United States Patent Application Publication US 2007/0042381 A1 - sequence listing, part 38

SEQ ID NO: 1692727 - RNA, 22 nt, Human
ugacuuuggauaauaaggaaaa

SEQ ID NO: 1692728 - RNA, 20 nt, Human
ugacuuuggauaauaaggaa

SEQ ID NO: 1692729 - RNA, 16 nt, Human
ugacuuuggauaauaa

SEQ ID NO: 1692730 - RNA, 15 nt, Human
ugacuuuggauaaua

SEQ ID NO: 1692731 - RNA, 14 nt, Human
ugacuuuggauaau

SEQ ID NO: 1692732 - RNA, 13 nt, Human
ugacuuuggauaa

SEQ ID NO: 1692733 - RNA, 12 nt, Human
ugacuuuggaua

SEQ ID NO: 1692734 - RNA, 15 nt, Human
ucuuguauuaagaau

SEQ ID NO: 1692735 - RNA, 14 nt, Human
ucuuguauuaagaa

SEQ ID NO: 1692736 - RNA, 12 nt, Human
ucuugucucaga

SEQ ID NO: 1692737 - RNA, 15 nt, Human
ucuugucucagauuu

SEQ ID NO: 1692738 - RNA, 14 nt, Human
ucuugucucagauu

SEQ ID NO: 1692739 - RNA, 17 nt, Human
ucuugucucagauuuua

SEQ ID NO: 1692740 - RNA, 17 nt, Human
ucugcaaucuucucaga

SEQ ID NO: 1692741 - RNA, 14 nt, Human
ucugcaaucuucuc

SEQ ID NO: 1692742 - RNA, 21 nt, Human
ucugccuaaggacuucuuuaa

SEQ ID NO: 1692743 - RNA, 20 nt, Human
ucugccuaaggacuucuuua

SEQ ID NO: 1692744 - RNA, 23 nt, Human
ucugccuaaggacuucuuuaauu

SEQ ID NO: 1692745 - RNA, 20 nt, Human
ucagauacuggauuguacuu

SEQ ID NO: 1692746 - RNA, 19 nt, Human
ucagauacuggauuguacu

SEQ ID NO: 1692747 - RNA, 16 nt, Human
ucagauacuggauugu

SEQ ID NO: 1692748 - RNA, 15 nt, Human
ucagauacuggauug

SEQ ID NO: 1692749 - RNA, 14 nt, Human
ucagauacuggauu

SEQ ID NO: 1692750 - RNA, 22 nt, Human
ucagauaacuguuauuuauaau

SEQ ID NO: 1692751 - RNA, 23 nt, Human
ucaucaguauugaagcauuuuau

SEQ ID NO: 1692752 - RNA, 21 nt, Human
ucaucaguauugaagcauuuu

SEQ ID NO: 1692753 - RNA, 20 nt, Human
ucaucaguauugaagcauuu

SEQ ID NO: 1692754 - RNA, 16 nt, Human
ucaucaguauugaagc

SEQ ID NO: 1692755 - RNA, 13 nt, Human
ucucagauuuuau

SEQ ID NO: 1692756 - RNA, 15 nt, Human
ucucagauuuuauua

SEQ ID NO: 1692757 - RNA, 14 nt, Human
ucucagauuuuauu

SEQ ID NO: 1692758 - RNA, 19 nt, Human
ucucagauuuuauuaugua

SEQ ID NO: 1692759 - RNA, 18 nt, Human
ucucagauuuuauuaugu

SEQ ID NO: 1692760 - RNA, 17 nt, Human
ucucagauuuuauuaug

SEQ ID NO: 1692761 - RNA, 16 nt, Human
ucucagauuuuauuau

SEQ ID NO: 1692762 - RNA, 19 nt, Human
ucuauauuuucauucuccu

SEQ ID NO: 1692763 - RNA, 16 nt, Human
ucuauauuuucauucu

SEQ ID NO: 1692764 - RNA, 15 nt, Human
ucuauauuuucauuc

SEQ ID NO: 1692765 - RNA, 14 nt, Human
ucuauauuuucauu

SEQ ID NO: 1692766 - RNA, 13 nt, Human
ucuauauuuucau

SEQ ID NO: 1692767 - RNA, 15 nt, Human
ucgcuuuugauaauc

SEQ ID NO: 1692768 - RNA, 21 nt, Human
uccucucaaccaccuuucaga

SEQ ID NO: 1692769 - RNA, 20 nt, Human
uccucucaaccaccuuucag

SEQ ID NO: 1692770 - RNA, 18 nt, Human
uccucucaaccaccuuuc

SEQ ID NO: 1692771 - RNA, 16 nt, Human
ucccuggccuuucaua

SEQ ID NO: 1692772 - RNA, 24 nt, Human
ucccuggccuuucauauuuuagcu

SEQ ID NO: 1692773 - RNA, 18 nt, Human
uggaacgcguugaaauug

SEQ ID NO: 1692774 - RNA, 19 nt, Human
uggaacgcguugaaauugu

SEQ ID NO: 1692775 - RNA, 20 nt, Human
ugcuuuaauaucaucaguau

SEQ ID NO: 1692776 - RNA, 18 nt, Human
ugcuuuaauaucaucagu

SEQ ID NO: 1692777 - RNA, 15 nt, Human
ugcuuuaauaucauc

SEQ ID NO: 1692778 - RNA, 13 nt, Human
ugcuuuaauauca

SEQ ID NO: 1692779 - RNA, 19 nt, Human
uggcuuuucugauccaguu

SEQ ID NO: 1692780 - RNA, 18 nt, Human
uggcuuuucugauccagu

SEQ ID NO: 1692781 - RNA, 17 nt, Human
uggcuuuucugauccag

SEQ ID NO: 1692782 - RNA, 14 nt, Human
uggcuuuucugauc

SEQ ID NO: 1692783 - RNA, 20 nt, Human
uggggauucuuaaaguugaa

SEQ ID NO: 1692784 - RNA, 18 nt, Human
uggggauucuuaaaguug

SEQ ID NO: 1692785 - RNA, 16 nt, Human
uggggauucuuaaagu

SEQ ID NO: 1692786 - RNA, 13 nt, Human
uggggauucuuaa

SEQ ID NO: 1692787 - RNA, 12 nt, Human
uggggauucuua

SEQ ID NO: 1692788 - RNA, 19 nt, Human
ugcacggugaauggcuuug

SEQ ID NO: 1692789 - RNA, 18 nt, Human
ugcacggugaauggcuuu

SEQ ID NO: 1692790 - RNA, 14 nt, Human
ugcacggugaaugg

SEQ ID NO: 1692791 - RNA, 21 nt, Human
uguauugugcgcuaaacuuuu

SEQ ID NO: 1692792 - RNA, 16 nt, Human
uguuaaaccaugggau

SEQ ID NO: 1692793 - RNA, 23 nt, Human
uguuuccuagcacacacuuuugg

SEQ ID NO: 1692794 - RNA, 23 nt, Human
uguuucuguacuuuuuggcauaa

SEQ ID NO: 1692795 - RNA, 22 nt, Human
uguuucuguacuuuuuggcaua

SEQ ID NO: 1692796 - RNA, 11 nt, Human
uguuucuguac

SEQ ID NO: 1692797 - RNA, 15 nt, Human
uuaaaaaaaaaauug

SEQ ID NO: 1692798 - RNA, 20 nt, Human
uuaaagccauguuuauuaca

SEQ ID NO: 1692799 - RNA, 18 nt, Human
uuaaagccauguuuauua

SEQ ID NO: 1692800 - RNA, 14 nt, Human
uuaaagccauguuu

SEQ ID NO: 1692801 - RNA, 12 nt, Human
uuaaagccaugu

SEQ ID NO: 1692802 - RNA, 20 nt, Human
uuaauauuaaagccauguuu

SEQ ID NO: 1692803 - RNA, 19 nt, Human
uuaauauuaaagccauguu

SEQ ID NO: 1692804 - RNA, 18 nt, Human
uuaauauuaaagccaugu

SEQ ID NO: 1692805 - RNA, 12 nt, Human
uuacagaagccc

SEQ ID NO: 1692806 - RNA, 23 nt, Human
uuaauaauaaauucccuggccuu

SEQ ID NO: 1692807 - RNA, 14 nt, Human
uuaauaauaaauuc

SEQ ID NO: 1692808 - RNA, 11 nt, Human
uuaauauuaaa

SEQ ID NO: 1692809 - RNA, 17 nt, Human
uuaauauuaaagccaug

SEQ ID NO: 1692810 - RNA, 16 nt, Human
uuaauauuaaagccau

SEQ ID NO: 1692811 - RNA, 14 nt, Human
uuaauauuaaagcc

SEQ ID NO: 1692812 - RNA, 13 nt, Human
uuaauauuaaagc

SEQ ID NO: 1692813 - RNA, 19 nt, Human
cacaguuuugguugcuuua

SEQ ID NO: 1692814 - RNA, 23 nt, Human
cacaguuuugguugcuuuaauau

SEQ ID NO: 1692815 - RNA, 20 nt, Human
cacaguuuugguugcuuuaa

SEQ ID NO: 1692816 - RNA, 13 nt, Human
caauuuuguuucu

SEQ ID NO: 1692817 - RNA, 17 nt, Human
caauuuuguuucuguac

SEQ ID NO: 1692818 - RNA, 16 nt, Human
caauuuuguuucugua

SEQ ID NO: 1692819 - RNA, 14 nt, Human
caauuuuguuucug

SEQ ID NO: 1692820 - RNA, 12 nt, Human
cacacacuuuug

SEQ ID NO: 1692821 - RNA, 17 nt, Human
auuuuaacaacagcugg

SEQ ID NO: 1692822 - RNA, 14 nt, Human
caaaguugccuaaa

SEQ ID NO: 1692823 - RNA, 17 nt, Human
caaaguugccuaaaucc

SEQ ID NO: 1692824 - RNA, 15 nt, Human
caaaguugccuaaau

SEQ ID NO: 1692825 - RNA, 18 nt, Human
caaaguugccuaaaucca

SEQ ID NO: 1692826 - RNA, 18 nt, Human
auccagcagauuauucac

SEQ ID NO: 1692827 - RNA, 18 nt, Human
auggcuuuguauagaacc

SEQ ID NO: 1692828 - RNA, 16 nt, Human
auggcuuuguauagaa

SEQ ID NO: 1692829 - RNA, 15 nt, Human
auggcuuuguauaga

SEQ ID NO: 1692830 - RNA, 18 nt, Human
augaaacuuguguaaaua

SEQ ID NO: 1692831 - RNA, 21 nt, Human
agucuggcuguacccaggaau

SEQ ID NO: 1692832 - RNA, 19 nt, Human
agucuggcuguacccagga

SEQ ID NO: 1692833 - RNA, 16 nt, Human
auaaaaaauuaugaca

SEQ ID NO: 1692834 - RNA, 18 nt, Human
auacaauuuuguuucugu

SEQ ID NO: 1692835 - RNA, 17 nt, Human
auacaauuuuguuucug

SEQ ID NO: 1692836 - RNA, 16 nt, Human
auacaauuuuguuucu

SEQ ID NO: 1692837 - RNA, 14 nt, Human
auacaauuuuguuu

SEQ ID NO: 1692838 - RNA, 19 nt, Human
auaaagaucauguaaaagu

SEQ ID NO: 1692839 - RNA, 20 nt, Human
auacuguuugagguuuuuaa

SEQ ID NO: 1692840 - RNA, 16 nt, Human
auacuguuugagguuu

SEQ ID NO: 1692841 - RNA, 12 nt, Human
auacuguuugag

SEQ ID NO: 1692842 - RNA, 16 nt, Human
agacgaugucuucaua

SEQ ID NO: 1692843 - RNA, 18 nt, Human
agaucugccuaaggacuu

SEQ ID NO: 1692844 - RNA, 13 nt, Human
agaucugccuaag

SEQ ID NO: 1692845 - RNA, 21 nt, Human
aggaagguucuggugugaacu

SEQ ID NO: 1692846 - RNA, 16 nt, Human
aggaagguucuggugu

SEQ ID NO: 1692847 - RNA, 14 nt, Human
aggaagguucuggu

SEQ ID NO: 1692848 - RNA, 22 nt, Human
acugauuugacauagucuggcu

SEQ ID NO: 1692849 - RNA, 20 nt, Human
acuggugacugauucuucag

SEQ ID NO: 1692850 - RNA, 19 nt, Human
acuggugacugauucuuca

SEQ ID NO: 1692851 - RNA, 18 nt, Human
acuggugacugauucuuc

SEQ ID NO: 1692852 - RNA, 18 nt, Human
acuucuuuaauuuuggaa

SEQ ID NO: 1692853 - RNA, 20 nt, Human
acuucuuuaauuuuggaauu

SEQ ID NO: 1692854 - RNA, 19 nt, Human
acuucuuuaauuuuggaau

SEQ ID NO: 1692855 - RNA, 21 nt, Human
aauuauaugcuauuucuauau

SEQ ID NO: 1692856 - RNA, 20 nt, Human
aauuauaugcuauuucuaua

SEQ ID NO: 1692857 - RNA, 19 nt, Human
aauuauaugcuauuucuau

SEQ ID NO: 1692858 - RNA, 23 nt, Human
aauuauaucugaggaauucugua

SEQ ID NO: 1692859 - RNA, 22 nt, Human
aauuauaucugaggaauucugu

SEQ ID NO: 1692860 - RNA, 20 nt, Human
aauuauaucugaggaauucu

SEQ ID NO: 1692861 - RNA, 15 nt, Human
aauuggggauucuua

SEQ ID NO: 1692862 - RNA, 12 nt, Human
aauucuguauag

SEQ ID NO: 1692863 - RNA, 20 nt, Human
aauucuguauagauuagaga

SEQ ID NO: 1692864 - RNA, 14 nt, Human
aauucuguauagau

SEQ ID NO: 1692865 - RNA, 13 nt, Human
aauucuguauaga

SEQ ID NO: 1692866 - RNA, 14 nt, Human
aauuguaauuauau

SEQ ID NO: 1692867 - RNA, 16 nt, Human
aauuguaauuauaucu

SEQ ID NO: 1692868 - RNA, 15 nt, Human
aauuguaauuauauc

SEQ ID NO: 1692869 - RNA, 17 nt, Human
aauuguaauuauaucug

SEQ ID NO: 1692870 - RNA, 14 nt, Human
acauguuaaaccau

SEQ ID NO: 1692871 - RNA, 23 nt, Human
acauguuaaaccaugggauaaau

SEQ ID NO: 1692872 - RNA, 21 nt, Human
acauguuaaaccaugggauaa

SEQ ID NO: 1692873 - RNA, 16 nt, Human
acauguuaaaccaugg

SEQ ID NO: 1692874 - RNA, 19 nt, Human
aauaaagaucauguaaaag

SEQ ID NO: 1692875 - RNA, 14 nt, Human
aauaaagaucaugu

SEQ ID NO: 1692876 - RNA, 20 nt, Human
aauaaagaucauguaaaagu

SEQ ID NO: 1692877 - RNA, 17 nt, Human
aaguugaauuuauuggc

SEQ ID NO: 1692878 - RNA, 15 nt, Human
aaguugaauuuauug

SEQ ID NO: 1692879 - RNA, 14 nt, Human
aaguugaauuuauu

SEQ ID NO: 1692880 - RNA, 22 nt, Human
aaguuguuugagaaauuaagua

SEQ ID NO: 1692881 - RNA, 21 nt, Human
aaguuguuugagaaauuaagu

SEQ ID NO: 1692882 - RNA, 24 nt, Human
aaguugaauuuauuggcuuuucug

SEQ ID NO: 1692883 - RNA, 23 nt, Human
aaguugaauuuauuggcuuuucu

SEQ ID NO: 1692884 - RNA, 15 nt, Human
aaguuuaauauuaaa

SEQ ID NO: 1692885 - RNA, 18 nt, Human
aaguuuaauauuaaagcc

SEQ ID NO: 1692886 - RNA, 17 nt, Human
aaguuuaauauuaaagc

SEQ ID NO: 1692887 - RNA, 23 nt, Human
aaggacuucuuuaauuuuggaau

SEQ ID NO: 1692888 - RNA, 21 nt, Human
aaggacuuguuagaucuaguu

SEQ ID NO: 1692889 - RNA, 15 nt, Human
aaggacuuguuagau

SEQ ID NO: 1692890 - RNA, 23 nt, Human
aaggacuuguuagaucuaguuca

SEQ ID NO: 1692891 - RNA, 23 nt, Human
aaauggacuguggugacuuugga

SEQ ID NO: 1692892 - RNA, 20 nt, Human
aaauggacuguggugacuuu

SEQ ID NO: 1692893 - RNA, 21 nt, Human
aaauggacuguggugacuuug

SEQ ID NO: 1692894 - RNA, 15 nt, Human
aaagaucauguaaaa

SEQ ID NO: 1692895 - RNA, 16 nt, Human
aaagccauguuuauua

SEQ ID NO: 1692896 - RNA, 14 nt, Human
aaagccauguuuau

SEQ ID NO: 1692897 - RNA, 23 nt, Human
aaagccauguuuauuacaguaua

SEQ ID NO: 1692898 - RNA, 18 nt, Human
aaagccauguuuauuaca

SEQ ID NO: 1692899 - RNA, 17 nt, Human
aaagccauguuuauuac

SEQ ID NO: 1692900 - RNA, 22 nt, Human
aaaccaguauuguacaaaguau

SEQ ID NO: 1692901 - RNA, 18 nt, Human
aaaccaguauuguacaaa

SEQ ID NO: 1692902 - RNA, 17 nt, Human
aaaccaguauuguacaa

SEQ ID NO: 1692903 - RNA, 16 nt, Human
aaaccaguauuguaca

SEQ ID NO: 1692904 - RNA, 14 nt, Human
aaaccaguauugua

SEQ ID NO: 1692905 - RNA, 22 nt, Human
aaaagagguuuuucuuaaauaa

SEQ ID NO: 1692906 - RNA, 21 nt, Human
aaaagagguuuuucuuaaaua

SEQ ID NO: 1692907 - RNA, 17 nt, Human
aaaagagguuuuucuua

SEQ ID NO: 1692908 - RNA, 18 nt, Human
aaaaguuuaauauuaaag

SEQ ID NO: 1692909 - RNA, 16 nt, Human
aaaaguuuaauauuaa

SEQ ID NO: 1692910 - RNA, 14 nt, Human
aaaaguuuaauauu

SEQ ID NO: 1692911 - RNA, 15 nt, Human
aaauucccuggccuu

SEQ ID NO: 1692912 - RNA, 18 nt, Human
aaauucccuggccuuuca

SEQ ID NO: 1692913 - RNA, 21 nt, Human
guaugugugaagugagugagu

SEQ ID NO: 1692914 - RNA, 17 nt, Human
guaugugugaagugagu

SEQ ID NO: 1692915 - RNA, 13 nt, Human
guaugugugaagu

SEQ ID NO: 1692916 - RNA, 15 nt, Human
aaaucgcuuuugaua

SEQ ID NO: 1692917 - RNA, 14 nt, Human
aaaucgcuuuugau

SEQ ID NO: 1692918 - RNA, 13 nt, Human
aaaucgcuuuuga

SEQ ID NO: 1692919 - RNA, 22 nt, Human
aaaucccauuauucaaaguugc

SEQ ID NO: 1692920 - RNA, 21 nt, Human
aaaucccauuauucaaaguug

SEQ ID NO: 1692921 - RNA, 20 nt, Human
aaaucccauuauucaaaguu

SEQ ID NO: 1692922 - RNA, 19 nt, Human
aaaucccauuauucaaagu

SEQ ID NO: 1692923 - RNA, 17 nt, Human
aaaucccauuauucaaa

SEQ ID NO: 1692924 - RNA, 16 nt, Human
aaaucccauuauucaa

SEQ ID NO: 1692925 - RNA, 15 nt, Human
aaaucccauuauuca

SEQ ID NO: 1692926 - RNA, 13 nt, Human
aaaucccauuauu

SEQ ID NO: 1692927 - RNA, 23 nt, Human
aaauccauuuggaaaucuuuaaa

SEQ ID NO: 1692928 - RNA, 22 nt, Human
aaauccauuuggaaaucuuuaa

SEQ ID NO: 1692929 - RNA, 21 nt, Human
aaauccauuuggaaaucuuua

SEQ ID NO: 1692930 - RNA, 18 nt, Human
aaauccauuuggaaaucu

SEQ ID NO: 1692931 - RNA, 14 nt, Human
aaauccauuuggaa

SEQ ID NO: 1692932 - RNA, 16 nt, Human
aaauccauuuggaaau

SEQ ID NO: 1692933 - RNA, 15 nt, Human
aaauccauuuggaaa

SEQ ID NO: 1692934 - RNA, 21 nt, Human
aaccaugggauaaaugccauc

SEQ ID NO: 1692935 - RNA, 20 nt, Human
aaccaugggauaaaugccau

SEQ ID NO: 1692936 - RNA, 18 nt, Human
aaccaugggauaaaugcc

SEQ ID NO: 1692937 - RNA, 17 nt, Human
aaccaugggauaaaugc

SEQ ID NO: 1692938 - RNA, 15 nt, Human
aaccaugggauaaau

SEQ ID NO: 1692939 - RNA, 17 nt, Human
aacuaaacuuucacacc

SEQ ID NO: 1692940 - RNA, 15 nt, Human
aacuaaacuuucaca

SEQ ID NO: 1692941 - RNA, 13 nt, Human
aacuaaacuuuca

SEQ ID NO: 1692942 - RNA, 17 nt, Human
aacacuccaauuaagga

SEQ ID NO: 1692943 - RNA, 14 nt, Human
guuauuuauaauca

SEQ ID NO: 1692944 - RNA, 20 nt, Human
guuauuuauaaucacuuuuu

SEQ ID NO: 1692945 - RNA, 13 nt, Human
guuaagucuguuu

SEQ ID NO: 1692946 - RNA, 22 nt, Human
guuaagucuguuuuaugacuuc

SEQ ID NO: 1692947 - RNA, 15 nt, Human
guuaagucuguuuua

SEQ ID NO: 1692948 - RNA, 12 nt, Human
guuagaucuagu

SEQ ID NO: 1692949 - RNA, 18 nt, Human
guucuggugugaacuaaa

SEQ ID NO: 1692950 - RNA, 15 nt, Human
guucuggugugaacu

SEQ ID NO: 1692951 - RNA, 21 nt, Human
guucuuguauuaagaaugaaa

SEQ ID NO: 1692952 - RNA, 18 nt, Human
guucuuguauuaagaaug

SEQ ID NO: 1692953 - RNA, 17 nt, Human
guucuuguauuaagaau

SEQ ID NO: 1692954 - RNA, 17 nt, Human
guugccuaaauccauuu

SEQ ID NO: 1692955 - RNA, 14 nt, Human
guugccuaaaucca

SEQ ID NO: 1692956 - RNA, 16 nt, Human
guugccuaaauccauu

SEQ ID NO: 1692957 - RNA, 15 nt, Human
guugccuaaauccau

SEQ ID NO: 1692958 - RNA, 20 nt, Human
guuucuguacuuuuuggcau

SEQ ID NO: 1692959 - RNA, 19 nt, Human
guguuguacucaauuuuaa

SEQ ID NO: 1692960 - RNA, 16 nt, Human
aagagguuuuucuuaa

SEQ ID NO: 1692961 - RNA, 22 nt, Human
aagaaugguccgugcuaaggac

SEQ ID NO: 1692962 - RNA, 19 nt, Human
aagaaugguccgugcuaag

SEQ ID NO: 1692963 - RNA, 23 nt, Human
uacaguauaauuaacauguuaaa

SEQ ID NO: 1692964 - RNA, 19 nt, Human
uacaguauaauuaacaugu

SEQ ID NO: 1692965 - RNA, 18 nt, Human
uacaguauaauuaacaug

SEQ ID NO: 1692966 - RNA, 20 nt, Human
aauggacuguggugacuuug

SEQ ID NO: 1692967 - RNA, 14 nt, Human
uacaccauuaugug

SEQ ID NO: 1692968 - RNA, 14 nt, Human
uacaguauaauuaa

SEQ ID NO: 1692969 - RNA, 17 nt, Human
uacaguauaauuaacau

SEQ ID NO: 1692970 - RNA, 16 nt, Human
uacaguauaauuaaca

SEQ ID NO: 1692971 - RNA, 20 nt, Human
aaucuuuaaaaaaaaaauug

SEQ ID NO: 1692972 - RNA, 19 nt, Human
aaucuuuaaaaaaaaaauu

SEQ ID NO: 1692973 - RNA, 21 nt, Human
uaaucaacugggcugaacacu

SEQ ID NO: 1692974 - RNA, 16 nt, Human
uaaguaucugacaucu

SEQ ID NO: 1692975 - RNA, 15 nt, Human
uaaguaucugacauc

SEQ ID NO: 1692976 - RNA, 19 nt, Human
aaucugugaacuugaaauu

SEQ ID NO: 1692977 - RNA, 18 nt, Human
aaucugugaacuugaaau

SEQ ID NO: 1692978 - RNA, 17 nt, Human
aaucugugaacuugaaa

SEQ ID NO: 1692979 - RNA, 15 nt, Human
aaucugugaacuuga

SEQ ID NO: 1692980 - RNA, 13 nt, Human
aaucugugaacuu

SEQ ID NO: 1692981 - RNA, 18 nt, Human
aauaucaucaguauugaa

SEQ ID NO: 1692982 - RNA, 15 nt, Human
uaacauaaaucugug

SEQ ID NO: 1692983 - RNA, 20 nt, Human
uaacauaaaucugugaacuu

SEQ ID NO: 1692984 - RNA, 18 nt, Human
uaacauaaaucugugaac

SEQ ID NO: 1692985 - RNA, 17 nt, Human
uaacauaaaucugugaa

SEQ ID NO: 1692986 - RNA, 16 nt, Human
uaacauaaaucuguga

SEQ ID NO: 1692987 - RNA, 18 nt, Human
aauauuuuaugauccagc

SEQ ID NO: 1692988 - RNA, 17 nt, Human
aauauuuuaugauccag

SEQ ID NO: 1692989 - RNA, 21 nt, Human
uaagaaugaaauacuguuuga

SEQ ID NO: 1692990 - RNA, 15 nt, Human
uaagaaugaaauacu

SEQ ID NO: 1692991 - RNA, 13 nt, Human
uaagaaugaaaua

SEQ ID NO: 1692992 - RNA, 14 nt, Human
uaaauaaauagcua

SEQ ID NO: 1692993 - RNA, 17 nt, Human
uaaauaaauaaauagcu

SEQ ID NO: 1692994 - RNA, 18 nt, Human
uaaauagcuagacuggug

SEQ ID NO: 1692995 - RNA, 22 nt, Human
uaaaucugugaacuugaaauuu

SEQ ID NO: 1692996 - RNA, 21 nt, Human
uaaaucugugaacuugaaauu

SEQ ID NO: 1692997 - RNA, 19 nt, Human
uaaaucugugaacuugaaa

SEQ ID NO: 1692998 - RNA, 18 nt, Human
uaaaucugugaacuugaa

SEQ ID NO: 1692999 - RNA, 17 nt, Human
uaaaucugugaacuuga

SEQ ID NO: 1693000 - RNA, 16 nt, Human
uaaaucugugaacuug

SEQ ID NO: 1693001 - RNA, 15 nt, Human
uaaaucugugaacuu

SEQ ID NO: 1693002 - RNA, 18 nt, Human
uagcuagacuggugacug

SEQ ID NO: 1693003 - RNA, 15 nt, Human
uagcuagacugguga

SEQ ID NO: 1693004 - RNA, 15 nt, Human
acaacagcuggugcc

SEQ ID NO: 1693005 - RNA, 14 nt, Human
uagaucuaguucac

SEQ ID NO: 1693006 - RNA, 20 nt, Human
acaaaguauuaagcauauau

SEQ ID NO: 1693007 - RNA, 16 nt, Human
aauuuuguuucuguac

SEQ ID NO: 1693008 - RNA, 22 nt, Human
uacuuugugcugggguuaucug

SEQ ID NO: 1693009 - RNA, 16 nt, Human
uacuuugugcuggggu

SEQ ID NO: 1693010 - RNA, 14 nt, Human
uacuuuuuggcaua

SEQ ID NO: 1693011 - RNA, 20 nt, Human
uacuuuuuggcauaacauaa

SEQ ID NO: 1693012 - RNA, 19 nt, Human
uacuuuuuggcauaacaua

SEQ ID NO: 1693013 - RNA, 18 nt, Human
acacuccaauuaaggauu

SEQ ID NO: 1693014 - RNA, 21 nt, Human
acacuccaauuaaggauuuua

SEQ ID NO: 1693015 - RNA, 22 nt, Human
uagucuugucucagauuuuauu

SEQ ID NO: 1693016 - RNA, 17 nt, Human
uagucuugucucagauu

SEQ ID NO: 1693017 - RNA, 21 nt, Human
acaccccagacgaugucuuca

SEQ ID NO: 1693018 - RNA, 13 nt, Human
ucaauuuuaacaa

SEQ ID NO: 1693019 - RNA, 19 nt, Human
accaugggauaaaugccau

SEQ ID NO: 1693020 - RNA, 22 nt, Human
ucagaaggcaaaugacuuugga

SEQ ID NO: 1693021 - RNA, 19 nt, Human
ucagaaggcaaaugacuuu

SEQ ID NO: 1693022 - RNA, 18 nt, Human
ucagaaggcaaaugacuu

SEQ ID NO: 1693023 - RNA, 18 nt, Human
accccagacgaugucuuc

SEQ ID NO: 1693024 - RNA, 16 nt, Human
uauuuuuauauuuacu

SEQ ID NO: 1693025 - RNA, 21 nt, Human
ucaaaguugccuaaauccauu

SEQ ID NO: 1693026 - RNA, 19 nt, Human
ucaaaguugccuaaaucca

SEQ ID NO: 1693027 - RNA, 18 nt, Human
ucaaaguugccuaaaucc

SEQ ID NO: 1693028 - RNA, 22 nt, Human
ucaaaguugccuaaauccauuu

SEQ ID NO: 1693029 - RNA, 20 nt, Human
acauagucuggcuguaccca

SEQ ID NO: 1693030 - RNA, 15 nt, Human
acauagucuggcugu

SEQ ID NO: 1693031 - RNA, 14 nt, Human
acauagucuggcug

SEQ ID NO: 1693032 - RNA, 24 nt, Human
acaguuuugguugcuuuaauauca

SEQ ID NO: 1693033 - RNA, 19 nt, Human
acaguuuugguugcuuuaa

SEQ ID NO: 1693034 - RNA, 18 nt, Human
acaguuuugguugcuuua

SEQ ID NO: 1693035 - RNA, 18 nt, Human
uauuucuauauuuucauu

SEQ ID NO: 1693036 - RNA, 17 nt, Human
uauuucuauauuuucau

SEQ ID NO: 1693037 - RNA, 16 nt, Human
uauuucuauauuuuca

SEQ ID NO: 1693038 - RNA, 15 nt, Human
accuacauguauuug

SEQ ID NO: 1693039 - RNA, 14 nt, Human
accuacauguauuu

SEQ ID NO: 1693040 - RNA, 13 nt, Human
accuacauguauu

SEQ ID NO: 1693041 - RNA, 18 nt, Human
uccauuuaauaauuauau

SEQ ID NO: 1693042 - RNA, 22 nt, Human
ucuaccagccucccuauuuuuu

SEQ ID NO: 1693043 - RNA, 14 nt, Human
acuguuauuuauaa

SEQ ID NO: 1693044 - RNA, 13 nt, Human
acuguuauuuaua

SEQ ID NO: 1693045 - RNA, 15 nt, Human
acuguggugacuuug

SEQ ID NO: 1693046 - RNA, 14 nt, Human
acuguggugacuuu

SEQ ID NO: 1693047 - RNA, 12 nt, Human
acuguggugacu

SEQ ID NO: 1693048 - RNA, 21 nt, Human
acuguggugacuuuggauaau

SEQ ID NO: 1693049 - RNA, 20 nt, Human
acuguggugacuuuggauaa

SEQ ID NO: 1693050 - RNA, 18 nt, Human
acuguggugacuuuggau

SEQ ID NO: 1693051 - RNA, 16 nt, Human
acugcuuguuuccuag

SEQ ID NO: 1693052 - RNA, 13 nt, Human
acugcuuguuucc

SEQ ID NO: 1693053 - RNA, 16 nt, Human
ucugaagugaaacugc

SEQ ID NO: 1693054 - RNA, 19 nt, Human
ucugaagucagaucugccu

SEQ ID NO: 1693055 - RNA, 15 nt, Human
ucugaagucagaucu

SEQ ID NO: 1693056 - RNA, 19 nt, Human
acuugaaauuugaauuuug

SEQ ID NO: 1693057 - RNA, 20 nt, Human
acuugaaauuugaauuuugu

SEQ ID NO: 1693058 - RNA, 15 nt, Human
acuuguuagaucuag

SEQ ID NO: 1693059 - RNA, 14 nt, Human
acuuguuagaucua

SEQ ID NO: 1693060 - RNA, 23 nt, Human
acuuguuagaucuaguucacucu

SEQ ID NO: 1693061 - RNA, 19 nt, Human
ucugugaacuugaaauuug

SEQ ID NO: 1693062 - RNA, 22 nt, Human
ucugugaacuugaaauuugaau

SEQ ID NO: 1693063 - RNA, 13 nt, Human
ucuguacuuuuug

SEQ ID NO: 1693064 - RNA, 17 nt, Human
ucuguacuuuuuggcau

SEQ ID NO: 1693065 - RNA, 14 nt, Human
ucuguacuuuuugg

SEQ ID NO: 1693066 - RNA, 19 nt, Human
agacuggugacugauucuu

SEQ ID NO: 1693067 - RNA, 17 nt, Human
agacuggugacugauuc

SEQ ID NO: 1693068 - RNA, 16 nt, Human
agacuggugacugauu

SEQ ID NO: 1693069 - RNA, 14 nt, Human
agacuggugacuga

SEQ ID NO: 1693070 - RNA, 13 nt, Human
agacuggugacug

SEQ ID NO: 1693071 - RNA, 12 nt, Human
agacuggugacu

SEQ ID NO: 1693072 - RNA, 22 nt, Human
agagauuuuuuuguuguuuguu

SEQ ID NO: 1693073 - RNA, 23 nt, Human
agagauuuuuuuguuguuuguuu

SEQ ID NO: 1693074 - RNA, 21 nt, Human
ugaaauuguaauuauaucuga

SEQ ID NO: 1693075 - RNA, 16 nt, Human
ugaaauuugaauuuug

SEQ ID NO: 1693076 - RNA, 15 nt, Human
ugaaauuugaauuuu

SEQ ID NO: 1693077 - RNA, 14 nt, Human
ugaaauuugaauuu

SEQ ID NO: 1693078 - RNA, 17 nt, Human
ugaaauuugaauuuugu

SEQ ID NO: 1693079 - RNA, 21 nt, Human
ugaauuuauuggcuuuucuga

SEQ ID NO: 1693080 - RNA, 17 nt, Human
ugaauuuauuggcuuuu

SEQ ID NO: 1693081 - RNA, 23 nt, Human
ugaauuuauuggcuuuucugauc

SEQ ID NO: 1693082 - RNA, 22 nt, Human
ugaauuuauuggcuuuucugau

SEQ ID NO: 1693083 - RNA, 15 nt, Human
agcauauauuuuuau

SEQ ID NO: 1693084 - RNA, 22 nt, Human
agcauauauuuuuauauuuacu

SEQ ID NO: 1693085 - RNA, 20 nt, Human
agcauauauuuuuauauuua

SEQ ID NO: 1693086 - RNA, 18 nt, Human
agcauauauuuuuauauu

SEQ ID NO: 1693087 - RNA, 20 nt, Human
agcauuuuauaaaucgcuuu

SEQ ID NO: 1693088 - RNA, 15 nt, Human
agcauuuuauaaauc

SEQ ID NO: 1693089 - RNA, 14 nt, Human
agcauuuuauaaau

SEQ ID NO: 1693090 - RNA, 13 nt, Human
agcauuuuauaaa

SEQ ID NO: 1693091 - RNA, 19 nt, Human
ugauccagcagauuauuca

SEQ ID NO: 1693092 - RNA, 20 nt, Human
ugauccagcagauuauucac

SEQ ID NO: 1693093 - RNA, 23 nt, Human
ugauuugacauagucuggcugua

SEQ ID NO: 1693094 - RNA, 23 nt, Human
aggacuucuuuaauuuuggaauu

SEQ ID NO: 1693095 - RNA, 22 nt, Human
aggacuucuuuaauuuuggaau

SEQ ID NO: 1693096 - RNA, 21 nt, Human
aggacuucuuuaauuuuggaa

SEQ ID NO: 1693097 - RNA, 16 nt, Human
aggacuucuuuaauuu

SEQ ID NO: 1693098 - RNA, 14 nt, Human
aggacuucuuuaau

SEQ ID NO: 1693099 - RNA, 15 nt, Human
aggaauucuguauag

SEQ ID NO: 1693100 - RNA, 14 nt, Human
aggaauucuguaua

SEQ ID NO: 1693101 - RNA, 13 nt, Human
aggaauucuguau

SEQ ID NO: 1693102 - RNA, 22 nt, Human
ugccaucaauaaaaaauuauga

SEQ ID NO: 1693103 - RNA, 14 nt, Human
ugccaucaauaaaa

SEQ ID NO: 1693104 - RNA, 22 nt, Human
ugcuauuucuauauuuucauuc

SEQ ID NO: 1693105 - RNA, 15 nt, Human
uguaaauacaauuuu

SEQ ID NO: 1693106 - RNA, 17 nt, Human
agguucuggugugaacu

SEQ ID NO: 1693107 - RNA, 23 nt, Human
uggugugaacuaaacuuucacac

SEQ ID NO: 1693108 - RNA, 22 nt, Human
uggugugaacuaaacuuucaca

SEQ ID NO: 1693109 - RNA, 14 nt, Human
uggugugaacuaaa

SEQ ID NO: 1693110 - RNA, 14 nt, Human
uggugcccugcuuu

SEQ ID NO: 1693111 - RNA, 20 nt, Human
uggugcccugcuuucagaua

SEQ ID NO: 1693112 - RNA, 19 nt, Human
uggugcccugcuuucagau

SEQ ID NO: 1693113 - RNA, 16 nt, Human
uggugcccugcuuuca

SEQ ID NO: 1693114 - RNA, 21 nt, Human
aguauugaagcauuuuauaaa

SEQ ID NO: 1693115 - RNA, 20 nt, Human
aguauugaagcauuuuauaa

SEQ ID NO: 1693116 - RNA, 18 nt, Human
aguauugaagcauuuuau

SEQ ID NO: 1693117 - RNA, 15 nt, Human
aguauugaagcauuu

SEQ ID NO: 1693118 - RNA, 14 nt, Human
aguauugaagcauu

SEQ ID NO: 1693119 - RNA, 13 nt, Human
agguuuuucuuaa

SEQ ID NO: 1693120 - RNA, 20 nt, Human
uuaagucuguuuuaugacuu

SEQ ID NO: 1693121 - RNA, 18 nt, Human
uuaagucuguuuuaugac

SEQ ID NO: 1693122 - RNA, 17 nt, Human
uuaagucuguuuuauga

SEQ ID NO: 1693123 - RNA, 21 nt, Human
uuaagucuguuuuaugacuuc

SEQ ID NO: 1693124 - RNA, 16 nt, Human
auaaaugguuaaaaga

SEQ ID NO: 1693125 - RNA, 22 nt, Human
auaaaugguuaaaagagguuuu

SEQ ID NO: 1693126 - RNA, 13 nt, Human
uuacaguauaauu

SEQ ID NO: 1693127 - RNA, 17 nt, Human
uuacaguauaauuaaca

SEQ ID NO: 1693128 - RNA, 16 nt, Human
uuacaguauaauuaac

SEQ ID NO: 1693129 - RNA, 20 nt, Human
uuacaguauaauuaacaugu

SEQ ID NO: 1693130 - RNA, 19 nt, Human
uuacaguauaauuaacaug

SEQ ID NO: 1693131 - RNA, 18 nt, Human
uuacaguauaauuaacau

SEQ ID NO: 1693132 - RNA, 21 nt, Human
auaaauagcuagacuggugac

SEQ ID NO: 1693133 - RNA, 18 nt, Human
auaaauagcuagacuggu

SEQ ID NO: 1693134 - RNA, 16 nt, Human
auaaauagcuagacug

SEQ ID NO: 1693135 - RNA, 22 nt, Human
auaaaucugugaacuugaaauu

SEQ ID NO: 1693136 - RNA, 21 nt, Human
auaaaucugugaacuugaaau

SEQ ID NO: 1693137 - RNA, 20 nt, Human
auaaaucugugaacuugaaa

SEQ ID NO: 1693138 - RNA, 14 nt, Human
uguuugagaaauua

SEQ ID NO: 1693139 - RNA, 22 nt, Human
uguuugagguuuuuaagccuua

SEQ ID NO: 1693140 - RNA, 14 nt, Human
uguuuauuacagua

SEQ ID NO: 1693141 - RNA, 18 nt, Human
uguuuauuacaguauaau

SEQ ID NO: 1693142 - RNA, 22 nt, Human
uguuuagucuugucucagauuu

SEQ ID NO: 1693143 - RNA, 23 nt, Human
uguuuagucuugucucagauuuu

SEQ ID NO: 1693144 - RNA, 18 nt, Human
uguuuuaugacuucauua

SEQ ID NO: 1693145 - RNA, 19 nt, Human
uguuuggaccaaaaaccag

SEQ ID NO: 1693146 - RNA, 23 nt, Human
aguugccuaaauccauuuggaaa

SEQ ID NO: 1693147 - RNA, 22 nt, Human
aguugccuaaauccauuuggaa

SEQ ID NO: 1693148 - RNA, 16 nt, Human
aguuggguguauugug

SEQ ID NO: 1693149 - RNA, 20 nt, Human
aguuggguguauugugcgcu

SEQ ID NO: 1693150 - RNA, 17 nt, Human
aguuggguguauugugc

SEQ ID NO: 1693151 - RNA, 20 nt, Human
aguuuaauauuaaagccaug

SEQ ID NO: 1693152 - RNA, 19 nt, Human
aguuuaauauuaaagccau

SEQ ID NO: 1693153 - RNA, 18 nt, Human
aguuuaauauuaaagcca

SEQ ID NO: 1693154 - RNA, 16 nt, Human
aguuuaauauuaaagc

SEQ ID NO: 1693155 - RNA, 15 nt, Human
aguuuaauauuaaag

SEQ ID NO: 1693156 - RNA, 20 nt, Human
uuaaaggaagguucuggugu

SEQ ID NO: 1693157 - RNA, 22 nt, Human
uuaaaggaagguucugguguga

SEQ ID NO: 1693158 - RNA, 16 nt, Human
uuaaauaauaaagauc

SEQ ID NO: 1693159 - RNA, 14 nt, Human
uuaacaacagcugg

SEQ ID NO: 1693160 - RNA, 20 nt, Human
agugaguuggguguauugug

SEQ ID NO: 1693161 - RNA, 19 nt, Human
agugaguuggguguauugu

SEQ ID NO: 1693162 - RNA, 13 nt, Human
uguuauauaaaug

SEQ ID NO: 1693163 - RNA, 14 nt, Human
uguuauauaaaugg

SEQ ID NO: 1693164 - RNA, 12 nt, Human
ugugaacuugaa

SEQ ID NO: 1693165 - RNA, 16 nt, Human
ugugaacuugaaauuu

SEQ ID NO: 1693166 - RNA, 15 nt, Human
ugugaacuugaaauu

SEQ ID NO: 1693167 - RNA, 14 nt, Human
ugugaacuugaaau

SEQ ID NO: 1693168 - RNA, 24 nt, Human
agugaaacugcuuguuuccuagca

SEQ ID NO: 1693169 - RNA, 21 nt, Human
agugaaacugcuuguuuccua

SEQ ID NO: 1693170 - RNA, 13 nt, Human
agugaaacugcuu

SEQ ID NO: 1693171 - RNA, 18 nt, Human
ugugcugggguuaucuga

SEQ ID NO: 1693172 - RNA, 23 nt, Human
auauuaaagccauguuuauuaca

SEQ ID NO: 1693173 - RNA, 18 nt, Human
auauuaaagccauguuua

SEQ ID NO: 1693174 - RNA, 15 nt, Human
auauuaaagccaugu

SEQ ID NO: 1693175 - RNA, 14 nt, Human
auauuaaagccaug

SEQ ID NO: 1693176 - RNA, 13 nt, Human
auauuuucauucu

SEQ ID NO: 1693177 - RNA, 13 nt, Human
auauuuuaugauc

SEQ ID NO: 1693178 - RNA, 12 nt, Human
auauuuuaugau

SEQ ID NO: 1693179 - RNA, 22 nt, Human
auauuuuaugauccagcagauu

SEQ ID NO: 1693180 - RNA, 17 nt, Human
auauuuuaugauccagc

SEQ ID NO: 1693181 - RNA, 22 nt, Human
aucaguauugaagcauuuuaua

SEQ ID NO: 1693182 - RNA, 15 nt, Human
aucaguauugaagca

SEQ ID NO: 1693183 - RNA, 17 nt, Human
aucaucaguauugaagc

SEQ ID NO: 1693184 - RNA, 19 nt, Human
aucaucaguauugaagcau

SEQ ID NO: 1693185 - RNA, 15 nt, Human
aucaucaguauugaa

SEQ ID NO: 1693186 - RNA, 14 nt, Human
uucuggugugaacu

SEQ ID NO: 1693187 - RNA, 12 nt, Human
uucuggugugaa

SEQ ID NO: 1693188 - RNA, 17 nt, Human
uuauuuauaaucacuuu

SEQ ID NO: 1693189 - RNA, 16 nt, Human
auagcuagacugguga

SEQ ID NO: 1693190 - RNA, 15 nt, Human
auagcuagacuggug

SEQ ID NO: 1693191 - RNA, 14 nt, Human
auagcuagacuggu

SEQ ID NO: 1693192 - RNA, 23 nt, Human
auagcuagacuggugacugauuc

SEQ ID NO: 1693193 - RNA, 19 nt, Human
auagcuagacuggugacug

SEQ ID NO: 1693194 - RNA, 18 nt, Human
auagcuagacuggugacu

SEQ ID NO: 1693195 - RNA, 17 nt, Human
auauaaaugguuaaaag

SEQ ID NO: 1693196 - RNA, 21 nt, Human
uucagcaaaaauauuuuauga

SEQ ID NO: 1693197 - RNA, 18 nt, Human
auaucugaggaauucugu

SEQ ID NO: 1693198 - RNA, 17 nt, Human
auaucugaggaauucug

SEQ ID NO: 1693199 - RNA, 16 nt, Human
auaucugaggaauucu

SEQ ID NO: 1693200 - RNA, 15 nt, Human
auaucugaggaauuc

SEQ ID NO: 1693201 - RNA, 23 nt, Human
auaucugaggaauucuguauaga

SEQ ID NO: 1693202 - RNA, 22 nt, Human
auaucugaggaauucuguauag

SEQ ID NO: 1693203 - RNA, 21 nt, Human
auaucugaggaauucuguaua

SEQ ID NO: 1693204 - RNA, 20 nt, Human
auaucugaggaauucuguau

SEQ ID NO: 1693205 - RNA, 19 nt, Human
auaucugaggaauucugua

SEQ ID NO: 1693206 - RNA, 19 nt, Human
uucauaccuacauguauuu

SEQ ID NO: 1693207 - RNA, 16 nt, Human
uucauaccuacaugua

SEQ ID NO: 1693208 - RNA, 22 nt, Human
augaaauacuguuugagguuuu

SEQ ID NO: 1693209 - RNA, 23 nt, Human
aucugaagucagaucugccuaag

SEQ ID NO: 1693210 - RNA, 18 nt, Human
aucugaagucagaucugc

SEQ ID NO: 1693211 - RNA, 17 nt, Human
aucugaagucagaucug

SEQ ID NO: 1693212 - RNA, 16 nt, Human
aucugaagucagaucu

SEQ ID NO: 1693213 - RNA, 23 nt, Human
uuuagucuugucucagauuuuau

SEQ ID NO: 1693214 - RNA, 17 nt, Human
uuuagucuugucucaga

SEQ ID NO: 1693215 - RNA, 15 nt, Human
uuuagucuugucuca

SEQ ID NO: 1693216 - RNA, 14 nt, Human
augccaucaauaaa

SEQ ID NO: 1693217 - RNA, 13 nt, Human
auuugaauuuugu

SEQ ID NO: 1693218 - RNA, 15 nt, Human
auuugaauuuugugu

SEQ ID NO: 1693219 - RNA, 23 nt, Human
auuuauuggcuuuucugauccag

SEQ ID NO: 1693220 - RNA, 20 nt, Human
auuuauuggcuuuucugauc

SEQ ID NO: 1693221 - RNA, 18 nt, Human
auuuauuggcuuuucuga

SEQ ID NO: 1693222 - RNA, 14 nt, Human
auuuauuggcuuuu

SEQ ID NO: 1693223 - RNA, 15 nt, Human
auuguacuuugugcu

SEQ ID NO: 1693224 - RNA, 20 nt, Human
auuuacuaaaauggacugug

SEQ ID NO: 1693225 - RNA, 19 nt, Human
auuuacuaaaauggacugu

SEQ ID NO: 1693226 - RNA, 16 nt, Human
auuuacuaaaauggac

SEQ ID NO: 1693227 - RNA, 22 nt, Human
auuggggauucuuaaaguugaa

SEQ ID NO: 1693228 - RNA, 21 nt, Human
auuggggauucuuaaaguuga

SEQ ID NO: 1693229 - RNA, 20 nt, Human
auuggggauucuuaaaguug

SEQ ID NO: 1693230 - RNA, 16 nt, Human
auuggggauucuuaaa

SEQ ID NO: 1693231 - RNA, 15 nt, Human
auuggggauucuuaa

SEQ ID NO: 1693232 - RNA, 14 nt, Human
auuggggauucuua

SEQ ID NO: 1693233 - RNA, 24 nt, Human
uuuuuggcauaacauaaaucugug

SEQ ID NO: 1693234 - RNA, 23 nt, Human
uuuuuggcauaacauaaaucugu

SEQ ID NO: 1693235 - RNA, 17 nt, Human
auuaaguaucugacauc

SEQ ID NO: 1693236 - RNA, 20 nt, Human
auuaaggauuuuaugcuuua

SEQ ID NO: 1693237 - RNA, 17 nt, Human
auuaaggauuuuaugcu

SEQ ID NO: 1693238 - RNA, 15 nt, Human
auuaaggauuuuaug

SEQ ID NO: 1693239 - RNA, 15 nt, Human
uuuuggaauuuuccu

SEQ ID NO: 1693240 - RNA, 20 nt, Human
uuuuuauauuuacuaaaaug

SEQ ID NO: 1693241 - RNA, 17 nt, Human
auucacugauuugacau

SEQ ID NO: 1693242 - RNA, 12 nt, Human
auucacugauuu

SEQ ID NO: 1693243 - RNA, 19 nt, Human
auuauaugcuauuucuaua

SEQ ID NO: 1693244 - RNA, 17 nt, Human
auuauaugcuauuucua

SEQ ID NO: 1693245 - RNA, 18 nt, Human
auuauaugcuauuucuau

SEQ ID NO: 1693246 - RNA, 19 nt, Human
auuauucacugauuugaca

SEQ ID NO: 1693247 - RNA, 24 nt, Human
auuauucaaaguugccuaaaucca

SEQ ID NO: 1693248 - RNA, 18 nt, Human
auuauucaaaguugccua

SEQ ID NO: 1693249 - RNA, 22 nt, Human
auuauucaaaguugccuaaauc

SEQ ID NO: 1693250 - RNA, 19 nt, Human
auuauucaaaguugccuaa

SEQ ID NO: 1693251 - RNA, 19 nt, Human
auuauaucugaggaauucu

SEQ ID NO: 1693252 - RNA, 18 nt, Human
auuauaucugaggaauuc

SEQ ID NO: 1693253 - RNA, 16 nt, Human
auuauaugcuauuucu

SEQ ID NO: 1693254 - RNA, 22 nt, Human
auuauaucugaggaauucugua

SEQ ID NO: 1693255 - RNA, 21 nt, Human
auuauaucugaggaauucugu

SEQ ID NO: 1693256 - RNA, 20 nt, Human
auuauaucugaggaauucug

SEQ ID NO: 1693257 - RNA, 14 nt, Human
uuugaauuuugugu

SEQ ID NO: 1693258 - RNA, 12 nt, Human
uuugaauuuugu

SEQ ID NO: 1693259 - RNA, 16 nt, Human
uuugagaaauuaagua

SEQ ID NO: 1693260 - RNA, 12 nt, Human
auguuuauuaca

SEQ ID NO: 1693261 - RNA, 12 nt, Human
uuuucuguuaua

SEQ ID NO: 1693262 - RNA, 23 nt, Human
uuuucuuaaauaauaaagaucau

SEQ ID NO: 1693263 - RNA, 14 nt, Human
uuuucuuaaauaau

SEQ ID NO: 1693264 - RNA, 19 nt, Human
uuuucugauccaguuuugu

SEQ ID NO: 1693265 - RNA, 23 nt, Human
auguuuauuacaguauaauuaac

SEQ ID NO: 1693266 - RNA, 22 nt, Human
auguuuauuacaguauaauuaa

SEQ ID NO: 1693267 - RNA, 19 nt, Human
auguuuauuacaguauaau

SEQ ID NO: 1693268 - RNA, 18 nt, Human
auguuuauuacaguauaa

SEQ ID NO: 1693269 - RNA, 16 nt, Human
auguuuauuacaguau

SEQ ID NO: 1693270 - RNA, 15 nt, Human
auguuuauuacagua

SEQ ID NO: 1693271 - RNA, 22 nt, Human
cacuccaauuaaggauuuuaug

SEQ ID NO: 1693272 - RNA, 21 nt, Human
cacuccaauuaaggauuuuau

SEQ ID NO: 1693273 - RNA, 13 nt, Human
auuuaauaauuau

SEQ ID NO: 1693274 - RNA, 18 nt, Human
auuuaauaauuauaugcu

SEQ ID NO: 1693275 - RNA, 15 nt, Human
auuuaauaauuauau

SEQ ID NO: 1693276 - RNA, 17 nt, Human
auuuuuuuucuguuaua

SEQ ID NO: 1693277 - RNA, 15 nt, Human
auuuuuuuucuguua

SEQ ID NO: 1693278 - RNA, 19 nt, Human
auuuuuuuucuguuauaua

SEQ ID NO: 1693279 - RNA, 18 nt, Human
auuuuuuuucuguuauau

SEQ ID NO: 1693280 - RNA, 20 nt, Human
auuuuuuuucuguuauauaa

SEQ ID NO: 1693281 - RNA, 14 nt, Human
auuauguaaauccc

SEQ ID NO: 1693282 - RNA, 13 nt, Human
auuauguaaaucc

SEQ ID NO: 1693283 - RNA, 23 nt, Human
auuauguaaaucccauuauucaa

SEQ ID NO: 1693284 - RNA, 22 nt, Human
auuauguaaaucccauuauuca

SEQ ID NO: 1693285 - RNA, 17 nt, Human
auuauguaaaucccauu

SEQ ID NO: 1693286 - RNA, 15 nt, Human
auuauguaaauccca

SEQ ID NO: 1693287 - RNA, 16 nt, Human
cauaggugaucucauu

SEQ ID NO: 1693288 - RNA, 17 nt, Human
cauugguguuguacuca

SEQ ID NO: 1693289 - RNA, 15 nt, Human
cauugguucuuguau

SEQ ID NO: 1693290 - RNA, 14 nt, Human
cauugguucuugua

SEQ ID NO: 1693291 - RNA, 14 nt, Human
cauuauucaaaguu

SEQ ID NO: 1693292 - RNA, 16 nt, Human
cauuauucaaaguugc

SEQ ID NO: 1693293 - RNA, 15 nt, Human
cauuauucaaaguug

SEQ ID NO: 1693294 - RNA, 14 nt, Human
cagauacuggauug

SEQ ID NO: 1693295 - RNA, 18 nt, Human
cagauacuggauuguacu

SEQ ID NO: 1693296 - RNA, 20 nt, Human
ccagacgaugucuucauacc

SEQ ID NO: 1693297 - RNA, 13 nt, Human
ccagacgaugucu

SEQ ID NO: 1693298 - RNA, 14 nt, Human
ccaguauuguacaa

SEQ ID NO: 1693299 - RNA, 19 nt, Human
ccaugggauaaaugccauc

SEQ ID NO: 1693300 - RNA, 12 nt, Human
ccuaaggacuuc

SEQ ID NO: 1693301 - RNA, 11 nt, Human
ccuaaggacuu

SEQ ID NO: 1693302 - RNA, 23 nt, Human
ccuaaggacuucuuuaauuuugg

SEQ ID NO: 1693303 - RNA, 18 nt, Human
ccuaaggacuucuuuaau

SEQ ID NO: 1693304 - RNA, 17 nt, Human
ccuaaggacuucuuuaa

SEQ ID NO: 1693305 - RNA, 16 nt, Human
ccuaaggacuucuuua

SEQ ID NO: 1693306 - RNA, 19 nt, Human
cgcugauaagcguucaugg

SEQ ID NO: 1693307 - RNA, 21 nt, Human
cguucauggaacgcguugaaa

SEQ ID NO: 1693308 - RNA, 19 nt, Human
cucagaaggcaaaugacuu

SEQ ID NO: 1693309 - RNA, 23 nt, Human
gcugaacacuccaauuaaggauu

SEQ ID NO: 1693310 - RNA, 21 nt, Human
gcugaacacuccaauuaagga

SEQ ID NO: 1693311 - RNA, 20 nt, Human
gcugaacacuccaauuaagg

SEQ ID NO: 1693312 - RNA, 12 nt, Human
ggacuuguuaga

SEQ ID NO: 1693313 - RNA, 13 nt, Human
ggcaaaugacuuu

SEQ ID NO: 1693314 - RNA, 23 nt, Human
aaaauuggggauucuuaaaguug

SEQ ID NO: 1693315 - RNA, 21 nt, Human
aaaauuggggauucuuaaagu

SEQ ID NO: 1693316 - RNA, 22 nt, Human
aaaauggacuguggugacuuug

SEQ ID NO: 1693317 - RNA, 18 nt, Human
aaacggaugauuucuaug

SEQ ID NO: 1693318 - RNA, 16 nt, Human
aaacggaugauuucua

SEQ ID NO: 1693319 - RNA, 15 nt, Human
aaacuggguuccugc

SEQ ID NO: 1693320 - RNA, 16 nt, Human
aaacuggguuccugca

SEQ ID NO: 1693321 - RNA, 17 nt, Human
aaacauugguucuugua

SEQ ID NO: 1693322 - RNA, 21 nt, Human
aaacauugguucuuguauuaa

SEQ ID NO: 1693323 - RNA, 20 nt, Human
aaacauugguucuuguauua

SEQ ID NO: 1693324 - RNA, 18 nt, Human
aaacauugguucuuguau

SEQ ID NO: 1693325 - RNA, 17 nt, Human
aaacuuuucugauagag

SEQ ID NO: 1693326 - RNA, 16 nt, Human
aaacuuuucugauaga

SEQ ID NO: 1693327 - RNA, 14 nt, Human
aaacuuuucugaua

SEQ ID NO: 1693328 - RNA, 13 nt, Human
aaacuuuucugau

SEQ ID NO: 1693329 - RNA, 17 nt, Human
aaacuuguguaaauaca

SEQ ID NO: 1693330 - RNA, 23 nt, Human
aaaggaagguucuggugugaacu

SEQ ID NO: 1693331 - RNA, 20 nt, Human
gggauucuuaaaguugaauu

SEQ ID NO: 1693332 - RNA, 15 nt, Human
gggauucuuaaaguu

SEQ ID NO: 1693333 - RNA, 21 nt, Human
ggcugaacacuccaauuaagg

SEQ ID NO: 1693334 - RNA, 14 nt, Human
gacuguggugacuu

SEQ ID NO: 1693335 - RNA, 13 nt, Human
gacuguggugacu

SEQ ID NO: 1693336 - RNA, 17 nt, Human
gacuguggugacuuugg

SEQ ID NO: 1693337 - RNA, 21 nt, Human
gagugaguuggguguauugug

SEQ ID NO: 1693338 - RNA, 21 nt, Human
gauuuuuuuguuguuuguuua

SEQ ID NO: 1693339 - RNA, 18 nt, Human
gauuuuuuuguuguuugu

SEQ ID NO: 1693340 - RNA, 23 nt, Human
gauucuucagcaaaaauauuuua

SEQ ID NO: 1693341 - RNA, 22 nt, Human
gauuauucacugauuugacaua

SEQ ID NO: 1693342 - RNA, 23 nt, Human
gaucugccuaaggacuucuuuaa

SEQ ID NO: 1693343 - RNA, 21 nt, Human
gaucugccuaaggacuucuuu

SEQ ID NO: 1693344 - RNA, 20 nt, Human
gaucugccuaaggacuucuu

SEQ ID NO: 1693345 - RNA, 18 nt, Human
gaucugccuaaggacuuc

SEQ ID NO: 1693346 - RNA, 20 nt, Human
cuuucagauaacuguuauuu

SEQ ID NO: 1693347 - RNA, 13 nt, Human
cuuucagauacug

SEQ ID NO: 1693348 - RNA, 21 nt, Human
cuuuaauaucaucaguauuga

SEQ ID NO: 1693349 - RNA, 19 nt, Human
cuuuaauaucaucaguauu

SEQ ID NO: 1693350 - RNA, 18 nt, Human
cuuuaauaucaucaguau

SEQ ID NO: 1693351 - RNA, 16 nt, Human
cuuuaauuuuggaauu

SEQ ID NO: 1693352 - RNA, 13 nt, Human
cuuuaauuuugga

SEQ ID NO: 1693353 - RNA, 15 nt, Human
cuuuaauuuuggaau

SEQ ID NO: 1693354 - RNA, 14 nt, Human
cuuuaauuuuggaa

SEQ ID NO: 1693355 - RNA, 13 nt, Human
cuuaaaguugaau

SEQ ID NO: 1693356 - RNA, 11 nt, Human
cuuaaaguuga

SEQ ID NO: 1693357 - RNA, 19 nt, Human
cugaugccaaguuguuuga

SEQ ID NO: 1693358 - RNA, 20 nt, Human
cugcacggugaauggcuuug

SEQ ID NO: 1693359 - RNA, 17 nt, Human
cugcacggugaauggcu

SEQ ID NO: 1693360 - RNA, 15 nt, Human
cugcacggugaaugg

SEQ ID NO: 1693361 - RNA, 14 nt, Human
cugcacggugaaug

SEQ ID NO: 1693362 - RNA, 23 nt, Human
cauuuuauaaaucgcuuuugaua

SEQ ID NO: 1693363 - RNA, 21 nt, Human
cauuuuauaaaucgcuuuuga

SEQ ID NO: 1693364 - RNA, 18 nt, Human
cauuuuauaaaucgcuuu

SEQ ID NO: 1693365 - RNA, 17 nt, Human
cauuuuauaaaucgcuu

SEQ ID NO: 1693366 - RNA, 13 nt, Human
cauuuuauaaauc

SEQ ID NO: 1693367 - RNA, 11 nt, Human
cauuuuauaaa

SEQ ID NO: 1693368 - RNA, 23 nt, Human
cauuuaauaauuauaugcuauuu

SEQ ID NO: 1693369 - RNA, 14 nt, Human
cauuuaauaauuau

SEQ ID NO: 1693370 - RNA, 12 nt, Human
cauuuaauaauu

SEQ ID NO: 1693371 - RNA, 19 nt, Human
cauuuaauaauuauaugcu

SEQ ID NO: 1693372 - RNA, 17 nt, Human
cauuuaauaauuauaug

SEQ ID NO: 1693373 - RNA, 16 nt, Human
cauuuaauaauuauau

SEQ ID NO: 1693374 - RNA, 15 nt, Human
cauuuaauaauuaua

SEQ ID NO: 1693375 - RNA, 20 nt, Human
ccaggaauggagccugcacg

SEQ ID NO: 1693376 - RNA, 20 nt, Human
ccaucaauaaaaaauuauga

SEQ ID NO: 1693377 - RNA, 19 nt, Human
ccaucaauaaaaaauuaug

SEQ ID NO: 1693378 - RNA, 14 nt, Human
cggaugauuucuau

SEQ ID NO: 1693379 - RNA, 13 nt, Human
cggaugauuucua

SEQ ID NO: 1693380 - RNA, 16 nt, Human
ccuuucucuuucguua

SEQ ID NO: 1693381 - RNA, 21 nt, Human
cgcguugaaauuguaauuaua

SEQ ID NO: 1693382 - RNA, 17 nt, Human
cgcguugaaauuguaau

SEQ ID NO: 1693383 - RNA, 22 nt, Human
cgcguugaaauuguaauuauau

SEQ ID NO: 1693384 - RNA, 13 nt, Human
cgcguugaaauug

SEQ ID NO: 1693385 - RNA, 22 nt, Human
cguucauggaacgcguugaaau

SEQ ID NO: 1693386 - RNA, 23 nt, Human
cguucauggaacgcguugaaauu

SEQ ID NO: 1693387 - RNA, 18 nt, Human
cguugaaauuguaauuau

SEQ ID NO: 1693388 - RNA, 13 nt, Human
cguugaaauugua

SEQ ID NO: 1693389 - RNA, 15 nt, Human
ccuggccuuucauau

SEQ ID NO: 1693390 - RNA, 14 nt, Human
ccuggccuuucaua

SEQ ID NO: 1693391 - RNA, 21 nt, Human
ccugcuuucagauacuggauu

SEQ ID NO: 1693392 - RNA, 16 nt, Human
ccugcuuucagauacu

SEQ ID NO: 1693393 - RNA, 15 nt, Human
ccugcuuucagauac

SEQ ID NO: 1693394 - RNA, 13 nt, Human
ccugauuaaagaa

SEQ ID NO: 1693395 - RNA, 12 nt, Human
ccugauuaaaga

SEQ ID NO: 1693396 - RNA, 21 nt, Human
ccucacccacccuuuuuuaaa

SEQ ID NO: 1693397 - RNA, 22 nt, Human
ccggaagccaaaccucugugag

SEQ ID NO: 1693398 - RNA, 11 nt, Human
ccggaagccaa

SEQ ID NO: 1693399 - RNA, 13 nt, Human
ccgugcuaaggac

SEQ ID NO: 1693400 - RNA, 21 nt, Human
cugcaaugaagucucugaagu

SEQ ID NO: 1693401 - RNA, 18 nt, Human
cugcaaugaagucucuga

SEQ ID NO: 1693402 - RNA, 22 nt, Human
cugcaaucuucucagaaggcaa

SEQ ID NO: 1693403 - RNA, 15 nt, Human
cugauucuucagcaa

SEQ ID NO: 1693404 - RNA, 20 nt, Human
cugauagaggaagccugauu

SEQ ID NO: 1693405 - RNA, 20 nt, Human
cugauccaguuuuguuugga

SEQ ID NO: 1693406 - RNA, 21 nt, Human
cugccuaaggacuucuuuaau

SEQ ID NO: 1693407 - RNA, 20 nt, Human
cugccuaaggacuucuuuaa

SEQ ID NO: 1693408 - RNA, 22 nt, Human
cugccuaaggacuucuuuaauu

SEQ ID NO: 1693409 - RNA, 19 nt, Human
cugccuaaggacuucuuua

SEQ ID NO: 1693410 - RNA, 21 nt, Human
cugcuuucagauacuggauug

SEQ ID NO: 1693411 - RNA, 18 nt, Human
cugcuuucagauacugga

SEQ ID NO: 1693412 - RNA, 20 nt, Human
cuggauuguacuuugugcug

SEQ ID NO: 1693413 - RNA, 19 nt, Human
cuggauuguacuuugugcu

SEQ ID NO: 1693414 - RNA, 18 nt, Human
cuccuaucaccugucuug

SEQ ID NO: 1693415 - RNA, 18 nt, Human
cucugcaaucuucucaga

SEQ ID NO: 1693416 - RNA, 17 nt, Human
cucugcaaucuucucag

SEQ ID NO: 1693417 - RNA, 13 nt, Human
cucuccauuuaau

SEQ ID NO: 1693418 - RNA, 19 nt, Human
cugaagugaaacugcuugu

SEQ ID NO: 1693419 - RNA, 17 nt, Human
cugaagugaaacugcuu

SEQ ID NO: 1693420 - RNA, 13 nt, Human
cugaagugaaacu

SEQ ID NO: 1693421 - RNA, 21 nt, Human
cugaagucagaucugccuaag

SEQ ID NO: 1693422 - RNA, 16 nt, Human
cugaagucagaucugc

SEQ ID NO: 1693423 - RNA, 15 nt, Human
cugaagucagaucug

SEQ ID NO: 1693424 - RNA, 14 nt, Human
cugaagucagaucu

SEQ ID NO: 1693425 - RNA, 16 nt, Human
cuguuuuaugacuuca

SEQ ID NO: 1693426 - RNA, 15 nt, Human
cuguuuuaugacuuc

SEQ ID NO: 1693427 - RNA, 14 nt, Human
cuguuuuaugacuu

SEQ ID NO: 1693428 - RNA, 13 nt, Human
cuguuuuaugacu

SEQ ID NO: 1693429 - RNA, 12 nt, Human
cuguuuuaugac

SEQ ID NO: 1693430 - RNA, 18 nt, Human
cuuuucugauccaguuuu

SEQ ID NO: 1693431 - RNA, 16 nt, Human
cuuuucugauccaguu

SEQ ID NO: 1693432 - RNA, 11 nt, Human
cuuuucugauc

SEQ ID NO: 1693433 - RNA, 15 nt, Human
cuuuucugauccagu

SEQ ID NO: 1693434 - RNA, 14 nt, Human
cuuuucugauccag

SEQ ID NO: 1693435 - RNA, 15 nt, Human
cuuuuuuaaauaaau

SEQ ID NO: 1693436 - RNA, 21 nt, Human
cuuuuucauuauuuuauuaug

SEQ ID NO: 1693437 - RNA, 14 nt, Human
cuuuuucauuauuu

SEQ ID NO: 1693438 - RNA, 13 nt, Human
cuuuuucauuauu

SEQ ID NO: 1693439 - RNA, 12 nt, Human
cuuuuucauuau

SEQ ID NO: 1693440 - RNA, 14 nt, Human
cuuuggauaauaag

SEQ ID NO: 1693441 - RNA, 16 nt, Human
cuuuggauaauaagga

SEQ ID NO: 1693442 - RNA, 16 nt, Human
cuuguuagaucuaguu

SEQ ID NO: 1693443 - RNA, 13 nt, Human
cuuguuagaucua

SEQ ID NO: 1693444 - RNA, 16 nt, Human
gacugauucuucagca

SEQ ID NO: 1693445 - RNA, 13 nt, Human
gacugauucuuca

SEQ ID NO: 1693446 - RNA, 17 nt, Human
gaacuaaacuuucacac

SEQ ID NO: 1693447 - RNA, 18 nt, Human
gaacuaaacuuucacacc

SEQ ID NO: 1693448 - RNA, 16 nt, Human
gaacuaaacuuucaca

SEQ ID NO: 1693449 - RNA, 14 nt, Human
gaacuaaacuuuca

SEQ ID NO: 1693450 - RNA, 12 nt, Human
gaacuaaacuuu

SEQ ID NO: 1693451 - RNA, 15 nt, Human
gaacgcguugaaauu

SEQ ID NO: 1693452 - RNA, 21 nt, Human
gaagucucugaagugaaacug

SEQ ID NO: 1693453 - RNA, 16 nt, Human
gaagucucugaaguga

SEQ ID NO: 1693454 - RNA, 11 nt, Human
gaauucuguau

SEQ ID NO: 1693455 - RNA, 22 nt, Human
gaauuuauuggcuuuucugauc

SEQ ID NO: 1693456 - RNA, 21 nt, Human
gaauuuauuggcuuuucugau

SEQ ID NO: 1693457 - RNA, 20 nt, Human
gaauuuauuggcuuuucuga

SEQ ID NO: 1693458 - RNA, 16 nt, Human
gaauuuauuggcuuuu

SEQ ID NO: 1693459 - RNA, 14 nt, Human
gaauuuauuggcuu

SEQ ID NO: 1693460 - RNA, 23 nt, Human
gaaugguccgugcuaaggacuug

SEQ ID NO: 1693461 - RNA, 22 nt, Human
gaaugguccgugcuaaggacuu

SEQ ID NO: 1693462 - RNA, 20 nt, Human
gaaugguccgugcuaaggac

SEQ ID NO: 1693463 - RNA, 15 nt, Human
gacuucauuaauaau

SEQ ID NO: 1693464 - RNA, 12 nt, Human
gaguguugaaac

SEQ ID NO: 1693465 - RNA, 22 nt, Human
gauaauaaggaaaaguuuaaua

SEQ ID NO: 1693466 - RNA, 21 nt, Human
gauaauaaggaaaaguuuaau

SEQ ID NO: 1693467 - RNA, 20 nt, Human
gauaauaaggaaaaguuuaa

SEQ ID NO: 1693468 - RNA, 17 nt, Human
gauaaucaacugggcug

SEQ ID NO: 1693469 - RNA, 21 nt, Human
gauaaucaacugggcugaaca

SEQ ID NO: 1693470 - RNA, 17 nt, Human
gaucuaguucacucucc

SEQ ID NO: 1693471 - RNA, 19 nt, Human
gcaaugaagucucugaagu

SEQ ID NO: 1693472 - RNA, 17 nt, Human
gcaaugaagucucugaa

SEQ ID NO: 1693473 - RNA, 12 nt, Human
gcaaaugacuuu

SEQ ID NO: 1693474 - RNA, 13 nt, Human
gcaaaugacuuug

SEQ ID NO: 1693475 - RNA, 21 nt, Human
gcauaggugaucucauuuaau

SEQ ID NO: 1693476 - RNA, 20 nt, Human
gcauauauuuuuauauuuac

SEQ ID NO: 1693477 - RNA, 16 nt, Human
gcauauauuuuuauau

SEQ ID NO: 1693478 - RNA, 11 nt, Human
gcauauauuuu

SEQ ID NO: 1693479 - RNA, 15 nt, Human
gcauauauuuuuaua

SEQ ID NO: 1693480 - RNA, 14 nt, Human
gcauauauuuuuau

SEQ ID NO: 1693481 - RNA, 12 nt, Human
gcaucacaguuu

SEQ ID NO: 1693482 - RNA, 13 nt, Human
gcauuuuauaaau

SEQ ID NO: 1693483 - RNA, 11 nt, Human
gccuaaaucca

SEQ ID NO: 1693484 - RNA, 13 nt, Human
gccuaaggacuuc

SEQ ID NO: 1693485 - RNA, 12 nt, Human
gccuaaggacuu

SEQ ID NO: 1693486 - RNA, 18 nt, Human
gccuaaggacuucuuuaa

SEQ ID NO: 1693487 - RNA, 15 nt, Human
gccuaaggacuucuu

SEQ ID NO: 1693488 - RNA, 14 nt, Human
gccuaaggacuucu

SEQ ID NO: 1693489 - RNA, 22 nt, Human
gccuuuuucauuauuuuauuau

SEQ ID NO: 1693490 - RNA, 20 nt, Human
gccuuuuucauuauuuuauu

SEQ ID NO: 1693491 - RNA, 16 nt, Human
gccuuuuucauuauuu

SEQ ID NO: 1693492 - RNA, 12 nt, Human
gccuuuuucauu

SEQ ID NO: 1693493 - RNA, 22 nt, Human
gcuagacuggugacugauucuu

SEQ ID NO: 1693494 - RNA, 20 nt, Human
gcuagacuggugacugauuc

SEQ ID NO: 1693495 - RNA, 19 nt, Human
gcuagacuggugacugauu

SEQ ID NO: 1693496 - RNA, 16 nt, Human
gcuagacuggugacug

SEQ ID NO: 1693497 - RNA, 15 nt, Human
gcuagacuggugacu

SEQ ID NO: 1693498 - RNA, 13 nt, Human
gcuagacugguga

SEQ ID NO: 1693499 - RNA, 21 nt, Human
ggugacuuuggauaauaagga

SEQ ID NO: 1693500 - RNA, 20 nt, Human
ggugacuuuggauaauaagg

SEQ ID NO: 1693501 - RNA, 19 nt, Human
ggugacuuuggauaauaag

SEQ ID NO: 1693502 - RNA, 18 nt, Human
ggugacuuuggauaauaa

SEQ ID NO: 1693503 - RNA, 14 nt, Human
ggugacuuuggaua

SEQ ID NO: 1693504 - RNA, 16 nt, Human
gguguaugugugaagu

SEQ ID NO: 1693505 - RNA, 14 nt, Human
gguucuuguauuaa

SEQ ID NO: 1693506 - RNA, 22 nt, Human
gguucuuguauuaagaaugaaa

SEQ ID NO: 1693507 - RNA, 23 nt, Human
gguuaagucuguuuuaugacuuc

SEQ ID NO: 1693508 - RNA, 16 nt, Human
gguuaagucuguuuua

SEQ ID NO: 1693509 - RNA, 13 nt, Human
gguuaagucuguu

SEQ ID NO: 1693510 - RNA, 20 nt, Human
gguuaucugaagucagaucu

SEQ ID NO: 1693511 - RNA, 15 nt, Human
ggggauucuuaaagu

SEQ ID NO: 1693512 - RNA, 11 nt, Human
ggggauucuua

SEQ ID NO: 1693513 - RNA, 11 nt, Human
ggguuccugca

SEQ ID NO: 1693514 - RNA, 16 nt, Human
ggcuuuucugauccag

SEQ ID NO: 1693515 - RNA, 13 nt, Human
ggcuuuucugauc

SEQ ID NO: 1693516 - RNA, 12 nt, Human
ggcuuuucugau

SEQ ID NO: 1693517 - RNA, 17 nt, Human
ggcuuuucugauccagu

SEQ ID NO: 1693518 - RNA, 21 nt, Human
ggcugaugccaaguuguuuga

SEQ ID NO: 1693519 - RNA, 22 nt, Human
ggcugaugccaaguuguuugag

SEQ ID NO: 1693520 - RNA, 22 nt, Human
gcuggugcccugcuuucagaua

SEQ ID NO: 1693521 - RNA, 24 nt, Human
gcuggugcccugcuuucagauacu

SEQ ID NO: 1693522 - RNA, 23 nt, Human
gcuuuaauaucaucaguauugaa

SEQ ID NO: 1693523 - RNA, 22 nt, Human
gcuuuaauaucaucaguauuga

SEQ ID NO: 1693524 - RNA, 20 nt, Human
gcuuuaauaucaucaguauu

SEQ ID NO: 1693525 - RNA, 17 nt, Human
ggaacgcguugaaauug

SEQ ID NO: 1693526 - RNA, 21 nt, Human
ggaacgcguugaaauuguaau

SEQ ID NO: 1693527 - RNA, 19 nt, Human
ggaaaaguuuaauauuaaa

SEQ ID NO: 1693528 - RNA, 22 nt, Human
ggaagccaaaccucugugagca

SEQ ID NO: 1693529 - RNA, 20 nt, Human
uauaaaucgcuuuugauaau

SEQ ID NO: 1693530 - RNA, 19 nt, Human
uauaaaucgcuuuugauaa

SEQ ID NO: 1693531 - RNA, 18 nt, Human
uauaaaucgcuuuugaua

SEQ ID NO: 1693532 - RNA, 19 nt, Human
uauauuuuuauauuuacua

SEQ ID NO: 1693533 - RNA, 22 nt, Human
uaucaucaguauugaagcauuu

SEQ ID NO: 1693534 - RNA, 18 nt, Human
uauauuuuuauauuuacu

SEQ ID NO: 1693535 - RNA, 18 nt, Human
uauaugcuauuucuauau

SEQ ID NO: 1693536 - RNA, 16 nt, Human
uauaugcuauuucuau

SEQ ID NO: 1693537 - RNA, 14 nt, Human
uagagaguguugaa

SEQ ID NO: 1693538 - RNA, 15 nt, Human
uagagaguguugaaa

SEQ ID NO: 1693539 - RNA, 18 nt, Human
uagacuggugacugauuc

SEQ ID NO: 1693540 - RNA, 17 nt, Human
uagacuggugacugauu

SEQ ID NO: 1693541 - RNA, 14 nt, Human
uagacuggugacug

SEQ ID NO: 1693542 - RNA, 13 nt, Human
uagacuggugacu

SEQ ID NO: 1693543 - RNA, 13 nt, Human
uaauuuuggaauu

SEQ ID NO: 1693544 - RNA, 12 nt, Human
uaauuuuggaau

SEQ ID NO: 1693545 - RNA, 18 nt, Human
uacaauuuuguuucugua

SEQ ID NO: 1693546 - RNA, 21 nt, Human
uacaauuuuguuucuguacuu

SEQ ID NO: 1693547 - RNA, 19 nt, Human
uacaauuuuguuucuguac

SEQ ID NO: 1693548 - RNA, 20 nt, Human
uaauuaacauguuaaaccau

SEQ ID NO: 1693549 - RNA, 19 nt, Human
uaauuaacauguuaaacca

SEQ ID NO: 1693550 - RNA, 18 nt, Human
uaauuaacauguuaaacc

SEQ ID NO: 1693551 - RNA, 17 nt, Human
uaauuaacauguuaaac

SEQ ID NO: 1693552 - RNA, 15 nt, Human
uaauuaacauguuaa

SEQ ID NO: 1693553 - RNA, 14 nt, Human
uaauuaacauguua

SEQ ID NO: 1693554 - RNA, 12 nt, Human
uaauuaacaugu

SEQ ID NO: 1693555 - RNA, 20 nt, Human
uaauaaggaaaaguuuaaua

SEQ ID NO: 1693556 - RNA, 17 nt, Human
uaauaaagaucauguaa

SEQ ID NO: 1693557 - RNA, 16 nt, Human
uaauaaagaucaugua

SEQ ID NO: 1693558 - RNA, 23 nt, Human
uaauaauuauaugcuauuucuau

SEQ ID NO: 1693559 - RNA, 22 nt, Human
uaauaauuauaugcuauuucua

SEQ ID NO: 1693560 - RNA, 20 nt, Human
uaauaauuauaugcuauuuc

SEQ ID NO: 1693561 - RNA, 19 nt, Human
uaauaauuauaugcuauuu

SEQ ID NO: 1693562 - RNA, 16 nt, Human
uaauaauuauaugcua

SEQ ID NO: 1693563 - RNA, 15 nt, Human
uaauaauuauaugcu

SEQ ID NO: 1693564 - RNA, 23 nt, Human
uaauccucucaaccaccuuucag

SEQ ID NO: 1693565 - RNA, 14 nt, Human
uaauauuaaagcca

SEQ ID NO: 1693566 - RNA, 13 nt, Human
uaauauuaaagcc

SEQ ID NO: 1693567 - RNA, 12 nt, Human
uaauauuaaagc

SEQ ID NO: 1693568 - RNA, 23 nt, Human
uaagcauauauuuuuauauuuac

SEQ ID NO: 1693569 - RNA, 19 nt, Human
uaagcauauauuuuuauau

SEQ ID NO: 1693570 - RNA, 22 nt, Human
uaagcauauauuuuuauauuua

SEQ ID NO: 1693571 - RNA, 21 nt, Human
uaagcauauauuuuuauauuu

SEQ ID NO: 1693572 - RNA, 17 nt, Human
uaacauguuaaaccaug

SEQ ID NO: 1693573 - RNA, 18 nt, Human
uaacauguuaaaccaugg

SEQ ID NO: 1693574 - RNA, 19 nt, Human
uaaaucccauuauucaaag

SEQ ID NO: 1693575 - RNA, 17 nt, Human
uaaaucccauuauucaa

SEQ ID NO: 1693576 - RNA, 16 nt, Human
uaaaucccauuauuca

SEQ ID NO: 1693577 - RNA, 23 nt, Human
uaaauccauuuggaaaucuuuaa

SEQ ID NO: 1693578 - RNA, 22 nt, Human
uaaauccauuuggaaaucuuua

SEQ ID NO: 1693579 - RNA, 19 nt, Human
uaaauccauuuggaaaucu

SEQ ID NO: 1693580 - RNA, 18 nt, Human
uaaauccauuuggaaauc

SEQ ID NO: 1693581 - RNA, 14 nt, Human
uaaauccauuugga

SEQ ID NO: 1693582 - RNA, 16 nt, Human
uaaauccauuuggaaa

SEQ ID NO: 1693583 - RNA, 15 nt, Human
uaaauccauuuggaa

SEQ ID NO: 1693584 - RNA, 23 nt, Human
uaaaguugaauuuauuggcuuuu

SEQ ID NO: 1693585 - RNA, 21 nt, Human
uaaaguugaauuuauuggcuu

SEQ ID NO: 1693586 - RNA, 19 nt, Human
uaaaguugaauuuauuggc

SEQ ID NO: 1693587 - RNA, 17 nt, Human
uaaaguugaauuuauug

SEQ ID NO: 1693588 - RNA, 15 nt, Human
uaaaguugaauuuau

SEQ ID NO: 1693589 - RNA, 14 nt, Human
uaaaguugaauuua

SEQ ID NO: 1693590 - RNA, 13 nt, Human
uaaaguugaauuu

SEQ ID NO: 1693591 - RNA, 15 nt, Human
uaaacuuuucugaua

SEQ ID NO: 1693592 - RNA, 14 nt, Human
uaaacuuuucugau

SEQ ID NO: 1693593 - RNA, 13 nt, Human
uaaacuuuucuga

SEQ ID NO: 1693594 - RNA, 13 nt, Human
uaaacuuucacac

SEQ ID NO: 1693595 - RNA, 12 nt, Human
uaaacuuucaca

SEQ ID NO: 1693596 - RNA, 18 nt, Human
guuuagucuugucucaga

SEQ ID NO: 1693597 - RNA, 14 nt, Human
guuuagucuugucu

SEQ ID NO: 1693598 - RNA, 23 nt, Human
guuugugcugguguaugugugaa

SEQ ID NO: 1693599 - RNA, 19 nt, Human
guuugagguuuuuaagccu

SEQ ID NO: 1693600 - RNA, 16 nt, Human
guuugagguuuuuaag

SEQ ID NO: 1693601 - RNA, 12 nt, Human
guuuguuuaguc

SEQ ID NO: 1693602 - RNA, 13 nt, Human
ucauuauuuuauu

SEQ ID NO: 1693603 - RNA, 15 nt, Human
ucauuauuuuauuau

SEQ ID NO: 1693604 - RNA, 14 nt, Human
ucauuauuuuauua

SEQ ID NO: 1693605 - RNA, 22 nt, Human
ucauuauuuuauuaugaaacuu

SEQ ID NO: 1693606 - RNA, 19 nt, Human
ucauuauuuuauuaugaaa

SEQ ID NO: 1693607 - RNA, 18 nt, Human
ucauuauuuuauuaugaa

SEQ ID NO: 1693608 - RNA, 16 nt, Human
ucauuauuuuauuaug

SEQ ID NO: 1693609 - RNA, 22 nt, Human
uccagcagauuauucacugauu

SEQ ID NO: 1693610 - RNA, 20 nt, Human
uccagcagauuauucacuga

SEQ ID NO: 1693611 - RNA, 16 nt, Human
ucacuuuuuuccacau

SEQ ID NO: 1693612 - RNA, 15 nt, Human
ucacuuuuuuccaca

SEQ ID NO: 1693613 - RNA, 13 nt, Human
ucacuuuuuucca

SEQ ID NO: 1693614 - RNA, 13 nt, Human
ucagauaacuguu

SEQ ID NO: 1693615 - RNA, 15 nt, Human
ucagauaacuguuau

SEQ ID NO: 1693616 - RNA, 18 nt, Human
ucacucuccauuuaauaa

SEQ ID NO: 1693617 - RNA, 16 nt, Human
uaucugaggaauucug

SEQ ID NO: 1693618 - RNA, 18 nt, Human
uaucugacaucucugcaa

SEQ ID NO: 1693619 - RNA, 15 nt, Human
uaucugaggaauucu

SEQ ID NO: 1693620 - RNA, 18 nt, Human
uaucugaagucagaucug

SEQ ID NO: 1693621 - RNA, 17 nt, Human
uaucugaagucagaucu

SEQ ID NO: 1693622 - RNA, 12 nt, Human
uauuuuaugauc

SEQ ID NO: 1693623 - RNA, 17 nt, Human
ucucaaccaccuuucag

SEQ ID NO: 1693624 - RNA, 22 nt, Human
ucucagaaggcaaaugacuuug

SEQ ID NO: 1693625 - RNA, 21 nt, Human
ucucagaaggcaaaugacuuu

SEQ ID NO: 1693626 - RNA, 20 nt, Human
ucucagaaggcaaaugacuu

SEQ ID NO: 1693627 - RNA, 19 nt, Human
ucucagaaggcaaaugacu

SEQ ID NO: 1693628 - RNA, 19 nt, Human
ucucugcaaucuucucaga

SEQ ID NO: 1693629 - RNA, 20 nt, Human
ucugaggaauucuguauaga

SEQ ID NO: 1693630 - RNA, 16 nt, Human
ucugacaucucugcaa

SEQ ID NO: 1693631 - RNA, 23 nt, Human
ugaacacuccaauuaaggauuuu

SEQ ID NO: 1693632 - RNA, 22 nt, Human
ugaacacuccaauuaaggauuu

SEQ ID NO: 1693633 - RNA, 19 nt, Human
ugaacacuccaauuaagga

SEQ ID NO: 1693634 - RNA, 18 nt, Human
ugaacacuccaauuaagg

SEQ ID NO: 1693635 - RNA, 18 nt, Human
ucuguuauauaaaugguu

SEQ ID NO: 1693636 - RNA, 15 nt, Human
ucuguuauauaaaug

SEQ ID NO: 1693637 - RNA, 16 nt, Human
ucuguuuuaugacuuc

SEQ ID NO: 1693638 - RNA, 15 nt, Human
ucuguuuuaugacuu

SEQ ID NO: 1693639 - RNA, 13 nt, Human
ucuguuuuaugac

SEQ ID NO: 1693640 - RNA, 17 nt, Human
ucuguuuuaugacuuca

SEQ ID NO: 1693641 - RNA, 23 nt, Human
ucuucucagaaggcaaaugacuu

SEQ ID NO: 1693642 - RNA, 21 nt, Human
ucuucucagaaggcaaaugac

SEQ ID NO: 1693643 - RNA, 22 nt, Human
ucuuguauuaagaaugaaauac

SEQ ID NO: 1693644 - RNA, 15 nt, Human
ucuugccuuuuucau

SEQ ID NO: 1693645 - RNA, 19 nt, Human
ucuuuaaaaaaaaaauugg

SEQ ID NO: 1693646 - RNA, 18 nt, Human
ucuuuaaaaaaaaaauug

SEQ ID NO: 1693647 - RNA, 19 nt, Human
ucuugucucagauuuuauu

SEQ ID NO: 1693648 - RNA, 17 nt, Human
ugcugaguuugugcugg

SEQ ID NO: 1693649 - RNA, 15 nt, Human
ugcugaguuugugcu

SEQ ID NO: 1693650 - RNA, 23 nt, Human
ugccuaaggacuucuuuaauuuu

SEQ ID NO: 1693651 - RNA, 23 nt, Human
ugcacggugaauggcuuuguaua

SEQ ID NO: 1693652 - RNA, 22 nt, Human
ugcacggugaauggcuuuguau

SEQ ID NO: 1693653 - RNA, 19 nt, Human
ugaagucucugaagugaaa

SEQ ID NO: 1693654 - RNA, 12 nt, Human
ugaagugaaacu

SEQ ID NO: 1693655 - RNA, 17 nt, Human
uggcauaacauaaaucu

SEQ ID NO: 1693656 - RNA, 15 nt, Human
uggcauaacauaaau

SEQ ID NO: 1693657 - RNA, 12 nt, Human
ugcuuucagaua

SEQ ID NO: 1693658 - RNA, 21 nt, Human
ugcuuucagauacuggauugu

SEQ ID NO: 1693659 - RNA, 20 nt, Human
ugcuuucagauacuggauug

SEQ ID NO: 1693660 - RNA, 17 nt, Human
ugcuuucagauacugga

SEQ ID NO: 1693661 - RNA, 16 nt, Human
ugcuuucagauacugg

SEQ ID NO: 1693662 - RNA, 12 nt, Human
ugcuuuaaacau

SEQ ID NO: 1693663 - RNA, 14 nt, Human
ugcuuguuuccuag

SEQ ID NO: 1693664 - RNA, 20 nt, Human
uggccuuucauauuuuagcu

SEQ ID NO: 1693665 - RNA, 15 nt, Human
uggcuguacccagga

SEQ ID NO: 1693666 - RNA, 22 nt, Human
uggcuuuguauagaaccucuuu

SEQ ID NO: 1693667 - RNA, 14 nt, Human
uggcuuuguauaga

SEQ ID NO: 1693668 - RNA, 21 nt, Human
uguuuguuuagucuugucuca

SEQ ID NO: 1693669 - RNA, 12 nt, Human
uguuuguuuagu

SEQ ID NO: 1693670 - RNA, 19 nt, Human
uuaacauguuaaaccaugg

SEQ ID NO: 1693671 - RNA, 18 nt, Human
uuaacauguuaaaccaug

SEQ ID NO: 1693672 - RNA, 12 nt, Human
uuaacauguuaa

SEQ ID NO: 1693673 - RNA, 18 nt, Human
uuaauaauuauaugcuau

SEQ ID NO: 1693674 - RNA, 23 nt, Human
uuaauaauuauaugcuauuucua

SEQ ID NO: 1693675 - RNA, 20 nt, Human
uuaauaauuauaugcuauuu

SEQ ID NO: 1693676 - RNA, 20 nt, Human
uuaaggauuuuaugcuuuaa

SEQ ID NO: 1693677 - RNA, 18 nt, Human
uuaaggauuuuaugcuuu

SEQ ID NO: 1693678 - RNA, 15 nt, Human
uuaaggauuuuaugc

SEQ ID NO: 1693679 - RNA, 13 nt, Human
uuaaggauuuuau

SEQ ID NO: 1693680 - RNA, 18 nt, Human
uuaauaucaucaguauug

SEQ ID NO: 1693681 - RNA, 14 nt, Human
uguuguuuguuuag

SEQ ID NO: 1693682 - RNA, 23 nt, Human
uguugaaacggaugauuucuaug

SEQ ID NO: 1693683 - RNA, 22 nt, Human
uguugaaacggaugauuucuau

SEQ ID NO: 1693684 - RNA, 21 nt, Human
uguugaaacggaugauuucua

SEQ ID NO: 1693685 - RNA, 20 nt, Human
uguugaaacggaugauuucu

SEQ ID NO: 1693686 - RNA, 16 nt, Human
uguuagaucuaguuca

SEQ ID NO: 1693687 - RNA, 23 nt, Human
uguuaaaccaugggauaaaugcc

SEQ ID NO: 1693688 - RNA, 21 nt, Human
uguuaaaccaugggauaaaug

SEQ ID NO: 1693689 - RNA, 20 nt, Human
uguuaaaccaugggauaaau

SEQ ID NO: 1693690 - RNA, 18 nt, Human
uguuaaaccaugggauaa

SEQ ID NO: 1693691 - RNA, 17 nt, Human
ugugugaagugagugag

SEQ ID NO: 1693692 - RNA, 16 nt, Human
uguauagaaccucuuu

SEQ ID NO: 1693693 - RNA, 14 nt, Human
uguauuuguuugca

SEQ ID NO: 1693694 - RNA, 13 nt, Human
uguacucaauuuu

SEQ ID NO: 1693695 - RNA, 23 nt, Human
ugugcgcuaaacuuuucugauag

SEQ ID NO: 1693696 - RNA, 22 nt, Human
ugugcgcuaaacuuuucugaua

SEQ ID NO: 1693697 - RNA, 19 nt, Human
ugugcgcuaaacuuuucug

SEQ ID NO: 1693698 - RNA, 14 nt, Human
ugugcgcuaaacuu

SEQ ID NO: 1693699 - RNA, 21 nt, Human
uugaaacggaugauuucuaug

SEQ ID NO: 1693700 - RNA, 22 nt, Human
uugaaacggaugauuucuaugc

SEQ ID NO: 1693701 - RNA, 18 nt, Human
uucuuguauuaagaauga

SEQ ID NO: 1693702 - RNA, 13 nt, Human
uucuuguauuaag

SEQ ID NO: 1693703 - RNA, 12 nt, Human
uucuuguauuaa

SEQ ID NO: 1693704 - RNA, 15 nt, Human
uuggcuuuucugauc

SEQ ID NO: 1693705 - RNA, 22 nt, Human
uuggcuuuucugauccaguuuu

SEQ ID NO: 1693706 - RNA, 19 nt, Human
uuggcuuuucugauccagu

SEQ ID NO: 1693707 - RNA, 21 nt, Human
uuggaccaaaaaccaguauug

SEQ ID NO: 1693708 - RNA, 15 nt, Human
uuggaaaucuuuaaa

SEQ ID NO: 1693709 - RNA, 12 nt, Human
uuggaaaucuuu

SEQ ID NO: 1693710 - RNA, 11 nt, Human
uucacugauuu

SEQ ID NO: 1693711 - RNA, 15 nt, Human
uuacuaaaauggacu

SEQ ID NO: 1693712 - RNA, 18 nt, Human
uuacuaaaauggacugug

SEQ ID NO: 1693713 - RNA, 17 nt, Human
uuacuaaaauggacugu

SEQ ID NO: 1693714 - RNA, 16 nt, Human
uuacuaaaauggacug

SEQ ID NO: 1693715 - RNA, 19 nt, Human
uuccuagcacacacuuuug

SEQ ID NO: 1693716 - RNA, 17 nt, Human
uuccuagcacacacuuu

SEQ ID NO: 1693717 - RNA, 21 nt, Human
uucuauauuuucauucuccua

SEQ ID NO: 1693718 - RNA, 18 nt, Human
uucuauauuuucauucuc

SEQ ID NO: 1693719 - RNA, 16 nt, Human
uucuauauuuucauuc

SEQ ID NO: 1693720 - RNA, 15 nt, Human
uucuauauuuucauu

SEQ ID NO: 1693721 - RNA, 14 nt, Human
uucuauauuuucau

SEQ ID NO: 1693722 - RNA, 11 nt, Human
uucuauauuuu

SEQ ID NO: 1693723 - RNA, 17 nt, Human
uucuaugcugaguuugu

SEQ ID NO: 1693724 - RNA, 21 nt, Human
uuuauuggcuuuucugaucca

SEQ ID NO: 1693725 - RNA, 17 nt, Human
uuuauuggcuuuucuga

SEQ ID NO: 1693726 - RNA, 13 nt, Human
uuuaugauccagc

SEQ ID NO: 1693727 - RNA, 18 nt, Human
uuucagauaacuguuauu

SEQ ID NO: 1693728 - RNA, 21 nt, Human
uuuccuagcacacacuuuugg

SEQ ID NO: 1693729 - RNA, 18 nt, Human
uuuccuagcacacacuuu

SEQ ID NO: 1693730 - RNA, 14 nt, Human
uuucucuuucguua

SEQ ID NO: 1693731 - RNA, 13 nt, Human
uuuuaugauccag

SEQ ID NO: 1693732 - RNA, 15 nt, Human
uuuuaugauccagca

SEQ ID NO: 1693733 - RNA, 19 nt, Human
uuuguuguuuguuuagucu

SEQ ID NO: 1693734 - RNA, 14 nt, Human
uuuguuguuuguuu

SEQ ID NO: 1693735 - RNA, 12 nt, Human
uuuguuguuugu

SEQ ID NO: 1693736 - RNA, 12 nt, Human
uuuguguuagag

SEQ ID NO: 1693737 - RNA, 11 nt, Human
uuuguauagaa

SEQ ID NO: 1693738 - RNA, 20 nt, Human
uuugguuaagucuguuuuau

SEQ ID NO: 1693739 - RNA, 19 nt, Human
uuugguuaagucuguuuua

SEQ ID NO: 1693740 - RNA, 18 nt, Human
uuugguuaagucuguuuu

SEQ ID NO: 1693741 - RNA, 22 nt, Human
uuugguuaagucuguuuuauga

SEQ ID NO: 1693742 - RNA, 16 nt, Human
uuuggaaaucuuuaaa

SEQ ID NO: 1693743 - RNA, 22 nt, Human
uuugcauaggugaucucauuua

SEQ ID NO: 1693744 - RNA, 20 nt, Human
uuugagguuuuuaagccuua

SEQ ID NO: 1693745 - RNA, 23 nt, Human
uuuuucuuaaauaauaaagauca

SEQ ID NO: 1693746 - RNA, 14 nt, Human
uuuuucuguuauau

SEQ ID NO: 1693747 - RNA, 14 nt, Human
cugcacggugaaug

SEQ ID NO: 1693748 - RNA, 15 nt, Human
cugcacggugaaugg

SEQ ID NO: 1693749 - RNA, 17 nt, Human
cugcacggugaauggcu

SEQ ID NO: 1693750 - RNA, 20 nt, Human
cugcacggugaauggcuuug

SEQ ID NO: 1693751 - RNA, 19 nt, Human
cugaugccaaguuguuuga

SEQ ID NO: 1693752 - RNA, 11 nt, Human
cuuaaaguuga

SEQ ID NO: 1693753 - RNA, 13 nt, Human
cuuaaaguugaau

SEQ ID NO: 1693754 - RNA, 14 nt, Human
cuuuaauuuuggaa

SEQ ID NO: 1693755 - RNA, 15 nt, Human
cuuuaauuuuggaau

SEQ ID NO: 1693756 - RNA, 13 nt, Human
cuuuaauuuugga

SEQ ID NO: 1693757 - RNA, 16 nt, Human
cuuuaauuuuggaauu

SEQ ID NO: 1693758 - RNA, 18 nt, Human
cuuuaauaucaucaguau

SEQ ID NO: 1693759 - RNA, 19 nt, Human
cuuuaauaucaucaguauu

SEQ ID NO: 1693760 - RNA, 21 nt, Human
cuuuaauaucaucaguauuga

SEQ ID NO: 1693761 - RNA, 13 nt, Human
cuuucagauacug

SEQ ID NO: 1693762 - RNA, 20 nt, Human
cuuucagauaacuguuauuu

SEQ ID NO: 1693763 - RNA, 18 nt, Human
gaucugccuaaggacuuc

SEQ ID NO: 1693764 - RNA, 20 nt, Human
gaucugccuaaggacuucuu

SEQ ID NO: 1693765 - RNA, 21 nt, Human
gaucugccuaaggacuucuuu

SEQ ID NO: 1693766 - RNA, 23 nt, Human
gaucugccuaaggacuucuuuaa

SEQ ID NO: 1693767 - RNA, 22 nt, Human
gauuauucacugauuugacaua

SEQ ID NO: 1693768 - RNA, 23 nt, Human
gauucuucagcaaaaauauuuua

SEQ ID NO: 1693769 - RNA, 18 nt, Human
gauuuuuuuguuguuugu

SEQ ID NO: 1693770 - RNA, 21 nt, Human
gauuuuuuuguuguuuguuua

SEQ ID NO: 1693771 - RNA, 21 nt, Human
gagugaguuggguguauugug

SEQ ID NO: 1693772 - RNA, 17 nt, Human
gacuguggugacuuugg

SEQ ID NO: 1693773 - RNA, 13 nt, Human
gacuguggugacu

SEQ ID NO: 1693774 - RNA, 14 nt, Human
gacuguggugacuu

SEQ ID NO: 1693775 - RNA, 21 nt, Human
ggcugaacacuccaauuaagg

SEQ ID NO: 1693776 - RNA, 15 nt, Human
gggauucuuaaaguu

SEQ ID NO: 1693777 - RNA, 20 nt, Human
gggauucuuaaaguugaauu

SEQ ID NO: 1693778 - RNA, 23 nt, Human
aaaggaagguucuggugugaacu

SEQ ID NO: 1693779 - RNA, 17 nt, Human
aaacuuguguaaauaca

SEQ ID NO: 1693780 - RNA, 15 nt, Human
aaacuuguguaaaua

SEQ ID NO: 1693781 - RNA, 13 nt, Human
aaacuuuucugau

SEQ ID NO: 1693782 - RNA, 14 nt, Human
aaacuuuucugaua

SEQ ID NO: 1693783 - RNA, 12 nt, Human
aaacuuuucuga

SEQ ID NO: 1693784 - RNA, 16 nt, Human
aaacuuuucugauaga

SEQ ID NO: 1693785 - RNA, 17 nt, Human
aaacuuuucugauagag

SEQ ID NO: 1693786 - RNA, 18 nt, Human
aaacauugguucuuguau

SEQ ID NO: 1693787 - RNA, 20 nt, Human
aaacauugguucuuguauua

SEQ ID NO: 1693788 - RNA, 21 nt, Human
aaacauugguucuuguauuaa

SEQ ID NO: 1693789 - RNA, 17 nt, Human
aaacauugguucuugua

SEQ ID NO: 1693790 - RNA, 16 nt, Human
aaacuggguuccugca

SEQ ID NO: 1693791 - RNA, 15 nt, Human
aaacuggguuccugc

SEQ ID NO: 1693792 - RNA, 16 nt, Human
aaacggaugauuucua

SEQ ID NO: 1693793 - RNA, 18 nt, Human
aaacggaugauuucuaug

SEQ ID NO: 1693794 - RNA, 22 nt, Human
aaaauggacuguggugacuuug

SEQ ID NO: 1693795 - RNA, 21 nt, Human
aaaauuggggauucuuaaagu

SEQ ID NO: 1693796 - RNA, 23 nt, Human
aaaauuggggauucuuaaaguug

SEQ ID NO: 1693797 - RNA, 13 nt, Human
ggcaaaugacuuu

SEQ ID NO: 1693798 - RNA, 20 nt, Human
gcugaacacuccaauuaagg

SEQ ID NO: 1693799 - RNA, 21 nt, Human
gcugaacacuccaauuaagga

SEQ ID NO: 1693800 - RNA, 23 nt, Human
gcugaacacuccaauuaaggauu

SEQ ID NO: 1693801 - RNA, 19 nt, Human
cucagaaggcaaaugacuu

SEQ ID NO: 1693802 - RNA, 19 nt, Human
cgcugauaagcguucaugg

SEQ ID NO: 1693803 - RNA, 16 nt, Human
ccuaaggacuucuuua

SEQ ID NO: 1693804 - RNA, 17 nt, Human
ccuaaggacuucuuuaa

SEQ ID NO: 1693805 - RNA, 18 nt, Human
ccuaaggacuucuuuaau

SEQ ID NO: 1693806 - RNA, 23 nt, Human
ccuaaggacuucuuuaauuuugg

SEQ ID NO: 1693807 - RNA, 11 nt, Human
ccuaaggacuu

SEQ ID NO: 1693808 - RNA, 12 nt, Human
ccuaaggacuuc

SEQ ID NO: 1693809 - RNA, 19 nt, Human
ccaugggauaaaugccauc

SEQ ID NO: 1693810 - RNA, 14 nt, Human
ccaguauuguacaa

SEQ ID NO: 1693811 - RNA, 13 nt, Human
ccagacgaugucu

SEQ ID NO: 1693812 - RNA, 20 nt, Human
ccagacgaugucuucauacc

SEQ ID NO: 1693813 - RNA, 18 nt, Human
cagauacuggauuguacu

SEQ ID NO: 1693814 - RNA, 14 nt, Human
cagauacuggauug

SEQ ID NO: 1693815 - RNA, 15 nt, Human
cauuauucaaaguug

SEQ ID NO: 1693816 - RNA, 16 nt, Human
cauuauucaaaguugc

SEQ ID NO: 1693817 - RNA, 14 nt, Human
cauuauucaaaguu

SEQ ID NO: 1693818 - RNA, 14 nt, Human
cauugguucuugua

SEQ ID NO: 1693819 - RNA, 15 nt, Human
cauugguucuuguau

SEQ ID NO: 1693820 - RNA, 17 nt, Human
cauugguguuguacuca

SEQ ID NO: 1693821 - RNA, 16 nt, Human
cauaggugaucucauu

SEQ ID NO: 1693822 - RNA, 15 nt, Human
auuauguaaauccca

SEQ ID NO: 1693823 - RNA, 17 nt, Human
auuauguaaaucccauu

SEQ ID NO: 1693824 - RNA, 22 nt, Human
auuauguaaaucccauuauuca

SEQ ID NO: 1693825 - RNA, 23 nt, Human
auuauguaaaucccauuauucaa

SEQ ID NO: 1693826 - RNA, 13 nt, Human
auuauguaaaucc

SEQ ID NO: 1693827 - RNA, 14 nt, Human
auuauguaaauccc

SEQ ID NO: 1693828 - RNA, 20 nt, Human
auuuuuuuucuguuauauaa

SEQ ID NO: 1693829 - RNA, 18 nt, Human
auuuuuuuucuguuauau

SEQ ID NO: 1693830 - RNA, 19 nt, Human
auuuuuuuucuguuauaua

SEQ ID NO: 1693831 - RNA, 15 nt, Human
auuuuuuuucuguua

SEQ ID NO: 1693832 - RNA, 17 nt, Human
auuuuuuuucuguuaua

SEQ ID NO: 1693833 - RNA, 15 nt, Human
auuuaauaauuauau

SEQ ID NO: 1693834 - RNA, 18 nt, Human
auuuaauaauuauaugcu

SEQ ID NO: 1693835 - RNA, 13 nt, Human
auuuaauaauuau

SEQ ID NO: 1693836 - RNA, 21 nt, Human
cacuccaauuaaggauuuuau

SEQ ID NO: 1693837 - RNA, 22 nt, Human
cacuccaauuaaggauuuuaug

SEQ ID NO: 1693838 - RNA, 15 nt, Human
auguuuauuacagua

SEQ ID NO: 1693839 - RNA, 16 nt, Human
auguuuauuacaguau

SEQ ID NO: 1693840 - RNA, 18 nt, Human
auguuuauuacaguauaa

SEQ ID NO: 1693841 - RNA, 19 nt, Human
auguuuauuacaguauaau

SEQ ID NO: 1693842 - RNA, 22 nt, Human
auguuuauuacaguauaauuaa

SEQ ID NO: 1693843 - RNA, 23 nt, Human
auguuuauuacaguauaauuaac

SEQ ID NO: 1693844 - RNA, 19 nt, Human
uuuucugauccaguuuugu

SEQ ID NO: 1693845 - RNA, 14 nt, Human
uuuucuuaaauaau

SEQ ID NO: 1693846 - RNA, 23 nt, Human
uuuucuuaaauaauaaagaucau

SEQ ID NO: 1693847 - RNA, 12 nt, Human
uuuucuguuaua

SEQ ID NO: 1693848 - RNA, 12 nt, Human
auguuuauuaca

SEQ ID NO: 1693849 - RNA, 16 nt, Human
uuugagaaauuaagua

SEQ ID NO: 1693850 - RNA, 12 nt, Human
uuugaauuuugu

SEQ ID NO: 1693851 - RNA, 14 nt, Human
uuugaauuuugugu

SEQ ID NO: 1693852 - RNA, 20 nt, Human
auuauaucugaggaauucug

SEQ ID NO: 1693853 - RNA, 21 nt, Human
auuauaucugaggaauucugu

SEQ ID NO: 1693854 - RNA, 22 nt, Human
auuauaucugaggaauucugua

SEQ ID NO: 1693855 - RNA, 16 nt, Human
auuauaugcuauuucu

SEQ ID NO: 1693856 - RNA, 18 nt, Human
auuauaucugaggaauuc

SEQ ID NO: 1693857 - RNA, 19 nt, Human
auuauaucugaggaauucu

SEQ ID NO: 1693858 - RNA, 19 nt, Human
auuauucaaaguugccuaa

SEQ ID NO: 1693859 - RNA, 22 nt, Human
auuauucaaaguugccuaaauc

SEQ ID NO: 1693860 - RNA, 18 nt, Human
auuauucaaaguugccua

SEQ ID NO: 1693861 - RNA, 24 nt, Human
auuauucaaaguugccuaaaucca

SEQ ID NO: 1693862 - RNA, 19 nt, Human
auuauucacugauuugaca

SEQ ID NO: 1693863 - RNA, 18 nt, Human
auuauaugcuauuucuau

SEQ ID NO: 1693864 - RNA, 17 nt, Human
auuauaugcuauuucua

SEQ ID NO: 1693865 - RNA, 19 nt, Human
auuauaugcuauuucuaua

SEQ ID NO: 1693866 - RNA, 12 nt, Human
auucacugauuu

SEQ ID NO: 1693867 - RNA, 17 nt, Human
auucacugauuugacau

SEQ ID NO: 1693868 - RNA, 20 nt, Human
uuuuuauauuuacuaaaaug

SEQ ID NO: 1693869 - RNA, 15 nt, Human
uuuuggaauuuuccu

SEQ ID NO: 1693870 - RNA, 15 nt, Human
auuaaggauuuuaug

SEQ ID NO: 1693871 - RNA, 17 nt, Human
auuaaggauuuuaugcu

SEQ ID NO: 1693872 - RNA, 20 nt, Human
auuaaggauuuuaugcuuua

SEQ ID NO: 1693873 - RNA, 17 nt, Human
auuaaguaucugacauc

SEQ ID NO: 1693874 - RNA, 23 nt, Human
uuuuuggcauaacauaaaucugu

SEQ ID NO: 1693875 - RNA, 24 nt, Human
uuuuuggcauaacauaaaucugug

SEQ ID NO: 1693876 - RNA, 14 nt, Human
auuggggauucuua

SEQ ID NO: 1693877 - RNA, 15 nt, Human
auuggggauucuuaa

SEQ ID NO: 1693878 - RNA, 16 nt, Human
auuggggauucuuaaa

SEQ ID NO: 1693879 - RNA, 20 nt, Human
auuggggauucuuaaaguug

SEQ ID NO: 1693880 - RNA, 21 nt, Human
auuggggauucuuaaaguuga

SEQ ID NO: 1693881 - RNA, 22 nt, Human
auuggggauucuuaaaguugaa

SEQ ID NO: 1693882 - RNA, 16 nt, Human
auuuacuaaaauggac

SEQ ID NO: 1693883 - RNA, 19 nt, Human
auuuacuaaaauggacugu

SEQ ID NO: 1693884 - RNA, 20 nt, Human
auuuacuaaaauggacugug

SEQ ID NO: 1693885 - RNA, 15 nt, Human
auuguacuuugugcu

SEQ ID NO: 1693886 - RNA, 14 nt, Human
auuuauuggcuuuu

SEQ ID NO: 1693887 - RNA, 18 nt, Human
auuuauuggcuuuucuga

SEQ ID NO: 1693888 - RNA, 20 nt, Human
auuuauuggcuuuucugauc

SEQ ID NO: 1693889 - RNA, 23 nt, Human
auuuauuggcuuuucugauccag

SEQ ID NO: 1693890 - RNA, 13 nt, Human
auuugaauuuugu

SEQ ID NO: 1693891 - RNA, 14 nt, Human
augccaucaauaaa

SEQ ID NO: 1693892 - RNA, 15 nt, Human
uuuagucuugucuca

SEQ ID NO: 1693893 - RNA, 17 nt, Human
uuuagucuugucucaga

SEQ ID NO: 1693894 - RNA, 23 nt, Human
uuuagucuugucucagauuuuau

SEQ ID NO: 1693895 - RNA, 16 nt, Human
aucugaagucagaucu

SEQ ID NO: 1693896 - RNA, 17 nt, Human
aucugaagucagaucug

SEQ ID NO: 1693897 - RNA, 18 nt, Human
aucugaagucagaucugc

SEQ ID NO: 1693898 - RNA, 23 nt, Human
aucugaagucagaucugccuaag

SEQ ID NO: 1693899 - RNA, 22 nt, Human
augaaauacuguuugagguuuu

SEQ ID NO: 1693900 - RNA, 16 nt, Human
uucauaccuacaugua

SEQ ID NO: 1693901 - RNA, 19 nt, Human
uucauaccuacauguauuu

SEQ ID NO: 1693902 - RNA, 19 nt, Human
auaucugaggaauucugua

SEQ ID NO: 1693903 - RNA, 20 nt, Human
auaucugaggaauucuguau

SEQ ID NO: 1693904 - RNA, 21 nt, Human
auaucugaggaauucuguaua

SEQ ID NO: 1693905 - RNA, 22 nt, Human
auaucugaggaauucuguauag

SEQ ID NO: 1693906 - RNA, 23 nt, Human
auaucugaggaauucuguauaga

SEQ ID NO: 1693907 - RNA, 15 nt, Human
auaucugaggaauuc

SEQ ID NO: 1693908 - RNA, 16 nt, Human
auaucugaggaauucu

SEQ ID NO: 1693909 - RNA, 17 nt, Human
auaucugaggaauucug

SEQ ID NO: 1693910 - RNA, 18 nt, Human
auaucugaggaauucugu

SEQ ID NO: 1693911 - RNA, 21 nt, Human
uucagcaaaaauauuuuauga

SEQ ID NO: 1693912 - RNA, 17 nt, Human
auauaaaugguuaaaag

SEQ ID NO: 1693913 - RNA, 18 nt, Human
auagcuagacuggugacu

SEQ ID NO: 1693914 - RNA, 19 nt, Human
auagcuagacuggugacug

SEQ ID NO: 1693915 - RNA, 23 nt, Human
auagcuagacuggugacugauuc

SEQ ID NO: 1693916 - RNA, 14 nt, Human
auagcuagacuggu

SEQ ID NO: 1693917 - RNA, 15 nt, Human
auagcuagacuggug

SEQ ID NO: 1693918 - RNA, 16 nt, Human
auagcuagacugguga

SEQ ID NO: 1693919 - RNA, 17 nt, Human
uuauuuauaaucacuuu

SEQ ID NO: 1693920 - RNA, 12 nt, Human
uucuggugugaa

SEQ ID NO: 1693921 - RNA, 15 nt, Human
aucaucaguauugaa

SEQ ID NO: 1693922 - RNA, 19 nt, Human
aucaucaguauugaagcau

SEQ ID NO: 1693923 - RNA, 17 nt, Human
aucaucaguauugaagc

SEQ ID NO: 1693924 - RNA, 15 nt, Human
aucaguauugaagca

SEQ ID NO: 1693925 - RNA, 22 nt, Human
aucaguauugaagcauuuuaua

SEQ ID NO: 1693926 - RNA, 17 nt, Human
auauuuuaugauccagc

SEQ ID NO: 1693927 - RNA, 22 nt, Human
auauuuuaugauccagcagauu

SEQ ID NO: 1693928 - RNA, 12 nt, Human
auauuuuaugau

SEQ ID NO: 1693929 - RNA, 13 nt, Human
auauuuuaugauc

SEQ ID NO: 1693930 - RNA, 13 nt, Human
auauuuucauucu

SEQ ID NO: 1693931 - RNA, 14 nt, Human
auauuaaagccaug

SEQ ID NO: 1693932 - RNA, 15 nt, Human
auauuaaagccaugu

SEQ ID NO: 1693933 - RNA, 18 nt, Human
auauuaaagccauguuua

SEQ ID NO: 1693934 - RNA, 23 nt, Human
auauuaaagccauguuuauuaca

SEQ ID NO: 1693935 - RNA, 18 nt, Human
ugugcugggguuaucuga

SEQ ID NO: 1693936 - RNA, 13 nt, Human
agugaaacugcuu

SEQ ID NO: 1693937 - RNA, 21 nt, Human
agugaaacugcuuguuuccua

SEQ ID NO: 1693938 - RNA, 24 nt, Human
agugaaacugcuuguuuccuagca

SEQ ID NO: 1693939 - RNA, 14 nt, Human
ugugaacuugaaau

SEQ ID NO: 1693940 - RNA, 15 nt, Human
ugugaacuugaaauu

SEQ ID NO: 1693941 - RNA, 16 nt, Human
ugugaacuugaaauuu

SEQ ID NO: 1693942 - RNA, 12 nt, Human
ugugaacuugaa

SEQ ID NO: 1693943 - RNA, 14 nt, Human
uguuauauaaaugg

SEQ ID NO: 1693944 - RNA, 13 nt, Human
uguuauauaaaug

SEQ ID NO: 1693945 - RNA, 19 nt, Human
agugaguuggguguauugu

SEQ ID NO: 1693946 - RNA, 20 nt, Human
agugaguuggguguauugug

SEQ ID NO: 1693947 - RNA, 14 nt, Human
uuaacaacagcugg

SEQ ID NO: 1693948 - RNA, 16 nt, Human
uuaaauaauaaagauc

SEQ ID NO: 1693949 - RNA, 22 nt, Human
uuaaaggaagguucugguguga

SEQ ID NO: 1693950 - RNA, 20 nt, Human
uuaaaggaagguucuggugu

SEQ ID NO: 1693951 - RNA, 15 nt, Human
aguuuaauauuaaag

SEQ ID NO: 1693952 - RNA, 16 nt, Human
aguuuaauauuaaagc

SEQ ID NO: 1693953 - RNA, 18 nt, Human
aguuuaauauuaaagcca

SEQ ID NO: 1693954 - RNA, 19 nt, Human
aguuuaauauuaaagccau

SEQ ID NO: 1693955 - RNA, 20 nt, Human
aguuuaauauuaaagccaug

SEQ ID NO: 1693956 - RNA, 17 nt, Human
aguuggguguauugugc

SEQ ID NO: 1693957 - RNA, 20 nt, Human
aguuggguguauugugcgcu

SEQ ID NO: 1693958 - RNA, 16 nt, Human
aguuggguguauugug

SEQ ID NO: 1693959 - RNA, 22 nt, Human
aguugccuaaauccauuuggaa

SEQ ID NO: 1693960 - RNA, 23 nt, Human
aguugccuaaauccauuuggaaa

SEQ ID NO: 1693961 - RNA, 19 nt, Human
uguuuggaccaaaaaccag

SEQ ID NO: 1693962 - RNA, 18 nt, Human
uguuuuaugacuucauua

SEQ ID NO: 1693963 - RNA, 23 nt, Human
uguuuagucuugucucagauuuu

SEQ ID NO: 1693964 - RNA, 22 nt, Human
uguuuagucuugucucagauuu

SEQ ID NO: 1693965 - RNA, 18 nt, Human
uguuuauuacaguauaau

SEQ ID NO: 1693966 - RNA, 14 nt, Human
uguuuauuacagua

SEQ ID NO: 1693967 - RNA, 22 nt, Human
uguuugagguuuuuaagccuua

SEQ ID NO: 1693968 - RNA, 14 nt, Human
uguuugagaaauua

SEQ ID NO: 1693969 - RNA, 20 nt, Human
auaaaucugugaacuugaaa

SEQ ID NO: 1693970 - RNA, 21 nt, Human
auaaaucugugaacuugaaau

SEQ ID NO: 1693971 - RNA, 22 nt, Human
auaaaucugugaacuugaaauu

SEQ ID NO: 1693972 - RNA, 16 nt, Human
auaaauagcuagacug

SEQ ID NO: 1693973 - RNA, 18 nt, Human
auaaauagcuagacuggu

SEQ ID NO: 1693974 - RNA, 21 nt, Human
auaaauagcuagacuggugac

SEQ ID NO: 1693975 - RNA, 18 nt, Human
uuacaguauaauuaacau

SEQ ID NO: 1693976 - RNA, 19 nt, Human
uuacaguauaauuaacaug

SEQ ID NO: 1693977 - RNA, 20 nt, Human
uuacaguauaauuaacaugu

SEQ ID NO: 1693978 - RNA, 16 nt, Human
uuacaguauaauuaac

SEQ ID NO: 1693979 - RNA, 17 nt, Human
uuacaguauaauuaaca

SEQ ID NO: 1693980 - RNA, 13 nt, Human
uuacaguauaauu

SEQ ID NO: 1693981 - RNA, 22 nt, Human
auaaaugguuaaaagagguuuu

SEQ ID NO: 1693982 - RNA, 16 nt, Human
auaaaugguuaaaaga

SEQ ID NO: 1693983 - RNA, 21 nt, Human
uuaagucuguuuuaugacuuc

SEQ ID NO: 1693984 - RNA, 17 nt, Human
uuaagucuguuuuauga

SEQ ID NO: 1693985 - RNA, 18 nt, Human
uuaagucuguuuuaugac

SEQ ID NO: 1693986 - RNA, 20 nt, Human
uuaagucuguuuuaugacuu

SEQ ID NO: 1693987 - RNA, 13 nt, Human
agguuuuucuuaa

SEQ ID NO: 1693988 - RNA, 14 nt, Human
aguauugaagcauu

SEQ ID NO: 1693989 - RNA, 15 nt, Human
aguauugaagcauuu

SEQ ID NO: 1693990 - RNA, 18 nt, Human
aguauugaagcauuuuau

SEQ ID NO: 1693991 - RNA, 20 nt, Human
aguauugaagcauuuuauaa

SEQ ID NO: 1693992 - RNA, 21 nt, Human
aguauugaagcauuuuauaaa

SEQ ID NO: 1693993 - RNA, 16 nt, Human
uggugcccugcuuuca

SEQ ID NO: 1693994 - RNA, 19 nt, Human
uggugcccugcuuucagau

SEQ ID NO: 1693995 - RNA, 20 nt, Human
uggugcccugcuuucagaua

SEQ ID NO: 1693996 - RNA, 14 nt, Human
uggugcccugcuuu

SEQ ID NO: 1693997 - RNA, 14 nt, Human
uggugugaacuaaa

SEQ ID NO: 1693998 - RNA, 22 nt, Human
uggugugaacuaaacuuucaca

SEQ ID NO: 1693999 - RNA, 23 nt, Human
uggugugaacuaaacuuucacac

SEQ ID NO: 1694000 - RNA, 17 nt, Human
agguucuggugugaacu

SEQ ID NO: 1694001 - RNA, 15 nt, Human
uguaaauacaauuuu

SEQ ID NO: 1694002 - RNA, 22 nt, Human
ugcuauuucuauauuuucauuc

SEQ ID NO: 1694003 - RNA, 14 nt, Human
ugccaucaauaaaa

SEQ ID NO: 1694004 - RNA, 22 nt, Human
ugccaucaauaaaaaauuauga

SEQ ID NO: 1694005 - RNA, 13 nt, Human
aggaauucuguau

SEQ ID NO: 1694006 - RNA, 14 nt, Human
aggaauucuguaua

SEQ ID NO: 1694007 - RNA, 15 nt, Human
aggaauucuguauag

SEQ ID NO: 1694008 - RNA, 14 nt, Human
aggacuucuuuaau

SEQ ID NO: 1694009 - RNA, 16 nt, Human
aggacuucuuuaauuu

SEQ ID NO: 1694010 - RNA, 21 nt, Human
aggacuucuuuaauuuuggaa

SEQ ID NO: 1694011 - RNA, 22 nt, Human
aggacuucuuuaauuuuggaau

SEQ ID NO: 1694012 - RNA, 23 nt, Human
aggacuucuuuaauuuuggaauu

SEQ ID NO: 1694013 - RNA, 23 nt, Human
ugauuugacauagucuggcugua

SEQ ID NO: 1694014 - RNA, 20 nt, Human
ugauccagcagauuauucac

SEQ ID NO: 1694015 - RNA, 19 nt, Human
ugauccagcagauuauuca

SEQ ID NO: 1694016 - RNA, 13 nt, Human
agcauuuuauaaa

SEQ ID NO: 1694017 - RNA, 14 nt, Human
agcauuuuauaaau

SEQ ID NO: 1694018 - RNA, 15 nt, Human
agcauuuuauaaauc

SEQ ID NO: 1694019 - RNA, 20 nt, Human
agcauuuuauaaaucgcuuu

SEQ ID NO: 1694020 - RNA, 18 nt, Human
agcauauauuuuuauauu

SEQ ID NO: 1694021 - RNA, 20 nt, Human
agcauauauuuuuauauuua

SEQ ID NO: 1694022 - RNA, 22 nt, Human
agcauauauuuuuauauuuacu

SEQ ID NO: 1694023 - RNA, 15 nt, Human
agcauauauuuuuau

SEQ ID NO: 1694024 - RNA, 22 nt, Human
ugaauuuauuggcuuuucugau

SEQ ID NO: 1694025 - RNA, 23 nt, Human
ugaauuuauuggcuuuucugauc

SEQ ID NO: 1694026 - RNA, 17 nt, Human
ugaauuuauuggcuuuu

SEQ ID NO: 1694027 - RNA, 21 nt, Human
ugaauuuauuggcuuuucuga

SEQ ID NO: 1694028 - RNA, 17 nt, Human
ugaaauuugaauuuugu

SEQ ID NO: 1694029 - RNA, 14 nt, Human
ugaaauuugaauuu

SEQ ID NO: 1694030 - RNA, 15 nt, Human
ugaaauuugaauuuu

SEQ ID NO: 1694031 - RNA, 16 nt, Human
ugaaauuugaauuuug

SEQ ID NO: 1694032 - RNA, 21 nt, Human
ugaaauuguaauuauaucuga

SEQ ID NO: 1694033 - RNA, 23 nt, Human
agagauuuuuuuguuguuuguuu

SEQ ID NO: 1694034 - RNA, 22 nt, Human
agagauuuuuuuguuguuuguu

SEQ ID NO: 1694035 - RNA, 12 nt, Human
agacuggugacu

SEQ ID NO: 1694036 - RNA, 13 nt, Human
agacuggugacug

SEQ ID NO: 1694037 - RNA, 14 nt, Human
agacuggugacuga

SEQ ID NO: 1694038 - RNA, 16 nt, Human
agacuggugacugauu

SEQ ID NO: 1694039 - RNA, 17 nt, Human
agacuggugacugauuc

SEQ ID NO: 1694040 - RNA, 19 nt, Human
agacuggugacugauucuu

SEQ ID NO: 1694041 - RNA, 14 nt, Human
ucuguacuuuuugg

SEQ ID NO: 1694042 - RNA, 17 nt, Human
ucuguacuuuuuggcau

SEQ ID NO: 1694043 - RNA, 13 nt, Human
ucuguacuuuuug

SEQ ID NO: 1694044 - RNA, 22 nt, Human
ucugugaacuugaaauuugaau

SEQ ID NO: 1694045 - RNA, 19 nt, Human
ucugugaacuugaaauuug

SEQ ID NO: 1694046 - RNA, 23 nt, Human
acuuguuagaucuaguucacucu

SEQ ID NO: 1694047 - RNA, 14 nt, Human
acuuguuagaucua

SEQ ID NO: 1694048 - RNA, 15 nt, Human
acuuguuagaucuag

SEQ ID NO: 1694049 - RNA, 20 nt, Human
acuugaaauuugaauuuugu

SEQ ID NO: 1694050 - RNA, 19 nt, Human
acuugaaauuugaauuuug

SEQ ID NO: 1694051 - RNA, 15 nt, Human
ucugaagucagaucu

SEQ ID NO: 1694052 - RNA, 19 nt, Human
ucugaagucagaucugccu

SEQ ID NO: 1694053 - RNA, 13 nt, Human
acugcuuguuucc

SEQ ID NO: 1694054 - RNA, 16 nt, Human
acugcuuguuuccuag

SEQ ID NO: 1694055 - RNA, 18 nt, Human
acuguggugacuuuggau

SEQ ID NO: 1694056 - RNA, 20 nt, Human
acuguggugacuuuggauaa

SEQ ID NO: 1694057 - RNA, 21 nt, Human
acuguggugacuuuggauaau

SEQ ID NO: 1694058 - RNA, 12 nt, Human
acuguggugacu

SEQ ID NO: 1694059 - RNA, 14 nt, Human
acuguggugacuuu

SEQ ID NO: 1694060 - RNA, 15 nt, Human
acuguggugacuuug

SEQ ID NO: 1694061 - RNA, 13 nt, Human
acuguuauuuaua

SEQ ID NO: 1694062 - RNA, 14 nt, Human
acuguuauuuauaa

SEQ ID NO: 1694063 - RNA, 22 nt, Human
ucuaccagccucccuauuuuuu

SEQ ID NO: 1694064 - RNA, 18 nt, Human
uccauuuaauaauuauau

SEQ ID NO: 1694065 - RNA, 13 nt, Human
accuacauguauu

SEQ ID NO: 1694066 - RNA, 14 nt, Human
accuacauguauuu

SEQ ID NO: 1694067 - RNA, 15 nt, Human
accuacauguauuug

SEQ ID NO: 1694068 - RNA, 16 nt, Human
uauuucuauauuuuca

SEQ ID NO: 1694069 - RNA, 17 nt, Human
uauuucuauauuuucau

SEQ ID NO: 1694070 - RNA, 18 nt, Human
uauuucuauauuuucauu

SEQ ID NO: 1694071 - RNA, 18 nt, Human
acaguuuugguugcuuua

SEQ ID NO: 1694072 - RNA, 19 nt, Human
acaguuuugguugcuuuaa

SEQ ID NO: 1694073 - RNA, 24 nt, Human
acaguuuugguugcuuuaauauca

SEQ ID NO: 1694074 - RNA, 14 nt, Human
acauagucuggcug

SEQ ID NO: 1694075 - RNA, 15 nt, Human
acauagucuggcugu

SEQ ID NO: 1694076 - RNA, 20 nt, Human
acauagucuggcuguaccca

SEQ ID NO: 1694077 - RNA, 22 nt, Human
ucaaaguugccuaaauccauuu

SEQ ID NO: 1694078 - RNA, 18 nt, Human
ucaaaguugccuaaaucc

SEQ ID NO: 1694079 - RNA, 19 nt, Human
ucaaaguugccuaaaucca

SEQ ID NO: 1694080 - RNA, 21 nt, Human
ucaaaguugccuaaauccauu

SEQ ID NO: 1694081 - RNA, 16 nt, Human
uauuuuuauauuuacu

SEQ ID NO: 1694082 - RNA, 18 nt, Human
accccagacgaugucuuc

SEQ ID NO: 1694083 - RNA, 18 nt, Human
ucagaaggcaaaugacuu

SEQ ID NO: 1694084 - RNA, 19 nt, Human
ucagaaggcaaaugacuuu

SEQ ID NO: 1694085 - RNA, 22 nt, Human
ucagaaggcaaaugacuuugga

SEQ ID NO: 1694086 - RNA, 19 nt, Human
accaugggauaaaugccau

SEQ ID NO: 1694087 - RNA, 13 nt, Human
ucaauuuuaacaa

SEQ ID NO: 1694088 - RNA, 21 nt, Human
acaccccagacgaugucuuca

SEQ ID NO: 1694089 - RNA, 17 nt, Human
uagucuugucucagauu

SEQ ID NO: 1694090 - RNA, 22 nt, Human
uagucuugucucagauuuuauu

SEQ ID NO: 1694091 - RNA, 21 nt, Human
acacuccaauuaaggauuuua

SEQ ID NO: 1694092 - RNA, 18 nt, Human
acacuccaauuaaggauu

SEQ ID NO: 1694093 - RNA, 17 nt, Human
acacuccaauuaaggau

SEQ ID NO: 1694094 - RNA, 19 nt, Human
uacuuuuuggcauaacaua

SEQ ID NO: 1694095 - RNA, 20 nt, Human
uacuuuuuggcauaacauaa

SEQ ID NO: 1694096 - RNA, 14 nt, Human
uacuuuuuggcaua

SEQ ID NO: 1694097 - RNA, 16 nt, Human
uacuuugugcuggggu

SEQ ID NO: 1694098 - RNA, 22 nt, Human
uacuuugugcugggguuaucug

SEQ ID NO: 1694099 - RNA, 16 nt, Human
aauuuuguuucuguac

SEQ ID NO: 1694100 - RNA, 20 nt, Human
acaaaguauuaagcauauau

SEQ ID NO: 1694101 - RNA, 14 nt, Human
uagaucuaguucac

SEQ ID NO: 1694102 - RNA, 15 nt, Human
acaacagcuggugcc

SEQ ID NO: 1694103 - RNA, 15 nt, Human
uagcuagacugguga

SEQ ID NO: 1694104 - RNA, 18 nt, Human
uagcuagacuggugacug

SEQ ID NO: 1694105 - RNA, 15 nt, Human
uaaaucugugaacuu

SEQ ID NO: 1694106 - RNA, 16 nt, Human
uaaaucugugaacuug

SEQ ID NO: 1694107 - RNA, 17 nt, Human
uaaaucugugaacuuga

SEQ ID NO: 1694108 - RNA, 18 nt, Human
uaaaucugugaacuugaa

SEQ ID NO: 1694109 - RNA, 19 nt, Human
uaaaucugugaacuugaaa

SEQ ID NO: 1694110 - RNA, 21 nt, Human
uaaaucugugaacuugaaauu

SEQ ID NO: 1694111 - RNA, 22 nt, Human
uaaaucugugaacuugaaauuu

SEQ ID NO: 1694112 - RNA, 18 nt, Human
uaaauagcuagacuggug

SEQ ID NO: 1694113 - RNA, 17 nt, Human
uaaauaaauaaauagcu

SEQ ID NO: 1694114 - RNA, 14 nt, Human
uaaauaaauagcua

SEQ ID NO: 1694115 - RNA, 13 nt, Human
uaagaaugaaaua

SEQ ID NO: 1694116 - RNA, 15 nt, Human
uaagaaugaaauacu

SEQ ID NO: 1694117 - RNA, 21 nt, Human
uaagaaugaaauacuguuuga

SEQ ID NO: 1694118 - RNA, 17 nt, Human
aauauuuuaugauccag

SEQ ID NO: 1694119 - RNA, 18 nt, Human
aauauuuuaugauccagc

SEQ ID NO: 1694120 - RNA, 16 nt, Human
uaacauaaaucuguga

SEQ ID NO: 1694121 - RNA, 17 nt, Human
uaacauaaaucugugaa

SEQ ID NO: 1694122 - RNA, 18 nt, Human
uaacauaaaucugugaac

SEQ ID NO: 1694123 - RNA, 20 nt, Human
uaacauaaaucugugaacuu

SEQ ID NO: 1694124 - RNA, 15 nt, Human
uaacauaaaucugug

SEQ ID NO: 1694125 - RNA, 18 nt, Human
aauaucaucaguauugaa

SEQ ID NO: 1694126 - RNA, 13 nt, Human
aaucugugaacuu

SEQ ID NO: 1694127 - RNA, 15 nt, Human
aaucugugaacuuga

SEQ ID NO: 1694128 - RNA, 17 nt, Human
aaucugugaacuugaaa

SEQ ID NO: 1694129 - RNA, 18 nt, Human
aaucugugaacuugaaau

SEQ ID NO: 1694130 - RNA, 19 nt, Human
aaucugugaacuugaaauu

SEQ ID NO: 1694131 - RNA, 15 nt, Human
uaaguaucugacauc

SEQ ID NO: 1694132 - RNA, 16 nt, Human
uaaguaucugacaucu

SEQ ID NO: 1694133 - RNA, 21 nt, Human
uaaucaacugggcugaacacu

SEQ ID NO: 1694134 - RNA, 19 nt, Human
aaucuuuaaaaaaaaaauu

SEQ ID NO: 1694135 - RNA, 20 nt, Human
aaucuuuaaaaaaaaaauug

SEQ ID NO: 1694136 - RNA, 16 nt, Human
uacaguauaauuaaca

SEQ ID NO: 1694137 - RNA, 17 nt, Human
uacaguauaauuaacau

SEQ ID NO: 1694138 - RNA, 14 nt, Human
uacaguauaauuaa

SEQ ID NO: 1694139 - RNA, 14 nt, Human
uacaccauuaugug

SEQ ID NO: 1694140 - RNA, 20 nt, Human
aauggacuguggugacuuug

SEQ ID NO: 1694141 - RNA, 18 nt, Human
uacaguauaauuaacaug

SEQ ID NO: 1694142 - RNA, 19 nt, Human
uacaguauaauuaacaugu

SEQ ID NO: 1694143 - RNA, 23 nt, Human
uacaguauaauuaacauguuaaa

SEQ ID NO: 1694144 - RNA, 19 nt, Human
aagaaugguccgugcuaag

SEQ ID NO: 1694145 - RNA, 22 nt, Human
aagaaugguccgugcuaaggac

SEQ ID NO: 1694146 - RNA, 16 nt, Human
aagagguuuuucuuaa

SEQ ID NO: 1694147 - RNA, 19 nt, Human
guguuguacucaauuuuaa

SEQ ID NO: 1694148 - RNA, 20 nt, Human
guuucuguacuuuuuggcau

SEQ ID NO: 1694149 - RNA, 15 nt, Human
guugccuaaauccau

SEQ ID NO: 1694150 - RNA, 16 nt, Human
guugccuaaauccauu

SEQ ID NO: 1694151 - RNA, 14 nt, Human
guugccuaaaucca

SEQ ID NO: 1694152 - RNA, 17 nt, Human
guugccuaaauccauuu

SEQ ID NO: 1694153 - RNA, 17 nt, Human
guucuuguauuaagaau

SEQ ID NO: 1694154 - RNA, 18 nt, Human
guucuuguauuaagaaug

SEQ ID NO: 1694155 - RNA, 21 nt, Human
guucuuguauuaagaaugaaa

SEQ ID NO: 1694156 - RNA, 15 nt, Human
guucuggugugaacu

SEQ ID NO: 1694157 - RNA, 18 nt, Human
guucuggugugaacuaaa

SEQ ID NO: 1694158 - RNA, 12 nt, Human
guuagaucuagu

SEQ ID NO: 1694159 - RNA, 15 nt, Human
guuaagucuguuuua

SEQ ID NO: 1694160 - RNA, 22 nt, Human
guuaagucuguuuuaugacuuc

SEQ ID NO: 1694161 - RNA, 13 nt, Human
guuaagucuguuu

SEQ ID NO: 1694162 - RNA, 20 nt, Human
guuauuuauaaucacuuuuu

SEQ ID NO: 1694163 - RNA, 14 nt, Human
guuauuuauaauca

SEQ ID NO: 1694164 - RNA, 17 nt, Human
aacacuccaauuaagga

SEQ ID NO: 1694165 - RNA, 13 nt, Human
aacuaaacuuuca

SEQ ID NO: 1694166 - RNA, 15 nt, Human
aacuaaacuuucaca

SEQ ID NO: 1694167 - RNA, 17 nt, Human
aacuaaacuuucacacc

SEQ ID NO: 1694168 - RNA, 15 nt, Human
aaccaugggauaaau

SEQ ID NO: 1694169 - RNA, 17 nt, Human
aaccaugggauaaaugc

SEQ ID NO: 1694170 - RNA, 18 nt, Human
aaccaugggauaaaugcc

SEQ ID NO: 1694171 - RNA, 20 nt, Human
aaccaugggauaaaugccau

SEQ ID NO: 1694172 - RNA, 21 nt, Human
aaccaugggauaaaugccauc

SEQ ID NO: 1694173 - RNA, 15 nt, Human
aaauccauuuggaaa

SEQ ID NO: 1694174 - RNA, 16 nt, Human
aaauccauuuggaaau

SEQ ID NO: 1694175 - RNA, 14 nt, Human
aaauccauuuggaa

SEQ ID NO: 1694176 - RNA, 18 nt, Human
aaauccauuuggaaaucu

SEQ ID NO: 1694177 - RNA, 21 nt, Human
aaauccauuuggaaaucuuua

SEQ ID NO: 1694178 - RNA, 22 nt, Human
aaauccauuuggaaaucuuuaa

SEQ ID NO: 1694179 - RNA, 23 nt, Human
aaauccauuuggaaaucuuuaaa

SEQ ID NO: 1694180 - RNA, 13 nt, Human
aaaucccauuauu

SEQ ID NO: 1694181 - RNA, 15 nt, Human
aaaucccauuauuca

SEQ ID NO: 1694182 - RNA, 16 nt, Human
aaaucccauuauucaa

SEQ ID NO: 1694183 - RNA, 17 nt, Human
aaaucccauuauucaaa

SEQ ID NO: 1694184 - RNA, 19 nt, Human
aaaucccauuauucaaagu

SEQ ID NO: 1694185 - RNA, 20 nt, Human
aaaucccauuauucaaaguu

SEQ ID NO: 1694186 - RNA, 21 nt, Human
aaaucccauuauucaaaguug

SEQ ID NO: 1694187 - RNA, 22 nt, Human
aaaucccauuauucaaaguugc

SEQ ID NO: 1694188 - RNA, 13 nt, Human
aaaucgcuuuuga

SEQ ID NO: 1694189 - RNA, 14 nt, Human
aaaucgcuuuugau

SEQ ID NO: 1694190 - RNA, 15 nt, Human
aaaucgcuuuugaua

SEQ ID NO: 1694191 - RNA, 13 nt, Human
guaugugugaagu

SEQ ID NO: 1694192 - RNA, 17 nt, Human
guaugugugaagugagu

SEQ ID NO: 1694193 - RNA, 18 nt, Human
aaauucccuggccuuuca

SEQ ID NO: 1694194 - RNA, 15 nt, Human
aaauucccuggccuu

SEQ ID NO: 1694195 - RNA, 14 nt, Human
aaaaguuuaauauu

SEQ ID NO: 1694196 - RNA, 16 nt, Human
aaaaguuuaauauuaa

SEQ ID NO: 1694197 - RNA, 18 nt, Human
aaaaguuuaauauuaaag

SEQ ID NO: 1694198 - RNA, 17 nt, Human
aaaagagguuuuucuua

SEQ ID NO: 1694199 - RNA, 21 nt, Human
aaaagagguuuuucuuaaaua

SEQ ID NO: 1694200 - RNA, 22 nt, Human
aaaagagguuuuucuuaaauaa

SEQ ID NO: 1694201 - RNA, 14 nt, Human
aaaccaguauugua

SEQ ID NO: 1694202 - RNA, 16 nt, Human
aaaccaguauuguaca

SEQ ID NO: 1694203 - RNA, 17 nt, Human
aaaccaguauuguacaa

SEQ ID NO: 1694204 - RNA, 18 nt, Human
aaaccaguauuguacaaa

SEQ ID NO: 1694205 - RNA, 22 nt, Human
aaaccaguauuguacaaaguau

SEQ ID NO: 1694206 - RNA, 17 nt, Human
aaagccauguuuauuac

SEQ ID NO: 1694207 - RNA, 18 nt, Human
aaagccauguuuauuaca

SEQ ID NO: 1694208 - RNA, 23 nt, Human
aaagccauguuuauuacaguaua

SEQ ID NO: 1694209 - RNA, 14 nt, Human
aaagccauguuuau

SEQ ID NO: 1694210 - RNA, 16 nt, Human
aaagccauguuuauua

SEQ ID NO: 1694211 - RNA, 15 nt, Human
aaagaucauguaaaa

SEQ ID NO: 1694212 - RNA, 21 nt, Human
aaauggacuguggugacuuug

SEQ ID NO: 1694213 - RNA, 20 nt, Human
aaauggacuguggugacuuu

SEQ ID NO: 1694214 - RNA, 23 nt, Human
aaauggacuguggugacuuugga

SEQ ID NO: 1694215 - RNA, 23 nt, Human
aaggacuuguuagaucuaguuca

SEQ ID NO: 1694216 - RNA, 15 nt, Human
aaggacuuguuagau

SEQ ID NO: 1694217 - RNA, 21 nt, Human
aaggacuuguuagaucuaguu

SEQ ID NO: 1694218 - RNA, 23 nt, Human
aaggacuucuuuaauuuuggaau

SEQ ID NO: 1694219 - RNA, 17 nt, Human
aaguuuaauauuaaagc

SEQ ID NO: 1694220 - RNA, 18 nt, Human
aaguuuaauauuaaagcc

SEQ ID NO: 1694221 - RNA, 15 nt, Human
aaguuuaauauuaaa

SEQ ID NO: 1694222 - RNA, 23 nt, Human
aaguugaauuuauuggcuuuucu

SEQ ID NO: 1694223 - RNA, 24 nt, Human
aaguugaauuuauuggcuuuucug

SEQ ID NO: 1694224 - RNA, 21 nt, Human
aaguuguuugagaaauuaagu

SEQ ID NO: 1694225 - RNA, 22 nt, Human
aaguuguuugagaaauuaagua

SEQ ID NO: 1694226 - RNA, 14 nt, Human
aaguugaauuuauu

SEQ ID NO: 1694227 - RNA, 15 nt, Human
aaguugaauuuauug

SEQ ID NO: 1694228 - RNA, 17 nt, Human
aaguugaauuuauuggc

SEQ ID NO: 1694229 - RNA, 20 nt, Human
aauaaagaucauguaaaagu

SEQ ID NO: 1694230 - RNA, 14 nt, Human
aauaaagaucaugu

SEQ ID NO: 1694231 - RNA, 19 nt, Human
aauaaagaucauguaaaag

SEQ ID NO: 1694232 - RNA, 22 nt, Human
aauauuaaagccauguuuauua

SEQ ID NO: 1694233 - RNA, 16 nt, Human
acauguuaaaccaugg

SEQ ID NO: 1694234 - RNA, 21 nt, Human
acauguuaaaccaugggauaa

SEQ ID NO: 1694235 - RNA, 23 nt, Human
acauguuaaaccaugggauaaau

SEQ ID NO: 1694236 - RNA, 14 nt, Human
acauguuaaaccau

SEQ ID NO: 1694237 - RNA, 17 nt, Human
aauuguaauuauaucug

SEQ ID NO: 1694238 - RNA, 15 nt, Human
aauuguaauuauauc

SEQ ID NO: 1694239 - RNA, 16 nt, Human
aauuguaauuauaucu

SEQ ID NO: 1694240 - RNA, 14 nt, Human
aauuguaauuauau

SEQ ID NO: 1694241 - RNA, 13 nt, Human
aauucuguauaga

SEQ ID NO: 1694242 - RNA, 14 nt, Human
aauucuguauagau

SEQ ID NO: 1694243 - RNA, 20 nt, Human
aauucuguauagauuagaga

SEQ ID NO: 1694244 - RNA, 12 nt, Human
aauucuguauag

SEQ ID NO: 1694245 - RNA, 15 nt, Human
aauuggggauucuua

SEQ ID NO: 1694246 - RNA, 20 nt, Human
aauuauaucugaggaauucu

SEQ ID NO: 1694247 - RNA, 22 nt, Human
aauuauaucugaggaauucugu

SEQ ID NO: 1694248 - RNA, 23 nt, Human
aauuauaucugaggaauucugua

SEQ ID NO: 1694249 - RNA, 19 nt, Human
aauuauaugcuauuucuau

SEQ ID NO: 1694250 - RNA, 20 nt, Human
aauuauaugcuauuucuaua

SEQ ID NO: 1694251 - RNA, 21 nt, Human
aauuauaugcuauuucuauau

SEQ ID NO: 1694252 - RNA, 19 nt, Human
acuucuuuaauuuuggaau

SEQ ID NO: 1694253 - RNA, 20 nt, Human
acuucuuuaauuuuggaauu

SEQ ID NO: 1694254 - RNA, 18 nt, Human
acuucuuuaauuuuggaa

SEQ ID NO: 1694255 - RNA, 18 nt, Human
acuggugacugauucuuc

SEQ ID NO: 1694256 - RNA, 19 nt, Human
acuggugacugauucuuca

SEQ ID NO: 1694257 - RNA, 16 nt, Human
acuggugacugauucu

SEQ ID NO: 1694258 - RNA, 20 nt, Human
acuggugacugauucuucag

SEQ ID NO: 1694259 - RNA, 22 nt, Human
acugauuugacauagucuggcu

SEQ ID NO: 1694260 - RNA, 14 nt, Human
aggaagguucuggu

SEQ ID NO: 1694261 - RNA, 16 nt, Human
aggaagguucuggugu

SEQ ID NO: 1694262 - RNA, 21 nt, Human
aggaagguucuggugugaacu

SEQ ID NO: 1694263 - RNA, 13 nt, Human
agaucugccuaag

SEQ ID NO: 1694264 - RNA, 18 nt, Human
agaucugccuaaggacuu

SEQ ID NO: 1694265 - RNA, 16 nt, Human
agacgaugucuucaua

SEQ ID NO: 1694266 - RNA, 12 nt, Human
auacuguuugag

SEQ ID NO: 1694267 - RNA, 16 nt, Human
auacuguuugagguuu

SEQ ID NO: 1694268 - RNA, 20 nt, Human
auacuguuugagguuuuuaa

SEQ ID NO: 1694269 - RNA, 19 nt, Human
auaaagaucauguaaaagu

SEQ ID NO: 1694270 - RNA, 14 nt, Human
auacaauuuuguuu

SEQ ID NO: 1694271 - RNA, 16 nt, Human
auacaauuuuguuucu

SEQ ID NO: 1694272 - RNA, 17 nt, Human
auacaauuuuguuucug

SEQ ID NO: 1694273 - RNA, 18 nt, Human
auacaauuuuguuucugu

SEQ ID NO: 1694274 - RNA, 16 nt, Human
auaaaaaauuaugaca

SEQ ID NO: 1694275 - RNA, 19 nt, Human
agucuggcuguacccagga

SEQ ID NO: 1694276 - RNA, 21 nt, Human
agucuggcuguacccaggaau

SEQ ID NO: 1694277 - RNA, 18 nt, Human
augaaacuuguguaaaua

SEQ ID NO: 1694278 - RNA, 15 nt, Human
auggcuuuguauaga

SEQ ID NO: 1694279 - RNA, 16 nt, Human
auggcuuuguauagaa

SEQ ID NO: 1694280 - RNA, 18 nt, Human
auggcuuuguauagaacc

SEQ ID NO: 1694281 - RNA, 18 nt, Human
auccagcagauuauucac

SEQ ID NO: 1694282 - RNA, 18 nt, Human
caaaguugccuaaaucca

SEQ ID NO: 1694283 - RNA, 15 nt, Human
caaaguugccuaaau

SEQ ID NO: 1694284 - RNA, 17 nt, Human
caaaguugccuaaaucc

SEQ ID NO: 1694285 - RNA, 14 nt, Human
caaaguugccuaaa

SEQ ID NO: 1694286 - RNA, 17 nt, Human
auuuuaacaacagcugg

SEQ ID NO: 1694287 - RNA, 12 nt, Human
cacacacuuuug

SEQ ID NO: 1694288 - RNA, 14 nt, Human
caauuuuguuucug

SEQ ID NO: 1694289 - RNA, 16 nt, Human
caauuuuguuucugua

SEQ ID NO: 1694290 - RNA, 17 nt, Human
caauuuuguuucuguac

SEQ ID NO: 1694291 - RNA, 13 nt, Human
caauuuuguuucu

SEQ ID NO: 1694292 - RNA, 20 nt, Human
cacaguuuugguugcuuuaa

SEQ ID NO: 1694293 - RNA, 23 nt, Human
cacaguuuugguugcuuuaauau

SEQ ID NO: 1694294 - RNA, 19 nt, Human
cacaguuuugguugcuuua

SEQ ID NO: 1694295 - RNA, 14 nt, Human
uuuuucuguuauau

SEQ ID NO: 1694296 - RNA, 23 nt, Human
uuuuucuuaaauaauaaagauca

SEQ ID NO: 1694297 - RNA, 20 nt, Human
uuugagguuuuuaagccuua

SEQ ID NO: 1694298 - RNA, 22 nt, Human
uuugcauaggugaucucauuua

SEQ ID NO: 1694299 - RNA, 16 nt, Human
uuuggaaaucuuuaaa

SEQ ID NO: 1694300 - RNA, 22 nt, Human
uuugguuaagucuguuuuauga

SEQ ID NO: 1694301 - RNA, 18 nt, Human
uuugguuaagucuguuuu

SEQ ID NO: 1694302 - RNA, 19 nt, Human
uuugguuaagucuguuuua

SEQ ID NO: 1694303 - RNA, 20 nt, Human
uuugguuaagucuguuuuau

SEQ ID NO: 1694304 - RNA, 11 nt, Human
uuuguauagaa

SEQ ID NO: 1694305 - RNA, 12 nt, Human
uuuguguuagag

SEQ ID NO: 1694306 - RNA, 12 nt, Human
uuuguuguuugu

SEQ ID NO: 1694307 - RNA, 14 nt, Human
uuuguuguuuguuu

SEQ ID NO: 1694308 - RNA, 19 nt, Human
uuuguuguuuguuuagucu

SEQ ID NO: 1694309 - RNA, 15 nt, Human
uuuuaugauccagca

SEQ ID NO: 1694310 - RNA, 13 nt, Human
uuuuaugauccag

SEQ ID NO: 1694311 - RNA, 14 nt, Human
uuucucuuucguua

SEQ ID NO: 1694312 - RNA, 18 nt, Human
uuuccuagcacacacuuu

SEQ ID NO: 1694313 - RNA, 21 nt, Human
uuuccuagcacacacuuuugg

SEQ ID NO: 1694314 - RNA, 18 nt, Human
uuucagauaacuguuauu

SEQ ID NO: 1694315 - RNA, 13 nt, Human
uuuaugauccagc

SEQ ID NO: 1694316 - RNA, 17 nt, Human
uuuauuggcuuuucuga

SEQ ID NO: 1694317 - RNA, 21 nt, Human
uuuauuggcuuuucugaucca

SEQ ID NO: 1694318 - RNA, 17 nt, Human
uucuaugcugaguuugu

SEQ ID NO: 1694319 - RNA, 11 nt, Human
uucuauauuuu

SEQ ID NO: 1694320 - RNA, 14 nt, Human
uucuauauuuucau

SEQ ID NO: 1694321 - RNA, 15 nt, Human
uucuauauuuucauu

SEQ ID NO: 1694322 - RNA, 16 nt, Human
uucuauauuuucauuc

SEQ ID NO: 1694323 - RNA, 18 nt, Human
uucuauauuuucauucuc

SEQ ID NO: 1694324 - RNA, 21 nt, Human
uucuauauuuucauucuccua

SEQ ID NO: 1694325 - RNA, 17 nt, Human
uuccuagcacacacuuu

SEQ ID NO: 1694326 - RNA, 19 nt, Human
uuccuagcacacacuuuug

SEQ ID NO: 1694327 - RNA, 16 nt, Human
uuacuaaaauggacug

SEQ ID NO: 1694328 - RNA, 17 nt, Human
uuacuaaaauggacugu

SEQ ID NO: 1694329 - RNA, 18 nt, Human
uuacuaaaauggacugug

SEQ ID NO: 1694330 - RNA, 15 nt, Human
uuacuaaaauggacu

SEQ ID NO: 1694331 - RNA, 11 nt, Human
uucacugauuu

SEQ ID NO: 1694332 - RNA, 12 nt, Human
uuggaaaucuuu

SEQ ID NO: 1694333 - RNA, 15 nt, Human
uuggaaaucuuuaaa

SEQ ID NO: 1694334 - RNA, 21 nt, Human
uuggaccaaaaaccaguauug

SEQ ID NO: 1694335 - RNA, 19 nt, Human
uuggcuuuucugauccagu

SEQ ID NO: 1694336 - RNA, 22 nt, Human
uuggcuuuucugauccaguuuu

SEQ ID NO: 1694337 - RNA, 15 nt, Human
uuggcuuuucugauc

SEQ ID NO: 1694338 - RNA, 12 nt, Human
uucuuguauuaa

SEQ ID NO: 1694339 - RNA, 13 nt, Human
uucuuguauuaag

SEQ ID NO: 1694340 - RNA, 18 nt, Human
uucuuguauuaagaauga

SEQ ID NO: 1694341 - RNA, 22 nt, Human
uugaaacggaugauuucuaugc

SEQ ID NO: 1694342 - RNA, 20 nt, Human
uugaaacggaugauuucuau

SEQ ID NO: 1694343 - RNA, 21 nt, Human
uugaaacggaugauuucuaug

SEQ ID NO: 1694344 - RNA, 14 nt, Human
ugugcgcuaaacuu

SEQ ID NO: 1694345 - RNA, 19 nt, Human
ugugcgcuaaacuuuucug

SEQ ID NO: 1694346 - RNA, 22 nt, Human
ugugcgcuaaacuuuucugaua

SEQ ID NO: 1694347 - RNA, 23 nt, Human
ugugcgcuaaacuuuucugauag

SEQ ID NO: 1694348 - RNA, 13 nt, Human
uguacucaauuuu

SEQ ID NO: 1694349 - RNA, 14 nt, Human
uguauuuguuugca

SEQ ID NO: 1694350 - RNA, 16 nt, Human
uguauagaaccucuuu

SEQ ID NO: 1694351 - RNA, 17 nt, Human
ugugugaagugagugag

SEQ ID NO: 1694352 - RNA, 18 nt, Human
uguuaaaccaugggauaa

SEQ ID NO: 1694353 - RNA, 20 nt, Human
uguuaaaccaugggauaaau

SEQ ID NO: 1694354 - RNA, 21 nt, Human
uguuaaaccaugggauaaaug

SEQ ID NO: 1694355 - RNA, 23 nt, Human
uguuaaaccaugggauaaaugcc

SEQ ID NO: 1694356 - RNA, 16 nt, Human
uguuagaucuaguuca

SEQ ID NO: 1694357 - RNA, 20 nt, Human
uguugaaacggaugauuucu

SEQ ID NO: 1694358 - RNA, 21 nt, Human
uguugaaacggaugauuucua

SEQ ID NO: 1694359 - RNA, 22 nt, Human
uguugaaacggaugauuucuau

SEQ ID NO: 1694360 - RNA, 23 nt, Human
uguugaaacggaugauuucuaug

SEQ ID NO: 1694361 - RNA, 14 nt, Human
uguuguuuguuuag

SEQ ID NO: 1694362 - RNA, 18 nt, Human
uuaauaucaucaguauug

SEQ ID NO: 1694363 - RNA, 13 nt, Human
uuaaggauuuuau

SEQ ID NO: 1694364 - RNA, 15 nt, Human
uuaaggauuuuaugc

SEQ ID NO: 1694365 - RNA, 18 nt, Human
uuaaggauuuuaugcuuu

SEQ ID NO: 1694366 - RNA, 20 nt, Human
uuaaggauuuuaugcuuuaa

SEQ ID NO: 1694367 - RNA, 20 nt, Human
uuaauaauuauaugcuauuu

SEQ ID NO: 1694368 - RNA, 23 nt, Human
uuaauaauuauaugcuauuucua

SEQ ID NO: 1694369 - RNA, 18 nt, Human
uuaauaauuauaugcuau

SEQ ID NO: 1694370 - RNA, 12 nt, Human
uuaacauguuaa

SEQ ID NO: 1694371 - RNA, 18 nt, Human
uuaacauguuaaaccaug

SEQ ID NO: 1694372 - RNA, 19 nt, Human
uuaacauguuaaaccaugg

SEQ ID NO: 1694373 - RNA, 12 nt, Human
uguuuguuuagu

SEQ ID NO: 1694374 - RNA, 21 nt, Human
uguuuguuuagucuugucuca

SEQ ID NO: 1694375 - RNA, 14 nt, Human
uggcuuuguauaga

SEQ ID NO: 1694376 - RNA, 22 nt, Human
uggcuuuguauagaaccucuuu

SEQ ID NO: 1694377 - RNA, 15 nt, Human
uggcuguacccagga

SEQ ID NO: 1694378 - RNA, 20 nt, Human
uggccuuucauauuuuagcu

SEQ ID NO: 1694379 - RNA, 14 nt, Human
ugcuuguuuccuag

SEQ ID NO: 1694380 - RNA, 12 nt, Human
ugcuuuaaacau

SEQ ID NO: 1694381 - RNA, 16 nt, Human
ugcuuucagauacugg

SEQ ID NO: 1694382 - RNA, 17 nt, Human
ugcuuucagauacugga

SEQ ID NO: 1694383 - RNA, 20 nt, Human
ugcuuucagauacuggauug

SEQ ID NO: 1694384 - RNA, 21 nt, Human
ugcuuucagauacuggauugu

SEQ ID NO: 1694385 - RNA, 12 nt, Human
ugcuuucagaua

SEQ ID NO: 1694386 - RNA, 15 nt, Human
uggcauaacauaaau

SEQ ID NO: 1694387 - RNA, 17 nt, Human
uggcauaacauaaaucu

SEQ ID NO: 1694388 - RNA, 19 nt, Human
ugaagucucugaagugaaa

SEQ ID NO: 1694389 - RNA, 22 nt, Human
ugcacggugaauggcuuuguau

SEQ ID NO: 1694390 - RNA, 23 nt, Human
ugcacggugaauggcuuuguaua

SEQ ID NO: 1694391 - RNA, 23 nt, Human
ugccuaaggacuucuuuaauuuu

SEQ ID NO: 1694392 - RNA, 15 nt, Human
ugcugaguuugugcu

SEQ ID NO: 1694393 - RNA, 17 nt, Human
ugcugaguuugugcugg

SEQ ID NO: 1694394 - RNA, 19 nt, Human
ucuugucucagauuuuauu

SEQ ID NO: 1694395 - RNA, 18 nt, Human
ucuuuaaaaaaaaaauug

SEQ ID NO: 1694396 - RNA, 19 nt, Human
ucuuuaaaaaaaaaauugg

SEQ ID NO: 1694397 - RNA, 15 nt, Human
ucuugccuuuuucau

SEQ ID NO: 1694398 - RNA, 22 nt, Human
ucuuguauuaagaaugaaauac

SEQ ID NO: 1694399 - RNA, 21 nt, Human
ucuucucagaaggcaaaugac

SEQ ID NO: 1694400 - RNA, 23 nt, Human
ucuucucagaaggcaaaugacuu

SEQ ID NO: 1694401 - RNA, 17 nt, Human
ucuguuuuaugacuuca

SEQ ID NO: 1694402 - RNA, 13 nt, Human
ucuguuuuaugac

SEQ ID NO: 1694403 - RNA, 15 nt, Human
ucuguuuuaugacuu

SEQ ID NO: 1694404 - RNA, 16 nt, Human
ucuguuuuaugacuuc

SEQ ID NO: 1694405 - RNA, 15 nt, Human
ucuguuauauaaaug

SEQ ID NO: 1694406 - RNA, 18 nt, Human
ucuguuauauaaaugguu

SEQ ID NO: 1694407 - RNA, 18 nt, Human
ugaacacuccaauuaagg

SEQ ID NO: 1694408 - RNA, 19 nt, Human
ugaacacuccaauuaagga

SEQ ID NO: 1694409 - RNA, 22 nt, Human
ugaacacuccaauuaaggauuu

SEQ ID NO: 1694410 - RNA, 23 nt, Human
ugaacacuccaauuaaggauuuu

SEQ ID NO: 1694411 - RNA, 16 nt, Human
ucugacaucucugcaa

SEQ ID NO: 1694412 - RNA, 20 nt, Human
ucugaggaauucuguauaga

SEQ ID NO: 1694413 - RNA, 19 nt, Human
ucucugcaaucuucucaga

SEQ ID NO: 1694414 - RNA, 19 nt, Human
ucucagaaggcaaaugacu

SEQ ID NO: 1694415 - RNA, 20 nt, Human
ucucagaaggcaaaugacuu

SEQ ID NO: 1694416 - RNA, 21 nt, Human
ucucagaaggcaaaugacuuu

SEQ ID NO: 1694417 - RNA, 22 nt, Human
ucucagaaggcaaaugacuuug

SEQ ID NO: 1694418 - RNA, 17 nt, Human
ucucaaccaccuuucag

SEQ ID NO: 1694419 - RNA, 12 nt, Human
uauuuuaugauc

SEQ ID NO: 1694420 - RNA, 17 nt, Human
uaucugaagucagaucu

SEQ ID NO: 1694421 - RNA, 18 nt, Human
uaucugaagucagaucug

SEQ ID NO: 1694422 - RNA, 15 nt, Human
uaucugaggaauucu

SEQ ID NO: 1694423 - RNA, 18 nt, Human
uaucugacaucucugcaa

SEQ ID NO: 1694424 - RNA, 16 nt, Human
uaucugaggaauucug

SEQ ID NO: 1694425 - RNA, 18 nt, Human
ucacucuccauuuaauaa

SEQ ID NO: 1694426 - RNA, 15 nt, Human
ucagauaacuguuau

SEQ ID NO: 1694427 - RNA, 13 nt, Human
ucagauaacuguu

SEQ ID NO: 1694428 - RNA, 13 nt, Human
ucacuuuuuucca

SEQ ID NO: 1694429 - RNA, 15 nt, Human
ucacuuuuuuccaca

SEQ ID NO: 1694430 - RNA, 16 nt, Human
ucacuuuuuuccacau

SEQ ID NO: 1694431 - RNA, 20 nt, Human
uccagcagauuauucacuga

SEQ ID NO: 1694432 - RNA, 22 nt, Human
uccagcagauuauucacugauu

SEQ ID NO: 1694433 - RNA, 16 nt, Human
ucauuauuuuauuaug

SEQ ID NO: 1694434 - RNA, 18 nt, Human
ucauuauuuuauuaugaa

SEQ ID NO: 1694435 - RNA, 19 nt, Human
ucauuauuuuauuaugaaa

SEQ ID NO: 1694436 - RNA, 22 nt, Human
ucauuauuuuauuaugaaacuu

SEQ ID NO: 1694437 - RNA, 14 nt, Human
ucauuauuuuauua

SEQ ID NO: 1694438 - RNA, 15 nt, Human
ucauuauuuuauuau

SEQ ID NO: 1694439 - RNA, 13 nt, Human
ucauuauuuuauu

SEQ ID NO: 1694440 - RNA, 12 nt, Human
guuuguuuaguc

SEQ ID NO: 1694441 - RNA, 16 nt, Human
guuugagguuuuuaag

SEQ ID NO: 1694442 - RNA, 19 nt, Human
guuugagguuuuuaagccu

SEQ ID NO: 1694443 - RNA, 23 nt, Human
guuugugcugguguaugugugaa

SEQ ID NO: 1694444 - RNA, 14 nt, Human
guuuagucuugucu

SEQ ID NO: 1694445 - RNA, 18 nt, Human
guuuagucuugucucaga

SEQ ID NO: 1694446 - RNA, 12 nt, Human
uaaacuuucaca

SEQ ID NO: 1694447 - RNA, 13 nt, Human
uaaacuuucacac

SEQ ID NO: 1694448 - RNA, 13 nt, Human
uaaacuuuucuga

SEQ ID NO: 1694449 - RNA, 14 nt, Human
uaaacuuuucugau

SEQ ID NO: 1694450 - RNA, 15 nt, Human
uaaacuuuucugaua

SEQ ID NO: 1694451 - RNA, 13 nt, Human
uaaaguugaauuu

SEQ ID NO: 1694452 - RNA, 14 nt, Human
uaaaguugaauuua

SEQ ID NO: 1694453 - RNA, 15 nt, Human
uaaaguugaauuuau

SEQ ID NO: 1694454 - RNA, 17 nt, Human
uaaaguugaauuuauug

SEQ ID NO: 1694455 - RNA, 19 nt, Human
uaaaguugaauuuauuggc

SEQ ID NO: 1694456 - RNA, 21 nt, Human
uaaaguugaauuuauuggcuu

SEQ ID NO: 1694457 - RNA, 23 nt, Human
uaaaguugaauuuauuggcuuuu

SEQ ID NO: 1694458 - RNA, 15 nt, Human
uaaauccauuuggaa

SEQ ID NO: 1694459 - RNA, 16 nt, Human
uaaauccauuuggaaa

SEQ ID NO: 1694460 - RNA, 14 nt, Human
uaaauccauuugga

SEQ ID NO: 1694461 - RNA, 18 nt, Human
uaaauccauuuggaaauc

SEQ ID NO: 1694462 - RNA, 19 nt, Human
uaaauccauuuggaaaucu

SEQ ID NO: 1694463 - RNA, 22 nt, Human
uaaauccauuuggaaaucuuua

SEQ ID NO: 1694464 - RNA, 23 nt, Human
uaaauccauuuggaaaucuuuaa

SEQ ID NO: 1694465 - RNA, 16 nt, Human
uaaaucccauuauuca

SEQ ID NO: 1694466 - RNA, 17 nt, Human
uaaaucccauuauucaa

SEQ ID NO: 1694467 - RNA, 19 nt, Human
uaaaucccauuauucaaag

SEQ ID NO: 1694468 - RNA, 18 nt, Human
uaacauguuaaaccaugg

SEQ ID NO: 1694469 - RNA, 17 nt, Human
uaacauguuaaaccaug

SEQ ID NO: 1694470 - RNA, 21 nt, Human
uaagcauauauuuuuauauuu

SEQ ID NO: 1694471 - RNA, 22 nt, Human
uaagcauauauuuuuauauuua

SEQ ID NO: 1694472 - RNA, 19 nt, Human
uaagcauauauuuuuauau

SEQ ID NO: 1694473 - RNA, 23 nt, Human
uaagcauauauuuuuauauuuac

SEQ ID NO: 1694474 - RNA, 12 nt, Human
uaauauuaaagc

SEQ ID NO: 1694475 - RNA, 13 nt, Human
uaauauuaaagcc

SEQ ID NO: 1694476 - RNA, 14 nt, Human
uaauauuaaagcca

SEQ ID NO: 1694477 - RNA, 23 nt, Human
uaauccucucaaccaccuuucag

SEQ ID NO: 1694478 - RNA, 15 nt, Human
uaauaauuauaugcu

SEQ ID NO: 1694479 - RNA, 16 nt, Human
uaauaauuauaugcua

SEQ ID NO: 1694480 - RNA, 19 nt, Human
uaauaauuauaugcuauuu

SEQ ID NO: 1694481 - RNA, 20 nt, Human
uaauaauuauaugcuauuuc

SEQ ID NO: 1694482 - RNA, 22 nt, Human
uaauaauuauaugcuauuucua

SEQ ID NO: 1694483 - RNA, 23 nt, Human
uaauaauuauaugcuauuucuau

SEQ ID NO: 1694484 - RNA, 16 nt, Human
uaauaaagaucaugua

SEQ ID NO: 1694485 - RNA, 17 nt, Human
uaauaaagaucauguaa

SEQ ID NO: 1694486 - RNA, 20 nt, Human
uaauaaggaaaaguuuaaua

SEQ ID NO: 1694487 - RNA, 18 nt, Human
uaauaaggaaaaguuuaa

SEQ ID NO: 1694488 - RNA, 12 nt, Human
uaauuaacaugu

SEQ ID NO: 1694489 - RNA, 14 nt, Human
uaauuaacauguua

SEQ ID NO: 1694490 - RNA, 15 nt, Human
uaauuaacauguuaa

SEQ ID NO: 1694491 - RNA, 17 nt, Human
uaauuaacauguuaaac

SEQ ID NO: 1694492 - RNA, 18 nt, Human
uaauuaacauguuaaacc

SEQ ID NO: 1694493 - RNA, 19 nt, Human
uaauuaacauguuaaacca

SEQ ID NO: 1694494 - RNA, 20 nt, Human
uaauuaacauguuaaaccau

SEQ ID NO: 1694495 - RNA, 19 nt, Human
uacaauuuuguuucuguac

SEQ ID NO: 1694496 - RNA, 21 nt, Human
uacaauuuuguuucuguacuu

SEQ ID NO: 1694497 - RNA, 18 nt, Human
uacaauuuuguuucugua

SEQ ID NO: 1694498 - RNA, 12 nt, Human
uaauuuuggaau

SEQ ID NO: 1694499 - RNA, 13 nt, Human
uaauuuuggaauu

SEQ ID NO: 1694500 - RNA, 13 nt, Human
uagacuggugacu

SEQ ID NO: 1694501 - RNA, 14 nt, Human
uagacuggugacug

SEQ ID NO: 1694502 - RNA, 17 nt, Human
uagacuggugacugauu

SEQ ID NO: 1694503 - RNA, 18 nt, Human
uagacuggugacugauuc

SEQ ID NO: 1694504 - RNA, 15 nt, Human
uagagaguguugaaa

SEQ ID NO: 1694505 - RNA, 14 nt, Human
uagagaguguugaa

SEQ ID NO: 1694506 - RNA, 16 nt, Human
uauaugcuauuucuau

SEQ ID NO: 1694507 - RNA, 18 nt, Human
uauaugcuauuucuauau

SEQ ID NO: 1694508 - RNA, 18 nt, Human
uauauuuuuauauuuacu

SEQ ID NO: 1694509 - RNA, 22 nt, Human
uaucaucaguauugaagcauuu

SEQ ID NO: 1694510 - RNA, 19 nt, Human
uauauuuuuauauuuacua

SEQ ID NO: 1694511 - RNA, 18 nt, Human
uauaaaucgcuuuugaua

SEQ ID NO: 1694512 - RNA, 19 nt, Human
uauaaaucgcuuuugauaa

SEQ ID NO: 1694513 - RNA, 20 nt, Human
uauaaaucgcuuuugauaau

SEQ ID NO: 1694514 - RNA, 22 nt, Human
ggaagccaaaccucugugagca

SEQ ID NO: 1694515 - RNA, 19 nt, Human
ggaaaaguuuaauauuaaa

SEQ ID NO: 1694516 - RNA, 21 nt, Human
ggaacgcguugaaauuguaau

SEQ ID NO: 1694517 - RNA, 17 nt, Human
ggaacgcguugaaauug

SEQ ID NO: 1694518 - RNA, 16 nt, Human
ggaacgcguugaaauu

SEQ ID NO: 1694519 - RNA, 20 nt, Human
gcuuuaauaucaucaguauu

SEQ ID NO: 1694520 - RNA, 22 nt, Human
gcuuuaauaucaucaguauuga

SEQ ID NO: 1694521 - RNA, 23 nt, Human
gcuuuaauaucaucaguauugaa

SEQ ID NO: 1694522 - RNA, 24 nt, Human
gcuggugcccugcuuucagauacu

SEQ ID NO: 1694523 - RNA, 22 nt, Human
gcuggugcccugcuuucagaua

SEQ ID NO: 1694524 - RNA, 22 nt, Human
ggcugaugccaaguuguuugag

SEQ ID NO: 1694525 - RNA, 21 nt, Human
ggcugaugccaaguuguuuga

SEQ ID NO: 1694526 - RNA, 17 nt, Human
ggcuuuucugauccagu

SEQ ID NO: 1694527 - RNA, 12 nt, Human
ggcuuuucugau

SEQ ID NO: 1694528 - RNA, 13 nt, Human
ggcuuuucugauc

SEQ ID NO: 1694529 - RNA, 16 nt, Human
ggcuuuucugauccag

SEQ ID NO: 1694530 - RNA, 11 nt, Human
ggguuccugca

SEQ ID NO: 1694531 - RNA, 11 nt, Human
ggggauucuua

SEQ ID NO: 1694532 - RNA, 15 nt, Human
ggggauucuuaaagu

SEQ ID NO: 1694533 - RNA, 20 nt, Human
gguuaucugaagucagaucu

SEQ ID NO: 1694534 - RNA, 13 nt, Human
gguuaagucuguu

SEQ ID NO: 1694535 - RNA, 16 nt, Human
gguuaagucuguuuua

SEQ ID NO: 1694536 - RNA, 23 nt, Human
gguuaagucuguuuuaugacuuc

SEQ ID NO: 1694537 - RNA, 22 nt, Human
gguucuuguauuaagaaugaaa

SEQ ID NO: 1694538 - RNA, 14 nt, Human
gguucuuguauuaa

SEQ ID NO: 1694539 - RNA, 16 nt, Human
gguguaugugugaagu

SEQ ID NO: 1694540 - RNA, 14 nt, Human
ggugacuuuggaua

SEQ ID NO: 1694541 - RNA, 18 nt, Human
ggugacuuuggauaauaa

SEQ ID NO: 1694542 - RNA, 19 nt, Human
ggugacuuuggauaauaag

SEQ ID NO: 1694543 - RNA, 20 nt, Human
ggugacuuuggauaauaagg

SEQ ID NO: 1694544 - RNA, 21 nt, Human
ggugacuuuggauaauaagga

SEQ ID NO: 1694545 - RNA, 13 nt, Human
gcuagacugguga

SEQ ID NO: 1694546 - RNA, 15 nt, Human
gcuagacuggugacu

SEQ ID NO: 1694547 - RNA, 16 nt, Human
gcuagacuggugacug

SEQ ID NO: 1694548 - RNA, 19 nt, Human
gcuagacuggugacugauu

SEQ ID NO: 1694549 - RNA, 20 nt, Human
gcuagacuggugacugauuc

SEQ ID NO: 1694550 - RNA, 22 nt, Human
gcuagacuggugacugauucuu

SEQ ID NO: 1694551 - RNA, 12 nt, Human
gccuuuuucauu

SEQ ID NO: 1694552 - RNA, 16 nt, Human
gccuuuuucauuauuu

SEQ ID NO: 1694553 - RNA, 20 nt, Human
gccuuuuucauuauuuuauu

SEQ ID NO: 1694554 - RNA, 22 nt, Human
gccuuuuucauuauuuuauuau

SEQ ID NO: 1694555 - RNA, 14 nt, Human
gccuaaggacuucu

SEQ ID NO: 1694556 - RNA, 15 nt, Human
gccuaaggacuucuu

SEQ ID NO: 1694557 - RNA, 18 nt, Human
gccuaaggacuucuuuaa

SEQ ID NO: 1694558 - RNA, 12 nt, Human
gccuaaggacuu

SEQ ID NO: 1694559 - RNA, 13 nt, Human
gccuaaggacuuc

SEQ ID NO: 1694560 - RNA, 11 nt, Human
gccuaaaucca

SEQ ID NO: 1694561 - RNA, 13 nt, Human
gcauuuuauaaau

SEQ ID NO: 1694562 - RNA, 12 nt, Human
gcaucacaguuu

SEQ ID NO: 1694563 - RNA, 14 nt, Human
gcauauauuuuuau

SEQ ID NO: 1694564 - RNA, 15 nt, Human
gcauauauuuuuaua

SEQ ID NO: 1694565 - RNA, 11 nt, Human
gcauauauuuu

SEQ ID NO: 1694566 - RNA, 16 nt, Human
gcauauauuuuuauau

SEQ ID NO: 1694567 - RNA, 20 nt, Human
gcauauauuuuuauauuuac

SEQ ID NO: 1694568 - RNA, 21 nt, Human
gcauaggugaucucauuuaau

SEQ ID NO: 1694569 - RNA, 13 nt, Human
gcaaaugacuuug

SEQ ID NO: 1694570 - RNA, 12 nt, Human
gcaaaugacuuu

SEQ ID NO: 1694571 - RNA, 17 nt, Human
gcaaugaagucucugaa

SEQ ID NO: 1694572 - RNA, 19 nt, Human
gcaaugaagucucugaagu

SEQ ID NO: 1694573 - RNA, 17 nt, Human
gaucuaguucacucucc

SEQ ID NO: 1694574 - RNA, 21 nt, Human
gauaaucaacugggcugaaca

SEQ ID NO: 1694575 - RNA, 17 nt, Human
gauaaucaacugggcug

SEQ ID NO: 1694576 - RNA, 20 nt, Human
gauaauaaggaaaaguuuaa

SEQ ID NO: 1694577 - RNA, 21 nt, Human
gauaauaaggaaaaguuuaau

SEQ ID NO: 1694578 - RNA, 22 nt, Human
gauaauaaggaaaaguuuaaua

SEQ ID NO: 1694579 - RNA, 12 nt, Human
gaguguugaaac

SEQ ID NO: 1694580 - RNA, 15 nt, Human
gacuucauuaauaau

SEQ ID NO: 1694581 - RNA, 20 nt, Human
gaaugguccgugcuaaggac

SEQ ID NO: 1694582 - RNA, 22 nt, Human
gaaugguccgugcuaaggacuu

SEQ ID NO: 1694583 - RNA, 23 nt, Human
gaaugguccgugcuaaggacuug

SEQ ID NO: 1694584 - RNA, 21 nt, Human
gaauggcuuuguauagaaccu

SEQ ID NO: 1694585 - RNA, 14 nt, Human
gaauuuauuggcuu

SEQ ID NO: 1694586 - RNA, 16 nt, Human
gaauuuauuggcuuuu

SEQ ID NO: 1694587 - RNA, 20 nt, Human
gaauuuauuggcuuuucuga

SEQ ID NO: 1694588 - RNA, 21 nt, Human
gaauuuauuggcuuuucugau

SEQ ID NO: 1694589 - RNA, 22 nt, Human
gaauuuauuggcuuuucugauc

SEQ ID NO: 1694590 - RNA, 11 nt, Human
gaauucuguau

SEQ ID NO: 1694591 - RNA, 16 nt, Human
gaagucucugaaguga

SEQ ID NO: 1694592 - RNA, 21 nt, Human
gaagucucugaagugaaacug

SEQ ID NO: 1694593 - RNA, 15 nt, Human
gaacgcguugaaauu

SEQ ID NO: 1694594 - RNA, 12 nt, Human
gaacuaaacuuu

SEQ ID NO: 1694595 - RNA, 14 nt, Human
gaacuaaacuuuca

SEQ ID NO: 1694596 - RNA, 16 nt, Human
gaacuaaacuuucaca

SEQ ID NO: 1694597 - RNA, 18 nt, Human
gaacuaaacuuucacacc

SEQ ID NO: 1694598 - RNA, 17 nt, Human
gaacuaaacuuucacac

SEQ ID NO: 1694599 - RNA, 17 nt, Human
gaaauuguaauuauauc

SEQ ID NO: 1694600 - RNA, 13 nt, Human
gacugauucuuca

SEQ ID NO: 1694601 - RNA, 16 nt, Human
gacugauucuucagca

SEQ ID NO: 1694602 - RNA, 13 nt, Human
cuuguuagaucua

SEQ ID NO: 1694603 - RNA, 16 nt, Human
cuuguuagaucuaguu

SEQ ID NO: 1694604 - RNA, 16 nt, Human
cuuuggauaauaagga

SEQ ID NO: 1694605 - RNA, 14 nt, Human
cuuuggauaauaag

SEQ ID NO: 1694606 - RNA, 12 nt, Human
cuuuuucauuau

SEQ ID NO: 1694607 - RNA, 13 nt, Human
cuuuuucauuauu

SEQ ID NO: 1694608 - RNA, 14 nt, Human
cuuuuucauuauuu

SEQ ID NO: 1694609 - RNA, 21 nt, Human
cuuuuucauuauuuuauuaug

SEQ ID NO: 1694610 - RNA, 15 nt, Human
cuuuuuuaaauaaau

SEQ ID NO: 1694611 - RNA, 14 nt, Human
cuuuucugauccag

SEQ ID NO: 1694612 - RNA, 15 nt, Human
cuuuucugauccagu

SEQ ID NO: 1694613 - RNA, 11 nt, Human
cuuuucugauc

SEQ ID NO: 1694614 - RNA, 16 nt, Human
cuuuucugauccaguu

SEQ ID NO: 1694615 - RNA, 18 nt, Human
cuuuucugauccaguuuu

SEQ ID NO: 1694616 - RNA, 12 nt, Human
cuguuuuaugac

SEQ ID NO: 1694617 - RNA, 13 nt, Human
cuguuuuaugacu

SEQ ID NO: 1694618 - RNA, 14 nt, Human
cuguuuuaugacuu

SEQ ID NO: 1694619 - RNA, 15 nt, Human
cuguuuuaugacuuc

SEQ ID NO: 1694620 - RNA, 16 nt, Human
cuguuuuaugacuuca

SEQ ID NO: 1694621 - RNA, 14 nt, Human
cugaagucagaucu

SEQ ID NO: 1694622 - RNA, 15 nt, Human
cugaagucagaucug

SEQ ID NO: 1694623 - RNA, 16 nt, Human
cugaagucagaucugc

SEQ ID NO: 1694624 - RNA, 21 nt, Human
cugaagucagaucugccuaag

SEQ ID NO: 1694625 - RNA, 13 nt, Human
cugaagugaaacu

SEQ ID NO: 1694626 - RNA, 17 nt, Human
cugaagugaaacugcuu

SEQ ID NO: 1694627 - RNA, 19 nt, Human
cugaagugaaacugcuugu

SEQ ID NO: 1694628 - RNA, 13 nt, Human
cucuccauuuaau

SEQ ID NO: 1694629 - RNA, 17 nt, Human
cucugcaaucuucucag

SEQ ID NO: 1694630 - RNA, 18 nt, Human
cucugcaaucuucucaga

SEQ ID NO: 1694631 - RNA, 18 nt, Human
cuccuaucaccugucuug

SEQ ID NO: 1694632 - RNA, 19 nt, Human
cuggauuguacuuugugcu

SEQ ID NO: 1694633 - RNA, 20 nt, Human
cuggauuguacuuugugcug

SEQ ID NO: 1694634 - RNA, 18 nt, Human
cugcuuucagauacugga

SEQ ID NO: 1694635 - RNA, 21 nt, Human
cugcuuucagauacuggauug

SEQ ID NO: 1694636 - RNA, 19 nt, Human
cugccuaaggacuucuuua

SEQ ID NO: 1694637 - RNA, 22 nt, Human
cugccuaaggacuucuuuaauu

SEQ ID NO: 1694638 - RNA, 20 nt, Human
cugccuaaggacuucuuuaa

SEQ ID NO: 1694639 - RNA, 21 nt, Human
cugccuaaggacuucuuuaau

SEQ ID NO: 1694640 - RNA, 20 nt, Human
cugauccaguuuuguuugga

SEQ ID NO: 1694641 - RNA, 20 nt, Human
cugauagaggaagccugauu

SEQ ID NO: 1694642 - RNA, 15 nt, Human
cugauucuucagcaa

SEQ ID NO: 1694643 - RNA, 22 nt, Human
cugcaaucuucucagaaggcaa

SEQ ID NO: 1694644 - RNA, 18 nt, Human
cugcaaugaagucucuga

SEQ ID NO: 1694645 - RNA, 21 nt, Human
cugcaaugaagucucugaagu

SEQ ID NO: 1694646 - RNA, 13 nt, Human
ccgugcuaaggac

SEQ ID NO: 1694647 - RNA, 11 nt, Human
ccggaagccaa

SEQ ID NO: 1694648 - RNA, 22 nt, Human
ccggaagccaaaccucugugag

SEQ ID NO: 1694649 - RNA, 21 nt, Human
ccucacccacccuuuuuuaaa

SEQ ID NO: 1694650 - RNA, 12 nt, Human
ccugauuaaaga

SEQ ID NO: 1694651 - RNA, 13 nt, Human
ccugauuaaagaa

SEQ ID NO: 1694652 - RNA, 15 nt, Human
ccugcuuucagauac

SEQ ID NO: 1694653 - RNA, 16 nt, Human
ccugcuuucagauacu

SEQ ID NO: 1694654 - RNA, 21 nt, Human
ccugcuuucagauacuggauu

SEQ ID NO: 1694655 - RNA, 14 nt, Human
ccuggccuuucaua

SEQ ID NO: 1694656 - RNA, 15 nt, Human
ccuggccuuucauau

SEQ ID NO: 1694657 - RNA, 13 nt, Human
cguugaaauugua

SEQ ID NO: 1694658 - RNA, 23 nt, Human
cguucauggaacgcguugaaauu

SEQ ID NO: 1694659 - RNA, 21 nt, Human
cguucauggaacgcguugaaa

SEQ ID NO: 1694660 - RNA, 22 nt, Human
cguucauggaacgcguugaaau

SEQ ID NO: 1694661 - RNA, 13 nt, Human
cgcguugaaauug

SEQ ID NO: 1694662 - RNA, 22 nt, Human
cgcguugaaauuguaauuauau

SEQ ID NO: 1694663 - RNA, 17 nt, Human
cgcguugaaauuguaau

SEQ ID NO: 1694664 - RNA, 21 nt, Human
cgcguugaaauuguaauuaua

SEQ ID NO: 1694665 - RNA, 16 nt, Human
ccuuucucuuucguua

SEQ ID NO: 1694666 - RNA, 13 nt, Human
cggaugauuucua

SEQ ID NO: 1694667 - RNA, 14 nt, Human
cggaugauuucuau

SEQ ID NO: 1694668 - RNA, 19 nt, Human
ccaucaauaaaaaauuaug

SEQ ID NO: 1694669 - RNA, 20 nt, Human
ccaucaauaaaaaauuauga

SEQ ID NO: 1694670 - RNA, 20 nt, Human
ccaggaauggagccugcacg

SEQ ID NO: 1694671 - RNA, 15 nt, Human
cauuuaauaauuaua

SEQ ID NO: 1694672 - RNA, 16 nt, Human
cauuuaauaauuauau

SEQ ID NO: 1694673 - RNA, 17 nt, Human
cauuuaauaauuauaug

SEQ ID NO: 1694674 - RNA, 19 nt, Human
cauuuaauaauuauaugcu

SEQ ID NO: 1694675 - RNA, 12 nt, Human
cauuuaauaauu

SEQ ID NO: 1694676 - RNA, 14 nt, Human
cauuuaauaauuau

SEQ ID NO: 1694677 - RNA, 23 nt, Human
cauuuaauaauuauaugcuauuu

SEQ ID NO: 1694678 - RNA, 11 nt, Human
cauuuuauaaa

SEQ ID NO: 1694679 - RNA, 13 nt, Human
cauuuuauaaauc

SEQ ID NO: 1694680 - RNA, 17 nt, Human
cauuuuauaaaucgcuu

SEQ ID NO: 1694681 - RNA, 18 nt, Human
cauuuuauaaaucgcuuu

SEQ ID NO: 1694682 - RNA, 21 nt, Human
cauuuuauaaaucgcuuuuga

SEQ ID NO: 1694683 - RNA, 23 nt, Human
cauuuuauaaaucgcuuuugaua

SEQ ID NO: 1694684 - RNA, 18 nt, Human
cugugaacuugaaauuug

SEQ ID NO: 1694685 - RNA, 14 nt, Human
cuguacuuuuuggc

SEQ ID NO: 1694686 - RNA, 15 nt, Human
cuguacuuuuuggca

SEQ ID NO: 1694687 - RNA, 13 nt, Human
cuggguuccugca

SEQ ID NO: 1694688 - RNA, 20 nt, Human
cuucauaccuacauguauuu

SEQ ID NO: 1694689 - RNA, 20 nt, Human
cuugccuuuuucauuauuuu

SEQ ID NO: 1694690 - RNA, 22 nt, Human
cuugccuuuuucauuauuuuau

SEQ ID NO: 1694691 - RNA, 23 nt, Human
cuugccuuuuucauuauuuuauu

SEQ ID NO: 1694692 - RNA, 14 nt, Human
cuugccuuuuucau

SEQ ID NO: 1694693 - RNA, 15 nt, Human
cuugccuuuuucauu

SEQ ID NO: 1694694 - RNA, 16 nt, Human
cuuuugguuaagucug

SEQ ID NO: 1694695 - RNA, 20 nt, Human
cuuuugguuaagucuguuuu

SEQ ID NO: 1694696 - RNA, 11 nt, Human
cuuuguauaga

SEQ ID NO: 1694697 - RNA, 20 nt, Human
cuuuguauagaaccucuuug

SEQ ID NO: 1694698 - RNA, 15 nt, Human
gacuggugacugauu

SEQ ID NO: 1694699 - RNA, 18 nt, Human
gacuggugacugauucuu

SEQ ID NO: 1694700 - RNA, 12 nt, Human
gacuggugacug

SEQ ID NO: 1694701 - RNA, 16 nt, Human
gaauuuuguguuagag

SEQ ID NO: 1694702 - RNA, 22 nt, Human
gaauuuuguguuagagauuuuu

SEQ ID NO: 1694703 - RNA, 13 nt, Human
gaauuuuguguua

SEQ ID NO: 1694704 - RNA, 14 nt, Human
gaagugaaacugcu

SEQ ID NO: 1694705 - RNA, 21 nt, Human
gcauaacauaaaucugugaac

SEQ ID NO: 1694706 - RNA, 23 nt, Human
gcauaacauaaaucugugaacuu

SEQ ID NO: 1694707 - RNA, 14 nt, Human
gauuagaauucugu

SEQ ID NO: 1694708 - RNA, 15 nt, Human
gauuagaauucugua

SEQ ID NO: 1694709 - RNA, 23 nt, Human
gauuagaauucuguauagauuag

SEQ ID NO: 1694710 - RNA, 13 nt, Human
gauuauucacuga

SEQ ID NO: 1694711 - RNA, 15 nt, Human
gauuauucacugauu

SEQ ID NO: 1694712 - RNA, 16 nt, Human
gauuauucacugauuu

SEQ ID NO: 1694713 - RNA, 21 nt, Human
gauuauucacugauuugacau

SEQ ID NO: 1694714 - RNA, 14 nt, Human
gauuagagaguguu

SEQ ID NO: 1694715 - RNA, 18 nt, Human
gauuagagaguguugaaa

SEQ ID NO: 1694716 - RNA, 11 nt, Human
gauccaguuuu

SEQ ID NO: 1694717 - RNA, 17 nt, Human
gauccaguuuuguuugg

SEQ ID NO: 1694718 - RNA, 22 nt, Human
gauccaguuuuguuuggaccaa

SEQ ID NO: 1694719 - RNA, 18 nt, Human
gguucuggugugaacuaa

SEQ ID NO: 1694720 - RNA, 20 nt, Human
aaaguuuaauauuaaagcca

SEQ ID NO: 1694721 - RNA, 21 nt, Human
aaaguuuaauauuaaagccau

SEQ ID NO: 1694722 - RNA, 22 nt, Human
aaaguuuaauauuaaagccaug

SEQ ID NO: 1694723 - RNA, 16 nt, Human
aaaguuuaauauuaaa

SEQ ID NO: 1694724 - RNA, 19 nt, Human
aaaguuuaauauuaaagcc

SEQ ID NO: 1694725 - RNA, 12 nt, Human
aaaguugaauuu

SEQ ID NO: 1694726 - RNA, 13 nt, Human
aaaguugaauuua

SEQ ID NO: 1694727 - RNA, 16 nt, Human
aaaguugaauuuauug

SEQ ID NO: 1694728 - RNA, 22 nt, Human
aaaguugaauuuauuggcuuuu

SEQ ID NO: 1694729 - RNA, 14 nt, Human
aaaaauauuuuaug

SEQ ID NO: 1694730 - RNA, 12 nt, Human
ggauaaaugcca

SEQ ID NO: 1694731 - RNA, 22 nt, Human
ggauaauaaggaaaaguuuaau

SEQ ID NO: 1694732 - RNA, 12 nt, Human
gcuuuucugauc

SEQ ID NO: 1694733 - RNA, 15 nt, Human
gcuuuucugauccag

SEQ ID NO: 1694734 - RNA, 16 nt, Human
gcuuuucugauccagu

SEQ ID NO: 1694735 - RNA, 11 nt, Human
gcuuuucugau

SEQ ID NO: 1694736 - RNA, 23 nt, Human
gcguugaaauuguaauuauaucu

SEQ ID NO: 1694737 - RNA, 24 nt, Human
gcguugaaauuguaauuauaucug

SEQ ID NO: 1694738 - RNA, 18 nt, Human
gcguugaaauuguaauua

SEQ ID NO: 1694739 - RNA, 24 nt, Human
gccaucaauaaaaaauuaugacau

SEQ ID NO: 1694740 - RNA, 20 nt, Human
cucucaaccaccuuucagau

SEQ ID NO: 1694741 - RNA, 17 nt, Human
ccuuuuucauuauuuua

SEQ ID NO: 1694742 - RNA, 15 nt, Human
cuaaacuuuucugau

SEQ ID NO: 1694743 - RNA, 14 nt, Human
cuaaacuuucacac

SEQ ID NO: 1694744 - RNA, 13 nt, Human
cuaaacuuuucug

SEQ ID NO: 1694745 - RNA, 13 nt, Human
cuaaacuuucaca

SEQ ID NO: 1694746 - RNA, 20 nt, Human
cccuauuuuuuuucuguuau

SEQ ID NO: 1694747 - RNA, 21 nt, Human
cccuauuuuuuuucuguuaua

SEQ ID NO: 1694748 - RNA, 17 nt, Human
cccuggccuuucauauu

SEQ ID NO: 1694749 - RNA, 17 nt, Human
ccuagcacacacuuuug

SEQ ID NO: 1694750 - RNA, 21 nt, Human
ccagcagauuauucacugauu

SEQ ID NO: 1694751 - RNA, 22 nt, Human
ccagcagauuauucacugauuu

SEQ ID NO: 1694752 - RNA, 12 nt, Human
caguauugaagc

SEQ ID NO: 1694753 - RNA, 14 nt, Human
caguauugaagcau

SEQ ID NO: 1694754 - RNA, 15 nt, Human
caguauugaagcauu

SEQ ID NO: 1694755 - RNA, 22 nt, Human
caguauuguacaaaguauuaag

SEQ ID NO: 1694756 - RNA, 16 nt, Human
caguauugaagcauuu

SEQ ID NO: 1694757 - RNA, 17 nt, Human
caguauugaagcauuuu

SEQ ID NO: 1694758 - RNA, 20 nt, Human
caguauugaagcauuuuaua

SEQ ID NO: 1694759 - RNA, 21 nt, Human
caguauugaagcauuuuauaa

SEQ ID NO: 1694760 - RNA, 13 nt, Human
cagauacuggauu

SEQ ID NO: 1694761 - RNA, 13 nt, Human
ccaauuaaggauu

SEQ ID NO: 1694762 - RNA, 18 nt, Human
ccaauuaaggauuuuaug

SEQ ID NO: 1694763 - RNA, 22 nt, Human
ccaauuaaggauuuuaugcuuu

SEQ ID NO: 1694764 - RNA, 21 nt, Human
cauucuccuaucaccugucuu

SEQ ID NO: 1694765 - RNA, 16 nt, Human
ccaaaaaccaguauug

SEQ ID NO: 1694766 - RNA, 19 nt, Human
ccaaaaaccaguauuguac

SEQ ID NO: 1694767 - RNA, 20 nt, Human
ccaaaaaccaguauuguaca

SEQ ID NO: 1694768 - RNA, 17 nt, Human
cacuccaauuaaggauu

SEQ ID NO: 1694769 - RNA, 18 nt, Human
cacuccaauuaaggauuu

SEQ ID NO: 1694770 - RNA, 13 nt, Human
cacuccaauuaag

SEQ ID NO: 1694771 - RNA, 15 nt, Human
cacuccaauuaagga

SEQ ID NO: 1694772 - RNA, 14 nt, Human
auuuuaugauccag

SEQ ID NO: 1694773 - RNA, 15 nt, Human
auuuuaugauccagc

SEQ ID NO: 1694774 - RNA, 16 nt, Human
auuuuaugauccagca

SEQ ID NO: 1694775 - RNA, 12 nt, Human
auuuguuugcau

SEQ ID NO: 1694776 - RNA, 13 nt, Human
auuuggaaaucuu

SEQ ID NO: 1694777 - RNA, 11 nt, Human
auuuggaaauc

SEQ ID NO: 1694778 - RNA, 12 nt, Human
auuuggaaaucu

SEQ ID NO: 1694779 - RNA, 12 nt, Human
auuuuaugcuuu

SEQ ID NO: 1694780 - RNA, 17 nt, Human
auuuuaugcuuuaaaca

SEQ ID NO: 1694781 - RNA, 12 nt, Human
auuacaguauaa

SEQ ID NO: 1694782 - RNA, 14 nt, Human
auuacaguauaauu

SEQ ID NO: 1694783 - RNA, 15 nt, Human
auuacaguauaauua

SEQ ID NO: 1694784 - RNA, 16 nt, Human
auuacaguauaauuaa

SEQ ID NO: 1694785 - RNA, 18 nt, Human
auucaaaguugccuaaau

SEQ ID NO: 1694786 - RNA, 20 nt, Human
auucaaaguugccuaaaucc

SEQ ID NO: 1694787 - RNA, 21 nt, Human
auucaaaguugccuaaaucca

SEQ ID NO: 1694788 - RNA, 22 nt, Human
auucaaaguugccuaaauccau

SEQ ID NO: 1694789 - RNA, 17 nt, Human
auucaaaguugccuaaa

SEQ ID NO: 1694790 - RNA, 14 nt, Human
auuaugaaacuugu

SEQ ID NO: 1694791 - RNA, 15 nt, Human
auuaugaaacuugug

SEQ ID NO: 1694792 - RNA, 18 nt, Human
auuaugaaacuuguguaa

SEQ ID NO: 1694793 - RNA, 20 nt, Human
auuaugaaacuuguguaaau

SEQ ID NO: 1694794 - RNA, 21 nt, Human
auuaugaaacuuguguaaaua

SEQ ID NO: 1694795 - RNA, 14 nt, Human
auuguaauuauauc

SEQ ID NO: 1694796 - RNA, 13 nt, Human
auuguaauuauau

SEQ ID NO: 1694797 - RNA, 13 nt, Human
uuguacaaaguau

SEQ ID NO: 1694798 - RNA, 14 nt, Human
uuguacaaaguauu

SEQ ID NO: 1694799 - RNA, 13 nt, Human
uugguugcuuuaa

SEQ ID NO: 1694800 - RNA, 16 nt, Human
uugguugcuuuaauau

SEQ ID NO: 1694801 - RNA, 15 nt, Human
uuguacaaaguauua

SEQ ID NO: 1694802 - RNA, 17 nt, Human
uuguacaaaguauuaag

SEQ ID NO: 1694803 - RNA, 20 nt, Human
uuguacaaaguauuaagcau

SEQ ID NO: 1694804 - RNA, 21 nt, Human
uuguacaaaguauuaagcaua

SEQ ID NO: 1694805 - RNA, 22 nt, Human
uuguacaaaguauuaagcauau

SEQ ID NO: 1694806 - RNA, 16 nt, Human
augacuucauuaauaa

SEQ ID NO: 1694807 - RNA, 11 nt, Human
augacuuugga

SEQ ID NO: 1694808 - RNA, 12 nt, Human
augacuuuggac

SEQ ID NO: 1694809 - RNA, 15 nt, Human
uuggggauucuuaaa

SEQ ID NO: 1694810 - RNA, 13 nt, Human
uuggggauucuua

SEQ ID NO: 1694811 - RNA, 15 nt, Human
uuggauaauaaggaa

SEQ ID NO: 1694812 - RNA, 19 nt, Human
uuggauaauaaggaaaagu

SEQ ID NO: 1694813 - RNA, 21 nt, Human
uuggauaauaaggaaaaguuu

SEQ ID NO: 1694814 - RNA, 13 nt, Human
aucugugaacuug

SEQ ID NO: 1694815 - RNA, 17 nt, Human
aucugugaacuugaaau

SEQ ID NO: 1694816 - RNA, 18 nt, Human
aucugugaacuugaaauu

SEQ ID NO: 1694817 - RNA, 19 nt, Human
aucugugaacuugaaauuu

SEQ ID NO: 1694818 - RNA, 14 nt, Human
aucugccuaaggac

SEQ ID NO: 1694819 - RNA, 15 nt, Human
aucugccuaaggacu

SEQ ID NO: 1694820 - RNA, 16 nt, Human
aucugccuaaggacuu

SEQ ID NO: 1694821 - RNA, 17 nt, Human
aucugccuaaggacuuc

SEQ ID NO: 1694822 - RNA, 13 nt, Human
aucugccuaagga

SEQ ID NO: 1694823 - RNA, 18 nt, Human
aucugccuaaggacuucu

SEQ ID NO: 1694824 - RNA, 19 nt, Human
aucugccuaaggacuucuu

SEQ ID NO: 1694825 - RNA, 20 nt, Human
aucugccuaaggacuucuuu

SEQ ID NO: 1694826 - RNA, 15 nt, Human
aucugaggaauucug

SEQ ID NO: 1694827 - RNA, 16 nt, Human
aucugaggaauucugu

SEQ ID NO: 1694828 - RNA, 17 nt, Human
aucugaggaauucugua

SEQ ID NO: 1694829 - RNA, 18 nt, Human
aucugaggaauucuguau

SEQ ID NO: 1694830 - RNA, 20 nt, Human
aucugaggaauucuguauag

SEQ ID NO: 1694831 - RNA, 21 nt, Human
aucugaggaauucuguauaga

SEQ ID NO: 1694832 - RNA, 13 nt, Human
uugccuaaaucca

SEQ ID NO: 1694833 - RNA, 14 nt, Human
uugccuaaauccau

SEQ ID NO: 1694834 - RNA, 15 nt, Human
uugccuaaauccauu

SEQ ID NO: 1694835 - RNA, 22 nt, Human
uugccuaaauccauuuggaaau

SEQ ID NO: 1694836 - RNA, 14 nt, Human
uuuagucuugucuc

SEQ ID NO: 1694837 - RNA, 22 nt, Human
uuuauuacaguauaauuaacau

SEQ ID NO: 1694838 - RNA, 23 nt, Human
auggaacgcguugaaauuguaau

SEQ ID NO: 1694839 - RNA, 23 nt, Human
uuuauuacaguauaauuaacaug

SEQ ID NO: 1694840 - RNA, 13 nt, Human
uuucauauuuuag

SEQ ID NO: 1694841 - RNA, 21 nt, Human
uuucauauuuuagcuacuaua

SEQ ID NO: 1694842 - RNA, 14 nt, Human
augccaaguuguuu

SEQ ID NO: 1694843 - RNA, 16 nt, Human
augccaaguuguuuga

SEQ ID NO: 1694844 - RNA, 23 nt, Human
augccaaguuguuugagaaauua

SEQ ID NO: 1694845 - RNA, 14 nt, Human
uuuaauuuuggaau

SEQ ID NO: 1694846 - RNA, 15 nt, Human
uuuaauuuuggaauu

SEQ ID NO: 1694847 - RNA, 17 nt, Human
uuuaauuuuggaauuuu

SEQ ID NO: 1694848 - RNA, 12 nt, Human
augauuucuaug

SEQ ID NO: 1694849 - RNA, 13 nt, Human
augauuucuaugc

SEQ ID NO: 1694850 - RNA, 16 nt, Human
augauuucuaugcuga

SEQ ID NO: 1694851 - RNA, 19 nt, Human
uuguguaaauacaauuuug

SEQ ID NO: 1694852 - RNA, 17 nt, Human
auauuuucauucuccua

SEQ ID NO: 1694853 - RNA, 16 nt, Human
auauuuuuauauuuac

SEQ ID NO: 1694854 - RNA, 14 nt, Human
aucacuuuuuucca

SEQ ID NO: 1694855 - RNA, 18 nt, Human
uucucagaaggcaaauga

SEQ ID NO: 1694856 - RNA, 19 nt, Human
uucucagaaggcaaaugac

SEQ ID NO: 1694857 - RNA, 21 nt, Human
uucucagaaggcaaaugacuu

SEQ ID NO: 1694858 - RNA, 22 nt, Human
uucucagaaggcaaaugacuuu

SEQ ID NO: 1694859 - RNA, 15 nt, Human
aucaauaaaaaauua

SEQ ID NO: 1694860 - RNA, 17 nt, Human
aucaauaaaaaauuaug

SEQ ID NO: 1694861 - RNA, 18 nt, Human
aucaauaaaaaauuauga

SEQ ID NO: 1694862 - RNA, 13 nt, Human
uucuguacuuuuu

SEQ ID NO: 1694863 - RNA, 18 nt, Human
uucuguacuuuuuggcau

SEQ ID NO: 1694864 - RNA, 19 nt, Human
uucuguacuuuuuggcaua

SEQ ID NO: 1694865 - RNA, 20 nt, Human
uucuggugugaacuaaacuu

SEQ ID NO: 1694866 - RNA, 21 nt, Human
uucuggugugaacuaaacuuu

SEQ ID NO: 1694867 - RNA, 14 nt, Human
uucuggugugaacu

SEQ ID NO: 1694868 - RNA, 20 nt, Human
auccaguuuuguuuggacca

SEQ ID NO: 1694869 - RNA, 21 nt, Human
auccaguuuuguuuggaccaa

SEQ ID NO: 1694870 - RNA, 18 nt, Human
auccaguuuuguuuggac

SEQ ID NO: 1694871 - RNA, 17 nt, Human
auccaguuuuguuugga

SEQ ID NO: 1694872 - RNA, 17 nt, Human
auccauuuggaaaucuu

SEQ ID NO: 1694873 - RNA, 19 nt, Human
auccauuuggaaaucuuua

SEQ ID NO: 1694874 - RNA, 13 nt, Human
auccauuuggaaa

SEQ ID NO: 1694875 - RNA, 13 nt, Human
auagucuggcugu

SEQ ID NO: 1694876 - RNA, 14 nt, Human
auauaugugaugau

SEQ ID NO: 1694877 - RNA, 13 nt, Human
auuuuauuaugaa

SEQ ID NO: 1694878 - RNA, 14 nt, Human
auuuuauuaugaaa

SEQ ID NO: 1694879 - RNA, 11 nt, Human
auuuuauuaug

SEQ ID NO: 1694880 - RNA, 12 nt, Human
auuuuauuauga

SEQ ID NO: 1694881 - RNA, 18 nt, Human
auuuuauuaugaaacuug

SEQ ID NO: 1694882 - RNA, 21 nt, Human
auuuuauuaugaaacuugugu

SEQ ID NO: 1694883 - RNA, 14 nt, Human
auuuuauuauguaa

SEQ ID NO: 1694884 - RNA, 15 nt, Human
auuuuauuauguaaa

SEQ ID NO: 1694885 - RNA, 13 nt, Human
auuuuauuaugua

SEQ ID NO: 1694886 - RNA, 15 nt, Human
auuuacuaaaaugga

SEQ ID NO: 1694887 - RNA, 20 nt, Human
auuuggaaaucuuuaaaaaa

SEQ ID NO: 1694888 - RNA, 17 nt, Human
auuuggaaaucuuuaaa

SEQ ID NO: 1694889 - RNA, 23 nt, Human
auugugcgcuaaacuuuucugau

SEQ ID NO: 1694890 - RNA, 21 nt, Human
auuauuuuauuaugaaacuug

SEQ ID NO: 1694891 - RNA, 22 nt, Human
auuauuuuauuaugaaacuugu

SEQ ID NO: 1694892 - RNA, 15 nt, Human
auuagagaguguuga

SEQ ID NO: 1694893 - RNA, 16 nt, Human
auuagagaguguugaa

SEQ ID NO: 1694894 - RNA, 17 nt, Human
auuagagaguguugaaa

SEQ ID NO: 1694895 - RNA, 18 nt, Human
auuagagaguguugaaac

SEQ ID NO: 1694896 - RNA, 19 nt, Human
auuagagaguguugaaacg

SEQ ID NO: 1694897 - RNA, 15 nt, Human
auuauuuuauuauga

SEQ ID NO: 1694898 - RNA, 13 nt, Human
uuuuauuauguaa

SEQ ID NO: 1694899 - RNA, 14 nt, Human
uuuuauuauguaaa

SEQ ID NO: 1694900 - RNA, 15 nt, Human
uuuucauuauuuuau

SEQ ID NO: 1694901 - RNA, 21 nt, Human
uuuucauuauuuuauuaugaa

SEQ ID NO: 1694902 - RNA, 22 nt, Human
uuuucauucuccuaucaccugu

SEQ ID NO: 1694903 - RNA, 12 nt, Human
uuuuauuaugua

SEQ ID NO: 1694904 - RNA, 18 nt, Human
uuuuaugcuuuaaacauu

SEQ ID NO: 1694905 - RNA, 12 nt, Human
uuuuauaaaucg

SEQ ID NO: 1694906 - RNA, 20 nt, Human
uuuuauaaaucgcuuuugau

SEQ ID NO: 1694907 - RNA, 16 nt, Human
auuaagaaugaaauac

SEQ ID NO: 1694908 - RNA, 20 nt, Human
auuaagaaugaaauacuguu

SEQ ID NO: 1694909 - RNA, 21 nt, Human
auuaagaaugaaauacuguuu

SEQ ID NO: 1694910 - RNA, 22 nt, Human
auuaagaaugaaauacuguuug

SEQ ID NO: 1694911 - RNA, 12 nt, Human
auuaaagccaug

SEQ ID NO: 1694912 - RNA, 16 nt, Human
auuaaagccauguuua

SEQ ID NO: 1694913 - RNA, 17 nt, Human
auuaaagccauguuuau

SEQ ID NO: 1694914 - RNA, 21 nt, Human
auuaaagccauguuuauuaca

SEQ ID NO: 1694915 - RNA, 13 nt, Human
auuaacauguuaa

SEQ ID NO: 1694916 - RNA, 14 nt, Human
auuaacauguuaaa

SEQ ID NO: 1694917 - RNA, 15 nt, Human
auuaacauguuaaac

SEQ ID NO: 1694918 - RNA, 17 nt, Human
auuaacauguuaaacca

SEQ ID NO: 1694919 - RNA, 19 nt, Human
auuaacauguuaaaccaug

SEQ ID NO: 1694920 - RNA, 18 nt, Human
uuuguuucuguacuuuuu

SEQ ID NO: 1694921 - RNA, 12 nt, Human
uuuguuucugua

SEQ ID NO: 1694922 - RNA, 13 nt, Human
uuuguuucuguac

SEQ ID NO: 1694923 - RNA, 15 nt, Human
uuugucuacaccauu

SEQ ID NO: 1694924 - RNA, 23 nt, Human
auaauaaauucccuggccuuuca

SEQ ID NO: 1694925 - RNA, 21 nt, Human
auaaauucccuggccuuucau

SEQ ID NO: 1694926 - RNA, 22 nt, Human
auaaauucccuggccuuucaua

SEQ ID NO: 1694927 - RNA, 18 nt, Human
auaacuguuauuuauaau

SEQ ID NO: 1694928 - RNA, 20 nt, Human
auaacuguuauuuauaauca

SEQ ID NO: 1694929 - RNA, 22 nt, Human
auaacuguuauuuauaaucacu

SEQ ID NO: 1694930 - RNA, 22 nt, Human
auaaauagcuagacuggugacu

SEQ ID NO: 1694931 - RNA, 15 nt, Human
aguuuugguugcuuu

SEQ ID NO: 1694932 - RNA, 21 nt, Human
aguuuugguugcuuuaauauc

SEQ ID NO: 1694933 - RNA, 22 nt, Human
aguuuugguugcuuuaauauca

SEQ ID NO: 1694934 - RNA, 17 nt, Human
uuaaguaucugacaucu

SEQ ID NO: 1694935 - RNA, 14 nt, Human
uuaagucuguuuua

SEQ ID NO: 1694936 - RNA, 15 nt, Human
uuaagucuguuuuau

SEQ ID NO: 1694937 - RNA, 11 nt, Human
aguugccuaaa

SEQ ID NO: 1694938 - RNA, 15 nt, Human
aguugccuaaaucca

SEQ ID NO: 1694939 - RNA, 16 nt, Human
aguugccuaaauccau

SEQ ID NO: 1694940 - RNA, 17 nt, Human
aguugccuaaauccauu

SEQ ID NO: 1694941 - RNA, 19 nt, Human
aguugccuaaauccauuug

SEQ ID NO: 1694942 - RNA, 18 nt, Human
uguuauuuauaaucacuu

SEQ ID NO: 1694943 - RNA, 21 nt, Human
uguuauuuauaaucacuuuuu

SEQ ID NO: 1694944 - RNA, 21 nt, Human
aguguugaaacggaugauuuc

SEQ ID NO: 1694945 - RNA, 22 nt, Human
aguucacucuccauuuaauaau

SEQ ID NO: 1694946 - RNA, 24 nt, Human
aguucacucuccauuuaauaauua

SEQ ID NO: 1694947 - RNA, 13 nt, Human
uguuuagucuugu

SEQ ID NO: 1694948 - RNA, 17 nt, Human
uguuuagucuugucuca

SEQ ID NO: 1694949 - RNA, 18 nt, Human
uguuuagucuugucucag

SEQ ID NO: 1694950 - RNA, 19 nt, Human
uguuuagucuugucucaga

SEQ ID NO: 1694951 - RNA, 20 nt, Human
uguuuagucuugucucagau

SEQ ID NO: 1694952 - RNA, 16 nt, Human
uguggugacuuuggau

SEQ ID NO: 1694953 - RNA, 17 nt, Human
uguggugacuuuggaua

SEQ ID NO: 1694954 - RNA, 13 nt, Human
uguaaaucccauu

SEQ ID NO: 1694955 - RNA, 16 nt, Human
uguaaaucccauuauu

SEQ ID NO: 1694956 - RNA, 18 nt, Human
uguaaaucccauuauuca

SEQ ID NO: 1694957 - RNA, 19 nt, Human
uguaaaucccauuauucaa

SEQ ID NO: 1694958 - RNA, 20 nt, Human
uguaaaucccauuauucaaa

SEQ ID NO: 1694959 - RNA, 22 nt, Human
uguaaaucccauuauucaaagu

SEQ ID NO: 1694960 - RNA, 14 nt, Human
uguaauuauaucug

SEQ ID NO: 1694961 - RNA, 15 nt, Human
uguaauuauaucuga

SEQ ID NO: 1694962 - RNA, 13 nt, Human
uguaauuauaucu

SEQ ID NO: 1694963 - RNA, 14 nt, Human
agguuuuuaagccu

SEQ ID NO: 1694964 - RNA, 12 nt, Human
uguacuuuuugg

SEQ ID NO: 1694965 - RNA, 15 nt, Human
uguacuuuuuggcau

SEQ ID NO: 1694966 - RNA, 16 nt, Human
uguacuuuuuggcaua

SEQ ID NO: 1694967 - RNA, 17 nt, Human
uguacuuuuuggcauaa

SEQ ID NO: 1694968 - RNA, 17 nt, Human
ugggcugaacacuccaa

SEQ ID NO: 1694969 - RNA, 19 nt, Human
ugggcugaacacuccaauu

SEQ ID NO: 1694970 - RNA, 14 nt, Human
uggaaaucuuuaaa

SEQ ID NO: 1694971 - RNA, 15 nt, Human
uggaaaucuuuaaaa

SEQ ID NO: 1694972 - RNA, 17 nt, Human
uggacuguggugacuuu

SEQ ID NO: 1694973 - RNA, 19 nt, Human
uggacuguggugacuuugg

SEQ ID NO: 1694974 - RNA, 21 nt, Human
uggacuguggugacuuuggau

SEQ ID NO: 1694975 - RNA, 22 nt, Human
uggacuguggugacuuuggaua

SEQ ID NO: 1694976 - RNA, 15 nt, Human
uggacuguggugacu

SEQ ID NO: 1694977 - RNA, 16 nt, Human
uggacuguggugacuu

SEQ ID NO: 1694978 - RNA, 14 nt, Human
aggcaaaugacuuu

SEQ ID NO: 1694979 - RNA, 15 nt, Human
aggcaaaugacuuug

SEQ ID NO: 1694980 - RNA, 18 nt, Human
aggcaaaugacuuuggac

SEQ ID NO: 1694981 - RNA, 21 nt, Human
uggcauaacauaaaucuguga

SEQ ID NO: 1694982 - RNA, 22 nt, Human
uggcauaacauaaaucugugaa

SEQ ID NO: 1694983 - RNA, 12 nt, Human
ugcuaaggacuu

SEQ ID NO: 1694984 - RNA, 13 nt, Human
ugcuaaggacuug

SEQ ID NO: 1694985 - RNA, 18 nt, Human
ugcuaaggacuuguuaga

SEQ ID NO: 1694986 - RNA, 22 nt, Human
ugcuaaggacuuguuagaucua

SEQ ID NO: 1694987 - RNA, 23 nt, Human
aggaauggagccugcacggugaa

SEQ ID NO: 1694988 - RNA, 17 nt, Human
aggaagccugauuaaag

SEQ ID NO: 1694989 - RNA, 18 nt, Human
aggaagccugauuaaaga

SEQ ID NO: 1694990 - RNA, 21 nt, Human
aggaagccugauuaaagaaug

SEQ ID NO: 1694991 - RNA, 14 nt, Human
agcuagacugguga

SEQ ID NO: 1694992 - RNA, 16 nt, Human
agcuagacuggugacu

SEQ ID NO: 1694993 - RNA, 17 nt, Human
agcuagacuggugacug

SEQ ID NO: 1694994 - RNA, 21 nt, Human
agcuagacuggugacugauuc

SEQ ID NO: 1694995 - RNA, 13 nt, Human
agcuagacuggug

SEQ ID NO: 1694996 - RNA, 15 nt, Human
ugccaaguuguuuga

SEQ ID NO: 1694997 - RNA, 19 nt, Human
ugccaaguuguuugagaaa

SEQ ID NO: 1694998 - RNA, 20 nt, Human
ugccaaguuguuugagaaau

SEQ ID NO: 1694999 - RNA, 16 nt, Human
agccauguuuauuaca

SEQ ID NO: 1695000 - RNA, 13 nt, Human
agccauguuuauu

SEQ ID NO: 1695001 - RNA, 14 nt, Human
agccauguuuauua

SEQ ID NO: 1695002 - RNA, 22 nt, Human
ugauccaguuuuguuuggacca

SEQ ID NO: 1695003 - RNA, 22 nt, Human
ugauccagcagauuauucacug

SEQ ID NO: 1695004 - RNA, 21 nt, Human
ugauccagcagauuauucacu

SEQ ID NO: 1695005 - RNA, 15 nt, Human
ugagguuuuuaagcc

SEQ ID NO: 1695006 - RNA, 14 nt, Human
ugauaaucaacugg

SEQ ID NO: 1695007 - RNA, 18 nt, Human
ugauaaucaacugggcug

SEQ ID NO: 1695008 - RNA, 24 nt, Human
ugauaaucaacugggcugaacacu

SEQ ID NO: 1695009 - RNA, 17 nt, Human
agcaucacaguuuuggu

SEQ ID NO: 1695010 - RNA, 15 nt, Human
agcaucacaguuuug

SEQ ID NO: 1695011 - RNA, 18 nt, Human
agauuuuuuuguuguuug

SEQ ID NO: 1695012 - RNA, 19 nt, Human
agauuuuuuuguuguuugu

SEQ ID NO: 1695013 - RNA, 23 nt, Human
agauuuuuuuguuguuuguuuag

SEQ ID NO: 1695014 - RNA, 15 nt, Human
agauuuuuuuguugu

SEQ ID NO: 1695015 - RNA, 16 nt, Human
agauuuuuuuguuguu

SEQ ID NO: 1695016 - RNA, 14 nt, Human
agauuuuauuaugu

SEQ ID NO: 1695017 - RNA, 15 nt, Human
agauuuuauuaugua

SEQ ID NO: 1695018 - RNA, 16 nt, Human
agauuuuauuauguaa

SEQ ID NO: 1695019 - RNA, 17 nt, Human
agauuuuauuauguaaa

SEQ ID NO: 1695020 - RNA, 18 nt, Human
agauuuuauuauguaaau

SEQ ID NO: 1695021 - RNA, 19 nt, Human
agauuuuauuauguaaauc

SEQ ID NO: 1695022 - RNA, 17 nt, Human
ugaauuuuguguuagag

SEQ ID NO: 1695023 - RNA, 21 nt, Human
ugaauuuuguguuagagauuu

SEQ ID NO: 1695024 - RNA, 17 nt, Human
agauacuggauuguacu

SEQ ID NO: 1695025 - RNA, 14 nt, Human
agauacuggauugu

SEQ ID NO: 1695026 - RNA, 16 nt, Human
agauaacuguuauuua

SEQ ID NO: 1695027 - RNA, 19 nt, Human
agauaacuguuauuuauaa

SEQ ID NO: 1695028 - RNA, 20 nt, Human
agauaacuguuauuuauaau

SEQ ID NO: 1695029 - RNA, 12 nt, Human
ugaauggcuuug

SEQ ID NO: 1695030 - RNA, 15 nt, Human
ugaauggcuuuguau

SEQ ID NO: 1695031 - RNA, 11 nt, Human
ugaauggcuuu

SEQ ID NO: 1695032 - RNA, 17 nt, Human
ugaauggcuuuguauag

SEQ ID NO: 1695033 - RNA, 18 nt, Human
ugaauggcuuuguauaga

SEQ ID NO: 1695034 - RNA, 19 nt, Human
ugaauggcuuuguauagaa

SEQ ID NO: 1695035 - RNA, 22 nt, Human
ugaauggcuuuguauagaaccu

SEQ ID NO: 1695036 - RNA, 15 nt, Human
ugaagcauuuuauaa

SEQ ID NO: 1695037 - RNA, 16 nt, Human
ugaagcauuuuauaaa

SEQ ID NO: 1695038 - RNA, 17 nt, Human
ugaagcauuuuauaaau

SEQ ID NO: 1695039 - RNA, 18 nt, Human
ugaagcauuuuauaaauc

SEQ ID NO: 1695040 - RNA, 22 nt, Human
ugaagcauuuuauaaaucgcuu

SEQ ID NO: 1695041 - RNA, 14 nt, Human
ugaagcauuuuaua

SEQ ID NO: 1695042 - RNA, 17 nt, Human
ugaaacggaugauuucu

SEQ ID NO: 1695043 - RNA, 18 nt, Human
ugaaacggaugauuucua

SEQ ID NO: 1695044 - RNA, 19 nt, Human
ugaaacggaugauuucuau

SEQ ID NO: 1695045 - RNA, 20 nt, Human
ugaaacggaugauuucuaug

SEQ ID NO: 1695046 - RNA, 17 nt, Human
ugaaacuuguguaaaua

SEQ ID NO: 1695047 - RNA, 23 nt, Human
ugaaacuuguguaaauacaauuu

SEQ ID NO: 1695048 - RNA, 15 nt, Human
ugaaacggaugauuu

SEQ ID NO: 1695049 - RNA, 21 nt, Human
agaagccccacccugccucac

SEQ ID NO: 1695050 - RNA, 18 nt, Human
ucugaagugaaacugcuu

SEQ ID NO: 1695051 - RNA, 22 nt, Human
ucugaagugaaacugcuuguuu

SEQ ID NO: 1695052 - RNA, 16 nt, Human
ucugaagugaaacugc

SEQ ID NO: 1695053 - RNA, 13 nt, Human
agaaauuaaguau

SEQ ID NO: 1695054 - RNA, 17 nt, Human
agaaauuaaguaucuga

SEQ ID NO: 1695055 - RNA, 22 nt, Human
acuuugugcugggguuaucuga

SEQ ID NO: 1695056 - RNA, 21 nt, Human
acugggcugaacacuccaauu

SEQ ID NO: 1695057 - RNA, 16 nt, Human
acugggcugaacacuc

SEQ ID NO: 1695058 - RNA, 16 nt, Human
acuugaaauuugaauu

SEQ ID NO: 1695059 - RNA, 17 nt, Human
acuucauuaauaauaaa

SEQ ID NO: 1695060 - RNA, 12 nt, Human
ucuaguucacuc

SEQ ID NO: 1695061 - RNA, 16 nt, Human
ucuaguucacucucca

SEQ ID NO: 1695062 - RNA, 19 nt, Human
ucuaguucacucuccauuu

SEQ ID NO: 1695063 - RNA, 19 nt, Human
ucaguauugaagcauuuua

SEQ ID NO: 1695064 - RNA, 14 nt, Human
ucaguauugaagca

SEQ ID NO: 1695065 - RNA, 15 nt, Human
ucaguauugaagcau

SEQ ID NO: 1695066 - RNA, 16 nt, Human
ucaguauugaagcauu

SEQ ID NO: 1695067 - RNA, 17 nt, Human
ucaguauugaagcauuu

SEQ ID NO: 1695068 - RNA, 18 nt, Human
ucaguauugaagcauuuu

SEQ ID NO: 1695069 - RNA, 17 nt, Human
accaugggauaaaugcc

SEQ ID NO: 1695070 - RNA, 18 nt, Human
accaugggauaaaugcca

SEQ ID NO: 1695071 - RNA, 15 nt, Human
ucagaucugccuaag

SEQ ID NO: 1695072 - RNA, 18 nt, Human
ucagaucugccuaaggac

SEQ ID NO: 1695073 - RNA, 20 nt, Human
ucagaucugccuaaggacuu

SEQ ID NO: 1695074 - RNA, 13 nt, Human
ucagaucugccua

SEQ ID NO: 1695075 - RNA, 12 nt, Human
accaaaaaccag

SEQ ID NO: 1695076 - RNA, 13 nt, Human
accaaaaaccagu

SEQ ID NO: 1695077 - RNA, 14 nt, Human
acauugguguugua

SEQ ID NO: 1695078 - RNA, 16 nt, Human
acauugguguuguacu

SEQ ID NO: 1695079 - RNA, 22 nt, Human
acauugguguuguacucaauuu

SEQ ID NO: 1695080 - RNA, 23 nt, Human
acauugguguuguacucaauuuu

SEQ ID NO: 1695081 - RNA, 14 nt, Human
acauugguucuugu

SEQ ID NO: 1695082 - RNA, 16 nt, Human
acauugguucuuguau

SEQ ID NO: 1695083 - RNA, 18 nt, Human
acauugguucuuguauua

SEQ ID NO: 1695084 - RNA, 21 nt, Human
acauugguucuuguauuaaga

SEQ ID NO: 1695085 - RNA, 22 nt, Human
acauugguucuuguauuaagaa

SEQ ID NO: 1695086 - RNA, 23 nt, Human
acauugguucuuguauuaagaau

SEQ ID NO: 1695087 - RNA, 12 nt, Human
acauguauuugu

SEQ ID NO: 1695088 - RNA, 15 nt, Human
ucaaaguugccuaaa

SEQ ID NO: 1695089 - RNA, 15 nt, Human
uauuuguuugcauag

SEQ ID NO: 1695090 - RNA, 23 nt, Human
uccgugcuaaggacuuguuagau

SEQ ID NO: 1695091 - RNA, 16 nt, Human
uccgugcuaaggacuu

SEQ ID NO: 1695092 - RNA, 17 nt, Human
uccgugcuaaggacuug

SEQ ID NO: 1695093 - RNA, 18 nt, Human
uccgugcuaaggacuugu

SEQ ID NO: 1695094 - RNA, 17 nt, Human
uccauuuaauaauuaua

SEQ ID NO: 1695095 - RNA, 12 nt, Human
uccauuuggaaa

SEQ ID NO: 1695096 - RNA, 19 nt, Human
uccauuuggaaaucuuuaa

SEQ ID NO: 1695097 - RNA, 20 nt, Human
uccauuuggaaaucuuuaaa

SEQ ID NO: 1695098 - RNA, 12 nt, Human
uccauuuaauaa

SEQ ID NO: 1695099 - RNA, 15 nt, Human
acggaugauuucuau

SEQ ID NO: 1695100 - RNA, 13 nt, Human
acgcguugaaauu

SEQ ID NO: 1695101 - RNA, 14 nt, Human
acgcguugaaauug

SEQ ID NO: 1695102 - RNA, 18 nt, Human
acgcguugaaauuguaau

SEQ ID NO: 1695103 - RNA, 20 nt, Human
acgcguugaaauuguaauua

SEQ ID NO: 1695104 - RNA, 22 nt, Human
uccacauaaggaaacuggguuc

SEQ ID NO: 1695105 - RNA, 16 nt, Human
uccaauuaaggauuuu

SEQ ID NO: 1695106 - RNA, 17 nt, Human
uccaauuaaggauuuua

SEQ ID NO: 1695107 - RNA, 15 nt, Human
uccaauuaaggauuu

SEQ ID NO: 1695108 - RNA, 15 nt, Human
acaaaguauuaagca

SEQ ID NO: 1695109 - RNA, 16 nt, Human
acaaaguauuaagcau

SEQ ID NO: 1695110 - RNA, 13 nt, Human
acaaaguauuaag

SEQ ID NO: 1695111 - RNA, 18 nt, Human
acaaaguauuaagcauau

SEQ ID NO: 1695112 - RNA, 18 nt, Human
uagcacacacuuuugguu

SEQ ID NO: 1695113 - RNA, 14 nt, Human
uaugcuauuucuau

SEQ ID NO: 1695114 - RNA, 15 nt, Human
uaugcuauuucuaua

SEQ ID NO: 1695115 - RNA, 16 nt, Human
uaugcuauuucuauau

SEQ ID NO: 1695116 - RNA, 18 nt, Human
uaugcuauuucuauauuu

SEQ ID NO: 1695117 - RNA, 22 nt, Human
uaugcuauuucuauauuuucau

SEQ ID NO: 1695118 - RNA, 23 nt, Human
uaugcuauuucuauauuuucauu

SEQ ID NO: 1695119 - RNA, 14 nt, Human
uaugaaacuugugu

SEQ ID NO: 1695120 - RNA, 19 nt, Human
uaugaaacuuguguaaaua

SEQ ID NO: 1695121 - RNA, 21 nt, Human
uaugaaacuuguguaaauaca

SEQ ID NO: 1695122 - RNA, 18 nt, Human
uauagauuagaauucugu

SEQ ID NO: 1695123 - RNA, 19 nt, Human
uauagauuagaauucugua

SEQ ID NO: 1695124 - RNA, 13 nt, Human
acacuuuugguua

SEQ ID NO: 1695125 - RNA, 22 nt, Human
acacuuuugguuaagucuguuu

SEQ ID NO: 1695126 - RNA, 13 nt, Human
aauuaaguaucug

SEQ ID NO: 1695127 - RNA, 14 nt, Human
aauuaaguaucuga

SEQ ID NO: 1695128 - RNA, 14 nt, Human
uaauuauaugcuau

SEQ ID NO: 1695129 - RNA, 18 nt, Human
uaauuauaugcuauuucu

SEQ ID NO: 1695130 - RNA, 19 nt, Human
uaauuauaugcuauuucua

SEQ ID NO: 1695131 - RNA, 20 nt, Human
uaauuauaugcuauuucuau

SEQ ID NO: 1695132 - RNA, 19 nt, Human
uaauuauaucugaggaauu

SEQ ID NO: 1695133 - RNA, 21 nt, Human
uaauuauaucugaggaauucu

SEQ ID NO: 1695134 - RNA, 22 nt, Human
uaauuauaucugaggaauucug

SEQ ID NO: 1695135 - RNA, 23 nt, Human
uaauuauaucugaggaauucugu

SEQ ID NO: 1695136 - RNA, 14 nt, Human
uaaggacuucuuua

SEQ ID NO: 1695137 - RNA, 15 nt, Human
uaaggacuucuuuaa

SEQ ID NO: 1695138 - RNA, 16 nt, Human
uaaggacuucuuuaau

SEQ ID NO: 1695139 - RNA, 22 nt, Human
uaaggacuucuuuaauuuugga

SEQ ID NO: 1695140 - RNA, 17 nt, Human
uaaggaaaaguuuaaua

SEQ ID NO: 1695141 - RNA, 19 nt, Human
uaaggaaaaguuuaauauu

SEQ ID NO: 1695142 - RNA, 21 nt, Human
uaaggaaaaguuuaauauuaa

SEQ ID NO: 1695143 - RNA, 12 nt, Human
uaaggaaacugg

SEQ ID NO: 1695144 - RNA, 14 nt, Human
uaaggaaacugggu

SEQ ID NO: 1695145 - RNA, 19 nt, Human
uaaggaaacuggguuccug

SEQ ID NO: 1695146 - RNA, 13 nt, Human
uaagcauauauuu

SEQ ID NO: 1695147 - RNA, 16 nt, Human
uaagcauauauuuuua

SEQ ID NO: 1695148 - RNA, 13 nt, Human
uaaggacuuguua

SEQ ID NO: 1695149 - RNA, 15 nt, Human
uaaggacuuguuaga

SEQ ID NO: 1695150 - RNA, 16 nt, Human
uaaggacuuguuagau

SEQ ID NO: 1695151 - RNA, 19 nt, Human
uaaggacuuguuagaucua

SEQ ID NO: 1695152 - RNA, 21 nt, Human
aauccucucaaccaccuuuca

SEQ ID NO: 1695153 - RNA, 21 nt, Human
aaucccauuauucaaaguugc

SEQ ID NO: 1695154 - RNA, 14 nt, Human
aaucccauuauuca

SEQ ID NO: 1695155 - RNA, 16 nt, Human
aaucccauuauucaaa

SEQ ID NO: 1695156 - RNA, 12 nt, Human
uaacauguuaaa

SEQ ID NO: 1695157 - RNA, 15 nt, Human
uaacauguuaaacca

SEQ ID NO: 1695158 - RNA, 16 nt, Human
uaacauguuaaaccau

SEQ ID NO: 1695159 - RNA, 14 nt, Human
aauagcuagacugg

SEQ ID NO: 1695160 - RNA, 20 nt, Human
aauagcuagacuggugacug

SEQ ID NO: 1695161 - RNA, 21 nt, Human
aauagcuagacuggugacuga

SEQ ID NO: 1695162 - RNA, 17 nt, Human
aagccaaaccucuguga

SEQ ID NO: 1695163 - RNA, 21 nt, Human
guuuuucuuaaauaauaaaga

SEQ ID NO: 1695164 - RNA, 15 nt, Human
aaguauuaagcauau

SEQ ID NO: 1695165 - RNA, 18 nt, Human
aaguauuaagcauauauu

SEQ ID NO: 1695166 - RNA, 16 nt, Human
aaguauuaagcauaua

SEQ ID NO: 1695167 - RNA, 17 nt, Human
aaguauuaagcauauau

SEQ ID NO: 1695168 - RNA, 20 nt, Human
guuuuucuuaaauaauaaag

SEQ ID NO: 1695169 - RNA, 22 nt, Human
guugccuaaauccauuuggaaa

SEQ ID NO: 1695170 - RNA, 20 nt, Human
guuuaauauuaaagccaugu

SEQ ID NO: 1695171 - RNA, 10 nt, Human
guauaauuaa

SEQ ID NO: 1695172 - RNA, 13 nt, Human
aaaugguuaaaag

SEQ ID NO: 1695173 - RNA, 19 nt, Human
aaaugguuaaaagagguuu

SEQ ID NO: 1695174 - RNA, 11 nt, Human
aaaugguuaaa

SEQ ID NO: 1695175 - RNA, 14 nt, Human
aaauuguaauuaua

SEQ ID NO: 1695176 - RNA, 15 nt, Human
aaauuguaauuauau

SEQ ID NO: 1695177 - RNA, 16 nt, Human
aaccucuuugucuaca

SEQ ID NO: 1695178 - RNA, 14 nt, Human
aacugggcugaaca

SEQ ID NO: 1695179 - RNA, 16 nt, Human
aacugggcugaacacu

SEQ ID NO: 1695180 - RNA, 17 nt, Human
aacugcuuguuuccuag

SEQ ID NO: 1695181 - RNA, 14 nt, Human
gugaacuugaaauu

SEQ ID NO: 1695182 - RNA, 15 nt, Human
gugaacuugaaauuu

SEQ ID NO: 1695183 - RNA, 15 nt, Human
aacuggguuccugca

SEQ ID NO: 1695184 - RNA, 14 nt, Human
aacuggguuccugc

SEQ ID NO: 1695185 - RNA, 19 nt, Human
accugucuugccuuuuuca

SEQ ID NO: 1695186 - RNA, 21 nt, Human
accugucuugccuuuuucauu

SEQ ID NO: 1695187 - RNA, 22 nt, Human
accugucuugccuuuuucauua

SEQ ID NO: 1695188 - RNA, 15 nt, Human
acugauucuucagca

SEQ ID NO: 1695189 - RNA, 22 nt, Human
acugauucuucagcaaaaauau

SEQ ID NO: 1695190 - RNA, 12 nt, Human
acugauucuuca

SEQ ID NO: 1695191 - RNA, 13 nt, Human
acugauucuucag

SEQ ID NO: 1695192 - RNA, 17 nt, Human
aauuggggauucuuaaa

SEQ ID NO: 1695193 - RNA, 20 nt, Human
aauuggggauucuuaaaguu

SEQ ID NO: 1695194 - RNA, 21 nt, Human
aaugguccgugcuaaggacuu

SEQ ID NO: 1695195 - RNA, 16 nt, Human
aauuggggauucuuaa

SEQ ID NO: 1695196 - RNA, 17 nt, Human
aauuuauuggcuuuucu

SEQ ID NO: 1695197 - RNA, 19 nt, Human
aauuuauuggcuuuucuga

SEQ ID NO: 1695198 - RNA, 20 nt, Human
aauuuauuggcuuuucugau

SEQ ID NO: 1695199 - RNA, 21 nt, Human
aauuuauuggcuuuucugauc

SEQ ID NO: 1695200 - RNA, 23 nt, Human
aauuuauuggcuuuucugaucca

SEQ ID NO: 1695201 - RNA, 12 nt, Human
aauuuuggaauu

SEQ ID NO: 1695202 - RNA, 11 nt, Human
aauuuuggaau

SEQ ID NO: 1695203 - RNA, 20 nt, Human
acaauuuuguuucuguacuu

SEQ ID NO: 1695204 - RNA, 14 nt, Human
accaccuuucagau

SEQ ID NO: 1695205 - RNA, 14 nt, Human
aaggcaaaugacuu

SEQ ID NO: 1695206 - RNA, 15 nt, Human
aaggcaaaugacuuu

SEQ ID NO: 1695207 - RNA, 16 nt, Human
aaggcaaaugacuuug

SEQ ID NO: 1695208 - RNA, 20 nt, Human
aaugguccgugcuaaggacu

SEQ ID NO: 1695209 - RNA, 12 nt, Human
aauacuguuuga

SEQ ID NO: 1695210 - RNA, 13 nt, Human
aauauuaaagcca

SEQ ID NO: 1695211 - RNA, 14 nt, Human
aauauuaaagccau

SEQ ID NO: 1695212 - RNA, 15 nt, Human
aauauuaaagccaug

SEQ ID NO: 1695213 - RNA, 16 nt, Human
aauauuaaagccaugu

SEQ ID NO: 1695214 - RNA, 18 nt, Human
aauauuaaagccauguuu

SEQ ID NO: 1695215 - RNA, 19 nt, Human
aauauuaaagccauguuua

SEQ ID NO: 1695216 - RNA, 20 nt, Human
aauauuaaagccauguuuau

SEQ ID NO: 1695217 - RNA, 21 nt, Human
aauaauaaagaucauguaaaa

SEQ ID NO: 1695218 - RNA, 13 nt, Human
aauaauaaagauc

SEQ ID NO: 1695219 - RNA, 20 nt, Human
aaaucugugaacuugaaauu

SEQ ID NO: 1695220 - RNA, 19 nt, Human
aaaucugugaacuugaaau

SEQ ID NO: 1695221 - RNA, 21 nt, Human
aaaucugugaacuugaaauuu

SEQ ID NO: 1695222 - RNA, 23 nt, Human
aaauuggggauucuuaaaguuga

SEQ ID NO: 1695223 - RNA, 18 nt, Human
aaauuggggauucuuaaa

SEQ ID NO: 1695224 - RNA, 19 nt, Human
aaauuggggauucuuaaag

SEQ ID NO: 1695225 - RNA, 20 nt, Human
aaauuggggauucuuaaagu

SEQ ID NO: 1695226 - RNA, 22 nt, Human
aaauuggggauucuuaaaguug

SEQ ID NO: 1695227 - RNA, 11 nt, Human
aaccaguauug

SEQ ID NO: 1695228 - RNA, 13 nt, Human
aaccaguauugua

SEQ ID NO: 1695229 - RNA, 14 nt, Human
aaccaguauuguac

SEQ ID NO: 1695230 - RNA, 13 nt, Human
aacgcguugaaau

SEQ ID NO: 1695231 - RNA, 14 nt, Human
aacgcguugaaauu

SEQ ID NO: 1695232 - RNA, 15 nt, Human
aacgcguugaaauug

SEQ ID NO: 1695233 - RNA, 17 nt, Human
aacgcguugaaauugua

SEQ ID NO: 1695234 - RNA, 15 nt, Human
aacuguuauuuauaa

SEQ ID NO: 1695235 - RNA, 16 nt, Human
aacuguuauuuauaau

SEQ ID NO: 1695236 - RNA, 17 nt, Human
aacuguuauuuauaauc

SEQ ID NO: 1695237 - RNA, 20 nt, Human
aacuguuauuuauaaucacu

SEQ ID NO: 1695238 - RNA, 22 nt, Human
aacuguuauuuauaaucacuuu

SEQ ID NO: 1695239 - RNA, 20 nt, Human
aaaaguuuaauauuaaagcc

SEQ ID NO: 1695240 - RNA, 23 nt, Human
aaaaguuuaauauuaaagccaug

SEQ ID NO: 1695241 - RNA, 21 nt, Human
aaaaguuuaauauuaaagcca

SEQ ID NO: 1695242 - RNA, 22 nt, Human
aaaaguuuaauauuaaagccau

SEQ ID NO: 1695243 - RNA, 16 nt, Human
agaaugaaauacuguu

SEQ ID NO: 1695244 - RNA, 19 nt, Human
agaaugaaauacuguuuga

SEQ ID NO: 1695245 - RNA, 20 nt, Human
agaaugaaauacuguuugag

SEQ ID NO: 1695246 - RNA, 17 nt, Human
agacgaugucuucauac

SEQ ID NO: 1695247 - RNA, 19 nt, Human
agacgaugucuucauaccu

SEQ ID NO: 1695248 - RNA, 16 nt, Human
agccaaaccucuguga

SEQ ID NO: 1695249 - RNA, 14 nt, Human
agcacacacuuuug

SEQ ID NO: 1695250 - RNA, 20 nt, Human
agcacacacuuuugguuaag

SEQ ID NO: 1695251 - RNA, 19 nt, Human
agaucugccuaaggacuuc

SEQ ID NO: 1695252 - RNA, 12 nt, Human
agucuguuuuau

SEQ ID NO: 1695253 - RNA, 20 nt, Human
auauauuuuuauauuuacua

SEQ ID NO: 1695254 - RNA, 18 nt, Human
auauauuuuuauauuuac

SEQ ID NO: 1695255 - RNA, 19 nt, Human
auauauuuuuauauuuacu

SEQ ID NO: 1695256 - RNA, 13 nt, Human
auaucaucaguau

SEQ ID NO: 1695257 - RNA, 17 nt, Human
auaucaucaguauugaa

SEQ ID NO: 1695258 - RNA, 14 nt, Human
aucccauuauucaa

SEQ ID NO: 1695259 - RNA, 15 nt, Human
aucccauuauucaaa

SEQ ID NO: 1695260 - RNA, 20 nt, Human
aucccauuauucaaaguugc

SEQ ID NO: 1695261 - RNA, 15 nt, Human
aucacaguuuugguu

SEQ ID NO: 1695262 - RNA, 22 nt, Human
aucacaguuuugguugcuuuaa

SEQ ID NO: 1695263 - RNA, 21 nt, Human
aucacaguuuugguugcuuua

SEQ ID NO: 1695264 - RNA, 14 nt, Human
augaagucucugaa

SEQ ID NO: 1695265 - RNA, 18 nt, Human
aucucugcaaucuucuca

SEQ ID NO: 1695266 - RNA, 21 nt, Human
aucucugcaaucuucucagaa

SEQ ID NO: 1695267 - RNA, 13 nt, Human
augcuuuaaacau

SEQ ID NO: 1695268 - RNA, 19 nt, Human
auggcuuuguauagaaccu

SEQ ID NO: 1695269 - RNA, 20 nt, Human
augcugaguuugugcuggug

SEQ ID NO: 1695270 - RNA, 15 nt, Human
augguccgugcuaag

SEQ ID NO: 1695271 - RNA, 18 nt, Human
augguccgugcuaaggac

SEQ ID NO: 1695272 - RNA, 23 nt, Human
caacagcuggugcccugcuuuca

SEQ ID NO: 1695273 - RNA, 13 nt, Human
uuaauauuaaagc

SEQ ID NO: 1695274 - RNA, 14 nt, Human
uuaauauuaaagcc

SEQ ID NO: 1695275 - RNA, 16 nt, Human
uuaauauuaaagccau

SEQ ID NO: 1695276 - RNA, 17 nt, Human
uuaauauuaaagccaug

SEQ ID NO: 1695277 - RNA, 11 nt, Human
uuaauauuaaa

SEQ ID NO: 1695278 - RNA, 14 nt, Human
uuaauaauaaauuc

SEQ ID NO: 1695279 - RNA, 23 nt, Human
uuaauaauaaauucccuggccuu

SEQ ID NO: 1695280 - RNA, 12 nt, Human
uuacagaagccc

SEQ ID NO: 1695281 - RNA, 18 nt, Human
uuaauauuaaagccaugu

SEQ ID NO: 1695282 - RNA, 19 nt, Human
uuaauauuaaagccauguu

SEQ ID NO: 1695283 - RNA, 20 nt, Human
uuaauauuaaagccauguuu

SEQ ID NO: 1695284 - RNA, 12 nt, Human
uuaaagccaugu

SEQ ID NO: 1695285 - RNA, 14 nt, Human
uuaaagccauguuu

SEQ ID NO: 1695286 - RNA, 18 nt, Human
uuaaagccauguuuauua

SEQ ID NO: 1695287 - RNA, 20 nt, Human
uuaaagccauguuuauuaca

SEQ ID NO: 1695288 - RNA, 15 nt, Human
uuaaaaaaaaaauug

SEQ ID NO: 1695289 - RNA, 11 nt, Human
uguuucuguac

SEQ ID NO: 1695290 - RNA, 22 nt, Human
uguuucuguacuuuuuggcaua

SEQ ID NO: 1695291 - RNA, 23 nt, Human
uguuucuguacuuuuuggcauaa

SEQ ID NO: 1695292 - RNA, 23 nt, Human
uguuuccuagcacacacuuuugg

SEQ ID NO: 1695293 - RNA, 16 nt, Human
uguuaaaccaugggau

SEQ ID NO: 1695294 - RNA, 21 nt, Human
uguauugugcgcuaaacuuuu

SEQ ID NO: 1695295 - RNA, 14 nt, Human
ugcacggugaaugg

SEQ ID NO: 1695296 - RNA, 18 nt, Human
ugcacggugaauggcuuu

SEQ ID NO: 1695297 - RNA, 19 nt, Human
ugcacggugaauggcuuug

SEQ ID NO: 1695298 - RNA, 12 nt, Human
uggggauucuua

SEQ ID NO: 1695299 - RNA, 13 nt, Human
uggggauucuuaa

SEQ ID NO: 1695300 - RNA, 16 nt, Human
uggggauucuuaaagu

SEQ ID NO: 1695301 - RNA, 18 nt, Human
uggggauucuuaaaguug

SEQ ID NO: 1695302 - RNA, 20 nt, Human
uggggauucuuaaaguugaa

SEQ ID NO: 1695303 - RNA, 14 nt, Human
uggcuuuucugauc

SEQ ID NO: 1695304 - RNA, 17 nt, Human
uggcuuuucugauccag

SEQ ID NO: 1695305 - RNA, 18 nt, Human
uggcuuuucugauccagu

SEQ ID NO: 1695306 - RNA, 19 nt, Human
uggcuuuucugauccaguu

SEQ ID NO: 1695307 - RNA, 13 nt, Human
ugcuuuaauauca

SEQ ID NO: 1695308 - RNA, 15 nt, Human
ugcuuuaauaucauc

SEQ ID NO: 1695309 - RNA, 18 nt, Human
ugcuuuaauaucaucagu

SEQ ID NO: 1695310 - RNA, 20 nt, Human
ugcuuuaauaucaucaguau

SEQ ID NO: 1695311 - RNA, 19 nt, Human
uggaacgcguugaaauugu

SEQ ID NO: 1695312 - RNA, 18 nt, Human
uggaacgcguugaaauug

SEQ ID NO: 1695313 - RNA, 24 nt, Human
ucccuggccuuucauauuuuagcu

SEQ ID NO: 1695314 - RNA, 16 nt, Human
ucccuggccuuucaua

SEQ ID NO: 1695315 - RNA, 18 nt, Human
uccucucaaccaccuuuc

SEQ ID NO: 1695316 - RNA, 20 nt, Human
uccucucaaccaccuuucag

SEQ ID NO: 1695317 - RNA, 21 nt, Human
uccucucaaccaccuuucaga

SEQ ID NO: 1695318 - RNA, 15 nt, Human
ucgcuuuugauaauc

SEQ ID NO: 1695319 - RNA, 13 nt, Human
ucuauauuuucau

SEQ ID NO: 1695320 - RNA, 14 nt, Human
ucuauauuuucauu

SEQ ID NO: 1695321 - RNA, 15 nt, Human
ucuauauuuucauuc

SEQ ID NO: 1695322 - RNA, 16 nt, Human
ucuauauuuucauucu

SEQ ID NO: 1695323 - RNA, 19 nt, Human
ucuauauuuucauucuccu

SEQ ID NO: 1695324 - RNA, 16 nt, Human
ucucagauuuuauuau

SEQ ID NO: 1695325 - RNA, 17 nt, Human
ucucagauuuuauuaug

SEQ ID NO: 1695326 - RNA, 18 nt, Human
ucucagauuuuauuaugu

SEQ ID NO: 1695327 - RNA, 19 nt, Human
ucucagauuuuauuaugua

SEQ ID NO: 1695328 - RNA, 14 nt, Human
ucucagauuuuauu

SEQ ID NO: 1695329 - RNA, 15 nt, Human
ucucagauuuuauua

SEQ ID NO: 1695330 - RNA, 13 nt, Human
ucucagauuuuau

SEQ ID NO: 1695331 - RNA, 16 nt, Human
ucaucaguauugaagc

SEQ ID NO: 1695332 - RNA, 20 nt, Human
ucaucaguauugaagcauuu

SEQ ID NO: 1695333 - RNA, 21 nt, Human
ucaucaguauugaagcauuuu

SEQ ID NO: 1695334 - RNA, 23 nt, Human
ucaucaguauugaagcauuuuau

SEQ ID NO: 1695335 - RNA, 22 nt, Human
ucagauaacuguuauuuauaau

SEQ ID NO: 1695336 - RNA, 14 nt, Human
ucagauacuggauu

SEQ ID NO: 1695337 - RNA, 15 nt, Human
ucagauacuggauug

SEQ ID NO: 1695338 - RNA, 16 nt, Human
ucagauacuggauugu

SEQ ID NO: 1695339 - RNA, 19 nt, Human
ucagauacuggauuguacu

SEQ ID NO: 1695340 - RNA, 20 nt, Human
ucagauacuggauuguacuu

SEQ ID NO: 1695341 - RNA, 23 nt, Human
ucugccuaaggacuucuuuaauu

SEQ ID NO: 1695342 - RNA, 20 nt, Human
ucugccuaaggacuucuuua

SEQ ID NO: 1695343 - RNA, 21 nt, Human
ucugccuaaggacuucuuuaa

SEQ ID NO: 1695344 - RNA, 14 nt, Human
ucugcaaucuucuc

SEQ ID NO: 1695345 - RNA, 17 nt, Human
ucugcaaucuucucaga

SEQ ID NO: 1695346 - RNA, 17 nt, Human
ucuugucucagauuuua

SEQ ID NO: 1695347 - RNA, 14 nt, Human
ucuugucucagauu

SEQ ID NO: 1695348 - RNA, 15 nt, Human
ucuugucucagauuu

SEQ ID NO: 1695349 - RNA, 12 nt, Human
ucuugucucaga

SEQ ID NO: 1695350 - RNA, 14 nt, Human
ucuuguauuaagaa

SEQ ID NO: 1695351 - RNA, 15 nt, Human
ucuuguauuaagaau

SEQ ID NO: 1695352 - RNA, 12 nt, Human
ugacuuuggaua

SEQ ID NO: 1695353 - RNA, 13 nt, Human
ugacuuuggauaa

SEQ ID NO: 1695354 - RNA, 14 nt, Human
ugacuuuggauaau

SEQ ID NO: 1695355 - RNA, 15 nt, Human
ugacuuuggauaaua

SEQ ID NO: 1695356 - RNA, 16 nt, Human
ugacuuuggauaauaa

SEQ ID NO: 1695357 - RNA, 20 nt, Human
ugacuuuggauaauaaggaa

SEQ ID NO: 1695358 - RNA, 22 nt, Human
ugacuuuggauaauaaggaaaa

SEQ ID NO: 1695359 - RNA, 13 nt, Human
ugacaucucugca

SEQ ID NO: 1695360 - RNA, 14 nt, Human
ugacaucucugcaa

SEQ ID NO: 1695361 - RNA, 23 nt, Human
ugacaucucugcaaucuucucag

SEQ ID NO: 1695362 - RNA, 13 nt, Human
ugaacuugaaauu

SEQ ID NO: 1695363 - RNA, 14 nt, Human
ugaacuugaaauuu

SEQ ID NO: 1695364 - RNA, 18 nt, Human
ugaacuugaaauuugaau

SEQ ID NO: 1695365 - RNA, 12 nt, Human
uacaauuuuguu

SEQ ID NO: 1695366 - RNA, 15 nt, Human
uacaauuuuguuucu

SEQ ID NO: 1695367 - RNA, 16 nt, Human
uacaauuuuguuucug

SEQ ID NO: 1695368 - RNA, 17 nt, Human
uacaauuuuguuucugu

SEQ ID NO: 1695369 - RNA, 15 nt, Human
uacaaaguauuaagc

SEQ ID NO: 1695370 - RNA, 16 nt, Human
uacaaaguauuaagca

SEQ ID NO: 1695371 - RNA, 18 nt, Human
uacaaaguauuaagcaua

SEQ ID NO: 1695372 - RNA, 19 nt, Human
uacaaaguauuaagcauau

SEQ ID NO: 1695373 - RNA, 13 nt, Human
uacaaaguauuaa

SEQ ID NO: 1695374 - RNA, 14 nt, Human
uacaaaguauuaag

SEQ ID NO: 1695375 - RNA, 12 nt, Human
uacaaaguauua

SEQ ID NO: 1695376 - RNA, 17 nt, Human
uacuaaaauggacugug

SEQ ID NO: 1695377 - RNA, 15 nt, Human
uacuaaaauggacug

SEQ ID NO: 1695378 - RNA, 23 nt, Human
uacuaaaauggacuguggugacu

SEQ ID NO: 1695379 - RNA, 13 nt, Human
uaccuacauguau

SEQ ID NO: 1695380 - RNA, 23 nt, Human
uaccuacauguauuuguuugcau

SEQ ID NO: 1695381 - RNA, 21 nt, Human
uagacuggugacugauucuuc

SEQ ID NO: 1695382 - RNA, 23 nt, Human
uagacuggugacugauucuucag

SEQ ID NO: 1695383 - RNA, 20 nt, Human
uagacuggugacugauucuu

SEQ ID NO: 1695384 - RNA, 11 nt, Human
uagaauucugu

SEQ ID NO: 1695385 - RNA, 13 nt, Human
uagaauucuguau

SEQ ID NO: 1695386 - RNA, 14 nt, Human
uagaauucuguaua

SEQ ID NO: 1695387 - RNA, 15 nt, Human
uagaauucuguauag

SEQ ID NO: 1695388 - RNA, 16 nt, Human
uagaauucuguauaga

SEQ ID NO: 1695389 - RNA, 21 nt, Human
uagaauucuguauagauuaga

SEQ ID NO: 1695390 - RNA, 20 nt, Human
uagauuagagaguguugaaa

SEQ ID NO: 1695391 - RNA, 16 nt, Human
uagauuagaauucugu

SEQ ID NO: 1695392 - RNA, 17 nt, Human
uagauuagaauucugua

SEQ ID NO: 1695393 - RNA, 19 nt, Human
uagauuagaauucuguaua

SEQ ID NO: 1695394 - RNA, 20 nt, Human
uagauuagaauucuguauag

SEQ ID NO: 1695395 - RNA, 14 nt, Human
uagauuagaauucu

SEQ ID NO: 1695396 - RNA, 15 nt, Human
uagauuagaauucug

SEQ ID NO: 1695397 - RNA, 16 nt, Human
uauauuuucauucucc

SEQ ID NO: 1695398 - RNA, 14 nt, Human
uaucaucaguauug

SEQ ID NO: 1695399 - RNA, 15 nt, Human
uaucaucaguauuga

SEQ ID NO: 1695400 - RNA, 16 nt, Human
uaucaucaguauugaa

SEQ ID NO: 1695401 - RNA, 20 nt, Human
uauagaaccucuuugucuac

SEQ ID NO: 1695402 - RNA, 21 nt, Human
uauagaaccucuuugucuaca

SEQ ID NO: 1695403 - RNA, 23 nt, Human
uauaucugaggaauucuguauag

SEQ ID NO: 1695404 - RNA, 17 nt, Human
uaauauuaaagccaugu

SEQ ID NO: 1695405 - RNA, 20 nt, Human
uaauauuaaagccauguuua

SEQ ID NO: 1695406 - RNA, 21 nt, Human
uaauauuaaagccauguuuau

SEQ ID NO: 1695407 - RNA, 15 nt, Human
uaauauuaaagccau

SEQ ID NO: 1695408 - RNA, 16 nt, Human
uaauauuaaagccaug

SEQ ID NO: 1695409 - RNA, 23 nt, Human
uaauaucaucaguauugaagcau

SEQ ID NO: 1695410 - RNA, 21 nt, Human
uaauuaacauguuaaaccaug

SEQ ID NO: 1695411 - RNA, 20 nt, Human
uaaggauuuuaugcuuuaaa

SEQ ID NO: 1695412 - RNA, 22 nt, Human
uaaggauuuuaugcuuuaaaca

SEQ ID NO: 1695413 - RNA, 12 nt, Human
uaaggauuuuau

SEQ ID NO: 1695414 - RNA, 13 nt, Human
uaaggauuuuaug

SEQ ID NO: 1695415 - RNA, 17 nt, Human
uaaggauuuuaugcuuu

SEQ ID NO: 1695416 - RNA, 19 nt, Human
uaaggauuuuaugcuuuaa

SEQ ID NO: 1695417 - RNA, 13 nt, Human
uaagucuguuuua

SEQ ID NO: 1695418 - RNA, 16 nt, Human
uaagucuguuuuauga

SEQ ID NO: 1695419 - RNA, 19 nt, Human
uaagucuguuuuaugacuu

SEQ ID NO: 1695420 - RNA, 20 nt, Human
uaagucuguuuuaugacuuc

SEQ ID NO: 1695421 - RNA, 21 nt, Human
uaagucuguuuuaugacuuca

SEQ ID NO: 1695422 - RNA, 16 nt, Human
uaauaaggaaaaguuu

SEQ ID NO: 1695423 - RNA, 16 nt, Human
uaacuguuauuuauaa

SEQ ID NO: 1695424 - RNA, 17 nt, Human
uaacuguuauuuauaau

SEQ ID NO: 1695425 - RNA, 16 nt, Human
uaaaugccaucaauaa

SEQ ID NO: 1695426 - RNA, 23 nt, Human
uaaaugccaucaauaaaaaauua

SEQ ID NO: 1695427 - RNA, 14 nt, Human
uaaaugguuaaaag

SEQ ID NO: 1695428 - RNA, 19 nt, Human
uaaacauugguucuuguau

SEQ ID NO: 1695429 - RNA, 21 nt, Human
uaaacauugguucuuguauua

SEQ ID NO: 1695430 - RNA, 11 nt, Human
uaaagccaugu

SEQ ID NO: 1695431 - RNA, 13 nt, Human
uaaagccauguuu

SEQ ID NO: 1695432 - RNA, 15 nt, Human
uaaagccauguuuau

SEQ ID NO: 1695433 - RNA, 20 nt, Human
uaaagccauguuuauuacag

SEQ ID NO: 1695434 - RNA, 19 nt, Human
uaaaagagguuuuucuuaa

SEQ ID NO: 1695435 - RNA, 21 nt, Human
uaaaagagguuuuucuuaaau

SEQ ID NO: 1695436 - RNA, 18 nt, Human
uaaaagagguuuuucuua

SEQ ID NO: 1695437 - RNA, 16 nt, Human
guuuugguugcuuuaa

SEQ ID NO: 1695438 - RNA, 18 nt, Human
guuguuugagaaauuaag

SEQ ID NO: 1695439 - RNA, 21 nt, Human
guugaaacggaugauuucuau

SEQ ID NO: 1695440 - RNA, 22 nt, Human
guugaaacggaugauuucuaug

SEQ ID NO: 1695441 - RNA, 16 nt, Human
guugaaauuguaauua

SEQ ID NO: 1695442 - RNA, 20 nt, Human
guugaaauuguaauuauauc

SEQ ID NO: 1695443 - RNA, 15 nt, Human
guugaaauuguaauu

SEQ ID NO: 1695444 - RNA, 14 nt, Human
guugaauuuauugg

SEQ ID NO: 1695445 - RNA, 21 nt, Human
guugaauuuauuggcuuuucu

SEQ ID NO: 1695446 - RNA, 22 nt, Human
guugaauuuauuggcuuuucug

SEQ ID NO: 1695447 - RNA, 15 nt, Human
guuccugcaaugaag

SEQ ID NO: 1695448 - RNA, 22 nt, Human
guucauggaacgcguugaaauu

SEQ ID NO: 1695449 - RNA, 23 nt, Human
guucauggaacgcguugaaauug

SEQ ID NO: 1695450 - RNA, 19 nt, Human
guucacucuccauuuaaua

SEQ ID NO: 1695451 - RNA, 19 nt, Human
guuaucugaagucagaucu

SEQ ID NO: 1695452 - RNA, 10 nt, Human
guuauauaaa

SEQ ID NO: 1695453 - RNA, 12 nt, Human
guuauauaaaug

SEQ ID NO: 1695454 - RNA, 13 nt, Human
guuauauaaaugg

SEQ ID NO: 1695455 - RNA, 13 nt, Human
guuacagaagccc

SEQ ID NO: 1695456 - RNA, 21 nt, Human
guuaaaccaugggauaaaugc

SEQ ID NO: 1695457 - RNA, 18 nt, Human
guuaaaccaugggauaaa

SEQ ID NO: 1695458 - RNA, 20 nt, Human
guuaaaagagguuuuucuua

SEQ ID NO: 1695459 - RNA, 21 nt, Human
guuaaaagagguuuuucuuaa

SEQ ID NO: 1695460 - RNA, 14 nt, Human
guuaaaagagguuu

SEQ ID NO: 1695461 - RNA, 13 nt, Human
guggugacuuugg

SEQ ID NO: 1695462 - RNA, 15 nt, Human
guggugacuuuggau

SEQ ID NO: 1695463 - RNA, 16 nt, Human
guggugacuuuggaua

SEQ ID NO: 1695464 - RNA, 13 nt, Human
gugcuaaggacuu

SEQ ID NO: 1695465 - RNA, 14 nt, Human
gugcuaaggacuug

SEQ ID NO: 1695466 - RNA, 20 nt, Human
gugcuaaggacuuguuagau

SEQ ID NO: 1695467 - RNA, 12 nt, Human
gugcuaaggacu

SEQ ID NO: 1695468 - RNA, 21 nt, Human
gugcgcuaaacuuuucugaua

SEQ ID NO: 1695469 - RNA, 17 nt, Human
gugcgcuaaacuuuucu

SEQ ID NO: 1695470 - RNA, 15 nt, Human
gucuugucucagauu

SEQ ID NO: 1695471 - RNA, 20 nt, Human
gucuugucucagauuuuauu

SEQ ID NO: 1695472 - RNA, 22 nt, Human
gucuugucucagauuuuauuau

SEQ ID NO: 1695473 - RNA, 15 nt, Human
gucuugccuuuuuca

SEQ ID NO: 1695474 - RNA, 16 nt, Human
gucuugccuuuuucau

SEQ ID NO: 1695475 - RNA, 17 nt, Human
gucuugccuuuuucauu

SEQ ID NO: 1695476 - RNA, 18 nt, Human
gucuugccuuuuucauua

SEQ ID NO: 1695477 - RNA, 20 nt, Human
gucuugccuuuuucauuauu

SEQ ID NO: 1695478 - RNA, 13 nt, Human
gucuguuuuauga

SEQ ID NO: 1695479 - RNA, 15 nt, Human
gucuguuuuaugacu

SEQ ID NO: 1695480 - RNA, 17 nt, Human
gucucagauuuuauuau

SEQ ID NO: 1695481 - RNA, 21 nt, Human
gucucagauuuuauuauguaa

SEQ ID NO: 1695482 - RNA, 15 nt, Human
gucucagauuuuauu

SEQ ID NO: 1695483 - RNA, 16 nt, Human
gucucagauuuuauua

SEQ ID NO: 1695484 - RNA, 14 nt, Human
gucucagauuuuau

SEQ ID NO: 1695485 - RNA, 15 nt, Human
gucucugaagugaaa

SEQ ID NO: 1695486 - RNA, 21 nt, Human
gucucugaagugaaacugcuu

SEQ ID NO: 1695487 - RNA, 16 nt, Human
gucagaucugccuaag

SEQ ID NO: 1695488 - RNA, 18 nt, Human
gucagaucugccuaagga

SEQ ID NO: 1695489 - RNA, 19 nt, Human
gucagaucugccuaaggac

SEQ ID NO: 1695490 - RNA, 20 nt, Human
gucagaucugccuaaggacu

SEQ ID NO: 1695491 - RNA, 21 nt, Human
gucagaucugccuaaggacuu

SEQ ID NO: 1695492 - RNA, 16 nt, Human
guauuaagcauauauu

SEQ ID NO: 1695493 - RNA, 17 nt, Human
guauuaagcauauauuu

SEQ ID NO: 1695494 - RNA, 15 nt, Human
guauuaagcauauau

SEQ ID NO: 1695495 - RNA, 16 nt, Human
guauuaagaaugaaau

SEQ ID NO: 1695496 - RNA, 18 nt, Human
guauuaagcauauauuuu

SEQ ID NO: 1695497 - RNA, 21 nt, Human
guauuaagcauauauuuuuau

SEQ ID NO: 1695498 - RNA, 19 nt, Human
guauagaaccucuuugucu

SEQ ID NO: 1695499 - RNA, 14 nt, Human
guauagauuagaau

SEQ ID NO: 1695500 - RNA, 21 nt, Human
guaugugugaagugagugagu

SEQ ID NO: 1695501 - RNA, 15 nt, Human
guauaauuaacaugu

SEQ ID NO: 1695502 - RNA, 17 nt, Human
guauaauuaacauguua

SEQ ID NO: 1695503 - RNA, 19 nt, Human
guauaauuaacauguuaaa

SEQ ID NO: 1695504 - RNA, 22 nt, Human
guauaauuaacauguuaaacca

SEQ ID NO: 1695505 - RNA, 23 nt, Human
guauaauuaacauguuaaaccau

SEQ ID NO: 1695506 - RNA, 13 nt, Human
guauaauuaacau

SEQ ID NO: 1695507 - RNA, 14 nt, Human
guauaauuaacaug

SEQ ID NO: 1695508 - RNA, 22 nt, Human
uuuggaauuuuccuccuuucuc

SEQ ID NO: 1695509 - RNA, 16 nt, Human
uuuggauaauaaggaa

SEQ ID NO: 1695510 - RNA, 18 nt, Human
uuuuuaagccuuaaagga

SEQ ID NO: 1695511 - RNA, 21 nt, Human
uuuuggcauaacauaaaucug

SEQ ID NO: 1695512 - RNA, 16 nt, Human
uuuugguugcuuuaau

SEQ ID NO: 1695513 - RNA, 15 nt, Human
uuuugguugcuuuaa

SEQ ID NO: 1695514 - RNA, 22 nt, Human
gccuaaauccauuuggaaaucu

SEQ ID NO: 1695515 - RNA, 23 nt, Human
gccuaaauccauuuggaaaucuu

SEQ ID NO: 1695516 - RNA, 12 nt, Human
gccuaaauccau

SEQ ID NO: 1695517 - RNA, 13 nt, Human
gccuaaauccauu

SEQ ID NO: 1695518 - RNA, 19 nt, Human
gccuaaauccauuuggaaa

SEQ ID NO: 1695519 - RNA, 21 nt, Human
gccuaaauccauuuggaaauc

SEQ ID NO: 1695520 - RNA, 14 nt, Human
gcccugcuuucaga

SEQ ID NO: 1695521 - RNA, 16 nt, Human
gcccugcuuucagaua

SEQ ID NO: 1695522 - RNA, 13 nt, Human
gcuaaacuuuucu

SEQ ID NO: 1695523 - RNA, 15 nt, Human
gcuaaacuuuucuga

SEQ ID NO: 1695524 - RNA, 17 nt, Human
gcuaaacuuuucugaua

SEQ ID NO: 1695525 - RNA, 23 nt, Human
gccuuuuucauuauuuuauuaug

SEQ ID NO: 1695526 - RNA, 13 nt, Human
gauuuuauuaugu

SEQ ID NO: 1695527 - RNA, 15 nt, Human
gauuuuauuauguaa

SEQ ID NO: 1695528 - RNA, 18 nt, Human
gauuuuauuauguaaauc

SEQ ID NO: 1695529 - RNA, 19 nt, Human
gauuuuauuauguaaaucc

SEQ ID NO: 1695530 - RNA, 20 nt, Human
gauuuuauuauguaaauccc

SEQ ID NO: 1695531 - RNA, 23 nt, Human
gauuuuauuauguaaaucccauu

SEQ ID NO: 1695532 - RNA, 14 nt, Human
gauuuuaugcuuua

SEQ ID NO: 1695533 - RNA, 19 nt, Human
gauuuuaugcuuuaaacau

SEQ ID NO: 1695534 - RNA, 20 nt, Human
gaugccaaguuguuugagaa

SEQ ID NO: 1695535 - RNA, 18 nt, Human
gcacggugaauggcuuug

SEQ ID NO: 1695536 - RNA, 18 nt, Human
gcagauuauucacugauu

SEQ ID NO: 1695537 - RNA, 16 nt, Human
gacauagucuggcugu

SEQ ID NO: 1695538 - RNA, 13 nt, Human
gaccaaaaaccag

SEQ ID NO: 1695539 - RNA, 19 nt, Human
gaccaaaaaccaguauugu

SEQ ID NO: 1695540 - RNA, 20 nt, Human
gaccaaaaaccaguauugua

SEQ ID NO: 1695541 - RNA, 12 nt, Human
gacuuguuagau

SEQ ID NO: 1695542 - RNA, 18 nt, Human
gaggaagccugauuaaag

SEQ ID NO: 1695543 - RNA, 19 nt, Human
gaggaagccugauuaaaga

SEQ ID NO: 1695544 - RNA, 16 nt, Human
gaaauuugaauuuugu

SEQ ID NO: 1695545 - RNA, 24 nt, Human
gaaauuugaauuuuguguuagaga

SEQ ID NO: 1695546 - RNA, 13 nt, Human
gaaauuugaauuu

SEQ ID NO: 1695547 - RNA, 16 nt, Human
gaaacggaugauuucu

SEQ ID NO: 1695548 - RNA, 18 nt, Human
gaagccaaaccucuguga

SEQ ID NO: 1695549 - RNA, 15 nt, Human
gaagcauuuuauaaa

SEQ ID NO: 1695550 - RNA, 17 nt, Human
gaagcauuuuauaaauc

SEQ ID NO: 1695551 - RNA, 13 nt, Human
gaagcauuuuaua

SEQ ID NO: 1695552 - RNA, 22 nt, Human
gaagucagaucugccuaaggac

SEQ ID NO: 1695553 - RNA, 23 nt, Human
gaagucagaucugccuaaggacu

SEQ ID NO: 1695554 - RNA, 14 nt, Human
gaagucagaucugc

SEQ ID NO: 1695555 - RNA, 12 nt, Human
gaacuugaaauu

SEQ ID NO: 1695556 - RNA, 13 nt, Human
gaacuugaaauuu

SEQ ID NO: 1695557 - RNA, 15 nt, Human
gaacuugaaauuuga

SEQ ID NO: 1695558 - RNA, 22 nt, Human
gaacuugaaauuugaauuuugu

SEQ ID NO: 1695559 - RNA, 14 nt, Human
cuuguauuaagaau

SEQ ID NO: 1695560 - RNA, 15 nt, Human
cuuguauuaagaaug

SEQ ID NO: 1695561 - RNA, 19 nt, Human
cuugaaauuugaauuuugu

SEQ ID NO: 1695562 - RNA, 20 nt, Human
cuugaaauuugaauuuugug

SEQ ID NO: 1695563 - RNA, 23 nt, Human
cuuuugauaaucaacugggcuga

SEQ ID NO: 1695564 - RNA, 22 nt, Human
cuuuugauaaucaacugggcug

SEQ ID NO: 1695565 - RNA, 12 nt, Human
cugcuuucagau

SEQ ID NO: 1695566 - RNA, 15 nt, Human
cugcuuucagauacu

SEQ ID NO: 1695567 - RNA, 16 nt, Human
cugcuuucagauacug

SEQ ID NO: 1695568 - RNA, 14 nt, Human
cugcuuguuuccua

SEQ ID NO: 1695569 - RNA, 13 nt, Human
cugcuuguuuccu

SEQ ID NO: 1695570 - RNA, 14 nt, Human
cuggccuuucauau

SEQ ID NO: 1695571 - RNA, 15 nt, Human
cuguauagauuagag

SEQ ID NO: 1695572 - RNA, 20 nt, Human
cuguauagauuagaauucug

SEQ ID NO: 1695573 - RNA, 16 nt, Human
cuguauagauuagaga

SEQ ID NO: 1695574 - RNA, 18 nt, Human
cugaacacuccaauuaag

SEQ ID NO: 1695575 - RNA, 23 nt, Human
cugaacacuccaauuaaggauuu

SEQ ID NO: 1695576 - RNA, 22 nt, Human
cucugugagcaucacaguuuug

SEQ ID NO: 1695577 - RNA, 18 nt, Human
cucugugagcaucacagu

SEQ ID NO: 1695578 - RNA, 21 nt, Human
cucugugagcaucacaguuuu

SEQ ID NO: 1695579 - RNA, 14 nt, Human
cugacaucucugca

SEQ ID NO: 1695580 - RNA, 15 nt, Human
cugacaucucugcaa

SEQ ID NO: 1695581 - RNA, 16 nt, Human
cugacaucucugcaau

SEQ ID NO: 1695582 - RNA, 19 nt, Human
cucccuauuuuuuuucugu

SEQ ID NO: 1695583 - RNA, 20 nt, Human
cucccuauuuuuuuucuguu

SEQ ID NO: 1695584 - RNA, 21 nt, Human
cucccuauuuuuuuucuguua

SEQ ID NO: 1695585 - RNA, 17 nt, Human
cucccuauuuuuuuucu

SEQ ID NO: 1695586 - RNA, 18 nt, Human
cggugaauggcuuuguau

SEQ ID NO: 1695587 - RNA, 20 nt, Human
cggugaauggcuuuguauag

SEQ ID NO: 1695588 - RNA, 22 nt, Human
cggugaauggcuuuguauagaa

SEQ ID NO: 1695589 - RNA, 13 nt, Human
cggugaauggcuu

SEQ ID NO: 1695590 - RNA, 14 nt, Human
cggugaauggcuuu

SEQ ID NO: 1695591 - RNA, 15 nt, Human
cggugaauggcuuug

SEQ ID NO: 1695592 - RNA, 16 nt, Human
cggugaauggcuuugu

SEQ ID NO: 1695593 - RNA, 23 nt, Human
cguugaaauuguaauuauaucug

SEQ ID NO: 1695594 - RNA, 18 nt, Human
cguugaaauuguaauuau

SEQ ID NO: 1695595 - RNA, 16 nt, Human
cgugcuaaggacuugu

SEQ ID NO: 1695596 - RNA, 12 nt, Human
cgugcuaaggac

SEQ ID NO: 1695597 - RNA, 13 nt, Human
cgugcuaaggacu

SEQ ID NO: 1695598 - RNA, 14 nt, Human
cgugcuaaggacuu

SEQ ID NO: 1695599 - RNA, 15 nt, Human
cgugcuaaggacuug

SEQ ID NO: 1695600 - RNA, 17 nt, Human
cuaaauccauuuggaaa

SEQ ID NO: 1695601 - RNA, 19 nt, Human
cuaaauccauuuggaaauc

SEQ ID NO: 1695602 - RNA, 20 nt, Human
cuaaauccauuuggaaaucu

SEQ ID NO: 1695603 - RNA, 16 nt, Human
cuaaauccauuuggaa

SEQ ID NO: 1695604 - RNA, 12 nt, Human
cuaguucacucu

SEQ ID NO: 1695605 - RNA, 18 nt, Human
cuauauaugugaugaucu

SEQ ID NO: 1695606 - RNA, 23 nt, Human
cuauauaugugaugaucuaccag

SEQ ID NO: 1695607 - RNA, 16 nt, Human
cuaaggacuuguuaga

SEQ ID NO: 1695608 - RNA, 17 nt, Human
cuaaggacuuguuagau

SEQ ID NO: 1695609 - RNA, 11 nt, Human
cuaaggacuug

SEQ ID NO: 1695610 - RNA, 22 nt, Human
ccuacauguauuuguuugcaua

SEQ ID NO: 1695611 - RNA, 20 nt, Human
ccuaaauccauuuggaaauc

SEQ ID NO: 1695612 - RNA, 21 nt, Human
ccuaaauccauuuggaaaucu

SEQ ID NO: 1695613 - RNA, 19 nt, Human
ccuaaauccauuuggaaau

SEQ ID NO: 1695614 - RNA, 23 nt, Human
cccggaagccaaaccucugugag

SEQ ID NO: 1695615 - RNA, 12 nt, Human
cccauuauucaa

SEQ ID NO: 1695616 - RNA, 17 nt, Human
cccagacgaugucuuca

SEQ ID NO: 1695617 - RNA, 15 nt, Human
cccagacgaugucuu

SEQ ID NO: 1695618 - RNA, 12 nt, Human
cauuauuuuauu

SEQ ID NO: 1695619 - RNA, 14 nt, Human
cauuauuuuauuau

SEQ ID NO: 1695620 - RNA, 16 nt, Human
cauuauuuuauuauga

SEQ ID NO: 1695621 - RNA, 17 nt, Human
ccaaaccucugugagca

SEQ ID NO: 1695622 - RNA, 12 nt, Human
cauguuuauuac

SEQ ID NO: 1695623 - RNA, 13 nt, Human
cauguuuauuaca

SEQ ID NO: 1695624 - RNA, 18 nt, Human
cauguuuauuacaguaua

SEQ ID NO: 1695625 - RNA, 19 nt, Human
cauguuuauuacaguauaa

SEQ ID NO: 1695626 - RNA, 20 nt, Human
cauguuuauuacaguauaau

SEQ ID NO: 1695627 - RNA, 22 nt, Human
cauguuuauuacaguauaauua

SEQ ID NO: 1695628 - RNA, 11 nt, Human
cauuauuuuau

SEQ ID NO: 1695629 - RNA, 18 nt, Human
cauggaacgcguugaaau

SEQ ID NO: 1695630 - RNA, 19 nt, Human
cauggaacgcguugaaauu

SEQ ID NO: 1695631 - RNA, 20 nt, Human
cauggaacgcguugaaauug

SEQ ID NO: 1695632 - RNA, 23 nt, Human
cauggaacgcguugaaauuguaa

SEQ ID NO: 1695633 - RNA, 15 nt, Human
cauaccuacauguau

SEQ ID NO: 1695634 - RNA, 21 nt, Human
caguuuuguuuggaccaaaaa

SEQ ID NO: 1695635 - RNA, 18 nt, Human
caguuuugguugcuuuaa

SEQ ID NO: 1695636 - RNA, 19 nt, Human
caguuuugguugcuuuaau

SEQ ID NO: 1695637 - RNA, 17 nt, Human
caguuuugguugcuuua

SEQ ID NO: 1695638 - RNA, 16 nt, Human
cauaaaucugugaacu

SEQ ID NO: 1695639 - RNA, 18 nt, Human
cauaaaucugugaacuug

SEQ ID NO: 1695640 - RNA, 22 nt, Human
cauaaaucugugaacuugaaau

SEQ ID NO: 1695641 - RNA, 23 nt, Human
cauaaaucugugaacuugaaauu

SEQ ID NO: 1695642 - RNA, 14 nt, Human
cauaaaucugugaa

SEQ ID NO: 1695643 - RNA, 12 nt, Human
cauaacauaaau

SEQ ID NO: 1695644 - RNA, 19 nt, Human
cauaacauaaaucugugaa

SEQ ID NO: 1695645 - RNA, 21 nt, Human
cauaacauaaaucugugaacu

SEQ ID NO: 1695646 - RNA, 17 nt, Human
cauaaggaaacuggguu

SEQ ID NO: 1695647 - RNA, 13 nt, Human
caucacaguuuug

SEQ ID NO: 1695648 - RNA, 21 nt, Human
caucacaguuuugguugcuuu

SEQ ID NO: 1695649 - RNA, 22 nt, Human
caucacaguuuugguugcuuua

SEQ ID NO: 1695650 - RNA, 13 nt, Human
cauauuuuagcua

SEQ ID NO: 1695651 - RNA, 18 nt, Human
cugaggaauucuguauag

SEQ ID NO: 1695652 - RNA, 19 nt, Human
cugaggaauucuguauaga

SEQ ID NO: 1695653 - RNA, 15 nt, Human
cugaggaauucugua

SEQ ID NO: 1695654 - RNA, 16 nt, Human
cugaggaauucuguau

SEQ ID NO: 1695655 - RNA, 13 nt, Human
cuccuuucucuuu

SEQ ID NO: 1695656 - RNA, 16 nt, Human
cuaaacuuuucugaua

SEQ ID NO: 1695657 - RNA, 14 nt, Human
cuacuauauaugug

SEQ ID NO: 1695658 - RNA, 20 nt, Human
cucagaaggcaaaugacuuu

SEQ ID NO: 1695659 - RNA, 13 nt, Human
caaguuguuugag

SEQ ID NO: 1695660 - RNA, 17 nt, Human
caaguuguuugagaaau

SEQ ID NO: 1695661 - RNA, 21 nt, Human
caaguuguuugagaaauuaag

SEQ ID NO: 1695662 - RNA, 23 nt, Human
caaguuguuugagaaauuaagua

SEQ ID NO: 1695663 - RNA, 21 nt, Human
caccuuucagauaacuguuau

SEQ ID NO: 1695664 - RNA, 22 nt, Human
caccuuucagauaacuguuauu

SEQ ID NO: 1695665 - RNA, 18 nt, Human
auuuuuuuguuguuuguu

SEQ ID NO: 1695666 - RNA, 13 nt, Human
auuuuuuuguugu

SEQ ID NO: 1695667 - RNA, 15 nt, Human
auuuuuauauuuacu

SEQ ID NO: 1695668 - RNA, 16 nt, Human
auuuuuauauuuacua

SEQ ID NO: 1695669 - RNA, 18 nt, Human
auuuuagcuacuauauau

SEQ ID NO: 1695670 - RNA, 18 nt, Human
auuuuaugcuuuaaacau

SEQ ID NO: 1695671 - RNA, 19 nt, Human
auuuuaugcuuuaaacauu

SEQ ID NO: 1695672 - RNA, 12 nt, Human
auuauguaaauc

SEQ ID NO: 1695673 - RNA, 15 nt, Human
auuuauaaucacuuu

SEQ ID NO: 1695674 - RNA, 13 nt, Human
auuuauaaucacu

SEQ ID NO: 1695675 - RNA, 22 nt, Human
auuuauaaucacuuuuuuccac

SEQ ID NO: 1695676 - RNA, 19 nt, Human
auuucuauauuuucauucu

SEQ ID NO: 1695677 - RNA, 19 nt, Human
auuucuaugcugaguuugu

SEQ ID NO: 1695678 - RNA, 21 nt, Human
auuucuaugcugaguuugugc

SEQ ID NO: 1695679 - RNA, 22 nt, Human
auuucuaugcugaguuugugcu

SEQ ID NO: 1695680 - RNA, 17 nt, Human
auuucuauauuuucauu

SEQ ID NO: 1695681 - RNA, 18 nt, Human
auuucuauauuuucauuc

SEQ ID NO: 1695682 - RNA, 15 nt, Human
auuucuauauuuuca

SEQ ID NO: 1695683 - RNA, 16 nt, Human
auuucuauauuuucau

SEQ ID NO: 1695684 - RNA, 16 nt, Human
auuguaauuauaucug

SEQ ID NO: 1695685 - RNA, 17 nt, Human
auuguaauuauaucuga

SEQ ID NO: 1695686 - RNA, 15 nt, Human
auuguaauuauaucu

SEQ ID NO: 1695687 - RNA, 21 nt, Human
auuguaauuauaucugaggaa

SEQ ID NO: 1695688 - RNA, 16 nt, Human
auuguacaaaguauua

SEQ ID NO: 1695689 - RNA, 17 nt, Human
auuguacaaaguauuaa

SEQ ID NO: 1695690 - RNA, 19 nt, Human
auuguacaaaguauuaagc

SEQ ID NO: 1695691 - RNA, 16 nt, Human
caguauuguacaaagu

SEQ ID NO: 1695692 - RNA, 17 nt, Human
caguauuguacaaagua

SEQ ID NO: 1695693 - RNA, 18 nt, Human
caguauuguacaaaguau

SEQ ID NO: 1695694 - RNA, 19 nt, Human
caguauuguacaaaguauu

SEQ ID NO: 1695695 - RNA, 12 nt, Human
caguauuguaca

SEQ ID NO: 1695696 - RNA, 13 nt, Human
caguauuguacaa

SEQ ID NO: 1695697 - RNA, 21 nt, Human
caguauuguacaaaguauuaa

SEQ ID NO: 1695698 - RNA, 18 nt, Human
cauugguucuuguauuaa

SEQ ID NO: 1695699 - RNA, 22 nt, Human
cauugguucuuguauuaagaau

SEQ ID NO: 1695700 - RNA, 22 nt, Human
cuuaaaguugaauuuauuggcu

SEQ ID NO: 1695701 - RNA, 13 nt, Human
cuuaaauaauaaa

SEQ ID NO: 1695702 - RNA, 22 nt, Human
cuuaaauaauaaagaucaugua

SEQ ID NO: 1695703 - RNA, 14 nt, Human
cuuaaaguugaauu

SEQ ID NO: 1695704 - RNA, 15 nt, Human
cuuaaaguugaauuu

SEQ ID NO: 1695705 - RNA, 18 nt, Human
cuuaaaguugaauuuauu

SEQ ID NO: 1695706 - RNA, 14 nt, Human
cuguuauuuauaau

SEQ ID NO: 1695707 - RNA, 20 nt, Human
cuguuauuuauaaucacuuu

SEQ ID NO: 1695708 - RNA, 18 nt, Human
gaacacuccaauuaagga

SEQ ID NO: 1695709 - RNA, 20 nt, Human
gaacacuccaauuaaggauu

SEQ ID NO: 1695710 - RNA, 12 nt, Human
gaaaucuuuaaa

SEQ ID NO: 1695711 - RNA, 15 nt, Human
gaaaucuuuaaaaaa

SEQ ID NO: 1695712 - RNA, 21 nt, Human
gaaacugcuuguuuccuagca

SEQ ID NO: 1695713 - RNA, 17 nt, Human
gaaacuggguuccugca

SEQ ID NO: 1695714 - RNA, 14 nt, Human
cuugucucagauuu

SEQ ID NO: 1695715 - RNA, 17 nt, Human
cuugucucagauuuuau

SEQ ID NO: 1695716 - RNA, 13 nt, Human
cuugucucagauu

SEQ ID NO: 1695717 - RNA, 18 nt, Human
cuugucucagauuuuauu

SEQ ID NO: 1695718 - RNA, 14 nt, Human
cuuucagauacugg

SEQ ID NO: 1695719 - RNA, 15 nt, Human
cuuucagauacugga

SEQ ID NO: 1695720 - RNA, 17 nt, Human
cuuucagauacuggauu

SEQ ID NO: 1695721 - RNA, 22 nt, Human
cuuucagauacuggauuguacu

SEQ ID NO: 1695722 - RNA, 13 nt, Human
gcauaacauaaau

SEQ ID NO: 1695723 - RNA, 15 nt, Human
gcauaacauaaaucu

SEQ ID NO: 1695724 - RNA, 17 nt, Human
gcaaaaauauuuuauga

SEQ ID NO: 1695725 - RNA, 22 nt, Human
gcaaaaauauuuuaugauccag

SEQ ID NO: 1695726 - RNA, 23 nt, Human
gcaaaaauauuuuaugauccagc

SEQ ID NO: 1695727 - RNA, 16 nt, Human
gcaaaaauauuuuaug

SEQ ID NO: 1695728 - RNA, 21 nt, Human
gauucuuaaaguugaauuuau

SEQ ID NO: 1695729 - RNA, 16 nt, Human
gauucuuaaaguugaa

SEQ ID NO: 1695730 - RNA, 17 nt, Human
gauucuuaaaguugaau

SEQ ID NO: 1695731 - RNA, 15 nt, Human
gauucuuaaaguuga

SEQ ID NO: 1695732 - RNA, 14 nt, Human
gaugucuucauacc

SEQ ID NO: 1695733 - RNA, 18 nt, Human
gaugucuucauaccuaca

SEQ ID NO: 1695734 - RNA, 19 nt, Human
gacuuuggauaauaaggaa

SEQ ID NO: 1695735 - RNA, 13 nt, Human
aaaguauuaagca

SEQ ID NO: 1695736 - RNA, 18 nt, Human
aaaguauuaagcauauau

SEQ ID NO: 1695737 - RNA, 19 nt, Human
aaaguauuaagcauauauu

SEQ ID NO: 1695738 - RNA, 20 nt, Human
aaaguauuaagcauauauuu

SEQ ID NO: 1695739 - RNA, 13 nt, Human
aaaguugccuaaa

SEQ ID NO: 1695740 - RNA, 14 nt, Human
aaaguugccuaaau

SEQ ID NO: 1695741 - RNA, 12 nt, Human
aaaguuuaauau

SEQ ID NO: 1695742 - RNA, 14 nt, Human
aaaguuuaauauua

SEQ ID NO: 1695743 - RNA, 16 nt, Human
aaaguugccuaaaucc

SEQ ID NO: 1695744 - RNA, 17 nt, Human
aaaguugccuaaaucca

SEQ ID NO: 1695745 - RNA, 23 nt, Human
aaaguugccuaaauccauuugga

SEQ ID NO: 1695746 - RNA, 13 nt, Human
aaauacaauuuug

SEQ ID NO: 1695747 - RNA, 14 nt, Human
aaauacaauuuugu

SEQ ID NO: 1695748 - RNA, 17 nt, Human
aaauacaauuuuguuuc

SEQ ID NO: 1695749 - RNA, 18 nt, Human
aaauacaauuuuguuucu

SEQ ID NO: 1695750 - RNA, 20 nt, Human
aaauacaauuuuguuucugu

SEQ ID NO: 1695751 - RNA, 21 nt, Human
aaauacaauuuuguuucugua

SEQ ID NO: 1695752 - RNA, 22 nt, Human
aaauacaauuuuguuucuguac

SEQ ID NO: 1695753 - RNA, 15 nt, Human
aaaccucugugagca

SEQ ID NO: 1695754 - RNA, 13 nt, Human
aaacugcuuguuu

SEQ ID NO: 1695755 - RNA, 14 nt, Human
aaacugcuuguuuc

SEQ ID NO: 1695756 - RNA, 17 nt, Human
aaacugcuuguuuccua

SEQ ID NO: 1695757 - RNA, 19 nt, Human
aaacugcuuguuuccuagc

SEQ ID NO: 1695758 - RNA, 22 nt, Human
aaacugcuuguuuccuagcaca

SEQ ID NO: 1695759 - RNA, 11 nt, Human
aaacuuuucug

SEQ ID NO: 1695760 - RNA, 20 nt, Human
aaaggaagguucugguguga

SEQ ID NO: 1695761 - RNA, 15 nt, Human
ggcuguacccaggaa

SEQ ID NO: 1695762 - RNA, 17 nt, Human
aaaaccaguauuguaca

SEQ ID NO: 1695763 - RNA, 16 nt, Human
ggcauaacauaaaucu

SEQ ID NO: 1695764 - RNA, 17 nt, Human
ggcauaacauaaaucug

SEQ ID NO: 1695765 - RNA, 22 nt, Human
ggacuucuuuaauuuuggaauu

SEQ ID NO: 1695766 - RNA, 21 nt, Human
ggacuucuuuaauuuuggaau

SEQ ID NO: 1695767 - RNA, 18 nt, Human
ggacuucuuuaauuuugg

SEQ ID NO: 1695768 - RNA, 15 nt, Human
ggacuuguuagaucu

SEQ ID NO: 1695769 - RNA, 12 nt, Human
ggacuuguuaga

SEQ ID NO: 1695770 - RNA, 22 nt, Human
gcugggguuaucugaagucaga

SEQ ID NO: 1695771 - RNA, 23 nt, Human
gcugggguuaucugaagucagau

SEQ ID NO: 1695772 - RNA, 14 nt, Human
gcugggguuaucug

SEQ ID NO: 1695773 - RNA, 22 nt, Human
gcuauuucuauauuuucauucu

SEQ ID NO: 1695774 - RNA, 16 nt, Human
auuugacauagucugg

SEQ ID NO: 1695775 - RNA, 17 nt, Human
auuugacauagucuggc

SEQ ID NO: 1695776 - RNA, 21 nt, Human
auuugacauagucuggcugua

SEQ ID NO: 1695777 - RNA, 15 nt, Human
auuugaauuuugugu

SEQ ID NO: 1695778 - RNA, 13 nt, Human
auuggcuuuucug

SEQ ID NO: 1695779 - RNA, 15 nt, Human
auuggcuuuucugau

SEQ ID NO: 1695780 - RNA, 16 nt, Human
auuggcuuuucugauc

SEQ ID NO: 1695781 - RNA, 19 nt, Human
auuggcuuuucugauccag

SEQ ID NO: 1695782 - RNA, 20 nt, Human
auuggcuuuucugauccagu

SEQ ID NO: 1695783 - RNA, 15 nt, Human
auugguucuuguauu

SEQ ID NO: 1695784 - RNA, 16 nt, Human
auugguucuuguauua

SEQ ID NO: 1695785 - RNA, 12 nt, Human
auuuuggaauuu

SEQ ID NO: 1695786 - RNA, 11 nt, Human
auuuuguuucu

SEQ ID NO: 1695787 - RNA, 14 nt, Human
auuuuguuucugua

SEQ ID NO: 1695788 - RNA, 15 nt, Human
auuuuguuucuguac

SEQ ID NO: 1695789 - RNA, 21 nt, Human
auucuuaaaguugaauuuauu

SEQ ID NO: 1695790 - RNA, 15 nt, Human
auucuguauagauua

SEQ ID NO: 1695791 - RNA, 19 nt, Human
auucuuaaaguugaauuua

SEQ ID NO: 1695792 - RNA, 20 nt, Human
auucuuaaaguugaauuuau

SEQ ID NO: 1695793 - RNA, 22 nt, Human
auugaagcauuuuauaaaucgc

SEQ ID NO: 1695794 - RNA, 11 nt, Human
auucuguauag

SEQ ID NO: 1695795 - RNA, 12 nt, Human
auucuguauaga

SEQ ID NO: 1695796 - RNA, 13 nt, Human
auucuguauagau

SEQ ID NO: 1695797 - RNA, 17 nt, Human
auuauucaaaguugccu

SEQ ID NO: 1695798 - RNA, 14 nt, Human
auuauucaaaguug

SEQ ID NO: 1695799 - RNA, 15 nt, Human
auuauucaaaguugc

SEQ ID NO: 1695800 - RNA, 13 nt, Human
auuauucaaaguu

SEQ ID NO: 1695801 - RNA, 20 nt, Human
uuucuguacuuuuuggcaua

SEQ ID NO: 1695802 - RNA, 19 nt, Human
uuucuguacuuuuuggcau

SEQ ID NO: 1695803 - RNA, 19 nt, Human
uuucuguuauauaaauggu

SEQ ID NO: 1695804 - RNA, 15 nt, Human
augggauaaaugcca

SEQ ID NO: 1695805 - RNA, 16 nt, Human
augggauaaaugccau

SEQ ID NO: 1695806 - RNA, 20 nt, Human
augggauaaaugccaucaau

SEQ ID NO: 1695807 - RNA, 14 nt, Human
auguaaaucccauu

SEQ ID NO: 1695808 - RNA, 20 nt, Human
auguaaaucccauuauucaa

SEQ ID NO: 1695809 - RNA, 22 nt, Human
auguaaaucccauuauucaaag

SEQ ID NO: 1695810 - RNA, 23 nt, Human
auguaaaucccauuauucaaagu

SEQ ID NO: 1695811 - RNA, 21 nt, Human
uuuggcauaacauaaaucugu

SEQ ID NO: 1695812 - RNA, 20 nt, Human
uuuggcauaacauaaaucug

SEQ ID NO: 1695813 - RNA, 19 nt, Human
uuugugcugguguaugugu

SEQ ID NO: 1695814 - RNA, 21 nt, Human
uuuaaauaaauaaauagcuag

SEQ ID NO: 1695815 - RNA, 10 nt, Human
augauccagc

SEQ ID NO: 1695816 - RNA, 19 nt, Human
augauccagcagauuauuc

SEQ ID NO: 1695817 - RNA, 20 nt, Human
augauccagcagauuauuca

SEQ ID NO: 1695818 - RNA, 22 nt, Human
augauccagcagauuauucacu

SEQ ID NO: 1695819 - RNA, 14 nt, Human
augggauaaaugcc

SEQ ID NO: 1695820 - RNA, 16 nt, Human
auggacuguggugacu

SEQ ID NO: 1695821 - RNA, 17 nt, Human
auggacuguggugacuu

SEQ ID NO: 1695822 - RNA, 22 nt, Human
auggacuguggugacuuuggau

SEQ ID NO: 1695823 - RNA, 19 nt, Human
uuucauuauuuuauuauga

SEQ ID NO: 1695824 - RNA, 20 nt, Human
uuucauuauuuuauuaugaa

SEQ ID NO: 1695825 - RNA, 13 nt, Human
uuucauuauuuua

SEQ ID NO: 1695826 - RNA, 15 nt, Human
uuucauuauuuuauu

SEQ ID NO: 1695827 - RNA, 15 nt, Human
auggaacgcguugaa

SEQ ID NO: 1695828 - RNA, 16 nt, Human
auggaacgcguugaaa

SEQ ID NO: 1695829 - RNA, 17 nt, Human
auggaacgcguugaaau

SEQ ID NO: 1695830 - RNA, 18 nt, Human
auggaacgcguugaaauu

SEQ ID NO: 1695831 - RNA, 19 nt, Human
auggaacgcguugaaauug

SEQ ID NO: 1695832 - RNA, 14 nt, Human
uuuauuacaguaua

SEQ ID NO: 1695833 - RNA, 18 nt, Human
uuuauuacaguauaauua

SEQ ID NO: 1695834 - RNA, 21 nt, Human
augcuauuucuauauuuucau

SEQ ID NO: 1695835 - RNA, 22 nt, Human
augcuauuucuauauuuucauu

SEQ ID NO: 1695836 - RNA, 23 nt, Human
augcuauuucuauauuuucauuc

SEQ ID NO: 1695837 - RNA, 13 nt, Human
augcuauuucuau

SEQ ID NO: 1695838 - RNA, 14 nt, Human
augcuauuucuaua

SEQ ID NO: 1695839 - RNA, 15 nt, Human
augcuauuucuauau

SEQ ID NO: 1695840 - RNA, 20 nt, Human
augcuauuucuauauuuuca

SEQ ID NO: 1695841 - RNA, 11 nt, Human
augcuauuucu

SEQ ID NO: 1695842 - RNA, 16 nt, Human
uuuauauuuacuaaaa

SEQ ID NO: 1695843 - RNA, 13 nt, Human
uuuauauuuacua

SEQ ID NO: 1695844 - RNA, 20 nt, Human
auccauuuggaaaucuuuaa

SEQ ID NO: 1695845 - RNA, 21 nt, Human
auccauuuggaaaucuuuaaa

SEQ ID NO: 1695846 - RNA, 13 nt, Human
uugaaauuguaau

SEQ ID NO: 1695847 - RNA, 14 nt, Human
uugaaauuguaauu

SEQ ID NO: 1695848 - RNA, 15 nt, Human
uugaaauuguaauua

SEQ ID NO: 1695849 - RNA, 17 nt, Human
uugaaauuguaauuaua

SEQ ID NO: 1695850 - RNA, 23 nt, Human
aucaccugucuugccuuuuucau

SEQ ID NO: 1695851 - RNA, 22 nt, Human
aucaccugucuugccuuuuuca

SEQ ID NO: 1695852 - RNA, 15 nt, Human
aucugacaucucugc

SEQ ID NO: 1695853 - RNA, 16 nt, Human
aucugacaucucugca

SEQ ID NO: 1695854 - RNA, 20 nt, Human
aucugacaucucugcaaucu

SEQ ID NO: 1695855 - RNA, 20 nt, Human
auccucucaaccaccuuuca

SEQ ID NO: 1695856 - RNA, 23 nt, Human
uugaagcauuuuauaaaucgcuu

SEQ ID NO: 1695857 - RNA, 11 nt, Human
aucugccuaag

SEQ ID NO: 1695858 - RNA, 21 nt, Human
aucugccuaaggacuucuuua

SEQ ID NO: 1695859 - RNA, 22 nt, Human
aucugccuaaggacuucuuuaa

SEQ ID NO: 1695860 - RNA, 23 nt, Human
aucugccuaaggacuucuuuaau

SEQ ID NO: 1695861 - RNA, 14 nt, Human
uuagaauucuguau

SEQ ID NO: 1695862 - RNA, 15 nt, Human
uuagaauucuguaua

SEQ ID NO: 1695863 - RNA, 17 nt, Human
uuagaauucuguauaga

SEQ ID NO: 1695864 - RNA, 15 nt, Human
auaaaucugugaacu

SEQ ID NO: 1695865 - RNA, 16 nt, Human
auaaaucugugaacuu

SEQ ID NO: 1695866 - RNA, 19 nt, Human
auaaaucugugaacuugaa

SEQ ID NO: 1695867 - RNA, 17 nt, Human
auaaaugccaucaauaa

SEQ ID NO: 1695868 - RNA, 18 nt, Human
auaaaugccaucaauaaa

SEQ ID NO: 1695869 - RNA, 14 nt, Human
auaaaucgcuuuug

SEQ ID NO: 1695870 - RNA, 16 nt, Human
auaaaucgcuuuugau

SEQ ID NO: 1695871 - RNA, 19 nt, Human
auaaaucgcuuuugauaau

SEQ ID NO: 1695872 - RNA, 21 nt, Human
auaaaucgcuuuugauaauca

SEQ ID NO: 1695873 - RNA, 14 nt, Human
uuaauuuuggaauu

SEQ ID NO: 1695874 - RNA, 15 nt, Human
uuaauuuuggaauuu

SEQ ID NO: 1695875 - RNA, 13 nt, Human
uuaauuuuggaau

SEQ ID NO: 1695876 - RNA, 14 nt, Human
uuaagaaugaaaua

SEQ ID NO: 1695877 - RNA, 20 nt, Human
uuaagaaugaaauacuguuu

SEQ ID NO: 1695878 - RNA, 22 nt, Human
uuaagaaugaaauacuguuuga

SEQ ID NO: 1695879 - RNA, 18 nt, Human
aguuuuguuuggaccaaa

SEQ ID NO: 1695880 - RNA, 14 nt, Human
aguuuuguuuggac

SEQ ID NO: 1695881 - RNA, 16 nt, Human
aguuuuguuuggacca

SEQ ID NO: 1695882 - RNA, 12 nt, Human
aguuuuguuugg

SEQ ID NO: 1695883 - RNA, 17 nt, Human
uuaaaccaugggauaaa

SEQ ID NO: 1695884 - RNA, 22 nt, Human
uuaaacauugguucuuguauua

SEQ ID NO: 1695885 - RNA, 18 nt, Human
uuaaacauugguucuugu

SEQ ID NO: 1695886 - RNA, 20 nt, Human
uuaaacauugguucuuguau

SEQ ID NO: 1695887 - RNA, 13 nt, Human
uuaaaguugaauu

SEQ ID NO: 1695888 - RNA, 16 nt, Human
uuaaaguugaauuuau

SEQ ID NO: 1695889 - RNA, 17 nt, Human
uuaaaguugaauuuauu

SEQ ID NO: 1695890 - RNA, 22 nt, Human
uuaaaguugaauuuauuggcuu

SEQ ID NO: 1695891 - RNA, 21 nt, Human
uuaaaccaugggauaaaugcc

SEQ ID NO: 1695892 - RNA, 22 nt, Human
uuaaaccaugggauaaaugcca

SEQ ID NO: 1695893 - RNA, 23 nt, Human
uuaaaccaugggauaaaugccau

SEQ ID NO: 1695894 - RNA, 19 nt, Human
aguuugugcugguguaugu

SEQ ID NO: 1695895 - RNA, 16 nt, Human
uuaugugcgcugauaa

SEQ ID NO: 1695896 - RNA, 11 nt, Human
uuauguaaauc

SEQ ID NO: 1695897 - RNA, 12 nt, Human
uuauguaaaucc

SEQ ID NO: 1695898 - RNA, 13 nt, Human
uuauguaaauccc

SEQ ID NO: 1695899 - RNA, 19 nt, Human
uuauguaaaucccauuauu

SEQ ID NO: 1695900 - RNA, 21 nt, Human
uuauguaaaucccauuauuca

SEQ ID NO: 1695901 - RNA, 22 nt, Human
uuauguaaaucccauuauucaa

SEQ ID NO: 1695902 - RNA, 23 nt, Human
uuauguaaaucccauuauucaaa

SEQ ID NO: 1695903 - RNA, 22 nt, Human
uuaugauccagcagauuauuca

SEQ ID NO: 1695904 - RNA, 23 nt, Human
uuaugauccagcagauuauucac

SEQ ID NO: 1695905 - RNA, 16 nt, Human
uuaugaaacuugugua

SEQ ID NO: 1695906 - RNA, 18 nt, Human
uuaugaaacuuguguaaa

SEQ ID NO: 1695907 - RNA, 13 nt, Human
uuaugaaacuugu

SEQ ID NO: 1695908 - RNA, 19 nt, Human
uuaugaaacuuguguaaau

SEQ ID NO: 1695909 - RNA, 13 nt, Human
uuaugauccagca

SEQ ID NO: 1695910 - RNA, 18 nt, Human
uuaugauccagcagauua

SEQ ID NO: 1695911 - RNA, 19 nt, Human
uuaugacuucauuaauaau

SEQ ID NO: 1695912 - RNA, 22 nt, Human
uuaugacuucauuaauaauaaa

SEQ ID NO: 1695913 - RNA, 15 nt, Human
auacuggauuguacu

SEQ ID NO: 1695914 - RNA, 14 nt, Human
uuauucacugauuu

SEQ ID NO: 1695915 - RNA, 13 nt, Human
uuauucaaaguug

SEQ ID NO: 1695916 - RNA, 15 nt, Human
uuauucaaaguugcc

SEQ ID NO: 1695917 - RNA, 19 nt, Human
uuauucaaaguugccuaaa

SEQ ID NO: 1695918 - RNA, 16 nt, Human
uuauuauguaaauccc

SEQ ID NO: 1695919 - RNA, 22 nt, Human
uuauuauguaaaucccauuauu

SEQ ID NO: 1695920 - RNA, 13 nt, Human
uuauuauguaaau

SEQ ID NO: 1695921 - RNA, 14 nt, Human
uuauuauguaaauc

SEQ ID NO: 1695922 - RNA, 17 nt, Human
uuauuaugaaacuugug

SEQ ID NO: 1695923 - RNA, 20 nt, Human
uuauuaugaaacuuguguaa

SEQ ID NO: 1695924 - RNA, 21 nt, Human
uuauuaugaaacuuguguaaa

SEQ ID NO: 1695925 - RNA, 22 nt, Human
uuauuaugaaacuuguguaaau

SEQ ID NO: 1695926 - RNA, 23 nt, Human
uuauuaugaaacuuguguaaaua

SEQ ID NO: 1695927 - RNA, 11 nt, Human
uuauuaugaaa

SEQ ID NO: 1695928 - RNA, 14 nt, Human
auagaaccucuuug

SEQ ID NO: 1695929 - RNA, 20 nt, Human
auagaaccucuuugucuaca

SEQ ID NO: 1695930 - RNA, 22 nt, Human
auagauuagagaguguugaaac

SEQ ID NO: 1695931 - RNA, 13 nt, Human
auagauuagaauu

SEQ ID NO: 1695932 - RNA, 15 nt, Human
auagauuagaauucu

SEQ ID NO: 1695933 - RNA, 16 nt, Human
auagauuagaauucug

SEQ ID NO: 1695934 - RNA, 21 nt, Human
auagauuagagaguguugaaa

SEQ ID NO: 1695935 - RNA, 21 nt, Human
auagaggaagccugauuaaag

SEQ ID NO: 1695936 - RNA, 22 nt, Human
auagaggaagccugauuaaaga

SEQ ID NO: 1695937 - RNA, 19 nt, Human
ugugcugggguuaucugaa

SEQ ID NO: 1695938 - RNA, 20 nt, Human
ugugcugguguaugugugaa

SEQ ID NO: 1695939 - RNA, 21 nt, Human
agugaguuggguguauugugc

SEQ ID NO: 1695940 - RNA, 17 nt, Human
agucuugucucagauuu

SEQ ID NO: 1695941 - RNA, 19 nt, Human
agucuugucucagauuuua

SEQ ID NO: 1695942 - RNA, 16 nt, Human
agucuugucucagauu

SEQ ID NO: 1695943 - RNA, 20 nt, Human
agucuugucucagauuuuau

SEQ ID NO: 1695944 - RNA, 21 nt, Human
agucuugucucagauuuuauu

SEQ ID NO: 1695945 - RNA, 16 nt, Human
uguguuagagauuuuu

SEQ ID NO: 1695946 - RNA, 13 nt, Human
aguauaauuaaca

SEQ ID NO: 1695947 - RNA, 14 nt, Human
aguauaauuaacau

SEQ ID NO: 1695948 - RNA, 16 nt, Human
aguauaauuaacaugu

SEQ ID NO: 1695949 - RNA, 23 nt, Human
aguauaauuaacauguuaaacca

SEQ ID NO: 1695950 - RNA, 12 nt, Human
aguauuaagcau

SEQ ID NO: 1695951 - RNA, 14 nt, Human
aguauuaagcauau

SEQ ID NO: 1695952 - RNA, 23 nt, Human
uggagccugcacggugaauggcu

SEQ ID NO: 1695953 - RNA, 17 nt, Human
uggaauuuuccuccuuu

SEQ ID NO: 1695954 - RNA, 21 nt, Human
uggaauuuuccuccuuucucu

SEQ ID NO: 1695955 - RNA, 16 nt, Human
aggauuuuaugcuuua

SEQ ID NO: 1695956 - RNA, 17 nt, Human
aggauuuuaugcuuuaa

SEQ ID NO: 1695957 - RNA, 11 nt, Human
aggauuuuaug

SEQ ID NO: 1695958 - RNA, 14 nt, Human
aggauuuuaugcuu

SEQ ID NO: 1695959 - RNA, 15 nt, Human
aggauuuuaugcuuu

SEQ ID NO: 1695960 - RNA, 17 nt, Human
aggaauucuguauagau

SEQ ID NO: 1695961 - RNA, 22 nt, Human
aggaauucuguauagauuagaa

SEQ ID NO: 1695962 - RNA, 16 nt, Human
aggaauucuguauaga

SEQ ID NO: 1695963 - RNA, 23 nt, Human
aggaauucuguauagauuagaau

SEQ ID NO: 1695964 - RNA, 23 nt, Human
aggaaaaguuuaauauuaaagcc

SEQ ID NO: 1695965 - RNA, 24 nt, Human
aggaaaaguuuaauauuaaagcca

SEQ ID NO: 1695966 - RNA, 21 nt, Human
aggaaaaguuuaauauuaaag

SEQ ID NO: 1695967 - RNA, 19 nt, Human
aggaaacuggguuccugca

SEQ ID NO: 1695968 - RNA, 13 nt, Human
ugccuuuuucauu

SEQ ID NO: 1695969 - RNA, 14 nt, Human
ugccuuuuucauua

SEQ ID NO: 1695970 - RNA, 15 nt, Human
ugccuuuuucauuau

SEQ ID NO: 1695971 - RNA, 16 nt, Human
ugccuuuuucauuauu

SEQ ID NO: 1695972 - RNA, 17 nt, Human
ugccuuuuucauuauuu

SEQ ID NO: 1695973 - RNA, 21 nt, Human
ugccuuuuucauuauuuuauu

SEQ ID NO: 1695974 - RNA, 18 nt, Human
agccugcacggugaaugg

SEQ ID NO: 1695975 - RNA, 16 nt, Human
agccugcacggugaau

SEQ ID NO: 1695976 - RNA, 14 nt, Human
agccugauuaaaga

SEQ ID NO: 1695977 - RNA, 14 nt, Human
ucugccuaaggacu

SEQ ID NO: 1695978 - RNA, 15 nt, Human
ucugccuaaggacuu

SEQ ID NO: 1695979 - RNA, 16 nt, Human
ucugccuaaggacuuc

SEQ ID NO: 1695980 - RNA, 13 nt, Human
ucugccuaaggac

SEQ ID NO: 1695981 - RNA, 22 nt, Human
agaaccucuuugucuacaccau

SEQ ID NO: 1695982 - RNA, 16 nt, Human
acuuuugguuaagucu

SEQ ID NO: 1695983 - RNA, 20 nt, Human
acuuuugguuaagucuguuu

SEQ ID NO: 1695984 - RNA, 22 nt, Human
acuuuugguuaagucuguuuua

SEQ ID NO: 1695985 - RNA, 13 nt, Human
acuuuuuuccaca

SEQ ID NO: 1695986 - RNA, 21 nt, Human
acuuguguaaauacaauuuug

SEQ ID NO: 1695987 - RNA, 22 nt, Human
acuuguguaaauacaauuuugu

SEQ ID NO: 1695988 - RNA, 23 nt, Human
acuuguguaaauacaauuuuguu

SEQ ID NO: 1695989 - RNA, 12 nt, Human
ucuccauuuaau

SEQ ID NO: 1695990 - RNA, 16 nt, Human
ucuccauuuaauaauu

SEQ ID NO: 1695991 - RNA, 19 nt, Human
ucuccauuuaauaauuaua

SEQ ID NO: 1695992 - RNA, 14 nt, Human
ucuuuaauuuugga

SEQ ID NO: 1695993 - RNA, 15 nt, Human
ucuuuaauuuuggaa

SEQ ID NO: 1695994 - RNA, 16 nt, Human
ucuuuaauuuuggaau

SEQ ID NO: 1695995 - RNA, 17 nt, Human
ucuuuaauuuuggaauu

SEQ ID NO: 1695996 - RNA, 18 nt, Human
ucuuuaauuuuggaauuu

SEQ ID NO: 1695997 - RNA, 13 nt, Human
ucuuuaauuuugg

SEQ ID NO: 1695998 - RNA, 16 nt, Human
ucuguauagauuagag

SEQ ID NO: 1695999 - RNA, 17 nt, Human
ucuguauagauuagaau

SEQ ID NO: 1696000 - RNA, 12 nt, Human
ugaauuuauugg

SEQ ID NO: 1696001 - RNA, 15 nt, Human
ugaauuuauuggcuu

SEQ ID NO: 1696002 - RNA, 16 nt, Human
ugaauuuauuggcuuu

SEQ ID NO: 1696003 - RNA, 16 nt, Human
agauuauucacugauu

SEQ ID NO: 1696004 - RNA, 22 nt, Human
ugacuucauuaauaauaaauuc

SEQ ID NO: 1696005 - RNA, 15 nt, Human
agcaaaaauauuuua

SEQ ID NO: 1696006 - RNA, 17 nt, Human
agcaaaaauauuuuaug

SEQ ID NO: 1696007 - RNA, 18 nt, Human
agcaaaaauauuuuauga

SEQ ID NO: 1696008 - RNA, 19 nt, Human
agcaaaaauauuuuaugau

SEQ ID NO: 1696009 - RNA, 23 nt, Human
agcaaaaauauuuuaugauccag

SEQ ID NO: 1696010 - RNA, 21 nt, Human
agauuuuauuauguaaauccc

SEQ ID NO: 1696011 - RNA, 20 nt, Human
agauuuuauuauguaaaucc

SEQ ID NO: 1696012 - RNA, 22 nt, Human
agauuuuauuauguaaauccca

SEQ ID NO: 1696013 - RNA, 18 nt, Human
ugaggaauucuguauaga

SEQ ID NO: 1696014 - RNA, 19 nt, Human
ugaggaauucuguauagau

SEQ ID NO: 1696015 - RNA, 14 nt, Human
ugaggaauucugua

SEQ ID NO: 1696016 - RNA, 15 nt, Human
ugaggaauucuguau

SEQ ID NO: 1696017 - RNA, 16 nt, Human
ugaggaauucuguaua

SEQ ID NO: 1696018 - RNA, 19 nt, Human
agcagauuauucacugauu

SEQ ID NO: 1696019 - RNA, 20 nt, Human
agcagauuauucacugauuu

SEQ ID NO: 1696020 - RNA, 15 nt, Human
agcagauuauucacu

SEQ ID NO: 1696021 - RNA, 16 nt, Human
agcagauuauucacug

SEQ ID NO: 1696022 - RNA, 14 nt, Human
agcagauuauucac

SEQ ID NO: 1696023 - RNA, 16 nt, Human
ucagauuuuauuaugu

SEQ ID NO: 1696024 - RNA, 19 nt, Human
ucagauuuuauuauguaaa

SEQ ID NO: 1696025 - RNA, 20 nt, Human
ucagauuuuauuauguaaau

SEQ ID NO: 1696026 - RNA, 22 nt, Human
ucagauuuuauuauguaaaucc

SEQ ID NO: 1696027 - RNA, 14 nt, Human
ucagauuuuauuau

SEQ ID NO: 1696028 - RNA, 15 nt, Human
ucagauuuuauuaug

SEQ ID NO: 1696029 - RNA, 13 nt, Human
ucagauuuuauua

SEQ ID NO: 1696030 - RNA, 21 nt, Human
ucagaucugccuaaggacuuc

SEQ ID NO: 1696031 - RNA, 18 nt, Human
uccacauaaggaaacugg

SEQ ID NO: 1696032 - RNA, 21 nt, Human
uccugcaaugaagucucugaa

SEQ ID NO: 1696033 - RNA, 15 nt, Human
uccugcaaugaaguc

SEQ ID NO: 1696034 - RNA, 18 nt, Human
uccugcaaugaagucucu

SEQ ID NO: 1696035 - RNA, 20 nt, Human
uccugcaaugaagucucuga

SEQ ID NO: 1696036 - RNA, 16 nt, Human
acuggauuguacuuug

SEQ ID NO: 1696037 - RNA, 13 nt, Human
acuggauuguacu

SEQ ID NO: 1696038 - RNA, 22 nt, Human
acucuccauuuaauaauuauau

SEQ ID NO: 1696039 - RNA, 17 nt, Human
uccuagcacacacuuuu

SEQ ID NO: 1696040 - RNA, 18 nt, Human
uccuagcacacacuuuug

SEQ ID NO: 1696041 - RNA, 19 nt, Human
uccuagcacacacuuuugg

SEQ ID NO: 1696042 - RNA, 14 nt, Human
uccgugcuaaggac

SEQ ID NO: 1696043 - RNA, 15 nt, Human
uccgugcuaaggacu

SEQ ID NO: 1696044 - RNA, 17 nt, Human
acuccaauuaaggauuu

SEQ ID NO: 1696045 - RNA, 21 nt, Human
acuccaauuaaggauuuuaug

SEQ ID NO: 1696046 - RNA, 13 nt, Human
acuauauauguga

SEQ ID NO: 1696047 - RNA, 21 nt, Human
ucccuauuuuuuuucuguuau

SEQ ID NO: 1696048 - RNA, 22 nt, Human
ucccuauuuuuuuucuguuaua

SEQ ID NO: 1696049 - RNA, 20 nt, Human
uaugauccagcagauuauuc

SEQ ID NO: 1696050 - RNA, 21 nt, Human
uaugauccagcagauuauuca

SEQ ID NO: 1696051 - RNA, 22 nt, Human
uaugauccagcagauuauucac

SEQ ID NO: 1696052 - RNA, 15 nt, Human
uaugcugaguuugug

SEQ ID NO: 1696053 - RNA, 11 nt, Human
uaugauccagc

SEQ ID NO: 1696054 - RNA, 19 nt, Human
uaugauccagcagauuauu

SEQ ID NO: 1696055 - RNA, 10 nt, Human
uaugauccag

SEQ ID NO: 1696056 - RNA, 20 nt, Human
uaucaccugucuugccuuuu

SEQ ID NO: 1696057 - RNA, 19 nt, Human
uauagauuagagaguguug

SEQ ID NO: 1696058 - RNA, 22 nt, Human
uauagauuagagaguguugaaa

SEQ ID NO: 1696059 - RNA, 20 nt, Human
uauagauuagaauucuguau

SEQ ID NO: 1696060 - RNA, 15 nt, Human
acacuccaauuaagg

SEQ ID NO: 1696061 - RNA, 16 nt, Human
acacuccaauuaagga

SEQ ID NO: 1696062 - RNA, 15 nt, Human
uauuggcuuuucuga

SEQ ID NO: 1696063 - RNA, 16 nt, Human
uauuggcuuuucugau

SEQ ID NO: 1696064 - RNA, 17 nt, Human
uauuggcuuuucugauc

SEQ ID NO: 1696065 - RNA, 18 nt, Human
uauuggcuuuucugaucc

SEQ ID NO: 1696066 - RNA, 14 nt, Human
uauuggcuuuucug

SEQ ID NO: 1696067 - RNA, 21 nt, Human
uauuggcuuuucugauccagu

SEQ ID NO: 1696068 - RNA, 22 nt, Human
uauuggcuuuucugauccaguu

SEQ ID NO: 1696069 - RNA, 12 nt, Human
uauugaagcauu

SEQ ID NO: 1696070 - RNA, 13 nt, Human
uauugaagcauuu

SEQ ID NO: 1696071 - RNA, 15 nt, Human
uauugaagcauuuua

SEQ ID NO: 1696072 - RNA, 16 nt, Human
uauugaagcauuuuau

SEQ ID NO: 1696073 - RNA, 17 nt, Human
uauugaagcauuuuaua

SEQ ID NO: 1696074 - RNA, 19 nt, Human
uauugaagcauuuuauaaa

SEQ ID NO: 1696075 - RNA, 15 nt, Human
uauuguacaaaguau

SEQ ID NO: 1696076 - RNA, 16 nt, Human
uauuguacaaaguauu

SEQ ID NO: 1696077 - RNA, 21 nt, Human
uauuguacaaaguauuaagca

SEQ ID NO: 1696078 - RNA, 22 nt, Human
uauuguacaaaguauuaagcau

SEQ ID NO: 1696079 - RNA, 23 nt, Human
uauuguacaaaguauuaagcaua

SEQ ID NO: 1696080 - RNA, 18 nt, Human
uauuuacuaaaauggacu

SEQ ID NO: 1696081 - RNA, 21 nt, Human
acaguauaauuaacauguuaa

SEQ ID NO: 1696082 - RNA, 23 nt, Human
acaguauaauuaacauguuaaac

SEQ ID NO: 1696083 - RNA, 17 nt, Human
acagcuggugcccugcu

SEQ ID NO: 1696084 - RNA, 20 nt, Human
acagcuggugcccugcuuuc

SEQ ID NO: 1696085 - RNA, 17 nt, Human
uauuaaagccauguuua

SEQ ID NO: 1696086 - RNA, 18 nt, Human
uauuaaagccauguuuau

SEQ ID NO: 1696087 - RNA, 20 nt, Human
uauuaaagccauguuuauua

SEQ ID NO: 1696088 - RNA, 16 nt, Human
uauuacaguauaauua

SEQ ID NO: 1696089 - RNA, 18 nt, Human
uauuacaguauaauuaac

SEQ ID NO: 1696090 - RNA, 20 nt, Human
uauuacaguauaauuaacau

SEQ ID NO: 1696091 - RNA, 21 nt, Human
uauuacaguauaauuaacaug

SEQ ID NO: 1696092 - RNA, 13 nt, Human
uauuaaagccaug

SEQ ID NO: 1696093 - RNA, 14 nt, Human
uauuaaagccaugu

SEQ ID NO: 1696094 - RNA, 12 nt, Human
uauuaaagccau

SEQ ID NO: 1696095 - RNA, 18 nt, Human
uauucaaaguugccuaaa

SEQ ID NO: 1696096 - RNA, 21 nt, Human
uauucaaaguugccuaaaucc

SEQ ID NO: 1696097 - RNA, 22 nt, Human
uauucaaaguugccuaaaucca

SEQ ID NO: 1696098 - RNA, 23 nt, Human
uauucaaaguugccuaaauccau

SEQ ID NO: 1696099 - RNA, 13 nt, Human
uauucacugauuu

SEQ ID NO: 1696100 - RNA, 19 nt, Human
uauucacugauuugacaua

SEQ ID NO: 1696101 - RNA, 22 nt, Human
uauucacugauuugacauaguc

SEQ ID NO: 1696102 - RNA, 13 nt, Human
aauuugaauuuug

SEQ ID NO: 1696103 - RNA, 16 nt, Human
aauuugaauuuugugu

SEQ ID NO: 1696104 - RNA, 18 nt, Human
aauuugaauuuuguguua

SEQ ID NO: 1696105 - RNA, 12 nt, Human
uacucaauuuua

SEQ ID NO: 1696106 - RNA, 13 nt, Human
uacucaauuuuaa

SEQ ID NO: 1696107 - RNA, 14 nt, Human
uacucaauuuuaac

SEQ ID NO: 1696108 - RNA, 21 nt, Human
uagaggaagccugauuaaaga

SEQ ID NO: 1696109 - RNA, 14 nt, Human
uagaaccucuuugu

SEQ ID NO: 1696110 - RNA, 21 nt, Human
uaauuauaugcuauuucuaua

SEQ ID NO: 1696111 - RNA, 13 nt, Human
uaauuauaucuga

SEQ ID NO: 1696112 - RNA, 17 nt, Human
uaauuauaucugaggaa

SEQ ID NO: 1696113 - RNA, 13 nt, Human
aauuaacauguua

SEQ ID NO: 1696114 - RNA, 14 nt, Human
aauuaacauguuaa

SEQ ID NO: 1696115 - RNA, 18 nt, Human
aauuaacauguuaaacca

SEQ ID NO: 1696116 - RNA, 16 nt, Human
aauuaaggauuuuaug

SEQ ID NO: 1696117 - RNA, 20 nt, Human
aauuaaggauuuuaugcuuu

SEQ ID NO: 1696118 - RNA, 22 nt, Human
aauuaaggauuuuaugcuuuaa

SEQ ID NO: 1696119 - RNA, 16 nt, Human
aaggaagguucuggug

SEQ ID NO: 1696120 - RNA, 13 nt, Human
aaguauuaagcau

SEQ ID NO: 1696121 - RNA, 14 nt, Human
aaguauuaagcaua

SEQ ID NO: 1696122 - RNA, 15 nt, Human
guuucuguacuuuuu

SEQ ID NO: 1696123 - RNA, 14 nt, Human
guuugcauagguga

SEQ ID NO: 1696124 - RNA, 10 nt, Human
guuucuguac

SEQ ID NO: 1696125 - RNA, 23 nt, Human
aaggcugaugccaaguuguuuga

SEQ ID NO: 1696126 - RNA, 19 nt, Human
aaguuuaauauuaaagcca

SEQ ID NO: 1696127 - RNA, 20 nt, Human
aaguuuaauauuaaagccau

SEQ ID NO: 1696128 - RNA, 21 nt, Human
aaguuuaauauuaaagccaug

SEQ ID NO: 1696129 - RNA, 18 nt, Human
uaaaccaugggauaaaug

SEQ ID NO: 1696130 - RNA, 20 nt, Human
uaaaccaugggauaaaugcc

SEQ ID NO: 1696131 - RNA, 21 nt, Human
uaaaccaugggauaaaugcca

SEQ ID NO: 1696132 - RNA, 22 nt, Human
uaaaccaugggauaaaugccau

SEQ ID NO: 1696133 - RNA, 16 nt, Human
uaacaacagcuggugc

SEQ ID NO: 1696134 - RNA, 15 nt, Human
aauacaauuuuguuu

SEQ ID NO: 1696135 - RNA, 17 nt, Human
aauacaauuuuguuucu

SEQ ID NO: 1696136 - RNA, 18 nt, Human
aauacaauuuuguuucug

SEQ ID NO: 1696137 - RNA, 20 nt, Human
aauacaauuuuguuucugua

SEQ ID NO: 1696138 - RNA, 12 nt, Human
aauacaauuuug

SEQ ID NO: 1696139 - RNA, 13 nt, Human
aauacaauuuugu

SEQ ID NO: 1696140 - RNA, 22 nt, Human
aauacaauuuuguuucuguacu

SEQ ID NO: 1696141 - RNA, 23 nt, Human
aauacaauuuuguuucuguacuu

SEQ ID NO: 1696142 - RNA, 13 nt, Human
uaaauacaauuuu

SEQ ID NO: 1696143 - RNA, 15 nt, Human
uaaauacaauuuugu

SEQ ID NO: 1696144 - RNA, 22 nt, Human
uaaauacaauuuuguuucugua

SEQ ID NO: 1696145 - RNA, 23 nt, Human
uaaauacaauuuuguuucuguac

SEQ ID NO: 1696146 - RNA, 19 nt, Human
uaaauagcuagacugguga

SEQ ID NO: 1696147 - RNA, 23 nt, Human
uaaauagcuagacuggugacuga

SEQ ID NO: 1696148 - RNA, 18 nt, Human
uaaaucgcuuuugauaau

SEQ ID NO: 1696149 - RNA, 19 nt, Human
uaaaucgcuuuugauaauc

SEQ ID NO: 1696150 - RNA, 23 nt, Human
uaaaucccauuauucaaaguugc

SEQ ID NO: 1696151 - RNA, 14 nt, Human
aauaauuauaugcu

SEQ ID NO: 1696152 - RNA, 15 nt, Human
aauaauuauaugcua

SEQ ID NO: 1696153 - RNA, 20 nt, Human
aauaauuauaugcuauuucu

SEQ ID NO: 1696154 - RNA, 21 nt, Human
aauaauuauaugcuauuucua

SEQ ID NO: 1696155 - RNA, 22 nt, Human
aauaauuauaugcuauuucuau

SEQ ID NO: 1696156 - RNA, 23 nt, Human
aauaauuauaugcuauuucuaua

SEQ ID NO: 1696157 - RNA, 16 nt, Human
aauaaggaaaaguuua

SEQ ID NO: 1696158 - RNA, 19 nt, Human
aauaaggaaaaguuuaaua

SEQ ID NO: 1696159 - RNA, 22 nt, Human
aauaaggaaaaguuuaauauua

SEQ ID NO: 1696160 - RNA, 13 nt, Human
aauaaggaaaagu

SEQ ID NO: 1696161 - RNA, 15 nt, Human
aauaaggaaaaguuu

SEQ ID NO: 1696162 - RNA, 21 nt, Human
aauaaauagcuagacugguga

SEQ ID NO: 1696163 - RNA, 15 nt, Human
aauaaaaaauuauga

SEQ ID NO: 1696164 - RNA, 16 nt, Human
aauaaaaaauuaugac

SEQ ID NO: 1696165 - RNA, 14 nt, Human
aauaaaaaauuaug

SEQ ID NO: 1696166 - RNA, 19 nt, Human
gugcugguguaugugugaa

SEQ ID NO: 1696167 - RNA, 22 nt, Human
gugcugggguuaucugaaguca

SEQ ID NO: 1696168 - RNA, 14 nt, Human
aacuuguguaaaua

SEQ ID NO: 1696169 - RNA, 15 nt, Human
aacuuguguaaauac

SEQ ID NO: 1696170 - RNA, 20 nt, Human
aacuuguguaaauacaauuu

SEQ ID NO: 1696171 - RNA, 21 nt, Human
guguugaaacggaugauuucu

SEQ ID NO: 1696172 - RNA, 23 nt, Human
guguugaaacggaugauuucuau

SEQ ID NO: 1696173 - RNA, 23 nt, Human
aacauguuaaaccaugggauaaa

SEQ ID NO: 1696174 - RNA, 15 nt, Human
aacauaaaucuguga

SEQ ID NO: 1696175 - RNA, 12 nt, Human
aacauaaaucug

SEQ ID NO: 1696176 - RNA, 14 nt, Human
aacauaaaucugug

SEQ ID NO: 1696177 - RNA, 23 nt, Human
gucuucauaccuacauguauuug

SEQ ID NO: 1696178 - RNA, 17 nt, Human
auaacauaaaucuguga

SEQ ID NO: 1696179 - RNA, 18 nt, Human
auaacauaaaucugugaa

SEQ ID NO: 1696180 - RNA, 19 nt, Human
auaacauaaaucugugaac

SEQ ID NO: 1696181 - RNA, 14 nt, Human
auaacauaaaucug

SEQ ID NO: 1696182 - RNA, 15 nt, Human
auaacauaaaucugu

SEQ ID NO: 1696183 - RNA, 21 nt, Human
auaccuacauguauuuguuug

SEQ ID NO: 1696184 - RNA, 16 nt, Human
auaaggaaaaguuuaa

SEQ ID NO: 1696185 - RNA, 15 nt, Human
auaaggaaaaguuua

SEQ ID NO: 1696186 - RNA, 15 nt, Human
auaauuaacauguua

SEQ ID NO: 1696187 - RNA, 17 nt, Human
auaauuaacauguuaaa

SEQ ID NO: 1696188 - RNA, 22 nt, Human
auaucaucaguauugaagcauu

SEQ ID NO: 1696189 - RNA, 16 nt, Human
auaugcuauuucuaua

SEQ ID NO: 1696190 - RNA, 18 nt, Human
auaugcuauuucuauauu

SEQ ID NO: 1696191 - RNA, 19 nt, Human
auaugcuauuucuauauuu

SEQ ID NO: 1696192 - RNA, 21 nt, Human
auaugcuauuucuauauuuuc

SEQ ID NO: 1696193 - RNA, 15 nt, Human
auaugcuauuucuau

SEQ ID NO: 1696194 - RNA, 22 nt, Human
auaugcuauuucuauauuuuca

SEQ ID NO: 1696195 - RNA, 23 nt, Human
auaugcuauuucuauauuuucau

SEQ ID NO: 1696196 - RNA, 18 nt, Human
auauuuacuaaaauggac

SEQ ID NO: 1696197 - RNA, 20 nt, Human
auauuuacuaaaauggacug

SEQ ID NO: 1696198 - RNA, 13 nt, Human
augugugaaguga

SEQ ID NO: 1696199 - RNA, 21 nt, Human
augucuucauaccuacaugua

SEQ ID NO: 1696200 - RNA, 22 nt, Human
augucuucauaccuacauguau

SEQ ID NO: 1696201 - RNA, 19 nt, Human
augguccgugcuaaggacu

SEQ ID NO: 1696202 - RNA, 20 nt, Human
augguccgugcuaaggacuu

SEQ ID NO: 1696203 - RNA, 21 nt, Human
augguccgugcuaaggacuug

SEQ ID NO: 1696204 - RNA, 14 nt, Human
auguauuuguuugc

SEQ ID NO: 1696205 - RNA, 13 nt, Human
agaguguugaaac

SEQ ID NO: 1696206 - RNA, 23 nt, Human
aaugaagucucugaagugaaacu

SEQ ID NO: 1696207 - RNA, 14 nt, Human
aaugaagucucuga

SEQ ID NO: 1696208 - RNA, 16 nt, Human
aaugaagucucugaag

SEQ ID NO: 1696209 - RNA, 13 nt, Human
aaugaaauacugu

SEQ ID NO: 1696210 - RNA, 15 nt, Human
aaguugccuaaaucc

SEQ ID NO: 1696211 - RNA, 16 nt, Human
aaguugccuaaaucca

SEQ ID NO: 1696212 - RNA, 17 nt, Human
aaguugccuaaauccau

SEQ ID NO: 1696213 - RNA, 18 nt, Human
aaguugccuaaauccauu

SEQ ID NO: 1696214 - RNA, 19 nt, Human
aaguugccuaaauccauuu

SEQ ID NO: 1696215 - RNA, 12 nt, Human
aauauuaaagcc

SEQ ID NO: 1696216 - RNA, 13 nt, Human
aaugguuaaaaga

SEQ ID NO: 1696217 - RNA, 12 nt, Human
aagucuguuuua

SEQ ID NO: 1696218 - RNA, 13 nt, Human
aagucuguuuuau

SEQ ID NO: 1696219 - RNA, 14 nt, Human
aagucuguuuuaug

SEQ ID NO: 1696220 - RNA, 12 nt, Human
aaguugccuaaa

SEQ ID NO: 1696221 - RNA, 14 nt, Human
aaggacuucuuuaa

SEQ ID NO: 1696222 - RNA, 15 nt, Human
aaggacuucuuuaau

SEQ ID NO: 1696223 - RNA, 20 nt, Human
aaggacuucuuuaauuuugg

SEQ ID NO: 1696224 - RNA, 21 nt, Human
aaggacuucuuuaauuuugga

SEQ ID NO: 1696225 - RNA, 19 nt, Human
aacagcuggugcccugcuu

SEQ ID NO: 1696226 - RNA, 20 nt, Human
aacagcuggugcccugcuuu

SEQ ID NO: 1696227 - RNA, 21 nt, Human
aacagcuggugcccugcuuuc

SEQ ID NO: 1696228 - RNA, 14 nt, Human
aacggaugauuucu

SEQ ID NO: 1696229 - RNA, 15 nt, Human
aacggaugauuucua

SEQ ID NO: 1696230 - RNA, 16 nt, Human
aacggaugauuucuau

SEQ ID NO: 1696231 - RNA, 17 nt, Human
aacggaugauuucuaug

SEQ ID NO: 1696232 - RNA, 18 nt, Human
aaauagcuagacugguga

SEQ ID NO: 1696233 - RNA, 15 nt, Human
aaaucugugaacuug

SEQ ID NO: 1696234 - RNA, 16 nt, Human
aaaucugugaacuuga

SEQ ID NO: 1696235 - RNA, 18 nt, Human
aaaucugugaacuugaaa

SEQ ID NO: 1696236 - RNA, 10 nt, Human
aaauaaauaa

SEQ ID NO: 1696237 - RNA, 20 nt, Human
aaaccaugggauaaaugcca

SEQ ID NO: 1696238 - RNA, 15 nt, Human
aaaccaugggauaaa

SEQ ID NO: 1696239 - RNA, 13 nt, Human
aauuuuguuucug

SEQ ID NO: 1696240 - RNA, 14 nt, Human
aauuuuguuucugu

SEQ ID NO: 1696241 - RNA, 15 nt, Human
aauuuuguuucugua

SEQ ID NO: 1696242 - RNA, 23 nt, Human
acuguuugagguuuuuaagccuu

SEQ ID NO: 1696243 - RNA, 18 nt, Human
acuguuugagguuuuuaa

SEQ ID NO: 1696244 - RNA, 14 nt, Human
acuggugacugauu

SEQ ID NO: 1696245 - RNA, 18 nt, Human
aaaaaauuggggauucuu

SEQ ID NO: 1696246 - RNA, 20 nt, Human
aaaaaccaguauuguacaaa

SEQ ID NO: 1696247 - RNA, 15 nt, Human
cacccacccuuuuuu

SEQ ID NO: 1696248 - RNA, 19 nt, Human
caaaguugccuaaauccau

SEQ ID NO: 1696249 - RNA, 13 nt, Human
caauuaaggauuu

SEQ ID NO: 1696250 - RNA, 15 nt, Human
caauuaaggauuuua

SEQ ID NO: 1696251 - RNA, 20 nt, Human
caauuaaggauuuuaugcuu

SEQ ID NO: 1696252 - RNA, 21 nt, Human
caauuaaggauuuuaugcuuu

SEQ ID NO: 1696253 - RNA, 22 nt, Human
caauuaaggauuuuaugcuuua

SEQ ID NO: 1696254 - RNA, 20 nt, Human
cacauugguguuguacucaa

SEQ ID NO: 1696255 - RNA, 19 nt, Human
uucuuguauuaagaaugaa

SEQ ID NO: 1696256 - RNA, 14 nt, Human
uucuguauagauua

SEQ ID NO: 1696257 - RNA, 13 nt, Human
uucuguauagauu

SEQ ID NO: 1696258 - RNA, 11 nt, Human
uucuguauaga

SEQ ID NO: 1696259 - RNA, 16 nt, Human
uugaaacggaugauuu

SEQ ID NO: 1696260 - RNA, 19 nt, Human
uugaaacggaugauuucua

SEQ ID NO: 1696261 - RNA, 17 nt, Human
uucuuuaauuuuggaau

SEQ ID NO: 1696262 - RNA, 18 nt, Human
uucuuuaauuuuggaauu

SEQ ID NO: 1696263 - RNA, 12 nt, Human
uucuuuaauuuu

SEQ ID NO: 1696264 - RNA, 13 nt, Human
uugaagcauuuua

SEQ ID NO: 1696265 - RNA, 14 nt, Human
uugaagcauuuuau

SEQ ID NO: 1696266 - RNA, 15 nt, Human
uugaagcauuuuaua

SEQ ID NO: 1696267 - RNA, 17 nt, Human
uugaagcauuuuauaaa

SEQ ID NO: 1696268 - RNA, 22 nt, Human
uugaagcauuuuauaaaucgcu

SEQ ID NO: 1696269 - RNA, 12 nt, Human
uugccuuuuuca

SEQ ID NO: 1696270 - RNA, 13 nt, Human
uugccuuuuucau

SEQ ID NO: 1696271 - RNA, 14 nt, Human
uugccuuuuucauu

SEQ ID NO: 1696272 - RNA, 15 nt, Human
uugccuuuuucauua

SEQ ID NO: 1696273 - RNA, 16 nt, Human
uugccuuuuucauuau

SEQ ID NO: 1696274 - RNA, 17 nt, Human
uugccuuuuucauuauu

SEQ ID NO: 1696275 - RNA, 19 nt, Human
uuggcauaacauaaaucug

SEQ ID NO: 1696276 - RNA, 20 nt, Human
uuggcauaacauaaaucugu

SEQ ID NO: 1696277 - RNA, 22 nt, Human
uuggcauaacauaaaucuguga

SEQ ID NO: 1696278 - RNA, 23 nt, Human
uuggcauaacauaaaucugugaa

SEQ ID NO: 1696279 - RNA, 18 nt, Human
uuggcauaacauaaaucu

SEQ ID NO: 1696280 - RNA, 12 nt, Human
uuguuucuguac

SEQ ID NO: 1696281 - RNA, 14 nt, Human
uuguuucuguacuu

SEQ ID NO: 1696282 - RNA, 13 nt, Human
uuguuuguuuagu

SEQ ID NO: 1696283 - RNA, 14 nt, Human
uuguuuguuuaguc

SEQ ID NO: 1696284 - RNA, 14 nt, Human
uuuaauaauuauau

SEQ ID NO: 1696285 - RNA, 15 nt, Human
uuuaauauuaaagcc

SEQ ID NO: 1696286 - RNA, 17 nt, Human
uuuaauauuaaagccau

SEQ ID NO: 1696287 - RNA, 20 nt, Human
uuuaauauuaaagccauguu

SEQ ID NO: 1696288 - RNA, 21 nt, Human
uuuaauauuaaagccauguuu

SEQ ID NO: 1696289 - RNA, 14 nt, Human
uuuaauauuaaagc

SEQ ID NO: 1696290 - RNA, 15 nt, Human
uuuauaaaucgcuuu

SEQ ID NO: 1696291 - RNA, 18 nt, Human
uuuauaaaucgcuuuuga

SEQ ID NO: 1696292 - RNA, 22 nt, Human
uuuauaaaucgcuuuugauaau

SEQ ID NO: 1696293 - RNA, 19 nt, Human
uuuauaaaucgcuuuugau

SEQ ID NO: 1696294 - RNA, 20 nt, Human
uuuaugacuucauuaauaau

SEQ ID NO: 1696295 - RNA, 15 nt, Human
uuucugauccaguuu

SEQ ID NO: 1696296 - RNA, 16 nt, Human
uuucugauccaguuuu

SEQ ID NO: 1696297 - RNA, 20 nt, Human
uuucugauccaguuuuguuu

SEQ ID NO: 1696298 - RNA, 22 nt, Human
uuucugauccaguuuuguuugg

SEQ ID NO: 1696299 - RNA, 13 nt, Human
uuucugauccagu

SEQ ID NO: 1696300 - RNA, 12 nt, Human
uuuaugcuuuaa

SEQ ID NO: 1696301 - RNA, 15 nt, Human
uuuaugcuuuaaaca

SEQ ID NO: 1696302 - RNA, 16 nt, Human
uuuaugcuuuaaacau

SEQ ID NO: 1696303 - RNA, 18 nt, Human
uuugauaaucaacugggc

SEQ ID NO: 1696304 - RNA, 17 nt, Human
uuugguugcuuuaauau

SEQ ID NO: 1696305 - RNA, 12 nt, Human
uuucuuaaauaa

SEQ ID NO: 1696306 - RNA, 13 nt, Human
uuucuuaaauaau

SEQ ID NO: 1696307 - RNA, 20 nt, Human
uuugauaaucaacugggcug

SEQ ID NO: 1696308 - RNA, 21 nt, Human
uucacucuccauuuaauaauu

SEQ ID NO: 1696309 - RNA, 17 nt, Human
uucagauaacuguuauu

SEQ ID NO: 1696310 - RNA, 18 nt, Human
uucagauaacuguuauuu

SEQ ID NO: 1696311 - RNA, 23 nt, Human
uucagauaacuguuauuuauaau

SEQ ID NO: 1696312 - RNA, 11 nt, Human
uucaaaguugc

SEQ ID NO: 1696313 - RNA, 15 nt, Human
uucaaaguugccuaa

SEQ ID NO: 1696314 - RNA, 16 nt, Human
uucaaaguugccuaaa

SEQ ID NO: 1696315 - RNA, 17 nt, Human
uucaaaguugccuaaau

SEQ ID NO: 1696316 - RNA, 23 nt, Human
uucaaaguugccuaaauccauuu

SEQ ID NO: 1696317 - RNA, 13 nt, Human
uuauuuuauuaug

SEQ ID NO: 1696318 - RNA, 12 nt, Human
uuauuggcuuuu

SEQ ID NO: 1696319 - RNA, 16 nt, Human
uuauuggcuuuucuga

SEQ ID NO: 1696320 - RNA, 18 nt, Human
uuauuggcuuuucugauc

SEQ ID NO: 1696321 - RNA, 22 nt, Human
uuauuggcuuuucugauccagu

SEQ ID NO: 1696322 - RNA, 17 nt, Human
uuaucugaagucagauc

SEQ ID NO: 1696323 - RNA, 13 nt, Human
uuaugcuuuaaac

SEQ ID NO: 1696324 - RNA, 14 nt, Human
uuaugcuuuaaaca

SEQ ID NO: 1696325 - RNA, 14 nt, Human
uuauuacaguauaa

SEQ ID NO: 1696326 - RNA, 17 nt, Human
uucccuggccuuucaua

SEQ ID NO: 1696327 - RNA, 16 nt, Human
uucccuggccuuucau

SEQ ID NO: 1696328 - RNA, 12 nt, Human
uucccuggccuu

SEQ ID NO: 1696329 - RNA, 14 nt, Human
uuagagaguguuga

SEQ ID NO: 1696330 - RNA, 16 nt, Human
uuagagaguguugaaa

SEQ ID NO: 1696331 - RNA, 17 nt, Human
uuagagaguguugaaac

SEQ ID NO: 1696332 - RNA, 18 nt, Human
uuagagaguguugaaacg

SEQ ID NO: 1696333 - RNA, 12 nt, Human
uuagagauuuuu

SEQ ID NO: 1696334 - RNA, 13 nt, Human
uuagaucuaguuc

SEQ ID NO: 1696335 - RNA, 14 nt, Human
uuagaucuaguuca

SEQ ID NO: 1696336 - RNA, 16 nt, Human
uuagcuacuauauaug

SEQ ID NO: 1696337 - RNA, 13 nt, Human
uuaagcauauauu

SEQ ID NO: 1696338 - RNA, 15 nt, Human
uuaagcauauauuuu

SEQ ID NO: 1696339 - RNA, 18 nt, Human
uuaagcauauauuuuuau

SEQ ID NO: 1696340 - RNA, 19 nt, Human
uuaagcauauauuuuuaua

SEQ ID NO: 1696341 - RNA, 23 nt, Human
uuaagcauauauuuuuauauuua

SEQ ID NO: 1696342 - RNA, 21 nt, Human
uuaauauuaaagccauguuua

SEQ ID NO: 1696343 - RNA, 22 nt, Human
uuaauauuaaagccauguuuau

SEQ ID NO: 1696344 - RNA, 15 nt, Human
uuaauaucaucagua

SEQ ID NO: 1696345 - RNA, 17 nt, Human
uggaccaaaaaccagua

SEQ ID NO: 1696346 - RNA, 22 nt, Human
uggaccaaaaaccaguauugua

SEQ ID NO: 1696347 - RNA, 20 nt, Human
uggauaauaaggaaaaguuu

SEQ ID NO: 1696348 - RNA, 15 nt, Human
uggugacugauucuu

SEQ ID NO: 1696349 - RNA, 16 nt, Human
uggugacugauucuuc

SEQ ID NO: 1696350 - RNA, 19 nt, Human
uggugacugauucuucagc

SEQ ID NO: 1696351 - RNA, 17 nt, Human
ugguccgugcuaaggac

SEQ ID NO: 1696352 - RNA, 18 nt, Human
ugguccgugcuaaggacu

SEQ ID NO: 1696353 - RNA, 19 nt, Human
ugguccgugcuaaggacuu

SEQ ID NO: 1696354 - RNA, 20 nt, Human
ugguccgugcuaaggacuug

SEQ ID NO: 1696355 - RNA, 13 nt, Human
ugccuaaauccau

SEQ ID NO: 1696356 - RNA, 15 nt, Human
ugccuaaauccauuu

SEQ ID NO: 1696357 - RNA, 19 nt, Human
ugccuaaauccauuuggaa

SEQ ID NO: 1696358 - RNA, 20 nt, Human
ugccuaaauccauuuggaaa

SEQ ID NO: 1696359 - RNA, 22 nt, Human
ugccuaaauccauuuggaaauc

SEQ ID NO: 1696360 - RNA, 23 nt, Human
ugccuaaauccauuuggaaaucu

SEQ ID NO: 1696361 - RNA, 20 nt, Human
ugccucacccacccuuuuuu

SEQ ID NO: 1696362 - RNA, 23 nt, Human
ugccucacccacccuuuuuuaaa

SEQ ID NO: 1696363 - RNA, 20 nt, Human
ugcauaggugaucucauuua

SEQ ID NO: 1696364 - RNA, 19 nt, Human
ugcgcuaaacuuuucugau

SEQ ID NO: 1696365 - RNA, 20 nt, Human
ugcgcuaaacuuuucugaua

SEQ ID NO: 1696366 - RNA, 21 nt, Human
ugcgcuaaacuuuucugauag

SEQ ID NO: 1696367 - RNA, 22 nt, Human
ugcugguguaugugugaaguga

SEQ ID NO: 1696368 - RNA, 13 nt, Human
ugcugguguaugu

SEQ ID NO: 1696369 - RNA, 17 nt, Human
ugcugggguuaucugaa

SEQ ID NO: 1696370 - RNA, 20 nt, Human
ugcugggguuaucugaaguc

SEQ ID NO: 1696371 - RNA, 21 nt, Human
ugauucuucagcaaaaauauu

SEQ ID NO: 1696372 - RNA, 15 nt, Human
ugauagaggaagccu

SEQ ID NO: 1696373 - RNA, 22 nt, Human
ugaucucauuuaauccucucaa

SEQ ID NO: 1696374 - RNA, 15 nt, Human
ugaucucauuuaauc

SEQ ID NO: 1696375 - RNA, 15 nt, Human
ugagcaucacaguuu

SEQ ID NO: 1696376 - RNA, 14 nt, Human
ugagcaucacaguu

SEQ ID NO: 1696377 - RNA, 19 nt, Human
ucuugccuuuuucauuauu

SEQ ID NO: 1696378 - RNA, 16 nt, Human
ucuugccuuuuucauu

SEQ ID NO: 1696379 - RNA, 17 nt, Human
ucuugccuuuuucauua

SEQ ID NO: 1696380 - RNA, 14 nt, Human
ugaagugaaacugc

SEQ ID NO: 1696381 - RNA, 13 nt, Human
ugaagugaaacug

SEQ ID NO: 1696382 - RNA, 12 nt, Human
ugaagugaaacu

SEQ ID NO: 1696383 - RNA, 20 nt, Human
ugaagucagaucugccuaag

SEQ ID NO: 1696384 - RNA, 23 nt, Human
ugaagucagaucugccuaaggac

SEQ ID NO: 1696385 - RNA, 17 nt, Human
ugacauagucuggcugu

SEQ ID NO: 1696386 - RNA, 16 nt, Human
ugacauagucuggcug

SEQ ID NO: 1696387 - RNA, 20 nt, Human
uccuaucaccugucuugccu

SEQ ID NO: 1696388 - RNA, 13 nt, Human
ucccauuauucaa

SEQ ID NO: 1696389 - RNA, 14 nt, Human
ucccauuauucaaa

SEQ ID NO: 1696390 - RNA, 16 nt, Human
ucccauuauucaaagu

SEQ ID NO: 1696391 - RNA, 18 nt, Human
ucccauuauucaaaguug

SEQ ID NO: 1696392 - RNA, 19 nt, Human
ucccauuauucaaaguugc

SEQ ID NO: 1696393 - RNA, 14 nt, Human
uccagcagauuauu

SEQ ID NO: 1696394 - RNA, 15 nt, Human
uccagcagauuauuc

SEQ ID NO: 1696395 - RNA, 16 nt, Human
uccagcagauuauuca

SEQ ID NO: 1696396 - RNA, 17 nt, Human
uccagcagauuauucac

SEQ ID NO: 1696397 - RNA, 20 nt, Human
uccaguuuuguuuggaccaa

SEQ ID NO: 1696398 - RNA, 15 nt, Human
uccaguuuuguuugg

SEQ ID NO: 1696399 - RNA, 17 nt, Human
uccaguuuuguuuggac

SEQ ID NO: 1696400 - RNA, 23 nt, Human
ucaguauugaagcauuuuauaaa

SEQ ID NO: 1696401 - RNA, 22 nt, Human
ucaguauugaagcauuuuauaa

SEQ ID NO: 1696402 - RNA, 20 nt, Human
ucauggaacgcguugaaauu

SEQ ID NO: 1696403 - RNA, 21 nt, Human
ucauggaacgcguugaaauug

SEQ ID NO: 1696404 - RNA, 22 nt, Human
ucauggaacgcguugaaauugu

SEQ ID NO: 1696405 - RNA, 16 nt, Human
uauuaagcauauauuu

SEQ ID NO: 1696406 - RNA, 12 nt, Human
uauuaugaaacu

SEQ ID NO: 1696407 - RNA, 20 nt, Human
uauuaugaaacuuguguaaa

SEQ ID NO: 1696408 - RNA, 21 nt, Human
uauuaugaaacuuguguaaau

SEQ ID NO: 1696409 - RNA, 22 nt, Human
uauuaugaaacuuguguaaaua

SEQ ID NO: 1696410 - RNA, 12 nt, Human
uauuauguaaau

SEQ ID NO: 1696411 - RNA, 15 nt, Human
uauuauguaaauccc

SEQ ID NO: 1696412 - RNA, 22 nt, Human
uauuauguaaaucccauuauuc

SEQ ID NO: 1696413 - RNA, 19 nt, Human
uauugugcgcuaaacuuuu

SEQ ID NO: 1696414 - RNA, 22 nt, Human
uauugugcgcuaaacuuuucug

SEQ ID NO: 1696415 - RNA, 23 nt, Human
uauugugcgcuaaacuuuucuga

SEQ ID NO: 1696416 - RNA, 19 nt, Human
ucaauaaaaaauuaugaca

SEQ ID NO: 1696417 - RNA, 18 nt, Human
ucacauugguguuguacu

SEQ ID NO: 1696418 - RNA, 14 nt, Human
ucaauaaaaaauua

SEQ ID NO: 1696419 - RNA, 16 nt, Human
ucaauaaaaaauuaug

SEQ ID NO: 1696420 - RNA, 13 nt, Human
ucaauaaaaaauu

SEQ ID NO: 1696421 - RNA, 15 nt, Human
uauaauuaacauguu

SEQ ID NO: 1696422 - RNA, 16 nt, Human
uauaauuaacauguua

SEQ ID NO: 1696423 - RNA, 18 nt, Human
uauaauuaacauguuaaa

SEQ ID NO: 1696424 - RNA, 19 nt, Human
uauaauuaacauguuaaac

SEQ ID NO: 1696425 - RNA, 13 nt, Human
uauaauuaacaug

SEQ ID NO: 1696426 - RNA, 14 nt, Human
uauaauuaacaugu

SEQ ID NO: 1696427 - RNA, 12 nt, Human
uauaauuaacau

SEQ ID NO: 1696428 - RNA, 20 nt, Human
uauaaucacuuuuuuccaca

SEQ ID NO: 1696429 - RNA, 22 nt, Human
uauaauuaacauguuaaaccau

SEQ ID NO: 1696430 - RNA, 23 nt, Human
uauaaaucgcuuuugauaaucaa

SEQ ID NO: 1696431 - RNA, 18 nt, Human
uauaucugaggaauucug

SEQ ID NO: 1696432 - RNA, 19 nt, Human
uauaucugaggaauucugu

SEQ ID NO: 1696433 - RNA, 20 nt, Human
uauaucugaggaauucugua

SEQ ID NO: 1696434 - RNA, 21 nt, Human
uauaucugaggaauucuguau

SEQ ID NO: 1696435 - RNA, 22 nt, Human
uauaucugaggaauucuguaua

SEQ ID NO: 1696436 - RNA, 18 nt, Human
uauauaaaugguuaaaag

SEQ ID NO: 1696437 - RNA, 16 nt, Human
uauaugugaugaucua

SEQ ID NO: 1696438 - RNA, 21 nt, Human
uaggugaucucauuuaauccu

SEQ ID NO: 1696439 - RNA, 16 nt, Human
uaugacuucauuaaua

SEQ ID NO: 1696440 - RNA, 20 nt, Human
uaugacuucauuaauaauaa

SEQ ID NO: 1696441 - RNA, 15 nt, Human
uaugcuuuaaacauu

SEQ ID NO: 1696442 - RNA, 18 nt, Human
uaucugaggaauucugua

SEQ ID NO: 1696443 - RNA, 19 nt, Human
uaucugaggaauucuguau

SEQ ID NO: 1696444 - RNA, 21 nt, Human
uaucugaggaauucuguauag

SEQ ID NO: 1696445 - RNA, 22 nt, Human
uaucugaggaauucuguauaga

SEQ ID NO: 1696446 - RNA, 17 nt, Human
uaucugaggaauucugu

SEQ ID NO: 1696447 - RNA, 23 nt, Human
gugaaacugcuuguuuccuagca

SEQ ID NO: 1696448 - RNA, 20 nt, Human
gugaaacugcuuguuuccua

SEQ ID NO: 1696449 - RNA, 21 nt, Human
gugaaacugcuuguuuccuag

SEQ ID NO: 1696450 - RNA, 17 nt, Human
gugaauggcuuuguaua

SEQ ID NO: 1696451 - RNA, 18 nt, Human
gugaauggcuuuguauag

SEQ ID NO: 1696452 - RNA, 19 nt, Human
gugaauggcuuuguauaga

SEQ ID NO: 1696453 - RNA, 13 nt, Human
gugaauggcuuug

SEQ ID NO: 1696454 - RNA, 14 nt, Human
gugaauggcuuugu

SEQ ID NO: 1696455 - RNA, 13 nt, Human
gucucagauuuua

SEQ ID NO: 1696456 - RNA, 12 nt, Human
guauuuguuugc

SEQ ID NO: 1696457 - RNA, 23 nt, Human
guauuuguuugcauaggugaucu

SEQ ID NO: 1696458 - RNA, 16 nt, Human
gguccgugcuaaggac

SEQ ID NO: 1696459 - RNA, 17 nt, Human
gguccgugcuaaggacu

SEQ ID NO: 1696460 - RNA, 18 nt, Human
gguccgugcuaaggacuu

SEQ ID NO: 1696461 - RNA, 14 nt, Human
ggugaauggcuuug

SEQ ID NO: 1696462 - RNA, 17 nt, Human
ggugaauggcuuuguau

SEQ ID NO: 1696463 - RNA, 20 nt, Human
ggugaauggcuuuguauaga

SEQ ID NO: 1696464 - RNA, 19 nt, Human
ggugcccugcuuucagaua

SEQ ID NO: 1696465 - RNA, 16 nt, Human
guaaaucccauuauuc

SEQ ID NO: 1696466 - RNA, 17 nt, Human
guaaaucccauuauuca

SEQ ID NO: 1696467 - RNA, 18 nt, Human
guaaaucccauuauucaa

SEQ ID NO: 1696468 - RNA, 19 nt, Human
guaaaucccauuauucaaa

SEQ ID NO: 1696469 - RNA, 20 nt, Human
guaaaucccauuauucaaag

SEQ ID NO: 1696470 - RNA, 21 nt, Human
guaaaucccauuauucaaagu

SEQ ID NO: 1696471 - RNA, 21 nt, Human
guaaauacaauuuuguuucug

SEQ ID NO: 1696472 - RNA, 15 nt, Human
guaaaucccauuauu

SEQ ID NO: 1696473 - RNA, 22 nt, Human
guaaauacaauuuuguuucugu

SEQ ID NO: 1696474 - RNA, 23 nt, Human
guaaauacaauuuuguuucugua

SEQ ID NO: 1696475 - RNA, 13 nt, Human
guaauuauaucug

SEQ ID NO: 1696476 - RNA, 12 nt, Human
guacuuuuuggc

SEQ ID NO: 1696477 - RNA, 21 nt, Human
guacuuuuuggcauaacauaa

SEQ ID NO: 1696478 - RNA, 13 nt, Human
gccugauuaaaga

SEQ ID NO: 1696479 - RNA, 16 nt, Human
gccugauuaaagaaug

SEQ ID NO: 1696480 - RNA, 23 nt, Human
gccugcacggugaauggcuuugu

SEQ ID NO: 1696481 - RNA, 20 nt, Human
ggauucuuaaaguugaauuu

SEQ ID NO: 1696482 - RNA, 18 nt, Human
ggauucuuaaaguugaau

SEQ ID NO: 1696483 - RNA, 19 nt, Human
ggauucuuaaaguugaauu

SEQ ID NO: 1696484 - RNA, 16 nt, Human
ggauucuuaaaguuga

SEQ ID NO: 1696485 - RNA, 14 nt, Human
ggaaaaguuuaaua

SEQ ID NO: 1696486 - RNA, 18 nt, Human
ggaaaaguuuaauauuaa

SEQ ID NO: 1696487 - RNA, 14 nt, Human
gcuuucagauacug

SEQ ID NO: 1696488 - RNA, 18 nt, Human
gcuuucagauacuggauu

SEQ ID NO: 1696489 - RNA, 23 nt, Human
gcuuucagauacuggauuguacu

SEQ ID NO: 1696490 - RNA, 15 nt, Human
ggacuguggugacuu

SEQ ID NO: 1696491 - RNA, 17 nt, Human
ggacuguggugacuuug

SEQ ID NO: 1696492 - RNA, 21 nt, Human
ggacuguggugacuuuggaua

SEQ ID NO: 1696493 - RNA, 22 nt, Human
ggacuguggugacuuuggauaa

SEQ ID NO: 1696494 - RNA, 14 nt, Human
ggacuguggugacu

SEQ ID NO: 1696495 - RNA, 16 nt, Human
ggaccaaaaaccagua

SEQ ID NO: 1696496 - RNA, 23 nt, Human
ggaccaaaaaccaguauuguaca

SEQ ID NO: 1696497 - RNA, 12 nt, Human
ggaauucuguau

SEQ ID NO: 1696498 - RNA, 15 nt, Human
ggaauucuguauaga

SEQ ID NO: 1696499 - RNA, 17 nt, Human
ggaauucuguauagauu

SEQ ID NO: 1696500 - RNA, 17 nt, Human
gauaacuguuauuuaua

SEQ ID NO: 1696501 - RNA, 18 nt, Human
gauaacuguuauuuauaa

SEQ ID NO: 1696502 - RNA, 11 nt, Human
gauaaaugcca

SEQ ID NO: 1696503 - RNA, 15 nt, Human
gauaaaugccaucaa

SEQ ID NO: 1696504 - RNA, 20 nt, Human
gauaaaugccaucaauaaaa

SEQ ID NO: 1696505 - RNA, 16 nt, Human
gaguguugaaacggau

SEQ ID NO: 1696506 - RNA, 13 nt, Human
gauuuuaugcuuu

SEQ ID NO: 1696507 - RNA, 19 nt, Human
gaaugaaauacuguuugag

SEQ ID NO: 1696508 - RNA, 15 nt, Human
gaaugaaauacuguu

SEQ ID NO: 1696509 - RNA, 18 nt, Human
gaaugaaauacuguuuga

SEQ ID NO: 1696510 - RNA, 17 nt, Human
gaauggcuuuguauaga

SEQ ID NO: 1696511 - RNA, 14 nt, Human
gaauggcuuuguau

SEQ ID NO: 1696512 - RNA, 16 nt, Human
gaauggcuuuguauag

SEQ ID NO: 1696513 - RNA, 14 nt, Human
gaauucuguauaga

SEQ ID NO: 1696514 - RNA, 21 nt, Human
gaauucuguauagauuagaau

SEQ ID NO: 1696515 - RNA, 22 nt, Human
gaauucuguauagauuagaauu

SEQ ID NO: 1696516 - RNA, 13 nt, Human
gaauucuguauag

SEQ ID NO: 1696517 - RNA, 16 nt, Human
gacuucuuuaauuuug

SEQ ID NO: 1696518 - RNA, 17 nt, Human
gacuucuuuaauuuugg

SEQ ID NO: 1696519 - RNA, 18 nt, Human
gacuucuuuaauuuugga

SEQ ID NO: 1696520 - RNA, 19 nt, Human
gacuucuuuaauuuuggaa

SEQ ID NO: 1696521 - RNA, 20 nt, Human
gacuucuuuaauuuuggaau

SEQ ID NO: 1696522 - RNA, 21 nt, Human
gacuucuuuaauuuuggaauu

SEQ ID NO: 1696523 - RNA, 13 nt, Human
gagaguguugaaa

SEQ ID NO: 1696524 - RNA, 12 nt, Human
cugccuaaggac

SEQ ID NO: 1696525 - RNA, 13 nt, Human
cugccuaaggacu

SEQ ID NO: 1696526 - RNA, 14 nt, Human
cugccuaaggacuu

SEQ ID NO: 1696527 - RNA, 15 nt, Human
cugccuaaggacuuc

SEQ ID NO: 1696528 - RNA, 16 nt, Human
cuguauagauuagaau

SEQ ID NO: 1696529 - RNA, 19 nt, Human
cuucuuuaauuuuggaauu

SEQ ID NO: 1696530 - RNA, 15 nt, Human
cuucuuuaauuuugg

SEQ ID NO: 1696531 - RNA, 16 nt, Human
cuucuuuaauuuugga

SEQ ID NO: 1696532 - RNA, 17 nt, Human
cuucuuuaauuuuggaa

SEQ ID NO: 1696533 - RNA, 18 nt, Human
cuucuuuaauuuuggaau

SEQ ID NO: 1696534 - RNA, 15 nt, Human
cuuugugcugggguu

SEQ ID NO: 1696535 - RNA, 20 nt, Human
cuuugugcugggguuaucug

SEQ ID NO: 1696536 - RNA, 22 nt, Human
cuuugugcugggguuaucugaa

SEQ ID NO: 1696537 - RNA, 23 nt, Human
cuuugucuacaccauuaugugcg

SEQ ID NO: 1696538 - RNA, 20 nt, Human
cuuugucuacaccauuaugu

SEQ ID NO: 1696539 - RNA, 16 nt, Human
cuuucucuuucguuac

SEQ ID NO: 1696540 - RNA, 14 nt, Human
cuuguguaaauaca

SEQ ID NO: 1696541 - RNA, 16 nt, Human
cuuguguaaauacaau

SEQ ID NO: 1696542 - RNA, 21 nt, Human
cuuguguaaauacaauuuugu

SEQ ID NO: 1696543 - RNA, 12 nt, Human
cuuguguaaaua

SEQ ID NO: 1696544 - RNA, 22 nt, Human
cuuguuagaucuaguucacucu

SEQ ID NO: 1696545 - RNA, 21 nt, Human
cuuuaaacauugguucuugua

SEQ ID NO: 1696546 - RNA, 17 nt, Human
gaaacggaugauuucua

SEQ ID NO: 1696547 - RNA, 18 nt, Human
gaaacggaugauuucuau

SEQ ID NO: 1696548 - RNA, 16 nt, Human
cuuuuuggcauaacau

SEQ ID NO: 1696549 - RNA, 20 nt, Human
cuuuuuggcauaacauaaau

SEQ ID NO: 1696550 - RNA, 22 nt, Human
cuuuuuggcauaacauaaaucu

SEQ ID NO: 1696551 - RNA, 19 nt, Human
gaaaaguuuaauauuaaag

SEQ ID NO: 1696552 - RNA, 20 nt, Human
gaaaaguuuaauauuaaagc

SEQ ID NO: 1696553 - RNA, 21 nt, Human
gaaaaguuuaauauuaaagcc

SEQ ID NO: 1696554 - RNA, 22 nt, Human
gaaaaguuuaauauuaaagcca

SEQ ID NO: 1696555 - RNA, 15 nt, Human
gaaaaguuuaauauu

SEQ ID NO: 1696556 - RNA, 23 nt, Human
gaaaaguuuaauauuaaagccau

SEQ ID NO: 1696557 - RNA, 17 nt, Human
cgcuaaacuuuucugau

SEQ ID NO: 1696558 - RNA, 18 nt, Human
cgcuaaacuuuucugaua

SEQ ID NO: 1696559 - RNA, 19 nt, Human
cgcuaaacuuuucugauag

SEQ ID NO: 1696560 - RNA, 24 nt, Human
cgcguugaaauuguaauuauaucu

SEQ ID NO: 1696561 - RNA, 23 nt, Human
cucagauuuuauuauguaaaucc

SEQ ID NO: 1696562 - RNA, 22 nt, Human
cucagauuuuauuauguaaauc

SEQ ID NO: 1696563 - RNA, 13 nt, Human
cuccauuuaauaa

SEQ ID NO: 1696564 - RNA, 20 nt, Human
cuccauuuaauaauuauaug

SEQ ID NO: 1696565 - RNA, 22 nt, Human
cucccuauuuuuuuucuguuau

SEQ ID NO: 1696566 - RNA, 19 nt, Human
cuauuucuauauuuucauu

SEQ ID NO: 1696567 - RNA, 20 nt, Human
cuauuucuauauuuucauuc

SEQ ID NO: 1696568 - RNA, 18 nt, Human
cucaaccaccuuucagau

SEQ ID NO: 1696569 - RNA, 14 nt, Human
cuaugcugaguuug

SEQ ID NO: 1696570 - RNA, 15 nt, Human
cuaugcugaguuugu

SEQ ID NO: 1696571 - RNA, 13 nt, Human
cuaugcugaguuu

SEQ ID NO: 1696572 - RNA, 14 nt, Human
cuagacuggugacu

SEQ ID NO: 1696573 - RNA, 15 nt, Human
cuagacuggugacug

SEQ ID NO: 1696574 - RNA, 17 nt, Human
cuagacuggugacugau

SEQ ID NO: 1696575 - RNA, 18 nt, Human
cuagacuggugacugauu

SEQ ID NO: 1696576 - RNA, 19 nt, Human
cuagacuggugacugauuc

SEQ ID NO: 1696577 - RNA, 22 nt, Human
cuagacuggugacugauucuuc

SEQ ID NO: 1696578 - RNA, 23 nt, Human
cuagacuggugacugauucuuca

SEQ ID NO: 1696579 - RNA, 14 nt, Human
cuaaggacuucuuu

SEQ ID NO: 1696580 - RNA, 15 nt, Human
cuaaggacuucuuua

SEQ ID NO: 1696581 - RNA, 16 nt, Human
cuaaggacuucuuuaa

SEQ ID NO: 1696582 - RNA, 22 nt, Human
cuaaggacuucuuuaauuuugg

SEQ ID NO: 1696583 - RNA, 22 nt, Human
cuaaaauggacuguggugacuu

SEQ ID NO: 1696584 - RNA, 21 nt, Human
cuaaaauggacuguggugacu

SEQ ID NO: 1696585 - RNA, 18 nt, Human
cccauuauucaaaguugc

SEQ ID NO: 1696586 - RNA, 23 nt, Human
cccauuauucaaaguugccuaaa

SEQ ID NO: 1696587 - RNA, 16 nt, Human
ccccacccugccucac

SEQ ID NO: 1696588 - RNA, 11 nt, Human
ccauuauucaa

SEQ ID NO: 1696589 - RNA, 13 nt, Human
ccauuuggaaauc

SEQ ID NO: 1696590 - RNA, 14 nt, Human
caaaaauauuuuau

SEQ ID NO: 1696591 - RNA, 15 nt, Human
caaaaauauuuuaug

SEQ ID NO: 1696592 - RNA, 17 nt, Human
caaaaauauuuuaugau

SEQ ID NO: 1696593 - RNA, 21 nt, Human
caaaaauauuuuaugauccag

SEQ ID NO: 1696594 - RNA, 22 nt, Human
caaaaauauuuuaugauccagc

SEQ ID NO: 1696595 - RNA, 23 nt, Human
caaaaauauuuuaugauccagca

SEQ ID NO: 1696596 - RNA, 19 nt, Human
caaaaaccaguauuguaca

SEQ ID NO: 1696597 - RNA, 20 nt, Human
caaaaaccaguauuguacaa

SEQ ID NO: 1696598 - RNA, 18 nt, Human
caaaaaccaguauuguac

SEQ ID NO: 1696599 - RNA, 23 nt, Human
caauuaaggauuuuaugcuuuaa

SEQ ID NO: 1696600 - RNA, 23 nt, Human
uuuuguuuggaccaaaaaccagu

SEQ ID NO: 1696601 - RNA, 13 nt, Human
uuuuguuucugua

SEQ ID NO: 1696602 - RNA, 12 nt, Human
uuuuguuuggac

SEQ ID NO: 1696603 - RNA, 22 nt, Human
uuuuguuuggaccaaaaaccag

SEQ ID NO: 1696604 - RNA, 12 nt, Human
uuuuguuucugu

SEQ ID NO: 1696605 - RNA, 18 nt, Human
uuuuguuguuuguuuagu

SEQ ID NO: 1696606 - RNA, 14 nt, Human
auuaagcauauauu

SEQ ID NO: 1696607 - RNA, 15 nt, Human
auuaagcauauauuu

SEQ ID NO: 1696608 - RNA, 21 nt, Human
auuaagcauauauuuuuauau

SEQ ID NO: 1696609 - RNA, 11 nt, Human
auuaaagccau

SEQ ID NO: 1696610 - RNA, 21 nt, Human
auuagaauucuguauagauua

SEQ ID NO: 1696611 - RNA, 15 nt, Human
auuagaauucuguau

SEQ ID NO: 1696612 - RNA, 16 nt, Human
auuagaauucuguaua

SEQ ID NO: 1696613 - RNA, 17 nt, Human
auuagaauucuguauag

SEQ ID NO: 1696614 - RNA, 18 nt, Human
auuagaauucuguauaga

SEQ ID NO: 1696615 - RNA, 13 nt, Human
auuagaauucugu

SEQ ID NO: 1696616 - RNA, 14 nt, Human
auuagaauucugua

SEQ ID NO: 1696617 - RNA, 12 nt, Human
auuagaauucug

SEQ ID NO: 1696618 - RNA, 15 nt, Human
auuaauaauaaauuc

SEQ ID NO: 1696619 - RNA, 12 nt, Human
auguuaaaccau

SEQ ID NO: 1696620 - RNA, 13 nt, Human
auguuaaaccaug

SEQ ID NO: 1696621 - RNA, 20 nt, Human
auguuaaaccaugggauaaa

SEQ ID NO: 1696622 - RNA, 12 nt, Human
uuuuauuaugaa

SEQ ID NO: 1696623 - RNA, 21 nt, Human
uuuuauuaugaaacuugugua

SEQ ID NO: 1696624 - RNA, 22 nt, Human
uuuuauuaugaaacuuguguaa

SEQ ID NO: 1696625 - RNA, 15 nt, Human
uuuucugauccaguu

SEQ ID NO: 1696626 - RNA, 21 nt, Human
auucccuggccuuucauauuu

SEQ ID NO: 1696627 - RNA, 13 nt, Human
auucccuggccuu

SEQ ID NO: 1696628 - RNA, 19 nt, Human
auucccuggccuuucauau

SEQ ID NO: 1696629 - RNA, 21 nt, Human
auucuccuaucaccugucuug

SEQ ID NO: 1696630 - RNA, 14 nt, Human
auugguguuguacu

SEQ ID NO: 1696631 - RNA, 22 nt, Human
auugguguuguacucaauuuua

SEQ ID NO: 1696632 - RNA, 23 nt, Human
auugguguuguacucaauuuuaa

SEQ ID NO: 1696633 - RNA, 13 nt, Human
auucuuaaaguug

SEQ ID NO: 1696634 - RNA, 14 nt, Human
auucuuaaaguuga

SEQ ID NO: 1696635 - RNA, 15 nt, Human
auucuuaaaguugaa

SEQ ID NO: 1696636 - RNA, 16 nt, Human
auucuuaaaguugaau

SEQ ID NO: 1696637 - RNA, 21 nt, Human
auucuguauagauuagaauuc

SEQ ID NO: 1696638 - RNA, 15 nt, Human
auucuucagcaaaaa

SEQ ID NO: 1696639 - RNA, 23 nt, Human
auucuucagcaaaaauauuuuau

SEQ ID NO: 1696640 - RNA, 18 nt, Human
auucuuaaaguugaauuu

SEQ ID NO: 1696641 - RNA, 16 nt, Human
auuuuauuauguaaau

SEQ ID NO: 1696642 - RNA, 17 nt, Human
auuuuauuauguaaauc

SEQ ID NO: 1696643 - RNA, 18 nt, Human
auuuuauuauguaaaucc

SEQ ID NO: 1696644 - RNA, 19 nt, Human
auuuuauuauguaaauccc

SEQ ID NO: 1696645 - RNA, 20 nt, Human
auuuuauuauguaaauccca

SEQ ID NO: 1696646 - RNA, 21 nt, Human
auuuuauuauguaaaucccau

SEQ ID NO: 1696647 - RNA, 13 nt, Human
auuuuccuccuuu

SEQ ID NO: 1696648 - RNA, 17 nt, Human
auuuuccuccuuucucu

SEQ ID NO: 1696649 - RNA, 15 nt, Human
uuguaauuauaucug

SEQ ID NO: 1696650 - RNA, 16 nt, Human
uugguuaagucuguuu

SEQ ID NO: 1696651 - RNA, 18 nt, Human
uugguuaagucuguuuua

SEQ ID NO: 1696652 - RNA, 17 nt, Human
uuuaaaaaaaaaauugg

SEQ ID NO: 1696653 - RNA, 23 nt, Human
augaucuaccagccucccuauuu

SEQ ID NO: 1696654 - RNA, 15 nt, Human
uuucuauauuuucau

SEQ ID NO: 1696655 - RNA, 18 nt, Human
uuucuauauuuucauucu

SEQ ID NO: 1696656 - RNA, 13 nt, Human
uuucuauauuuuc

SEQ ID NO: 1696657 - RNA, 21 nt, Human
uuucuaugcugaguuugugcu

SEQ ID NO: 1696658 - RNA, 15 nt, Human
uuuacuaaaauggac

SEQ ID NO: 1696659 - RNA, 17 nt, Human
uuuacuaaaauggacug

SEQ ID NO: 1696660 - RNA, 23 nt, Human
uuuagcuacuauauaugugauga

SEQ ID NO: 1696661 - RNA, 21 nt, Human
uuuauuaugaaacuuguguaa

SEQ ID NO: 1696662 - RNA, 13 nt, Human
uuuauuaugaaac

SEQ ID NO: 1696663 - RNA, 17 nt, Human
uucagcaaaaauauuuu

SEQ ID NO: 1696664 - RNA, 19 nt, Human
uucagcaaaaauauuuuau

SEQ ID NO: 1696665 - RNA, 22 nt, Human
uucauuauuuuauuaugaaacu

SEQ ID NO: 1696666 - RNA, 21 nt, Human
uucauggaacgcguugaaauu

SEQ ID NO: 1696667 - RNA, 22 nt, Human
uucauggaacgcguugaaauug

SEQ ID NO: 1696668 - RNA, 15 nt, Human
uucauuaauaauaaa

SEQ ID NO: 1696669 - RNA, 18 nt, Human
uucauuaauaauaaauuc

SEQ ID NO: 1696670 - RNA, 21 nt, Human
uucauuaauaauaaauucccu

SEQ ID NO: 1696671 - RNA, 19 nt, Human
uucauggaacgcguugaaa

SEQ ID NO: 1696672 - RNA, 20 nt, Human
uucauggaacgcguugaaau

SEQ ID NO: 1696673 - RNA, 13 nt, Human
auauauuuuuaua

SEQ ID NO: 1696674 - RNA, 19 nt, Human
aucaacugggcugaacacu

SEQ ID NO: 1696675 - RNA, 12 nt, Human
auauuaaagcca

SEQ ID NO: 1696676 - RNA, 17 nt, Human
uugacauagucuggcug

SEQ ID NO: 1696677 - RNA, 14 nt, Human
uugacauagucugg

SEQ ID NO: 1696678 - RNA, 19 nt, Human
uugauaaucaacugggcug

SEQ ID NO: 1696679 - RNA, 13 nt, Human
uucuuaaaguuga

SEQ ID NO: 1696680 - RNA, 15 nt, Human
uucuuaaauaauaaa

SEQ ID NO: 1696681 - RNA, 19 nt, Human
uucuuaaauaauaaagauc

SEQ ID NO: 1696682 - RNA, 14 nt, Human
ugcuauuucuauau

SEQ ID NO: 1696683 - RNA, 20 nt, Human
ugcuauuucuauauuuucau

SEQ ID NO: 1696684 - RNA, 21 nt, Human
ugcuauuucuauauuuucauu

SEQ ID NO: 1696685 - RNA, 12 nt, Human
ugcuauuucuau

SEQ ID NO: 1696686 - RNA, 13 nt, Human
ugcuauuucuaua

SEQ ID NO: 1696687 - RNA, 14 nt, Human
aggacuuguuagau

SEQ ID NO: 1696688 - RNA, 16 nt, Human
aggacuuguuagaucu

SEQ ID NO: 1696689 - RNA, 17 nt, Human
aggacuuguuagaucua

SEQ ID NO: 1696690 - RNA, 20 nt, Human
aggauuuuaugcuuuaaaca

SEQ ID NO: 1696691 - RNA, 12 nt, Human
ugauuucuaugc

SEQ ID NO: 1696692 - RNA, 15 nt, Human
ugauuucuaugcuga

SEQ ID NO: 1696693 - RNA, 16 nt, Human
ugauuucuaugcugag

SEQ ID NO: 1696694 - RNA, 21 nt, Human
uguuguacucaauuuuaacaa

SEQ ID NO: 1696695 - RNA, 14 nt, Human
uuauaaaucgcuuu

SEQ ID NO: 1696696 - RNA, 17 nt, Human
uuauaaaucgcuuuuga

SEQ ID NO: 1696697 - RNA, 18 nt, Human
uuauaaaucgcuuuugau

SEQ ID NO: 1696698 - RNA, 21 nt, Human
auaauuauaugcuauuucuau

SEQ ID NO: 1696699 - RNA, 23 nt, Human
auaauuauaugcuauuucuauau

SEQ ID NO: 1696700 - RNA, 17 nt, Human
auaauuauaugcuauuu

SEQ ID NO: 1696701 - RNA, 19 nt, Human
auaauuauaugcuauuucu

SEQ ID NO: 1696702 - RNA, 19 nt, Human
auaaucacuuuuuuccaca

SEQ ID NO: 1696703 - RNA, 16 nt, Human
auaauaaggaaaaguu

SEQ ID NO: 1696704 - RNA, 17 nt, Human
auaauaaggaaaaguuu

SEQ ID NO: 1696705 - RNA, 18 nt, Human
auaauaaggaaaaguuua

SEQ ID NO: 1696706 - RNA, 19 nt, Human
auaauaaggaaaaguuuaa

SEQ ID NO: 1696707 - RNA, 22 nt, Human
auaauaaggaaaaguuuaauau

SEQ ID NO: 1696708 - RNA, 18 nt, Human
ugguuaagucuguuuuau

SEQ ID NO: 1696709 - RNA, 15 nt, Human
ugguuaagucuguuu

SEQ ID NO: 1696710 - RNA, 21 nt, Human
uguaaauacaauuuuguuucu

SEQ ID NO: 1696711 - RNA, 10 nt, Human
uguaaauccc

SEQ ID NO: 1696712 - RNA, 16 nt, Human
uguaaauacaauuuug

SEQ ID NO: 1696713 - RNA, 17 nt, Human
uguaaauacaauuuugu

SEQ ID NO: 1696714 - RNA, 18 nt, Human
uguaaauacaauuuuguu

SEQ ID NO: 1696715 - RNA, 19 nt, Human
uguaaauacaauuuuguuu

SEQ ID NO: 1696716 - RNA, 13 nt, Human
uguacaaaguauu

SEQ ID NO: 1696717 - RNA, 14 nt, Human
uguacaaaguauua

SEQ ID NO: 1696718 - RNA, 15 nt, Human
ugucuugccuuuuuc

SEQ ID NO: 1696719 - RNA, 16 nt, Human
ugucuugccuuuuuca

SEQ ID NO: 1696720 - RNA, 17 nt, Human
ugucuugccuuuuucau

SEQ ID NO: 1696721 - RNA, 21 nt, Human
ugucuugccuuuuucauuauu

SEQ ID NO: 1696722 - RNA, 14 nt, Human
ugugaacuaaacuu

SEQ ID NO: 1696723 - RNA, 19 nt, Human
ugugaacuaaacuuucaca

SEQ ID NO: 1696724 - RNA, 20 nt, Human
ugugaacuaaacuuucacac

SEQ ID NO: 1696725 - RNA, 22 nt, Human
ugucuucauaccuacauguauu

SEQ ID NO: 1696726 - RNA, 13 nt, Human
agucuguuuuaug

SEQ ID NO: 1696727 - RNA, 14 nt, Human
agucuguuuuauga

SEQ ID NO: 1696728 - RNA, 17 nt, Human
agucuguuuuaugacuu

SEQ ID NO: 1696729 - RNA, 18 nt, Human
agucuguuuuaugacuuc

SEQ ID NO: 1696730 - RNA, 18 nt, Human
agucucugaagugaaacu

SEQ ID NO: 1696731 - RNA, 19 nt, Human
agucucugaagugaaacug

SEQ ID NO: 1696732 - RNA, 18 nt, Human
ugugagcaucacaguuuu

SEQ ID NO: 1696733 - RNA, 12 nt, Human
uguaugugugaa

SEQ ID NO: 1696734 - RNA, 13 nt, Human
uguaugugugaag

SEQ ID NO: 1696735 - RNA, 12 nt, Human
uguauuaagaau

SEQ ID NO: 1696736 - RNA, 16 nt, Human
uguauuaagaaugaaa

SEQ ID NO: 1696737 - RNA, 15 nt, Human
aguauuguacaaagu

SEQ ID NO: 1696738 - RNA, 20 nt, Human
aguauuguacaaaguauuaa

SEQ ID NO: 1696739 - RNA, 22 nt, Human
aguauuguacaaaguauuaagc

SEQ ID NO: 1696740 - RNA, 23 nt, Human
aguauuguacaaaguauuaagca

SEQ ID NO: 1696741 - RNA, 11 nt, Human
aguauuguaca

SEQ ID NO: 1696742 - RNA, 23 nt, Human
agucagaucugccuaaggacuuc

SEQ ID NO: 1696743 - RNA, 21 nt, Human
agucagaucugccuaaggacu

SEQ ID NO: 1696744 - RNA, 22 nt, Human
agucagaucugccuaaggacuu

SEQ ID NO: 1696745 - RNA, 20 nt, Human
agucagaucugccuaaggac

SEQ ID NO: 1696746 - RNA, 17 nt, Human
agucagaucugccuaag

SEQ ID NO: 1696747 - RNA, 20 nt, Human
agacuggugacugauucuuc

SEQ ID NO: 1696748 - RNA, 21 nt, Human
agacuggugacugauucuuca

SEQ ID NO: 1696749 - RNA, 17 nt, Human
ucuuugucuacaccauu

SEQ ID NO: 1696750 - RNA, 18 nt, Human
ugaaacugcuuguuuccu

SEQ ID NO: 1696751 - RNA, 19 nt, Human
ugaaacugcuuguuuccua

SEQ ID NO: 1696752 - RNA, 16 nt, Human
agagaguguugaaacg

SEQ ID NO: 1696753 - RNA, 15 nt, Human
agagaguguugaaac

SEQ ID NO: 1696754 - RNA, 20 nt, Human
ugaaacugcuuguuuccuag

SEQ ID NO: 1696755 - RNA, 22 nt, Human
ugaaacugcuuguuuccuagca

SEQ ID NO: 1696756 - RNA, 12 nt, Human
agagguuuuucu

SEQ ID NO: 1696757 - RNA, 22 nt, Human
agagguuuuucuuaaauaauaa

SEQ ID NO: 1696758 - RNA, 17 nt, Human
ugaacuaaacuuucaca

SEQ ID NO: 1696759 - RNA, 19 nt, Human
ugaacuaaacuuucacacc

SEQ ID NO: 1696760 - RNA, 13 nt, Human
ugaaauuguaauu

SEQ ID NO: 1696761 - RNA, 14 nt, Human
ugaaauuguaauua

SEQ ID NO: 1696762 - RNA, 15 nt, Human
ugaaauuguaauuau

SEQ ID NO: 1696763 - RNA, 16 nt, Human
ugaaauuguaauuaua

SEQ ID NO: 1696764 - RNA, 19 nt, Human
ugaaauuguaauuauaucu

SEQ ID NO: 1696765 - RNA, 20 nt, Human
ugaaauuguaauuauaucug

SEQ ID NO: 1696766 - RNA, 14 nt, Human
ugaaauacuguuug

SEQ ID NO: 1696767 - RNA, 16 nt, Human
ugaaauacuguuugag

SEQ ID NO: 1696768 - RNA, 15 nt, Human
agauuagaauucugu

SEQ ID NO: 1696769 - RNA, 16 nt, Human
agauuagaauucugua

SEQ ID NO: 1696770 - RNA, 22 nt, Human
agauuagaauucuguauagauu

SEQ ID NO: 1696771 - RNA, 23 nt, Human
agauuagaauucuguauagauua

SEQ ID NO: 1696772 - RNA, 21 nt, Human
agauuagagaguguugaaacg

SEQ ID NO: 1696773 - RNA, 17 nt, Human
acuuuggauaauaagga

SEQ ID NO: 1696774 - RNA, 19 nt, Human
acuuuggauaauaaggaaa

SEQ ID NO: 1696775 - RNA, 12 nt, Human
acuuuggauaau

SEQ ID NO: 1696776 - RNA, 16 nt, Human
ucucauuuaauccucu

SEQ ID NO: 1696777 - RNA, 22 nt, Human
ucucagauuuuauuauguaaau

SEQ ID NO: 1696778 - RNA, 23 nt, Human
ucucagauuuuauuauguaaauc

SEQ ID NO: 1696779 - RNA, 13 nt, Human
acuuguguaaaua

SEQ ID NO: 1696780 - RNA, 15 nt, Human
acuguuauuuauaau

SEQ ID NO: 1696781 - RNA, 17 nt, Human
acuguuauuuauaauca

SEQ ID NO: 1696782 - RNA, 20 nt, Human
acuguuauuuauaaucacuu

SEQ ID NO: 1696783 - RNA, 21 nt, Human
acuguuauuuauaaucacuuu

SEQ ID NO: 1696784 - RNA, 14 nt, Human
ucugauccaguuuu

SEQ ID NO: 1696785 - RNA, 21 nt, Human
ucugauccaguuuuguuugga

SEQ ID NO: 1696786 - RNA, 11 nt, Human
ucugauccagu

SEQ ID NO: 1696787 - RNA, 20 nt, Human
ucugugagcaucacaguuuu

SEQ ID NO: 1696788 - RNA, 14 nt, Human
agaauucuguauag

SEQ ID NO: 1696789 - RNA, 12 nt, Human
agaauucuguau

SEQ ID NO: 1696790 - RNA, 14 nt, Human
ucugugaacuugaa

SEQ ID NO: 1696791 - RNA, 17 nt, Human
ucugugaacuugaaauu

SEQ ID NO: 1696792 - RNA, 18 nt, Human
ucugugaacuugaaauuu

SEQ ID NO: 1696793 - RNA, 21 nt, Human
agaaugguccgugcuaaggac

SEQ ID NO: 1696794 - RNA, 23 nt, Human
agaaugguccgugcuaaggacuu

SEQ ID NO: 1696795 - RNA, 14 nt, Human
agaaggcaaaugac

SEQ ID NO: 1696796 - RNA, 15 nt, Human
agaaggcaaaugacu

SEQ ID NO: 1696797 - RNA, 20 nt, Human
agaaggcaaaugacuuugga

SEQ ID NO: 1696798 - RNA, 22 nt, Human
uccugcaaugaagucucugaag

SEQ ID NO: 1696799 - RNA, 12 nt, Human
acucaauuuuaa

SEQ ID NO: 1696800 - RNA, 15 nt, Human
acucaauuuuaacaa

SEQ ID NO: 1696801 - RNA, 19 nt, Human
acggugaauggcuuuguau

SEQ ID NO: 1696802 - RNA, 20 nt, Human
acggugaauggcuuuguaua

SEQ ID NO: 1696803 - RNA, 16 nt, Human
acggugaauggcuuug

SEQ ID NO: 1696804 - RNA, 15 nt, Human
acuaaacuuucacac

SEQ ID NO: 1696805 - RNA, 16 nt, Human
acuaaacuuucacacc

SEQ ID NO: 1696806 - RNA, 13 nt, Human
acggaugauuucu

SEQ ID NO: 1696807 - RNA, 14 nt, Human
acggaugauuucua

SEQ ID NO: 1696808 - RNA, 19 nt, Human
accauaaccccggaagcca

SEQ ID NO: 1696809 - RNA, 23 nt, Human
ucagauuuuauuauguaaauccc

SEQ ID NO: 1696810 - RNA, 19 nt, Human
ucagcaaaaauauuuuaug

SEQ ID NO: 1696811 - RNA, 20 nt, Human
ucagcaaaaauauuuuauga

SEQ ID NO: 1696812 - RNA, 18 nt, Human
ucaacugggcugaacacu

SEQ ID NO: 1696813 - RNA, 17 nt, Human
ucaaccaccuuucagau

SEQ ID NO: 1696814 - RNA, 19 nt, Human
acauguauuuguuugcaua

SEQ ID NO: 1696815 - RNA, 17 nt, Human
acauguauuuguuugca

SEQ ID NO: 1696816 - RNA, 18 nt, Human
acauguauuuguuugcau

SEQ ID NO: 1696817 - RNA, 16 nt, Human
acauguauuuguuugc

SEQ ID NO: 1696818 - RNA, 12 nt, Human
ucaacugggcug

SEQ ID NO: 1696819 - RNA, 19 nt, Human
ucaccugucuugccuuuuu

SEQ ID NO: 1696820 - RNA, 20 nt, Human
ucaccugucuugccuuuuuc

SEQ ID NO: 1696821 - RNA, 23 nt, Human
accaguauuguacaaaguauuaa

SEQ ID NO: 1696822 - RNA, 14 nt, Human
accaguauuguaca

SEQ ID NO: 1696823 - RNA, 15 nt, Human
accaguauuguacaa

SEQ ID NO: 1696824 - RNA, 20 nt, Human
accaguauuguacaaaguau

SEQ ID NO: 1696825 - RNA, 22 nt, Human
accaguauuguacaaaguauua

SEQ ID NO: 1696826 - RNA, 20 nt, Human
ucacaguuuugguugcuuua

SEQ ID NO: 1696827 - RNA, 21 nt, Human
ucacaguuuugguugcuuuaa

SEQ ID NO: 1696828 - RNA, 23 nt, Human
ucacaguuuugguugcuuuaaua

SEQ ID NO: 1696829 - RNA, 21 nt, Human
uaacuguuauuuauaaucacu

SEQ ID NO: 1696830 - RNA, 12 nt, Human
uaacauaaaucu

SEQ ID NO: 1696831 - RNA, 14 nt, Human
uaacauaaaucugu

SEQ ID NO: 1696832 - RNA, 16 nt, Human
aauaucaucaguauug

SEQ ID NO: 1696833 - RNA, 20 nt, Human
aaucugugaacuugaaauuu

SEQ ID NO: 1696834 - RNA, 21 nt, Human
aaucugugaacuugaaauuug

SEQ ID NO: 1696835 - RNA, 22 nt, Human
aaucugugaacuugaaauuuga

SEQ ID NO: 1696836 - RNA, 16 nt, Human
uaaggaaaaguuuaau

SEQ ID NO: 1696837 - RNA, 16 nt, Human
uaaucacuuuuuucca

SEQ ID NO: 1696838 - RNA, 17 nt, Human
uaaucacuuuuuuccac

SEQ ID NO: 1696839 - RNA, 19 nt, Human
uaaucacuuuuuuccacau

SEQ ID NO: 1696840 - RNA, 18 nt, Human
uaaucacuuuuuuccaca

SEQ ID NO: 1696841 - RNA, 19 nt, Human
uacuauauaugugaugauc

SEQ ID NO: 1696842 - RNA, 19 nt, Human
aauucccuggccuuucaua

SEQ ID NO: 1696843 - RNA, 20 nt, Human
aauucccuggccuuucauau

SEQ ID NO: 1696844 - RNA, 14 nt, Human
uacuggauuguacu

SEQ ID NO: 1696845 - RNA, 16 nt, Human
aauggacuguggugac

SEQ ID NO: 1696846 - RNA, 16 nt, Human
aaugccaucaauaaaa

SEQ ID NO: 1696847 - RNA, 21 nt, Human
aaugccaucaauaaaaaauua

SEQ ID NO: 1696848 - RNA, 23 nt, Human
aaugccaucaauaaaaaauuaug

SEQ ID NO: 1696849 - RNA, 20 nt, Human
aauuaacauguuaaaccaug

SEQ ID NO: 1696850 - RNA, 19 nt, Human
aauuaacauguuaaaccau

SEQ ID NO: 1696851 - RNA, 13 nt, Human
uacauguauuugu

SEQ ID NO: 1696852 - RNA, 12 nt, Human
uauucaaaguug

SEQ ID NO: 1696853 - RNA, 13 nt, Human
uauucaaaguugc

SEQ ID NO: 1696854 - RNA, 16 nt, Human
uauucaaaguugccua

SEQ ID NO: 1696855 - RNA, 13 nt, Human
acaguauaauuaa

SEQ ID NO: 1696856 - RNA, 15 nt, Human
acaguauaauuaaca

SEQ ID NO: 1696857 - RNA, 20 nt, Human
acaguauaauuaacauguua

SEQ ID NO: 1696858 - RNA, 14 nt, Human
uaugugugaaguga

SEQ ID NO: 1696859 - RNA, 12 nt, Human
uaugugugaagu

SEQ ID NO: 1696860 - RNA, 20 nt, Human
uauauuuacuaaaauggacu

SEQ ID NO: 1696861 - RNA, 21 nt, Human
uauauuuacuaaaauggacug

SEQ ID NO: 1696862 - RNA, 19 nt, Human
uauauuuacuaaaauggac

SEQ ID NO: 1696863 - RNA, 23 nt, Human
acacacuuuugguuaagucuguu

SEQ ID NO: 1696864 - RNA, 17 nt, Human
acaccauuaugugcgcu

SEQ ID NO: 1696865 - RNA, 21 nt, Human
acaccauuaugugcgcugaua

SEQ ID NO: 1696866 - RNA, 21 nt, Human
uagcuagacuggugacugauu

SEQ ID NO: 1696867 - RNA, 22 nt, Human
uagcuagacuggugacugauuc

SEQ ID NO: 1696868 - RNA, 23 nt, Human
uagagauuuuuuuguuguuuguu

SEQ ID NO: 1696869 - RNA, 14 nt, Human
gugaucucauuuaa

SEQ ID NO: 1696870 - RNA, 13 nt, Human
aacuugaaauuug

SEQ ID NO: 1696871 - RNA, 18 nt, Human
aacuugaaauuugaauuu

SEQ ID NO: 1696872 - RNA, 19 nt, Human
aacuugaaauuugaauuuu

SEQ ID NO: 1696873 - RNA, 12 nt, Human
aacuugaaauuu

SEQ ID NO: 1696874 - RNA, 12 nt, Human
gugacuuuggau

SEQ ID NO: 1696875 - RNA, 15 nt, Human
gugacuuuggauaau

SEQ ID NO: 1696876 - RNA, 23 nt, Human
gucuugucucagauuuuauuaug

SEQ ID NO: 1696877 - RNA, 16 nt, Human
aacauguuaaaccaug

SEQ ID NO: 1696878 - RNA, 14 nt, Human
aacauguuaaacca

SEQ ID NO: 1696879 - RNA, 15 nt, Human
aacauguuaaaccau

SEQ ID NO: 1696880 - RNA, 16 nt, Human
aacauugguucuugua

SEQ ID NO: 1696881 - RNA, 18 nt, Human
aacauugguucuuguauu

SEQ ID NO: 1696882 - RNA, 19 nt, Human
aacauugguucuuguauua

SEQ ID NO: 1696883 - RNA, 22 nt, Human
aacauugguucuuguauuaaga

SEQ ID NO: 1696884 - RNA, 23 nt, Human
aacauugguucuuguauuaagaa

SEQ ID NO: 1696885 - RNA, 16 nt, Human
guccgugcuaaggacu

SEQ ID NO: 1696886 - RNA, 17 nt, Human
guccgugcuaaggacuu

SEQ ID NO: 1696887 - RNA, 15 nt, Human
guccgugcuaaggac

SEQ ID NO: 1696888 - RNA, 15 nt, Human
aaauuugaauuuugu

SEQ ID NO: 1696889 - RNA, 22 nt, Human
aaauuugaauuuuguguuagag

SEQ ID NO: 1696890 - RNA, 12 nt, Human
aaauuugaauuu

SEQ ID NO: 1696891 - RNA, 19 nt, Human
guauuguacaaaguauuaa

SEQ ID NO: 1696892 - RNA, 10 nt, Human
guauugaagc

SEQ ID NO: 1696893 - RNA, 13 nt, Human
guauugaagcauu

SEQ ID NO: 1696894 - RNA, 17 nt, Human
guauugaagcauuuuau

SEQ ID NO: 1696895 - RNA, 18 nt, Human
guauugaagcauuuuaua

SEQ ID NO: 1696896 - RNA, 22 nt, Human
guauugaagcauuuuauaaauc

SEQ ID NO: 1696897 - RNA, 21 nt, Human
guauuguacaaaguauuaagc

SEQ ID NO: 1696898 - RNA, 22 nt, Human
guauuguacaaaguauuaagca

SEQ ID NO: 1696899 - RNA, 23 nt, Human
guauuguacaaaguauuaagcau

SEQ ID NO: 1696900 - RNA, 23 nt, Human
aagucagaucugccuaaggacuu

SEQ ID NO: 1696901 - RNA, 14 nt, Human
uaaaaaaaaaauug

SEQ ID NO: 1696902 - RNA, 18 nt, Human
uaaaaaaaaaauugggga

SEQ ID NO: 1696903 - RNA, 12 nt, Human
guuguuuguuua

SEQ ID NO: 1696904 - RNA, 12 nt, Human
aaggaaaaguuu

SEQ ID NO: 1696905 - RNA, 20 nt, Human
aaggaaacuggguuccugca

SEQ ID NO: 1696906 - RNA, 13 nt, Human
guuuauuacagua

SEQ ID NO: 1696907 - RNA, 17 nt, Human
guuuauuacaguauaau

SEQ ID NO: 1696908 - RNA, 13 nt, Human
guuuaauauuaaa

SEQ ID NO: 1696909 - RNA, 14 nt, Human
guuuaauauuaaag

SEQ ID NO: 1696910 - RNA, 15 nt, Human
guuuaauauuaaagc

SEQ ID NO: 1696911 - RNA, 18 nt, Human
guuuaauauuaaagccau

SEQ ID NO: 1696912 - RNA, 19 nt, Human
guuuaauauuaaagccaug

SEQ ID NO: 1696913 - RNA, 18 nt, Human
guuuggaccaaaaaccag

SEQ ID NO: 1696914 - RNA, 13 nt, Human
guuuuaugacuuc

SEQ ID NO: 1696915 - RNA, 18 nt, Human
guuuuaugacuucauuaa

SEQ ID NO: 1696916 - RNA, 18 nt, Human
aagucagaucugccuaag

SEQ ID NO: 1696917 - RNA, 21 nt, Human
aagucagaucugccuaaggac

SEQ ID NO: 1696918 - RNA, 22 nt, Human
aagucagaucugccuaaggacu

SEQ ID NO: 1696919 - RNA, 20 nt, Human
aagccauguuuauuacagua

SEQ ID NO: 1696920 - RNA, 21 nt, Human
aagccauguuuauuacaguau

SEQ ID NO: 1696921 - RNA, 22 nt, Human
aagccauguuuauuacaguaua

SEQ ID NO: 1696922 - RNA, 23 nt, Human
aagccauguuuauuacaguauaa

SEQ ID NO: 1696923 - RNA, 18 nt, Human
guuagagauuuuuuuguu

SEQ ID NO: 1696924 - RNA, 23 nt, Human
aagcauauauuuuuauauuuacu

SEQ ID NO: 1696925 - RNA, 15 nt, Human
aagccauguuuauua

SEQ ID NO: 1696926 - RNA, 16 nt, Human
aagccauguuuauuac

SEQ ID NO: 1696927 - RNA, 17 nt, Human
aagccauguuuauuaca

SEQ ID NO: 1696928 - RNA, 21 nt, Human
aagcauuuuauaaaucgcuuu

SEQ ID NO: 1696929 - RNA, 17 nt, Human
aagcauuuuauaaaucg

SEQ ID NO: 1696930 - RNA, 19 nt, Human
aagcauuuuauaaaucgcu

SEQ ID NO: 1696931 - RNA, 12 nt, Human
aagcauuuuaua

SEQ ID NO: 1696932 - RNA, 14 nt, Human
aagcauuuuauaaa

SEQ ID NO: 1696933 - RNA, 15 nt, Human
aagcauuuuauaaau

SEQ ID NO: 1696934 - RNA, 18 nt, Human
guguaaauacaauuuugu

SEQ ID NO: 1696935 - RNA, 21 nt, Human
guguaaauacaauuuuguuuc

SEQ ID NO: 1696936 - RNA, 22 nt, Human
guguaaauacaauuuuguuucu

SEQ ID NO: 1696937 - RNA, 21 nt, Human
cuauuuuuuuucuguuauaua

SEQ ID NO: 1696938 - RNA, 20 nt, Human
cuauuuuuuuucuguuauau

SEQ ID NO: 1696939 - RNA, 15 nt, Human
ccuuuuucauuauuu

SEQ ID NO: 1696940 - RNA, 16 nt, Human
ccuuuuuuaaauaaau

SEQ ID NO: 1696941 - RNA, 12 nt, Human
ccuuucauauuu

SEQ ID NO: 1696942 - RNA, 19 nt, Human
ccugucuugccuuuuucau

SEQ ID NO: 1696943 - RNA, 20 nt, Human
ccugucuugccuuuuucauu

SEQ ID NO: 1696944 - RNA, 17 nt, Human
ccugucuugccuuuuuc

SEQ ID NO: 1696945 - RNA, 20 nt, Human
ccuauuuuuuuucuguuaua

SEQ ID NO: 1696946 - RNA, 18 nt, Human
cccaggaauggagccugc

SEQ ID NO: 1696947 - RNA, 19 nt, Human
cccaggaauggagccugca

SEQ ID NO: 1696948 - RNA, 20 nt, Human
cccaggaauggagccugcac

SEQ ID NO: 1696949 - RNA, 22 nt, Human
cccaggaauggagccugcacgg

SEQ ID NO: 1696950 - RNA, 15 nt, Human
ccagcagauuauuca

SEQ ID NO: 1696951 - RNA, 16 nt, Human
ccagcagauuauucac

SEQ ID NO: 1696952 - RNA, 20 nt, Human
ccaguauuguacaaaguauu

SEQ ID NO: 1696953 - RNA, 22 nt, Human
ccaguauuguacaaaguauuaa

SEQ ID NO: 1696954 - RNA, 16 nt, Human
ccaguuuuguuuggac

SEQ ID NO: 1696955 - RNA, 19 nt, Human
ccaguuuuguuuggaccaa

SEQ ID NO: 1696956 - RNA, 23 nt, Human
ccaccuuucagauaacuguuauu

SEQ ID NO: 1696957 - RNA, 18 nt, Human
cauguauuuguuugcaua

SEQ ID NO: 1696958 - RNA, 13 nt, Human
caauaaaaaauua

SEQ ID NO: 1696959 - RNA, 16 nt, Human
caauaaaaaauuauga

SEQ ID NO: 1696960 - RNA, 17 nt, Human
caauaaaaaauuaugac

SEQ ID NO: 1696961 - RNA, 16 nt, Human
caaaguauuaagcaua

SEQ ID NO: 1696962 - RNA, 17 nt, Human
caaaguauuaagcauau

SEQ ID NO: 1696963 - RNA, 19 nt, Human
caaaguauuaagcauauau

SEQ ID NO: 1696964 - RNA, 21 nt, Human
caaaguauuaagcauauauuu

SEQ ID NO: 1696965 - RNA, 14 nt, Human
caaaguauuaagca

SEQ ID NO: 1696966 - RNA, 15 nt, Human
caaaguauuaagcau

SEQ ID NO: 1696967 - RNA, 16 nt, Human
caaccaccuuucagau

SEQ ID NO: 1696968 - RNA, 15 nt, Human
auuuuauaaaucgcu

SEQ ID NO: 1696969 - RNA, 16 nt, Human
auuuuauaaaucgcuu

SEQ ID NO: 1696970 - RNA, 17 nt, Human
auuuuauaaaucgcuuu

SEQ ID NO: 1696971 - RNA, 20 nt, Human
auuuuauaaaucgcuuuuga

SEQ ID NO: 1696972 - RNA, 21 nt, Human
auuuuauaaaucgcuuuugau

SEQ ID NO: 1696973 - RNA, 23 nt, Human
auuuuauaaaucgcuuuugauaa

SEQ ID NO: 1696974 - RNA, 23 nt, Human
auuguacaaaguauuaagcauau

SEQ ID NO: 1696975 - RNA, 22 nt, Human
auuguacaaaguauuaagcaua

SEQ ID NO: 1696976 - RNA, 20 nt, Human
auuguacaaaguauuaagca

SEQ ID NO: 1696977 - RNA, 23 nt, Human
auuuauaaucacuuuuuuccaca

SEQ ID NO: 1696978 - RNA, 19 nt, Human
gguguuguacucaauuuua

SEQ ID NO: 1696979 - RNA, 20 nt, Human
gguguuguacucaauuuuaa

SEQ ID NO: 1696980 - RNA, 20 nt, Human
guacaaaguauuaagcauau

SEQ ID NO: 1696981 - RNA, 21 nt, Human
guacaaaguauuaagcauaua

SEQ ID NO: 1696982 - RNA, 15 nt, Human
aaaauauuuuaugau

SEQ ID NO: 1696983 - RNA, 18 nt, Human
aaaauauuuuaugaucca

SEQ ID NO: 1696984 - RNA, 15 nt, Human
ggaagccugauuaaa

SEQ ID NO: 1696985 - RNA, 13 nt, Human
ggaaaucuuuaaa

SEQ ID NO: 1696986 - RNA, 18 nt, Human
ggaaacuggguuccugca

SEQ ID NO: 1696987 - RNA, 13 nt, Human
gccauguuuauua

SEQ ID NO: 1696988 - RNA, 11 nt, Human
gccauguuuau

SEQ ID NO: 1696989 - RNA, 14 nt, Human
gccauguuuauuac

SEQ ID NO: 1696990 - RNA, 18 nt, Human
gccauguuuauuacagua

SEQ ID NO: 1696991 - RNA, 22 nt, Human
gccauguuuauuacaguauaau

SEQ ID NO: 1696992 - RNA, 11 nt, Human
gcuaaggacuu

SEQ ID NO: 1696993 - RNA, 12 nt, Human
gcuaaggacuug

SEQ ID NO: 1696994 - RNA, 12 nt, Human
gcguugaaauug

SEQ ID NO: 1696995 - RNA, 23 nt, Human
gcuaaggacuuguuagaucuagu

SEQ ID NO: 1696996 - RNA, 22 nt, Human
gcguucauggaacgcguugaaa

SEQ ID NO: 1696997 - RNA, 18 nt, Human
gcuauuucuauauuuuca

SEQ ID NO: 1696998 - RNA, 19 nt, Human
gcuauuucuauauuuucau

SEQ ID NO: 1696999 - RNA, 20 nt, Human
gcuauuucuauauuuucauu

SEQ ID NO: 1697000 - RNA, 11 nt, Human
gcuauuucuau

SEQ ID NO: 1697001 - RNA, 13 nt, Human
gcuauuucuauau

SEQ ID NO: 1697002 - RNA, 15 nt, Human
gcuauuucuauauuu

SEQ ID NO: 1697003 - RNA, 16 nt, Human
gcuauuucuauauuuu

SEQ ID NO: 1697004 - RNA, 19 nt, Human
gauccagcagauuauucac

SEQ ID NO: 1697005 - RNA, 18 nt, Human
gauccagcagauuauuca

SEQ ID NO: 1697006 - RNA, 16 nt, Human
gaucugccuaaggacu

SEQ ID NO: 1697007 - RNA, 17 nt, Human
gaucugccuaaggacuu

SEQ ID NO: 1697008 - RNA, 12 nt, Human
gaucugccuaag

SEQ ID NO: 1697009 - RNA, 15 nt, Human
gaucugccuaaggac

SEQ ID NO: 1697010 - RNA, 13 nt, Human
gaugauuucuaug

SEQ ID NO: 1697011 - RNA, 23 nt, Human
gaugauuucuaugcugaguuugu

SEQ ID NO: 1697012 - RNA, 12 nt, Human
gaugauuucuau

SEQ ID NO: 1697013 - RNA, 16 nt, Human
gauacuggauuguacu

SEQ ID NO: 1697014 - RNA, 20 nt, Human
gauacuggauuguacuuugu

SEQ ID NO: 1697015 - RNA, 19 nt, Human
cugugagcaucacaguuuu

SEQ ID NO: 1697016 - RNA, 13 nt, Human
cuguuauauaaau

SEQ ID NO: 1697017 - RNA, 14 nt, Human
cuguuauauaaaug

SEQ ID NO: 1697018 - RNA, 15 nt, Human
cuguuauauaaaugg

SEQ ID NO: 1697019 - RNA, 22 nt, Human
cuguuauauaaaugguuaaaag

SEQ ID NO: 1697020 - RNA, 15 nt, Human
cugugaacuugaaau

SEQ ID NO: 1697021 - RNA, 16 nt, Human
cugugaacuugaaauu

SEQ ID NO: 1697022 - RNA, 17 nt, Human
cugugaacuugaaauuu

SEQ ID NO: 1697023 - RNA, 16 nt, Human
cugugagcaucacagu

SEQ ID NO: 1697024 - RNA, 13 nt, Human
cuggugacugauu

SEQ ID NO: 1697025 - RNA, 14 nt, Human
cuggugacugauuc

SEQ ID NO: 1697026 - RNA, 15 nt, Human
cuggugacugauucu

SEQ ID NO: 1697027 - RNA, 17 nt, Human
cuggugacugauucuuc

SEQ ID NO: 1697028 - RNA, 18 nt, Human
cuggugacugauucuuca

SEQ ID NO: 1697029 - RNA, 15 nt, Human
cuggugcccugcuuu

SEQ ID NO: 1697030 - RNA, 16 nt, Human
cuggugcccugcuuuc

SEQ ID NO: 1697031 - RNA, 19 nt, Human
cuggugcccugcuuucaga

SEQ ID NO: 1697032 - RNA, 21 nt, Human
cuggugcccugcuuucagaua

SEQ ID NO: 1697033 - RNA, 23 nt, Human
cuggugcccugcuuucagauacu

SEQ ID NO: 1697034 - RNA, 14 nt, Human
gaaacuuguguaaa

SEQ ID NO: 1697035 - RNA, 16 nt, Human
gaaacuuguguaaaua

SEQ ID NO: 1697036 - RNA, 20 nt, Human
gaaacuuguguaaauacaau

SEQ ID NO: 1697037 - RNA, 13 nt, Human
cuuuugguuaagu

SEQ ID NO: 1697038 - RNA, 21 nt, Human
cuugucucagauuuuauuaug

SEQ ID NO: 1697039 - RNA, 14 nt, Human
agcuggugcccugc

SEQ ID NO: 1697040 - RNA, 23 nt, Human
aggcugaugccaaguuguuugag

SEQ ID NO: 1697041 - RNA, 23 nt, Human
agccucccuauuuuuuuucuguu

SEQ ID NO: 1697042 - RNA, 22 nt, Human
agccauguuuauuacaguauaa

SEQ ID NO: 1697043 - RNA, 17 nt, Human
agccauguuuauuacag

SEQ ID NO: 1697044 - RNA, 14 nt, Human
agaguguugaaacg

SEQ ID NO: 1697045 - RNA, 12 nt, Human
aucaccugucuu

SEQ ID NO: 1697046 - RNA, 21 nt, Human
aucaccugucuugccuuuuuc

SEQ ID NO: 1697047 - RNA, 24 nt, Human
aucuucucagaaggcaaaugacuu

SEQ ID NO: 1697048 - RNA, 18 nt, Human
auggagccugcacgguga

SEQ ID NO: 1697049 - RNA, 22 nt, Human
auggagccugcacggugaaugg

SEQ ID NO: 1697050 - RNA, 11 nt, Human
aguugaauuua

SEQ ID NO: 1697051 - RNA, 13 nt, Human
aguugaauuuauu

SEQ ID NO: 1697052 - RNA, 17 nt, Human
aguugaauuuauuggcu

SEQ ID NO: 1697053 - RNA, 19 nt, Human
aguugaauuuauuggcuuu

SEQ ID NO: 1697054 - RNA, 20 nt, Human
aguugaauuuauuggcuuuu

SEQ ID NO: 1697055 - RNA, 20 nt, Human
auaauuaacauguuaaacca

SEQ ID NO: 1697056 - RNA, 21 nt, Human
auaauuaacauguuaaaccau

SEQ ID NO: 1697057 - RNA, 22 nt, Human
auaauuaacauguuaaaccaug

SEQ ID NO: 1697058 - RNA, 17 nt, Human
auaccuacauguauuug

SEQ ID NO: 1697059 - RNA, 15 nt, Human
auaccuacauguauu

SEQ ID NO: 1697060 - RNA, 19 nt, Human
auacaauuuuguuucugua

SEQ ID NO: 1697061 - RNA, 20 nt, Human
auacaauuuuguuucuguac

SEQ ID NO: 1697062 - RNA, 14 nt, Human
auaugcuauuucua

SEQ ID NO: 1697063 - RNA, 14 nt, Human
acauaaaucuguga

SEQ ID NO: 1697064 - RNA, 15 nt, Human
acauaaaucugugaa

SEQ ID NO: 1697065 - RNA, 18 nt, Human
acauaaaucugugaacuu

SEQ ID NO: 1697066 - RNA, 14 nt, Human
acaauuuuguuucu

SEQ ID NO: 1697067 - RNA, 15 nt, Human
acaauuuuguuucug

SEQ ID NO: 1697068 - RNA, 17 nt, Human
acaauuuuguuucugua

SEQ ID NO: 1697069 - RNA, 18 nt, Human
acaauuuuguuucuguac

SEQ ID NO: 1697070 - RNA, 12 nt, Human
acuuuucugaua

SEQ ID NO: 1697071 - RNA, 14 nt, Human
acuggguuccugca

SEQ ID NO: 1697072 - RNA, 21 nt, Human
acuucuuuaauuuuggaauuu

SEQ ID NO: 1697073 - RNA, 23 nt, Human
accuuucagauaacuguuauuua

SEQ ID NO: 1697074 - RNA, 13 nt, Human
acgaugucuucau

SEQ ID NO: 1697075 - RNA, 17 nt, Human
aacagcuggugcccugc

SEQ ID NO: 1697076 - RNA, 20 nt, Human
aaccaguauuguacaaagua

SEQ ID NO: 1697077 - RNA, 15 nt, Human
aaccaguauuguaca

SEQ ID NO: 1697078 - RNA, 21 nt, Human
aaccaguauuguacaaaguau

SEQ ID NO: 1697079 - RNA, 22 nt, Human
aaccaguauuguacaaaguauu

SEQ ID NO: 1697080 - RNA, 16 nt, Human
aaauuggggauucuua

SEQ ID NO: 1697081 - RNA, 17 nt, Human
aaauuggggauucuuaa

SEQ ID NO: 1697082 - RNA, 13 nt, Human
aacuuuucugaua

SEQ ID NO: 1697083 - RNA, 14 nt, Human
aacuuuucugauag

SEQ ID NO: 1697084 - RNA, 12 nt, Human
aacuuuucugau

SEQ ID NO: 1697085 - RNA, 16 nt, Human
aaagagguuuuucuua

SEQ ID NO: 1697086 - RNA, 19 nt, Human
aaagagguuuuucuuaaau

SEQ ID NO: 1697087 - RNA, 17 nt, Human
aaaauuggggauucuua

SEQ ID NO: 1697088 - RNA, 18 nt, Human
aaaauuggggauucuuaa

SEQ ID NO: 1697089 - RNA, 19 nt, Human
aaaauuggggauucuuaaa

SEQ ID NO: 1697090 - RNA, 19 nt, Human
aaauggacuguggugacuu

SEQ ID NO: 1697091 - RNA, 14 nt, Human
aaauacuguuugag

SEQ ID NO: 1697092 - RNA, 18 nt, Human
aaauauuuuaugauccag

SEQ ID NO: 1697093 - RNA, 19 nt, Human
aaauauuuuaugauccagc

SEQ ID NO: 1697094 - RNA, 14 nt, Human
aaauauuuuaugau

SEQ ID NO: 1697095 - RNA, 12 nt, Human
aaggauuuuaug

SEQ ID NO: 1697096 - RNA, 13 nt, Human
aaggauuuuaugc

SEQ ID NO: 1697097 - RNA, 23 nt, Human
aaggauuuuaugcuuuaaacauu

SEQ ID NO: 1697098 - RNA, 16 nt, Human
aaggauuuuaugcuuu

SEQ ID NO: 1697099 - RNA, 20 nt, Human
aaggauuuuaugcuuuaaac

SEQ ID NO: 1697100 - RNA, 21 nt, Human
aaggauuuuaugcuuuaaaca

SEQ ID NO: 1697101 - RNA, 22 nt, Human
aaggauuuuaugcuuuaaacau

SEQ ID NO: 1697102 - RNA, 13 nt, Human
aagccauguuuau

SEQ ID NO: 1697103 - RNA, 12 nt, Human
aaguuguuugag

SEQ ID NO: 1697104 - RNA, 15 nt, Human
aaguuguuugagaaa

SEQ ID NO: 1697105 - RNA, 15 nt, Human
aagucuguuuuauga

SEQ ID NO: 1697106 - RNA, 16 nt, Human
aagucuguuuuaugac

SEQ ID NO: 1697107 - RNA, 18 nt, Human
aagucuguuuuaugacuu

SEQ ID NO: 1697108 - RNA, 19 nt, Human
aagucuguuuuaugacuuc

SEQ ID NO: 1697109 - RNA, 20 nt, Human
aagucuguuuuaugacuuca

SEQ ID NO: 1697110 - RNA, 23 nt, Human
aagucuguuuuaugacuucauua

SEQ ID NO: 1697111 - RNA, 19 nt, Human
aagucucugaagugaaacu

SEQ ID NO: 1697112 - RNA, 22 nt, Human
aagucucugaagugaaacugcu

SEQ ID NO: 1697113 - RNA, 18 nt, Human
aagguucuggugugaacu

SEQ ID NO: 1697114 - RNA, 15 nt, Human
aaguaucugacaucu

SEQ ID NO: 1697115 - RNA, 22 nt, Human
aaguaucugacaucucugcaau

SEQ ID NO: 1697116 - RNA, 19 nt, Human
aaucaacugggcugaacac

SEQ ID NO: 1697117 - RNA, 14 nt, Human
aaucaacugggcug

SEQ ID NO: 1697118 - RNA, 14 nt, Human
aauccauuuggaaa

SEQ ID NO: 1697119 - RNA, 15 nt, Human
aauccauuuggaaau

SEQ ID NO: 1697120 - RNA, 17 nt, Human
aauccauuuggaaaucu

SEQ ID NO: 1697121 - RNA, 18 nt, Human
aauccauuuggaaaucuu

SEQ ID NO: 1697122 - RNA, 22 nt, Human
aauccauuuggaaaucuuuaaa

SEQ ID NO: 1697123 - RNA, 22 nt, Human
aaugguccgugcuaaggacuug

SEQ ID NO: 1697124 - RNA, 15 nt, Human
aauggcuuuguauag

SEQ ID NO: 1697125 - RNA, 16 nt, Human
aauggcuuuguauaga

SEQ ID NO: 1697126 - RNA, 18 nt, Human
aauggcuuuguauagaac

SEQ ID NO: 1697127 - RNA, 13 nt, Human
aauggcuuuguau

SEQ ID NO: 1697128 - RNA, 16 nt, Human
aaaaaccaguauugua

SEQ ID NO: 1697129 - RNA, 18 nt, Human
aaaaaccaguauuguaca

SEQ ID NO: 1697130 - RNA, 17 nt, Human
aaaaauuggggauucuu

SEQ ID NO: 1697131 - RNA, 18 nt, Human
aaaaauuggggauucuua

SEQ ID NO: 1697132 - RNA, 19 nt, Human
aaaaauuggggauucuuaa

SEQ ID NO: 1697133 - RNA, 20 nt, Human
aaaaauuggggauucuuaaa

SEQ ID NO: 1697134 - RNA, 23 nt, Human
aaaaaauuggggauucuuaaagu

SEQ ID NO: 1697135 - RNA, 16 nt, Human
uuauuacaguauaauu

SEQ ID NO: 1697136 - RNA, 13 nt, Human
uuauaaucacuuu

SEQ ID NO: 1697137 - RNA, 20 nt, Human
uuauaucugaggaauucugu

SEQ ID NO: 1697138 - RNA, 21 nt, Human
uuauaucugaggaauucugua

SEQ ID NO: 1697139 - RNA, 14 nt, Human
uuauaucugaggaa

SEQ ID NO: 1697140 - RNA, 22 nt, Human
uuauaucugaggaauucuguau

SEQ ID NO: 1697141 - RNA, 23 nt, Human
uuauaucugaggaauucuguaua

SEQ ID NO: 1697142 - RNA, 18 nt, Human
uuauaugcuauuucuaua

SEQ ID NO: 1697143 - RNA, 16 nt, Human
uuauaugcuauuucua

SEQ ID NO: 1697144 - RNA, 16 nt, Human
uucagauacuggauug

SEQ ID NO: 1697145 - RNA, 20 nt, Human
uucagauacuggauuguacu

SEQ ID NO: 1697146 - RNA, 15 nt, Human
uuauuuuauuaugaa

SEQ ID NO: 1697147 - RNA, 16 nt, Human
uuauuuuauuaugaaa

SEQ ID NO: 1697148 - RNA, 14 nt, Human
uuauuuuauuauga

SEQ ID NO: 1697149 - RNA, 20 nt, Human
uuauuuuauuaugaaacuug

SEQ ID NO: 1697150 - RNA, 17 nt, Human
uugaauuuuguguuaga

SEQ ID NO: 1697151 - RNA, 21 nt, Human
uugaauuuuguguuagagauu

SEQ ID NO: 1697152 - RNA, 15 nt, Human
uugaauuuauuggcu

SEQ ID NO: 1697153 - RNA, 18 nt, Human
uugaauuuauuggcuuuu

SEQ ID NO: 1697154 - RNA, 22 nt, Human
uugaauuuauuggcuuuucuga

SEQ ID NO: 1697155 - RNA, 13 nt, Human
uucugauagagga

SEQ ID NO: 1697156 - RNA, 21 nt, Human
uucugauagaggaagccugau

SEQ ID NO: 1697157 - RNA, 13 nt, Human
uuccugcaaugaa

SEQ ID NO: 1697158 - RNA, 21 nt, Human
uuccugcaaugaagucucuga

SEQ ID NO: 1697159 - RNA, 13 nt, Human
uuucagauacugg

SEQ ID NO: 1697160 - RNA, 21 nt, Human
uuucagauacuggauuguacu

SEQ ID NO: 1697161 - RNA, 16 nt, Human
uuuauuauguaaaucc

SEQ ID NO: 1697162 - RNA, 17 nt, Human
uuuauuauguaaauccc

SEQ ID NO: 1697163 - RNA, 14 nt, Human
uuuauuauguaaau

SEQ ID NO: 1697164 - RNA, 21 nt, Human
uuuaauaauuauaugcuauuu

SEQ ID NO: 1697165 - RNA, 18 nt, Human
uuuaauaauuauaugcua

SEQ ID NO: 1697166 - RNA, 16 nt, Human
uuuaacaacagcuggu

SEQ ID NO: 1697167 - RNA, 21 nt, Human
uuguuuggaccaaaaaccagu

SEQ ID NO: 1697168 - RNA, 13 nt, Human
uuggguguauugu

SEQ ID NO: 1697169 - RNA, 15 nt, Human
uuggguguauugugc

SEQ ID NO: 1697170 - RNA, 16 nt, Human
uuggguguauugugcg

SEQ ID NO: 1697171 - RNA, 22 nt, Human
uugucucagauuuuauuaugua

SEQ ID NO: 1697172 - RNA, 16 nt, Human
uugucucagauuuuau

SEQ ID NO: 1697173 - RNA, 20 nt, Human
uugucucagauuuuauuaug

SEQ ID NO: 1697174 - RNA, 13 nt, Human
uugucucagauuu

SEQ ID NO: 1697175 - RNA, 20 nt, Human
uugucuacaccauuaugugc

SEQ ID NO: 1697176 - RNA, 19 nt, Human
uugucuacaccauuaugug

SEQ ID NO: 1697177 - RNA, 12 nt, Human
uuguauuaagaa

SEQ ID NO: 1697178 - RNA, 13 nt, Human
uuguauuaagaau

SEQ ID NO: 1697179 - RNA, 18 nt, Human
uuguauuaagaaugaaau

SEQ ID NO: 1697180 - RNA, 15 nt, Human
uuguacucaauuuua

SEQ ID NO: 1697181 - RNA, 14 nt, Human
uuguacucaauuuu

SEQ ID NO: 1697182 - RNA, 17 nt, Human
uuguuagaucuaguuca

SEQ ID NO: 1697183 - RNA, 17 nt, Human
uuguuguuuguuuaguc

SEQ ID NO: 1697184 - RNA, 15 nt, Human
uuguuugagaaauua

SEQ ID NO: 1697185 - RNA, 21 nt, Human
uuguuugagaaauuaaguauc

SEQ ID NO: 1697186 - RNA, 19 nt, Human
uugugcugggguuaucuga

SEQ ID NO: 1697187 - RNA, 22 nt, Human
uugugcgcuaaacuuuucugau

SEQ ID NO: 1697188 - RNA, 23 nt, Human
uugugcgcuaaacuuuucugaua

SEQ ID NO: 1697189 - RNA, 13 nt, Human
uuuuucauuauuu

SEQ ID NO: 1697190 - RNA, 22 nt, Human
uuuuucauuauuuuauuaugaa

SEQ ID NO: 1697191 - RNA, 21 nt, Human
uuuuuccacauaaggaaacug

SEQ ID NO: 1697192 - RNA, 24 nt, Human
uuuggaccaaaaaccaguauugua

SEQ ID NO: 1697193 - RNA, 15 nt, Human
uuuggaaaucuuuaa

SEQ ID NO: 1697194 - RNA, 18 nt, Human
uuuggaccaaaaaccagu

SEQ ID NO: 1697195 - RNA, 21 nt, Human
uuuggaccaaaaaccaguauu

SEQ ID NO: 1697196 - RNA, 22 nt, Human
uuuggaccaaaaaccaguauug

SEQ ID NO: 1697197 - RNA, 23 nt, Human
uuuccacauaaggaaacuggguu

SEQ ID NO: 1697198 - RNA, 20 nt, Human
uuuccacauaaggaaacugg

SEQ ID NO: 1697199 - RNA, 20 nt, Human
uuuuaugacuucauuaauaa

SEQ ID NO: 1697200 - RNA, 21 nt, Human
uuuuaugacuucauuaauaau

SEQ ID NO: 1697201 - RNA, 13 nt, Human
uuuuauauuuacu

SEQ ID NO: 1697202 - RNA, 14 nt, Human
ugccuaaggacuuc

SEQ ID NO: 1697203 - RNA, 15 nt, Human
ugccuaaggacuucu

SEQ ID NO: 1697204 - RNA, 16 nt, Human
ugccuaaggacuucuu

SEQ ID NO: 1697205 - RNA, 20 nt, Human
ugccuaaggacuucuuuaau

SEQ ID NO: 1697206 - RNA, 12 nt, Human
ugccuaaggacu

SEQ ID NO: 1697207 - RNA, 13 nt, Human
ugccuaaggacuu

SEQ ID NO: 1697208 - RNA, 21 nt, Human
ugccuaaggacuucuuuaauu

SEQ ID NO: 1697209 - RNA, 12 nt, Human
ugcccugcuuuc

SEQ ID NO: 1697210 - RNA, 16 nt, Human
ugcccugcuuucagau

SEQ ID NO: 1697211 - RNA, 17 nt, Human
ugcccugcuuucagaua

SEQ ID NO: 1697212 - RNA, 15 nt, Human
ugcaaugaagucucu

SEQ ID NO: 1697213 - RNA, 18 nt, Human
ugcaaugaagucucugaa

SEQ ID NO: 1697214 - RNA, 22 nt, Human
ugcaaugaagucucugaaguga

SEQ ID NO: 1697215 - RNA, 17 nt, Human
ugagcaucacaguuuug

SEQ ID NO: 1697216 - RNA, 16 nt, Human
ugagcaucacaguuuu

SEQ ID NO: 1697217 - RNA, 14 nt, Human
ugagaaauuaagua

SEQ ID NO: 1697218 - RNA, 13 nt, Human
ugagaaauuaagu

SEQ ID NO: 1697219 - RNA, 13 nt, Human
ugacugauucuuc

SEQ ID NO: 1697220 - RNA, 14 nt, Human
ugacugauucuuca

SEQ ID NO: 1697221 - RNA, 15 nt, Human
ugacugauucuucag

SEQ ID NO: 1697222 - RNA, 16 nt, Human
ugacugauucuucagc

SEQ ID NO: 1697223 - RNA, 17 nt, Human
ugacugauucuucagca

SEQ ID NO: 1697224 - RNA, 19 nt, Human
ugaugccaaguuguuugag

SEQ ID NO: 1697225 - RNA, 15 nt, Human
ugaugccaaguuguu

SEQ ID NO: 1697226 - RNA, 21 nt, Human
ugaugccaaguuguuugagaa

SEQ ID NO: 1697227 - RNA, 23 nt, Human
ugggguuaucugaagucagaucu

SEQ ID NO: 1697228 - RNA, 13 nt, Human
ugggauaaaugcc

SEQ ID NO: 1697229 - RNA, 14 nt, Human
ugggauaaaugcca

SEQ ID NO: 1697230 - RNA, 12 nt, Human
ugggauaaaugc

SEQ ID NO: 1697231 - RNA, 13 nt, Human
uggcuuuucugau

SEQ ID NO: 1697232 - RNA, 15 nt, Human
uggaccaaaaaccag

SEQ ID NO: 1697233 - RNA, 14 nt, Human
uggaacgcguugaa

SEQ ID NO: 1697234 - RNA, 15 nt, Human
uggaacgcguugaaa

SEQ ID NO: 1697235 - RNA, 16 nt, Human
uggaacgcguugaaau

SEQ ID NO: 1697236 - RNA, 17 nt, Human
uggaacgcguugaaauu

SEQ ID NO: 1697237 - RNA, 17 nt, Human
ugucuacaccauuaugu

SEQ ID NO: 1697238 - RNA, 18 nt, Human
ugucuacaccauuaugug

SEQ ID NO: 1697239 - RNA, 16 nt, Human
ugucucagauuuuauu

SEQ ID NO: 1697240 - RNA, 20 nt, Human
ugucucagauuuuauuaugu

SEQ ID NO: 1697241 - RNA, 22 nt, Human
ugucucagauuuuauuauguaa

SEQ ID NO: 1697242 - RNA, 15 nt, Human
uguauuuguuugcau

SEQ ID NO: 1697243 - RNA, 23 nt, Human
uguauagaaccucuuugucuaca

SEQ ID NO: 1697244 - RNA, 15 nt, Human
uguauagauuagaau

SEQ ID NO: 1697245 - RNA, 21 nt, Human
uguauagauuagaauucugua

SEQ ID NO: 1697246 - RNA, 23 nt, Human
uguauagauuagagaguguugaa

SEQ ID NO: 1697247 - RNA, 19 nt, Human
ugguucuuguauuaagaau

SEQ ID NO: 1697248 - RNA, 14 nt, Human
ugguucuuguauua

SEQ ID NO: 1697249 - RNA, 18 nt, Human
ugguucuuguauuaagaa

SEQ ID NO: 1697250 - RNA, 16 nt, Human
uggugacuuuggauaa

SEQ ID NO: 1697251 - RNA, 18 nt, Human
uggugacuuuggauaaua

SEQ ID NO: 1697252 - RNA, 19 nt, Human
uggugacuuuggauaauaa

SEQ ID NO: 1697253 - RNA, 23 nt, Human
uggugacuuuggauaauaaggaa

SEQ ID NO: 1697254 - RNA, 15 nt, Human
uggugacuuuggaua

SEQ ID NO: 1697255 - RNA, 14 nt, Human
ugguugcuuuaaua

SEQ ID NO: 1697256 - RNA, 18 nt, Human
ugguugcuuuaauaucau

SEQ ID NO: 1697257 - RNA, 17 nt, Human
uguacaaaguauuaagc

SEQ ID NO: 1697258 - RNA, 18 nt, Human
uguacaaaguauuaagca

SEQ ID NO: 1697259 - RNA, 19 nt, Human
uguacaaaguauuaagcau

SEQ ID NO: 1697260 - RNA, 20 nt, Human
uguacaaaguauuaagcaua

SEQ ID NO: 1697261 - RNA, 15 nt, Human
uguacaaaguauuaa

SEQ ID NO: 1697262 - RNA, 21 nt, Human
uguacaaaguauuaagcauau

SEQ ID NO: 1697263 - RNA, 15 nt, Human
ucccuggccuuucau

SEQ ID NO: 1697264 - RNA, 11 nt, Human
ucccuggccuu

SEQ ID NO: 1697265 - RNA, 20 nt, Human
ucuaugcugaguuugugcug

SEQ ID NO: 1697266 - RNA, 16 nt, Human
ucuaugcugaguuugu

SEQ ID NO: 1697267 - RNA, 16 nt, Human
ucucugaagugaaacu

SEQ ID NO: 1697268 - RNA, 12 nt, Human
ucugacaucucu

SEQ ID NO: 1697269 - RNA, 14 nt, Human
ucugacaucucugc

SEQ ID NO: 1697270 - RNA, 15 nt, Human
ucugacaucucugca

SEQ ID NO: 1697271 - RNA, 15 nt, Human
ucugaggaauucugu

SEQ ID NO: 1697272 - RNA, 16 nt, Human
ucugaggaauucugua

SEQ ID NO: 1697273 - RNA, 17 nt, Human
ucugaggaauucuguau

SEQ ID NO: 1697274 - RNA, 18 nt, Human
ucugaggaauucuguaua

SEQ ID NO: 1697275 - RNA, 19 nt, Human
ucugaggaauucuguauag

SEQ ID NO: 1697276 - RNA, 14 nt, Human
ucugaggaauucug

SEQ ID NO: 1697277 - RNA, 16 nt, Human
ucuuaaaguugaauuu

SEQ ID NO: 1697278 - RNA, 19 nt, Human
ucuuaaaguugaauuuauu

SEQ ID NO: 1697279 - RNA, 20 nt, Human
ucuuaaaguugaauuuauug

SEQ ID NO: 1697280 - RNA, 21 nt, Human
ucuuaaaguugaauuuauugg

SEQ ID NO: 1697281 - RNA, 22 nt, Human
ucuuaaaguugaauuuauuggc

SEQ ID NO: 1697282 - RNA, 15 nt, Human
ucuuaaauaauaaag

SEQ ID NO: 1697283 - RNA, 19 nt, Human
ucuuaaauaauaaagauca

SEQ ID NO: 1697284 - RNA, 13 nt, Human
ucuuaaaguugaa

SEQ ID NO: 1697285 - RNA, 14 nt, Human
ucuuaaaguugaau

SEQ ID NO: 1697286 - RNA, 12 nt, Human
ucuuaaaguuga

SEQ ID NO: 1697287 - RNA, 21 nt, Human
ucuucagcaaaaauauuuuau

SEQ ID NO: 1697288 - RNA, 22 nt, Human
ucuucagcaaaaauauuuuaug

SEQ ID NO: 1697289 - RNA, 23 nt, Human
ucuucagcaaaaauauuuuauga

SEQ ID NO: 1697290 - RNA, 18 nt, Human
ucuucauaccuacaugua

SEQ ID NO: 1697291 - RNA, 21 nt, Human
ucuucauaccuacauguauuu

SEQ ID NO: 1697292 - RNA, 14 nt, Human
uauuuuuuuucugu

SEQ ID NO: 1697293 - RNA, 18 nt, Human
uauuuuauuaugaaacuu

SEQ ID NO: 1697294 - RNA, 23 nt, Human
uauuuuauuaugaaacuugugua

SEQ ID NO: 1697295 - RNA, 13 nt, Human
uauuuuauuauga

SEQ ID NO: 1697296 - RNA, 17 nt, Human
uauuuauaaucacuuuu

SEQ ID NO: 1697297 - RNA, 15 nt, Human
uauuuucauucuccu

SEQ ID NO: 1697298 - RNA, 23 nt, Human
ucacaccccagacgaugucuuca

SEQ ID NO: 1697299 - RNA, 12 nt, Human
uauuacaguaua

SEQ ID NO: 1697300 - RNA, 13 nt, Human
uauuacaguauaa

SEQ ID NO: 1697301 - RNA, 14 nt, Human
uauuacaguauaau

SEQ ID NO: 1697302 - RNA, 15 nt, Human
uauguaaaucccauu

SEQ ID NO: 1697303 - RNA, 19 nt, Human
uauguaaaucccauuauuc

SEQ ID NO: 1697304 - RNA, 20 nt, Human
uauguaaaucccauuauuca

SEQ ID NO: 1697305 - RNA, 21 nt, Human
uauguaaaucccauuauucaa

SEQ ID NO: 1697306 - RNA, 23 nt, Human
uauguaaaucccauuauucaaag

SEQ ID NO: 1697307 - RNA, 12 nt, Human
uauguaaauccc

SEQ ID NO: 1697308 - RNA, 16 nt, Human
uauuaagaaugaaaua

SEQ ID NO: 1697309 - RNA, 13 nt, Human
uauuaagaaugaa

SEQ ID NO: 1697310 - RNA, 23 nt, Human
ucauuauuuuauuaugaaacuug

SEQ ID NO: 1697311 - RNA, 15 nt, Human
ucauaccuacaugua

SEQ ID NO: 1697312 - RNA, 16 nt, Human
ucauaccuacauguau

SEQ ID NO: 1697313 - RNA, 14 nt, Human
ucaucaguauugaa

SEQ ID NO: 1697314 - RNA, 14 nt, Human
ggaccaaaaaccag

SEQ ID NO: 1697315 - RNA, 13 nt, Human
ggauucuuaaagu

SEQ ID NO: 1697316 - RNA, 15 nt, Human
ggcuuuguauagaac

SEQ ID NO: 1697317 - RNA, 12 nt, Human
gcuuuguauaga

SEQ ID NO: 1697318 - RNA, 13 nt, Human
gcuuuguauagaa

SEQ ID NO: 1697319 - RNA, 14 nt, Human
gcuuuguauagaac

SEQ ID NO: 1697320 - RNA, 20 nt, Human
gcuuuguauagaaccucuuu

SEQ ID NO: 1697321 - RNA, 15 nt, Human
gcuuguuuccuagca

SEQ ID NO: 1697322 - RNA, 23 nt, Human
gcuuguuuccuagcacacacuuu

SEQ ID NO: 1697323 - RNA, 22 nt, Human
gcuuuaaacauugguucuugua

SEQ ID NO: 1697324 - RNA, 21 nt, Human
gcugguguaugugugaaguga

SEQ ID NO: 1697325 - RNA, 13 nt, Human
gcagauuauucac

SEQ ID NO: 1697326 - RNA, 16 nt, Human
gcagauuauucacuga

SEQ ID NO: 1697327 - RNA, 15 nt, Human
gauagaggaagccug

SEQ ID NO: 1697328 - RNA, 21 nt, Human
gauagaggaagccugauuaaa

SEQ ID NO: 1697329 - RNA, 22 nt, Human
gauagaggaagccugauuaaag

SEQ ID NO: 1697330 - RNA, 14 nt, Human
gauagaggaagccu

SEQ ID NO: 1697331 - RNA, 16 nt, Human
gaggaauucuguauag

SEQ ID NO: 1697332 - RNA, 17 nt, Human
gaggaauucuguauaga

SEQ ID NO: 1697333 - RNA, 14 nt, Human
gaggaauucuguau

SEQ ID NO: 1697334 - RNA, 23 nt, Human
gagccugcacggugaauggcuuu

SEQ ID NO: 1697335 - RNA, 17 nt, Human
gagccugcacggugaau

SEQ ID NO: 1697336 - RNA, 22 nt, Human
gagccugcacggugaauggcuu

SEQ ID NO: 1697337 - RNA, 14 nt, Human
cuauuucuauauuu

SEQ ID NO: 1697338 - RNA, 16 nt, Human
cuauuucuauauuuuc

SEQ ID NO: 1697339 - RNA, 18 nt, Human
cuauuucuauauuuucau

SEQ ID NO: 1697340 - RNA, 15 nt, Human
cucagauuuuauuau

SEQ ID NO: 1697341 - RNA, 17 nt, Human
cucagauuuuauuaugu

SEQ ID NO: 1697342 - RNA, 18 nt, Human
cucagauuuuauuaugua

SEQ ID NO: 1697343 - RNA, 13 nt, Human
cucagauuuuauu

SEQ ID NO: 1697344 - RNA, 19 nt, Human
cuauauuuucauucuccua

SEQ ID NO: 1697345 - RNA, 15 nt, Human
cuauauuuucauucu

SEQ ID NO: 1697346 - RNA, 18 nt, Human
cuaugcugaguuugugcu

SEQ ID NO: 1697347 - RNA, 22 nt, Human
cuccaauuaaggauuuuaugcu

SEQ ID NO: 1697348 - RNA, 17 nt, Human
cuccaauuaaggauuuu

SEQ ID NO: 1697349 - RNA, 20 nt, Human
cuccaauuaaggauuuuaug

SEQ ID NO: 1697350 - RNA, 19 nt, Human
cucugaagugaaacugcuu

SEQ ID NO: 1697351 - RNA, 23 nt, Human
cucugaagugaaacugcuuguuu

SEQ ID NO: 1697352 - RNA, 23 nt, Human
cucuuugucuacaccauuaugug

SEQ ID NO: 1697353 - RNA, 13 nt, Human
cugaguuugugcu

SEQ ID NO: 1697354 - RNA, 18 nt, Human
cugaguuugugcuggugu

SEQ ID NO: 1697355 - RNA, 22 nt, Human
cugauuugacauagucuggcug

SEQ ID NO: 1697356 - RNA, 23 nt, Human
cugauuugacauagucuggcugu

SEQ ID NO: 1697357 - RNA, 21 nt, Human
cugauuugacauagucuggcu

SEQ ID NO: 1697358 - RNA, 15 nt, Human
gaaauacuguuugag

SEQ ID NO: 1697359 - RNA, 19 nt, Human
gaaauacuguuugagguuu

SEQ ID NO: 1697360 - RNA, 16 nt, Human
gaacgcguugaaauug

SEQ ID NO: 1697361 - RNA, 15 nt, Human
gaaggcaaaugacuu

SEQ ID NO: 1697362 - RNA, 16 nt, Human
gaaggcaaaugacuuu

SEQ ID NO: 1697363 - RNA, 16 nt, Human
gaagguucugguguga

SEQ ID NO: 1697364 - RNA, 20 nt, Human
gaagguucuggugugaacua

SEQ ID NO: 1697365 - RNA, 14 nt, Human
gaaggcaaaugacu

SEQ ID NO: 1697366 - RNA, 11 nt, Human
cuuuucugaua

SEQ ID NO: 1697367 - RNA, 14 nt, Human
cuuuucugauagag

SEQ ID NO: 1697368 - RNA, 14 nt, Human
cuuucauauuuuag

SEQ ID NO: 1697369 - RNA, 17 nt, Human
cuuuaaaaaaaaaauug

SEQ ID NO: 1697370 - RNA, 16 nt, Human
cuucauuaauaauaaa

SEQ ID NO: 1697371 - RNA, 17 nt, Human
cuucauuaauaauaaau

SEQ ID NO: 1697372 - RNA, 20 nt, Human
cuucagcaaaaauauuuuau

SEQ ID NO: 1697373 - RNA, 23 nt, Human
cuucagcaaaaauauuuuaugau

SEQ ID NO: 1697374 - RNA, 17 nt, Human
cuucagcaaaaauauuu

SEQ ID NO: 1697375 - RNA, 16 nt, Human
cuucucagaaggcaaa

SEQ ID NO: 1697376 - RNA, 22 nt, Human
cuucucagaaggcaaaugacuu

SEQ ID NO: 1697377 - RNA, 15 nt, Human
cugguguauguguga

SEQ ID NO: 1697378 - RNA, 16 nt, Human
cuggugugaacuaaac

SEQ ID NO: 1697379 - RNA, 17 nt, Human
cuggugugaacuaaacu

SEQ ID NO: 1697380 - RNA, 14 nt, Human
cugggguuaucuga

SEQ ID NO: 1697381 - RNA, 18 nt, Human
cugggcugaacacuccaa

SEQ ID NO: 1697382 - RNA, 15 nt, Human
cuguggugacuuugg

SEQ ID NO: 1697383 - RNA, 17 nt, Human
cuguggugacuuuggau

SEQ ID NO: 1697384 - RNA, 18 nt, Human
cuguggugacuuuggaua

SEQ ID NO: 1697385 - RNA, 20 nt, Human
cuguggugacuuuggauaau

SEQ ID NO: 1697386 - RNA, 23 nt, Human
cuguggugacuuuggauaauaag

SEQ ID NO: 1697387 - RNA, 13 nt, Human
cuguggugacuuu

SEQ ID NO: 1697388 - RNA, 14 nt, Human
cuguggugacuuug

SEQ ID NO: 1697389 - RNA, 12 nt, Human
cuguggugacuu

SEQ ID NO: 1697390 - RNA, 21 nt, Human
cugucuugccuuuuucauuau

SEQ ID NO: 1697391 - RNA, 23 nt, Human
cugucuugccuuuuucauuauuu

SEQ ID NO: 1697392 - RNA, 17 nt, Human
cccugcuuucagauacu

SEQ ID NO: 1697393 - RNA, 14 nt, Human
cccugcuuucagau

SEQ ID NO: 1697394 - RNA, 17 nt, Human
ccuaaauccauuuggaa

SEQ ID NO: 1697395 - RNA, 18 nt, Human
ccuaaauccauuuggaaa

SEQ ID NO: 1697396 - RNA, 12 nt, Human
ccuaaauccauu

SEQ ID NO: 1697397 - RNA, 15 nt, Human
ccgugcuaaggacuu

SEQ ID NO: 1697398 - RNA, 16 nt, Human
ccgugcuaaggacuug

SEQ ID NO: 1697399 - RNA, 14 nt, Human
ccgugcuaaggacu

SEQ ID NO: 1697400 - RNA, 12 nt, Human
ccuuaaaggaag

SEQ ID NO: 1697401 - RNA, 20 nt, Human
ccugcacggugaauggcuuu

SEQ ID NO: 1697402 - RNA, 20 nt, Human
ccugcaaugaagucucugaa

SEQ ID NO: 1697403 - RNA, 21 nt, Human
ccugcacggugaauggcuuug

SEQ ID NO: 1697404 - RNA, 21 nt, Human
ccugcaaugaagucucugaag

SEQ ID NO: 1697405 - RNA, 19 nt, Human
ccugcaaugaagucucuga

SEQ ID NO: 1697406 - RNA, 14 nt, Human
ccauuauucaaagu

SEQ ID NO: 1697407 - RNA, 13 nt, Human
ccauguuuauuac

SEQ ID NO: 1697408 - RNA, 20 nt, Human
ccauguuuauuacaguauaa

SEQ ID NO: 1697409 - RNA, 17 nt, Human
ccauuauucaaaguugc

SEQ ID NO: 1697410 - RNA, 22 nt, Human
ccauuauucaaaguugccuaaa

SEQ ID NO: 1697411 - RNA, 17 nt, Human
ccaugggauaaaugcca

SEQ ID NO: 1697412 - RNA, 13 nt, Human
ccaugggauaaau

SEQ ID NO: 1697413 - RNA, 17 nt, Human
cauuauuuuauuaugaa

SEQ ID NO: 1697414 - RNA, 18 nt, Human
cauuauucaaaguugccu

SEQ ID NO: 1697415 - RNA, 21 nt, Human
cauuauucaaaguugccuaaa

SEQ ID NO: 1697416 - RNA, 22 nt, Human
cauuauucaaaguugccuaaau

SEQ ID NO: 1697417 - RNA, 14 nt, Human
cauuaauaauaaau

SEQ ID NO: 1697418 - RNA, 17 nt, Human
cauuuggaaaucuuuaa

SEQ ID NO: 1697419 - RNA, 18 nt, Human
cauuuggaaaucuuuaaa

SEQ ID NO: 1697420 - RNA, 11 nt, Human
cauuuggaaau

SEQ ID NO: 1697421 - RNA, 22 nt, Human
cauuuggaaaucuuuaaaaaaa

SEQ ID NO: 1697422 - RNA, 18 nt, Human
caugggauaaaugccauc

SEQ ID NO: 1697423 - RNA, 23 nt, Human
caugggauaaaugccaucaauaa

SEQ ID NO: 1697424 - RNA, 16 nt, Human
caugggauaaaugcca

SEQ ID NO: 1697425 - RNA, 17 nt, Human
caugggauaaaugccau

SEQ ID NO: 1697426 - RNA, 22 nt, Human
cauguuaaaccaugggauaaau

SEQ ID NO: 1697427 - RNA, 23 nt, Human
cauguuuauuacaguauaauuaa

SEQ ID NO: 1697428 - RNA, 13 nt, Human
cauguuaaaccau

SEQ ID NO: 1697429 - RNA, 16 nt, Human
caucaguauugaagca

SEQ ID NO: 1697430 - RNA, 20 nt, Human
caucaguauugaagcauuuu

SEQ ID NO: 1697431 - RNA, 22 nt, Human
caucaguauugaagcauuuuau

SEQ ID NO: 1697432 - RNA, 19 nt, Human
cauagucuggcuguaccca

SEQ ID NO: 1697433 - RNA, 18 nt, Human
cauauauuuuuauauuua

SEQ ID NO: 1697434 - RNA, 20 nt, Human
cauauauuuuuauauuuacu

SEQ ID NO: 1697435 - RNA, 21 nt, Human
cauauauuuuuauauuuacua

SEQ ID NO: 1697436 - RNA, 22 nt, Human
cauauauuuuuauauuuacuaa

SEQ ID NO: 1697437 - RNA, 15 nt, Human
caucucugcaaucuu

SEQ ID NO: 1697438 - RNA, 22 nt, Human
caucucugcaaucuucucagaa

SEQ ID NO: 1697439 - RNA, 14 nt, Human
caguauaauuaaca

SEQ ID NO: 1697440 - RNA, 15 nt, Human
caguauaauuaacau

SEQ ID NO: 1697441 - RNA, 17 nt, Human
caguauaauuaacaugu

SEQ ID NO: 1697442 - RNA, 21 nt, Human
caguauaauuaacauguuaaa

SEQ ID NO: 1697443 - RNA, 21 nt, Human
cagccucccuauuuuuuuucu

SEQ ID NO: 1697444 - RNA, 19 nt, Human
cagcuggugcccugcuuuc

SEQ ID NO: 1697445 - RNA, 20 nt, Human
cagcuggugcccugcuuuca

SEQ ID NO: 1697446 - RNA, 21 nt, Human
cagcuggugcccugcuuucag

SEQ ID NO: 1697447 - RNA, 23 nt, Human
cagcuggugcccugcuuucagau

SEQ ID NO: 1697448 - RNA, 18 nt, Human
cagcuggugcccugcuuu

SEQ ID NO: 1697449 - RNA, 17 nt, Human
caggaauggagccugca

SEQ ID NO: 1697450 - RNA, 23 nt, Human
caggaauggagccugcacgguga

SEQ ID NO: 1697451 - RNA, 14 nt, Human
cagcagauuauuca

SEQ ID NO: 1697452 - RNA, 15 nt, Human
cagcagauuauucac

SEQ ID NO: 1697453 - RNA, 19 nt, Human
cagcagauuauucacugau

SEQ ID NO: 1697454 - RNA, 13 nt, Human
cagauuuuauuau

SEQ ID NO: 1697455 - RNA, 15 nt, Human
cagauuuuauuaugu

SEQ ID NO: 1697456 - RNA, 16 nt, Human
cagauuuuauuaugua

SEQ ID NO: 1697457 - RNA, 18 nt, Human
cagauuuuauuauguaaa

SEQ ID NO: 1697458 - RNA, 20 nt, Human
cagauuuuauuauguaaauc

SEQ ID NO: 1697459 - RNA, 21 nt, Human
cagauuuuauuauguaaaucc

SEQ ID NO: 1697460 - RNA, 22 nt, Human
cagauuuuauuauguaaauccc

SEQ ID NO: 1697461 - RNA, 17 nt, Human
cagcaaaaauauuuuau

SEQ ID NO: 1697462 - RNA, 12 nt, Human
cagauuauucac

SEQ ID NO: 1697463 - RNA, 18 nt, Human
cagauuauucacugauuu

SEQ ID NO: 1697464 - RNA, 23 nt, Human
cagauuauucacugauuugacau

SEQ ID NO: 1697465 - RNA, 18 nt, Human
cagaaggcaaaugacuuu

SEQ ID NO: 1697466 - RNA, 19 nt, Human
cagaaggcaaaugacuuug

SEQ ID NO: 1697467 - RNA, 20 nt, Human
cagaaggcaaaugacuuugg

SEQ ID NO: 1697468 - RNA, 22 nt, Human
cacuuuugguuaagucuguuuu

SEQ ID NO: 1697469 - RNA, 14 nt, Human
cacuuuuuuccaca

SEQ ID NO: 1697470 - RNA, 12 nt, Human
cacuuuuuucca

SEQ ID NO: 1697471 - RNA, 19 nt, Human
cagaucugccuaaggacuu

SEQ ID NO: 1697472 - RNA, 20 nt, Human
cagaucugccuaaggacuuc

SEQ ID NO: 1697473 - RNA, 21 nt, Human
cagaucugccuaaggacuucu

SEQ ID NO: 1697474 - RNA, 23 nt, Human
cagaucugccuaaggacuucuuu

SEQ ID NO: 1697475 - RNA, 16 nt, Human
cagaucugccuaagga

SEQ ID NO: 1697476 - RNA, 17 nt, Human
cagaucugccuaaggac

SEQ ID NO: 1697477 - RNA, 14 nt, Human
cagaucugccuaag

SEQ ID NO: 1697478 - RNA, 20 nt, Human
cagauaacuguuauuuauaa

SEQ ID NO: 1697479 - RNA, 21 nt, Human
cagauaacuguuauuuauaau

SEQ ID NO: 1697480 - RNA, 14 nt, Human
cagauaacuguuau

SEQ ID NO: 1697481 - RNA, 16 nt, Human
cagauaacuguuauuu

SEQ ID NO: 1697482 - RNA, 19 nt, Human
cagauaacuguuauuuaua

SEQ ID NO: 1697483 - RNA, 15 nt, Human
cacucuccauuuaau

SEQ ID NO: 1697484 - RNA, 17 nt, Human
cacucuccauuuaauaa

SEQ ID NO: 1697485 - RNA, 20 nt, Human
cacggugaauggcuuuguau

SEQ ID NO: 1697486 - RNA, 23 nt, Human
cacggugaauggcuuuguauaga

SEQ ID NO: 1697487 - RNA, 20 nt, Human
caccugucuugccuuuuuca

SEQ ID NO: 1697488 - RNA, 17 nt, Human
caccugucuugccuuuu

SEQ ID NO: 1697489 - RNA, 21 nt, Human
cacugauuugacauagucugg

SEQ ID NO: 1697490 - RNA, 23 nt, Human
cacugauuugacauagucuggcu

SEQ ID NO: 1697491 - RNA, 23 nt, Human
aaaaaauuggggauucuuaaagu

SEQ ID NO: 1697492 - RNA, 20 nt, Human
aaaaauuggggauucuuaaa

SEQ ID NO: 1697493 - RNA, 19 nt, Human
aaaaauuggggauucuuaa

SEQ ID NO: 1697494 - RNA, 18 nt, Human
aaaaauuggggauucuua

SEQ ID NO: 1697495 - RNA, 17 nt, Human
aaaaauuggggauucuu

SEQ ID NO: 1697496 - RNA, 18 nt, Human
aaaaaccaguauuguaca

SEQ ID NO: 1697497 - RNA, 16 nt, Human
aaaaaccaguauugua

SEQ ID NO: 1697498 - RNA, 14 nt, Human
aaaacaaggaugaa

SEQ ID NO: 1697499 - RNA, 17 nt, Human
aaaacaaggaugaauua

SEQ ID NO: 1697500 - RNA, 13 nt, Human
aauggcuuuguau

SEQ ID NO: 1697501 - RNA, 18 nt, Human
aauggcuuuguauagaac

SEQ ID NO: 1697502 - RNA, 16 nt, Human
aauggcuuuguauaga

SEQ ID NO: 1697503 - RNA, 15 nt, Human
aauggcuuuguauag

SEQ ID NO: 1697504 - RNA, 22 nt, Human
aaugguccgugcuaaggacuug

SEQ ID NO: 1697505 - RNA, 20 nt, Human
aauuaguuuuauaugcuucu

SEQ ID NO: 1697506 - RNA, 17 nt, Human
aauuaguuuuauaugcu

SEQ ID NO: 1697507 - RNA, 14 nt, Human
aauuaguuuuauau

SEQ ID NO: 1697508 - RNA, 22 nt, Human
aauccauuuggaaaucuuuaaa

SEQ ID NO: 1697509 - RNA, 18 nt, Human
aauccauuuggaaaucuu

SEQ ID NO: 1697510 - RNA, 17 nt, Human
aauccauuuggaaaucu

SEQ ID NO: 1697511 - RNA, 15 nt, Human
aauccauuuggaaau

SEQ ID NO: 1697512 - RNA, 14 nt, Human
aauccauuuggaaa

SEQ ID NO: 1697513 - RNA, 14 nt, Human
aauccauacauuug

SEQ ID NO: 1697514 - RNA, 13 nt, Human
aauccauacauuu

SEQ ID NO: 1697515 - RNA, 20 nt, Human
aaugauaacuggaaacuuca

SEQ ID NO: 1697516 - RNA, 17 nt, Human
aaugauaacuggaaacu

SEQ ID NO: 1697517 - RNA, 14 nt, Human
aaucaacugggcug

SEQ ID NO: 1697518 - RNA, 19 nt, Human
aaucaacugggcugaacac

SEQ ID NO: 1697519 - RNA, 13 nt, Human
aaucacaauacau

SEQ ID NO: 1697520 - RNA, 16 nt, Human
aauauuauguuaaaac

SEQ ID NO: 1697521 - RNA, 22 nt, Human
aaguaucugacaucucugcaau

SEQ ID NO: 1697522 - RNA, 15 nt, Human
aaguaucugacaucu

SEQ ID NO: 1697523 - RNA, 18 nt, Human
aagguucuggugugaacu

SEQ ID NO: 1697524 - RNA, 22 nt, Human
aagucucugaagugaaacugcu

SEQ ID NO: 1697525 - RNA, 19 nt, Human
aagucucugaagugaaacu

SEQ ID NO: 1697526 - RNA, 23 nt, Human
aagucuguuuuaugacuucauua

SEQ ID NO: 1697527 - RNA, 20 nt, Human
aagucuguuuuaugacuuca

SEQ ID NO: 1697528 - RNA, 19 nt, Human
aagucuguuuuaugacuuc

SEQ ID NO: 1697529 - RNA, 18 nt, Human
aagucuguuuuaugacuu

SEQ ID NO: 1697530 - RNA, 16 nt, Human
aagucuguuuuaugac

SEQ ID NO: 1697531 - RNA, 15 nt, Human
aagucuguuuuauga

SEQ ID NO: 1697532 - RNA, 15 nt, Human
aaguuguuugagaaa

SEQ ID NO: 1697533 - RNA, 12 nt, Human
aaguuguuugag

SEQ ID NO: 1697534 - RNA, 21 nt, Human
aauaauccuaaacauaugaau

SEQ ID NO: 1697535 - RNA, 13 nt, Human
aagccauguuuau

SEQ ID NO: 1697536 - RNA, 13 nt, Human
aagccagauuuuc

SEQ ID NO: 1697537 - RNA, 16 nt, Human
aagauuuaccacuugu

SEQ ID NO: 1697538 - RNA, 22 nt, Human
aaggauuuuaugcuuuaaacau

SEQ ID NO: 1697539 - RNA, 21 nt, Human
aaggauuuuaugcuuuaaaca

SEQ ID NO: 1697540 - RNA, 20 nt, Human
aaggauuuuaugcuuuaaac

SEQ ID NO: 1697541 - RNA, 16 nt, Human
aaggauuuuaugcuuu

SEQ ID NO: 1697542 - RNA, 23 nt, Human
aaggauuuuaugcuuuaaacauu

SEQ ID NO: 1697543 - RNA, 13 nt, Human
aaggauuuuaugc

SEQ ID NO: 1697544 - RNA, 12 nt, Human
aaggauuuuaug

SEQ ID NO: 1697545 - RNA, 14 nt, Human
aaauauuuuaugau

SEQ ID NO: 1697546 - RNA, 19 nt, Human
aaauauuuuaugauccagc

SEQ ID NO: 1697547 - RNA, 18 nt, Human
aaauauuuuaugauccag

SEQ ID NO: 1697548 - RNA, 14 nt, Human
aaauacuguuugag

SEQ ID NO: 1697549 - RNA, 19 nt, Human
aaauggacuguggugacuu

SEQ ID NO: 1697550 - RNA, 18 nt, Human
aaauggcuuccuggcaau

SEQ ID NO: 1697551 - RNA, 12 nt, Human
aaauaacaauga

SEQ ID NO: 1697552 - RNA, 19 nt, Human
aaaauuggggauucuuaaa

SEQ ID NO: 1697553 - RNA, 18 nt, Human
aaaauuggggauucuuaa

SEQ ID NO: 1697554 - RNA, 17 nt, Human
aaaauuggggauucuua

SEQ ID NO: 1697555 - RNA, 19 nt, Human
aaagagguuuuucuuaaau

SEQ ID NO: 1697556 - RNA, 16 nt, Human
aaagagguuuuucuua

SEQ ID NO: 1697557 - RNA, 17 nt, Human
aaacugacucuuaagaa

SEQ ID NO: 1697558 - RNA, 16 nt, Human
aaacugacucuuaaga

SEQ ID NO: 1697559 - RNA, 12 nt, Human
aacuuuucugau

SEQ ID NO: 1697560 - RNA, 14 nt, Human
aacuuuucugauag

SEQ ID NO: 1697561 - RNA, 13 nt, Human
aacuuuucugaua

SEQ ID NO: 1697562 - RNA, 17 nt, Human
aaauuggggauucuuaa

SEQ ID NO: 1697563 - RNA, 16 nt, Human
aaauuggggauucuua

SEQ ID NO: 1697564 - RNA, 22 nt, Human
aaccaguauuguacaaaguauu

SEQ ID NO: 1697565 - RNA, 21 nt, Human
aaccaguauuguacaaaguau

SEQ ID NO: 1697566 - RNA, 15 nt, Human
aaccaguauuguaca

SEQ ID NO: 1697567 - RNA, 20 nt, Human
aaccaguauuguacaaagua

SEQ ID NO: 1697568 - RNA, 17 nt, Human
aacagcuggugcccugc

SEQ ID NO: 1697569 - RNA, 13 nt, Human
acgaugucuucau

SEQ ID NO: 1697570 - RNA, 16 nt, Human
acuaagagagaaugag

SEQ ID NO: 1697571 - RNA, 23 nt, Human
accuuucagauaacuguuauuua

SEQ ID NO: 1697572 - RNA, 14 nt, Human
acuagcuauggugu

SEQ ID NO: 1697573 - RNA, 13 nt, Human
acucccuuucaac

SEQ ID NO: 1697574 - RNA, 12 nt, Human
acucccuuucaa

SEQ ID NO: 1697575 - RNA, 21 nt, Human
acuucuuuaauuuuggaauuu

SEQ ID NO: 1697576 - RNA, 15 nt, Human
acuuggucugugaga

SEQ ID NO: 1697577 - RNA, 14 nt, Human
acuuggucugugag

SEQ ID NO: 1697578 - RNA, 19 nt, Human
acuuguaaaggaauuuaaa

SEQ ID NO: 1697579 - RNA, 20 nt, Human
acuuguaaaggaauuuaaaa

SEQ ID NO: 1697580 - RNA, 21 nt, Human
acuuggucugugagaugcuag

SEQ ID NO: 1697581 - RNA, 14 nt, Human
acuggguuccugca

SEQ ID NO: 1697582 - RNA, 12 nt, Human
acuuuucugaua

SEQ ID NO: 1697583 - RNA, 14 nt, Human
agaaaauaacaaua

SEQ ID NO: 1697584 - RNA, 18 nt, Human
acaauuuuguuucuguac

SEQ ID NO: 1697585 - RNA, 17 nt, Human
acaauuuuguuucugua

SEQ ID NO: 1697586 - RNA, 15 nt, Human
acaauuuuguuucug

SEQ ID NO: 1697587 - RNA, 14 nt, Human
acaauuuuguuucu

SEQ ID NO: 1697588 - RNA, 13 nt, Human
acaacuauauugu

SEQ ID NO: 1697589 - RNA, 20 nt, Human
acagcucugcauacucauua

SEQ ID NO: 1697590 - RNA, 18 nt, Human
acauaaaucugugaacuu

SEQ ID NO: 1697591 - RNA, 15 nt, Human
acauaaaucugugaa

SEQ ID NO: 1697592 - RNA, 14 nt, Human
acauaaaucuguga

SEQ ID NO: 1697593 - RNA, 13 nt, Human
acauguuacaaca

SEQ ID NO: 1697594 - RNA, 14 nt, Human
acauuuguauaaaa

SEQ ID NO: 1697595 - RNA, 18 nt, Human
acauuugcucauggaauu

SEQ ID NO: 1697596 - RNA, 15 nt, Human
acccacaagaaauga

SEQ ID NO: 1697597 - RNA, 14 nt, Human
auaugcuauuucua

SEQ ID NO: 1697598 - RNA, 23 nt, Human
auaugcuucuguuuuauaauuuu

SEQ ID NO: 1697599 - RNA, 18 nt, Human
auaucacuugucaauaaa

SEQ ID NO: 1697600 - RNA, 22 nt, Human
auauuuauuacuguaagaaaau

SEQ ID NO: 1697601 - RNA, 18 nt, Human
auauuuauuuuaauaaug

SEQ ID NO: 1697602 - RNA, 19 nt, Human
auauuuauuacuguaagaa

SEQ ID NO: 1697603 - RNA, 14 nt, Human
auauuuauuacugu

SEQ ID NO: 1697604 - RNA, 23 nt, Human
auauuucagauaaucacaauaca

SEQ ID NO: 1697605 - RNA, 20 nt, Human
auacaauuuuguuucuguac

SEQ ID NO: 1697606 - RNA, 19 nt, Human
auacaauuuuguuucugua

SEQ ID NO: 1697607 - RNA, 14 nt, Human
auaauuacuauguc

SEQ ID NO: 1697608 - RNA, 15 nt, Human
auaccuacauguauu

SEQ ID NO: 1697609 - RNA, 22 nt, Human
auaauuaacauguuaaaccaug

SEQ ID NO: 1697610 - RNA, 21 nt, Human
auaauuaacauguuaaaccau

SEQ ID NO: 1697611 - RNA, 20 nt, Human
auaauuaacauguuaaacca

SEQ ID NO: 1697612 - RNA, 20 nt, Human
aguugaauuuauuggcuuuu

SEQ ID NO: 1697613 - RNA, 18 nt, Human
aguuguaccgcaauguga

SEQ ID NO: 1697614 - RNA, 19 nt, Human
aguuguaccgcaaugugac

SEQ ID NO: 1697615 - RNA, 19 nt, Human
aguugaauuuauuggcuuu

SEQ ID NO: 1697616 - RNA, 17 nt, Human
aguugaauuuauuggcu

SEQ ID NO: 1697617 - RNA, 13 nt, Human
aguugaauuuauu

SEQ ID NO: 1697618 - RNA, 11 nt, Human
aguugaauuua

SEQ ID NO: 1697619 - RNA, 15 nt, Human
agugauuaccaggga

SEQ ID NO: 1697620 - RNA, 18 nt, Human
agugauuaccagggacug

SEQ ID NO: 1697621 - RNA, 13 nt, Human
agucaaauugugu

SEQ ID NO: 1697622 - RNA, 17 nt, Human
agucaaauugugugaaa

SEQ ID NO: 1697623 - RNA, 15 nt, Human
agucaaauuguguga

SEQ ID NO: 1697624 - RNA, 21 nt, Human
aguccaagcauuuagauguau

SEQ ID NO: 1697625 - RNA, 16 nt, Human
aguccaagcauuuaga

SEQ ID NO: 1697626 - RNA, 22 nt, Human
auggagccugcacggugaaugg

SEQ ID NO: 1697627 - RNA, 18 nt, Human
auggagccugcacgguga

SEQ ID NO: 1697628 - RNA, 16 nt, Human
augucaaucagccuag

SEQ ID NO: 1697629 - RNA, 24 nt, Human
aucuucucagaaggcaaaugacuu

SEQ ID NO: 1697630 - RNA, 22 nt, Human
aucuuauaauuuaaaauaugcu

SEQ ID NO: 1697631 - RNA, 21 nt, Human
aucaccugucuugccuuuuuc

SEQ ID NO: 1697632 - RNA, 12 nt, Human
aucaccugucuu

SEQ ID NO: 1697633 - RNA, 14 nt, Human
agaguguugaaacg

SEQ ID NO: 1697634 - RNA, 21 nt, Human
agauaggucagugcaaauacu

SEQ ID NO: 1697635 - RNA, 17 nt, Human
agacugcauuauauuua

SEQ ID NO: 1697636 - RNA, 17 nt, Human
agccauguuuauuacag

SEQ ID NO: 1697637 - RNA, 22 nt, Human
agccauguuuauuacaguauaa

SEQ ID NO: 1697638 - RNA, 19 nt, Human
agccagauuuuccugaaaa

SEQ ID NO: 1697639 - RNA, 15 nt, Human
agccagauuuuccug

SEQ ID NO: 1697640 - RNA, 21 nt, Human
agaugggagaaucacuugaac

SEQ ID NO: 1697641 - RNA, 14 nt, Human
agauguagaggaga

SEQ ID NO: 1697642 - RNA, 23 nt, Human
agccucccuauuuuuuuucuguu

SEQ ID NO: 1697643 - RNA, 23 nt, Human
aggcugaugccaaguuguuugag

SEQ ID NO: 1697644 - RNA, 14 nt, Human
agcuggugcccugc

SEQ ID NO: 1697645 - RNA, 14 nt, Human
agcuguaugauucc

SEQ ID NO: 1697646 - RNA, 14 nt, Human
aggauguugaaaaa

SEQ ID NO: 1697647 - RNA, 17 nt, Human
aggauguugaaaaaguu

SEQ ID NO: 1697648 - RNA, 21 nt, Human
cuugucucagauuuuauuaug

SEQ ID NO: 1697649 - RNA, 23 nt, Human
cuuggucucagugucaaugcagc

SEQ ID NO: 1697650 - RNA, 13 nt, Human
cuuuugguuaagu

SEQ ID NO: 1697651 - RNA, 20 nt, Human
gaaacuuguguaaauacaau

SEQ ID NO: 1697652 - RNA, 16 nt, Human
gaaacuuguguaaaua

SEQ ID NO: 1697653 - RNA, 14 nt, Human
gaaacuuguguaaa

SEQ ID NO: 1697654 - RNA, 23 nt, Human
gaaacuucagcgguuuauauaag

SEQ ID NO: 1697655 - RNA, 23 nt, Human
gaacaaauuuacagagacagaaa

SEQ ID NO: 1697656 - RNA, 18 nt, Human
gaacaaauuuacagagac

SEQ ID NO: 1697657 - RNA, 17 nt, Human
gaacaaauuuacagaga

SEQ ID NO: 1697658 - RNA, 18 nt, Human
gaaaugaaagcagggacu

SEQ ID NO: 1697659 - RNA, 23 nt, Human
cuggugcccugcuuucagauacu

SEQ ID NO: 1697660 - RNA, 21 nt, Human
cuggugcccugcuuucagaua

SEQ ID NO: 1697661 - RNA, 19 nt, Human
cuggugcccugcuuucaga

SEQ ID NO: 1697662 - RNA, 16 nt, Human
cuggugcccugcuuuc

SEQ ID NO: 1697663 - RNA, 15 nt, Human
cuggugcccugcuuu

SEQ ID NO: 1697664 - RNA, 18 nt, Human
cuggugacugauucuuca

SEQ ID NO: 1697665 - RNA, 12 nt, Human
cuggugccucac

SEQ ID NO: 1697666 - RNA, 17 nt, Human
cuggugacugauucuuc

SEQ ID NO: 1697667 - RNA, 15 nt, Human
cuggugacugauucu

SEQ ID NO: 1697668 - RNA, 14 nt, Human
cuggugacugauuc

SEQ ID NO: 1697669 - RNA, 13 nt, Human
cuggugacugauu

SEQ ID NO: 1697670 - RNA, 20 nt, Human
cuguaagaaaauaucacuug

SEQ ID NO: 1697671 - RNA, 16 nt, Human
cugugagcaucacagu

SEQ ID NO: 1697672 - RNA, 23 nt, Human
cugugagaugcuagaacucccuu

SEQ ID NO: 1697673 - RNA, 17 nt, Human
cugugaacuugaaauuu

SEQ ID NO: 1697674 - RNA, 16 nt, Human
cugugaacuugaaauu

SEQ ID NO: 1697675 - RNA, 15 nt, Human
cugugaacuugaaau

SEQ ID NO: 1697676 - RNA, 22 nt, Human
cuguuauauaaaugguuaaaag

SEQ ID NO: 1697677 - RNA, 15 nt, Human
cuguuauauaaaugg

SEQ ID NO: 1697678 - RNA, 14 nt, Human
cuguuauauaaaug

SEQ ID NO: 1697679 - RNA, 13 nt, Human
cuguuauauaaau

SEQ ID NO: 1697680 - RNA, 19 nt, Human
cugugagcaucacaguuuu

SEQ ID NO: 1697681 - RNA, 20 nt, Human
cuuaaaaaugguuuaaaugg

SEQ ID NO: 1697682 - RNA, 13 nt, Human
cuuaaaaaugguu

SEQ ID NO: 1697683 - RNA, 23 nt, Human
cuggaaaaguauguuagugcaaa

SEQ ID NO: 1697684 - RNA, 20 nt, Human
gauacuggauuguacuuugu

SEQ ID NO: 1697685 - RNA, 16 nt, Human
gauacuggauuguacu

SEQ ID NO: 1697686 - RNA, 12 nt, Human
gaugauuucuau

SEQ ID NO: 1697687 - RNA, 23 nt, Human
gaugauuucuaugcugaguuugu

SEQ ID NO: 1697688 - RNA, 13 nt, Human
gaugauuucuaug

SEQ ID NO: 1697689 - RNA, 15 nt, Human
gaucugccuaaggac

SEQ ID NO: 1697690 - RNA, 12 nt, Human
gaucugccuaag

SEQ ID NO: 1697691 - RNA, 16 nt, Human
gaucugccuaaggacu

SEQ ID NO: 1697692 - RNA, 18 nt, Human
gauccagcagauuauuca

SEQ ID NO: 1697693 - RNA, 19 nt, Human
gauccagcagauuauucac

SEQ ID NO: 1697694 - RNA, 22 nt, Human
gcagaacagugauuaccaggga

SEQ ID NO: 1697695 - RNA, 18 nt, Human
gcagaacagugauuacca

SEQ ID NO: 1697696 - RNA, 13 nt, Human
gcagaacagugau

SEQ ID NO: 1697697 - RNA, 12 nt, Human
gcagaacaguga

SEQ ID NO: 1697698 - RNA, 22 nt, Human
gcaguuguugcccacagcugua

SEQ ID NO: 1697699 - RNA, 20 nt, Human
gcaucuagcaugucgucaaa

SEQ ID NO: 1697700 - RNA, 15 nt, Human
gaggcuccacuuggu

SEQ ID NO: 1697701 - RNA, 18 nt, Human
gaggcuccacuuggucug

SEQ ID NO: 1697702 - RNA, 17 nt, Human
gaggcuccacuuggucu

SEQ ID NO: 1697703 - RNA, 18 nt, Human
gaggcugagaugggagaa

SEQ ID NO: 1697704 - RNA, 14 nt, Human
gaggagaaacugga

SEQ ID NO: 1697705 - RNA, 12 nt, Human
gaggagaaacug

SEQ ID NO: 1697706 - RNA, 21 nt, Human
gaggacgcucucuggccuucg

SEQ ID NO: 1697707 - RNA, 14 nt, Human
gagcagucaggaaa

SEQ ID NO: 1697708 - RNA, 22 nt, Human
gacuuuuuauggcacuaguauu

SEQ ID NO: 1697709 - RNA, 16 nt, Human
gagaugcuagaacucc

SEQ ID NO: 1697710 - RNA, 20 nt, Human
gagaugcuagaacucccuuu

SEQ ID NO: 1697711 - RNA, 21 nt, Human
gagauugugccccugcacucc

SEQ ID NO: 1697712 - RNA, 12 nt, Human
gacagcucugca

SEQ ID NO: 1697713 - RNA, 18 nt, Human
gacagucaccucauggaa

SEQ ID NO: 1697714 - RNA, 14 nt, Human
gacgcucucuggcc

SEQ ID NO: 1697715 - RNA, 14 nt, Human
gaaugaauggcuaa

SEQ ID NO: 1697716 - RNA, 20 nt, Human
gaaugaauggcuaagcaaaa

SEQ ID NO: 1697717 - RNA, 15 nt, Human
gaaugaauggcuaag

SEQ ID NO: 1697718 - RNA, 14 nt, Human
gaaugauuaugaau

SEQ ID NO: 1697719 - RNA, 22 nt, Human
gaaugauuaugaauuacauuug

SEQ ID NO: 1697720 - RNA, 15 nt, Human
gaauuaacacaugau

SEQ ID NO: 1697721 - RNA, 14 nt, Human
gaauuaacacauga

SEQ ID NO: 1697722 - RNA, 20 nt, Human
gaauuacauuuguauaaaau

SEQ ID NO: 1697723 - RNA, 18 nt, Human
gaauuacauuuguauaaa

SEQ ID NO: 1697724 - RNA, 15 nt, Human
gaauuacauuuguau

SEQ ID NO: 1697725 - RNA, 13 nt, Human
gaauuacauuugu

SEQ ID NO: 1697726 - RNA, 16 nt, Human
gcuauuucuauauuuu

SEQ ID NO: 1697727 - RNA, 15 nt, Human
gcuauuucuauauuu

SEQ ID NO: 1697728 - RNA, 13 nt, Human
gcuauuucuauau

SEQ ID NO: 1697729 - RNA, 11 nt, Human
gcuauuucuau

SEQ ID NO: 1697730 - RNA, 20 nt, Human
gcuauuucuauauuuucauu

SEQ ID NO: 1697731 - RNA, 19 nt, Human
gcuauuucuauauuuucau

SEQ ID NO: 1697732 - RNA, 18 nt, Human
gcuauuucuauauuuuca

SEQ ID NO: 1697733 - RNA, 22 nt, Human
gcguucauggaacgcguugaaa

SEQ ID NO: 1697734 - RNA, 23 nt, Human
gcuaaggacuuguuagaucuagu

SEQ ID NO: 1697735 - RNA, 12 nt, Human
gcguugaaauug

SEQ ID NO: 1697736 - RNA, 12 nt, Human
gcuaaggacuug

SEQ ID NO: 1697737 - RNA, 11 nt, Human
gcuaaggacuu

SEQ ID NO: 1697738 - RNA, 22 nt, Human
gccauguuuauuacaguauaau

SEQ ID NO: 1697739 - RNA, 18 nt, Human
gccauguuuauuacagua

SEQ ID NO: 1697740 - RNA, 14 nt, Human
gccauguuuauuac

SEQ ID NO: 1697741 - RNA, 11 nt, Human
gccauguuuau

SEQ ID NO: 1697742 - RNA, 13 nt, Human
gccauguuuauua

SEQ ID NO: 1697743 - RNA, 12 nt, Human
gcauuuagaugu

SEQ ID NO: 1697744 - RNA, 19 nt, Human
gcauuuaggccaugggaca

SEQ ID NO: 1697745 - RNA, 13 nt, Human
gcauuuagaugua

SEQ ID NO: 1697746 - RNA, 11 nt, Human
gccccaaaagg

SEQ ID NO: 1697747 - RNA, 22 nt, Human
gccucauguccacugguucuuc

SEQ ID NO: 1697748 - RNA, 15 nt, Human
gccuccauccugagg

SEQ ID NO: 1697749 - RNA, 14 nt, Human
gccuccauccugag

SEQ ID NO: 1697750 - RNA, 13 nt, Human
gccuccauccuga

SEQ ID NO: 1697751 - RNA, 18 nt, Human
ggaaacuggguuccugca

SEQ ID NO: 1697752 - RNA, 16 nt, Human
ggaaaaaauaacaaug

SEQ ID NO: 1697753 - RNA, 13 nt, Human
ggaaaucuuuaaa

SEQ ID NO: 1697754 - RNA, 19 nt, Human
ggaaaucaggguuaguauu

SEQ ID NO: 1697755 - RNA, 15 nt, Human
ggaagccugauuaaa

SEQ ID NO: 1697756 - RNA, 21 nt, Human
ggacagucaccucauggaauu

SEQ ID NO: 1697757 - RNA, 18 nt, Human
ggacagucaccucaugga

SEQ ID NO: 1697758 - RNA, 17 nt, Human
ggacagucaccucaugg

SEQ ID NO: 1697759 - RNA, 21 nt, Human
gcuguauuuuaaaagaaugau

SEQ ID NO: 1697760 - RNA, 18 nt, Human
gcuguauuuuaaaagaau

SEQ ID NO: 1697761 - RNA, 20 nt, Human
gcuguauuuuaaaagaauga

SEQ ID NO: 1697762 - RNA, 18 nt, Human
aaaauauuuuaugaucca

SEQ ID NO: 1697763 - RNA, 17 nt, Human
aaaaucucaauauuuca

SEQ ID NO: 1697764 - RNA, 15 nt, Human
aaaauauuuuaugau

SEQ ID NO: 1697765 - RNA, 20 nt, Human
aaaauaauuuuuauauuuga

SEQ ID NO: 1697766 - RNA, 17 nt, Human
aaaauaauuuuuauauu

SEQ ID NO: 1697767 - RNA, 16 nt, Human
aaaauaauuuuuauau

SEQ ID NO: 1697768 - RNA, 11 nt, Human
aaaauaauuuu

SEQ ID NO: 1697769 - RNA, 15 nt, Human
gggcgugguggugag

SEQ ID NO: 1697770 - RNA, 18 nt, Human
aaaaugguuuaaaugguc

SEQ ID NO: 1697771 - RNA, 16 nt, Human
aaaaugguuuaaaugg

SEQ ID NO: 1697772 - RNA, 14 nt, Human
ggucagugcaaaua

SEQ ID NO: 1697773 - RNA, 21 nt, Human
guacaaaguauuaagcauaua

SEQ ID NO: 1697774 - RNA, 20 nt, Human
guacaaaguauuaagcauau

SEQ ID NO: 1697775 - RNA, 18 nt, Human
aaauauaugcuaagucuu

SEQ ID NO: 1697776 - RNA, 22 nt, Human
aaauaucacuugucaauaaaau

SEQ ID NO: 1697777 - RNA, 20 nt, Human
gguguuguacucaauuuuaa

SEQ ID NO: 1697778 - RNA, 19 nt, Human
gguguuguacucaauuuua

SEQ ID NO: 1697779 - RNA, 17 nt, Human
aaaguauguuagugcaa

SEQ ID NO: 1697780 - RNA, 19 nt, Human
aaacuuuaugcuaagugaa

SEQ ID NO: 1697781 - RNA, 12 nt, Human
aaacuuuaugcu

SEQ ID NO: 1697782 - RNA, 16 nt, Human
aaagcagaacagugau

SEQ ID NO: 1697783 - RNA, 22 nt, Human
aaagggcuguuauaaucuuuca

SEQ ID NO: 1697784 - RNA, 20 nt, Human
aaagggcuguuauaaucuuu

SEQ ID NO: 1697785 - RNA, 13 nt, Human
aaaaauacaaaaa

SEQ ID NO: 1697786 - RNA, 16 nt, Human
ggccuucggccuccau

SEQ ID NO: 1697787 - RNA, 22 nt, Human
ggccuucggccuccauccugag

SEQ ID NO: 1697788 - RNA, 18 nt, Human
ggccuucggccuccaucc

SEQ ID NO: 1697789 - RNA, 20 nt, Human
ggcuaagcuucacuguaaaa

SEQ ID NO: 1697790 - RNA, 23 nt, Human
auuuauaaucacuuuuuuccaca

SEQ ID NO: 1697791 - RNA, 16 nt, Human
auuucagcagcugcag

SEQ ID NO: 1697792 - RNA, 20 nt, Human
auuucuaugaaauauuaugu

SEQ ID NO: 1697793 - RNA, 18 nt, Human
auuucuaugaaauauuau

SEQ ID NO: 1697794 - RNA, 15 nt, Human
auuucuaugaaauau

SEQ ID NO: 1697795 - RNA, 20 nt, Human
auuguacaaaguauuaagca

SEQ ID NO: 1697796 - RNA, 22 nt, Human
auuguacaaaguauuaagcaua

SEQ ID NO: 1697797 - RNA, 23 nt, Human
auuguacaaaguauuaagcauau

SEQ ID NO: 1697798 - RNA, 23 nt, Human
auuguaauaggcguaacuaauuu

SEQ ID NO: 1697799 - RNA, 13 nt, Human
auuguaaaauggu

SEQ ID NO: 1697800 - RNA, 18 nt, Human
auucacaagacccaaaag

SEQ ID NO: 1697801 - RNA, 17 nt, Human
auucuugccaaauauaa

SEQ ID NO: 1697802 - RNA, 23 nt, Human
auuuuauaaaucgcuuuugauaa

SEQ ID NO: 1697803 - RNA, 21 nt, Human
auuuuauaaaucgcuuuugau

SEQ ID NO: 1697804 - RNA, 20 nt, Human
auuuuauaaaucgcuuuuga

SEQ ID NO: 1697805 - RNA, 17 nt, Human
auuuuauaaaucgcuuu

SEQ ID NO: 1697806 - RNA, 16 nt, Human
auuuuauaaaucgcuu

SEQ ID NO: 1697807 - RNA, 15 nt, Human
auuuuauaaaucgcu

SEQ ID NO: 1697808 - RNA, 16 nt, Human
caaccaccuuucagau

SEQ ID NO: 1697809 - RNA, 19 nt, Human
caacccaaauguucaucaa

SEQ ID NO: 1697810 - RNA, 21 nt, Human
caacuaucucauuuccaagca

SEQ ID NO: 1697811 - RNA, 15 nt, Human
caaaguauuaagcau

SEQ ID NO: 1697812 - RNA, 14 nt, Human
caaaguauuaagca

SEQ ID NO: 1697813 - RNA, 21 nt, Human
caaaguauuaagcauauauuu

SEQ ID NO: 1697814 - RNA, 19 nt, Human
caaaguauuaagcauauau

SEQ ID NO: 1697815 - RNA, 17 nt, Human
caaaguauuaagcauau

SEQ ID NO: 1697816 - RNA, 16 nt, Human
caaaguauuaagcaua

SEQ ID NO: 1697817 - RNA, 17 nt, Human
caauaaaaaauuaugac

SEQ ID NO: 1697818 - RNA, 16 nt, Human
caauaaaaaauuauga

SEQ ID NO: 1697819 - RNA, 13 nt, Human
caauaaaaaauua

SEQ ID NO: 1697820 - RNA, 20 nt, Human
caaguauuagaauaccacag

SEQ ID NO: 1697821 - RNA, 14 nt, Human
caaguauuagaaua

SEQ ID NO: 1697822 - RNA, 23 nt, Human
caaugcuguauuuuaaaagaaug

SEQ ID NO: 1697823 - RNA, 14 nt, Human
caaugcuguauuuu

SEQ ID NO: 1697824 - RNA, 21 nt, Human
caauauuucagauaaucacaa

SEQ ID NO: 1697825 - RNA, 20 nt, Human
caauauuucagauaaucaca

SEQ ID NO: 1697826 - RNA, 12 nt, Human
caauauuucaga

SEQ ID NO: 1697827 - RNA, 12 nt, Human
caauuuaaaaaa

SEQ ID NO: 1697828 - RNA, 16 nt, Human
cacaagacugcacauc

SEQ ID NO: 1697829 - RNA, 20 nt, Human
cacuuggucugugagaugcu

SEQ ID NO: 1697830 - RNA, 17 nt, Human
cacuuggucugugagau

SEQ ID NO: 1697831 - RNA, 21 nt, Human
caccuacaugagguacugaga

SEQ ID NO: 1697832 - RNA, 11 nt, Human
cacugaagaag

SEQ ID NO: 1697833 - RNA, 18 nt, Human
cauguauuuguuugcaua

SEQ ID NO: 1697834 - RNA, 14 nt, Human
caugauguuuagaa

SEQ ID NO: 1697835 - RNA, 23 nt, Human
ccaccuuucagauaacuguuauu

SEQ ID NO: 1697836 - RNA, 17 nt, Human
ccaaauguucaucaaug

SEQ ID NO: 1697837 - RNA, 18 nt, Human
ccaaauguucaucaauga

SEQ ID NO: 1697838 - RNA, 20 nt, Human
cauuuguauaaaauaauuuu

SEQ ID NO: 1697839 - RNA, 19 nt, Human
cauuuguauaaaauaauuu

SEQ ID NO: 1697840 - RNA, 20 nt, Human
cagucugacuguuuccauca

SEQ ID NO: 1697841 - RNA, 19 nt, Human
cagucaccucauggaauug

SEQ ID NO: 1697842 - RNA, 15 nt, Human
cagucacauuccaag

SEQ ID NO: 1697843 - RNA, 16 nt, Human
cagucaccucauggaa

SEQ ID NO: 1697844 - RNA, 17 nt, Human
cagagguugcagugagc

SEQ ID NO: 1697845 - RNA, 12 nt, Human
cagauccuggaa

SEQ ID NO: 1697846 - RNA, 13 nt, Human
cagauccuggaaa

SEQ ID NO: 1697847 - RNA, 19 nt, Human
ccaguuuuguuuggaccaa

SEQ ID NO: 1697848 - RNA, 16 nt, Human
ccaguuuuguuuggac

SEQ ID NO: 1697849 - RNA, 14 nt, Human
ccauacauuugugu

SEQ ID NO: 1697850 - RNA, 13 nt, Human
ccauacauuugug

SEQ ID NO: 1697851 - RNA, 22 nt, Human
ccaguauuguacaaaguauuaa

SEQ ID NO: 1697852 - RNA, 20 nt, Human
ccaguauuguacaaaguauu

SEQ ID NO: 1697853 - RNA, 16 nt, Human
ccagcagauuauucac

SEQ ID NO: 1697854 - RNA, 15 nt, Human
ccagcagauuauuca

SEQ ID NO: 1697855 - RNA, 22 nt, Human
cccaggaauggagccugcacgg

SEQ ID NO: 1697856 - RNA, 20 nt, Human
cccaggaauggagccugcac

SEQ ID NO: 1697857 - RNA, 19 nt, Human
cccaggaauggagccugca

SEQ ID NO: 1697858 - RNA, 18 nt, Human
cccaggaauggagccugc

SEQ ID NO: 1697859 - RNA, 18 nt, Human
ccccugcacuccagccug

SEQ ID NO: 1697860 - RNA, 20 nt, Human
ccuauuuuuuuucuguuaua

SEQ ID NO: 1697861 - RNA, 23 nt, Human
ccucauggaauuggagcucgugg

SEQ ID NO: 1697862 - RNA, 17 nt, Human
ccugucuugccuuuuuc

SEQ ID NO: 1697863 - RNA, 20 nt, Human
ccugucuugccuuuuucauu

SEQ ID NO: 1697864 - RNA, 19 nt, Human
ccugucuugccuuuuucau

SEQ ID NO: 1697865 - RNA, 15 nt, Human
ccuguaaucacagcu

SEQ ID NO: 1697866 - RNA, 12 nt, Human
ccuuucauauuu

SEQ ID NO: 1697867 - RNA, 16 nt, Human
ccuuuuuuaaauaaau

SEQ ID NO: 1697868 - RNA, 20 nt, Human
cuauuuuuuuucuguuauau

SEQ ID NO: 1697869 - RNA, 21 nt, Human
cuauuuuuuuucuguuauaua

SEQ ID NO: 1697870 - RNA, 20 nt, Human
cuacaugagguacugagagu

SEQ ID NO: 1697871 - RNA, 13 nt, Human
cuagaacucccuu

SEQ ID NO: 1697872 - RNA, 12 nt, Human
cuagaacucccu

SEQ ID NO: 1697873 - RNA, 23 nt, Human
cuccacuuggucugugagaugcu

SEQ ID NO: 1697874 - RNA, 22 nt, Human
cuccacuuggucugugagaugc

SEQ ID NO: 1697875 - RNA, 21 nt, Human
cuccacuuggucugugagaug

SEQ ID NO: 1697876 - RNA, 17 nt, Human
cuccacuuggucuguga

SEQ ID NO: 1697877 - RNA, 16 nt, Human
cuccacuuggucugug

SEQ ID NO: 1697878 - RNA, 15 nt, Human
cuccacuuggucugu

SEQ ID NO: 1697879 - RNA, 13 nt, Human
cuccacuuggucu

SEQ ID NO: 1697880 - RNA, 14 nt, Human
cucguuaauuugua

SEQ ID NO: 1697881 - RNA, 22 nt, Human
cucuuagaugcaguucugaaga

SEQ ID NO: 1697882 - RNA, 22 nt, Human
guguaaauacaauuuuguuucu

SEQ ID NO: 1697883 - RNA, 21 nt, Human
guguaaauacaauuuuguuuc

SEQ ID NO: 1697884 - RNA, 18 nt, Human
guguaaauacaauuuugu

SEQ ID NO: 1697885 - RNA, 17 nt, Human
aagcaacccaaauguuc

SEQ ID NO: 1697886 - RNA, 13 nt, Human
aagcaaaauguga

SEQ ID NO: 1697887 - RNA, 15 nt, Human
aagcauuuuauaaau

SEQ ID NO: 1697888 - RNA, 14 nt, Human
aagcauuuuauaaa

SEQ ID NO: 1697889 - RNA, 12 nt, Human
aagcauuuuaua

SEQ ID NO: 1697890 - RNA, 19 nt, Human
aagcauuuuauaaaucgcu

SEQ ID NO: 1697891 - RNA, 17 nt, Human
aagcauuuuauaaaucg

SEQ ID NO: 1697892 - RNA, 21 nt, Human
aagcauuuuauaaaucgcuuu

SEQ ID NO: 1697893 - RNA, 17 nt, Human
aagccauguuuauuaca

SEQ ID NO: 1697894 - RNA, 16 nt, Human
aagccauguuuauuac

SEQ ID NO: 1697895 - RNA, 15 nt, Human
aagccauguuuauua

SEQ ID NO: 1697896 - RNA, 23 nt, Human
aagcauauauuuuuauauuuacu

SEQ ID NO: 1697897 - RNA, 16 nt, Human
aagcacuaaacaaaga

SEQ ID NO: 1697898 - RNA, 18 nt, Human
guuagagauuuuuuuguu

SEQ ID NO: 1697899 - RNA, 19 nt, Human
guuauuauauuuacaaaug

SEQ ID NO: 1697900 - RNA, 20 nt, Human
guuauuauauuuacaaaugg

SEQ ID NO: 1697901 - RNA, 23 nt, Human
aagccauguuuauuacaguauaa

SEQ ID NO: 1697902 - RNA, 22 nt, Human
aagccauguuuauuacaguaua

SEQ ID NO: 1697903 - RNA, 21 nt, Human
aagccauguuuauuacaguau

SEQ ID NO: 1697904 - RNA, 20 nt, Human
aagccauguuuauuacagua

SEQ ID NO: 1697905 - RNA, 21 nt, Human
aagccuuggggcugaugcagu

SEQ ID NO: 1697906 - RNA, 18 nt, Human
guucccuugaugaagaag

SEQ ID NO: 1697907 - RNA, 23 nt, Human
aagcuuguauuccuuuuucucuc

SEQ ID NO: 1697908 - RNA, 22 nt, Human
aagucagaucugccuaaggacu

SEQ ID NO: 1697909 - RNA, 21 nt, Human
aagucagaucugccuaaggac

SEQ ID NO: 1697910 - RNA, 18 nt, Human
aagucagaucugccuaag

SEQ ID NO: 1697911 - RNA, 19 nt, Human
aaguauguuagugcaaauu

SEQ ID NO: 1697912 - RNA, 18 nt, Human
aaguauguuagugcaaau

SEQ ID NO: 1697913 - RNA, 18 nt, Human
guuuuaugacuucauuaa

SEQ ID NO: 1697914 - RNA, 13 nt, Human
guuuuaugacuuc

SEQ ID NO: 1697915 - RNA, 18 nt, Human
guuuggaccaaaaaccag

SEQ ID NO: 1697916 - RNA, 14 nt, Human
guuuaugauuccac

SEQ ID NO: 1697917 - RNA, 18 nt, Human
guuuaauauuaaagccau

SEQ ID NO: 1697918 - RNA, 15 nt, Human
guuuaauauuaaagc

SEQ ID NO: 1697919 - RNA, 14 nt, Human
guuuaauauuaaag

SEQ ID NO: 1697920 - RNA, 13 nt, Human
guuuaauauuaaa

SEQ ID NO: 1697921 - RNA, 17 nt, Human
guuuauuacaguauaau

SEQ ID NO: 1697922 - RNA, 13 nt, Human
guuuauuacagua

SEQ ID NO: 1697923 - RNA, 20 nt, Human
aaggaaacuggguuccugca

SEQ ID NO: 1697924 - RNA, 12 nt, Human
aaggaaaaguuu

SEQ ID NO: 1697925 - RNA, 12 nt, Human
guuguuuguuua

SEQ ID NO: 1697926 - RNA, 17 nt, Human
aaggggaauugaggaca

SEQ ID NO: 1697927 - RNA, 17 nt, Human
aagggcuguuauaaucu

SEQ ID NO: 1697928 - RNA, 15 nt, Human
aagggcuguuauaau

SEQ ID NO: 1697929 - RNA, 18 nt, Human
uaaaaaaaaaauugggga

SEQ ID NO: 1697930 - RNA, 14 nt, Human
uaaaaaaaaaauug

SEQ ID NO: 1697931 - RNA, 21 nt, Human
uaaaaaaaaaccugagcccca

SEQ ID NO: 1697932 - RNA, 23 nt, Human
aagucagaucugccuaaggacuu

SEQ ID NO: 1697933 - RNA, 22 nt, Human
uaaaauaauuuuuauauuugaa

SEQ ID NO: 1697934 - RNA, 9 nt, Human
uaaaauggu

SEQ ID NO: 1697935 - RNA, 23 nt, Human
guauuguacaaaguauuaagcau

SEQ ID NO: 1697936 - RNA, 22 nt, Human
guauuguacaaaguauuaagca

SEQ ID NO: 1697937 - RNA, 21 nt, Human
guauuguacaaaguauuaagc

SEQ ID NO: 1697938 - RNA, 22 nt, Human
guauugaagcauuuuauaaauc

SEQ ID NO: 1697939 - RNA, 18 nt, Human
guauugaagcauuuuaua

SEQ ID NO: 1697940 - RNA, 17 nt, Human
guauugaagcauuuuau

SEQ ID NO: 1697941 - RNA, 13 nt, Human
guauugaagcauu

SEQ ID NO: 1697942 - RNA, 10 nt, Human
guauugaagc

SEQ ID NO: 1697943 - RNA, 19 nt, Human
guauuguacaaaguauuaa

SEQ ID NO: 1697944 - RNA, 17 nt, Human
aaauuccaagugauuga

SEQ ID NO: 1697945 - RNA, 17 nt, Human
aaauuguauuacaaauc

SEQ ID NO: 1697946 - RNA, 13 nt, Human
gucaggaaagaga

SEQ ID NO: 1697947 - RNA, 14 nt, Human
gucaggaaagagaa

SEQ ID NO: 1697948 - RNA, 15 nt, Human
gucacaggaaguaga

SEQ ID NO: 1697949 - RNA, 13 nt, Human
gucacaggaagua

SEQ ID NO: 1697950 - RNA, 21 nt, Human
gucaauuuuguuauguauauu

SEQ ID NO: 1697951 - RNA, 20 nt, Human
gucacaggaaguagaggagg

SEQ ID NO: 1697952 - RNA, 12 nt, Human
aaauuugaauuu

SEQ ID NO: 1697953 - RNA, 22 nt, Human
aaauuugaauuuuguguuagag

SEQ ID NO: 1697954 - RNA, 15 nt, Human
aaauuugaauuuugu

SEQ ID NO: 1697955 - RNA, 23 nt, Human
guccaugaagauguagaggagaa

SEQ ID NO: 1697956 - RNA, 22 nt, Human
guccaugaagauguagaggaga

SEQ ID NO: 1697957 - RNA, 15 nt, Human
guccgugcuaaggac

SEQ ID NO: 1697958 - RNA, 17 nt, Human
guccgugcuaaggacuu

SEQ ID NO: 1697959 - RNA, 16 nt, Human
guccgugcuaaggacu

SEQ ID NO: 1697960 - RNA, 12 nt, Human
aacauauauaac

SEQ ID NO: 1697961 - RNA, 23 nt, Human
aacauugguucuuguauuaagaa

SEQ ID NO: 1697962 - RNA, 22 nt, Human
aacauugguucuuguauuaaga

SEQ ID NO: 1697963 - RNA, 19 nt, Human
aacauugguucuuguauua

SEQ ID NO: 1697964 - RNA, 18 nt, Human
aacauugguucuuguauu

SEQ ID NO: 1697965 - RNA, 16 nt, Human
aacauugguucuugua

SEQ ID NO: 1697966 - RNA, 15 nt, Human
aacauguuaaaccau

SEQ ID NO: 1697967 - RNA, 14 nt, Human
aacauguuaaacca

SEQ ID NO: 1697968 - RNA, 16 nt, Human
aacauguuaaaccaug

SEQ ID NO: 1697969 - RNA, 23 nt, Human
gucuugucucagauuuuauuaug

SEQ ID NO: 1697970 - RNA, 15 nt, Human
gugacuuuggauaau

SEQ ID NO: 1697971 - RNA, 12 nt, Human
gugacuuuggau

SEQ ID NO: 1697972 - RNA, 12 nt, Human
aacuugaaauuu

SEQ ID NO: 1697973 - RNA, 19 nt, Human
aacuugaaauuugaauuuu

SEQ ID NO: 1697974 - RNA, 18 nt, Human
aacuugaaauuugaauuu

SEQ ID NO: 1697975 - RNA, 13 nt, Human
aacuugaaauuug

SEQ ID NO: 1697976 - RNA, 21 nt, Human
aacuucagcgguuuauauaag

SEQ ID NO: 1697977 - RNA, 13 nt, Human
aacuucagacaua

SEQ ID NO: 1697978 - RNA, 18 nt, Human
aacuucagcgguuuauau

SEQ ID NO: 1697979 - RNA, 14 nt, Human
gugaucucauuuaa

SEQ ID NO: 1697980 - RNA, 17 nt, Human
gugauuaccagggacug

SEQ ID NO: 1697981 - RNA, 16 nt, Human
gugauuaccagggacu

SEQ ID NO: 1697982 - RNA, 11 nt, Human
gugauuaccag

SEQ ID NO: 1697983 - RNA, 11 nt, Human
aagaaacauuu

SEQ ID NO: 1697984 - RNA, 16 nt, Human
aagaaagaaaaucagg

SEQ ID NO: 1697985 - RNA, 14 nt, Human
aagaaagaaaauca

SEQ ID NO: 1697986 - RNA, 23 nt, Human
uagagauuuuuuuguuguuuguu

SEQ ID NO: 1697987 - RNA, 22 nt, Human
uagaggagaaacuggaacucuc

SEQ ID NO: 1697988 - RNA, 18 nt, Human
acaaaaggauaaugaaua

SEQ ID NO: 1697989 - RNA, 15 nt, Human
uagaugcaguucuga

SEQ ID NO: 1697990 - RNA, 18 nt, Human
uagcaugucgucaaagcu

SEQ ID NO: 1697991 - RNA, 20 nt, Human
acaagacccaaaaggcagaa

SEQ ID NO: 1697992 - RNA, 18 nt, Human
acaaauuuacagagacag

SEQ ID NO: 1697993 - RNA, 19 nt, Human
acaaauuuacagagacaga

SEQ ID NO: 1697994 - RNA, 22 nt, Human
uagcuagacuggugacugauuc

SEQ ID NO: 1697995 - RNA, 21 nt, Human
uagcuagacuggugacugauu

SEQ ID NO: 1697996 - RNA, 23 nt, Human
acaauacaucccuuaccugggaa

SEQ ID NO: 1697997 - RNA, 14 nt, Human
acaagacugcacau

SEQ ID NO: 1697998 - RNA, 13 nt, Human
acaagacugcaca

SEQ ID NO: 1697999 - RNA, 18 nt, Human
uaggaaauauuuauuuua

SEQ ID NO: 1698000 - RNA, 19 nt, Human
uaggaaauauuuauuuuaa

SEQ ID NO: 1698001 - RNA, 21 nt, Human
acaccauuaugugcgcugaua

SEQ ID NO: 1698002 - RNA, 17 nt, Human
acaccauuaugugcgcu

SEQ ID NO: 1698003 - RNA, 18 nt, Human
acacaugauccugcaauu

SEQ ID NO: 1698004 - RNA, 15 nt, Human
acacaugaaguccaa

SEQ ID NO: 1698005 - RNA, 14 nt, Human
acacuaagagagaa

SEQ ID NO: 1698006 - RNA, 13 nt, Human
acacuaagagaga

SEQ ID NO: 1698007 - RNA, 23 nt, Human
acacacuuuugguuaagucuguu

SEQ ID NO: 1698008 - RNA, 23 nt, Human
uaguguuggagaagaacugaaau

SEQ ID NO: 1698009 - RNA, 22 nt, Human
uagugaaacucguuaauuugua

SEQ ID NO: 1698010 - RNA, 22 nt, Human
acaaugcuguauuuuaaaagaa

SEQ ID NO: 1698011 - RNA, 19 nt, Human
uauauuuacuaaaauggac

SEQ ID NO: 1698012 - RNA, 15 nt, Human
uauauuguuugcuaa

SEQ ID NO: 1698013 - RNA, 21 nt, Human
uauauuuacuaaaauggacug

SEQ ID NO: 1698014 - RNA, 20 nt, Human
uauauuuacuaaaauggacu

SEQ ID NO: 1698015 - RNA, 21 nt, Human
uaugauuaaguaaugauaacu

SEQ ID NO: 1698016 - RNA, 20 nt, Human
uaugauuaaguaaugauaac

SEQ ID NO: 1698017 - RNA, 16 nt, Human
uaugauuaaguaauga

SEQ ID NO: 1698018 - RNA, 19 nt, Human
uaugccccauucaacaucu

SEQ ID NO: 1698019 - RNA, 16 nt, Human
acagccucuuagaugc

SEQ ID NO: 1698020 - RNA, 12 nt, Human
uaugugugaagu

SEQ ID NO: 1698021 - RNA, 14 nt, Human
uaugugugaaguga

SEQ ID NO: 1698022 - RNA, 21 nt, Human
uauguuuucaggcuagaugua

SEQ ID NO: 1698023 - RNA, 17 nt, Human
acaggaaguagaggagg

SEQ ID NO: 1698024 - RNA, 20 nt, Human
acaguauaauuaacauguua

SEQ ID NO: 1698025 - RNA, 15 nt, Human
acaguauaauuaaca

SEQ ID NO: 1698026 - RNA, 16 nt, Human
acagucaccucaugga

SEQ ID NO: 1698027 - RNA, 13 nt, Human
acaguauaauuaa

SEQ ID NO: 1698028 - RNA, 18 nt, Human
acagucaccucauggaau

SEQ ID NO: 1698029 - RNA, 17 nt, Human
acagucaccucauggaa

SEQ ID NO: 1698030 - RNA, 21 nt, Human
acagggaggacgcucucuggc

SEQ ID NO: 1698031 - RNA, 20 nt, Human
acagggaggacgcucucugg

SEQ ID NO: 1698032 - RNA, 16 nt, Human
uauucaaaguugccua

SEQ ID NO: 1698033 - RNA, 13 nt, Human
uauucaaaguugc

SEQ ID NO: 1698034 - RNA, 12 nt, Human
uauucaaaguug

SEQ ID NO: 1698035 - RNA, 14 nt, Human
uauuacuguaagaa

SEQ ID NO: 1698036 - RNA, 13 nt, Human
uacauguauuugu

SEQ ID NO: 1698037 - RNA, 18 nt, Human
uaccaccagucugacugu

SEQ ID NO: 1698038 - RNA, 19 nt, Human
aauuaacauguuaaaccau

SEQ ID NO: 1698039 - RNA, 20 nt, Human
aauuaacauguuaaaccaug

SEQ ID NO: 1698040 - RNA, 20 nt, Human
uacaucccuuaccugggaaa

SEQ ID NO: 1698041 - RNA, 23 nt, Human
aaugccaucaauaaaaaauuaug

SEQ ID NO: 1698042 - RNA, 21 nt, Human
aaugccaucaauaaaaaauua

SEQ ID NO: 1698043 - RNA, 16 nt, Human
aaugccaucaauaaaa

SEQ ID NO: 1698044 - RNA, 16 nt, Human
aaugcuguauuuuaaa

SEQ ID NO: 1698045 - RNA, 16 nt, Human
aauggacuguggugac

SEQ ID NO: 1698046 - RNA, 18 nt, Human
uacacuaagagagaauga

SEQ ID NO: 1698047 - RNA, 14 nt, Human
uacacuaagagaga

SEQ ID NO: 1698048 - RNA, 14 nt, Human
uacuggauuguacu

SEQ ID NO: 1698049 - RNA, 14 nt, Human
uacuguaagaaaau

SEQ ID NO: 1698050 - RNA, 21 nt, Human
aauugacccacaagaaaugaa

SEQ ID NO: 1698051 - RNA, 22 nt, Human
aauugacccacaagaaaugaaa

SEQ ID NO: 1698052 - RNA, 20 nt, Human
aauucccuggccuuucauau

SEQ ID NO: 1698053 - RNA, 19 nt, Human
aauucccuggccuuucaua

SEQ ID NO: 1698054 - RNA, 19 nt, Human
uacuauauaugugaugauc

SEQ ID NO: 1698055 - RNA, 18 nt, Human
aauuccaagugauugaaa

SEQ ID NO: 1698056 - RNA, 22 nt, Human
aauuccacuuauaggaauugac

SEQ ID NO: 1698057 - RNA, 18 nt, Human
uaaucacuuuuuuccaca

SEQ ID NO: 1698058 - RNA, 19 nt, Human
uaaucacuuuuuuccacau

SEQ ID NO: 1698059 - RNA, 17 nt, Human
uaaucacuuuuuuccac

SEQ ID NO: 1698060 - RNA, 16 nt, Human
uaaucacuuuuuucca

SEQ ID NO: 1698061 - RNA, 22 nt, Human
aaugaauggcuaagcaaaaugu

SEQ ID NO: 1698062 - RNA, 16 nt, Human
uaaggaaaaguuuaau

SEQ ID NO: 1698063 - RNA, 19 nt, Human
uaaguaaugauaacuggaa

SEQ ID NO: 1698064 - RNA, 16 nt, Human
uaagcuuguauuccuu

SEQ ID NO: 1698065 - RNA, 15 nt, Human
aaucaugaauuaguu

SEQ ID NO: 1698066 - RNA, 12 nt, Human
aaucaugaauua

SEQ ID NO: 1698067 - RNA, 22 nt, Human
aaucugugaacuugaaauuuga

SEQ ID NO: 1698068 - RNA, 21 nt, Human
aaucugugaacuugaaauuug

SEQ ID NO: 1698069 - RNA, 20 nt, Human
aaucugugaacuugaaauuu

SEQ ID NO: 1698070 - RNA, 19 nt, Human
aaucuacacuccagugaga

SEQ ID NO: 1698071 - RNA, 19 nt, Human
aaucuuauaauuuaaaaua

SEQ ID NO: 1698072 - RNA, 16 nt, Human
aauaucaucaguauug

SEQ ID NO: 1698073 - RNA, 20 nt, Human
aauaucacuugucaauaaaa

SEQ ID NO: 1698074 - RNA, 22 nt, Human
aauaucacuugucaauaaaauc

SEQ ID NO: 1698075 - RNA, 14 nt, Human
uaacauaaaucugu

SEQ ID NO: 1698076 - RNA, 12 nt, Human
uaacauaaaucu

SEQ ID NO: 1698077 - RNA, 16 nt, Human
aauagucaaauugugu

SEQ ID NO: 1698078 - RNA, 21 nt, Human
uaacuguuauuuauaaucacu

SEQ ID NO: 1698079 - RNA, 20 nt, Human
uaacgauaaaagacagugaa

SEQ ID NO: 1698080 - RNA, 18 nt, Human
uaagaagugaaaaucuac

SEQ ID NO: 1698081 - RNA, 14 nt, Human
aauauuucagauaa

SEQ ID NO: 1698082 - RNA, 19 nt, Human
aauauuuauuuuaauaaug

SEQ ID NO: 1698083 - RNA, 18 nt, Human
aauauuuauuuuaauaau

SEQ ID NO: 1698084 - RNA, 24 nt, Human
aauaugccccauucaacaucuagu

SEQ ID NO: 1698085 - RNA, 21 nt, Human
aauaugccccauucaacaucu

SEQ ID NO: 1698086 - RNA, 21 nt, Human
aaucaggguuaguauugucca

SEQ ID NO: 1698087 - RNA, 16 nt, Human
aaucaggguuaguauu

SEQ ID NO: 1698088 - RNA, 22 nt, Human
aaucaggguuaguauuguccag

SEQ ID NO: 1698089 - RNA, 23 nt, Human
ucacaguuuugguugcuuuaaua

SEQ ID NO: 1698090 - RNA, 21 nt, Human
ucacaguuuugguugcuuuaa

SEQ ID NO: 1698091 - RNA, 20 nt, Human
ucacaguuuugguugcuuua

SEQ ID NO: 1698092 - RNA, 16 nt, Human
ucaauucuugccaaau

SEQ ID NO: 1698093 - RNA, 22 nt, Human
accaguauuguacaaaguauua

SEQ ID NO: 1698094 - RNA, 20 nt, Human
accaguauuguacaaaguau

SEQ ID NO: 1698095 - RNA, 15 nt, Human
accaguauuguacaa

SEQ ID NO: 1698096 - RNA, 14 nt, Human
accaguauuguaca

SEQ ID NO: 1698097 - RNA, 23 nt, Human
ucacuugaacccgggaggcagag

SEQ ID NO: 1698098 - RNA, 23 nt, Human
accaguauuguacaaaguauuaa

SEQ ID NO: 1698099 - RNA, 14 nt, Human
accagucugacugu

SEQ ID NO: 1698100 - RNA, 20 nt, Human
ucaccugucuugccuuuuuc

SEQ ID NO: 1698101 - RNA, 19 nt, Human
ucaccugucuugccuuuuu

SEQ ID NO: 1698102 - RNA, 14 nt, Human
ucaccucauggaau

SEQ ID NO: 1698103 - RNA, 13 nt, Human
ucaccucauggaa

SEQ ID NO: 1698104 - RNA, 12 nt, Human
ucaccucaugga

SEQ ID NO: 1698105 - RNA, 12 nt, Human
ucaacugggcug

SEQ ID NO: 1698106 - RNA, 22 nt, Human
ucaauaucuuuuuuuuaauaaa

SEQ ID NO: 1698107 - RNA, 23 nt, Human
ucaaugaaugaaugaauggcuaa

SEQ ID NO: 1698108 - RNA, 19 nt, Human
ucaauauuucagauaauca

SEQ ID NO: 1698109 - RNA, 15 nt, Human
ucaauauuucagaua

SEQ ID NO: 1698110 - RNA, 16 nt, Human
acauguauuuguuugc

SEQ ID NO: 1698111 - RNA, 18 nt, Human
acauguauuuguuugcau

SEQ ID NO: 1698112 - RNA, 17 nt, Human
acauguauuuguuugca

SEQ ID NO: 1698113 - RNA, 19 nt, Human
acauguauuuguuugcaua

SEQ ID NO: 1698114 - RNA, 18 nt, Human
ucaaauugugugaaaggu

SEQ ID NO: 1698115 - RNA, 15 nt, Human
ucaaauugugugaaa

SEQ ID NO: 1698116 - RNA, 17 nt, Human
ucaaccaccuuucagau

SEQ ID NO: 1698117 - RNA, 18 nt, Human
ucaacugggcugaacacu

SEQ ID NO: 1698118 - RNA, 20 nt, Human
acaugagguacugagaguga

SEQ ID NO: 1698119 - RNA, 23 nt, Human
acaugagguacugagagugaaca

SEQ ID NO: 1698120 - RNA, 14 nt, Human
acaugggacauuug

SEQ ID NO: 1698121 - RNA, 11 nt, Human
acaugggacau

SEQ ID NO: 1698122 - RNA, 21 nt, Human
acaugggacauuugcucaugg

SEQ ID NO: 1698123 - RNA, 20 nt, Human
acaugggacauuugcucaug

SEQ ID NO: 1698124 - RNA, 15 nt, Human
acaugggacauuugc

SEQ ID NO: 1698125 - RNA, 20 nt, Human
ucagcaaaaauauuuuauga

SEQ ID NO: 1698126 - RNA, 19 nt, Human
ucagcaaaaauauuuuaug

SEQ ID NO: 1698127 - RNA, 23 nt, Human
ucagauuuuauuauguaaauccc

SEQ ID NO: 1698128 - RNA, 22 nt, Human
ucagauuuuauuauguaaaucc

SEQ ID NO: 1698129 - RNA, 19 nt, Human
accauaaccccggaagcca

SEQ ID NO: 1698130 - RNA, 17 nt, Human
acccgggaggcagaggu

SEQ ID NO: 1698131 - RNA, 16 nt, Human
accuagggugauauua

SEQ ID NO: 1698132 - RNA, 17 nt, Human
ucaguuuuugugaaaag

SEQ ID NO: 1698133 - RNA, 15 nt, Human
ucaguuuuugugaaa

SEQ ID NO: 1698134 - RNA, 13 nt, Human
acggaugauuucu

SEQ ID NO: 1698135 - RNA, 18 nt, Human
uccagugagacagcucug

SEQ ID NO: 1698136 - RNA, 14 nt, Human
acgcucucuggccu

SEQ ID NO: 1698137 - RNA, 11 nt, Human
acgcucucugg

SEQ ID NO: 1698138 - RNA, 19 nt, Human
accuugaaaacuuuaugcu

SEQ ID NO: 1698139 - RNA, 22 nt, Human
uccacugguucuucuuggucuc

SEQ ID NO: 1698140 - RNA, 20 nt, Human
accuuuuggucuggagggaa

SEQ ID NO: 1698141 - RNA, 16 nt, Human
acuaaacuuucacacc

SEQ ID NO: 1698142 - RNA, 15 nt, Human
acuaaacuuucacac

SEQ ID NO: 1698143 - RNA, 15 nt, Human
acuaauuuuaaaaug

SEQ ID NO: 1698144 - RNA, 16 nt, Human
acggugaauggcuuug

SEQ ID NO: 1698145 - RNA, 19 nt, Human
uccauccugaggcuccacu

SEQ ID NO: 1698146 - RNA, 15 nt, Human
uccauccugaggcuc

SEQ ID NO: 1698147 - RNA, 12 nt, Human
uccauccugagg

SEQ ID NO: 1698148 - RNA, 20 nt, Human
acggugaauggcuuuguaua

SEQ ID NO: 1698149 - RNA, 19 nt, Human
acggugaauggcuuuguau

SEQ ID NO: 1698150 - RNA, 15 nt, Human
acucaauuuuaacaa

SEQ ID NO: 1698151 - RNA, 12 nt, Human
acucaauuuuaa

SEQ ID NO: 1698152 - RNA, 22 nt, Human
acuauauuguuugcuaagcauu

SEQ ID NO: 1698153 - RNA, 17 nt, Human
acuauauuguuugcuaa

SEQ ID NO: 1698154 - RNA, 15 nt, Human
acuaucucauuucca

SEQ ID NO: 1698155 - RNA, 17 nt, Human
acuaucucauuuccaag

SEQ ID NO: 1698156 - RNA, 16 nt, Human
acuaucucauuuccaa

SEQ ID NO: 1698157 - RNA, 22 nt, Human
uccugcaaugaagucucugaag

SEQ ID NO: 1698158 - RNA, 16 nt, Human
uccuggaaaucagggu

SEQ ID NO: 1698159 - RNA, 18 nt, Human
acugagagugaacaaauu

SEQ ID NO: 1698160 - RNA, 20 nt, Human
acugacucuuaagaagacug

SEQ ID NO: 1698161 - RNA, 18 nt, Human
acugacucuuaagaagac

SEQ ID NO: 1698162 - RNA, 17 nt, Human
acugacucuuaagaaga

SEQ ID NO: 1698163 - RNA, 16 nt, Human
acugacucuuaagaag

SEQ ID NO: 1698164 - RNA, 15 nt, Human
acugacucuuaagaa

SEQ ID NO: 1698165 - RNA, 14 nt, Human
acugacucuuaaga

SEQ ID NO: 1698166 - RNA, 13 nt, Human
acugacucuuaag

SEQ ID NO: 1698167 - RNA, 12 nt, Human
acugaagaagca

SEQ ID NO: 1698168 - RNA, 21 nt, Human
acucuuaagaagacugcauua

SEQ ID NO: 1698169 - RNA, 19 nt, Human
acuccagugagacagcucu

SEQ ID NO: 1698170 - RNA, 20 nt, Human
agaaggcaaaugacuuugga

SEQ ID NO: 1698171 - RNA, 15 nt, Human
agaaggcaaaugacu

SEQ ID NO: 1698172 - RNA, 14 nt, Human
agaaggcaaaugac

SEQ ID NO: 1698173 - RNA, 23 nt, Human
agaaugguccgugcuaaggacuu

SEQ ID NO: 1698174 - RNA, 21 nt, Human
agaaugguccgugcuaaggac

SEQ ID NO: 1698175 - RNA, 15 nt, Human
agaauuaacacauga

SEQ ID NO: 1698176 - RNA, 23 nt, Human
agaauuaacacaugauccugcaa

SEQ ID NO: 1698177 - RNA, 18 nt, Human
ucugugaacuugaaauuu

SEQ ID NO: 1698178 - RNA, 14 nt, Human
ucugugagaugcua

SEQ ID NO: 1698179 - RNA, 17 nt, Human
ucugugaacuugaaauu

SEQ ID NO: 1698180 - RNA, 14 nt, Human
ucugugaacuugaa

SEQ ID NO: 1698181 - RNA, 22 nt, Human
ucugugagaugcuagaacuccc

SEQ ID NO: 1698182 - RNA, 17 nt, Human
ucugugagaugcuagaa

SEQ ID NO: 1698183 - RNA, 23 nt, Human
ucugugagaugcuagaacucccu

SEQ ID NO: 1698184 - RNA, 12 nt, Human
agaauucuguau

SEQ ID NO: 1698185 - RNA, 14 nt, Human
agaauucuguauag

SEQ ID NO: 1698186 - RNA, 20 nt, Human
ucugugagcaucacaguuuu

SEQ ID NO: 1698187 - RNA, 15 nt, Human
agacacacaugaagu

SEQ ID NO: 1698188 - RNA, 12 nt, Human
agacacacauga

SEQ ID NO: 1698189 - RNA, 11 nt, Human
ucugauccagu

SEQ ID NO: 1698190 - RNA, 21 nt, Human
ucugauccaguuuuguuugga

SEQ ID NO: 1698191 - RNA, 14 nt, Human
ucugauccaguuuu

SEQ ID NO: 1698192 - RNA, 15 nt, Human
ucugcagauaaacag

SEQ ID NO: 1698193 - RNA, 18 nt, Human
ucugcagauaaacaguag

SEQ ID NO: 1698194 - RNA, 19 nt, Human
agaagcaacccaaauguuc

SEQ ID NO: 1698195 - RNA, 14 nt, Human
agaagaacugaaau

SEQ ID NO: 1698196 - RNA, 13 nt, Human
agaagaacugaaa

SEQ ID NO: 1698197 - RNA, 18 nt, Human
agaagaugguaccaccag

SEQ ID NO: 1698198 - RNA, 21 nt, Human
acuguuauuuauaaucacuuu

SEQ ID NO: 1698199 - RNA, 20 nt, Human
acuguuauuuauaaucacuu

SEQ ID NO: 1698200 - RNA, 17 nt, Human
acuguuauuuauaauca

SEQ ID NO: 1698201 - RNA, 15 nt, Human
acuguuauuuauaau

SEQ ID NO: 1698202 - RNA, 14 nt, Human
acuguuauuuauaa

SEQ ID NO: 1698203 - RNA, 16 nt, Human
ucuaggaaauauuuau

SEQ ID NO: 1698204 - RNA, 17 nt, Human
ucuaggaaauauuuauu

SEQ ID NO: 1698205 - RNA, 13 nt, Human
acuuguguaaaua

SEQ ID NO: 1698206 - RNA, 15 nt, Human
acuugucaauaaaau

SEQ ID NO: 1698207 - RNA, 23 nt, Human
ucucagauuuuauuauguaaauc

SEQ ID NO: 1698208 - RNA, 22 nt, Human
ucucagauuuuauuauguaaau

SEQ ID NO: 1698209 - RNA, 16 nt, Human
ucucauuuaauccucu

SEQ ID NO: 1698210 - RNA, 15 nt, Human
ucucauuuccaagca

SEQ ID NO: 1698211 - RNA, 12 nt, Human
acuuuggauaau

SEQ ID NO: 1698212 - RNA, 19 nt, Human
acuuuggauaauaaggaaa

SEQ ID NO: 1698213 - RNA, 17 nt, Human
acuuuggauaauaagga

SEQ ID NO: 1698214 - RNA, 21 nt, Human
agauuagagaguguugaaacg

SEQ ID NO: 1698215 - RNA, 23 nt, Human
agauuagaauucuguauagauua

SEQ ID NO: 1698216 - RNA, 22 nt, Human
agauuagaauucuguauagauu

SEQ ID NO: 1698217 - RNA, 16 nt, Human
agauuagaauucugua

SEQ ID NO: 1698218 - RNA, 15 nt, Human
agauuagaauucugu

SEQ ID NO: 1698219 - RNA, 22 nt, Human
agauguauguacuucaugcugu

SEQ ID NO: 1698220 - RNA, 15 nt, Human
ugacacuuaaaaaug

SEQ ID NO: 1698221 - RNA, 14 nt, Human
agauccuggaaauc

SEQ ID NO: 1698222 - RNA, 13 nt, Human
agauccuggaaau

SEQ ID NO: 1698223 - RNA, 22 nt, Human
agaugcuagaacucccuuucaa

SEQ ID NO: 1698224 - RNA, 21 nt, Human
agaugcuagaacucccuuuca

SEQ ID NO: 1698225 - RNA, 19 nt, Human
agaugcuagaacucccuuu

SEQ ID NO: 1698226 - RNA, 21 nt, Human
agaugcaguucugaagaagau

SEQ ID NO: 1698227 - RNA, 20 nt, Human
agaugcaguucugaagaaga

SEQ ID NO: 1698228 - RNA, 16 nt, Human
agauuuuccugaaaac

SEQ ID NO: 1698229 - RNA, 15 nt, Human
agauuuuccugaaaa

SEQ ID NO: 1698230 - RNA, 12 nt, Human
ugagacagcucu

SEQ ID NO: 1698231 - RNA, 20 nt, Human
ugagacucugucucagucca

SEQ ID NO: 1698232 - RNA, 20 nt, Human
ugagagacacacugaagaag

SEQ ID NO: 1698233 - RNA, 19 nt, Human
ugagagacacacugaagaa

SEQ ID NO: 1698234 - RNA, 17 nt, Human
ugagagacacacugaag

SEQ ID NO: 1698235 - RNA, 16 nt, Human
ugagagacacacugaa

SEQ ID NO: 1698236 - RNA, 22 nt, Human
ugagagacacacugaagaagca

SEQ ID NO: 1698237 - RNA, 21 nt, Human
ugagagacacacugaagaagc

SEQ ID NO: 1698238 - RNA, 16 nt, Human
ugaaauacuguuugag

SEQ ID NO: 1698239 - RNA, 14 nt, Human
ugaaauacuguuug

SEQ ID NO: 1698240 - RNA, 14 nt, Human
ugaaauaagccaga

SEQ ID NO: 1698241 - RNA, 20 nt, Human
ugaaauuguaauuauaucug

SEQ ID NO: 1698242 - RNA, 19 nt, Human
ugaaauuguaauuauaucu

SEQ ID NO: 1698243 - RNA, 16 nt, Human
ugaaauuguaauuaua

SEQ ID NO: 1698244 - RNA, 15 nt, Human
ugaaauuguaauuau

SEQ ID NO: 1698245 - RNA, 14 nt, Human
ugaaauuguaauua

SEQ ID NO: 1698246 - RNA, 13 nt, Human
ugaaauuguaauu

SEQ ID NO: 1698247 - RNA, 19 nt, Human
ugaacuaaacuuucacacc

SEQ ID NO: 1698248 - RNA, 17 nt, Human
ugaacuaaacuuucaca

SEQ ID NO: 1698249 - RNA, 23 nt, Human
ugaacuagaguuuagcuggaaaa

SEQ ID NO: 1698250 - RNA, 18 nt, Human
ugaacccgggaggcagag

SEQ ID NO: 1698251 - RNA, 22 nt, Human
ugaacccauauuuguacaccaa

SEQ ID NO: 1698252 - RNA, 13 nt, Human
ugaacaaauuuac

SEQ ID NO: 1698253 - RNA, 18 nt, Human
ugaacaaauuuacagaga

SEQ ID NO: 1698254 - RNA, 22 nt, Human
agagguuuuucuuaaauaauaa

SEQ ID NO: 1698255 - RNA, 12 nt, Human
agagguuuuucu

SEQ ID NO: 1698256 - RNA, 20 nt, Human
ugaagauuuaccacuugugu

SEQ ID NO: 1698257 - RNA, 17 nt, Human
ugaagauuuaccacuug

SEQ ID NO: 1698258 - RNA, 17 nt, Human
ugaaguacucauacaug

SEQ ID NO: 1698259 - RNA, 22 nt, Human
ugaaacugcuuguuuccuagca

SEQ ID NO: 1698260 - RNA, 20 nt, Human
ugaaacugcuuguuuccuag

SEQ ID NO: 1698261 - RNA, 17 nt, Human
ugaaagaggaaugaagu

SEQ ID NO: 1698262 - RNA, 18 nt, Human
ugaaagaggaaugaagua

SEQ ID NO: 1698263 - RNA, 15 nt, Human
agagaguguugaaac

SEQ ID NO: 1698264 - RNA, 16 nt, Human
agagaguguugaaacg

SEQ ID NO: 1698265 - RNA, 19 nt, Human
ugaaacugcuuguuuccua

SEQ ID NO: 1698266 - RNA, 18 nt, Human
ugaaacugcuuguuuccu

SEQ ID NO: 1698267 - RNA, 13 nt, Human
ugaaagaaaauaa

SEQ ID NO: 1698268 - RNA, 17 nt, Human
ucuuugucuacaccauu

SEQ ID NO: 1698269 - RNA, 15 nt, Human
agagacagaaagcag

SEQ ID NO: 1698270 - RNA, 14 nt, Human
agagacagaaagca

SEQ ID NO: 1698271 - RNA, 16 nt, Human
agagacacacugaaga

SEQ ID NO: 1698272 - RNA, 21 nt, Human
agacuggugacugauucuuca

SEQ ID NO: 1698273 - RNA, 20 nt, Human
agacuggugacugauucuuc

SEQ ID NO: 1698274 - RNA, 19 nt, Human
agacuggugacugauucuu

SEQ ID NO: 1698275 - RNA, 17 nt, Human
agucagaucugccuaag

SEQ ID NO: 1698276 - RNA, 20 nt, Human
agucagaucugccuaaggac

SEQ ID NO: 1698277 - RNA, 22 nt, Human
agucagaucugccuaaggacuu

SEQ ID NO: 1698278 - RNA, 21 nt, Human
agucagaucugccuaaggacu

SEQ ID NO: 1698279 - RNA, 23 nt, Human
agucagaucugccuaaggacuuc

SEQ ID NO: 1698280 - RNA, 11 nt, Human
aguauuguaca

SEQ ID NO: 1698281 - RNA, 23 nt, Human
aguauuguacaaaguauuaagca

SEQ ID NO: 1698282 - RNA, 22 nt, Human
aguauuguacaaaguauuaagc

SEQ ID NO: 1698283 - RNA, 20 nt, Human
aguauuguacaaaguauuaa

SEQ ID NO: 1698284 - RNA, 15 nt, Human
aguauuguacaaagu

SEQ ID NO: 1698285 - RNA, 21 nt, Human
aguauguuagugcaaauuguc

SEQ ID NO: 1698286 - RNA, 18 nt, Human
aguauguuagugcaaauu

SEQ ID NO: 1698287 - RNA, 21 nt, Human
aguauuagaauaccacaggaa

SEQ ID NO: 1698288 - RNA, 20 nt, Human
agucacauuccaagccucau

SEQ ID NO: 1698289 - RNA, 16 nt, Human
aguauuguccaggucu

SEQ ID NO: 1698290 - RNA, 15 nt, Human
aguauuguccagguc

SEQ ID NO: 1698291 - RNA, 16 nt, Human
uguauuaagaaugaaa

SEQ ID NO: 1698292 - RNA, 12 nt, Human
uguauuaagaau

SEQ ID NO: 1698293 - RNA, 13 nt, Human
uguaugugugaag

SEQ ID NO: 1698294 - RNA, 12 nt, Human
uguaugugugaa

SEQ ID NO: 1698295 - RNA, 18 nt, Human
ugugagcaucacaguuuu

SEQ ID NO: 1698296 - RNA, 19 nt, Human
agucucugaagugaaacug

SEQ ID NO: 1698297 - RNA, 18 nt, Human
agucucugaagugaaacu

SEQ ID NO: 1698298 - RNA, 14 nt, Human
ugugaagcaaaauu

SEQ ID NO: 1698299 - RNA, 18 nt, Human
agucuguuuuaugacuuc

SEQ ID NO: 1698300 - RNA, 17 nt, Human
agucuguuuuaugacuu

SEQ ID NO: 1698301 - RNA, 14 nt, Human
agucuguuuuauga

SEQ ID NO: 1698302 - RNA, 13 nt, Human
agucuguuuuaug

SEQ ID NO: 1698303 - RNA, 17 nt, Human
agugaaagaaaauaaca

SEQ ID NO: 1698304 - RNA, 14 nt, Human
agugagacagcucu

SEQ ID NO: 1698305 - RNA, 20 nt, Human
agugaaacucguuaauuugu

SEQ ID NO: 1698306 - RNA, 16 nt, Human
agugagccgagauugu

SEQ ID NO: 1698307 - RNA, 21 nt, Human
agugagcagucaggaaagaga

SEQ ID NO: 1698308 - RNA, 22 nt, Human
ugucuucauaccuacauguauu

SEQ ID NO: 1698309 - RNA, 20 nt, Human
ugugaacuaaacuuucacac

SEQ ID NO: 1698310 - RNA, 19 nt, Human
ugugaacuaaacuuucaca

SEQ ID NO: 1698311 - RNA, 14 nt, Human
ugugaacuaaacuu

SEQ ID NO: 1698312 - RNA, 21 nt, Human
ugucuugccuuuuucauuauu

SEQ ID NO: 1698313 - RNA, 17 nt, Human
ugucuugccuuuuucau

SEQ ID NO: 1698314 - RNA, 16 nt, Human
ugucuugccuuuuuca

SEQ ID NO: 1698315 - RNA, 15 nt, Human
ugucuugccuuuuuc

SEQ ID NO: 1698316 - RNA, 17 nt, Human
ugucucuacuaaaaaua

SEQ ID NO: 1698317 - RNA, 14 nt, Human
uguacaaaguauua

SEQ ID NO: 1698318 - RNA, 13 nt, Human
uguacaaaguauu

SEQ ID NO: 1698319 - RNA, 18 nt, Human
uguaagaaaauaucacuu

SEQ ID NO: 1698320 - RNA, 19 nt, Human
uguaaauacaauuuuguuu

SEQ ID NO: 1698321 - RNA, 18 nt, Human
uguaaauacaauuuuguu

SEQ ID NO: 1698322 - RNA, 17 nt, Human
uguaaauacaauuuugu

SEQ ID NO: 1698323 - RNA, 16 nt, Human
uguaaauacaauuuug

SEQ ID NO: 1698324 - RNA, 16 nt, Human
uguaaaggaauuuaaa

SEQ ID NO: 1698325 - RNA, 10 nt, Human
uguaaauccc

SEQ ID NO: 1698326 - RNA, 21 nt, Human
uguaaauacaauuuuguuucu

SEQ ID NO: 1698327 - RNA, 15 nt, Human
ugguuaagucuguuu

SEQ ID NO: 1698328 - RNA, 18 nt, Human
ugguuaagucuguuuuau

SEQ ID NO: 1698329 - RNA, 15 nt, Human
aggucagugcaaaua

SEQ ID NO: 1698330 - RNA, 20 nt, Human
aggguuuauguuuaggaugu

SEQ ID NO: 1698331 - RNA, 22 nt, Human
uggucugugagaugcuagaacu

SEQ ID NO: 1698332 - RNA, 22 nt, Human
ugguccaugggccauaugaaaa

SEQ ID NO: 1698333 - RNA, 22 nt, Human
auaauaaggaaaaguuuaauau

SEQ ID NO: 1698334 - RNA, 19 nt, Human
auaauaaggaaaaguuuaa

SEQ ID NO: 1698335 - RNA, 18 nt, Human
auaauaaggaaaaguuua

SEQ ID NO: 1698336 - RNA, 17 nt, Human
auaauaaggaaaaguuu

SEQ ID NO: 1698337 - RNA, 16 nt, Human
auaauaaggaaaaguu

SEQ ID NO: 1698338 - RNA, 19 nt, Human
auaaucacuuuuuuccaca

SEQ ID NO: 1698339 - RNA, 21 nt, Human
auaaucuuucacaggggacag

SEQ ID NO: 1698340 - RNA, 19 nt, Human
auaauuauaugcuauuucu

SEQ ID NO: 1698341 - RNA, 17 nt, Human
auaauuauaugcuauuu

SEQ ID NO: 1698342 - RNA, 14 nt, Human
auaaugaauacuuu

SEQ ID NO: 1698343 - RNA, 23 nt, Human
auaauuauaugcuauuucuauau

SEQ ID NO: 1698344 - RNA, 21 nt, Human
auaauuauaugcuauuucuau

SEQ ID NO: 1698345 - RNA, 22 nt, Human
uuagaugcaguucugaagaaga

SEQ ID NO: 1698346 - RNA, 23 nt, Human
uuagaugcaguucugaagaagau

SEQ ID NO: 1698347 - RNA, 12 nt, Human
auaacuggaaac

SEQ ID NO: 1698348 - RNA, 18 nt, Human
uuauaaaucgcuuuugau

SEQ ID NO: 1698349 - RNA, 17 nt, Human
uuauaaaucgcuuuuga

SEQ ID NO: 1698350 - RNA, 14 nt, Human
uuauaaaucgcuuu

SEQ ID NO: 1698351 - RNA, 18 nt, Human
uuauauaagcuuguauuc

SEQ ID NO: 1698352 - RNA, 22 nt, Human
auacaaaaaaaaaaaaaaauua

SEQ ID NO: 1698353 - RNA, 22 nt, Human
auaauuuuuauauuugaaauau

SEQ ID NO: 1698354 - RNA, 21 nt, Human
auaauuuuuauauuugaaaua

SEQ ID NO: 1698355 - RNA, 19 nt, Human
auaauuuuuauauuugaaa

SEQ ID NO: 1698356 - RNA, 16 nt, Human
auaauuuuuauauuug

SEQ ID NO: 1698357 - RNA, 14 nt, Human
auaauuuuuauauu

SEQ ID NO: 1698358 - RNA, 20 nt, Human
auaauuuugugaagcaaaau

SEQ ID NO: 1698359 - RNA, 15 nt, Human
auaauuuugugaagc

SEQ ID NO: 1698360 - RNA, 14 nt, Human
auaauuuugugaag

SEQ ID NO: 1698361 - RNA, 13 nt, Human
auaauuuugugaa

SEQ ID NO: 1698362 - RNA, 22 nt, Human
auaccacaggaaccacaagacu

SEQ ID NO: 1698363 - RNA, 21 nt, Human
auacaguucggugagcuacaa

SEQ ID NO: 1698364 - RNA, 20 nt, Human
auacaucccuuaccugggaa

SEQ ID NO: 1698365 - RNA, 21 nt, Human
uguuguacucaauuuuaacaa

SEQ ID NO: 1698366 - RNA, 20 nt, Human
aguuauuauauuuacaaaug

SEQ ID NO: 1698367 - RNA, 18 nt, Human
uuaaaaaagaaacauuug

SEQ ID NO: 1698368 - RNA, 15 nt, Human
uuaaaaaagaaacau

SEQ ID NO: 1698369 - RNA, 20 nt, Human
uuaaaaaugguuuaaauggu

SEQ ID NO: 1698370 - RNA, 16 nt, Human
aguucugaagaagaug

SEQ ID NO: 1698371 - RNA, 15 nt, Human
aguucugaagaagau

SEQ ID NO: 1698372 - RNA, 14 nt, Human
aguucugaagaaga

SEQ ID NO: 1698373 - RNA, 13 nt, Human
aguucugaagaag

SEQ ID NO: 1698374 - RNA, 21 nt, Human
aguugauaugccuuuucccaa

SEQ ID NO: 1698375 - RNA, 15 nt, Human
uguuugcuaagcauu

SEQ ID NO: 1698376 - RNA, 19 nt, Human
uguuugcuaagcauuccaa

SEQ ID NO: 1698377 - RNA, 20 nt, Human
uguuuuauaauuuugugaag

SEQ ID NO: 1698378 - RNA, 13 nt, Human
uguuuuauaauuu

SEQ ID NO: 1698379 - RNA, 16 nt, Human
ugauuucuaugcugag

SEQ ID NO: 1698380 - RNA, 15 nt, Human
ugauuucuaugcuga

SEQ ID NO: 1698381 - RNA, 12 nt, Human
ugauuucuaugc

SEQ ID NO: 1698382 - RNA, 18 nt, Human
ugauuaaguaaugauaac

SEQ ID NO: 1698383 - RNA, 23 nt, Human
ugauuaaguaaugauaacuggaa

SEQ ID NO: 1698384 - RNA, 12 nt, Human
ugaugaagaagu

SEQ ID NO: 1698385 - RNA, 11 nt, Human
ugaugaagaag

SEQ ID NO: 1698386 - RNA, 15 nt, Human
ugcagaagacaguau

SEQ ID NO: 1698387 - RNA, 14 nt, Human
ugcagaagacagua

SEQ ID NO: 1698388 - RNA, 16 nt, Human
ugccccauucaacauc

SEQ ID NO: 1698389 - RNA, 23 nt, Human
agcucugcccauccugccccuga

SEQ ID NO: 1698390 - RNA, 15 nt, Human
ugccucaccccuugc

SEQ ID NO: 1698391 - RNA, 18 nt, Human
ugccucagaaaacaagga

SEQ ID NO: 1698392 - RNA, 20 nt, Human
aggauuuuaugcuuuaaaca

SEQ ID NO: 1698393 - RNA, 18 nt, Human
uggaauuggagcucgugg

SEQ ID NO: 1698394 - RNA, 17 nt, Human
aggacuuguuagaucua

SEQ ID NO: 1698395 - RNA, 11 nt, Human
aggagaaacug

SEQ ID NO: 1698396 - RNA, 17 nt, Human
aggagaaacuggaacuc

SEQ ID NO: 1698397 - RNA, 16 nt, Human
aggacuuguuagaucu

SEQ ID NO: 1698398 - RNA, 14 nt, Human
aggacuuguuagau

SEQ ID NO: 1698399 - RNA, 13 nt, Human
uggaaaggcagcu

SEQ ID NO: 1698400 - RNA, 13 nt, Human
ugcuauuucuaua

SEQ ID NO: 1698401 - RNA, 12 nt, Human
ugcuauuucuau

SEQ ID NO: 1698402 - RNA, 21 nt, Human
ugcuauuucuauauuuucauu

SEQ ID NO: 1698403 - RNA, 20 nt, Human
ugcuauuucuauauuuucau

SEQ ID NO: 1698404 - RNA, 14 nt, Human
ugcuauuucuauau

SEQ ID NO: 1698405 - RNA, 11 nt, Human
aggaauuuaaa

SEQ ID NO: 1698406 - RNA, 23 nt, Human
aggaauugacccacaagaaauga

SEQ ID NO: 1698407 - RNA, 14 nt, Human
aggacacugauaug

SEQ ID NO: 1698408 - RNA, 14 nt, Human
ugcuggagcucugc

SEQ ID NO: 1698409 - RNA, 13 nt, Human
ugcuggagcucug

SEQ ID NO: 1698410 - RNA, 18 nt, Human
uggacgagaaaacaauaa

SEQ ID NO: 1698411 - RNA, 19 nt, Human
uucuuaaauaauaaagauc

SEQ ID NO: 1698412 - RNA, 15 nt, Human
uucuuaaauaauaaa

SEQ ID NO: 1698413 - RNA, 13 nt, Human
uucuuaaaguuga

SEQ ID NO: 1698414 - RNA, 17 nt, Human
uucuguuuuauaauuuu

SEQ ID NO: 1698415 - RNA, 16 nt, Human
uucuguuuuauaauuu

SEQ ID NO: 1698416 - RNA, 23 nt, Human
aucacuugaacccgggaggcaga

SEQ ID NO: 1698417 - RNA, 19 nt, Human
uugauaaucaacugggcug

SEQ ID NO: 1698418 - RNA, 14 nt, Human
uugacauagucugg

SEQ ID NO: 1698419 - RNA, 19 nt, Human
uugacacuuaaaaaugguu

SEQ ID NO: 1698420 - RNA, 17 nt, Human
uugacauagucuggcug

SEQ ID NO: 1698421 - RNA, 14 nt, Human
uugacccacaagaa

SEQ ID NO: 1698422 - RNA, 17 nt, Human
uugacacuuaaaaaugg

SEQ ID NO: 1698423 - RNA, 18 nt, Human
auccugaggcuccacuug

SEQ ID NO: 1698424 - RNA, 16 nt, Human
auccugaggcuccacu

SEQ ID NO: 1698425 - RNA, 13 nt, Human
auccugaggcucc

SEQ ID NO: 1698426 - RNA, 11 nt, Human
auccugaggcu

SEQ ID NO: 1698427 - RNA, 13 nt, Human
auccugccccuga

SEQ ID NO: 1698428 - RNA, 22 nt, Human
auccugaggcuccacuuggucu

SEQ ID NO: 1698429 - RNA, 16 nt, Human
auccugcaauuccacu

SEQ ID NO: 1698430 - RNA, 12 nt, Human
auauuaaagcca

SEQ ID NO: 1698431 - RNA, 13 nt, Human
auauuuacaaaug

SEQ ID NO: 1698432 - RNA, 14 nt, Human
auauuguuugcuaa

SEQ ID NO: 1698433 - RNA, 19 nt, Human
aucaacugggcugaacacu

SEQ ID NO: 1698434 - RNA, 16 nt, Human
aucaaggguacacugc

SEQ ID NO: 1698435 - RNA, 13 nt, Human
aucaauuuaaaaa

SEQ ID NO: 1698436 - RNA, 21 nt, Human
aucaaggguacacugccuucu

SEQ ID NO: 1698437 - RNA, 13 nt, Human
auauauuuuuaua

SEQ ID NO: 1698438 - RNA, 20 nt, Human
uucauggaacgcguugaaau

SEQ ID NO: 1698439 - RNA, 19 nt, Human
uucauggaacgcguugaaa

SEQ ID NO: 1698440 - RNA, 21 nt, Human
uucauuaauaauaaauucccu

SEQ ID NO: 1698441 - RNA, 18 nt, Human
uucauuaauaauaaauuc

SEQ ID NO: 1698442 - RNA, 15 nt, Human
uucauuaauaauaaa

SEQ ID NO: 1698443 - RNA, 22 nt, Human
uucauggaacgcguugaaauug

SEQ ID NO: 1698444 - RNA, 21 nt, Human
uucauggaacgcguugaaauu

SEQ ID NO: 1698445 - RNA, 23 nt, Human
auauguaccuaacgaaguauccu

SEQ ID NO: 1698446 - RNA, 22 nt, Human
uucauuauuuuauuaugaaacu

SEQ ID NO: 1698447 - RNA, 19 nt, Human
uucagcaaaaauauuuuau

SEQ ID NO: 1698448 - RNA, 17 nt, Human
uucagcgguuuauauaa

SEQ ID NO: 1698449 - RNA, 17 nt, Human
uucagcaaaaauauuuu

SEQ ID NO: 1698450 - RNA, 15 nt, Human
uucaucaaugaauga

SEQ ID NO: 1698451 - RNA, 13 nt, Human
auauaugcuaagu

SEQ ID NO: 1698452 - RNA, 13 nt, Human
uuuauuaugaaac

SEQ ID NO: 1698453 - RNA, 19 nt, Human
uuuauuacuguaagaaaau

SEQ ID NO: 1698454 - RNA, 21 nt, Human
uuuauuaugaaacuuguguaa

SEQ ID NO: 1698455 - RNA, 23 nt, Human
augcugucuacacuaagagagaa

SEQ ID NO: 1698456 - RNA, 14 nt, Human
augcuguauuuuaa

SEQ ID NO: 1698457 - RNA, 16 nt, Human
uuuauuuuaauaaugu

SEQ ID NO: 1698458 - RNA, 23 nt, Human
auggaauuggagcucgugggaca

SEQ ID NO: 1698459 - RNA, 23 nt, Human
uuuagcuacuauauaugugauga

SEQ ID NO: 1698460 - RNA, 19 nt, Human
uuuauaugcuucuguuuua

SEQ ID NO: 1698461 - RNA, 17 nt, Human
uuuauaugcuucuguuu

SEQ ID NO: 1698462 - RNA, 17 nt, Human
uuuacuaaaauggacug

SEQ ID NO: 1698463 - RNA, 15 nt, Human
uuuacuaaaauggac

SEQ ID NO: 1698464 - RNA, 13 nt, Human
augcuaagugaaa

SEQ ID NO: 1698465 - RNA, 21 nt, Human
uuucuaugcugaguuugugcu

SEQ ID NO: 1698466 - RNA, 20 nt, Human
uuucuaugaaauauuauguu

SEQ ID NO: 1698467 - RNA, 14 nt, Human
uuucuaugaaauau

SEQ ID NO: 1698468 - RNA, 13 nt, Human
uuucuaugaaaua

SEQ ID NO: 1698469 - RNA, 13 nt, Human
uuucuauauuuuc

SEQ ID NO: 1698470 - RNA, 18 nt, Human
uuucuauauuuucauucu

SEQ ID NO: 1698471 - RNA, 15 nt, Human
uuucuauauuuucau

SEQ ID NO: 1698472 - RNA, 14 nt, Human
uuugaaauauugac

SEQ ID NO: 1698473 - RNA, 21 nt, Human
augggacauuugcucauggaa

SEQ ID NO: 1698474 - RNA, 22 nt, Human
augggacauuugcucauggaau

SEQ ID NO: 1698475 - RNA, 23 nt, Human
augaucuaccagccucccuauuu

SEQ ID NO: 1698476 - RNA, 18 nt, Human
uugugaagcaaaauuuuu

SEQ ID NO: 1698477 - RNA, 17 nt, Human
uuuaaaaaaaaaauugg

SEQ ID NO: 1698478 - RNA, 20 nt, Human
uuuaaaaaagaaacauuugg

SEQ ID NO: 1698479 - RNA, 14 nt, Human
augauaacuggaaa

SEQ ID NO: 1698480 - RNA, 18 nt, Human
uugguuaagucuguuuua

SEQ ID NO: 1698481 - RNA, 16 nt, Human
uugguuaagucuguuu

SEQ ID NO: 1698482 - RNA, 22 nt, Human
augaauuacauuuguauaaaau

SEQ ID NO: 1698483 - RNA, 19 nt, Human
augaauuacauuuguauaa

SEQ ID NO: 1698484 - RNA, 18 nt, Human
augaauuacauuuguaua

SEQ ID NO: 1698485 - RNA, 15 nt, Human
uuguaauuauaucug

SEQ ID NO: 1698486 - RNA, 23 nt, Human
uuguaguguuggagaagaacuga

SEQ ID NO: 1698487 - RNA, 13 nt, Human
uuguauaaaauaa

SEQ ID NO: 1698488 - RNA, 19 nt, Human
uuguauaaaauaauuuuua

SEQ ID NO: 1698489 - RNA, 23 nt, Human
augaauuaguuuuauaugcuucu

SEQ ID NO: 1698490 - RNA, 21 nt, Human
augaauuaguuuuauaugcuu

SEQ ID NO: 1698491 - RNA, 20 nt, Human
augaaauauuauguuaaaac

SEQ ID NO: 1698492 - RNA, 21 nt, Human
augaaauauuauguuaaaacu

SEQ ID NO: 1698493 - RNA, 12 nt, Human
uugcucauggaa

SEQ ID NO: 1698494 - RNA, 11 nt, Human
uugcucaugga

SEQ ID NO: 1698495 - RNA, 17 nt, Human
auuuuccuccuuucucu

SEQ ID NO: 1698496 - RNA, 13 nt, Human
auuuuccuccuuu

SEQ ID NO: 1698497 - RNA, 22 nt, Human
auuuucaguuauuauauuuaca

SEQ ID NO: 1698498 - RNA, 21 nt, Human
auuuuauuauguaaaucccau

SEQ ID NO: 1698499 - RNA, 20 nt, Human
auuuuauuauguaaauccca

SEQ ID NO: 1698500 - RNA, 19 nt, Human
auuuuauuauguaaauccc

SEQ ID NO: 1698501 - RNA, 18 nt, Human
auuuuauuauguaaaucc

SEQ ID NO: 1698502 - RNA, 17 nt, Human
auuuuauuauguaaauc

SEQ ID NO: 1698503 - RNA, 16 nt, Human
auuuuauuauguaaau

SEQ ID NO: 1698504 - RNA, 17 nt, Human
auuuuaaaagaaugauu

SEQ ID NO: 1698505 - RNA, 19 nt, Human
auuuguauaaaauaauuuu

SEQ ID NO: 1698506 - RNA, 18 nt, Human
auuuguauaaaauaauuu

SEQ ID NO: 1698507 - RNA, 15 nt, Human
auuuguauaaaauaa

SEQ ID NO: 1698508 - RNA, 22 nt, Human
auuuuaaaagaaugauuaugaa

SEQ ID NO: 1698509 - RNA, 18 nt, Human
auuuuaaaagaaugauua

SEQ ID NO: 1698510 - RNA, 18 nt, Human
auucuuaaaguugaauuu

SEQ ID NO: 1698511 - RNA, 23 nt, Human
auucuucagcaaaaauauuuuau

SEQ ID NO: 1698512 - RNA, 15 nt, Human
auucuucagcaaaaa

SEQ ID NO: 1698513 - RNA, 21 nt, Human
auucuguauagauuagaauuc

SEQ ID NO: 1698514 - RNA, 16 nt, Human
auucuuaaaguugaau

SEQ ID NO: 1698515 - RNA, 15 nt, Human
auucuuaaaguugaa

SEQ ID NO: 1698516 - RNA, 14 nt, Human
auucuuaaaguuga

SEQ ID NO: 1698517 - RNA, 13 nt, Human
auucuuaaaguug

SEQ ID NO: 1698518 - RNA, 18 nt, Human
auugacccacaagaaaug

SEQ ID NO: 1698519 - RNA, 23 nt, Human
auugguguuguacucaauuuuaa

SEQ ID NO: 1698520 - RNA, 22 nt, Human
auugguguuguacucaauuuua

SEQ ID NO: 1698521 - RNA, 14 nt, Human
auugguguuguacu

SEQ ID NO: 1698522 - RNA, 13 nt, Human
auuuagauguaua

SEQ ID NO: 1698523 - RNA, 17 nt, Human
auuuauuuuaauaaugu

SEQ ID NO: 1698524 - RNA, 20 nt, Human
auuuauuuuaauaauguuuc

SEQ ID NO: 1698525 - RNA, 19 nt, Human
auuuauuuuaauaauguuu

SEQ ID NO: 1698526 - RNA, 14 nt, Human
auuugaaauauuga

SEQ ID NO: 1698527 - RNA, 21 nt, Human
auucuccuaucaccugucuug

SEQ ID NO: 1698528 - RNA, 19 nt, Human
auucccuggccuuucauau

SEQ ID NO: 1698529 - RNA, 13 nt, Human
auucccuggccuu

SEQ ID NO: 1698530 - RNA, 15 nt, Human
uuuucugauccaguu

SEQ ID NO: 1698531 - RNA, 16 nt, Human
uuuucucuaggaaaua

SEQ ID NO: 1698532 - RNA, 14 nt, Human
uuuucucuaggaaa

SEQ ID NO: 1698533 - RNA, 22 nt, Human
uuuuauuaugaaacuuguguaa

SEQ ID NO: 1698534 - RNA, 21 nt, Human
uuuuauuaugaaacuugugua

SEQ ID NO: 1698535 - RNA, 12 nt, Human
uuuuauuaugaa

SEQ ID NO: 1698536 - RNA, 21 nt, Human
auguuuucaggcuagauguau

SEQ ID NO: 1698537 - RNA, 17 nt, Human
auguuuucaggcuagau

SEQ ID NO: 1698538 - RNA, 15 nt, Human
auguuuucaggcuag

SEQ ID NO: 1698539 - RNA, 20 nt, Human
auguuaaaccaugggauaaa

SEQ ID NO: 1698540 - RNA, 13 nt, Human
auguuaaaccaug

SEQ ID NO: 1698541 - RNA, 12 nt, Human
auguuaaaccau

SEQ ID NO: 1698542 - RNA, 18 nt, Human
auguucaucaaugaauga

SEQ ID NO: 1698543 - RNA, 14 nt, Human
uuuuaauaauguuu

SEQ ID NO: 1698544 - RNA, 13 nt, Human
uuuuaauaauguu

SEQ ID NO: 1698545 - RNA, 12 nt, Human
uuuuaauaaugu

SEQ ID NO: 1698546 - RNA, 16 nt, Human
uuuuaauaauguuuca

SEQ ID NO: 1698547 - RNA, 19 nt, Human
augugcuaguaauuggaaa

SEQ ID NO: 1698548 - RNA, 15 nt, Human
auuaauaauaaauuc

SEQ ID NO: 1698549 - RNA, 20 nt, Human
auuacauuuguauaaaauaa

SEQ ID NO: 1698550 - RNA, 18 nt, Human
auuacauuuguauaaaau

SEQ ID NO: 1698551 - RNA, 17 nt, Human
auuacauuuguauaaaa

SEQ ID NO: 1698552 - RNA, 23 nt, Human
auuaaguaaugauaacuggaaac

SEQ ID NO: 1698553 - RNA, 21 nt, Human
auuaaguaaugauaacuggaa

SEQ ID NO: 1698554 - RNA, 19 nt, Human
uuuuugugaaaagcuccau

SEQ ID NO: 1698555 - RNA, 12 nt, Human
auuagaauucug

SEQ ID NO: 1698556 - RNA, 14 nt, Human
auuagaauucugua

SEQ ID NO: 1698557 - RNA, 13 nt, Human
auuagaauucugu

SEQ ID NO: 1698558 - RNA, 18 nt, Human
auuagaauucuguauaga

SEQ ID NO: 1698559 - RNA, 17 nt, Human
auuagaauucuguauag

SEQ ID NO: 1698560 - RNA, 16 nt, Human
auuagaauucuguaua

SEQ ID NO: 1698561 - RNA, 15 nt, Human
auuagaauucuguau

SEQ ID NO: 1698562 - RNA, 21 nt, Human
auuagaauucuguauagauua

SEQ ID NO: 1698563 - RNA, 11 nt, Human
auuaaagccau

SEQ ID NO: 1698564 - RNA, 21 nt, Human
auuaagcauauauuuuuauau

SEQ ID NO: 1698565 - RNA, 15 nt, Human
auuaagcauauauuu

SEQ ID NO: 1698566 - RNA, 14 nt, Human
auuaagcauauauu

SEQ ID NO: 1698567 - RNA, 18 nt, Human
uuuuguuguuuguuuagu

SEQ ID NO: 1698568 - RNA, 12 nt, Human
uuuuguuucugu

SEQ ID NO: 1698569 - RNA, 22 nt, Human
uuuuguuuggaccaaaaaccag

SEQ ID NO: 1698570 - RNA, 12 nt, Human
uuuuguuuggac

SEQ ID NO: 1698571 - RNA, 13 nt, Human
uuuuguuucugua

SEQ ID NO: 1698572 - RNA, 23 nt, Human
uuuuguuuggaccaaaaaccagu

SEQ ID NO: 1698573 - RNA, 19 nt, Human
uuuuuauauuugaaauauu

SEQ ID NO: 1698574 - RNA, 23 nt, Human
caauuaaggauuuuaugcuuuaa

SEQ ID NO: 1698575 - RNA, 23 nt, Human
caauacaucccuuaccugggaaa

SEQ ID NO: 1698576 - RNA, 19 nt, Human
caagacugcacaucaaaau

SEQ ID NO: 1698577 - RNA, 17 nt, Human
caaggcugauuaaacca

SEQ ID NO: 1698578 - RNA, 21 nt, Human
caagccagauuuuccugaaaa

SEQ ID NO: 1698579 - RNA, 18 nt, Human
caaaaaccaguauuguac

SEQ ID NO: 1698580 - RNA, 20 nt, Human
caaaaaccaguauuguacaa

SEQ ID NO: 1698581 - RNA, 19 nt, Human
caaaaaccaguauuguaca

SEQ ID NO: 1698582 - RNA, 13 nt, Human
auuuuccugaaaa

SEQ ID NO: 1698583 - RNA, 23 nt, Human
caaaaauauuuuaugauccagca

SEQ ID NO: 1698584 - RNA, 22 nt, Human
caaaaauauuuuaugauccagc

SEQ ID NO: 1698585 - RNA, 19 nt, Human
caaaaaucucaauauuuca

SEQ ID NO: 1698586 - RNA, 21 nt, Human
caaaaauauuuuaugauccag

SEQ ID NO: 1698587 - RNA, 17 nt, Human
caaaaauauuuuaugau

SEQ ID NO: 1698588 - RNA, 15 nt, Human
caaaaauauuuuaug

SEQ ID NO: 1698589 - RNA, 14 nt, Human
caaaaauauuuuau

SEQ ID NO: 1698590 - RNA, 23 nt, Human
caaaacuucagacauagaauuaa

SEQ ID NO: 1698591 - RNA, 22 nt, Human
caaaauuuuuucucuaggaaau

SEQ ID NO: 1698592 - RNA, 21 nt, Human
caaaauuuuuucucuaggaaa

SEQ ID NO: 1698593 - RNA, 16 nt, Human
caaaauuuuuucucua

SEQ ID NO: 1698594 - RNA, 15 nt, Human
caaauugugugaaag

SEQ ID NO: 1698595 - RNA, 23 nt, Human
cacugauuugacauagucuggcu

SEQ ID NO: 1698596 - RNA, 21 nt, Human
cacugauuugacauagucugg

SEQ ID NO: 1698597 - RNA, 20 nt, Human
cacugccuucucaacuccaa

SEQ ID NO: 1698598 - RNA, 23 nt, Human
cacuugaacccgggaggcagagg

SEQ ID NO: 1698599 - RNA, 21 nt, Human
cacuugaacccgggaggcaga

SEQ ID NO: 1698600 - RNA, 20 nt, Human
cacuugaacccgggaggcag

SEQ ID NO: 1698601 - RNA, 15 nt, Human
cacuuggucugugag

SEQ ID NO: 1698602 - RNA, 19 nt, Human
cacuguggguagacacaca

SEQ ID NO: 1698603 - RNA, 24 nt, Human
cacuguggguagacacacaugaag

SEQ ID NO: 1698604 - RNA, 22 nt, Human
cacuguggguagacacacauga

SEQ ID NO: 1698605 - RNA, 17 nt, Human
caccugucuugccuuuu

SEQ ID NO: 1698606 - RNA, 20 nt, Human
caccugucuugccuuuuuca

SEQ ID NO: 1698607 - RNA, 23 nt, Human
cacggugaauggcuuuguauaga

SEQ ID NO: 1698608 - RNA, 20 nt, Human
cacggugaauggcuuuguau

SEQ ID NO: 1698609 - RNA, 22 nt, Human
cacguucuuacuaguuucccuu

SEQ ID NO: 1698610 - RNA, 13 nt, Human
cacuaaacaaaga

SEQ ID NO: 1698611 - RNA, 17 nt, Human
cacucuccauuuaauaa

SEQ ID NO: 1698612 - RNA, 15 nt, Human
cacucuccauuuaau

SEQ ID NO: 1698613 - RNA, 19 nt, Human
cacuaguauuucuaugaaa

SEQ ID NO: 1698614 - RNA, 14 nt, Human
cacuaguauuucua

SEQ ID NO: 1698615 - RNA, 21 nt, Human
cacuaaauugacacuuaaaaa

SEQ ID NO: 1698616 - RNA, 17 nt, Human
cacuaagagagaaugag

SEQ ID NO: 1698617 - RNA, 14 nt, Human
caccucauggaauu

SEQ ID NO: 1698618 - RNA, 12 nt, Human
caccucauggaa

SEQ ID NO: 1698619 - RNA, 11 nt, Human
caccucaugga

SEQ ID NO: 1698620 - RNA, 19 nt, Human
cagauaacuguuauuuaua

SEQ ID NO: 1698621 - RNA, 16 nt, Human
cagauaacuguuauuu

SEQ ID NO: 1698622 - RNA, 14 nt, Human
cagauaacuguuau

SEQ ID NO: 1698623 - RNA, 21 nt, Human
cagauaacuguuauuuauaau

SEQ ID NO: 1698624 - RNA, 20 nt, Human
cagauaacuguuauuuauaa

SEQ ID NO: 1698625 - RNA, 14 nt, Human
cagauaaucacaau

SEQ ID NO: 1698626 - RNA, 14 nt, Human
cagauaaacaguag

SEQ ID NO: 1698627 - RNA, 23 nt, Human
cagauaaauaguuuaugauucca

SEQ ID NO: 1698628 - RNA, 14 nt, Human
cagaucugccuaag

SEQ ID NO: 1698629 - RNA, 17 nt, Human
cagaucugccuaaggac

SEQ ID NO: 1698630 - RNA, 16 nt, Human
cagaucugccuaagga

SEQ ID NO: 1698631 - RNA, 23 nt, Human
cagaucugccuaaggacuucuuu

SEQ ID NO: 1698632 - RNA, 21 nt, Human
cagaucugccuaaggacuucu

SEQ ID NO: 1698633 - RNA, 20 nt, Human
cagaucugccuaaggacuuc

SEQ ID NO: 1698634 - RNA, 19 nt, Human
cagaucugccuaaggacuu

SEQ ID NO: 1698635 - RNA, 14 nt, Human
cagauccuggaaau

SEQ ID NO: 1698636 - RNA, 12 nt, Human
cacuuuuuucca

SEQ ID NO: 1698637 - RNA, 14 nt, Human
cacuuuuuuccaca

SEQ ID NO: 1698638 - RNA, 22 nt, Human
cacuuuugguuaagucuguuuu

SEQ ID NO: 1698639 - RNA, 23 nt, Human
cagaacagugauuaccagggacu

SEQ ID NO: 1698640 - RNA, 19 nt, Human
cagaaagcagaacagugau

SEQ ID NO: 1698641 - RNA, 18 nt, Human
cagaaagcagaacaguga

SEQ ID NO: 1698642 - RNA, 20 nt, Human
cagaaggcaaaugacuuugg

SEQ ID NO: 1698643 - RNA, 19 nt, Human
cagaaggcaaaugacuuug

SEQ ID NO: 1698644 - RNA, 18 nt, Human
cagaaggcaaaugacuuu

SEQ ID NO: 1698645 - RNA, 20 nt, Human
cagaagcaacccaaauguuc

SEQ ID NO: 1698646 - RNA, 19 nt, Human
cagaagcaacccaaauguu

SEQ ID NO: 1698647 - RNA, 19 nt, Human
cagacauagaauuaacaca

SEQ ID NO: 1698648 - RNA, 17 nt, Human
cagacauagaauuaaca

SEQ ID NO: 1698649 - RNA, 23 nt, Human
cagauuauucacugauuugacau

SEQ ID NO: 1698650 - RNA, 18 nt, Human
cagauuauucacugauuu

SEQ ID NO: 1698651 - RNA, 12 nt, Human
cagauuauucac

SEQ ID NO: 1698652 - RNA, 17 nt, Human
cagcaaaaauauuuuau

SEQ ID NO: 1698653 - RNA, 15 nt, Human
cagauuuuccugaaa

SEQ ID NO: 1698654 - RNA, 14 nt, Human
cagauuuuccugaa

SEQ ID NO: 1698655 - RNA, 22 nt, Human
cagauuuuauuauguaaauccc

SEQ ID NO: 1698656 - RNA, 21 nt, Human
cagauuuuauuauguaaaucc

SEQ ID NO: 1698657 - RNA, 20 nt, Human
cagauuuuauuauguaaauc

SEQ ID NO: 1698658 - RNA, 18 nt, Human
cagauuuuauuauguaaa

SEQ ID NO: 1698659 - RNA, 16 nt, Human
cagauuuuauuaugua

SEQ ID NO: 1698660 - RNA, 15 nt, Human
cagauuuuauuaugu

SEQ ID NO: 1698661 - RNA, 13 nt, Human
cagauuuuauuau

SEQ ID NO: 1698662 - RNA, 19 nt, Human
cagcagauuauucacugau

SEQ ID NO: 1698663 - RNA, 15 nt, Human
cagcagauuauucac

SEQ ID NO: 1698664 - RNA, 14 nt, Human
cagcagauuauuca

SEQ ID NO: 1698665 - RNA, 23 nt, Human
caggaauggagccugcacgguga

SEQ ID NO: 1698666 - RNA, 17 nt, Human
caggaauggagccugca

SEQ ID NO: 1698667 - RNA, 15 nt, Human
caggaaguagaggag

SEQ ID NO: 1698668 - RNA, 16 nt, Human
caggaaguagaggagg

SEQ ID NO: 1698669 - RNA, 23 nt, Human
cagcuuuccucaaaacuucagac

SEQ ID NO: 1698670 - RNA, 18 nt, Human
caggaaccacaagacugc

SEQ ID NO: 1698671 - RNA, 19 nt, Human
cagcuguaugauucccagc

SEQ ID NO: 1698672 - RNA, 18 nt, Human
cagcuggugcccugcuuu

SEQ ID NO: 1698673 - RNA, 23 nt, Human
cagcuggugcccugcuuucagau

SEQ ID NO: 1698674 - RNA, 21 nt, Human
cagcuggugcccugcuuucag

SEQ ID NO: 1698675 - RNA, 20 nt, Human
cagcuggugcccugcuuuca

SEQ ID NO: 1698676 - RNA, 19 nt, Human
cagcuggugcccugcuuuc

SEQ ID NO: 1698677 - RNA, 18 nt, Human
cagcuguaugauucccag

SEQ ID NO: 1698678 - RNA, 20 nt, Human
cagcucugcauacucauuag

SEQ ID NO: 1698679 - RNA, 21 nt, Human
cagccucccuauuuuuuuucu

SEQ ID NO: 1698680 - RNA, 19 nt, Human
cagcuacuugggaggcuga

SEQ ID NO: 1698681 - RNA, 16 nt, Human
cagccuaguugaucag

SEQ ID NO: 1698682 - RNA, 21 nt, Human
caguauaauuaacauguuaaa

SEQ ID NO: 1698683 - RNA, 17 nt, Human
caguauaauuaacaugu

SEQ ID NO: 1698684 - RNA, 15 nt, Human
caguauaauuaacau

SEQ ID NO: 1698685 - RNA, 14 nt, Human
caguauaauuaaca

SEQ ID NO: 1698686 - RNA, 12 nt, Human
caguagugauag

SEQ ID NO: 1698687 - RNA, 12 nt, Human
caguauggcagc

SEQ ID NO: 1698688 - RNA, 13 nt, Human
caguccaugaaga

SEQ ID NO: 1698689 - RNA, 22 nt, Human
cagucaggaaagagaacuucca

SEQ ID NO: 1698690 - RNA, 18 nt, Human
cagucaggaaagagaacu

SEQ ID NO: 1698691 - RNA, 15 nt, Human
cagucaggaaagaga

SEQ ID NO: 1698692 - RNA, 15 nt, Human
cagugagacagcucu

SEQ ID NO: 1698693 - RNA, 16 nt, Human
cagugaaagaaaauaa

SEQ ID NO: 1698694 - RNA, 20 nt, Human
cagugaaagaaaauaacaau

SEQ ID NO: 1698695 - RNA, 18 nt, Human
cagugauuaccagggacu

SEQ ID NO: 1698696 - RNA, 17 nt, Human
cagugauuaccagggac

SEQ ID NO: 1698697 - RNA, 23 nt, Human
caggaugguucccuugaugaaga

SEQ ID NO: 1698698 - RNA, 21 nt, Human
caggaugguucccuugaugaa

SEQ ID NO: 1698699 - RNA, 16 nt, Human
caggggacaggauggu

SEQ ID NO: 1698700 - RNA, 11 nt, Human
caggggacagg

SEQ ID NO: 1698701 - RNA, 19 nt, Human
caggcuagauguauguacu

SEQ ID NO: 1698702 - RNA, 13 nt, Human
caggcuagaugua

SEQ ID NO: 1698703 - RNA, 22 nt, Human
caucucugcaaucuucucagaa

SEQ ID NO: 1698704 - RNA, 15 nt, Human
caucucugcaaucuu

SEQ ID NO: 1698705 - RNA, 19 nt, Human
caugaagauguagaggaga

SEQ ID NO: 1698706 - RNA, 18 nt, Human
caugaagauguagaggag

SEQ ID NO: 1698707 - RNA, 16 nt, Human
caugagguacugagag

SEQ ID NO: 1698708 - RNA, 19 nt, Human
caugagguacugagaguga

SEQ ID NO: 1698709 - RNA, 21 nt, Human
cauauauuuuuauauuuacua

SEQ ID NO: 1698710 - RNA, 20 nt, Human
cauauauuuuuauauuuacu

SEQ ID NO: 1698711 - RNA, 18 nt, Human
cauauauuuuuauauuua

SEQ ID NO: 1698712 - RNA, 20 nt, Human
cauauauaacaaugcuguau

SEQ ID NO: 1698713 - RNA, 15 nt, Human
cauauauaacaaugc

SEQ ID NO: 1698714 - RNA, 19 nt, Human
cauagucuggcuguaccca

SEQ ID NO: 1698715 - RNA, 13 nt, Human
cauauauaacaau

SEQ ID NO: 1698716 - RNA, 22 nt, Human
caucaguauugaagcauuuuau

SEQ ID NO: 1698717 - RNA, 20 nt, Human
caucaguauugaagcauuuu

SEQ ID NO: 1698718 - RNA, 16 nt, Human
caucaguauugaagca

SEQ ID NO: 1698719 - RNA, 18 nt, Human
caucccuuaccugggaaa

SEQ ID NO: 1698720 - RNA, 13 nt, Human
cauguuaaaccau

SEQ ID NO: 1698721 - RNA, 23 nt, Human
cauguuuauuacaguauaauuaa

SEQ ID NO: 1698722 - RNA, 22 nt, Human
cauguuaaaccaugggauaaau

SEQ ID NO: 1698723 - RNA, 20 nt, Human
caugugcuaguaauuggaaa

SEQ ID NO: 1698724 - RNA, 17 nt, Human
caugggauaaaugccau

SEQ ID NO: 1698725 - RNA, 16 nt, Human
caugggauaaaugcca

SEQ ID NO: 1698726 - RNA, 23 nt, Human
caugggauaaaugccaucaauaa

SEQ ID NO: 1698727 - RNA, 18 nt, Human
caugggauaaaugccauc

SEQ ID NO: 1698728 - RNA, 23 nt, Human
caugggacagggaggacgcucuc

SEQ ID NO: 1698729 - RNA, 20 nt, Human
cauggaauuggagcucgugg

SEQ ID NO: 1698730 - RNA, 22 nt, Human
cauuuggaaaucuuuaaaaaaa

SEQ ID NO: 1698731 - RNA, 11 nt, Human
cauuuggaaau

SEQ ID NO: 1698732 - RNA, 18 nt, Human
cauuuggaaaucuuuaaa

SEQ ID NO: 1698733 - RNA, 17 nt, Human
cauuuggaaaucuuuaa

SEQ ID NO: 1698734 - RNA, 14 nt, Human
cauuaauaauaaau

SEQ ID NO: 1698735 - RNA, 22 nt, Human
cauuauucaaaguugccuaaau

SEQ ID NO: 1698736 - RNA, 21 nt, Human
cauuauucaaaguugccuaaa

SEQ ID NO: 1698737 - RNA, 18 nt, Human
cauuauucaaaguugccu

SEQ ID NO: 1698738 - RNA, 17 nt, Human
cauuauuuuauuaugaa

SEQ ID NO: 1698739 - RNA, 22 nt, Human
cauuccaacuaucucauuucca

SEQ ID NO: 1698740 - RNA, 13 nt, Human
cauucuggaauaa

SEQ ID NO: 1698741 - RNA, 13 nt, Human
ccaugggauaaau

SEQ ID NO: 1698742 - RNA, 19 nt, Human
ccaugggacagggaggacg

SEQ ID NO: 1698743 - RNA, 16 nt, Human
ccaugggacagggagg

SEQ ID NO: 1698744 - RNA, 17 nt, Human
ccaugggauaaaugcca

SEQ ID NO: 1698745 - RNA, 22 nt, Human
ccauuauucaaaguugccuaaa

SEQ ID NO: 1698746 - RNA, 17 nt, Human
ccauuauucaaaguugc

SEQ ID NO: 1698747 - RNA, 20 nt, Human
ccauguuuauuacaguauaa

SEQ ID NO: 1698748 - RNA, 13 nt, Human
ccauguuuauuac

SEQ ID NO: 1698749 - RNA, 14 nt, Human
ccauuauucaaagu

SEQ ID NO: 1698750 - RNA, 19 nt, Human
ccugcaaugaagucucuga

SEQ ID NO: 1698751 - RNA, 21 nt, Human
ccugcaaugaagucucugaag

SEQ ID NO: 1698752 - RNA, 21 nt, Human
ccugcacggugaauggcuuug

SEQ ID NO: 1698753 - RNA, 20 nt, Human
ccugcaaugaagucucugaa

SEQ ID NO: 1698754 - RNA, 20 nt, Human
ccugcacggugaauggcuuu

SEQ ID NO: 1698755 - RNA, 11 nt, Human
ccugagcccca

SEQ ID NO: 1698756 - RNA, 23 nt, Human
ccuggaaaucaggguuaguauug

SEQ ID NO: 1698757 - RNA, 12 nt, Human
ccuuaaaggaag

SEQ ID NO: 1698758 - RNA, 16 nt, Human
ccuucggccuccaucc

SEQ ID NO: 1698759 - RNA, 20 nt, Human
ccuugaaaacuuuaugcuaa

SEQ ID NO: 1698760 - RNA, 19 nt, Human
ccuuggggcugaugcaguu

SEQ ID NO: 1698761 - RNA, 14 nt, Human
ccuugaugaagaag

SEQ ID NO: 1698762 - RNA, 20 nt, Human
ccuucggccuccauccugag

SEQ ID NO: 1698763 - RNA, 19 nt, Human
ccuucggccuccauccuga

SEQ ID NO: 1698764 - RNA, 14 nt, Human
ccuucggccuccau

SEQ ID NO: 1698765 - RNA, 12 nt, Human
ccuucagccuga

SEQ ID NO: 1698766 - RNA, 14 nt, Human
ccgugcuaaggacu

SEQ ID NO: 1698767 - RNA, 16 nt, Human
ccgugcuaaggacuug

SEQ ID NO: 1698768 - RNA, 15 nt, Human
ccgugcuaaggacuu

SEQ ID NO: 1698769 - RNA, 16 nt, Human
ccgggcguggugguga

SEQ ID NO: 1698770 - RNA, 12 nt, Human
ccuaaauccauu

SEQ ID NO: 1698771 - RNA, 18 nt, Human
ccuaaauccauuuggaaa

SEQ ID NO: 1698772 - RNA, 17 nt, Human
ccuaaauccauuuggaa

SEQ ID NO: 1698773 - RNA, 14 nt, Human
cccugcuuucagau

SEQ ID NO: 1698774 - RNA, 17 nt, Human
cccugcuuucagauacu

SEQ ID NO: 1698775 - RNA, 15 nt, Human
cccgugggguuccuc

SEQ ID NO: 1698776 - RNA, 13 nt, Human
cccacaagaaaug

SEQ ID NO: 1698777 - RNA, 20 nt, Human
cccacaagaaaugaaagcag

SEQ ID NO: 1698778 - RNA, 23 nt, Human
cugucuugccuuuuucauuauuu

SEQ ID NO: 1698779 - RNA, 21 nt, Human
cugucuugccuuuuucauuau

SEQ ID NO: 1698780 - RNA, 12 nt, Human
cuguggugacuu

SEQ ID NO: 1698781 - RNA, 14 nt, Human
cuguggugacuuug

SEQ ID NO: 1698782 - RNA, 13 nt, Human
cuguggugacuuu

SEQ ID NO: 1698783 - RNA, 23 nt, Human
cuguggugacuuuggauaauaag

SEQ ID NO: 1698784 - RNA, 20 nt, Human
cuguggugacuuuggauaau

SEQ ID NO: 1698785 - RNA, 18 nt, Human
cuguggugacuuuggaua

SEQ ID NO: 1698786 - RNA, 17 nt, Human
cuguggugacuuuggau

SEQ ID NO: 1698787 - RNA, 15 nt, Human
cuguggugacuuugg

SEQ ID NO: 1698788 - RNA, 18 nt, Human
cugggcugaacacuccaa

SEQ ID NO: 1698789 - RNA, 14 nt, Human
cugggguuaucuga

SEQ ID NO: 1698790 - RNA, 17 nt, Human
cuggugugaacuaaacu

SEQ ID NO: 1698791 - RNA, 16 nt, Human
cuggugugaacuaaac

SEQ ID NO: 1698792 - RNA, 15 nt, Human
cugguguauguguga

SEQ ID NO: 1698793 - RNA, 22 nt, Human
cuucucagaaggcaaaugacuu

SEQ ID NO: 1698794 - RNA, 16 nt, Human
cuucucagaaggcaaa

SEQ ID NO: 1698795 - RNA, 20 nt, Human
cuucggccuccauccugagg

SEQ ID NO: 1698796 - RNA, 17 nt, Human
cuucagcaaaaauauuu

SEQ ID NO: 1698797 - RNA, 17 nt, Human
cuucaaauccuugaaga

SEQ ID NO: 1698798 - RNA, 23 nt, Human
cuucagcaaaaauauuuuaugau

SEQ ID NO: 1698799 - RNA, 20 nt, Human
cuucagcaaaaauauuuuau

SEQ ID NO: 1698800 - RNA, 15 nt, Human
cuucagccugaaaga

SEQ ID NO: 1698801 - RNA, 16 nt, Human
cuucagcgguuuauau

SEQ ID NO: 1698802 - RNA, 17 nt, Human
cuucauuaauaauaaau

SEQ ID NO: 1698803 - RNA, 16 nt, Human
cuucauuaauaauaaa

SEQ ID NO: 1698804 - RNA, 15 nt, Human
cuguuuuauaauuuu

SEQ ID NO: 1698805 - RNA, 14 nt, Human
cuguuuuauaauuu

SEQ ID NO: 1698806 - RNA, 12 nt, Human
cuuaaaaauggu

SEQ ID NO: 1698807 - RNA, 23 nt, Human
cuuaagaagacugcauuauauuu

SEQ ID NO: 1698808 - RNA, 17 nt, Human
cuuuaaaaaaaaaauug

SEQ ID NO: 1698809 - RNA, 14 nt, Human
cuuucauauuuuag

SEQ ID NO: 1698810 - RNA, 13 nt, Human
cuuuccacagaag

SEQ ID NO: 1698811 - RNA, 21 nt, Human
cuuuauuuucuauaauuuaaa

SEQ ID NO: 1698812 - RNA, 19 nt, Human
cuuguaaaggaauuuaaaa

SEQ ID NO: 1698813 - RNA, 14 nt, Human
cuuuucugauagag

SEQ ID NO: 1698814 - RNA, 11 nt, Human
cuuuucugaua

SEQ ID NO: 1698815 - RNA, 22 nt, Human
gaaaacaauaacgauaaaagac

SEQ ID NO: 1698816 - RNA, 12 nt, Human
gaaaauaucacu

SEQ ID NO: 1698817 - RNA, 19 nt, Human
gaaaaucuuauaauuuaaa

SEQ ID NO: 1698818 - RNA, 19 nt, Human
gaaaauaacgauaaaagac

SEQ ID NO: 1698819 - RNA, 20 nt, Human
gaaaaucuuauaauuuaaaa

SEQ ID NO: 1698820 - RNA, 14 nt, Human
gaaggcaaaugacu

SEQ ID NO: 1698821 - RNA, 20 nt, Human
gaagguucuggugugaacua

SEQ ID NO: 1698822 - RNA, 16 nt, Human
gaagguucugguguga

SEQ ID NO: 1698823 - RNA, 16 nt, Human
gaaggcaaaugacuuu

SEQ ID NO: 1698824 - RNA, 15 nt, Human
gaaggcaaaugacuu

SEQ ID NO: 1698825 - RNA, 21 nt, Human
gaagccuuggggcugaugcag

SEQ ID NO: 1698826 - RNA, 17 nt, Human
gaagacugcauuauauu

SEQ ID NO: 1698827 - RNA, 20 nt, Human
gaauaauccuaaacauauga

SEQ ID NO: 1698828 - RNA, 14 nt, Human
gaauacuuuauaaa

SEQ ID NO: 1698829 - RNA, 16 nt, Human
gaacgcguugaaauug

SEQ ID NO: 1698830 - RNA, 15 nt, Human
gaacgcguugaaauu

SEQ ID NO: 1698831 - RNA, 22 nt, Human
gaacuagaguuuagcuggaaaa

SEQ ID NO: 1698832 - RNA, 21 nt, Human
gaacuagaguuuagcuggaaa

SEQ ID NO: 1698833 - RNA, 22 nt, Human
gaacuuccagauccuggaaauc

SEQ ID NO: 1698834 - RNA, 14 nt, Human
gaacucccuuucaa

SEQ ID NO: 1698835 - RNA, 15 nt, Human
gaacucccuuucaac

SEQ ID NO: 1698836 - RNA, 21 nt, Human
gaacuuguaaaggaauuuaaa

SEQ ID NO: 1698837 - RNA, 21 nt, Human
gaagaagcaccaaucaugaau

SEQ ID NO: 1698838 - RNA, 19 nt, Human
gaaauacuguuugagguuu

SEQ ID NO: 1698839 - RNA, 15 nt, Human
gaaauacuguuugag

SEQ ID NO: 1698840 - RNA, 16 nt, Human
gaaauauuauguuaaa

SEQ ID NO: 1698841 - RNA, 13 nt, Human
gaaauauuauguu

SEQ ID NO: 1698842 - RNA, 21 nt, Human
cugauuugacauagucuggcu

SEQ ID NO: 1698843 - RNA, 23 nt, Human
cugauuugacauagucuggcugu

SEQ ID NO: 1698844 - RNA, 22 nt, Human
cugauuugacauagucuggcug

SEQ ID NO: 1698845 - RNA, 18 nt, Human
cugaguuugugcuggugu

SEQ ID NO: 1698846 - RNA, 13 nt, Human
cugaguuugugcu

SEQ ID NO: 1698847 - RNA, 21 nt, Human
cugaggcuccacuuggucugu

SEQ ID NO: 1698848 - RNA, 15 nt, Human
cugaggcuccacuug

SEQ ID NO: 1698849 - RNA, 23 nt, Human
cucuuugucuacaccauuaugug

SEQ ID NO: 1698850 - RNA, 14 nt, Human
cugaagaagauggu

SEQ ID NO: 1698851 - RNA, 23 nt, Human
cucugaagugaaacugcuuguuu

SEQ ID NO: 1698852 - RNA, 19 nt, Human
cucugaagugaaacugcuu

SEQ ID NO: 1698853 - RNA, 22 nt, Human
cucuggccuucggccuccaucc

SEQ ID NO: 1698854 - RNA, 21 nt, Human
cucuggccuucggccuccauc

SEQ ID NO: 1698855 - RNA, 19 nt, Human
cucuuaagaagacugcauu

SEQ ID NO: 1698856 - RNA, 20 nt, Human
cuccaauuaaggauuuuaug

SEQ ID NO: 1698857 - RNA, 17 nt, Human
cuccaauuaaggauuuu

SEQ ID NO: 1698858 - RNA, 22 nt, Human
cuccaauuaaggauuuuaugcu

SEQ ID NO: 1698859 - RNA, 21 nt, Human
cucauuuccaagcaaguauua

SEQ ID NO: 1698860 - RNA, 21 nt, Human
cuccaaacugacucuuaagaa

SEQ ID NO: 1698861 - RNA, 12 nt, Human
cuccauccugag

SEQ ID NO: 1698862 - RNA, 12 nt, Human
cucccuuucaac

SEQ ID NO: 1698863 - RNA, 13 nt, Human
cuccauccugagg

SEQ ID NO: 1698864 - RNA, 14 nt, Human
cuccauccugaggc

SEQ ID NO: 1698865 - RNA, 18 nt, Human
cuaugcugaguuugugcu

SEQ ID NO: 1698866 - RNA, 15 nt, Human
cuauauuuucauucu

SEQ ID NO: 1698867 - RNA, 19 nt, Human
cuauauuuucauucuccua

SEQ ID NO: 1698868 - RNA, 18 nt, Human
cuauauuguuugcuaagc

SEQ ID NO: 1698869 - RNA, 21 nt, Human
cuagugagcagucaggaaaga

SEQ ID NO: 1698870 - RNA, 20 nt, Human
cuagugaaacucguuaauuu

SEQ ID NO: 1698871 - RNA, 16 nt, Human
cuaguaauuggaaagg

SEQ ID NO: 1698872 - RNA, 13 nt, Human
cucagauuuuauu

SEQ ID NO: 1698873 - RNA, 18 nt, Human
cucagauuuuauuaugua

SEQ ID NO: 1698874 - RNA, 17 nt, Human
cucagauuuuauuaugu

SEQ ID NO: 1698875 - RNA, 15 nt, Human
cucagauuuuauuau

SEQ ID NO: 1698876 - RNA, 18 nt, Human
cuauuucuauauuuucau

SEQ ID NO: 1698877 - RNA, 16 nt, Human
cuauuucuauauuuuc

SEQ ID NO: 1698878 - RNA, 14 nt, Human
cuauuucuauauuu

SEQ ID NO: 1698879 - RNA, 22 nt, Human
gagccugcacggugaauggcuu

SEQ ID NO: 1698880 - RNA, 17 nt, Human
gagccugcacggugaau

SEQ ID NO: 1698881 - RNA, 23 nt, Human
gagccugcacggugaauggcuuu

SEQ ID NO: 1698882 - RNA, 12 nt, Human
gagcuacaaaug

SEQ ID NO: 1698883 - RNA, 13 nt, Human
gagcuacaaaugc

SEQ ID NO: 1698884 - RNA, 14 nt, Human
gagcuacaaaugca

SEQ ID NO: 1698885 - RNA, 14 nt, Human
gaggaauucuguau

SEQ ID NO: 1698886 - RNA, 17 nt, Human
gaggaauucuguauaga

SEQ ID NO: 1698887 - RNA, 16 nt, Human
gaggaauucuguauag

SEQ ID NO: 1698888 - RNA, 14 nt, Human
gauagaggaagccu

SEQ ID NO: 1698889 - RNA, 22 nt, Human
gauagaggaagccugauuaaag

SEQ ID NO: 1698890 - RNA, 21 nt, Human
gauagaggaagccugauuaaa

SEQ ID NO: 1698891 - RNA, 15 nt, Human
gauagaggaagccug

SEQ ID NO: 1698892 - RNA, 19 nt, Human
gagugaacaaauuuacaga

SEQ ID NO: 1698893 - RNA, 23 nt, Human
gagugaacaaauuuacagagaca

SEQ ID NO: 1698894 - RNA, 22 nt, Human
gagugaacaaauuuacagagac

SEQ ID NO: 1698895 - RNA, 21 nt, Human
gaguugaaaaucuuauaauuu

SEQ ID NO: 1698896 - RNA, 18 nt, Human
gaugcaguucugaagaag

SEQ ID NO: 1698897 - RNA, 13 nt, Human
gauugugccccug

SEQ ID NO: 1698898 - RNA, 19 nt, Human
gauguugaaaaaguucugc

SEQ ID NO: 1698899 - RNA, 16 nt, Human
gcagauuauucacuga

SEQ ID NO: 1698900 - RNA, 13 nt, Human
gcagauuauucac

SEQ ID NO: 1698901 - RNA, 18 nt, Human
gcagagguugcagugagc

SEQ ID NO: 1698902 - RNA, 23 nt, Human
gcagagguugcagugagccgaga

SEQ ID NO: 1698903 - RNA, 18 nt, Human
gcacagccucuuagaugc

SEQ ID NO: 1698904 - RNA, 15 nt, Human
gcacagccucuuaga

SEQ ID NO: 1698905 - RNA, 19 nt, Human
gccagauuuuccugaaaac

SEQ ID NO: 1698906 - RNA, 23 nt, Human
gccaugggacagggaggacgcuc

SEQ ID NO: 1698907 - RNA, 22 nt, Human
gccaugggacagggaggacgcu

SEQ ID NO: 1698908 - RNA, 21 nt, Human
gcugguguaugugugaaguga

SEQ ID NO: 1698909 - RNA, 22 nt, Human
gcuuuaaacauugguucuugua

SEQ ID NO: 1698910 - RNA, 23 nt, Human
gcuuguuuccuagcacacacuuu

SEQ ID NO: 1698911 - RNA, 15 nt, Human
gcuuguuuccuagca

SEQ ID NO: 1698912 - RNA, 20 nt, Human
gcuuuguauagaaccucuuu

SEQ ID NO: 1698913 - RNA, 14 nt, Human
gcuuuguauagaac

SEQ ID NO: 1698914 - RNA, 13 nt, Human
gcuuuguauagaa

SEQ ID NO: 1698915 - RNA, 12 nt, Human
gcuuuguauaga

SEQ ID NO: 1698916 - RNA, 19 nt, Human
gcuucuguuuuauaauuuu

SEQ ID NO: 1698917 - RNA, 23 nt, Human
gcuggaaaaguauguuagugcaa

SEQ ID NO: 1698918 - RNA, 21 nt, Human
gcuggaaaaguauguuagugc

SEQ ID NO: 1698919 - RNA, 21 nt, Human
gcugauuaaaccaaggcuaga

SEQ ID NO: 1698920 - RNA, 20 nt, Human
gccugagcgacagugagacu

SEQ ID NO: 1698921 - RNA, 17 nt, Human
gccugagcgacagugag

SEQ ID NO: 1698922 - RNA, 13 nt, Human
gcuagauguaugu

SEQ ID NO: 1698923 - RNA, 16 nt, Human
gcuagauguauguacu

SEQ ID NO: 1698924 - RNA, 14 nt, Human
gcuagauguaugua

SEQ ID NO: 1698925 - RNA, 15 nt, Human
ggcuuuguauagaac

SEQ ID NO: 1698926 - RNA, 14 nt, Human
gggaauugaggaca

SEQ ID NO: 1698927 - RNA, 21 nt, Human
gggacugaggggaggggagca

SEQ ID NO: 1698928 - RNA, 11 nt, Human
gggaggcagag

SEQ ID NO: 1698929 - RNA, 20 nt, Human
gggaggacgcucucuggccu

SEQ ID NO: 1698930 - RNA, 17 nt, Human
gggaggacgcucucugg

SEQ ID NO: 1698931 - RNA, 20 nt, Human
ggcuaguaucaaaagaaaga

SEQ ID NO: 1698932 - RNA, 16 nt, Human
ggcuccacuuggucug

SEQ ID NO: 1698933 - RNA, 13 nt, Human
ggauucuuaaagu

SEQ ID NO: 1698934 - RNA, 21 nt, Human
ggcagagguugcagugagccg

SEQ ID NO: 1698935 - RNA, 20 nt, Human
ggacauuugcucauggaauu

SEQ ID NO: 1698936 - RNA, 17 nt, Human
ggacauuugcucaugga

SEQ ID NO: 1698937 - RNA, 19 nt, Human
ggacgcucucuggccuucg

SEQ ID NO: 1698938 - RNA, 16 nt, Human
ggacgcucucuggccu

SEQ ID NO: 1698939 - RNA, 14 nt, Human
ggagaagaacugaa

SEQ ID NO: 1698940 - RNA, 11 nt, Human
ggagaagaacu

SEQ ID NO: 1698941 - RNA, 19 nt, Human
ggaggggagcaugggaagu

SEQ ID NO: 1698942 - RNA, 16 nt, Human
ggaggacgcucucugg

SEQ ID NO: 1698943 - RNA, 14 nt, Human
ucaucaguauugaa

SEQ ID NO: 1698944 - RNA, 16 nt, Human
ucauaccuacauguau

SEQ ID NO: 1698945 - RNA, 15 nt, Human
ucauaccuacaugua

SEQ ID NO: 1698946 - RNA, 23 nt, Human
ucauuauuuuauuaugaaacuug

SEQ ID NO: 1698947 - RNA, 16 nt, Human
ucauuuccaagcaagu

SEQ ID NO: 1698948 - RNA, 13 nt, Human
ucauuuccaagca

SEQ ID NO: 1698949 - RNA, 19 nt, Human
uccacagaagcuccaggua

SEQ ID NO: 1698950 - RNA, 16 nt, Human
uccacuuggucuguga

SEQ ID NO: 1698951 - RNA, 15 nt, Human
uccacuuggucugug

SEQ ID NO: 1698952 - RNA, 17 nt, Human
uccacuuggucugugag

SEQ ID NO: 1698953 - RNA, 17 nt, Human
ucaggcuagauguaugu

SEQ ID NO: 1698954 - RNA, 13 nt, Human
ucaggcuagaugu

SEQ ID NO: 1698955 - RNA, 13 nt, Human
uauuaagaaugaa

SEQ ID NO: 1698956 - RNA, 16 nt, Human
uauuaagaaugaaaua

SEQ ID NO: 1698957 - RNA, 12 nt, Human
uauguaaauccc

SEQ ID NO: 1698958 - RNA, 23 nt, Human
uauguaaaucccauuauucaaag

SEQ ID NO: 1698959 - RNA, 21 nt, Human
uauguaaaucccauuauucaa

SEQ ID NO: 1698960 - RNA, 20 nt, Human
uauguaaaucccauuauuca

SEQ ID NO: 1698961 - RNA, 19 nt, Human
uauguaaaucccauuauuc

SEQ ID NO: 1698962 - RNA, 15 nt, Human
uauguaaaucccauu

SEQ ID NO: 1698963 - RNA, 17 nt, Human
uauguacuucaugcugu

SEQ ID NO: 1698964 - RNA, 13 nt, Human
uauguacuucaug

SEQ ID NO: 1698965 - RNA, 14 nt, Human
uauuacaguauaau

SEQ ID NO: 1698966 - RNA, 13 nt, Human
uauuacaguauaa

SEQ ID NO: 1698967 - RNA, 12 nt, Human
uauuacaguaua

SEQ ID NO: 1698968 - RNA, 23 nt, Human
ucacaccccagacgaugucuuca

SEQ ID NO: 1698969 - RNA, 18 nt, Human
ucacaagacccaaaaggc

SEQ ID NO: 1698970 - RNA, 17 nt, Human
ucacaagacccaaaagg

SEQ ID NO: 1698971 - RNA, 13 nt, Human
ucacaagacccaa

SEQ ID NO: 1698972 - RNA, 16 nt, Human
ucacagucacauucca

SEQ ID NO: 1698973 - RNA, 14 nt, Human
ucaccaaggcugau

SEQ ID NO: 1698974 - RNA, 21 nt, Human
ucaauaaaauccauacauuug

SEQ ID NO: 1698975 - RNA, 15 nt, Human
uauuuucauucuccu

SEQ ID NO: 1698976 - RNA, 17 nt, Human
uauuuauaaucacuuuu

SEQ ID NO: 1698977 - RNA, 13 nt, Human
uauuuuauuauga

SEQ ID NO: 1698978 - RNA, 23 nt, Human
uauuuuauuaugaaacuugugua

SEQ ID NO: 1698979 - RNA, 18 nt, Human
uauuuuauuaugaaacuu

SEQ ID NO: 1698980 - RNA, 14 nt, Human
uauuuuuuuucugu

SEQ ID NO: 1698981 - RNA, 14 nt, Human
ucaaauugugugaa

SEQ ID NO: 1698982 - RNA, 15 nt, Human
ucaaauccuugaaga

SEQ ID NO: 1698983 - RNA, 21 nt, Human
ucuucauaccuacauguauuu

SEQ ID NO: 1698984 - RNA, 18 nt, Human
ucuucauaccuacaugua

SEQ ID NO: 1698985 - RNA, 23 nt, Human
ucuucagcaaaaauauuuuauga

SEQ ID NO: 1698986 - RNA, 22 nt, Human
ucuucagcaaaaauauuuuaug

SEQ ID NO: 1698987 - RNA, 21 nt, Human
ucuucagcaaaaauauuuuau

SEQ ID NO: 1698988 - RNA, 12 nt, Human
ucuuaaaguuga

SEQ ID NO: 1698989 - RNA, 14 nt, Human
ucuuaaaguugaau

SEQ ID NO: 1698990 - RNA, 13 nt, Human
ucuuaaaguugaa

SEQ ID NO: 1698991 - RNA, 19 nt, Human
ucuuaaauaauaaagauca

SEQ ID NO: 1698992 - RNA, 15 nt, Human
ucuuaaauaauaaag

SEQ ID NO: 1698993 - RNA, 22 nt, Human
ucuuaaaguugaauuuauuggc

SEQ ID NO: 1698994 - RNA, 21 nt, Human
ucuuaaaguugaauuuauugg

SEQ ID NO: 1698995 - RNA, 20 nt, Human
ucuuaaaguugaauuuauug

SEQ ID NO: 1698996 - RNA, 19 nt, Human
ucuuaaaguugaauuuauu

SEQ ID NO: 1698997 - RNA, 16 nt, Human
ucuuaaaguugaauuu

SEQ ID NO: 1698998 - RNA, 18 nt, Human
ucuuaagaagacugcauu

SEQ ID NO: 1698999 - RNA, 12 nt, Human
ucuuaagaagac

SEQ ID NO: 1699000 - RNA, 23 nt, Human
ucuggccuucggccuccauccug

SEQ ID NO: 1699001 - RNA, 18 nt, Human
ucuggccuucggccucca

SEQ ID NO: 1699002 - RNA, 17 nt, Human
ucuggccuucggccucc

SEQ ID NO: 1699003 - RNA, 14 nt, Human
ucugaggaauucug

SEQ ID NO: 1699004 - RNA, 19 nt, Human
ucugaggaauucuguauag

SEQ ID NO: 1699005 - RNA, 18 nt, Human
ucugaggaauucuguaua

SEQ ID NO: 1699006 - RNA, 17 nt, Human
ucugaggaauucuguau

SEQ ID NO: 1699007 - RNA, 16 nt, Human
ucugaggaauucugua

SEQ ID NO: 1699008 - RNA, 15 nt, Human
ucugaggaauucugu

SEQ ID NO: 1699009 - RNA, 15 nt, Human
ucugacaucucugca

SEQ ID NO: 1699010 - RNA, 14 nt, Human
ucugacaucucugc

SEQ ID NO: 1699011 - RNA, 12 nt, Human
ucugacaucucu

SEQ ID NO: 1699012 - RNA, 16 nt, Human
ucucugaagugaaacu

SEQ ID NO: 1699013 - RNA, 16 nt, Human
ucuaugcugaguuugu

SEQ ID NO: 1699014 - RNA, 20 nt, Human
ucuaugcugaguuugugcug

SEQ ID NO: 1699015 - RNA, 15 nt, Human
ucucaacuccaaacu

SEQ ID NO: 1699016 - RNA, 17 nt, Human
ucuaugaaauauuaugu

SEQ ID NO: 1699017 - RNA, 14 nt, Human
ucuaugaaauauua

SEQ ID NO: 1699018 - RNA, 13 nt, Human
ucuaugaaauauu

SEQ ID NO: 1699019 - RNA, 19 nt, Human
ucuagugagcagucaggaa

SEQ ID NO: 1699020 - RNA, 22 nt, Human
ucuagugagcagucaggaaaga

SEQ ID NO: 1699021 - RNA, 22 nt, Human
ucgugggacagucaccucaugg

SEQ ID NO: 1699022 - RNA, 21 nt, Human
ucguggaacaguuaccucugc

SEQ ID NO: 1699023 - RNA, 18 nt, Human
ucggccuccauccugagg

SEQ ID NO: 1699024 - RNA, 13 nt, Human
ucguuaauuugua

SEQ ID NO: 1699025 - RNA, 20 nt, Human
uccugccuaagugcagcccc

SEQ ID NO: 1699026 - RNA, 11 nt, Human
ucccuggccuu

SEQ ID NO: 1699027 - RNA, 15 nt, Human
ucccuggccuuucau

SEQ ID NO: 1699028 - RNA, 16 nt, Human
ucccuugaugaagaag

SEQ ID NO: 1699029 - RNA, 15 nt, Human
ucccuugaugaagaa

SEQ ID NO: 1699030 - RNA, 21 nt, Human
uguacaaaguauuaagcauau

SEQ ID NO: 1699031 - RNA, 15 nt, Human
uguacaaaguauuaa

SEQ ID NO: 1699032 - RNA, 20 nt, Human
uguacaaaguauuaagcaua

SEQ ID NO: 1699033 - RNA, 19 nt, Human
uguacaaaguauuaagcau

SEQ ID NO: 1699034 - RNA, 18 nt, Human
uguacaaaguauuaagca

SEQ ID NO: 1699035 - RNA, 17 nt, Human
uguacaaaguauuaagc

SEQ ID NO: 1699036 - RNA, 18 nt, Human
ugguugcuuuaauaucau

SEQ ID NO: 1699037 - RNA, 14 nt, Human
ugguugcuuuaaua

SEQ ID NO: 1699038 - RNA, 12 nt, Human
uguaaaauggug

SEQ ID NO: 1699039 - RNA, 11 nt, Human
uguaaaauggu

SEQ ID NO: 1699040 - RNA, 15 nt, Human
uggugacuuuggaua

SEQ ID NO: 1699041 - RNA, 14 nt, Human
uggguagacacaca

SEQ ID NO: 1699042 - RNA, 23 nt, Human
uggugacuuuggauaauaaggaa

SEQ ID NO: 1699043 - RNA, 19 nt, Human
uggugacuuuggauaauaa

SEQ ID NO: 1699044 - RNA, 18 nt, Human
uggugacuuuggauaaua

SEQ ID NO: 1699045 - RNA, 16 nt, Human
uggugacuuuggauaa

SEQ ID NO: 1699046 - RNA, 18 nt, Human
ugguucuuguauuaagaa

SEQ ID NO: 1699047 - RNA, 14 nt, Human
ugguucuuguauua

SEQ ID NO: 1699048 - RNA, 19 nt, Human
ugguucuuguauuaagaau

SEQ ID NO: 1699049 - RNA, 20 nt, Human
ugguucccuugaugaagaag

SEQ ID NO: 1699050 - RNA, 17 nt, Human
ugguucccuugaugaag

SEQ ID NO: 1699051 - RNA, 16 nt, Human
ugguucccuugaugaa

SEQ ID NO: 1699052 - RNA, 23 nt, Human
uguauagauuagagaguguugaa

SEQ ID NO: 1699053 - RNA, 21 nt, Human
uguauagauuagaauucugua

SEQ ID NO: 1699054 - RNA, 15 nt, Human
uguauagauuagaau

SEQ ID NO: 1699055 - RNA, 23 nt, Human
uguauagaaccucuuugucuaca

SEQ ID NO: 1699056 - RNA, 13 nt, Human
uguauaaaauaau

SEQ ID NO: 1699057 - RNA, 14 nt, Human
uguauaaaauaauu

SEQ ID NO: 1699058 - RNA, 19 nt, Human
uguaguguuggagaagaac

SEQ ID NO: 1699059 - RNA, 21 nt, Human
uguaguguuggagaagaacug

SEQ ID NO: 1699060 - RNA, 20 nt, Human
uguaguguuggagaagaacu

SEQ ID NO: 1699061 - RNA, 15 nt, Human
uguauuuguuugcau

SEQ ID NO: 1699062 - RNA, 19 nt, Human
uguauuuuaaaagaaugau

SEQ ID NO: 1699063 - RNA, 18 nt, Human
uguauuuuaaaagaauga

SEQ ID NO: 1699064 - RNA, 22 nt, Human
ugucucagauuuuauuauguaa

SEQ ID NO: 1699065 - RNA, 20 nt, Human
ugucucagauuuuauuaugu

SEQ ID NO: 1699066 - RNA, 16 nt, Human
ugucucagauuuuauu

SEQ ID NO: 1699067 - RNA, 18 nt, Human
ugucuacaccauuaugug

SEQ ID NO: 1699068 - RNA, 22 nt, Human
ugucuacacuaagagagaauga

SEQ ID NO: 1699069 - RNA, 17 nt, Human
ugucuacaccauuaugu

SEQ ID NO: 1699070 - RNA, 17 nt, Human
ugucuacacuaagagag

SEQ ID NO: 1699071 - RNA, 17 nt, Human
uggaacgcguugaaauu

SEQ ID NO: 1699072 - RNA, 16 nt, Human
uggaacgcguugaaau

SEQ ID NO: 1699073 - RNA, 15 nt, Human
uggaacgcguugaaa

SEQ ID NO: 1699074 - RNA, 14 nt, Human
uggaacgcguugaa

SEQ ID NO: 1699075 - RNA, 22 nt, Human
uggaaaaguauguuagugcaaa

SEQ ID NO: 1699076 - RNA, 22 nt, Human
ugcuucuguuuuauaauuuugu

SEQ ID NO: 1699077 - RNA, 17 nt, Human
ugcuucuguuuuauaau

SEQ ID NO: 1699078 - RNA, 15 nt, Human
uggaccaaaaaccag

SEQ ID NO: 1699079 - RNA, 13 nt, Human
uggcuuuucugau

SEQ ID NO: 1699080 - RNA, 22 nt, Human
uggccuucggccuccauccuga

SEQ ID NO: 1699081 - RNA, 23 nt, Human
uggccuucggccuccauccugag

SEQ ID NO: 1699082 - RNA, 12 nt, Human
ugggauaaaugc

SEQ ID NO: 1699083 - RNA, 14 nt, Human
ugggauaaaugcca

SEQ ID NO: 1699084 - RNA, 13 nt, Human
ugggauaaaugcc

SEQ ID NO: 1699085 - RNA, 14 nt, Human
ugggacagggagga

SEQ ID NO: 1699086 - RNA, 23 nt, Human
ugggguuaucugaagucagaucu

SEQ ID NO: 1699087 - RNA, 21 nt, Human
ugaugccaaguuguuugagaa

SEQ ID NO: 1699088 - RNA, 15 nt, Human
ugaugccaaguuguu

SEQ ID NO: 1699089 - RNA, 19 nt, Human
ugaugccaaguuguuugag

SEQ ID NO: 1699090 - RNA, 24 nt, Human
ugauaguuguaccgcaaugugacu

SEQ ID NO: 1699091 - RNA, 17 nt, Human
ugacugauucuucagca

SEQ ID NO: 1699092 - RNA, 16 nt, Human
ugacugauucuucagc

SEQ ID NO: 1699093 - RNA, 15 nt, Human
ugacugauucuucag

SEQ ID NO: 1699094 - RNA, 14 nt, Human
ugacugauucuuca

SEQ ID NO: 1699095 - RNA, 13 nt, Human
ugacugauucuuc

SEQ ID NO: 1699096 - RNA, 12 nt, Human
ugacucuuaaga

SEQ ID NO: 1699097 - RNA, 13 nt, Human
ugagaaauuaagu

SEQ ID NO: 1699098 - RNA, 14 nt, Human
ugagaaauuaagua

SEQ ID NO: 1699099 - RNA, 16 nt, Human
ugagacagcucugcau

SEQ ID NO: 1699100 - RNA, 14 nt, Human
ugagacagcucugc

SEQ ID NO: 1699101 - RNA, 16 nt, Human
ugagcaucacaguuuu

SEQ ID NO: 1699102 - RNA, 17 nt, Human
ugagcaucacaguuuug

SEQ ID NO: 1699103 - RNA, 13 nt, Human
ugagccccaaaag

SEQ ID NO: 1699104 - RNA, 20 nt, Human
ugagaugcuagaacucccuu

SEQ ID NO: 1699105 - RNA, 16 nt, Human
ugagaugcuagaacuc

SEQ ID NO: 1699106 - RNA, 14 nt, Human
ugagaugcuagaac

SEQ ID NO: 1699107 - RNA, 20 nt, Human
ugagcagucaggaaagagaa

SEQ ID NO: 1699108 - RNA, 15 nt, Human
ugagcagucaggaaa

SEQ ID NO: 1699109 - RNA, 17 nt, Human
ugagcagucaggaaaga

SEQ ID NO: 1699110 - RNA, 22 nt, Human
ugcaaugaagucucugaaguga

SEQ ID NO: 1699111 - RNA, 18 nt, Human
ugcaaugaagucucugaa

SEQ ID NO: 1699112 - RNA, 15 nt, Human
ugcaaugaagucucu

SEQ ID NO: 1699113 - RNA, 17 nt, Human
ugcccugcuuucagaua

SEQ ID NO: 1699114 - RNA, 16 nt, Human
ugcccugcuuucagau

SEQ ID NO: 1699115 - RNA, 12 nt, Human
ugcccugcuuuc

SEQ ID NO: 1699116 - RNA, 21 nt, Human
ugccuaaggacuucuuuaauu

SEQ ID NO: 1699117 - RNA, 13 nt, Human
ugccuaaggacuu

SEQ ID NO: 1699118 - RNA, 12 nt, Human
ugccuaaggacu

SEQ ID NO: 1699119 - RNA, 20 nt, Human
ugccuaaggacuucuuuaau

SEQ ID NO: 1699120 - RNA, 16 nt, Human
ugccuaaggacuucuu

SEQ ID NO: 1699121 - RNA, 15 nt, Human
ugccuaaggacuucu

SEQ ID NO: 1699122 - RNA, 14 nt, Human
ugccuaaggacuuc

SEQ ID NO: 1699123 - RNA, 14 nt, Human
ugcauuauauuuau

SEQ ID NO: 1699124 - RNA, 19 nt, Human
ugcagauaaacaguaguga

SEQ ID NO: 1699125 - RNA, 13 nt, Human
uuuuauauuuacu

SEQ ID NO: 1699126 - RNA, 18 nt, Human
uuuuauauuugaaauauu

SEQ ID NO: 1699127 - RNA, 13 nt, Human
uuuuauauuugaa

SEQ ID NO: 1699128 - RNA, 21 nt, Human
uuuuaugacuucauuaauaau

SEQ ID NO: 1699129 - RNA, 20 nt, Human
uuuuaugacuucauuaauaa

SEQ ID NO: 1699130 - RNA, 21 nt, Human
uuuuauaauuuugugaagcaa

SEQ ID NO: 1699131 - RNA, 23 nt, Human
uuuuauaauuuugugaagcaaaa

SEQ ID NO: 1699132 - RNA, 21 nt, Human
uuuuaaaguaacccuacaaaa

SEQ ID NO: 1699133 - RNA, 20 nt, Human
uuuccacauaaggaaacugg

SEQ ID NO: 1699134 - RNA, 23 nt, Human
uuuccacauaaggaaacuggguu

SEQ ID NO: 1699135 - RNA, 15 nt, Human
uuuccacagaagcuc

SEQ ID NO: 1699136 - RNA, 22 nt, Human
uuuggaccaaaaaccaguauug

SEQ ID NO: 1699137 - RNA, 21 nt, Human
uuuggaccaaaaaccaguauu

SEQ ID NO: 1699138 - RNA, 18 nt, Human
uuuggaccaaaaaccagu

SEQ ID NO: 1699139 - RNA, 15 nt, Human
uuuggaaaucuuuaa

SEQ ID NO: 1699140 - RNA, 24 nt, Human
uuuggaccaaaaaccaguauugua

SEQ ID NO: 1699141 - RNA, 17 nt, Human
uuuguauaaaauaauuu

SEQ ID NO: 1699142 - RNA, 19 nt, Human
uuuguauaaaauaauuuuu

SEQ ID NO: 1699143 - RNA, 18 nt, Human
uuuguauaaaauaauuuu

SEQ ID NO: 1699144 - RNA, 21 nt, Human
uuuuuccacauaaggaaacug

SEQ ID NO: 1699145 - RNA, 22 nt, Human
uuuuucauuauuuuauuaugaa

SEQ ID NO: 1699146 - RNA, 13 nt, Human
uuuuucauuauuu

SEQ ID NO: 1699147 - RNA, 23 nt, Human
uugugcgcuaaacuuuucugaua

SEQ ID NO: 1699148 - RNA, 22 nt, Human
uugugcgcuaaacuuuucugau

SEQ ID NO: 1699149 - RNA, 19 nt, Human
uugugcugggguuaucuga

SEQ ID NO: 1699150 - RNA, 12 nt, Human
uugugccccugc

SEQ ID NO: 1699151 - RNA, 21 nt, Human
uuguuugagaaauuaaguauc

SEQ ID NO: 1699152 - RNA, 15 nt, Human
uuguuugagaaauua

SEQ ID NO: 1699153 - RNA, 17 nt, Human
uuguuguuuguuuaguc

SEQ ID NO: 1699154 - RNA, 17 nt, Human
uuguuagaucuaguuca

SEQ ID NO: 1699155 - RNA, 18 nt, Human
uuguguuuugcaagccag

SEQ ID NO: 1699156 - RNA, 14 nt, Human
uuguacucaauuuu

SEQ ID NO: 1699157 - RNA, 15 nt, Human
uuguacucaauuuua

SEQ ID NO: 1699158 - RNA, 18 nt, Human
uuguauuaagaaugaaau

SEQ ID NO: 1699159 - RNA, 13 nt, Human
uuguauuaagaau

SEQ ID NO: 1699160 - RNA, 12 nt, Human
uuguauuaagaa

SEQ ID NO: 1699161 - RNA, 14 nt, Human
uuguauuacaaauc

SEQ ID NO: 1699162 - RNA, 19 nt, Human
uugucuacaccauuaugug

SEQ ID NO: 1699163 - RNA, 20 nt, Human
uugucuacaccauuaugugc

SEQ ID NO: 1699164 - RNA, 15 nt, Human
uugucuagugaaacu

SEQ ID NO: 1699165 - RNA, 13 nt, Human
uugucucagauuu

SEQ ID NO: 1699166 - RNA, 20 nt, Human
uugucucagauuuuauuaug

SEQ ID NO: 1699167 - RNA, 16 nt, Human
uugucucagauuuuau

SEQ ID NO: 1699168 - RNA, 22 nt, Human
uugucucagauuuuauuaugua

SEQ ID NO: 1699169 - RNA, 16 nt, Human
uuggguguauugugcg

SEQ ID NO: 1699170 - RNA, 15 nt, Human
uuggguguauugugc

SEQ ID NO: 1699171 - RNA, 13 nt, Human
uuggguguauugu

SEQ ID NO: 1699172 - RNA, 16 nt, Human
uuggucugugagaugc

SEQ ID NO: 1699173 - RNA, 21 nt, Human
uuguuuggaccaaaaaccagu

SEQ ID NO: 1699174 - RNA, 16 nt, Human
uuuaacaacagcuggu

SEQ ID NO: 1699175 - RNA, 19 nt, Human
uuuaacucuauaauguguu

SEQ ID NO: 1699176 - RNA, 13 nt, Human
uuuaauaauguuu

SEQ ID NO: 1699177 - RNA, 18 nt, Human
uuuaauaauuauaugcua

SEQ ID NO: 1699178 - RNA, 21 nt, Human
uuuaauaauuauaugcuauuu

SEQ ID NO: 1699179 - RNA, 13 nt, Human
uuuaccacuugug

SEQ ID NO: 1699180 - RNA, 14 nt, Human
uuuauuauguaaau

SEQ ID NO: 1699181 - RNA, 17 nt, Human
uuuauuauguaaauccc

SEQ ID NO: 1699182 - RNA, 16 nt, Human
uuuauuauguaaaucc

SEQ ID NO: 1699183 - RNA, 22 nt, Human
uuuauaauuuugugaagcaaaa

SEQ ID NO: 1699184 - RNA, 21 nt, Human
uuucagauacuggauuguacu

SEQ ID NO: 1699185 - RNA, 13 nt, Human
uuucagauacugg

SEQ ID NO: 1699186 - RNA, 21 nt, Human
uuccugcaaugaagucucuga

SEQ ID NO: 1699187 - RNA, 13 nt, Human
uuccugcaaugaa

SEQ ID NO: 1699188 - RNA, 18 nt, Human
uucggugagcuacaaaug

SEQ ID NO: 1699189 - RNA, 21 nt, Human
uucugauagaggaagccugau

SEQ ID NO: 1699190 - RNA, 13 nt, Human
uucugauagagga

SEQ ID NO: 1699191 - RNA, 21 nt, Human
uucuaugaaauauuauguuaa

SEQ ID NO: 1699192 - RNA, 14 nt, Human
uucuaugaaauauu

SEQ ID NO: 1699193 - RNA, 22 nt, Human
uugaauuuauuggcuuuucuga

SEQ ID NO: 1699194 - RNA, 18 nt, Human
uugaauuuauuggcuuuu

SEQ ID NO: 1699195 - RNA, 15 nt, Human
uugaauuuauuggcu

SEQ ID NO: 1699196 - RNA, 21 nt, Human
uugaauuuuguguuagagauu

SEQ ID NO: 1699197 - RNA, 17 nt, Human
uugaauuuuguguuaga

SEQ ID NO: 1699198 - RNA, 17 nt, Human
uugacccacaagaaaug

SEQ ID NO: 1699199 - RNA, 23 nt, Human
uugaugaagaaguugauaugccu

SEQ ID NO: 1699200 - RNA, 14 nt, Human
uugaugaagaaguu

SEQ ID NO: 1699201 - RNA, 13 nt, Human
uugaugaagaagu

SEQ ID NO: 1699202 - RNA, 20 nt, Human
uuauuuuauuaugaaacuug

SEQ ID NO: 1699203 - RNA, 14 nt, Human
uuauuuuauuauga

SEQ ID NO: 1699204 - RNA, 20 nt, Human
uuauuuuaauaauguuucaa

SEQ ID NO: 1699205 - RNA, 16 nt, Human
uuauuuuauuaugaaa

SEQ ID NO: 1699206 - RNA, 15 nt, Human
uuauuuuauuaugaa

SEQ ID NO: 1699207 - RNA, 19 nt, Human
uuauuuuaauaauguuuca

SEQ ID NO: 1699208 - RNA, 20 nt, Human
uucagauacuggauuguacu

SEQ ID NO: 1699209 - RNA, 16 nt, Human
uucagauacuggauug

SEQ ID NO: 1699210 - RNA, 22 nt, Human
uucacaagacccaaaaggcaga

SEQ ID NO: 1699211 - RNA, 18 nt, Human
uuccagauccuggaaauc

SEQ ID NO: 1699212 - RNA, 23 nt, Human
uucaguuauuauauuuacaaaug

SEQ ID NO: 1699213 - RNA, 16 nt, Human
uuauaugcuauuucua

SEQ ID NO: 1699214 - RNA, 18 nt, Human
uuauaugcuauuucuaua

SEQ ID NO: 1699215 - RNA, 23 nt, Human
uuauaucugaggaauucuguaua

SEQ ID NO: 1699216 - RNA, 22 nt, Human
uuauaucugaggaauucuguau

SEQ ID NO: 1699217 - RNA, 14 nt, Human
uuauaucugaggaa

SEQ ID NO: 1699218 - RNA, 21 nt, Human
uuauaucugaggaauucugua

SEQ ID NO: 1699219 - RNA, 20 nt, Human
uuauaucugaggaauucugu

SEQ ID NO: 1699220 - RNA, 18 nt, Human
uuauaauuuugugaagca

SEQ ID NO: 1699221 - RNA, 17 nt, Human
uuauaauuuugugaagc

SEQ ID NO: 1699222 - RNA, 16 nt, Human
uuauaauuuugugaag

SEQ ID NO: 1699223 - RNA, 13 nt, Human
uuauaaucacuuu

SEQ ID NO: 1699224 - RNA, 11 nt, Human
uuauaaucuuu

SEQ ID NO: 1699225 - RNA, 15 nt, Human
uuauaauuuugugaa

SEQ ID NO: 1699226 - RNA, 14 nt, Human
uuauaauuuuguga

SEQ ID NO: 1699227 - RNA, 12 nt, Human
uuauaauuuaaa

SEQ ID NO: 1699228 - RNA, 16 nt, Human
uuauuacaguauaauu

SEQ ID NO: 1699229 - RNA, 15 nt, Human
uuauauuugaaauau

SEQ ID NO: 1699230 - RNA, 13 nt, Human
uuauauuugaaau

SEQ ID NO: 1699231 - RNA, 12 nt, Human
uuauauuugaaa

SEQ ID NO: 1699232 - RNA, 20 nt, Human
uuauauuuauuacuguaaga

SEQ ID NO: 1699233 - RNA, 16 nt, Human
uuauauuuacaaaugg

SEQ ID NO: 1699234 - RNA, 20 nt, Human
cacauugguguuguacucaa

SEQ ID NO: 1699235 - RNA, 15 nt, Human
cacaggaaguagagg

SEQ ID NO: 1699236 - RNA, 20 nt, Human
cacaggaaccacaagacugc

SEQ ID NO: 1699237 - RNA, 19 nt, Human
cacaggaaccacaagacug

SEQ ID NO: 1699238 - RNA, 22 nt, Human
caauuaaggauuuuaugcuuua

SEQ ID NO: 1699239 - RNA, 21 nt, Human
caauuaaggauuuuaugcuuu

SEQ ID NO: 1699240 - RNA, 20 nt, Human
caauuaaggauuuuaugcuu

SEQ ID NO: 1699241 - RNA, 15 nt, Human
caauuaaggauuuua

SEQ ID NO: 1699242 - RNA, 13 nt, Human
caauuaaggauuu

SEQ ID NO: 1699243 - RNA, 22 nt, Human
caaugaaugaaugaauggcuaa

SEQ ID NO: 1699244 - RNA, 13 nt, Human
cacaacuauauug

SEQ ID NO: 1699245 - RNA, 19 nt, Human
caaaguugccuaaauccau

SEQ ID NO: 1699246 - RNA, 21 nt, Human
caaauguucaucaaugaauga

SEQ ID NO: 1699247 - RNA, 15 nt, Human
caaauuuacagagac

SEQ ID NO: 1699248 - RNA, 16 nt, Human
caaauuuacagagaca

SEQ ID NO: 1699249 - RNA, 14 nt, Human
caaauuuacagaga

SEQ ID NO: 1699250 - RNA, 17 nt, Human
caagcacuaaacaaaga

SEQ ID NO: 1699251 - RNA, 15 nt, Human
cacccacccuuuuuu

SEQ ID NO: 1699252 - RNA, 20 nt, Human
aaaaaccaguauuguacaaa

SEQ ID NO: 1699253 - RNA, 18 nt, Human
aaaaaauuggggauucuu

SEQ ID NO: 1699254 - RNA, 14 nt, Human
acuggugacugauu

SEQ ID NO: 1699255 - RNA, 22 nt, Human
acuguaagaaaauaucacuugu

SEQ ID NO: 1699256 - RNA, 13 nt, Human
acuguaagaaaau

SEQ ID NO: 1699257 - RNA, 19 nt, Human
acuguaagaaaauaucacu

SEQ ID NO: 1699258 - RNA, 18 nt, Human
acucugucucaguccaug

SEQ ID NO: 1699259 - RNA, 20 nt, Human
acucugucucaguccaugaa

SEQ ID NO: 1699260 - RNA, 18 nt, Human
acuguuugagguuuuuaa

SEQ ID NO: 1699261 - RNA, 23 nt, Human
acuguuugagguuuuuaagccuu

SEQ ID NO: 1699262 - RNA, 12 nt, Human
acuucagacaua

SEQ ID NO: 1699263 - RNA, 18 nt, Human
acuuguaaaggaauuuaa

SEQ ID NO: 1699264 - RNA, 22 nt, Human
acuuuauuuucuauaauuuaaa

SEQ ID NO: 1699265 - RNA, 16 nt, Human
agaaaaucaggcuggc

SEQ ID NO: 1699266 - RNA, 20 nt, Human
acuaguauuucuaugaaaua

SEQ ID NO: 1699267 - RNA, 17 nt, Human
acucuauguucuaagaa

SEQ ID NO: 1699268 - RNA, 15 nt, Human
acuaagagagaauga

SEQ ID NO: 1699269 - RNA, 13 nt, Human
acuaagagagaau

SEQ ID NO: 1699270 - RNA, 15 nt, Human
aauuuuguuucugua

SEQ ID NO: 1699271 - RNA, 14 nt, Human
aauuuuguuucugu

SEQ ID NO: 1699272 - RNA, 13 nt, Human
acaagaaaugaaa

SEQ ID NO: 1699273 - RNA, 13 nt, Human
aauuuuguuucug

SEQ ID NO: 1699274 - RNA, 13 nt, Human
aauuuugugaagc

SEQ ID NO: 1699275 - RNA, 17 nt, Human
acccacaagaaaugaaa

SEQ ID NO: 1699276 - RNA, 21 nt, Human
acccacaagaaaugaaagcag

SEQ ID NO: 1699277 - RNA, 15 nt, Human
aaaccaugggauaaa

SEQ ID NO: 1699278 - RNA, 20 nt, Human
aaaccaugggauaaaugcca

SEQ ID NO: 1699279 - RNA, 21 nt, Human
aaaaucuacacuccagugaga

SEQ ID NO: 1699280 - RNA, 18 nt, Human
aaaaguucugcagauaaa

SEQ ID NO: 1699281 - RNA, 16 nt, Human
aaaaagaaacauuugg

SEQ ID NO: 1699282 - RNA, 16 nt, Human
aaaaucucaauauuuc

SEQ ID NO: 1699283 - RNA, 10 nt, Human
aaauaaauaa

SEQ ID NO: 1699284 - RNA, 14 nt, Human
aaaggcagaagcaa

SEQ ID NO: 1699285 - RNA, 18 nt, Human
aaaucugugaacuugaaa

SEQ ID NO: 1699286 - RNA, 16 nt, Human
aaaucugugaacuuga

SEQ ID NO: 1699287 - RNA, 15 nt, Human
aaaucugugaacuug

SEQ ID NO: 1699288 - RNA, 20 nt, Human
aaauauuuauuuuaauaaug

SEQ ID NO: 1699289 - RNA, 13 nt, Human
aaauauuuauuuu

SEQ ID NO: 1699290 - RNA, 15 nt, Human
aaauauuuauuuuaa

SEQ ID NO: 1699291 - RNA, 18 nt, Human
aaauagcuagacugguga

SEQ ID NO: 1699292 - RNA, 17 nt, Human
aacggaugauuucuaug

SEQ ID NO: 1699293 - RNA, 16 nt, Human
aacggaugauuucuau

SEQ ID NO: 1699294 - RNA, 15 nt, Human
aacggaugauuucua

SEQ ID NO: 1699295 - RNA, 14 nt, Human
aacggaugauuucu

SEQ ID NO: 1699296 - RNA, 20 nt, Human
aacugacucuuaagaagacu

SEQ ID NO: 1699297 - RNA, 19 nt, Human
aacugacucuuaagaagac

SEQ ID NO: 1699298 - RNA, 18 nt, Human
aacugacucuuaagaaga

SEQ ID NO: 1699299 - RNA, 15 nt, Human
aacugacucuuaaga

SEQ ID NO: 1699300 - RNA, 20 nt, Human
aacuuuaugcuaagugaaau

SEQ ID NO: 1699301 - RNA, 21 nt, Human
aacuuuaugcuaagugaaaua

SEQ ID NO: 1699302 - RNA, 21 nt, Human
aacagcuggugcccugcuuuc

SEQ ID NO: 1699303 - RNA, 20 nt, Human
aacagcuggugcccugcuuu

SEQ ID NO: 1699304 - RNA, 19 nt, Human
aacagcuggugcccugcuu

SEQ ID NO: 1699305 - RNA, 17 nt, Human
aaccuagggugauauua

SEQ ID NO: 1699306 - RNA, 22 nt, Human
aaccacuggaaaguuuaugguu

SEQ ID NO: 1699307 - RNA, 19 nt, Human
aaauugacacuuaaaaaug

SEQ ID NO: 1699308 - RNA, 22 nt, Human
aaauugacacuuaaaaaugguu

SEQ ID NO: 1699309 - RNA, 17 nt, Human
aaaucuuauaauuuaaa

SEQ ID NO: 1699310 - RNA, 18 nt, Human
aacaaauuuacagagaca

SEQ ID NO: 1699311 - RNA, 21 nt, Human
aaggacuucuuuaauuuugga

SEQ ID NO: 1699312 - RNA, 20 nt, Human
aaggacuucuuuaauuuugg

SEQ ID NO: 1699313 - RNA, 15 nt, Human
aaggacuucuuuaau

SEQ ID NO: 1699314 - RNA, 14 nt, Human
aaggacuucuuuaa

SEQ ID NO: 1699315 - RNA, 20 nt, Human
aaggcagcucuaaaugucaa

SEQ ID NO: 1699316 - RNA, 12 nt, Human
aaguugccuaaa

SEQ ID NO: 1699317 - RNA, 14 nt, Human
aagucuguuuuaug

SEQ ID NO: 1699318 - RNA, 13 nt, Human
aagucuguuuuau

SEQ ID NO: 1699319 - RNA, 12 nt, Human
aagucuguuuua

SEQ ID NO: 1699320 - RNA, 18 nt, Human
aaguccaagcauuuagau

SEQ ID NO: 1699321 - RNA, 13 nt, Human
aaugguuaaaaga

SEQ ID NO: 1699322 - RNA, 23 nt, Human
aauguuucaaacauauauaacaa

SEQ ID NO: 1699323 - RNA, 12 nt, Human
aauauuaaagcc

SEQ ID NO: 1699324 - RNA, 19 nt, Human
aaguugccuaaauccauuu

SEQ ID NO: 1699325 - RNA, 18 nt, Human
aaguugccuaaauccauu

SEQ ID NO: 1699326 - RNA, 17 nt, Human
aaguugccuaaauccau

SEQ ID NO: 1699327 - RNA, 16 nt, Human
aaguugccuaaaucca

SEQ ID NO: 1699328 - RNA, 15 nt, Human
aaguugccuaaaucc

SEQ ID NO: 1699329 - RNA, 13 nt, Human
aaugaaauacugu

SEQ ID NO: 1699330 - RNA, 16 nt, Human
aaugaagucucugaag

SEQ ID NO: 1699331 - RNA, 14 nt, Human
aaugaagucucuga

SEQ ID NO: 1699332 - RNA, 23 nt, Human
aaugaagucucugaagugaaacu

SEQ ID NO: 1699333 - RNA, 15 nt, Human
aaugauuaugaauua

SEQ ID NO: 1699334 - RNA, 23 nt, Human
aaugauuaugaauuacauuugua

SEQ ID NO: 1699335 - RNA, 21 nt, Human
aaugauuaugaauuacauuug

SEQ ID NO: 1699336 - RNA, 15 nt, Human
aauccaaugaaauga

SEQ ID NO: 1699337 - RNA, 13 nt, Human
agaguguugaaac

SEQ ID NO: 1699338 - RNA, 21 nt, Human
agacugcauuauauuuauuac

SEQ ID NO: 1699339 - RNA, 17 nt, Human
agagaacuuccagaucc

SEQ ID NO: 1699340 - RNA, 21 nt, Human
agccgggcgugguggugagug

SEQ ID NO: 1699341 - RNA, 17 nt, Human
aggcuagauguauguac

SEQ ID NO: 1699342 - RNA, 16 nt, Human
aggcuagauguaugua

SEQ ID NO: 1699343 - RNA, 15 nt, Human
aggcuagauguaugu

SEQ ID NO: 1699344 - RNA, 21 nt, Human
aggcuagaaccaccugccuau

SEQ ID NO: 1699345 - RNA, 20 nt, Human
agguaaaagcaucacaugaa

SEQ ID NO: 1699346 - RNA, 23 nt, Human
aggaugguucccuugaugaagaa

SEQ ID NO: 1699347 - RNA, 14 nt, Human
auguauuuguuugc

SEQ ID NO: 1699348 - RNA, 21 nt, Human
augguccgugcuaaggacuug

SEQ ID NO: 1699349 - RNA, 20 nt, Human
augguccgugcuaaggacuu

SEQ ID NO: 1699350 - RNA, 19 nt, Human
augguccgugcuaaggacu

SEQ ID NO: 1699351 - RNA, 22 nt, Human
augucuucauaccuacauguau

SEQ ID NO: 1699352 - RNA, 21 nt, Human
augucuucauaccuacaugua

SEQ ID NO: 1699353 - RNA, 13 nt, Human
augugugaaguga

SEQ ID NO: 1699354 - RNA, 17 nt, Human
auguucuaagaagugaa

SEQ ID NO: 1699355 - RNA, 15 nt, Human
auauuuauuuuaaua

SEQ ID NO: 1699356 - RNA, 14 nt, Human
auauuuauuuuaau

SEQ ID NO: 1699357 - RNA, 17 nt, Human
auauuuauuuuaauaau

SEQ ID NO: 1699358 - RNA, 20 nt, Human
auauuuacuaaaauggacug

SEQ ID NO: 1699359 - RNA, 18 nt, Human
auauuuacuaaaauggac

SEQ ID NO: 1699360 - RNA, 13 nt, Human
auauuuauuuuaa

SEQ ID NO: 1699361 - RNA, 23 nt, Human
auaugcuauuucuauauuuucau

SEQ ID NO: 1699362 - RNA, 22 nt, Human
auaugcuauuucuauauuuuca

SEQ ID NO: 1699363 - RNA, 22 nt, Human
auaugcuucuguuuuauaauuu

SEQ ID NO: 1699364 - RNA, 20 nt, Human
auaugcuucuguuuuauaau

SEQ ID NO: 1699365 - RNA, 15 nt, Human
auaugcuauuucuau

SEQ ID NO: 1699366 - RNA, 21 nt, Human
auaugcuauuucuauauuuuc

SEQ ID NO: 1699367 - RNA, 19 nt, Human
auaugcuauuucuauauuu

SEQ ID NO: 1699368 - RNA, 18 nt, Human
auaugcuauuucuauauu

SEQ ID NO: 1699369 - RNA, 16 nt, Human
auaugcuauuucuaua

SEQ ID NO: 1699370 - RNA, 22 nt, Human
auaucaucaguauugaagcauu

SEQ ID NO: 1699371 - RNA, 15 nt, Human
auaucaauuuaaaaa

SEQ ID NO: 1699372 - RNA, 17 nt, Human
auaucaucaguauugaa

SEQ ID NO: 1699373 - RNA, 14 nt, Human
auagucaaauugug

SEQ ID NO: 1699374 - RNA, 15 nt, Human
auagguuuaauaauu

SEQ ID NO: 1699375 - RNA, 17 nt, Human
auaauuaacauguuaaa

SEQ ID NO: 1699376 - RNA, 15 nt, Human
auaauuaacauguua

SEQ ID NO: 1699377 - RNA, 23 nt, Human
auaauguuucaaacauauauaac

SEQ ID NO: 1699378 - RNA, 15 nt, Human
auaaggaaaaguuua

SEQ ID NO: 1699379 - RNA, 16 nt, Human
auaaggaaaaguuuaa

SEQ ID NO: 1699380 - RNA, 21 nt, Human
auaccuacauguauuuguuug

SEQ ID NO: 1699381 - RNA, 17 nt, Human
auaccuacauguauuug

SEQ ID NO: 1699382 - RNA, 15 nt, Human
auaacauaaaucugu

SEQ ID NO: 1699383 - RNA, 14 nt, Human
auaacauaaaucug

SEQ ID NO: 1699384 - RNA, 18 nt, Human
auaaaggauuaaugucaa

SEQ ID NO: 1699385 - RNA, 19 nt, Human
auaacauaaaucugugaac

SEQ ID NO: 1699386 - RNA, 18 nt, Human
auaacauaaaucugugaa

SEQ ID NO: 1699387 - RNA, 17 nt, Human
auaacauaaaucuguga

SEQ ID NO: 1699388 - RNA, 19 nt, Human
agucaaauugugugaaagg

SEQ ID NO: 1699389 - RNA, 23 nt, Human
agucaaauugugugaaagguacu

SEQ ID NO: 1699390 - RNA, 12 nt, Human
aguccuguaaug

SEQ ID NO: 1699391 - RNA, 22 nt, Human
aguugaaaaucuuauaauuuaa

SEQ ID NO: 1699392 - RNA, 23 nt, Human
aguugaaaaucuuauaauuuaaa

SEQ ID NO: 1699393 - RNA, 23 nt, Human
gucuucauaccuacauguauuug

SEQ ID NO: 1699394 - RNA, 23 nt, Human
aacuaucucauuuccaagcaagu

SEQ ID NO: 1699395 - RNA, 20 nt, Human
aacuaucucauuuccaagca

SEQ ID NO: 1699396 - RNA, 13 nt, Human
aacuauauuguuu

SEQ ID NO: 1699397 - RNA, 20 nt, Human
aacugaaaucauacuucuua

SEQ ID NO: 1699398 - RNA, 13 nt, Human
aacugaaaucaua

SEQ ID NO: 1699399 - RNA, 14 nt, Human
aacauaaaucugug

SEQ ID NO: 1699400 - RNA, 12 nt, Human
aacauaaaucug

SEQ ID NO: 1699401 - RNA, 15 nt, Human
aacauaaaucuguga

SEQ ID NO: 1699402 - RNA, 23 nt, Human
aacauguuaaaccaugggauaaa

SEQ ID NO: 1699403 - RNA, 16 nt, Human
aacauauauaacaaug

SEQ ID NO: 1699404 - RNA, 23 nt, Human
gucucaguccaugaagauguaga

SEQ ID NO: 1699405 - RNA, 23 nt, Human
guguugaaacggaugauuucuau

SEQ ID NO: 1699406 - RNA, 21 nt, Human
guguugaaacggaugauuucu

SEQ ID NO: 1699407 - RNA, 16 nt, Human
aagcaaguauuagaau

SEQ ID NO: 1699408 - RNA, 19 nt, Human
aagcaaaauuuuuucucua

SEQ ID NO: 1699409 - RNA, 22 nt, Human
aagauguagaggagaaacugga

SEQ ID NO: 1699410 - RNA, 19 nt, Human
aagauguagaggagaaacu

SEQ ID NO: 1699411 - RNA, 20 nt, Human
aacuuguguaaauacaauuu

SEQ ID NO: 1699412 - RNA, 15 nt, Human
aacuuguguaaauac

SEQ ID NO: 1699413 - RNA, 14 nt, Human
aacuuguguaaaua

SEQ ID NO: 1699414 - RNA, 22 nt, Human
aagaagcaccaaucaugaauua

SEQ ID NO: 1699415 - RNA, 13 nt, Human
aagaaaauaucac

SEQ ID NO: 1699416 - RNA, 22 nt, Human
gugcugggguuaucugaaguca

SEQ ID NO: 1699417 - RNA, 19 nt, Human
gugcugguguaugugugaa

SEQ ID NO: 1699418 - RNA, 13 nt, Human
aagacccaaaagg

SEQ ID NO: 1699419 - RNA, 14 nt, Human
aauaaaaaauuaug

SEQ ID NO: 1699420 - RNA, 16 nt, Human
aauaaaaaauuaugac

SEQ ID NO: 1699421 - RNA, 15 nt, Human
aauaaaaaauuauga

SEQ ID NO: 1699422 - RNA, 12 nt, Human
aauaaaaauaau

SEQ ID NO: 1699423 - RNA, 22 nt, Human
aauaaaauccauacauuugugu

SEQ ID NO: 1699424 - RNA, 21 nt, Human
aauaaauagcuagacugguga

SEQ ID NO: 1699425 - RNA, 15 nt, Human
aauaacaauaaaaga

SEQ ID NO: 1699426 - RNA, 15 nt, Human
aauaaggaaaaguuu

SEQ ID NO: 1699427 - RNA, 13 nt, Human
aauaaggaaaagu

SEQ ID NO: 1699428 - RNA, 22 nt, Human
aauaaggaaaaguuuaauauua

SEQ ID NO: 1699429 - RNA, 19 nt, Human
aauaaggaaaaguuuaaua

SEQ ID NO: 1699430 - RNA, 16 nt, Human
aauaaggaaaaguuua

SEQ ID NO: 1699431 - RNA, 23 nt, Human
aauaauuauaugcuauuucuaua

SEQ ID NO: 1699432 - RNA, 22 nt, Human
aauaauuauaugcuauuucuau

SEQ ID NO: 1699433 - RNA, 21 nt, Human
aauaauuauaugcuauuucua

SEQ ID NO: 1699434 - RNA, 20 nt, Human
aauaauuauaugcuauuucu

SEQ ID NO: 1699435 - RNA, 15 nt, Human
aauaauuauaugcua

SEQ ID NO: 1699436 - RNA, 14 nt, Human
aauaauuauaugcu

SEQ ID NO: 1699437 - RNA, 23 nt, Human
uaaaucccauuauucaaaguugc

SEQ ID NO: 1699438 - RNA, 19 nt, Human
uaaaucgcuuuugauaauc

SEQ ID NO: 1699439 - RNA, 18 nt, Human
uaaaucgcuuuugauaau

SEQ ID NO: 1699440 - RNA, 23 nt, Human
uaaauagcuagacuggugacuga

SEQ ID NO: 1699441 - RNA, 19 nt, Human
uaaauagcuagacugguga

SEQ ID NO: 1699442 - RNA, 23 nt, Human
uaaauacaauuuuguuucuguac

SEQ ID NO: 1699443 - RNA, 22 nt, Human
uaaauacaauuuuguuucugua

SEQ ID NO: 1699444 - RNA, 15 nt, Human
uaaauacaauuuugu

SEQ ID NO: 1699445 - RNA, 13 nt, Human
uaaauacaauuuu

SEQ ID NO: 1699446 - RNA, 23 nt, Human
aauacaauuuuguuucuguacuu

SEQ ID NO: 1699447 - RNA, 22 nt, Human
aauacaauuuuguuucuguacu

SEQ ID NO: 1699448 - RNA, 13 nt, Human
aauacaauuuugu

SEQ ID NO: 1699449 - RNA, 12 nt, Human
aauacaauuuug

SEQ ID NO: 1699450 - RNA, 20 nt, Human
aauacaauuuuguuucugua

SEQ ID NO: 1699451 - RNA, 18 nt, Human
aauacaauuuuguuucug

SEQ ID NO: 1699452 - RNA, 17 nt, Human
aauacaauuuuguuucu

SEQ ID NO: 1699453 - RNA, 15 nt, Human
aauacaauuuuguuu

SEQ ID NO: 1699454 - RNA, 16 nt, Human
uaacaacagcuggugc

SEQ ID NO: 1699455 - RNA, 17 nt, Human
uaacaaugcuguauuuu

SEQ ID NO: 1699456 - RNA, 15 nt, Human
uaacaaugcuguauu

SEQ ID NO: 1699457 - RNA, 15 nt, Human
uaaauguugacaugg

SEQ ID NO: 1699458 - RNA, 17 nt, Human
uaaaugauuucauucaa

SEQ ID NO: 1699459 - RNA, 22 nt, Human
uaaaccaugggauaaaugccau

SEQ ID NO: 1699460 - RNA, 21 nt, Human
uaaaccaugggauaaaugcca

SEQ ID NO: 1699461 - RNA, 20 nt, Human
uaaaccaugggauaaaugcc

SEQ ID NO: 1699462 - RNA, 18 nt, Human
uaaaccaugggauaaaug

SEQ ID NO: 1699463 - RNA, 21 nt, Human
aaguuuaauauuaaagccaug

SEQ ID NO: 1699464 - RNA, 20 nt, Human
aaguuuaauauuaaagccau

SEQ ID NO: 1699465 - RNA, 19 nt, Human
aaguuuaauauuaaagcca

SEQ ID NO: 1699466 - RNA, 17 nt, Human
aaguucugcagauaaac

SEQ ID NO: 1699467 - RNA, 19 nt, Human
uaaaccaaggcuagaacca

SEQ ID NO: 1699468 - RNA, 23 nt, Human
aaggcugaugccaaguuguuuga

SEQ ID NO: 1699469 - RNA, 10 nt, Human
guuucuguac

SEQ ID NO: 1699470 - RNA, 14 nt, Human
guuugcauagguga

SEQ ID NO: 1699471 - RNA, 15 nt, Human
guuucuguacuuuuu

SEQ ID NO: 1699472 - RNA, 22 nt, Human
guuuuauaauuuugugaagcaa

SEQ ID NO: 1699473 - RNA, 15 nt, Human
guuuuauaauuuugu

SEQ ID NO: 1699474 - RNA, 13 nt, Human
aaguauuaagcau

SEQ ID NO: 1699475 - RNA, 21 nt, Human
aaguauguuagugcaaauugu

SEQ ID NO: 1699476 - RNA, 23 nt, Human
aaguauguuagugcaaauuguca

SEQ ID NO: 1699477 - RNA, 23 nt, Human
guuuuuuuuuaaaaaagaaacau

SEQ ID NO: 1699478 - RNA, 22 nt, Human
aagucuuauauauuguagauaa

SEQ ID NO: 1699479 - RNA, 16 nt, Human
aaggaagguucuggug

SEQ ID NO: 1699480 - RNA, 13 nt, Human
aaggauaaugaau

SEQ ID NO: 1699481 - RNA, 16 nt, Human
aaggaaaaaauaacaa

SEQ ID NO: 1699482 - RNA, 19 nt, Human
aaggaaaaaauaacaauga

SEQ ID NO: 1699483 - RNA, 22 nt, Human
aauuaaggauuuuaugcuuuaa

SEQ ID NO: 1699484 - RNA, 20 nt, Human
aauuaaggauuuuaugcuuu

SEQ ID NO: 1699485 - RNA, 16 nt, Human
aauuaaggauuuuaug

SEQ ID NO: 1699486 - RNA, 18 nt, Human
aauuaacauguuaaacca

SEQ ID NO: 1699487 - RNA, 14 nt, Human
aauuaacauguuaa

SEQ ID NO: 1699488 - RNA, 13 nt, Human
aauuaacauguua

SEQ ID NO: 1699489 - RNA, 18 nt, Human
aauguugacaugggacau

SEQ ID NO: 1699490 - RNA, 16 nt, Human
aaugguuuaaaugguc

SEQ ID NO: 1699491 - RNA, 17 nt, Human
uaauuauaucugaggaa

SEQ ID NO: 1699492 - RNA, 13 nt, Human
uaauuauaucuga

SEQ ID NO: 1699493 - RNA, 21 nt, Human
uaauuauaugcuauuucuaua

SEQ ID NO: 1699494 - RNA, 15 nt, Human
aaugaaugaaugaau

SEQ ID NO: 1699495 - RNA, 13 nt, Human
uaaucuuucacag

SEQ ID NO: 1699496 - RNA, 19 nt, Human
uaacaaugcuguauuuuaa

SEQ ID NO: 1699497 - RNA, 14 nt, Human
uagaaccucuuugu

SEQ ID NO: 1699498 - RNA, 15 nt, Human
uagaacucccuuuca

SEQ ID NO: 1699499 - RNA, 16 nt, Human
uacuucaugcugucua

SEQ ID NO: 1699500 - RNA, 21 nt, Human
uacuucaaauccuugaagauu

SEQ ID NO: 1699501 - RNA, 19 nt, Human
aauuuuuucucuaggaaau

SEQ ID NO: 1699502 - RNA, 19 nt, Human
aauuuuuauauuugaaaua

SEQ ID NO: 1699503 - RNA, 21 nt, Human
uagaggaagccugauuaaaga

SEQ ID NO: 1699504 - RNA, 19 nt, Human
uagaggagaaacuggaacu

SEQ ID NO: 1699505 - RNA, 16 nt, Human
uagaugcaguucugaa

SEQ ID NO: 1699506 - RNA, 19 nt, Human
uagaugcaguucugaagaa

SEQ ID NO: 1699507 - RNA, 17 nt, Human
uagaugcaguucugaag

SEQ ID NO: 1699508 - RNA, 21 nt, Human
uagcaugucgucaaagcugaa

SEQ ID NO: 1699509 - RNA, 18 nt, Human
acaagcacuaaacaaaga

SEQ ID NO: 1699510 - RNA, 14 nt, Human
uacucaauuuuaac

SEQ ID NO: 1699511 - RNA, 13 nt, Human
uacucaauuuuaa

SEQ ID NO: 1699512 - RNA, 12 nt, Human
uacucaauuuua

SEQ ID NO: 1699513 - RNA, 21 nt, Human
aauucuugccaaauauaaaua

SEQ ID NO: 1699514 - RNA, 19 nt, Human
aauugacccacaagaaaug

SEQ ID NO: 1699515 - RNA, 16 nt, Human
aauugacccacaagaa

SEQ ID NO: 1699516 - RNA, 18 nt, Human
aauuugaauuuuguguua

SEQ ID NO: 1699517 - RNA, 16 nt, Human
aauuugaauuuugugu

SEQ ID NO: 1699518 - RNA, 13 nt, Human
aauuugaauuuug

SEQ ID NO: 1699519 - RNA, 19 nt, Human
uacuucaaauccuugaaga

SEQ ID NO: 1699520 - RNA, 14 nt, Human
uacuucaaauccuu

SEQ ID NO: 1699521 - RNA, 13 nt, Human
uacuguaagaaaa

SEQ ID NO: 1699522 - RNA, 23 nt, Human
aauugugugaaagguacuucaaa

SEQ ID NO: 1699523 - RNA, 22 nt, Human
uauucacugauuugacauaguc

SEQ ID NO: 1699524 - RNA, 19 nt, Human
uauucacugauuugacaua

SEQ ID NO: 1699525 - RNA, 13 nt, Human
uauucacugauuu

SEQ ID NO: 1699526 - RNA, 23 nt, Human
uauucaaaguugccuaaauccau

SEQ ID NO: 1699527 - RNA, 22 nt, Human
uauucaaaguugccuaaaucca

SEQ ID NO: 1699528 - RNA, 21 nt, Human
uauucaaaguugccuaaaucc

SEQ ID NO: 1699529 - RNA, 18 nt, Human
uauucaaaguugccuaaa

SEQ ID NO: 1699530 - RNA, 23 nt, Human
uauucauagcagcuuauucacaa

SEQ ID NO: 1699531 - RNA, 15 nt, Human
uauuagaauaccaca

SEQ ID NO: 1699532 - RNA, 12 nt, Human
uauuaaagccau

SEQ ID NO: 1699533 - RNA, 14 nt, Human
uauuaaagccaugu

SEQ ID NO: 1699534 - RNA, 13 nt, Human
uauuaaagccaug

SEQ ID NO: 1699535 - RNA, 21 nt, Human
uauuacaguauaauuaacaug

SEQ ID NO: 1699536 - RNA, 20 nt, Human
uauuacaguauaauuaacau

SEQ ID NO: 1699537 - RNA, 18 nt, Human
uauuacaguauaauuaac

SEQ ID NO: 1699538 - RNA, 16 nt, Human
uauuacaguauaauua

SEQ ID NO: 1699539 - RNA, 20 nt, Human
uauuaaagccauguuuauua

SEQ ID NO: 1699540 - RNA, 18 nt, Human
uauuaaagccauguuuau

SEQ ID NO: 1699541 - RNA, 17 nt, Human
uauuaaagccauguuua

SEQ ID NO: 1699542 - RNA, 20 nt, Human
acagcuggugcccugcuuuc

SEQ ID NO: 1699543 - RNA, 17 nt, Human
acagcuggugcccugcu

SEQ ID NO: 1699544 - RNA, 23 nt, Human
acaguauaauuaacauguuaaac

SEQ ID NO: 1699545 - RNA, 21 nt, Human
acaguauggcagcuuuccuca

SEQ ID NO: 1699546 - RNA, 21 nt, Human
acaguauaauuaacauguuaa

SEQ ID NO: 1699547 - RNA, 20 nt, Human
acagugaaagaaaauaacaa

SEQ ID NO: 1699548 - RNA, 18 nt, Human
acagugagacucugucuc

SEQ ID NO: 1699549 - RNA, 14 nt, Human
acagugagacucug

SEQ ID NO: 1699550 - RNA, 21 nt, Human
acaguuaccucugccucagaa

SEQ ID NO: 1699551 - RNA, 18 nt, Human
uauuuacuaaaauggacu

SEQ ID NO: 1699552 - RNA, 18 nt, Human
uauuuauuuuaauaaugu

SEQ ID NO: 1699553 - RNA, 16 nt, Human
uauuuauuuuaauaau

SEQ ID NO: 1699554 - RNA, 14 nt, Human
uauuuauuuuaaua

SEQ ID NO: 1699555 - RNA, 23 nt, Human
uauuguacaaaguauuaagcaua

SEQ ID NO: 1699556 - RNA, 22 nt, Human
uauuguacaaaguauuaagcau

SEQ ID NO: 1699557 - RNA, 21 nt, Human
uauuguacaaaguauuaagca

SEQ ID NO: 1699558 - RNA, 16 nt, Human
uauuguacaaaguauu

SEQ ID NO: 1699559 - RNA, 15 nt, Human
uauuguacaaaguau

SEQ ID NO: 1699560 - RNA, 17 nt, Human
uauugucuagugaaacu

SEQ ID NO: 1699561 - RNA, 19 nt, Human
uauugaagcauuuuauaaa

SEQ ID NO: 1699562 - RNA, 17 nt, Human
uauugaagcauuuuaua

SEQ ID NO: 1699563 - RNA, 16 nt, Human
uauugaagcauuuuau

SEQ ID NO: 1699564 - RNA, 15 nt, Human
uauugaagcauuuua

SEQ ID NO: 1699565 - RNA, 13 nt, Human
uauugaagcauuu

SEQ ID NO: 1699566 - RNA, 12 nt, Human
uauugaagcauu

SEQ ID NO: 1699567 - RNA, 22 nt, Human
uauuggcuuuucugauccaguu

SEQ ID NO: 1699568 - RNA, 21 nt, Human
uauuggcuuuucugauccagu

SEQ ID NO: 1699569 - RNA, 14 nt, Human
uauuggcuuuucug

SEQ ID NO: 1699570 - RNA, 18 nt, Human
uauuggcuuuucugaucc

SEQ ID NO: 1699571 - RNA, 17 nt, Human
uauuggcuuuucugauc

SEQ ID NO: 1699572 - RNA, 16 nt, Human
uauuggcuuuucugau

SEQ ID NO: 1699573 - RNA, 15 nt, Human
uauuggcuuuucuga

SEQ ID NO: 1699574 - RNA, 23 nt, Human
acaguucggugagcuacaaaugc

SEQ ID NO: 1699575 - RNA, 19 nt, Human
acaguucggugagcuacaa

SEQ ID NO: 1699576 - RNA, 22 nt, Human
acaguucggugagcuacaaaug

SEQ ID NO: 1699577 - RNA, 16 nt, Human
acacuccaauuaagga

SEQ ID NO: 1699578 - RNA, 15 nt, Human
acacuccaauuaagg

SEQ ID NO: 1699579 - RNA, 19 nt, Human
uauaggaauugacccacaa

SEQ ID NO: 1699580 - RNA, 14 nt, Human
uauaggaauugacc

SEQ ID NO: 1699581 - RNA, 13 nt, Human
uauaggaauugac

SEQ ID NO: 1699582 - RNA, 20 nt, Human
uauagauuagaauucuguau

SEQ ID NO: 1699583 - RNA, 22 nt, Human
uauagauuagagaguguugaaa

SEQ ID NO: 1699584 - RNA, 19 nt, Human
uauagauuagagaguguug

SEQ ID NO: 1699585 - RNA, 19 nt, Human
uauaauuuugugaagcaaa

SEQ ID NO: 1699586 - RNA, 14 nt, Human
uauaauuuugugaa

SEQ ID NO: 1699587 - RNA, 18 nt, Human
uauaacaaugcuguauuu

SEQ ID NO: 1699588 - RNA, 23 nt, Human
uauaaaauaauuuuuauauuuga

SEQ ID NO: 1699589 - RNA, 22 nt, Human
uauaaaauaauuuuuauauuug

SEQ ID NO: 1699590 - RNA, 21 nt, Human
uauaaaauaauuuuuauauuu

SEQ ID NO: 1699591 - RNA, 22 nt, Human
uagugagcagucaggaaagaga

SEQ ID NO: 1699592 - RNA, 16 nt, Human
uaguuuuauaugcuuc

SEQ ID NO: 1699593 - RNA, 20 nt, Human
uaucaccugucuugccuuuu

SEQ ID NO: 1699594 - RNA, 15 nt, Human
uauauuuacaaaugg

SEQ ID NO: 1699595 - RNA, 14 nt, Human
uauauuuacaaaug

SEQ ID NO: 1699596 - RNA, 10 nt, Human
uaugauccag

SEQ ID NO: 1699597 - RNA, 19 nt, Human
uaugauccagcagauuauu

SEQ ID NO: 1699598 - RNA, 11 nt, Human
uaugauccagc

SEQ ID NO: 1699599 - RNA, 15 nt, Human
uaugcugaguuugug

SEQ ID NO: 1699600 - RNA, 22 nt, Human
uaugauccagcagauuauucac

SEQ ID NO: 1699601 - RNA, 21 nt, Human
uaugauccagcagauuauuca

SEQ ID NO: 1699602 - RNA, 20 nt, Human
uaugauccagcagauuauuc

SEQ ID NO: 1699603 - RNA, 22 nt, Human
ucccuauuuuuuuucuguuaua

SEQ ID NO: 1699604 - RNA, 21 nt, Human
ucccuauuuuuuuucuguuau

SEQ ID NO: 1699605 - RNA, 13 nt, Human
acuauauauguga

SEQ ID NO: 1699606 - RNA, 13 nt, Human
acuaaaaauacaa

SEQ ID NO: 1699607 - RNA, 21 nt, Human
acuccaauuaaggauuuuaug

SEQ ID NO: 1699608 - RNA, 17 nt, Human
acuccaauuaaggauuu

SEQ ID NO: 1699609 - RNA, 15 nt, Human
uccgugcuaaggacu

SEQ ID NO: 1699610 - RNA, 14 nt, Human
uccgugcuaaggac

SEQ ID NO: 1699611 - RNA, 19 nt, Human
uccuagcacacacuuuugg

SEQ ID NO: 1699612 - RNA, 18 nt, Human
uccuagcacacacuuuug

SEQ ID NO: 1699613 - RNA, 17 nt, Human
uccuagcacacacuuuu

SEQ ID NO: 1699614 - RNA, 22 nt, Human
acucuccauuuaauaauuauau

SEQ ID NO: 1699615 - RNA, 13 nt, Human
acuggauuguacu

SEQ ID NO: 1699616 - RNA, 16 nt, Human
acuggauuguacuuug

SEQ ID NO: 1699617 - RNA, 22 nt, Human
acugccuucucaacuccaaacu

SEQ ID NO: 1699618 - RNA, 13 nt, Human
uccuucagccuga

SEQ ID NO: 1699619 - RNA, 20 nt, Human
uccugcaaugaagucucuga

SEQ ID NO: 1699620 - RNA, 18 nt, Human
uccugcaaugaagucucu

SEQ ID NO: 1699621 - RNA, 15 nt, Human
uccugcaaugaaguc

SEQ ID NO: 1699622 - RNA, 21 nt, Human
uccugcaaugaagucucugaa

SEQ ID NO: 1699623 - RNA, 22 nt, Human
acugaggggaggggagcauggg

SEQ ID NO: 1699624 - RNA, 17 nt, Human
acugaggggaggggagc

SEQ ID NO: 1699625 - RNA, 18 nt, Human
uccacauaaggaaacugg

SEQ ID NO: 1699626 - RNA, 21 nt, Human
uccaacuaucucauuuccaag

SEQ ID NO: 1699627 - RNA, 20 nt, Human
uccagccugagcgacaguga

SEQ ID NO: 1699628 - RNA, 21 nt, Human
uccagccugagcgacagugag

SEQ ID NO: 1699629 - RNA, 22 nt, Human
ucaugaauuaguuuuauaugcu

SEQ ID NO: 1699630 - RNA, 21 nt, Human
ucagaucugccuaaggacuuc

SEQ ID NO: 1699631 - RNA, 13 nt, Human
ucagauuuuauua

SEQ ID NO: 1699632 - RNA, 15 nt, Human
ucagauuuuauuaug

SEQ ID NO: 1699633 - RNA, 14 nt, Human
ucagauuuuauuau

SEQ ID NO: 1699634 - RNA, 20 nt, Human
ucagauuuuauuauguaaau

SEQ ID NO: 1699635 - RNA, 19 nt, Human
ucagauuuuauuauguaaa

SEQ ID NO: 1699636 - RNA, 16 nt, Human
ucagauuuuauuaugu

SEQ ID NO: 1699637 - RNA, 19 nt, Human
accacugcagaagacagua

SEQ ID NO: 1699638 - RNA, 14 nt, Human
accacugcagaaga

SEQ ID NO: 1699639 - RNA, 13 nt, Human
accacugcagaag

SEQ ID NO: 1699640 - RNA, 23 nt, Human
accacuuguguuuugcaagccag

SEQ ID NO: 1699641 - RNA, 19 nt, Human
accacuuguguuuugcaag

SEQ ID NO: 1699642 - RNA, 15 nt, Human
acccaaaaggcagaa

SEQ ID NO: 1699643 - RNA, 13 nt, Human
acccaaaaggcag

SEQ ID NO: 1699644 - RNA, 18 nt, Human
acccaaaaggcagaagca

SEQ ID NO: 1699645 - RNA, 21 nt, Human
acccaaauguucaucaaugaa

SEQ ID NO: 1699646 - RNA, 14 nt, Human
agcagauuauucac

SEQ ID NO: 1699647 - RNA, 16 nt, Human
agcagauuauucacug

SEQ ID NO: 1699648 - RNA, 15 nt, Human
agcagauuauucacu

SEQ ID NO: 1699649 - RNA, 20 nt, Human
agcagauuauucacugauuu

SEQ ID NO: 1699650 - RNA, 19 nt, Human
agcagauuauucacugauu

SEQ ID NO: 1699651 - RNA, 22 nt, Human
ugagguacugagagugaacaaa

SEQ ID NO: 1699652 - RNA, 17 nt, Human
ugagguacugagaguga

SEQ ID NO: 1699653 - RNA, 16 nt, Human
ugaggaauucuguaua

SEQ ID NO: 1699654 - RNA, 15 nt, Human
ugaggaauucuguau

SEQ ID NO: 1699655 - RNA, 14 nt, Human
ugaggaauucugua

SEQ ID NO: 1699656 - RNA, 19 nt, Human
ugaggaauucuguauagau

SEQ ID NO: 1699657 - RNA, 18 nt, Human
ugaggaauucuguauaga

SEQ ID NO: 1699658 - RNA, 15 nt, Human
ugaggacacugauau

SEQ ID NO: 1699659 - RNA, 13 nt, Human
ugagcuacaaaug

SEQ ID NO: 1699660 - RNA, 14 nt, Human
ugagcuacaaaugc

SEQ ID NO: 1699661 - RNA, 16 nt, Human
ugagcuacaaaugcau

SEQ ID NO: 1699662 - RNA, 20 nt, Human
ugagcgacagugagacucug

SEQ ID NO: 1699663 - RNA, 16 nt, Human
ugagcgacagugagac

SEQ ID NO: 1699664 - RNA, 14 nt, Human
ugagcgacagugag

SEQ ID NO: 1699665 - RNA, 13 nt, Human
ugagcgacaguga

SEQ ID NO: 1699666 - RNA, 14 nt, Human
agcagaacagugau

SEQ ID NO: 1699667 - RNA, 16 nt, Human
agcaccaaucaugaau

SEQ ID NO: 1699668 - RNA, 22 nt, Human
agcacagccucuuagaugcagu

SEQ ID NO: 1699669 - RNA, 22 nt, Human
agauuuuauuauguaaauccca

SEQ ID NO: 1699670 - RNA, 20 nt, Human
agauuuuauuauguaaaucc

SEQ ID NO: 1699671 - RNA, 21 nt, Human
agauuuuauuauguaaauccc

SEQ ID NO: 1699672 - RNA, 14 nt, Human
agauuuuccugaaa

SEQ ID NO: 1699673 - RNA, 23 nt, Human
agcaaaaauauuuuaugauccag

SEQ ID NO: 1699674 - RNA, 19 nt, Human
agcaaaaauauuuuaugau

SEQ ID NO: 1699675 - RNA, 18 nt, Human
agcaaaaauauuuuauga

SEQ ID NO: 1699676 - RNA, 17 nt, Human
agcaaaaauauuuuaug

SEQ ID NO: 1699677 - RNA, 15 nt, Human
agcaaaaauauuuua

SEQ ID NO: 1699678 - RNA, 21 nt, Human
agauugugccccugcacucca

SEQ ID NO: 1699679 - RNA, 16 nt, Human
agauugugccccugca

SEQ ID NO: 1699680 - RNA, 16 nt, Human
agauuuaccacuugug

SEQ ID NO: 1699681 - RNA, 22 nt, Human
ugacuucauuaauaauaaauuc

SEQ ID NO: 1699682 - RNA, 16 nt, Human
agauuauucacugauu

SEQ ID NO: 1699683 - RNA, 15 nt, Human
ugacuguuuccauca

SEQ ID NO: 1699684 - RNA, 16 nt, Human
ugaauuuauuggcuuu

SEQ ID NO: 1699685 - RNA, 15 nt, Human
ugaauuuauuggcuu

SEQ ID NO: 1699686 - RNA, 12 nt, Human
ugaauuuauugg

SEQ ID NO: 1699687 - RNA, 23 nt, Human
agaugcuagaacucccuuucaac

SEQ ID NO: 1699688 - RNA, 22 nt, Human
agagugaacaaauuuacagaga

SEQ ID NO: 1699689 - RNA, 14 nt, Human
agagugaacaaauu

SEQ ID NO: 1699690 - RNA, 20 nt, Human
ugaagaagcaccaaucauga

SEQ ID NO: 1699691 - RNA, 14 nt, Human
ugaagaagauggua

SEQ ID NO: 1699692 - RNA, 22 nt, Human
ugaagaagcaccaaucaugaau

SEQ ID NO: 1699693 - RNA, 18 nt, Human
ugaagauguagaggagaa

SEQ ID NO: 1699694 - RNA, 17 nt, Human
ugaagauguagaggaga

SEQ ID NO: 1699695 - RNA, 17 nt, Human
ucuguauagauuagaau

SEQ ID NO: 1699696 - RNA, 16 nt, Human
ucuguauagauuagag

SEQ ID NO: 1699697 - RNA, 18 nt, Human
ucuguuuuauaauuuugu

SEQ ID NO: 1699698 - RNA, 20 nt, Human
ucuguuuuauaauuuuguga

SEQ ID NO: 1699699 - RNA, 22 nt, Human
ucuuagaugcaguucugaagaa

SEQ ID NO: 1699700 - RNA, 13 nt, Human
ucuuuaauuuugg

SEQ ID NO: 1699701 - RNA, 18 nt, Human
ucuuuaauuuuggaauuu

SEQ ID NO: 1699702 - RNA, 17 nt, Human
ucuuuaauuuuggaauu

SEQ ID NO: 1699703 - RNA, 16 nt, Human
ucuuuaauuuuggaau

SEQ ID NO: 1699704 - RNA, 15 nt, Human
ucuuuaauuuuggaa

SEQ ID NO: 1699705 - RNA, 14 nt, Human
ucuuuaauuuugga

SEQ ID NO: 1699706 - RNA, 15 nt, Human
agagaaugagagaca

SEQ ID NO: 1699707 - RNA, 17 nt, Human
agagacacacugaagaa

SEQ ID NO: 1699708 - RNA, 20 nt, Human
agagacacacugaagaagca

SEQ ID NO: 1699709 - RNA, 18 nt, Human
agagacacacugaagaag

SEQ ID NO: 1699710 - RNA, 19 nt, Human
ucuccauuuaauaauuaua

SEQ ID NO: 1699711 - RNA, 16 nt, Human
ucuccauuuaauaauu

SEQ ID NO: 1699712 - RNA, 12 nt, Human
ucuccauuuaau

SEQ ID NO: 1699713 - RNA, 23 nt, Human
acuuguguaaauacaauuuuguu

SEQ ID NO: 1699714 - RNA, 22 nt, Human
acuuguguaaauacaauuuugu

SEQ ID NO: 1699715 - RNA, 21 nt, Human
acuuguguaaauacaauuuug

SEQ ID NO: 1699716 - RNA, 13 nt, Human
acuuuuuuccaca

SEQ ID NO: 1699717 - RNA, 22 nt, Human
acuuuugguuaagucuguuuua

SEQ ID NO: 1699718 - RNA, 20 nt, Human
acuuuugguuaagucuguuu

SEQ ID NO: 1699719 - RNA, 16 nt, Human
acuuuugguuaagucu

SEQ ID NO: 1699720 - RNA, 22 nt, Human
acuuuuuauggcacuaguauuu

SEQ ID NO: 1699721 - RNA, 17 nt, Human
ucucuggccuucggccu

SEQ ID NO: 1699722 - RNA, 16 nt, Human
ucucuggccuucggcc

SEQ ID NO: 1699723 - RNA, 13 nt, Human
ucucuggccuucg

SEQ ID NO: 1699724 - RNA, 19 nt, Human
agaaaacaaggaugaauua

SEQ ID NO: 1699725 - RNA, 15 nt, Human
agaaacuggaacucu

SEQ ID NO: 1699726 - RNA, 13 nt, Human
agaaacuggaacu

SEQ ID NO: 1699727 - RNA, 22 nt, Human
agaaccucuuugucuacaccau

SEQ ID NO: 1699728 - RNA, 15 nt, Human
agaacucccuuucaa

SEQ ID NO: 1699729 - RNA, 14 nt, Human
agaacucccuuuca

SEQ ID NO: 1699730 - RNA, 21 nt, Human
ucugacuguuuccaucaaggg

SEQ ID NO: 1699731 - RNA, 13 nt, Human
ucugccuaaggac

SEQ ID NO: 1699732 - RNA, 16 nt, Human
ucugccuaaggacuuc

SEQ ID NO: 1699733 - RNA, 15 nt, Human
ucugccuaaggacuu

SEQ ID NO: 1699734 - RNA, 14 nt, Human
ucugccuaaggacu

SEQ ID NO: 1699735 - RNA, 21 nt, Human
agaagaacugaaaucauacuu

SEQ ID NO: 1699736 - RNA, 14 nt, Human
agaagcuccaggua

SEQ ID NO: 1699737 - RNA, 14 nt, Human
agccugauuaaaga

SEQ ID NO: 1699738 - RNA, 16 nt, Human
agccugcacggugaau

SEQ ID NO: 1699739 - RNA, 18 nt, Human
agccugcacggugaaugg

SEQ ID NO: 1699740 - RNA, 19 nt, Human
ugcagugagccgagauugu

SEQ ID NO: 1699741 - RNA, 14 nt, Human
ugcagugagccgag

SEQ ID NO: 1699742 - RNA, 18 nt, Human
agccugagcgacagugag

SEQ ID NO: 1699743 - RNA, 19 nt, Human
agccugagcgacagugaga

SEQ ID NO: 1699744 - RNA, 19 nt, Human
agcccuucuuuccacagaa

SEQ ID NO: 1699745 - RNA, 18 nt, Human
agcccuucuuuccacaga

SEQ ID NO: 1699746 - RNA, 19 nt, Human
agcuauggugucauaggcu

SEQ ID NO: 1699747 - RNA, 21 nt, Human
ugccuuuuucauuauuuuauu

SEQ ID NO: 1699748 - RNA, 17 nt, Human
ugccuuuuucauuauuu

SEQ ID NO: 1699749 - RNA, 16 nt, Human
ugccuuuuucauuauu

SEQ ID NO: 1699750 - RNA, 15 nt, Human
ugccuuuuucauuau

SEQ ID NO: 1699751 - RNA, 14 nt, Human
ugccuuuuucauua

SEQ ID NO: 1699752 - RNA, 13 nt, Human
ugccuuuuucauu

SEQ ID NO: 1699753 - RNA, 13 nt, Human
agcuggaaaagua

SEQ ID NO: 1699754 - RNA, 19 nt, Human
aggaaacuggguuccugca

SEQ ID NO: 1699755 - RNA, 19 nt, Human
aggaaagagaacuuccaga

SEQ ID NO: 1699756 - RNA, 13 nt, Human
aggaaagagaacu

SEQ ID NO: 1699757 - RNA, 14 nt, Human
ugcuaguaauugga

SEQ ID NO: 1699758 - RNA, 16 nt, Human
ugcuaguaauuggaaa

SEQ ID NO: 1699759 - RNA, 21 nt, Human
aggaaaaguuuaauauuaaag

SEQ ID NO: 1699760 - RNA, 24 nt, Human
aggaaaaguuuaauauuaaagcca

SEQ ID NO: 1699761 - RNA, 23 nt, Human
aggaaaaguuuaauauuaaagcc

SEQ ID NO: 1699762 - RNA, 21 nt, Human
agcuuauugucuagugaaacu

SEQ ID NO: 1699763 - RNA, 23 nt, Human
aggaauucuguauagauuagaau

SEQ ID NO: 1699764 - RNA, 19 nt, Human
aggaauugacccacaagaa

SEQ ID NO: 1699765 - RNA, 16 nt, Human
aggaauucuguauaga

SEQ ID NO: 1699766 - RNA, 22 nt, Human
aggaauucuguauagauuagaa

SEQ ID NO: 1699767 - RNA, 17 nt, Human
aggaauucuguauagau

SEQ ID NO: 1699768 - RNA, 18 nt, Human
aggaaauauuuauuuuaa

SEQ ID NO: 1699769 - RNA, 14 nt, Human
aggaaauauuuauu

SEQ ID NO: 1699770 - RNA, 15 nt, Human
aggauuuuaugcuuu

SEQ ID NO: 1699771 - RNA, 14 nt, Human
aggauuuuaugcuu

SEQ ID NO: 1699772 - RNA, 11 nt, Human
aggauuuuaug

SEQ ID NO: 1699773 - RNA, 17 nt, Human
aggauuuuaugcuuuaa

SEQ ID NO: 1699774 - RNA, 16 nt, Human
aggauuuuaugcuuua

SEQ ID NO: 1699775 - RNA, 21 nt, Human
uggaauuuuccuccuuucucu

SEQ ID NO: 1699776 - RNA, 17 nt, Human
uggaauuuuccuccuuu

SEQ ID NO: 1699777 - RNA, 23 nt, Human
uggagccugcacggugaauggcu

SEQ ID NO: 1699778 - RNA, 16 nt, Human
uggagaagaacugaaa

SEQ ID NO: 1699779 - RNA, 20 nt, Human
aggcagcucuaaaugucaau

SEQ ID NO: 1699780 - RNA, 22 nt, Human
aggcuccacuuggucugugaga

SEQ ID NO: 1699781 - RNA, 21 nt, Human
aggcuccacuuggucugugag

SEQ ID NO: 1699782 - RNA, 17 nt, Human
aggcuccacuuggucug

SEQ ID NO: 1699783 - RNA, 11 nt, Human
aggcuccacuu

SEQ ID NO: 1699784 - RNA, 13 nt, Human
agggaaauuucag

SEQ ID NO: 1699785 - RNA, 19 nt, Human
ugggaggcugagaugggag

SEQ ID NO: 1699786 - RNA, 22 nt, Human
agggcuguuauaaucuuucaca

SEQ ID NO: 1699787 - RNA, 18 nt, Human
uggcuaagcaaaauguga

SEQ ID NO: 1699788 - RNA, 18 nt, Human
ugggaaacaaaaggauaa

SEQ ID NO: 1699789 - RNA, 14 nt, Human
aguauuaagcauau

SEQ ID NO: 1699790 - RNA, 12 nt, Human
aguauuaagcau

SEQ ID NO: 1699791 - RNA, 23 nt, Human
aguauaauuaacauguuaaacca

SEQ ID NO: 1699792 - RNA, 16 nt, Human
aguauaauuaacaugu

SEQ ID NO: 1699793 - RNA, 14 nt, Human
aguauaauuaacau

SEQ ID NO: 1699794 - RNA, 13 nt, Human
aguauaauuaaca

SEQ ID NO: 1699795 - RNA, 14 nt, Human
agucaggaaagaga

SEQ ID NO: 1699796 - RNA, 16 nt, Human
uguaguguuggagaag

SEQ ID NO: 1699797 - RNA, 18 nt, Human
uguaguguuggagaagaa

SEQ ID NO: 1699798 - RNA, 17 nt, Human
uguaguguuggagaaga

SEQ ID NO: 1699799 - RNA, 13 nt, Human
aguaauuggaaag

SEQ ID NO: 1699800 - RNA, 12 nt, Human
aguaauuggaaa

SEQ ID NO: 1699801 - RNA, 13 nt, Human
aguaaugauaacu

SEQ ID NO: 1699802 - RNA, 14 nt, Human
agguugcagugagc

SEQ ID NO: 1699803 - RNA, 16 nt, Human
uguguuagagauuuuu

SEQ ID NO: 1699804 - RNA, 22 nt, Human
uguugcccacagcuguaugauu

SEQ ID NO: 1699805 - RNA, 15 nt, Human
uguucuaagaaguga

SEQ ID NO: 1699806 - RNA, 21 nt, Human
agucuugucucagauuuuauu

SEQ ID NO: 1699807 - RNA, 20 nt, Human
agucuugucucagauuuuau

SEQ ID NO: 1699808 - RNA, 16 nt, Human
agucuuucacauuuaa

SEQ ID NO: 1699809 - RNA, 21 nt, Human
agugaacaaauuuacagagac

SEQ ID NO: 1699810 - RNA, 18 nt, Human
agucuuucacauuuaaau

SEQ ID NO: 1699811 - RNA, 23 nt, Human
agugaacaaauuuacagagacag

SEQ ID NO: 1699812 - RNA, 22 nt, Human
agugaacaaauuuacagagaca

SEQ ID NO: 1699813 - RNA, 16 nt, Human
agucuugucucagauu

SEQ ID NO: 1699814 - RNA, 19 nt, Human
agucuugucucagauuuua

SEQ ID NO: 1699815 - RNA, 17 nt, Human
agucuugucucagauuu

SEQ ID NO: 1699816 - RNA, 21 nt, Human
agugaguuggguguauugugc

SEQ ID NO: 1699817 - RNA, 14 nt, Human
agugcaaauuguca

SEQ ID NO: 1699818 - RNA, 20 nt, Human
ugugcugguguaugugugaa

SEQ ID NO: 1699819 - RNA, 19 nt, Human
ugugcugggguuaucugaa

SEQ ID NO: 1699820 - RNA, 22 nt, Human
auagaggaagccugauuaaaga

SEQ ID NO: 1699821 - RNA, 21 nt, Human
auagaggaagccugauuaaag

SEQ ID NO: 1699822 - RNA, 18 nt, Human
auagauaggucagugcaa

SEQ ID NO: 1699823 - RNA, 21 nt, Human
auagauuagagaguguugaaa

SEQ ID NO: 1699824 - RNA, 16 nt, Human
auagauuagaauucug

SEQ ID NO: 1699825 - RNA, 15 nt, Human
auagauuagaauucu

SEQ ID NO: 1699826 - RNA, 13 nt, Human
auagauuagaauu

SEQ ID NO: 1699827 - RNA, 22 nt, Human
auagauuagagaguguugaaac

SEQ ID NO: 1699828 - RNA, 20 nt, Human
auagaaccucuuugucuaca

SEQ ID NO: 1699829 - RNA, 14 nt, Human
auagaaccucuuug

SEQ ID NO: 1699830 - RNA, 13 nt, Human
auagaaguaaaaa

SEQ ID NO: 1699831 - RNA, 17 nt, Human
auagaauuaacacauga

SEQ ID NO: 1699832 - RNA, 11 nt, Human
uuauuaugaaa

SEQ ID NO: 1699833 - RNA, 15 nt, Human
uuauuauauuuacaa

SEQ ID NO: 1699834 - RNA, 23 nt, Human
uuauuaugaaacuuguguaaaua

SEQ ID NO: 1699835 - RNA, 22 nt, Human
uuauuaugaaacuuguguaaau

SEQ ID NO: 1699836 - RNA, 21 nt, Human
uuauuaugaaacuuguguaaa

SEQ ID NO: 1699837 - RNA, 20 nt, Human
uuauuaugaaacuuguguaa

SEQ ID NO: 1699838 - RNA, 17 nt, Human
uuauuaugaaacuugug

SEQ ID NO: 1699839 - RNA, 19 nt, Human
uuauguuaaaacugggaca

SEQ ID NO: 1699840 - RNA, 14 nt, Human
uuauuauauuuaca

SEQ ID NO: 1699841 - RNA, 14 nt, Human
uuauuauguaaauc

SEQ ID NO: 1699842 - RNA, 13 nt, Human
uuauuauguaaau

SEQ ID NO: 1699843 - RNA, 22 nt, Human
uuauuauguaaaucccauuauu

SEQ ID NO: 1699844 - RNA, 16 nt, Human
uuauuauguaaauccc

SEQ ID NO: 1699845 - RNA, 19 nt, Human
uuauucaaaguugccuaaa

SEQ ID NO: 1699846 - RNA, 15 nt, Human
uuauucaaaguugcc

SEQ ID NO: 1699847 - RNA, 13 nt, Human
uuauucaaaguug

SEQ ID NO: 1699848 - RNA, 14 nt, Human
uuauucacugauuu

SEQ ID NO: 1699849 - RNA, 15 nt, Human
auacuggauuguacu

SEQ ID NO: 1699850 - RNA, 16 nt, Human
auacucauuaggaugg

SEQ ID NO: 1699851 - RNA, 22 nt, Human
uuaugacuucauuaauaauaaa

SEQ ID NO: 1699852 - RNA, 19 nt, Human
uuaugacuucauuaauaau

SEQ ID NO: 1699853 - RNA, 18 nt, Human
uuaugauccagcagauua

SEQ ID NO: 1699854 - RNA, 13 nt, Human
uuaugauccagca

SEQ ID NO: 1699855 - RNA, 21 nt, Human
uuaugaauuacauuuguauaa

SEQ ID NO: 1699856 - RNA, 17 nt, Human
uuaugaauuacauuugu

SEQ ID NO: 1699857 - RNA, 16 nt, Human
uuaugaauuacauuug

SEQ ID NO: 1699858 - RNA, 14 nt, Human
uuaugaauuacauu

SEQ ID NO: 1699859 - RNA, 19 nt, Human
uuaugaaacuuguguaaau

SEQ ID NO: 1699860 - RNA, 13 nt, Human
uuaugaaacuugu

SEQ ID NO: 1699861 - RNA, 18 nt, Human
uuaugaaacuuguguaaa

SEQ ID NO: 1699862 - RNA, 16 nt, Human
uuaugaaacuugugua

SEQ ID NO: 1699863 - RNA, 23 nt, Human
uuaugauccagcagauuauucac

SEQ ID NO: 1699864 - RNA, 22 nt, Human
uuaugauccagcagauuauuca

SEQ ID NO: 1699865 - RNA, 19 nt, Human
uuaugauuaaguaaugaua

SEQ ID NO: 1699866 - RNA, 22 nt, Human
uuaugauuaaguaaugauaacu

SEQ ID NO: 1699867 - RNA, 23 nt, Human
uuauguaaaucccauuauucaaa

SEQ ID NO: 1699868 - RNA, 22 nt, Human
uuauguaaaucccauuauucaa

SEQ ID NO: 1699869 - RNA, 21 nt, Human
uuauguaaaucccauuauuca

SEQ ID NO: 1699870 - RNA, 19 nt, Human
uuauguaaaucccauuauu

SEQ ID NO: 1699871 - RNA, 13 nt, Human
uuauguaaauccc

SEQ ID NO: 1699872 - RNA, 12 nt, Human
uuauguaaaucc

SEQ ID NO: 1699873 - RNA, 11 nt, Human
uuauguaaauc

SEQ ID NO: 1699874 - RNA, 16 nt, Human
uuaugugcgcugauaa

SEQ ID NO: 1699875 - RNA, 19 nt, Human
uuauauuugaaauauugac

SEQ ID NO: 1699876 - RNA, 19 nt, Human
aguuugugcugguguaugu

SEQ ID NO: 1699877 - RNA, 23 nt, Human
uuaaaccaugggauaaaugccau

SEQ ID NO: 1699878 - RNA, 22 nt, Human
uuaaaccaugggauaaaugcca

SEQ ID NO: 1699879 - RNA, 21 nt, Human
uuaaaccaugggauaaaugcc

SEQ ID NO: 1699880 - RNA, 22 nt, Human
uuaaaguugaauuuauuggcuu

SEQ ID NO: 1699881 - RNA, 17 nt, Human
uuaaaguugaauuuauu

SEQ ID NO: 1699882 - RNA, 16 nt, Human
uuaaaguugaauuuau

SEQ ID NO: 1699883 - RNA, 13 nt, Human
uuaaaguugaauu

SEQ ID NO: 1699884 - RNA, 20 nt, Human
uuaaacauugguucuuguau

SEQ ID NO: 1699885 - RNA, 18 nt, Human
uuaaacauugguucuugu

SEQ ID NO: 1699886 - RNA, 22 nt, Human
uuaaacauugguucuuguauua

SEQ ID NO: 1699887 - RNA, 17 nt, Human
uuaaaccaugggauaaa

SEQ ID NO: 1699888 - RNA, 17 nt, Human
aguuuaaauuguaauag

SEQ ID NO: 1699889 - RNA, 20 nt, Human
aguuuaaauuguaauaggcg

SEQ ID NO: 1699890 - RNA, 15 nt, Human
aguuuagcuggaaaa

SEQ ID NO: 1699891 - RNA, 16 nt, Human
aguuuagcuggaaaag

SEQ ID NO: 1699892 - RNA, 19 nt, Human
uuaaaaaagaaacauuugg

SEQ ID NO: 1699893 - RNA, 12 nt, Human
aguuuuguuugg

SEQ ID NO: 1699894 - RNA, 16 nt, Human
aguuuuguuuggacca

SEQ ID NO: 1699895 - RNA, 14 nt, Human
aguuuuguuuggac

SEQ ID NO: 1699896 - RNA, 16 nt, Human
aguuuuauaugcuucu

SEQ ID NO: 1699897 - RNA, 18 nt, Human
aguuuuguuuggaccaaa

SEQ ID NO: 1699898 - RNA, 22 nt, Human
uuaagaaugaaauacuguuuga

SEQ ID NO: 1699899 - RNA, 20 nt, Human
uuaagaaugaaauacuguuu

SEQ ID NO: 1699900 - RNA, 14 nt, Human
uuaagaaugaaaua

SEQ ID NO: 1699901 - RNA, 13 nt, Human
uuaauuuuggaau

SEQ ID NO: 1699902 - RNA, 15 nt, Human
uuaauuuuggaauuu

SEQ ID NO: 1699903 - RNA, 14 nt, Human
uuaauuuuggaauu

SEQ ID NO: 1699904 - RNA, 21 nt, Human
auaaaucgcuuuugauaauca

SEQ ID NO: 1699905 - RNA, 19 nt, Human
auaaaucgcuuuugauaau

SEQ ID NO: 1699906 - RNA, 16 nt, Human
auaaaucgcuuuugau

SEQ ID NO: 1699907 - RNA, 14 nt, Human
auaaaucgcuuuug

SEQ ID NO: 1699908 - RNA, 18 nt, Human
auaaaugccaucaauaaa

SEQ ID NO: 1699909 - RNA, 17 nt, Human
auaaaugccaucaauaa

SEQ ID NO: 1699910 - RNA, 19 nt, Human
auaaaucugugaacuugaa

SEQ ID NO: 1699911 - RNA, 16 nt, Human
auaaaucugugaacuu

SEQ ID NO: 1699912 - RNA, 15 nt, Human
auaaaucugugaacu

SEQ ID NO: 1699913 - RNA, 17 nt, Human
uuagaauucuguauaga

SEQ ID NO: 1699914 - RNA, 15 nt, Human
uuagaauucuguaua

SEQ ID NO: 1699915 - RNA, 14 nt, Human
uuagaauucuguau

SEQ ID NO: 1699916 - RNA, 14 nt, Human
auaaucuuucacag

SEQ ID NO: 1699917 - RNA, 14 nt, Human
auaagccagacauc

SEQ ID NO: 1699918 - RNA, 16 nt, Human
uuaggguuaugauuaa

SEQ ID NO: 1699919 - RNA, 14 nt, Human
uuaggguuaugauu

SEQ ID NO: 1699920 - RNA, 23 nt, Human
aucugccuaaggacuucuuuaau

SEQ ID NO: 1699921 - RNA, 22 nt, Human
aucugccuaaggacuucuuuaa

SEQ ID NO: 1699922 - RNA, 21 nt, Human
aucugccuaaggacuucuuua

SEQ ID NO: 1699923 - RNA, 11 nt, Human
aucugccuaag

SEQ ID NO: 1699924 - RNA, 14 nt, Human
aucuuauaauuuaa

SEQ ID NO: 1699925 - RNA, 18 nt, Human
augaacuuguaaaggaau

SEQ ID NO: 1699926 - RNA, 17 nt, Human
augaauuacauuuguau

SEQ ID NO: 1699927 - RNA, 16 nt, Human
augaauuacauuugua

SEQ ID NO: 1699928 - RNA, 23 nt, Human
augaauggcuaagcaaaauguga

SEQ ID NO: 1699929 - RNA, 15 nt, Human
augaauuacauuugu

SEQ ID NO: 1699930 - RNA, 23 nt, Human
uugaagcauuuuauaaaucgcuu

SEQ ID NO: 1699931 - RNA, 20 nt, Human
auccucucaaccaccuuuca

SEQ ID NO: 1699932 - RNA, 17 nt, Human
uugaagggaaauuucag

SEQ ID NO: 1699933 - RNA, 19 nt, Human
aucuacacuccagugagac

SEQ ID NO: 1699934 - RNA, 18 nt, Human
aucuacacuccagugaga

SEQ ID NO: 1699935 - RNA, 20 nt, Human
aucugacaucucugcaaucu

SEQ ID NO: 1699936 - RNA, 16 nt, Human
aucugacaucucugca

SEQ ID NO: 1699937 - RNA, 15 nt, Human
aucugacaucucugc

SEQ ID NO: 1699938 - RNA, 22 nt, Human
uugcaagccagauuuuccugaa

SEQ ID NO: 1699939 - RNA, 14 nt, Human
aucucauuuccaag

SEQ ID NO: 1699940 - RNA, 22 nt, Human
aucaccugucuugccuuuuuca

SEQ ID NO: 1699941 - RNA, 23 nt, Human
aucaccugucuugccuuuuucau

SEQ ID NO: 1699942 - RNA, 18 nt, Human
auauuuuuuguuaaauga

SEQ ID NO: 1699943 - RNA, 20 nt, Human
auauuuuuuguuaaaugauu

SEQ ID NO: 1699944 - RNA, 14 nt, Human
aucaacagauaaau

SEQ ID NO: 1699945 - RNA, 19 nt, Human
uuccguagguuauuuucag

SEQ ID NO: 1699946 - RNA, 23 nt, Human
uucuaagaagugaaaaucuacac

SEQ ID NO: 1699947 - RNA, 14 nt, Human
uucggccuccaucc

SEQ ID NO: 1699948 - RNA, 15 nt, Human
uucggccuccauccu

SEQ ID NO: 1699949 - RNA, 22 nt, Human
aucacuugucaauaaaauccau

SEQ ID NO: 1699950 - RNA, 17 nt, Human
aucaggguuaguauugu

SEQ ID NO: 1699951 - RNA, 17 nt, Human
uugaaauuguaauuaua

SEQ ID NO: 1699952 - RNA, 15 nt, Human
uugaaauuguaauua

SEQ ID NO: 1699953 - RNA, 17 nt, Human
uugaaauuguauuacaa

SEQ ID NO: 1699954 - RNA, 19 nt, Human
uugaacccgggaggcagag

SEQ ID NO: 1699955 - RNA, 14 nt, Human
uugaaauuguaauu

SEQ ID NO: 1699956 - RNA, 13 nt, Human
uugaaauuguaau

SEQ ID NO: 1699957 - RNA, 21 nt, Human
auccauuuggaaaucuuuaaa

SEQ ID NO: 1699958 - RNA, 20 nt, Human
auccauuuggaaaucuuuaa

SEQ ID NO: 1699959 - RNA, 12 nt, Human
uucucuaggaaa

SEQ ID NO: 1699960 - RNA, 13 nt, Human
uuuauauuuacua

SEQ ID NO: 1699961 - RNA, 16 nt, Human
uuuauauuuacuaaaa

SEQ ID NO: 1699962 - RNA, 11 nt, Human
augcuauuucu

SEQ ID NO: 1699963 - RNA, 20 nt, Human
augcuauuucuauauuuuca

SEQ ID NO: 1699964 - RNA, 15 nt, Human
augcuauuucuauau

SEQ ID NO: 1699965 - RNA, 14 nt, Human
augcuauuucuaua

SEQ ID NO: 1699966 - RNA, 13 nt, Human
augcuauuucuau

SEQ ID NO: 1699967 - RNA, 23 nt, Human
augcuauuucuauauuuucauuc

SEQ ID NO: 1699968 - RNA, 22 nt, Human
augcuauuucuauauuuucauu

SEQ ID NO: 1699969 - RNA, 21 nt, Human
augcuauuucuauauuuucau

SEQ ID NO: 1699970 - RNA, 18 nt, Human
uuuauuacaguauaauua

SEQ ID NO: 1699971 - RNA, 14 nt, Human
uuuauuacaguaua

SEQ ID NO: 1699972 - RNA, 22 nt, Human
augcuagaacucccuuucaaca

SEQ ID NO: 1699973 - RNA, 21 nt, Human
augcuagaacucccuuucaac

SEQ ID NO: 1699974 - RNA, 20 nt, Human
augcuagaacucccuuucaa

SEQ ID NO: 1699975 - RNA, 19 nt, Human
auggaacgcguugaaauug

SEQ ID NO: 1699976 - RNA, 18 nt, Human
auggaacgcguugaaauu

SEQ ID NO: 1699977 - RNA, 17 nt, Human
uuucaaacauauauaac

SEQ ID NO: 1699978 - RNA, 16 nt, Human
uuucaaacauauauaa

SEQ ID NO: 1699979 - RNA, 17 nt, Human
auggaacgcguugaaau

SEQ ID NO: 1699980 - RNA, 16 nt, Human
auggaacgcguugaaa

SEQ ID NO: 1699981 - RNA, 15 nt, Human
auggaacgcguugaa

SEQ ID NO: 1699982 - RNA, 15 nt, Human
uuucauuauuuuauu

SEQ ID NO: 1699983 - RNA, 13 nt, Human
uuucauuauuuua

SEQ ID NO: 1699984 - RNA, 20 nt, Human
uuucauuauuuuauuaugaa

SEQ ID NO: 1699985 - RNA, 19 nt, Human
uuucauuauuuuauuauga

SEQ ID NO: 1699986 - RNA, 22 nt, Human
auggacuguggugacuuuggau

SEQ ID NO: 1699987 - RNA, 17 nt, Human
auggacuguggugacuu

SEQ ID NO: 1699988 - RNA, 16 nt, Human
auggacuguggugacu

SEQ ID NO: 1699989 - RNA, 14 nt, Human
augggauaaaugcc

SEQ ID NO: 1699990 - RNA, 19 nt, Human
auggcuaagcaaaauguga

SEQ ID NO: 1699991 - RNA, 16 nt, Human
auggcacuaguauuuc

SEQ ID NO: 1699992 - RNA, 14 nt, Human
auggcacuaguauu

SEQ ID NO: 1699993 - RNA, 22 nt, Human
augauccagcagauuauucacu

SEQ ID NO: 1699994 - RNA, 18 nt, Human
augauuaaguaaugauaa

SEQ ID NO: 1699995 - RNA, 14 nt, Human
augauuaaguaaug

SEQ ID NO: 1699996 - RNA, 20 nt, Human
augauccagcagauuauuca

SEQ ID NO: 1699997 - RNA, 19 nt, Human
augauccagcagauuauuc

SEQ ID NO: 1699998 - RNA, 10 nt, Human
augauccagc

SEQ ID NO: 1699999 - RNA, 15 nt, Human
augauaacuggaaac

SEQ ID NO: 1700000 - RNA, 21 nt, Human
uuuaaauaaauaaauagcuag

SEQ ID NO: 1700001 - RNA, 18 nt, Human
uuuaaauauaugcuaagu

SEQ ID NO: 1700002 - RNA, 13 nt, Human
augcaguucugaa

SEQ ID NO: 1700003 - RNA, 19 nt, Human
uuugugcugguguaugugu

SEQ ID NO: 1700004 - RNA, 17 nt, Human
uuugugaagcaaaauuu

SEQ ID NO: 1700005 - RNA, 21 nt, Human
uuuguaguguuggagaagaac

SEQ ID NO: 1700006 - RNA, 19 nt, Human
uuuguaguguuggagaaga

SEQ ID NO: 1700007 - RNA, 20 nt, Human
uuuggcauaacauaaaucug

SEQ ID NO: 1700008 - RNA, 21 nt, Human
uuuggcauaacauaaaucugu

SEQ ID NO: 1700009 - RNA, 17 nt, Human
auguccacugguucuuc

SEQ ID NO: 1700010 - RNA, 13 nt, Human
auguagaggagaa

SEQ ID NO: 1700011 - RNA, 12 nt, Human
auguagaggaga

SEQ ID NO: 1700012 - RNA, 19 nt, Human
auguagaggagaaacugga

SEQ ID NO: 1700013 - RNA, 17 nt, Human
auguagaggagaaacug

SEQ ID NO: 1700014 - RNA, 16 nt, Human
auguacuucaugcugu

SEQ ID NO: 1700015 - RNA, 14 nt, Human
uuugcaagccagau

SEQ ID NO: 1700016 - RNA, 23 nt, Human
auguaaaucccauuauucaaagu

SEQ ID NO: 1700017 - RNA, 22 nt, Human
auguaaaucccauuauucaaag

SEQ ID NO: 1700018 - RNA, 20 nt, Human
auguaaaucccauuauucaa

SEQ ID NO: 1700019 - RNA, 14 nt, Human
auguaaaucccauu

SEQ ID NO: 1700020 - RNA, 21 nt, Human
augguucccuugaugaagaag

SEQ ID NO: 1700021 - RNA, 20 nt, Human
augggauaaaugccaucaau

SEQ ID NO: 1700022 - RNA, 16 nt, Human
augggauaaaugccau

SEQ ID NO: 1700023 - RNA, 15 nt, Human
augggauaaaugcca

SEQ ID NO: 1700024 - RNA, 19 nt, Human
uuucuguuauauaaauggu

SEQ ID NO: 1700025 - RNA, 19 nt, Human
uuucuguacuuuuuggcau

SEQ ID NO: 1700026 - RNA, 20 nt, Human
uuucuguacuuuuuggcaua

SEQ ID NO: 1700027 - RNA, 15 nt, Human
uuugaaauauugacu

SEQ ID NO: 1700028 - RNA, 13 nt, Human
auuauucaaaguu

SEQ ID NO: 1700029 - RNA, 15 nt, Human
auuauucaaaguugc

SEQ ID NO: 1700030 - RNA, 14 nt, Human
auuauucaaaguug

SEQ ID NO: 1700031 - RNA, 17 nt, Human
auuauucaaaguugccu

SEQ ID NO: 1700032 - RNA, 21 nt, Human
auuauguuaaaacugggacag

SEQ ID NO: 1700033 - RNA, 18 nt, Human
auuauauuuauuacugua

SEQ ID NO: 1700034 - RNA, 15 nt, Human
auuauauuuauuacu

SEQ ID NO: 1700035 - RNA, 15 nt, Human
auuauauuuacaaau

SEQ ID NO: 1700036 - RNA, 13 nt, Human
auucuguauagau

SEQ ID NO: 1700037 - RNA, 12 nt, Human
auucuguauaga

SEQ ID NO: 1700038 - RNA, 11 nt, Human
auucuguauag

SEQ ID NO: 1700039 - RNA, 22 nt, Human
auugaagcauuuuauaaaucgc

SEQ ID NO: 1700040 - RNA, 17 nt, Human
auugacacuuaaaaaug

SEQ ID NO: 1700041 - RNA, 15 nt, Human
auugacacuuaaaaa

SEQ ID NO: 1700042 - RNA, 19 nt, Human
auugacacuuaaaaauggu

SEQ ID NO: 1700043 - RNA, 20 nt, Human
auucuuaaaguugaauuuau

SEQ ID NO: 1700044 - RNA, 19 nt, Human
auucuuaaaguugaauuua

SEQ ID NO: 1700045 - RNA, 15 nt, Human
auucuguauagauua

SEQ ID NO: 1700046 - RNA, 21 nt, Human
auucuuaaaguugaauuuauu

SEQ ID NO: 1700047 - RNA, 15 nt, Human
auuuuguuucuguac

SEQ ID NO: 1700048 - RNA, 14 nt, Human
auuuuguuucugua

SEQ ID NO: 1700049 - RNA, 22 nt, Human
auuuuugugauuuugugauuga

SEQ ID NO: 1700050 - RNA, 18 nt, Human
auuuuuuguuaaaugauu

SEQ ID NO: 1700051 - RNA, 23 nt, Human
auuuuuucucuaggaaauauuua

SEQ ID NO: 1700052 - RNA, 20 nt, Human
auuuuuucucuaggaaauau

SEQ ID NO: 1700053 - RNA, 11 nt, Human
auuuuguuucu

SEQ ID NO: 1700054 - RNA, 12 nt, Human
auuuuggaauuu

SEQ ID NO: 1700055 - RNA, 14 nt, Human
auuuuccugaaaac

SEQ ID NO: 1700056 - RNA, 14 nt, Human
auuuucuauaauuu

SEQ ID NO: 1700057 - RNA, 15 nt, Human
auuuucuauaauuua

SEQ ID NO: 1700058 - RNA, 12 nt, Human
auuuuaauaaug

SEQ ID NO: 1700059 - RNA, 16 nt, Human
auugguucuuguauua

SEQ ID NO: 1700060 - RNA, 15 nt, Human
auugguucuuguauu

SEQ ID NO: 1700061 - RNA, 20 nt, Human
auuggcuuuucugauccagu

SEQ ID NO: 1700062 - RNA, 19 nt, Human
auuggcuuuucugauccag

SEQ ID NO: 1700063 - RNA, 16 nt, Human
auuggcuuuucugauc

SEQ ID NO: 1700064 - RNA, 15 nt, Human
auuggcuuuucugau

SEQ ID NO: 1700065 - RNA, 13 nt, Human
auuggcuuuucug

SEQ ID NO: 1700066 - RNA, 18 nt, Human
auugacuuuuuauggcac

SEQ ID NO: 1700067 - RNA, 13 nt, Human
auugacuuuuuau

SEQ ID NO: 1700068 - RNA, 19 nt, Human
auuggagcucgugggacag

SEQ ID NO: 1700069 - RNA, 19 nt, Human
auuggacaguaaaauccac

SEQ ID NO: 1700070 - RNA, 13 nt, Human
auugucuagugaa

SEQ ID NO: 1700071 - RNA, 15 nt, Human
auuugaauuuugugu

SEQ ID NO: 1700072 - RNA, 21 nt, Human
auuugacauagucuggcugua

SEQ ID NO: 1700073 - RNA, 17 nt, Human
auuugacauagucuggc

SEQ ID NO: 1700074 - RNA, 16 nt, Human
auuugacauagucugg

SEQ ID NO: 1700075 - RNA, 20 nt, Human
auuucuugagguaaaagcau

SEQ ID NO: 1700076 - RNA, 14 nt, Human
auuuauuuuaauaa

SEQ ID NO: 1700077 - RNA, 16 nt, Human
auuuuaaaagaaugau

SEQ ID NO: 1700078 - RNA, 23 nt, Human
auuuuaaaagaaugauuaugaau

SEQ ID NO: 1700079 - RNA, 14 nt, Human
auuuguauaaaaua

SEQ ID NO: 1700080 - RNA, 22 nt, Human
auuuguaguguuggagaagaac

SEQ ID NO: 1700081 - RNA, 19 nt, Human
auuuguaguguuggagaag

SEQ ID NO: 1700082 - RNA, 22 nt, Human
gcuauuucuauauuuucauucu

SEQ ID NO: 1700083 - RNA, 15 nt, Human
gcuagaacucccuuu

SEQ ID NO: 1700084 - RNA, 14 nt, Human
gcuagaacucccuu

SEQ ID NO: 1700085 - RNA, 13 nt, Human
gcuagaacucccu

SEQ ID NO: 1700086 - RNA, 12 nt, Human
gcuagaacuccc

SEQ ID NO: 1700087 - RNA, 18 nt, Human
gcuagaacucccuuucaa

SEQ ID NO: 1700088 - RNA, 16 nt, Human
gcuagaacucccuuuc

SEQ ID NO: 1700089 - RNA, 15 nt, Human
gcuccacuuggucug

SEQ ID NO: 1700090 - RNA, 19 nt, Human
gcuccacuuggucugugag

SEQ ID NO: 1700091 - RNA, 18 nt, Human
gcuccacuuggucuguga

SEQ ID NO: 1700092 - RNA, 12 nt, Human
gccuccauccug

SEQ ID NO: 1700093 - RNA, 15 nt, Human
gccucuuagaugcag

SEQ ID NO: 1700094 - RNA, 20 nt, Human
gccuucggccuccauccuga

SEQ ID NO: 1700095 - RNA, 23 nt, Human
gccuucggccuccauccugaggc

SEQ ID NO: 1700096 - RNA, 21 nt, Human
gccuucggccuccauccugag

SEQ ID NO: 1700097 - RNA, 14 nt, Human
gcugggguuaucug

SEQ ID NO: 1700098 - RNA, 23 nt, Human
gcugggguuaucugaagucagau

SEQ ID NO: 1700099 - RNA, 22 nt, Human
gcugggguuaucugaagucaga

SEQ ID NO: 1700100 - RNA, 12 nt, Human
ggacuuguuaga

SEQ ID NO: 1700101 - RNA, 15 nt, Human
ggacuuguuagaucu

SEQ ID NO: 1700102 - RNA, 18 nt, Human
ggacuucuuuaauuuugg

SEQ ID NO: 1700103 - RNA, 21 nt, Human
ggacuucuuuaauuuuggaau

SEQ ID NO: 1700104 - RNA, 22 nt, Human
ggacuucuuuaauuuuggaauu

SEQ ID NO: 1700105 - RNA, 13 nt, Human
ggagaaacuggaa

SEQ ID NO: 1700106 - RNA, 17 nt, Human
ggcauaacauaaaucug

SEQ ID NO: 1700107 - RNA, 16 nt, Human
ggcauaacauaaaucu

SEQ ID NO: 1700108 - RNA, 16 nt, Human
ggccuccauccugagg

SEQ ID NO: 1700109 - RNA, 15 nt, Human
ggccuccauccugag

SEQ ID NO: 1700110 - RNA, 14 nt, Human
ggccuccauccuga

SEQ ID NO: 1700111 - RNA, 17 nt, Human
aaaaccaguauuguaca

SEQ ID NO: 1700112 - RNA, 17 nt, Human
aaaaaugguuuaaaugg

SEQ ID NO: 1700113 - RNA, 15 nt, Human
aaaacuucagacaua

SEQ ID NO: 1700114 - RNA, 15 nt, Human
ggcuguacccaggaa

SEQ ID NO: 1700115 - RNA, 14 nt, Human
aaaaauaacaauga

SEQ ID NO: 1700116 - RNA, 22 nt, Human
gggacagucaccucauggaauu

SEQ ID NO: 1700117 - RNA, 21 nt, Human
gggacagucaccucauggaau

SEQ ID NO: 1700118 - RNA, 20 nt, Human
gggacagucaccucauggaa

SEQ ID NO: 1700119 - RNA, 14 nt, Human
ggcuccacuugguc

SEQ ID NO: 1700120 - RNA, 20 nt, Human
aaaggaagguucugguguga

SEQ ID NO: 1700121 - RNA, 14 nt, Human
aaagguacuucaaa

SEQ ID NO: 1700122 - RNA, 11 nt, Human
aaacuuuucug

SEQ ID NO: 1700123 - RNA, 13 nt, Human
aaagacagugaaa

SEQ ID NO: 1700124 - RNA, 23 nt, Human
aaacuucagcgguuuauauaagc

SEQ ID NO: 1700125 - RNA, 19 nt, Human
aaacuucagacauagaauu

SEQ ID NO: 1700126 - RNA, 15 nt, Human
aaagaggaaugaagu

SEQ ID NO: 1700127 - RNA, 22 nt, Human
aaacugcuuguuuccuagcaca

SEQ ID NO: 1700128 - RNA, 19 nt, Human
aaacugcuuguuuccuagc

SEQ ID NO: 1700129 - RNA, 17 nt, Human
aaacugcuuguuuccua

SEQ ID NO: 1700130 - RNA, 14 nt, Human
aaacugcuuguuuc

SEQ ID NO: 1700131 - RNA, 13 nt, Human
aaacugcuuguuu

SEQ ID NO: 1700132 - RNA, 15 nt, Human
aaacucguuaauuug

SEQ ID NO: 1700133 - RNA, 15 nt, Human
aaaccucugugagca

SEQ ID NO: 1700134 - RNA, 14 nt, Human
aaacaguagugaua

SEQ ID NO: 1700135 - RNA, 19 nt, Human
ggggaauugaggacacuga

SEQ ID NO: 1700136 - RNA, 22 nt, Human
aaauacaauuuuguuucuguac

SEQ ID NO: 1700137 - RNA, 21 nt, Human
aaauacaauuuuguuucugua

SEQ ID NO: 1700138 - RNA, 20 nt, Human
aaauacaauuuuguuucugu

SEQ ID NO: 1700139 - RNA, 18 nt, Human
aaauacaauuuuguuucu

SEQ ID NO: 1700140 - RNA, 17 nt, Human
aaauacaauuuuguuuc

SEQ ID NO: 1700141 - RNA, 14 nt, Human
aaauacaauuuugu

SEQ ID NO: 1700142 - RNA, 13 nt, Human
aaauacaauuuug

SEQ ID NO: 1700143 - RNA, 23 nt, Human
aaauaauuuuuauauuugaaaua

SEQ ID NO: 1700144 - RNA, 22 nt, Human
aaauaauuuuuauauuugaaau

SEQ ID NO: 1700145 - RNA, 21 nt, Human
aaauaauuuuuauauuugaaa

SEQ ID NO: 1700146 - RNA, 23 nt, Human
guacacugccuucucaacuccaa

SEQ ID NO: 1700147 - RNA, 20 nt, Human
guaauaggcguaacuaauuu

SEQ ID NO: 1700148 - RNA, 23 nt, Human
aaaguugccuaaauccauuugga

SEQ ID NO: 1700149 - RNA, 17 nt, Human
aaaguugccuaaaucca

SEQ ID NO: 1700150 - RNA, 16 nt, Human
aaaguugccuaaaucc

SEQ ID NO: 1700151 - RNA, 14 nt, Human
aaaguuuaauauua

SEQ ID NO: 1700152 - RNA, 12 nt, Human
aaaguuuaauau

SEQ ID NO: 1700153 - RNA, 14 nt, Human
aaaguugccuaaau

SEQ ID NO: 1700154 - RNA, 13 nt, Human
aaaguugccuaaa

SEQ ID NO: 1700155 - RNA, 23 nt, Human
aaaguucugcagauaaacaguag

SEQ ID NO: 1700156 - RNA, 20 nt, Human
aaaguauuaagcauauauuu

SEQ ID NO: 1700157 - RNA, 19 nt, Human
aaaguauuaagcauauauu

SEQ ID NO: 1700158 - RNA, 18 nt, Human
aaaguauuaagcauauau

SEQ ID NO: 1700159 - RNA, 13 nt, Human
aaaguauuaagca

SEQ ID NO: 1700160 - RNA, 20 nt, Human
aaagguauuuuaaucaccaa

SEQ ID NO: 1700161 - RNA, 18 nt, Human
aaaguauguuagugcaaa

SEQ ID NO: 1700162 - RNA, 15 nt, Human
guacuucaugcuguc

SEQ ID NO: 1700163 - RNA, 22 nt, Human
guacuucaaauccuugaagauu

SEQ ID NO: 1700164 - RNA, 21 nt, Human
guacuucaaauccuugaagau

SEQ ID NO: 1700165 - RNA, 18 nt, Human
aaauccauacauuugugu

SEQ ID NO: 1700166 - RNA, 15 nt, Human
aaauccauacauuug

SEQ ID NO: 1700167 - RNA, 17 nt, Human
aaauauuauguuaaaac

SEQ ID NO: 1700168 - RNA, 19 nt, Human
gacuuuggauaauaaggaa

SEQ ID NO: 1700169 - RNA, 17 nt, Human
gacuguggugacuuugg

SEQ ID NO: 1700170 - RNA, 14 nt, Human
gacagaaagcagaa

SEQ ID NO: 1700171 - RNA, 20 nt, Human
gacagaaagcagaacaguga

SEQ ID NO: 1700172 - RNA, 21 nt, Human
gacagcccuucuuuccacaga

SEQ ID NO: 1700173 - RNA, 20 nt, Human
gacaguauggcagcuuuccu

SEQ ID NO: 1700174 - RNA, 15 nt, Human
gagcgacagugagac

SEQ ID NO: 1700175 - RNA, 13 nt, Human
gagcgacagugag

SEQ ID NO: 1700176 - RNA, 18 nt, Human
gaugucuucauaccuaca

SEQ ID NO: 1700177 - RNA, 14 nt, Human
gaugucuucauacc

SEQ ID NO: 1700178 - RNA, 15 nt, Human
gauucuuaaaguuga

SEQ ID NO: 1700179 - RNA, 17 nt, Human
gauucuuaaaguugaau

SEQ ID NO: 1700180 - RNA, 16 nt, Human
gauucuuaaaguugaa

SEQ ID NO: 1700181 - RNA, 21 nt, Human
gauucuuaaaguugaauuuau

SEQ ID NO: 1700182 - RNA, 16 nt, Human
gcaaaaauauuuuaug

SEQ ID NO: 1700183 - RNA, 23 nt, Human
gcaaaaauauuuuaugauccagc

SEQ ID NO: 1700184 - RNA, 22 nt, Human
gcaaaaauauuuuaugauccag

SEQ ID NO: 1700185 - RNA, 17 nt, Human
gcaaaaauauuuuauga

SEQ ID NO: 1700186 - RNA, 18 nt, Human
gcaauagucaaauugugu

SEQ ID NO: 1700187 - RNA, 13 nt, Human
gcauaacauaaau

SEQ ID NO: 1700188 - RNA, 15 nt, Human
gcagcuuauucacaa

SEQ ID NO: 1700189 - RNA, 22 nt, Human
cuuucagauacuggauuguacu

SEQ ID NO: 1700190 - RNA, 17 nt, Human
cuuucagauacuggauu

SEQ ID NO: 1700191 - RNA, 15 nt, Human
cuuucagauacugga

SEQ ID NO: 1700192 - RNA, 14 nt, Human
cuuucagauacugg

SEQ ID NO: 1700193 - RNA, 18 nt, Human
cuugucucagauuuuauu

SEQ ID NO: 1700194 - RNA, 13 nt, Human
cuugucucagauu

SEQ ID NO: 1700195 - RNA, 17 nt, Human
cuugucucagauuuuau

SEQ ID NO: 1700196 - RNA, 14 nt, Human
cuugucucagauuu

SEQ ID NO: 1700197 - RNA, 16 nt, Human
cuuggucugugagaug

SEQ ID NO: 1700198 - RNA, 19 nt, Human
cuuggucugugagaugcua

SEQ ID NO: 1700199 - RNA, 13 nt, Human
cuucucacauuua

SEQ ID NO: 1700200 - RNA, 20 nt, Human
cuucucacauuuauauuuuu

SEQ ID NO: 1700201 - RNA, 17 nt, Human
gaaacuggguuccugca

SEQ ID NO: 1700202 - RNA, 18 nt, Human
gaaagaaaaucaggcugg

SEQ ID NO: 1700203 - RNA, 21 nt, Human
gaaacugcuuguuuccuagca

SEQ ID NO: 1700204 - RNA, 15 nt, Human
gaaaucuuuaaaaaa

SEQ ID NO: 1700205 - RNA, 12 nt, Human
gaaaucuuuaaa

SEQ ID NO: 1700206 - RNA, 17 nt, Human
gaaaugaaagcagggac

SEQ ID NO: 1700207 - RNA, 18 nt, Human
gaacacuccaauuaagga

SEQ ID NO: 1700208 - RNA, 21 nt, Human
gaaaacuuuaugcuaagugaa

SEQ ID NO: 1700209 - RNA, 19 nt, Human
gaacccgggaggcagaggu

SEQ ID NO: 1700210 - RNA, 17 nt, Human
gaacccgggaggcagag

SEQ ID NO: 1700211 - RNA, 13 nt, Human
gaacugaaaucau

SEQ ID NO: 1700212 - RNA, 20 nt, Human
cuguuauuuauaaucacuuu

SEQ ID NO: 1700213 - RNA, 14 nt, Human
cuguuauuuauaau

SEQ ID NO: 1700214 - RNA, 18 nt, Human
cuuaaaguugaauuuauu

SEQ ID NO: 1700215 - RNA, 15 nt, Human
cuuaaaguugaauuu

SEQ ID NO: 1700216 - RNA, 14 nt, Human
cuuaaaguugaauu

SEQ ID NO: 1700217 - RNA, 22 nt, Human
cuuaaauaauaaagaucaugua

SEQ ID NO: 1700218 - RNA, 13 nt, Human
cuuaaauaauaaa

SEQ ID NO: 1700219 - RNA, 22 nt, Human
cuuaaaguugaauuuauuggcu

SEQ ID NO: 1700220 - RNA, 21 nt, Human
cuuaaaaaugguuuaaauggu

SEQ ID NO: 1700221 - RNA, 19 nt, Human
cuguuauaaucuuucacag

SEQ ID NO: 1700222 - RNA, 13 nt, Human
cuguuauaaucuu

SEQ ID NO: 1700223 - RNA, 22 nt, Human
cauugguucuuguauuaagaau

SEQ ID NO: 1700224 - RNA, 18 nt, Human
cauugguucuuguauuaa

SEQ ID NO: 1700225 - RNA, 18 nt, Human
ccacagaagcuccaggua

SEQ ID NO: 1700226 - RNA, 18 nt, Human
ccaccagucugacuguuu

SEQ ID NO: 1700227 - RNA, 16 nt, Human
ccacagaagcuccagg

SEQ ID NO: 1700228 - RNA, 21 nt, Human
caguauuguacaaaguauuaa

SEQ ID NO: 1700229 - RNA, 15 nt, Human
cagucaccucaugga

SEQ ID NO: 1700230 - RNA, 13 nt, Human
caguauuguacaa

SEQ ID NO: 1700231 - RNA, 12 nt, Human
caguauuguaca

SEQ ID NO: 1700232 - RNA, 19 nt, Human
caguauuguacaaaguauu

SEQ ID NO: 1700233 - RNA, 18 nt, Human
caguauuguacaaaguau

SEQ ID NO: 1700234 - RNA, 17 nt, Human
caguauuguacaaagua

SEQ ID NO: 1700235 - RNA, 16 nt, Human
caguauuguacaaagu

SEQ ID NO: 1700236 - RNA, 18 nt, Human
cagggaggacgcucucug

SEQ ID NO: 1700237 - RNA, 17 nt, Human
cagggaggacgcucucu

SEQ ID NO: 1700238 - RNA, 19 nt, Human
cagggaggacgcucucugg

SEQ ID NO: 1700239 - RNA, 22 nt, Human
cagcacagccucuuagaugcag

SEQ ID NO: 1700240 - RNA, 22 nt, Human
cagccugagcgacagugagacu

SEQ ID NO: 1700241 - RNA, 19 nt, Human
cagccugagcgacagugag

SEQ ID NO: 1700242 - RNA, 18 nt, Human
cagccugagcgacaguga

SEQ ID NO: 1700243 - RNA, 20 nt, Human
cagcccuucuuuccacagaa

SEQ ID NO: 1700244 - RNA, 19 nt, Human
cagcccuucuuuccacaga

SEQ ID NO: 1700245 - RNA, 15 nt, Human
cagcccuucuuucca

SEQ ID NO: 1700246 - RNA, 19 nt, Human
auuguacaaaguauuaagc

SEQ ID NO: 1700247 - RNA, 17 nt, Human
auuguacaaaguauuaa

SEQ ID NO: 1700248 - RNA, 16 nt, Human
auuguacaaaguauua

SEQ ID NO: 1700249 - RNA, 21 nt, Human
auuguaauuauaucugaggaa

SEQ ID NO: 1700250 - RNA, 15 nt, Human
auuguaauuauaucu

SEQ ID NO: 1700251 - RNA, 17 nt, Human
auuguaauuauaucuga

SEQ ID NO: 1700252 - RNA, 16 nt, Human
auuguaauuauaucug

SEQ ID NO: 1700253 - RNA, 16 nt, Human
auuucuauauuuucau

SEQ ID NO: 1700254 - RNA, 15 nt, Human
auuucuauauuuuca

SEQ ID NO: 1700255 - RNA, 18 nt, Human
auuucuauauuuucauuc

SEQ ID NO: 1700256 - RNA, 17 nt, Human
auuucuauauuuucauu

SEQ ID NO: 1700257 - RNA, 14 nt, Human
auuucuaugaaaua

SEQ ID NO: 1700258 - RNA, 22 nt, Human
auuucuaugcugaguuugugcu

SEQ ID NO: 1700259 - RNA, 21 nt, Human
auuucuaugcugaguuugugc

SEQ ID NO: 1700260 - RNA, 19 nt, Human
auuucuaugcugaguuugu

SEQ ID NO: 1700261 - RNA, 19 nt, Human
auuucuauauuuucauucu

SEQ ID NO: 1700262 - RNA, 22 nt, Human
auuuauaaucacuuuuuuccac

SEQ ID NO: 1700263 - RNA, 13 nt, Human
auuuauaaucacu

SEQ ID NO: 1700264 - RNA, 15 nt, Human
auuuauaaucacuuu

SEQ ID NO: 1700265 - RNA, 12 nt, Human
auuauguaaauc

SEQ ID NO: 1700266 - RNA, 22 nt, Human
auuaugaauuacauuuguauaa

SEQ ID NO: 1700267 - RNA, 20 nt, Human
auuaugaauuacauuuguau

SEQ ID NO: 1700268 - RNA, 19 nt, Human
auuaugaauuacauuugua

SEQ ID NO: 1700269 - RNA, 19 nt, Human
auuuuaugcuuuaaacauu

SEQ ID NO: 1700270 - RNA, 18 nt, Human
auuuuaugcuuuaaacau

SEQ ID NO: 1700271 - RNA, 18 nt, Human
auuuuagcuacuauauau

SEQ ID NO: 1700272 - RNA, 21 nt, Human
auuuuauaucaauuuaaaaaa

SEQ ID NO: 1700273 - RNA, 16 nt, Human
auuuuuauauuuacua

SEQ ID NO: 1700274 - RNA, 15 nt, Human
auuuuuauauuuacu

SEQ ID NO: 1700275 - RNA, 16 nt, Human
auuuuuauauuugaaa

SEQ ID NO: 1700276 - RNA, 15 nt, Human
auuuuuauauuugaa

SEQ ID NO: 1700277 - RNA, 13 nt, Human
auuuuuuuguugu

SEQ ID NO: 1700278 - RNA, 17 nt, Human
caaacauauauaacaau

SEQ ID NO: 1700279 - RNA, 21 nt, Human
caaaaggauaaugaauacuuu

SEQ ID NO: 1700280 - RNA, 19 nt, Human
caagacccaaaaggcagaa

SEQ ID NO: 1700281 - RNA, 22 nt, Human
caccuuucagauaacuguuauu

SEQ ID NO: 1700282 - RNA, 21 nt, Human
caccuuucagauaacuguuau

SEQ ID NO: 1700283 - RNA, 12 nt, Human
cacuccagccug

SEQ ID NO: 1700284 - RNA, 13 nt, Human
cacuccagccuga

SEQ ID NO: 1700285 - RNA, 23 nt, Human
cacuccagccugagcgacaguga

SEQ ID NO: 1700286 - RNA, 15 nt, Human
cacuuaaaaaugguu

SEQ ID NO: 1700287 - RNA, 17 nt, Human
cacuuguguuuugcaag

SEQ ID NO: 1700288 - RNA, 18 nt, Human
cagaacagugauuaccag

SEQ ID NO: 1700289 - RNA, 17 nt, Human
cagaacagugauuacca

SEQ ID NO: 1700290 - RNA, 12 nt, Human
cagaacagugau

SEQ ID NO: 1700291 - RNA, 11 nt, Human
cagaacaguga

SEQ ID NO: 1700292 - RNA, 23 nt, Human
caaguuguuugagaaauuaagua

SEQ ID NO: 1700293 - RNA, 21 nt, Human
caaguuguuugagaaauuaag

SEQ ID NO: 1700294 - RNA, 17 nt, Human
caaguuguuugagaaau

SEQ ID NO: 1700295 - RNA, 13 nt, Human
caaguuguuugag

SEQ ID NO: 1700296 - RNA, 23 nt, Human
caauaaaauccauacauuugugu

SEQ ID NO: 1700297 - RNA, 20 nt, Human
caauaaaauccauacauuug

SEQ ID NO: 1700298 - RNA, 20 nt, Human
cucagaaggcaaaugacuuu

SEQ ID NO: 1700299 - RNA, 23 nt, Human
cucagaaaacaaggaugaauuaa

SEQ ID NO: 1700300 - RNA, 19 nt, Human
cucagaaaacaaggaugaa

SEQ ID NO: 1700301 - RNA, 23 nt, Human
cuaugucauuugcuggagcucug

SEQ ID NO: 1700302 - RNA, 14 nt, Human
cuacuauauaugug

SEQ ID NO: 1700303 - RNA, 16 nt, Human
cuaaacuuuucugaua

SEQ ID NO: 1700304 - RNA, 15 nt, Human
cuaaacuuuucugau

SEQ ID NO: 1700305 - RNA, 15 nt, Human
cgguuuauauaagcu

SEQ ID NO: 1700306 - RNA, 13 nt, Human
cuccuuucucuuu

SEQ ID NO: 1700307 - RNA, 17 nt, Human
cucucuggccuucggcc

SEQ ID NO: 1700308 - RNA, 22 nt, Human
cucucuggccuucggccuccau

SEQ ID NO: 1700309 - RNA, 19 nt, Human
cucucuggccuucggccuc

SEQ ID NO: 1700310 - RNA, 19 nt, Human
cuccccaugauguuuagaa

SEQ ID NO: 1700311 - RNA, 16 nt, Human
cugaggaauucuguau

SEQ ID NO: 1700312 - RNA, 15 nt, Human
cugaggaauucugua

SEQ ID NO: 1700313 - RNA, 19 nt, Human
cugaggaauucuguauaga

SEQ ID NO: 1700314 - RNA, 18 nt, Human
cugaggaauucuguauag

SEQ ID NO: 1700315 - RNA, 17 nt, Human
cugaaagaggaaugaag

SEQ ID NO: 1700316 - RNA, 13 nt, Human
cugaaagaggaau

SEQ ID NO: 1700317 - RNA, 17 nt, Human
ccugucucuacuaaaaa

SEQ ID NO: 1700318 - RNA, 16 nt, Human
ccucccuucucuucac

SEQ ID NO: 1700319 - RNA, 13 nt, Human
ccccugcacucca

SEQ ID NO: 1700320 - RNA, 13 nt, Human
cccaacuccagaa

SEQ ID NO: 1700321 - RNA, 13 nt, Human
ccauuuggaaauc

SEQ ID NO: 1700322 - RNA, 11 nt, Human
ccauuauucaa

SEQ ID NO: 1700323 - RNA, 18 nt, Human
ccauccugaggcuccacu

SEQ ID NO: 1700324 - RNA, 20 nt, Human
ccauccugaggcuccacuug

SEQ ID NO: 1700325 - RNA, 20 nt, Human
ccagguagaggguguguaag

SEQ ID NO: 1700326 - RNA, 15 nt, Human
ccacugguucuucuu

SEQ ID NO: 1700327 - RNA, 14 nt, Human
ccagacaucaacag

SEQ ID NO: 1700328 - RNA, 19 nt, Human
ccagccugagcgacaguga

SEQ ID NO: 1700329 - RNA, 16 nt, Human
ccccacccugccucac

SEQ ID NO: 1700330 - RNA, 23 nt, Human
cccauuauucaaaguugccuaaa

SEQ ID NO: 1700331 - RNA, 18 nt, Human
cccauuauucaaaguugc

SEQ ID NO: 1700332 - RNA, 15 nt, Human
ccuaacgaaguaucc

SEQ ID NO: 1700333 - RNA, 15 nt, Human
cccuugaugaagaag

SEQ ID NO: 1700334 - RNA, 21 nt, Human
cuaaaauggacuguggugacu

SEQ ID NO: 1700335 - RNA, 22 nt, Human
cuaaaauggacuguggugacuu

SEQ ID NO: 1700336 - RNA, 20 nt, Human
cgggaggcagagguugcagu

SEQ ID NO: 1700337 - RNA, 15 nt, Human
cuaagagagaaugag

SEQ ID NO: 1700338 - RNA, 14 nt, Human
cuaagagagaauga

SEQ ID NO: 1700339 - RNA, 19 nt, Human
cuaaauugacacuuaaaaa

SEQ ID NO: 1700340 - RNA, 22 nt, Human
cuaaggacuucuuuaauuuugg

SEQ ID NO: 1700341 - RNA, 16 nt, Human
cuaaggacuucuuuaa

SEQ ID NO: 1700342 - RNA, 15 nt, Human
cuaaggacuucuuua

SEQ ID NO: 1700343 - RNA, 14 nt, Human
cuaaggacuucuuu

SEQ ID NO: 1700344 - RNA, 21 nt, Human
cuaagcuucacuguaaaauaa

SEQ ID NO: 1700345 - RNA, 14 nt, Human
cuacacuaagagag

SEQ ID NO: 1700346 - RNA, 23 nt, Human
cuacacgagauacagaauuuuau

SEQ ID NO: 1700347 - RNA, 22 nt, Human
cuaggaaauauuuauuuuaaua

SEQ ID NO: 1700348 - RNA, 23 nt, Human
cuagacuggugacugauucuuca

SEQ ID NO: 1700349 - RNA, 22 nt, Human
cuagacuggugacugauucuuc

SEQ ID NO: 1700350 - RNA, 19 nt, Human
cuagacuggugacugauuc

SEQ ID NO: 1700351 - RNA, 18 nt, Human
cuagacuggugacugauu

SEQ ID NO: 1700352 - RNA, 17 nt, Human
cuagacuggugacugau

SEQ ID NO: 1700353 - RNA, 15 nt, Human
cuagacuggugacug

SEQ ID NO: 1700354 - RNA, 14 nt, Human
cuagacuggugacu

SEQ ID NO: 1700355 - RNA, 19 nt, Human
cuagaguuuagcuggaaaa

SEQ ID NO: 1700356 - RNA, 18 nt, Human
cuagaguuuagcuggaaa

SEQ ID NO: 1700357 - RNA, 20 nt, Human
cuaggaaauauuuauuuuaa

SEQ ID NO: 1700358 - RNA, 19 nt, Human
cuaggaaauauuuauuuua

SEQ ID NO: 1700359 - RNA, 15 nt, Human
cuaggaaauauuuau

SEQ ID NO: 1700360 - RNA, 14 nt, Human
cuaggaaauauuua

SEQ ID NO: 1700361 - RNA, 13 nt, Human
cuaugcugaguuu

SEQ ID NO: 1700362 - RNA, 15 nt, Human
cuaugcugaguuugu

SEQ ID NO: 1700363 - RNA, 14 nt, Human
cuaugcugaguuug

SEQ ID NO: 1700364 - RNA, 12 nt, Human
cuauaauuuaaa

SEQ ID NO: 1700365 - RNA, 13 nt, Human
cuauaauuuaaau

SEQ ID NO: 1700366 - RNA, 19 nt, Human
cuaugaaauauuauguuaa

SEQ ID NO: 1700367 - RNA, 18 nt, Human
cucaaccaccuuucagau

SEQ ID NO: 1700368 - RNA, 20 nt, Human
cuauuucuauauuuucauuc

SEQ ID NO: 1700369 - RNA, 19 nt, Human
cuauuucuauauuuucauu

SEQ ID NO: 1700370 - RNA, 22 nt, Human
cucccuauuuuuuuucuguuau

SEQ ID NO: 1700371 - RNA, 20 nt, Human
cuccauuuaauaauuauaug

SEQ ID NO: 1700372 - RNA, 13 nt, Human
cuccauuuaauaa

SEQ ID NO: 1700373 - RNA, 17 nt, Human
cucauuuccaagcaagu

SEQ ID NO: 1700374 - RNA, 14 nt, Human
cucauuuccaagca

SEQ ID NO: 1700375 - RNA, 13 nt, Human
cucauuuccaagc

SEQ ID NO: 1700376 - RNA, 12 nt, Human
cucauuuccaag

SEQ ID NO: 1700377 - RNA, 22 nt, Human
cucagauuuuauuauguaaauc

SEQ ID NO: 1700378 - RNA, 23 nt, Human
cucagauuuuauuauguaaaucc

SEQ ID NO: 1700379 - RNA, 24 nt, Human
cgcguugaaauuguaauuauaucu

SEQ ID NO: 1700380 - RNA, 19 nt, Human
cgcuaaacuuuucugauag

SEQ ID NO: 1700381 - RNA, 18 nt, Human
cgcuaaacuuuucugaua

SEQ ID NO: 1700382 - RNA, 17 nt, Human
cgcuaaacuuuucugau

SEQ ID NO: 1700383 - RNA, 18 nt, Human
ccuucggccuccauccug

SEQ ID NO: 1700384 - RNA, 17 nt, Human
ccuucggccuccauccu

SEQ ID NO: 1700385 - RNA, 14 nt, Human
ccugaggcuccacu

SEQ ID NO: 1700386 - RNA, 13 nt, Human
ccugaggcuccac

SEQ ID NO: 1700387 - RNA, 17 nt, Human
ccugaggcuccacuugg

SEQ ID NO: 1700388 - RNA, 13 nt, Human
ccugaaagaggaa

SEQ ID NO: 1700389 - RNA, 17 nt, Human
ccugccccugagcccau

SEQ ID NO: 1700390 - RNA, 23 nt, Human
gaaaaguuuaauauuaaagccau

SEQ ID NO: 1700391 - RNA, 22 nt, Human
gaaaaucuacacuccagugaga

SEQ ID NO: 1700392 - RNA, 18 nt, Human
gaaaaucuuauaauuuaa

SEQ ID NO: 1700393 - RNA, 15 nt, Human
gaaaaguuuaauauu

SEQ ID NO: 1700394 - RNA, 22 nt, Human
gaaaaguuuaauauuaaagcca

SEQ ID NO: 1700395 - RNA, 21 nt, Human
gaaaaguuuaauauuaaagcc

SEQ ID NO: 1700396 - RNA, 20 nt, Human
gaaaaguuuaauauuaaagc

SEQ ID NO: 1700397 - RNA, 19 nt, Human
gaaaaguuuaauauuaaag

SEQ ID NO: 1700398 - RNA, 22 nt, Human
cuuuuuggcauaacauaaaucu

SEQ ID NO: 1700399 - RNA, 20 nt, Human
cuuuuuggcauaacauaaau

SEQ ID NO: 1700400 - RNA, 16 nt, Human
cuuuuuggcauaacau

SEQ ID NO: 1700401 - RNA, 18 nt, Human
gaaacggaugauuucuau

SEQ ID NO: 1700402 - RNA, 17 nt, Human
gaaacggaugauuucua

SEQ ID NO: 1700403 - RNA, 23 nt, Human
gaaacucguuaauuuguaguguu

SEQ ID NO: 1700404 - RNA, 14 nt, Human
gaaacccugucucu

SEQ ID NO: 1700405 - RNA, 16 nt, Human
gaaacacaacuauauu

SEQ ID NO: 1700406 - RNA, 11 nt, Human
gaaacauuugg

SEQ ID NO: 1700407 - RNA, 17 nt, Human
gaaagagaacuuccaga

SEQ ID NO: 1700408 - RNA, 21 nt, Human
gaaagaggaaugaaguacuca

SEQ ID NO: 1700409 - RNA, 17 nt, Human
gaaagcagaacagugau

SEQ ID NO: 1700410 - RNA, 22 nt, Human
gaaagcagaacagugauuacca

SEQ ID NO: 1700411 - RNA, 14 nt, Human
gaaagcagggacuu

SEQ ID NO: 1700412 - RNA, 21 nt, Human
gaaagcuugcccuggugccuc

SEQ ID NO: 1700413 - RNA, 21 nt, Human
cuuuaaacauugguucuugua

SEQ ID NO: 1700414 - RNA, 22 nt, Human
cuuguuagaucuaguucacucu

SEQ ID NO: 1700415 - RNA, 12 nt, Human
cuuguguaaaua

SEQ ID NO: 1700416 - RNA, 21 nt, Human
cuuguguaaauacaauuuugu

SEQ ID NO: 1700417 - RNA, 16 nt, Human
cuuguguaaauacaau

SEQ ID NO: 1700418 - RNA, 14 nt, Human
cuuguguaaauaca

SEQ ID NO: 1700419 - RNA, 23 nt, Human
cuugucaauaaaauccauacauu

SEQ ID NO: 1700420 - RNA, 17 nt, Human
cuuguacuuuauuuucu

SEQ ID NO: 1700421 - RNA, 19 nt, Human
cuugaguuuaaauuguaau

SEQ ID NO: 1700422 - RNA, 16 nt, Human
cuuucucuuucguuac

SEQ ID NO: 1700423 - RNA, 20 nt, Human
cuuugucuacaccauuaugu

SEQ ID NO: 1700424 - RNA, 23 nt, Human
cuuugucuacaccauuaugugcg

SEQ ID NO: 1700425 - RNA, 22 nt, Human
cuuugugcugggguuaucugaa

SEQ ID NO: 1700426 - RNA, 20 nt, Human
cuuugugcugggguuaucug

SEQ ID NO: 1700427 - RNA, 15 nt, Human
cuuugugcugggguu

SEQ ID NO: 1700428 - RNA, 18 nt, Human
cuucuuuaauuuuggaau

SEQ ID NO: 1700429 - RNA, 17 nt, Human
cuucuuuaauuuuggaa

SEQ ID NO: 1700430 - RNA, 16 nt, Human
cuucuuuaauuuugga

SEQ ID NO: 1700431 - RNA, 15 nt, Human
cuucuuuaauuuugg

SEQ ID NO: 1700432 - RNA, 19 nt, Human
cuucuuuaauuuuggaauu

SEQ ID NO: 1700433 - RNA, 22 nt, Human
cuuagaugcaguucugaagaag

SEQ ID NO: 1700434 - RNA, 20 nt, Human
cuuagaugcaguucugaaga

SEQ ID NO: 1700435 - RNA, 16 nt, Human
cuguauagauuagaau

SEQ ID NO: 1700436 - RNA, 19 nt, Human
cuguauuuuaaaagaauga

SEQ ID NO: 1700437 - RNA, 20 nt, Human
cuguauuuuaaaagaaugau

SEQ ID NO: 1700438 - RNA, 22 nt, Human
cuguauuuuaaaagaaugauua

SEQ ID NO: 1700439 - RNA, 20 nt, Human
cugucuacacuaagagagaa

SEQ ID NO: 1700440 - RNA, 23 nt, Human
cuguaaucacagcuacuugggag

SEQ ID NO: 1700441 - RNA, 22 nt, Human
cugggggggauuguaaaauggu

SEQ ID NO: 1700442 - RNA, 15 nt, Human
cugccuaaggacuuc

SEQ ID NO: 1700443 - RNA, 14 nt, Human
cugccuaaggacuu

SEQ ID NO: 1700444 - RNA, 13 nt, Human
cugccuaaggacu

SEQ ID NO: 1700445 - RNA, 12 nt, Human
cugccuaaggac

SEQ ID NO: 1700446 - RNA, 13 nt, Human
cuggagcucugcc

SEQ ID NO: 1700447 - RNA, 12 nt, Human
cuggagcucugc

SEQ ID NO: 1700448 - RNA, 16 nt, Human
cuggagcucugcccau

SEQ ID NO: 1700449 - RNA, 23 nt, Human
cuggccuucggccuccauccuga

SEQ ID NO: 1700450 - RNA, 22 nt, Human
cuggccuucggccuccauccug

SEQ ID NO: 1700451 - RNA, 13 nt, Human
gagaguguugaaa

SEQ ID NO: 1700452 - RNA, 20 nt, Human
gagacagcucugcauacuca

SEQ ID NO: 1700453 - RNA, 21 nt, Human
gagaaugagagacacacugaa

SEQ ID NO: 1700454 - RNA, 20 nt, Human
gagaaugagagacacacuga

SEQ ID NO: 1700455 - RNA, 21 nt, Human
gacuucuuuaauuuuggaauu

SEQ ID NO: 1700456 - RNA, 20 nt, Human
gacuucuuuaauuuuggaau

SEQ ID NO: 1700457 - RNA, 19 nt, Human
gacuucuuuaauuuuggaa

SEQ ID NO: 1700458 - RNA, 18 nt, Human
gacuucuuuaauuuugga

SEQ ID NO: 1700459 - RNA, 17 nt, Human
gacuucuuuaauuuugg

SEQ ID NO: 1700460 - RNA, 16 nt, Human
gacuucuuuaauuuug

SEQ ID NO: 1700461 - RNA, 22 nt, Human
gagaaccuagggugauauuaac

SEQ ID NO: 1700462 - RNA, 21 nt, Human
gagaaccuagggugauauuaa

SEQ ID NO: 1700463 - RNA, 23 nt, Human
gagaacuuccagauccuggaaau

SEQ ID NO: 1700464 - RNA, 22 nt, Human
gagaacuuccagauccuggaaa

SEQ ID NO: 1700465 - RNA, 17 nt, Human
gagaaugagagacacac

SEQ ID NO: 1700466 - RNA, 16 nt, Human
gacugcauuauauuua

SEQ ID NO: 1700467 - RNA, 14 nt, Human
gacugcauuauauu

SEQ ID NO: 1700468 - RNA, 13 nt, Human
gaauucuguauag

SEQ ID NO: 1700469 - RNA, 22 nt, Human
gaauucuguauagauuagaauu

SEQ ID NO: 1700470 - RNA, 21 nt, Human
gaauucuguauagauuagaau

SEQ ID NO: 1700471 - RNA, 14 nt, Human
gaauucuguauaga

SEQ ID NO: 1700472 - RNA, 21 nt, Human
gaauugacccacaagaaauga

SEQ ID NO: 1700473 - RNA, 16 nt, Human
gaauugacccacaaga

SEQ ID NO: 1700474 - RNA, 16 nt, Human
gaauuggagcucgugg

SEQ ID NO: 1700475 - RNA, 16 nt, Human
gaauggcuuuguauag

SEQ ID NO: 1700476 - RNA, 14 nt, Human
gaauggcuuuguau

SEQ ID NO: 1700477 - RNA, 17 nt, Human
gaauggcuuuguauaga

SEQ ID NO: 1700478 - RNA, 18 nt, Human
gaaugaaauacuguuuga

SEQ ID NO: 1700479 - RNA, 15 nt, Human
gaaugaaauacuguu

SEQ ID NO: 1700480 - RNA, 19 nt, Human
gaaugaaauacuguuugag

SEQ ID NO: 1700481 - RNA, 16 nt, Human
gacaaggaaaaaauaa

SEQ ID NO: 1700482 - RNA, 17 nt, Human
gacagggaggacgcucu

SEQ ID NO: 1700483 - RNA, 18 nt, Human
gacagggaggacgcucuc

SEQ ID NO: 1700484 - RNA, 20 nt, Human
gacauagaauuaacacauga

SEQ ID NO: 1700485 - RNA, 22 nt, Human
gacccacaagaaaugaaagcag

SEQ ID NO: 1700486 - RNA, 15 nt, Human
gacccacaagaaaug

SEQ ID NO: 1700487 - RNA, 16 nt, Human
gacccaaaaggcagaa

SEQ ID NO: 1700488 - RNA, 21 nt, Human
gaccacugcagaagacaguau

SEQ ID NO: 1700489 - RNA, 16 nt, Human
gacaugggacauuugc

SEQ ID NO: 1700490 - RNA, 13 nt, Human
gauuuuaugcuuu

SEQ ID NO: 1700491 - RNA, 16 nt, Human
gcaaauugucacagga

SEQ ID NO: 1700492 - RNA, 22 nt, Human
gaugguucccuugaugaagaag

SEQ ID NO: 1700493 - RNA, 22 nt, Human
gaugcuagaacucccuuucaac

SEQ ID NO: 1700494 - RNA, 20 nt, Human
gaugcuagaacucccuuuca

SEQ ID NO: 1700495 - RNA, 18 nt, Human
gaugcuagaacucccuuu

SEQ ID NO: 1700496 - RNA, 19 nt, Human
gcacuguggguagacacac

SEQ ID NO: 1700497 - RNA, 16 nt, Human
gaguguugaaacggau

SEQ ID NO: 1700498 - RNA, 12 nt, Human
gaguguugaaac

SEQ ID NO: 1700499 - RNA, 20 nt, Human
gauaaaugccaucaauaaaa

SEQ ID NO: 1700500 - RNA, 22 nt, Human
gauaaauggcuuccuggcaaua

SEQ ID NO: 1700501 - RNA, 15 nt, Human
gauaaaugccaucaa

SEQ ID NO: 1700502 - RNA, 11 nt, Human
gauaaaugcca

SEQ ID NO: 1700503 - RNA, 18 nt, Human
gauaacuguuauuuauaa

SEQ ID NO: 1700504 - RNA, 17 nt, Human
gauaacuguuauuuaua

SEQ ID NO: 1700505 - RNA, 19 nt, Human
gaggcagagguugcaguga

SEQ ID NO: 1700506 - RNA, 17 nt, Human
ggaauucuguauagauu

SEQ ID NO: 1700507 - RNA, 15 nt, Human
ggaauucuguauaga

SEQ ID NO: 1700508 - RNA, 12 nt, Human
ggaauucuguau

SEQ ID NO: 1700509 - RNA, 22 nt, Human
ggaauuggagcucgugggacag

SEQ ID NO: 1700510 - RNA, 16 nt, Human
ggaauuggagcucgug

SEQ ID NO: 1700511 - RNA, 20 nt, Human
ggaagugacgguuuaauggg

SEQ ID NO: 1700512 - RNA, 23 nt, Human
ggaccaaaaaccaguauuguaca

SEQ ID NO: 1700513 - RNA, 16 nt, Human
ggaccaaaaaccagua

SEQ ID NO: 1700514 - RNA, 16 nt, Human
ggacauuugcucaugg

SEQ ID NO: 1700515 - RNA, 14 nt, Human
ggaccaaaaaccag

SEQ ID NO: 1700516 - RNA, 14 nt, Human
ggacuguggugacu

SEQ ID NO: 1700517 - RNA, 14 nt, Human
ggacgcucucuggc

SEQ ID NO: 1700518 - RNA, 13 nt, Human
ggacgcucucugg

SEQ ID NO: 1700519 - RNA, 15 nt, Human
ggacgcucucuggcc

SEQ ID NO: 1700520 - RNA, 22 nt, Human
ggacuguggugacuuuggauaa

SEQ ID NO: 1700521 - RNA, 21 nt, Human
ggacuguggugacuuuggaua

SEQ ID NO: 1700522 - RNA, 17 nt, Human
ggacuguggugacuuug

SEQ ID NO: 1700523 - RNA, 15 nt, Human
ggacuguggugacuu

SEQ ID NO: 1700524 - RNA, 19 nt, Human
ggagaaucacuugaacccg

SEQ ID NO: 1700525 - RNA, 15 nt, Human
ggagaaucacuugaa

SEQ ID NO: 1700526 - RNA, 23 nt, Human
gcuuucagauacuggauuguacu

SEQ ID NO: 1700527 - RNA, 18 nt, Human
gcuuucagauacuggauu

SEQ ID NO: 1700528 - RNA, 14 nt, Human
gcuuucagauacug

SEQ ID NO: 1700529 - RNA, 14 nt, Human
ggaaaaguuuaaua

SEQ ID NO: 1700530 - RNA, 20 nt, Human
gcugucuacacuaagagaga

SEQ ID NO: 1700531 - RNA, 16 nt, Human
ggauucuuaaaguuga

SEQ ID NO: 1700532 - RNA, 19 nt, Human
ggauucuuaaaguugaauu

SEQ ID NO: 1700533 - RNA, 18 nt, Human
ggauucuuaaaguugaau

SEQ ID NO: 1700534 - RNA, 20 nt, Human
ggauucuuaaaguugaauuu

SEQ ID NO: 1700535 - RNA, 15 nt, Human
ggauuguaaaauggu

SEQ ID NO: 1700536 - RNA, 23 nt, Human
gccugcacggugaauggcuuugu

SEQ ID NO: 1700537 - RNA, 16 nt, Human
gccugauuaaagaaug

SEQ ID NO: 1700538 - RNA, 13 nt, Human
gccugauuaaaga

SEQ ID NO: 1700539 - RNA, 17 nt, Human
gccuaagugcagccccg

SEQ ID NO: 1700540 - RNA, 22 nt, Human
gccuauauuuuuuguuaaauga

SEQ ID NO: 1700541 - RNA, 20 nt, Human
gcucucuggccuucggccuc

SEQ ID NO: 1700542 - RNA, 19 nt, Human
gcucucuggccuucggccu

SEQ ID NO: 1700543 - RNA, 15 nt, Human
gcucucuggccuucg

SEQ ID NO: 1700544 - RNA, 14 nt, Human
gcucucuggccuuc

SEQ ID NO: 1700545 - RNA, 13 nt, Human
gcucucuggccuu

SEQ ID NO: 1700546 - RNA, 12 nt, Human
gcucucuggccu

SEQ ID NO: 1700547 - RNA, 11 nt, Human
gcucucuggcc

SEQ ID NO: 1700548 - RNA, 17 nt, Human
gcuaagcaaaaugugau

SEQ ID NO: 1700549 - RNA, 14 nt, Human
gcuaagcauuccaa

SEQ ID NO: 1700550 - RNA, 20 nt, Human
gcuccauuuuuagugaaaua

SEQ ID NO: 1700551 - RNA, 21 nt, Human
guacuuuuuggcauaacauaa

SEQ ID NO: 1700552 - RNA, 12 nt, Human
guacuuuuuggc

SEQ ID NO: 1700553 - RNA, 15 nt, Human
guagaggagaaacug

SEQ ID NO: 1700554 - RNA, 23 nt, Human
guacuuuauuuucuauaauuuaa

SEQ ID NO: 1700555 - RNA, 15 nt, Human
guaccgcaaugugac

SEQ ID NO: 1700556 - RNA, 13 nt, Human
guaauuauaucug

SEQ ID NO: 1700557 - RNA, 15 nt, Human
guaauuggaaaggca

SEQ ID NO: 1700558 - RNA, 19 nt, Human
guaaugauaacuggaaacu

SEQ ID NO: 1700559 - RNA, 23 nt, Human
guaaauacaauuuuguuucugua

SEQ ID NO: 1700560 - RNA, 22 nt, Human
guaaauacaauuuuguuucugu

SEQ ID NO: 1700561 - RNA, 15 nt, Human
guaaaucccauuauu

SEQ ID NO: 1700562 - RNA, 21 nt, Human
guaaauacaauuuuguuucug

SEQ ID NO: 1700563 - RNA, 21 nt, Human
guaaaucccauuauucaaagu

SEQ ID NO: 1700564 - RNA, 20 nt, Human
guaaaucccauuauucaaag

SEQ ID NO: 1700565 - RNA, 19 nt, Human
guaaaucccauuauucaaa

SEQ ID NO: 1700566 - RNA, 18 nt, Human
guaaaucccauuauucaa

SEQ ID NO: 1700567 - RNA, 17 nt, Human
guaaaucccauuauuca

SEQ ID NO: 1700568 - RNA, 16 nt, Human
guaaaucccauuauuc

SEQ ID NO: 1700569 - RNA, 19 nt, Human
ggugcccugcuuucagaua

SEQ ID NO: 1700570 - RNA, 20 nt, Human
ggugaauggcuuuguauaga

SEQ ID NO: 1700571 - RNA, 17 nt, Human
ggugaauggcuuuguau

SEQ ID NO: 1700572 - RNA, 14 nt, Human
ggugaauggcuuug

SEQ ID NO: 1700573 - RNA, 18 nt, Human
gguccgugcuaaggacuu

SEQ ID NO: 1700574 - RNA, 17 nt, Human
gguccgugcuaaggacu

SEQ ID NO: 1700575 - RNA, 16 nt, Human
gguccgugcuaaggac

SEQ ID NO: 1700576 - RNA, 22 nt, Human
gguagacacacaugaaguccaa

SEQ ID NO: 1700577 - RNA, 15 nt, Human
gguagacacacauga

SEQ ID NO: 1700578 - RNA, 22 nt, Human
gguacuucaaauccuugaagau

SEQ ID NO: 1700579 - RNA, 23 nt, Human
guauuuguuugcauaggugaucu

SEQ ID NO: 1700580 - RNA, 12 nt, Human
guauuuguuugc

SEQ ID NO: 1700581 - RNA, 18 nt, Human
guauuuuaaaagaaugau

SEQ ID NO: 1700582 - RNA, 17 nt, Human
guauuuuaaaagaauga

SEQ ID NO: 1700583 - RNA, 16 nt, Human
guauuuuaaaagaaug

SEQ ID NO: 1700584 - RNA, 21 nt, Human
gucaauaaaauccauacauuu

SEQ ID NO: 1700585 - RNA, 15 nt, Human
gucaauaaaauccau

SEQ ID NO: 1700586 - RNA, 14 nt, Human
gucaccucauggaa

SEQ ID NO: 1700587 - RNA, 22 nt, Human
guauuucuaugaaauauuaugu

SEQ ID NO: 1700588 - RNA, 17 nt, Human
guauuucuaugaaauau

SEQ ID NO: 1700589 - RNA, 13 nt, Human
gucucagauuuua

SEQ ID NO: 1700590 - RNA, 23 nt, Human
gucuacacuaagagagaaugaga

SEQ ID NO: 1700591 - RNA, 17 nt, Human
gucuacacuaagagaga

SEQ ID NO: 1700592 - RNA, 14 nt, Human
gugaauggcuuugu

SEQ ID NO: 1700593 - RNA, 13 nt, Human
gugaauggcuuug

SEQ ID NO: 1700594 - RNA, 19 nt, Human
gugaauggcuuuguauaga

SEQ ID NO: 1700595 - RNA, 18 nt, Human
gugaauggcuuuguauag

SEQ ID NO: 1700596 - RNA, 17 nt, Human
gugaauggcuuuguaua

SEQ ID NO: 1700597 - RNA, 21 nt, Human
gugaaacugcuuguuuccuag

SEQ ID NO: 1700598 - RNA, 20 nt, Human
gugaaacugcuuguuuccua

SEQ ID NO: 1700599 - RNA, 20 nt, Human
gugaaacucguuaauuugua

SEQ ID NO: 1700600 - RNA, 23 nt, Human
gugaaacugcuuguuuccuagca

SEQ ID NO: 1700601 - RNA, 19 nt, Human
gugaaagaaaauaacaaua

SEQ ID NO: 1700602 - RNA, 16 nt, Human
gugagcagucaggaaa

SEQ ID NO: 1700603 - RNA, 16 nt, Human
gugacaagcucacaga

SEQ ID NO: 1700604 - RNA, 18 nt, Human
gugcaaauugucacagga

SEQ ID NO: 1700605 - RNA, 17 nt, Human
uaucugaggaauucugu

SEQ ID NO: 1700606 - RNA, 16 nt, Human
uaucugaggaauucug

SEQ ID NO: 1700607 - RNA, 22 nt, Human
uaucugaggaauucuguauaga

SEQ ID NO: 1700608 - RNA, 21 nt, Human
uaucugaggaauucuguauag

SEQ ID NO: 1700609 - RNA, 19 nt, Human
uaucugaggaauucuguau

SEQ ID NO: 1700610 - RNA, 18 nt, Human
uaucugaggaauucugua

SEQ ID NO: 1700611 - RNA, 14 nt, Human
uauccuucagccug

SEQ ID NO: 1700612 - RNA, 15 nt, Human
uauccuucagccuga

SEQ ID NO: 1700613 - RNA, 23 nt, Human
uaugaauuacauuuguauaaaau

SEQ ID NO: 1700614 - RNA, 17 nt, Human
uaugaauuacauuugua

SEQ ID NO: 1700615 - RNA, 15 nt, Human
uaugcuuuaaacauu

SEQ ID NO: 1700616 - RNA, 16 nt, Human
uaugcuucuguuuuau

SEQ ID NO: 1700617 - RNA, 15 nt, Human
uaugcuucuguuuua

SEQ ID NO: 1700618 - RNA, 20 nt, Human
uaugacuucauuaauaauaa

SEQ ID NO: 1700619 - RNA, 16 nt, Human
uaugacuucauuaaua

SEQ ID NO: 1700620 - RNA, 16 nt, Human
uaugauucccagccag

SEQ ID NO: 1700621 - RNA, 21 nt, Human
uaggugaucucauuuaauccu

SEQ ID NO: 1700622 - RNA, 13 nt, Human
uaguaucaaaaga

SEQ ID NO: 1700623 - RNA, 16 nt, Human
uaguauuucuaugaaa

SEQ ID NO: 1700624 - RNA, 19 nt, Human
uaguauuucuaugaaauau

SEQ ID NO: 1700625 - RNA, 18 nt, Human
uaguauuucuaugaaaua

SEQ ID NO: 1700626 - RNA, 15 nt, Human
uagugcaaauuguca

SEQ ID NO: 1700627 - RNA, 14 nt, Human
uagugcaaauuguc

SEQ ID NO: 1700628 - RNA, 14 nt, Human
uagucaaauugugu

SEQ ID NO: 1700629 - RNA, 13 nt, Human
uagucaaauugug

SEQ ID NO: 1700630 - RNA, 18 nt, Human
uaggccaugggacaggga

SEQ ID NO: 1700631 - RNA, 12 nt, Human
uaggaauugacc

SEQ ID NO: 1700632 - RNA, 16 nt, Human
uaggucagugcaaaua

SEQ ID NO: 1700633 - RNA, 16 nt, Human
uauaugugaugaucua

SEQ ID NO: 1700634 - RNA, 13 nt, Human
uauaugcuucugu

SEQ ID NO: 1700635 - RNA, 18 nt, Human
uauauaaaugguuaaaag

SEQ ID NO: 1700636 - RNA, 13 nt, Human
uauauaacaaugc

SEQ ID NO: 1700637 - RNA, 22 nt, Human
uauaucugaggaauucuguaua

SEQ ID NO: 1700638 - RNA, 21 nt, Human
uauaucugaggaauucuguau

SEQ ID NO: 1700639 - RNA, 20 nt, Human
uauaucugaggaauucugua

SEQ ID NO: 1700640 - RNA, 19 nt, Human
uauaucugaggaauucugu

SEQ ID NO: 1700641 - RNA, 18 nt, Human
uauaucugaggaauucug

SEQ ID NO: 1700642 - RNA, 23 nt, Human
uauaaaucgcuuuugauaaucaa

SEQ ID NO: 1700643 - RNA, 22 nt, Human
uauaauuaacauguuaaaccau

SEQ ID NO: 1700644 - RNA, 20 nt, Human
uauaaucacuuuuuuccaca

SEQ ID NO: 1700645 - RNA, 12 nt, Human
uauaauuaacau

SEQ ID NO: 1700646 - RNA, 14 nt, Human
uauaauuaacaugu

SEQ ID NO: 1700647 - RNA, 13 nt, Human
uauaauuaacaug

SEQ ID NO: 1700648 - RNA, 19 nt, Human
uauaauuaacauguuaaac

SEQ ID NO: 1700649 - RNA, 18 nt, Human
uauaauuaacauguuaaa

SEQ ID NO: 1700650 - RNA, 16 nt, Human
uauaauuaacauguua

SEQ ID NO: 1700651 - RNA, 15 nt, Human
uauaauuaacauguu

SEQ ID NO: 1700652 - RNA, 13 nt, Human
ucaauaaaaaauu

SEQ ID NO: 1700653 - RNA, 16 nt, Human
ucaauaaaaaauuaug

SEQ ID NO: 1700654 - RNA, 14 nt, Human
ucaauaaaaaauua

SEQ ID NO: 1700655 - RNA, 22 nt, Human
ucaacuccaaacugacucuuaa

SEQ ID NO: 1700656 - RNA, 16 nt, Human
ucaaauccuugaagau

SEQ ID NO: 1700657 - RNA, 17 nt, Human
ucaaacauauauaacaa

SEQ ID NO: 1700658 - RNA, 18 nt, Human
ucacauugguguuguacu

SEQ ID NO: 1700659 - RNA, 12 nt, Human
ucacauuuaaau

SEQ ID NO: 1700660 - RNA, 19 nt, Human
ucaauaaaaaauuaugaca

SEQ ID NO: 1700661 - RNA, 14 nt, Human
ucaauaaaauccau

SEQ ID NO: 1700662 - RNA, 22 nt, Human
ucacaagacccaaaaggcagaa

SEQ ID NO: 1700663 - RNA, 23 nt, Human
uauugugcgcuaaacuuuucuga

SEQ ID NO: 1700664 - RNA, 22 nt, Human
uauugugcgcuaaacuuuucug

SEQ ID NO: 1700665 - RNA, 19 nt, Human
uauugugcgcuaaacuuuu

SEQ ID NO: 1700666 - RNA, 14 nt, Human
uauuuauuacugua

SEQ ID NO: 1700667 - RNA, 13 nt, Human
uauuucuaugaaa

SEQ ID NO: 1700668 - RNA, 15 nt, Human
uauuucuaugaaaua

SEQ ID NO: 1700669 - RNA, 14 nt, Human
uauuucuaugaaau

SEQ ID NO: 1700670 - RNA, 22 nt, Human
uauuauguaaaucccauuauuc

SEQ ID NO: 1700671 - RNA, 16 nt, Human
uauuauguuaaaacug

SEQ ID NO: 1700672 - RNA, 15 nt, Human
uauuauguaaauccc

SEQ ID NO: 1700673 - RNA, 12 nt, Human
uauuauguaaau

SEQ ID NO: 1700674 - RNA, 22 nt, Human
uauuaugaaacuuguguaaaua

SEQ ID NO: 1700675 - RNA, 21 nt, Human
uauuaugaaacuuguguaaau

SEQ ID NO: 1700676 - RNA, 20 nt, Human
uauuaugaaacuuguguaaa

SEQ ID NO: 1700677 - RNA, 12 nt, Human
uauuaugaaacu

SEQ ID NO: 1700678 - RNA, 16 nt, Human
uauuaagcauauauuu

SEQ ID NO: 1700679 - RNA, 17 nt, Human
uauuauauuuacaaaug

SEQ ID NO: 1700680 - RNA, 17 nt, Human
uauguucuaagaaguga

SEQ ID NO: 1700681 - RNA, 19 nt, Human
uauguuagugcaaauuguc

SEQ ID NO: 1700682 - RNA, 12 nt, Human
uauguuaaaacu

SEQ ID NO: 1700683 - RNA, 22 nt, Human
ucauggaacgcguugaaauugu

SEQ ID NO: 1700684 - RNA, 21 nt, Human
ucauggaacgcguugaaauug

SEQ ID NO: 1700685 - RNA, 20 nt, Human
ucauggaacgcguugaaauu

SEQ ID NO: 1700686 - RNA, 11 nt, Human
ucauagcagcu

SEQ ID NO: 1700687 - RNA, 12 nt, Human
ucauagcagcuu

SEQ ID NO: 1700688 - RNA, 17 nt, Human
ucaucaaugaaugaaug

SEQ ID NO: 1700689 - RNA, 16 nt, Human
ucauuaggauggcuag

SEQ ID NO: 1700690 - RNA, 22 nt, Human
ucaguauugaagcauuuuauaa

SEQ ID NO: 1700691 - RNA, 23 nt, Human
ucaguauugaagcauuuuauaaa

SEQ ID NO: 1700692 - RNA, 17 nt, Human
uccaguuuuguuuggac

SEQ ID NO: 1700693 - RNA, 15 nt, Human
uccaguuuuguuugg

SEQ ID NO: 1700694 - RNA, 20 nt, Human
uccaguuuuguuuggaccaa

SEQ ID NO: 1700695 - RNA, 19 nt, Human
uccagguagagggugugua

SEQ ID NO: 1700696 - RNA, 15 nt, Human
uccauacauuugugu

SEQ ID NO: 1700697 - RNA, 20 nt, Human
uccaugggccauaugaaaag

SEQ ID NO: 1700698 - RNA, 16 nt, Human
uccagcagauuauuca

SEQ ID NO: 1700699 - RNA, 15 nt, Human
uccagcagauuauuc

SEQ ID NO: 1700700 - RNA, 14 nt, Human
uccagcagauuauu

SEQ ID NO: 1700701 - RNA, 23 nt, Human
uccacuuggucugugagaugcua

SEQ ID NO: 1700702 - RNA, 21 nt, Human
uccacuuggucugugagaugc

SEQ ID NO: 1700703 - RNA, 19 nt, Human
ucccauuauucaaaguugc

SEQ ID NO: 1700704 - RNA, 18 nt, Human
ucccauuauucaaaguug

SEQ ID NO: 1700705 - RNA, 16 nt, Human
ucccauuauucaaagu

SEQ ID NO: 1700706 - RNA, 14 nt, Human
ucccauuauucaaa

SEQ ID NO: 1700707 - RNA, 13 nt, Human
ucccauuauucaa

SEQ ID NO: 1700708 - RNA, 20 nt, Human
uccuaucaccugucuugccu

SEQ ID NO: 1700709 - RNA, 18 nt, Human
uccugccccugagcccau

SEQ ID NO: 1700710 - RNA, 17 nt, Human
uccugccccugagccca

SEQ ID NO: 1700711 - RNA, 20 nt, Human
uccugaggcuccacuugguc

SEQ ID NO: 1700712 - RNA, 19 nt, Human
uccugaggcuccacuuggu

SEQ ID NO: 1700713 - RNA, 21 nt, Human
uccugaggcuccacuuggucu

SEQ ID NO: 1700714 - RNA, 17 nt, Human
uccuggcaauagucaaa

SEQ ID NO: 1700715 - RNA, 17 nt, Human
ucuacacuaagagagaa

SEQ ID NO: 1700716 - RNA, 18 nt, Human
ucuaugaaauauuauguu

SEQ ID NO: 1700717 - RNA, 23 nt, Human
ucucaguccaugaagauguagag

SEQ ID NO: 1700718 - RNA, 16 nt, Human
ugacauagucuggcug

SEQ ID NO: 1700719 - RNA, 17 nt, Human
ugacauagucuggcugu

SEQ ID NO: 1700720 - RNA, 17 nt, Human
ugacaugggacauuugc

SEQ ID NO: 1700721 - RNA, 16 nt, Human
ugacaugggacauuug

SEQ ID NO: 1700722 - RNA, 18 nt, Human
ugacaugggacauuugcu

SEQ ID NO: 1700723 - RNA, 20 nt, Human
ugaccacugcagaagacagu

SEQ ID NO: 1700724 - RNA, 20 nt, Human
ugacaagcucacagaccuuu

SEQ ID NO: 1700725 - RNA, 15 nt, Human
ugacaagcucacaga

SEQ ID NO: 1700726 - RNA, 12 nt, Human
ugacaagcucac

SEQ ID NO: 1700727 - RNA, 23 nt, Human
ugaagucagaucugccuaaggac

SEQ ID NO: 1700728 - RNA, 11 nt, Human
ugaaguccaag

SEQ ID NO: 1700729 - RNA, 20 nt, Human
ugaagucagaucugccuaag

SEQ ID NO: 1700730 - RNA, 12 nt, Human
ugaagugaaacu

SEQ ID NO: 1700731 - RNA, 13 nt, Human
ugaagugaaacug

SEQ ID NO: 1700732 - RNA, 14 nt, Human
ugaagugaaacugc

SEQ ID NO: 1700733 - RNA, 13 nt, Human
ugaaguccaagca

SEQ ID NO: 1700734 - RNA, 18 nt, Human
ugaauuacauuuguauaa

SEQ ID NO: 1700735 - RNA, 16 nt, Human
ugaauuacauuuguau

SEQ ID NO: 1700736 - RNA, 15 nt, Human
ugaauuacauuugua

SEQ ID NO: 1700737 - RNA, 17 nt, Human
ucuugccuuuuucauua

SEQ ID NO: 1700738 - RNA, 16 nt, Human
ucuugccuuuuucauu

SEQ ID NO: 1700739 - RNA, 19 nt, Human
ucuugccuuuuucauuauu

SEQ ID NO: 1700740 - RNA, 12 nt, Human
ucuuugccaagu

SEQ ID NO: 1700741 - RNA, 19 nt, Human
ucuuuccacagaagcucca

SEQ ID NO: 1700742 - RNA, 15 nt, Human
ugaaagguacuucaa

SEQ ID NO: 1700743 - RNA, 16 nt, Human
ugaaagguacuucaaa

SEQ ID NO: 1700744 - RNA, 20 nt, Human
ugaaaagcuccauuuuuagu

SEQ ID NO: 1700745 - RNA, 16 nt, Human
ugaaauauugacuuuu

SEQ ID NO: 1700746 - RNA, 14 nt, Human
ugagcaucacaguu

SEQ ID NO: 1700747 - RNA, 15 nt, Human
ugagcaucacaguuu

SEQ ID NO: 1700748 - RNA, 16 nt, Human
ugagagugaacaaauu

SEQ ID NO: 1700749 - RNA, 16 nt, Human
ugauaacuggaaacuu

SEQ ID NO: 1700750 - RNA, 20 nt, Human
ugaggcuccacuuggucugu

SEQ ID NO: 1700751 - RNA, 18 nt, Human
ugaggcuccacuuggucu

SEQ ID NO: 1700752 - RNA, 15 nt, Human
ugaucucauuuaauc

SEQ ID NO: 1700753 - RNA, 22 nt, Human
ugaucucauuuaauccucucaa

SEQ ID NO: 1700754 - RNA, 15 nt, Human
ugauagaggaagccu

SEQ ID NO: 1700755 - RNA, 24 nt, Human
ugaucagcuuauugucuagugaaa

SEQ ID NO: 1700756 - RNA, 17 nt, Human
ugaucagcuuauugucu

SEQ ID NO: 1700757 - RNA, 15 nt, Human
ugauggugguauguu

SEQ ID NO: 1700758 - RNA, 23 nt, Human
ugaugcuacaggauuugaaauug

SEQ ID NO: 1700759 - RNA, 20 nt, Human
ugaugcuacaggauuugaaa

SEQ ID NO: 1700760 - RNA, 21 nt, Human
ugauucuucagcaaaaauauu

SEQ ID NO: 1700761 - RNA, 22 nt, Human
ugauuaugaauuacauuuguau

SEQ ID NO: 1700762 - RNA, 21 nt, Human
ugauuaugaauuacauuugua

SEQ ID NO: 1700763 - RNA, 22 nt, Human
ugauguuuagaaacacaacuau

SEQ ID NO: 1700764 - RNA, 16 nt, Human
ugauuaccagggacug

SEQ ID NO: 1700765 - RNA, 19 nt, Human
ugauuaugaauuacauuug

SEQ ID NO: 1700766 - RNA, 17 nt, Human
ugauuaugaauuacauu

SEQ ID NO: 1700767 - RNA, 13 nt, Human
ugauuauauguca

SEQ ID NO: 1700768 - RNA, 20 nt, Human
ugcugggguuaucugaaguc

SEQ ID NO: 1700769 - RNA, 17 nt, Human
ugcugggguuaucugaa

SEQ ID NO: 1700770 - RNA, 13 nt, Human
ugcugguguaugu

SEQ ID NO: 1700771 - RNA, 22 nt, Human
ugcugguguaugugugaaguga

SEQ ID NO: 1700772 - RNA, 20 nt, Human
ugcugggggggauuguaaaa

SEQ ID NO: 1700773 - RNA, 21 nt, Human
ugcgcuaaacuuuucugauag

SEQ ID NO: 1700774 - RNA, 20 nt, Human
ugcgcuaaacuuuucugaua

SEQ ID NO: 1700775 - RNA, 19 nt, Human
ugcgcuaaacuuuucugau

SEQ ID NO: 1700776 - RNA, 17 nt, Human
ugcuagaacucccuuuc

SEQ ID NO: 1700777 - RNA, 15 nt, Human
ugcuagaacucccuu

SEQ ID NO: 1700778 - RNA, 14 nt, Human
ugcuagaacucccu

SEQ ID NO: 1700779 - RNA, 13 nt, Human
ugcuagaacuccc

SEQ ID NO: 1700780 - RNA, 18 nt, Human
ugcuagaacucccuuuca

SEQ ID NO: 1700781 - RNA, 20 nt, Human
ugcauaggugaucucauuua

SEQ ID NO: 1700782 - RNA, 14 nt, Human
ugcaguucugaaga

SEQ ID NO: 1700783 - RNA, 12 nt, Human
ugcaguucugaa

SEQ ID NO: 1700784 - RNA, 17 nt, Human
ugcaugguuuagaaagc

SEQ ID NO: 1700785 - RNA, 16 nt, Human
ugccacuaaauugaca

SEQ ID NO: 1700786 - RNA, 23 nt, Human
ugccucacccacccuuuuuuaaa

SEQ ID NO: 1700787 - RNA, 20 nt, Human
ugccucacccacccuuuuuu

SEQ ID NO: 1700788 - RNA, 23 nt, Human
ugccuaaauccauuuggaaaucu

SEQ ID NO: 1700789 - RNA, 22 nt, Human
ugccuaaauccauuuggaaauc

SEQ ID NO: 1700790 - RNA, 20 nt, Human
ugccuaaauccauuuggaaa

SEQ ID NO: 1700791 - RNA, 19 nt, Human
ugccuaaauccauuuggaa

SEQ ID NO: 1700792 - RNA, 15 nt, Human
ugccuaaauccauuu

SEQ ID NO: 1700793 - RNA, 13 nt, Human
ugccuaaauccau

SEQ ID NO: 1700794 - RNA, 20 nt, Human
ugguccgugcuaaggacuug

SEQ ID NO: 1700795 - RNA, 19 nt, Human
ugguccgugcuaaggacuu

SEQ ID NO: 1700796 - RNA, 18 nt, Human
ugguccgugcuaaggacu

SEQ ID NO: 1700797 - RNA, 17 nt, Human
ugguccgugcuaaggac

SEQ ID NO: 1700798 - RNA, 21 nt, Human
ugguauguuuucaggcuagau

SEQ ID NO: 1700799 - RNA, 13 nt, Human
ugguauguuuuca

SEQ ID NO: 1700800 - RNA, 22 nt, Human
uggucacaggaaguagaggagg

SEQ ID NO: 1700801 - RNA, 19 nt, Human
uggugacugauucuucagc

SEQ ID NO: 1700802 - RNA, 16 nt, Human
uggugacugauucuuc

SEQ ID NO: 1700803 - RNA, 15 nt, Human
uggugacugauucuu

SEQ ID NO: 1700804 - RNA, 20 nt, Human
uggauaauaaggaaaaguuu

SEQ ID NO: 1700805 - RNA, 15 nt, Human
uggcacuaguauuuc

SEQ ID NO: 1700806 - RNA, 20 nt, Human
uggcaauagucaaauugugu

SEQ ID NO: 1700807 - RNA, 22 nt, Human
uggaccaaaaaccaguauugua

SEQ ID NO: 1700808 - RNA, 17 nt, Human
uggaccaaaaaccagua

SEQ ID NO: 1700809 - RNA, 15 nt, Human
uuaauaucaucagua

SEQ ID NO: 1700810 - RNA, 22 nt, Human
uuaauauuaaagccauguuuau

SEQ ID NO: 1700811 - RNA, 21 nt, Human
uuaauauuaaagccauguuua

SEQ ID NO: 1700812 - RNA, 23 nt, Human
uuaagcauauauuuuuauauuua

SEQ ID NO: 1700813 - RNA, 19 nt, Human
uuaagcauauauuuuuaua

SEQ ID NO: 1700814 - RNA, 18 nt, Human
uuaagcauauauuuuuau

SEQ ID NO: 1700815 - RNA, 15 nt, Human
uuaagcauauauuuu

SEQ ID NO: 1700816 - RNA, 13 nt, Human
uuaagcauauauu

SEQ ID NO: 1700817 - RNA, 13 nt, Human
uuaaaagaaugau

SEQ ID NO: 1700818 - RNA, 19 nt, Human
uguuucaaacauauauaac

SEQ ID NO: 1700819 - RNA, 22 nt, Human
uguuucaaacauauauaacaau

SEQ ID NO: 1700820 - RNA, 21 nt, Human
uguuucaaacauauauaacaa

SEQ ID NO: 1700821 - RNA, 16 nt, Human
uuagcuacuauauaug

SEQ ID NO: 1700822 - RNA, 21 nt, Human
uuagaugcaguucugaagaag

SEQ ID NO: 1700823 - RNA, 20 nt, Human
uuagaugcaguucugaagaa

SEQ ID NO: 1700824 - RNA, 14 nt, Human
uuagaucuaguuca

SEQ ID NO: 1700825 - RNA, 13 nt, Human
uuagaucuaguuc

SEQ ID NO: 1700826 - RNA, 12 nt, Human
uuagagauuuuu

SEQ ID NO: 1700827 - RNA, 18 nt, Human
uuagagaguguugaaacg

SEQ ID NO: 1700828 - RNA, 13 nt, Human
uuagcuggaaaag

SEQ ID NO: 1700829 - RNA, 12 nt, Human
uuagcuggaaaa

SEQ ID NO: 1700830 - RNA, 18 nt, Human
uuaggauguugaaaaagu

SEQ ID NO: 1700831 - RNA, 17 nt, Human
uuagagaguguugaaac

SEQ ID NO: 1700832 - RNA, 16 nt, Human
uuagagaguguugaaa

SEQ ID NO: 1700833 - RNA, 14 nt, Human
uuagagaguguuga

SEQ ID NO: 1700834 - RNA, 19 nt, Human
uuagaaacacaacuauauu

SEQ ID NO: 1700835 - RNA, 17 nt, Human
uuacuaguuucccuugc

SEQ ID NO: 1700836 - RNA, 12 nt, Human
uucccuggccuu

SEQ ID NO: 1700837 - RNA, 16 nt, Human
uucccuggccuuucau

SEQ ID NO: 1700838 - RNA, 17 nt, Human
uucccuggccuuucaua

SEQ ID NO: 1700839 - RNA, 17 nt, Human
uucccuugaugaagaag

SEQ ID NO: 1700840 - RNA, 18 nt, Human
uucccuugaugaagaagu

SEQ ID NO: 1700841 - RNA, 19 nt, Human
uuccagauccuggaaauca

SEQ ID NO: 1700842 - RNA, 14 nt, Human
uuauuacaguauaa

SEQ ID NO: 1700843 - RNA, 16 nt, Human
uuauuacuguaagaaa

SEQ ID NO: 1700844 - RNA, 18 nt, Human
uuauuacuguaagaaaau

SEQ ID NO: 1700845 - RNA, 17 nt, Human
uuauuacuguaagaaaa

SEQ ID NO: 1700846 - RNA, 14 nt, Human
uuaugcuuuaaaca

SEQ ID NO: 1700847 - RNA, 13 nt, Human
uuaugcuuuaaac

SEQ ID NO: 1700848 - RNA, 21 nt, Human
uuauggcacuaguauuucuau

SEQ ID NO: 1700849 - RNA, 17 nt, Human
uuaucugaagucagauc

SEQ ID NO: 1700850 - RNA, 22 nt, Human
uuauuggcuuuucugauccagu

SEQ ID NO: 1700851 - RNA, 18 nt, Human
uuauuggcuuuucugauc

SEQ ID NO: 1700852 - RNA, 16 nt, Human
uuauuggcuuuucuga

SEQ ID NO: 1700853 - RNA, 12 nt, Human
uuauuggcuuuu

SEQ ID NO: 1700854 - RNA, 15 nt, Human
uuauugucuagugaa

SEQ ID NO: 1700855 - RNA, 16 nt, Human
uuauuuuaauaauguu

SEQ ID NO: 1700856 - RNA, 15 nt, Human
uuauuuuaauaaugu

SEQ ID NO: 1700857 - RNA, 13 nt, Human
uuauuuuauuaug

SEQ ID NO: 1700858 - RNA, 17 nt, Human
uuauuuuaauaauguuu

SEQ ID NO: 1700859 - RNA, 23 nt, Human
uucaaaguugccuaaauccauuu

SEQ ID NO: 1700860 - RNA, 17 nt, Human
uucaaaguugccuaaau

SEQ ID NO: 1700861 - RNA, 16 nt, Human
uucaaaguugccuaaa

SEQ ID NO: 1700862 - RNA, 15 nt, Human
uucaaaguugccuaa

SEQ ID NO: 1700863 - RNA, 11 nt, Human
uucaaaguugc

SEQ ID NO: 1700864 - RNA, 17 nt, Human
uucaaauccuugaagau

SEQ ID NO: 1700865 - RNA, 23 nt, Human
uucagauaacuguuauuuauaau

SEQ ID NO: 1700866 - RNA, 18 nt, Human
uucagauaacuguuauuu

SEQ ID NO: 1700867 - RNA, 17 nt, Human
uucagauaacuguuauu

SEQ ID NO: 1700868 - RNA, 20 nt, Human
uucagauaaucacaauacau

SEQ ID NO: 1700869 - RNA, 21 nt, Human
uucacucuccauuuaauaauu

SEQ ID NO: 1700870 - RNA, 20 nt, Human
uucagacauagaauuaacac

SEQ ID NO: 1700871 - RNA, 16 nt, Human
uucagacauagaauua

SEQ ID NO: 1700872 - RNA, 20 nt, Human
uuugauaaucaacugggcug

SEQ ID NO: 1700873 - RNA, 13 nt, Human
uuucuuaaauaau

SEQ ID NO: 1700874 - RNA, 12 nt, Human
uuucuuaaauaa

SEQ ID NO: 1700875 - RNA, 21 nt, Human
uuugaaauuguauuacaaauc

SEQ ID NO: 1700876 - RNA, 17 nt, Human
uuugguugcuuuaauau

SEQ ID NO: 1700877 - RNA, 18 nt, Human
uuugguaaggggaauuga

SEQ ID NO: 1700878 - RNA, 18 nt, Human
uuugauaaucaacugggc

SEQ ID NO: 1700879 - RNA, 16 nt, Human
uuuaugcuuuaaacau

SEQ ID NO: 1700880 - RNA, 15 nt, Human
uuuaugcuuuaaaca

SEQ ID NO: 1700881 - RNA, 17 nt, Human
uuuauggcacuaguauu

SEQ ID NO: 1700882 - RNA, 12 nt, Human
uuuaugcuuuaa

SEQ ID NO: 1700883 - RNA, 13 nt, Human
uuucugauccagu

SEQ ID NO: 1700884 - RNA, 22 nt, Human
uuucugauccaguuuuguuugg

SEQ ID NO: 1700885 - RNA, 20 nt, Human
uuucugauccaguuuuguuu

SEQ ID NO: 1700886 - RNA, 16 nt, Human
uuucugauccaguuuu

SEQ ID NO: 1700887 - RNA, 15 nt, Human
uuucugauccaguuu

SEQ ID NO: 1700888 - RNA, 12 nt, Human
uuucucuaggaa

SEQ ID NO: 1700889 - RNA, 20 nt, Human
uuuaugacuucauuaauaau

SEQ ID NO: 1700890 - RNA, 19 nt, Human
uuuauaaaucgcuuuugau

SEQ ID NO: 1700891 - RNA, 22 nt, Human
uuuauaaaucgcuuuugauaau

SEQ ID NO: 1700892 - RNA, 18 nt, Human
uuuauaaaucgcuuuuga

SEQ ID NO: 1700893 - RNA, 15 nt, Human
uuuauaaaucgcuuu

SEQ ID NO: 1700894 - RNA, 14 nt, Human
uuuaauauuaaagc

SEQ ID NO: 1700895 - RNA, 21 nt, Human
uuuaauauuaaagccauguuu

SEQ ID NO: 1700896 - RNA, 20 nt, Human
uuuaauauuaaagccauguu

SEQ ID NO: 1700897 - RNA, 17 nt, Human
uuuaauauuaaagccau

SEQ ID NO: 1700898 - RNA, 15 nt, Human
uuuaauauuaaagcc

SEQ ID NO: 1700899 - RNA, 13 nt, Human
uuuacagagacag

SEQ ID NO: 1700900 - RNA, 14 nt, Human
uuuaauaauuauau

SEQ ID NO: 1700901 - RNA, 19 nt, Human
uuuaauaauguuucaaaca

SEQ ID NO: 1700902 - RNA, 15 nt, Human
uuuaauaauguuuca

SEQ ID NO: 1700903 - RNA, 14 nt, Human
uuuaauaauguuuc

SEQ ID NO: 1700904 - RNA, 13 nt, Human
uuuaauaaaccau

SEQ ID NO: 1700905 - RNA, 14 nt, Human
uuguuuguuuaguc

SEQ ID NO: 1700906 - RNA, 13 nt, Human
uuguuuguuuagu

SEQ ID NO: 1700907 - RNA, 14 nt, Human
uuguuucuguacuu

SEQ ID NO: 1700908 - RNA, 12 nt, Human
uuguuucuguac

SEQ ID NO: 1700909 - RNA, 17 nt, Human
uuuaaaagaaugauuau

SEQ ID NO: 1700910 - RNA, 14 nt, Human
uuuaaaagaaugau

SEQ ID NO: 1700911 - RNA, 12 nt, Human
uuuaaaaugucu

SEQ ID NO: 1700912 - RNA, 18 nt, Human
uuggcauaacauaaaucu

SEQ ID NO: 1700913 - RNA, 23 nt, Human
uuggcauaacauaaaucugugaa

SEQ ID NO: 1700914 - RNA, 22 nt, Human
uuggcauaacauaaaucuguga

SEQ ID NO: 1700915 - RNA, 20 nt, Human
uuggcauaacauaaaucugu

SEQ ID NO: 1700916 - RNA, 19 nt, Human
uuggcauaacauaaaucug

SEQ ID NO: 1700917 - RNA, 13 nt, Human
uuguaaaauggug

SEQ ID NO: 1700918 - RNA, 12 nt, Human
uuguaaaauggu

SEQ ID NO: 1700919 - RNA, 15 nt, Human
uuggucugugagaug

SEQ ID NO: 1700920 - RNA, 20 nt, Human
uugguaaggggaauugagga

SEQ ID NO: 1700921 - RNA, 16 nt, Human
uuguaccgcaauguga

SEQ ID NO: 1700922 - RNA, 20 nt, Human
uuguaaaauggugugaccac

SEQ ID NO: 1700923 - RNA, 17 nt, Human
uugccuuuuucauuauu

SEQ ID NO: 1700924 - RNA, 16 nt, Human
uugccuuuuucauuau

SEQ ID NO: 1700925 - RNA, 15 nt, Human
uugccuuuuucauua

SEQ ID NO: 1700926 - RNA, 14 nt, Human
uugccuuuuucauu

SEQ ID NO: 1700927 - RNA, 13 nt, Human
uugccuuuuucau

SEQ ID NO: 1700928 - RNA, 12 nt, Human
uugccuuuuuca

SEQ ID NO: 1700929 - RNA, 18 nt, Human
uugcuaagcauuccaacu

SEQ ID NO: 1700930 - RNA, 16 nt, Human
uugcuaagcauuccaa

SEQ ID NO: 1700931 - RNA, 22 nt, Human
uugaagcauuuuauaaaucgcu

SEQ ID NO: 1700932 - RNA, 17 nt, Human
uugaagcauuuuauaaa

SEQ ID NO: 1700933 - RNA, 15 nt, Human
uugaagcauuuuaua

SEQ ID NO: 1700934 - RNA, 14 nt, Human
uugaagcauuuuau

SEQ ID NO: 1700935 - RNA, 13 nt, Human
uugaagcauuuua

SEQ ID NO: 1700936 - RNA, 12 nt, Human
uucuuuaauuuu

SEQ ID NO: 1700937 - RNA, 18 nt, Human
uucuuuaauuuuggaauu

SEQ ID NO: 1700938 - RNA, 17 nt, Human
uucuuuaauuuuggaau

SEQ ID NO: 1700939 - RNA, 18 nt, Human
uucuuuccacagaagcuc

SEQ ID NO: 1700940 - RNA, 21 nt, Human
uugaaaaucuuauaauuuaaa

SEQ ID NO: 1700941 - RNA, 19 nt, Human
uugaaacggaugauuucua

SEQ ID NO: 1700942 - RNA, 16 nt, Human
uugaaacggaugauuu

SEQ ID NO: 1700943 - RNA, 11 nt, Human
uucuguauaga

SEQ ID NO: 1700944 - RNA, 13 nt, Human
uucuguauagauu

SEQ ID NO: 1700945 - RNA, 14 nt, Human
uucuguauagauua

SEQ ID NO: 1700946 - RNA, 19 nt, Human
uucuuguauuaagaaugaa

SEQ ID NO: 1700947 - RNA, 19 nt, Human
uucuuaggguuaugauuaa

SEQ ID NO: 1700948 - RNA, 20 nt, Human
uugauaugccuuuucccaac

SEQ ID NO: 1700949 - RNA, 23 nt, Human
caacagcuggugcccugcuuuca

SEQ ID NO: 1700950 - RNA, 14 nt, Human
caaauguucaucaa

SEQ ID NO: 1700951 - RNA, 18 nt, Human
caaauguucaucaaugaa

SEQ ID NO: 1700952 - RNA, 20 nt, Human
caaauguucaucaaugaaug

SEQ ID NO: 1700953 - RNA, 19 nt, Human
caagaaaugaaagcaggga

SEQ ID NO: 1700954 - RNA, 17 nt, Human
caagaaaugaaagcagg

SEQ ID NO: 1700955 - RNA, 16 nt, Human
caaacugacucuuaag

SEQ ID NO: 1700956 - RNA, 21 nt, Human
caaacugacucuuaagaagac

SEQ ID NO: 1700957 - RNA, 17 nt, Human
caaacugacucuuaaga

SEQ ID NO: 1700958 - RNA, 19 nt, Human
caauagucaaauuguguga

SEQ ID NO: 1700959 - RNA, 17 nt, Human
caauagucaaauugugu

SEQ ID NO: 1700960 - RNA, 18 nt, Human
caaggaaaaaauaacaau

SEQ ID NO: 1700961 - RNA, 20 nt, Human
caaggaaaaaauaacaauga

SEQ ID NO: 1700962 - RNA, 14 nt, Human
cacacugaagaagc

SEQ ID NO: 1700963 - RNA, 13 nt, Human
cacacugaagaag

SEQ ID NO: 1700964 - RNA, 21 nt, Human
caauaucuuuuuuuuaauaaa

SEQ ID NO: 1700965 - RNA, 22 nt, Human
caaugugacuuaaugccacuaa

SEQ ID NO: 1700966 - RNA, 18 nt, Human
cacaagaaaugaaagcag

SEQ ID NO: 1700967 - RNA, 21 nt, Human
cacaagaaaugaaagcaggga

SEQ ID NO: 1700968 - RNA, 20 nt, Human
cacaagaaaugaaagcaggg

SEQ ID NO: 1700969 - RNA, 18 nt, Human
augguccgugcuaaggac

SEQ ID NO: 1700970 - RNA, 15 nt, Human
augguccgugcuaag

SEQ ID NO: 1700971 - RNA, 21 nt, Human
augucaaucagccuaguugau

SEQ ID NO: 1700972 - RNA, 20 nt, Human
augcugaguuugugcuggug

SEQ ID NO: 1700973 - RNA, 19 nt, Human
auggcuuuguauagaaccu

SEQ ID NO: 1700974 - RNA, 13 nt, Human
augcuuuaaacau

SEQ ID NO: 1700975 - RNA, 18 nt, Human
auggcuuuguauagaacc

SEQ ID NO: 1700976 - RNA, 21 nt, Human
aucucugcaaucuucucagaa

SEQ ID NO: 1700977 - RNA, 18 nt, Human
aucucugcaaucuucuca

SEQ ID NO: 1700978 - RNA, 14 nt, Human
augaagucucugaa

SEQ ID NO: 1700979 - RNA, 23 nt, Human
augaaguccaagcauuuagaugu

SEQ ID NO: 1700980 - RNA, 20 nt, Human
augaaguccaagcauuuaga

SEQ ID NO: 1700981 - RNA, 21 nt, Human
augaaguacucauacauguua

SEQ ID NO: 1700982 - RNA, 21 nt, Human
aucacaguuuugguugcuuua

SEQ ID NO: 1700983 - RNA, 22 nt, Human
aucacaguuuugguugcuuuaa

SEQ ID NO: 1700984 - RNA, 15 nt, Human
aucacaguuuugguu

SEQ ID NO: 1700985 - RNA, 17 nt, Human
aucaugaauuaguuuua

SEQ ID NO: 1700986 - RNA, 13 nt, Human
aucagcuuauugu

SEQ ID NO: 1700987 - RNA, 20 nt, Human
aucccauuauucaaaguugc

SEQ ID NO: 1700988 - RNA, 15 nt, Human
aucccauuauucaaa

SEQ ID NO: 1700989 - RNA, 14 nt, Human
aucccauuauucaa

SEQ ID NO: 1700990 - RNA, 19 nt, Human
auccucaguuuuugugaaa

SEQ ID NO: 1700991 - RNA, 13 nt, Human
auaucaucaguau

SEQ ID NO: 1700992 - RNA, 13 nt, Human
auauuauguuaaa

SEQ ID NO: 1700993 - RNA, 16 nt, Human
auauuauguuaaaacu

SEQ ID NO: 1700994 - RNA, 14 nt, Human
auauuauguuaaaa

SEQ ID NO: 1700995 - RNA, 19 nt, Human
auauauuuuuauauuuacu

SEQ ID NO: 1700996 - RNA, 18 nt, Human
auauauuuuuauauuuac

SEQ ID NO: 1700997 - RNA, 20 nt, Human
auauauuuuuauauuuacua

SEQ ID NO: 1700998 - RNA, 15 nt, Human
auagcagcuuauuca

SEQ ID NO: 1700999 - RNA, 18 nt, Human
auagcagcuuauucacaa

SEQ ID NO: 1701000 - RNA, 18 nt, Human
auaauguuucaaacauau

SEQ ID NO: 1701001 - RNA, 22 nt, Human
auaagccagacaucaacagaua

SEQ ID NO: 1701002 - RNA, 21 nt, Human
auaagccagacaucaacagau

SEQ ID NO: 1701003 - RNA, 13 nt, Human
auaauguuucaaa

SEQ ID NO: 1701004 - RNA, 21 nt, Human
auaacaaugcuguauuuuaaa

SEQ ID NO: 1701005 - RNA, 20 nt, Human
auaacaaugcuguauuuuaa

SEQ ID NO: 1701006 - RNA, 19 nt, Human
auaacaaugcuguauuuua

SEQ ID NO: 1701007 - RNA, 17 nt, Human
auaacaaugcuguauuu

SEQ ID NO: 1701008 - RNA, 15 nt, Human
auaacaaugcuguau

SEQ ID NO: 1701009 - RNA, 14 nt, Human
auaacaaugaaagu

SEQ ID NO: 1701010 - RNA, 12 nt, Human
agucuguuuuau

SEQ ID NO: 1701011 - RNA, 13 nt, Human
aguacucauacau

SEQ ID NO: 1701012 - RNA, 19 nt, Human
agugucaaugcagccccca

SEQ ID NO: 1701013 - RNA, 19 nt, Human
agaucugccuaaggacuuc

SEQ ID NO: 1701014 - RNA, 19 nt, Human
agauguagaggagaaacug

SEQ ID NO: 1701015 - RNA, 16 nt, Human
agauguagaggagaaa

SEQ ID NO: 1701016 - RNA, 24 nt, Human
agcaaaauuuuuucucuaggaaau

SEQ ID NO: 1701017 - RNA, 20 nt, Human
agcacacacuuuugguuaag

SEQ ID NO: 1701018 - RNA, 14 nt, Human
agcacacacuuuug

SEQ ID NO: 1701019 - RNA, 16 nt, Human
agccaaaccucuguga

SEQ ID NO: 1701020 - RNA, 19 nt, Human
agacgaugucuucauaccu

SEQ ID NO: 1701021 - RNA, 17 nt, Human
agacgaugucuucauac

SEQ ID NO: 1701022 - RNA, 19 nt, Human
agacccaaaaggcagaagc

SEQ ID NO: 1701023 - RNA, 20 nt, Human
agaaugaaauacuguuugag

SEQ ID NO: 1701024 - RNA, 19 nt, Human
agaaugaaauacuguuuga

SEQ ID NO: 1701025 - RNA, 16 nt, Human
agaaugaaauacuguu

SEQ ID NO: 1701026 - RNA, 21 nt, Human
agaagugaaaaucuacacucc

SEQ ID NO: 1701027 - RNA, 17 nt, Human
agaaugauuaugaauua

SEQ ID NO: 1701028 - RNA, 22 nt, Human
agaaugagagacacacugaaga

SEQ ID NO: 1701029 - RNA, 17 nt, Human
agaaugagagacacacu

SEQ ID NO: 1701030 - RNA, 18 nt, Human
agaagacugcauuauauu

SEQ ID NO: 1701031 - RNA, 18 nt, Human
agacucugucucagucca

SEQ ID NO: 1701032 - RNA, 13 nt, Human
agaggaaugaagu

SEQ ID NO: 1701033 - RNA, 12 nt, Human
agcuacaaaugc

SEQ ID NO: 1701034 - RNA, 18 nt, Human
agcuucacuguaaaauaa

SEQ ID NO: 1701035 - RNA, 15 nt, Human
agggacugaggggag

SEQ ID NO: 1701036 - RNA, 21 nt, Human
aggccaugggcacugugggua

SEQ ID NO: 1701037 - RNA, 22 nt, Human
aaaaguuuaauauuaaagccau

SEQ ID NO: 1701038 - RNA, 21 nt, Human
aaaaguuuaauauuaaagcca

SEQ ID NO: 1701039 - RNA, 23 nt, Human
aaaaguuuaauauuaaagccaug

SEQ ID NO: 1701040 - RNA, 20 nt, Human
aaaaguuuaauauuaaagcc

SEQ ID NO: 1701041 - RNA, 19 nt, Human
aaaauccauacauuugugu

SEQ ID NO: 1701042 - RNA, 19 nt, Human
aaaggcagaagcaacccaa

SEQ ID NO: 1701043 - RNA, 19 nt, Human
aaacccuugccaugugcua

SEQ ID NO: 1701044 - RNA, 21 nt, Human
aaacccugucucuacuaaaaa

SEQ ID NO: 1701045 - RNA, 13 nt, Human
aaagaaacauuug

SEQ ID NO: 1701046 - RNA, 22 nt, Human
aacuguuauuuauaaucacuuu

SEQ ID NO: 1701047 - RNA, 20 nt, Human
aacuguuauuuauaaucacu

SEQ ID NO: 1701048 - RNA, 17 nt, Human
aacuguuauuuauaauc

SEQ ID NO: 1701049 - RNA, 16 nt, Human
aacuguuauuuauaau

SEQ ID NO: 1701050 - RNA, 15 nt, Human
aacuguuauuuauaa

SEQ ID NO: 1701051 - RNA, 17 nt, Human
aacgcguugaaauugua

SEQ ID NO: 1701052 - RNA, 15 nt, Human
aacgcguugaaauug

SEQ ID NO: 1701053 - RNA, 14 nt, Human
aacgcguugaaauu

SEQ ID NO: 1701054 - RNA, 13 nt, Human
aacgcguugaaau

SEQ ID NO: 1701055 - RNA, 14 nt, Human
aaccaguauuguac

SEQ ID NO: 1701056 - RNA, 13 nt, Human
aaccaguauugua

SEQ ID NO: 1701057 - RNA, 11 nt, Human
aaccaguauug

SEQ ID NO: 1701058 - RNA, 22 nt, Human
aaauuggggauucuuaaaguug

SEQ ID NO: 1701059 - RNA, 20 nt, Human
aaauuggggauucuuaaagu

SEQ ID NO: 1701060 - RNA, 19 nt, Human
aaauuggggauucuuaaag

SEQ ID NO: 1701061 - RNA, 18 nt, Human
aaauuggggauucuuaaa

SEQ ID NO: 1701062 - RNA, 23 nt, Human
aaauuggggauucuuaaaguuga

SEQ ID NO: 1701063 - RNA, 20 nt, Human
aaauguucaucaaugaauga

SEQ ID NO: 1701064 - RNA, 21 nt, Human
aaaucugugaacuugaaauuu

SEQ ID NO: 1701065 - RNA, 19 nt, Human
aaaucugugaacuugaaau

SEQ ID NO: 1701066 - RNA, 20 nt, Human
aaaucugugaacuugaaauu

SEQ ID NO: 1701067 - RNA, 13 nt, Human
aauaauaaagauc

SEQ ID NO: 1701068 - RNA, 21 nt, Human
aauaauaaagaucauguaaaa

SEQ ID NO: 1701069 - RNA, 10 nt, Human
aauaaaccau

SEQ ID NO: 1701070 - RNA, 22 nt, Human
aaguugauaugccuuuucccaa

SEQ ID NO: 1701071 - RNA, 12 nt, Human
aauaauguuuca

SEQ ID NO: 1701072 - RNA, 19 nt, Human
aauaauguuucaaacauau

SEQ ID NO: 1701073 - RNA, 14 nt, Human
aauaauguuucaaa

SEQ ID NO: 1701074 - RNA, 20 nt, Human
aauauuaaagccauguuuau

SEQ ID NO: 1701075 - RNA, 19 nt, Human
aauauuaaagccauguuua

SEQ ID NO: 1701076 - RNA, 18 nt, Human
aauauuaaagccauguuu

SEQ ID NO: 1701077 - RNA, 16 nt, Human
aauauuaaagccaugu

SEQ ID NO: 1701078 - RNA, 15 nt, Human
aauauuaaagccaug

SEQ ID NO: 1701079 - RNA, 14 nt, Human
aauauuaaagccau

SEQ ID NO: 1701080 - RNA, 13 nt, Human
aauauuaaagcca

SEQ ID NO: 1701081 - RNA, 12 nt, Human
aauacuguuuga

SEQ ID NO: 1701082 - RNA, 20 nt, Human
aaugguccgugcuaaggacu

SEQ ID NO: 1701083 - RNA, 16 nt, Human
aaugauaacuggaaac

SEQ ID NO: 1701084 - RNA, 15 nt, Human
aaugauaacuggaaa

SEQ ID NO: 1701085 - RNA, 14 nt, Human
aaugauaacuggaa

SEQ ID NO: 1701086 - RNA, 17 nt, Human
aauccauacauuugugu

SEQ ID NO: 1701087 - RNA, 16 nt, Human
aauccauacauuugug

SEQ ID NO: 1701088 - RNA, 16 nt, Human
aaggcaaaugacuuug

SEQ ID NO: 1701089 - RNA, 15 nt, Human
aaggcaaaugacuuu

SEQ ID NO: 1701090 - RNA, 14 nt, Human
aaggcaaaugacuu

SEQ ID NO: 1701091 - RNA, 19 nt, Human
aagccagauuuuccugaaa

SEQ ID NO: 1701092 - RNA, 12 nt, Human
aaguagaggagg

SEQ ID NO: 1701093 - RNA, 15 nt, Human
aagcagggacuugaa

SEQ ID NO: 1701094 - RNA, 23 nt, Human
aagacagugaaagaaaauaacaa

SEQ ID NO: 1701095 - RNA, 15 nt, Human
aagagaacuuccaga

SEQ ID NO: 1701096 - RNA, 14 nt, Human
accaccuuucagau

SEQ ID NO: 1701097 - RNA, 20 nt, Human
accaaggcugauuaaaccaa

SEQ ID NO: 1701098 - RNA, 19 nt, Human
accaaggcugauuaaacca

SEQ ID NO: 1701099 - RNA, 20 nt, Human
acaucccuuaccugggaaag

SEQ ID NO: 1701100 - RNA, 21 nt, Human
acagugauuaccagggacuga

SEQ ID NO: 1701101 - RNA, 20 nt, Human
acaauuuuguuucuguacuu

SEQ ID NO: 1701102 - RNA, 16 nt, Human
acagaagcuccaggua

SEQ ID NO: 1701103 - RNA, 11 nt, Human
aauuuuggaau

SEQ ID NO: 1701104 - RNA, 12 nt, Human
aauuuuggaauu

SEQ ID NO: 1701105 - RNA, 18 nt, Human
aauuuugugaagcaaaau

SEQ ID NO: 1701106 - RNA, 17 nt, Human
aauuuugugaagcaaaa

SEQ ID NO: 1701107 - RNA, 16 nt, Human
acaagaaaugaaagca

SEQ ID NO: 1701108 - RNA, 15 nt, Human
acaagaaaugaaagc

SEQ ID NO: 1701109 - RNA, 22 nt, Human
acaagaaaugaaagcagggacu

SEQ ID NO: 1701110 - RNA, 21 nt, Human
acaaggaugaauuaaguuuuu

SEQ ID NO: 1701111 - RNA, 23 nt, Human
aauuuauuggcuuuucugaucca

SEQ ID NO: 1701112 - RNA, 21 nt, Human
aauuuauuggcuuuucugauc

SEQ ID NO: 1701113 - RNA, 20 nt, Human
aauuuauuggcuuuucugau

SEQ ID NO: 1701114 - RNA, 19 nt, Human
aauuuauuggcuuuucuga

SEQ ID NO: 1701115 - RNA, 17 nt, Human
aauuuauuggcuuuucu

SEQ ID NO: 1701116 - RNA, 16 nt, Human
aauuggggauucuuaa

SEQ ID NO: 1701117 - RNA, 21 nt, Human
aaugguccgugcuaaggacuu

SEQ ID NO: 1701118 - RNA, 20 nt, Human
aauuggggauucuuaaaguu

SEQ ID NO: 1701119 - RNA, 17 nt, Human
aauuggggauucuuaaa

SEQ ID NO: 1701120 - RNA, 13 nt, Human
acugauucuucag

SEQ ID NO: 1701121 - RNA, 12 nt, Human
acugauucuuca

SEQ ID NO: 1701122 - RNA, 22 nt, Human
acugauucuucagcaaaaauau

SEQ ID NO: 1701123 - RNA, 15 nt, Human
acugauucuucagca

SEQ ID NO: 1701124 - RNA, 17 nt, Human
acucugucucaguccau

SEQ ID NO: 1701125 - RNA, 15 nt, Human
acucugucucagucc

SEQ ID NO: 1701126 - RNA, 20 nt, Human
acucuuaagaagacugcauu

SEQ ID NO: 1701127 - RNA, 15 nt, Human
acucuuaagaagacu

SEQ ID NO: 1701128 - RNA, 14 nt, Human
acucuuaagaagac

SEQ ID NO: 1701129 - RNA, 22 nt, Human
acuugggaggcugagaugggag

SEQ ID NO: 1701130 - RNA, 17 nt, Human
acuuuaugcuaagugaa

SEQ ID NO: 1701131 - RNA, 12 nt, Human
acuuuaugcuaa

SEQ ID NO: 1701132 - RNA, 14 nt, Human
acuuaaaaaugguu

SEQ ID NO: 1701133 - RNA, 13 nt, Human
acuuaaaaauggu

SEQ ID NO: 1701134 - RNA, 21 nt, Human
acuuaaaaaugguuuaaaugg

SEQ ID NO: 1701135 - RNA, 19 nt, Human
acuucaaauccuugaagau

SEQ ID NO: 1701136 - RNA, 19 nt, Human
acuucagcgguuuauauaa

SEQ ID NO: 1701137 - RNA, 18 nt, Human
acuucagcgguuuauaua

SEQ ID NO: 1701138 - RNA, 17 nt, Human
acuucagcgguuuauau

SEQ ID NO: 1701139 - RNA, 20 nt, Human
acuucaaauccuugaagauu

SEQ ID NO: 1701140 - RNA, 22 nt, Human
accugucuugccuuuuucauua

SEQ ID NO: 1701141 - RNA, 21 nt, Human
accugucuugccuuuuucauu

SEQ ID NO: 1701142 - RNA, 19 nt, Human
accugucuugccuuuuuca

SEQ ID NO: 1701143 - RNA, 20 nt, Human
accucugccucagaaaacaa

SEQ ID NO: 1701144 - RNA, 18 nt, Human
accucugccucagaaaac

SEQ ID NO: 1701145 - RNA, 17 nt, Human
accucugccucagaaaa

SEQ ID NO: 1701146 - RNA, 19 nt, Human
acggacgaaccuugaaaac

SEQ ID NO: 1701147 - RNA, 18 nt, Human
acuaguauuucuaugaaa

SEQ ID NO: 1701148 - RNA, 19 nt, Human
acuaguauuucuaugaaau

SEQ ID NO: 1701149 - RNA, 14 nt, Human
aacuggguuccugc

SEQ ID NO: 1701150 - RNA, 15 nt, Human
aacuggguuccugca

SEQ ID NO: 1701151 - RNA, 18 nt, Human
aacuuccagauccuggaa

SEQ ID NO: 1701152 - RNA, 15 nt, Human
gugaacuugaaauuu

SEQ ID NO: 1701153 - RNA, 14 nt, Human
gugaacuugaaauu

SEQ ID NO: 1701154 - RNA, 21 nt, Human
gugagaugcuagaacucccuu

SEQ ID NO: 1701155 - RNA, 12 nt, Human
aacugaaaucau

SEQ ID NO: 1701156 - RNA, 17 nt, Human
aacugcuuguuuccuag

SEQ ID NO: 1701157 - RNA, 16 nt, Human
aacugggcugaacacu

SEQ ID NO: 1701158 - RNA, 14 nt, Human
aacugggcugaaca

SEQ ID NO: 1701159 - RNA, 17 nt, Human
aacugggacaggggaga

SEQ ID NO: 1701160 - RNA, 16 nt, Human
aaccucuuugucuaca

SEQ ID NO: 1701161 - RNA, 18 nt, Human
aaccugagccccaaaagg

SEQ ID NO: 1701162 - RNA, 16 nt, Human
aacccgggaggcagag

SEQ ID NO: 1701163 - RNA, 23 nt, Human
aacccaaauguucaucaaugaau

SEQ ID NO: 1701164 - RNA, 18 nt, Human
aaccuugaaaacuuuaug

SEQ ID NO: 1701165 - RNA, 21 nt, Human
aacuagaguuuagcuggaaaa

SEQ ID NO: 1701166 - RNA, 16 nt, Human
gucuuucacauuuaaa

SEQ ID NO: 1701167 - RNA, 20 nt, Human
aaccugagccccaaaaggua

SEQ ID NO: 1701168 - RNA, 15 nt, Human
aaauuguaauuauau

SEQ ID NO: 1701169 - RNA, 14 nt, Human
aaauuguaauuaua

SEQ ID NO: 1701170 - RNA, 18 nt, Human
guauguacuucaugcugu

SEQ ID NO: 1701171 - RNA, 11 nt, Human
aaaugguuaaa

SEQ ID NO: 1701172 - RNA, 19 nt, Human
aaaugguuaaaagagguuu

SEQ ID NO: 1701173 - RNA, 13 nt, Human
aaaugguuaaaag

SEQ ID NO: 1701174 - RNA, 17 nt, Human
guaguguuggagaagaa

SEQ ID NO: 1701175 - RNA, 20 nt, Human
guaguguuggagaagaacug

SEQ ID NO: 1701176 - RNA, 10 nt, Human
guauaauuaa

SEQ ID NO: 1701177 - RNA, 21 nt, Human
guauaaaauaauuuuuauauu

SEQ ID NO: 1701178 - RNA, 15 nt, Human
guauaaaauaauuuu

SEQ ID NO: 1701179 - RNA, 16 nt, Human
guauauuuuauaucaa

SEQ ID NO: 1701180 - RNA, 20 nt, Human
aaauuuuuucucuaggaaau

SEQ ID NO: 1701181 - RNA, 15 nt, Human
aacaaugcuguauuu

SEQ ID NO: 1701182 - RNA, 14 nt, Human
aacaaugcuguauu

SEQ ID NO: 1701183 - RNA, 12 nt, Human
aacaauaaaaga

SEQ ID NO: 1701184 - RNA, 16 nt, Human
aacacaacuauauugu

SEQ ID NO: 1701185 - RNA, 15 nt, Human
aacacaacuauauug

SEQ ID NO: 1701186 - RNA, 22 nt, Human
aacaaugcuguauuuuaaaaga

SEQ ID NO: 1701187 - RNA, 17 nt, Human
aacaaugcuguauuuua

SEQ ID NO: 1701188 - RNA, 16 nt, Human
aacagauaaauaguuu

SEQ ID NO: 1701189 - RNA, 22 nt, Human
aacagugauuaccagggacuga

SEQ ID NO: 1701190 - RNA, 15 nt, Human
aacagugauuaccag

SEQ ID NO: 1701191 - RNA, 17 nt, Human
aacacaacuauauuguu

SEQ ID NO: 1701192 - RNA, 20 nt, Human
guuuaauauuaaagccaugu

SEQ ID NO: 1701193 - RNA, 19 nt, Human
guuuaauauuaaagccaug

SEQ ID NO: 1701194 - RNA, 14 nt, Human
aagguacuucaaau

SEQ ID NO: 1701195 - RNA, 22 nt, Human
guugccuaaauccauuuggaaa

SEQ ID NO: 1701196 - RNA, 17 nt, Human
guugccuaaauccauuu

SEQ ID NO: 1701197 - RNA, 20 nt, Human
guuuuucuuaaauaauaaag

SEQ ID NO: 1701198 - RNA, 16 nt, Human
aagucuuucacauuua

SEQ ID NO: 1701199 - RNA, 17 nt, Human
aaguauuaagcauauau

SEQ ID NO: 1701200 - RNA, 16 nt, Human
aaguauuaagcauaua

SEQ ID NO: 1701201 - RNA, 13 nt, Human
aaguauuagaaua

SEQ ID NO: 1701202 - RNA, 18 nt, Human
aaguauuaagcauauauu

SEQ ID NO: 1701203 - RNA, 15 nt, Human
aaguauuaagcauau

SEQ ID NO: 1701204 - RNA, 14 nt, Human
aaguauuaagcaua

SEQ ID NO: 1701205 - RNA, 19 nt, Human
aaguaaugauaacuggaaa

SEQ ID NO: 1701206 - RNA, 14 nt, Human
aaguaaugauaacu

SEQ ID NO: 1701207 - RNA, 21 nt, Human
guuuuucuuaaauaauaaaga

SEQ ID NO: 1701208 - RNA, 12 nt, Human
uaaaagaaugau

SEQ ID NO: 1701209 - RNA, 20 nt, Human
uaaaauaauuuuuauauuug

SEQ ID NO: 1701210 - RNA, 20 nt, Human
uaaaagacagugaaagaaaa

SEQ ID NO: 1701211 - RNA, 17 nt, Human
aagccaaaccucuguga

SEQ ID NO: 1701212 - RNA, 16 nt, Human
aagcauuuagauguau

SEQ ID NO: 1701213 - RNA, 20 nt, Human
aagcucacagaccuuugaac

SEQ ID NO: 1701214 - RNA, 14 nt, Human
aagcuccagguaga

SEQ ID NO: 1701215 - RNA, 13 nt, Human
aagcuccagguag

SEQ ID NO: 1701216 - RNA, 17 nt, Human
aagacugcauuauauuu

SEQ ID NO: 1701217 - RNA, 16 nt, Human
aagacugcacaucaaa

SEQ ID NO: 1701218 - RNA, 23 nt, Human
aagaggaaugaaguacucauaca

SEQ ID NO: 1701219 - RNA, 13 nt, Human
aagauguagagga

SEQ ID NO: 1701220 - RNA, 21 nt, Human
gugugaccacugcagaagaca

SEQ ID NO: 1701221 - RNA, 21 nt, Human
aauagcuagacuggugacuga

SEQ ID NO: 1701222 - RNA, 19 nt, Human
aauagucaaauugugugaa

SEQ ID NO: 1701223 - RNA, 20 nt, Human
aauagcuagacuggugacug

SEQ ID NO: 1701224 - RNA, 14 nt, Human
aauagcuagacugg

SEQ ID NO: 1701225 - RNA, 15 nt, Human
uaacauguuaaacca

SEQ ID NO: 1701226 - RNA, 12 nt, Human
uaacauguuaaa

SEQ ID NO: 1701227 - RNA, 13 nt, Human
uaagaagugaaaa

SEQ ID NO: 1701228 - RNA, 23 nt, Human
aauacaucccuuaccugggaaag

SEQ ID NO: 1701229 - RNA, 23 nt, Human
aauaccacaggaaccacaagacu

SEQ ID NO: 1701230 - RNA, 13 nt, Human
uaacaaugcugua

SEQ ID NO: 1701231 - RNA, 16 nt, Human
aaucccauuauucaaa

SEQ ID NO: 1701232 - RNA, 14 nt, Human
aaucccauuauuca

SEQ ID NO: 1701233 - RNA, 21 nt, Human
aaucccauuauucaaaguugc

SEQ ID NO: 1701234 - RNA, 21 nt, Human
aauccucucaaccaccuuuca

SEQ ID NO: 1701235 - RNA, 19 nt, Human
uaaggacuuguuagaucua

SEQ ID NO: 1701236 - RNA, 16 nt, Human
uaaggacuuguuagau

SEQ ID NO: 1701237 - RNA, 15 nt, Human
uaaggacuuguuaga

SEQ ID NO: 1701238 - RNA, 13 nt, Human
uaaggacuuguua

SEQ ID NO: 1701239 - RNA, 20 nt, Human
uaaguaaugauaacuggaaa

SEQ ID NO: 1701240 - RNA, 13 nt, Human
uaagcauauauuu

SEQ ID NO: 1701241 - RNA, 14 nt, Human
uaagcaaaauguga

SEQ ID NO: 1701242 - RNA, 21 nt, Human
uaagcaaaaugugauauguac

SEQ ID NO: 1701243 - RNA, 15 nt, Human
uaagcaaaaugugau

SEQ ID NO: 1701244 - RNA, 19 nt, Human
uaaggaaacuggguuccug

SEQ ID NO: 1701245 - RNA, 14 nt, Human
uaaggaaacugggu

SEQ ID NO: 1701246 - RNA, 12 nt, Human
uaaggaaacugg

SEQ ID NO: 1701247 - RNA, 21 nt, Human
uaaggaaaaguuuaauauuaa

SEQ ID NO: 1701248 - RNA, 19 nt, Human
uaaggaaaaguuuaauauu

SEQ ID NO: 1701249 - RNA, 17 nt, Human
uaaggaaaaguuuaaua

SEQ ID NO: 1701250 - RNA, 22 nt, Human
uaaggacuucuuuaauuuugga

SEQ ID NO: 1701251 - RNA, 16 nt, Human
uaaggacuucuuuaau

SEQ ID NO: 1701252 - RNA, 15 nt, Human
uaaggacuucuuuaa

SEQ ID NO: 1701253 - RNA, 14 nt, Human
uaaggacuucuuua

SEQ ID NO: 1701254 - RNA, 16 nt, Human
aaucagccuaguugau

SEQ ID NO: 1701255 - RNA, 15 nt, Human
aauauuuauuuuaau

SEQ ID NO: 1701256 - RNA, 23 nt, Human
uaauuauaucugaggaauucugu

SEQ ID NO: 1701257 - RNA, 22 nt, Human
uaauuauaucugaggaauucug

SEQ ID NO: 1701258 - RNA, 21 nt, Human
uaauuauaucugaggaauucu

SEQ ID NO: 1701259 - RNA, 19 nt, Human
uaauuauaucugaggaauu

SEQ ID NO: 1701260 - RNA, 20 nt, Human
uaauuauaugcuauuucuau

SEQ ID NO: 1701261 - RNA, 19 nt, Human
uaauuauaugcuauuucua

SEQ ID NO: 1701262 - RNA, 18 nt, Human
uaauuauaugcuauuucu

SEQ ID NO: 1701263 - RNA, 14 nt, Human
uaauuauaugcuau

SEQ ID NO: 1701264 - RNA, 16 nt, Human
aaugauuucauucaau

SEQ ID NO: 1701265 - RNA, 18 nt, Human
uaauuuuuauauuugaaa

SEQ ID NO: 1701266 - RNA, 21 nt, Human
uaauuuuuauauuugaaauau

SEQ ID NO: 1701267 - RNA, 19 nt, Human
uaauuuuuauauuugaaau

SEQ ID NO: 1701268 - RNA, 22 nt, Human
uaauuccguagguuauuuucag

SEQ ID NO: 1701269 - RNA, 22 nt, Human
aaugagagacacacugaagaag

SEQ ID NO: 1701270 - RNA, 21 nt, Human
uacaaaaaaaaaaaaaaauua

SEQ ID NO: 1701271 - RNA, 21 nt, Human
aaugcuguauuuuaaaagaau

SEQ ID NO: 1701272 - RNA, 20 nt, Human
aaugcuguauuuuaaaagaa

SEQ ID NO: 1701273 - RNA, 22 nt, Human
aaugcuguauuuuaaaagaaug

SEQ ID NO: 1701274 - RNA, 17 nt, Human
uacagagacagaaagca

SEQ ID NO: 1701275 - RNA, 14 nt, Human
uacaccauuaugug

SEQ ID NO: 1701276 - RNA, 14 nt, Human
aauuaaguaucuga

SEQ ID NO: 1701277 - RNA, 13 nt, Human
aauuaaguaucug

SEQ ID NO: 1701278 - RNA, 19 nt, Human
uaccagggacugaggggag

SEQ ID NO: 1701279 - RNA, 20 nt, Human
aauguucaucaaugaaugaa

SEQ ID NO: 1701280 - RNA, 16 nt, Human
aauguucaucaaugaa

SEQ ID NO: 1701281 - RNA, 13 nt, Human
aauguucaucaau

SEQ ID NO: 1701282 - RNA, 14 nt, Human
aauuacauuuguau

SEQ ID NO: 1701283 - RNA, 13 nt, Human
aauuacauuugua

SEQ ID NO: 1701284 - RNA, 22 nt, Human
acacuuuugguuaagucuguuu

SEQ ID NO: 1701285 - RNA, 13 nt, Human
acacuuuugguua

SEQ ID NO: 1701286 - RNA, 14 nt, Human
acagaccuuugaac

SEQ ID NO: 1701287 - RNA, 19 nt, Human
uauagauuagaauucugua

SEQ ID NO: 1701288 - RNA, 18 nt, Human
uauagauuagaauucugu

SEQ ID NO: 1701289 - RNA, 12 nt, Human
uauaggaauuga

SEQ ID NO: 1701290 - RNA, 21 nt, Human
uaugaaacuuguguaaauaca

SEQ ID NO: 1701291 - RNA, 19 nt, Human
uaugaaacuuguguaaaua

SEQ ID NO: 1701292 - RNA, 14 nt, Human
uaugaaacuugugu

SEQ ID NO: 1701293 - RNA, 19 nt, Human
acagcccuucuuuccacag

SEQ ID NO: 1701294 - RNA, 23 nt, Human
uaugcuauuucuauauuuucauu

SEQ ID NO: 1701295 - RNA, 22 nt, Human
uaugcuauuucuauauuuucau

SEQ ID NO: 1701296 - RNA, 18 nt, Human
uaugcuauuucuauauuu

SEQ ID NO: 1701297 - RNA, 16 nt, Human
uaugcuauuucuauau

SEQ ID NO: 1701298 - RNA, 15 nt, Human
uaugcuauuucuaua

SEQ ID NO: 1701299 - RNA, 14 nt, Human
uaugcuauuucuau

SEQ ID NO: 1701300 - RNA, 15 nt, Human
uaugccccauucaac

SEQ ID NO: 1701301 - RNA, 22 nt, Human
acaggaaccacaagacugcaca

SEQ ID NO: 1701302 - RNA, 23 nt, Human
acagcuguaugauucccagccag

SEQ ID NO: 1701303 - RNA, 20 nt, Human
acagcuguaugauucccagc

SEQ ID NO: 1701304 - RNA, 19 nt, Human
acagcuguaugauucccag

SEQ ID NO: 1701305 - RNA, 14 nt, Human
acagcuguaugauu

SEQ ID NO: 1701306 - RNA, 18 nt, Human
uagcacacacuuuugguu

SEQ ID NO: 1701307 - RNA, 14 nt, Human
uagaggguguguaa

SEQ ID NO: 1701308 - RNA, 18 nt, Human
acaaaguauuaagcauau

SEQ ID NO: 1701309 - RNA, 13 nt, Human
acaaaguauuaag

SEQ ID NO: 1701310 - RNA, 16 nt, Human
acaaaguauuaagcau

SEQ ID NO: 1701311 - RNA, 15 nt, Human
acaaaguauuaagca

SEQ ID NO: 1701312 - RNA, 13 nt, Human
uagacacacauga

SEQ ID NO: 1701313 - RNA, 16 nt, Human
uagaacucccuuucaa

SEQ ID NO: 1701314 - RNA, 18 nt, Human
uagaacucccuuucaaca

SEQ ID NO: 1701315 - RNA, 17 nt, Human
uagaacucccuuucaac

SEQ ID NO: 1701316 - RNA, 15 nt, Human
uagaaacacaacuau

SEQ ID NO: 1701317 - RNA, 13 nt, Human
uaggauguugaaa

SEQ ID NO: 1701318 - RNA, 13 nt, Human
acacaacuauauu

SEQ ID NO: 1701319 - RNA, 15 nt, Human
uccaauuaaggauuu

SEQ ID NO: 1701320 - RNA, 17 nt, Human
uccaauuaaggauuuua

SEQ ID NO: 1701321 - RNA, 16 nt, Human
uccaauuaaggauuuu

SEQ ID NO: 1701322 - RNA, 22 nt, Human
uccacauaaggaaacuggguuc

SEQ ID NO: 1701323 - RNA, 17 nt, Human
accugagccccaaaagg

SEQ ID NO: 1701324 - RNA, 12 nt, Human
accugagcccca

SEQ ID NO: 1701325 - RNA, 16 nt, Human
ucauaauaaguugcau

SEQ ID NO: 1701326 - RNA, 20 nt, Human
acgcguugaaauuguaauua

SEQ ID NO: 1701327 - RNA, 18 nt, Human
acgcguugaaauuguaau

SEQ ID NO: 1701328 - RNA, 14 nt, Human
acgcguugaaauug

SEQ ID NO: 1701329 - RNA, 13 nt, Human
acgcguugaaauu

SEQ ID NO: 1701330 - RNA, 16 nt, Human
acgcucucuggccuuc

SEQ ID NO: 1701331 - RNA, 15 nt, Human
acgcucucuggccuu

SEQ ID NO: 1701332 - RNA, 15 nt, Human
acggaugauuucuau

SEQ ID NO: 1701333 - RNA, 14 nt, Human
acggaugauuucua

SEQ ID NO: 1701334 - RNA, 17 nt, Human
acgcucucuggccuucg

SEQ ID NO: 1701335 - RNA, 12 nt, Human
uccauuuaauaa

SEQ ID NO: 1701336 - RNA, 22 nt, Human
uccaugaagauguagaggagaa

SEQ ID NO: 1701337 - RNA, 11 nt, Human
uccauccugag

SEQ ID NO: 1701338 - RNA, 14 nt, Human
uccagugagacagc

SEQ ID NO: 1701339 - RNA, 20 nt, Human
uccauuuggaaaucuuuaaa

SEQ ID NO: 1701340 - RNA, 19 nt, Human
uccauuuggaaaucuuuaa

SEQ ID NO: 1701341 - RNA, 12 nt, Human
uccauuuggaaa

SEQ ID NO: 1701342 - RNA, 17 nt, Human
uccauuuaauaauuaua

SEQ ID NO: 1701343 - RNA, 18 nt, Human
uccgugcuaaggacuugu

SEQ ID NO: 1701344 - RNA, 17 nt, Human
uccgugcuaaggacuug

SEQ ID NO: 1701345 - RNA, 16 nt, Human
uccgugcuaaggacuu

SEQ ID NO: 1701346 - RNA, 18 nt, Human
acuccagaaagugacaag

SEQ ID NO: 1701347 - RNA, 14 nt, Human
acuccagaaaguga

SEQ ID NO: 1701348 - RNA, 23 nt, Human
uccgugcuaaggacuuguuagau

SEQ ID NO: 1701349 - RNA, 22 nt, Human
uccugaaaacccuugccaugug

SEQ ID NO: 1701350 - RNA, 21 nt, Human
uccugaaaacccuugccaugu

SEQ ID NO: 1701351 - RNA, 17 nt, Human
uccucuccccaugaugu

SEQ ID NO: 1701352 - RNA, 21 nt, Human
acuccaaacugacucuuaaga

SEQ ID NO: 1701353 - RNA, 20 nt, Human
acuagaguuuagcuggaaaa

SEQ ID NO: 1701354 - RNA, 15 nt, Human
uauuuguuugcauag

SEQ ID NO: 1701355 - RNA, 14 nt, Human
uauuuuaaaagaau

SEQ ID NO: 1701356 - RNA, 18 nt, Human
uauuuuaaaagaaugauu

SEQ ID NO: 1701357 - RNA, 22 nt, Human
uauuuuaauaauguuucaaaca

SEQ ID NO: 1701358 - RNA, 19 nt, Human
uauuuuaauaauguuucaa

SEQ ID NO: 1701359 - RNA, 15 nt, Human
ucaaaguugccuaaa

SEQ ID NO: 1701360 - RNA, 12 nt, Human
acauguauuugu

SEQ ID NO: 1701361 - RNA, 16 nt, Human
acaugagguacugaga

SEQ ID NO: 1701362 - RNA, 23 nt, Human
acauugguucuuguauuaagaau

SEQ ID NO: 1701363 - RNA, 22 nt, Human
acauugguucuuguauuaagaa

SEQ ID NO: 1701364 - RNA, 21 nt, Human
acauugguucuuguauuaaga

SEQ ID NO: 1701365 - RNA, 18 nt, Human
acauugguucuuguauua

SEQ ID NO: 1701366 - RNA, 16 nt, Human
acauugguucuuguau

SEQ ID NO: 1701367 - RNA, 14 nt, Human
acauugguucuugu

SEQ ID NO: 1701368 - RNA, 23 nt, Human
acauugguguuguacucaauuuu

SEQ ID NO: 1701369 - RNA, 22 nt, Human
acauugguguuguacucaauuu

SEQ ID NO: 1701370 - RNA, 16 nt, Human
acauugguguuguacu

SEQ ID NO: 1701371 - RNA, 14 nt, Human
acauugguguugua

SEQ ID NO: 1701372 - RNA, 23 nt, Human
ucaauauuucagauaaucacaau

SEQ ID NO: 1701373 - RNA, 13 nt, Human
accaaaaaccagu

SEQ ID NO: 1701374 - RNA, 12 nt, Human
accaaaaaccag

SEQ ID NO: 1701375 - RNA, 23 nt, Human
accaaaaaucucaauauuucaga

SEQ ID NO: 1701376 - RNA, 16 nt, Human
accacaagacugcaca

SEQ ID NO: 1701377 - RNA, 14 nt, Human
ucacaggaaguaga

SEQ ID NO: 1701378 - RNA, 13 nt, Human
ucaauuuaaaaaa

SEQ ID NO: 1701379 - RNA, 12 nt, Human
ucaauuuaaaaa

SEQ ID NO: 1701380 - RNA, 16 nt, Human
ucacagaccuuugaac

SEQ ID NO: 1701381 - RNA, 13 nt, Human
ucagaucugccua

SEQ ID NO: 1701382 - RNA, 20 nt, Human
ucagaucugccuaaggacuu

SEQ ID NO: 1701383 - RNA, 18 nt, Human
ucagaucugccuaaggac

SEQ ID NO: 1701384 - RNA, 15 nt, Human
ucagaucugccuaag

SEQ ID NO: 1701385 - RNA, 18 nt, Human
accaugggauaaaugcca

SEQ ID NO: 1701386 - RNA, 17 nt, Human
accaugggauaaaugcc

SEQ ID NO: 1701387 - RNA, 20 nt, Human
acccaaauguucaucaauga

SEQ ID NO: 1701388 - RNA, 16 nt, Human
acccaaauguucauca

SEQ ID NO: 1701389 - RNA, 18 nt, Human
ucaguauugaagcauuuu

SEQ ID NO: 1701390 - RNA, 17 nt, Human
ucaguauugaagcauuu

SEQ ID NO: 1701391 - RNA, 16 nt, Human
ucaguauugaagcauu

SEQ ID NO: 1701392 - RNA, 15 nt, Human
ucaguauugaagcau

SEQ ID NO: 1701393 - RNA, 14 nt, Human
ucaguauugaagca

SEQ ID NO: 1701394 - RNA, 19 nt, Human
ucaguauugaagcauuuua

SEQ ID NO: 1701395 - RNA, 15 nt, Human
acccgggaggcagag

SEQ ID NO: 1701396 - RNA, 19 nt, Human
ucuaguucacucuccauuu

SEQ ID NO: 1701397 - RNA, 16 nt, Human
ucuaguucacucucca

SEQ ID NO: 1701398 - RNA, 12 nt, Human
ucuaguucacuc

SEQ ID NO: 1701399 - RNA, 13 nt, Human
ucuauaauuuaaa

SEQ ID NO: 1701400 - RNA, 17 nt, Human
acuucauuaauaauaaa

SEQ ID NO: 1701401 - RNA, 20 nt, Human
acuuccagauccuggaaauc

SEQ ID NO: 1701402 - RNA, 16 nt, Human
acuugaaauuugaauu

SEQ ID NO: 1701403 - RNA, 23 nt, Human
acuugaacccgggaggcagaggu

SEQ ID NO: 1701404 - RNA, 16 nt, Human
acugggcugaacacuc

SEQ ID NO: 1701405 - RNA, 21 nt, Human
acugggcugaacacuccaauu

SEQ ID NO: 1701406 - RNA, 22 nt, Human
acugaagaagcaccaaucauga

SEQ ID NO: 1701407 - RNA, 17 nt, Human
ucuaccaaaaaucucaa

SEQ ID NO: 1701408 - RNA, 13 nt, Human
acuguggguagac

SEQ ID NO: 1701409 - RNA, 22 nt, Human
acuuugugcugggguuaucuga

SEQ ID NO: 1701410 - RNA, 15 nt, Human
agaaacauuugguaa

SEQ ID NO: 1701411 - RNA, 16 nt, Human
agaaacacaacuauau

SEQ ID NO: 1701412 - RNA, 16 nt, Human
agaaaacaaggaugaa

SEQ ID NO: 1701413 - RNA, 18 nt, Human
agaaagcagaacagugau

SEQ ID NO: 1701414 - RNA, 17 nt, Human
agaaagcagaacaguga

SEQ ID NO: 1701415 - RNA, 20 nt, Human
agaaagcagaacagugauua

SEQ ID NO: 1701416 - RNA, 17 nt, Human
agaaauuaaguaucuga

SEQ ID NO: 1701417 - RNA, 13 nt, Human
agaaauuaaguau

SEQ ID NO: 1701418 - RNA, 16 nt, Human
ucugaagugaaacugc

SEQ ID NO: 1701419 - RNA, 22 nt, Human
ucugaagugaaacugcuuguuu

SEQ ID NO: 1701420 - RNA, 18 nt, Human
ucugaagugaaacugcuu

SEQ ID NO: 1701421 - RNA, 16 nt, Human
agaacucccuuucaac

SEQ ID NO: 1701422 - RNA, 17 nt, Human
agaacucccuuucaaca

SEQ ID NO: 1701423 - RNA, 21 nt, Human
agaagccccacccugccucac

SEQ ID NO: 1701424 - RNA, 20 nt, Human
ucugcccauccugccccuga

SEQ ID NO: 1701425 - RNA, 19 nt, Human
agaagcaccaaucaugaau

SEQ ID NO: 1701426 - RNA, 13 nt, Human
agaaguugauaug

SEQ ID NO: 1701427 - RNA, 10 nt, Human
ucuggccuuc

SEQ ID NO: 1701428 - RNA, 15 nt, Human
ugaaacggaugauuu

SEQ ID NO: 1701429 - RNA, 20 nt, Human
ugaaaaucuuauaauuuaaa

SEQ ID NO: 1701430 - RNA, 23 nt, Human
ugaaacuuguguaaauacaauuu

SEQ ID NO: 1701431 - RNA, 17 nt, Human
ugaaacuuguguaaaua

SEQ ID NO: 1701432 - RNA, 19 nt, Human
ugaaacucguuaauuugua

SEQ ID NO: 1701433 - RNA, 20 nt, Human
ugaaacggaugauuucuaug

SEQ ID NO: 1701434 - RNA, 19 nt, Human
ugaaacggaugauuucuau

SEQ ID NO: 1701435 - RNA, 18 nt, Human
ugaaacggaugauuucua

SEQ ID NO: 1701436 - RNA, 17 nt, Human
ugaaacggaugauuucu

SEQ ID NO: 1701437 - RNA, 22 nt, Human
ugaaaaaguucugcagauaaac

SEQ ID NO: 1701438 - RNA, 18 nt, Human
agacaucaacagauaaau

SEQ ID NO: 1701439 - RNA, 17 nt, Human
agacaucaacagauaaa

SEQ ID NO: 1701440 - RNA, 21 nt, Human
agacauagaauuaacacauga

SEQ ID NO: 1701441 - RNA, 14 nt, Human
agaaucacuugaac

SEQ ID NO: 1701442 - RNA, 14 nt, Human
ugaagcauuuuaua

SEQ ID NO: 1701443 - RNA, 22 nt, Human
ugaagcauuuuauaaaucgcuu

SEQ ID NO: 1701444 - RNA, 18 nt, Human
ugaagcauuuuauaaauc

SEQ ID NO: 1701445 - RNA, 17 nt, Human
ugaagcauuuuauaaau

SEQ ID NO: 1701446 - RNA, 16 nt, Human
ugaagcauuuuauaaa

SEQ ID NO: 1701447 - RNA, 15 nt, Human
ugaagcauuuuauaa

SEQ ID NO: 1701448 - RNA, 22 nt, Human
ugaauggcuuuguauagaaccu

SEQ ID NO: 1701449 - RNA, 19 nt, Human
ugaauggcuuuguauagaa

SEQ ID NO: 1701450 - RNA, 18 nt, Human
ugaauggcuuuguauaga

SEQ ID NO: 1701451 - RNA, 17 nt, Human
ugaauggcuuuguauag

SEQ ID NO: 1701452 - RNA, 11 nt, Human
ugaauggcuuu

SEQ ID NO: 1701453 - RNA, 15 nt, Human
ugaauggcuuuguau

SEQ ID NO: 1701454 - RNA, 12 nt, Human
ugaauggcuuug

SEQ ID NO: 1701455 - RNA, 15 nt, Human
ugaauacuuuauaaa

SEQ ID NO: 1701456 - RNA, 20 nt, Human
agauaacuguuauuuauaau

SEQ ID NO: 1701457 - RNA, 19 nt, Human
agauaacuguuauuuauaa

SEQ ID NO: 1701458 - RNA, 16 nt, Human
agauaacuguuauuua

SEQ ID NO: 1701459 - RNA, 14 nt, Human
agauacuggauugu

SEQ ID NO: 1701460 - RNA, 17 nt, Human
agauacuggauuguacu

SEQ ID NO: 1701461 - RNA, 21 nt, Human
ugaauuuuguguuagagauuu

SEQ ID NO: 1701462 - RNA, 17 nt, Human
ugaauuuuguguuagag

SEQ ID NO: 1701463 - RNA, 19 nt, Human
agauuuuauuauguaaauc

SEQ ID NO: 1701464 - RNA, 18 nt, Human
agauuuuauuauguaaau

SEQ ID NO: 1701465 - RNA, 17 nt, Human
agauuuuauuauguaaa

SEQ ID NO: 1701466 - RNA, 16 nt, Human
agauuuuauuauguaa

SEQ ID NO: 1701467 - RNA, 15 nt, Human
agauuuuauuaugua

SEQ ID NO: 1701468 - RNA, 14 nt, Human
agauuuuauuaugu

SEQ ID NO: 1701469 - RNA, 16 nt, Human
agauuuuuuuguuguu

SEQ ID NO: 1701470 - RNA, 15 nt, Human
agauuuuuuuguugu

SEQ ID NO: 1701471 - RNA, 23 nt, Human
agauuuuuuuguuguuuguuuag

SEQ ID NO: 1701472 - RNA, 19 nt, Human
agauuuuuuuguuguuugu

SEQ ID NO: 1701473 - RNA, 18 nt, Human
agauuuuuuuguuguuug

SEQ ID NO: 1701474 - RNA, 16 nt, Human
ugacacuuaaaaaugg

SEQ ID NO: 1701475 - RNA, 17 nt, Human
ugacacuuaaaaauggu

SEQ ID NO: 1701476 - RNA, 16 nt, Human
agaugcaguucugaag

SEQ ID NO: 1701477 - RNA, 15 nt, Human
agcaucacaguuuug

SEQ ID NO: 1701478 - RNA, 17 nt, Human
agcaucacaguuuuggu

SEQ ID NO: 1701479 - RNA, 20 nt, Human
agcaucacaugaacuuguaa

SEQ ID NO: 1701480 - RNA, 12 nt, Human
ugauaugggucu

SEQ ID NO: 1701481 - RNA, 17 nt, Human
agcaugucgucaaagcu

SEQ ID NO: 1701482 - RNA, 20 nt, Human
agcaugucgucaaagcugaa

SEQ ID NO: 1701483 - RNA, 24 nt, Human
ugauaaucaacugggcugaacacu

SEQ ID NO: 1701484 - RNA, 18 nt, Human
ugauaaucaacugggcug

SEQ ID NO: 1701485 - RNA, 14 nt, Human
ugauaaucaacugg

SEQ ID NO: 1701486 - RNA, 15 nt, Human
ugagguuuuuaagcc

SEQ ID NO: 1701487 - RNA, 22 nt, Human
ugaguaacugauuuguaacaag

SEQ ID NO: 1701488 - RNA, 23 nt, Human
agcauaaauguugacaugggaca

SEQ ID NO: 1701489 - RNA, 21 nt, Human
ugauccagcagauuauucacu

SEQ ID NO: 1701490 - RNA, 22 nt, Human
ugauccagcagauuauucacug

SEQ ID NO: 1701491 - RNA, 22 nt, Human
ugauccaguuuuguuuggacca

SEQ ID NO: 1701492 - RNA, 17 nt, Human
ugaugaagaaguugaua

SEQ ID NO: 1701493 - RNA, 14 nt, Human
ugauuaccagggac

SEQ ID NO: 1701494 - RNA, 12 nt, Human
ugauuaaaccaa

SEQ ID NO: 1701495 - RNA, 14 nt, Human
agccauguuuauua

SEQ ID NO: 1701496 - RNA, 13 nt, Human
agccauguuuauu

SEQ ID NO: 1701497 - RNA, 16 nt, Human
agccauguuuauuaca

SEQ ID NO: 1701498 - RNA, 20 nt, Human
ugccaaguuguuugagaaau

SEQ ID NO: 1701499 - RNA, 19 nt, Human
ugccaaguuguuugagaaa

SEQ ID NO: 1701500 - RNA, 15 nt, Human
ugccaaguuguuuga

SEQ ID NO: 1701501 - RNA, 20 nt, Human
agccuuggggcugaugcagu

SEQ ID NO: 1701502 - RNA, 13 nt, Human
agcuagacuggug

SEQ ID NO: 1701503 - RNA, 21 nt, Human
agcuagacuggugacugauuc

SEQ ID NO: 1701504 - RNA, 17 nt, Human
agcuagacuggugacug

SEQ ID NO: 1701505 - RNA, 16 nt, Human
agcuagacuggugacu

SEQ ID NO: 1701506 - RNA, 14 nt, Human
agcuagacugguga

SEQ ID NO: 1701507 - RNA, 18 nt, Human
agcuacuugggaggcuga

SEQ ID NO: 1701508 - RNA, 17 nt, Human
agcuacuugggaggcug

SEQ ID NO: 1701509 - RNA, 19 nt, Human
agcuacuaauuuuaaaaug

SEQ ID NO: 1701510 - RNA, 22 nt, Human
agccugaaagaggaaugaagua

SEQ ID NO: 1701511 - RNA, 15 nt, Human
agccucauguccacu

SEQ ID NO: 1701512 - RNA, 20 nt, Human
agccucauguccacugguuc

SEQ ID NO: 1701513 - RNA, 17 nt, Human
agcccuucuuuccacag

SEQ ID NO: 1701514 - RNA, 18 nt, Human
agcccauggcacucuaug

SEQ ID NO: 1701515 - RNA, 21 nt, Human
aggaagccugauuaaagaaug

SEQ ID NO: 1701516 - RNA, 18 nt, Human
aggaagccugauuaaaga

SEQ ID NO: 1701517 - RNA, 17 nt, Human
aggaagccugauuaaag

SEQ ID NO: 1701518 - RNA, 12 nt, Human
aggaaauauuua

SEQ ID NO: 1701519 - RNA, 13 nt, Human
aggaaauauuuau

SEQ ID NO: 1701520 - RNA, 14 nt, Human
ugcucauggaauug

SEQ ID NO: 1701521 - RNA, 23 nt, Human
aggaauggagccugcacggugaa

SEQ ID NO: 1701522 - RNA, 13 nt, Human
ugcuguauuuuaa

SEQ ID NO: 1701523 - RNA, 22 nt, Human
ugcuguauuuuaaaagaaugau

SEQ ID NO: 1701524 - RNA, 21 nt, Human
ugcuguauuuuaaaagaauga

SEQ ID NO: 1701525 - RNA, 23 nt, Human
ugcuguauuuuaaaagaaugauu

SEQ ID NO: 1701526 - RNA, 17 nt, Human
aggacacugauaugggu

SEQ ID NO: 1701527 - RNA, 22 nt, Human
ugcuaaggacuuguuagaucua

SEQ ID NO: 1701528 - RNA, 18 nt, Human
ugcuaaggacuuguuaga

SEQ ID NO: 1701529 - RNA, 13 nt, Human
ugcuaaggacuug

SEQ ID NO: 1701530 - RNA, 12 nt, Human
ugcuaaggacuu

SEQ ID NO: 1701531 - RNA, 22 nt, Human
uggcauaacauaaaucugugaa

SEQ ID NO: 1701532 - RNA, 21 nt, Human
uggcauaacauaaaucuguga

SEQ ID NO: 1701533 - RNA, 17 nt, Human
uggcauaacauaaaucu

SEQ ID NO: 1701534 - RNA, 14 nt, Human
uggccuucggccuc

SEQ ID NO: 1701535 - RNA, 18 nt, Human
aggcaaaugacuuuggac

SEQ ID NO: 1701536 - RNA, 15 nt, Human
aggcaaaugacuuug

SEQ ID NO: 1701537 - RNA, 14 nt, Human
aggcaaaugacuuu

SEQ ID NO: 1701538 - RNA, 16 nt, Human
uggacuguggugacuu

SEQ ID NO: 1701539 - RNA, 15 nt, Human
uggacuguggugacu

SEQ ID NO: 1701540 - RNA, 22 nt, Human
uggacuguggugacuuuggaua

SEQ ID NO: 1701541 - RNA, 21 nt, Human
uggacuguggugacuuuggau

SEQ ID NO: 1701542 - RNA, 19 nt, Human
uggacuguggugacuuugg

SEQ ID NO: 1701543 - RNA, 17 nt, Human
uggacuguggugacuuu

SEQ ID NO: 1701544 - RNA, 13 nt, Human
uggagaagaacug

SEQ ID NO: 1701545 - RNA, 14 nt, Human
uggagaagaacuga

SEQ ID NO: 1701546 - RNA, 14 nt, Human
uggagcucguggaa

SEQ ID NO: 1701547 - RNA, 15 nt, Human
uggaaaucuuuaaaa

SEQ ID NO: 1701548 - RNA, 14 nt, Human
uggaaaucuuuaaa

SEQ ID NO: 1701549 - RNA, 23 nt, Human
aggacagcccuucuuuccacaga

SEQ ID NO: 1701550 - RNA, 19 nt, Human
ugggcugaacacuccaauu

SEQ ID NO: 1701551 - RNA, 17 nt, Human
ugggcugaacacuccaa

SEQ ID NO: 1701552 - RNA, 14 nt, Human
ugggaguacaaaag

SEQ ID NO: 1701553 - RNA, 23 nt, Human
agguacuucaaauccuugaagau

SEQ ID NO: 1701554 - RNA, 17 nt, Human
aggguuaugauuaagua

SEQ ID NO: 1701555 - RNA, 20 nt, Human
ugguaaggggaauugaggac

SEQ ID NO: 1701556 - RNA, 17 nt, Human
uguacuuuuuggcauaa

SEQ ID NO: 1701557 - RNA, 18 nt, Human
uguagaggagaaacugga

SEQ ID NO: 1701558 - RNA, 16 nt, Human
uguacuuuuuggcaua

SEQ ID NO: 1701559 - RNA, 15 nt, Human
uguacuuuuuggcau

SEQ ID NO: 1701560 - RNA, 12 nt, Human
uguacuuuuugg

SEQ ID NO: 1701561 - RNA, 14 nt, Human
agguuuuuaagccu

SEQ ID NO: 1701562 - RNA, 19 nt, Human
aguagauaggccaugggca

SEQ ID NO: 1701563 - RNA, 13 nt, Human
uguaauuauaucu

SEQ ID NO: 1701564 - RNA, 15 nt, Human
uguaauuauaucuga

SEQ ID NO: 1701565 - RNA, 14 nt, Human
uguaauuauaucug

SEQ ID NO: 1701566 - RNA, 17 nt, Human
uguaagaaaauaucacu

SEQ ID NO: 1701567 - RNA, 22 nt, Human
uguaaaucccauuauucaaagu

SEQ ID NO: 1701568 - RNA, 20 nt, Human
uguaaaucccauuauucaaa

SEQ ID NO: 1701569 - RNA, 19 nt, Human
uguaaaucccauuauucaa

SEQ ID NO: 1701570 - RNA, 18 nt, Human
uguaaaucccauuauuca

SEQ ID NO: 1701571 - RNA, 16 nt, Human
uguaaaucccauuauu

SEQ ID NO: 1701572 - RNA, 13 nt, Human
uguaaaucccauu

SEQ ID NO: 1701573 - RNA, 15 nt, Human
aguauuucuaugaaa

SEQ ID NO: 1701574 - RNA, 13 nt, Human
aguauuucuauga

SEQ ID NO: 1701575 - RNA, 22 nt, Human
aguauuucuaugaaauauuaug

SEQ ID NO: 1701576 - RNA, 23 nt, Human
ugucauuugcuggagcucugccc

SEQ ID NO: 1701577 - RNA, 21 nt, Human
ugucaauaaaauccauacauu

SEQ ID NO: 1701578 - RNA, 20 nt, Human
ugucaaucagccuaguugau

SEQ ID NO: 1701579 - RNA, 15 nt, Human
agucaggaaagagaa

SEQ ID NO: 1701580 - RNA, 16 nt, Human
agucaggaaagagaac

SEQ ID NO: 1701581 - RNA, 17 nt, Human
uguggugacuuuggaua

SEQ ID NO: 1701582 - RNA, 16 nt, Human
uguggugacuuuggau

SEQ ID NO: 1701583 - RNA, 21 nt, Human
agugccuguaaucacagcuac

SEQ ID NO: 1701584 - RNA, 21 nt, Human
agugcaaauugucacaggaca

SEQ ID NO: 1701585 - RNA, 18 nt, Human
agugcaaauugucacagg

SEQ ID NO: 1701586 - RNA, 22 nt, Human
agugcaaauugucacaggacag

SEQ ID NO: 1701587 - RNA, 19 nt, Human
uguuuagucuugucucaga

SEQ ID NO: 1701588 - RNA, 18 nt, Human
uguuuagucuugucucag

SEQ ID NO: 1701589 - RNA, 17 nt, Human
uguuuagucuugucuca

SEQ ID NO: 1701590 - RNA, 13 nt, Human
uguuuagucuugu

SEQ ID NO: 1701591 - RNA, 24 nt, Human
aguucacucuccauuuaauaauua

SEQ ID NO: 1701592 - RNA, 22 nt, Human
aguucacucuccauuuaauaau

SEQ ID NO: 1701593 - RNA, 20 nt, Human
aguucggugagcuacaaaug

SEQ ID NO: 1701594 - RNA, 19 nt, Human
aguucggugagcuacaaau

SEQ ID NO: 1701595 - RNA, 21 nt, Human
aguguugaaacggaugauuuc

SEQ ID NO: 1701596 - RNA, 16 nt, Human
aguguuggagaagaac

SEQ ID NO: 1701597 - RNA, 14 nt, Human
aguguuggagaaga

SEQ ID NO: 1701598 - RNA, 18 nt, Human
aguguuggagaagaacug

SEQ ID NO: 1701599 - RNA, 17 nt, Human
aguguuggagaagaacu

SEQ ID NO: 1701600 - RNA, 23 nt, Human
aguguuggagaagaacugaaauc

SEQ ID NO: 1701601 - RNA, 21 nt, Human
uguuauuuauaaucacuuuuu

SEQ ID NO: 1701602 - RNA, 18 nt, Human
uguuauuuauaaucacuu

SEQ ID NO: 1701603 - RNA, 17 nt, Human
aguugccuaaauccauu

SEQ ID NO: 1701604 - RNA, 16 nt, Human
aguugccuaaauccau

SEQ ID NO: 1701605 - RNA, 15 nt, Human
aguugccuaaaucca

SEQ ID NO: 1701606 - RNA, 11 nt, Human
aguugccuaaa

SEQ ID NO: 1701607 - RNA, 13 nt, Human
uguuucaaacaua

SEQ ID NO: 1701608 - RNA, 14 nt, Human
aguuuaaauuguaa

SEQ ID NO: 1701609 - RNA, 15 nt, Human
uuaagucuguuuuau

SEQ ID NO: 1701610 - RNA, 14 nt, Human
uuaagucuguuuua

SEQ ID NO: 1701611 - RNA, 17 nt, Human
uuaaguaucugacaucu

SEQ ID NO: 1701612 - RNA, 20 nt, Human
uuaagaagacugcauuauau

SEQ ID NO: 1701613 - RNA, 22 nt, Human
aguuuugguugcuuuaauauca

SEQ ID NO: 1701614 - RNA, 21 nt, Human
aguuuugguugcuuuaauauc

SEQ ID NO: 1701615 - RNA, 15 nt, Human
aguuuugguugcuuu

SEQ ID NO: 1701616 - RNA, 15 nt, Human
auaaaauaauuuuua

SEQ ID NO: 1701617 - RNA, 12 nt, Human
auaaaauaauuu

SEQ ID NO: 1701618 - RNA, 22 nt, Human
auaaauagcuagacuggugacu

SEQ ID NO: 1701619 - RNA, 21 nt, Human
auaaauagcuagacuggugac

SEQ ID NO: 1701620 - RNA, 14 nt, Human
auaaauaaaaauaa

SEQ ID NO: 1701621 - RNA, 15 nt, Human
auaaauaguuuauga

SEQ ID NO: 1701622 - RNA, 13 nt, Human
auaaauaaaaaua

SEQ ID NO: 1701623 - RNA, 22 nt, Human
auaacuguuauuuauaaucacu

SEQ ID NO: 1701624 - RNA, 20 nt, Human
auaacuguuauuuauaauca

SEQ ID NO: 1701625 - RNA, 18 nt, Human
auaacuguuauuuauaau

SEQ ID NO: 1701626 - RNA, 22 nt, Human
auaacgauaaaagacagugaaa

SEQ ID NO: 1701627 - RNA, 22 nt, Human
auaaauucccuggccuuucaua

SEQ ID NO: 1701628 - RNA, 21 nt, Human
auaaauucccuggccuuucau

SEQ ID NO: 1701629 - RNA, 23 nt, Human
auaauaaauucccuggccuuuca

SEQ ID NO: 1701630 - RNA, 18 nt, Human
auaauccuaaacauauga

SEQ ID NO: 1701631 - RNA, 15 nt, Human
uuugucuacaccauu

SEQ ID NO: 1701632 - RNA, 13 nt, Human
uuuguuucuguac

SEQ ID NO: 1701633 - RNA, 12 nt, Human
uuuguuucugua

SEQ ID NO: 1701634 - RNA, 18 nt, Human
uuuguuucuguacuuuuu

SEQ ID NO: 1701635 - RNA, 13 nt, Human
uuuuaaaaaagaa

SEQ ID NO: 1701636 - RNA, 15 nt, Human
uuuuaaaagaaugau

SEQ ID NO: 1701637 - RNA, 14 nt, Human
uuuuaaaagaauga

SEQ ID NO: 1701638 - RNA, 13 nt, Human
uuugcucauggaa

SEQ ID NO: 1701639 - RNA, 12 nt, Human
uuugcucaugga

SEQ ID NO: 1701640 - RNA, 11 nt, Human
uuugcucaugg

SEQ ID NO: 1701641 - RNA, 16 nt, Human
auguccacugguucuu

SEQ ID NO: 1701642 - RNA, 19 nt, Human
auuaacauguuaaaccaug

SEQ ID NO: 1701643 - RNA, 17 nt, Human
auuaacauguuaaacca

SEQ ID NO: 1701644 - RNA, 15 nt, Human
auuaacauguuaaac

SEQ ID NO: 1701645 - RNA, 14 nt, Human
auuaacauguuaaa

SEQ ID NO: 1701646 - RNA, 13 nt, Human
auuaacauguuaa

SEQ ID NO: 1701647 - RNA, 21 nt, Human
auuaaagccauguuuauuaca

SEQ ID NO: 1701648 - RNA, 17 nt, Human
auuaaagccauguuuau

SEQ ID NO: 1701649 - RNA, 16 nt, Human
auuaaagccauguuua

SEQ ID NO: 1701650 - RNA, 12 nt, Human
auuaaagccaug

SEQ ID NO: 1701651 - RNA, 22 nt, Human
auuaagaaugaaauacuguuug

SEQ ID NO: 1701652 - RNA, 21 nt, Human
auuaagaaugaaauacuguuu

SEQ ID NO: 1701653 - RNA, 20 nt, Human
auuaagaaugaaauacuguu

SEQ ID NO: 1701654 - RNA, 16 nt, Human
auuaagaaugaaauac

SEQ ID NO: 1701655 - RNA, 21 nt, Human
auguuucaaacauauauaaca

SEQ ID NO: 1701656 - RNA, 18 nt, Human
auguuucaaacauauaua

SEQ ID NO: 1701657 - RNA, 20 nt, Human
uuuuauaaaucgcuuuugau

SEQ ID NO: 1701658 - RNA, 12 nt, Human
uuuuauaaaucg

SEQ ID NO: 1701659 - RNA, 18 nt, Human
uuuuaugcuuuaaacauu

SEQ ID NO: 1701660 - RNA, 14 nt, Human
uuuuauaauuuugu

SEQ ID NO: 1701661 - RNA, 12 nt, Human
uuuuauuaugua

SEQ ID NO: 1701662 - RNA, 19 nt, Human
uuuuauggcacuaguauuu

SEQ ID NO: 1701663 - RNA, 22 nt, Human
uuuucauucuccuaucaccugu

SEQ ID NO: 1701664 - RNA, 21 nt, Human
uuuucauuauuuuauuaugaa

SEQ ID NO: 1701665 - RNA, 15 nt, Human
uuuucauuauuuuau

SEQ ID NO: 1701666 - RNA, 14 nt, Human
uuuuauuauguaaa

SEQ ID NO: 1701667 - RNA, 13 nt, Human
uuuuauuauguaa

SEQ ID NO: 1701668 - RNA, 19 nt, Human
auguucaucaaugaaugaa

SEQ ID NO: 1701669 - RNA, 15 nt, Human
auguugacaugggac

SEQ ID NO: 1701670 - RNA, 15 nt, Human
auuauuuuauuauga

SEQ ID NO: 1701671 - RNA, 17 nt, Human
auuauauuuacaaaugg

SEQ ID NO: 1701672 - RNA, 19 nt, Human
auuagagaguguugaaacg

SEQ ID NO: 1701673 - RNA, 18 nt, Human
auuagagaguguugaaac

SEQ ID NO: 1701674 - RNA, 17 nt, Human
auuagagaguguugaaa

SEQ ID NO: 1701675 - RNA, 16 nt, Human
auuagagaguguugaa

SEQ ID NO: 1701676 - RNA, 15 nt, Human
auuagagaguguuga

SEQ ID NO: 1701677 - RNA, 16 nt, Human
auuauauuuacaaaug

SEQ ID NO: 1701678 - RNA, 15 nt, Human
auuaaguaaugauaa

SEQ ID NO: 1701679 - RNA, 13 nt, Human
auuaaguaaugau

SEQ ID NO: 1701680 - RNA, 23 nt, Human
uuuuuuaaaaaagaaacauuugg

SEQ ID NO: 1701681 - RNA, 12 nt, Human
auuaccagggac

SEQ ID NO: 1701682 - RNA, 16 nt, Human
auuacauuuguauaaa

SEQ ID NO: 1701683 - RNA, 15 nt, Human
auuacauuuguauaa

SEQ ID NO: 1701684 - RNA, 13 nt, Human
auuacauuuguau

SEQ ID NO: 1701685 - RNA, 22 nt, Human
auuauuuuauuaugaaacuugu

SEQ ID NO: 1701686 - RNA, 21 nt, Human
auuauuuuauuaugaaacuug

SEQ ID NO: 1701687 - RNA, 20 nt, Human
auuccacuuauaggaauuga

SEQ ID NO: 1701688 - RNA, 21 nt, Human
auucccuggccuuucauauuu

SEQ ID NO: 1701689 - RNA, 23 nt, Human
auugugcgcuaaacuuuucugau

SEQ ID NO: 1701690 - RNA, 13 nt, Human
auugugccccugc

SEQ ID NO: 1701691 - RNA, 14 nt, Human
auuguauuacaaau

SEQ ID NO: 1701692 - RNA, 15 nt, Human
auuguauuacaaauc

SEQ ID NO: 1701693 - RNA, 16 nt, Human
auuuacaaaugggaaa

SEQ ID NO: 1701694 - RNA, 20 nt, Human
auugacacuuaaaaaugguu

SEQ ID NO: 1701695 - RNA, 21 nt, Human
auugacccacaagaaaugaaa

SEQ ID NO: 1701696 - RNA, 17 nt, Human
auuuggaaaucuuuaaa

SEQ ID NO: 1701697 - RNA, 20 nt, Human
auuuggaaaucuuuaaaaaa

SEQ ID NO: 1701698 - RNA, 23 nt, Human
auuugguaaggggaauugaggac

SEQ ID NO: 1701699 - RNA, 18 nt, Human
auuuguaguguuggagaa

SEQ ID NO: 1701700 - RNA, 15 nt, Human
auuuacuaaaaugga

SEQ ID NO: 1701701 - RNA, 22 nt, Human
auuuauuacuguaagaaaauau

SEQ ID NO: 1701702 - RNA, 13 nt, Human
auuuuauuaugua

SEQ ID NO: 1701703 - RNA, 15 nt, Human
auuuuauuauguaaa

SEQ ID NO: 1701704 - RNA, 14 nt, Human
auuuuauuauguaa

SEQ ID NO: 1701705 - RNA, 21 nt, Human
auuuuauuaugaaacuugugu

SEQ ID NO: 1701706 - RNA, 18 nt, Human
auuuuauuaugaaacuug

SEQ ID NO: 1701707 - RNA, 12 nt, Human
auuuuauuauga

SEQ ID NO: 1701708 - RNA, 11 nt, Human
auuuuauuaug

SEQ ID NO: 1701709 - RNA, 14 nt, Human
auuuuauuaugaaa

SEQ ID NO: 1701710 - RNA, 13 nt, Human
auuuuauuaugaa

SEQ ID NO: 1701711 - RNA, 16 nt, Human
auuuuaauaauguuuc

SEQ ID NO: 1701712 - RNA, 15 nt, Human
auuuuaauaauguuu

SEQ ID NO: 1701713 - RNA, 14 nt, Human
auuuuaauaauguu

SEQ ID NO: 1701714 - RNA, 21 nt, Human
auuuguauaaaauaauuuuua

SEQ ID NO: 1701715 - RNA, 14 nt, Human
auauaugugaugau

SEQ ID NO: 1701716 - RNA, 18 nt, Human
uucccaacuccagaaagu

SEQ ID NO: 1701717 - RNA, 13 nt, Human
auagucuggcugu

SEQ ID NO: 1701718 - RNA, 20 nt, Human
auaguuguaccgcaauguga

SEQ ID NO: 1701719 - RNA, 14 nt, Human
auauauaacaaugc

SEQ ID NO: 1701720 - RNA, 14 nt, Human
uucaaacauauaua

SEQ ID NO: 1701721 - RNA, 23 nt, Human
uucacaagacccaaaaggcagaa

SEQ ID NO: 1701722 - RNA, 17 nt, Human
auaggcguaacuaauuu

SEQ ID NO: 1701723 - RNA, 13 nt, Human
auccauuuggaaa

SEQ ID NO: 1701724 - RNA, 19 nt, Human
auccauuuggaaaucuuua

SEQ ID NO: 1701725 - RNA, 17 nt, Human
auccauuuggaaaucuu

SEQ ID NO: 1701726 - RNA, 14 nt, Human
auccauacauuugu

SEQ ID NO: 1701727 - RNA, 17 nt, Human
auccaguuuuguuugga

SEQ ID NO: 1701728 - RNA, 18 nt, Human
auccaguuuuguuuggac

SEQ ID NO: 1701729 - RNA, 21 nt, Human
auccaguuuuguuuggaccaa

SEQ ID NO: 1701730 - RNA, 20 nt, Human
auccaguuuuguuuggacca

SEQ ID NO: 1701731 - RNA, 14 nt, Human
uucuggugugaacu

SEQ ID NO: 1701732 - RNA, 21 nt, Human
uucuggugugaacuaaacuuu

SEQ ID NO: 1701733 - RNA, 20 nt, Human
uucuggugugaacuaaacuu

SEQ ID NO: 1701734 - RNA, 19 nt, Human
uucuguacuuuuuggcaua

SEQ ID NO: 1701735 - RNA, 18 nt, Human
uucuguacuuuuuggcau

SEQ ID NO: 1701736 - RNA, 13 nt, Human
uucuguacuuuuu

SEQ ID NO: 1701737 - RNA, 18 nt, Human
uugaacccgggaggcaga

SEQ ID NO: 1701738 - RNA, 19 nt, Human
uugaaauauugacuuuuua

SEQ ID NO: 1701739 - RNA, 18 nt, Human
aucaauaaaaaauuauga

SEQ ID NO: 1701740 - RNA, 17 nt, Human
aucaauaaaaaauuaug

SEQ ID NO: 1701741 - RNA, 15 nt, Human
aucaauaaaaaauua

SEQ ID NO: 1701742 - RNA, 13 nt, Human
uucuaagaaguga

SEQ ID NO: 1701743 - RNA, 22 nt, Human
uucucagaaggcaaaugacuuu

SEQ ID NO: 1701744 - RNA, 21 nt, Human
uucucagaaggcaaaugacuu

SEQ ID NO: 1701745 - RNA, 19 nt, Human
uucucagaaggcaaaugac

SEQ ID NO: 1701746 - RNA, 18 nt, Human
uucucagaaggcaaauga

SEQ ID NO: 1701747 - RNA, 13 nt, Human
uucuauaauuuaa

SEQ ID NO: 1701748 - RNA, 14 nt, Human
uucuauaauuuaaa

SEQ ID NO: 1701749 - RNA, 14 nt, Human
aucacuuuuuucca

SEQ ID NO: 1701750 - RNA, 16 nt, Human
auauuuuuauauuuac

SEQ ID NO: 1701751 - RNA, 17 nt, Human
auauuuucauucuccua

SEQ ID NO: 1701752 - RNA, 19 nt, Human
uuguguaaauacaauuuug

SEQ ID NO: 1701753 - RNA, 23 nt, Human
uugugugaaagguacuucaaauc

SEQ ID NO: 1701754 - RNA, 23 nt, Human
augagagacacacugaagaagca

SEQ ID NO: 1701755 - RNA, 21 nt, Human
augagagacacacugaagaag

SEQ ID NO: 1701756 - RNA, 20 nt, Human
augagagacacacugaagaa

SEQ ID NO: 1701757 - RNA, 16 nt, Human
augauuucuaugcuga

SEQ ID NO: 1701758 - RNA, 13 nt, Human
augauuucuaugc

SEQ ID NO: 1701759 - RNA, 12 nt, Human
augauuucuaug

SEQ ID NO: 1701760 - RNA, 22 nt, Human
augauuaugaauuacauuugua

SEQ ID NO: 1701761 - RNA, 12 nt, Human
augauucccagc

SEQ ID NO: 1701762 - RNA, 17 nt, Human
uuuaauuuuggaauuuu

SEQ ID NO: 1701763 - RNA, 15 nt, Human
uuuaauuuuggaauu

SEQ ID NO: 1701764 - RNA, 14 nt, Human
uuuaauuuuggaau

SEQ ID NO: 1701765 - RNA, 17 nt, Human
augcaguucugaagaag

SEQ ID NO: 1701766 - RNA, 15 nt, Human
augcaguucugaaga

SEQ ID NO: 1701767 - RNA, 23 nt, Human
augccaaguuguuugagaaauua

SEQ ID NO: 1701768 - RNA, 17 nt, Human
augccacuaaauugaca

SEQ ID NO: 1701769 - RNA, 15 nt, Human
augccacuaaauuga

SEQ ID NO: 1701770 - RNA, 16 nt, Human
augccaaguuguuuga

SEQ ID NO: 1701771 - RNA, 14 nt, Human
augccaaguuguuu

SEQ ID NO: 1701772 - RNA, 19 nt, Human
augcaguucugaagaagau

SEQ ID NO: 1701773 - RNA, 18 nt, Human
augcaguucugaagaaga

SEQ ID NO: 1701774 - RNA, 21 nt, Human
uuucauauuuuagcuacuaua

SEQ ID NO: 1701775 - RNA, 13 nt, Human
uuucauauuuuag

SEQ ID NO: 1701776 - RNA, 20 nt, Human
auggcuaguaucaaaagaaa

SEQ ID NO: 1701777 - RNA, 23 nt, Human
uuuauuacaguauaauuaacaug

SEQ ID NO: 1701778 - RNA, 15 nt, Human
augcuagaacucccu

SEQ ID NO: 1701779 - RNA, 19 nt, Human
augcuagaacucccuuuca

SEQ ID NO: 1701780 - RNA, 16 nt, Human
augcuagaacucccuu

SEQ ID NO: 1701781 - RNA, 16 nt, Human
uuuauuacuguaagaa

SEQ ID NO: 1701782 - RNA, 23 nt, Human
auggaacgcguugaaauuguaau

SEQ ID NO: 1701783 - RNA, 22 nt, Human
augcugucuacacuaagagaga

SEQ ID NO: 1701784 - RNA, 22 nt, Human
uuuauuacaguauaauuaacau

SEQ ID NO: 1701785 - RNA, 13 nt, Human
uuuauauaagcuu

SEQ ID NO: 1701786 - RNA, 14 nt, Human
uuuagucuugucuc

SEQ ID NO: 1701787 - RNA, 22 nt, Human
uuuagcuggaaaaguauguuag

SEQ ID NO: 1701788 - RNA, 20 nt, Human
uuuagcuggaaaaguauguu

SEQ ID NO: 1701789 - RNA, 22 nt, Human
uugccuaaauccauuuggaaau

SEQ ID NO: 1701790 - RNA, 15 nt, Human
uugccuaaauccauu

SEQ ID NO: 1701791 - RNA, 14 nt, Human
uugccuaaauccau

SEQ ID NO: 1701792 - RNA, 13 nt, Human
uugccuaaaucca

SEQ ID NO: 1701793 - RNA, 21 nt, Human
aucugaggaauucuguauaga

SEQ ID NO: 1701794 - RNA, 20 nt, Human
aucugaggaauucuguauag

SEQ ID NO: 1701795 - RNA, 18 nt, Human
aucugaggaauucuguau

SEQ ID NO: 1701796 - RNA, 17 nt, Human
aucugaggaauucugua

SEQ ID NO: 1701797 - RNA, 16 nt, Human
aucugaggaauucugu

SEQ ID NO: 1701798 - RNA, 15 nt, Human
aucugaggaauucug

SEQ ID NO: 1701799 - RNA, 20 nt, Human
aucugccuaaggacuucuuu

SEQ ID NO: 1701800 - RNA, 19 nt, Human
aucugccuaaggacuucuu

SEQ ID NO: 1701801 - RNA, 18 nt, Human
aucugccuaaggacuucu

SEQ ID NO: 1701802 - RNA, 13 nt, Human
aucugccuaagga

SEQ ID NO: 1701803 - RNA, 17 nt, Human
aucugccuaaggacuuc

SEQ ID NO: 1701804 - RNA, 16 nt, Human
aucugccuaaggacuu

SEQ ID NO: 1701805 - RNA, 15 nt, Human
aucugccuaaggacu

SEQ ID NO: 1701806 - RNA, 14 nt, Human
aucugccuaaggac

SEQ ID NO: 1701807 - RNA, 19 nt, Human
aucugugaacuugaaauuu

SEQ ID NO: 1701808 - RNA, 18 nt, Human
aucugugaacuugaaauu

SEQ ID NO: 1701809 - RNA, 17 nt, Human
aucugugaacuugaaau

SEQ ID NO: 1701810 - RNA, 13 nt, Human
aucugugaacuug

SEQ ID NO: 1701811 - RNA, 21 nt, Human
aucucauuuccaagcaaguau

SEQ ID NO: 1701812 - RNA, 23 nt, Human
aucucauuuccaagcaaguauua

SEQ ID NO: 1701813 - RNA, 13 nt, Human
aucucaauauuuc

SEQ ID NO: 1701814 - RNA, 19 nt, Human
uugauggugguauguuuuc

SEQ ID NO: 1701815 - RNA, 18 nt, Human
uugauggugguauguuuu

SEQ ID NO: 1701816 - RNA, 21 nt, Human
uuggauaauaaggaaaaguuu

SEQ ID NO: 1701817 - RNA, 19 nt, Human
uuggauaauaaggaaaagu

SEQ ID NO: 1701818 - RNA, 15 nt, Human
uuggauaauaaggaa

SEQ ID NO: 1701819 - RNA, 15 nt, Human
augaaagcagggacu

SEQ ID NO: 1701820 - RNA, 13 nt, Human
uuggggauucuua

SEQ ID NO: 1701821 - RNA, 15 nt, Human
augaauuaaguuuuu

SEQ ID NO: 1701822 - RNA, 15 nt, Human
uuggggauucuuaaa

SEQ ID NO: 1701823 - RNA, 18 nt, Human
augaaauauuauguuaaa

SEQ ID NO: 1701824 - RNA, 17 nt, Human
augaaauauuauguuaa

SEQ ID NO: 1701825 - RNA, 13 nt, Human
augaaauauuaug

SEQ ID NO: 1701826 - RNA, 13 nt, Human
augaaugaauggc

SEQ ID NO: 1701827 - RNA, 18 nt, Human
augaagauguagaggaga

SEQ ID NO: 1701828 - RNA, 12 nt, Human
augacuuuggac

SEQ ID NO: 1701829 - RNA, 11 nt, Human
augacuuugga

SEQ ID NO: 1701830 - RNA, 16 nt, Human
augacuucauuaauaa

SEQ ID NO: 1701831 - RNA, 19 nt, Human
augagagacacacugaaga

SEQ ID NO: 1701832 - RNA, 17 nt, Human
augagagacacacugaa

SEQ ID NO: 1701833 - RNA, 14 nt, Human
augagagacacacu

SEQ ID NO: 1701834 - RNA, 13 nt, Human
augagagacacac

SEQ ID NO: 1701835 - RNA, 22 nt, Human
uuguacaaaguauuaagcauau

SEQ ID NO: 1701836 - RNA, 21 nt, Human
uuguacaaaguauuaagcaua

SEQ ID NO: 1701837 - RNA, 20 nt, Human
uuguacaaaguauuaagcau

SEQ ID NO: 1701838 - RNA, 17 nt, Human
uuguacaaaguauuaag

SEQ ID NO: 1701839 - RNA, 15 nt, Human
uuguacaaaguauua

SEQ ID NO: 1701840 - RNA, 15 nt, Human
uuguauaaaauaauu

SEQ ID NO: 1701841 - RNA, 16 nt, Human
uuguauaaaauaauuu

SEQ ID NO: 1701842 - RNA, 16 nt, Human
uugguugcuuuaauau

SEQ ID NO: 1701843 - RNA, 13 nt, Human
uugguugcuuuaa

SEQ ID NO: 1701844 - RNA, 14 nt, Human
uuguacaaaguauu

SEQ ID NO: 1701845 - RNA, 13 nt, Human
uuguacaaaguau

SEQ ID NO: 1701846 - RNA, 17 nt, Human
uuguauaaaauaauuuu

SEQ ID NO: 1701847 - RNA, 13 nt, Human
auuguaauuauau

SEQ ID NO: 1701848 - RNA, 14 nt, Human
auuguaaaauggug

SEQ ID NO: 1701849 - RNA, 14 nt, Human
auuguaauuauauc

SEQ ID NO: 1701850 - RNA, 21 nt, Human
auuaugaaacuuguguaaaua

SEQ ID NO: 1701851 - RNA, 20 nt, Human
auuaugaaacuuguguaaau

SEQ ID NO: 1701852 - RNA, 18 nt, Human
auuaugaaacuuguguaa

SEQ ID NO: 1701853 - RNA, 17 nt, Human
auuaugaauuacauuug

SEQ ID NO: 1701854 - RNA, 14 nt, Human
auuaugaauuacau

SEQ ID NO: 1701855 - RNA, 15 nt, Human
auuaugaaacuugug

SEQ ID NO: 1701856 - RNA, 14 nt, Human
auuaugaaacuugu

SEQ ID NO: 1701857 - RNA, 17 nt, Human
auucaaaguugccuaaa

SEQ ID NO: 1701858 - RNA, 22 nt, Human
auucaaaguugccuaaauccau

SEQ ID NO: 1701859 - RNA, 21 nt, Human
auucaaaguugccuaaaucca

SEQ ID NO: 1701860 - RNA, 20 nt, Human
auucaaaguugccuaaaucc

SEQ ID NO: 1701861 - RNA, 18 nt, Human
auucaaaguugccuaaau

SEQ ID NO: 1701862 - RNA, 18 nt, Human
auuaugaauuacauuugu

SEQ ID NO: 1701863 - RNA, 19 nt, Human
auucacaagacccaaaagg

SEQ ID NO: 1701864 - RNA, 22 nt, Human
auucauagcagcuuauucacaa

SEQ ID NO: 1701865 - RNA, 19 nt, Human
auucauagcagcuuauuca

SEQ ID NO: 1701866 - RNA, 16 nt, Human
auuacaguauaauuaa

SEQ ID NO: 1701867 - RNA, 15 nt, Human
auuacaguauaauua

SEQ ID NO: 1701868 - RNA, 14 nt, Human
auuacaguauaauu

SEQ ID NO: 1701869 - RNA, 12 nt, Human
auuacaguauaa

SEQ ID NO: 1701870 - RNA, 17 nt, Human
auuuuaugcuuuaaaca

SEQ ID NO: 1701871 - RNA, 12 nt, Human
auuuuaugcuuu

SEQ ID NO: 1701872 - RNA, 12 nt, Human
auuuggaaaucu

SEQ ID NO: 1701873 - RNA, 11 nt, Human
auuuggaaauc

SEQ ID NO: 1701874 - RNA, 13 nt, Human
auuuggaaaucuu

SEQ ID NO: 1701875 - RNA, 17 nt, Human
auuugcucauggaauug

SEQ ID NO: 1701876 - RNA, 14 nt, Human
auuugcucauggaa

SEQ ID NO: 1701877 - RNA, 12 nt, Human
auuuguuugcau

SEQ ID NO: 1701878 - RNA, 19 nt, Human
auuuuauagcuacuaauuu

SEQ ID NO: 1701879 - RNA, 16 nt, Human
auuuuaugauccagca

SEQ ID NO: 1701880 - RNA, 15 nt, Human
auuuuaugauccagc

SEQ ID NO: 1701881 - RNA, 14 nt, Human
auuuuaugauccag

SEQ ID NO: 1701882 - RNA, 17 nt, Human
auuuuauagcuacuaau

SEQ ID NO: 1701883 - RNA, 15 nt, Human
caaauccuugaagau

SEQ ID NO: 1701884 - RNA, 20 nt, Human
caaaaaaaaaaaaaaauuag

SEQ ID NO: 1701885 - RNA, 15 nt, Human
caaaaggcagaagca

SEQ ID NO: 1701886 - RNA, 15 nt, Human
cacuccaauuaagga

SEQ ID NO: 1701887 - RNA, 13 nt, Human
cacuccaauuaag

SEQ ID NO: 1701888 - RNA, 18 nt, Human
cacuccaauuaaggauuu

SEQ ID NO: 1701889 - RNA, 17 nt, Human
cacuccaauuaaggauu

SEQ ID NO: 1701890 - RNA, 16 nt, Human
cacuccagugagacag

SEQ ID NO: 1701891 - RNA, 22 nt, Human
cacugguucuucuuggucucag

SEQ ID NO: 1701892 - RNA, 19 nt, Human
cacuuguguuuugcaagcc

SEQ ID NO: 1701893 - RNA, 16 nt, Human
cacuugucaauaaaau

SEQ ID NO: 1701894 - RNA, 22 nt, Human
cacuuguguuuugcaagccaga

SEQ ID NO: 1701895 - RNA, 21 nt, Human
cacugcagaagacaguauggc

SEQ ID NO: 1701896 - RNA, 18 nt, Human
cacaagacugcacaucaa

SEQ ID NO: 1701897 - RNA, 15 nt, Human
caauucuugccaaau

SEQ ID NO: 1701898 - RNA, 17 nt, Human
caaugcuguauuuuaaa

SEQ ID NO: 1701899 - RNA, 16 nt, Human
caaugcuguauuuuaa

SEQ ID NO: 1701900 - RNA, 15 nt, Human
caaugcuguauuuua

SEQ ID NO: 1701901 - RNA, 21 nt, Human
cacagccucuuagaugcaguu

SEQ ID NO: 1701902 - RNA, 17 nt, Human
cacagccucuuagaugc

SEQ ID NO: 1701903 - RNA, 22 nt, Human
cacacaugaaguccaagcauuu

SEQ ID NO: 1701904 - RNA, 17 nt, Human
cacacaugaaguccaag

SEQ ID NO: 1701905 - RNA, 20 nt, Human
ccaaaaaccaguauuguaca

SEQ ID NO: 1701906 - RNA, 19 nt, Human
ccaaaaaccaguauuguac

SEQ ID NO: 1701907 - RNA, 16 nt, Human
ccaaaaaccaguauug

SEQ ID NO: 1701908 - RNA, 12 nt, Human
cauuuccaagca

SEQ ID NO: 1701909 - RNA, 21 nt, Human
cauucuccuaucaccugucuu

SEQ ID NO: 1701910 - RNA, 15 nt, Human
cauuaggauggcuag

SEQ ID NO: 1701911 - RNA, 22 nt, Human
ccaauuaaggauuuuaugcuuu

SEQ ID NO: 1701912 - RNA, 18 nt, Human
ccaauuaaggauuuuaug

SEQ ID NO: 1701913 - RNA, 13 nt, Human
ccaauuaaggauu

SEQ ID NO: 1701914 - RNA, 16 nt, Human
caugaauuaguuuuau

SEQ ID NO: 1701915 - RNA, 13 nt, Human
cagauacuggauu

SEQ ID NO: 1701916 - RNA, 16 nt, Human
cagagguugcagugag

SEQ ID NO: 1701917 - RNA, 23 nt, Human
cagccugagcgacagugagacuc

SEQ ID NO: 1701918 - RNA, 19 nt, Human
cagccccgugggguuccuc

SEQ ID NO: 1701919 - RNA, 21 nt, Human
caguauugaagcauuuuauaa

SEQ ID NO: 1701920 - RNA, 20 nt, Human
caguauugaagcauuuuaua

SEQ ID NO: 1701921 - RNA, 17 nt, Human
caguauugaagcauuuu

SEQ ID NO: 1701922 - RNA, 16 nt, Human
caguauugaagcauuu

SEQ ID NO: 1701923 - RNA, 22 nt, Human
caguauuguacaaaguauuaag

SEQ ID NO: 1701924 - RNA, 15 nt, Human
caguauugaagcauu

SEQ ID NO: 1701925 - RNA, 14 nt, Human
caguauugaagcau

SEQ ID NO: 1701926 - RNA, 12 nt, Human
caguauugaagc

SEQ ID NO: 1701927 - RNA, 22 nt, Human
cagggaggacgcucucuggccu

SEQ ID NO: 1701928 - RNA, 17 nt, Human
cagcuuauucacaagac

SEQ ID NO: 1701929 - RNA, 16 nt, Human
cagcuuauucacaaga

SEQ ID NO: 1701930 - RNA, 24 nt, Human
caggacagcccuucuuuccacaga

SEQ ID NO: 1701931 - RNA, 23 nt, Human
caggacagcccuucuuuccacag

SEQ ID NO: 1701932 - RNA, 22 nt, Human
ccagcagauuauucacugauuu

SEQ ID NO: 1701933 - RNA, 21 nt, Human
ccagcagauuauucacugauu

SEQ ID NO: 1701934 - RNA, 15 nt, Human
ccagauccuggaaau

SEQ ID NO: 1701935 - RNA, 23 nt, Human
cccgggaggcagagguugcagug

SEQ ID NO: 1701936 - RNA, 23 nt, Human
cccauuguggucacaggaaguag

SEQ ID NO: 1701937 - RNA, 22 nt, Human
cccauuguggucacaggaagua

SEQ ID NO: 1701938 - RNA, 20 nt, Human
cccauauuuguacaccaaua

SEQ ID NO: 1701939 - RNA, 17 nt, Human
ccuagcacacacuuuug

SEQ ID NO: 1701940 - RNA, 16 nt, Human
ccguagguuauuuuca

SEQ ID NO: 1701941 - RNA, 20 nt, Human
ccucauguccacugguucuu

SEQ ID NO: 1701942 - RNA, 15 nt, Human
ccucauguccacugg

SEQ ID NO: 1701943 - RNA, 17 nt, Human
cccuggccuuucauauu

SEQ ID NO: 1701944 - RNA, 21 nt, Human
cccuauuuuuuuucuguuaua

SEQ ID NO: 1701945 - RNA, 20 nt, Human
cccuauuuuuuuucuguuau

SEQ ID NO: 1701946 - RNA, 17 nt, Human
cccuucuuuccacagaa

SEQ ID NO: 1701947 - RNA, 13 nt, Human
cuaaacuuucaca

SEQ ID NO: 1701948 - RNA, 13 nt, Human
cuaaacuuuucug

SEQ ID NO: 1701949 - RNA, 14 nt, Human
cuaaacuuucacac

SEQ ID NO: 1701950 - RNA, 15 nt, Human
cuacaugagguacug

SEQ ID NO: 1701951 - RNA, 18 nt, Human
cuacaugagguacugaga

SEQ ID NO: 1701952 - RNA, 23 nt, Human
cuaagugaaauaagccagacauc

SEQ ID NO: 1701953 - RNA, 20 nt, Human
cuaagugaaauaagccagac

SEQ ID NO: 1701954 - RNA, 19 nt, Human
cuagaacucccuuucaaca

SEQ ID NO: 1701955 - RNA, 18 nt, Human
cuagaacucccuuucaac

SEQ ID NO: 1701956 - RNA, 17 nt, Human
cuagaacucccuuucaa

SEQ ID NO: 1701957 - RNA, 16 nt, Human
cuagaacucccuuuca

SEQ ID NO: 1701958 - RNA, 23 nt, Human
cuaguugaucagcuuauugucua

SEQ ID NO: 1701959 - RNA, 17 nt, Human
ccuuuuucauuauuuua

SEQ ID NO: 1701960 - RNA, 15 nt, Human
ccuuuuucauuauuu

SEQ ID NO: 1701961 - RNA, 16 nt, Human
cgacagugagacucug

SEQ ID NO: 1701962 - RNA, 15 nt, Human
cgacagugagacucu

SEQ ID NO: 1701963 - RNA, 20 nt, Human
cucucaaccaccuuucagau

SEQ ID NO: 1701964 - RNA, 11 nt, Human
cucucuggccu

SEQ ID NO: 1701965 - RNA, 12 nt, Human
cucucuggccuu

SEQ ID NO: 1701966 - RNA, 15 nt, Human
cucuuagaugcaguu

SEQ ID NO: 1701967 - RNA, 21 nt, Human
cucuuagaugcaguucugaag

SEQ ID NO: 1701968 - RNA, 20 nt, Human
cucuuagaugcaguucugaa

SEQ ID NO: 1701969 - RNA, 21 nt, Human
cuccagugagacagcucugca

SEQ ID NO: 1701970 - RNA, 24 nt, Human
gccaucaauaaaaaauuaugacau

SEQ ID NO: 1701971 - RNA, 22 nt, Human
gccaugugcuaguaauuggaaa

SEQ ID NO: 1701972 - RNA, 16 nt, Human
gccauaugaaaaggcu

SEQ ID NO: 1701973 - RNA, 18 nt, Human
gcguugaaauuguaauua

SEQ ID NO: 1701974 - RNA, 24 nt, Human
gcguugaaauuguaauuauaucug

SEQ ID NO: 1701975 - RNA, 23 nt, Human
gcguugaaauuguaauuauaucu

SEQ ID NO: 1701976 - RNA, 17 nt, Human
gcuacuugggaggcuga

SEQ ID NO: 1701977 - RNA, 20 nt, Human
gccuccauccugaggcucca

SEQ ID NO: 1701978 - RNA, 16 nt, Human
gccuccauccugaggc

SEQ ID NO: 1701979 - RNA, 11 nt, Human
gcuuuucugau

SEQ ID NO: 1701980 - RNA, 16 nt, Human
gcuuuucugauccagu

SEQ ID NO: 1701981 - RNA, 15 nt, Human
gcuuuucugauccag

SEQ ID NO: 1701982 - RNA, 12 nt, Human
gcuuuucugauc

SEQ ID NO: 1701983 - RNA, 19 nt, Human
gcuuccuggcaauagucaa

SEQ ID NO: 1701984 - RNA, 13 nt, Human
gcuguauuuuaaa

SEQ ID NO: 1701985 - RNA, 12 nt, Human
gcuguauuuuaa

SEQ ID NO: 1701986 - RNA, 15 nt, Human
gcucugcccauccug

SEQ ID NO: 1701987 - RNA, 21 nt, Human
gcucugcccauccugccccug

SEQ ID NO: 1701988 - RNA, 20 nt, Human
gcuccacuuggucugugaga

SEQ ID NO: 1701989 - RNA, 22 nt, Human
ggauaauaaggaaaaguuuaau

SEQ ID NO: 1701990 - RNA, 12 nt, Human
ggauaaaugcca

SEQ ID NO: 1701991 - RNA, 22 nt, Human
ggauguugaaaaaguucugcag

SEQ ID NO: 1701992 - RNA, 13 nt, Human
ggccuccauccug

SEQ ID NO: 1701993 - RNA, 23 nt, Human
ggccuucggccuccauccugagg

SEQ ID NO: 1701994 - RNA, 14 nt, Human
aaaaauauuuuaug

SEQ ID NO: 1701995 - RNA, 21 nt, Human
gggacauuugcucauggaauu

SEQ ID NO: 1701996 - RNA, 20 nt, Human
gggacauuugcucauggaau

SEQ ID NO: 1701997 - RNA, 19 nt, Human
gggacauuugcucauggaa

SEQ ID NO: 1701998 - RNA, 17 nt, Human
gggauuguaaaauggug

SEQ ID NO: 1701999 - RNA, 16 nt, Human
gggauuguaaaauggu

SEQ ID NO: 1702000 - RNA, 15 nt, Human
aaaaugugauaugua

SEQ ID NO: 1702001 - RNA, 22 nt, Human
aaaauuuuuucucuaggaaaua

SEQ ID NO: 1702002 - RNA, 20 nt, Human
aaacaagcacuaaacaaaga

SEQ ID NO: 1702003 - RNA, 19 nt, Human
aaaaguauguuagugcaaa

SEQ ID NO: 1702004 - RNA, 22 nt, Human
aaaguugaauuuauuggcuuuu

SEQ ID NO: 1702005 - RNA, 16 nt, Human
aaaguugaauuuauug

SEQ ID NO: 1702006 - RNA, 13 nt, Human
aaaguugaauuua

SEQ ID NO: 1702007 - RNA, 12 nt, Human
aaaguugaauuu

SEQ ID NO: 1702008 - RNA, 19 nt, Human
aaaguuuaauauuaaagcc

SEQ ID NO: 1702009 - RNA, 16 nt, Human
aaaguuuaauauuaaa

SEQ ID NO: 1702010 - RNA, 22 nt, Human
aaaguuuaauauuaaagccaug

SEQ ID NO: 1702011 - RNA, 21 nt, Human
aaaguuuaauauuaaagccau

SEQ ID NO: 1702012 - RNA, 20 nt, Human
aaaguuuaauauuaaagcca

SEQ ID NO: 1702013 - RNA, 20 nt, Human
aaauaauuuuuauauuugaa

SEQ ID NO: 1702014 - RNA, 18 nt, Human
aaauaauuuuuauauuug

SEQ ID NO: 1702015 - RNA, 15 nt, Human
aaauaauuuuuauau

SEQ ID NO: 1702016 - RNA, 18 nt, Human
gguucuggugugaacuaa

SEQ ID NO: 1702017 - RNA, 16 nt, Human
gguuuagaaagcuugc

SEQ ID NO: 1702018 - RNA, 16 nt, Human
ggugugaccacugcag

SEQ ID NO: 1702019 - RNA, 17 nt, Human
aaagcagggacuugaac

SEQ ID NO: 1702020 - RNA, 22 nt, Human
gauccaguuuuguuuggaccaa

SEQ ID NO: 1702021 - RNA, 17 nt, Human
gauccaguuuuguuugg

SEQ ID NO: 1702022 - RNA, 11 nt, Human
gauccaguuuu

SEQ ID NO: 1702023 - RNA, 18 nt, Human
gauuagagaguguugaaa

SEQ ID NO: 1702024 - RNA, 14 nt, Human
gauuagagaguguu

SEQ ID NO: 1702025 - RNA, 21 nt, Human
gauuauucacugauuugacau

SEQ ID NO: 1702026 - RNA, 16 nt, Human
gauuauucacugauuu

SEQ ID NO: 1702027 - RNA, 15 nt, Human
gauuauucacugauu

SEQ ID NO: 1702028 - RNA, 13 nt, Human
gauuauucacuga

SEQ ID NO: 1702029 - RNA, 23 nt, Human
gauuagaauucuguauagauuag

SEQ ID NO: 1702030 - RNA, 15 nt, Human
gauuagaauucugua

SEQ ID NO: 1702031 - RNA, 14 nt, Human
gauuagaauucugu

SEQ ID NO: 1702032 - RNA, 14 nt, Human
gauuaccagggacu

SEQ ID NO: 1702033 - RNA, 16 nt, Human
gaguuuagcuggaaaa

SEQ ID NO: 1702034 - RNA, 20 nt, Human
gauauguaccuaacgaagua

SEQ ID NO: 1702035 - RNA, 23 nt, Human
gcauaacauaaaucugugaacuu

SEQ ID NO: 1702036 - RNA, 21 nt, Human
gcauaacauaaaucugugaac

SEQ ID NO: 1702037 - RNA, 15 nt, Human
gcauaacauaaaucu

SEQ ID NO: 1702038 - RNA, 19 nt, Human
gcagggacuugaacccaua

SEQ ID NO: 1702039 - RNA, 14 nt, Human
gaagugaaacugcu

SEQ ID NO: 1702040 - RNA, 20 nt, Human
gaaugagagacacacugaag

SEQ ID NO: 1702041 - RNA, 23 nt, Human
gaaugagagacacacugaagaag

SEQ ID NO: 1702042 - RNA, 22 nt, Human
gaaugagagacacacugaagaa

SEQ ID NO: 1702043 - RNA, 13 nt, Human
gaauuuuguguua

SEQ ID NO: 1702044 - RNA, 22 nt, Human
gaauuuuguguuagagauuuuu

SEQ ID NO: 1702045 - RNA, 16 nt, Human
gaauuuuguguuagag

SEQ ID NO: 1702046 - RNA, 11 nt, Human
gaauuaguuuu

SEQ ID NO: 1702047 - RNA, 14 nt, Human
gacacacugaagaa

SEQ ID NO: 1702048 - RNA, 12 nt, Human
gacacacaugaa

SEQ ID NO: 1702049 - RNA, 13 nt, Human
gacacacugaaga

SEQ ID NO: 1702050 - RNA, 17 nt, Human
gacagucaccucaugga

SEQ ID NO: 1702051 - RNA, 14 nt, Human
gacagugaaagaaa

SEQ ID NO: 1702052 - RNA, 16 nt, Human
gacacuuaaaaauggu

SEQ ID NO: 1702053 - RNA, 12 nt, Human
gacuggugacug

SEQ ID NO: 1702054 - RNA, 18 nt, Human
gacuggugacugauucuu

SEQ ID NO: 1702055 - RNA, 15 nt, Human
gacuggugacugauu

SEQ ID NO: 1702056 - RNA, 14 nt, Human
gagaaucacuugaa

SEQ ID NO: 1702057 - RNA, 15 nt, Human
gagaaucacuugaac

SEQ ID NO: 1702058 - RNA, 16 nt, Human
gacucuuaagaagacu

SEQ ID NO: 1702059 - RNA, 18 nt, Human
gacucuuaagaagacugc

SEQ ID NO: 1702060 - RNA, 17 nt, Human
gacucuuaagaagacug

SEQ ID NO: 1702061 - RNA, 20 nt, Human
cuuuguauagaaccucuuug

SEQ ID NO: 1702062 - RNA, 11 nt, Human
cuuuguauaga

SEQ ID NO: 1702063 - RNA, 20 nt, Human
cuuuugguuaagucuguuuu

SEQ ID NO: 1702064 - RNA, 16 nt, Human
cuuuugguuaagucug

SEQ ID NO: 1702065 - RNA, 17 nt, Human
gaaauauuuauuuuaau

SEQ ID NO: 1702066 - RNA, 22 nt, Human
gaaauauuuauuuuaauaaugu

SEQ ID NO: 1702067 - RNA, 18 nt, Human
gaaauauuuauuuuaaua

SEQ ID NO: 1702068 - RNA, 15 nt, Human
cuugccuuuuucauu

SEQ ID NO: 1702069 - RNA, 14 nt, Human
cuugccuuuuucau

SEQ ID NO: 1702070 - RNA, 23 nt, Human
cuugccuuuuucauuauuuuauu

SEQ ID NO: 1702071 - RNA, 22 nt, Human
cuugccuuuuucauuauuuuau

SEQ ID NO: 1702072 - RNA, 20 nt, Human
cuugccuuuuucauuauuuu

SEQ ID NO: 1702073 - RNA, 13 nt, Human
cuugaugaagaag

SEQ ID NO: 1702074 - RNA, 12 nt, Human
cuugaugaagaa

SEQ ID NO: 1702075 - RNA, 20 nt, Human
cuucauaccuacauguauuu

SEQ ID NO: 1702076 - RNA, 15 nt, Human
cuucacuguaaaaua

SEQ ID NO: 1702077 - RNA, 13 nt, Human
cuggguuccugca

SEQ ID NO: 1702078 - RNA, 10 nt, Human
cugggacagg

SEQ ID NO: 1702079 - RNA, 15 nt, Human
cuguacuuuuuggca

SEQ ID NO: 1702080 - RNA, 14 nt, Human
cuguacuuuuuggc

SEQ ID NO: 1702081 - RNA, 18 nt, Human
cugugaacuugaaauuug

SEQ ID NO: 1702082 - RNA, 21 nt, Human
cugugagaugcuagaacuccc

SEQ ID NO: 1702083 - RNA, 16 nt, Human
cugugagaugcuagaa

SEQ ID NO: 1702084 - RNA, 21 nt, Human
cuggaaaucaggguuaguauu

SEQ ID NO: 1702085 - RNA, 13 nt, Human
cauauuuuagcua

SEQ ID NO: 1702086 - RNA, 18 nt, Human
caucaaugaaugaaugaa

SEQ ID NO: 1702087 - RNA, 22 nt, Human
caucaagucuuucacauuuaaa

SEQ ID NO: 1702088 - RNA, 22 nt, Human
cauauauuuuuauauuuacuaa

SEQ ID NO: 1702089 - RNA, 22 nt, Human
caucacaguuuugguugcuuua

SEQ ID NO: 1702090 - RNA, 21 nt, Human
caucacaguuuugguugcuuu

SEQ ID NO: 1702091 - RNA, 13 nt, Human
caucacaguuuug

SEQ ID NO: 1702092 - RNA, 22 nt, Human
caucuagugagcagucaggaaa

SEQ ID NO: 1702093 - RNA, 14 nt, Human
caucuagugagcag

SEQ ID NO: 1702094 - RNA, 17 nt, Human
cauaaggaaacuggguu

SEQ ID NO: 1702095 - RNA, 21 nt, Human
cauaacauaaaucugugaacu

SEQ ID NO: 1702096 - RNA, 19 nt, Human
cauaacauaaaucugugaa

SEQ ID NO: 1702097 - RNA, 12 nt, Human
cauaacauaaau

SEQ ID NO: 1702098 - RNA, 14 nt, Human
cauaaaucugugaa

SEQ ID NO: 1702099 - RNA, 23 nt, Human
cauaaaucugugaacuugaaauu

SEQ ID NO: 1702100 - RNA, 22 nt, Human
cauaaaucugugaacuugaaau

SEQ ID NO: 1702101 - RNA, 18 nt, Human
cauaaaucugugaacuug

SEQ ID NO: 1702102 - RNA, 16 nt, Human
cauaaaucugugaacu

SEQ ID NO: 1702103 - RNA, 17 nt, Human
caguuuugguugcuuua

SEQ ID NO: 1702104 - RNA, 19 nt, Human
caguuuugguugcuuuaau

SEQ ID NO: 1702105 - RNA, 18 nt, Human
caguuuugguugcuuuaa

SEQ ID NO: 1702106 - RNA, 21 nt, Human
caguuuuguuuggaccaaaaa

SEQ ID NO: 1702107 - RNA, 15 nt, Human
cauaccuacauguau

SEQ ID NO: 1702108 - RNA, 14 nt, Human
cagugucaaugcag

SEQ ID NO: 1702109 - RNA, 22 nt, Human
caguucggugagcuacaaaugc

SEQ ID NO: 1702110 - RNA, 12 nt, Human
caguucugaaga

SEQ ID NO: 1702111 - RNA, 14 nt, Human
caguucugaagaag

SEQ ID NO: 1702112 - RNA, 13 nt, Human
caguucugaagaa

SEQ ID NO: 1702113 - RNA, 22 nt, Human
caguucugaagaagaugguacc

SEQ ID NO: 1702114 - RNA, 16 nt, Human
caguucugaagaagau

SEQ ID NO: 1702115 - RNA, 15 nt, Human
caguucugaagaaga

SEQ ID NO: 1702116 - RNA, 21 nt, Human
caguuaccucugccucagaaa

SEQ ID NO: 1702117 - RNA, 23 nt, Human
cauggaacgcguugaaauuguaa

SEQ ID NO: 1702118 - RNA, 20 nt, Human
cauggaacgcguugaaauug

SEQ ID NO: 1702119 - RNA, 19 nt, Human
cauggaacgcguugaaauu

SEQ ID NO: 1702120 - RNA, 18 nt, Human
cauggaacgcguugaaau

SEQ ID NO: 1702121 - RNA, 23 nt, Human
caugcugucuacacuaagagaga

SEQ ID NO: 1702122 - RNA, 17 nt, Human
caugggacagggaggac

SEQ ID NO: 1702123 - RNA, 11 nt, Human
cauuauuuuau

SEQ ID NO: 1702124 - RNA, 22 nt, Human
cauguuuauuacaguauaauua

SEQ ID NO: 1702125 - RNA, 20 nt, Human
cauguuuauuacaguauaau

SEQ ID NO: 1702126 - RNA, 19 nt, Human
cauguuuauuacaguauaa

SEQ ID NO: 1702127 - RNA, 18 nt, Human
cauguuuauuacaguaua

SEQ ID NO: 1702128 - RNA, 13 nt, Human
cauguuuauuaca

SEQ ID NO: 1702129 - RNA, 12 nt, Human
cauguuuauuac

SEQ ID NO: 1702130 - RNA, 17 nt, Human
ccaaaccucugugagca

SEQ ID NO: 1702131 - RNA, 16 nt, Human
cauuugcucauggaau

SEQ ID NO: 1702132 - RNA, 14 nt, Human
cauuugcucaugga

SEQ ID NO: 1702133 - RNA, 15 nt, Human
cauuugcucauggaa

SEQ ID NO: 1702134 - RNA, 16 nt, Human
cauuauuuuauuauga

SEQ ID NO: 1702135 - RNA, 14 nt, Human
cauuauuuuauuau

SEQ ID NO: 1702136 - RNA, 12 nt, Human
cauuauuuuauu

SEQ ID NO: 1702137 - RNA, 20 nt, Human
ccaauauucauagcagcuua

SEQ ID NO: 1702138 - RNA, 19 nt, Human
ccaaggcugauuaaaccaa

SEQ ID NO: 1702139 - RNA, 22 nt, Human
ccacaagaaaugaaagcaggga

SEQ ID NO: 1702140 - RNA, 16 nt, Human
ccacaagaaaugaaag

SEQ ID NO: 1702141 - RNA, 18 nt, Human
ccaaggcuagaaccaccu

SEQ ID NO: 1702142 - RNA, 15 nt, Human
cccagacgaugucuu

SEQ ID NO: 1702143 - RNA, 17 nt, Human
cccagacgaugucuuca

SEQ ID NO: 1702144 - RNA, 23 nt, Human
ccauggcacucuauguucuaaga

SEQ ID NO: 1702145 - RNA, 12 nt, Human
cccauuauucaa

SEQ ID NO: 1702146 - RNA, 15 nt, Human
ccauccugaggcucc

SEQ ID NO: 1702147 - RNA, 16 nt, Human
ccauccugaggcucca

SEQ ID NO: 1702148 - RNA, 23 nt, Human
cccggaagccaaaccucugugag

SEQ ID NO: 1702149 - RNA, 19 nt, Human
ccuaaauccauuuggaaau

SEQ ID NO: 1702150 - RNA, 13 nt, Human
ccuaaacauauga

SEQ ID NO: 1702151 - RNA, 21 nt, Human
ccuaaauccauuuggaaaucu

SEQ ID NO: 1702152 - RNA, 20 nt, Human
ccuaaauccauuuggaaauc

SEQ ID NO: 1702153 - RNA, 22 nt, Human
ccuacauguauuuguuugcaua

SEQ ID NO: 1702154 - RNA, 13 nt, Human
ccuccauccugag

SEQ ID NO: 1702155 - RNA, 12 nt, Human
ccuccauccuga

SEQ ID NO: 1702156 - RNA, 14 nt, Human
ccuccauccugagg

SEQ ID NO: 1702157 - RNA, 11 nt, Human
cuaaggacuug

SEQ ID NO: 1702158 - RNA, 17 nt, Human
cuaaggacuuguuagau

SEQ ID NO: 1702159 - RNA, 16 nt, Human
cuaaggacuuguuaga

SEQ ID NO: 1702160 - RNA, 14 nt, Human
cuaagcaaaaugug

SEQ ID NO: 1702161 - RNA, 18 nt, Human
cuaagcaaaaugugauau

SEQ ID NO: 1702162 - RNA, 15 nt, Human
cuaagcaaaauguga

SEQ ID NO: 1702163 - RNA, 17 nt, Human
cuacacuccagugagac

SEQ ID NO: 1702164 - RNA, 16 nt, Human
cuacacuccagugaga

SEQ ID NO: 1702165 - RNA, 19 nt, Human
cuacuugggaggcugagau

SEQ ID NO: 1702166 - RNA, 18 nt, Human
cuacuugggaggcugaga

SEQ ID NO: 1702167 - RNA, 15 nt, Human
cuacuugggaggcug

SEQ ID NO: 1702168 - RNA, 23 nt, Human
cuauauaugugaugaucuaccag

SEQ ID NO: 1702169 - RNA, 18 nt, Human
cuauauaugugaugaucu

SEQ ID NO: 1702170 - RNA, 12 nt, Human
cuaguucacucu

SEQ ID NO: 1702171 - RNA, 20 nt, Human
cuauauuuuuuguuaaauga

SEQ ID NO: 1702172 - RNA, 19 nt, Human
cuauauuguuugcuaagca

SEQ ID NO: 1702173 - RNA, 18 nt, Human
cuaugaaauauuauguua

SEQ ID NO: 1702174 - RNA, 13 nt, Human
cuaugaaauauua

SEQ ID NO: 1702175 - RNA, 22 nt, Human
cuauauuuuuuguuaaaugauu

SEQ ID NO: 1702176 - RNA, 23 nt, Human
cuaguaucaaaagaaagaaaauc

SEQ ID NO: 1702177 - RNA, 17 nt, Human
cuaguaucaaaagaaag

SEQ ID NO: 1702178 - RNA, 15 nt, Human
cuaguaucaaaagaa

SEQ ID NO: 1702179 - RNA, 20 nt, Human
cuaguauuucuaugaaauau

SEQ ID NO: 1702180 - RNA, 19 nt, Human
cuaguauuucuaugaaaua

SEQ ID NO: 1702181 - RNA, 22 nt, Human
cuaguauuucuaugaaauauua

SEQ ID NO: 1702182 - RNA, 17 nt, Human
cucaccccuugccauaa

SEQ ID NO: 1702183 - RNA, 13 nt, Human
cucacauuuauau

SEQ ID NO: 1702184 - RNA, 16 nt, Human
cuaaauccauuuggaa

SEQ ID NO: 1702185 - RNA, 20 nt, Human
cuaaauccauuuggaaaucu

SEQ ID NO: 1702186 - RNA, 19 nt, Human
cuaaauccauuuggaaauc

SEQ ID NO: 1702187 - RNA, 17 nt, Human
cuaaauccauuuggaaa

SEQ ID NO: 1702188 - RNA, 23 nt, Human
cuaaauugacacuuaaaaauggu

SEQ ID NO: 1702189 - RNA, 15 nt, Human
cgugcuaaggacuug

SEQ ID NO: 1702190 - RNA, 14 nt, Human
cgugcuaaggacuu

SEQ ID NO: 1702191 - RNA, 13 nt, Human
cgugcuaaggacu

SEQ ID NO: 1702192 - RNA, 12 nt, Human
cgugcuaaggac

SEQ ID NO: 1702193 - RNA, 16 nt, Human
cgugcuaaggacuugu

SEQ ID NO: 1702194 - RNA, 18 nt, Human
cguugaaauuguaauuau

SEQ ID NO: 1702195 - RNA, 23 nt, Human
cguugaaauuguaauuauaucug

SEQ ID NO: 1702196 - RNA, 16 nt, Human
cggugaauggcuuugu

SEQ ID NO: 1702197 - RNA, 15 nt, Human
cggugaauggcuuug

SEQ ID NO: 1702198 - RNA, 14 nt, Human
cggugaauggcuuu

SEQ ID NO: 1702199 - RNA, 13 nt, Human
cggugaauggcuu

SEQ ID NO: 1702200 - RNA, 22 nt, Human
cggugaauggcuuuguauagaa

SEQ ID NO: 1702201 - RNA, 20 nt, Human
cggugaauggcuuuguauag

SEQ ID NO: 1702202 - RNA, 18 nt, Human
cggugaauggcuuuguau

SEQ ID NO: 1702203 - RNA, 17 nt, Human
cggugagcuacaaaugc

SEQ ID NO: 1702204 - RNA, 14 nt, Human
cggccuccauccug

SEQ ID NO: 1702205 - RNA, 12 nt, Human
cggccuccaucc

SEQ ID NO: 1702206 - RNA, 18 nt, Human
cgcucucuggccuucggc

SEQ ID NO: 1702207 - RNA, 15 nt, Human
cgcucucuggccuuc

SEQ ID NO: 1702208 - RNA, 14 nt, Human
cgcucucuggccuu

SEQ ID NO: 1702209 - RNA, 17 nt, Human
cucccuauuuuuuuucu

SEQ ID NO: 1702210 - RNA, 20 nt, Human
cuccauccugaggcuccacu

SEQ ID NO: 1702211 - RNA, 18 nt, Human
cuccauccugaggcucca

SEQ ID NO: 1702212 - RNA, 16 nt, Human
cuccauccugaggcuc

SEQ ID NO: 1702213 - RNA, 11 nt, Human
cuccauccuga

SEQ ID NO: 1702214 - RNA, 21 nt, Human
cucccuauuuuuuuucuguua

SEQ ID NO: 1702215 - RNA, 20 nt, Human
cucccuauuuuuuuucuguu

SEQ ID NO: 1702216 - RNA, 19 nt, Human
cucccuauuuuuuuucugu

SEQ ID NO: 1702217 - RNA, 17 nt, Human
cucuaggaaauauuuau

SEQ ID NO: 1702218 - RNA, 15 nt, Human
cucuaggaaauauuu

SEQ ID NO: 1702219 - RNA, 16 nt, Human
cugacaucucugcaau

SEQ ID NO: 1702220 - RNA, 15 nt, Human
cugacaucucugcaa

SEQ ID NO: 1702221 - RNA, 14 nt, Human
cugacaucucugca

SEQ ID NO: 1702222 - RNA, 17 nt, Human
cugacucuuaagaagac

SEQ ID NO: 1702223 - RNA, 20 nt, Human
cugagcgacagugagacucu

SEQ ID NO: 1702224 - RNA, 16 nt, Human
cugagcgacagugaga

SEQ ID NO: 1702225 - RNA, 21 nt, Human
cucugugagcaucacaguuuu

SEQ ID NO: 1702226 - RNA, 18 nt, Human
cucugugagcaucacagu

SEQ ID NO: 1702227 - RNA, 22 nt, Human
cucugugagcaucacaguuuug

SEQ ID NO: 1702228 - RNA, 19 nt, Human
cucuggccuucggccucca

SEQ ID NO: 1702229 - RNA, 12 nt, Human
cucuggccuucg

SEQ ID NO: 1702230 - RNA, 23 nt, Human
cugaacacuccaauuaaggauuu

SEQ ID NO: 1702231 - RNA, 18 nt, Human
cugaacacuccaauuaag

SEQ ID NO: 1702232 - RNA, 23 nt, Human
cugaagaagcaccaaucaugaau

SEQ ID NO: 1702233 - RNA, 16 nt, Human
cuguauagauuagaga

SEQ ID NO: 1702234 - RNA, 20 nt, Human
cuguauagauuagaauucug

SEQ ID NO: 1702235 - RNA, 15 nt, Human
cuguauagauuagag

SEQ ID NO: 1702236 - RNA, 15 nt, Human
cuguaugauucccag

SEQ ID NO: 1702237 - RNA, 16 nt, Human
cuguauuuuaaaagaa

SEQ ID NO: 1702238 - RNA, 13 nt, Human
cuguauuuuaaaa

SEQ ID NO: 1702239 - RNA, 18 nt, Human
cugucucuacuaaaaaua

SEQ ID NO: 1702240 - RNA, 14 nt, Human
cuggccuuucauau

SEQ ID NO: 1702241 - RNA, 15 nt, Human
cuggccuucggccuc

SEQ ID NO: 1702242 - RNA, 21 nt, Human
cuggccuucggccuccauccu

SEQ ID NO: 1702243 - RNA, 18 nt, Human
cuggccuucggccuccau

SEQ ID NO: 1702244 - RNA, 17 nt, Human
cuggccuucggccucca

SEQ ID NO: 1702245 - RNA, 16 nt, Human
cuggccuucggccucc

SEQ ID NO: 1702246 - RNA, 13 nt, Human
cugcuuguuuccu

SEQ ID NO: 1702247 - RNA, 14 nt, Human
cugcuuguuuccua

SEQ ID NO: 1702248 - RNA, 16 nt, Human
cugcuuucagauacug

SEQ ID NO: 1702249 - RNA, 15 nt, Human
cugcuuucagauacu

SEQ ID NO: 1702250 - RNA, 12 nt, Human
cugcuuucagau

SEQ ID NO: 1702251 - RNA, 22 nt, Human
cuuuugauaaucaacugggcug

SEQ ID NO: 1702252 - RNA, 23 nt, Human
cuuuugauaaucaacugggcuga

SEQ ID NO: 1702253 - RNA, 20 nt, Human
cuugaaauuugaauuuugug

SEQ ID NO: 1702254 - RNA, 19 nt, Human
cuugaaauuugaauuuugu

SEQ ID NO: 1702255 - RNA, 14 nt, Human
cuugaacccgggag

SEQ ID NO: 1702256 - RNA, 20 nt, Human
cuugaacccgggaggcagag

SEQ ID NO: 1702257 - RNA, 19 nt, Human
cuugaacccgggaggcaga

SEQ ID NO: 1702258 - RNA, 19 nt, Human
cuucuuuccacagaagcuc

SEQ ID NO: 1702259 - RNA, 13 nt, Human
cuucuuuccacag

SEQ ID NO: 1702260 - RNA, 21 nt, Human
cuugcaugguuuagaaagcuu

SEQ ID NO: 1702261 - RNA, 15 nt, Human
cuuguauuaagaaug

SEQ ID NO: 1702262 - RNA, 14 nt, Human
cuuguauuaagaau

SEQ ID NO: 1702263 - RNA, 18 nt, Human
cuuguaaaggaauuuaaa

SEQ ID NO: 1702264 - RNA, 17 nt, Human
cuugccaaauauaaaua

SEQ ID NO: 1702265 - RNA, 22 nt, Human
gaacuugaaauuugaauuuugu

SEQ ID NO: 1702266 - RNA, 15 nt, Human
gaacuugaaauuuga

SEQ ID NO: 1702267 - RNA, 13 nt, Human
gaacuugaaauuu

SEQ ID NO: 1702268 - RNA, 12 nt, Human
gaacuugaaauu

SEQ ID NO: 1702269 - RNA, 16 nt, Human
gaacucccuuucaaca

SEQ ID NO: 1702270 - RNA, 15 nt, Human
gaaccacaagacugc

SEQ ID NO: 1702271 - RNA, 14 nt, Human
gaaccacaagacug

SEQ ID NO: 1702272 - RNA, 22 nt, Human
gaacuuguaaaggaauuuaaaa

SEQ ID NO: 1702273 - RNA, 17 nt, Human
gaagauguagaggagaa

SEQ ID NO: 1702274 - RNA, 14 nt, Human
gaagucagaucugc

SEQ ID NO: 1702275 - RNA, 23 nt, Human
gaagucagaucugccuaaggacu

SEQ ID NO: 1702276 - RNA, 22 nt, Human
gaagucagaucugccuaaggac

SEQ ID NO: 1702277 - RNA, 23 nt, Human
gaaguccaagcauuuagauguau

SEQ ID NO: 1702278 - RNA, 13 nt, Human
gaagcauuuuaua

SEQ ID NO: 1702279 - RNA, 17 nt, Human
gaagcauuuuauaaauc

SEQ ID NO: 1702280 - RNA, 15 nt, Human
gaagcauuuuauaaa

SEQ ID NO: 1702281 - RNA, 18 nt, Human
gaagccaaaccucuguga

SEQ ID NO: 1702282 - RNA, 16 nt, Human
gaaacggaugauuucu

SEQ ID NO: 1702283 - RNA, 14 nt, Human
gaaagcagaacagu

SEQ ID NO: 1702284 - RNA, 13 nt, Human
gaaagcagaacag

SEQ ID NO: 1702285 - RNA, 13 nt, Human
gaaauuugaauuu

SEQ ID NO: 1702286 - RNA, 24 nt, Human
gaaauuugaauuuuguguuagaga

SEQ ID NO: 1702287 - RNA, 16 nt, Human
gaaauuugaauuuugu

SEQ ID NO: 1702288 - RNA, 20 nt, Human
gaacacuccaauuaaggauu

SEQ ID NO: 1702289 - RNA, 24 nt, Human
gaacaguuaccucugccucagaaa

SEQ ID NO: 1702290 - RNA, 13 nt, Human
gaaauauuuauuu

SEQ ID NO: 1702291 - RNA, 16 nt, Human
gaaauauuuauuuuaa

SEQ ID NO: 1702292 - RNA, 15 nt, Human
gaaauauuuauuuua

SEQ ID NO: 1702293 - RNA, 19 nt, Human
gaggaagccugauuaaaga

SEQ ID NO: 1702294 - RNA, 18 nt, Human
gaggaagccugauuaaag

SEQ ID NO: 1702295 - RNA, 16 nt, Human
gagcucgugggacagu

SEQ ID NO: 1702296 - RNA, 12 nt, Human
gacuuguuagau

SEQ ID NO: 1702297 - RNA, 18 nt, Human
gagacacacugaagaagc

SEQ ID NO: 1702298 - RNA, 16 nt, Human
gagaagaacugaaauc

SEQ ID NO: 1702299 - RNA, 14 nt, Human
gagaagaacugaaa

SEQ ID NO: 1702300 - RNA, 13 nt, Human
gagaagaacugaa

SEQ ID NO: 1702301 - RNA, 13 nt, Human
gagacagcucugc

SEQ ID NO: 1702302 - RNA, 18 nt, Human
gagacagcucugcauacu

SEQ ID NO: 1702303 - RNA, 15 nt, Human
gagacagcucugcau

SEQ ID NO: 1702304 - RNA, 15 nt, Human
gagagugaacaaauu

SEQ ID NO: 1702305 - RNA, 19 nt, Human
gagagugaacaaauuuaca

SEQ ID NO: 1702306 - RNA, 17 nt, Human
gagauacagaauuuuau

SEQ ID NO: 1702307 - RNA, 19 nt, Human
gagagacacacugaagaag

SEQ ID NO: 1702308 - RNA, 20 nt, Human
gaccaaaaaccaguauugua

SEQ ID NO: 1702309 - RNA, 19 nt, Human
gaccaaaaaccaguauugu

SEQ ID NO: 1702310 - RNA, 13 nt, Human
gaccaaaaaccag

SEQ ID NO: 1702311 - RNA, 22 nt, Human
gacaugggacauuugcucaugg

SEQ ID NO: 1702312 - RNA, 17 nt, Human
gacaugggacauuugcu

SEQ ID NO: 1702313 - RNA, 16 nt, Human
gacauagucuggcugu

SEQ ID NO: 1702314 - RNA, 14 nt, Human
gacaucaacagaua

SEQ ID NO: 1702315 - RNA, 15 nt, Human
gacaagcucacagac

SEQ ID NO: 1702316 - RNA, 23 nt, Human
gaccugauuucugagcauuuaau

SEQ ID NO: 1702317 - RNA, 18 nt, Human
gcagauuauucacugauu

SEQ ID NO: 1702318 - RNA, 18 nt, Human
gcagauaaacaguaguga

SEQ ID NO: 1702319 - RNA, 20 nt, Human
gcagccccgugggguuccuc

SEQ ID NO: 1702320 - RNA, 18 nt, Human
gcacggugaauggcuuug

SEQ ID NO: 1702321 - RNA, 17 nt, Human
gcauagguuuaauaauu

SEQ ID NO: 1702322 - RNA, 21 nt, Human
gcauaggugaucucauuuaau

SEQ ID NO: 1702323 - RNA, 15 nt, Human
gcaguucugaagaag

SEQ ID NO: 1702324 - RNA, 17 nt, Human
gcaguucugaagaagau

SEQ ID NO: 1702325 - RNA, 13 nt, Human
gcauagaaguaaa

SEQ ID NO: 1702326 - RNA, 13 nt, Human
gcauuauauuuau

SEQ ID NO: 1702327 - RNA, 20 nt, Human
gaugccaaguuguuugagaa

SEQ ID NO: 1702328 - RNA, 21 nt, Human
gauggcuaguaucaaaagaaa

SEQ ID NO: 1702329 - RNA, 13 nt, Human
gauccuggaaauc

SEQ ID NO: 1702330 - RNA, 22 nt, Human
gauaaauaguuuaugauuccac

SEQ ID NO: 1702331 - RNA, 23 nt, Human
gauagauaggucagugcaaauac

SEQ ID NO: 1702332 - RNA, 19 nt, Human
gauuuuaugcuuuaaacau

SEQ ID NO: 1702333 - RNA, 14 nt, Human
gauuuuaugcuuua

SEQ ID NO: 1702334 - RNA, 23 nt, Human
gauuuuauuauguaaaucccauu

SEQ ID NO: 1702335 - RNA, 20 nt, Human
gauuuuauuauguaaauccc

SEQ ID NO: 1702336 - RNA, 19 nt, Human
gauuuuauuauguaaaucc

SEQ ID NO: 1702337 - RNA, 18 nt, Human
gauuuuauuauguaaauc

SEQ ID NO: 1702338 - RNA, 15 nt, Human
gauuuuauuauguaa

SEQ ID NO: 1702339 - RNA, 13 nt, Human
gauuuuauuaugu

SEQ ID NO: 1702340 - RNA, 15 nt, Human
gauuuuccugaaaac

SEQ ID NO: 1702341 - RNA, 10 nt, Human
gcaagccaga

SEQ ID NO: 1702342 - RNA, 23 nt, Human
gccuuuuucauuauuuuauuaug

SEQ ID NO: 1702343 - RNA, 17 nt, Human
gcuaaacuuuucugaua

SEQ ID NO: 1702344 - RNA, 15 nt, Human
gcuaaacuuuucuga

SEQ ID NO: 1702345 - RNA, 13 nt, Human
gcuaaacuuuucu

SEQ ID NO: 1702346 - RNA, 19 nt, Human
gcuagaacucccuuucaac

SEQ ID NO: 1702347 - RNA, 12 nt, Human
gcgacagugaga

SEQ ID NO: 1702348 - RNA, 22 nt, Human
gcgacagugagacucugucuca

SEQ ID NO: 1702349 - RNA, 16 nt, Human
gcccugcuuucagaua

SEQ ID NO: 1702350 - RNA, 14 nt, Human
gcccugcuuucaga

SEQ ID NO: 1702351 - RNA, 20 nt, Human
gccgggcgugguggugagug

SEQ ID NO: 1702352 - RNA, 21 nt, Human
gccuaaauccauuuggaaauc

SEQ ID NO: 1702353 - RNA, 19 nt, Human
gccuaaauccauuuggaaa

SEQ ID NO: 1702354 - RNA, 13 nt, Human
gccuaaauccauu

SEQ ID NO: 1702355 - RNA, 12 nt, Human
gccuaaauccau

SEQ ID NO: 1702356 - RNA, 23 nt, Human
gccuaaauccauuuggaaaucuu

SEQ ID NO: 1702357 - RNA, 22 nt, Human
gccuaaauccauuuggaaaucu

SEQ ID NO: 1702358 - RNA, 19 nt, Human
gccaugggcacugugggua

SEQ ID NO: 1702359 - RNA, 15 nt, Human
uuuugguugcuuuaa

SEQ ID NO: 1702360 - RNA, 16 nt, Human
uuuugguugcuuuaau

SEQ ID NO: 1702361 - RNA, 18 nt, Human
uuuuuaaaaaagaaacau

SEQ ID NO: 1702362 - RNA, 21 nt, Human
uuuuggcauaacauaaaucug

SEQ ID NO: 1702363 - RNA, 18 nt, Human
uuuuggucuggagggaag

SEQ ID NO: 1702364 - RNA, 14 nt, Human
uuuuccugaaaacc

SEQ ID NO: 1702365 - RNA, 18 nt, Human
uuuuuaagccuuaaagga

SEQ ID NO: 1702366 - RNA, 19 nt, Human
uuuuucucuaggaaauauu

SEQ ID NO: 1702367 - RNA, 16 nt, Human
uuuggauaauaaggaa

SEQ ID NO: 1702368 - RNA, 16 nt, Human
uuuguauaaaauaauu

SEQ ID NO: 1702369 - RNA, 14 nt, Human
uuuguauaaaauaa

SEQ ID NO: 1702370 - RNA, 13 nt, Human
uuuguauaaaaua

SEQ ID NO: 1702371 - RNA, 22 nt, Human
uuuggaauuuuccuccuuucuc

SEQ ID NO: 1702372 - RNA, 20 nt, Human
uuuuaauaauguuucaaaca

SEQ ID NO: 1702373 - RNA, 21 nt, Human
uuuuaaaagaaugauuaugaa

SEQ ID NO: 1702374 - RNA, 18 nt, Human
uuugaaucaucaagucuu

SEQ ID NO: 1702375 - RNA, 14 nt, Human
guauaauuaacaug

SEQ ID NO: 1702376 - RNA, 13 nt, Human
guauaauuaacau

SEQ ID NO: 1702377 - RNA, 15 nt, Human
guaguguuggagaag

SEQ ID NO: 1702378 - RNA, 14 nt, Human
guaguguuggagaa

SEQ ID NO: 1702379 - RNA, 23 nt, Human
guauaauuaacauguuaaaccau

SEQ ID NO: 1702380 - RNA, 22 nt, Human
guauaauuaacauguuaaacca

SEQ ID NO: 1702381 - RNA, 19 nt, Human
guauaauuaacauguuaaa

SEQ ID NO: 1702382 - RNA, 17 nt, Human
guauaauuaacauguua

SEQ ID NO: 1702383 - RNA, 15 nt, Human
guauaauuaacaugu

SEQ ID NO: 1702384 - RNA, 21 nt, Human
guaugugugaagugagugagu

SEQ ID NO: 1702385 - RNA, 17 nt, Human
guauguuagugcaaauu

SEQ ID NO: 1702386 - RNA, 14 nt, Human
guauagauuagaau

SEQ ID NO: 1702387 - RNA, 19 nt, Human
guauagaaccucuuugucu

SEQ ID NO: 1702388 - RNA, 21 nt, Human
guauuaagcauauauuuuuau

SEQ ID NO: 1702389 - RNA, 18 nt, Human
guauuaagcauauauuuu

SEQ ID NO: 1702390 - RNA, 16 nt, Human
guauuaagaaugaaau

SEQ ID NO: 1702391 - RNA, 15 nt, Human
guauuaagcauauau

SEQ ID NO: 1702392 - RNA, 17 nt, Human
guauuaagcauauauuu

SEQ ID NO: 1702393 - RNA, 16 nt, Human
guauuaagcauauauu

SEQ ID NO: 1702394 - RNA, 13 nt, Human
guauuuuaaucac

SEQ ID NO: 1702395 - RNA, 20 nt, Human
guauuuuaaaagaaugauua

SEQ ID NO: 1702396 - RNA, 15 nt, Human
gucaaugcagccccc

SEQ ID NO: 1702397 - RNA, 22 nt, Human
gucaauaaaauccauacauuug

SEQ ID NO: 1702398 - RNA, 23 nt, Human
gucaauaaaauccauacauuugu

SEQ ID NO: 1702399 - RNA, 21 nt, Human
gucagaucugccuaaggacuu

SEQ ID NO: 1702400 - RNA, 20 nt, Human
gucagaucugccuaaggacu

SEQ ID NO: 1702401 - RNA, 19 nt, Human
gucagaucugccuaaggac

SEQ ID NO: 1702402 - RNA, 18 nt, Human
gucagaucugccuaagga

SEQ ID NO: 1702403 - RNA, 16 nt, Human
gucagaucugccuaag

SEQ ID NO: 1702404 - RNA, 21 nt, Human
gucucugaagugaaacugcuu

SEQ ID NO: 1702405 - RNA, 15 nt, Human
gucucugaagugaaa

SEQ ID NO: 1702406 - RNA, 13 nt, Human
gucugacuguuuc

SEQ ID NO: 1702407 - RNA, 14 nt, Human
gucucagauuuuau

SEQ ID NO: 1702408 - RNA, 16 nt, Human
gucucagauuuuauua

SEQ ID NO: 1702409 - RNA, 15 nt, Human
gucucagauuuuauu

SEQ ID NO: 1702410 - RNA, 21 nt, Human
gucucagauuuuauuauguaa

SEQ ID NO: 1702411 - RNA, 17 nt, Human
gucucagauuuuauuau

SEQ ID NO: 1702412 - RNA, 18 nt, Human
gucgucaaagcugaaaug

SEQ ID NO: 1702413 - RNA, 15 nt, Human
gucuguuuuaugacu

SEQ ID NO: 1702414 - RNA, 13 nt, Human
gucuguuuuauga

SEQ ID NO: 1702415 - RNA, 21 nt, Human
gucugugagaugcuagaacuc

SEQ ID NO: 1702416 - RNA, 17 nt, Human
gucugugagaugcuaga

SEQ ID NO: 1702417 - RNA, 16 nt, Human
gucugugagaugcuag

SEQ ID NO: 1702418 - RNA, 15 nt, Human
gucugugagaugcua

SEQ ID NO: 1702419 - RNA, 23 nt, Human
gucugugagaugcuagaacuccc

SEQ ID NO: 1702420 - RNA, 22 nt, Human
gucugugagaugcuagaacucc

SEQ ID NO: 1702421 - RNA, 20 nt, Human
gucuugccuuuuucauuauu

SEQ ID NO: 1702422 - RNA, 18 nt, Human
gucuugccuuuuucauua

SEQ ID NO: 1702423 - RNA, 17 nt, Human
gucuugccuuuuucauu

SEQ ID NO: 1702424 - RNA, 16 nt, Human
gucuugccuuuuucau

SEQ ID NO: 1702425 - RNA, 15 nt, Human
gucuugccuuuuuca

SEQ ID NO: 1702426 - RNA, 22 nt, Human
gucuugucucagauuuuauuau

SEQ ID NO: 1702427 - RNA, 20 nt, Human
gucuugucucagauuuuauu

SEQ ID NO: 1702428 - RNA, 15 nt, Human
gucuugucucagauu

SEQ ID NO: 1702429 - RNA, 17 nt, Human
gugcgcuaaacuuuucu

SEQ ID NO: 1702430 - RNA, 21 nt, Human
gugcgcuaaacuuuucugaua

SEQ ID NO: 1702431 - RNA, 12 nt, Human
gugcuaaggacu

SEQ ID NO: 1702432 - RNA, 20 nt, Human
gugcuaaggacuuguuagau

SEQ ID NO: 1702433 - RNA, 14 nt, Human
gugcuaaggacuug

SEQ ID NO: 1702434 - RNA, 13 nt, Human
gugcuaaggacuu

SEQ ID NO: 1702435 - RNA, 21 nt, Human
gugaacaaauuuacagagaca

SEQ ID NO: 1702436 - RNA, 14 nt, Human
gugagcuacaaaug

SEQ ID NO: 1702437 - RNA, 16 nt, Human
guggugacuuuggaua

SEQ ID NO: 1702438 - RNA, 21 nt, Human
guguaaguagauaggccaugg

SEQ ID NO: 1702439 - RNA, 15 nt, Human
guggugacuuuggau

SEQ ID NO: 1702440 - RNA, 13 nt, Human
guggugacuuugg

SEQ ID NO: 1702441 - RNA, 14 nt, Human
guuaaaagagguuu

SEQ ID NO: 1702442 - RNA, 21 nt, Human
guuaaaagagguuuuucuuaa

SEQ ID NO: 1702443 - RNA, 20 nt, Human
guuaaaagagguuuuucuua

SEQ ID NO: 1702444 - RNA, 18 nt, Human
guuaaaccaugggauaaa

SEQ ID NO: 1702445 - RNA, 21 nt, Human
guuaaaccaugggauaaaugc

SEQ ID NO: 1702446 - RNA, 13 nt, Human
guuacagaagccc

SEQ ID NO: 1702447 - RNA, 13 nt, Human
guuauauaaaugg

SEQ ID NO: 1702448 - RNA, 12 nt, Human
guuauauaaaug

SEQ ID NO: 1702449 - RNA, 10 nt, Human
guuauauaaa

SEQ ID NO: 1702450 - RNA, 19 nt, Human
guuaucugaagucagaucu

SEQ ID NO: 1702451 - RNA, 17 nt, Human
guuauuauauuuacaaa

SEQ ID NO: 1702452 - RNA, 23 nt, Human
guuaccucugccucagaaaacaa

SEQ ID NO: 1702453 - RNA, 19 nt, Human
guucacucuccauuuaaua

SEQ ID NO: 1702454 - RNA, 23 nt, Human
guucauggaacgcguugaaauug

SEQ ID NO: 1702455 - RNA, 22 nt, Human
guucauggaacgcguugaaauu

SEQ ID NO: 1702456 - RNA, 16 nt, Human
guucaucaaugaauga

SEQ ID NO: 1702457 - RNA, 15 nt, Human
guuccugcaaugaag

SEQ ID NO: 1702458 - RNA, 22 nt, Human
guugaauuuauuggcuuuucug

SEQ ID NO: 1702459 - RNA, 21 nt, Human
guugaauuuauuggcuuuucu

SEQ ID NO: 1702460 - RNA, 20 nt, Human
guugauggugguauguuuuc

SEQ ID NO: 1702461 - RNA, 21 nt, Human
guugauggugguauguuuuca

SEQ ID NO: 1702462 - RNA, 14 nt, Human
guugaauuuauugg

SEQ ID NO: 1702463 - RNA, 15 nt, Human
guugaaauuguaauu

SEQ ID NO: 1702464 - RNA, 20 nt, Human
guugaaauuguaauuauauc

SEQ ID NO: 1702465 - RNA, 16 nt, Human
guugaaauuguaauua

SEQ ID NO: 1702466 - RNA, 22 nt, Human
guugaaacggaugauuucuaug

SEQ ID NO: 1702467 - RNA, 21 nt, Human
guugaaacggaugauuucuau

SEQ ID NO: 1702468 - RNA, 15 nt, Human
guucugaagaagaug

SEQ ID NO: 1702469 - RNA, 14 nt, Human
guucugaagaagau

SEQ ID NO: 1702470 - RNA, 13 nt, Human
guucugaagaaga

SEQ ID NO: 1702471 - RNA, 12 nt, Human
guucugaagaag

SEQ ID NO: 1702472 - RNA, 18 nt, Human
guuguuugagaaauuaag

SEQ ID NO: 1702473 - RNA, 20 nt, Human
guuuauauaagcuuguauuc

SEQ ID NO: 1702474 - RNA, 20 nt, Human
guuuaggauguugaaaaagu

SEQ ID NO: 1702475 - RNA, 21 nt, Human
guuuagcuggaaaaguauguu

SEQ ID NO: 1702476 - RNA, 20 nt, Human
guuuagcuggaaaaguaugu

SEQ ID NO: 1702477 - RNA, 16 nt, Human
guuuugguugcuuuaa

SEQ ID NO: 1702478 - RNA, 18 nt, Human
uaaaagagguuuuucuua

SEQ ID NO: 1702479 - RNA, 21 nt, Human
uaaaagagguuuuucuuaaau

SEQ ID NO: 1702480 - RNA, 19 nt, Human
uaaaagagguuuuucuuaa

SEQ ID NO: 1702481 - RNA, 17 nt, Human
uaaaauccauacauuug

SEQ ID NO: 1702482 - RNA, 15 nt, Human
uaaaauccauacauu

SEQ ID NO: 1702483 - RNA, 18 nt, Human
uaaaaaugguuuaaaugg

SEQ ID NO: 1702484 - RNA, 19 nt, Human
uaaaaaugguuuaaauggu

SEQ ID NO: 1702485 - RNA, 22 nt, Human
uaaaacaagcacuaaacaaaga

SEQ ID NO: 1702486 - RNA, 20 nt, Human
uaaagccauguuuauuacag

SEQ ID NO: 1702487 - RNA, 15 nt, Human
uaaagccauguuuau

SEQ ID NO: 1702488 - RNA, 13 nt, Human
uaaagccauguuu

SEQ ID NO: 1702489 - RNA, 11 nt, Human
uaaagccaugu

SEQ ID NO: 1702490 - RNA, 14 nt, Human
uaaaguguuugaaa

SEQ ID NO: 1702491 - RNA, 21 nt, Human
uaaacauugguucuuguauua

SEQ ID NO: 1702492 - RNA, 19 nt, Human
uaaacauugguucuuguau

SEQ ID NO: 1702493 - RNA, 14 nt, Human
uaaaugguuaaaag

SEQ ID NO: 1702494 - RNA, 20 nt, Human
uaaauggcuuccuggcaaua

SEQ ID NO: 1702495 - RNA, 23 nt, Human
uaaaugccaucaauaaaaaauua

SEQ ID NO: 1702496 - RNA, 16 nt, Human
uaaaugccaucaauaa

SEQ ID NO: 1702497 - RNA, 23 nt, Human
uaaauugacacuuaaaaaugguu

SEQ ID NO: 1702498 - RNA, 20 nt, Human
uaaauugacacuuaaaaaug

SEQ ID NO: 1702499 - RNA, 17 nt, Human
uaacuguuauuuauaau

SEQ ID NO: 1702500 - RNA, 16 nt, Human
uaacuguuauuuauaa

SEQ ID NO: 1702501 - RNA, 15 nt, Human
uaacuggaaacuuca

SEQ ID NO: 1702502 - RNA, 21 nt, Human
uaagaaaauaucacuugucaa

SEQ ID NO: 1702503 - RNA, 13 nt, Human
uaagagagaauga

SEQ ID NO: 1702504 - RNA, 23 nt, Human
uaagagagaaugagagacacacu

SEQ ID NO: 1702505 - RNA, 14 nt, Human
uaagagagaaugag

SEQ ID NO: 1702506 - RNA, 17 nt, Human
uaaccaggggccaugaa

SEQ ID NO: 1702507 - RNA, 16 nt, Human
uaauaaggaaaaguuu

SEQ ID NO: 1702508 - RNA, 21 nt, Human
uaagucuguuuuaugacuuca

SEQ ID NO: 1702509 - RNA, 20 nt, Human
uaagucuguuuuaugacuuc

SEQ ID NO: 1702510 - RNA, 19 nt, Human
uaagucuguuuuaugacuu

SEQ ID NO: 1702511 - RNA, 16 nt, Human
uaagucuguuuuauga

SEQ ID NO: 1702512 - RNA, 13 nt, Human
uaagucuguuuua

SEQ ID NO: 1702513 - RNA, 13 nt, Human
uaagugaaauaag

SEQ ID NO: 1702514 - RNA, 19 nt, Human
uaaggauuuuaugcuuuaa

SEQ ID NO: 1702515 - RNA, 17 nt, Human
uaaggauuuuaugcuuu

SEQ ID NO: 1702516 - RNA, 13 nt, Human
uaaggauuuuaug

SEQ ID NO: 1702517 - RNA, 12 nt, Human
uaaggauuuuau

SEQ ID NO: 1702518 - RNA, 22 nt, Human
uaaggauuuuaugcuuuaaaca

SEQ ID NO: 1702519 - RNA, 20 nt, Human
uaaggauuuuaugcuuuaaa

SEQ ID NO: 1702520 - RNA, 21 nt, Human
uaauuaacauguuaaaccaug

SEQ ID NO: 1702521 - RNA, 22 nt, Human
uaauguuucaaacauauauaac

SEQ ID NO: 1702522 - RNA, 23 nt, Human
uaaugauaacuggaaacuucagc

SEQ ID NO: 1702523 - RNA, 22 nt, Human
uaaugauaacuggaaacuucag

SEQ ID NO: 1702524 - RNA, 17 nt, Human
uaaugauaacuggaaac

SEQ ID NO: 1702525 - RNA, 23 nt, Human
uaauaucaucaguauugaagcau

SEQ ID NO: 1702526 - RNA, 14 nt, Human
uaauaauguuucaa

SEQ ID NO: 1702527 - RNA, 16 nt, Human
uaauauuaaagccaug

SEQ ID NO: 1702528 - RNA, 15 nt, Human
uaauauuaaagccau

SEQ ID NO: 1702529 - RNA, 21 nt, Human
uaauauuaaagccauguuuau

SEQ ID NO: 1702530 - RNA, 20 nt, Human
uaauauuaaagccauguuua

SEQ ID NO: 1702531 - RNA, 17 nt, Human
uaauauuaaagccaugu

SEQ ID NO: 1702532 - RNA, 23 nt, Human
uauaucugaggaauucuguauag

SEQ ID NO: 1702533 - RNA, 19 nt, Human
uauauaacaaugcuguauu

SEQ ID NO: 1702534 - RNA, 17 nt, Human
uauauaacaaugcugua

SEQ ID NO: 1702535 - RNA, 21 nt, Human
uauagaaccucuuugucuaca

SEQ ID NO: 1702536 - RNA, 20 nt, Human
uauagaaccucuuugucuac

SEQ ID NO: 1702537 - RNA, 16 nt, Human
uaucaucaguauugaa

SEQ ID NO: 1702538 - RNA, 15 nt, Human
uaucaucaguauuga

SEQ ID NO: 1702539 - RNA, 14 nt, Human
uaucaucaguauug

SEQ ID NO: 1702540 - RNA, 14 nt, Human
uaucaaaagaaaga

SEQ ID NO: 1702541 - RNA, 16 nt, Human
uauauuuucauucucc

SEQ ID NO: 1702542 - RNA, 21 nt, Human
uauauuuuuuguuaaaugauu

SEQ ID NO: 1702543 - RNA, 16 nt, Human
uauaugcuucuguuuu

SEQ ID NO: 1702544 - RNA, 14 nt, Human
uauaugcuucuguu

SEQ ID NO: 1702545 - RNA, 20 nt, Human
uauauuugaaauauugacuu

SEQ ID NO: 1702546 - RNA, 17 nt, Human
uaguauuguccaggucu

SEQ ID NO: 1702547 - RNA, 15 nt, Human
uagauuagaauucug

SEQ ID NO: 1702548 - RNA, 14 nt, Human
uagauuagaauucu

SEQ ID NO: 1702549 - RNA, 20 nt, Human
uagauuagaauucuguauag

SEQ ID NO: 1702550 - RNA, 19 nt, Human
uagauuagaauucuguaua

SEQ ID NO: 1702551 - RNA, 17 nt, Human
uagauuagaauucugua

SEQ ID NO: 1702552 - RNA, 16 nt, Human
uagauuagaauucugu

SEQ ID NO: 1702553 - RNA, 14 nt, Human
uagauaggccaugg

SEQ ID NO: 1702554 - RNA, 20 nt, Human
uagauuagagaguguugaaa

SEQ ID NO: 1702555 - RNA, 21 nt, Human
uagaauucuguauagauuaga

SEQ ID NO: 1702556 - RNA, 16 nt, Human
uagaauucuguauaga

SEQ ID NO: 1702557 - RNA, 15 nt, Human
uagaauucuguauag

SEQ ID NO: 1702558 - RNA, 14 nt, Human
uagaauucuguaua

SEQ ID NO: 1702559 - RNA, 13 nt, Human
uagaauucuguau

SEQ ID NO: 1702560 - RNA, 11 nt, Human
uagaauucugu

SEQ ID NO: 1702561 - RNA, 20 nt, Human
uagacuggugacugauucuu

SEQ ID NO: 1702562 - RNA, 23 nt, Human
uagacuggugacugauucuucag

SEQ ID NO: 1702563 - RNA, 21 nt, Human
uagacuggugacugauucuuc

SEQ ID NO: 1702564 - RNA, 18 nt, Human
uagaauuaacacaugauc

SEQ ID NO: 1702565 - RNA, 16 nt, Human
uagaauuaacacauga

SEQ ID NO: 1702566 - RNA, 15 nt, Human
uagaauuaacacaug

SEQ ID NO: 1702567 - RNA, 23 nt, Human
uagaauaccacaggaaccacaag

SEQ ID NO: 1702568 - RNA, 23 nt, Human
uaccuacauguauuuguuugcau

SEQ ID NO: 1702569 - RNA, 13 nt, Human
uaccuacauguau

SEQ ID NO: 1702570 - RNA, 22 nt, Human
uaccaaaaaucucaauauuuca

SEQ ID NO: 1702571 - RNA, 22 nt, Human
uaccuaacgaaguauccuucag

SEQ ID NO: 1702572 - RNA, 23 nt, Human
uacuaaaauggacuguggugacu

SEQ ID NO: 1702573 - RNA, 15 nt, Human
uacuaaaauggacug

SEQ ID NO: 1702574 - RNA, 17 nt, Human
uacuaaaauggacugug

SEQ ID NO: 1702575 - RNA, 12 nt, Human
uacaaaguauua

SEQ ID NO: 1702576 - RNA, 14 nt, Human
uacaaaguauuaag

SEQ ID NO: 1702577 - RNA, 13 nt, Human
uacaaaguauuaa

SEQ ID NO: 1702578 - RNA, 19 nt, Human
uacaaaguauuaagcauau

SEQ ID NO: 1702579 - RNA, 18 nt, Human
uacaaaguauuaagcaua

SEQ ID NO: 1702580 - RNA, 16 nt, Human
uacaaaguauuaagca

SEQ ID NO: 1702581 - RNA, 15 nt, Human
uacaaaguauuaagc

SEQ ID NO: 1702582 - RNA, 13 nt, Human
uaauuuugugaag

SEQ ID NO: 1702583 - RNA, 17 nt, Human
uaauuuuuauauuugaa

SEQ ID NO: 1702584 - RNA, 16 nt, Human
uaauuuuuauauuuga

SEQ ID NO: 1702585 - RNA, 12 nt, Human
uaauuuuuauau

SEQ ID NO: 1702586 - RNA, 18 nt, Human
uaauuuugugaagcaaaa

SEQ ID NO: 1702587 - RNA, 17 nt, Human
uacaauuuuguuucugu

SEQ ID NO: 1702588 - RNA, 16 nt, Human
uacaauuuuguuucug

SEQ ID NO: 1702589 - RNA, 15 nt, Human
uacaauuuuguuucu

SEQ ID NO: 1702590 - RNA, 12 nt, Human
uacaauuuuguu

SEQ ID NO: 1702591 - RNA, 23 nt, Human
uacaguucggugagcuacaaaug

SEQ ID NO: 1702592 - RNA, 18 nt, Human
ugaacuugaaauuugaau

SEQ ID NO: 1702593 - RNA, 14 nt, Human
ugaacuugaaauuu

SEQ ID NO: 1702594 - RNA, 13 nt, Human
ugaacuugaaauu

SEQ ID NO: 1702595 - RNA, 20 nt, Human
ugaaugaauggcuaagcaaa

SEQ ID NO: 1702596 - RNA, 15 nt, Human
ugaaugaauggcuaa

SEQ ID NO: 1702597 - RNA, 23 nt, Human
ugacaucucugcaaucuucucag

SEQ ID NO: 1702598 - RNA, 14 nt, Human
ugacaucucugcaa

SEQ ID NO: 1702599 - RNA, 13 nt, Human
ugacaucucugca

SEQ ID NO: 1702600 - RNA, 18 nt, Human
ugaccacugcagaagaca

SEQ ID NO: 1702601 - RNA, 17 nt, Human
ugaccacugcagaagac

SEQ ID NO: 1702602 - RNA, 16 nt, Human
ugaccacugcagaaga

SEQ ID NO: 1702603 - RNA, 14 nt, Human
ugaauuacauuugu

SEQ ID NO: 1702604 - RNA, 13 nt, Human
ugaauuacauuug

SEQ ID NO: 1702605 - RNA, 14 nt, Human
ugaauuaaguuuuu

SEQ ID NO: 1702606 - RNA, 22 nt, Human
ugacuuuggauaauaaggaaaa

SEQ ID NO: 1702607 - RNA, 20 nt, Human
ugacuuuggauaauaaggaa

SEQ ID NO: 1702608 - RNA, 16 nt, Human
ugacuuuggauaauaa

SEQ ID NO: 1702609 - RNA, 15 nt, Human
ugacuuuggauaaua

SEQ ID NO: 1702610 - RNA, 14 nt, Human
ugacuuuggauaau

SEQ ID NO: 1702611 - RNA, 13 nt, Human
ugacuuuggauaa

SEQ ID NO: 1702612 - RNA, 12 nt, Human
ugacuuuggaua

SEQ ID NO: 1702613 - RNA, 13 nt, Human
ugacucuuaagaa

SEQ ID NO: 1702614 - RNA, 16 nt, Human
ugacucuuaagaagac

SEQ ID NO: 1702615 - RNA, 15 nt, Human
ugacucuuaagaaga

SEQ ID NO: 1702616 - RNA, 14 nt, Human
ugacucuuaagaag

SEQ ID NO: 1702617 - RNA, 15 nt, Human
ucuuguauuaagaau

SEQ ID NO: 1702618 - RNA, 14 nt, Human
ucuuguauuaagaa

SEQ ID NO: 1702619 - RNA, 19 nt, Human
ucuugccaaauauaaauaa

SEQ ID NO: 1702620 - RNA, 16 nt, Human
ucuucuuggucucagu

SEQ ID NO: 1702621 - RNA, 13 nt, Human
ucuuauaauuuaa

SEQ ID NO: 1702622 - RNA, 14 nt, Human
ucuuauaauuuaaa

SEQ ID NO: 1702623 - RNA, 22 nt, Human
ucuuaggguuaugauuaaguaa

SEQ ID NO: 1702624 - RNA, 12 nt, Human
ucuugucucaga

SEQ ID NO: 1702625 - RNA, 15 nt, Human
ucuugucucagauuu

SEQ ID NO: 1702626 - RNA, 14 nt, Human
ucuugucucagauu

SEQ ID NO: 1702627 - RNA, 17 nt, Human
ucuugucucagauuuua

SEQ ID NO: 1702628 - RNA, 17 nt, Human
ucuuuccacagaagcuc

SEQ ID NO: 1702629 - RNA, 17 nt, Human
ucugcaaucuucucaga

SEQ ID NO: 1702630 - RNA, 14 nt, Human
ucugcaaucuucuc

SEQ ID NO: 1702631 - RNA, 21 nt, Human
ucugccuaaggacuucuuuaa

SEQ ID NO: 1702632 - RNA, 20 nt, Human
ucugccuaaggacuucuuua

SEQ ID NO: 1702633 - RNA, 23 nt, Human
ucugccuaaggacuucuuuaauu

SEQ ID NO: 1702634 - RNA, 14 nt, Human
ucugucucagucca

SEQ ID NO: 1702635 - RNA, 20 nt, Human
ucagauacuggauuguacuu

SEQ ID NO: 1702636 - RNA, 19 nt, Human
ucagauacuggauuguacu

SEQ ID NO: 1702637 - RNA, 16 nt, Human
ucagauacuggauugu

SEQ ID NO: 1702638 - RNA, 15 nt, Human
ucagauacuggauug

SEQ ID NO: 1702639 - RNA, 14 nt, Human
ucagauacuggauu

SEQ ID NO: 1702640 - RNA, 22 nt, Human
ucagauaacuguuauuuauaau

SEQ ID NO: 1702641 - RNA, 23 nt, Human
ucaucaguauugaagcauuuuau

SEQ ID NO: 1702642 - RNA, 21 nt, Human
ucaucaguauugaagcauuuu

SEQ ID NO: 1702643 - RNA, 20 nt, Human
ucaucaguauugaagcauuu

SEQ ID NO: 1702644 - RNA, 16 nt, Human
ucaucaguauugaagc

SEQ ID NO: 1702645 - RNA, 19 nt, Human
ucauggaauuggagcucgu

SEQ ID NO: 1702646 - RNA, 21 nt, Human
ucauggaauuggagcucgugg

SEQ ID NO: 1702647 - RNA, 18 nt, Human
ucaguccaugaagaugua

SEQ ID NO: 1702648 - RNA, 12 nt, Human
uccauacauuug

SEQ ID NO: 1702649 - RNA, 13 nt, Human
ucucagauuuuau

SEQ ID NO: 1702650 - RNA, 15 nt, Human
ucucagauuuuauua

SEQ ID NO: 1702651 - RNA, 14 nt, Human
ucucagauuuuauu

SEQ ID NO: 1702652 - RNA, 19 nt, Human
ucucagauuuuauuaugua

SEQ ID NO: 1702653 - RNA, 18 nt, Human
ucucagauuuuauuaugu

SEQ ID NO: 1702654 - RNA, 17 nt, Human
ucucagauuuuauuaug

SEQ ID NO: 1702655 - RNA, 16 nt, Human
ucucagauuuuauuau

SEQ ID NO: 1702656 - RNA, 19 nt, Human
ucuauauuuucauucuccu

SEQ ID NO: 1702657 - RNA, 16 nt, Human
ucuauauuuucauucu

SEQ ID NO: 1702658 - RNA, 15 nt, Human
ucuauauuuucauuc

SEQ ID NO: 1702659 - RNA, 14 nt, Human
ucuauauuuucauu

SEQ ID NO: 1702660 - RNA, 13 nt, Human
ucuauauuuucau

SEQ ID NO: 1702661 - RNA, 19 nt, Human
ucuacuaaaaauacaaaaa

SEQ ID NO: 1702662 - RNA, 15 nt, Human
ucuacuaaaaauaca

SEQ ID NO: 1702663 - RNA, 12 nt, Human
ucuacuaaaaau

SEQ ID NO: 1702664 - RNA, 15 nt, Human
ucgcuuuugauaauc

SEQ ID NO: 1702665 - RNA, 17 nt, Human
ucggccuccauccugag

SEQ ID NO: 1702666 - RNA, 16 nt, Human
ucggccuccauccuga

SEQ ID NO: 1702667 - RNA, 15 nt, Human
ucggccuccauccug

SEQ ID NO: 1702668 - RNA, 21 nt, Human
uccucucaaccaccuuucaga

SEQ ID NO: 1702669 - RNA, 20 nt, Human
uccucucaaccaccuuucag

SEQ ID NO: 1702670 - RNA, 18 nt, Human
uccucucaaccaccuuuc

SEQ ID NO: 1702671 - RNA, 17 nt, Human
uccugaggcuccacuug

SEQ ID NO: 1702672 - RNA, 16 nt, Human
uccugaggcuccacuu

SEQ ID NO: 1702673 - RNA, 15 nt, Human
uccugaggcuccacu

SEQ ID NO: 1702674 - RNA, 20 nt, Human
uccucaaaacuucagacaua

SEQ ID NO: 1702675 - RNA, 16 nt, Human
ucccuggccuuucaua

SEQ ID NO: 1702676 - RNA, 24 nt, Human
ucccuggccuuucauauuuuagcu

SEQ ID NO: 1702677 - RNA, 18 nt, Human
uggaacgcguugaaauug

SEQ ID NO: 1702678 - RNA, 19 nt, Human
uggaacgcguugaaauugu

SEQ ID NO: 1702679 - RNA, 22 nt, Human
uggaauaauccuaaacauauga

SEQ ID NO: 1702680 - RNA, 20 nt, Human
ugcuuuaauaucaucaguau

SEQ ID NO: 1702681 - RNA, 18 nt, Human
ugcuuuaauaucaucagu

SEQ ID NO: 1702682 - RNA, 15 nt, Human
ugcuuuaauaucauc

SEQ ID NO: 1702683 - RNA, 13 nt, Human
ugcuuuaauauca

SEQ ID NO: 1702684 - RNA, 23 nt, Human
uggaaacuucagcgguuuauaua

SEQ ID NO: 1702685 - RNA, 11 nt, Human
uggagggaagc

SEQ ID NO: 1702686 - RNA, 19 nt, Human
uggcuuuucugauccaguu

SEQ ID NO: 1702687 - RNA, 18 nt, Human
uggcuuuucugauccagu

SEQ ID NO: 1702688 - RNA, 17 nt, Human
uggcuuuucugauccag

SEQ ID NO: 1702689 - RNA, 14 nt, Human
uggcuuuucugauc

SEQ ID NO: 1702690 - RNA, 21 nt, Human
uggcuugaguuuaaauuguaa

SEQ ID NO: 1702691 - RNA, 16 nt, Human
uggcuuccuggcaaua

SEQ ID NO: 1702692 - RNA, 20 nt, Human
uggggauucuuaaaguugaa

SEQ ID NO: 1702693 - RNA, 18 nt, Human
uggggauucuuaaaguug

SEQ ID NO: 1702694 - RNA, 16 nt, Human
uggggauucuuaaagu

SEQ ID NO: 1702695 - RNA, 13 nt, Human
uggggauucuuaa

SEQ ID NO: 1702696 - RNA, 12 nt, Human
uggggauucuua

SEQ ID NO: 1702697 - RNA, 19 nt, Human
ugcacggugaauggcuuug

SEQ ID NO: 1702698 - RNA, 18 nt, Human
ugcacggugaauggcuuu

SEQ ID NO: 1702699 - RNA, 14 nt, Human
ugcacggugaaugg

SEQ ID NO: 1702700 - RNA, 22 nt, Human
ugcaguucugaagaagauggua

SEQ ID NO: 1702701 - RNA, 19 nt, Human
ugcaguucugaagaagaug

SEQ ID NO: 1702702 - RNA, 18 nt, Human
ugcaguucugaagaagau

SEQ ID NO: 1702703 - RNA, 17 nt, Human
ugcaguucugaagaaga

SEQ ID NO: 1702704 - RNA, 16 nt, Human
ugcaguucugaagaag

SEQ ID NO: 1702705 - RNA, 15 nt, Human
ugcaguucugaagaa

SEQ ID NO: 1702706 - RNA, 19 nt, Human
ugccaaauauaaauaaaaa

SEQ ID NO: 1702707 - RNA, 22 nt, Human
ugccaaauauaaauaaaaauaa

SEQ ID NO: 1702708 - RNA, 17 nt, Human
ugccaaauauaaauaaa

SEQ ID NO: 1702709 - RNA, 18 nt, Human
ugccaaauauaaauaaaa

SEQ ID NO: 1702710 - RNA, 20 nt, Human
ugccacuaaauugacacuua

SEQ ID NO: 1702711 - RNA, 15 nt, Human
ugccuucucaacucc

SEQ ID NO: 1702712 - RNA, 18 nt, Human
ugccuguaaucacagcua

SEQ ID NO: 1702713 - RNA, 19 nt, Human
ugcuaagcauuccaacuau

SEQ ID NO: 1702714 - RNA, 15 nt, Human
ugcuaagcauuccaa

SEQ ID NO: 1702715 - RNA, 21 nt, Human
uguauugugcgcuaaacuuuu

SEQ ID NO: 1702716 - RNA, 15 nt, Human
uguaugauucccagc

SEQ ID NO: 1702717 - RNA, 22 nt, Human
uguaguguuggagaagaacuga

SEQ ID NO: 1702718 - RNA, 16 nt, Human
uguaccgcaaugugac

SEQ ID NO: 1702719 - RNA, 17 nt, Human
uggucacaggaaguaga

SEQ ID NO: 1702720 - RNA, 14 nt, Human
uguaaucacagcua

SEQ ID NO: 1702721 - RNA, 19 nt, Human
ugugcuaguaauuggaaag

SEQ ID NO: 1702722 - RNA, 14 nt, Human
uguuagugcaaauu

SEQ ID NO: 1702723 - RNA, 19 nt, Human
uguguuuugcaagccagau

SEQ ID NO: 1702724 - RNA, 13 nt, Human
uguguuuugcaag

SEQ ID NO: 1702725 - RNA, 22 nt, Human
ugugugaaagguacuucaaauc

SEQ ID NO: 1702726 - RNA, 21 nt, Human
ugugugaaagguacuucaaau

SEQ ID NO: 1702727 - RNA, 20 nt, Human
uguuggagaagaacugaaau

SEQ ID NO: 1702728 - RNA, 19 nt, Human
uguuggagaagaacugaaa

SEQ ID NO: 1702729 - RNA, 17 nt, Human
uguuggagaagaacuga

SEQ ID NO: 1702730 - RNA, 16 nt, Human
uguuggagaagaacug

SEQ ID NO: 1702731 - RNA, 14 nt, Human
uguuggagaagaac

SEQ ID NO: 1702732 - RNA, 20 nt, Human
uguugacaugggacauuugc

SEQ ID NO: 1702733 - RNA, 23 nt, Human
uguuuccuagcacacacuuuugg

SEQ ID NO: 1702734 - RNA, 23 nt, Human
uguuucuguacuuuuuggcauaa

SEQ ID NO: 1702735 - RNA, 22 nt, Human
uguuucuguacuuuuuggcaua

SEQ ID NO: 1702736 - RNA, 11 nt, Human
uguuucuguac

SEQ ID NO: 1702737 - RNA, 15 nt, Human
uuaaaaaaaaaauug

SEQ ID NO: 1702738 - RNA, 22 nt, Human
uuaaaaaaaaaccugagcccca

SEQ ID NO: 1702739 - RNA, 20 nt, Human
uuaaagccauguuuauuaca

SEQ ID NO: 1702740 - RNA, 18 nt, Human
uuaaagccauguuuauua

SEQ ID NO: 1702741 - RNA, 14 nt, Human
uuaaagccauguuu

SEQ ID NO: 1702742 - RNA, 12 nt, Human
uuaaagccaugu

SEQ ID NO: 1702743 - RNA, 20 nt, Human
uuaauauuaaagccauguuu

SEQ ID NO: 1702744 - RNA, 19 nt, Human
uuaauauuaaagccauguu

SEQ ID NO: 1702745 - RNA, 18 nt, Human
uuaauauuaaagccaugu

SEQ ID NO: 1702746 - RNA, 12 nt, Human
uuacagaagccc

SEQ ID NO: 1702747 - RNA, 20 nt, Human
uuacauuuguauaaaauaau

SEQ ID NO: 1702748 - RNA, 23 nt, Human
uuaauaauaaauucccuggccuu

SEQ ID NO: 1702749 - RNA, 14 nt, Human
uuaauaauaaauuc

SEQ ID NO: 1702750 - RNA, 11 nt, Human
uuaauauuaaa

SEQ ID NO: 1702751 - RNA, 17 nt, Human
uuaauauuaaagccaug

SEQ ID NO: 1702752 - RNA, 16 nt, Human
uuaauauuaaagccau

SEQ ID NO: 1702753 - RNA, 14 nt, Human
uuaauauuaaagcc

SEQ ID NO: 1702754 - RNA, 13 nt, Human
uuaauauuaaagc

SEQ ID NO: 1702755 - RNA, 19 nt, Human
cacaguuuugguugcuuua

SEQ ID NO: 1702756 - RNA, 16 nt, Human
cacaugaaguccaagc

SEQ ID NO: 1702757 - RNA, 20 nt, Human
cacaugaaguccaagcauuu

SEQ ID NO: 1702758 - RNA, 17 nt, Human
cacaugaaguccaagca

SEQ ID NO: 1702759 - RNA, 23 nt, Human
cacaguuuugguugcuuuaauau

SEQ ID NO: 1702760 - RNA, 20 nt, Human
cacaguuuugguugcuuuaa

SEQ ID NO: 1702761 - RNA, 13 nt, Human
caauuuuguuucu

SEQ ID NO: 1702762 - RNA, 17 nt, Human
caauuuuguuucuguac

SEQ ID NO: 1702763 - RNA, 16 nt, Human
caauuuuguuucugua

SEQ ID NO: 1702764 - RNA, 14 nt, Human
caauuuuguuucug

SEQ ID NO: 1702765 - RNA, 23 nt, Human
cacaagacccaaaaggcagaagc

SEQ ID NO: 1702766 - RNA, 23 nt, Human
cacaagaaaugaaagcagggacu

SEQ ID NO: 1702767 - RNA, 15 nt, Human
cacaagaaaugaaag

SEQ ID NO: 1702768 - RNA, 13 nt, Human
cacaagaaaugaa

SEQ ID NO: 1702769 - RNA, 12 nt, Human
cacacacuuuug

SEQ ID NO: 1702770 - RNA, 17 nt, Human
auuuuaacaacagcugg

SEQ ID NO: 1702771 - RNA, 19 nt, Human
auuuuaauaauguuucaaa

SEQ ID NO: 1702772 - RNA, 18 nt, Human
auuuuaauaauguuucaa

SEQ ID NO: 1702773 - RNA, 14 nt, Human
caaaguugccuaaa

SEQ ID NO: 1702774 - RNA, 17 nt, Human
caaaguugccuaaaucc

SEQ ID NO: 1702775 - RNA, 15 nt, Human
caaaguugccuaaau

SEQ ID NO: 1702776 - RNA, 18 nt, Human
caaaguugccuaaaucca

SEQ ID NO: 1702777 - RNA, 23 nt, Human
caaauuuacagagacagaaagca

SEQ ID NO: 1702778 - RNA, 17 nt, Human
caaauuuacagagacag

SEQ ID NO: 1702779 - RNA, 19 nt, Human
caagcauuuagauguauag

SEQ ID NO: 1702780 - RNA, 16 nt, Human
caagcauuuagaugua

SEQ ID NO: 1702781 - RNA, 13 nt, Human
caagaaaugaaag

SEQ ID NO: 1702782 - RNA, 15 nt, Human
caagaaaugaaagca

SEQ ID NO: 1702783 - RNA, 18 nt, Human
auccagcagauuauucac

SEQ ID NO: 1702784 - RNA, 21 nt, Human
aucaugaauuaguuuuauaug

SEQ ID NO: 1702785 - RNA, 12 nt, Human
auccuugaagau

SEQ ID NO: 1702786 - RNA, 14 nt, Human
aucaaaagaaagaa

SEQ ID NO: 1702787 - RNA, 16 nt, Human
auggcuuuguauagaa

SEQ ID NO: 1702788 - RNA, 15 nt, Human
auggcuuuguauaga

SEQ ID NO: 1702789 - RNA, 23 nt, Human
auggcuuccuggcaauagucaaa

SEQ ID NO: 1702790 - RNA, 15 nt, Human
augggacagggagga

SEQ ID NO: 1702791 - RNA, 20 nt, Human
augggacauuugcucaugga

SEQ ID NO: 1702792 - RNA, 18 nt, Human
augaaacuuguguaaaua

SEQ ID NO: 1702793 - RNA, 13 nt, Human
augaaguacucau

SEQ ID NO: 1702794 - RNA, 21 nt, Human
agucuggcuguacccaggaau

SEQ ID NO: 1702795 - RNA, 19 nt, Human
agucuggcuguacccagga

SEQ ID NO: 1702796 - RNA, 13 nt, Human
agugauuaccagg

SEQ ID NO: 1702797 - RNA, 16 nt, Human
auaaaaaauuaugaca

SEQ ID NO: 1702798 - RNA, 16 nt, Human
auaaaagacagugaaa

SEQ ID NO: 1702799 - RNA, 15 nt, Human
auaaaagacagugaa

SEQ ID NO: 1702800 - RNA, 18 nt, Human
auacaauuuuguuucugu

SEQ ID NO: 1702801 - RNA, 17 nt, Human
auacaauuuuguuucug

SEQ ID NO: 1702802 - RNA, 16 nt, Human
auacaauuuuguuucu

SEQ ID NO: 1702803 - RNA, 14 nt, Human
auacaauuuuguuu

SEQ ID NO: 1702804 - RNA, 19 nt, Human
auaaagaucauguaaaagu

SEQ ID NO: 1702805 - RNA, 20 nt, Human
auacuguuugagguuuuuaa

SEQ ID NO: 1702806 - RNA, 16 nt, Human
auacuguuugagguuu

SEQ ID NO: 1702807 - RNA, 12 nt, Human
auacuguuugag

SEQ ID NO: 1702808 - RNA, 16 nt, Human
agacgaugucuucaua

SEQ ID NO: 1702809 - RNA, 17 nt, Human
agacccaaaaggcagaa

SEQ ID NO: 1702810 - RNA, 19 nt, Human
agacaaggaaaaaauaaca

SEQ ID NO: 1702811 - RNA, 22 nt, Human
agaacagugauuaccagggacu

SEQ ID NO: 1702812 - RNA, 21 nt, Human
agaagacugcauuauauuuau

SEQ ID NO: 1702813 - RNA, 18 nt, Human
agaucugccuaaggacuu

SEQ ID NO: 1702814 - RNA, 13 nt, Human
agaucugccuaag

SEQ ID NO: 1702815 - RNA, 23 nt, Human
agcaaaauuuuuucucuaggaaa

SEQ ID NO: 1702816 - RNA, 20 nt, Human
agauagauaggucagugcaa

SEQ ID NO: 1702817 - RNA, 21 nt, Human
aggaagguucuggugugaacu

SEQ ID NO: 1702818 - RNA, 16 nt, Human
aggaagguucuggugu

SEQ ID NO: 1702819 - RNA, 14 nt, Human
aggaagguucuggu

SEQ ID NO: 1702820 - RNA, 18 nt, Human
aggaaaaaauaacaauga

SEQ ID NO: 1702821 - RNA, 18 nt, Human
agcuguaugauucccagc

SEQ ID NO: 1702822 - RNA, 17 nt, Human
agcuguaugauucccag

SEQ ID NO: 1702823 - RNA, 13 nt, Human
agcuacaaaugca

SEQ ID NO: 1702824 - RNA, 17 nt, Human
agcgacagugagacucu

SEQ ID NO: 1702825 - RNA, 15 nt, Human
agcgacagugagacu

SEQ ID NO: 1702826 - RNA, 13 nt, Human
agcgacagugaga

SEQ ID NO: 1702827 - RNA, 20 nt, Human
aggcagagguugcagugagc

SEQ ID NO: 1702828 - RNA, 23 nt, Human
aggccaugggcacuguggguaga

SEQ ID NO: 1702829 - RNA, 13 nt, Human
aggaaguagagga

SEQ ID NO: 1702830 - RNA, 22 nt, Human
acugauuugacauagucuggcu

SEQ ID NO: 1702831 - RNA, 19 nt, Human
acugauaugggucuugaua

SEQ ID NO: 1702832 - RNA, 14 nt, Human
acucccuuucaaca

SEQ ID NO: 1702833 - RNA, 19 nt, Human
acucguuaauuuguagugu

SEQ ID NO: 1702834 - RNA, 14 nt, Human
acucguuaauuugu

SEQ ID NO: 1702835 - RNA, 20 nt, Human
acuggugacugauucuucag

SEQ ID NO: 1702836 - RNA, 17 nt, Human
acuguaaaauaauaacu

SEQ ID NO: 1702837 - RNA, 16 nt, Human
acuggugacugauucu

SEQ ID NO: 1702838 - RNA, 19 nt, Human
acuggugacugauucuuca

SEQ ID NO: 1702839 - RNA, 18 nt, Human
acuggugacugauucuuc

SEQ ID NO: 1702840 - RNA, 12 nt, Human
acuggaacucuc

SEQ ID NO: 1702841 - RNA, 18 nt, Human
acuucuuuaauuuuggaa

SEQ ID NO: 1702842 - RNA, 20 nt, Human
acuucuuuaauuuuggaauu

SEQ ID NO: 1702843 - RNA, 19 nt, Human
acuucuuuaauuuuggaau

SEQ ID NO: 1702844 - RNA, 21 nt, Human
acuucagacauagaauuaaca

SEQ ID NO: 1702845 - RNA, 13 nt, Human
acuuggucuguga

SEQ ID NO: 1702846 - RNA, 22 nt, Human
acuuaaaaaugguuuaaauggu

SEQ ID NO: 1702847 - RNA, 18 nt, Human
acuucaaauccuugaaga

SEQ ID NO: 1702848 - RNA, 17 nt, Human
acuucaaauccuugaag

SEQ ID NO: 1702849 - RNA, 21 nt, Human
acccugucucuacuaaaaaua

SEQ ID NO: 1702850 - RNA, 21 nt, Human
aauuauaugcuauuucuauau

SEQ ID NO: 1702851 - RNA, 20 nt, Human
aauuauaugcuauuucuaua

SEQ ID NO: 1702852 - RNA, 19 nt, Human
aauuauaugcuauuucuau

SEQ ID NO: 1702853 - RNA, 23 nt, Human
aauuauaucugaggaauucugua

SEQ ID NO: 1702854 - RNA, 22 nt, Human
aauuauaucugaggaauucugu

SEQ ID NO: 1702855 - RNA, 20 nt, Human
aauuauaucugaggaauucu

SEQ ID NO: 1702856 - RNA, 15 nt, Human
aauuggggauucuua

SEQ ID NO: 1702857 - RNA, 12 nt, Human
aauucuguauag

SEQ ID NO: 1702858 - RNA, 20 nt, Human
aauucuguauagauuagaga

SEQ ID NO: 1702859 - RNA, 14 nt, Human
aauucuguauagau

SEQ ID NO: 1702860 - RNA, 13 nt, Human
aauucuguauaga

SEQ ID NO: 1702861 - RNA, 14 nt, Human
aauuguaauuauau

SEQ ID NO: 1702862 - RNA, 16 nt, Human
aauuguaauuauaucu

SEQ ID NO: 1702863 - RNA, 15 nt, Human
aauuguaauuauauc

SEQ ID NO: 1702864 - RNA, 11 nt, Human
aauuguaauag

SEQ ID NO: 1702865 - RNA, 17 nt, Human
aauuguaauuauaucug

SEQ ID NO: 1702866 - RNA, 15 nt, Human
acaccaauauucaua

SEQ ID NO: 1702867 - RNA, 14 nt, Human
acauguuaaaccau

SEQ ID NO: 1702868 - RNA, 23 nt, Human
acauguuaaaccaugggauaaau

SEQ ID NO: 1702869 - RNA, 21 nt, Human
acauguuaaaccaugggauaa

SEQ ID NO: 1702870 - RNA, 16 nt, Human
acauguuaaaccaugg

SEQ ID NO: 1702871 - RNA, 21 nt, Human
acauuuguauaaaauaauuuu

SEQ ID NO: 1702872 - RNA, 19 nt, Human
acauuuguauaaaauaauu

SEQ ID NO: 1702873 - RNA, 16 nt, Human
acauuuguauaaaaua

SEQ ID NO: 1702874 - RNA, 16 nt, Human
acauuugcucauggaa

SEQ ID NO: 1702875 - RNA, 15 nt, Human
acauuugcucaugga

SEQ ID NO: 1702876 - RNA, 22 nt, Human
acaggaugguucccuugaugaa

SEQ ID NO: 1702877 - RNA, 24 nt, Human
acaggaugguucccuugaugaaga

SEQ ID NO: 1702878 - RNA, 20 nt, Human
acagugauuaccagggacug

SEQ ID NO: 1702879 - RNA, 19 nt, Human
acagugauuaccagggacu

SEQ ID NO: 1702880 - RNA, 22 nt, Human
aauauuaaagccauguuuauua

SEQ ID NO: 1702881 - RNA, 16 nt, Human
aaucucaauauuucag

SEQ ID NO: 1702882 - RNA, 20 nt, Human
aaugaauacuuuauaaagga

SEQ ID NO: 1702883 - RNA, 19 nt, Human
aauaaagaucauguaaaag

SEQ ID NO: 1702884 - RNA, 14 nt, Human
aauaaagaucaugu

SEQ ID NO: 1702885 - RNA, 20 nt, Human
aauaaagaucauguaaaagu

SEQ ID NO: 1702886 - RNA, 17 nt, Human
aaguugaauuuauuggc

SEQ ID NO: 1702887 - RNA, 15 nt, Human
aaguugaauuuauug

SEQ ID NO: 1702888 - RNA, 14 nt, Human
aaguugaauuuauu

SEQ ID NO: 1702889 - RNA, 22 nt, Human
aaguuguuugagaaauuaagua

SEQ ID NO: 1702890 - RNA, 21 nt, Human
aaguuguuugagaaauuaagu

SEQ ID NO: 1702891 - RNA, 24 nt, Human
aaguugaauuuauuggcuuuucug

SEQ ID NO: 1702892 - RNA, 23 nt, Human
aaguugaauuuauuggcuuuucu

SEQ ID NO: 1702893 - RNA, 15 nt, Human
aaguuuaauauuaaa

SEQ ID NO: 1702894 - RNA, 18 nt, Human
aaguuuaauauuaaagcc

SEQ ID NO: 1702895 - RNA, 17 nt, Human
aaguuuaauauuaaagc

SEQ ID NO: 1702896 - RNA, 23 nt, Human
aaggacuucuuuaauuuuggaau

SEQ ID NO: 1702897 - RNA, 21 nt, Human
aaggacuuguuagaucuaguu

SEQ ID NO: 1702898 - RNA, 15 nt, Human
aaggacuuguuagau

SEQ ID NO: 1702899 - RNA, 23 nt, Human
aaggacuuguuagaucuaguuca

SEQ ID NO: 1702900 - RNA, 15 nt, Human
aagaagacugcauua

SEQ ID NO: 1702901 - RNA, 20 nt, Human
aagaagacugcauuauauuu

SEQ ID NO: 1702902 - RNA, 21 nt, Human
aagacaaggaaaaaauaacaa

SEQ ID NO: 1702903 - RNA, 15 nt, Human
aagaacugaaaucau

SEQ ID NO: 1702904 - RNA, 13 nt, Human
aagaacugaaauc

SEQ ID NO: 1702905 - RNA, 12 nt, Human
aagaacugaaau

SEQ ID NO: 1702906 - RNA, 11 nt, Human
aagaacugaaa

SEQ ID NO: 1702907 - RNA, 23 nt, Human
aaauggacuguggugacuuugga

SEQ ID NO: 1702908 - RNA, 20 nt, Human
aaauggacuguggugacuuu

SEQ ID NO: 1702909 - RNA, 21 nt, Human
aaauggacuguggugacuuug

SEQ ID NO: 1702910 - RNA, 18 nt, Human
aaaucucaauauuucaga

SEQ ID NO: 1702911 - RNA, 21 nt, Human
aaauauuuauuuuaauaaugu

SEQ ID NO: 1702912 - RNA, 23 nt, Human
aaauguugacaugggacauuugc

SEQ ID NO: 1702913 - RNA, 13 nt, Human
aaauguucaucaa

SEQ ID NO: 1702914 - RNA, 17 nt, Human
aaauguucaucaaugaa

SEQ ID NO: 1702915 - RNA, 22 nt, Human
aaauguugacaugggacauuug

SEQ ID NO: 1702916 - RNA, 15 nt, Human
aaagaucauguaaaa

SEQ ID NO: 1702917 - RNA, 16 nt, Human
aaagccauguuuauua

SEQ ID NO: 1702918 - RNA, 14 nt, Human
aaagccauguuuau

SEQ ID NO: 1702919 - RNA, 23 nt, Human
aaagccauguuuauuacaguaua

SEQ ID NO: 1702920 - RNA, 18 nt, Human
aaagccauguuuauuaca

SEQ ID NO: 1702921 - RNA, 17 nt, Human
aaagccauguuuauuac

SEQ ID NO: 1702922 - RNA, 22 nt, Human
aaaccaguauuguacaaaguau

SEQ ID NO: 1702923 - RNA, 18 nt, Human
aaaccaguauuguacaaa

SEQ ID NO: 1702924 - RNA, 17 nt, Human
aaaccaguauuguacaa

SEQ ID NO: 1702925 - RNA, 16 nt, Human
aaaccaguauuguaca

SEQ ID NO: 1702926 - RNA, 14 nt, Human
aaaccaguauugua

SEQ ID NO: 1702927 - RNA, 22 nt, Human
aaaagagguuuuucuuaaauaa

SEQ ID NO: 1702928 - RNA, 21 nt, Human
aaaagagguuuuucuuaaaua

SEQ ID NO: 1702929 - RNA, 17 nt, Human
aaaagagguuuuucuua

SEQ ID NO: 1702930 - RNA, 11 nt, Human
aaaagaaugau

SEQ ID NO: 1702931 - RNA, 20 nt, Human
aaaagacaaggaaaaaauaa

SEQ ID NO: 1702932 - RNA, 17 nt, Human
aaaagaaagaaaaucag

SEQ ID NO: 1702933 - RNA, 18 nt, Human
aaaaguuuaauauuaaag

SEQ ID NO: 1702934 - RNA, 16 nt, Human
aaaaguuuaauauuaa

SEQ ID NO: 1702935 - RNA, 14 nt, Human
aaaaguuuaauauu

SEQ ID NO: 1702936 - RNA, 15 nt, Human
aaauucccuggccuu

SEQ ID NO: 1702937 - RNA, 18 nt, Human
aaauucccuggccuuuca

SEQ ID NO: 1702938 - RNA, 17 nt, Human
aaauuucagcagcugca

SEQ ID NO: 1702939 - RNA, 18 nt, Human
aaauuucagcagcugcag

SEQ ID NO: 1702940 - RNA, 16 nt, Human
gucaaauugugugaaa

SEQ ID NO: 1702941 - RNA, 17 nt, Human
guaugugugaagugagu

SEQ ID NO: 1702942 - RNA, 13 nt, Human
guaugugugaagu

SEQ ID NO: 1702943 - RNA, 14 nt, Human
guaugauucccagc

SEQ ID NO: 1702944 - RNA, 15 nt, Human
aaaucgcuuuugaua

SEQ ID NO: 1702945 - RNA, 14 nt, Human
aaaucgcuuuugau

SEQ ID NO: 1702946 - RNA, 13 nt, Human
aaaucgcuuuuga

SEQ ID NO: 1702947 - RNA, 19 nt, Human
aaaucuacacuccagugag

SEQ ID NO: 1702948 - RNA, 22 nt, Human
aaaucccauuauucaaaguugc

SEQ ID NO: 1702949 - RNA, 21 nt, Human
aaaucccauuauucaaaguug

SEQ ID NO: 1702950 - RNA, 20 nt, Human
aaaucccauuauucaaaguu

SEQ ID NO: 1702951 - RNA, 19 nt, Human
aaaucccauuauucaaagu

SEQ ID NO: 1702952 - RNA, 17 nt, Human
aaaucccauuauucaaa

SEQ ID NO: 1702953 - RNA, 16 nt, Human
aaaucccauuauucaa

SEQ ID NO: 1702954 - RNA, 15 nt, Human
aaaucccauuauuca

SEQ ID NO: 1702955 - RNA, 13 nt, Human
aaaucccauuauu

SEQ ID NO: 1702956 - RNA, 23 nt, Human
aaauccauuuggaaaucuuuaaa

SEQ ID NO: 1702957 - RNA, 22 nt, Human
aaauccauuuggaaaucuuuaa

SEQ ID NO: 1702958 - RNA, 21 nt, Human
aaauccauuuggaaaucuuua

SEQ ID NO: 1702959 - RNA, 18 nt, Human
aaauccauuuggaaaucu

SEQ ID NO: 1702960 - RNA, 14 nt, Human
aaauccuugaagau

SEQ ID NO: 1702961 - RNA, 14 nt, Human
aaauccauuuggaa

SEQ ID NO: 1702962 - RNA, 16 nt, Human
aaauccauuuggaaau

SEQ ID NO: 1702963 - RNA, 15 nt, Human
aaauccauuuggaaa

SEQ ID NO: 1702964 - RNA, 14 nt, Human
aaaugcauuucuaa

SEQ ID NO: 1702965 - RNA, 19 nt, Human
aaauggcuuccuggcaaua

SEQ ID NO: 1702966 - RNA, 22 nt, Human
aaaugaaagcagggacuugaac

SEQ ID NO: 1702967 - RNA, 21 nt, Human
aaaugaaagcagggacuugaa

SEQ ID NO: 1702968 - RNA, 21 nt, Human
aaccaugggauaaaugccauc

SEQ ID NO: 1702969 - RNA, 13 nt, Human
aacccaaauguuc

SEQ ID NO: 1702970 - RNA, 18 nt, Human
aacccaaauguucaucaa

SEQ ID NO: 1702971 - RNA, 20 nt, Human
aacccauauuuguacaccaa

SEQ ID NO: 1702972 - RNA, 20 nt, Human
aaccuagggugauauuaacc

SEQ ID NO: 1702973 - RNA, 20 nt, Human
aaccaugggauaaaugccau

SEQ ID NO: 1702974 - RNA, 18 nt, Human
aaccaugggauaaaugcc

SEQ ID NO: 1702975 - RNA, 17 nt, Human
aaccaugggauaaaugc

SEQ ID NO: 1702976 - RNA, 15 nt, Human
aaccaugggauaaau

SEQ ID NO: 1702977 - RNA, 17 nt, Human
aacuaaacuuucacacc

SEQ ID NO: 1702978 - RNA, 15 nt, Human
aacuaaacuuucaca

SEQ ID NO: 1702979 - RNA, 13 nt, Human
aacuaaacuuuca

SEQ ID NO: 1702980 - RNA, 14 nt, Human
aacucccuuucaac

SEQ ID NO: 1702981 - RNA, 13 nt, Human
aacucccuuucaa

SEQ ID NO: 1702982 - RNA, 18 nt, Human
aacucguuaauuuguagu

SEQ ID NO: 1702983 - RNA, 21 nt, Human
aacuccagaaagugacaagcu

SEQ ID NO: 1702984 - RNA, 14 nt, Human
aacuccagaaagug

SEQ ID NO: 1702985 - RNA, 19 nt, Human
gucuuauauauuguagaua

SEQ ID NO: 1702986 - RNA, 17 nt, Human
aacacuccaauuaagga

SEQ ID NO: 1702987 - RNA, 21 nt, Human
guccaagcauuuagauguaua

SEQ ID NO: 1702988 - RNA, 21 nt, Human
aacaagccuccuuuuaaagua

SEQ ID NO: 1702989 - RNA, 15 nt, Human
aacaaggaugaauua

SEQ ID NO: 1702990 - RNA, 18 nt, Human
aacauuugguaaggggaa

SEQ ID NO: 1702991 - RNA, 22 nt, Human
aacaguagugauaguuguaccg

SEQ ID NO: 1702992 - RNA, 14 nt, Human
guuauuuauaauca

SEQ ID NO: 1702993 - RNA, 20 nt, Human
guuauuuauaaucacuuuuu

SEQ ID NO: 1702994 - RNA, 13 nt, Human
guuaagucuguuu

SEQ ID NO: 1702995 - RNA, 22 nt, Human
guuaagucuguuuuaugacuuc

SEQ ID NO: 1702996 - RNA, 15 nt, Human
guuaagucuguuuua

SEQ ID NO: 1702997 - RNA, 12 nt, Human
guuagaucuagu

SEQ ID NO: 1702998 - RNA, 18 nt, Human
guucuggugugaacuaaa

SEQ ID NO: 1702999 - RNA, 15 nt, Human
guucuggugugaacu

SEQ ID NO: 1703000 - RNA, 21 nt, Human
guucuuguauuaagaaugaaa

SEQ ID NO: 1703001 - RNA, 18 nt, Human
guucuuguauuaagaaug

SEQ ID NO: 1703002 - RNA, 17 nt, Human
guucuuguauuaagaau

SEQ ID NO: 1703003 - RNA, 13 nt, Human
guugacaugggac

SEQ ID NO: 1703004 - RNA, 18 nt, Human
guugacaugggacauuug

SEQ ID NO: 1703005 - RNA, 14 nt, Human
guugacaugggaca

SEQ ID NO: 1703006 - RNA, 18 nt, Human
guuguaccgcaaugugac

SEQ ID NO: 1703007 - RNA, 14 nt, Human
guugccuaaaucca

SEQ ID NO: 1703008 - RNA, 16 nt, Human
guugccuaaauccauu

SEQ ID NO: 1703009 - RNA, 15 nt, Human
guugccuaaauccau

SEQ ID NO: 1703010 - RNA, 20 nt, Human
guuucuguacuuuuuggcau

SEQ ID NO: 1703011 - RNA, 13 nt, Human
aagguacuucaaa

SEQ ID NO: 1703012 - RNA, 21 nt, Human
guuucaaacauauauaacaau

SEQ ID NO: 1703013 - RNA, 19 nt, Human
guguuguacucaauuuuaa

SEQ ID NO: 1703014 - RNA, 16 nt, Human
aagagguuuuucuuaa

SEQ ID NO: 1703015 - RNA, 14 nt, Human
guggguagacacac

SEQ ID NO: 1703016 - RNA, 21 nt, Human
gugggacagucaccucaugga

SEQ ID NO: 1703017 - RNA, 22 nt, Human
aagaaugguccgugcuaaggac

SEQ ID NO: 1703018 - RNA, 19 nt, Human
aagaaugguccgugcuaag

SEQ ID NO: 1703019 - RNA, 18 nt, Human
aagaaugauuaugaauua

SEQ ID NO: 1703020 - RNA, 16 nt, Human
aagaaugauuaugaau

SEQ ID NO: 1703021 - RNA, 13 nt, Human
aagaaagaaaauc

SEQ ID NO: 1703022 - RNA, 22 nt, Human
aagaagugaaaaucuacacucc

SEQ ID NO: 1703023 - RNA, 16 nt, Human
aagaagugaaaaucua

SEQ ID NO: 1703024 - RNA, 18 nt, Human
gugcuaguaauuggaaag

SEQ ID NO: 1703025 - RNA, 23 nt, Human
uacaguauaauuaacauguuaaa

SEQ ID NO: 1703026 - RNA, 19 nt, Human
uacaguauaauuaacaugu

SEQ ID NO: 1703027 - RNA, 18 nt, Human
uacaguauaauuaacaug

SEQ ID NO: 1703028 - RNA, 11 nt, Human
aaugugauaug

SEQ ID NO: 1703029 - RNA, 20 nt, Human
aauggacuguggugacuuug

SEQ ID NO: 1703030 - RNA, 19 nt, Human
aauggacuuuuguacauag

SEQ ID NO: 1703031 - RNA, 19 nt, Human
uacacuaagagagaaugag

SEQ ID NO: 1703032 - RNA, 14 nt, Human
uacacuccagugag

SEQ ID NO: 1703033 - RNA, 14 nt, Human
uacaguauaauuaa

SEQ ID NO: 1703034 - RNA, 17 nt, Human
uacaguauaauuaacau

SEQ ID NO: 1703035 - RNA, 16 nt, Human
uacaguauaauuaaca

SEQ ID NO: 1703036 - RNA, 20 nt, Human
aaucuuuaaaaaaaaaauug

SEQ ID NO: 1703037 - RNA, 19 nt, Human
aaucuuuaaaaaaaaaauu

SEQ ID NO: 1703038 - RNA, 16 nt, Human
uaaugauaacuggaaa

SEQ ID NO: 1703039 - RNA, 21 nt, Human
aaugagagacacacugaagaa

SEQ ID NO: 1703040 - RNA, 21 nt, Human
uaaucaacugggcugaacacu

SEQ ID NO: 1703041 - RNA, 16 nt, Human
uaaguaucugacaucu

SEQ ID NO: 1703042 - RNA, 15 nt, Human
uaaguaucugacauc

SEQ ID NO: 1703043 - RNA, 18 nt, Human
uaaguuuuuuuuuaaaaa

SEQ ID NO: 1703044 - RNA, 23 nt, Human
aaucaugaauuaguuuuauaugc

SEQ ID NO: 1703045 - RNA, 17 nt, Human
aaucaugaauuaguuuu

SEQ ID NO: 1703046 - RNA, 19 nt, Human
aaucaugaauuaguuuuau

SEQ ID NO: 1703047 - RNA, 15 nt, Human
aaucaucaagucuuu

SEQ ID NO: 1703048 - RNA, 19 nt, Human
aaucugugaacuugaaauu

SEQ ID NO: 1703049 - RNA, 18 nt, Human
aaucugugaacuugaaau

SEQ ID NO: 1703050 - RNA, 17 nt, Human
aaucugugaacuugaaa

SEQ ID NO: 1703051 - RNA, 15 nt, Human
aaucugugaacuuga

SEQ ID NO: 1703052 - RNA, 13 nt, Human
aaucugugaacuu

SEQ ID NO: 1703053 - RNA, 14 nt, Human
aaucuuauaauuua

SEQ ID NO: 1703054 - RNA, 16 nt, Human
aaucuuauaauuuaaa

SEQ ID NO: 1703055 - RNA, 13 nt, Human
aauccuugaagau

SEQ ID NO: 1703056 - RNA, 20 nt, Human
aauccucaguuuuugugaaa

SEQ ID NO: 1703057 - RNA, 18 nt, Human
aauaucaucaguauugaa

SEQ ID NO: 1703058 - RNA, 15 nt, Human
aauaucacuugucaa

SEQ ID NO: 1703059 - RNA, 12 nt, Human
aauaucacuugu

SEQ ID NO: 1703060 - RNA, 15 nt, Human
uaacauaaaucugug

SEQ ID NO: 1703061 - RNA, 20 nt, Human
uaacauaaaucugugaacuu

SEQ ID NO: 1703062 - RNA, 18 nt, Human
uaacauaaaucugugaac

SEQ ID NO: 1703063 - RNA, 17 nt, Human
uaacauaaaucugugaa

SEQ ID NO: 1703064 - RNA, 16 nt, Human
uaacauaaaucuguga

SEQ ID NO: 1703065 - RNA, 18 nt, Human
aauaggcguaacuaauuu

SEQ ID NO: 1703066 - RNA, 18 nt, Human
aauauuuuaugauccagc

SEQ ID NO: 1703067 - RNA, 17 nt, Human
aauauuuuaugauccag

SEQ ID NO: 1703068 - RNA, 15 nt, Human
aauauuucagauaau

SEQ ID NO: 1703069 - RNA, 21 nt, Human
uaagaaugaaauacuguuuga

SEQ ID NO: 1703070 - RNA, 15 nt, Human
uaagaaugaaauacu

SEQ ID NO: 1703071 - RNA, 13 nt, Human
uaagaaugaaaua

SEQ ID NO: 1703072 - RNA, 19 nt, Human
aauaucuuuuuuuuaauaa

SEQ ID NO: 1703073 - RNA, 14 nt, Human
uaaauaaauagcua

SEQ ID NO: 1703074 - RNA, 17 nt, Human
uaaauaaauaaauagcu

SEQ ID NO: 1703075 - RNA, 20 nt, Human
aauaauuuuuauauuugaaa

SEQ ID NO: 1703076 - RNA, 19 nt, Human
aauaauuuuuauauuugaa

SEQ ID NO: 1703077 - RNA, 17 nt, Human
aauaauuuuuauauuug

SEQ ID NO: 1703078 - RNA, 16 nt, Human
aauaauuuuuauauuu

SEQ ID NO: 1703079 - RNA, 18 nt, Human
uaaauagcuagacuggug

SEQ ID NO: 1703080 - RNA, 22 nt, Human
uaaaucugugaacuugaaauuu

SEQ ID NO: 1703081 - RNA, 21 nt, Human
uaaaucugugaacuugaaauu

SEQ ID NO: 1703082 - RNA, 19 nt, Human
uaaaucugugaacuugaaa

SEQ ID NO: 1703083 - RNA, 18 nt, Human
uaaaucugugaacuugaa

SEQ ID NO: 1703084 - RNA, 17 nt, Human
uaaaucugugaacuuga

SEQ ID NO: 1703085 - RNA, 16 nt, Human
uaaaucugugaacuug

SEQ ID NO: 1703086 - RNA, 15 nt, Human
uaaaucugugaacuu

SEQ ID NO: 1703087 - RNA, 15 nt, Human
aauaacgauaaaaga

SEQ ID NO: 1703088 - RNA, 21 nt, Human
aauaacaaugaaaguugauaa

SEQ ID NO: 1703089 - RNA, 18 nt, Human
uagcuagacuggugacug

SEQ ID NO: 1703090 - RNA, 15 nt, Human
uagcuagacugguga

SEQ ID NO: 1703091 - RNA, 16 nt, Human
uagcuacuaauuuuaa

SEQ ID NO: 1703092 - RNA, 15 nt, Human
acaacagcuggugcc

SEQ ID NO: 1703093 - RNA, 17 nt, Human
acaaauuuacagagaca

SEQ ID NO: 1703094 - RNA, 22 nt, Human
acaagcucacagaccuuugaac

SEQ ID NO: 1703095 - RNA, 14 nt, Human
uagaucuaguucac

SEQ ID NO: 1703096 - RNA, 20 nt, Human
uagaugcaguucugaagaag

SEQ ID NO: 1703097 - RNA, 21 nt, Human
uagaugcaguucugaagaaga

SEQ ID NO: 1703098 - RNA, 17 nt, Human
uagauaggccaugggca

SEQ ID NO: 1703099 - RNA, 22 nt, Human
uagauaggucagugcaaauacu

SEQ ID NO: 1703100 - RNA, 20 nt, Human
acaaaguauuaagcauauau

SEQ ID NO: 1703101 - RNA, 16 nt, Human
aauuuuguuucuguac

SEQ ID NO: 1703102 - RNA, 22 nt, Human
aauuuuuucucuaggaaauauu

SEQ ID NO: 1703103 - RNA, 22 nt, Human
uacuuugugcugggguuaucug

SEQ ID NO: 1703104 - RNA, 16 nt, Human
uacuuugugcuggggu

SEQ ID NO: 1703105 - RNA, 14 nt, Human
uacuuuuuggcaua

SEQ ID NO: 1703106 - RNA, 20 nt, Human
uacuuuuuggcauaacauaa

SEQ ID NO: 1703107 - RNA, 19 nt, Human
uacuuuuuggcauaacaua

SEQ ID NO: 1703108 - RNA, 18 nt, Human
aauuuacagagacagaaa

SEQ ID NO: 1703109 - RNA, 17 nt, Human
aauuuacagagacagaa

SEQ ID NO: 1703110 - RNA, 15 nt, Human
aauuggagcucgugg

SEQ ID NO: 1703111 - RNA, 19 nt, Human
uacuucuuaggguuaugau

SEQ ID NO: 1703112 - RNA, 13 nt, Human
aauugacccacaa

SEQ ID NO: 1703113 - RNA, 14 nt, Human
uacuaaaaauacaa

SEQ ID NO: 1703114 - RNA, 18 nt, Human
uacuaaaaauacaaaaaa

SEQ ID NO: 1703115 - RNA, 18 nt, Human
aauugaggacacugauau

SEQ ID NO: 1703116 - RNA, 19 nt, Human
uacugagagugaacaaauu

SEQ ID NO: 1703117 - RNA, 17 nt, Human
uacugagagugaacaaa

SEQ ID NO: 1703118 - RNA, 17 nt, Human
acacuccaauuaaggau

SEQ ID NO: 1703119 - RNA, 18 nt, Human
acacuccaauuaaggauu

SEQ ID NO: 1703120 - RNA, 21 nt, Human
acacuccaauuaaggauuuua

SEQ ID NO: 1703121 - RNA, 14 nt, Human
acacuccagugaga

SEQ ID NO: 1703122 - RNA, 14 nt, Human
acacugaagaagca

SEQ ID NO: 1703123 - RNA, 12 nt, Human
acacugaagaag

SEQ ID NO: 1703124 - RNA, 12 nt, Human
uauauuuacaaa

SEQ ID NO: 1703125 - RNA, 19 nt, Human
acagaaagcagaacaguga

SEQ ID NO: 1703126 - RNA, 15 nt, Human
acacuuaaaaauggu

SEQ ID NO: 1703127 - RNA, 13 nt, Human
acacuuaaaaaug

SEQ ID NO: 1703128 - RNA, 21 nt, Human
acagcccuucuuuccacagaa

SEQ ID NO: 1703129 - RNA, 20 nt, Human
acagcccuucuuuccacaga

SEQ ID NO: 1703130 - RNA, 19 nt, Human
uauauuuauuacuguaaga

SEQ ID NO: 1703131 - RNA, 15 nt, Human
uauauuuauuacugu

SEQ ID NO: 1703132 - RNA, 22 nt, Human
uagucuugucucagauuuuauu

SEQ ID NO: 1703133 - RNA, 17 nt, Human
uagucuugucucagauu

SEQ ID NO: 1703134 - RNA, 17 nt, Human
uaguguuggagaagaac

SEQ ID NO: 1703135 - RNA, 16 nt, Human
uaguguuggagaagaa

SEQ ID NO: 1703136 - RNA, 12 nt, Human
uaguguuggaga

SEQ ID NO: 1703137 - RNA, 14 nt, Human
acacacugaagaag

SEQ ID NO: 1703138 - RNA, 17 nt, Human
acacaacuauauuguuu

SEQ ID NO: 1703139 - RNA, 14 nt, Human
acacaacuauauug

SEQ ID NO: 1703140 - RNA, 18 nt, Human
acaaugcuguauuuuaaa

SEQ ID NO: 1703141 - RNA, 17 nt, Human
acaaugcuguauuuuaa

SEQ ID NO: 1703142 - RNA, 14 nt, Human
acaaugcuguauuu

SEQ ID NO: 1703143 - RNA, 13 nt, Human
acacacugaagaa

SEQ ID NO: 1703144 - RNA, 21 nt, Human
acaccccagacgaugucuuca

SEQ ID NO: 1703145 - RNA, 17 nt, Human
acacuaagagagaauga

SEQ ID NO: 1703146 - RNA, 19 nt, Human
acacuaagagagaaugaga

SEQ ID NO: 1703147 - RNA, 18 nt, Human
acacuaagagagaaugag

SEQ ID NO: 1703148 - RNA, 13 nt, Human
ucaauuuuaacaa

SEQ ID NO: 1703149 - RNA, 15 nt, Human
ucaauucuugccaaa

SEQ ID NO: 1703150 - RNA, 15 nt, Human
accaaucaugaauua

SEQ ID NO: 1703151 - RNA, 13 nt, Human
accaaucaugaau

SEQ ID NO: 1703152 - RNA, 14 nt, Human
accagggacugagg

SEQ ID NO: 1703153 - RNA, 18 nt, Human
accacuuguguuuugcaa

SEQ ID NO: 1703154 - RNA, 19 nt, Human
accaugggauaaaugccau

SEQ ID NO: 1703155 - RNA, 23 nt, Human
accauuucuugagguaaaagcau

SEQ ID NO: 1703156 - RNA, 22 nt, Human
ucagaaggcaaaugacuuugga

SEQ ID NO: 1703157 - RNA, 19 nt, Human
ucagaaggcaaaugacuuu

SEQ ID NO: 1703158 - RNA, 18 nt, Human
ucagaaggcaaaugacuu

SEQ ID NO: 1703159 - RNA, 18 nt, Human
accccagacgaugucuuc

SEQ ID NO: 1703160 - RNA, 19 nt, Human
ucaggaaagagaacuucca

SEQ ID NO: 1703161 - RNA, 13 nt, Human
ucaggaaagagaa

SEQ ID NO: 1703162 - RNA, 16 nt, Human
uauuuuuauauuuacu

SEQ ID NO: 1703163 - RNA, 18 nt, Human
ucaaaagaaagaaaauca

SEQ ID NO: 1703164 - RNA, 21 nt, Human
ucaaaauaugccccauucaac

SEQ ID NO: 1703165 - RNA, 21 nt, Human
ucaaaguugccuaaauccauu

SEQ ID NO: 1703166 - RNA, 19 nt, Human
ucaaaguugccuaaaucca

SEQ ID NO: 1703167 - RNA, 18 nt, Human
ucaaaguugccuaaaucc

SEQ ID NO: 1703168 - RNA, 22 nt, Human
ucaaaguugccuaaauccauuu

SEQ ID NO: 1703169 - RNA, 14 nt, Human
ucaaagcugaaaug

SEQ ID NO: 1703170 - RNA, 19 nt, Human
acaugauccugcaauucca

SEQ ID NO: 1703171 - RNA, 16 nt, Human
acaugaaguccaagca

SEQ ID NO: 1703172 - RNA, 20 nt, Human
acauagucuggcuguaccca

SEQ ID NO: 1703173 - RNA, 15 nt, Human
acauagucuggcugu

SEQ ID NO: 1703174 - RNA, 14 nt, Human
acauagucuggcug

SEQ ID NO: 1703175 - RNA, 19 nt, Human
acauauauaacaaugcugu

SEQ ID NO: 1703176 - RNA, 18 nt, Human
acauagaauuaacacaug

SEQ ID NO: 1703177 - RNA, 14 nt, Human
acauagaauuaaca

SEQ ID NO: 1703178 - RNA, 13 nt, Human
acaucaacagaua

SEQ ID NO: 1703179 - RNA, 24 nt, Human
acaguuuugguugcuuuaauauca

SEQ ID NO: 1703180 - RNA, 19 nt, Human
acaguuuugguugcuuuaa

SEQ ID NO: 1703181 - RNA, 18 nt, Human
acaguuuugguugcuuua

SEQ ID NO: 1703182 - RNA, 18 nt, Human
uauuucuauauuuucauu

SEQ ID NO: 1703183 - RNA, 17 nt, Human
uauuucuauauuuucau

SEQ ID NO: 1703184 - RNA, 16 nt, Human
uauuucuauauuuuca

SEQ ID NO: 1703185 - RNA, 21 nt, Human
uaugaaauauuauguuaaaac

SEQ ID NO: 1703186 - RNA, 15 nt, Human
accuacauguauuug

SEQ ID NO: 1703187 - RNA, 14 nt, Human
accuacauguauuu

SEQ ID NO: 1703188 - RNA, 13 nt, Human
accuacauguauu

SEQ ID NO: 1703189 - RNA, 21 nt, Human
accuagggugauauuaaccag

SEQ ID NO: 1703190 - RNA, 16 nt, Human
ucaugaauuaguuuua

SEQ ID NO: 1703191 - RNA, 21 nt, Human
ucaugaauuaguuuuauaugc

SEQ ID NO: 1703192 - RNA, 14 nt, Human
acgagaaaacaaua

SEQ ID NO: 1703193 - RNA, 18 nt, Human
uccauuuaauaauuauau

SEQ ID NO: 1703194 - RNA, 21 nt, Human
uccaugaagauguagaggaga

SEQ ID NO: 1703195 - RNA, 13 nt, Human
uccaugaagaugu

SEQ ID NO: 1703196 - RNA, 21 nt, Human
uccauccugaggcuccacuug

SEQ ID NO: 1703197 - RNA, 20 nt, Human
uccauccugaggcuccacuu

SEQ ID NO: 1703198 - RNA, 22 nt, Human
ucuaccagccucccuauuuuuu

SEQ ID NO: 1703199 - RNA, 13 nt, Human
acuguuauuuaua

SEQ ID NO: 1703200 - RNA, 20 nt, Human
ucuaaagccauuguaguccu

SEQ ID NO: 1703201 - RNA, 15 nt, Human
acuguggugacuuug

SEQ ID NO: 1703202 - RNA, 14 nt, Human
acuguggugacuuu

SEQ ID NO: 1703203 - RNA, 12 nt, Human
acuguggugacu

SEQ ID NO: 1703204 - RNA, 18 nt, Human
acuguggguagacacaca

SEQ ID NO: 1703205 - RNA, 21 nt, Human
acuguggugacuuuggauaau

SEQ ID NO: 1703206 - RNA, 20 nt, Human
acuguggugacuuuggauaa

SEQ ID NO: 1703207 - RNA, 18 nt, Human
acuguggugacuuuggau

SEQ ID NO: 1703208 - RNA, 18 nt, Human
acugggacaggggagaac

SEQ ID NO: 1703209 - RNA, 16 nt, Human
acugcuuguuuccuag

SEQ ID NO: 1703210 - RNA, 13 nt, Human
acugcuuguuucc

SEQ ID NO: 1703211 - RNA, 20 nt, Human
acugccuucucaacuccaaa

SEQ ID NO: 1703212 - RNA, 19 nt, Human
acugccuucucaacuccaa

SEQ ID NO: 1703213 - RNA, 13 nt, Human
acugccuucucaa

SEQ ID NO: 1703214 - RNA, 14 nt, Human
acugcauuauauuu

SEQ ID NO: 1703215 - RNA, 15 nt, Human
acugcauuauauuua

SEQ ID NO: 1703216 - RNA, 19 nt, Human
ucugaagucagaucugccu

SEQ ID NO: 1703217 - RNA, 15 nt, Human
ucugaagucagaucu

SEQ ID NO: 1703218 - RNA, 12 nt, Human
ucugaagaagau

SEQ ID NO: 1703219 - RNA, 14 nt, Human
agaaaugaaagcag

SEQ ID NO: 1703220 - RNA, 14 nt, Human
agaaagaaaaucag

SEQ ID NO: 1703221 - RNA, 23 nt, Human
ucucuggccuucggccuccaucc

SEQ ID NO: 1703222 - RNA, 22 nt, Human
ucucuggccuucggccuccauc

SEQ ID NO: 1703223 - RNA, 21 nt, Human
ucucuggccuucggccuccau

SEQ ID NO: 1703224 - RNA, 12 nt, Human
ucucuggccuuc

SEQ ID NO: 1703225 - RNA, 19 nt, Human
acuugaaauuugaauuuug

SEQ ID NO: 1703226 - RNA, 20 nt, Human
acuugaaauuugaauuuugu

SEQ ID NO: 1703227 - RNA, 20 nt, Human
acuugaacccgggaggcaga

SEQ ID NO: 1703228 - RNA, 19 nt, Human
acuugaacccgggaggcag

SEQ ID NO: 1703229 - RNA, 21 nt, Human
acuugaacccauauuuguaca

SEQ ID NO: 1703230 - RNA, 21 nt, Human
acuugaacccgggaggcagag

SEQ ID NO: 1703231 - RNA, 16 nt, Human
acuugucaauaaaauc

SEQ ID NO: 1703232 - RNA, 15 nt, Human
acuuguuagaucuag

SEQ ID NO: 1703233 - RNA, 14 nt, Human
acuuguuagaucua

SEQ ID NO: 1703234 - RNA, 16 nt, Human
acuuguguuuugcaag

SEQ ID NO: 1703235 - RNA, 23 nt, Human
acuuguuagaucuaguucacucu

SEQ ID NO: 1703236 - RNA, 19 nt, Human
ucugugaacuugaaauuug

SEQ ID NO: 1703237 - RNA, 22 nt, Human
ucugugaacuugaaauuugaau

SEQ ID NO: 1703238 - RNA, 13 nt, Human
ucuguacuuuuug

SEQ ID NO: 1703239 - RNA, 17 nt, Human
ucuguacuuuuuggcau

SEQ ID NO: 1703240 - RNA, 14 nt, Human
ucuguacuuuuugg

SEQ ID NO: 1703241 - RNA, 17 nt, Human
agacacacugaagaagc

SEQ ID NO: 1703242 - RNA, 16 nt, Human
agacacacugaagaag

SEQ ID NO: 1703243 - RNA, 23 nt, Human
ucuuagaugcaguucugaagaag

SEQ ID NO: 1703244 - RNA, 17 nt, Human
agacuggugacugauuc

SEQ ID NO: 1703245 - RNA, 16 nt, Human
agacuggugacugauu

SEQ ID NO: 1703246 - RNA, 14 nt, Human
agacuggugacuga

SEQ ID NO: 1703247 - RNA, 13 nt, Human
agacuggugacug

SEQ ID NO: 1703248 - RNA, 12 nt, Human
agacuggugacu

SEQ ID NO: 1703249 - RNA, 24 nt, Human
agagacagaaagcagaacagugau

SEQ ID NO: 1703250 - RNA, 14 nt, Human
agacauagaauuaa

SEQ ID NO: 1703251 - RNA, 22 nt, Human
agagauuuuuuuguuguuuguu

SEQ ID NO: 1703252 - RNA, 23 nt, Human
agagauuuuuuuguuguuuguuu

SEQ ID NO: 1703253 - RNA, 21 nt, Human
ugaaauuguaauuauaucuga

SEQ ID NO: 1703254 - RNA, 16 nt, Human
ugaaauuugaauuuug

SEQ ID NO: 1703255 - RNA, 15 nt, Human
ugaaauuugaauuuu

SEQ ID NO: 1703256 - RNA, 14 nt, Human
ugaaauuugaauuu

SEQ ID NO: 1703257 - RNA, 17 nt, Human
ugaaauuugaauuuugu

SEQ ID NO: 1703258 - RNA, 18 nt, Human
ugaaauauuauguuaaaa

SEQ ID NO: 1703259 - RNA, 15 nt, Human
ugaaauuguauuaca

SEQ ID NO: 1703260 - RNA, 23 nt, Human
ugaaauaagccagacaucaacag

SEQ ID NO: 1703261 - RNA, 20 nt, Human
ugaaauaagccagacaucaa

SEQ ID NO: 1703262 - RNA, 18 nt, Human
ugaaauaagccagacauc

SEQ ID NO: 1703263 - RNA, 17 nt, Human
ugaaauaagccagacau

SEQ ID NO: 1703264 - RNA, 20 nt, Human
ugaacaaauuuacagagaca

SEQ ID NO: 1703265 - RNA, 19 nt, Human
ugaacaaauuuacagagac

SEQ ID NO: 1703266 - RNA, 15 nt, Human
agagguugcagugag

SEQ ID NO: 1703267 - RNA, 21 nt, Human
ugaauuuauuggcuuuucuga

SEQ ID NO: 1703268 - RNA, 17 nt, Human
ugaauuuauuggcuuuu

SEQ ID NO: 1703269 - RNA, 23 nt, Human
ugaauuuauuggcuuuucugauc

SEQ ID NO: 1703270 - RNA, 22 nt, Human
ugaauuuauuggcuuuucugau

SEQ ID NO: 1703271 - RNA, 17 nt, Human
agaguuuagcuggaaaa

SEQ ID NO: 1703272 - RNA, 16 nt, Human
agaguuuagcuggaaa

SEQ ID NO: 1703273 - RNA, 17 nt, Human
ugacccacaagaaauga

SEQ ID NO: 1703274 - RNA, 15 nt, Human
agaugcuagaacucc

SEQ ID NO: 1703275 - RNA, 14 nt, Human
agaugcuagaacuc

SEQ ID NO: 1703276 - RNA, 19 nt, Human
agaugcaguucugaagaag

SEQ ID NO: 1703277 - RNA, 18 nt, Human
agaugcaguucugaagaa

SEQ ID NO: 1703278 - RNA, 17 nt, Human
agaugcaguucugaaga

SEQ ID NO: 1703279 - RNA, 15 nt, Human
agcauauauuuuuau

SEQ ID NO: 1703280 - RNA, 22 nt, Human
agcauauauuuuuauauuuacu

SEQ ID NO: 1703281 - RNA, 20 nt, Human
agcauauauuuuuauauuua

SEQ ID NO: 1703282 - RNA, 18 nt, Human
agcauauauuuuuauauu

SEQ ID NO: 1703283 - RNA, 19 nt, Human
agcagucaggaaagagaac

SEQ ID NO: 1703284 - RNA, 18 nt, Human
agcagucaggaaagagaa

SEQ ID NO: 1703285 - RNA, 17 nt, Human
agcagucaggaaagaga

SEQ ID NO: 1703286 - RNA, 20 nt, Human
agcauuuuauaaaucgcuuu

SEQ ID NO: 1703287 - RNA, 15 nt, Human
agcauuuuauaaauc

SEQ ID NO: 1703288 - RNA, 14 nt, Human
agcauuuuauaaau

SEQ ID NO: 1703289 - RNA, 13 nt, Human
agcauuuuauaaa

SEQ ID NO: 1703290 - RNA, 22 nt, Human
agcauuuagauguauagguuga

SEQ ID NO: 1703291 - RNA, 19 nt, Human
ugauccagcagauuauuca

SEQ ID NO: 1703292 - RNA, 20 nt, Human
ugauccagcagauuauucac

SEQ ID NO: 1703293 - RNA, 16 nt, Human
ugauuaaguaaugaua

SEQ ID NO: 1703294 - RNA, 15 nt, Human
ugauuaaguaaugau

SEQ ID NO: 1703295 - RNA, 23 nt, Human
ugauuugacauagucuggcugua

SEQ ID NO: 1703296 - RNA, 13 nt, Human
ugauuucauucaa

SEQ ID NO: 1703297 - RNA, 21 nt, Human
ugcaagccagauuuuccugaa

SEQ ID NO: 1703298 - RNA, 15 nt, Human
ugcaagccagauuuu

SEQ ID NO: 1703299 - RNA, 18 nt, Human
agccccgugggguuccuc

SEQ ID NO: 1703300 - RNA, 15 nt, Human
ugcacuccagccuga

SEQ ID NO: 1703301 - RNA, 17 nt, Human
ugcacuccagccugagc

SEQ ID NO: 1703302 - RNA, 22 nt, Human
ugcagaagacaguauggcagcu

SEQ ID NO: 1703303 - RNA, 13 nt, Human
ugccauaauuacu

SEQ ID NO: 1703304 - RNA, 19 nt, Human
ugcauacucauuaggaugg

SEQ ID NO: 1703305 - RNA, 13 nt, Human
ugcauacucauua

SEQ ID NO: 1703306 - RNA, 23 nt, Human
aggacuucuuuaauuuuggaauu

SEQ ID NO: 1703307 - RNA, 22 nt, Human
aggacuucuuuaauuuuggaau

SEQ ID NO: 1703308 - RNA, 21 nt, Human
aggacuucuuuaauuuuggaa

SEQ ID NO: 1703309 - RNA, 16 nt, Human
aggacuucuuuaauuu

SEQ ID NO: 1703310 - RNA, 19 nt, Human
aggagaaacuggaacucuc

SEQ ID NO: 1703311 - RNA, 18 nt, Human
aggagaaacuggaacucu

SEQ ID NO: 1703312 - RNA, 14 nt, Human
aggacuucuuuaau

SEQ ID NO: 1703313 - RNA, 15 nt, Human
aggaauucuguauag

SEQ ID NO: 1703314 - RNA, 14 nt, Human
aggaauucuguaua

SEQ ID NO: 1703315 - RNA, 13 nt, Human
aggaauucuguau

SEQ ID NO: 1703316 - RNA, 20 nt, Human
aggacgcucucuggccuucg

SEQ ID NO: 1703317 - RNA, 19 nt, Human
aggacgcucucuggccuuc

SEQ ID NO: 1703318 - RNA, 17 nt, Human
aggacgcucucuggccu

SEQ ID NO: 1703319 - RNA, 16 nt, Human
aggacgcucucuggcc

SEQ ID NO: 1703320 - RNA, 14 nt, Human
aggacgcucucugg

SEQ ID NO: 1703321 - RNA, 13 nt, Human
aggacgcucucug

SEQ ID NO: 1703322 - RNA, 14 nt, Human
uggaguugaaaauc

SEQ ID NO: 1703323 - RNA, 20 nt, Human
aggcauuuaggccaugggac

SEQ ID NO: 1703324 - RNA, 21 nt, Human
uggagcucgugggacagucac

SEQ ID NO: 1703325 - RNA, 21 nt, Human
uggagcucguggaacaguuac

SEQ ID NO: 1703326 - RNA, 17 nt, Human
uggagcucguggaacag

SEQ ID NO: 1703327 - RNA, 22 nt, Human
ugccaucaauaaaaaauuauga

SEQ ID NO: 1703328 - RNA, 14 nt, Human
ugccaucaauaaaa

SEQ ID NO: 1703329 - RNA, 22 nt, Human
ugcuauuucuauauuuucauuc

SEQ ID NO: 1703330 - RNA, 20 nt, Human
agcuugcccuggugccucac

SEQ ID NO: 1703331 - RNA, 19 nt, Human
ugccuuuucccaacuccag

SEQ ID NO: 1703332 - RNA, 17 nt, Human
ugccuuuucccaacucc

SEQ ID NO: 1703333 - RNA, 15 nt, Human
uguaaauacaauuuu

SEQ ID NO: 1703334 - RNA, 17 nt, Human
agguucuggugugaacu

SEQ ID NO: 1703335 - RNA, 23 nt, Human
uggugugaacuaaacuuucacac

SEQ ID NO: 1703336 - RNA, 22 nt, Human
uggugugaacuaaacuuucaca

SEQ ID NO: 1703337 - RNA, 14 nt, Human
uggugugaacuaaa

SEQ ID NO: 1703338 - RNA, 23 nt, Human
uggugugaccacugcagaagaca

SEQ ID NO: 1703339 - RNA, 14 nt, Human
uggugcccugcuuu

SEQ ID NO: 1703340 - RNA, 20 nt, Human
uggugcccugcuuucagaua

SEQ ID NO: 1703341 - RNA, 19 nt, Human
uggugcccugcuuucagau

SEQ ID NO: 1703342 - RNA, 16 nt, Human
uggugcccugcuuuca

SEQ ID NO: 1703343 - RNA, 21 nt, Human
aguauugaagcauuuuauaaa

SEQ ID NO: 1703344 - RNA, 20 nt, Human
aguauugaagcauuuuauaa

SEQ ID NO: 1703345 - RNA, 18 nt, Human
aguauugaagcauuuuau

SEQ ID NO: 1703346 - RNA, 15 nt, Human
aguauugaagcauuu

SEQ ID NO: 1703347 - RNA, 14 nt, Human
aguauugaagcauu

SEQ ID NO: 1703348 - RNA, 18 nt, Human
aguauuucuaugaaauau

SEQ ID NO: 1703349 - RNA, 16 nt, Human
aguauuucuaugaaau

SEQ ID NO: 1703350 - RNA, 17 nt, Human
aguauuucuaugaaaua

SEQ ID NO: 1703351 - RNA, 17 nt, Human
agucaccucauggaauu

SEQ ID NO: 1703352 - RNA, 15 nt, Human
agucaccucauggaa

SEQ ID NO: 1703353 - RNA, 14 nt, Human
agucaccucaugga

SEQ ID NO: 1703354 - RNA, 18 nt, Human
aguauuagaauaccacag

SEQ ID NO: 1703355 - RNA, 22 nt, Human
uguauuacaaauccaaugaaau

SEQ ID NO: 1703356 - RNA, 13 nt, Human
uguauuacaaauc

SEQ ID NO: 1703357 - RNA, 15 nt, Human
uguaguguuggagaa

SEQ ID NO: 1703358 - RNA, 14 nt, Human
uguaguguuggaga

SEQ ID NO: 1703359 - RNA, 13 nt, Human
agguuuuucuuaa

SEQ ID NO: 1703360 - RNA, 13 nt, Human
aguaaaauccaca

SEQ ID NO: 1703361 - RNA, 17 nt, Human
aguaaugauaacuggaa

SEQ ID NO: 1703362 - RNA, 20 nt, Human
aguaaugauaacuggaaacu

SEQ ID NO: 1703363 - RNA, 18 nt, Human
aguaaugauaacuggaaa

SEQ ID NO: 1703364 - RNA, 16 nt, Human
uguagaggagaaacug

SEQ ID NO: 1703365 - RNA, 18 nt, Human
aggggagcaugggaagug

SEQ ID NO: 1703366 - RNA, 16 nt, Human
aggggaauugaggaca

SEQ ID NO: 1703367 - RNA, 22 nt, Human
agggaggacgcucucuggccuu

SEQ ID NO: 1703368 - RNA, 21 nt, Human
agggaggacgcucucuggccu

SEQ ID NO: 1703369 - RNA, 23 nt, Human
agggaggacgcucucuggccuuc

SEQ ID NO: 1703370 - RNA, 20 nt, Human
uuaagucuguuuuaugacuu

SEQ ID NO: 1703371 - RNA, 18 nt, Human
uuaagucuguuuuaugac

SEQ ID NO: 1703372 - RNA, 17 nt, Human
uuaagucuguuuuauga

SEQ ID NO: 1703373 - RNA, 21 nt, Human
uuaagucuguuuuaugacuuc

SEQ ID NO: 1703374 - RNA, 18 nt, Human
uuaaguaaugauaacugg

SEQ ID NO: 1703375 - RNA, 22 nt, Human
uuaagaagacugcauuauauuu

SEQ ID NO: 1703376 - RNA, 19 nt, Human
auaaaauccauacauuugu

SEQ ID NO: 1703377 - RNA, 18 nt, Human
auaaaauccauacauuug

SEQ ID NO: 1703378 - RNA, 22 nt, Human
auaaaauaauuuuuauauuuga

SEQ ID NO: 1703379 - RNA, 21 nt, Human
auaaaauaauuuuuauauuug

SEQ ID NO: 1703380 - RNA, 16 nt, Human
auaaaauaauuuuuau

SEQ ID NO: 1703381 - RNA, 16 nt, Human
auaaaugguuaaaaga

SEQ ID NO: 1703382 - RNA, 22 nt, Human
auaaaugguuaaaagagguuuu

SEQ ID NO: 1703383 - RNA, 13 nt, Human
uuacaguauaauu

SEQ ID NO: 1703384 - RNA, 17 nt, Human
uuacaguauaauuaaca

SEQ ID NO: 1703385 - RNA, 16 nt, Human
uuacaguauaauuaac

SEQ ID NO: 1703386 - RNA, 20 nt, Human
uuacaguauaauuaacaugu

SEQ ID NO: 1703387 - RNA, 19 nt, Human
uuacaguauaauuaacaug

SEQ ID NO: 1703388 - RNA, 18 nt, Human
uuacaguauaauuaacau

SEQ ID NO: 1703389 - RNA, 18 nt, Human
auaaauagcuagacuggu

SEQ ID NO: 1703390 - RNA, 16 nt, Human
auaaauagcuagacug

SEQ ID NO: 1703391 - RNA, 22 nt, Human
auaaaucugugaacuugaaauu

SEQ ID NO: 1703392 - RNA, 21 nt, Human
auaaaucugugaacuugaaau

SEQ ID NO: 1703393 - RNA, 20 nt, Human
auaaaucugugaacuugaaa

SEQ ID NO: 1703394 - RNA, 12 nt, Human
uuaccugggaaa

SEQ ID NO: 1703395 - RNA, 15 nt, Human
uuacuguaagaaaau

SEQ ID NO: 1703396 - RNA, 14 nt, Human
uguuugagaaauua

SEQ ID NO: 1703397 - RNA, 22 nt, Human
uguuugagguuuuuaagccuua

SEQ ID NO: 1703398 - RNA, 14 nt, Human
uguuuauuacagua

SEQ ID NO: 1703399 - RNA, 18 nt, Human
uguuuauuacaguauaau

SEQ ID NO: 1703400 - RNA, 22 nt, Human
uguuuagucuugucucagauuu

SEQ ID NO: 1703401 - RNA, 20 nt, Human
uguuuagucuugucucagau

SEQ ID NO: 1703402 - RNA, 23 nt, Human
uguuuagucuugucucagauuuu

SEQ ID NO: 1703403 - RNA, 18 nt, Human
uguuuuaugacuucauua

SEQ ID NO: 1703404 - RNA, 19 nt, Human
uguuuggaccaaaaaccag

SEQ ID NO: 1703405 - RNA, 16 nt, Human
aguucugcagauaaac

SEQ ID NO: 1703406 - RNA, 21 nt, Human
aguucugcagauaaacaguag

SEQ ID NO: 1703407 - RNA, 14 nt, Human
uguuuugcaagcca

SEQ ID NO: 1703408 - RNA, 23 nt, Human
aguugccuaaauccauuuggaaa

SEQ ID NO: 1703409 - RNA, 22 nt, Human
aguugccuaaauccauuuggaa

SEQ ID NO: 1703410 - RNA, 22 nt, Human
aguugcauagguuuaauaauuu

SEQ ID NO: 1703411 - RNA, 19 nt, Human
aguugccuaaauccauuug

SEQ ID NO: 1703412 - RNA, 16 nt, Human
aguuggguguauugug

SEQ ID NO: 1703413 - RNA, 20 nt, Human
aguuggguguauugugcgcu

SEQ ID NO: 1703414 - RNA, 17 nt, Human
aguuggguguauugugc

SEQ ID NO: 1703415 - RNA, 20 nt, Human
aguuuaauauuaaagccaug

SEQ ID NO: 1703416 - RNA, 19 nt, Human
aguuuaauauuaaagccau

SEQ ID NO: 1703417 - RNA, 18 nt, Human
aguuuaauauuaaagcca

SEQ ID NO: 1703418 - RNA, 16 nt, Human
aguuuaauauuaaagc

SEQ ID NO: 1703419 - RNA, 15 nt, Human
aguuuaauauuaaag

SEQ ID NO: 1703420 - RNA, 20 nt, Human
uuaaaggaagguucuggugu

SEQ ID NO: 1703421 - RNA, 22 nt, Human
uuaaaggaagguucugguguga

SEQ ID NO: 1703422 - RNA, 16 nt, Human
uuaaauaauaaagauc

SEQ ID NO: 1703423 - RNA, 14 nt, Human
uuaacaacagcugg

SEQ ID NO: 1703424 - RNA, 20 nt, Human
agugaguuggguguauugug

SEQ ID NO: 1703425 - RNA, 19 nt, Human
agugaguuggguguauugu

SEQ ID NO: 1703426 - RNA, 20 nt, Human
uguggucacaggaaguagag

SEQ ID NO: 1703427 - RNA, 13 nt, Human
uguguaaguagau

SEQ ID NO: 1703428 - RNA, 20 nt, Human
ugugugaaagguacuucaaa

SEQ ID NO: 1703429 - RNA, 13 nt, Human
uguuauauaaaug

SEQ ID NO: 1703430 - RNA, 14 nt, Human
uguuauauaaaugg

SEQ ID NO: 1703431 - RNA, 15 nt, Human
uguuauaaucuuuca

SEQ ID NO: 1703432 - RNA, 12 nt, Human
ugugaacuugaa

SEQ ID NO: 1703433 - RNA, 16 nt, Human
ugugaacuugaaauuu

SEQ ID NO: 1703434 - RNA, 15 nt, Human
ugugaacuugaaauu

SEQ ID NO: 1703435 - RNA, 14 nt, Human
ugugaacuugaaau

SEQ ID NO: 1703436 - RNA, 24 nt, Human
agugaaacugcuuguuuccuagca

SEQ ID NO: 1703437 - RNA, 21 nt, Human
agugaaacugcuuguuuccua

SEQ ID NO: 1703438 - RNA, 13 nt, Human
agugaaacugcuu

SEQ ID NO: 1703439 - RNA, 22 nt, Human
ugugagaugcuagaacucccuu

SEQ ID NO: 1703440 - RNA, 19 nt, Human
ugugagaugcuagaacucc

SEQ ID NO: 1703441 - RNA, 15 nt, Human
ugugagaugcuagaa

SEQ ID NO: 1703442 - RNA, 18 nt, Human
ugugcugggguuaucuga

SEQ ID NO: 1703443 - RNA, 20 nt, Human
agugaacaaauuuacagaga

SEQ ID NO: 1703444 - RNA, 16 nt, Human
agugaacaaauuuaca

SEQ ID NO: 1703445 - RNA, 15 nt, Human
agugaaagaaaauaa

SEQ ID NO: 1703446 - RNA, 23 nt, Human
auauuaaagccauguuuauuaca

SEQ ID NO: 1703447 - RNA, 18 nt, Human
auauuaaagccauguuua

SEQ ID NO: 1703448 - RNA, 15 nt, Human
auauuaaagccaugu

SEQ ID NO: 1703449 - RNA, 14 nt, Human
auauuaaagccaug

SEQ ID NO: 1703450 - RNA, 13 nt, Human
auauuugaaauau

SEQ ID NO: 1703451 - RNA, 23 nt, Human
auauuugaaauauugacuuuuua

SEQ ID NO: 1703452 - RNA, 19 nt, Human
auauuugaaauauugacuu

SEQ ID NO: 1703453 - RNA, 14 nt, Human
auauuugaaauauu

SEQ ID NO: 1703454 - RNA, 13 nt, Human
auauuuucauucu

SEQ ID NO: 1703455 - RNA, 13 nt, Human
auauuuuaugauc

SEQ ID NO: 1703456 - RNA, 12 nt, Human
auauuuuaugau

SEQ ID NO: 1703457 - RNA, 22 nt, Human
auauuuuaugauccagcagauu

SEQ ID NO: 1703458 - RNA, 17 nt, Human
auauuuuaugauccagc

SEQ ID NO: 1703459 - RNA, 22 nt, Human
aucaguauugaagcauuuuaua

SEQ ID NO: 1703460 - RNA, 15 nt, Human
aucaguauugaagca

SEQ ID NO: 1703461 - RNA, 17 nt, Human
aucaucaguauugaagc

SEQ ID NO: 1703462 - RNA, 19 nt, Human
aucaucaguauugaagcau

SEQ ID NO: 1703463 - RNA, 15 nt, Human
aucaucaguauugaa

SEQ ID NO: 1703464 - RNA, 18 nt, Human
uucucaacuccaaacuga

SEQ ID NO: 1703465 - RNA, 14 nt, Human
uucucaacuccaaa

SEQ ID NO: 1703466 - RNA, 12 nt, Human
uucuggugugaa

SEQ ID NO: 1703467 - RNA, 13 nt, Human
uucugaagaagau

SEQ ID NO: 1703468 - RNA, 12 nt, Human
uucugaagaaga

SEQ ID NO: 1703469 - RNA, 14 nt, Human
uucugaagaagaug

SEQ ID NO: 1703470 - RNA, 17 nt, Human
uuauuuauaaucacuuu

SEQ ID NO: 1703471 - RNA, 16 nt, Human
auagcuagacugguga

SEQ ID NO: 1703472 - RNA, 15 nt, Human
auagcuagacuggug

SEQ ID NO: 1703473 - RNA, 14 nt, Human
auagcuagacuggu

SEQ ID NO: 1703474 - RNA, 18 nt, Human
auagcuacuaauuuuaaa

SEQ ID NO: 1703475 - RNA, 23 nt, Human
auagcuagacuggugacugauuc

SEQ ID NO: 1703476 - RNA, 19 nt, Human
auagcuagacuggugacug

SEQ ID NO: 1703477 - RNA, 18 nt, Human
auagcuagacuggugacu

SEQ ID NO: 1703478 - RNA, 14 nt, Human
auagcuacuaauuu

SEQ ID NO: 1703479 - RNA, 17 nt, Human
auagcuacuaauuuuaa

SEQ ID NO: 1703480 - RNA, 15 nt, Human
uucaaacauauauaa

SEQ ID NO: 1703481 - RNA, 21 nt, Human
auaggaauugacccacaagaa

SEQ ID NO: 1703482 - RNA, 22 nt, Human
auaggaauugacccacaagaaa

SEQ ID NO: 1703483 - RNA, 17 nt, Human
auauaaaugguuaaaag

SEQ ID NO: 1703484 - RNA, 18 nt, Human
auagucaaauugugugaa

SEQ ID NO: 1703485 - RNA, 17 nt, Human
auagucaaauuguguga

SEQ ID NO: 1703486 - RNA, 19 nt, Human
auauaagcuuguauuccuu

SEQ ID NO: 1703487 - RNA, 17 nt, Human
auauaacaaugcuguau

SEQ ID NO: 1703488 - RNA, 15 nt, Human
auauaacaaugcugu

SEQ ID NO: 1703489 - RNA, 12 nt, Human
auauaacaaugc

SEQ ID NO: 1703490 - RNA, 19 nt, Human
auauauaacaaugcuguau

SEQ ID NO: 1703491 - RNA, 18 nt, Human
auauauaacaaugcugua

SEQ ID NO: 1703492 - RNA, 17 nt, Human
auauauaacaaugcugu

SEQ ID NO: 1703493 - RNA, 21 nt, Human
uucagcaaaaauauuuuauga

SEQ ID NO: 1703494 - RNA, 18 nt, Human
auaucugaggaauucugu

SEQ ID NO: 1703495 - RNA, 17 nt, Human
auaucugaggaauucug

SEQ ID NO: 1703496 - RNA, 16 nt, Human
auaucugaggaauucu

SEQ ID NO: 1703497 - RNA, 15 nt, Human
auaucugaggaauuc

SEQ ID NO: 1703498 - RNA, 23 nt, Human
auaucugaggaauucuguauaga

SEQ ID NO: 1703499 - RNA, 22 nt, Human
auaucugaggaauucuguauag

SEQ ID NO: 1703500 - RNA, 21 nt, Human
auaucugaggaauucuguaua

SEQ ID NO: 1703501 - RNA, 20 nt, Human
auaucugaggaauucuguau

SEQ ID NO: 1703502 - RNA, 19 nt, Human
auaucugaggaauucugua

SEQ ID NO: 1703503 - RNA, 19 nt, Human
uucauaccuacauguauuu

SEQ ID NO: 1703504 - RNA, 16 nt, Human
uucauaccuacaugua

SEQ ID NO: 1703505 - RNA, 22 nt, Human
augaaauacuguuugagguuuu

SEQ ID NO: 1703506 - RNA, 15 nt, Human
uuggagaagaacuga

SEQ ID NO: 1703507 - RNA, 22 nt, Human
uuggagaagaacugaaaucaua

SEQ ID NO: 1703508 - RNA, 17 nt, Human
uuggagaagaacugaaa

SEQ ID NO: 1703509 - RNA, 16 nt, Human
aucuuauaauuuaaaa

SEQ ID NO: 1703510 - RNA, 15 nt, Human
aucuuauaauuuaaa

SEQ ID NO: 1703511 - RNA, 23 nt, Human
aucugaagucagaucugccuaag

SEQ ID NO: 1703512 - RNA, 18 nt, Human
aucugaagucagaucugc

SEQ ID NO: 1703513 - RNA, 17 nt, Human
aucugaagucagaucug

SEQ ID NO: 1703514 - RNA, 16 nt, Human
aucugaagucagaucu

SEQ ID NO: 1703515 - RNA, 12 nt, Human
uugacuuuuuau

SEQ ID NO: 1703516 - RNA, 13 nt, Human
uugacaugggaca

SEQ ID NO: 1703517 - RNA, 23 nt, Human
uuuagucuugucucagauuuuau

SEQ ID NO: 1703518 - RNA, 17 nt, Human
uuuagucuugucucaga

SEQ ID NO: 1703519 - RNA, 21 nt, Human
uuuauaugcuucuguuuuaua

SEQ ID NO: 1703520 - RNA, 15 nt, Human
uuuagucuugucuca

SEQ ID NO: 1703521 - RNA, 14 nt, Human
augccaucaauaaa

SEQ ID NO: 1703522 - RNA, 18 nt, Human
augcuacaggauuugaaa

SEQ ID NO: 1703523 - RNA, 22 nt, Human
augccuuuucccaacuccagaa

SEQ ID NO: 1703524 - RNA, 20 nt, Human
augccuuuucccaacuccag

SEQ ID NO: 1703525 - RNA, 14 nt, Human
augccuuuucccaa

SEQ ID NO: 1703526 - RNA, 19 nt, Human
uuucaaacauauauaacaa

SEQ ID NO: 1703527 - RNA, 21 nt, Human
augcuucuguuuuauaauuuu

SEQ ID NO: 1703528 - RNA, 22 nt, Human
augcuguauuuuaaaagaauga

SEQ ID NO: 1703529 - RNA, 19 nt, Human
augcuguauuuuaaaagaa

SEQ ID NO: 1703530 - RNA, 23 nt, Human
augcuguauuuuaaaagaaugau

SEQ ID NO: 1703531 - RNA, 15 nt, Human
augagguacugagag

SEQ ID NO: 1703532 - RNA, 18 nt, Human
augagguacugagaguga

SEQ ID NO: 1703533 - RNA, 17 nt, Human
augagguacugagagug

SEQ ID NO: 1703534 - RNA, 20 nt, Human
uugucaauaaaauccauaca

SEQ ID NO: 1703535 - RNA, 13 nt, Human
augauuucauuca

SEQ ID NO: 1703536 - RNA, 18 nt, Human
uuuaaaaaaauuccaagu

SEQ ID NO: 1703537 - RNA, 21 nt, Human
uuuaaauauaugcuaagucuu

SEQ ID NO: 1703538 - RNA, 13 nt, Human
auuugaauuuugu

SEQ ID NO: 1703539 - RNA, 23 nt, Human
auuuauuggcuuuucugauccag

SEQ ID NO: 1703540 - RNA, 20 nt, Human
auuuauuggcuuuucugauc

SEQ ID NO: 1703541 - RNA, 21 nt, Human
auuuauuuuaauaauguuuca

SEQ ID NO: 1703542 - RNA, 18 nt, Human
auuuauuggcuuuucuga

SEQ ID NO: 1703543 - RNA, 14 nt, Human
auuuauuggcuuuu

SEQ ID NO: 1703544 - RNA, 20 nt, Human
auuuauuacuguaagaaaau

SEQ ID NO: 1703545 - RNA, 19 nt, Human
auuuauuacuguaagaaaa

SEQ ID NO: 1703546 - RNA, 15 nt, Human
auuguacuuugugcu

SEQ ID NO: 1703547 - RNA, 16 nt, Human
auuguaguccuguaau

SEQ ID NO: 1703548 - RNA, 17 nt, Human
auuuaaaaaaaaaccug

SEQ ID NO: 1703549 - RNA, 20 nt, Human
auuuacuaaaauggacugug

SEQ ID NO: 1703550 - RNA, 19 nt, Human
auuuacuaaaauggacugu

SEQ ID NO: 1703551 - RNA, 16 nt, Human
auuuacuaaaauggac

SEQ ID NO: 1703552 - RNA, 22 nt, Human
auuuaccacuuguguuuugcaa

SEQ ID NO: 1703553 - RNA, 15 nt, Human
auuuaccacuugugu

SEQ ID NO: 1703554 - RNA, 22 nt, Human
auuggggauucuuaaaguugaa

SEQ ID NO: 1703555 - RNA, 21 nt, Human
auuggggauucuuaaaguuga

SEQ ID NO: 1703556 - RNA, 20 nt, Human
auuggggauucuuaaaguug

SEQ ID NO: 1703557 - RNA, 16 nt, Human
auuggggauucuuaaa

SEQ ID NO: 1703558 - RNA, 15 nt, Human
auuggggauucuuaa

SEQ ID NO: 1703559 - RNA, 14 nt, Human
auuggggauucuua

SEQ ID NO: 1703560 - RNA, 17 nt, Human
auuggagcucgugggac

SEQ ID NO: 1703561 - RNA, 16 nt, Human
auuggagcucguggaa

SEQ ID NO: 1703562 - RNA, 24 nt, Human
uuuuuggcauaacauaaaucugug

SEQ ID NO: 1703563 - RNA, 23 nt, Human
uuuuuggcauaacauaaaucugu

SEQ ID NO: 1703564 - RNA, 17 nt, Human
auuaaguaucugacauc

SEQ ID NO: 1703565 - RNA, 20 nt, Human
auuaaggauuuuaugcuuua

SEQ ID NO: 1703566 - RNA, 17 nt, Human
auuaaggauuuuaugcu

SEQ ID NO: 1703567 - RNA, 15 nt, Human
auuaaggauuuuaug

SEQ ID NO: 1703568 - RNA, 15 nt, Human
uuuuugaagcuguau

SEQ ID NO: 1703569 - RNA, 17 nt, Human
uuuuuauauuugaaaua

SEQ ID NO: 1703570 - RNA, 15 nt, Human
uuuuggaauuuuccu

SEQ ID NO: 1703571 - RNA, 14 nt, Human
uuuugugaagcaaa

SEQ ID NO: 1703572 - RNA, 20 nt, Human
uuuuuauauuuacuaaaaug

SEQ ID NO: 1703573 - RNA, 16 nt, Human
auuacuguaagaaaau

SEQ ID NO: 1703574 - RNA, 15 nt, Human
auuacuguaagaaaa

SEQ ID NO: 1703575 - RNA, 17 nt, Human
auucacugauuugacau

SEQ ID NO: 1703576 - RNA, 12 nt, Human
auucacugauuu

SEQ ID NO: 1703577 - RNA, 17 nt, Human
auuccaagugauugaaa

SEQ ID NO: 1703578 - RNA, 19 nt, Human
auuauaugcuauuucuaua

SEQ ID NO: 1703579 - RNA, 17 nt, Human
auuauaugcuauuucua

SEQ ID NO: 1703580 - RNA, 18 nt, Human
auuauaugcuauuucuau

SEQ ID NO: 1703581 - RNA, 20 nt, Human
auuauauggcuugaguuuaa

SEQ ID NO: 1703582 - RNA, 19 nt, Human
auuauucacugauuugaca

SEQ ID NO: 1703583 - RNA, 24 nt, Human
auuauucaaaguugccuaaaucca

SEQ ID NO: 1703584 - RNA, 18 nt, Human
auuauucaaaguugccua

SEQ ID NO: 1703585 - RNA, 22 nt, Human
auuauucaaaguugccuaaauc

SEQ ID NO: 1703586 - RNA, 19 nt, Human
auuauucaaaguugccuaa

SEQ ID NO: 1703587 - RNA, 19 nt, Human
auuauaucugaggaauucu

SEQ ID NO: 1703588 - RNA, 18 nt, Human
auuauaucugaggaauuc

SEQ ID NO: 1703589 - RNA, 16 nt, Human
auuauaugcuauuucu

SEQ ID NO: 1703590 - RNA, 22 nt, Human
auuauaucugaggaauucugua

SEQ ID NO: 1703591 - RNA, 21 nt, Human
auuauaucugaggaauucugu

SEQ ID NO: 1703592 - RNA, 20 nt, Human
auuauaucugaggaauucug

SEQ ID NO: 1703593 - RNA, 14 nt, Human
uuugaauuuugugu

SEQ ID NO: 1703594 - RNA, 12 nt, Human
uuugaauuuugu

SEQ ID NO: 1703595 - RNA, 16 nt, Human
uuugagaaauuaagua

SEQ ID NO: 1703596 - RNA, 20 nt, Human
uuugcuggagcucugcccau

SEQ ID NO: 1703597 - RNA, 19 nt, Human
uuugcuaagcauuccaacu

SEQ ID NO: 1703598 - RNA, 19 nt, Human
auguauauuuuauaucaau

SEQ ID NO: 1703599 - RNA, 23 nt, Human
augucgucaaagcugaaauggac

SEQ ID NO: 1703600 - RNA, 17 nt, Human
uuuguaguguuggagaa

SEQ ID NO: 1703601 - RNA, 12 nt, Human
auguuuauuaca

SEQ ID NO: 1703602 - RNA, 12 nt, Human
uuuucuguuaua

SEQ ID NO: 1703603 - RNA, 23 nt, Human
uuuucuuaaauaauaaagaucau

SEQ ID NO: 1703604 - RNA, 14 nt, Human
uuuucuuaaauaau

SEQ ID NO: 1703605 - RNA, 19 nt, Human
uuuucugauccaguuuugu

SEQ ID NO: 1703606 - RNA, 23 nt, Human
auguuuauuacaguauaauuaac

SEQ ID NO: 1703607 - RNA, 22 nt, Human
auguuuauuacaguauaauuaa

SEQ ID NO: 1703608 - RNA, 19 nt, Human
auguuuauuacaguauaau

SEQ ID NO: 1703609 - RNA, 18 nt, Human
auguuuauuacaguauaa

SEQ ID NO: 1703610 - RNA, 16 nt, Human
auguuuauuacaguau

SEQ ID NO: 1703611 - RNA, 15 nt, Human
auguuuauuacagua

SEQ ID NO: 1703612 - RNA, 20 nt, Human
uuuucaggcuagauguaugu

SEQ ID NO: 1703613 - RNA, 16 nt, Human
uuuucuauaauuuaaa

SEQ ID NO: 1703614 - RNA, 22 nt, Human
uuuuauggcacuaguauuucua

SEQ ID NO: 1703615 - RNA, 21 nt, Human
augugcuaguaauuggaaagg

SEQ ID NO: 1703616 - RNA, 20 nt, Human
augugcuaguaauuggaaag

SEQ ID NO: 1703617 - RNA, 22 nt, Human
cacuccaauuaaggauuuuaug

SEQ ID NO: 1703618 - RNA, 21 nt, Human
cacuccaauuaaggauuuuau

SEQ ID NO: 1703619 - RNA, 21 nt, Human
cacuccagugagacagcucug

SEQ ID NO: 1703620 - RNA, 23 nt, Human
cacugaagaagcaccaaucauga

SEQ ID NO: 1703621 - RNA, 12 nt, Human
caacuccagaaa

SEQ ID NO: 1703622 - RNA, 19 nt, Human
caacuaucucauuuccaag

SEQ ID NO: 1703623 - RNA, 19 nt, Human
caacuauauuguuugcuaa

SEQ ID NO: 1703624 - RNA, 14 nt, Human
caagcaaguauuag

SEQ ID NO: 1703625 - RNA, 17 nt, Human
caaucagccuaguugau

SEQ ID NO: 1703626 - RNA, 13 nt, Human
auuuaauaauuau

SEQ ID NO: 1703627 - RNA, 18 nt, Human
auuuaauaauuauaugcu

SEQ ID NO: 1703628 - RNA, 15 nt, Human
auuuaauaauuauau

SEQ ID NO: 1703629 - RNA, 17 nt, Human
auuuuuuuucuguuaua

SEQ ID NO: 1703630 - RNA, 15 nt, Human
auuuuuuuucuguua

SEQ ID NO: 1703631 - RNA, 19 nt, Human
auuuuuuuucuguuauaua

SEQ ID NO: 1703632 - RNA, 18 nt, Human
auuuuuuuucuguuauau

SEQ ID NO: 1703633 - RNA, 20 nt, Human
auuuuuuuucuguuauauaa

SEQ ID NO: 1703634 - RNA, 21 nt, Human
caaaagguauuuuaaucacca

SEQ ID NO: 1703635 - RNA, 19 nt, Human
auuuuuauauuugaaauau

SEQ ID NO: 1703636 - RNA, 18 nt, Human
auuuuuuuguuguuuguu

SEQ ID NO: 1703637 - RNA, 17 nt, Human
auuuucuauaauuuaaa

SEQ ID NO: 1703638 - RNA, 18 nt, Human
auuuucuauaauuuaaau

SEQ ID NO: 1703639 - RNA, 19 nt, Human
auuuucuauaauuuaaaua

SEQ ID NO: 1703640 - RNA, 14 nt, Human
auuauguaaauccc

SEQ ID NO: 1703641 - RNA, 13 nt, Human
auuauguaaaucc

SEQ ID NO: 1703642 - RNA, 23 nt, Human
auuauguaaaucccauuauucaa

SEQ ID NO: 1703643 - RNA, 22 nt, Human
auuauguaaaucccauuauuca

SEQ ID NO: 1703644 - RNA, 17 nt, Human
auuauguaaaucccauu

SEQ ID NO: 1703645 - RNA, 15 nt, Human
auuauguaaauccca

SEQ ID NO: 1703646 - RNA, 22 nt, Human
auugaggacacugauauggguc

SEQ ID NO: 1703647 - RNA, 16 nt, Human
cauaggugaucucauu

SEQ ID NO: 1703648 - RNA, 16 nt, Human
cauagguuuaauaauu

SEQ ID NO: 1703649 - RNA, 19 nt, Human
cauagcagcuuauucacaa

SEQ ID NO: 1703650 - RNA, 20 nt, Human
cauagcagcuuauucacaag

SEQ ID NO: 1703651 - RNA, 19 nt, Human
cauccugaggcuccacuug

SEQ ID NO: 1703652 - RNA, 18 nt, Human
cauccugaggcuccacuu

SEQ ID NO: 1703653 - RNA, 22 nt, Human
cagugauuaccagggacugagg

SEQ ID NO: 1703654 - RNA, 17 nt, Human
caguuauuauauuuaca

SEQ ID NO: 1703655 - RNA, 21 nt, Human
caguuauuauauuuacaaaug

SEQ ID NO: 1703656 - RNA, 22 nt, Human
caguuauuauauuuacaaaugg

SEQ ID NO: 1703657 - RNA, 17 nt, Human
cauugguguuguacuca

SEQ ID NO: 1703658 - RNA, 15 nt, Human
cauugguucuuguau

SEQ ID NO: 1703659 - RNA, 14 nt, Human
cauugguucuugua

SEQ ID NO: 1703660 - RNA, 16 nt, Human
cauuuguauaaaauaa

SEQ ID NO: 1703661 - RNA, 14 nt, Human
cauuuguauaaaau

SEQ ID NO: 1703662 - RNA, 17 nt, Human
cauuuguauaaaauaau

SEQ ID NO: 1703663 - RNA, 14 nt, Human
ccaaaaggcagaag

SEQ ID NO: 1703664 - RNA, 21 nt, Human
ccaacuccagaaagugacaag

SEQ ID NO: 1703665 - RNA, 14 nt, Human
cauuauucaaaguu

SEQ ID NO: 1703666 - RNA, 16 nt, Human
cauuauucaaaguugc

SEQ ID NO: 1703667 - RNA, 15 nt, Human
cauuauucaaaguug

SEQ ID NO: 1703668 - RNA, 19 nt, Human
cauuauauuuauuacugua

SEQ ID NO: 1703669 - RNA, 14 nt, Human
cagauacuggauug

SEQ ID NO: 1703670 - RNA, 18 nt, Human
cagauacuggauuguacu

SEQ ID NO: 1703671 - RNA, 20 nt, Human
caggaaagagaacuuccaga

SEQ ID NO: 1703672 - RNA, 16 nt, Human
caggaaagagaacuuc

SEQ ID NO: 1703673 - RNA, 20 nt, Human
cagcuuauugucuagugaaa

SEQ ID NO: 1703674 - RNA, 14 nt, Human
cagcuuauugucua

SEQ ID NO: 1703675 - RNA, 20 nt, Human
cagcuguaugauucccagcc

SEQ ID NO: 1703676 - RNA, 20 nt, Human
ccagacgaugucuucauacc

SEQ ID NO: 1703677 - RNA, 13 nt, Human
ccagacgaugucu

SEQ ID NO: 1703678 - RNA, 19 nt, Human
ccacuuggucugugagaug

SEQ ID NO: 1703679 - RNA, 17 nt, Human
ccacuuggucugugaga

SEQ ID NO: 1703680 - RNA, 16 nt, Human
ccacuuggucugugag

SEQ ID NO: 1703681 - RNA, 15 nt, Human
ccacuuggucuguga

SEQ ID NO: 1703682 - RNA, 22 nt, Human
ccacuuggucugugagaugcua

SEQ ID NO: 1703683 - RNA, 20 nt, Human
ccacuuggucugugagaugc

SEQ ID NO: 1703684 - RNA, 12 nt, Human
ccacuuggucug

SEQ ID NO: 1703685 - RNA, 14 nt, Human
ccaguauuguacaa

SEQ ID NO: 1703686 - RNA, 15 nt, Human
ccaggggccaugaau

SEQ ID NO: 1703687 - RNA, 19 nt, Human
ccaugggauaaaugccauc

SEQ ID NO: 1703688 - RNA, 18 nt, Human
ccaugggcacugugggua

SEQ ID NO: 1703689 - RNA, 22 nt, Human
ccauuguggucacaggaaguag

SEQ ID NO: 1703690 - RNA, 15 nt, Human
ccccauuguggucac

SEQ ID NO: 1703691 - RNA, 12 nt, Human
ccuaaggacuuc

SEQ ID NO: 1703692 - RNA, 11 nt, Human
ccuaaggacuu

SEQ ID NO: 1703693 - RNA, 23 nt, Human
ccuaaggacuucuuuaauuuugg

SEQ ID NO: 1703694 - RNA, 18 nt, Human
ccuaaggacuucuuuaau

SEQ ID NO: 1703695 - RNA, 17 nt, Human
ccuaaggacuucuuuaa

SEQ ID NO: 1703696 - RNA, 16 nt, Human
ccuaaggacuucuuua

SEQ ID NO: 1703697 - RNA, 20 nt, Human
ccuaacgaaguauccuucag

SEQ ID NO: 1703698 - RNA, 19 nt, Human
cgcugauaagcguucaugg

SEQ ID NO: 1703699 - RNA, 12 nt, Human
ccuuuucccaac

SEQ ID NO: 1703700 - RNA, 20 nt, Human
cuaacgaaguauccuucagc

SEQ ID NO: 1703701 - RNA, 17 nt, Human
ccuucucuucacaguca

SEQ ID NO: 1703702 - RNA, 19 nt, Human
cucagaaggcaaaugacuu

SEQ ID NO: 1703703 - RNA, 16 nt, Human
cucaguccaugaagau

SEQ ID NO: 1703704 - RNA, 18 nt, Human
cuauguucuaagaaguga

SEQ ID NO: 1703705 - RNA, 18 nt, Human
cuaucucauuuccaagca

SEQ ID NO: 1703706 - RNA, 13 nt, Human
cucucuggccuuc

SEQ ID NO: 1703707 - RNA, 16 nt, Human
cucucuggccuucggc

SEQ ID NO: 1703708 - RNA, 14 nt, Human
cucucuggccuucg

SEQ ID NO: 1703709 - RNA, 19 nt, Human
cucuauguucuaagaagug

SEQ ID NO: 1703710 - RNA, 15 nt, Human
cucuccccaugaugu

SEQ ID NO: 1703711 - RNA, 16 nt, Human
cucuccccaugauguu

SEQ ID NO: 1703712 - RNA, 23 nt, Human
gcugaacacuccaauuaaggauu

SEQ ID NO: 1703713 - RNA, 21 nt, Human
gcugaacacuccaauuaagga

SEQ ID NO: 1703714 - RNA, 20 nt, Human
gcugaacacuccaauuaagg

SEQ ID NO: 1703715 - RNA, 16 nt, Human
gcuaguaucaaaagaa

SEQ ID NO: 1703716 - RNA, 21 nt, Human
gcuaguaauuggaaaggcagc

SEQ ID NO: 1703717 - RNA, 17 nt, Human
gcuggagcucugcccau

SEQ ID NO: 1703718 - RNA, 14 nt, Human
gcuggagcucugcc

SEQ ID NO: 1703719 - RNA, 22 nt, Human
gccagacaucaacagauaaaua

SEQ ID NO: 1703720 - RNA, 13 nt, Human
ggcaaaugacuuu

SEQ ID NO: 1703721 - RNA, 23 nt, Human
ggaugguucccuugaugaagaag

SEQ ID NO: 1703722 - RNA, 22 nt, Human
ggaugguucccuugaugaagaa

SEQ ID NO: 1703723 - RNA, 19 nt, Human
ggaggcugagaugggagaa

SEQ ID NO: 1703724 - RNA, 15 nt, Human
ggaggcugagauggg

SEQ ID NO: 1703725 - RNA, 23 nt, Human
aaaauuggggauucuuaaaguug

SEQ ID NO: 1703726 - RNA, 21 nt, Human
aaaauuggggauucuuaaagu

SEQ ID NO: 1703727 - RNA, 22 nt, Human
aaaauggacuguggugacuuug

SEQ ID NO: 1703728 - RNA, 17 nt, Human
aaacaaggaugaauuaa

SEQ ID NO: 1703729 - RNA, 19 nt, Human
aaaauuuuuucucuaggaa

SEQ ID NO: 1703730 - RNA, 21 nt, Human
aaacauauauaacaaugcugu

SEQ ID NO: 1703731 - RNA, 19 nt, Human
aaacauauauaacaaugcu

SEQ ID NO: 1703732 - RNA, 16 nt, Human
aaacauauauaacaau

SEQ ID NO: 1703733 - RNA, 13 nt, Human
aaacauauauaac

SEQ ID NO: 1703734 - RNA, 14 nt, Human
aaacacaacuauau

SEQ ID NO: 1703735 - RNA, 18 nt, Human
aaacggaugauuucuaug

SEQ ID NO: 1703736 - RNA, 16 nt, Human
aaacggaugauuucua

SEQ ID NO: 1703737 - RNA, 15 nt, Human
aaacuggguuccugc

SEQ ID NO: 1703738 - RNA, 16 nt, Human
aaacuggguuccugca

SEQ ID NO: 1703739 - RNA, 17 nt, Human
aaacauugguucuugua

SEQ ID NO: 1703740 - RNA, 21 nt, Human
aaacauugguucuuguauuaa

SEQ ID NO: 1703741 - RNA, 20 nt, Human
aaacauugguucuuguauua

SEQ ID NO: 1703742 - RNA, 18 nt, Human
aaacauugguucuuguau

SEQ ID NO: 1703743 - RNA, 17 nt, Human
aaacuuuucugauagag

SEQ ID NO: 1703744 - RNA, 16 nt, Human
aaacuuuucugauaga

SEQ ID NO: 1703745 - RNA, 16 nt, Human
aaagaaugauuaugaa

SEQ ID NO: 1703746 - RNA, 12 nt, Human
aaacuuuucuga

SEQ ID NO: 1703747 - RNA, 14 nt, Human
aaacuuuucugaua

SEQ ID NO: 1703748 - RNA, 13 nt, Human
aaacuuuucugau

SEQ ID NO: 1703749 - RNA, 15 nt, Human
aaacuuguguaaaua

SEQ ID NO: 1703750 - RNA, 17 nt, Human
aaacuuguguaaauaca

SEQ ID NO: 1703751 - RNA, 18 nt, Human
aaagagaacuuccagauc

SEQ ID NO: 1703752 - RNA, 23 nt, Human
aaaggaagguucuggugugaacu

SEQ ID NO: 1703753 - RNA, 13 nt, Human
aaaggaauuuaaa

SEQ ID NO: 1703754 - RNA, 24 nt, Human
ggucugugagaugcuagaacuccc

SEQ ID NO: 1703755 - RNA, 14 nt, Human
ggucugugagaugc

SEQ ID NO: 1703756 - RNA, 20 nt, Human
gggauucuuaaaguugaauu

SEQ ID NO: 1703757 - RNA, 15 nt, Human
gggauucuuaaaguu

SEQ ID NO: 1703758 - RNA, 23 nt, Human
aaaauaauuuuuauauuugaaau

SEQ ID NO: 1703759 - RNA, 21 nt, Human
aaaauaauuuuuauauuugaa

SEQ ID NO: 1703760 - RNA, 21 nt, Human
aaaacuuuaugcuaagugaaa

SEQ ID NO: 1703761 - RNA, 22 nt, Human
aaaagcuccauuuuuagugaaa

SEQ ID NO: 1703762 - RNA, 20 nt, Human
gggaggcagagguugcagug

SEQ ID NO: 1703763 - RNA, 21 nt, Human
ggcugaacacuccaauuaagg

SEQ ID NO: 1703764 - RNA, 14 nt, Human
gacuguggugacuu

SEQ ID NO: 1703765 - RNA, 13 nt, Human
gacuguggugacu

SEQ ID NO: 1703766 - RNA, 21 nt, Human
gacucuuaagaagacugcauu

SEQ ID NO: 1703767 - RNA, 15 nt, Human
gacucuuaagaagac

SEQ ID NO: 1703768 - RNA, 14 nt, Human
gacucuuaagaaga

SEQ ID NO: 1703769 - RNA, 17 nt, Human
gacgcucucuggccuuc

SEQ ID NO: 1703770 - RNA, 16 nt, Human
gacgcucucuggccuu

SEQ ID NO: 1703771 - RNA, 15 nt, Human
gacgcucucuggccu

SEQ ID NO: 1703772 - RNA, 16 nt, Human
gacacacugaagaagc

SEQ ID NO: 1703773 - RNA, 15 nt, Human
gacacacugaagaag

SEQ ID NO: 1703774 - RNA, 21 nt, Human
gacagaaagcagaacagugau

SEQ ID NO: 1703775 - RNA, 21 nt, Human
gacagugagacucugucucag

SEQ ID NO: 1703776 - RNA, 17 nt, Human
gacauuugcucauggaa

SEQ ID NO: 1703777 - RNA, 16 nt, Human
gacauuugcucaugga

SEQ ID NO: 1703778 - RNA, 14 nt, Human
gaagcaaaauuuuu

SEQ ID NO: 1703779 - RNA, 23 nt, Human
gaagcaacccaaauguucaucaa

SEQ ID NO: 1703780 - RNA, 14 nt, Human
gaacugaaaucaua

SEQ ID NO: 1703781 - RNA, 21 nt, Human
gagugaguuggguguauugug

SEQ ID NO: 1703782 - RNA, 16 nt, Human
gaguuuaaauuguaau

SEQ ID NO: 1703783 - RNA, 15 nt, Human
gaggacgcucucugg

SEQ ID NO: 1703784 - RNA, 20 nt, Human
gaggacgcucucuggccuuc

SEQ ID NO: 1703785 - RNA, 23 nt, Human
gaggcuccacuuggucugugaga

SEQ ID NO: 1703786 - RNA, 12 nt, Human
gaggcuccacuu

SEQ ID NO: 1703787 - RNA, 19 nt, Human
gaggcuccacuuggucugu

SEQ ID NO: 1703788 - RNA, 21 nt, Human
gauuuuuuuguuguuuguuua

SEQ ID NO: 1703789 - RNA, 18 nt, Human
gauuuuuuuguuguuugu

SEQ ID NO: 1703790 - RNA, 20 nt, Human
gcaaguauuagaauaccaca

SEQ ID NO: 1703791 - RNA, 22 nt, Human
gcaauagucaaauugugugaaa

SEQ ID NO: 1703792 - RNA, 23 nt, Human
gauucuucagcaaaaauauuuua

SEQ ID NO: 1703793 - RNA, 15 nt, Human
gauuuaccacuugug

SEQ ID NO: 1703794 - RNA, 16 nt, Human
gauuuaccacuugugu

SEQ ID NO: 1703795 - RNA, 22 nt, Human
gauuauucacugauuugacaua

SEQ ID NO: 1703796 - RNA, 23 nt, Human
gaucugccuaaggacuucuuuaa

SEQ ID NO: 1703797 - RNA, 21 nt, Human
gaucugccuaaggacuucuuu

SEQ ID NO: 1703798 - RNA, 20 nt, Human
gaucugccuaaggacuucuu

SEQ ID NO: 1703799 - RNA, 18 nt, Human
gaucugccuaaggacuuc

SEQ ID NO: 1703800 - RNA, 17 nt, Human
gaucugccuaaggacuu

SEQ ID NO: 1703801 - RNA, 18 nt, Human
gauguagaggagaaacug

SEQ ID NO: 1703802 - RNA, 17 nt, Human
gauguagaggagaaacu

SEQ ID NO: 1703803 - RNA, 20 nt, Human
cuuucagauaacuguuauuu

SEQ ID NO: 1703804 - RNA, 13 nt, Human
cuuucagauacug

SEQ ID NO: 1703805 - RNA, 21 nt, Human
cuuuaauaucaucaguauuga

SEQ ID NO: 1703806 - RNA, 19 nt, Human
cuuuaauaucaucaguauu

SEQ ID NO: 1703807 - RNA, 18 nt, Human
cuuuaauaucaucaguau

SEQ ID NO: 1703808 - RNA, 16 nt, Human
cuuuaauuuuggaauu

SEQ ID NO: 1703809 - RNA, 13 nt, Human
cuuuaauuuugga

SEQ ID NO: 1703810 - RNA, 15 nt, Human
cuuuaauuuuggaau

SEQ ID NO: 1703811 - RNA, 14 nt, Human
cuuuaauuuuggaa

SEQ ID NO: 1703812 - RNA, 20 nt, Human
cuucuguuuuauaauuuugu

SEQ ID NO: 1703813 - RNA, 15 nt, Human
cuucuguuuuauaau

SEQ ID NO: 1703814 - RNA, 13 nt, Human
cuuaaaguugaau

SEQ ID NO: 1703815 - RNA, 11 nt, Human
cuuaaaguuga

SEQ ID NO: 1703816 - RNA, 23 nt, Human
cuucaugcugucuacacuaagag

SEQ ID NO: 1703817 - RNA, 11 nt, Human
cuucagacaua

SEQ ID NO: 1703818 - RNA, 19 nt, Human
cugaugccaaguuguuuga

SEQ ID NO: 1703819 - RNA, 20 nt, Human
cugcacggugaauggcuuug

SEQ ID NO: 1703820 - RNA, 17 nt, Human
cugcacggugaauggcu

SEQ ID NO: 1703821 - RNA, 15 nt, Human
cugcacggugaaugg

SEQ ID NO: 1703822 - RNA, 14 nt, Human
cugcacggugaaug

SEQ ID NO: 1703823 - RNA, 16 nt, Human
cugcacuccagccuga

SEQ ID NO: 1703824 - RNA, 20 nt, Human
cugcacuccagccugagcga

SEQ ID NO: 1703825 - RNA, 17 nt, Human
cugcacuccagccugag

SEQ ID NO: 1703826 - RNA, 21 nt, Human
cuggugccucaccccuugcca

SEQ ID NO: 1703827 - RNA, 23 nt, Human
cauuuuauaaaucgcuuuugaua

SEQ ID NO: 1703828 - RNA, 21 nt, Human
cauuuuauaaaucgcuuuuga

SEQ ID NO: 1703829 - RNA, 18 nt, Human
cauuuuauaaaucgcuuu

SEQ ID NO: 1703830 - RNA, 17 nt, Human
cauuuuauaaaucgcuu

SEQ ID NO: 1703831 - RNA, 13 nt, Human
cauuuuauaaauc

SEQ ID NO: 1703832 - RNA, 11 nt, Human
cauuuuauaaa

SEQ ID NO: 1703833 - RNA, 18 nt, Human
cauuugcucauggaauug

SEQ ID NO: 1703834 - RNA, 13 nt, Human
cauuugcucaugg

SEQ ID NO: 1703835 - RNA, 23 nt, Human
cauuuaauaauuauaugcuauuu

SEQ ID NO: 1703836 - RNA, 17 nt, Human
cauuuaggccaugggac

SEQ ID NO: 1703837 - RNA, 14 nt, Human
cauuuaauaauuau

SEQ ID NO: 1703838 - RNA, 12 nt, Human
cauuuaauaauu

SEQ ID NO: 1703839 - RNA, 19 nt, Human
cauuuaauaauuauaugcu

SEQ ID NO: 1703840 - RNA, 17 nt, Human
cauuuaauaauuauaug

SEQ ID NO: 1703841 - RNA, 16 nt, Human
cauuuaauaauuauau

SEQ ID NO: 1703842 - RNA, 15 nt, Human
cauuuaauaauuaua

SEQ ID NO: 1703843 - RNA, 22 nt, Human
ccaaacugacucuuaagaagac

SEQ ID NO: 1703844 - RNA, 17 nt, Human
ccaagcauuuagaugua

SEQ ID NO: 1703845 - RNA, 14 nt, Human
ccaagcaaguauua

SEQ ID NO: 1703846 - RNA, 20 nt, Human
ccacaggaaccacaagacug

SEQ ID NO: 1703847 - RNA, 16 nt, Human
ccaauauucauagcag

SEQ ID NO: 1703848 - RNA, 18 nt, Human
ccacugcagaagacagua

SEQ ID NO: 1703849 - RNA, 13 nt, Human
ccacugcagaaga

SEQ ID NO: 1703850 - RNA, 20 nt, Human
ccaggaauggagccugcacg

SEQ ID NO: 1703851 - RNA, 20 nt, Human
ccaucaauaaaaaauuauga

SEQ ID NO: 1703852 - RNA, 19 nt, Human
ccaucaauaaaaaauuaug

SEQ ID NO: 1703853 - RNA, 18 nt, Human
ccaucaaggguacacugc

SEQ ID NO: 1703854 - RNA, 14 nt, Human
ccaugaagauguag

SEQ ID NO: 1703855 - RNA, 16 nt, Human
ccaugauguuuagaaa

SEQ ID NO: 1703856 - RNA, 13 nt, Human
cccaaaaggcaga

SEQ ID NO: 1703857 - RNA, 18 nt, Human
cccaaaaggcagaagcaa

SEQ ID NO: 1703858 - RNA, 14 nt, Human
cggaugauuucuau

SEQ ID NO: 1703859 - RNA, 13 nt, Human
cggaugauuucua

SEQ ID NO: 1703860 - RNA, 17 nt, Human
cggccuccauccugagg

SEQ ID NO: 1703861 - RNA, 16 nt, Human
cggccuccauccugag

SEQ ID NO: 1703862 - RNA, 16 nt, Human
ccuuucucuuucguua

SEQ ID NO: 1703863 - RNA, 11 nt, Human
cgcaaugugac

SEQ ID NO: 1703864 - RNA, 21 nt, Human
cgcguugaaauuguaauuaua

SEQ ID NO: 1703865 - RNA, 17 nt, Human
cgcguugaaauuguaau

SEQ ID NO: 1703866 - RNA, 22 nt, Human
cgcguugaaauuguaauuauau

SEQ ID NO: 1703867 - RNA, 13 nt, Human
cgcguugaaauug

SEQ ID NO: 1703868 - RNA, 22 nt, Human
cguucauggaacgcguugaaau

SEQ ID NO: 1703869 - RNA, 21 nt, Human
cguucauggaacgcguugaaa

SEQ ID NO: 1703870 - RNA, 23 nt, Human
cguucauggaacgcguugaaauu

SEQ ID NO: 1703871 - RNA, 13 nt, Human
cguugaaauugua

SEQ ID NO: 1703872 - RNA, 15 nt, Human
ccuggccuuucauau

SEQ ID NO: 1703873 - RNA, 14 nt, Human
ccuggccuuucaua

SEQ ID NO: 1703874 - RNA, 21 nt, Human
ccugcuuucagauacuggauu

SEQ ID NO: 1703875 - RNA, 16 nt, Human
ccugcuuucagauacu

SEQ ID NO: 1703876 - RNA, 15 nt, Human
ccugcuuucagauac

SEQ ID NO: 1703877 - RNA, 13 nt, Human
ccugauuaaagaa

SEQ ID NO: 1703878 - RNA, 12 nt, Human
ccugauuaaaga

SEQ ID NO: 1703879 - RNA, 20 nt, Human
ccugaggcuccacuuggucu

SEQ ID NO: 1703880 - RNA, 18 nt, Human
ccugaggcuccacuuggu

SEQ ID NO: 1703881 - RNA, 23 nt, Human
ccugaaagaggaaugaaguacuc

SEQ ID NO: 1703882 - RNA, 18 nt, Human
ccugaaagaggaaugaag

SEQ ID NO: 1703883 - RNA, 23 nt, Human
ccucuuagaugcaguucugaaga

SEQ ID NO: 1703884 - RNA, 20 nt, Human
ccucagaaaacaaggaugaa

SEQ ID NO: 1703885 - RNA, 21 nt, Human
ccucacccacccuuuuuuaaa

SEQ ID NO: 1703886 - RNA, 22 nt, Human
ccggaagccaaaccucugugag

SEQ ID NO: 1703887 - RNA, 11 nt, Human
ccggaagccaa

SEQ ID NO: 1703888 - RNA, 22 nt, Human
ccgggaggcagagguugcagug

SEQ ID NO: 1703889 - RNA, 13 nt, Human
ccgugcuaaggac

SEQ ID NO: 1703890 - RNA, 16 nt, Human
cccuugaugaagaagu

SEQ ID NO: 1703891 - RNA, 21 nt, Human
cugcaaugaagucucugaagu

SEQ ID NO: 1703892 - RNA, 18 nt, Human
cugcaaugaagucucuga

SEQ ID NO: 1703893 - RNA, 22 nt, Human
cugcaaucuucucagaaggcaa

SEQ ID NO: 1703894 - RNA, 15 nt, Human
cugauucuucagcaa

SEQ ID NO: 1703895 - RNA, 13 nt, Human
cugcagaagacag

SEQ ID NO: 1703896 - RNA, 23 nt, Human
cugcagaagacaguauggcagcu

SEQ ID NO: 1703897 - RNA, 20 nt, Human
cugauagaggaagccugauu

SEQ ID NO: 1703898 - RNA, 20 nt, Human
cugauccaguuuuguuugga

SEQ ID NO: 1703899 - RNA, 21 nt, Human
cugccuaaggacuucuuuaau

SEQ ID NO: 1703900 - RNA, 20 nt, Human
cugccuaaggacuucuuuaa

SEQ ID NO: 1703901 - RNA, 15 nt, Human
cugccuaagugcagc

SEQ ID NO: 1703902 - RNA, 22 nt, Human
cugccuaaggacuucuuuaauu

SEQ ID NO: 1703903 - RNA, 19 nt, Human
cugccuaaggacuucuuua

SEQ ID NO: 1703904 - RNA, 21 nt, Human
cugcuuucagauacuggauug

SEQ ID NO: 1703905 - RNA, 18 nt, Human
cugcuuucagauacugga

SEQ ID NO: 1703906 - RNA, 23 nt, Human
cuggaauaauccuaaacauauga

SEQ ID NO: 1703907 - RNA, 20 nt, Human
cuggauuguacuuugugcug

SEQ ID NO: 1703908 - RNA, 19 nt, Human
cuggauuguacuuugugcu

SEQ ID NO: 1703909 - RNA, 16 nt, Human
cuggccaacgggguga

SEQ ID NO: 1703910 - RNA, 18 nt, Human
cuccuaucaccugucuug

SEQ ID NO: 1703911 - RNA, 16 nt, Human
cucccuucucuucaca

SEQ ID NO: 1703912 - RNA, 13 nt, Human
cucccuuucaaca

SEQ ID NO: 1703913 - RNA, 18 nt, Human
cucauuaggauggcuagu

SEQ ID NO: 1703914 - RNA, 17 nt, Human
cucauuaggauggcuag

SEQ ID NO: 1703915 - RNA, 21 nt, Human
cuccauccugaggcuccacuu

SEQ ID NO: 1703916 - RNA, 23 nt, Human
cuccauccugaggcuccacuugg

SEQ ID NO: 1703917 - RNA, 18 nt, Human
cucugcaaucuucucaga

SEQ ID NO: 1703918 - RNA, 17 nt, Human
cucugcaaucuucucag

SEQ ID NO: 1703919 - RNA, 23 nt, Human
cucugcauacucauuaggauggc

SEQ ID NO: 1703920 - RNA, 13 nt, Human
cucuccauuuaau

SEQ ID NO: 1703921 - RNA, 19 nt, Human
cugaagugaaacugcuugu

SEQ ID NO: 1703922 - RNA, 17 nt, Human
cugaagugaaacugcuu

SEQ ID NO: 1703923 - RNA, 13 nt, Human
cugaagugaaacu

SEQ ID NO: 1703924 - RNA, 21 nt, Human
cugaagucagaucugccuaag

SEQ ID NO: 1703925 - RNA, 16 nt, Human
cugaagucagaucugc

SEQ ID NO: 1703926 - RNA, 15 nt, Human
cugaagucagaucug

SEQ ID NO: 1703927 - RNA, 14 nt, Human
cugaagucagaucu

SEQ ID NO: 1703928 - RNA, 13 nt, Human
cucuuaagaagac

SEQ ID NO: 1703929 - RNA, 16 nt, Human
cuguuuuaugacuuca

SEQ ID NO: 1703930 - RNA, 15 nt, Human
cuguuuuaugacuuc

SEQ ID NO: 1703931 - RNA, 14 nt, Human
cuguuuuaugacuu

SEQ ID NO: 1703932 - RNA, 13 nt, Human
cuguuuuaugacu

SEQ ID NO: 1703933 - RNA, 12 nt, Human
cuguuuuaugac

SEQ ID NO: 1703934 - RNA, 19 nt, Human
cuguuuuauaauuuuguga

SEQ ID NO: 1703935 - RNA, 18 nt, Human
cuuaaugccacuaaauug

SEQ ID NO: 1703936 - RNA, 21 nt, Human
cuuaagaagacugcauuauau

SEQ ID NO: 1703937 - RNA, 21 nt, Human
cuuaggguuaugauuaaguaa

SEQ ID NO: 1703938 - RNA, 13 nt, Human
cuuauaauuuaaa

SEQ ID NO: 1703939 - RNA, 14 nt, Human
cuuauaauuuaaaa

SEQ ID NO: 1703940 - RNA, 19 nt, Human
cuuauaggaauugacccac

SEQ ID NO: 1703941 - RNA, 19 nt, Human
cuuacuaguuucccuugca

SEQ ID NO: 1703942 - RNA, 19 nt, Human
cuuagaugcaguucugaag

SEQ ID NO: 1703943 - RNA, 19 nt, Human
cuuccagauccuggaaauc

SEQ ID NO: 1703944 - RNA, 18 nt, Human
cuucagcgguuuauauaa

SEQ ID NO: 1703945 - RNA, 17 nt, Human
cuucggccuccauccug

SEQ ID NO: 1703946 - RNA, 19 nt, Human
cuucggccuccauccugag

SEQ ID NO: 1703947 - RNA, 18 nt, Human
cuucggccuccauccuga

SEQ ID NO: 1703948 - RNA, 18 nt, Human
cuuuucugauccaguuuu

SEQ ID NO: 1703949 - RNA, 16 nt, Human
cuuuucugauccaguu

SEQ ID NO: 1703950 - RNA, 11 nt, Human
cuuuucugauc

SEQ ID NO: 1703951 - RNA, 15 nt, Human
cuuuucugauccagu

SEQ ID NO: 1703952 - RNA, 14 nt, Human
cuuuucugauccag

SEQ ID NO: 1703953 - RNA, 15 nt, Human
cuuuuuuaaauaaau

SEQ ID NO: 1703954 - RNA, 21 nt, Human
cuuuuucauuauuuuauuaug

SEQ ID NO: 1703955 - RNA, 14 nt, Human
cuuuuucauuauuu

SEQ ID NO: 1703956 - RNA, 13 nt, Human
cuuuuucauuauu

SEQ ID NO: 1703957 - RNA, 12 nt, Human
cuuuuucauuau

SEQ ID NO: 1703958 - RNA, 20 nt, Human
gaaaaguauguuagugcaaa

SEQ ID NO: 1703959 - RNA, 14 nt, Human
gaaaaguauguuag

SEQ ID NO: 1703960 - RNA, 19 nt, Human
gaaaauaacaauaaaagac

SEQ ID NO: 1703961 - RNA, 14 nt, Human
gaaaacaaggauga

SEQ ID NO: 1703962 - RNA, 14 nt, Human
cuuuggauaauaag

SEQ ID NO: 1703963 - RNA, 16 nt, Human
cuuuggauaauaagga

SEQ ID NO: 1703964 - RNA, 19 nt, Human
cuuuccucaaaacuucaga

SEQ ID NO: 1703965 - RNA, 16 nt, Human
cuuguuagaucuaguu

SEQ ID NO: 1703966 - RNA, 13 nt, Human
cuuguuagaucua

SEQ ID NO: 1703967 - RNA, 18 nt, Human
cuuggggcugaugcaguu

SEQ ID NO: 1703968 - RNA, 16 nt, Human
cuuggggcugaugcag

SEQ ID NO: 1703969 - RNA, 18 nt, Human
cuugcccuggugccucac

SEQ ID NO: 1703970 - RNA, 20 nt, Human
cuugcuugauuguauggugg

SEQ ID NO: 1703971 - RNA, 16 nt, Human
gacugauucuucagca

SEQ ID NO: 1703972 - RNA, 13 nt, Human
gacugauucuuca

SEQ ID NO: 1703973 - RNA, 24 nt, Human
gacugcauuauauuuauuacugua

SEQ ID NO: 1703974 - RNA, 16 nt, Human
gacugaggggagggga

SEQ ID NO: 1703975 - RNA, 23 nt, Human
gacaggaugguucccuugaugaa

SEQ ID NO: 1703976 - RNA, 18 nt, Human
gaccacugcagaagacag

SEQ ID NO: 1703977 - RNA, 16 nt, Human
gaccacugcagaagac

SEQ ID NO: 1703978 - RNA, 19 nt, Human
gacccaaaaggcagaagca

SEQ ID NO: 1703979 - RNA, 18 nt, Human
gacccaaaaggcagaagc

SEQ ID NO: 1703980 - RNA, 20 nt, Human
gacccaaaaggcagaagcaa

SEQ ID NO: 1703981 - RNA, 17 nt, Human
gaaauuguaauuauauc

SEQ ID NO: 1703982 - RNA, 18 nt, Human
gaaauuguauuacaaauc

SEQ ID NO: 1703983 - RNA, 16 nt, Human
gaaauuguauuacaaa

SEQ ID NO: 1703984 - RNA, 20 nt, Human
gaacagugauuaccagggac

SEQ ID NO: 1703985 - RNA, 16 nt, Human
gaacagugauuaccag

SEQ ID NO: 1703986 - RNA, 17 nt, Human
gaacuaaacuuucacac

SEQ ID NO: 1703987 - RNA, 18 nt, Human
gaacuaaacuuucacacc

SEQ ID NO: 1703988 - RNA, 16 nt, Human
gaacuaaacuuucaca

SEQ ID NO: 1703989 - RNA, 14 nt, Human
gaacuaaacuuuca

SEQ ID NO: 1703990 - RNA, 12 nt, Human
gaacuaaacuuu

SEQ ID NO: 1703991 - RNA, 18 nt, Human
gaagauguagaggagaaa

SEQ ID NO: 1703992 - RNA, 19 nt, Human
gaagacugcauuauauuua

SEQ ID NO: 1703993 - RNA, 12 nt, Human
gaagaacugaaa

SEQ ID NO: 1703994 - RNA, 21 nt, Human
gaagucucugaagugaaacug

SEQ ID NO: 1703995 - RNA, 16 nt, Human
gaagucucugaaguga

SEQ ID NO: 1703996 - RNA, 22 nt, Human
gaaguccaagcauuuagaugua

SEQ ID NO: 1703997 - RNA, 12 nt, Human
gaaguccaagca

SEQ ID NO: 1703998 - RNA, 14 nt, Human
gaaguauccuucag

SEQ ID NO: 1703999 - RNA, 16 nt, Human
gaaguauccuucagcc

SEQ ID NO: 1704000 - RNA, 11 nt, Human
gaauucuguau

SEQ ID NO: 1704001 - RNA, 22 nt, Human
gaauuuauuggcuuuucugauc

SEQ ID NO: 1704002 - RNA, 21 nt, Human
gaauuuauuggcuuuucugau

SEQ ID NO: 1704003 - RNA, 20 nt, Human
gaauuuauuggcuuuucuga

SEQ ID NO: 1704004 - RNA, 16 nt, Human
gaauuuauuggcuuuu

SEQ ID NO: 1704005 - RNA, 14 nt, Human
gaauuuauuggcuu

SEQ ID NO: 1704006 - RNA, 21 nt, Human
gaauggcuuuguauagaaccu

SEQ ID NO: 1704007 - RNA, 23 nt, Human
gaaugguccgugcuaaggacuug

SEQ ID NO: 1704008 - RNA, 22 nt, Human
gaaugguccgugcuaaggacuu

SEQ ID NO: 1704009 - RNA, 20 nt, Human
gaaugguccgugcuaaggac

SEQ ID NO: 1704010 - RNA, 15 nt, Human
gacuucauuaauaau

SEQ ID NO: 1704011 - RNA, 22 nt, Human
gauaauaaggaaaaguuuaaua

SEQ ID NO: 1704012 - RNA, 21 nt, Human
gauaauaaggaaaaguuuaau

SEQ ID NO: 1704013 - RNA, 20 nt, Human
gauaauaaggaaaaguuuaa

SEQ ID NO: 1704014 - RNA, 13 nt, Human
gauaaacaguagu

SEQ ID NO: 1704015 - RNA, 17 nt, Human
gauaaucaacugggcug

SEQ ID NO: 1704016 - RNA, 21 nt, Human
gauaaucaacugggcugaaca

SEQ ID NO: 1704017 - RNA, 17 nt, Human
gauaggucagugcaaau

SEQ ID NO: 1704018 - RNA, 23 nt, Human
gaucagcuuauugucuagugaaa

SEQ ID NO: 1704019 - RNA, 17 nt, Human
gaucuaguucacucucc

SEQ ID NO: 1704020 - RNA, 14 nt, Human
gauccuggaaauca

SEQ ID NO: 1704021 - RNA, 19 nt, Human
gcaaugaagucucugaagu

SEQ ID NO: 1704022 - RNA, 17 nt, Human
gcaaugaagucucugaa

SEQ ID NO: 1704023 - RNA, 12 nt, Human
gcaaaugacuuu

SEQ ID NO: 1704024 - RNA, 13 nt, Human
gcaaaugacuuug

SEQ ID NO: 1704025 - RNA, 16 nt, Human
gaugcuagaacucccu

SEQ ID NO: 1704026 - RNA, 14 nt, Human
gauuaaguaaugau

SEQ ID NO: 1704027 - RNA, 22 nt, Human
gauuaaguaaugauaacuggaa

SEQ ID NO: 1704028 - RNA, 14 nt, Human
gcaguucugaagaa

SEQ ID NO: 1704029 - RNA, 13 nt, Human
gcaguucugaaga

SEQ ID NO: 1704030 - RNA, 20 nt, Human
gcauauauuuuuauauuuac

SEQ ID NO: 1704031 - RNA, 16 nt, Human
gcauauauuuuuauau

SEQ ID NO: 1704032 - RNA, 11 nt, Human
gcauauauuuu

SEQ ID NO: 1704033 - RNA, 15 nt, Human
gcauauauuuuuaua

SEQ ID NO: 1704034 - RNA, 14 nt, Human
gcauauauuuuuau

SEQ ID NO: 1704035 - RNA, 12 nt, Human
gcaucacaguuu

SEQ ID NO: 1704036 - RNA, 13 nt, Human
gcauuuuauaaau

SEQ ID NO: 1704037 - RNA, 20 nt, Human
gcacagccucuuagaugcag

SEQ ID NO: 1704038 - RNA, 14 nt, Human
gcagaagacaguau

SEQ ID NO: 1704039 - RNA, 11 nt, Human
gccuaaaucca

SEQ ID NO: 1704040 - RNA, 13 nt, Human
gccuaaggacuuc

SEQ ID NO: 1704041 - RNA, 12 nt, Human
gccuaaggacuu

SEQ ID NO: 1704042 - RNA, 18 nt, Human
gccuaaggacuucuuuaa

SEQ ID NO: 1704043 - RNA, 15 nt, Human
gccuaaggacuucuu

SEQ ID NO: 1704044 - RNA, 14 nt, Human
gccuaaggacuucu

SEQ ID NO: 1704045 - RNA, 19 nt, Human
gcccuucuuuccacagaag

SEQ ID NO: 1704046 - RNA, 22 nt, Human
gccuuuuucauuauuuuauuau

SEQ ID NO: 1704047 - RNA, 20 nt, Human
gccuuuuucauuauuuuauu

SEQ ID NO: 1704048 - RNA, 16 nt, Human
gccuuuuucauuauuu

SEQ ID NO: 1704049 - RNA, 12 nt, Human
gccuuuuucauu

SEQ ID NO: 1704050 - RNA, 18 nt, Human
gccuucggccuccauccu

SEQ ID NO: 1704051 - RNA, 19 nt, Human
gccuucggccuccauccug

SEQ ID NO: 1704052 - RNA, 18 nt, Human
gccuuggggcugaugcag

SEQ ID NO: 1704053 - RNA, 18 nt, Human
gccuguaaucacagcuac

SEQ ID NO: 1704054 - RNA, 22 nt, Human
gcuagacuggugacugauucuu

SEQ ID NO: 1704055 - RNA, 20 nt, Human
gcuagacuggugacugauuc

SEQ ID NO: 1704056 - RNA, 19 nt, Human
gcuagacuggugacugauu

SEQ ID NO: 1704057 - RNA, 16 nt, Human
gcuagacuggugacug

SEQ ID NO: 1704058 - RNA, 15 nt, Human
gcuagacuggugacu

SEQ ID NO: 1704059 - RNA, 13 nt, Human
gcuagacugguga

SEQ ID NO: 1704060 - RNA, 22 nt, Human
gccacguucuuacuaguuuccc

SEQ ID NO: 1704061 - RNA, 19 nt, Human
gccaugggacagggaggac

SEQ ID NO: 1704062 - RNA, 14 nt, Human
gccaugggacaggg

SEQ ID NO: 1704063 - RNA, 16 nt, Human
gcccacagcuguauga

SEQ ID NO: 1704064 - RNA, 19 nt, Human
gccccugcacuccagccug

SEQ ID NO: 1704065 - RNA, 17 nt, Human
gccccgugggguuccuc

SEQ ID NO: 1704066 - RNA, 21 nt, Human
ggugacuuuggauaauaagga

SEQ ID NO: 1704067 - RNA, 20 nt, Human
ggugacuuuggauaauaagg

SEQ ID NO: 1704068 - RNA, 19 nt, Human
ggugacuuuggauaauaag

SEQ ID NO: 1704069 - RNA, 18 nt, Human
ggugacuuuggauaauaa

SEQ ID NO: 1704070 - RNA, 14 nt, Human
ggugacuuuggaua

SEQ ID NO: 1704071 - RNA, 16 nt, Human
gguguaugugugaagu

SEQ ID NO: 1704072 - RNA, 14 nt, Human
gguucuuguauuaa

SEQ ID NO: 1704073 - RNA, 22 nt, Human
gguucuuguauuaagaaugaaa

SEQ ID NO: 1704074 - RNA, 23 nt, Human
gguuaagucuguuuuaugacuuc

SEQ ID NO: 1704075 - RNA, 16 nt, Human
gguuaagucuguuuua

SEQ ID NO: 1704076 - RNA, 13 nt, Human
gguuaagucuguu

SEQ ID NO: 1704077 - RNA, 20 nt, Human
gguuaucugaagucagaucu

SEQ ID NO: 1704078 - RNA, 15 nt, Human
ggggauucuuaaagu

SEQ ID NO: 1704079 - RNA, 11 nt, Human
ggggauucuua

SEQ ID NO: 1704080 - RNA, 11 nt, Human
ggguuccugca

SEQ ID NO: 1704081 - RNA, 16 nt, Human
ggcuuuucugauccag

SEQ ID NO: 1704082 - RNA, 13 nt, Human
ggcuuuucugauc

SEQ ID NO: 1704083 - RNA, 12 nt, Human
ggcuuuucugau

SEQ ID NO: 1704084 - RNA, 22 nt, Human
ggcuugaguuuaaauuguaaua

SEQ ID NO: 1704085 - RNA, 17 nt, Human
ggcuuuucugauccagu

SEQ ID NO: 1704086 - RNA, 21 nt, Human
ggcugaugccaaguuguuuga

SEQ ID NO: 1704087 - RNA, 22 nt, Human
ggcugaugccaaguuguuugag

SEQ ID NO: 1704088 - RNA, 22 nt, Human
gcuggugcccugcuuucagaua

SEQ ID NO: 1704089 - RNA, 24 nt, Human
gcuggugcccugcuuucagauacu

SEQ ID NO: 1704090 - RNA, 22 nt, Human
gcuguauuuuaaaagaaugauu

SEQ ID NO: 1704091 - RNA, 18 nt, Human
gcuagauguauguacuuc

SEQ ID NO: 1704092 - RNA, 23 nt, Human
gcuuuaauaucaucaguauugaa

SEQ ID NO: 1704093 - RNA, 22 nt, Human
gcuuuaauaucaucaguauuga

SEQ ID NO: 1704094 - RNA, 20 nt, Human
gcuuuaauaucaucaguauu

SEQ ID NO: 1704095 - RNA, 20 nt, Human
ggaaaaaauaacaaugaaag

SEQ ID NO: 1704096 - RNA, 19 nt, Human
gcuugcccuggugccucac

SEQ ID NO: 1704097 - RNA, 17 nt, Human
gcuugcccuggugccuc

SEQ ID NO: 1704098 - RNA, 16 nt, Human
ggaacgcguugaaauu

SEQ ID NO: 1704099 - RNA, 17 nt, Human
ggaacgcguugaaauug

SEQ ID NO: 1704100 - RNA, 21 nt, Human
ggaacgcguugaaauuguaau

SEQ ID NO: 1704101 - RNA, 19 nt, Human
ggaaaaguuuaauauuaaa

SEQ ID NO: 1704102 - RNA, 18 nt, Human
ggaaaaguuuaauauuaa

SEQ ID NO: 1704103 - RNA, 18 nt, Human
ggaaauauuuauuuuaau

SEQ ID NO: 1704104 - RNA, 17 nt, Human
ggaaauauuuauuuuaa

SEQ ID NO: 1704105 - RNA, 15 nt, Human
ggaaauauuuauuuu

SEQ ID NO: 1704106 - RNA, 13 nt, Human
ggaaauauuuauu

SEQ ID NO: 1704107 - RNA, 12 nt, Human
ggaaauauuuau

SEQ ID NO: 1704108 - RNA, 22 nt, Human
ggaagccaaaccucugugagca

SEQ ID NO: 1704109 - RNA, 19 nt, Human
ggaggacgcucucuggccu

SEQ ID NO: 1704110 - RNA, 21 nt, Human
ggaggacgcucucuggccuuc

SEQ ID NO: 1704111 - RNA, 20 nt, Human
ggaggacgcucucuggccuu

SEQ ID NO: 1704112 - RNA, 22 nt, Human
ggccaugggacagggaggacgc

SEQ ID NO: 1704113 - RNA, 20 nt, Human
uauaaaucgcuuuugauaau

SEQ ID NO: 1704114 - RNA, 19 nt, Human
uauaaaucgcuuuugauaa

SEQ ID NO: 1704115 - RNA, 18 nt, Human
uauaaaucgcuuuugaua

SEQ ID NO: 1704116 - RNA, 15 nt, Human
uaguuuuauaugcuu

SEQ ID NO: 1704117 - RNA, 21 nt, Human
uaguuguaccgcaaugugacu

SEQ ID NO: 1704118 - RNA, 18 nt, Human
uagucaaauugugugaaa

SEQ ID NO: 1704119 - RNA, 19 nt, Human
uauauuuuuauauuuacua

SEQ ID NO: 1704120 - RNA, 19 nt, Human
uauauuuuuuguuaaauga

SEQ ID NO: 1704121 - RNA, 22 nt, Human
uaucaucaguauugaagcauuu

SEQ ID NO: 1704122 - RNA, 18 nt, Human
uauauuuuuauauuuacu

SEQ ID NO: 1704123 - RNA, 14 nt, Human
uauauuugaaauau

SEQ ID NO: 1704124 - RNA, 13 nt, Human
uauauuugaaaua

SEQ ID NO: 1704125 - RNA, 23 nt, Human
uauauuuauuacuguaagaaaau

SEQ ID NO: 1704126 - RNA, 20 nt, Human
uauauuuauuacuguaagaa

SEQ ID NO: 1704127 - RNA, 18 nt, Human
uauaugcuauuucuauau

SEQ ID NO: 1704128 - RNA, 16 nt, Human
uauaugcuauuucuau

SEQ ID NO: 1704129 - RNA, 14 nt, Human
uagagaguguugaa

SEQ ID NO: 1704130 - RNA, 15 nt, Human
uagagaguguugaaa

SEQ ID NO: 1704131 - RNA, 18 nt, Human
uagaguuuagcuggaaaa

SEQ ID NO: 1704132 - RNA, 17 nt, Human
uagaguuuagcuggaaa

SEQ ID NO: 1704133 - RNA, 18 nt, Human
uagacuggugacugauuc

SEQ ID NO: 1704134 - RNA, 17 nt, Human
uagacuggugacugauu

SEQ ID NO: 1704135 - RNA, 14 nt, Human
uagacuggugacug

SEQ ID NO: 1704136 - RNA, 13 nt, Human
uagacuggugacu

SEQ ID NO: 1704137 - RNA, 20 nt, Human
uagauguauguacuucaugc

SEQ ID NO: 1704138 - RNA, 16 nt, Human
uagauguauguacuuc

SEQ ID NO: 1704139 - RNA, 16 nt, Human
uaggccaugggacagg

SEQ ID NO: 1704140 - RNA, 13 nt, Human
uaggccaugggac

SEQ ID NO: 1704141 - RNA, 20 nt, Human
uaggaauugacccacaagaa

SEQ ID NO: 1704142 - RNA, 23 nt, Human
uaggaauugacccacaagaaaug

SEQ ID NO: 1704143 - RNA, 13 nt, Human
uaauuuuggaauu

SEQ ID NO: 1704144 - RNA, 12 nt, Human
uaauuuuggaau

SEQ ID NO: 1704145 - RNA, 18 nt, Human
uacaauuuuguuucugua

SEQ ID NO: 1704146 - RNA, 21 nt, Human
uacaauuuuguuucuguacuu

SEQ ID NO: 1704147 - RNA, 19 nt, Human
uacaauuuuguuucuguac

SEQ ID NO: 1704148 - RNA, 13 nt, Human
uacagaauuuuau

SEQ ID NO: 1704149 - RNA, 14 nt, Human
uacaggauuugaaa

SEQ ID NO: 1704150 - RNA, 16 nt, Human
uacauuuguauaaaau

SEQ ID NO: 1704151 - RNA, 11 nt, Human
uacauuugugu

SEQ ID NO: 1704152 - RNA, 17 nt, Human
uacauuuguauaaaaua

SEQ ID NO: 1704153 - RNA, 22 nt, Human
uacaugagguacugagagugaa

SEQ ID NO: 1704154 - RNA, 21 nt, Human
uacaugagguacugagaguga

SEQ ID NO: 1704155 - RNA, 23 nt, Human
uaccacaggaaccacaagacugc

SEQ ID NO: 1704156 - RNA, 20 nt, Human
uaauuaacauguuaaaccau

SEQ ID NO: 1704157 - RNA, 19 nt, Human
uaauuaacauguuaaacca

SEQ ID NO: 1704158 - RNA, 18 nt, Human
uaauuaacauguuaaacc

SEQ ID NO: 1704159 - RNA, 17 nt, Human
uaauuaacauguuaaac

SEQ ID NO: 1704160 - RNA, 15 nt, Human
uaauuaacauguuaa

SEQ ID NO: 1704161 - RNA, 14 nt, Human
uaauuaacauguua

SEQ ID NO: 1704162 - RNA, 12 nt, Human
uaauuaacaugu

SEQ ID NO: 1704163 - RNA, 15 nt, Human
uaauguuucaaacau

SEQ ID NO: 1704164 - RNA, 14 nt, Human
uaauguuucaaaca

SEQ ID NO: 1704165 - RNA, 23 nt, Human
uaauuuguaguguuggagaagaa

SEQ ID NO: 1704166 - RNA, 20 nt, Human
uaauuuguaguguuggagaa

SEQ ID NO: 1704167 - RNA, 22 nt, Human
uaauuggaaaggcagcucuaaa

SEQ ID NO: 1704168 - RNA, 18 nt, Human
uaauaaggaaaaguuuaa

SEQ ID NO: 1704169 - RNA, 20 nt, Human
uaauaaggaaaaguuuaaua

SEQ ID NO: 1704170 - RNA, 17 nt, Human
uaauaaagaucauguaa

SEQ ID NO: 1704171 - RNA, 16 nt, Human
uaauaaagaucaugua

SEQ ID NO: 1704172 - RNA, 23 nt, Human
uaauaauuauaugcuauuucuau

SEQ ID NO: 1704173 - RNA, 22 nt, Human
uaauaauuauaugcuauuucua

SEQ ID NO: 1704174 - RNA, 20 nt, Human
uaauaauuauaugcuauuuc

SEQ ID NO: 1704175 - RNA, 19 nt, Human
uaauaauuauaugcuauuu

SEQ ID NO: 1704176 - RNA, 16 nt, Human
uaauaauuauaugcua

SEQ ID NO: 1704177 - RNA, 15 nt, Human
uaauaauuauaugcu

SEQ ID NO: 1704178 - RNA, 15 nt, Human
uaauaauguuucaaa

SEQ ID NO: 1704179 - RNA, 23 nt, Human
uaauccucucaaccaccuuucag

SEQ ID NO: 1704180 - RNA, 14 nt, Human
uaauauuaaagcca

SEQ ID NO: 1704181 - RNA, 13 nt, Human
uaauauuaaagcc

SEQ ID NO: 1704182 - RNA, 12 nt, Human
uaauauuaaagc

SEQ ID NO: 1704183 - RNA, 19 nt, Human
uaaugccacuaaauugaca

SEQ ID NO: 1704184 - RNA, 23 nt, Human
uaagcauauauuuuuauauuuac

SEQ ID NO: 1704185 - RNA, 19 nt, Human
uaagcauauauuuuuauau

SEQ ID NO: 1704186 - RNA, 16 nt, Human
uaagcauauauuuuua

SEQ ID NO: 1704187 - RNA, 22 nt, Human
uaagcauauauuuuuauauuua

SEQ ID NO: 1704188 - RNA, 21 nt, Human
uaagcauauauuuuuauauuu

SEQ ID NO: 1704189 - RNA, 13 nt, Human
uaagccagacauc

SEQ ID NO: 1704190 - RNA, 20 nt, Human
uaagcauuccaacuaucuca

SEQ ID NO: 1704191 - RNA, 18 nt, Human
uaagcauuccaacuaucu

SEQ ID NO: 1704192 - RNA, 16 nt, Human
uaagcauuccaacuau

SEQ ID NO: 1704193 - RNA, 21 nt, Human
uaagccagacaucaacagaua

SEQ ID NO: 1704194 - RNA, 20 nt, Human
uaagccagacaucaacagau

SEQ ID NO: 1704195 - RNA, 17 nt, Human
uaacauguuaaaccaug

SEQ ID NO: 1704196 - RNA, 16 nt, Human
uaacauguuaaaccau

SEQ ID NO: 1704197 - RNA, 18 nt, Human
uaacauguuaaaccaugg

SEQ ID NO: 1704198 - RNA, 19 nt, Human
uaaaucccauuauucaaag

SEQ ID NO: 1704199 - RNA, 17 nt, Human
uaaaucccauuauucaa

SEQ ID NO: 1704200 - RNA, 16 nt, Human
uaaaucccauuauuca

SEQ ID NO: 1704201 - RNA, 23 nt, Human
uaaauccauuuggaaaucuuuaa

SEQ ID NO: 1704202 - RNA, 22 nt, Human
uaaauccauuuggaaaucuuua

SEQ ID NO: 1704203 - RNA, 19 nt, Human
uaaauccauuuggaaaucu

SEQ ID NO: 1704204 - RNA, 18 nt, Human
uaaauccauuuggaaauc

SEQ ID NO: 1704205 - RNA, 14 nt, Human
uaaauccauuugga

SEQ ID NO: 1704206 - RNA, 16 nt, Human
uaaauccauuuggaaa

SEQ ID NO: 1704207 - RNA, 15 nt, Human
uaaauccauuuggaa

SEQ ID NO: 1704208 - RNA, 18 nt, Human
uaaauauaugcuaagucu

SEQ ID NO: 1704209 - RNA, 23 nt, Human
uaaaguugaauuuauuggcuuuu

SEQ ID NO: 1704210 - RNA, 21 nt, Human
uaaaguugaauuuauuggcuu

SEQ ID NO: 1704211 - RNA, 19 nt, Human
uaaaguugaauuuauuggc

SEQ ID NO: 1704212 - RNA, 17 nt, Human
uaaaguugaauuuauug

SEQ ID NO: 1704213 - RNA, 15 nt, Human
uaaaguugaauuuau

SEQ ID NO: 1704214 - RNA, 14 nt, Human
uaaaguugaauuua

SEQ ID NO: 1704215 - RNA, 13 nt, Human
uaaaguugaauuu

SEQ ID NO: 1704216 - RNA, 17 nt, Human
uaaauaaaaauaauccu

SEQ ID NO: 1704217 - RNA, 15 nt, Human
uaaacuuuucugaua

SEQ ID NO: 1704218 - RNA, 14 nt, Human
uaaacuuuucugau

SEQ ID NO: 1704219 - RNA, 13 nt, Human
uaaacuuuucuga

SEQ ID NO: 1704220 - RNA, 14 nt, Human
uaaaggaauuuaaa

SEQ ID NO: 1704221 - RNA, 13 nt, Human
uaaacuuucacac

SEQ ID NO: 1704222 - RNA, 12 nt, Human
uaaacuuucaca

SEQ ID NO: 1704223 - RNA, 15 nt, Human
uaaaaaugguuuaaa

SEQ ID NO: 1704224 - RNA, 18 nt, Human
uaaaauccauacauuugu

SEQ ID NO: 1704225 - RNA, 19 nt, Human
uaaaauccauacauuugug

SEQ ID NO: 1704226 - RNA, 18 nt, Human
guuuagucuugucucaga

SEQ ID NO: 1704227 - RNA, 14 nt, Human
guuuagucuugucu

SEQ ID NO: 1704228 - RNA, 17 nt, Human
guuuagaaagcuugccc

SEQ ID NO: 1704229 - RNA, 13 nt, Human
guuuagaaagcuu

SEQ ID NO: 1704230 - RNA, 23 nt, Human
guuugugcugguguaugugugaa

SEQ ID NO: 1704231 - RNA, 19 nt, Human
guuugagguuuuuaagccu

SEQ ID NO: 1704232 - RNA, 16 nt, Human
guuugagguuuuuaag

SEQ ID NO: 1704233 - RNA, 12 nt, Human
guuuguuuaguc

SEQ ID NO: 1704234 - RNA, 18 nt, Human
guuuucaggcuagaugua

SEQ ID NO: 1704235 - RNA, 16 nt, Human
uaaaaaagaaacauuu

SEQ ID NO: 1704236 - RNA, 13 nt, Human
ucauuauuuuauu

SEQ ID NO: 1704237 - RNA, 15 nt, Human
ucauuauuuuauuau

SEQ ID NO: 1704238 - RNA, 14 nt, Human
ucauuauuuuauua

SEQ ID NO: 1704239 - RNA, 22 nt, Human
ucauuauuuuauuaugaaacuu

SEQ ID NO: 1704240 - RNA, 19 nt, Human
ucauuauuuuauuaugaaa

SEQ ID NO: 1704241 - RNA, 18 nt, Human
ucauuauuuuauuaugaa

SEQ ID NO: 1704242 - RNA, 16 nt, Human
ucauuauuuuauuaug

SEQ ID NO: 1704243 - RNA, 22 nt, Human
uccagcagauuauucacugauu

SEQ ID NO: 1704244 - RNA, 17 nt, Human
uccagcagauuauucac

SEQ ID NO: 1704245 - RNA, 20 nt, Human
uccagcagauuauucacuga

SEQ ID NO: 1704246 - RNA, 14 nt, Human
uccagauccuggaa

SEQ ID NO: 1704247 - RNA, 17 nt, Human
uccagauccuggaaauc

SEQ ID NO: 1704248 - RNA, 16 nt, Human
uccagauccuggaaau

SEQ ID NO: 1704249 - RNA, 13 nt, Human
uccacuuggucug

SEQ ID NO: 1704250 - RNA, 12 nt, Human
uccacuuggucu

SEQ ID NO: 1704251 - RNA, 14 nt, Human
uccacuuggucugu

SEQ ID NO: 1704252 - RNA, 20 nt, Human
uccaagcauuuagauguaua

SEQ ID NO: 1704253 - RNA, 14 nt, Human
uccaccuacaugag

SEQ ID NO: 1704254 - RNA, 17 nt, Human
uccaagcauuuagaugu

SEQ ID NO: 1704255 - RNA, 23 nt, Human
uccaaacugacucuuaagaagac

SEQ ID NO: 1704256 - RNA, 16 nt, Human
ucacuuuuuuccacau

SEQ ID NO: 1704257 - RNA, 15 nt, Human
ucacuuuuuuccaca

SEQ ID NO: 1704258 - RNA, 13 nt, Human
ucacuuuuuucca

SEQ ID NO: 1704259 - RNA, 17 nt, Human
ucacuugucaauaaaau

SEQ ID NO: 1704260 - RNA, 13 nt, Human
ucagauaacuguu

SEQ ID NO: 1704261 - RNA, 15 nt, Human
ucagauaacuguuau

SEQ ID NO: 1704262 - RNA, 19 nt, Human
ucagacauagaauuaacac

SEQ ID NO: 1704263 - RNA, 22 nt, Human
ucagacauagaauuaacacaug

SEQ ID NO: 1704264 - RNA, 18 nt, Human
ucacucuccauuuaauaa

SEQ ID NO: 1704265 - RNA, 18 nt, Human
uaucugacaucucugcaa

SEQ ID NO: 1704266 - RNA, 15 nt, Human
uaucugaggaauucu

SEQ ID NO: 1704267 - RNA, 18 nt, Human
uaucugaagucagaucug

SEQ ID NO: 1704268 - RNA, 17 nt, Human
uaucugaagucagaucu

SEQ ID NO: 1704269 - RNA, 21 nt, Human
uauuucuaugaaauauuaugu

SEQ ID NO: 1704270 - RNA, 22 nt, Human
uauuucuaugaaauauuauguu

SEQ ID NO: 1704271 - RNA, 13 nt, Human
uauuuauuacugu

SEQ ID NO: 1704272 - RNA, 12 nt, Human
uauuuuaugauc

SEQ ID NO: 1704273 - RNA, 13 nt, Human
ucaaugcagcccc

SEQ ID NO: 1704274 - RNA, 19 nt, Human
ucacaggaaguagaggagg

SEQ ID NO: 1704275 - RNA, 23 nt, Human
ucacaggacagcccuucuuucca

SEQ ID NO: 1704276 - RNA, 19 nt, Human
ucaacuccaaacugacucu

SEQ ID NO: 1704277 - RNA, 17 nt, Human
ucucaaccaccuuucag

SEQ ID NO: 1704278 - RNA, 22 nt, Human
ucucagaaggcaaaugacuuug

SEQ ID NO: 1704279 - RNA, 21 nt, Human
ucucagaaggcaaaugacuuu

SEQ ID NO: 1704280 - RNA, 20 nt, Human
ucucagaaggcaaaugacuu

SEQ ID NO: 1704281 - RNA, 19 nt, Human
ucucagaaggcaaaugacu

SEQ ID NO: 1704282 - RNA, 21 nt, Human
ucuacacuaagagagaaugag

SEQ ID NO: 1704283 - RNA, 17 nt, Human
ucuacacuccagugaga

SEQ ID NO: 1704284 - RNA, 19 nt, Human
ucucugcaaucuucucaga

SEQ ID NO: 1704285 - RNA, 18 nt, Human
ucucuucacagucacauu

SEQ ID NO: 1704286 - RNA, 20 nt, Human
ucugaggaauucuguauaga

SEQ ID NO: 1704287 - RNA, 16 nt, Human
ucugacaucucugcaa

SEQ ID NO: 1704288 - RNA, 19 nt, Human
ucucuaggaaauauuuauu

SEQ ID NO: 1704289 - RNA, 13 nt, Human
ucucuaggaaaua

SEQ ID NO: 1704290 - RNA, 21 nt, Human
ucucagugucaaugcagcccc

SEQ ID NO: 1704291 - RNA, 23 nt, Human
ugaacacuccaauuaaggauuuu

SEQ ID NO: 1704292 - RNA, 22 nt, Human
ugaacacuccaauuaaggauuu

SEQ ID NO: 1704293 - RNA, 19 nt, Human
ugaacacuccaauuaagga

SEQ ID NO: 1704294 - RNA, 18 nt, Human
ugaacacuccaauuaagg

SEQ ID NO: 1704295 - RNA, 19 nt, Human
ugaaauggacuuuuguaca

SEQ ID NO: 1704296 - RNA, 22 nt, Human
ugaacuuguaaaggaauuuaaa

SEQ ID NO: 1704297 - RNA, 22 nt, Human
ugaaguccaagcauuuagaugu

SEQ ID NO: 1704298 - RNA, 21 nt, Human
ugaaguccaagcauuuagaug

SEQ ID NO: 1704299 - RNA, 18 nt, Human
ugaaacccugucucuacu

SEQ ID NO: 1704300 - RNA, 23 nt, Human
ugaaagcagggacuugaacccau

SEQ ID NO: 1704301 - RNA, 19 nt, Human
ugaaagcagggacuugaac

SEQ ID NO: 1704302 - RNA, 18 nt, Human
ugaaagcagggacuugaa

SEQ ID NO: 1704303 - RNA, 19 nt, Human
ugaaaacuuuaugcuaagu

SEQ ID NO: 1704304 - RNA, 17 nt, Human
ucuuucacauuuaaaua

SEQ ID NO: 1704305 - RNA, 18 nt, Human
ucuguuauauaaaugguu

SEQ ID NO: 1704306 - RNA, 15 nt, Human
ucuguuauauaaaug

SEQ ID NO: 1704307 - RNA, 16 nt, Human
ucuguuuuaugacuuc

SEQ ID NO: 1704308 - RNA, 15 nt, Human
ucuguuuuaugacuu

SEQ ID NO: 1704309 - RNA, 13 nt, Human
ucuguuuuaugac

SEQ ID NO: 1704310 - RNA, 22 nt, Human
ucuguuuuauaauuuugugaag

SEQ ID NO: 1704311 - RNA, 17 nt, Human
ucuguuuuaugacuuca

SEQ ID NO: 1704312 - RNA, 23 nt, Human
ucuucucagaaggcaaaugacuu

SEQ ID NO: 1704313 - RNA, 21 nt, Human
ucuucucagaaggcaaaugac

SEQ ID NO: 1704314 - RNA, 22 nt, Human
ucuuguauuaagaaugaaauac

SEQ ID NO: 1704315 - RNA, 15 nt, Human
ucuugccuuuuucau

SEQ ID NO: 1704316 - RNA, 19 nt, Human
ucuuuaaaaaaaaaauugg

SEQ ID NO: 1704317 - RNA, 18 nt, Human
ucuuuaaaaaaaaaauug

SEQ ID NO: 1704318 - RNA, 19 nt, Human
ucuugucucagauuuuauu

SEQ ID NO: 1704319 - RNA, 17 nt, Human
ugcugaguuugugcugg

SEQ ID NO: 1704320 - RNA, 15 nt, Human
ugcugaguuugugcu

SEQ ID NO: 1704321 - RNA, 11 nt, Human
ugcucauggaa

SEQ ID NO: 1704322 - RNA, 21 nt, Human
ugcuagaacucccuuucaaca

SEQ ID NO: 1704323 - RNA, 20 nt, Human
ugcuagaacucccuuucaac

SEQ ID NO: 1704324 - RNA, 19 nt, Human
ugcuagaacucccuuucaa

SEQ ID NO: 1704325 - RNA, 23 nt, Human
ugccuaaggacuucuuuaauuuu

SEQ ID NO: 1704326 - RNA, 17 nt, Human
ugccuucucaacuccaa

SEQ ID NO: 1704327 - RNA, 22 nt, Human
ugccuucucaacuccaaacuga

SEQ ID NO: 1704328 - RNA, 23 nt, Human
ugcacggugaauggcuuuguaua

SEQ ID NO: 1704329 - RNA, 22 nt, Human
ugcacggugaauggcuuuguau

SEQ ID NO: 1704330 - RNA, 17 nt, Human
ugcagauaaacaguagu

SEQ ID NO: 1704331 - RNA, 16 nt, Human
ugcagauaaacaguag

SEQ ID NO: 1704332 - RNA, 19 nt, Human
ugaagucucugaagugaaa

SEQ ID NO: 1704333 - RNA, 15 nt, Human
ugcacaucaaaauau

SEQ ID NO: 1704334 - RNA, 21 nt, Human
ugcauuauauuuauuacugua

SEQ ID NO: 1704335 - RNA, 20 nt, Human
ugcauuauauuuauuacugu

SEQ ID NO: 1704336 - RNA, 15 nt, Human
ugcauuauauuuauu

SEQ ID NO: 1704337 - RNA, 15 nt, Human
uggcauaacauaaau

SEQ ID NO: 1704338 - RNA, 12 nt, Human
ugcuuucagaua

SEQ ID NO: 1704339 - RNA, 21 nt, Human
ugcuuucagauacuggauugu

SEQ ID NO: 1704340 - RNA, 20 nt, Human
ugcuuucagauacuggauug

SEQ ID NO: 1704341 - RNA, 17 nt, Human
ugcuuucagauacugga

SEQ ID NO: 1704342 - RNA, 16 nt, Human
ugcuuucagauacugg

SEQ ID NO: 1704343 - RNA, 12 nt, Human
ugcuuuaaacau

SEQ ID NO: 1704344 - RNA, 14 nt, Human
ugcuuguuuccuag

SEQ ID NO: 1704345 - RNA, 14 nt, Human
ugcuucuguuuuau

SEQ ID NO: 1704346 - RNA, 14 nt, Human
uggaacucucgagc

SEQ ID NO: 1704347 - RNA, 20 nt, Human
uggccuuucauauuuuagcu

SEQ ID NO: 1704348 - RNA, 20 nt, Human
uggccuucggccuccauccu

SEQ ID NO: 1704349 - RNA, 18 nt, Human
uggccuucggccuccauc

SEQ ID NO: 1704350 - RNA, 17 nt, Human
uggccuucggccuccau

SEQ ID NO: 1704351 - RNA, 15 nt, Human
uggcuguacccagga

SEQ ID NO: 1704352 - RNA, 22 nt, Human
uggcuuuguauagaaccucuuu

SEQ ID NO: 1704353 - RNA, 14 nt, Human
uggcuuuguauaga

SEQ ID NO: 1704354 - RNA, 21 nt, Human
ugggacagucaccucauggaa

SEQ ID NO: 1704355 - RNA, 20 nt, Human
ugggacagucaccucaugga

SEQ ID NO: 1704356 - RNA, 18 nt, Human
ugggacagucaccucaug

SEQ ID NO: 1704357 - RNA, 20 nt, Human
ugggacauuugcucauggaa

SEQ ID NO: 1704358 - RNA, 19 nt, Human
ugggacauuugcucaugga

SEQ ID NO: 1704359 - RNA, 16 nt, Human
uggguagacacacaug

SEQ ID NO: 1704360 - RNA, 17 nt, Human
uggguagacacacauga

SEQ ID NO: 1704361 - RNA, 21 nt, Human
uguuuguuuagucuugucuca

SEQ ID NO: 1704362 - RNA, 12 nt, Human
uguuuguuuagu

SEQ ID NO: 1704363 - RNA, 19 nt, Human
uuaacauguuaaaccaugg

SEQ ID NO: 1704364 - RNA, 18 nt, Human
uuaacauguuaaaccaug

SEQ ID NO: 1704365 - RNA, 12 nt, Human
uuaacauguuaa

SEQ ID NO: 1704366 - RNA, 19 nt, Human
uuaaaagaaugauuaugaa

SEQ ID NO: 1704367 - RNA, 18 nt, Human
uuaauaauuauaugcuau

SEQ ID NO: 1704368 - RNA, 18 nt, Human
uuaauaauguuucaaaca

SEQ ID NO: 1704369 - RNA, 23 nt, Human
uuaauaauuauaugcuauuucua

SEQ ID NO: 1704370 - RNA, 20 nt, Human
uuaauaauuauaugcuauuu

SEQ ID NO: 1704371 - RNA, 20 nt, Human
uuaaggauuuuaugcuuuaa

SEQ ID NO: 1704372 - RNA, 18 nt, Human
uuaaggauuuuaugcuuu

SEQ ID NO: 1704373 - RNA, 16 nt, Human
uuaauaauguuucaaa

SEQ ID NO: 1704374 - RNA, 15 nt, Human
uuaaggauuuuaugc

SEQ ID NO: 1704375 - RNA, 13 nt, Human
uuaaggauuuuau

SEQ ID NO: 1704376 - RNA, 18 nt, Human
uuaauaucaucaguauug

SEQ ID NO: 1704377 - RNA, 22 nt, Human
uuaaugucaauucuugccaaau

SEQ ID NO: 1704378 - RNA, 21 nt, Human
uuaccacuuguguuuugcaag

SEQ ID NO: 1704379 - RNA, 15 nt, Human
uuacauuuguauaaa

SEQ ID NO: 1704380 - RNA, 14 nt, Human
uuacauuuguauaa

SEQ ID NO: 1704381 - RNA, 20 nt, Human
uuacagagacagaaagcaga

SEQ ID NO: 1704382 - RNA, 14 nt, Human
uguuguuuguuuag

SEQ ID NO: 1704383 - RNA, 21 nt, Human
uguuggagaagaacugaaauc

SEQ ID NO: 1704384 - RNA, 23 nt, Human
uguugaaacggaugauuucuaug

SEQ ID NO: 1704385 - RNA, 22 nt, Human
uguugaaacggaugauuucuau

SEQ ID NO: 1704386 - RNA, 21 nt, Human
uguugaaacggaugauuucua

SEQ ID NO: 1704387 - RNA, 20 nt, Human
uguugaaacggaugauuucu

SEQ ID NO: 1704388 - RNA, 16 nt, Human
uguuagaucuaguuca

SEQ ID NO: 1704389 - RNA, 12 nt, Human
uguuauaaucuu

SEQ ID NO: 1704390 - RNA, 23 nt, Human
uguuaaaccaugggauaaaugcc

SEQ ID NO: 1704391 - RNA, 21 nt, Human
uguuaaaccaugggauaaaug

SEQ ID NO: 1704392 - RNA, 20 nt, Human
uguuaaaccaugggauaaau

SEQ ID NO: 1704393 - RNA, 18 nt, Human
uguuaaaccaugggauaa

SEQ ID NO: 1704394 - RNA, 16 nt, Human
uguuaaaccaugggau

SEQ ID NO: 1704395 - RNA, 17 nt, Human
ugugugaagugagugag

SEQ ID NO: 1704396 - RNA, 16 nt, Human
uguauagaaccucuuu

SEQ ID NO: 1704397 - RNA, 16 nt, Human
uguaugauucccagcc

SEQ ID NO: 1704398 - RNA, 14 nt, Human
uguauuuguuugca

SEQ ID NO: 1704399 - RNA, 13 nt, Human
uguacucaauuuu

SEQ ID NO: 1704400 - RNA, 17 nt, Human
uguagauaauacaguuc

SEQ ID NO: 1704401 - RNA, 15 nt, Human
uguaccgcaauguga

SEQ ID NO: 1704402 - RNA, 15 nt, Human
uguaaucacagcuac

SEQ ID NO: 1704403 - RNA, 23 nt, Human
ugugcgcuaaacuuuucugauag

SEQ ID NO: 1704404 - RNA, 22 nt, Human
ugugcgcuaaacuuuucugaua

SEQ ID NO: 1704405 - RNA, 19 nt, Human
ugugcgcuaaacuuuucug

SEQ ID NO: 1704406 - RNA, 14 nt, Human
ugugcgcuaaacuu

SEQ ID NO: 1704407 - RNA, 22 nt, Human
ugucucaguccaugaagaugua

SEQ ID NO: 1704408 - RNA, 21 nt, Human
ugucucaguccaugaagaugu

SEQ ID NO: 1704409 - RNA, 22 nt, Human
ugugaccacugcagaagacagu

SEQ ID NO: 1704410 - RNA, 21 nt, Human
uugaaacggaugauuucuaug

SEQ ID NO: 1704411 - RNA, 20 nt, Human
uugaaacggaugauuucuau

SEQ ID NO: 1704412 - RNA, 22 nt, Human
uugaaacggaugauuucuaugc

SEQ ID NO: 1704413 - RNA, 18 nt, Human
uucuuguauuaagaauga

SEQ ID NO: 1704414 - RNA, 13 nt, Human
uucuuguauuaag

SEQ ID NO: 1704415 - RNA, 12 nt, Human
uucuuguauuaa

SEQ ID NO: 1704416 - RNA, 14 nt, Human
uucugagcauuuaa

SEQ ID NO: 1704417 - RNA, 12 nt, Human
uugaugaagaag

SEQ ID NO: 1704418 - RNA, 15 nt, Human
uugaggacacugaua

SEQ ID NO: 1704419 - RNA, 14 nt, Human
uugaggacacugau

SEQ ID NO: 1704420 - RNA, 15 nt, Human
uuggcuuuucugauc

SEQ ID NO: 1704421 - RNA, 22 nt, Human
uuggcuuuucugauccaguuuu

SEQ ID NO: 1704422 - RNA, 19 nt, Human
uuggcuuuucugauccagu

SEQ ID NO: 1704423 - RNA, 12 nt, Human
uugggaggcuga

SEQ ID NO: 1704424 - RNA, 16 nt, Human
uuguaaaggaauuuaa

SEQ ID NO: 1704425 - RNA, 21 nt, Human
uuggaccaaaaaccaguauug

SEQ ID NO: 1704426 - RNA, 15 nt, Human
uuggaaaucuuuaaa

SEQ ID NO: 1704427 - RNA, 12 nt, Human
uuggaaaucuuu

SEQ ID NO: 1704428 - RNA, 11 nt, Human
uucacugauuu

SEQ ID NO: 1704429 - RNA, 15 nt, Human
uuacuaaaauggacu

SEQ ID NO: 1704430 - RNA, 18 nt, Human
uuacuaaaauggacugug

SEQ ID NO: 1704431 - RNA, 17 nt, Human
uuacuaaaauggacugu

SEQ ID NO: 1704432 - RNA, 16 nt, Human
uuacuaaaauggacug

SEQ ID NO: 1704433 - RNA, 19 nt, Human
uuccacuuauaggaauuga

SEQ ID NO: 1704434 - RNA, 19 nt, Human
uuccuagcacacacuuuug

SEQ ID NO: 1704435 - RNA, 17 nt, Human
uuccuagcacacacuuu

SEQ ID NO: 1704436 - RNA, 19 nt, Human
uucggccuccauccugagg

SEQ ID NO: 1704437 - RNA, 18 nt, Human
uucggccuccauccugag

SEQ ID NO: 1704438 - RNA, 22 nt, Human
uucggccuccauccugaggcuc

SEQ ID NO: 1704439 - RNA, 21 nt, Human
uucuauauuuucauucuccua

SEQ ID NO: 1704440 - RNA, 18 nt, Human
uucuauauuuucauucuc

SEQ ID NO: 1704441 - RNA, 16 nt, Human
uucuauauuuucauuc

SEQ ID NO: 1704442 - RNA, 15 nt, Human
uucuauauuuucauu

SEQ ID NO: 1704443 - RNA, 14 nt, Human
uucuauauuuucau

SEQ ID NO: 1704444 - RNA, 11 nt, Human
uucuauauuuu

SEQ ID NO: 1704445 - RNA, 17 nt, Human
uucuaugcugaguuugu

SEQ ID NO: 1704446 - RNA, 23 nt, Human
uucucuccucuccccaugauguu

SEQ ID NO: 1704447 - RNA, 21 nt, Human
uuuauuggcuuuucugaucca

SEQ ID NO: 1704448 - RNA, 17 nt, Human
uuuauuggcuuuucuga

SEQ ID NO: 1704449 - RNA, 13 nt, Human
uuuaugauccagc

SEQ ID NO: 1704450 - RNA, 12 nt, Human
uuuagaaacaca

SEQ ID NO: 1704451 - RNA, 20 nt, Human
uuuagaaacacaacuauauu

SEQ ID NO: 1704452 - RNA, 18 nt, Human
uuucagauaacuguuauu

SEQ ID NO: 1704453 - RNA, 21 nt, Human
uuucagauaaucacaauacau

SEQ ID NO: 1704454 - RNA, 15 nt, Human
uuucagcagcugcag

SEQ ID NO: 1704455 - RNA, 15 nt, Human
uuucagauaaucaca

SEQ ID NO: 1704456 - RNA, 21 nt, Human
uuuccuagcacacacuuuugg

SEQ ID NO: 1704457 - RNA, 18 nt, Human
uuuccuagcacacacuuu

SEQ ID NO: 1704458 - RNA, 22 nt, Human
uuuccucaaaacuucagacaua

SEQ ID NO: 1704459 - RNA, 14 nt, Human
uuucucuuucguua

SEQ ID NO: 1704460 - RNA, 13 nt, Human
uuuuaugauccag

SEQ ID NO: 1704461 - RNA, 15 nt, Human
uuuuaugauccagca

SEQ ID NO: 1704462 - RNA, 13 nt, Human
uuuuccugaaaac

SEQ ID NO: 1704463 - RNA, 19 nt, Human
uuuguuguuuguuuagucu

SEQ ID NO: 1704464 - RNA, 10 nt, Human
uuuuauauuu

SEQ ID NO: 1704465 - RNA, 20 nt, Human
uuuuauaucaauuuaaaaaa

SEQ ID NO: 1704466 - RNA, 20 nt, Human
uuuuauaugcuucuguuuua

SEQ ID NO: 1704467 - RNA, 15 nt, Human
uuuuauaugcuucug

SEQ ID NO: 1704468 - RNA, 14 nt, Human
uuuguuguuuguuu

SEQ ID NO: 1704469 - RNA, 12 nt, Human
uuuguuguuugu

SEQ ID NO: 1704470 - RNA, 12 nt, Human
uuuguguuagag

SEQ ID NO: 1704471 - RNA, 11 nt, Human
uuuguauagaa

SEQ ID NO: 1704472 - RNA, 21 nt, Human
uuuguauaaaauaauuuuuau

SEQ ID NO: 1704473 - RNA, 20 nt, Human
uuugguuaagucuguuuuau

SEQ ID NO: 1704474 - RNA, 19 nt, Human
uuugguuaagucuguuuua

SEQ ID NO: 1704475 - RNA, 18 nt, Human
uuugguuaagucuguuuu

SEQ ID NO: 1704476 - RNA, 22 nt, Human
uuugguuaagucuguuuuauga

SEQ ID NO: 1704477 - RNA, 16 nt, Human
uuuggaaaucuuuaaa

SEQ ID NO: 1704478 - RNA, 22 nt, Human
uuugcauaggugaucucauuua

SEQ ID NO: 1704479 - RNA, 20 nt, Human
uuugagguuuuuaagccuua

SEQ ID NO: 1704480 - RNA, 23 nt, Human
uuuuucuuaaauaauaaagauca

SEQ ID NO: 1704481 - RNA, 14 nt, Human
uuuuucuguuauau

SEQ ID NO: 1704482 - RNA, 14 nt, Human
cugcacggugaaug

SEQ ID NO: 1704483 - RNA, 15 nt, Human
cugcacggugaaugg

SEQ ID NO: 1704484 - RNA, 17 nt, Human
cugcacggugaauggcu

SEQ ID NO: 1704485 - RNA, 20 nt, Human
cugcacggugaauggcuuug

SEQ ID NO: 1704486 - RNA, 19 nt, Human
cugaugccaaguuguuuga

SEQ ID NO: 1704487 - RNA, 11 nt, Human
cuuaaaguuga

SEQ ID NO: 1704488 - RNA, 13 nt, Human
cuuaaaguugaau

SEQ ID NO: 1704489 - RNA, 14 nt, Human
cuuuaauuuuggaa

SEQ ID NO: 1704490 - RNA, 15 nt, Human
cuuuaauuuuggaau

SEQ ID NO: 1704491 - RNA, 13 nt, Human
cuuuaauuuugga

SEQ ID NO: 1704492 - RNA, 16 nt, Human
cuuuaauuuuggaauu

SEQ ID NO: 1704493 - RNA, 18 nt, Human
cuuuaauaucaucaguau

SEQ ID NO: 1704494 - RNA, 19 nt, Human
cuuuaauaucaucaguauu

SEQ ID NO: 1704495 - RNA, 21 nt, Human
cuuuaauaucaucaguauuga

SEQ ID NO: 1704496 - RNA, 13 nt, Human
cuuucagauacug

SEQ ID NO: 1704497 - RNA, 20 nt, Human
cuuucagauaacuguuauuu

SEQ ID NO: 1704498 - RNA, 17 nt, Human
gaucugccuaaggacuu

SEQ ID NO: 1704499 - RNA, 18 nt, Human
gaucugccuaaggacuuc

SEQ ID NO: 1704500 - RNA, 20 nt, Human
gaucugccuaaggacuucuu

SEQ ID NO: 1704501 - RNA, 21 nt, Human
gaucugccuaaggacuucuuu

SEQ ID NO: 1704502 - RNA, 23 nt, Human
gaucugccuaaggacuucuuuaa

SEQ ID NO: 1704503 - RNA, 22 nt, Human
gauuauucacugauuugacaua

SEQ ID NO: 1704504 - RNA, 21 nt, Human
gauuauucacugauuugacau

SEQ ID NO: 1704505 - RNA, 23 nt, Human
gauucuucagcaaaaauauuuua

SEQ ID NO: 1704506 - RNA, 18 nt, Human
gauuuuuuuguuguuugu

SEQ ID NO: 1704507 - RNA, 21 nt, Human
gauuuuuuuguuguuuguuua

SEQ ID NO: 1704508 - RNA, 21 nt, Human
gagugaguuggguguauugug

SEQ ID NO: 1704509 - RNA, 13 nt, Human
gacuguggugacu

SEQ ID NO: 1704510 - RNA, 14 nt, Human
gacuguggugacuu

SEQ ID NO: 1704511 - RNA, 21 nt, Human
ggcugaacacuccaauuaagg

SEQ ID NO: 1704512 - RNA, 15 nt, Human
gggauucuuaaaguu

SEQ ID NO: 1704513 - RNA, 20 nt, Human
gggauucuuaaaguugaauu

SEQ ID NO: 1704514 - RNA, 23 nt, Human
aaaggaagguucuggugugaacu

SEQ ID NO: 1704515 - RNA, 20 nt, Human
aaaggaagguucugguguga

SEQ ID NO: 1704516 - RNA, 17 nt, Human
aaacuuguguaaauaca

SEQ ID NO: 1704517 - RNA, 15 nt, Human
aaacuuguguaaaua

SEQ ID NO: 1704518 - RNA, 13 nt, Human
aaacuuuucugau

SEQ ID NO: 1704519 - RNA, 14 nt, Human
aaacuuuucugaua

SEQ ID NO: 1704520 - RNA, 12 nt, Human
aaacuuuucuga

SEQ ID NO: 1704521 - RNA, 16 nt, Human
aaacuuuucugauaga

SEQ ID NO: 1704522 - RNA, 17 nt, Human
aaacuuuucugauagag

SEQ ID NO: 1704523 - RNA, 18 nt, Human
aaacauugguucuuguau

SEQ ID NO: 1704524 - RNA, 20 nt, Human
aaacauugguucuuguauua

SEQ ID NO: 1704525 - RNA, 21 nt, Human
aaacauugguucuuguauuaa

SEQ ID NO: 1704526 - RNA, 17 nt, Human
aaacauugguucuugua

SEQ ID NO: 1704527 - RNA, 16 nt, Human
aaacuggguuccugca

SEQ ID NO: 1704528 - RNA, 15 nt, Human
aaacuggguuccugc

SEQ ID NO: 1704529 - RNA, 16 nt, Human
aaacggaugauuucua

SEQ ID NO: 1704530 - RNA, 18 nt, Human
aaacggaugauuucuaug

SEQ ID NO: 1704531 - RNA, 22 nt, Human
aaaauggacuguggugacuuug

SEQ ID NO: 1704532 - RNA, 21 nt, Human
aaaauuggggauucuuaaagu

SEQ ID NO: 1704533 - RNA, 23 nt, Human
aaaauuggggauucuuaaaguug

SEQ ID NO: 1704534 - RNA, 13 nt, Human
ggcaaaugacuuu

SEQ ID NO: 1704535 - RNA, 20 nt, Human
gcugaacacuccaauuaagg

SEQ ID NO: 1704536 - RNA, 21 nt, Human
gcugaacacuccaauuaagga

SEQ ID NO: 1704537 - RNA, 23 nt, Human
gcugaacacuccaauuaaggauu

SEQ ID NO: 1704538 - RNA, 19 nt, Human
cucagaaggcaaaugacuu

SEQ ID NO: 1704539 - RNA, 19 nt, Human
cgcugauaagcguucaugg

SEQ ID NO: 1704540 - RNA, 16 nt, Human
ccuaaggacuucuuua

SEQ ID NO: 1704541 - RNA, 17 nt, Human
ccuaaggacuucuuuaa

SEQ ID NO: 1704542 - RNA, 18 nt, Human
ccuaaggacuucuuuaau

SEQ ID NO: 1704543 - RNA, 23 nt, Human
ccuaaggacuucuuuaauuuugg

SEQ ID NO: 1704544 - RNA, 11 nt, Human
ccuaaggacuu

SEQ ID NO: 1704545 - RNA, 12 nt, Human
ccuaaggacuuc

SEQ ID NO: 1704546 - RNA, 19 nt, Human
ccaugggauaaaugccauc

SEQ ID NO: 1704547 - RNA, 14 nt, Human
ccaguauuguacaa

SEQ ID NO: 1704548 - RNA, 13 nt, Human
ccagacgaugucu

SEQ ID NO: 1704549 - RNA, 20 nt, Human
ccagacgaugucuucauacc

SEQ ID NO: 1704550 - RNA, 18 nt, Human
cagauacuggauuguacu

SEQ ID NO: 1704551 - RNA, 14 nt, Human
cagauacuggauug

SEQ ID NO: 1704552 - RNA, 15 nt, Human
cauuauucaaaguug

SEQ ID NO: 1704553 - RNA, 14 nt, Human
cauuauucaaaguu

SEQ ID NO: 1704554 - RNA, 14 nt, Human
cauugguucuugua

SEQ ID NO: 1704555 - RNA, 17 nt, Human
cauugguguuguacuca

SEQ ID NO: 1704556 - RNA, 16 nt, Human
cauaggugaucucauu

SEQ ID NO: 1704557 - RNA, 15 nt, Human
auuauguaaauccca

SEQ ID NO: 1704558 - RNA, 17 nt, Human
auuauguaaaucccauu

SEQ ID NO: 1704559 - RNA, 22 nt, Human
auuauguaaaucccauuauuca

SEQ ID NO: 1704560 - RNA, 23 nt, Human
auuauguaaaucccauuauucaa

SEQ ID NO: 1704561 - RNA, 13 nt, Human
auuauguaaaucc

SEQ ID NO: 1704562 - RNA, 14 nt, Human
auuauguaaauccc

SEQ ID NO: 1704563 - RNA, 18 nt, Human
auuuuuuuguuguuuguu

SEQ ID NO: 1704564 - RNA, 20 nt, Human
auuuuuuuucuguuauauaa

SEQ ID NO: 1704565 - RNA, 18 nt, Human
auuuuuuuucuguuauau

SEQ ID NO: 1704566 - RNA, 19 nt, Human
auuuuuuuucuguuauaua

SEQ ID NO: 1704567 - RNA, 15 nt, Human
auuuuuuuucuguua

SEQ ID NO: 1704568 - RNA, 17 nt, Human
auuuuuuuucuguuaua

SEQ ID NO: 1704569 - RNA, 15 nt, Human
auuuaauaauuauau

SEQ ID NO: 1704570 - RNA, 18 nt, Human
auuuaauaauuauaugcu

SEQ ID NO: 1704571 - RNA, 13 nt, Human
auuuaauaauuau

SEQ ID NO: 1704572 - RNA, 21 nt, Human
cacuccaauuaaggauuuuau

SEQ ID NO: 1704573 - RNA, 22 nt, Human
cacuccaauuaaggauuuuaug

SEQ ID NO: 1704574 - RNA, 15 nt, Human
auguuuauuacagua

SEQ ID NO: 1704575 - RNA, 16 nt, Human
auguuuauuacaguau

SEQ ID NO: 1704576 - RNA, 18 nt, Human
auguuuauuacaguauaa

SEQ ID NO: 1704577 - RNA, 19 nt, Human
auguuuauuacaguauaau

SEQ ID NO: 1704578 - RNA, 22 nt, Human
auguuuauuacaguauaauuaa

SEQ ID NO: 1704579 - RNA, 23 nt, Human
auguuuauuacaguauaauuaac

SEQ ID NO: 1704580 - RNA, 19 nt, Human
uuuucugauccaguuuugu

SEQ ID NO: 1704581 - RNA, 14 nt, Human
uuuucuuaaauaau

SEQ ID NO: 1704582 - RNA, 23 nt, Human
uuuucuuaaauaauaaagaucau

SEQ ID NO: 1704583 - RNA, 12 nt, Human
uuuucuguuaua

SEQ ID NO: 1704584 - RNA, 12 nt, Human
auguuuauuaca

SEQ ID NO: 1704585 - RNA, 16 nt, Human
uuugagaaauuaagua

SEQ ID NO: 1704586 - RNA, 12 nt, Human
uuugaauuuugu

SEQ ID NO: 1704587 - RNA, 14 nt, Human
uuugaauuuugugu

SEQ ID NO: 1704588 - RNA, 20 nt, Human
auuauaucugaggaauucug

SEQ ID NO: 1704589 - RNA, 21 nt, Human
auuauaucugaggaauucugu

SEQ ID NO: 1704590 - RNA, 22 nt, Human
auuauaucugaggaauucugua

SEQ ID NO: 1704591 - RNA, 16 nt, Human
auuauaugcuauuucu

SEQ ID NO: 1704592 - RNA, 18 nt, Human
auuauaucugaggaauuc

SEQ ID NO: 1704593 - RNA, 19 nt, Human
auuauaucugaggaauucu

SEQ ID NO: 1704594 - RNA, 19 nt, Human
auuauucaaaguugccuaa

SEQ ID NO: 1704595 - RNA, 22 nt, Human
auuauucaaaguugccuaaauc

SEQ ID NO: 1704596 - RNA, 18 nt, Human
auuauucaaaguugccua

SEQ ID NO: 1704597 - RNA, 24 nt, Human
auuauucaaaguugccuaaaucca

SEQ ID NO: 1704598 - RNA, 19 nt, Human
auuauucacugauuugaca

SEQ ID NO: 1704599 - RNA, 18 nt, Human
auuauaugcuauuucuau

SEQ ID NO: 1704600 - RNA, 17 nt, Human
auuauaugcuauuucua

SEQ ID NO: 1704601 - RNA, 19 nt, Human
auuauaugcuauuucuaua

SEQ ID NO: 1704602 - RNA, 12 nt, Human
auucacugauuu

SEQ ID NO: 1704603 - RNA, 17 nt, Human
auucacugauuugacau

SEQ ID NO: 1704604 - RNA, 20 nt, Human
uuuuuauauuuacuaaaaug

SEQ ID NO: 1704605 - RNA, 15 nt, Human
uuuuggaauuuuccu

SEQ ID NO: 1704606 - RNA, 15 nt, Human
auuaaggauuuuaug

SEQ ID NO: 1704607 - RNA, 17 nt, Human
auuaaggauuuuaugcu

SEQ ID NO: 1704608 - RNA, 20 nt, Human
auuaaggauuuuaugcuuua

SEQ ID NO: 1704609 - RNA, 17 nt, Human
auuaaguaucugacauc

SEQ ID NO: 1704610 - RNA, 23 nt, Human
uuuuuggcauaacauaaaucugu

SEQ ID NO: 1704611 - RNA, 24 nt, Human
uuuuuggcauaacauaaaucugug

SEQ ID NO: 1704612 - RNA, 14 nt, Human
auuggggauucuua

SEQ ID NO: 1704613 - RNA, 15 nt, Human
auuggggauucuuaa

SEQ ID NO: 1704614 - RNA, 16 nt, Human
auuggggauucuuaaa

SEQ ID NO: 1704615 - RNA, 20 nt, Human
auuggggauucuuaaaguug

SEQ ID NO: 1704616 - RNA, 21 nt, Human
auuggggauucuuaaaguuga

SEQ ID NO: 1704617 - RNA, 22 nt, Human
auuggggauucuuaaaguugaa

SEQ ID NO: 1704618 - RNA, 16 nt, Human
auuuacuaaaauggac

SEQ ID NO: 1704619 - RNA, 19 nt, Human
auuuacuaaaauggacugu

SEQ ID NO: 1704620 - RNA, 20 nt, Human
auuuacuaaaauggacugug

SEQ ID NO: 1704621 - RNA, 15 nt, Human
auuguacuuugugcu

SEQ ID NO: 1704622 - RNA, 14 nt, Human
auuuauuggcuuuu

SEQ ID NO: 1704623 - RNA, 18 nt, Human
auuuauuggcuuuucuga

SEQ ID NO: 1704624 - RNA, 20 nt, Human
auuuauuggcuuuucugauc

SEQ ID NO: 1704625 - RNA, 23 nt, Human
auuuauuggcuuuucugauccag

SEQ ID NO: 1704626 - RNA, 13 nt, Human
auuugaauuuugu

SEQ ID NO: 1704627 - RNA, 14 nt, Human
augccaucaauaaa

SEQ ID NO: 1704628 - RNA, 15 nt, Human
uuuagucuugucuca

SEQ ID NO: 1704629 - RNA, 17 nt, Human
uuuagucuugucucaga

SEQ ID NO: 1704630 - RNA, 23 nt, Human
uuuagucuugucucagauuuuau

SEQ ID NO: 1704631 - RNA, 16 nt, Human
aucugaagucagaucu

SEQ ID NO: 1704632 - RNA, 17 nt, Human
aucugaagucagaucug

SEQ ID NO: 1704633 - RNA, 18 nt, Human
aucugaagucagaucugc

SEQ ID NO: 1704634 - RNA, 23 nt, Human
aucugaagucagaucugccuaag

SEQ ID NO: 1704635 - RNA, 22 nt, Human
augaaauacuguuugagguuuu

SEQ ID NO: 1704636 - RNA, 16 nt, Human
uucauaccuacaugua

SEQ ID NO: 1704637 - RNA, 19 nt, Human
uucauaccuacauguauuu

SEQ ID NO: 1704638 - RNA, 19 nt, Human
auaucugaggaauucugua

SEQ ID NO: 1704639 - RNA, 20 nt, Human
auaucugaggaauucuguau

SEQ ID NO: 1704640 - RNA, 21 nt, Human
auaucugaggaauucuguaua

SEQ ID NO: 1704641 - RNA, 22 nt, Human
auaucugaggaauucuguauag

SEQ ID NO: 1704642 - RNA, 23 nt, Human
auaucugaggaauucuguauaga

SEQ ID NO: 1704643 - RNA, 15 nt, Human
auaucugaggaauuc

SEQ ID NO: 1704644 - RNA, 16 nt, Human
auaucugaggaauucu

SEQ ID NO: 1704645 - RNA, 17 nt, Human
auaucugaggaauucug

SEQ ID NO: 1704646 - RNA, 18 nt, Human
auaucugaggaauucugu

SEQ ID NO: 1704647 - RNA, 21 nt, Human
uucagcaaaaauauuuuauga

SEQ ID NO: 1704648 - RNA, 17 nt, Human
auauaaaugguuaaaag

SEQ ID NO: 1704649 - RNA, 18 nt, Human
auagcuagacuggugacu

SEQ ID NO: 1704650 - RNA, 19 nt, Human
auagcuagacuggugacug

SEQ ID NO: 1704651 - RNA, 23 nt, Human
auagcuagacuggugacugauuc

SEQ ID NO: 1704652 - RNA, 14 nt, Human
auagcuagacuggu

SEQ ID NO: 1704653 - RNA, 15 nt, Human
auagcuagacuggug

SEQ ID NO: 1704654 - RNA, 16 nt, Human
auagcuagacugguga

SEQ ID NO: 1704655 - RNA, 17 nt, Human
uuauuuauaaucacuuu

SEQ ID NO: 1704656 - RNA, 12 nt, Human
uucuggugugaa

SEQ ID NO: 1704657 - RNA, 15 nt, Human
aucaucaguauugaa

SEQ ID NO: 1704658 - RNA, 19 nt, Human
aucaucaguauugaagcau

SEQ ID NO: 1704659 - RNA, 17 nt, Human
aucaucaguauugaagc

SEQ ID NO: 1704660 - RNA, 15 nt, Human
aucaguauugaagca

SEQ ID NO: 1704661 - RNA, 22 nt, Human
aucaguauugaagcauuuuaua

SEQ ID NO: 1704662 - RNA, 17 nt, Human
auauuuuaugauccagc

SEQ ID NO: 1704663 - RNA, 22 nt, Human
auauuuuaugauccagcagauu

SEQ ID NO: 1704664 - RNA, 12 nt, Human
auauuuuaugau

SEQ ID NO: 1704665 - RNA, 13 nt, Human
auauuuuaugauc

SEQ ID NO: 1704666 - RNA, 13 nt, Human
auauuuucauucu

SEQ ID NO: 1704667 - RNA, 14 nt, Human
auauuaaagccaug

SEQ ID NO: 1704668 - RNA, 15 nt, Human
auauuaaagccaugu

SEQ ID NO: 1704669 - RNA, 18 nt, Human
auauuaaagccauguuua

SEQ ID NO: 1704670 - RNA, 23 nt, Human
auauuaaagccauguuuauuaca

SEQ ID NO: 1704671 - RNA, 18 nt, Human
ugugcugggguuaucuga

SEQ ID NO: 1704672 - RNA, 13 nt, Human
agugaaacugcuu

SEQ ID NO: 1704673 - RNA, 21 nt, Human
agugaaacugcuuguuuccua

SEQ ID NO: 1704674 - RNA, 24 nt, Human
agugaaacugcuuguuuccuagca

SEQ ID NO: 1704675 - RNA, 14 nt, Human
ugugaacuugaaau

SEQ ID NO: 1704676 - RNA, 15 nt, Human
ugugaacuugaaauu

SEQ ID NO: 1704677 - RNA, 16 nt, Human
ugugaacuugaaauuu

SEQ ID NO: 1704678 - RNA, 12 nt, Human
ugugaacuugaa

SEQ ID NO: 1704679 - RNA, 14 nt, Human
uguuauauaaaugg

SEQ ID NO: 1704680 - RNA, 13 nt, Human
uguuauauaaaug

SEQ ID NO: 1704681 - RNA, 19 nt, Human
agugaguuggguguauugu

SEQ ID NO: 1704682 - RNA, 20 nt, Human
agugaguuggguguauugug

SEQ ID NO: 1704683 - RNA, 14 nt, Human
uuaacaacagcugg

SEQ ID NO: 1704684 - RNA, 16 nt, Human
uuaaauaauaaagauc

SEQ ID NO: 1704685 - RNA, 22 nt, Human
uuaaaggaagguucugguguga

SEQ ID NO: 1704686 - RNA, 20 nt, Human
uuaaaggaagguucuggugu

SEQ ID NO: 1704687 - RNA, 15 nt, Human
aguuuaauauuaaag

SEQ ID NO: 1704688 - RNA, 16 nt, Human
aguuuaauauuaaagc

SEQ ID NO: 1704689 - RNA, 18 nt, Human
aguuuaauauuaaagcca

SEQ ID NO: 1704690 - RNA, 19 nt, Human
aguuuaauauuaaagccau

SEQ ID NO: 1704691 - RNA, 20 nt, Human
aguuuaauauuaaagccaug

SEQ ID NO: 1704692 - RNA, 17 nt, Human
aguuggguguauugugc

SEQ ID NO: 1704693 - RNA, 20 nt, Human
aguuggguguauugugcgcu

SEQ ID NO: 1704694 - RNA, 16 nt, Human
aguuggguguauugug

SEQ ID NO: 1704695 - RNA, 19 nt, Human
aguugccuaaauccauuug

SEQ ID NO: 1704696 - RNA, 22 nt, Human
aguugccuaaauccauuuggaa

SEQ ID NO: 1704697 - RNA, 23 nt, Human
aguugccuaaauccauuuggaaa

SEQ ID NO: 1704698 - RNA, 19 nt, Human
uguuuggaccaaaaaccag

SEQ ID NO: 1704699 - RNA, 18 nt, Human
uguuuuaugacuucauua

SEQ ID NO: 1704700 - RNA, 23 nt, Human
uguuuagucuugucucagauuuu

SEQ ID NO: 1704701 - RNA, 20 nt, Human
uguuuagucuugucucagau

SEQ ID NO: 1704702 - RNA, 22 nt, Human
uguuuagucuugucucagauuu

SEQ ID NO: 1704703 - RNA, 14 nt, Human
uguuuauuacagua

SEQ ID NO: 1704704 - RNA, 22 nt, Human
uguuugagguuuuuaagccuua

SEQ ID NO: 1704705 - RNA, 14 nt, Human
uguuugagaaauua

SEQ ID NO: 1704706 - RNA, 20 nt, Human
auaaaucugugaacuugaaa

SEQ ID NO: 1704707 - RNA, 21 nt, Human
auaaaucugugaacuugaaau

SEQ ID NO: 1704708 - RNA, 22 nt, Human
auaaaucugugaacuugaaauu

SEQ ID NO: 1704709 - RNA, 16 nt, Human
auaaauagcuagacug

SEQ ID NO: 1704710 - RNA, 18 nt, Human
auaaauagcuagacuggu

SEQ ID NO: 1704711 - RNA, 18 nt, Human
uuacaguauaauuaacau

SEQ ID NO: 1704712 - RNA, 19 nt, Human
uuacaguauaauuaacaug

SEQ ID NO: 1704713 - RNA, 20 nt, Human
uuacaguauaauuaacaugu

SEQ ID NO: 1704714 - RNA, 16 nt, Human
uuacaguauaauuaac

SEQ ID NO: 1704715 - RNA, 17 nt, Human
uuacaguauaauuaaca

SEQ ID NO: 1704716 - RNA, 13 nt, Human
uuacaguauaauu

SEQ ID NO: 1704717 - RNA, 22 nt, Human
auaaaugguuaaaagagguuuu

SEQ ID NO: 1704718 - RNA, 16 nt, Human
auaaaugguuaaaaga

SEQ ID NO: 1704719 - RNA, 21 nt, Human
uuaagucuguuuuaugacuuc

SEQ ID NO: 1704720 - RNA, 17 nt, Human
uuaagucuguuuuauga

SEQ ID NO: 1704721 - RNA, 18 nt, Human
uuaagucuguuuuaugac

SEQ ID NO: 1704722 - RNA, 20 nt, Human
uuaagucuguuuuaugacuu

SEQ ID NO: 1704723 - RNA, 13 nt, Human
agguuuuucuuaa

SEQ ID NO: 1704724 - RNA, 14 nt, Human
aguauugaagcauu

SEQ ID NO: 1704725 - RNA, 15 nt, Human
aguauugaagcauuu

SEQ ID NO: 1704726 - RNA, 18 nt, Human
aguauugaagcauuuuau

SEQ ID NO: 1704727 - RNA, 20 nt, Human
aguauugaagcauuuuauaa

SEQ ID NO: 1704728 - RNA, 21 nt, Human
aguauugaagcauuuuauaaa

SEQ ID NO: 1704729 - RNA, 16 nt, Human
uggugcccugcuuuca

SEQ ID NO: 1704730 - RNA, 19 nt, Human
uggugcccugcuuucagau

SEQ ID NO: 1704731 - RNA, 20 nt, Human
uggugcccugcuuucagaua

SEQ ID NO: 1704732 - RNA, 14 nt, Human
uggugcccugcuuu

SEQ ID NO: 1704733 - RNA, 14 nt, Human
uggugugaacuaaa

SEQ ID NO: 1704734 - RNA, 22 nt, Human
uggugugaacuaaacuuucaca

SEQ ID NO: 1704735 - RNA, 23 nt, Human
uggugugaacuaaacuuucacac

SEQ ID NO: 1704736 - RNA, 17 nt, Human
agguucuggugugaacu

SEQ ID NO: 1704737 - RNA, 15 nt, Human
uguaaauacaauuuu

SEQ ID NO: 1704738 - RNA, 22 nt, Human
ugcuauuucuauauuuucauuc

SEQ ID NO: 1704739 - RNA, 21 nt, Human
ugcuauuucuauauuuucauu

SEQ ID NO: 1704740 - RNA, 14 nt, Human
ugccaucaauaaaa

SEQ ID NO: 1704741 - RNA, 22 nt, Human
ugccaucaauaaaaaauuauga

SEQ ID NO: 1704742 - RNA, 13 nt, Human
aggaauucuguau

SEQ ID NO: 1704743 - RNA, 14 nt, Human
aggaauucuguaua

SEQ ID NO: 1704744 - RNA, 15 nt, Human
aggaauucuguauag

SEQ ID NO: 1704745 - RNA, 14 nt, Human
aggacuucuuuaau

SEQ ID NO: 1704746 - RNA, 16 nt, Human
aggacuucuuuaauuu

SEQ ID NO: 1704747 - RNA, 21 nt, Human
aggacuucuuuaauuuuggaa

SEQ ID NO: 1704748 - RNA, 22 nt, Human
aggacuucuuuaauuuuggaau

SEQ ID NO: 1704749 - RNA, 23 nt, Human
aggacuucuuuaauuuuggaauu

SEQ ID NO: 1704750 - RNA, 23 nt, Human
ugauuugacauagucuggcugua

SEQ ID NO: 1704751 - RNA, 20 nt, Human
ugauccagcagauuauucac

SEQ ID NO: 1704752 - RNA, 19 nt, Human
ugauccagcagauuauuca

SEQ ID NO: 1704753 - RNA, 13 nt, Human
agcauuuuauaaa

SEQ ID NO: 1704754 - RNA, 14 nt, Human
agcauuuuauaaau

SEQ ID NO: 1704755 - RNA, 15 nt, Human
agcauuuuauaaauc

SEQ ID NO: 1704756 - RNA, 20 nt, Human
agcauuuuauaaaucgcuuu

SEQ ID NO: 1704757 - RNA, 18 nt, Human
agcauauauuuuuauauu

SEQ ID NO: 1704758 - RNA, 20 nt, Human
agcauauauuuuuauauuua

SEQ ID NO: 1704759 - RNA, 22 nt, Human
agcauauauuuuuauauuuacu

SEQ ID NO: 1704760 - RNA, 15 nt, Human
agcauauauuuuuau

SEQ ID NO: 1704761 - RNA, 22 nt, Human
ugaauuuauuggcuuuucugau

SEQ ID NO: 1704762 - RNA, 23 nt, Human
ugaauuuauuggcuuuucugauc

SEQ ID NO: 1704763 - RNA, 17 nt, Human
ugaauuuauuggcuuuu

SEQ ID NO: 1704764 - RNA, 21 nt, Human
ugaauuuauuggcuuuucuga

SEQ ID NO: 1704765 - RNA, 17 nt, Human
ugaaauuugaauuuugu

SEQ ID NO: 1704766 - RNA, 14 nt, Human
ugaaauuugaauuu

SEQ ID NO: 1704767 - RNA, 15 nt, Human
ugaaauuugaauuuu

SEQ ID NO: 1704768 - RNA, 16 nt, Human
ugaaauuugaauuuug

SEQ ID NO: 1704769 - RNA, 21 nt, Human
ugaaauuguaauuauaucuga

SEQ ID NO: 1704770 - RNA, 20 nt, Human
ugaaauuguaauuauaucug

SEQ ID NO: 1704771 - RNA, 23 nt, Human
agagauuuuuuuguuguuuguuu

SEQ ID NO: 1704772 - RNA, 22 nt, Human
agagauuuuuuuguuguuuguu

SEQ ID NO: 1704773 - RNA, 12 nt, Human
agacuggugacu

SEQ ID NO: 1704774 - RNA, 13 nt, Human
agacuggugacug

SEQ ID NO: 1704775 - RNA, 14 nt, Human
agacuggugacuga

SEQ ID NO: 1704776 - RNA, 16 nt, Human
agacuggugacugauu

SEQ ID NO: 1704777 - RNA, 17 nt, Human
agacuggugacugauuc

SEQ ID NO: 1704778 - RNA, 14 nt, Human
ucuguacuuuuugg

SEQ ID NO: 1704779 - RNA, 17 nt, Human
ucuguacuuuuuggcau

SEQ ID NO: 1704780 - RNA, 13 nt, Human
ucuguacuuuuug

SEQ ID NO: 1704781 - RNA, 22 nt, Human
ucugugaacuugaaauuugaau

SEQ ID NO: 1704782 - RNA, 19 nt, Human
ucugugaacuugaaauuug

SEQ ID NO: 1704783 - RNA, 23 nt, Human
acuuguuagaucuaguucacucu

SEQ ID NO: 1704784 - RNA, 14 nt, Human
acuuguuagaucua

SEQ ID NO: 1704785 - RNA, 15 nt, Human
acuuguuagaucuag

SEQ ID NO: 1704786 - RNA, 20 nt, Human
acuugaaauuugaauuuugu

SEQ ID NO: 1704787 - RNA, 19 nt, Human
acuugaaauuugaauuuug

SEQ ID NO: 1704788 - RNA, 15 nt, Human
ucugaagucagaucu

SEQ ID NO: 1704789 - RNA, 19 nt, Human
ucugaagucagaucugccu

SEQ ID NO: 1704790 - RNA, 13 nt, Human
acugcuuguuucc

SEQ ID NO: 1704791 - RNA, 16 nt, Human
acugcuuguuuccuag

SEQ ID NO: 1704792 - RNA, 18 nt, Human
acuguggugacuuuggau

SEQ ID NO: 1704793 - RNA, 20 nt, Human
acuguggugacuuuggauaa

SEQ ID NO: 1704794 - RNA, 21 nt, Human
acuguggugacuuuggauaau

SEQ ID NO: 1704795 - RNA, 12 nt, Human
acuguggugacu

SEQ ID NO: 1704796 - RNA, 14 nt, Human
acuguggugacuuu

SEQ ID NO: 1704797 - RNA, 15 nt, Human
acuguggugacuuug

SEQ ID NO: 1704798 - RNA, 13 nt, Human
acuguuauuuaua

SEQ ID NO: 1704799 - RNA, 22 nt, Human
ucuaccagccucccuauuuuuu

SEQ ID NO: 1704800 - RNA, 18 nt, Human
uccauuuaauaauuauau

SEQ ID NO: 1704801 - RNA, 13 nt, Human
accuacauguauu

SEQ ID NO: 1704802 - RNA, 14 nt, Human
accuacauguauuu

SEQ ID NO: 1704803 - RNA, 15 nt, Human
accuacauguauuug

SEQ ID NO: 1704804 - RNA, 16 nt, Human
uauuucuauauuuuca

SEQ ID NO: 1704805 - RNA, 17 nt, Human
uauuucuauauuuucau

SEQ ID NO: 1704806 - RNA, 18 nt, Human
uauuucuauauuuucauu

SEQ ID NO: 1704807 - RNA, 18 nt, Human
acaguuuugguugcuuua

SEQ ID NO: 1704808 - RNA, 19 nt, Human
acaguuuugguugcuuuaa

SEQ ID NO: 1704809 - RNA, 24 nt, Human
acaguuuugguugcuuuaauauca

SEQ ID NO: 1704810 - RNA, 14 nt, Human
acauagucuggcug

SEQ ID NO: 1704811 - RNA, 15 nt, Human
acauagucuggcugu

SEQ ID NO: 1704812 - RNA, 20 nt, Human
acauagucuggcuguaccca

SEQ ID NO: 1704813 - RNA, 22 nt, Human
ucaaaguugccuaaauccauuu

SEQ ID NO: 1704814 - RNA, 18 nt, Human
ucaaaguugccuaaaucc

SEQ ID NO: 1704815 - RNA, 19 nt, Human
ucaaaguugccuaaaucca

SEQ ID NO: 1704816 - RNA, 21 nt, Human
ucaaaguugccuaaauccauu

SEQ ID NO: 1704817 - RNA, 16 nt, Human
uauuuuuauauuuacu

SEQ ID NO: 1704818 - RNA, 18 nt, Human
accccagacgaugucuuc

SEQ ID NO: 1704819 - RNA, 18 nt, Human
ucagaaggcaaaugacuu

SEQ ID NO: 1704820 - RNA, 19 nt, Human
ucagaaggcaaaugacuuu

SEQ ID NO: 1704821 - RNA, 22 nt, Human
ucagaaggcaaaugacuuugga

SEQ ID NO: 1704822 - RNA, 19 nt, Human
accaugggauaaaugccau

SEQ ID NO: 1704823 - RNA, 13 nt, Human
ucaauuuuaacaa

SEQ ID NO: 1704824 - RNA, 21 nt, Human
acaccccagacgaugucuuca

SEQ ID NO: 1704825 - RNA, 17 nt, Human
uagucuugucucagauu

SEQ ID NO: 1704826 - RNA, 22 nt, Human
uagucuugucucagauuuuauu

SEQ ID NO: 1704827 - RNA, 21 nt, Human
acacuccaauuaaggauuuua

SEQ ID NO: 1704828 - RNA, 18 nt, Human
acacuccaauuaaggauu

SEQ ID NO: 1704829 - RNA, 17 nt, Human
acacuccaauuaaggau

SEQ ID NO: 1704830 - RNA, 19 nt, Human
uacuuuuuggcauaacaua

SEQ ID NO: 1704831 - RNA, 20 nt, Human
uacuuuuuggcauaacauaa

SEQ ID NO: 1704832 - RNA, 14 nt, Human
uacuuuuuggcaua

SEQ ID NO: 1704833 - RNA, 16 nt, Human
uacuuugugcuggggu

SEQ ID NO: 1704834 - RNA, 22 nt, Human
uacuuugugcugggguuaucug

SEQ ID NO: 1704835 - RNA, 16 nt, Human
aauuuuguuucuguac

SEQ ID NO: 1704836 - RNA, 20 nt, Human
acaaaguauuaagcauauau

SEQ ID NO: 1704837 - RNA, 14 nt, Human
uagaucuaguucac

SEQ ID NO: 1704838 - RNA, 15 nt, Human
acaacagcuggugcc

SEQ ID NO: 1704839 - RNA, 15 nt, Human
uagcuagacugguga

SEQ ID NO: 1704840 - RNA, 18 nt, Human
uagcuagacuggugacug

SEQ ID NO: 1704841 - RNA, 15 nt, Human
uaaaucugugaacuu

SEQ ID NO: 1704842 - RNA, 16 nt, Human
uaaaucugugaacuug

SEQ ID NO: 1704843 - RNA, 17 nt, Human
uaaaucugugaacuuga

SEQ ID NO: 1704844 - RNA, 18 nt, Human
uaaaucugugaacuugaa

SEQ ID NO: 1704845 - RNA, 19 nt, Human
uaaaucugugaacuugaaa

SEQ ID NO: 1704846 - RNA, 21 nt, Human
uaaaucugugaacuugaaauu

SEQ ID NO: 1704847 - RNA, 22 nt, Human
uaaaucugugaacuugaaauuu

SEQ ID NO: 1704848 - RNA, 18 nt, Human
uaaauagcuagacuggug

SEQ ID NO: 1704849 - RNA, 17 nt, Human
uaaauaaauaaauagcu

SEQ ID NO: 1704850 - RNA, 14 nt, Human
uaaauaaauagcua

SEQ ID NO: 1704851 - RNA, 13 nt, Human
uaagaaugaaaua

SEQ ID NO: 1704852 - RNA, 15 nt, Human
uaagaaugaaauacu

SEQ ID NO: 1704853 - RNA, 21 nt, Human
uaagaaugaaauacuguuuga

SEQ ID NO: 1704854 - RNA, 17 nt, Human
aauauuuuaugauccag

SEQ ID NO: 1704855 - RNA, 18 nt, Human
aauauuuuaugauccagc

SEQ ID NO: 1704856 - RNA, 16 nt, Human
uaacauaaaucuguga

SEQ ID NO: 1704857 - RNA, 17 nt, Human
uaacauaaaucugugaa

SEQ ID NO: 1704858 - RNA, 18 nt, Human
uaacauaaaucugugaac

SEQ ID NO: 1704859 - RNA, 20 nt, Human
uaacauaaaucugugaacuu

SEQ ID NO: 1704860 - RNA, 15 nt, Human
uaacauaaaucugug

SEQ ID NO: 1704861 - RNA, 14 nt, Human
uaacauaaaucugu

SEQ ID NO: 1704862 - RNA, 18 nt, Human
aauaucaucaguauugaa

SEQ ID NO: 1704863 - RNA, 13 nt, Human
aaucugugaacuu

SEQ ID NO: 1704864 - RNA, 15 nt, Human
aaucugugaacuuga

SEQ ID NO: 1704865 - RNA, 17 nt, Human
aaucugugaacuugaaa

SEQ ID NO: 1704866 - RNA, 18 nt, Human
aaucugugaacuugaaau

SEQ ID NO: 1704867 - RNA, 19 nt, Human
aaucugugaacuugaaauu

SEQ ID NO: 1704868 - RNA, 15 nt, Human
uaaguaucugacauc

SEQ ID NO: 1704869 - RNA, 16 nt, Human
uaaguaucugacaucu

SEQ ID NO: 1704870 - RNA, 21 nt, Human
uaaucaacugggcugaacacu

SEQ ID NO: 1704871 - RNA, 19 nt, Human
aaucuuuaaaaaaaaaauu

SEQ ID NO: 1704872 - RNA, 20 nt, Human
aaucuuuaaaaaaaaaauug

SEQ ID NO: 1704873 - RNA, 16 nt, Human
uacaguauaauuaaca

SEQ ID NO: 1704874 - RNA, 17 nt, Human
uacaguauaauuaacau

SEQ ID NO: 1704875 - RNA, 14 nt, Human
uacaguauaauuaa

SEQ ID NO: 1704876 - RNA, 20 nt, Human
aauggacuguggugacuuug

SEQ ID NO: 1704877 - RNA, 18 nt, Human
uacaguauaauuaacaug

SEQ ID NO: 1704878 - RNA, 19 nt, Human
uacaguauaauuaacaugu

SEQ ID NO: 1704879 - RNA, 23 nt, Human
uacaguauaauuaacauguuaaa

SEQ ID NO: 1704880 - RNA, 19 nt, Human
aagaaugguccgugcuaag

SEQ ID NO: 1704881 - RNA, 22 nt, Human
aagaaugguccgugcuaaggac

SEQ ID NO: 1704882 - RNA, 16 nt, Human
aagagguuuuucuuaa

SEQ ID NO: 1704883 - RNA, 19 nt, Human
guguuguacucaauuuuaa

SEQ ID NO: 1704884 - RNA, 20 nt, Human
guuucuguacuuuuuggcau

SEQ ID NO: 1704885 - RNA, 15 nt, Human
guugccuaaauccau

SEQ ID NO: 1704886 - RNA, 16 nt, Human
guugccuaaauccauu

SEQ ID NO: 1704887 - RNA, 14 nt, Human
guugccuaaaucca

SEQ ID NO: 1704888 - RNA, 17 nt, Human
guucuuguauuaagaau

SEQ ID NO: 1704889 - RNA, 18 nt, Human
guucuuguauuaagaaug

SEQ ID NO: 1704890 - RNA, 21 nt, Human
guucuuguauuaagaaugaaa

SEQ ID NO: 1704891 - RNA, 15 nt, Human
guucuggugugaacu

SEQ ID NO: 1704892 - RNA, 18 nt, Human
guucuggugugaacuaaa

SEQ ID NO: 1704893 - RNA, 12 nt, Human
guuagaucuagu

SEQ ID NO: 1704894 - RNA, 15 nt, Human
guuaagucuguuuua

SEQ ID NO: 1704895 - RNA, 22 nt, Human
guuaagucuguuuuaugacuuc

SEQ ID NO: 1704896 - RNA, 13 nt, Human
guuaagucuguuu

SEQ ID NO: 1704897 - RNA, 20 nt, Human
guuauuuauaaucacuuuuu

SEQ ID NO: 1704898 - RNA, 14 nt, Human
guuauuuauaauca

SEQ ID NO: 1704899 - RNA, 17 nt, Human
aacacuccaauuaagga

SEQ ID NO: 1704900 - RNA, 13 nt, Human
aacuaaacuuuca

SEQ ID NO: 1704901 - RNA, 15 nt, Human
aacuaaacuuucaca

SEQ ID NO: 1704902 - RNA, 17 nt, Human
aacuaaacuuucacacc

SEQ ID NO: 1704903 - RNA, 15 nt, Human
aaccaugggauaaau

SEQ ID NO: 1704904 - RNA, 17 nt, Human
aaccaugggauaaaugc

SEQ ID NO: 1704905 - RNA, 18 nt, Human
aaccaugggauaaaugcc

SEQ ID NO: 1704906 - RNA, 20 nt, Human
aaccaugggauaaaugccau

SEQ ID NO: 1704907 - RNA, 21 nt, Human
aaccaugggauaaaugccauc

SEQ ID NO: 1704908 - RNA, 15 nt, Human
aaauccauuuggaaa

SEQ ID NO: 1704909 - RNA, 16 nt, Human
aaauccauuuggaaau

SEQ ID NO: 1704910 - RNA, 14 nt, Human
aaauccauuuggaa

SEQ ID NO: 1704911 - RNA, 18 nt, Human
aaauccauuuggaaaucu

SEQ ID NO: 1704912 - RNA, 21 nt, Human
aaauccauuuggaaaucuuua

SEQ ID NO: 1704913 - RNA, 22 nt, Human
aaauccauuuggaaaucuuuaa

SEQ ID NO: 1704914 - RNA, 23 nt, Human
aaauccauuuggaaaucuuuaaa

SEQ ID NO: 1704915 - RNA, 13 nt, Human
aaaucccauuauu

SEQ ID NO: 1704916 - RNA, 15 nt, Human
aaaucccauuauuca

SEQ ID NO: 1704917 - RNA, 16 nt, Human
aaaucccauuauucaa

SEQ ID NO: 1704918 - RNA, 17 nt, Human
aaaucccauuauucaaa

SEQ ID NO: 1704919 - RNA, 19 nt, Human
aaaucccauuauucaaagu

SEQ ID NO: 1704920 - RNA, 20 nt, Human
aaaucccauuauucaaaguu

SEQ ID NO: 1704921 - RNA, 21 nt, Human
aaaucccauuauucaaaguug

SEQ ID NO: 1704922 - RNA, 22 nt, Human
aaaucccauuauucaaaguugc

SEQ ID NO: 1704923 - RNA, 13 nt, Human
aaaucgcuuuuga

SEQ ID NO: 1704924 - RNA, 14 nt, Human
aaaucgcuuuugau

SEQ ID NO: 1704925 - RNA, 15 nt, Human
aaaucgcuuuugaua

SEQ ID NO: 1704926 - RNA, 13 nt, Human
guaugugugaagu

SEQ ID NO: 1704927 - RNA, 17 nt, Human
guaugugugaagugagu

SEQ ID NO: 1704928 - RNA, 18 nt, Human
aaauucccuggccuuuca

SEQ ID NO: 1704929 - RNA, 15 nt, Human
aaauucccuggccuu

SEQ ID NO: 1704930 - RNA, 14 nt, Human
aaaaguuuaauauu

SEQ ID NO: 1704931 - RNA, 16 nt, Human
aaaaguuuaauauuaa

SEQ ID NO: 1704932 - RNA, 18 nt, Human
aaaaguuuaauauuaaag

SEQ ID NO: 1704933 - RNA, 17 nt, Human
aaaagagguuuuucuua

SEQ ID NO: 1704934 - RNA, 21 nt, Human
aaaagagguuuuucuuaaaua

SEQ ID NO: 1704935 - RNA, 22 nt, Human
aaaagagguuuuucuuaaauaa

SEQ ID NO: 1704936 - RNA, 14 nt, Human
aaaccaguauugua

SEQ ID NO: 1704937 - RNA, 16 nt, Human
aaaccaguauuguaca

SEQ ID NO: 1704938 - RNA, 17 nt, Human
aaaccaguauuguacaa

SEQ ID NO: 1704939 - RNA, 18 nt, Human
aaaccaguauuguacaaa

SEQ ID NO: 1704940 - RNA, 22 nt, Human
aaaccaguauuguacaaaguau

SEQ ID NO: 1704941 - RNA, 17 nt, Human
aaagccauguuuauuac

SEQ ID NO: 1704942 - RNA, 18 nt, Human
aaagccauguuuauuaca

SEQ ID NO: 1704943 - RNA, 23 nt, Human
aaagccauguuuauuacaguaua

SEQ ID NO: 1704944 - RNA, 14 nt, Human
aaagccauguuuau

SEQ ID NO: 1704945 - RNA, 16 nt, Human
aaagccauguuuauua

SEQ ID NO: 1704946 - RNA, 15 nt, Human
aaagaucauguaaaa

SEQ ID NO: 1704947 - RNA, 21 nt, Human
aaauggacuguggugacuuug

SEQ ID NO: 1704948 - RNA, 20 nt, Human
aaauggacuguggugacuuu

SEQ ID NO: 1704949 - RNA, 23 nt, Human
aaauggacuguggugacuuugga

SEQ ID NO: 1704950 - RNA, 23 nt, Human
aaggacuuguuagaucuaguuca

SEQ ID NO: 1704951 - RNA, 15 nt, Human
aaggacuuguuagau

SEQ ID NO: 1704952 - RNA, 21 nt, Human
aaggacuuguuagaucuaguu

SEQ ID NO: 1704953 - RNA, 23 nt, Human
aaggacuucuuuaauuuuggaau

SEQ ID NO: 1704954 - RNA, 17 nt, Human
aaguuuaauauuaaagc

SEQ ID NO: 1704955 - RNA, 18 nt, Human
aaguuuaauauuaaagcc

SEQ ID NO: 1704956 - RNA, 15 nt, Human
aaguuuaauauuaaa

SEQ ID NO: 1704957 - RNA, 23 nt, Human
aaguugaauuuauuggcuuuucu

SEQ ID NO: 1704958 - RNA, 24 nt, Human
aaguugaauuuauuggcuuuucug

SEQ ID NO: 1704959 - RNA, 21 nt, Human
aaguuguuugagaaauuaagu

SEQ ID NO: 1704960 - RNA, 15 nt, Human
aaguuguuugagaaa

SEQ ID NO: 1704961 - RNA, 22 nt, Human
aaguuguuugagaaauuaagua

SEQ ID NO: 1704962 - RNA, 14 nt, Human
aaguugaauuuauu

SEQ ID NO: 1704963 - RNA, 15 nt, Human
aaguugaauuuauug

SEQ ID NO: 1704964 - RNA, 17 nt, Human
aaguugaauuuauuggc

SEQ ID NO: 1704965 - RNA, 20 nt, Human
aauaaagaucauguaaaagu

SEQ ID NO: 1704966 - RNA, 14 nt, Human
aauaaagaucaugu

SEQ ID NO: 1704967 - RNA, 19 nt, Human
aauaaagaucauguaaaag

SEQ ID NO: 1704968 - RNA, 22 nt, Human
aauauuaaagccauguuuauua

SEQ ID NO: 1704969 - RNA, 16 nt, Human
acauguuaaaccaugg

SEQ ID NO: 1704970 - RNA, 21 nt, Human
acauguuaaaccaugggauaa

SEQ ID NO: 1704971 - RNA, 23 nt, Human
acauguuaaaccaugggauaaau

SEQ ID NO: 1704972 - RNA, 14 nt, Human
acauguuaaaccau

SEQ ID NO: 1704973 - RNA, 17 nt, Human
aauuguaauuauaucug

SEQ ID NO: 1704974 - RNA, 15 nt, Human
aauuguaauuauauc

SEQ ID NO: 1704975 - RNA, 16 nt, Human
aauuguaauuauaucu

SEQ ID NO: 1704976 - RNA, 14 nt, Human
aauuguaauuauau

SEQ ID NO: 1704977 - RNA, 13 nt, Human
aauucuguauaga

SEQ ID NO: 1704978 - RNA, 14 nt, Human
aauucuguauagau

SEQ ID NO: 1704979 - RNA, 20 nt, Human
aauucuguauagauuagaga

SEQ ID NO: 1704980 - RNA, 12 nt, Human
aauucuguauag

SEQ ID NO: 1704981 - RNA, 15 nt, Human
aauuggggauucuua

SEQ ID NO: 1704982 - RNA, 20 nt, Human
aauuauaucugaggaauucu

SEQ ID NO: 1704983 - RNA, 22 nt, Human
aauuauaucugaggaauucugu

SEQ ID NO: 1704984 - RNA, 23 nt, Human
aauuauaucugaggaauucugua

SEQ ID NO: 1704985 - RNA, 19 nt, Human
aauuauaugcuauuucuau

SEQ ID NO: 1704986 - RNA, 20 nt, Human
aauuauaugcuauuucuaua

SEQ ID NO: 1704987 - RNA, 21 nt, Human
aauuauaugcuauuucuauau

SEQ ID NO: 1704988 - RNA, 19 nt, Human
acuucuuuaauuuuggaau

SEQ ID NO: 1704989 - RNA, 20 nt, Human
acuucuuuaauuuuggaauu

SEQ ID NO: 1704990 - RNA, 18 nt, Human
acuucuuuaauuuuggaa

SEQ ID NO: 1704991 - RNA, 18 nt, Human
acuggugacugauucuuc

SEQ ID NO: 1704992 - RNA, 19 nt, Human
acuggugacugauucuuca

SEQ ID NO: 1704993 - RNA, 16 nt, Human
acuggugacugauucu

SEQ ID NO: 1704994 - RNA, 20 nt, Human
acuggugacugauucuucag

SEQ ID NO: 1704995 - RNA, 22 nt, Human
acugauuugacauagucuggcu

SEQ ID NO: 1704996 - RNA, 14 nt, Human
aggaagguucuggu

SEQ ID NO: 1704997 - RNA, 16 nt, Human
aggaagguucuggugu

SEQ ID NO: 1704998 - RNA, 21 nt, Human
aggaagguucuggugugaacu

SEQ ID NO: 1704999 - RNA, 13 nt, Human
agaucugccuaag

SEQ ID NO: 1705000 - RNA, 18 nt, Human
agaucugccuaaggacuu

SEQ ID NO: 1705001 - RNA, 12 nt, Human
auacuguuugag

SEQ ID NO: 1705002 - RNA, 16 nt, Human
auacuguuugagguuu

SEQ ID NO: 1705003 - RNA, 20 nt, Human
auacuguuugagguuuuuaa

SEQ ID NO: 1705004 - RNA, 19 nt, Human
auaaagaucauguaaaagu

SEQ ID NO: 1705005 - RNA, 14 nt, Human
auacaauuuuguuu

SEQ ID NO: 1705006 - RNA, 16 nt, Human
auacaauuuuguuucu

SEQ ID NO: 1705007 - RNA, 17 nt, Human
auacaauuuuguuucug

SEQ ID NO: 1705008 - RNA, 18 nt, Human
auacaauuuuguuucugu

SEQ ID NO: 1705009 - RNA, 16 nt, Human
auaaaaaauuaugaca

SEQ ID NO: 1705010 - RNA, 19 nt, Human
agucuggcuguacccagga

SEQ ID NO: 1705011 - RNA, 21 nt, Human
agucuggcuguacccaggaau

SEQ ID NO: 1705012 - RNA, 18 nt, Human
augaaacuuguguaaaua

SEQ ID NO: 1705013 - RNA, 15 nt, Human
auggcuuuguauaga

SEQ ID NO: 1705014 - RNA, 16 nt, Human
auggcuuuguauagaa

SEQ ID NO: 1705015 - RNA, 18 nt, Human
auccagcagauuauucac

SEQ ID NO: 1705016 - RNA, 18 nt, Human
caaaguugccuaaaucca

SEQ ID NO: 1705017 - RNA, 15 nt, Human
caaaguugccuaaau

SEQ ID NO: 1705018 - RNA, 17 nt, Human
caaaguugccuaaaucc

SEQ ID NO: 1705019 - RNA, 14 nt, Human
caaaguugccuaaa

SEQ ID NO: 1705020 - RNA, 17 nt, Human
auuuuaacaacagcugg

SEQ ID NO: 1705021 - RNA, 12 nt, Human
cacacacuuuug

SEQ ID NO: 1705022 - RNA, 14 nt, Human
caauuuuguuucug

SEQ ID NO: 1705023 - RNA, 16 nt, Human
caauuuuguuucugua

SEQ ID NO: 1705024 - RNA, 17 nt, Human
caauuuuguuucuguac

SEQ ID NO: 1705025 - RNA, 13 nt, Human
caauuuuguuucu

SEQ ID NO: 1705026 - RNA, 20 nt, Human
cacaguuuugguugcuuuaa

SEQ ID NO: 1705027 - RNA, 23 nt, Human
cacaguuuugguugcuuuaauau

SEQ ID NO: 1705028 - RNA, 19 nt, Human
cacaguuuugguugcuuua

SEQ ID NO: 1705029 - RNA, 14 nt, Human
uuuuucuguuauau

SEQ ID NO: 1705030 - RNA, 23 nt, Human
uuuuucuuaaauaauaaagauca

SEQ ID NO: 1705031 - RNA, 20 nt, Human
uuugagguuuuuaagccuua

SEQ ID NO: 1705032 - RNA, 22 nt, Human
uuugcauaggugaucucauuua

SEQ ID NO: 1705033 - RNA, 16 nt, Human
uuuggaaaucuuuaaa

SEQ ID NO: 1705034 - RNA, 22 nt, Human
uuugguuaagucuguuuuauga

SEQ ID NO: 1705035 - RNA, 18 nt, Human
uuugguuaagucuguuuu

SEQ ID NO: 1705036 - RNA, 19 nt, Human
uuugguuaagucuguuuua

SEQ ID NO: 1705037 - RNA, 20 nt, Human
uuugguuaagucuguuuuau

SEQ ID NO: 1705038 - RNA, 11 nt, Human
uuuguauagaa

SEQ ID NO: 1705039 - RNA, 12 nt, Human
uuuguguuagag

SEQ ID NO: 1705040 - RNA, 12 nt, Human
uuuguuguuugu

SEQ ID NO: 1705041 - RNA, 14 nt, Human
uuuguuguuuguuu

SEQ ID NO: 1705042 - RNA, 19 nt, Human
uuuguuguuuguuuagucu

SEQ ID NO: 1705043 - RNA, 15 nt, Human
uuuuaugauccagca

SEQ ID NO: 1705044 - RNA, 13 nt, Human
uuuuaugauccag

SEQ ID NO: 1705045 - RNA, 14 nt, Human
uuucucuuucguua

SEQ ID NO: 1705046 - RNA, 18 nt, Human
uuuccuagcacacacuuu

SEQ ID NO: 1705047 - RNA, 21 nt, Human
uuuccuagcacacacuuuugg

SEQ ID NO: 1705048 - RNA, 18 nt, Human
uuucagauaacuguuauu

SEQ ID NO: 1705049 - RNA, 13 nt, Human
uuuaugauccagc

SEQ ID NO: 1705050 - RNA, 17 nt, Human
uuuauuggcuuuucuga

SEQ ID NO: 1705051 - RNA, 21 nt, Human
uuuauuggcuuuucugaucca

SEQ ID NO: 1705052 - RNA, 17 nt, Human
uucuaugcugaguuugu

SEQ ID NO: 1705053 - RNA, 11 nt, Human
uucuauauuuu

SEQ ID NO: 1705054 - RNA, 14 nt, Human
uucuauauuuucau

SEQ ID NO: 1705055 - RNA, 15 nt, Human
uucuauauuuucauu

SEQ ID NO: 1705056 - RNA, 16 nt, Human
uucuauauuuucauuc

SEQ ID NO: 1705057 - RNA, 18 nt, Human
uucuauauuuucauucuc

SEQ ID NO: 1705058 - RNA, 21 nt, Human
uucuauauuuucauucuccua

SEQ ID NO: 1705059 - RNA, 17 nt, Human
uuccuagcacacacuuu

SEQ ID NO: 1705060 - RNA, 19 nt, Human
uuccuagcacacacuuuug

SEQ ID NO: 1705061 - RNA, 16 nt, Human
uuacuaaaauggacug

SEQ ID NO: 1705062 - RNA, 17 nt, Human
uuacuaaaauggacugu

SEQ ID NO: 1705063 - RNA, 18 nt, Human
uuacuaaaauggacugug

SEQ ID NO: 1705064 - RNA, 15 nt, Human
uuacuaaaauggacu

SEQ ID NO: 1705065 - RNA, 11 nt, Human
uucacugauuu

SEQ ID NO: 1705066 - RNA, 12 nt, Human
uuggaaaucuuu

SEQ ID NO: 1705067 - RNA, 15 nt, Human
uuggaaaucuuuaaa

SEQ ID NO: 1705068 - RNA, 21 nt, Human
uuggaccaaaaaccaguauug

SEQ ID NO: 1705069 - RNA, 19 nt, Human
uuggcuuuucugauccagu

SEQ ID NO: 1705070 - RNA, 22 nt, Human
uuggcuuuucugauccaguuuu

SEQ ID NO: 1705071 - RNA, 15 nt, Human
uuggcuuuucugauc

SEQ ID NO: 1705072 - RNA, 12 nt, Human
uucuuguauuaa

SEQ ID NO: 1705073 - RNA, 13 nt, Human
uucuuguauuaag

SEQ ID NO: 1705074 - RNA, 18 nt, Human
uucuuguauuaagaauga

SEQ ID NO: 1705075 - RNA, 22 nt, Human
uugaaacggaugauuucuaugc

SEQ ID NO: 1705076 - RNA, 20 nt, Human
uugaaacggaugauuucuau

SEQ ID NO: 1705077 - RNA, 21 nt, Human
uugaaacggaugauuucuaug

SEQ ID NO: 1705078 - RNA, 14 nt, Human
ugugcgcuaaacuu

SEQ ID NO: 1705079 - RNA, 19 nt, Human
ugugcgcuaaacuuuucug

SEQ ID NO: 1705080 - RNA, 22 nt, Human
ugugcgcuaaacuuuucugaua

SEQ ID NO: 1705081 - RNA, 23 nt, Human
ugugcgcuaaacuuuucugauag

SEQ ID NO: 1705082 - RNA, 13 nt, Human
uguacucaauuuu

SEQ ID NO: 1705083 - RNA, 16 nt, Human
uguauagaaccucuuu

SEQ ID NO: 1705084 - RNA, 17 nt, Human
ugugugaagugagugag

SEQ ID NO: 1705085 - RNA, 16 nt, Human
uguuaaaccaugggau

SEQ ID NO: 1705086 - RNA, 18 nt, Human
uguuaaaccaugggauaa

SEQ ID NO: 1705087 - RNA, 20 nt, Human
uguuaaaccaugggauaaau

SEQ ID NO: 1705088 - RNA, 21 nt, Human
uguuaaaccaugggauaaaug

SEQ ID NO: 1705089 - RNA, 23 nt, Human
uguuaaaccaugggauaaaugcc

SEQ ID NO: 1705090 - RNA, 16 nt, Human
uguuagaucuaguuca

SEQ ID NO: 1705091 - RNA, 20 nt, Human
uguugaaacggaugauuucu

SEQ ID NO: 1705092 - RNA, 21 nt, Human
uguugaaacggaugauuucua

SEQ ID NO: 1705093 - RNA, 22 nt, Human
uguugaaacggaugauuucuau

SEQ ID NO: 1705094 - RNA, 23 nt, Human
uguugaaacggaugauuucuaug

SEQ ID NO: 1705095 - RNA, 14 nt, Human
uguuguuuguuuag

SEQ ID NO: 1705096 - RNA, 18 nt, Human
uuaauaucaucaguauug

SEQ ID NO: 1705097 - RNA, 15 nt, Human
uuaauaucaucagua

SEQ ID NO: 1705098 - RNA, 13 nt, Human
uuaaggauuuuau

SEQ ID NO: 1705099 - RNA, 15 nt, Human
uuaaggauuuuaugc

SEQ ID NO: 1705100 - RNA, 18 nt, Human
uuaaggauuuuaugcuuu

SEQ ID NO: 1705101 - RNA, 20 nt, Human
uuaaggauuuuaugcuuuaa

SEQ ID NO: 1705102 - RNA, 20 nt, Human
uuaauaauuauaugcuauuu

SEQ ID NO: 1705103 - RNA, 23 nt, Human
uuaauaauuauaugcuauuucua

SEQ ID NO: 1705104 - RNA, 18 nt, Human
uuaauaauuauaugcuau

SEQ ID NO: 1705105 - RNA, 12 nt, Human
uuaacauguuaa

SEQ ID NO: 1705106 - RNA, 18 nt, Human
uuaacauguuaaaccaug

SEQ ID NO: 1705107 - RNA, 19 nt, Human
uuaacauguuaaaccaugg

SEQ ID NO: 1705108 - RNA, 12 nt, Human
uguuuguuuagu

SEQ ID NO: 1705109 - RNA, 21 nt, Human
uguuuguuuagucuugucuca

SEQ ID NO: 1705110 - RNA, 14 nt, Human
uggcuuuguauaga

SEQ ID NO: 1705111 - RNA, 22 nt, Human
uggcuuuguauagaaccucuuu

SEQ ID NO: 1705112 - RNA, 15 nt, Human
uggcuguacccagga

SEQ ID NO: 1705113 - RNA, 20 nt, Human
uggccuuucauauuuuagcu

SEQ ID NO: 1705114 - RNA, 14 nt, Human
ugcuuguuuccuag

SEQ ID NO: 1705115 - RNA, 12 nt, Human
ugcuuuaaacau

SEQ ID NO: 1705116 - RNA, 16 nt, Human
ugcuuucagauacugg

SEQ ID NO: 1705117 - RNA, 17 nt, Human
ugcuuucagauacugga

SEQ ID NO: 1705118 - RNA, 20 nt, Human
ugcuuucagauacuggauug

SEQ ID NO: 1705119 - RNA, 21 nt, Human
ugcuuucagauacuggauugu

SEQ ID NO: 1705120 - RNA, 12 nt, Human
ugcuuucagaua

SEQ ID NO: 1705121 - RNA, 15 nt, Human
uggcauaacauaaau

SEQ ID NO: 1705122 - RNA, 19 nt, Human
ugaagucucugaagugaaa

SEQ ID NO: 1705123 - RNA, 22 nt, Human
ugcacggugaauggcuuuguau

SEQ ID NO: 1705124 - RNA, 23 nt, Human
ugcacggugaauggcuuuguaua

SEQ ID NO: 1705125 - RNA, 23 nt, Human
ugccuaaggacuucuuuaauuuu

SEQ ID NO: 1705126 - RNA, 15 nt, Human
ugcugaguuugugcu

SEQ ID NO: 1705127 - RNA, 17 nt, Human
ugcugaguuugugcugg

SEQ ID NO: 1705128 - RNA, 19 nt, Human
ucuugucucagauuuuauu

SEQ ID NO: 1705129 - RNA, 18 nt, Human
ucuuuaaaaaaaaaauug

SEQ ID NO: 1705130 - RNA, 19 nt, Human
ucuuuaaaaaaaaaauugg

SEQ ID NO: 1705131 - RNA, 15 nt, Human
ucuugccuuuuucau

SEQ ID NO: 1705132 - RNA, 22 nt, Human
ucuuguauuaagaaugaaauac

SEQ ID NO: 1705133 - RNA, 21 nt, Human
ucuucucagaaggcaaaugac

SEQ ID NO: 1705134 - RNA, 23 nt, Human
ucuucucagaaggcaaaugacuu

SEQ ID NO: 1705135 - RNA, 17 nt, Human
ucuguuuuaugacuuca

SEQ ID NO: 1705136 - RNA, 13 nt, Human
ucuguuuuaugac

SEQ ID NO: 1705137 - RNA, 15 nt, Human
ucuguuuuaugacuu

SEQ ID NO: 1705138 - RNA, 16 nt, Human
ucuguuuuaugacuuc

SEQ ID NO: 1705139 - RNA, 15 nt, Human
ucuguuauauaaaug

SEQ ID NO: 1705140 - RNA, 18 nt, Human
ucuguuauauaaaugguu

SEQ ID NO: 1705141 - RNA, 18 nt, Human
ugaacacuccaauuaagg

SEQ ID NO: 1705142 - RNA, 19 nt, Human
ugaacacuccaauuaagga

SEQ ID NO: 1705143 - RNA, 22 nt, Human
ugaacacuccaauuaaggauuu

SEQ ID NO: 1705144 - RNA, 23 nt, Human
ugaacacuccaauuaaggauuuu

SEQ ID NO: 1705145 - RNA, 16 nt, Human
ucugacaucucugcaa

SEQ ID NO: 1705146 - RNA, 20 nt, Human
ucugaggaauucuguauaga

SEQ ID NO: 1705147 - RNA, 19 nt, Human
ucucugcaaucuucucaga

SEQ ID NO: 1705148 - RNA, 19 nt, Human
ucucagaaggcaaaugacu

SEQ ID NO: 1705149 - RNA, 20 nt, Human
ucucagaaggcaaaugacuu

SEQ ID NO: 1705150 - RNA, 21 nt, Human
ucucagaaggcaaaugacuuu

SEQ ID NO: 1705151 - RNA, 22 nt, Human
ucucagaaggcaaaugacuuug

SEQ ID NO: 1705152 - RNA, 17 nt, Human
ucucaaccaccuuucag

SEQ ID NO: 1705153 - RNA, 12 nt, Human
uauuuuaugauc

SEQ ID NO: 1705154 - RNA, 17 nt, Human
uaucugaagucagaucu

SEQ ID NO: 1705155 - RNA, 18 nt, Human
uaucugaagucagaucug

SEQ ID NO: 1705156 - RNA, 15 nt, Human
uaucugaggaauucu

SEQ ID NO: 1705157 - RNA, 18 nt, Human
uaucugacaucucugcaa

SEQ ID NO: 1705158 - RNA, 18 nt, Human
ucacucuccauuuaauaa

SEQ ID NO: 1705159 - RNA, 15 nt, Human
ucagauaacuguuau

SEQ ID NO: 1705160 - RNA, 13 nt, Human
ucagauaacuguu

SEQ ID NO: 1705161 - RNA, 13 nt, Human
ucacuuuuuucca

SEQ ID NO: 1705162 - RNA, 15 nt, Human
ucacuuuuuuccaca

SEQ ID NO: 1705163 - RNA, 16 nt, Human
ucacuuuuuuccacau

SEQ ID NO: 1705164 - RNA, 20 nt, Human
uccagcagauuauucacuga

SEQ ID NO: 1705165 - RNA, 17 nt, Human
uccagcagauuauucac

SEQ ID NO: 1705166 - RNA, 22 nt, Human
uccagcagauuauucacugauu

SEQ ID NO: 1705167 - RNA, 16 nt, Human
ucauuauuuuauuaug

SEQ ID NO: 1705168 - RNA, 18 nt, Human
ucauuauuuuauuaugaa

SEQ ID NO: 1705169 - RNA, 19 nt, Human
ucauuauuuuauuaugaaa

SEQ ID NO: 1705170 - RNA, 14 nt, Human
ucauuauuuuauua

SEQ ID NO: 1705171 - RNA, 15 nt, Human
ucauuauuuuauuau

SEQ ID NO: 1705172 - RNA, 13 nt, Human
ucauuauuuuauu

SEQ ID NO: 1705173 - RNA, 12 nt, Human
guuuguuuaguc

SEQ ID NO: 1705174 - RNA, 16 nt, Human
guuugagguuuuuaag

SEQ ID NO: 1705175 - RNA, 19 nt, Human
guuugagguuuuuaagccu

SEQ ID NO: 1705176 - RNA, 23 nt, Human
guuugugcugguguaugugugaa

SEQ ID NO: 1705177 - RNA, 14 nt, Human
guuuagucuugucu

SEQ ID NO: 1705178 - RNA, 18 nt, Human
guuuagucuugucucaga

SEQ ID NO: 1705179 - RNA, 12 nt, Human
uaaacuuucaca

SEQ ID NO: 1705180 - RNA, 13 nt, Human
uaaacuuucacac

SEQ ID NO: 1705181 - RNA, 13 nt, Human
uaaacuuuucuga

SEQ ID NO: 1705182 - RNA, 14 nt, Human
uaaacuuuucugau

SEQ ID NO: 1705183 - RNA, 15 nt, Human
uaaacuuuucugaua

SEQ ID NO: 1705184 - RNA, 13 nt, Human
uaaaguugaauuu

SEQ ID NO: 1705185 - RNA, 14 nt, Human
uaaaguugaauuua

SEQ ID NO: 1705186 - RNA, 15 nt, Human
uaaaguugaauuuau

SEQ ID NO: 1705187 - RNA, 17 nt, Human
uaaaguugaauuuauug

SEQ ID NO: 1705188 - RNA, 19 nt, Human
uaaaguugaauuuauuggc

SEQ ID NO: 1705189 - RNA, 21 nt, Human
uaaaguugaauuuauuggcuu

SEQ ID NO: 1705190 - RNA, 23 nt, Human
uaaaguugaauuuauuggcuuuu

SEQ ID NO: 1705191 - RNA, 15 nt, Human
uaaauccauuuggaa

SEQ ID NO: 1705192 - RNA, 16 nt, Human
uaaauccauuuggaaa

SEQ ID NO: 1705193 - RNA, 14 nt, Human
uaaauccauuugga

SEQ ID NO: 1705194 - RNA, 18 nt, Human
uaaauccauuuggaaauc

SEQ ID NO: 1705195 - RNA, 19 nt, Human
uaaauccauuuggaaaucu

SEQ ID NO: 1705196 - RNA, 22 nt, Human
uaaauccauuuggaaaucuuua

SEQ ID NO: 1705197 - RNA, 23 nt, Human
uaaauccauuuggaaaucuuuaa

SEQ ID NO: 1705198 - RNA, 16 nt, Human
uaaaucccauuauuca

SEQ ID NO: 1705199 - RNA, 17 nt, Human
uaaaucccauuauucaa

SEQ ID NO: 1705200 - RNA, 19 nt, Human
uaaaucccauuauucaaag

SEQ ID NO: 1705201 - RNA, 18 nt, Human
uaacauguuaaaccaugg

SEQ ID NO: 1705202 - RNA, 16 nt, Human
uaacauguuaaaccau

SEQ ID NO: 1705203 - RNA, 17 nt, Human
uaacauguuaaaccaug

SEQ ID NO: 1705204 - RNA, 21 nt, Human
uaagcauauauuuuuauauuu

SEQ ID NO: 1705205 - RNA, 22 nt, Human
uaagcauauauuuuuauauuua

SEQ ID NO: 1705206 - RNA, 16 nt, Human
uaagcauauauuuuua

SEQ ID NO: 1705207 - RNA, 19 nt, Human
uaagcauauauuuuuauau

SEQ ID NO: 1705208 - RNA, 23 nt, Human
uaagcauauauuuuuauauuuac

SEQ ID NO: 1705209 - RNA, 12 nt, Human
uaauauuaaagc

SEQ ID NO: 1705210 - RNA, 13 nt, Human
uaauauuaaagcc

SEQ ID NO: 1705211 - RNA, 14 nt, Human
uaauauuaaagcca

SEQ ID NO: 1705212 - RNA, 23 nt, Human
uaauccucucaaccaccuuucag

SEQ ID NO: 1705213 - RNA, 15 nt, Human
uaauaauuauaugcu

SEQ ID NO: 1705214 - RNA, 16 nt, Human
uaauaauuauaugcua

SEQ ID NO: 1705215 - RNA, 19 nt, Human
uaauaauuauaugcuauuu

SEQ ID NO: 1705216 - RNA, 20 nt, Human
uaauaauuauaugcuauuuc

SEQ ID NO: 1705217 - RNA, 22 nt, Human
uaauaauuauaugcuauuucua

SEQ ID NO: 1705218 - RNA, 23 nt, Human
uaauaauuauaugcuauuucuau

SEQ ID NO: 1705219 - RNA, 16 nt, Human
uaauaaagaucaugua

SEQ ID NO: 1705220 - RNA, 17 nt, Human
uaauaaagaucauguaa

SEQ ID NO: 1705221 - RNA, 20 nt, Human
uaauaaggaaaaguuuaaua

SEQ ID NO: 1705222 - RNA, 18 nt, Human
uaauaaggaaaaguuuaa

SEQ ID NO: 1705223 - RNA, 12 nt, Human
uaauuaacaugu

SEQ ID NO: 1705224 - RNA, 14 nt, Human
uaauuaacauguua

SEQ ID NO: 1705225 - RNA, 15 nt, Human
uaauuaacauguuaa

SEQ ID NO: 1705226 - RNA, 17 nt, Human
uaauuaacauguuaaac

SEQ ID NO: 1705227 - RNA, 18 nt, Human
uaauuaacauguuaaacc

SEQ ID NO: 1705228 - RNA, 19 nt, Human
uaauuaacauguuaaacca

SEQ ID NO: 1705229 - RNA, 20 nt, Human
uaauuaacauguuaaaccau

SEQ ID NO: 1705230 - RNA, 19 nt, Human
uacaauuuuguuucuguac

SEQ ID NO: 1705231 - RNA, 21 nt, Human
uacaauuuuguuucuguacuu

SEQ ID NO: 1705232 - RNA, 18 nt, Human
uacaauuuuguuucugua

SEQ ID NO: 1705233 - RNA, 12 nt, Human
uaauuuuggaau

SEQ ID NO: 1705234 - RNA, 13 nt, Human
uaauuuuggaauu

SEQ ID NO: 1705235 - RNA, 13 nt, Human
uagacuggugacu

SEQ ID NO: 1705236 - RNA, 14 nt, Human
uagacuggugacug

SEQ ID NO: 1705237 - RNA, 17 nt, Human
uagacuggugacugauu

SEQ ID NO: 1705238 - RNA, 18 nt, Human
uagacuggugacugauuc

SEQ ID NO: 1705239 - RNA, 15 nt, Human
uagagaguguugaaa

SEQ ID NO: 1705240 - RNA, 14 nt, Human
uagagaguguugaa

SEQ ID NO: 1705241 - RNA, 16 nt, Human
uauaugcuauuucuau

SEQ ID NO: 1705242 - RNA, 18 nt, Human
uauaugcuauuucuauau

SEQ ID NO: 1705243 - RNA, 18 nt, Human
uauauuuuuauauuuacu

SEQ ID NO: 1705244 - RNA, 22 nt, Human
uaucaucaguauugaagcauuu

SEQ ID NO: 1705245 - RNA, 19 nt, Human
uauauuuuuauauuuacua

SEQ ID NO: 1705246 - RNA, 18 nt, Human
uauaaaucgcuuuugaua

SEQ ID NO: 1705247 - RNA, 19 nt, Human
uauaaaucgcuuuugauaa

SEQ ID NO: 1705248 - RNA, 20 nt, Human
uauaaaucgcuuuugauaau

SEQ ID NO: 1705249 - RNA, 22 nt, Human
ggaagccaaaccucugugagca

SEQ ID NO: 1705250 - RNA, 18 nt, Human
ggaaaaguuuaauauuaa

SEQ ID NO: 1705251 - RNA, 19 nt, Human
ggaaaaguuuaauauuaaa

SEQ ID NO: 1705252 - RNA, 21 nt, Human
ggaacgcguugaaauuguaau

SEQ ID NO: 1705253 - RNA, 17 nt, Human
ggaacgcguugaaauug

SEQ ID NO: 1705254 - RNA, 16 nt, Human
ggaacgcguugaaauu

SEQ ID NO: 1705255 - RNA, 20 nt, Human
gcuuuaauaucaucaguauu

SEQ ID NO: 1705256 - RNA, 22 nt, Human
gcuuuaauaucaucaguauuga

SEQ ID NO: 1705257 - RNA, 23 nt, Human
gcuuuaauaucaucaguauugaa

SEQ ID NO: 1705258 - RNA, 24 nt, Human
gcuggugcccugcuuucagauacu

SEQ ID NO: 1705259 - RNA, 22 nt, Human
gcuggugcccugcuuucagaua

SEQ ID NO: 1705260 - RNA, 22 nt, Human
ggcugaugccaaguuguuugag

SEQ ID NO: 1705261 - RNA, 21 nt, Human
ggcugaugccaaguuguuuga

SEQ ID NO: 1705262 - RNA, 17 nt, Human
ggcuuuucugauccagu

SEQ ID NO: 1705263 - RNA, 12 nt, Human
ggcuuuucugau

SEQ ID NO: 1705264 - RNA, 13 nt, Human
ggcuuuucugauc

SEQ ID NO: 1705265 - RNA, 16 nt, Human
ggcuuuucugauccag

SEQ ID NO: 1705266 - RNA, 11 nt, Human
ggguuccugca

SEQ ID NO: 1705267 - RNA, 11 nt, Human
ggggauucuua

SEQ ID NO: 1705268 - RNA, 15 nt, Human
ggggauucuuaaagu

SEQ ID NO: 1705269 - RNA, 20 nt, Human
gguuaucugaagucagaucu

SEQ ID NO: 1705270 - RNA, 13 nt, Human
gguuaagucuguu

SEQ ID NO: 1705271 - RNA, 16 nt, Human
gguuaagucuguuuua

SEQ ID NO: 1705272 - RNA, 23 nt, Human
gguuaagucuguuuuaugacuuc

SEQ ID NO: 1705273 - RNA, 22 nt, Human
gguucuuguauuaagaaugaaa

SEQ ID NO: 1705274 - RNA, 14 nt, Human
gguucuuguauuaa

SEQ ID NO: 1705275 - RNA, 16 nt, Human
gguguaugugugaagu

SEQ ID NO: 1705276 - RNA, 14 nt, Human
ggugacuuuggaua

SEQ ID NO: 1705277 - RNA, 18 nt, Human
ggugacuuuggauaauaa

SEQ ID NO: 1705278 - RNA, 19 nt, Human
ggugacuuuggauaauaag

SEQ ID NO: 1705279 - RNA, 20 nt, Human
ggugacuuuggauaauaagg

SEQ ID NO: 1705280 - RNA, 21 nt, Human
ggugacuuuggauaauaagga

SEQ ID NO: 1705281 - RNA, 13 nt, Human
gcuagacugguga

SEQ ID NO: 1705282 - RNA, 15 nt, Human
gcuagacuggugacu

SEQ ID NO: 1705283 - RNA, 16 nt, Human
gcuagacuggugacug

SEQ ID NO: 1705284 - RNA, 19 nt, Human
gcuagacuggugacugauu

SEQ ID NO: 1705285 - RNA, 20 nt, Human
gcuagacuggugacugauuc

SEQ ID NO: 1705286 - RNA, 22 nt, Human
gcuagacuggugacugauucuu

SEQ ID NO: 1705287 - RNA, 12 nt, Human
gccuuuuucauu

SEQ ID NO: 1705288 - RNA, 16 nt, Human
gccuuuuucauuauuu

SEQ ID NO: 1705289 - RNA, 20 nt, Human
gccuuuuucauuauuuuauu

SEQ ID NO: 1705290 - RNA, 22 nt, Human
gccuuuuucauuauuuuauuau

SEQ ID NO: 1705291 - RNA, 14 nt, Human
gccuaaggacuucu

SEQ ID NO: 1705292 - RNA, 15 nt, Human
gccuaaggacuucuu

SEQ ID NO: 1705293 - RNA, 18 nt, Human
gccuaaggacuucuuuaa

SEQ ID NO: 1705294 - RNA, 12 nt, Human
gccuaaggacuu

SEQ ID NO: 1705295 - RNA, 13 nt, Human
gccuaaggacuuc

SEQ ID NO: 1705296 - RNA, 11 nt, Human
gccuaaaucca

SEQ ID NO: 1705297 - RNA, 13 nt, Human
gcauuuuauaaau

SEQ ID NO: 1705298 - RNA, 12 nt, Human
gcaucacaguuu

SEQ ID NO: 1705299 - RNA, 14 nt, Human
gcauauauuuuuau

SEQ ID NO: 1705300 - RNA, 15 nt, Human
gcauauauuuuuaua

SEQ ID NO: 1705301 - RNA, 11 nt, Human
gcauauauuuu

SEQ ID NO: 1705302 - RNA, 16 nt, Human
gcauauauuuuuauau

SEQ ID NO: 1705303 - RNA, 13 nt, Human
gcaaaugacuuug

SEQ ID NO: 1705304 - RNA, 12 nt, Human
gcaaaugacuuu

SEQ ID NO: 1705305 - RNA, 17 nt, Human
gcaaugaagucucugaa

SEQ ID NO: 1705306 - RNA, 19 nt, Human
gcaaugaagucucugaagu

SEQ ID NO: 1705307 - RNA, 17 nt, Human
gaucuaguucacucucc

SEQ ID NO: 1705308 - RNA, 21 nt, Human
gauaaucaacugggcugaaca

SEQ ID NO: 1705309 - RNA, 17 nt, Human
gauaaucaacugggcug

SEQ ID NO: 1705310 - RNA, 20 nt, Human
gauaauaaggaaaaguuuaa

SEQ ID NO: 1705311 - RNA, 21 nt, Human
gauaauaaggaaaaguuuaau

SEQ ID NO: 1705312 - RNA, 22 nt, Human
gauaauaaggaaaaguuuaaua

SEQ ID NO: 1705313 - RNA, 15 nt, Human
gacuucauuaauaau

SEQ ID NO: 1705314 - RNA, 20 nt, Human
gaaugguccgugcuaaggac

SEQ ID NO: 1705315 - RNA, 22 nt, Human
gaaugguccgugcuaaggacuu

SEQ ID NO: 1705316 - RNA, 23 nt, Human
gaaugguccgugcuaaggacuug

SEQ ID NO: 1705317 - RNA, 21 nt, Human
gaauggcuuuguauagaaccu

SEQ ID NO: 1705318 - RNA, 14 nt, Human
gaauuuauuggcuu

SEQ ID NO: 1705319 - RNA, 16 nt, Human
gaauuuauuggcuuuu

SEQ ID NO: 1705320 - RNA, 20 nt, Human
gaauuuauuggcuuuucuga

SEQ ID NO: 1705321 - RNA, 21 nt, Human
gaauuuauuggcuuuucugau

SEQ ID NO: 1705322 - RNA, 22 nt, Human
gaauuuauuggcuuuucugauc

SEQ ID NO: 1705323 - RNA, 11 nt, Human
gaauucuguau

SEQ ID NO: 1705324 - RNA, 16 nt, Human
gaagucucugaaguga

SEQ ID NO: 1705325 - RNA, 21 nt, Human
gaagucucugaagugaaacug

SEQ ID NO: 1705326 - RNA, 12 nt, Human
gaacuaaacuuu

SEQ ID NO: 1705327 - RNA, 14 nt, Human
gaacuaaacuuuca

SEQ ID NO: 1705328 - RNA, 16 nt, Human
gaacuaaacuuucaca

SEQ ID NO: 1705329 - RNA, 18 nt, Human
gaacuaaacuuucacacc

SEQ ID NO: 1705330 - RNA, 17 nt, Human
gaacuaaacuuucacac

SEQ ID NO: 1705331 - RNA, 17 nt, Human
gaaauuguaauuauauc

SEQ ID NO: 1705332 - RNA, 13 nt, Human
gacugauucuuca

SEQ ID NO: 1705333 - RNA, 16 nt, Human
gacugauucuucagca

SEQ ID NO: 1705334 - RNA, 13 nt, Human
cuuguuagaucua

SEQ ID NO: 1705335 - RNA, 16 nt, Human
cuuguuagaucuaguu

SEQ ID NO: 1705336 - RNA, 17 nt, Human
cuuuaaaaaaaaaauug

SEQ ID NO: 1705337 - RNA, 16 nt, Human
cuuuggauaauaagga

SEQ ID NO: 1705338 - RNA, 14 nt, Human
cuuuggauaauaag

SEQ ID NO: 1705339 - RNA, 12 nt, Human
cuuuuucauuau

SEQ ID NO: 1705340 - RNA, 13 nt, Human
cuuuuucauuauu

SEQ ID NO: 1705341 - RNA, 14 nt, Human
cuuuuucauuauuu

SEQ ID NO: 1705342 - RNA, 15 nt, Human
cuuuuuuaaauaaau

SEQ ID NO: 1705343 - RNA, 14 nt, Human
cuuuucugauccag

SEQ ID NO: 1705344 - RNA, 15 nt, Human
cuuuucugauccagu

SEQ ID NO: 1705345 - RNA, 11 nt, Human
cuuuucugauc

SEQ ID NO: 1705346 - RNA, 16 nt, Human
cuuuucugauccaguu

SEQ ID NO: 1705347 - RNA, 18 nt, Human
cuuuucugauccaguuuu

SEQ ID NO: 1705348 - RNA, 12 nt, Human
cuguuuuaugac

SEQ ID NO: 1705349 - RNA, 13 nt, Human
cuguuuuaugacu

SEQ ID NO: 1705350 - RNA, 14 nt, Human
cuguuuuaugacuu

SEQ ID NO: 1705351 - RNA, 15 nt, Human
cuguuuuaugacuuc

SEQ ID NO: 1705352 - RNA, 16 nt, Human
cuguuuuaugacuuca

SEQ ID NO: 1705353 - RNA, 14 nt, Human
cugaagucagaucu

SEQ ID NO: 1705354 - RNA, 15 nt, Human
cugaagucagaucug

SEQ ID NO: 1705355 - RNA, 16 nt, Human
cugaagucagaucugc

SEQ ID NO: 1705356 - RNA, 21 nt, Human
cugaagucagaucugccuaag

SEQ ID NO: 1705357 - RNA, 13 nt, Human
cugaagugaaacu

SEQ ID NO: 1705358 - RNA, 17 nt, Human
cugaagugaaacugcuu

SEQ ID NO: 1705359 - RNA, 19 nt, Human
cugaagugaaacugcuugu

SEQ ID NO: 1705360 - RNA, 13 nt, Human
cucuccauuuaau

SEQ ID NO: 1705361 - RNA, 17 nt, Human
cucugcaaucuucucag

SEQ ID NO: 1705362 - RNA, 18 nt, Human
cucugcaaucuucucaga

SEQ ID NO: 1705363 - RNA, 18 nt, Human
cuccuaucaccugucuug

SEQ ID NO: 1705364 - RNA, 19 nt, Human
cuggauuguacuuugugcu

SEQ ID NO: 1705365 - RNA, 20 nt, Human
cuggauuguacuuugugcug

SEQ ID NO: 1705366 - RNA, 18 nt, Human
cugcuuucagauacugga

SEQ ID NO: 1705367 - RNA, 21 nt, Human
cugcuuucagauacuggauug

SEQ ID NO: 1705368 - RNA, 16 nt, Human
cugcuuucagauacug

SEQ ID NO: 1705369 - RNA, 19 nt, Human
cugccuaaggacuucuuua

SEQ ID NO: 1705370 - RNA, 22 nt, Human
cugccuaaggacuucuuuaauu

SEQ ID NO: 1705371 - RNA, 20 nt, Human
cugccuaaggacuucuuuaa

SEQ ID NO: 1705372 - RNA, 21 nt, Human
cugccuaaggacuucuuuaau

SEQ ID NO: 1705373 - RNA, 20 nt, Human
cugauccaguuuuguuugga

SEQ ID NO: 1705374 - RNA, 20 nt, Human
cugauagaggaagccugauu

SEQ ID NO: 1705375 - RNA, 15 nt, Human
cugauucuucagcaa

SEQ ID NO: 1705376 - RNA, 22 nt, Human
cugcaaucuucucagaaggcaa

SEQ ID NO: 1705377 - RNA, 18 nt, Human
cugcaaugaagucucuga

SEQ ID NO: 1705378 - RNA, 21 nt, Human
cugcaaugaagucucugaagu

SEQ ID NO: 1705379 - RNA, 13 nt, Human
ccgugcuaaggac

SEQ ID NO: 1705380 - RNA, 11 nt, Human
ccggaagccaa

SEQ ID NO: 1705381 - RNA, 22 nt, Human
ccggaagccaaaccucugugag

SEQ ID NO: 1705382 - RNA, 21 nt, Human
ccucacccacccuuuuuuaaa

SEQ ID NO: 1705383 - RNA, 12 nt, Human
ccugauuaaaga

SEQ ID NO: 1705384 - RNA, 13 nt, Human
ccugauuaaagaa

SEQ ID NO: 1705385 - RNA, 15 nt, Human
ccugcuuucagauac

SEQ ID NO: 1705386 - RNA, 16 nt, Human
ccugcuuucagauacu

SEQ ID NO: 1705387 - RNA, 21 nt, Human
ccugcuuucagauacuggauu

SEQ ID NO: 1705388 - RNA, 14 nt, Human
ccuggccuuucaua

SEQ ID NO: 1705389 - RNA, 15 nt, Human
ccuggccuuucauau

SEQ ID NO: 1705390 - RNA, 13 nt, Human
cguugaaauugua

SEQ ID NO: 1705391 - RNA, 23 nt, Human
cguucauggaacgcguugaaauu

SEQ ID NO: 1705392 - RNA, 21 nt, Human
cguucauggaacgcguugaaa

SEQ ID NO: 1705393 - RNA, 22 nt, Human
cguucauggaacgcguugaaau

SEQ ID NO: 1705394 - RNA, 13 nt, Human
cgcguugaaauug

SEQ ID NO: 1705395 - RNA, 17 nt, Human
cgcguugaaauuguaau

SEQ ID NO: 1705396 - RNA, 21 nt, Human
cgcguugaaauuguaauuaua

SEQ ID NO: 1705397 - RNA, 16 nt, Human
ccuuucucuuucguua

SEQ ID NO: 1705398 - RNA, 13 nt, Human
cggaugauuucua

SEQ ID NO: 1705399 - RNA, 14 nt, Human
cggaugauuucuau

SEQ ID NO: 1705400 - RNA, 19 nt, Human
ccaucaauaaaaaauuaug

SEQ ID NO: 1705401 - RNA, 20 nt, Human
ccaucaauaaaaaauuauga

SEQ ID NO: 1705402 - RNA, 20 nt, Human
ccaggaauggagccugcacg

SEQ ID NO: 1705403 - RNA, 15 nt, Human
cauuuaauaauuaua

SEQ ID NO: 1705404 - RNA, 16 nt, Human
cauuuaauaauuauau

SEQ ID NO: 1705405 - RNA, 17 nt, Human
cauuuaauaauuauaug

SEQ ID NO: 1705406 - RNA, 19 nt, Human
cauuuaauaauuauaugcu

SEQ ID NO: 1705407 - RNA, 12 nt, Human
cauuuaauaauu

SEQ ID NO: 1705408 - RNA, 14 nt, Human
cauuuaauaauuau

SEQ ID NO: 1705409 - RNA, 23 nt, Human
cauuuaauaauuauaugcuauuu

SEQ ID NO: 1705410 - RNA, 11 nt, Human
cauuuuauaaa

SEQ ID NO: 1705411 - RNA, 13 nt, Human
cauuuuauaaauc

SEQ ID NO: 1705412 - RNA, 17 nt, Human
cauuuuauaaaucgcuu

SEQ ID NO: 1705413 - RNA, 18 nt, Human
cauuuuauaaaucgcuuu

SEQ ID NO: 1705414 - RNA, 21 nt, Human
cauuuuauaaaucgcuuuuga

SEQ ID NO: 1705415 - RNA, 23 nt, Human
cauuuuauaaaucgcuuuugaua

SEQ ID NO: 1705416 - RNA, 18 nt, Human
cugugaacuugaaauuug

SEQ ID NO: 1705417 - RNA, 14 nt, Human
cuguacuuuuuggc

SEQ ID NO: 1705418 - RNA, 15 nt, Human
cuguacuuuuuggca

SEQ ID NO: 1705419 - RNA, 13 nt, Human
cuggguuccugca

SEQ ID NO: 1705420 - RNA, 20 nt, Human
cuucauaccuacauguauuu

SEQ ID NO: 1705421 - RNA, 20 nt, Human
cuugccuuuuucauuauuuu

SEQ ID NO: 1705422 - RNA, 22 nt, Human
cuugccuuuuucauuauuuuau

SEQ ID NO: 1705423 - RNA, 23 nt, Human
cuugccuuuuucauuauuuuauu

SEQ ID NO: 1705424 - RNA, 14 nt, Human
cuugccuuuuucau

SEQ ID NO: 1705425 - RNA, 15 nt, Human
cuugccuuuuucauu

SEQ ID NO: 1705426 - RNA, 16 nt, Human
cuuuugguuaagucug

SEQ ID NO: 1705427 - RNA, 20 nt, Human
cuuuugguuaagucuguuuu

SEQ ID NO: 1705428 - RNA, 13 nt, Human
cuuuugguuaagu

SEQ ID NO: 1705429 - RNA, 11 nt, Human
cuuuguauaga

SEQ ID NO: 1705430 - RNA, 20 nt, Human
cuuuguauagaaccucuuug

SEQ ID NO: 1705431 - RNA, 15 nt, Human
gacuggugacugauu

SEQ ID NO: 1705432 - RNA, 18 nt, Human
gacuggugacugauucuu

SEQ ID NO: 1705433 - RNA, 12 nt, Human
gacuggugacug

SEQ ID NO: 1705434 - RNA, 16 nt, Human
gaauuuuguguuagag

SEQ ID NO: 1705435 - RNA, 22 nt, Human
gaauuuuguguuagagauuuuu

SEQ ID NO: 1705436 - RNA, 13 nt, Human
gaauuuuguguua

SEQ ID NO: 1705437 - RNA, 14 nt, Human
gaagugaaacugcu

SEQ ID NO: 1705438 - RNA, 15 nt, Human
gcauaacauaaaucu

SEQ ID NO: 1705439 - RNA, 21 nt, Human
gcauaacauaaaucugugaac

SEQ ID NO: 1705440 - RNA, 23 nt, Human
gcauaacauaaaucugugaacuu

SEQ ID NO: 1705441 - RNA, 14 nt, Human
gauuagaauucugu

SEQ ID NO: 1705442 - RNA, 15 nt, Human
gauuagaauucugua

SEQ ID NO: 1705443 - RNA, 23 nt, Human
gauuagaauucuguauagauuag

SEQ ID NO: 1705444 - RNA, 13 nt, Human
gauuauucacuga

SEQ ID NO: 1705445 - RNA, 15 nt, Human
gauuauucacugauu

SEQ ID NO: 1705446 - RNA, 16 nt, Human
gauuauucacugauuu

SEQ ID NO: 1705447 - RNA, 14 nt, Human
gauuagagaguguu

SEQ ID NO: 1705448 - RNA, 18 nt, Human
gauuagagaguguugaaa

SEQ ID NO: 1705449 - RNA, 11 nt, Human
gauccaguuuu

SEQ ID NO: 1705450 - RNA, 17 nt, Human
gauccaguuuuguuugg

SEQ ID NO: 1705451 - RNA, 22 nt, Human
gauccaguuuuguuuggaccaa

SEQ ID NO: 1705452 - RNA, 18 nt, Human
gguucuggugugaacuaa

SEQ ID NO: 1705453 - RNA, 20 nt, Human
aaaguuuaauauuaaagcca

SEQ ID NO: 1705454 - RNA, 21 nt, Human
aaaguuuaauauuaaagccau

SEQ ID NO: 1705455 - RNA, 22 nt, Human
aaaguuuaauauuaaagccaug

SEQ ID NO: 1705456 - RNA, 16 nt, Human
aaaguuuaauauuaaa

SEQ ID NO: 1705457 - RNA, 19 nt, Human
aaaguuuaauauuaaagcc

SEQ ID NO: 1705458 - RNA, 12 nt, Human
aaaguugaauuu

SEQ ID NO: 1705459 - RNA, 13 nt, Human
aaaguugaauuua

SEQ ID NO: 1705460 - RNA, 16 nt, Human
aaaguugaauuuauug

SEQ ID NO: 1705461 - RNA, 22 nt, Human
aaaguugaauuuauuggcuuuu

SEQ ID NO: 1705462 - RNA, 14 nt, Human
aaaaauauuuuaug

SEQ ID NO: 1705463 - RNA, 12 nt, Human
ggauaaaugcca

SEQ ID NO: 1705464 - RNA, 22 nt, Human
ggauaauaaggaaaaguuuaau

SEQ ID NO: 1705465 - RNA, 12 nt, Human
gcuuuucugauc

SEQ ID NO: 1705466 - RNA, 15 nt, Human
gcuuuucugauccag

SEQ ID NO: 1705467 - RNA, 16 nt, Human
gcuuuucugauccagu

SEQ ID NO: 1705468 - RNA, 11 nt, Human
gcuuuucugau

SEQ ID NO: 1705469 - RNA, 13 nt, Human
ggaaaucuuuaaa

SEQ ID NO: 1705470 - RNA, 23 nt, Human
gcguugaaauuguaauuauaucu

SEQ ID NO: 1705471 - RNA, 24 nt, Human
gcguugaaauuguaauuauaucug

SEQ ID NO: 1705472 - RNA, 18 nt, Human
gcguugaaauuguaauua

SEQ ID NO: 1705473 - RNA, 24 nt, Human
gccaucaauaaaaaauuaugacau

SEQ ID NO: 1705474 - RNA, 20 nt, Human
cucucaaccaccuuucagau

SEQ ID NO: 1705475 - RNA, 15 nt, Human
ccuuuuucauuauuu

SEQ ID NO: 1705476 - RNA, 17 nt, Human
ccuuuuucauuauuuua

SEQ ID NO: 1705477 - RNA, 14 nt, Human
cuaaacuuucacac

SEQ ID NO: 1705478 - RNA, 13 nt, Human
cuaaacuuuucug

SEQ ID NO: 1705479 - RNA, 13 nt, Human
cuaaacuuucaca

SEQ ID NO: 1705480 - RNA, 20 nt, Human
cccuauuuuuuuucuguuau

SEQ ID NO: 1705481 - RNA, 21 nt, Human
cccuauuuuuuuucuguuaua

SEQ ID NO: 1705482 - RNA, 17 nt, Human
cccuggccuuucauauu

SEQ ID NO: 1705483 - RNA, 17 nt, Human
ccuagcacacacuuuug

SEQ ID NO: 1705484 - RNA, 21 nt, Human
ccagcagauuauucacugauu

SEQ ID NO: 1705485 - RNA, 22 nt, Human
ccagcagauuauucacugauuu

SEQ ID NO: 1705486 - RNA, 16 nt, Human
ccagcagauuauucac

SEQ ID NO: 1705487 - RNA, 12 nt, Human
caguauugaagc

SEQ ID NO: 1705488 - RNA, 14 nt, Human
caguauugaagcau

SEQ ID NO: 1705489 - RNA, 15 nt, Human
caguauugaagcauu

SEQ ID NO: 1705490 - RNA, 22 nt, Human
caguauuguacaaaguauuaag

SEQ ID NO: 1705491 - RNA, 16 nt, Human
caguauugaagcauuu

SEQ ID NO: 1705492 - RNA, 17 nt, Human
caguauugaagcauuuu

SEQ ID NO: 1705493 - RNA, 20 nt, Human
caguauugaagcauuuuaua

SEQ ID NO: 1705494 - RNA, 13 nt, Human
cagauacuggauu

SEQ ID NO: 1705495 - RNA, 13 nt, Human
ccaauuaaggauu

SEQ ID NO: 1705496 - RNA, 18 nt, Human
ccaauuaaggauuuuaug

SEQ ID NO: 1705497 - RNA, 22 nt, Human
ccaauuaaggauuuuaugcuuu

SEQ ID NO: 1705498 - RNA, 21 nt, Human
cauucuccuaucaccugucuu

SEQ ID NO: 1705499 - RNA, 16 nt, Human
ccaaaaaccaguauug

SEQ ID NO: 1705500 - RNA, 19 nt, Human
ccaaaaaccaguauuguac

SEQ ID NO: 1705501 - RNA, 20 nt, Human
ccaaaaaccaguauuguaca

SEQ ID NO: 1705502 - RNA, 17 nt, Human
cacuccaauuaaggauu

SEQ ID NO: 1705503 - RNA, 18 nt, Human
cacuccaauuaaggauuu

SEQ ID NO: 1705504 - RNA, 13 nt, Human
cacuccaauuaag

SEQ ID NO: 1705505 - RNA, 15 nt, Human
cacuccaauuaagga

SEQ ID NO: 1705506 - RNA, 14 nt, Human
auuuuaugauccag

SEQ ID NO: 1705507 - RNA, 15 nt, Human
auuuuaugauccagc

SEQ ID NO: 1705508 - RNA, 16 nt, Human
auuuuaugauccagca

SEQ ID NO: 1705509 - RNA, 12 nt, Human
auuuguuugcau

SEQ ID NO: 1705510 - RNA, 13 nt, Human
auuuggaaaucuu

SEQ ID NO: 1705511 - RNA, 11 nt, Human
auuuggaaauc

SEQ ID NO: 1705512 - RNA, 12 nt, Human
auuuggaaaucu

SEQ ID NO: 1705513 - RNA, 12 nt, Human
auuuuaugcuuu

SEQ ID NO: 1705514 - RNA, 17 nt, Human
auuuuaugcuuuaaaca

SEQ ID NO: 1705515 - RNA, 12 nt, Human
auuacaguauaa

SEQ ID NO: 1705516 - RNA, 14 nt, Human
auuacaguauaauu

SEQ ID NO: 1705517 - RNA, 15 nt, Human
auuacaguauaauua

SEQ ID NO: 1705518 - RNA, 16 nt, Human
auuacaguauaauuaa

SEQ ID NO: 1705519 - RNA, 18 nt, Human
auucaaaguugccuaaau

SEQ ID NO: 1705520 - RNA, 20 nt, Human
auucaaaguugccuaaaucc

SEQ ID NO: 1705521 - RNA, 21 nt, Human
auucaaaguugccuaaaucca

SEQ ID NO: 1705522 - RNA, 22 nt, Human
auucaaaguugccuaaauccau

SEQ ID NO: 1705523 - RNA, 17 nt, Human
auucaaaguugccuaaa

SEQ ID NO: 1705524 - RNA, 14 nt, Human
auuaugaaacuugu

SEQ ID NO: 1705525 - RNA, 15 nt, Human
auuaugaaacuugug

SEQ ID NO: 1705526 - RNA, 18 nt, Human
auuaugaaacuuguguaa

SEQ ID NO: 1705527 - RNA, 20 nt, Human
auuaugaaacuuguguaaau

SEQ ID NO: 1705528 - RNA, 21 nt, Human
auuaugaaacuuguguaaaua

SEQ ID NO: 1705529 - RNA, 14 nt, Human
auuguaauuauauc

SEQ ID NO: 1705530 - RNA, 13 nt, Human
auuguaauuauau

SEQ ID NO: 1705531 - RNA, 13 nt, Human
uuguacaaaguau

SEQ ID NO: 1705532 - RNA, 14 nt, Human
uuguacaaaguauu

SEQ ID NO: 1705533 - RNA, 13 nt, Human
uugguugcuuuaa

SEQ ID NO: 1705534 - RNA, 16 nt, Human
uugguugcuuuaauau

SEQ ID NO: 1705535 - RNA, 15 nt, Human
uuguacaaaguauua

SEQ ID NO: 1705536 - RNA, 17 nt, Human
uuguacaaaguauuaag

SEQ ID NO: 1705537 - RNA, 20 nt, Human
uuguacaaaguauuaagcau

SEQ ID NO: 1705538 - RNA, 21 nt, Human
uuguacaaaguauuaagcaua

SEQ ID NO: 1705539 - RNA, 22 nt, Human
uuguacaaaguauuaagcauau

SEQ ID NO: 1705540 - RNA, 16 nt, Human
augacuucauuaauaa

SEQ ID NO: 1705541 - RNA, 11 nt, Human
augacuuugga

SEQ ID NO: 1705542 - RNA, 12 nt, Human
augacuuuggac

SEQ ID NO: 1705543 - RNA, 15 nt, Human
uuggggauucuuaaa

SEQ ID NO: 1705544 - RNA, 13 nt, Human
uuggggauucuua

SEQ ID NO: 1705545 - RNA, 15 nt, Human
uuggauaauaaggaa

SEQ ID NO: 1705546 - RNA, 19 nt, Human
uuggauaauaaggaaaagu

SEQ ID NO: 1705547 - RNA, 21 nt, Human
uuggauaauaaggaaaaguuu

SEQ ID NO: 1705548 - RNA, 13 nt, Human
aucugugaacuug

SEQ ID NO: 1705549 - RNA, 17 nt, Human
aucugugaacuugaaau

SEQ ID NO: 1705550 - RNA, 18 nt, Human
aucugugaacuugaaauu

SEQ ID NO: 1705551 - RNA, 19 nt, Human
aucugugaacuugaaauuu

SEQ ID NO: 1705552 - RNA, 14 nt, Human
aucugccuaaggac

SEQ ID NO: 1705553 - RNA, 15 nt, Human
aucugccuaaggacu

SEQ ID NO: 1705554 - RNA, 16 nt, Human
aucugccuaaggacuu

SEQ ID NO: 1705555 - RNA, 17 nt, Human
aucugccuaaggacuuc

SEQ ID NO: 1705556 - RNA, 13 nt, Human
aucugccuaagga

SEQ ID NO: 1705557 - RNA, 18 nt, Human
aucugccuaaggacuucu

SEQ ID NO: 1705558 - RNA, 19 nt, Human
aucugccuaaggacuucuu

SEQ ID NO: 1705559 - RNA, 20 nt, Human
aucugccuaaggacuucuuu

SEQ ID NO: 1705560 - RNA, 15 nt, Human
aucugaggaauucug

SEQ ID NO: 1705561 - RNA, 16 nt, Human
aucugaggaauucugu

SEQ ID NO: 1705562 - RNA, 17 nt, Human
aucugaggaauucugua

SEQ ID NO: 1705563 - RNA, 18 nt, Human
aucugaggaauucuguau

SEQ ID NO: 1705564 - RNA, 20 nt, Human
aucugaggaauucuguauag

SEQ ID NO: 1705565 - RNA, 21 nt, Human
aucugaggaauucuguauaga

SEQ ID NO: 1705566 - RNA, 13 nt, Human
uugccuaaaucca

SEQ ID NO: 1705567 - RNA, 14 nt, Human
uugccuaaauccau

SEQ ID NO: 1705568 - RNA, 15 nt, Human
uugccuaaauccauu

SEQ ID NO: 1705569 - RNA, 22 nt, Human
uugccuaaauccauuuggaaau

SEQ ID NO: 1705570 - RNA, 14 nt, Human
uuuagucuugucuc

SEQ ID NO: 1705571 - RNA, 22 nt, Human
uuuauuacaguauaauuaacau

SEQ ID NO: 1705572 - RNA, 23 nt, Human
auggaacgcguugaaauuguaau

SEQ ID NO: 1705573 - RNA, 23 nt, Human
uuuauuacaguauaauuaacaug

SEQ ID NO: 1705574 - RNA, 13 nt, Human
uuucauauuuuag

SEQ ID NO: 1705575 - RNA, 21 nt, Human
uuucauauuuuagcuacuaua

SEQ ID NO: 1705576 - RNA, 14 nt, Human
augccaaguuguuu

SEQ ID NO: 1705577 - RNA, 16 nt, Human
augccaaguuguuuga

SEQ ID NO: 1705578 - RNA, 23 nt, Human
augccaaguuguuugagaaauua

SEQ ID NO: 1705579 - RNA, 14 nt, Human
uuuaauuuuggaau

SEQ ID NO: 1705580 - RNA, 15 nt, Human
uuuaauuuuggaauu

SEQ ID NO: 1705581 - RNA, 17 nt, Human
uuuaauuuuggaauuuu

SEQ ID NO: 1705582 - RNA, 12 nt, Human
augauuucuaug

SEQ ID NO: 1705583 - RNA, 13 nt, Human
augauuucuaugc

SEQ ID NO: 1705584 - RNA, 16 nt, Human
augauuucuaugcuga

SEQ ID NO: 1705585 - RNA, 19 nt, Human
uuguguaaauacaauuuug

SEQ ID NO: 1705586 - RNA, 17 nt, Human
auauuuucauucuccua

SEQ ID NO: 1705587 - RNA, 16 nt, Human
auauuuuuauauuuac

SEQ ID NO: 1705588 - RNA, 14 nt, Human
aucacuuuuuucca

SEQ ID NO: 1705589 - RNA, 18 nt, Human
uucucagaaggcaaauga

SEQ ID NO: 1705590 - RNA, 19 nt, Human
uucucagaaggcaaaugac

SEQ ID NO: 1705591 - RNA, 21 nt, Human
uucucagaaggcaaaugacuu

SEQ ID NO: 1705592 - RNA, 22 nt, Human
uucucagaaggcaaaugacuuu

SEQ ID NO: 1705593 - RNA, 15 nt, Human
aucaauaaaaaauua

SEQ ID NO: 1705594 - RNA, 17 nt, Human
aucaauaaaaaauuaug

SEQ ID NO: 1705595 - RNA, 18 nt, Human
aucaauaaaaaauuauga

SEQ ID NO: 1705596 - RNA, 13 nt, Human
uucuguacuuuuu

SEQ ID NO: 1705597 - RNA, 18 nt, Human
uucuguacuuuuuggcau

SEQ ID NO: 1705598 - RNA, 19 nt, Human
uucuguacuuuuuggcaua

SEQ ID NO: 1705599 - RNA, 20 nt, Human
uucuggugugaacuaaacuu

SEQ ID NO: 1705600 - RNA, 21 nt, Human
uucuggugugaacuaaacuuu

SEQ ID NO: 1705601 - RNA, 14 nt, Human
uucuggugugaacu

SEQ ID NO: 1705602 - RNA, 20 nt, Human
auccaguuuuguuuggacca

SEQ ID NO: 1705603 - RNA, 21 nt, Human
auccaguuuuguuuggaccaa

SEQ ID NO: 1705604 - RNA, 18 nt, Human
auccaguuuuguuuggac

SEQ ID NO: 1705605 - RNA, 17 nt, Human
auccaguuuuguuugga

SEQ ID NO: 1705606 - RNA, 17 nt, Human
auccauuuggaaaucuu

SEQ ID NO: 1705607 - RNA, 19 nt, Human
auccauuuggaaaucuuua

SEQ ID NO: 1705608 - RNA, 13 nt, Human
auccauuuggaaa

SEQ ID NO: 1705609 - RNA, 13 nt, Human
auagucuggcugu

SEQ ID NO: 1705610 - RNA, 14 nt, Human
auauaugugaugau

SEQ ID NO: 1705611 - RNA, 13 nt, Human
auuuuauuaugaa

SEQ ID NO: 1705612 - RNA, 14 nt, Human
auuuuauuaugaaa

SEQ ID NO: 1705613 - RNA, 11 nt, Human
auuuuauuaug

SEQ ID NO: 1705614 - RNA, 12 nt, Human
auuuuauuauga

SEQ ID NO: 1705615 - RNA, 18 nt, Human
auuuuauuaugaaacuug

SEQ ID NO: 1705616 - RNA, 21 nt, Human
auuuuauuaugaaacuugugu

SEQ ID NO: 1705617 - RNA, 14 nt, Human
auuuuauuauguaa

SEQ ID NO: 1705618 - RNA, 13 nt, Human
auuuuauuaugua

SEQ ID NO: 1705619 - RNA, 15 nt, Human
auuuacuaaaaugga

SEQ ID NO: 1705620 - RNA, 20 nt, Human
auuuggaaaucuuuaaaaaa

SEQ ID NO: 1705621 - RNA, 17 nt, Human
auuuggaaaucuuuaaa

SEQ ID NO: 1705622 - RNA, 23 nt, Human
auugugcgcuaaacuuuucugau

SEQ ID NO: 1705623 - RNA, 21 nt, Human
auucccuggccuuucauauuu

SEQ ID NO: 1705624 - RNA, 21 nt, Human
auuauuuuauuaugaaacuug

SEQ ID NO: 1705625 - RNA, 22 nt, Human
auuauuuuauuaugaaacuugu

SEQ ID NO: 1705626 - RNA, 15 nt, Human
auuagagaguguuga

SEQ ID NO: 1705627 - RNA, 16 nt, Human
auuagagaguguugaa

SEQ ID NO: 1705628 - RNA, 17 nt, Human
auuagagaguguugaaa

SEQ ID NO: 1705629 - RNA, 18 nt, Human
auuagagaguguugaaac

SEQ ID NO: 1705630 - RNA, 19 nt, Human
auuagagaguguugaaacg

SEQ ID NO: 1705631 - RNA, 15 nt, Human
auuauuuuauuauga

SEQ ID NO: 1705632 - RNA, 13 nt, Human
uuuuauuauguaa

SEQ ID NO: 1705633 - RNA, 14 nt, Human
uuuuauuauguaaa

SEQ ID NO: 1705634 - RNA, 15 nt, Human
uuuucauuauuuuau

SEQ ID NO: 1705635 - RNA, 21 nt, Human
uuuucauuauuuuauuaugaa

SEQ ID NO: 1705636 - RNA, 22 nt, Human
uuuucauucuccuaucaccugu

SEQ ID NO: 1705637 - RNA, 12 nt, Human
uuuuauuaugua

SEQ ID NO: 1705638 - RNA, 18 nt, Human
uuuuaugcuuuaaacauu

SEQ ID NO: 1705639 - RNA, 12 nt, Human
uuuuauaaaucg

SEQ ID NO: 1705640 - RNA, 20 nt, Human
uuuuauaaaucgcuuuugau

SEQ ID NO: 1705641 - RNA, 16 nt, Human
auuaagaaugaaauac

SEQ ID NO: 1705642 - RNA, 20 nt, Human
auuaagaaugaaauacuguu

SEQ ID NO: 1705643 - RNA, 21 nt, Human
auuaagaaugaaauacuguuu

SEQ ID NO: 1705644 - RNA, 22 nt, Human
auuaagaaugaaauacuguuug

SEQ ID NO: 1705645 - RNA, 12 nt, Human
auuaaagccaug

SEQ ID NO: 1705646 - RNA, 16 nt, Human
auuaaagccauguuua

SEQ ID NO: 1705647 - RNA, 17 nt, Human
auuaaagccauguuuau

SEQ ID NO: 1705648 - RNA, 21 nt, Human
auuaaagccauguuuauuaca

SEQ ID NO: 1705649 - RNA, 13 nt, Human
auuaacauguuaa

SEQ ID NO: 1705650 - RNA, 14 nt, Human
auuaacauguuaaa

SEQ ID NO: 1705651 - RNA, 15 nt, Human
auuaacauguuaaac

SEQ ID NO: 1705652 - RNA, 17 nt, Human
auuaacauguuaaacca

SEQ ID NO: 1705653 - RNA, 19 nt, Human
auuaacauguuaaaccaug

SEQ ID NO: 1705654 - RNA, 18 nt, Human
uuuguuucuguacuuuuu

SEQ ID NO: 1705655 - RNA, 12 nt, Human
uuuguuucugua

SEQ ID NO: 1705656 - RNA, 13 nt, Human
uuuguuucuguac

SEQ ID NO: 1705657 - RNA, 15 nt, Human
uuugucuacaccauu

SEQ ID NO: 1705658 - RNA, 21 nt, Human
auaaauucccuggccuuucau

SEQ ID NO: 1705659 - RNA, 22 nt, Human
auaaauucccuggccuuucaua

SEQ ID NO: 1705660 - RNA, 18 nt, Human
auaacuguuauuuauaau

SEQ ID NO: 1705661 - RNA, 20 nt, Human
auaacuguuauuuauaauca

SEQ ID NO: 1705662 - RNA, 22 nt, Human
auaacuguuauuuauaaucacu

SEQ ID NO: 1705663 - RNA, 21 nt, Human
auaaauagcuagacuggugac

SEQ ID NO: 1705664 - RNA, 22 nt, Human
auaaauagcuagacuggugacu

SEQ ID NO: 1705665 - RNA, 15 nt, Human
aguuuugguugcuuu

SEQ ID NO: 1705666 - RNA, 21 nt, Human
aguuuugguugcuuuaauauc

SEQ ID NO: 1705667 - RNA, 22 nt, Human
aguuuugguugcuuuaauauca

SEQ ID NO: 1705668 - RNA, 17 nt, Human
uuaaguaucugacaucu

SEQ ID NO: 1705669 - RNA, 14 nt, Human
uuaagucuguuuua

SEQ ID NO: 1705670 - RNA, 15 nt, Human
uuaagucuguuuuau

SEQ ID NO: 1705671 - RNA, 11 nt, Human
aguugccuaaa

SEQ ID NO: 1705672 - RNA, 15 nt, Human
aguugccuaaaucca

SEQ ID NO: 1705673 - RNA, 16 nt, Human
aguugccuaaauccau

SEQ ID NO: 1705674 - RNA, 17 nt, Human
aguugccuaaauccauu

SEQ ID NO: 1705675 - RNA, 18 nt, Human
uguuauuuauaaucacuu

SEQ ID NO: 1705676 - RNA, 21 nt, Human
uguuauuuauaaucacuuuuu

SEQ ID NO: 1705677 - RNA, 21 nt, Human
aguguugaaacggaugauuuc

SEQ ID NO: 1705678 - RNA, 22 nt, Human
aguucacucuccauuuaauaau

SEQ ID NO: 1705679 - RNA, 24 nt, Human
aguucacucuccauuuaauaauua

SEQ ID NO: 1705680 - RNA, 13 nt, Human
uguuuagucuugu

SEQ ID NO: 1705681 - RNA, 17 nt, Human
uguuuagucuugucuca

SEQ ID NO: 1705682 - RNA, 18 nt, Human
uguuuagucuugucucag

SEQ ID NO: 1705683 - RNA, 19 nt, Human
uguuuagucuugucucaga

SEQ ID NO: 1705684 - RNA, 18 nt, Human
uguuuauuacaguauaau

SEQ ID NO: 1705685 - RNA, 16 nt, Human
uguggugacuuuggau

SEQ ID NO: 1705686 - RNA, 17 nt, Human
uguggugacuuuggaua

SEQ ID NO: 1705687 - RNA, 13 nt, Human
uguaaaucccauu

SEQ ID NO: 1705688 - RNA, 16 nt, Human
uguaaaucccauuauu

SEQ ID NO: 1705689 - RNA, 18 nt, Human
uguaaaucccauuauuca

SEQ ID NO: 1705690 - RNA, 19 nt, Human
uguaaaucccauuauucaa

SEQ ID NO: 1705691 - RNA, 20 nt, Human
uguaaaucccauuauucaaa

SEQ ID NO: 1705692 - RNA, 22 nt, Human
uguaaaucccauuauucaaagu

SEQ ID NO: 1705693 - RNA, 14 nt, Human
uguaauuauaucug

SEQ ID NO: 1705694 - RNA, 15 nt, Human
uguaauuauaucuga

SEQ ID NO: 1705695 - RNA, 13 nt, Human
uguaauuauaucu

SEQ ID NO: 1705696 - RNA, 14 nt, Human
agguuuuuaagccu

SEQ ID NO: 1705697 - RNA, 12 nt, Human
uguacuuuuugg

SEQ ID NO: 1705698 - RNA, 15 nt, Human
uguacuuuuuggcau

SEQ ID NO: 1705699 - RNA, 16 nt, Human
uguacuuuuuggcaua

SEQ ID NO: 1705700 - RNA, 17 nt, Human
uguacuuuuuggcauaa

SEQ ID NO: 1705701 - RNA, 17 nt, Human
ugggcugaacacuccaa

SEQ ID NO: 1705702 - RNA, 19 nt, Human
ugggcugaacacuccaauu

SEQ ID NO: 1705703 - RNA, 14 nt, Human
uggaaaucuuuaaa

SEQ ID NO: 1705704 - RNA, 15 nt, Human
uggaaaucuuuaaaa

SEQ ID NO: 1705705 - RNA, 17 nt, Human
uggacuguggugacuuu

SEQ ID NO: 1705706 - RNA, 19 nt, Human
uggacuguggugacuuugg

SEQ ID NO: 1705707 - RNA, 21 nt, Human
uggacuguggugacuuuggau

SEQ ID NO: 1705708 - RNA, 22 nt, Human
uggacuguggugacuuuggaua

SEQ ID NO: 1705709 - RNA, 15 nt, Human
uggacuguggugacu

SEQ ID NO: 1705710 - RNA, 16 nt, Human
uggacuguggugacuu

SEQ ID NO: 1705711 - RNA, 14 nt, Human
aggcaaaugacuuu

SEQ ID NO: 1705712 - RNA, 15 nt, Human
aggcaaaugacuuug

SEQ ID NO: 1705713 - RNA, 18 nt, Human
aggcaaaugacuuuggac

SEQ ID NO: 1705714 - RNA, 17 nt, Human
uggcauaacauaaaucu

SEQ ID NO: 1705715 - RNA, 21 nt, Human
uggcauaacauaaaucuguga

SEQ ID NO: 1705716 - RNA, 22 nt, Human
uggcauaacauaaaucugugaa

SEQ ID NO: 1705717 - RNA, 12 nt, Human
ugcuaaggacuu

SEQ ID NO: 1705718 - RNA, 13 nt, Human
ugcuaaggacuug

SEQ ID NO: 1705719 - RNA, 18 nt, Human
ugcuaaggacuuguuaga

SEQ ID NO: 1705720 - RNA, 22 nt, Human
ugcuaaggacuuguuagaucua

SEQ ID NO: 1705721 - RNA, 23 nt, Human
aggaauggagccugcacggugaa

SEQ ID NO: 1705722 - RNA, 17 nt, Human
aggaagccugauuaaag

SEQ ID NO: 1705723 - RNA, 18 nt, Human
aggaagccugauuaaaga

SEQ ID NO: 1705724 - RNA, 21 nt, Human
aggaagccugauuaaagaaug

SEQ ID NO: 1705725 - RNA, 14 nt, Human
agcuagacugguga

SEQ ID NO: 1705726 - RNA, 16 nt, Human
agcuagacuggugacu

SEQ ID NO: 1705727 - RNA, 17 nt, Human
agcuagacuggugacug

SEQ ID NO: 1705728 - RNA, 21 nt, Human
agcuagacuggugacugauuc

SEQ ID NO: 1705729 - RNA, 13 nt, Human
agcuagacuggug

SEQ ID NO: 1705730 - RNA, 15 nt, Human
ugccaaguuguuuga

SEQ ID NO: 1705731 - RNA, 19 nt, Human
ugccaaguuguuugagaaa

SEQ ID NO: 1705732 - RNA, 20 nt, Human
ugccaaguuguuugagaaau

SEQ ID NO: 1705733 - RNA, 16 nt, Human
agccauguuuauuaca

SEQ ID NO: 1705734 - RNA, 13 nt, Human
agccauguuuauu

SEQ ID NO: 1705735 - RNA, 14 nt, Human
agccauguuuauua

SEQ ID NO: 1705736 - RNA, 22 nt, Human
ugauccaguuuuguuuggacca

SEQ ID NO: 1705737 - RNA, 22 nt, Human
ugauccagcagauuauucacug

SEQ ID NO: 1705738 - RNA, 21 nt, Human
ugauccagcagauuauucacu

SEQ ID NO: 1705739 - RNA, 15 nt, Human
ugagguuuuuaagcc

SEQ ID NO: 1705740 - RNA, 14 nt, Human
ugauaaucaacugg

SEQ ID NO: 1705741 - RNA, 18 nt, Human
ugauaaucaacugggcug

SEQ ID NO: 1705742 - RNA, 24 nt, Human
ugauaaucaacugggcugaacacu

SEQ ID NO: 1705743 - RNA, 17 nt, Human
agcaucacaguuuuggu

SEQ ID NO: 1705744 - RNA, 15 nt, Human
agcaucacaguuuug

SEQ ID NO: 1705745 - RNA, 18 nt, Human
agauuuuuuuguuguuug

SEQ ID NO: 1705746 - RNA, 19 nt, Human
agauuuuuuuguuguuugu

SEQ ID NO: 1705747 - RNA, 23 nt, Human
agauuuuuuuguuguuuguuuag

SEQ ID NO: 1705748 - RNA, 15 nt, Human
agauuuuuuuguugu

SEQ ID NO: 1705749 - RNA, 16 nt, Human
agauuuuuuuguuguu

SEQ ID NO: 1705750 - RNA, 14 nt, Human
agauuuuauuaugu

SEQ ID NO: 1705751 - RNA, 15 nt, Human
agauuuuauuaugua

SEQ ID NO: 1705752 - RNA, 16 nt, Human
agauuuuauuauguaa

SEQ ID NO: 1705753 - RNA, 17 nt, Human
agauuuuauuauguaaa

SEQ ID NO: 1705754 - RNA, 18 nt, Human
agauuuuauuauguaaau

SEQ ID NO: 1705755 - RNA, 19 nt, Human
agauuuuauuauguaaauc

SEQ ID NO: 1705756 - RNA, 17 nt, Human
ugaauuuuguguuagag

SEQ ID NO: 1705757 - RNA, 21 nt, Human
ugaauuuuguguuagagauuu

SEQ ID NO: 1705758 - RNA, 17 nt, Human
agauacuggauuguacu

SEQ ID NO: 1705759 - RNA, 14 nt, Human
agauacuggauugu

SEQ ID NO: 1705760 - RNA, 16 nt, Human
agauaacuguuauuua

SEQ ID NO: 1705761 - RNA, 19 nt, Human
agauaacuguuauuuauaa

SEQ ID NO: 1705762 - RNA, 20 nt, Human
agauaacuguuauuuauaau

SEQ ID NO: 1705763 - RNA, 12 nt, Human
ugaauggcuuug

SEQ ID NO: 1705764 - RNA, 15 nt, Human
ugaauggcuuuguau

SEQ ID NO: 1705765 - RNA, 11 nt, Human
ugaauggcuuu

SEQ ID NO: 1705766 - RNA, 17 nt, Human
ugaauggcuuuguauag

SEQ ID NO: 1705767 - RNA, 18 nt, Human
ugaauggcuuuguauaga

SEQ ID NO: 1705768 - RNA, 19 nt, Human
ugaauggcuuuguauagaa

SEQ ID NO: 1705769 - RNA, 22 nt, Human
ugaauggcuuuguauagaaccu

SEQ ID NO: 1705770 - RNA, 15 nt, Human
ugaagcauuuuauaa

SEQ ID NO: 1705771 - RNA, 16 nt, Human
ugaagcauuuuauaaa

SEQ ID NO: 1705772 - RNA, 17 nt, Human
ugaagcauuuuauaaau

SEQ ID NO: 1705773 - RNA, 18 nt, Human
ugaagcauuuuauaaauc

SEQ ID NO: 1705774 - RNA, 22 nt, Human
ugaagcauuuuauaaaucgcuu

SEQ ID NO: 1705775 - RNA, 14 nt, Human
ugaagcauuuuaua

SEQ ID NO: 1705776 - RNA, 17 nt, Human
ugaaacggaugauuucu

SEQ ID NO: 1705777 - RNA, 18 nt, Human
ugaaacggaugauuucua

SEQ ID NO: 1705778 - RNA, 19 nt, Human
ugaaacggaugauuucuau

SEQ ID NO: 1705779 - RNA, 20 nt, Human
ugaaacggaugauuucuaug

SEQ ID NO: 1705780 - RNA, 17 nt, Human
ugaaacuuguguaaaua

SEQ ID NO: 1705781 - RNA, 23 nt, Human
ugaaacuuguguaaauacaauuu

SEQ ID NO: 1705782 - RNA, 15 nt, Human
ugaaacggaugauuu

SEQ ID NO: 1705783 - RNA, 21 nt, Human
agaagccccacccugccucac

SEQ ID NO: 1705784 - RNA, 18 nt, Human
ucugaagugaaacugcuu

SEQ ID NO: 1705785 - RNA, 22 nt, Human
ucugaagugaaacugcuuguuu

SEQ ID NO: 1705786 - RNA, 16 nt, Human
ucugaagugaaacugc

SEQ ID NO: 1705787 - RNA, 13 nt, Human
agaaauuaaguau

SEQ ID NO: 1705788 - RNA, 17 nt, Human
agaaauuaaguaucuga

SEQ ID NO: 1705789 - RNA, 22 nt, Human
acuuugugcugggguuaucuga

SEQ ID NO: 1705790 - RNA, 21 nt, Human
acugggcugaacacuccaauu

SEQ ID NO: 1705791 - RNA, 16 nt, Human
acugggcugaacacuc

SEQ ID NO: 1705792 - RNA, 16 nt, Human
acuugaaauuugaauu

SEQ ID NO: 1705793 - RNA, 17 nt, Human
acuucauuaauaauaaa

SEQ ID NO: 1705794 - RNA, 12 nt, Human
ucuaguucacuc

SEQ ID NO: 1705795 - RNA, 16 nt, Human
ucuaguucacucucca

SEQ ID NO: 1705796 - RNA, 19 nt, Human
ucuaguucacucuccauuu

SEQ ID NO: 1705797 - RNA, 19 nt, Human
ucaguauugaagcauuuua

SEQ ID NO: 1705798 - RNA, 14 nt, Human
ucaguauugaagca

SEQ ID NO: 1705799 - RNA, 15 nt, Human
ucaguauugaagcau

SEQ ID NO: 1705800 - RNA, 16 nt, Human
ucaguauugaagcauu

SEQ ID NO: 1705801 - RNA, 17 nt, Human
ucaguauugaagcauuu

SEQ ID NO: 1705802 - RNA, 18 nt, Human
ucaguauugaagcauuuu

SEQ ID NO: 1705803 - RNA, 17 nt, Human
accaugggauaaaugcc

SEQ ID NO: 1705804 - RNA, 18 nt, Human
accaugggauaaaugcca

SEQ ID NO: 1705805 - RNA, 15 nt, Human
ucagaucugccuaag

SEQ ID NO: 1705806 - RNA, 18 nt, Human
ucagaucugccuaaggac

SEQ ID NO: 1705807 - RNA, 20 nt, Human
ucagaucugccuaaggacuu

SEQ ID NO: 1705808 - RNA, 13 nt, Human
ucagaucugccua

SEQ ID NO: 1705809 - RNA, 12 nt, Human
accaaaaaccag

SEQ ID NO: 1705810 - RNA, 13 nt, Human
accaaaaaccagu

SEQ ID NO: 1705811 - RNA, 14 nt, Human
acauugguguugua

SEQ ID NO: 1705812 - RNA, 16 nt, Human
acauugguguuguacu

SEQ ID NO: 1705813 - RNA, 22 nt, Human
acauugguguuguacucaauuu

SEQ ID NO: 1705814 - RNA, 23 nt, Human
acauugguguuguacucaauuuu

SEQ ID NO: 1705815 - RNA, 14 nt, Human
acauugguucuugu

SEQ ID NO: 1705816 - RNA, 16 nt, Human
acauugguucuuguau

SEQ ID NO: 1705817 - RNA, 18 nt, Human
acauugguucuuguauua

SEQ ID NO: 1705818 - RNA, 21 nt, Human
acauugguucuuguauuaaga

SEQ ID NO: 1705819 - RNA, 22 nt, Human
acauugguucuuguauuaagaa

SEQ ID NO: 1705820 - RNA, 23 nt, Human
acauugguucuuguauuaagaau

SEQ ID NO: 1705821 - RNA, 12 nt, Human
acauguauuugu

SEQ ID NO: 1705822 - RNA, 15 nt, Human
ucaaaguugccuaaa

SEQ ID NO: 1705823 - RNA, 15 nt, Human
uauuuguuugcauag

SEQ ID NO: 1705824 - RNA, 23 nt, Human
uccgugcuaaggacuuguuagau

SEQ ID NO: 1705825 - RNA, 16 nt, Human
uccgugcuaaggacuu

SEQ ID NO: 1705826 - RNA, 17 nt, Human
uccgugcuaaggacuug

SEQ ID NO: 1705827 - RNA, 18 nt, Human
uccgugcuaaggacuugu

SEQ ID NO: 1705828 - RNA, 17 nt, Human
uccauuuaauaauuaua

SEQ ID NO: 1705829 - RNA, 12 nt, Human
uccauuuggaaa

SEQ ID NO: 1705830 - RNA, 19 nt, Human
uccauuuggaaaucuuuaa

SEQ ID NO: 1705831 - RNA, 20 nt, Human
uccauuuggaaaucuuuaaa

SEQ ID NO: 1705832 - RNA, 12 nt, Human
uccauuuaauaa

SEQ ID NO: 1705833 - RNA, 14 nt, Human
acggaugauuucua

SEQ ID NO: 1705834 - RNA, 15 nt, Human
acggaugauuucuau

SEQ ID NO: 1705835 - RNA, 13 nt, Human
acgcguugaaauu

SEQ ID NO: 1705836 - RNA, 14 nt, Human
acgcguugaaauug

SEQ ID NO: 1705837 - RNA, 18 nt, Human
acgcguugaaauuguaau

SEQ ID NO: 1705838 - RNA, 20 nt, Human
acgcguugaaauuguaauua

SEQ ID NO: 1705839 - RNA, 22 nt, Human
uccacauaaggaaacuggguuc

SEQ ID NO: 1705840 - RNA, 16 nt, Human
uccaauuaaggauuuu

SEQ ID NO: 1705841 - RNA, 17 nt, Human
uccaauuaaggauuuua

SEQ ID NO: 1705842 - RNA, 15 nt, Human
uccaauuaaggauuu

SEQ ID NO: 1705843 - RNA, 15 nt, Human
acaaaguauuaagca

SEQ ID NO: 1705844 - RNA, 16 nt, Human
acaaaguauuaagcau

SEQ ID NO: 1705845 - RNA, 13 nt, Human
acaaaguauuaag

SEQ ID NO: 1705846 - RNA, 18 nt, Human
acaaaguauuaagcauau

SEQ ID NO: 1705847 - RNA, 18 nt, Human
uagcacacacuuuugguu

SEQ ID NO: 1705848 - RNA, 14 nt, Human
uaugcuauuucuau

SEQ ID NO: 1705849 - RNA, 15 nt, Human
uaugcuauuucuaua

SEQ ID NO: 1705850 - RNA, 16 nt, Human
uaugcuauuucuauau

SEQ ID NO: 1705851 - RNA, 18 nt, Human
uaugcuauuucuauauuu

SEQ ID NO: 1705852 - RNA, 22 nt, Human
uaugcuauuucuauauuuucau

SEQ ID NO: 1705853 - RNA, 23 nt, Human
uaugcuauuucuauauuuucauu

SEQ ID NO: 1705854 - RNA, 14 nt, Human
uaugaaacuugugu

SEQ ID NO: 1705855 - RNA, 19 nt, Human
uaugaaacuuguguaaaua

SEQ ID NO: 1705856 - RNA, 21 nt, Human
uaugaaacuuguguaaauaca

SEQ ID NO: 1705857 - RNA, 18 nt, Human
uauagauuagaauucugu

SEQ ID NO: 1705858 - RNA, 13 nt, Human
acacuuuugguua

SEQ ID NO: 1705859 - RNA, 22 nt, Human
acacuuuugguuaagucuguuu

SEQ ID NO: 1705860 - RNA, 13 nt, Human
aauuaaguaucug

SEQ ID NO: 1705861 - RNA, 14 nt, Human
aauuaaguaucuga

SEQ ID NO: 1705862 - RNA, 14 nt, Human
uacaccauuaugug

SEQ ID NO: 1705863 - RNA, 14 nt, Human
uaauuauaugcuau

SEQ ID NO: 1705864 - RNA, 18 nt, Human
uaauuauaugcuauuucu

SEQ ID NO: 1705865 - RNA, 19 nt, Human
uaauuauaugcuauuucua

SEQ ID NO: 1705866 - RNA, 19 nt, Human
uaauuauaucugaggaauu

SEQ ID NO: 1705867 - RNA, 21 nt, Human
uaauuauaucugaggaauucu

SEQ ID NO: 1705868 - RNA, 22 nt, Human
uaauuauaucugaggaauucug

SEQ ID NO: 1705869 - RNA, 23 nt, Human
uaauuauaucugaggaauucugu

SEQ ID NO: 1705870 - RNA, 14 nt, Human
uaaggacuucuuua

SEQ ID NO: 1705871 - RNA, 15 nt, Human
uaaggacuucuuuaa

SEQ ID NO: 1705872 - RNA, 16 nt, Human
uaaggacuucuuuaau

SEQ ID NO: 1705873 - RNA, 22 nt, Human
uaaggacuucuuuaauuuugga

SEQ ID NO: 1705874 - RNA, 17 nt, Human
uaaggaaaaguuuaaua

SEQ ID NO: 1705875 - RNA, 19 nt, Human
uaaggaaaaguuuaauauu

SEQ ID NO: 1705876 - RNA, 21 nt, Human
uaaggaaaaguuuaauauuaa

SEQ ID NO: 1705877 - RNA, 12 nt, Human
uaaggaaacugg

SEQ ID NO: 1705878 - RNA, 14 nt, Human
uaaggaaacugggu

SEQ ID NO: 1705879 - RNA, 19 nt, Human
uaaggaaacuggguuccug

SEQ ID NO: 1705880 - RNA, 13 nt, Human
uaagcauauauuu

SEQ ID NO: 1705881 - RNA, 13 nt, Human
uaaggacuuguua

SEQ ID NO: 1705882 - RNA, 15 nt, Human
uaaggacuuguuaga

SEQ ID NO: 1705883 - RNA, 16 nt, Human
uaaggacuuguuagau

SEQ ID NO: 1705884 - RNA, 19 nt, Human
uaaggacuuguuagaucua

SEQ ID NO: 1705885 - RNA, 21 nt, Human
aauccucucaaccaccuuuca

SEQ ID NO: 1705886 - RNA, 21 nt, Human
aaucccauuauucaaaguugc

SEQ ID NO: 1705887 - RNA, 14 nt, Human
aaucccauuauuca

SEQ ID NO: 1705888 - RNA, 16 nt, Human
aaucccauuauucaaa

SEQ ID NO: 1705889 - RNA, 12 nt, Human
uaacauguuaaa

SEQ ID NO: 1705890 - RNA, 15 nt, Human
uaacauguuaaacca

SEQ ID NO: 1705891 - RNA, 14 nt, Human
aauagcuagacugg

SEQ ID NO: 1705892 - RNA, 20 nt, Human
aauagcuagacuggugacug

SEQ ID NO: 1705893 - RNA, 21 nt, Human
aauagcuagacuggugacuga

SEQ ID NO: 1705894 - RNA, 17 nt, Human
aagccaaaccucuguga

SEQ ID NO: 1705895 - RNA, 21 nt, Human
guuuuucuuaaauaauaaaga

SEQ ID NO: 1705896 - RNA, 14 nt, Human
aaguauuaagcaua

SEQ ID NO: 1705897 - RNA, 15 nt, Human
aaguauuaagcauau

SEQ ID NO: 1705898 - RNA, 18 nt, Human
aaguauuaagcauauauu

SEQ ID NO: 1705899 - RNA, 16 nt, Human
aaguauuaagcauaua

SEQ ID NO: 1705900 - RNA, 17 nt, Human
aaguauuaagcauauau

SEQ ID NO: 1705901 - RNA, 20 nt, Human
guuuuucuuaaauaauaaag

SEQ ID NO: 1705902 - RNA, 17 nt, Human
guugccuaaauccauuu

SEQ ID NO: 1705903 - RNA, 22 nt, Human
guugccuaaauccauuuggaaa

SEQ ID NO: 1705904 - RNA, 19 nt, Human
guuuaauauuaaagccaug

SEQ ID NO: 1705905 - RNA, 20 nt, Human
guuuaauauuaaagccaugu

SEQ ID NO: 1705906 - RNA, 13 nt, Human
aaaugguuaaaag

SEQ ID NO: 1705907 - RNA, 19 nt, Human
aaaugguuaaaagagguuu

SEQ ID NO: 1705908 - RNA, 11 nt, Human
aaaugguuaaa

SEQ ID NO: 1705909 - RNA, 14 nt, Human
aaauuguaauuaua

SEQ ID NO: 1705910 - RNA, 15 nt, Human
aaauuguaauuauau

SEQ ID NO: 1705911 - RNA, 16 nt, Human
aaccucuuugucuaca

SEQ ID NO: 1705912 - RNA, 14 nt, Human
aacugggcugaaca

SEQ ID NO: 1705913 - RNA, 16 nt, Human
aacugggcugaacacu

SEQ ID NO: 1705914 - RNA, 17 nt, Human
aacugcuuguuuccuag

SEQ ID NO: 1705915 - RNA, 14 nt, Human
gugaacuugaaauu

SEQ ID NO: 1705916 - RNA, 15 nt, Human
gugaacuugaaauuu

SEQ ID NO: 1705917 - RNA, 15 nt, Human
aacuggguuccugca

SEQ ID NO: 1705918 - RNA, 14 nt, Human
aacuggguuccugc

SEQ ID NO: 1705919 - RNA, 19 nt, Human
accugucuugccuuuuuca

SEQ ID NO: 1705920 - RNA, 21 nt, Human
accugucuugccuuuuucauu

SEQ ID NO: 1705921 - RNA, 22 nt, Human
accugucuugccuuuuucauua

SEQ ID NO: 1705922 - RNA, 15 nt, Human
acugauucuucagca

SEQ ID NO: 1705923 - RNA, 22 nt, Human
acugauucuucagcaaaaauau

SEQ ID NO: 1705924 - RNA, 12 nt, Human
acugauucuuca

SEQ ID NO: 1705925 - RNA, 13 nt, Human
acugauucuucag

SEQ ID NO: 1705926 - RNA, 17 nt, Human
aauuggggauucuuaaa

SEQ ID NO: 1705927 - RNA, 20 nt, Human
aauuggggauucuuaaaguu

SEQ ID NO: 1705928 - RNA, 21 nt, Human
aaugguccgugcuaaggacuu

SEQ ID NO: 1705929 - RNA, 16 nt, Human
aauuggggauucuuaa

SEQ ID NO: 1705930 - RNA, 17 nt, Human
aauuuauuggcuuuucu

SEQ ID NO: 1705931 - RNA, 19 nt, Human
aauuuauuggcuuuucuga

SEQ ID NO: 1705932 - RNA, 20 nt, Human
aauuuauuggcuuuucugau

SEQ ID NO: 1705933 - RNA, 21 nt, Human
aauuuauuggcuuuucugauc

SEQ ID NO: 1705934 - RNA, 23 nt, Human
aauuuauuggcuuuucugaucca

SEQ ID NO: 1705935 - RNA, 12 nt, Human
aauuuuggaauu

SEQ ID NO: 1705936 - RNA, 11 nt, Human
aauuuuggaau

SEQ ID NO: 1705937 - RNA, 20 nt, Human
acaauuuuguuucuguacuu

SEQ ID NO: 1705938 - RNA, 18 nt, Human
acaauuuuguuucuguac

SEQ ID NO: 1705939 - RNA, 14 nt, Human
accaccuuucagau

SEQ ID NO: 1705940 - RNA, 14 nt, Human
aaggcaaaugacuu

SEQ ID NO: 1705941 - RNA, 15 nt, Human
aaggcaaaugacuuu

SEQ ID NO: 1705942 - RNA, 16 nt, Human
aaggcaaaugacuuug

SEQ ID NO: 1705943 - RNA, 20 nt, Human
aaugguccgugcuaaggacu

SEQ ID NO: 1705944 - RNA, 12 nt, Human
aauacuguuuga

SEQ ID NO: 1705945 - RNA, 13 nt, Human
aauauuaaagcca

SEQ ID NO: 1705946 - RNA, 12 nt, Human
aauauuaaagcc

SEQ ID NO: 1705947 - RNA, 14 nt, Human
aauauuaaagccau

SEQ ID NO: 1705948 - RNA, 15 nt, Human
aauauuaaagccaug

SEQ ID NO: 1705949 - RNA, 16 nt, Human
aauauuaaagccaugu

SEQ ID NO: 1705950 - RNA, 18 nt, Human
aauauuaaagccauguuu

SEQ ID NO: 1705951 - RNA, 19 nt, Human
aauauuaaagccauguuua

SEQ ID NO: 1705952 - RNA, 20 nt, Human
aauauuaaagccauguuuau

SEQ ID NO: 1705953 - RNA, 21 nt, Human
aauaauaaagaucauguaaaa

SEQ ID NO: 1705954 - RNA, 13 nt, Human
aauaauaaagauc

SEQ ID NO: 1705955 - RNA, 20 nt, Human
aaaucugugaacuugaaauu

SEQ ID NO: 1705956 - RNA, 19 nt, Human
aaaucugugaacuugaaau

SEQ ID NO: 1705957 - RNA, 21 nt, Human
aaaucugugaacuugaaauuu

SEQ ID NO: 1705958 - RNA, 23 nt, Human
aaauuggggauucuuaaaguuga

SEQ ID NO: 1705959 - RNA, 18 nt, Human
aaauuggggauucuuaaa

SEQ ID NO: 1705960 - RNA, 19 nt, Human
aaauuggggauucuuaaag

SEQ ID NO: 1705961 - RNA, 20 nt, Human
aaauuggggauucuuaaagu

SEQ ID NO: 1705962 - RNA, 22 nt, Human
aaauuggggauucuuaaaguug

SEQ ID NO: 1705963 - RNA, 11 nt, Human
aaccaguauug

SEQ ID NO: 1705964 - RNA, 13 nt, Human
aaccaguauugua

SEQ ID NO: 1705965 - RNA, 14 nt, Human
aaccaguauuguac

SEQ ID NO: 1705966 - RNA, 13 nt, Human
aacgcguugaaau

SEQ ID NO: 1705967 - RNA, 14 nt, Human
aacgcguugaaauu

SEQ ID NO: 1705968 - RNA, 15 nt, Human
aacgcguugaaauug

SEQ ID NO: 1705969 - RNA, 17 nt, Human
aacgcguugaaauugua

SEQ ID NO: 1705970 - RNA, 15 nt, Human
aacuguuauuuauaa

SEQ ID NO: 1705971 - RNA, 16 nt, Human
aacuguuauuuauaau

SEQ ID NO: 1705972 - RNA, 17 nt, Human
aacuguuauuuauaauc

SEQ ID NO: 1705973 - RNA, 20 nt, Human
aacuguuauuuauaaucacu

SEQ ID NO: 1705974 - RNA, 22 nt, Human
aacuguuauuuauaaucacuuu

SEQ ID NO: 1705975 - RNA, 20 nt, Human
aaaaguuuaauauuaaagcc

SEQ ID NO: 1705976 - RNA, 23 nt, Human
aaaaguuuaauauuaaagccaug

SEQ ID NO: 1705977 - RNA, 21 nt, Human
aaaaguuuaauauuaaagcca

SEQ ID NO: 1705978 - RNA, 22 nt, Human
aaaaguuuaauauuaaagccau

SEQ ID NO: 1705979 - RNA, 16 nt, Human
agaaugaaauacuguu

SEQ ID NO: 1705980 - RNA, 19 nt, Human
agaaugaaauacuguuuga

SEQ ID NO: 1705981 - RNA, 20 nt, Human
agaaugaaauacuguuugag

SEQ ID NO: 1705982 - RNA, 17 nt, Human
agacgaugucuucauac

SEQ ID NO: 1705983 - RNA, 19 nt, Human
agacgaugucuucauaccu

SEQ ID NO: 1705984 - RNA, 16 nt, Human
agacgaugucuucaua

SEQ ID NO: 1705985 - RNA, 16 nt, Human
agccaaaccucuguga

SEQ ID NO: 1705986 - RNA, 14 nt, Human
agcacacacuuuug

SEQ ID NO: 1705987 - RNA, 20 nt, Human
agcacacacuuuugguuaag

SEQ ID NO: 1705988 - RNA, 19 nt, Human
agaucugccuaaggacuuc

SEQ ID NO: 1705989 - RNA, 12 nt, Human
agucuguuuuau

SEQ ID NO: 1705990 - RNA, 20 nt, Human
auauauuuuuauauuuacua

SEQ ID NO: 1705991 - RNA, 18 nt, Human
auauauuuuuauauuuac

SEQ ID NO: 1705992 - RNA, 19 nt, Human
auauauuuuuauauuuacu

SEQ ID NO: 1705993 - RNA, 13 nt, Human
auaucaucaguau

SEQ ID NO: 1705994 - RNA, 14 nt, Human
aucccauuauucaa

SEQ ID NO: 1705995 - RNA, 15 nt, Human
aucccauuauucaaa

SEQ ID NO: 1705996 - RNA, 20 nt, Human
aucccauuauucaaaguugc

SEQ ID NO: 1705997 - RNA, 15 nt, Human
aucacaguuuugguu

SEQ ID NO: 1705998 - RNA, 22 nt, Human
aucacaguuuugguugcuuuaa

SEQ ID NO: 1705999 - RNA, 21 nt, Human
aucacaguuuugguugcuuua

SEQ ID NO: 1706000 - RNA, 14 nt, Human
augaagucucugaa

SEQ ID NO: 1706001 - RNA, 18 nt, Human
aucucugcaaucuucuca

SEQ ID NO: 1706002 - RNA, 21 nt, Human
aucucugcaaucuucucagaa

SEQ ID NO: 1706003 - RNA, 18 nt, Human
auggcuuuguauagaacc

SEQ ID NO: 1706004 - RNA, 13 nt, Human
augcuuuaaacau

SEQ ID NO: 1706005 - RNA, 19 nt, Human
auggcuuuguauagaaccu

SEQ ID NO: 1706006 - RNA, 20 nt, Human
augcugaguuugugcuggug

SEQ ID NO: 1706007 - RNA, 15 nt, Human
augguccgugcuaag

SEQ ID NO: 1706008 - RNA, 18 nt, Human
augguccgugcuaaggac

SEQ ID NO: 1706009 - RNA, 23 nt, Human
caacagcuggugcccugcuuuca

SEQ ID NO: 1706010 - RNA, 13 nt, Human
uuaauauuaaagc

SEQ ID NO: 1706011 - RNA, 14 nt, Human
uuaauauuaaagcc

SEQ ID NO: 1706012 - RNA, 16 nt, Human
uuaauauuaaagccau

SEQ ID NO: 1706013 - RNA, 17 nt, Human
uuaauauuaaagccaug

SEQ ID NO: 1706014 - RNA, 11 nt, Human
uuaauauuaaa

SEQ ID NO: 1706015 - RNA, 14 nt, Human
uuaauaauaaauuc

SEQ ID NO: 1706016 - RNA, 23 nt, Human
uuaauaauaaauucccuggccuu

SEQ ID NO: 1706017 - RNA, 12 nt, Human
uuacagaagccc

SEQ ID NO: 1706018 - RNA, 18 nt, Human
uuaauauuaaagccaugu

SEQ ID NO: 1706019 - RNA, 19 nt, Human
uuaauauuaaagccauguu

SEQ ID NO: 1706020 - RNA, 20 nt, Human
uuaauauuaaagccauguuu

SEQ ID NO: 1706021 - RNA, 12 nt, Human
uuaaagccaugu

SEQ ID NO: 1706022 - RNA, 14 nt, Human
uuaaagccauguuu

SEQ ID NO: 1706023 - RNA, 18 nt, Human
uuaaagccauguuuauua

SEQ ID NO: 1706024 - RNA, 20 nt, Human
uuaaagccauguuuauuaca

SEQ ID NO: 1706025 - RNA, 15 nt, Human
uuaaaaaaaaaauug

SEQ ID NO: 1706026 - RNA, 11 nt, Human
uguuucuguac

SEQ ID NO: 1706027 - RNA, 22 nt, Human
uguuucuguacuuuuuggcaua

SEQ ID NO: 1706028 - RNA, 23 nt, Human
uguuucuguacuuuuuggcauaa

SEQ ID NO: 1706029 - RNA, 23 nt, Human
uguuuccuagcacacacuuuugg

SEQ ID NO: 1706030 - RNA, 21 nt, Human
uguauugugcgcuaaacuuuu

SEQ ID NO: 1706031 - RNA, 14 nt, Human
ugcacggugaaugg

SEQ ID NO: 1706032 - RNA, 18 nt, Human
ugcacggugaauggcuuu

SEQ ID NO: 1706033 - RNA, 19 nt, Human
ugcacggugaauggcuuug

SEQ ID NO: 1706034 - RNA, 12 nt, Human
uggggauucuua

SEQ ID NO: 1706035 - RNA, 13 nt, Human
uggggauucuuaa

SEQ ID NO: 1706036 - RNA, 16 nt, Human
uggggauucuuaaagu

SEQ ID NO: 1706037 - RNA, 18 nt, Human
uggggauucuuaaaguug

SEQ ID NO: 1706038 - RNA, 20 nt, Human
uggggauucuuaaaguugaa

SEQ ID NO: 1706039 - RNA, 14 nt, Human
uggcuuuucugauc

SEQ ID NO: 1706040 - RNA, 17 nt, Human
uggcuuuucugauccag

SEQ ID NO: 1706041 - RNA, 13 nt, Human
uggcuuuucugau

SEQ ID NO: 1706042 - RNA, 18 nt, Human
uggcuuuucugauccagu

SEQ ID NO: 1706043 - RNA, 19 nt, Human
uggcuuuucugauccaguu

SEQ ID NO: 1706044 - RNA, 13 nt, Human
ugcuuuaauauca

SEQ ID NO: 1706045 - RNA, 15 nt, Human
ugcuuuaauaucauc

SEQ ID NO: 1706046 - RNA, 18 nt, Human
ugcuuuaauaucaucagu

SEQ ID NO: 1706047 - RNA, 20 nt, Human
ugcuuuaauaucaucaguau

SEQ ID NO: 1706048 - RNA, 19 nt, Human
uggaacgcguugaaauugu

SEQ ID NO: 1706049 - RNA, 18 nt, Human
uggaacgcguugaaauug

SEQ ID NO: 1706050 - RNA, 24 nt, Human
ucccuggccuuucauauuuuagcu

SEQ ID NO: 1706051 - RNA, 16 nt, Human
ucccuggccuuucaua

SEQ ID NO: 1706052 - RNA, 18 nt, Human
uccucucaaccaccuuuc

SEQ ID NO: 1706053 - RNA, 20 nt, Human
uccucucaaccaccuuucag

SEQ ID NO: 1706054 - RNA, 21 nt, Human
uccucucaaccaccuuucaga

SEQ ID NO: 1706055 - RNA, 15 nt, Human
ucgcuuuugauaauc

SEQ ID NO: 1706056 - RNA, 13 nt, Human
ucuauauuuucau

SEQ ID NO: 1706057 - RNA, 14 nt, Human
ucuauauuuucauu

SEQ ID NO: 1706058 - RNA, 15 nt, Human
ucuauauuuucauuc

SEQ ID NO: 1706059 - RNA, 16 nt, Human
ucuauauuuucauucu

SEQ ID NO: 1706060 - RNA, 19 nt, Human
ucuauauuuucauucuccu

SEQ ID NO: 1706061 - RNA, 16 nt, Human
ucucagauuuuauuau

SEQ ID NO: 1706062 - RNA, 17 nt, Human
ucucagauuuuauuaug

SEQ ID NO: 1706063 - RNA, 18 nt, Human
ucucagauuuuauuaugu

SEQ ID NO: 1706064 - RNA, 19 nt, Human
ucucagauuuuauuaugua

SEQ ID NO: 1706065 - RNA, 14 nt, Human
ucucagauuuuauu

SEQ ID NO: 1706066 - RNA, 15 nt, Human
ucucagauuuuauua

SEQ ID NO: 1706067 - RNA, 13 nt, Human
ucucagauuuuau

SEQ ID NO: 1706068 - RNA, 16 nt, Human
ucaucaguauugaagc

SEQ ID NO: 1706069 - RNA, 20 nt, Human
ucaucaguauugaagcauuu

SEQ ID NO: 1706070 - RNA, 21 nt, Human
ucaucaguauugaagcauuuu

SEQ ID NO: 1706071 - RNA, 23 nt, Human
ucaucaguauugaagcauuuuau

SEQ ID NO: 1706072 - RNA, 22 nt, Human
ucagauaacuguuauuuauaau

SEQ ID NO: 1706073 - RNA, 14 nt, Human
ucagauacuggauu

SEQ ID NO: 1706074 - RNA, 15 nt, Human
ucagauacuggauug

SEQ ID NO: 1706075 - RNA, 16 nt, Human
ucagauacuggauugu

SEQ ID NO: 1706076 - RNA, 19 nt, Human
ucagauacuggauuguacu

SEQ ID NO: 1706077 - RNA, 20 nt, Human
ucagauacuggauuguacuu

SEQ ID NO: 1706078 - RNA, 23 nt, Human
ucugccuaaggacuucuuuaauu

SEQ ID NO: 1706079 - RNA, 20 nt, Human
ucugccuaaggacuucuuua

SEQ ID NO: 1706080 - RNA, 21 nt, Human
ucugccuaaggacuucuuuaa

SEQ ID NO: 1706081 - RNA, 14 nt, Human
ucugcaaucuucuc

SEQ ID NO: 1706082 - RNA, 17 nt, Human
ucugcaaucuucucaga

SEQ ID NO: 1706083 - RNA, 17 nt, Human
ucuugucucagauuuua

SEQ ID NO: 1706084 - RNA, 14 nt, Human
ucuugucucagauu

SEQ ID NO: 1706085 - RNA, 15 nt, Human
ucuugucucagauuu

SEQ ID NO: 1706086 - RNA, 12 nt, Human
ucuugucucaga

SEQ ID NO: 1706087 - RNA, 14 nt, Human
ucuuguauuaagaa

SEQ ID NO: 1706088 - RNA, 15 nt, Human
ucuuguauuaagaau

SEQ ID NO: 1706089 - RNA, 12 nt, Human
ugacuuuggaua

SEQ ID NO: 1706090 - RNA, 13 nt, Human
ugacuuuggauaa

SEQ ID NO: 1706091 - RNA, 14 nt, Human
ugacuuuggauaau

SEQ ID NO: 1706092 - RNA, 15 nt, Human
ugacuuuggauaaua

SEQ ID NO: 1706093 - RNA, 16 nt, Human
ugacuuuggauaauaa

SEQ ID NO: 1706094 - RNA, 20 nt, Human
ugacuuuggauaauaaggaa

SEQ ID NO: 1706095 - RNA, 22 nt, Human
ugacuuuggauaauaaggaaaa

SEQ ID NO: 1706096 - RNA, 13 nt, Human
ugacaucucugca

SEQ ID NO: 1706097 - RNA, 14 nt, Human
ugacaucucugcaa

SEQ ID NO: 1706098 - RNA, 23 nt, Human
ugacaucucugcaaucuucucag

SEQ ID NO: 1706099 - RNA, 13 nt, Human
ugaacuugaaauu

SEQ ID NO: 1706100 - RNA, 14 nt, Human
ugaacuugaaauuu

SEQ ID NO: 1706101 - RNA, 18 nt, Human
ugaacuugaaauuugaau

SEQ ID NO: 1706102 - RNA, 12 nt, Human
uacaauuuuguu

SEQ ID NO: 1706103 - RNA, 15 nt, Human
uacaauuuuguuucu

SEQ ID NO: 1706104 - RNA, 16 nt, Human
uacaauuuuguuucug

SEQ ID NO: 1706105 - RNA, 17 nt, Human
uacaauuuuguuucugu

SEQ ID NO: 1706106 - RNA, 15 nt, Human
uacaaaguauuaagc

SEQ ID NO: 1706107 - RNA, 16 nt, Human
uacaaaguauuaagca

SEQ ID NO: 1706108 - RNA, 18 nt, Human
uacaaaguauuaagcaua

SEQ ID NO: 1706109 - RNA, 19 nt, Human
uacaaaguauuaagcauau

SEQ ID NO: 1706110 - RNA, 13 nt, Human
uacaaaguauuaa

SEQ ID NO: 1706111 - RNA, 14 nt, Human
uacaaaguauuaag

SEQ ID NO: 1706112 - RNA, 12 nt, Human
uacaaaguauua

SEQ ID NO: 1706113 - RNA, 17 nt, Human
uacuaaaauggacugug

SEQ ID NO: 1706114 - RNA, 15 nt, Human
uacuaaaauggacug

SEQ ID NO: 1706115 - RNA, 23 nt, Human
uacuaaaauggacuguggugacu

SEQ ID NO: 1706116 - RNA, 13 nt, Human
uaccuacauguau

SEQ ID NO: 1706117 - RNA, 23 nt, Human
uaccuacauguauuuguuugcau

SEQ ID NO: 1706118 - RNA, 21 nt, Human
uagacuggugacugauucuuc

SEQ ID NO: 1706119 - RNA, 23 nt, Human
uagacuggugacugauucuucag

SEQ ID NO: 1706120 - RNA, 20 nt, Human
uagacuggugacugauucuu

SEQ ID NO: 1706121 - RNA, 11 nt, Human
uagaauucugu

SEQ ID NO: 1706122 - RNA, 13 nt, Human
uagaauucuguau

SEQ ID NO: 1706123 - RNA, 14 nt, Human
uagaauucuguaua

SEQ ID NO: 1706124 - RNA, 15 nt, Human
uagaauucuguauag

SEQ ID NO: 1706125 - RNA, 16 nt, Human
uagaauucuguauaga

SEQ ID NO: 1706126 - RNA, 21 nt, Human
uagaauucuguauagauuaga

SEQ ID NO: 1706127 - RNA, 20 nt, Human
uagauuagagaguguugaaa

SEQ ID NO: 1706128 - RNA, 16 nt, Human
uagauuagaauucugu

SEQ ID NO: 1706129 - RNA, 17 nt, Human
uagauuagaauucugua

SEQ ID NO: 1706130 - RNA, 19 nt, Human
uagauuagaauucuguaua

SEQ ID NO: 1706131 - RNA, 20 nt, Human
uagauuagaauucuguauag

SEQ ID NO: 1706132 - RNA, 14 nt, Human
uagauuagaauucu

SEQ ID NO: 1706133 - RNA, 15 nt, Human
uagauuagaauucug

SEQ ID NO: 1706134 - RNA, 16 nt, Human
uauauuuucauucucc

SEQ ID NO: 1706135 - RNA, 14 nt, Human
uaucaucaguauug

SEQ ID NO: 1706136 - RNA, 15 nt, Human
uaucaucaguauuga

SEQ ID NO: 1706137 - RNA, 16 nt, Human
uaucaucaguauugaa

SEQ ID NO: 1706138 - RNA, 20 nt, Human
uauagaaccucuuugucuac

SEQ ID NO: 1706139 - RNA, 21 nt, Human
uauagaaccucuuugucuaca

SEQ ID NO: 1706140 - RNA, 23 nt, Human
uauaucugaggaauucuguauag

SEQ ID NO: 1706141 - RNA, 17 nt, Human
uaauauuaaagccaugu

SEQ ID NO: 1706142 - RNA, 20 nt, Human
uaauauuaaagccauguuua

SEQ ID NO: 1706143 - RNA, 21 nt, Human
uaauauuaaagccauguuuau

SEQ ID NO: 1706144 - RNA, 15 nt, Human
uaauauuaaagccau

SEQ ID NO: 1706145 - RNA, 16 nt, Human
uaauauuaaagccaug

SEQ ID NO: 1706146 - RNA, 23 nt, Human
uaauaucaucaguauugaagcau

SEQ ID NO: 1706147 - RNA, 21 nt, Human
uaauuaacauguuaaaccaug

SEQ ID NO: 1706148 - RNA, 20 nt, Human
uaaggauuuuaugcuuuaaa

SEQ ID NO: 1706149 - RNA, 22 nt, Human
uaaggauuuuaugcuuuaaaca

SEQ ID NO: 1706150 - RNA, 12 nt, Human
uaaggauuuuau

SEQ ID NO: 1706151 - RNA, 13 nt, Human
uaaggauuuuaug

SEQ ID NO: 1706152 - RNA, 17 nt, Human
uaaggauuuuaugcuuu

SEQ ID NO: 1706153 - RNA, 19 nt, Human
uaaggauuuuaugcuuuaa

SEQ ID NO: 1706154 - RNA, 13 nt, Human
uaagucuguuuua

SEQ ID NO: 1706155 - RNA, 16 nt, Human
uaagucuguuuuauga

SEQ ID NO: 1706156 - RNA, 19 nt, Human
uaagucuguuuuaugacuu

SEQ ID NO: 1706157 - RNA, 20 nt, Human
uaagucuguuuuaugacuuc

SEQ ID NO: 1706158 - RNA, 21 nt, Human
uaagucuguuuuaugacuuca

SEQ ID NO: 1706159 - RNA, 16 nt, Human
uaauaaggaaaaguuu

SEQ ID NO: 1706160 - RNA, 16 nt, Human
uaacuguuauuuauaa

SEQ ID NO: 1706161 - RNA, 17 nt, Human
uaacuguuauuuauaau

SEQ ID NO: 1706162 - RNA, 16 nt, Human
uaaaugccaucaauaa

SEQ ID NO: 1706163 - RNA, 23 nt, Human
uaaaugccaucaauaaaaaauua

SEQ ID NO: 1706164 - RNA, 14 nt, Human
uaaaugguuaaaag

SEQ ID NO: 1706165 - RNA, 19 nt, Human
uaaacauugguucuuguau

SEQ ID NO: 1706166 - RNA, 21 nt, Human
uaaacauugguucuuguauua

SEQ ID NO: 1706167 - RNA, 11 nt, Human
uaaagccaugu

SEQ ID NO: 1706168 - RNA, 13 nt, Human
uaaagccauguuu

SEQ ID NO: 1706169 - RNA, 15 nt, Human
uaaagccauguuuau

SEQ ID NO: 1706170 - RNA, 20 nt, Human
uaaagccauguuuauuacag

SEQ ID NO: 1706171 - RNA, 19 nt, Human
uaaaagagguuuuucuuaa

SEQ ID NO: 1706172 - RNA, 21 nt, Human
uaaaagagguuuuucuuaaau

SEQ ID NO: 1706173 - RNA, 18 nt, Human
uaaaagagguuuuucuua

SEQ ID NO: 1706174 - RNA, 16 nt, Human
guuuugguugcuuuaa

SEQ ID NO: 1706175 - RNA, 18 nt, Human
guuguuugagaaauuaag

SEQ ID NO: 1706176 - RNA, 21 nt, Human
guugaaacggaugauuucuau

SEQ ID NO: 1706177 - RNA, 22 nt, Human
guugaaacggaugauuucuaug

SEQ ID NO: 1706178 - RNA, 16 nt, Human
guugaaauuguaauua

SEQ ID NO: 1706179 - RNA, 20 nt, Human
guugaaauuguaauuauauc

SEQ ID NO: 1706180 - RNA, 15 nt, Human
guugaaauuguaauu

SEQ ID NO: 1706181 - RNA, 14 nt, Human
guugaauuuauugg

SEQ ID NO: 1706182 - RNA, 21 nt, Human
guugaauuuauuggcuuuucu

SEQ ID NO: 1706183 - RNA, 22 nt, Human
guugaauuuauuggcuuuucug

SEQ ID NO: 1706184 - RNA, 15 nt, Human
guuccugcaaugaag

SEQ ID NO: 1706185 - RNA, 22 nt, Human
guucauggaacgcguugaaauu

SEQ ID NO: 1706186 - RNA, 23 nt, Human
guucauggaacgcguugaaauug

SEQ ID NO: 1706187 - RNA, 19 nt, Human
guucacucuccauuuaaua

SEQ ID NO: 1706188 - RNA, 19 nt, Human
guuaucugaagucagaucu

SEQ ID NO: 1706189 - RNA, 10 nt, Human
guuauauaaa

SEQ ID NO: 1706190 - RNA, 12 nt, Human
guuauauaaaug

SEQ ID NO: 1706191 - RNA, 13 nt, Human
guuauauaaaugg

SEQ ID NO: 1706192 - RNA, 13 nt, Human
guuacagaagccc

SEQ ID NO: 1706193 - RNA, 21 nt, Human
guuaaaccaugggauaaaugc

SEQ ID NO: 1706194 - RNA, 18 nt, Human
guuaaaccaugggauaaa

SEQ ID NO: 1706195 - RNA, 20 nt, Human
guuaaaagagguuuuucuua

SEQ ID NO: 1706196 - RNA, 21 nt, Human
guuaaaagagguuuuucuuaa

SEQ ID NO: 1706197 - RNA, 14 nt, Human
guuaaaagagguuu

SEQ ID NO: 1706198 - RNA, 13 nt, Human
guggugacuuugg

SEQ ID NO: 1706199 - RNA, 15 nt, Human
guggugacuuuggau

SEQ ID NO: 1706200 - RNA, 16 nt, Human
guggugacuuuggaua

SEQ ID NO: 1706201 - RNA, 13 nt, Human
gugcuaaggacuu

SEQ ID NO: 1706202 - RNA, 14 nt, Human
gugcuaaggacuug

SEQ ID NO: 1706203 - RNA, 20 nt, Human
gugcuaaggacuuguuagau

SEQ ID NO: 1706204 - RNA, 12 nt, Human
gugcuaaggacu

SEQ ID NO: 1706205 - RNA, 21 nt, Human
gugcgcuaaacuuuucugaua

SEQ ID NO: 1706206 - RNA, 17 nt, Human
gugcgcuaaacuuuucu

SEQ ID NO: 1706207 - RNA, 15 nt, Human
gucuugucucagauu

SEQ ID NO: 1706208 - RNA, 20 nt, Human
gucuugucucagauuuuauu

SEQ ID NO: 1706209 - RNA, 22 nt, Human
gucuugucucagauuuuauuau

SEQ ID NO: 1706210 - RNA, 15 nt, Human
gucuugccuuuuuca

SEQ ID NO: 1706211 - RNA, 16 nt, Human
gucuugccuuuuucau

SEQ ID NO: 1706212 - RNA, 17 nt, Human
gucuugccuuuuucauu

SEQ ID NO: 1706213 - RNA, 18 nt, Human
gucuugccuuuuucauua

SEQ ID NO: 1706214 - RNA, 20 nt, Human
gucuugccuuuuucauuauu

SEQ ID NO: 1706215 - RNA, 13 nt, Human
gucuguuuuauga

SEQ ID NO: 1706216 - RNA, 15 nt, Human
gucuguuuuaugacu

SEQ ID NO: 1706217 - RNA, 17 nt, Human
gucucagauuuuauuau

SEQ ID NO: 1706218 - RNA, 21 nt, Human
gucucagauuuuauuauguaa

SEQ ID NO: 1706219 - RNA, 15 nt, Human
gucucagauuuuauu

SEQ ID NO: 1706220 - RNA, 16 nt, Human
gucucagauuuuauua

SEQ ID NO: 1706221 - RNA, 14 nt, Human
gucucagauuuuau

SEQ ID NO: 1706222 - RNA, 15 nt, Human
gucucugaagugaaa

SEQ ID NO: 1706223 - RNA, 21 nt, Human
gucucugaagugaaacugcuu

SEQ ID NO: 1706224 - RNA, 16 nt, Human
gucagaucugccuaag

SEQ ID NO: 1706225 - RNA, 18 nt, Human
gucagaucugccuaagga

SEQ ID NO: 1706226 - RNA, 19 nt, Human
gucagaucugccuaaggac

SEQ ID NO: 1706227 - RNA, 20 nt, Human
gucagaucugccuaaggacu

SEQ ID NO: 1706228 - RNA, 21 nt, Human
gucagaucugccuaaggacuu

SEQ ID NO: 1706229 - RNA, 16 nt, Human
guauuaagcauauauu

SEQ ID NO: 1706230 - RNA, 17 nt, Human
guauuaagcauauauuu

SEQ ID NO: 1706231 - RNA, 15 nt, Human
guauuaagcauauau

SEQ ID NO: 1706232 - RNA, 16 nt, Human
guauuaagaaugaaau

SEQ ID NO: 1706233 - RNA, 18 nt, Human
guauuaagcauauauuuu

SEQ ID NO: 1706234 - RNA, 21 nt, Human
guauuaagcauauauuuuuau

SEQ ID NO: 1706235 - RNA, 19 nt, Human
guauagaaccucuuugucu

SEQ ID NO: 1706236 - RNA, 14 nt, Human
guauagauuagaau

SEQ ID NO: 1706237 - RNA, 21 nt, Human
guaugugugaagugagugagu

SEQ ID NO: 1706238 - RNA, 15 nt, Human
guauaauuaacaugu

SEQ ID NO: 1706239 - RNA, 17 nt, Human
guauaauuaacauguua

SEQ ID NO: 1706240 - RNA, 19 nt, Human
guauaauuaacauguuaaa

SEQ ID NO: 1706241 - RNA, 22 nt, Human
guauaauuaacauguuaaacca

SEQ ID NO: 1706242 - RNA, 23 nt, Human
guauaauuaacauguuaaaccau

SEQ ID NO: 1706243 - RNA, 13 nt, Human
guauaauuaacau

SEQ ID NO: 1706244 - RNA, 14 nt, Human
guauaauuaacaug

SEQ ID NO: 1706245 - RNA, 10 nt, Human
guauaauuaa

SEQ ID NO: 1706246 - RNA, 22 nt, Human
uuuggaauuuuccuccuuucuc

SEQ ID NO: 1706247 - RNA, 16 nt, Human
uuuggauaauaaggaa

SEQ ID NO: 1706248 - RNA, 18 nt, Human
uuuuuaagccuuaaagga

SEQ ID NO: 1706249 - RNA, 21 nt, Human
uuuuggcauaacauaaaucug

SEQ ID NO: 1706250 - RNA, 16 nt, Human
uuuugguugcuuuaau

SEQ ID NO: 1706251 - RNA, 15 nt, Human
uuuugguugcuuuaa

SEQ ID NO: 1706252 - RNA, 22 nt, Human
gccuaaauccauuuggaaaucu

SEQ ID NO: 1706253 - RNA, 23 nt, Human
gccuaaauccauuuggaaaucuu

SEQ ID NO: 1706254 - RNA, 12 nt, Human
gccuaaauccau

SEQ ID NO: 1706255 - RNA, 13 nt, Human
gccuaaauccauu

SEQ ID NO: 1706256 - RNA, 19 nt, Human
gccuaaauccauuuggaaa

SEQ ID NO: 1706257 - RNA, 21 nt, Human
gccuaaauccauuuggaaauc

SEQ ID NO: 1706258 - RNA, 14 nt, Human
gcccugcuuucaga

SEQ ID NO: 1706259 - RNA, 16 nt, Human
gcccugcuuucagaua

SEQ ID NO: 1706260 - RNA, 13 nt, Human
gcuaaacuuuucu

SEQ ID NO: 1706261 - RNA, 15 nt, Human
gcuaaacuuuucuga

SEQ ID NO: 1706262 - RNA, 17 nt, Human
gcuaaacuuuucugaua

SEQ ID NO: 1706263 - RNA, 23 nt, Human
gccuuuuucauuauuuuauuaug

SEQ ID NO: 1706264 - RNA, 13 nt, Human
gauuuuauuaugu

SEQ ID NO: 1706265 - RNA, 15 nt, Human
gauuuuauuauguaa

SEQ ID NO: 1706266 - RNA, 18 nt, Human
gauuuuauuauguaaauc

SEQ ID NO: 1706267 - RNA, 19 nt, Human
gauuuuauuauguaaaucc

SEQ ID NO: 1706268 - RNA, 20 nt, Human
gauuuuauuauguaaauccc

SEQ ID NO: 1706269 - RNA, 23 nt, Human
gauuuuauuauguaaaucccauu

SEQ ID NO: 1706270 - RNA, 14 nt, Human
gauuuuaugcuuua

SEQ ID NO: 1706271 - RNA, 19 nt, Human
gauuuuaugcuuuaaacau

SEQ ID NO: 1706272 - RNA, 20 nt, Human
gaugccaaguuguuugagaa

SEQ ID NO: 1706273 - RNA, 21 nt, Human
gcauaggugaucucauuuaau

SEQ ID NO: 1706274 - RNA, 20 nt, Human
gcauauauuuuuauauuuac

SEQ ID NO: 1706275 - RNA, 18 nt, Human
gcacggugaauggcuuug

SEQ ID NO: 1706276 - RNA, 18 nt, Human
gcagauuauucacugauu

SEQ ID NO: 1706277 - RNA, 16 nt, Human
gacauagucuggcugu

SEQ ID NO: 1706278 - RNA, 13 nt, Human
gaccaaaaaccag

SEQ ID NO: 1706279 - RNA, 19 nt, Human
gaccaaaaaccaguauugu

SEQ ID NO: 1706280 - RNA, 20 nt, Human
gaccaaaaaccaguauugua

SEQ ID NO: 1706281 - RNA, 12 nt, Human
gacuuguuagau

SEQ ID NO: 1706282 - RNA, 18 nt, Human
gaggaagccugauuaaag

SEQ ID NO: 1706283 - RNA, 19 nt, Human
gaggaagccugauuaaaga

SEQ ID NO: 1706284 - RNA, 20 nt, Human
gaacacuccaauuaaggauu

SEQ ID NO: 1706285 - RNA, 16 nt, Human
gaaauuugaauuuugu

SEQ ID NO: 1706286 - RNA, 24 nt, Human
gaaauuugaauuuuguguuagaga

SEQ ID NO: 1706287 - RNA, 13 nt, Human
gaaauuugaauuu

SEQ ID NO: 1706288 - RNA, 16 nt, Human
gaaacggaugauuucu

SEQ ID NO: 1706289 - RNA, 18 nt, Human
gaagccaaaccucuguga

SEQ ID NO: 1706290 - RNA, 15 nt, Human
gaagcauuuuauaaa

SEQ ID NO: 1706291 - RNA, 17 nt, Human
gaagcauuuuauaaauc

SEQ ID NO: 1706292 - RNA, 13 nt, Human
gaagcauuuuaua

SEQ ID NO: 1706293 - RNA, 22 nt, Human
gaagucagaucugccuaaggac

SEQ ID NO: 1706294 - RNA, 23 nt, Human
gaagucagaucugccuaaggacu

SEQ ID NO: 1706295 - RNA, 14 nt, Human
gaagucagaucugc

SEQ ID NO: 1706296 - RNA, 12 nt, Human
gaacuugaaauu

SEQ ID NO: 1706297 - RNA, 13 nt, Human
gaacuugaaauuu

SEQ ID NO: 1706298 - RNA, 15 nt, Human
gaacuugaaauuuga

SEQ ID NO: 1706299 - RNA, 22 nt, Human
gaacuugaaauuugaauuuugu

SEQ ID NO: 1706300 - RNA, 14 nt, Human
cuuguauuaagaau

SEQ ID NO: 1706301 - RNA, 15 nt, Human
cuuguauuaagaaug

SEQ ID NO: 1706302 - RNA, 19 nt, Human
cuugaaauuugaauuuugu

SEQ ID NO: 1706303 - RNA, 20 nt, Human
cuugaaauuugaauuuugug

SEQ ID NO: 1706304 - RNA, 23 nt, Human
cuuuugauaaucaacugggcuga

SEQ ID NO: 1706305 - RNA, 22 nt, Human
cuuuugauaaucaacugggcug

SEQ ID NO: 1706306 - RNA, 21 nt, Human
cuuuuucauuauuuuauuaug

SEQ ID NO: 1706307 - RNA, 12 nt, Human
cugcuuucagau

SEQ ID NO: 1706308 - RNA, 15 nt, Human
cugcuuucagauacu

SEQ ID NO: 1706309 - RNA, 14 nt, Human
cugcuuguuuccua

SEQ ID NO: 1706310 - RNA, 13 nt, Human
cugcuuguuuccu

SEQ ID NO: 1706311 - RNA, 14 nt, Human
cuggccuuucauau

SEQ ID NO: 1706312 - RNA, 15 nt, Human
cuguauagauuagag

SEQ ID NO: 1706313 - RNA, 20 nt, Human
cuguauagauuagaauucug

SEQ ID NO: 1706314 - RNA, 16 nt, Human
cuguauagauuagaga

SEQ ID NO: 1706315 - RNA, 18 nt, Human
cugaacacuccaauuaag

SEQ ID NO: 1706316 - RNA, 23 nt, Human
cugaacacuccaauuaaggauuu

SEQ ID NO: 1706317 - RNA, 22 nt, Human
cucugugagcaucacaguuuug

SEQ ID NO: 1706318 - RNA, 18 nt, Human
cucugugagcaucacagu

SEQ ID NO: 1706319 - RNA, 21 nt, Human
cucugugagcaucacaguuuu

SEQ ID NO: 1706320 - RNA, 14 nt, Human
cugacaucucugca

SEQ ID NO: 1706321 - RNA, 15 nt, Human
cugacaucucugcaa

SEQ ID NO: 1706322 - RNA, 16 nt, Human
cugacaucucugcaau

SEQ ID NO: 1706323 - RNA, 19 nt, Human
cucccuauuuuuuuucugu

SEQ ID NO: 1706324 - RNA, 20 nt, Human
cucccuauuuuuuuucuguu

SEQ ID NO: 1706325 - RNA, 17 nt, Human
cucccuauuuuuuuucu

SEQ ID NO: 1706326 - RNA, 18 nt, Human
cggugaauggcuuuguau

SEQ ID NO: 1706327 - RNA, 20 nt, Human
cggugaauggcuuuguauag

SEQ ID NO: 1706328 - RNA, 22 nt, Human
cggugaauggcuuuguauagaa

SEQ ID NO: 1706329 - RNA, 13 nt, Human
cggugaauggcuu

SEQ ID NO: 1706330 - RNA, 14 nt, Human
cggugaauggcuuu

SEQ ID NO: 1706331 - RNA, 15 nt, Human
cggugaauggcuuug

SEQ ID NO: 1706332 - RNA, 16 nt, Human
cggugaauggcuuugu

SEQ ID NO: 1706333 - RNA, 23 nt, Human
cguugaaauuguaauuauaucug

SEQ ID NO: 1706334 - RNA, 18 nt, Human
cguugaaauuguaauuau

SEQ ID NO: 1706335 - RNA, 16 nt, Human
cgugcuaaggacuugu

SEQ ID NO: 1706336 - RNA, 12 nt, Human
cgugcuaaggac

SEQ ID NO: 1706337 - RNA, 13 nt, Human
cgugcuaaggacu

SEQ ID NO: 1706338 - RNA, 14 nt, Human
cgugcuaaggacuu

SEQ ID NO: 1706339 - RNA, 15 nt, Human
cgugcuaaggacuug

SEQ ID NO: 1706340 - RNA, 17 nt, Human
cuaaauccauuuggaaa

SEQ ID NO: 1706341 - RNA, 19 nt, Human
cuaaauccauuuggaaauc

SEQ ID NO: 1706342 - RNA, 20 nt, Human
cuaaauccauuuggaaaucu

SEQ ID NO: 1706343 - RNA, 16 nt, Human
cuaaauccauuuggaa

SEQ ID NO: 1706344 - RNA, 12 nt, Human
cuaguucacucu

SEQ ID NO: 1706345 - RNA, 18 nt, Human
cuauauaugugaugaucu

SEQ ID NO: 1706346 - RNA, 23 nt, Human
cuauauaugugaugaucuaccag

SEQ ID NO: 1706347 - RNA, 16 nt, Human
cuaaggacuuguuaga

SEQ ID NO: 1706348 - RNA, 17 nt, Human
cuaaggacuuguuagau

SEQ ID NO: 1706349 - RNA, 11 nt, Human
cuaaggacuug

SEQ ID NO: 1706350 - RNA, 22 nt, Human
ccuacauguauuuguuugcaua

SEQ ID NO: 1706351 - RNA, 20 nt, Human
ccuaaauccauuuggaaauc

SEQ ID NO: 1706352 - RNA, 21 nt, Human
ccuaaauccauuuggaaaucu

SEQ ID NO: 1706353 - RNA, 19 nt, Human
ccuaaauccauuuggaaau

SEQ ID NO: 1706354 - RNA, 23 nt, Human
cccggaagccaaaccucugugag

SEQ ID NO: 1706355 - RNA, 12 nt, Human
cccauuauucaa

SEQ ID NO: 1706356 - RNA, 17 nt, Human
cccagacgaugucuuca

SEQ ID NO: 1706357 - RNA, 15 nt, Human
cccagacgaugucuu

SEQ ID NO: 1706358 - RNA, 12 nt, Human
cauuauuuuauu

SEQ ID NO: 1706359 - RNA, 14 nt, Human
cauuauuuuauuau

SEQ ID NO: 1706360 - RNA, 16 nt, Human
cauuauuuuauuauga

SEQ ID NO: 1706361 - RNA, 17 nt, Human
ccaaaccucugugagca

SEQ ID NO: 1706362 - RNA, 12 nt, Human
cauguuuauuac

SEQ ID NO: 1706363 - RNA, 13 nt, Human
cauguuuauuaca

SEQ ID NO: 1706364 - RNA, 18 nt, Human
cauguuuauuacaguaua

SEQ ID NO: 1706365 - RNA, 19 nt, Human
cauguuuauuacaguauaa

SEQ ID NO: 1706366 - RNA, 20 nt, Human
cauguuuauuacaguauaau

SEQ ID NO: 1706367 - RNA, 22 nt, Human
cauguuuauuacaguauaauua

SEQ ID NO: 1706368 - RNA, 11 nt, Human
cauuauuuuau

SEQ ID NO: 1706369 - RNA, 18 nt, Human
cauggaacgcguugaaau

SEQ ID NO: 1706370 - RNA, 19 nt, Human
cauggaacgcguugaaauu

SEQ ID NO: 1706371 - RNA, 20 nt, Human
cauggaacgcguugaaauug

SEQ ID NO: 1706372 - RNA, 23 nt, Human
cauggaacgcguugaaauuguaa

SEQ ID NO: 1706373 - RNA, 15 nt, Human
cauaccuacauguau

SEQ ID NO: 1706374 - RNA, 21 nt, Human
caguuuuguuuggaccaaaaa

SEQ ID NO: 1706375 - RNA, 18 nt, Human
caguuuugguugcuuuaa

SEQ ID NO: 1706376 - RNA, 19 nt, Human
caguuuugguugcuuuaau

SEQ ID NO: 1706377 - RNA, 17 nt, Human
caguuuugguugcuuua

SEQ ID NO: 1706378 - RNA, 16 nt, Human
cauaaaucugugaacu

SEQ ID NO: 1706379 - RNA, 18 nt, Human
cauaaaucugugaacuug

SEQ ID NO: 1706380 - RNA, 22 nt, Human
cauaaaucugugaacuugaaau

SEQ ID NO: 1706381 - RNA, 23 nt, Human
cauaaaucugugaacuugaaauu

SEQ ID NO: 1706382 - RNA, 14 nt, Human
cauaaaucugugaa

SEQ ID NO: 1706383 - RNA, 12 nt, Human
cauaacauaaau

SEQ ID NO: 1706384 - RNA, 19 nt, Human
cauaacauaaaucugugaa

SEQ ID NO: 1706385 - RNA, 21 nt, Human
cauaacauaaaucugugaacu

SEQ ID NO: 1706386 - RNA, 17 nt, Human
cauaaggaaacuggguu

SEQ ID NO: 1706387 - RNA, 13 nt, Human
caucacaguuuug

SEQ ID NO: 1706388 - RNA, 21 nt, Human
caucacaguuuugguugcuuu

SEQ ID NO: 1706389 - RNA, 22 nt, Human
caucacaguuuugguugcuuua

SEQ ID NO: 1706390 - RNA, 22 nt, Human
cauauauuuuuauauuuacuaa

SEQ ID NO: 1706391 - RNA, 13 nt, Human
cauauuuuagcua

SEQ ID NO: 1706392 - RNA, 18 nt, Human
cugaggaauucuguauag

SEQ ID NO: 1706393 - RNA, 19 nt, Human
cugaggaauucuguauaga

SEQ ID NO: 1706394 - RNA, 15 nt, Human
cugaggaauucugua

SEQ ID NO: 1706395 - RNA, 16 nt, Human
cugaggaauucuguau

SEQ ID NO: 1706396 - RNA, 13 nt, Human
cuccuuucucuuu

SEQ ID NO: 1706397 - RNA, 15 nt, Human
cuaaacuuuucugau

SEQ ID NO: 1706398 - RNA, 16 nt, Human
cuaaacuuuucugaua

SEQ ID NO: 1706399 - RNA, 14 nt, Human
cuacuauauaugug

SEQ ID NO: 1706400 - RNA, 20 nt, Human
cucagaaggcaaaugacuuu

SEQ ID NO: 1706401 - RNA, 13 nt, Human
caaguuguuugag

SEQ ID NO: 1706402 - RNA, 17 nt, Human
caaguuguuugagaaau

SEQ ID NO: 1706403 - RNA, 21 nt, Human
caaguuguuugagaaauuaag

SEQ ID NO: 1706404 - RNA, 23 nt, Human
caaguuguuugagaaauuaagua

SEQ ID NO: 1706405 - RNA, 21 nt, Human
caccuuucagauaacuguuau

SEQ ID NO: 1706406 - RNA, 22 nt, Human
caccuuucagauaacuguuauu

SEQ ID NO: 1706407 - RNA, 13 nt, Human
auuuuuuuguugu

SEQ ID NO: 1706408 - RNA, 15 nt, Human
auuuuuauauuuacu

SEQ ID NO: 1706409 - RNA, 16 nt, Human
auuuuuauauuuacua

SEQ ID NO: 1706410 - RNA, 18 nt, Human
auuuuagcuacuauauau

SEQ ID NO: 1706411 - RNA, 18 nt, Human
auuuuaugcuuuaaacau

SEQ ID NO: 1706412 - RNA, 19 nt, Human
auuuuaugcuuuaaacauu

SEQ ID NO: 1706413 - RNA, 12 nt, Human
auuauguaaauc

SEQ ID NO: 1706414 - RNA, 15 nt, Human
auuuauaaucacuuu

SEQ ID NO: 1706415 - RNA, 13 nt, Human
auuuauaaucacu

SEQ ID NO: 1706416 - RNA, 22 nt, Human
auuuauaaucacuuuuuuccac

SEQ ID NO: 1706417 - RNA, 19 nt, Human
auuucuauauuuucauucu

SEQ ID NO: 1706418 - RNA, 19 nt, Human
auuucuaugcugaguuugu

SEQ ID NO: 1706419 - RNA, 21 nt, Human
auuucuaugcugaguuugugc

SEQ ID NO: 1706420 - RNA, 22 nt, Human
auuucuaugcugaguuugugcu

SEQ ID NO: 1706421 - RNA, 17 nt, Human
auuucuauauuuucauu

SEQ ID NO: 1706422 - RNA, 18 nt, Human
auuucuauauuuucauuc

SEQ ID NO: 1706423 - RNA, 15 nt, Human
auuucuauauuuuca

SEQ ID NO: 1706424 - RNA, 16 nt, Human
auuucuauauuuucau

SEQ ID NO: 1706425 - RNA, 16 nt, Human
auuguaauuauaucug

SEQ ID NO: 1706426 - RNA, 17 nt, Human
auuguaauuauaucuga

SEQ ID NO: 1706427 - RNA, 15 nt, Human
auuguaauuauaucu

SEQ ID NO: 1706428 - RNA, 21 nt, Human
auuguaauuauaucugaggaa

SEQ ID NO: 1706429 - RNA, 16 nt, Human
auuguacaaaguauua

SEQ ID NO: 1706430 - RNA, 17 nt, Human
auuguacaaaguauuaa

SEQ ID NO: 1706431 - RNA, 19 nt, Human
auuguacaaaguauuaagc

SEQ ID NO: 1706432 - RNA, 16 nt, Human
caguauuguacaaagu

SEQ ID NO: 1706433 - RNA, 17 nt, Human
caguauuguacaaagua

SEQ ID NO: 1706434 - RNA, 18 nt, Human
caguauuguacaaaguau

SEQ ID NO: 1706435 - RNA, 19 nt, Human
caguauuguacaaaguauu

SEQ ID NO: 1706436 - RNA, 12 nt, Human
caguauuguaca

SEQ ID NO: 1706437 - RNA, 13 nt, Human
caguauuguacaa

SEQ ID NO: 1706438 - RNA, 21 nt, Human
caguauugaagcauuuuauaa

SEQ ID NO: 1706439 - RNA, 21 nt, Human
caguauuguacaaaguauuaa

SEQ ID NO: 1706440 - RNA, 18 nt, Human
cauugguucuuguauuaa

SEQ ID NO: 1706441 - RNA, 15 nt, Human
cauugguucuuguau

SEQ ID NO: 1706442 - RNA, 22 nt, Human
cauugguucuuguauuaagaau

SEQ ID NO: 1706443 - RNA, 22 nt, Human
cauuuggaaaucuuuaaaaaaa

SEQ ID NO: 1706444 - RNA, 22 nt, Human
cuuaaaguugaauuuauuggcu

SEQ ID NO: 1706445 - RNA, 13 nt, Human
cuuaaauaauaaa

SEQ ID NO: 1706446 - RNA, 22 nt, Human
cuuaaauaauaaagaucaugua

SEQ ID NO: 1706447 - RNA, 14 nt, Human
cuuaaaguugaauu

SEQ ID NO: 1706448 - RNA, 15 nt, Human
cuuaaaguugaauuu

SEQ ID NO: 1706449 - RNA, 18 nt, Human
cuuaaaguugaauuuauu

SEQ ID NO: 1706450 - RNA, 14 nt, Human
cuguuauuuauaau

SEQ ID NO: 1706451 - RNA, 20 nt, Human
cuguuauuuauaaucacuuu

SEQ ID NO: 1706452 - RNA, 18 nt, Human
gaacacuccaauuaagga

SEQ ID NO: 1706453 - RNA, 12 nt, Human
gaaaucuuuaaa

SEQ ID NO: 1706454 - RNA, 15 nt, Human
gaaaucuuuaaaaaa

SEQ ID NO: 1706455 - RNA, 21 nt, Human
gaaacugcuuguuuccuagca

SEQ ID NO: 1706456 - RNA, 17 nt, Human
gaaacuggguuccugca

SEQ ID NO: 1706457 - RNA, 14 nt, Human
cuugucucagauuu

SEQ ID NO: 1706458 - RNA, 17 nt, Human
cuugucucagauuuuau

SEQ ID NO: 1706459 - RNA, 13 nt, Human
cuugucucagauu

SEQ ID NO: 1706460 - RNA, 18 nt, Human
cuugucucagauuuuauu

SEQ ID NO: 1706461 - RNA, 14 nt, Human
cuuucagauacugg

SEQ ID NO: 1706462 - RNA, 15 nt, Human
cuuucagauacugga

SEQ ID NO: 1706463 - RNA, 17 nt, Human
cuuucagauacuggauu

SEQ ID NO: 1706464 - RNA, 22 nt, Human
cuuucagauacuggauuguacu

SEQ ID NO: 1706465 - RNA, 13 nt, Human
gcauaacauaaau

SEQ ID NO: 1706466 - RNA, 17 nt, Human
gcaaaaauauuuuauga

SEQ ID NO: 1706467 - RNA, 22 nt, Human
gcaaaaauauuuuaugauccag

SEQ ID NO: 1706468 - RNA, 23 nt, Human
gcaaaaauauuuuaugauccagc

SEQ ID NO: 1706469 - RNA, 16 nt, Human
gcaaaaauauuuuaug

SEQ ID NO: 1706470 - RNA, 21 nt, Human
gauucuuaaaguugaauuuau

SEQ ID NO: 1706471 - RNA, 16 nt, Human
gauucuuaaaguugaa

SEQ ID NO: 1706472 - RNA, 17 nt, Human
gauucuuaaaguugaau

SEQ ID NO: 1706473 - RNA, 15 nt, Human
gauucuuaaaguuga

SEQ ID NO: 1706474 - RNA, 14 nt, Human
gaugucuucauacc

SEQ ID NO: 1706475 - RNA, 18 nt, Human
gaugucuucauaccuaca

SEQ ID NO: 1706476 - RNA, 17 nt, Human
gacuguggugacuuugg

SEQ ID NO: 1706477 - RNA, 19 nt, Human
gacuuuggauaauaaggaa

SEQ ID NO: 1706478 - RNA, 13 nt, Human
aaaguauuaagca

SEQ ID NO: 1706479 - RNA, 18 nt, Human
aaaguauuaagcauauau

SEQ ID NO: 1706480 - RNA, 19 nt, Human
aaaguauuaagcauauauu

SEQ ID NO: 1706481 - RNA, 20 nt, Human
aaaguauuaagcauauauuu

SEQ ID NO: 1706482 - RNA, 13 nt, Human
aaaguugccuaaa

SEQ ID NO: 1706483 - RNA, 14 nt, Human
aaaguugccuaaau

SEQ ID NO: 1706484 - RNA, 12 nt, Human
aaaguuuaauau

SEQ ID NO: 1706485 - RNA, 14 nt, Human
aaaguuuaauauua

SEQ ID NO: 1706486 - RNA, 16 nt, Human
aaaguugccuaaaucc

SEQ ID NO: 1706487 - RNA, 17 nt, Human
aaaguugccuaaaucca

SEQ ID NO: 1706488 - RNA, 23 nt, Human
aaaguugccuaaauccauuugga

SEQ ID NO: 1706489 - RNA, 13 nt, Human
aaauacaauuuug

SEQ ID NO: 1706490 - RNA, 14 nt, Human
aaauacaauuuugu

SEQ ID NO: 1706491 - RNA, 17 nt, Human
aaauacaauuuuguuuc

SEQ ID NO: 1706492 - RNA, 18 nt, Human
aaauacaauuuuguuucu

SEQ ID NO: 1706493 - RNA, 20 nt, Human
aaauacaauuuuguuucugu

SEQ ID NO: 1706494 - RNA, 21 nt, Human
aaauacaauuuuguuucugua

SEQ ID NO: 1706495 - RNA, 22 nt, Human
aaauacaauuuuguuucuguac

SEQ ID NO: 1706496 - RNA, 15 nt, Human
aaaccucugugagca

SEQ ID NO: 1706497 - RNA, 13 nt, Human
aaacugcuuguuu

SEQ ID NO: 1706498 - RNA, 14 nt, Human
aaacugcuuguuuc

SEQ ID NO: 1706499 - RNA, 17 nt, Human
aaacugcuuguuuccua

SEQ ID NO: 1706500 - RNA, 19 nt, Human
aaacugcuuguuuccuagc

SEQ ID NO: 1706501 - RNA, 22 nt, Human
aaacugcuuguuuccuagcaca

SEQ ID NO: 1706502 - RNA, 11 nt, Human
aaacuuuucug

SEQ ID NO: 1706503 - RNA, 15 nt, Human
ggcuguacccaggaa

SEQ ID NO: 1706504 - RNA, 17 nt, Human
aaaaccaguauuguaca

SEQ ID NO: 1706505 - RNA, 16 nt, Human
ggcauaacauaaaucu

SEQ ID NO: 1706506 - RNA, 17 nt, Human
ggcauaacauaaaucug

SEQ ID NO: 1706507 - RNA, 22 nt, Human
ggacuucuuuaauuuuggaauu

SEQ ID NO: 1706508 - RNA, 21 nt, Human
ggacuucuuuaauuuuggaau

SEQ ID NO: 1706509 - RNA, 18 nt, Human
ggacuucuuuaauuuugg

SEQ ID NO: 1706510 - RNA, 15 nt, Human
ggacuuguuagaucu

SEQ ID NO: 1706511 - RNA, 12 nt, Human
ggacuuguuaga

SEQ ID NO: 1706512 - RNA, 22 nt, Human
gcugggguuaucugaagucaga

SEQ ID NO: 1706513 - RNA, 23 nt, Human
gcugggguuaucugaagucagau

SEQ ID NO: 1706514 - RNA, 14 nt, Human
gcugggguuaucug

SEQ ID NO: 1706515 - RNA, 22 nt, Human
gcuauuucuauauuuucauucu

SEQ ID NO: 1706516 - RNA, 16 nt, Human
auuugacauagucugg

SEQ ID NO: 1706517 - RNA, 17 nt, Human
auuugacauagucuggc

SEQ ID NO: 1706518 - RNA, 21 nt, Human
auuugacauagucuggcugua

SEQ ID NO: 1706519 - RNA, 15 nt, Human
auuugaauuuugugu

SEQ ID NO: 1706520 - RNA, 13 nt, Human
auuggcuuuucug

SEQ ID NO: 1706521 - RNA, 15 nt, Human
auuggcuuuucugau

SEQ ID NO: 1706522 - RNA, 16 nt, Human
auuggcuuuucugauc

SEQ ID NO: 1706523 - RNA, 19 nt, Human
auuggcuuuucugauccag

SEQ ID NO: 1706524 - RNA, 20 nt, Human
auuggcuuuucugauccagu

SEQ ID NO: 1706525 - RNA, 15 nt, Human
auugguucuuguauu

SEQ ID NO: 1706526 - RNA, 16 nt, Human
auugguucuuguauua

SEQ ID NO: 1706527 - RNA, 12 nt, Human
auuuuggaauuu

SEQ ID NO: 1706528 - RNA, 11 nt, Human
auuuuguuucu

SEQ ID NO: 1706529 - RNA, 14 nt, Human
auuuuguuucugua

SEQ ID NO: 1706530 - RNA, 15 nt, Human
auuuuguuucuguac

SEQ ID NO: 1706531 - RNA, 21 nt, Human
auucuuaaaguugaauuuauu

SEQ ID NO: 1706532 - RNA, 19 nt, Human
auucuuaaaguugaauuua

SEQ ID NO: 1706533 - RNA, 20 nt, Human
auucuuaaaguugaauuuau

SEQ ID NO: 1706534 - RNA, 22 nt, Human
auugaagcauuuuauaaaucgc

SEQ ID NO: 1706535 - RNA, 11 nt, Human
auucuguauag

SEQ ID NO: 1706536 - RNA, 12 nt, Human
auucuguauaga

SEQ ID NO: 1706537 - RNA, 13 nt, Human
auucuguauagau

SEQ ID NO: 1706538 - RNA, 17 nt, Human
auuauucaaaguugccu

SEQ ID NO: 1706539 - RNA, 14 nt, Human
auuauucaaaguug

SEQ ID NO: 1706540 - RNA, 15 nt, Human
auuauucaaaguugc

SEQ ID NO: 1706541 - RNA, 13 nt, Human
auuauucaaaguu

SEQ ID NO: 1706542 - RNA, 20 nt, Human
uuucuguacuuuuuggcaua

SEQ ID NO: 1706543 - RNA, 19 nt, Human
uuucuguacuuuuuggcau

SEQ ID NO: 1706544 - RNA, 19 nt, Human
uuucuguuauauaaauggu

SEQ ID NO: 1706545 - RNA, 15 nt, Human
augggauaaaugcca

SEQ ID NO: 1706546 - RNA, 16 nt, Human
augggauaaaugccau

SEQ ID NO: 1706547 - RNA, 20 nt, Human
augggauaaaugccaucaau

SEQ ID NO: 1706548 - RNA, 14 nt, Human
auguaaaucccauu

SEQ ID NO: 1706549 - RNA, 20 nt, Human
auguaaaucccauuauucaa

SEQ ID NO: 1706550 - RNA, 22 nt, Human
auguaaaucccauuauucaaag

SEQ ID NO: 1706551 - RNA, 23 nt, Human
auguaaaucccauuauucaaagu

SEQ ID NO: 1706552 - RNA, 21 nt, Human
uuuggcauaacauaaaucugu

SEQ ID NO: 1706553 - RNA, 20 nt, Human
uuuggcauaacauaaaucug

SEQ ID NO: 1706554 - RNA, 19 nt, Human
uuugugcugguguaugugu

SEQ ID NO: 1706555 - RNA, 21 nt, Human
uuuaaauaaauaaauagcuag

SEQ ID NO: 1706556 - RNA, 10 nt, Human
augauccagc

SEQ ID NO: 1706557 - RNA, 19 nt, Human
augauccagcagauuauuc

SEQ ID NO: 1706558 - RNA, 20 nt, Human
augauccagcagauuauuca

SEQ ID NO: 1706559 - RNA, 22 nt, Human
augauccagcagauuauucacu

SEQ ID NO: 1706560 - RNA, 14 nt, Human
augggauaaaugcc

SEQ ID NO: 1706561 - RNA, 16 nt, Human
auggacuguggugacu

SEQ ID NO: 1706562 - RNA, 17 nt, Human
auggacuguggugacuu

SEQ ID NO: 1706563 - RNA, 22 nt, Human
auggacuguggugacuuuggau

SEQ ID NO: 1706564 - RNA, 19 nt, Human
uuucauuauuuuauuauga

SEQ ID NO: 1706565 - RNA, 20 nt, Human
uuucauuauuuuauuaugaa

SEQ ID NO: 1706566 - RNA, 13 nt, Human
uuucauuauuuua

SEQ ID NO: 1706567 - RNA, 15 nt, Human
uuucauuauuuuauu

SEQ ID NO: 1706568 - RNA, 15 nt, Human
auggaacgcguugaa

SEQ ID NO: 1706569 - RNA, 16 nt, Human
auggaacgcguugaaa

SEQ ID NO: 1706570 - RNA, 17 nt, Human
auggaacgcguugaaau

SEQ ID NO: 1706571 - RNA, 18 nt, Human
auggaacgcguugaaauu

SEQ ID NO: 1706572 - RNA, 19 nt, Human
auggaacgcguugaaauug

SEQ ID NO: 1706573 - RNA, 14 nt, Human
uuuauuacaguaua

SEQ ID NO: 1706574 - RNA, 18 nt, Human
uuuauuacaguauaauua

SEQ ID NO: 1706575 - RNA, 21 nt, Human
augcuauuucuauauuuucau

SEQ ID NO: 1706576 - RNA, 22 nt, Human
augcuauuucuauauuuucauu

SEQ ID NO: 1706577 - RNA, 23 nt, Human
augcuauuucuauauuuucauuc

SEQ ID NO: 1706578 - RNA, 13 nt, Human
augcuauuucuau

SEQ ID NO: 1706579 - RNA, 14 nt, Human
augcuauuucuaua

SEQ ID NO: 1706580 - RNA, 15 nt, Human
augcuauuucuauau

SEQ ID NO: 1706581 - RNA, 20 nt, Human
augcuauuucuauauuuuca

SEQ ID NO: 1706582 - RNA, 11 nt, Human
augcuauuucu

SEQ ID NO: 1706583 - RNA, 16 nt, Human
uuuauauuuacuaaaa

SEQ ID NO: 1706584 - RNA, 13 nt, Human
uuuauauuuacua

SEQ ID NO: 1706585 - RNA, 20 nt, Human
auccauuuggaaaucuuuaa

SEQ ID NO: 1706586 - RNA, 21 nt, Human
auccauuuggaaaucuuuaaa

SEQ ID NO: 1706587 - RNA, 13 nt, Human
uugaaauuguaau

SEQ ID NO: 1706588 - RNA, 14 nt, Human
uugaaauuguaauu

SEQ ID NO: 1706589 - RNA, 15 nt, Human
uugaaauuguaauua

SEQ ID NO: 1706590 - RNA, 17 nt, Human
uugaaauuguaauuaua

SEQ ID NO: 1706591 - RNA, 23 nt, Human
aucaccugucuugccuuuuucau

SEQ ID NO: 1706592 - RNA, 22 nt, Human
aucaccugucuugccuuuuuca

SEQ ID NO: 1706593 - RNA, 15 nt, Human
aucugacaucucugc

SEQ ID NO: 1706594 - RNA, 16 nt, Human
aucugacaucucugca

SEQ ID NO: 1706595 - RNA, 20 nt, Human
aucugacaucucugcaaucu

SEQ ID NO: 1706596 - RNA, 20 nt, Human
auccucucaaccaccuuuca

SEQ ID NO: 1706597 - RNA, 23 nt, Human
uugaagcauuuuauaaaucgcuu

SEQ ID NO: 1706598 - RNA, 11 nt, Human
aucugccuaag

SEQ ID NO: 1706599 - RNA, 21 nt, Human
aucugccuaaggacuucuuua

SEQ ID NO: 1706600 - RNA, 22 nt, Human
aucugccuaaggacuucuuuaa

SEQ ID NO: 1706601 - RNA, 23 nt, Human
aucugccuaaggacuucuuuaau

SEQ ID NO: 1706602 - RNA, 14 nt, Human
uuagaauucuguau

SEQ ID NO: 1706603 - RNA, 15 nt, Human
uuagaauucuguaua

SEQ ID NO: 1706604 - RNA, 17 nt, Human
uuagaauucuguauaga

SEQ ID NO: 1706605 - RNA, 15 nt, Human
auaaaucugugaacu

SEQ ID NO: 1706606 - RNA, 16 nt, Human
auaaaucugugaacuu

SEQ ID NO: 1706607 - RNA, 19 nt, Human
auaaaucugugaacuugaa

SEQ ID NO: 1706608 - RNA, 17 nt, Human
auaaaugccaucaauaa

SEQ ID NO: 1706609 - RNA, 18 nt, Human
auaaaugccaucaauaaa

SEQ ID NO: 1706610 - RNA, 14 nt, Human
auaaaucgcuuuug

SEQ ID NO: 1706611 - RNA, 16 nt, Human
auaaaucgcuuuugau

SEQ ID NO: 1706612 - RNA, 19 nt, Human
auaaaucgcuuuugauaau

SEQ ID NO: 1706613 - RNA, 21 nt, Human
auaaaucgcuuuugauaauca

SEQ ID NO: 1706614 - RNA, 14 nt, Human
uuaauuuuggaauu

SEQ ID NO: 1706615 - RNA, 15 nt, Human
uuaauuuuggaauuu

SEQ ID NO: 1706616 - RNA, 13 nt, Human
uuaauuuuggaau

SEQ ID NO: 1706617 - RNA, 14 nt, Human
uuaagaaugaaaua

SEQ ID NO: 1706618 - RNA, 20 nt, Human
uuaagaaugaaauacuguuu

SEQ ID NO: 1706619 - RNA, 22 nt, Human
uuaagaaugaaauacuguuuga

SEQ ID NO: 1706620 - RNA, 18 nt, Human
aguuuuguuuggaccaaa

SEQ ID NO: 1706621 - RNA, 14 nt, Human
aguuuuguuuggac

SEQ ID NO: 1706622 - RNA, 16 nt, Human
aguuuuguuuggacca

SEQ ID NO: 1706623 - RNA, 12 nt, Human
aguuuuguuugg

SEQ ID NO: 1706624 - RNA, 17 nt, Human
uuaaaccaugggauaaa

SEQ ID NO: 1706625 - RNA, 22 nt, Human
uuaaacauugguucuuguauua

SEQ ID NO: 1706626 - RNA, 18 nt, Human
uuaaacauugguucuugu

SEQ ID NO: 1706627 - RNA, 20 nt, Human
uuaaacauugguucuuguau

SEQ ID NO: 1706628 - RNA, 13 nt, Human
uuaaaguugaauu

SEQ ID NO: 1706629 - RNA, 16 nt, Human
uuaaaguugaauuuau

SEQ ID NO: 1706630 - RNA, 17 nt, Human
uuaaaguugaauuuauu

SEQ ID NO: 1706631 - RNA, 22 nt, Human
uuaaaguugaauuuauuggcuu

SEQ ID NO: 1706632 - RNA, 21 nt, Human
uuaaaccaugggauaaaugcc

SEQ ID NO: 1706633 - RNA, 22 nt, Human
uuaaaccaugggauaaaugcca

SEQ ID NO: 1706634 - RNA, 23 nt, Human
uuaaaccaugggauaaaugccau

SEQ ID NO: 1706635 - RNA, 19 nt, Human
aguuugugcugguguaugu

SEQ ID NO: 1706636 - RNA, 16 nt, Human
uuaugugcgcugauaa

SEQ ID NO: 1706637 - RNA, 11 nt, Human
uuauguaaauc

SEQ ID NO: 1706638 - RNA, 12 nt, Human
uuauguaaaucc

SEQ ID NO: 1706639 - RNA, 13 nt, Human
uuauguaaauccc

SEQ ID NO: 1706640 - RNA, 19 nt, Human
uuauguaaaucccauuauu

SEQ ID NO: 1706641 - RNA, 21 nt, Human
uuauguaaaucccauuauuca

SEQ ID NO: 1706642 - RNA, 22 nt, Human
uuauguaaaucccauuauucaa

SEQ ID NO: 1706643 - RNA, 23 nt, Human
uuauguaaaucccauuauucaaa

SEQ ID NO: 1706644 - RNA, 22 nt, Human
uuaugauccagcagauuauuca

SEQ ID NO: 1706645 - RNA, 23 nt, Human
uuaugauccagcagauuauucac

SEQ ID NO: 1706646 - RNA, 16 nt, Human
uuaugaaacuugugua

SEQ ID NO: 1706647 - RNA, 18 nt, Human
uuaugaaacuuguguaaa

SEQ ID NO: 1706648 - RNA, 13 nt, Human
uuaugaaacuugu

SEQ ID NO: 1706649 - RNA, 19 nt, Human
uuaugaaacuuguguaaau

SEQ ID NO: 1706650 - RNA, 13 nt, Human
uuaugauccagca

SEQ ID NO: 1706651 - RNA, 18 nt, Human
uuaugauccagcagauua

SEQ ID NO: 1706652 - RNA, 19 nt, Human
uuaugacuucauuaauaau

SEQ ID NO: 1706653 - RNA, 22 nt, Human
uuaugacuucauuaauaauaaa

SEQ ID NO: 1706654 - RNA, 15 nt, Human
auacuggauuguacu

SEQ ID NO: 1706655 - RNA, 14 nt, Human
uuauucacugauuu

SEQ ID NO: 1706656 - RNA, 13 nt, Human
uuauucaaaguug

SEQ ID NO: 1706657 - RNA, 15 nt, Human
uuauucaaaguugcc

SEQ ID NO: 1706658 - RNA, 19 nt, Human
uuauucaaaguugccuaaa

SEQ ID NO: 1706659 - RNA, 16 nt, Human
uuauuauguaaauccc

SEQ ID NO: 1706660 - RNA, 22 nt, Human
uuauuauguaaaucccauuauu

SEQ ID NO: 1706661 - RNA, 13 nt, Human
uuauuauguaaau

SEQ ID NO: 1706662 - RNA, 14 nt, Human
uuauuauguaaauc

SEQ ID NO: 1706663 - RNA, 17 nt, Human
uuauuaugaaacuugug

SEQ ID NO: 1706664 - RNA, 20 nt, Human
uuauuaugaaacuuguguaa

SEQ ID NO: 1706665 - RNA, 21 nt, Human
uuauuaugaaacuuguguaaa

SEQ ID NO: 1706666 - RNA, 22 nt, Human
uuauuaugaaacuuguguaaau

SEQ ID NO: 1706667 - RNA, 23 nt, Human
uuauuaugaaacuuguguaaaua

SEQ ID NO: 1706668 - RNA, 11 nt, Human
uuauuaugaaa

SEQ ID NO: 1706669 - RNA, 14 nt, Human
auagaaccucuuug

SEQ ID NO: 1706670 - RNA, 20 nt, Human
auagaaccucuuugucuaca

SEQ ID NO: 1706671 - RNA, 22 nt, Human
auagauuagagaguguugaaac

SEQ ID NO: 1706672 - RNA, 13 nt, Human
auagauuagaauu

SEQ ID NO: 1706673 - RNA, 15 nt, Human
auagauuagaauucu

SEQ ID NO: 1706674 - RNA, 16 nt, Human
auagauuagaauucug

SEQ ID NO: 1706675 - RNA, 21 nt, Human
auagauuagagaguguugaaa

SEQ ID NO: 1706676 - RNA, 21 nt, Human
auagaggaagccugauuaaag

SEQ ID NO: 1706677 - RNA, 22 nt, Human
auagaggaagccugauuaaaga

SEQ ID NO: 1706678 - RNA, 19 nt, Human
ugugcugggguuaucugaa

SEQ ID NO: 1706679 - RNA, 20 nt, Human
ugugcugguguaugugugaa

SEQ ID NO: 1706680 - RNA, 21 nt, Human
agugaguuggguguauugugc

SEQ ID NO: 1706681 - RNA, 17 nt, Human
agucuugucucagauuu

SEQ ID NO: 1706682 - RNA, 19 nt, Human
agucuugucucagauuuua

SEQ ID NO: 1706683 - RNA, 16 nt, Human
agucuugucucagauu

SEQ ID NO: 1706684 - RNA, 20 nt, Human
agucuugucucagauuuuau

SEQ ID NO: 1706685 - RNA, 21 nt, Human
agucuugucucagauuuuauu

SEQ ID NO: 1706686 - RNA, 16 nt, Human
uguguuagagauuuuu

SEQ ID NO: 1706687 - RNA, 13 nt, Human
aguauaauuaaca

SEQ ID NO: 1706688 - RNA, 14 nt, Human
aguauaauuaacau

SEQ ID NO: 1706689 - RNA, 16 nt, Human
aguauaauuaacaugu

SEQ ID NO: 1706690 - RNA, 23 nt, Human
aguauaauuaacauguuaaacca

SEQ ID NO: 1706691 - RNA, 12 nt, Human
aguauuaagcau

SEQ ID NO: 1706692 - RNA, 14 nt, Human
aguauuaagcauau

SEQ ID NO: 1706693 - RNA, 23 nt, Human
uggagccugcacggugaauggcu

SEQ ID NO: 1706694 - RNA, 17 nt, Human
uggaauuuuccuccuuu

SEQ ID NO: 1706695 - RNA, 21 nt, Human
uggaauuuuccuccuuucucu

SEQ ID NO: 1706696 - RNA, 16 nt, Human
aggauuuuaugcuuua

SEQ ID NO: 1706697 - RNA, 17 nt, Human
aggauuuuaugcuuuaa

SEQ ID NO: 1706698 - RNA, 11 nt, Human
aggauuuuaug

SEQ ID NO: 1706699 - RNA, 14 nt, Human
aggauuuuaugcuu

SEQ ID NO: 1706700 - RNA, 15 nt, Human
aggauuuuaugcuuu

SEQ ID NO: 1706701 - RNA, 17 nt, Human
aggaauucuguauagau

SEQ ID NO: 1706702 - RNA, 22 nt, Human
aggaauucuguauagauuagaa

SEQ ID NO: 1706703 - RNA, 16 nt, Human
aggaauucuguauaga

SEQ ID NO: 1706704 - RNA, 23 nt, Human
aggaauucuguauagauuagaau

SEQ ID NO: 1706705 - RNA, 23 nt, Human
aggaaaaguuuaauauuaaagcc

SEQ ID NO: 1706706 - RNA, 24 nt, Human
aggaaaaguuuaauauuaaagcca

SEQ ID NO: 1706707 - RNA, 21 nt, Human
aggaaaaguuuaauauuaaag

SEQ ID NO: 1706708 - RNA, 19 nt, Human
aggaaacuggguuccugca

SEQ ID NO: 1706709 - RNA, 13 nt, Human
ugccuuuuucauu

SEQ ID NO: 1706710 - RNA, 14 nt, Human
ugccuuuuucauua

SEQ ID NO: 1706711 - RNA, 15 nt, Human
ugccuuuuucauuau

SEQ ID NO: 1706712 - RNA, 16 nt, Human
ugccuuuuucauuauu

SEQ ID NO: 1706713 - RNA, 17 nt, Human
ugccuuuuucauuauuu

SEQ ID NO: 1706714 - RNA, 21 nt, Human
ugccuuuuucauuauuuuauu

SEQ ID NO: 1706715 - RNA, 18 nt, Human
agccugcacggugaaugg

SEQ ID NO: 1706716 - RNA, 16 nt, Human
agccugcacggugaau

SEQ ID NO: 1706717 - RNA, 14 nt, Human
agccugauuaaaga

SEQ ID NO: 1706718 - RNA, 14 nt, Human
ucugccuaaggacu

SEQ ID NO: 1706719 - RNA, 15 nt, Human
ucugccuaaggacuu

SEQ ID NO: 1706720 - RNA, 16 nt, Human
ucugccuaaggacuuc

SEQ ID NO: 1706721 - RNA, 13 nt, Human
ucugccuaaggac

SEQ ID NO: 1706722 - RNA, 22 nt, Human
agaaccucuuugucuacaccau

SEQ ID NO: 1706723 - RNA, 16 nt, Human
acuuuugguuaagucu

SEQ ID NO: 1706724 - RNA, 20 nt, Human
acuuuugguuaagucuguuu

SEQ ID NO: 1706725 - RNA, 22 nt, Human
acuuuugguuaagucuguuuua

SEQ ID NO: 1706726 - RNA, 13 nt, Human
acuuuuuuccaca

SEQ ID NO: 1706727 - RNA, 21 nt, Human
acuuguguaaauacaauuuug

SEQ ID NO: 1706728 - RNA, 22 nt, Human
acuuguguaaauacaauuuugu

SEQ ID NO: 1706729 - RNA, 23 nt, Human
acuuguguaaauacaauuuuguu

SEQ ID NO: 1706730 - RNA, 12 nt, Human
ucuccauuuaau

SEQ ID NO: 1706731 - RNA, 16 nt, Human
ucuccauuuaauaauu

SEQ ID NO: 1706732 - RNA, 19 nt, Human
ucuccauuuaauaauuaua

SEQ ID NO: 1706733 - RNA, 14 nt, Human
ucuuuaauuuugga

SEQ ID NO: 1706734 - RNA, 15 nt, Human
ucuuuaauuuuggaa

SEQ ID NO: 1706735 - RNA, 16 nt, Human
ucuuuaauuuuggaau

SEQ ID NO: 1706736 - RNA, 17 nt, Human
ucuuuaauuuuggaauu

SEQ ID NO: 1706737 - RNA, 18 nt, Human
ucuuuaauuuuggaauuu

SEQ ID NO: 1706738 - RNA, 13 nt, Human
ucuuuaauuuugg

SEQ ID NO: 1706739 - RNA, 16 nt, Human
ucuguauagauuagag

SEQ ID NO: 1706740 - RNA, 17 nt, Human
ucuguauagauuagaau

SEQ ID NO: 1706741 - RNA, 12 nt, Human
ugaauuuauugg

SEQ ID NO: 1706742 - RNA, 15 nt, Human
ugaauuuauuggcuu

SEQ ID NO: 1706743 - RNA, 16 nt, Human
ugaauuuauuggcuuu

SEQ ID NO: 1706744 - RNA, 16 nt, Human
agauuauucacugauu

SEQ ID NO: 1706745 - RNA, 22 nt, Human
ugacuucauuaauaauaaauuc

SEQ ID NO: 1706746 - RNA, 15 nt, Human
agcaaaaauauuuua

SEQ ID NO: 1706747 - RNA, 17 nt, Human
agcaaaaauauuuuaug

SEQ ID NO: 1706748 - RNA, 18 nt, Human
agcaaaaauauuuuauga

SEQ ID NO: 1706749 - RNA, 19 nt, Human
agcaaaaauauuuuaugau

SEQ ID NO: 1706750 - RNA, 23 nt, Human
agcaaaaauauuuuaugauccag

SEQ ID NO: 1706751 - RNA, 21 nt, Human
agauuuuauuauguaaauccc

SEQ ID NO: 1706752 - RNA, 20 nt, Human
agauuuuauuauguaaaucc

SEQ ID NO: 1706753 - RNA, 22 nt, Human
agauuuuauuauguaaauccca

SEQ ID NO: 1706754 - RNA, 18 nt, Human
ugaggaauucuguauaga

SEQ ID NO: 1706755 - RNA, 19 nt, Human
ugaggaauucuguauagau

SEQ ID NO: 1706756 - RNA, 14 nt, Human
ugaggaauucugua

SEQ ID NO: 1706757 - RNA, 15 nt, Human
ugaggaauucuguau

SEQ ID NO: 1706758 - RNA, 16 nt, Human
ugaggaauucuguaua

SEQ ID NO: 1706759 - RNA, 19 nt, Human
agcagauuauucacugauu

SEQ ID NO: 1706760 - RNA, 20 nt, Human
agcagauuauucacugauuu

SEQ ID NO: 1706761 - RNA, 15 nt, Human
agcagauuauucacu

SEQ ID NO: 1706762 - RNA, 16 nt, Human
agcagauuauucacug

SEQ ID NO: 1706763 - RNA, 14 nt, Human
agcagauuauucac

SEQ ID NO: 1706764 - RNA, 16 nt, Human
ucagauuuuauuaugu

SEQ ID NO: 1706765 - RNA, 19 nt, Human
ucagauuuuauuauguaaa

SEQ ID NO: 1706766 - RNA, 20 nt, Human
ucagauuuuauuauguaaau

SEQ ID NO: 1706767 - RNA, 14 nt, Human
ucagauuuuauuau

SEQ ID NO: 1706768 - RNA, 15 nt, Human
ucagauuuuauuaug

SEQ ID NO: 1706769 - RNA, 13 nt, Human
ucagauuuuauua

SEQ ID NO: 1706770 - RNA, 21 nt, Human
ucagaucugccuaaggacuuc

SEQ ID NO: 1706771 - RNA, 18 nt, Human
uccacauaaggaaacugg

SEQ ID NO: 1706772 - RNA, 21 nt, Human
uccugcaaugaagucucugaa

SEQ ID NO: 1706773 - RNA, 15 nt, Human
uccugcaaugaaguc

SEQ ID NO: 1706774 - RNA, 18 nt, Human
uccugcaaugaagucucu

SEQ ID NO: 1706775 - RNA, 20 nt, Human
uccugcaaugaagucucuga

SEQ ID NO: 1706776 - RNA, 16 nt, Human
acuggauuguacuuug

SEQ ID NO: 1706777 - RNA, 13 nt, Human
acuggauuguacu

SEQ ID NO: 1706778 - RNA, 22 nt, Human
acucuccauuuaauaauuauau

SEQ ID NO: 1706779 - RNA, 17 nt, Human
uccuagcacacacuuuu

SEQ ID NO: 1706780 - RNA, 18 nt, Human
uccuagcacacacuuuug

SEQ ID NO: 1706781 - RNA, 19 nt, Human
uccuagcacacacuuuugg

SEQ ID NO: 1706782 - RNA, 14 nt, Human
uccgugcuaaggac

SEQ ID NO: 1706783 - RNA, 15 nt, Human
uccgugcuaaggacu

SEQ ID NO: 1706784 - RNA, 17 nt, Human
acuccaauuaaggauuu

SEQ ID NO: 1706785 - RNA, 21 nt, Human
acuccaauuaaggauuuuaug

SEQ ID NO: 1706786 - RNA, 13 nt, Human
acuauauauguga

SEQ ID NO: 1706787 - RNA, 21 nt, Human
ucccuauuuuuuuucuguuau

SEQ ID NO: 1706788 - RNA, 22 nt, Human
ucccuauuuuuuuucuguuaua

SEQ ID NO: 1706789 - RNA, 20 nt, Human
uaugauccagcagauuauuc

SEQ ID NO: 1706790 - RNA, 21 nt, Human
uaugauccagcagauuauuca

SEQ ID NO: 1706791 - RNA, 22 nt, Human
uaugauccagcagauuauucac

SEQ ID NO: 1706792 - RNA, 15 nt, Human
uaugcugaguuugug

SEQ ID NO: 1706793 - RNA, 11 nt, Human
uaugauccagc

SEQ ID NO: 1706794 - RNA, 19 nt, Human
uaugauccagcagauuauu

SEQ ID NO: 1706795 - RNA, 10 nt, Human
uaugauccag

SEQ ID NO: 1706796 - RNA, 20 nt, Human
uaucaccugucuugccuuuu

SEQ ID NO: 1706797 - RNA, 19 nt, Human
uauagauuagagaguguug

SEQ ID NO: 1706798 - RNA, 22 nt, Human
uauagauuagagaguguugaaa

SEQ ID NO: 1706799 - RNA, 20 nt, Human
uauagauuagaauucuguau

SEQ ID NO: 1706800 - RNA, 19 nt, Human
uauagauuagaauucugua

SEQ ID NO: 1706801 - RNA, 15 nt, Human
acacuccaauuaagg

SEQ ID NO: 1706802 - RNA, 16 nt, Human
acacuccaauuaagga

SEQ ID NO: 1706803 - RNA, 15 nt, Human
uauuggcuuuucuga

SEQ ID NO: 1706804 - RNA, 16 nt, Human
uauuggcuuuucugau

SEQ ID NO: 1706805 - RNA, 17 nt, Human
uauuggcuuuucugauc

SEQ ID NO: 1706806 - RNA, 18 nt, Human
uauuggcuuuucugaucc

SEQ ID NO: 1706807 - RNA, 14 nt, Human
uauuggcuuuucug

SEQ ID NO: 1706808 - RNA, 21 nt, Human
uauuggcuuuucugauccagu

SEQ ID NO: 1706809 - RNA, 22 nt, Human
uauuggcuuuucugauccaguu

SEQ ID NO: 1706810 - RNA, 12 nt, Human
uauugaagcauu

SEQ ID NO: 1706811 - RNA, 13 nt, Human
uauugaagcauuu

SEQ ID NO: 1706812 - RNA, 15 nt, Human
uauugaagcauuuua

SEQ ID NO: 1706813 - RNA, 16 nt, Human
uauugaagcauuuuau

SEQ ID NO: 1706814 - RNA, 17 nt, Human
uauugaagcauuuuaua

SEQ ID NO: 1706815 - RNA, 19 nt, Human
uauugaagcauuuuauaaa

SEQ ID NO: 1706816 - RNA, 15 nt, Human
uauuguacaaaguau

SEQ ID NO: 1706817 - RNA, 16 nt, Human
uauuguacaaaguauu

SEQ ID NO: 1706818 - RNA, 21 nt, Human
uauuguacaaaguauuaagca

SEQ ID NO: 1706819 - RNA, 22 nt, Human
uauuguacaaaguauuaagcau

SEQ ID NO: 1706820 - RNA, 23 nt, Human
uauuguacaaaguauuaagcaua

SEQ ID NO: 1706821 - RNA, 18 nt, Human
uauuuacuaaaauggacu

SEQ ID NO: 1706822 - RNA, 21 nt, Human
acaguauaauuaacauguuaa

SEQ ID NO: 1706823 - RNA, 23 nt, Human
acaguauaauuaacauguuaaac

SEQ ID NO: 1706824 - RNA, 17 nt, Human
acagcuggugcccugcu

SEQ ID NO: 1706825 - RNA, 20 nt, Human
acagcuggugcccugcuuuc

SEQ ID NO: 1706826 - RNA, 17 nt, Human
uauuaaagccauguuua

SEQ ID NO: 1706827 - RNA, 18 nt, Human
uauuaaagccauguuuau

SEQ ID NO: 1706828 - RNA, 20 nt, Human
uauuaaagccauguuuauua

SEQ ID NO: 1706829 - RNA, 16 nt, Human
uauuacaguauaauua

SEQ ID NO: 1706830 - RNA, 18 nt, Human
uauuacaguauaauuaac

SEQ ID NO: 1706831 - RNA, 20 nt, Human
uauuacaguauaauuaacau

SEQ ID NO: 1706832 - RNA, 21 nt, Human
uauuacaguauaauuaacaug

SEQ ID NO: 1706833 - RNA, 14 nt, Human
uauuacaguauaau

SEQ ID NO: 1706834 - RNA, 13 nt, Human
uauuaaagccaug

SEQ ID NO: 1706835 - RNA, 14 nt, Human
uauuaaagccaugu

SEQ ID NO: 1706836 - RNA, 12 nt, Human
uauuaaagccau

SEQ ID NO: 1706837 - RNA, 18 nt, Human
uauucaaaguugccuaaa

SEQ ID NO: 1706838 - RNA, 21 nt, Human
uauucaaaguugccuaaaucc

SEQ ID NO: 1706839 - RNA, 22 nt, Human
uauucaaaguugccuaaaucca

SEQ ID NO: 1706840 - RNA, 23 nt, Human
uauucaaaguugccuaaauccau

SEQ ID NO: 1706841 - RNA, 13 nt, Human
uauucacugauuu

SEQ ID NO: 1706842 - RNA, 19 nt, Human
uauucacugauuugacaua

SEQ ID NO: 1706843 - RNA, 22 nt, Human
uauucacugauuugacauaguc

SEQ ID NO: 1706844 - RNA, 13 nt, Human
aauuugaauuuug

SEQ ID NO: 1706845 - RNA, 16 nt, Human
aauuugaauuuugugu

SEQ ID NO: 1706846 - RNA, 18 nt, Human
aauuugaauuuuguguua

SEQ ID NO: 1706847 - RNA, 12 nt, Human
uacucaauuuua

SEQ ID NO: 1706848 - RNA, 13 nt, Human
uacucaauuuuaa

SEQ ID NO: 1706849 - RNA, 14 nt, Human
uacucaauuuuaac

SEQ ID NO: 1706850 - RNA, 21 nt, Human
uagaggaagccugauuaaaga

SEQ ID NO: 1706851 - RNA, 14 nt, Human
uagaaccucuuugu

SEQ ID NO: 1706852 - RNA, 21 nt, Human
uaauuauaugcuauuucuaua

SEQ ID NO: 1706853 - RNA, 20 nt, Human
uaauuauaugcuauuucuau

SEQ ID NO: 1706854 - RNA, 13 nt, Human
uaauuauaucuga

SEQ ID NO: 1706855 - RNA, 17 nt, Human
uaauuauaucugaggaa

SEQ ID NO: 1706856 - RNA, 13 nt, Human
aauuaacauguua

SEQ ID NO: 1706857 - RNA, 14 nt, Human
aauuaacauguuaa

SEQ ID NO: 1706858 - RNA, 18 nt, Human
aauuaacauguuaaacca

SEQ ID NO: 1706859 - RNA, 16 nt, Human
aauuaaggauuuuaug

SEQ ID NO: 1706860 - RNA, 20 nt, Human
aauuaaggauuuuaugcuuu

SEQ ID NO: 1706861 - RNA, 22 nt, Human
aauuaaggauuuuaugcuuuaa

SEQ ID NO: 1706862 - RNA, 16 nt, Human
aaggaagguucuggug

SEQ ID NO: 1706863 - RNA, 13 nt, Human
aaguauuaagcau

SEQ ID NO: 1706864 - RNA, 15 nt, Human
guuucuguacuuuuu

SEQ ID NO: 1706865 - RNA, 14 nt, Human
guuugcauagguga

SEQ ID NO: 1706866 - RNA, 10 nt, Human
guuucuguac

SEQ ID NO: 1706867 - RNA, 23 nt, Human
aaggcugaugccaaguuguuuga

SEQ ID NO: 1706868 - RNA, 19 nt, Human
aaguuuaauauuaaagcca

SEQ ID NO: 1706869 - RNA, 20 nt, Human
aaguuuaauauuaaagccau

SEQ ID NO: 1706870 - RNA, 21 nt, Human
aaguuuaauauuaaagccaug

SEQ ID NO: 1706871 - RNA, 18 nt, Human
uaaaccaugggauaaaug

SEQ ID NO: 1706872 - RNA, 20 nt, Human
uaaaccaugggauaaaugcc

SEQ ID NO: 1706873 - RNA, 21 nt, Human
uaaaccaugggauaaaugcca

SEQ ID NO: 1706874 - RNA, 22 nt, Human
uaaaccaugggauaaaugccau

SEQ ID NO: 1706875 - RNA, 16 nt, Human
uaacaacagcuggugc

SEQ ID NO: 1706876 - RNA, 15 nt, Human
aauacaauuuuguuu

SEQ ID NO: 1706877 - RNA, 17 nt, Human
aauacaauuuuguuucu

SEQ ID NO: 1706878 - RNA, 18 nt, Human
aauacaauuuuguuucug

SEQ ID NO: 1706879 - RNA, 20 nt, Human
aauacaauuuuguuucugua

SEQ ID NO: 1706880 - RNA, 12 nt, Human
aauacaauuuug

SEQ ID NO: 1706881 - RNA, 13 nt, Human
aauacaauuuugu

SEQ ID NO: 1706882 - RNA, 22 nt, Human
aauacaauuuuguuucuguacu

SEQ ID NO: 1706883 - RNA, 23 nt, Human
aauacaauuuuguuucuguacuu

SEQ ID NO: 1706884 - RNA, 13 nt, Human
uaaauacaauuuu

SEQ ID NO: 1706885 - RNA, 15 nt, Human
uaaauacaauuuugu

SEQ ID NO: 1706886 - RNA, 22 nt, Human
uaaauacaauuuuguuucugua

SEQ ID NO: 1706887 - RNA, 23 nt, Human
uaaauacaauuuuguuucuguac

SEQ ID NO: 1706888 - RNA, 19 nt, Human
uaaauagcuagacugguga

SEQ ID NO: 1706889 - RNA, 23 nt, Human
uaaauagcuagacuggugacuga

SEQ ID NO: 1706890 - RNA, 18 nt, Human
uaaaucgcuuuugauaau

SEQ ID NO: 1706891 - RNA, 19 nt, Human
uaaaucgcuuuugauaauc

SEQ ID NO: 1706892 - RNA, 23 nt, Human
uaaaucccauuauucaaaguugc

SEQ ID NO: 1706893 - RNA, 14 nt, Human
aauaauuauaugcu

SEQ ID NO: 1706894 - RNA, 15 nt, Human
aauaauuauaugcua

SEQ ID NO: 1706895 - RNA, 20 nt, Human
aauaauuauaugcuauuucu

SEQ ID NO: 1706896 - RNA, 21 nt, Human
aauaauuauaugcuauuucua

SEQ ID NO: 1706897 - RNA, 22 nt, Human
aauaauuauaugcuauuucuau

SEQ ID NO: 1706898 - RNA, 23 nt, Human
aauaauuauaugcuauuucuaua

SEQ ID NO: 1706899 - RNA, 16 nt, Human
aauaaggaaaaguuua

SEQ ID NO: 1706900 - RNA, 19 nt, Human
aauaaggaaaaguuuaaua

SEQ ID NO: 1706901 - RNA, 22 nt, Human
aauaaggaaaaguuuaauauua

SEQ ID NO: 1706902 - RNA, 13 nt, Human
aauaaggaaaagu

SEQ ID NO: 1706903 - RNA, 15 nt, Human
aauaaggaaaaguuu

SEQ ID NO: 1706904 - RNA, 21 nt, Human
aauaaauagcuagacugguga

SEQ ID NO: 1706905 - RNA, 15 nt, Human
aauaaaaaauuauga

SEQ ID NO: 1706906 - RNA, 16 nt, Human
aauaaaaaauuaugac

SEQ ID NO: 1706907 - RNA, 14 nt, Human
aauaaaaaauuaug

SEQ ID NO: 1706908 - RNA, 19 nt, Human
gugcugguguaugugugaa

SEQ ID NO: 1706909 - RNA, 22 nt, Human
gugcugggguuaucugaaguca

SEQ ID NO: 1706910 - RNA, 14 nt, Human
aacuuguguaaaua

SEQ ID NO: 1706911 - RNA, 15 nt, Human
aacuuguguaaauac

SEQ ID NO: 1706912 - RNA, 20 nt, Human
aacuuguguaaauacaauuu

SEQ ID NO: 1706913 - RNA, 21 nt, Human
guguugaaacggaugauuucu

SEQ ID NO: 1706914 - RNA, 23 nt, Human
guguugaaacggaugauuucuau

SEQ ID NO: 1706915 - RNA, 23 nt, Human
aacauguuaaaccaugggauaaa

SEQ ID NO: 1706916 - RNA, 15 nt, Human
aacauaaaucuguga

SEQ ID NO: 1706917 - RNA, 12 nt, Human
aacauaaaucug

SEQ ID NO: 1706918 - RNA, 14 nt, Human
aacauaaaucugug

SEQ ID NO: 1706919 - RNA, 23 nt, Human
gucuucauaccuacauguauuug

SEQ ID NO: 1706920 - RNA, 17 nt, Human
auaacauaaaucuguga

SEQ ID NO: 1706921 - RNA, 18 nt, Human
auaacauaaaucugugaa

SEQ ID NO: 1706922 - RNA, 19 nt, Human
auaacauaaaucugugaac

SEQ ID NO: 1706923 - RNA, 14 nt, Human
auaacauaaaucug

SEQ ID NO: 1706924 - RNA, 15 nt, Human
auaacauaaaucugu

SEQ ID NO: 1706925 - RNA, 17 nt, Human
auaccuacauguauuug

SEQ ID NO: 1706926 - RNA, 21 nt, Human
auaccuacauguauuuguuug

SEQ ID NO: 1706927 - RNA, 16 nt, Human
auaaggaaaaguuuaa

SEQ ID NO: 1706928 - RNA, 15 nt, Human
auaaggaaaaguuua

SEQ ID NO: 1706929 - RNA, 15 nt, Human
auaauuaacauguua

SEQ ID NO: 1706930 - RNA, 17 nt, Human
auaauuaacauguuaaa

SEQ ID NO: 1706931 - RNA, 17 nt, Human
auaucaucaguauugaa

SEQ ID NO: 1706932 - RNA, 22 nt, Human
auaucaucaguauugaagcauu

SEQ ID NO: 1706933 - RNA, 16 nt, Human
auaugcuauuucuaua

SEQ ID NO: 1706934 - RNA, 18 nt, Human
auaugcuauuucuauauu

SEQ ID NO: 1706935 - RNA, 19 nt, Human
auaugcuauuucuauauuu

SEQ ID NO: 1706936 - RNA, 21 nt, Human
auaugcuauuucuauauuuuc

SEQ ID NO: 1706937 - RNA, 15 nt, Human
auaugcuauuucuau

SEQ ID NO: 1706938 - RNA, 22 nt, Human
auaugcuauuucuauauuuuca

SEQ ID NO: 1706939 - RNA, 23 nt, Human
auaugcuauuucuauauuuucau

SEQ ID NO: 1706940 - RNA, 18 nt, Human
auauuuacuaaaauggac

SEQ ID NO: 1706941 - RNA, 20 nt, Human
auauuuacuaaaauggacug

SEQ ID NO: 1706942 - RNA, 13 nt, Human
augugugaaguga

SEQ ID NO: 1706943 - RNA, 21 nt, Human
augucuucauaccuacaugua

SEQ ID NO: 1706944 - RNA, 22 nt, Human
augucuucauaccuacauguau

SEQ ID NO: 1706945 - RNA, 19 nt, Human
augguccgugcuaaggacu

SEQ ID NO: 1706946 - RNA, 20 nt, Human
augguccgugcuaaggacuu

SEQ ID NO: 1706947 - RNA, 21 nt, Human
augguccgugcuaaggacuug

SEQ ID NO: 1706948 - RNA, 14 nt, Human
auguauuuguuugc

SEQ ID NO: 1706949 - RNA, 13 nt, Human
agaguguugaaac

SEQ ID NO: 1706950 - RNA, 23 nt, Human
aaugaagucucugaagugaaacu

SEQ ID NO: 1706951 - RNA, 14 nt, Human
aaugaagucucuga

SEQ ID NO: 1706952 - RNA, 16 nt, Human
aaugaagucucugaag

SEQ ID NO: 1706953 - RNA, 13 nt, Human
aaugaaauacugu

SEQ ID NO: 1706954 - RNA, 15 nt, Human
aaguugccuaaaucc

SEQ ID NO: 1706955 - RNA, 16 nt, Human
aaguugccuaaaucca

SEQ ID NO: 1706956 - RNA, 17 nt, Human
aaguugccuaaauccau

SEQ ID NO: 1706957 - RNA, 18 nt, Human
aaguugccuaaauccauu

SEQ ID NO: 1706958 - RNA, 19 nt, Human
aaguugccuaaauccauuu

SEQ ID NO: 1706959 - RNA, 13 nt, Human
aaugguuaaaaga

SEQ ID NO: 1706960 - RNA, 12 nt, Human
aagucuguuuua

SEQ ID NO: 1706961 - RNA, 13 nt, Human
aagucuguuuuau

SEQ ID NO: 1706962 - RNA, 14 nt, Human
aagucuguuuuaug

SEQ ID NO: 1706963 - RNA, 12 nt, Human
aaguugccuaaa

SEQ ID NO: 1706964 - RNA, 14 nt, Human
aaggacuucuuuaa

SEQ ID NO: 1706965 - RNA, 15 nt, Human
aaggacuucuuuaau

SEQ ID NO: 1706966 - RNA, 20 nt, Human
aaggacuucuuuaauuuugg

SEQ ID NO: 1706967 - RNA, 21 nt, Human
aaggacuucuuuaauuuugga

SEQ ID NO: 1706968 - RNA, 19 nt, Human
aacagcuggugcccugcuu

SEQ ID NO: 1706969 - RNA, 20 nt, Human
aacagcuggugcccugcuuu

SEQ ID NO: 1706970 - RNA, 21 nt, Human
aacagcuggugcccugcuuuc

SEQ ID NO: 1706971 - RNA, 14 nt, Human
aacggaugauuucu

SEQ ID NO: 1706972 - RNA, 15 nt, Human
aacggaugauuucua

SEQ ID NO: 1706973 - RNA, 16 nt, Human
aacggaugauuucuau

SEQ ID NO: 1706974 - RNA, 17 nt, Human
aacggaugauuucuaug

SEQ ID NO: 1706975 - RNA, 18 nt, Human
aaauagcuagacugguga

SEQ ID NO: 1706976 - RNA, 15 nt, Human
aaaucugugaacuug

SEQ ID NO: 1706977 - RNA, 16 nt, Human
aaaucugugaacuuga

SEQ ID NO: 1706978 - RNA, 18 nt, Human
aaaucugugaacuugaaa

SEQ ID NO: 1706979 - RNA, 10 nt, Human
aaauaaauaa

SEQ ID NO: 1706980 - RNA, 20 nt, Human
aaaccaugggauaaaugcca

SEQ ID NO: 1706981 - RNA, 15 nt, Human
aaaccaugggauaaa

SEQ ID NO: 1706982 - RNA, 13 nt, Human
aauuuuguuucug

SEQ ID NO: 1706983 - RNA, 14 nt, Human
aauuuuguuucugu

SEQ ID NO: 1706984 - RNA, 15 nt, Human
aauuuuguuucugua

SEQ ID NO: 1706985 - RNA, 23 nt, Human
acuguuugagguuuuuaagccuu

SEQ ID NO: 1706986 - RNA, 18 nt, Human
acuguuugagguuuuuaa

SEQ ID NO: 1706987 - RNA, 14 nt, Human
acuggugacugauu

SEQ ID NO: 1706988 - RNA, 18 nt, Human
aaaaaauuggggauucuu

SEQ ID NO: 1706989 - RNA, 20 nt, Human
aaaaaccaguauuguacaaa

SEQ ID NO: 1706990 - RNA, 15 nt, Human
cacccacccuuuuuu

SEQ ID NO: 1706991 - RNA, 19 nt, Human
caaaguugccuaaauccau

SEQ ID NO: 1706992 - RNA, 13 nt, Human
caauuaaggauuu

SEQ ID NO: 1706993 - RNA, 15 nt, Human
caauuaaggauuuua

SEQ ID NO: 1706994 - RNA, 20 nt, Human
caauuaaggauuuuaugcuu

SEQ ID NO: 1706995 - RNA, 21 nt, Human
caauuaaggauuuuaugcuuu

SEQ ID NO: 1706996 - RNA, 22 nt, Human
caauuaaggauuuuaugcuuua

SEQ ID NO: 1706997 - RNA, 20 nt, Human
cacauugguguuguacucaa

SEQ ID NO: 1706998 - RNA, 19 nt, Human
uucuuguauuaagaaugaa

SEQ ID NO: 1706999 - RNA, 14 nt, Human
uucuguauagauua

SEQ ID NO: 1707000 - RNA, 13 nt, Human
uucuguauagauu

SEQ ID NO: 1707001 - RNA, 11 nt, Human
uucuguauaga

SEQ ID NO: 1707002 - RNA, 16 nt, Human
uugaaacggaugauuu

SEQ ID NO: 1707003 - RNA, 19 nt, Human
uugaaacggaugauuucua

SEQ ID NO: 1707004 - RNA, 17 nt, Human
uucuuuaauuuuggaau

SEQ ID NO: 1707005 - RNA, 18 nt, Human
uucuuuaauuuuggaauu

SEQ ID NO: 1707006 - RNA, 12 nt, Human
uucuuuaauuuu

SEQ ID NO: 1707007 - RNA, 13 nt, Human
uugaagcauuuua

SEQ ID NO: 1707008 - RNA, 14 nt, Human
uugaagcauuuuau

SEQ ID NO: 1707009 - RNA, 15 nt, Human
uugaagcauuuuaua

SEQ ID NO: 1707010 - RNA, 17 nt, Human
uugaagcauuuuauaaa

SEQ ID NO: 1707011 - RNA, 22 nt, Human
uugaagcauuuuauaaaucgcu

SEQ ID NO: 1707012 - RNA, 12 nt, Human
uugccuuuuuca

SEQ ID NO: 1707013 - RNA, 13 nt, Human
uugccuuuuucau

SEQ ID NO: 1707014 - RNA, 14 nt, Human
uugccuuuuucauu

SEQ ID NO: 1707015 - RNA, 15 nt, Human
uugccuuuuucauua

SEQ ID NO: 1707016 - RNA, 16 nt, Human
uugccuuuuucauuau

SEQ ID NO: 1707017 - RNA, 17 nt, Human
uugccuuuuucauuauu

SEQ ID NO: 1707018 - RNA, 19 nt, Human
uuggcauaacauaaaucug

SEQ ID NO: 1707019 - RNA, 20 nt, Human
uuggcauaacauaaaucugu

SEQ ID NO: 1707020 - RNA, 22 nt, Human
uuggcauaacauaaaucuguga

SEQ ID NO: 1707021 - RNA, 23 nt, Human
uuggcauaacauaaaucugugaa

SEQ ID NO: 1707022 - RNA, 18 nt, Human
uuggcauaacauaaaucu

SEQ ID NO: 1707023 - RNA, 12 nt, Human
uuguuucuguac

SEQ ID NO: 1707024 - RNA, 14 nt, Human
uuguuucuguacuu

SEQ ID NO: 1707025 - RNA, 13 nt, Human
uuguuuguuuagu

SEQ ID NO: 1707026 - RNA, 14 nt, Human
uuguuuguuuaguc

SEQ ID NO: 1707027 - RNA, 14 nt, Human
uuuaauaauuauau

SEQ ID NO: 1707028 - RNA, 15 nt, Human
uuuaauauuaaagcc

SEQ ID NO: 1707029 - RNA, 17 nt, Human
uuuaauauuaaagccau

SEQ ID NO: 1707030 - RNA, 20 nt, Human
uuuaauauuaaagccauguu

SEQ ID NO: 1707031 - RNA, 21 nt, Human
uuuaauauuaaagccauguuu

SEQ ID NO: 1707032 - RNA, 14 nt, Human
uuuaauauuaaagc

SEQ ID NO: 1707033 - RNA, 15 nt, Human
uuuauaaaucgcuuu

SEQ ID NO: 1707034 - RNA, 18 nt, Human
uuuauaaaucgcuuuuga

SEQ ID NO: 1707035 - RNA, 22 nt, Human
uuuauaaaucgcuuuugauaau

SEQ ID NO: 1707036 - RNA, 19 nt, Human
uuuauaaaucgcuuuugau

SEQ ID NO: 1707037 - RNA, 20 nt, Human
uuuaugacuucauuaauaau

SEQ ID NO: 1707038 - RNA, 15 nt, Human
uuucugauccaguuu

SEQ ID NO: 1707039 - RNA, 16 nt, Human
uuucugauccaguuuu

SEQ ID NO: 1707040 - RNA, 20 nt, Human
uuucugauccaguuuuguuu

SEQ ID NO: 1707041 - RNA, 22 nt, Human
uuucugauccaguuuuguuugg

SEQ ID NO: 1707042 - RNA, 13 nt, Human
uuucugauccagu

SEQ ID NO: 1707043 - RNA, 12 nt, Human
uuuaugcuuuaa

SEQ ID NO: 1707044 - RNA, 15 nt, Human
uuuaugcuuuaaaca

SEQ ID NO: 1707045 - RNA, 16 nt, Human
uuuaugcuuuaaacau

SEQ ID NO: 1707046 - RNA, 18 nt, Human
uuugauaaucaacugggc

SEQ ID NO: 1707047 - RNA, 17 nt, Human
uuugguugcuuuaauau

SEQ ID NO: 1707048 - RNA, 12 nt, Human
uuucuuaaauaa

SEQ ID NO: 1707049 - RNA, 13 nt, Human
uuucuuaaauaau

SEQ ID NO: 1707050 - RNA, 20 nt, Human
uuugauaaucaacugggcug

SEQ ID NO: 1707051 - RNA, 21 nt, Human
uucacucuccauuuaauaauu

SEQ ID NO: 1707052 - RNA, 17 nt, Human
uucagauaacuguuauu

SEQ ID NO: 1707053 - RNA, 18 nt, Human
uucagauaacuguuauuu

SEQ ID NO: 1707054 - RNA, 23 nt, Human
uucagauaacuguuauuuauaau

SEQ ID NO: 1707055 - RNA, 11 nt, Human
uucaaaguugc

SEQ ID NO: 1707056 - RNA, 15 nt, Human
uucaaaguugccuaa

SEQ ID NO: 1707057 - RNA, 16 nt, Human
uucaaaguugccuaaa

SEQ ID NO: 1707058 - RNA, 17 nt, Human
uucaaaguugccuaaau

SEQ ID NO: 1707059 - RNA, 23 nt, Human
uucaaaguugccuaaauccauuu

SEQ ID NO: 1707060 - RNA, 13 nt, Human
uuauuuuauuaug

SEQ ID NO: 1707061 - RNA, 12 nt, Human
uuauuggcuuuu

SEQ ID NO: 1707062 - RNA, 16 nt, Human
uuauuggcuuuucuga

SEQ ID NO: 1707063 - RNA, 18 nt, Human
uuauuggcuuuucugauc

SEQ ID NO: 1707064 - RNA, 22 nt, Human
uuauuggcuuuucugauccagu

SEQ ID NO: 1707065 - RNA, 17 nt, Human
uuaucugaagucagauc

SEQ ID NO: 1707066 - RNA, 13 nt, Human
uuaugcuuuaaac

SEQ ID NO: 1707067 - RNA, 14 nt, Human
uuaugcuuuaaaca

SEQ ID NO: 1707068 - RNA, 14 nt, Human
uuauuacaguauaa

SEQ ID NO: 1707069 - RNA, 17 nt, Human
uucccuggccuuucaua

SEQ ID NO: 1707070 - RNA, 16 nt, Human
uucccuggccuuucau

SEQ ID NO: 1707071 - RNA, 12 nt, Human
uucccuggccuu

SEQ ID NO: 1707072 - RNA, 14 nt, Human
uuagagaguguuga

SEQ ID NO: 1707073 - RNA, 16 nt, Human
uuagagaguguugaaa

SEQ ID NO: 1707074 - RNA, 17 nt, Human
uuagagaguguugaaac

SEQ ID NO: 1707075 - RNA, 18 nt, Human
uuagagaguguugaaacg

SEQ ID NO: 1707076 - RNA, 12 nt, Human
uuagagauuuuu

SEQ ID NO: 1707077 - RNA, 13 nt, Human
uuagaucuaguuc

SEQ ID NO: 1707078 - RNA, 14 nt, Human
uuagaucuaguuca

SEQ ID NO: 1707079 - RNA, 16 nt, Human
uuagcuacuauauaug

SEQ ID NO: 1707080 - RNA, 13 nt, Human
uuaagcauauauu

SEQ ID NO: 1707081 - RNA, 15 nt, Human
uuaagcauauauuuu

SEQ ID NO: 1707082 - RNA, 18 nt, Human
uuaagcauauauuuuuau

SEQ ID NO: 1707083 - RNA, 19 nt, Human
uuaagcauauauuuuuaua

SEQ ID NO: 1707084 - RNA, 23 nt, Human
uuaagcauauauuuuuauauuua

SEQ ID NO: 1707085 - RNA, 21 nt, Human
uuaauauuaaagccauguuua

SEQ ID NO: 1707086 - RNA, 22 nt, Human
uuaauauuaaagccauguuuau

SEQ ID NO: 1707087 - RNA, 17 nt, Human
uggaccaaaaaccagua

SEQ ID NO: 1707088 - RNA, 22 nt, Human
uggaccaaaaaccaguauugua

SEQ ID NO: 1707089 - RNA, 20 nt, Human
uggauaauaaggaaaaguuu

SEQ ID NO: 1707090 - RNA, 15 nt, Human
uggugacugauucuu

SEQ ID NO: 1707091 - RNA, 16 nt, Human
uggugacugauucuuc

SEQ ID NO: 1707092 - RNA, 19 nt, Human
uggugacugauucuucagc

SEQ ID NO: 1707093 - RNA, 17 nt, Human
ugguccgugcuaaggac

SEQ ID NO: 1707094 - RNA, 18 nt, Human
ugguccgugcuaaggacu

SEQ ID NO: 1707095 - RNA, 19 nt, Human
ugguccgugcuaaggacuu

SEQ ID NO: 1707096 - RNA, 20 nt, Human
ugguccgugcuaaggacuug

SEQ ID NO: 1707097 - RNA, 13 nt, Human
ugccuaaauccau

SEQ ID NO: 1707098 - RNA, 15 nt, Human
ugccuaaauccauuu

SEQ ID NO: 1707099 - RNA, 19 nt, Human
ugccuaaauccauuuggaa

SEQ ID NO: 1707100 - RNA, 20 nt, Human
ugccuaaauccauuuggaaa

SEQ ID NO: 1707101 - RNA, 22 nt, Human
ugccuaaauccauuuggaaauc

SEQ ID NO: 1707102 - RNA, 23 nt, Human
ugccuaaauccauuuggaaaucu

SEQ ID NO: 1707103 - RNA, 20 nt, Human
ugccucacccacccuuuuuu

SEQ ID NO: 1707104 - RNA, 23 nt, Human
ugccucacccacccuuuuuuaaa

SEQ ID NO: 1707105 - RNA, 20 nt, Human
ugcauaggugaucucauuua

SEQ ID NO: 1707106 - RNA, 19 nt, Human
ugcgcuaaacuuuucugau

SEQ ID NO: 1707107 - RNA, 20 nt, Human
ugcgcuaaacuuuucugaua

SEQ ID NO: 1707108 - RNA, 21 nt, Human
ugcgcuaaacuuuucugauag

SEQ ID NO: 1707109 - RNA, 22 nt, Human
ugcugguguaugugugaaguga

SEQ ID NO: 1707110 - RNA, 13 nt, Human
ugcugguguaugu

SEQ ID NO: 1707111 - RNA, 17 nt, Human
ugcugggguuaucugaa

SEQ ID NO: 1707112 - RNA, 20 nt, Human
ugcugggguuaucugaaguc

SEQ ID NO: 1707113 - RNA, 21 nt, Human
ugauucuucagcaaaaauauu

SEQ ID NO: 1707114 - RNA, 15 nt, Human
ugauagaggaagccu

SEQ ID NO: 1707115 - RNA, 22 nt, Human
ugaucucauuuaauccucucaa

SEQ ID NO: 1707116 - RNA, 15 nt, Human
ugaucucauuuaauc

SEQ ID NO: 1707117 - RNA, 15 nt, Human
ugagcaucacaguuu

SEQ ID NO: 1707118 - RNA, 14 nt, Human
ugagcaucacaguu

SEQ ID NO: 1707119 - RNA, 19 nt, Human
ucuugccuuuuucauuauu

SEQ ID NO: 1707120 - RNA, 16 nt, Human
ucuugccuuuuucauu

SEQ ID NO: 1707121 - RNA, 17 nt, Human
ucuugccuuuuucauua

SEQ ID NO: 1707122 - RNA, 14 nt, Human
ugaagugaaacugc

SEQ ID NO: 1707123 - RNA, 13 nt, Human
ugaagugaaacug

SEQ ID NO: 1707124 - RNA, 12 nt, Human
ugaagugaaacu

SEQ ID NO: 1707125 - RNA, 20 nt, Human
ugaagucagaucugccuaag

SEQ ID NO: 1707126 - RNA, 23 nt, Human
ugaagucagaucugccuaaggac

SEQ ID NO: 1707127 - RNA, 17 nt, Human
ugacauagucuggcugu

SEQ ID NO: 1707128 - RNA, 16 nt, Human
ugacauagucuggcug

SEQ ID NO: 1707129 - RNA, 20 nt, Human
uccuaucaccugucuugccu

SEQ ID NO: 1707130 - RNA, 13 nt, Human
ucccauuauucaa

SEQ ID NO: 1707131 - RNA, 14 nt, Human
ucccauuauucaaa

SEQ ID NO: 1707132 - RNA, 16 nt, Human
ucccauuauucaaagu

SEQ ID NO: 1707133 - RNA, 18 nt, Human
ucccauuauucaaaguug

SEQ ID NO: 1707134 - RNA, 19 nt, Human
ucccauuauucaaaguugc

SEQ ID NO: 1707135 - RNA, 14 nt, Human
uccagcagauuauu

SEQ ID NO: 1707136 - RNA, 15 nt, Human
uccagcagauuauuc

SEQ ID NO: 1707137 - RNA, 16 nt, Human
uccagcagauuauuca

SEQ ID NO: 1707138 - RNA, 20 nt, Human
uccaguuuuguuuggaccaa

SEQ ID NO: 1707139 - RNA, 15 nt, Human
uccaguuuuguuugg

SEQ ID NO: 1707140 - RNA, 17 nt, Human
uccaguuuuguuuggac

SEQ ID NO: 1707141 - RNA, 23 nt, Human
ucaguauugaagcauuuuauaaa

SEQ ID NO: 1707142 - RNA, 22 nt, Human
ucaguauugaagcauuuuauaa

SEQ ID NO: 1707143 - RNA, 20 nt, Human
ucauggaacgcguugaaauu

SEQ ID NO: 1707144 - RNA, 21 nt, Human
ucauggaacgcguugaaauug

SEQ ID NO: 1707145 - RNA, 22 nt, Human
ucauggaacgcguugaaauugu

SEQ ID NO: 1707146 - RNA, 16 nt, Human
uauuaagcauauauuu

SEQ ID NO: 1707147 - RNA, 12 nt, Human
uauuaugaaacu

SEQ ID NO: 1707148 - RNA, 20 nt, Human
uauuaugaaacuuguguaaa

SEQ ID NO: 1707149 - RNA, 21 nt, Human
uauuaugaaacuuguguaaau

SEQ ID NO: 1707150 - RNA, 22 nt, Human
uauuaugaaacuuguguaaaua

SEQ ID NO: 1707151 - RNA, 12 nt, Human
uauuauguaaau

SEQ ID NO: 1707152 - RNA, 15 nt, Human
uauuauguaaauccc

SEQ ID NO: 1707153 - RNA, 22 nt, Human
uauuauguaaaucccauuauuc

SEQ ID NO: 1707154 - RNA, 19 nt, Human
uauugugcgcuaaacuuuu

SEQ ID NO: 1707155 - RNA, 22 nt, Human
uauugugcgcuaaacuuuucug

SEQ ID NO: 1707156 - RNA, 23 nt, Human
uauugugcgcuaaacuuuucuga

SEQ ID NO: 1707157 - RNA, 19 nt, Human
ucaauaaaaaauuaugaca

SEQ ID NO: 1707158 - RNA, 18 nt, Human
ucacauugguguuguacu

SEQ ID NO: 1707159 - RNA, 14 nt, Human
ucaauaaaaaauua

SEQ ID NO: 1707160 - RNA, 16 nt, Human
ucaauaaaaaauuaug

SEQ ID NO: 1707161 - RNA, 13 nt, Human
ucaauaaaaaauu

SEQ ID NO: 1707162 - RNA, 15 nt, Human
uauaauuaacauguu

SEQ ID NO: 1707163 - RNA, 16 nt, Human
uauaauuaacauguua

SEQ ID NO: 1707164 - RNA, 18 nt, Human
uauaauuaacauguuaaa

SEQ ID NO: 1707165 - RNA, 19 nt, Human
uauaauuaacauguuaaac

SEQ ID NO: 1707166 - RNA, 13 nt, Human
uauaauuaacaug

SEQ ID NO: 1707167 - RNA, 14 nt, Human
uauaauuaacaugu

SEQ ID NO: 1707168 - RNA, 12 nt, Human
uauaauuaacau

SEQ ID NO: 1707169 - RNA, 20 nt, Human
uauaaucacuuuuuuccaca

SEQ ID NO: 1707170 - RNA, 22 nt, Human
uauaauuaacauguuaaaccau

SEQ ID NO: 1707171 - RNA, 23 nt, Human
uauaaaucgcuuuugauaaucaa

SEQ ID NO: 1707172 - RNA, 18 nt, Human
uauaucugaggaauucug

SEQ ID NO: 1707173 - RNA, 19 nt, Human
uauaucugaggaauucugu

SEQ ID NO: 1707174 - RNA, 20 nt, Human
uauaucugaggaauucugua

SEQ ID NO: 1707175 - RNA, 21 nt, Human
uauaucugaggaauucuguau

SEQ ID NO: 1707176 - RNA, 22 nt, Human
uauaucugaggaauucuguaua

SEQ ID NO: 1707177 - RNA, 18 nt, Human
uauauaaaugguuaaaag

SEQ ID NO: 1707178 - RNA, 16 nt, Human
uauaugugaugaucua

SEQ ID NO: 1707179 - RNA, 21 nt, Human
uaggugaucucauuuaauccu

SEQ ID NO: 1707180 - RNA, 16 nt, Human
uaugacuucauuaaua

SEQ ID NO: 1707181 - RNA, 20 nt, Human
uaugacuucauuaauaauaa

SEQ ID NO: 1707182 - RNA, 15 nt, Human
uaugcuuuaaacauu

SEQ ID NO: 1707183 - RNA, 18 nt, Human
uaucugaggaauucugua

SEQ ID NO: 1707184 - RNA, 19 nt, Human
uaucugaggaauucuguau

SEQ ID NO: 1707185 - RNA, 21 nt, Human
uaucugaggaauucuguauag

SEQ ID NO: 1707186 - RNA, 22 nt, Human
uaucugaggaauucuguauaga

SEQ ID NO: 1707187 - RNA, 16 nt, Human
uaucugaggaauucug

SEQ ID NO: 1707188 - RNA, 17 nt, Human
uaucugaggaauucugu

SEQ ID NO: 1707189 - RNA, 23 nt, Human
gugaaacugcuuguuuccuagca

SEQ ID NO: 1707190 - RNA, 20 nt, Human
gugaaacugcuuguuuccua

SEQ ID NO: 1707191 - RNA, 21 nt, Human
gugaaacugcuuguuuccuag

SEQ ID NO: 1707192 - RNA, 17 nt, Human
gugaauggcuuuguaua

SEQ ID NO: 1707193 - RNA, 18 nt, Human
gugaauggcuuuguauag

SEQ ID NO: 1707194 - RNA, 19 nt, Human
gugaauggcuuuguauaga

SEQ ID NO: 1707195 - RNA, 13 nt, Human
gugaauggcuuug

SEQ ID NO: 1707196 - RNA, 14 nt, Human
gugaauggcuuugu

SEQ ID NO: 1707197 - RNA, 13 nt, Human
gucucagauuuua

SEQ ID NO: 1707198 - RNA, 12 nt, Human
guauuuguuugc

SEQ ID NO: 1707199 - RNA, 23 nt, Human
guauuuguuugcauaggugaucu

SEQ ID NO: 1707200 - RNA, 16 nt, Human
gguccgugcuaaggac

SEQ ID NO: 1707201 - RNA, 17 nt, Human
gguccgugcuaaggacu

SEQ ID NO: 1707202 - RNA, 18 nt, Human
gguccgugcuaaggacuu

SEQ ID NO: 1707203 - RNA, 14 nt, Human
ggugaauggcuuug

SEQ ID NO: 1707204 - RNA, 17 nt, Human
ggugaauggcuuuguau

SEQ ID NO: 1707205 - RNA, 20 nt, Human
ggugaauggcuuuguauaga

SEQ ID NO: 1707206 - RNA, 19 nt, Human
ggugcccugcuuucagaua

SEQ ID NO: 1707207 - RNA, 16 nt, Human
guaaaucccauuauuc

SEQ ID NO: 1707208 - RNA, 17 nt, Human
guaaaucccauuauuca

SEQ ID NO: 1707209 - RNA, 18 nt, Human
guaaaucccauuauucaa

SEQ ID NO: 1707210 - RNA, 19 nt, Human
guaaaucccauuauucaaa

SEQ ID NO: 1707211 - RNA, 20 nt, Human
guaaaucccauuauucaaag

SEQ ID NO: 1707212 - RNA, 21 nt, Human
guaaaucccauuauucaaagu

SEQ ID NO: 1707213 - RNA, 21 nt, Human
guaaauacaauuuuguuucug

SEQ ID NO: 1707214 - RNA, 15 nt, Human
guaaaucccauuauu

SEQ ID NO: 1707215 - RNA, 22 nt, Human
guaaauacaauuuuguuucugu

SEQ ID NO: 1707216 - RNA, 23 nt, Human
guaaauacaauuuuguuucugua

SEQ ID NO: 1707217 - RNA, 13 nt, Human
guaauuauaucug

SEQ ID NO: 1707218 - RNA, 12 nt, Human
guacuuuuuggc

SEQ ID NO: 1707219 - RNA, 21 nt, Human
guacuuuuuggcauaacauaa

SEQ ID NO: 1707220 - RNA, 13 nt, Human
gccugauuaaaga

SEQ ID NO: 1707221 - RNA, 16 nt, Human
gccugauuaaagaaug

SEQ ID NO: 1707222 - RNA, 23 nt, Human
gccugcacggugaauggcuuugu

SEQ ID NO: 1707223 - RNA, 20 nt, Human
ggauucuuaaaguugaauuu

SEQ ID NO: 1707224 - RNA, 18 nt, Human
ggauucuuaaaguugaau

SEQ ID NO: 1707225 - RNA, 19 nt, Human
ggauucuuaaaguugaauu

SEQ ID NO: 1707226 - RNA, 16 nt, Human
ggauucuuaaaguuga

SEQ ID NO: 1707227 - RNA, 14 nt, Human
ggaaaaguuuaaua

SEQ ID NO: 1707228 - RNA, 14 nt, Human
gcuuucagauacug

SEQ ID NO: 1707229 - RNA, 18 nt, Human
gcuuucagauacuggauu

SEQ ID NO: 1707230 - RNA, 23 nt, Human
gcuuucagauacuggauuguacu

SEQ ID NO: 1707231 - RNA, 20 nt, Human
gcuuuguauagaaccucuuu

SEQ ID NO: 1707232 - RNA, 15 nt, Human
ggacuguggugacuu

SEQ ID NO: 1707233 - RNA, 17 nt, Human
ggacuguggugacuuug

SEQ ID NO: 1707234 - RNA, 21 nt, Human
ggacuguggugacuuuggaua

SEQ ID NO: 1707235 - RNA, 22 nt, Human
ggacuguggugacuuuggauaa

SEQ ID NO: 1707236 - RNA, 14 nt, Human
ggacuguggugacu

SEQ ID NO: 1707237 - RNA, 14 nt, Human
ggaccaaaaaccag

SEQ ID NO: 1707238 - RNA, 16 nt, Human
ggaccaaaaaccagua

SEQ ID NO: 1707239 - RNA, 23 nt, Human
ggaccaaaaaccaguauuguaca

SEQ ID NO: 1707240 - RNA, 12 nt, Human
ggaauucuguau

SEQ ID NO: 1707241 - RNA, 15 nt, Human
ggaauucuguauaga

SEQ ID NO: 1707242 - RNA, 17 nt, Human
ggaauucuguauagauu

SEQ ID NO: 1707243 - RNA, 17 nt, Human
gauaacuguuauuuaua

SEQ ID NO: 1707244 - RNA, 18 nt, Human
gauaacuguuauuuauaa

SEQ ID NO: 1707245 - RNA, 11 nt, Human
gauaaaugcca

SEQ ID NO: 1707246 - RNA, 15 nt, Human
gauaaaugccaucaa

SEQ ID NO: 1707247 - RNA, 20 nt, Human
gauaaaugccaucaauaaaa

SEQ ID NO: 1707248 - RNA, 12 nt, Human
gaguguugaaac

SEQ ID NO: 1707249 - RNA, 16 nt, Human
gaguguugaaacggau

SEQ ID NO: 1707250 - RNA, 13 nt, Human
gauuuuaugcuuu

SEQ ID NO: 1707251 - RNA, 19 nt, Human
gaaugaaauacuguuugag

SEQ ID NO: 1707252 - RNA, 15 nt, Human
gaaugaaauacuguu

SEQ ID NO: 1707253 - RNA, 18 nt, Human
gaaugaaauacuguuuga

SEQ ID NO: 1707254 - RNA, 17 nt, Human
gaauggcuuuguauaga

SEQ ID NO: 1707255 - RNA, 14 nt, Human
gaauggcuuuguau

SEQ ID NO: 1707256 - RNA, 16 nt, Human
gaauggcuuuguauag

SEQ ID NO: 1707257 - RNA, 14 nt, Human
gaauucuguauaga

SEQ ID NO: 1707258 - RNA, 21 nt, Human
gaauucuguauagauuagaau

SEQ ID NO: 1707259 - RNA, 22 nt, Human
gaauucuguauagauuagaauu

SEQ ID NO: 1707260 - RNA, 13 nt, Human
gaauucuguauag

SEQ ID NO: 1707261 - RNA, 16 nt, Human
gacuucuuuaauuuug

SEQ ID NO: 1707262 - RNA, 17 nt, Human
gacuucuuuaauuuugg

SEQ ID NO: 1707263 - RNA, 18 nt, Human
gacuucuuuaauuuugga

SEQ ID NO: 1707264 - RNA, 19 nt, Human
gacuucuuuaauuuuggaa

SEQ ID NO: 1707265 - RNA, 20 nt, Human
gacuucuuuaauuuuggaau

SEQ ID NO: 1707266 - RNA, 21 nt, Human
gacuucuuuaauuuuggaauu

SEQ ID NO: 1707267 - RNA, 13 nt, Human
gagaguguugaaa

SEQ ID NO: 1707268 - RNA, 12 nt, Human
cugccuaaggac

SEQ ID NO: 1707269 - RNA, 13 nt, Human
cugccuaaggacu

SEQ ID NO: 1707270 - RNA, 14 nt, Human
cugccuaaggacuu

SEQ ID NO: 1707271 - RNA, 15 nt, Human
cugccuaaggacuuc

SEQ ID NO: 1707272 - RNA, 16 nt, Human
cuguauagauuagaau

SEQ ID NO: 1707273 - RNA, 19 nt, Human
cuucuuuaauuuuggaauu

SEQ ID NO: 1707274 - RNA, 15 nt, Human
cuucuuuaauuuugg

SEQ ID NO: 1707275 - RNA, 16 nt, Human
cuucuuuaauuuugga

SEQ ID NO: 1707276 - RNA, 17 nt, Human
cuucuuuaauuuuggaa

SEQ ID NO: 1707277 - RNA, 18 nt, Human
cuucuuuaauuuuggaau

SEQ ID NO: 1707278 - RNA, 15 nt, Human
cuuugugcugggguu

SEQ ID NO: 1707279 - RNA, 20 nt, Human
cuuugugcugggguuaucug

SEQ ID NO: 1707280 - RNA, 22 nt, Human
cuuugugcugggguuaucugaa

SEQ ID NO: 1707281 - RNA, 23 nt, Human
cuuugucuacaccauuaugugcg

SEQ ID NO: 1707282 - RNA, 20 nt, Human
cuuugucuacaccauuaugu

SEQ ID NO: 1707283 - RNA, 16 nt, Human
cuuucucuuucguuac

SEQ ID NO: 1707284 - RNA, 14 nt, Human
cuuguguaaauaca

SEQ ID NO: 1707285 - RNA, 16 nt, Human
cuuguguaaauacaau

SEQ ID NO: 1707286 - RNA, 21 nt, Human
cuuguguaaauacaauuuugu

SEQ ID NO: 1707287 - RNA, 12 nt, Human
cuuguguaaaua

SEQ ID NO: 1707288 - RNA, 22 nt, Human
cuuguuagaucuaguucacucu

SEQ ID NO: 1707289 - RNA, 21 nt, Human
cuuuaaacauugguucuugua

SEQ ID NO: 1707290 - RNA, 17 nt, Human
gaaacggaugauuucua

SEQ ID NO: 1707291 - RNA, 18 nt, Human
gaaacggaugauuucuau

SEQ ID NO: 1707292 - RNA, 16 nt, Human
cuuuuuggcauaacau

SEQ ID NO: 1707293 - RNA, 20 nt, Human
cuuuuuggcauaacauaaau

SEQ ID NO: 1707294 - RNA, 22 nt, Human
cuuuuuggcauaacauaaaucu

SEQ ID NO: 1707295 - RNA, 19 nt, Human
gaaaaguuuaauauuaaag

SEQ ID NO: 1707296 - RNA, 20 nt, Human
gaaaaguuuaauauuaaagc

SEQ ID NO: 1707297 - RNA, 21 nt, Human
gaaaaguuuaauauuaaagcc

SEQ ID NO: 1707298 - RNA, 22 nt, Human
gaaaaguuuaauauuaaagcca

SEQ ID NO: 1707299 - RNA, 15 nt, Human
gaaaaguuuaauauu

SEQ ID NO: 1707300 - RNA, 23 nt, Human
gaaaaguuuaauauuaaagccau

SEQ ID NO: 1707301 - RNA, 17 nt, Human
cgcuaaacuuuucugau

SEQ ID NO: 1707302 - RNA, 18 nt, Human
cgcuaaacuuuucugaua

SEQ ID NO: 1707303 - RNA, 19 nt, Human
cgcuaaacuuuucugauag

SEQ ID NO: 1707304 - RNA, 24 nt, Human
cgcguugaaauuguaauuauaucu

SEQ ID NO: 1707305 - RNA, 22 nt, Human
cgcguugaaauuguaauuauau

SEQ ID NO: 1707306 - RNA, 23 nt, Human
cucagauuuuauuauguaaaucc

SEQ ID NO: 1707307 - RNA, 22 nt, Human
cucagauuuuauuauguaaauc

SEQ ID NO: 1707308 - RNA, 13 nt, Human
cuccauuuaauaa

SEQ ID NO: 1707309 - RNA, 20 nt, Human
cuccauuuaauaauuauaug

SEQ ID NO: 1707310 - RNA, 22 nt, Human
cucccuauuuuuuuucuguuau

SEQ ID NO: 1707311 - RNA, 21 nt, Human
cucccuauuuuuuuucuguua

SEQ ID NO: 1707312 - RNA, 19 nt, Human
cuauuucuauauuuucauu

SEQ ID NO: 1707313 - RNA, 20 nt, Human
cuauuucuauauuuucauuc

SEQ ID NO: 1707314 - RNA, 18 nt, Human
cucaaccaccuuucagau

SEQ ID NO: 1707315 - RNA, 14 nt, Human
cuaugcugaguuug

SEQ ID NO: 1707316 - RNA, 15 nt, Human
cuaugcugaguuugu

SEQ ID NO: 1707317 - RNA, 13 nt, Human
cuaugcugaguuu

SEQ ID NO: 1707318 - RNA, 14 nt, Human
cuagacuggugacu

SEQ ID NO: 1707319 - RNA, 15 nt, Human
cuagacuggugacug

SEQ ID NO: 1707320 - RNA, 17 nt, Human
cuagacuggugacugau

SEQ ID NO: 1707321 - RNA, 18 nt, Human
cuagacuggugacugauu

SEQ ID NO: 1707322 - RNA, 19 nt, Human
cuagacuggugacugauuc

SEQ ID NO: 1707323 - RNA, 22 nt, Human
cuagacuggugacugauucuuc

SEQ ID NO: 1707324 - RNA, 23 nt, Human
cuagacuggugacugauucuuca

SEQ ID NO: 1707325 - RNA, 14 nt, Human
cuaaggacuucuuu

SEQ ID NO: 1707326 - RNA, 15 nt, Human
cuaaggacuucuuua

SEQ ID NO: 1707327 - RNA, 16 nt, Human
cuaaggacuucuuuaa

SEQ ID NO: 1707328 - RNA, 22 nt, Human
cuaaggacuucuuuaauuuugg

SEQ ID NO: 1707329 - RNA, 22 nt, Human
cuaaaauggacuguggugacuu

SEQ ID NO: 1707330 - RNA, 21 nt, Human
cuaaaauggacuguggugacu

SEQ ID NO: 1707331 - RNA, 18 nt, Human
cccauuauucaaaguugc

SEQ ID NO: 1707332 - RNA, 23 nt, Human
cccauuauucaaaguugccuaaa

SEQ ID NO: 1707333 - RNA, 16 nt, Human
ccccacccugccucac

SEQ ID NO: 1707334 - RNA, 11 nt, Human
ccauuauucaa

SEQ ID NO: 1707335 - RNA, 13 nt, Human
ccauuuggaaauc

SEQ ID NO: 1707336 - RNA, 14 nt, Human
caaaaauauuuuau

SEQ ID NO: 1707337 - RNA, 15 nt, Human
caaaaauauuuuaug

SEQ ID NO: 1707338 - RNA, 17 nt, Human
caaaaauauuuuaugau

SEQ ID NO: 1707339 - RNA, 21 nt, Human
caaaaauauuuuaugauccag

SEQ ID NO: 1707340 - RNA, 22 nt, Human
caaaaauauuuuaugauccagc

SEQ ID NO: 1707341 - RNA, 23 nt, Human
caaaaauauuuuaugauccagca

SEQ ID NO: 1707342 - RNA, 19 nt, Human
caaaaaccaguauuguaca

SEQ ID NO: 1707343 - RNA, 20 nt, Human
caaaaaccaguauuguacaa

SEQ ID NO: 1707344 - RNA, 18 nt, Human
caaaaaccaguauuguac

SEQ ID NO: 1707345 - RNA, 23 nt, Human
caauuaaggauuuuaugcuuuaa

SEQ ID NO: 1707346 - RNA, 23 nt, Human
uuuuguuuggaccaaaaaccagu

SEQ ID NO: 1707347 - RNA, 13 nt, Human
uuuuguuucugua

SEQ ID NO: 1707348 - RNA, 12 nt, Human
uuuuguuuggac

SEQ ID NO: 1707349 - RNA, 22 nt, Human
uuuuguuuggaccaaaaaccag

SEQ ID NO: 1707350 - RNA, 12 nt, Human
uuuuguuucugu

SEQ ID NO: 1707351 - RNA, 18 nt, Human
uuuuguuguuuguuuagu

SEQ ID NO: 1707352 - RNA, 14 nt, Human
auuaagcauauauu

SEQ ID NO: 1707353 - RNA, 15 nt, Human
auuaagcauauauuu

SEQ ID NO: 1707354 - RNA, 21 nt, Human
auuaagcauauauuuuuauau

SEQ ID NO: 1707355 - RNA, 11 nt, Human
auuaaagccau

SEQ ID NO: 1707356 - RNA, 21 nt, Human
auuagaauucuguauagauua

SEQ ID NO: 1707357 - RNA, 15 nt, Human
auuagaauucuguau

SEQ ID NO: 1707358 - RNA, 16 nt, Human
auuagaauucuguaua

SEQ ID NO: 1707359 - RNA, 17 nt, Human
auuagaauucuguauag

SEQ ID NO: 1707360 - RNA, 18 nt, Human
auuagaauucuguauaga

SEQ ID NO: 1707361 - RNA, 13 nt, Human
auuagaauucugu

SEQ ID NO: 1707362 - RNA, 14 nt, Human
auuagaauucugua

SEQ ID NO: 1707363 - RNA, 12 nt, Human
auuagaauucug

SEQ ID NO: 1707364 - RNA, 15 nt, Human
auuaauaauaaauuc

SEQ ID NO: 1707365 - RNA, 12 nt, Human
auguuaaaccau

SEQ ID NO: 1707366 - RNA, 13 nt, Human
auguuaaaccaug

SEQ ID NO: 1707367 - RNA, 20 nt, Human
auguuaaaccaugggauaaa

SEQ ID NO: 1707368 - RNA, 12 nt, Human
uuuuauuaugaa

SEQ ID NO: 1707369 - RNA, 21 nt, Human
uuuuauuaugaaacuugugua

SEQ ID NO: 1707370 - RNA, 22 nt, Human
uuuuauuaugaaacuuguguaa

SEQ ID NO: 1707371 - RNA, 15 nt, Human
uuuucugauccaguu

SEQ ID NO: 1707372 - RNA, 13 nt, Human
auucccuggccuu

SEQ ID NO: 1707373 - RNA, 19 nt, Human
auucccuggccuuucauau

SEQ ID NO: 1707374 - RNA, 21 nt, Human
auucuccuaucaccugucuug

SEQ ID NO: 1707375 - RNA, 14 nt, Human
auugguguuguacu

SEQ ID NO: 1707376 - RNA, 22 nt, Human
auugguguuguacucaauuuua

SEQ ID NO: 1707377 - RNA, 23 nt, Human
auugguguuguacucaauuuuaa

SEQ ID NO: 1707378 - RNA, 13 nt, Human
auucuuaaaguug

SEQ ID NO: 1707379 - RNA, 14 nt, Human
auucuuaaaguuga

SEQ ID NO: 1707380 - RNA, 15 nt, Human
auucuuaaaguugaa

SEQ ID NO: 1707381 - RNA, 16 nt, Human
auucuuaaaguugaau

SEQ ID NO: 1707382 - RNA, 21 nt, Human
auucuguauagauuagaauuc

SEQ ID NO: 1707383 - RNA, 15 nt, Human
auucuguauagauua

SEQ ID NO: 1707384 - RNA, 15 nt, Human
auucuucagcaaaaa

SEQ ID NO: 1707385 - RNA, 23 nt, Human
auucuucagcaaaaauauuuuau

SEQ ID NO: 1707386 - RNA, 18 nt, Human
auucuuaaaguugaauuu

SEQ ID NO: 1707387 - RNA, 16 nt, Human
auuuuauuauguaaau

SEQ ID NO: 1707388 - RNA, 17 nt, Human
auuuuauuauguaaauc

SEQ ID NO: 1707389 - RNA, 18 nt, Human
auuuuauuauguaaaucc

SEQ ID NO: 1707390 - RNA, 19 nt, Human
auuuuauuauguaaauccc

SEQ ID NO: 1707391 - RNA, 15 nt, Human
auuuuauuauguaaa

SEQ ID NO: 1707392 - RNA, 20 nt, Human
auuuuauuauguaaauccca

SEQ ID NO: 1707393 - RNA, 21 nt, Human
auuuuauuauguaaaucccau

SEQ ID NO: 1707394 - RNA, 13 nt, Human
auuuuccuccuuu

SEQ ID NO: 1707395 - RNA, 17 nt, Human
auuuuccuccuuucucu

SEQ ID NO: 1707396 - RNA, 15 nt, Human
uuguaauuauaucug

SEQ ID NO: 1707397 - RNA, 16 nt, Human
uugguuaagucuguuu

SEQ ID NO: 1707398 - RNA, 18 nt, Human
uugguuaagucuguuuua

SEQ ID NO: 1707399 - RNA, 17 nt, Human
uuuaaaaaaaaaauugg

SEQ ID NO: 1707400 - RNA, 23 nt, Human
augaucuaccagccucccuauuu

SEQ ID NO: 1707401 - RNA, 15 nt, Human
uuucuauauuuucau

SEQ ID NO: 1707402 - RNA, 18 nt, Human
uuucuauauuuucauucu

SEQ ID NO: 1707403 - RNA, 13 nt, Human
uuucuauauuuuc

SEQ ID NO: 1707404 - RNA, 21 nt, Human
uuucuaugcugaguuugugcu

SEQ ID NO: 1707405 - RNA, 15 nt, Human
uuuacuaaaauggac

SEQ ID NO: 1707406 - RNA, 17 nt, Human
uuuacuaaaauggacug

SEQ ID NO: 1707407 - RNA, 23 nt, Human
uuuagcuacuauauaugugauga

SEQ ID NO: 1707408 - RNA, 21 nt, Human
uuuauuaugaaacuuguguaa

SEQ ID NO: 1707409 - RNA, 13 nt, Human
uuuauuaugaaac

SEQ ID NO: 1707410 - RNA, 17 nt, Human
uucagcaaaaauauuuu

SEQ ID NO: 1707411 - RNA, 19 nt, Human
uucagcaaaaauauuuuau

SEQ ID NO: 1707412 - RNA, 22 nt, Human
uucauuauuuuauuaugaaacu

SEQ ID NO: 1707413 - RNA, 21 nt, Human
uucauggaacgcguugaaauu

SEQ ID NO: 1707414 - RNA, 22 nt, Human
uucauggaacgcguugaaauug

SEQ ID NO: 1707415 - RNA, 15 nt, Human
uucauuaauaauaaa

SEQ ID NO: 1707416 - RNA, 18 nt, Human
uucauuaauaauaaauuc

SEQ ID NO: 1707417 - RNA, 21 nt, Human
uucauuaauaauaaauucccu

SEQ ID NO: 1707418 - RNA, 19 nt, Human
uucauggaacgcguugaaa

SEQ ID NO: 1707419 - RNA, 20 nt, Human
uucauggaacgcguugaaau

SEQ ID NO: 1707420 - RNA, 13 nt, Human
auauauuuuuaua

SEQ ID NO: 1707421 - RNA, 19 nt, Human
aucaacugggcugaacacu

SEQ ID NO: 1707422 - RNA, 12 nt, Human
auauuaaagcca

SEQ ID NO: 1707423 - RNA, 17 nt, Human
uugacauagucuggcug

SEQ ID NO: 1707424 - RNA, 14 nt, Human
uugacauagucugg

SEQ ID NO: 1707425 - RNA, 19 nt, Human
uugauaaucaacugggcug

SEQ ID NO: 1707426 - RNA, 13 nt, Human
uucuuaaaguuga

SEQ ID NO: 1707427 - RNA, 15 nt, Human
uucuuaaauaauaaa

SEQ ID NO: 1707428 - RNA, 19 nt, Human
uucuuaaauaauaaagauc

SEQ ID NO: 1707429 - RNA, 14 nt, Human
ugcuauuucuauau

SEQ ID NO: 1707430 - RNA, 20 nt, Human
ugcuauuucuauauuuucau

SEQ ID NO: 1707431 - RNA, 12 nt, Human
ugcuauuucuau

SEQ ID NO: 1707432 - RNA, 13 nt, Human
ugcuauuucuaua

SEQ ID NO: 1707433 - RNA, 14 nt, Human
aggacuuguuagau

SEQ ID NO: 1707434 - RNA, 16 nt, Human
aggacuuguuagaucu

SEQ ID NO: 1707435 - RNA, 17 nt, Human
aggacuuguuagaucua

SEQ ID NO: 1707436 - RNA, 20 nt, Human
aggauuuuaugcuuuaaaca

SEQ ID NO: 1707437 - RNA, 12 nt, Human
ugauuucuaugc

SEQ ID NO: 1707438 - RNA, 15 nt, Human
ugauuucuaugcuga

SEQ ID NO: 1707439 - RNA, 16 nt, Human
ugauuucuaugcugag

SEQ ID NO: 1707440 - RNA, 21 nt, Human
uguuguacucaauuuuaacaa

SEQ ID NO: 1707441 - RNA, 14 nt, Human
uuauaaaucgcuuu

SEQ ID NO: 1707442 - RNA, 17 nt, Human
uuauaaaucgcuuuuga

SEQ ID NO: 1707443 - RNA, 18 nt, Human
uuauaaaucgcuuuugau

SEQ ID NO: 1707444 - RNA, 21 nt, Human
auaauuauaugcuauuucuau

SEQ ID NO: 1707445 - RNA, 23 nt, Human
auaauuauaugcuauuucuauau

SEQ ID NO: 1707446 - RNA, 17 nt, Human
auaauuauaugcuauuu

SEQ ID NO: 1707447 - RNA, 19 nt, Human
auaauuauaugcuauuucu

SEQ ID NO: 1707448 - RNA, 19 nt, Human
auaaucacuuuuuuccaca

SEQ ID NO: 1707449 - RNA, 16 nt, Human
auaauaaggaaaaguu

SEQ ID NO: 1707450 - RNA, 23 nt, Human
auaauaaauucccuggccuuuca

SEQ ID NO: 1707451 - RNA, 17 nt, Human
auaauaaggaaaaguuu

SEQ ID NO: 1707452 - RNA, 18 nt, Human
auaauaaggaaaaguuua

SEQ ID NO: 1707453 - RNA, 19 nt, Human
auaauaaggaaaaguuuaa

SEQ ID NO: 1707454 - RNA, 22 nt, Human
auaauaaggaaaaguuuaauau

SEQ ID NO: 1707455 - RNA, 18 nt, Human
ugguuaagucuguuuuau

SEQ ID NO: 1707456 - RNA, 15 nt, Human
ugguuaagucuguuu

SEQ ID NO: 1707457 - RNA, 21 nt, Human
uguaaauacaauuuuguuucu

SEQ ID NO: 1707458 - RNA, 10 nt, Human
uguaaauccc

SEQ ID NO: 1707459 - RNA, 16 nt, Human
uguaaauacaauuuug

SEQ ID NO: 1707460 - RNA, 17 nt, Human
uguaaauacaauuuugu

SEQ ID NO: 1707461 - RNA, 18 nt, Human
uguaaauacaauuuuguu

SEQ ID NO: 1707462 - RNA, 19 nt, Human
uguaaauacaauuuuguuu

SEQ ID NO: 1707463 - RNA, 13 nt, Human
uguacaaaguauu

SEQ ID NO: 1707464 - RNA, 14 nt, Human
uguacaaaguauua

SEQ ID NO: 1707465 - RNA, 15 nt, Human
ugucuugccuuuuuc

SEQ ID NO: 1707466 - RNA, 16 nt, Human
ugucuugccuuuuuca

SEQ ID NO: 1707467 - RNA, 17 nt, Human
ugucuugccuuuuucau

SEQ ID NO: 1707468 - RNA, 21 nt, Human
ugucuugccuuuuucauuauu

SEQ ID NO: 1707469 - RNA, 14 nt, Human
ugugaacuaaacuu

SEQ ID NO: 1707470 - RNA, 19 nt, Human
ugugaacuaaacuuucaca

SEQ ID NO: 1707471 - RNA, 20 nt, Human
ugugaacuaaacuuucacac

SEQ ID NO: 1707472 - RNA, 22 nt, Human
ugucuucauaccuacauguauu

SEQ ID NO: 1707473 - RNA, 13 nt, Human
agucuguuuuaug

SEQ ID NO: 1707474 - RNA, 14 nt, Human
agucuguuuuauga

SEQ ID NO: 1707475 - RNA, 17 nt, Human
agucuguuuuaugacuu

SEQ ID NO: 1707476 - RNA, 18 nt, Human
agucuguuuuaugacuuc

SEQ ID NO: 1707477 - RNA, 18 nt, Human
agucucugaagugaaacu

SEQ ID NO: 1707478 - RNA, 19 nt, Human
agucucugaagugaaacug

SEQ ID NO: 1707479 - RNA, 18 nt, Human
ugugagcaucacaguuuu

SEQ ID NO: 1707480 - RNA, 12 nt, Human
uguaugugugaa

SEQ ID NO: 1707481 - RNA, 13 nt, Human
uguaugugugaag

SEQ ID NO: 1707482 - RNA, 12 nt, Human
uguauuaagaau

SEQ ID NO: 1707483 - RNA, 16 nt, Human
uguauuaagaaugaaa

SEQ ID NO: 1707484 - RNA, 15 nt, Human
aguauuguacaaagu

SEQ ID NO: 1707485 - RNA, 20 nt, Human
aguauuguacaaaguauuaa

SEQ ID NO: 1707486 - RNA, 22 nt, Human
aguauuguacaaaguauuaagc

SEQ ID NO: 1707487 - RNA, 23 nt, Human
aguauuguacaaaguauuaagca

SEQ ID NO: 1707488 - RNA, 11 nt, Human
aguauuguaca

SEQ ID NO: 1707489 - RNA, 23 nt, Human
agucagaucugccuaaggacuuc

SEQ ID NO: 1707490 - RNA, 21 nt, Human
agucagaucugccuaaggacu

SEQ ID NO: 1707491 - RNA, 22 nt, Human
agucagaucugccuaaggacuu

SEQ ID NO: 1707492 - RNA, 20 nt, Human
agucagaucugccuaaggac

SEQ ID NO: 1707493 - RNA, 17 nt, Human
agucagaucugccuaag

SEQ ID NO: 1707494 - RNA, 19 nt, Human
agacuggugacugauucuu

SEQ ID NO: 1707495 - RNA, 20 nt, Human
agacuggugacugauucuuc

SEQ ID NO: 1707496 - RNA, 21 nt, Human
agacuggugacugauucuuca

SEQ ID NO: 1707497 - RNA, 17 nt, Human
ucuuugucuacaccauu

SEQ ID NO: 1707498 - RNA, 18 nt, Human
ugaaacugcuuguuuccu

SEQ ID NO: 1707499 - RNA, 19 nt, Human
ugaaacugcuuguuuccua

SEQ ID NO: 1707500 - RNA, 16 nt, Human
agagaguguugaaacg

SEQ ID NO: 1707501 - RNA, 15 nt, Human
agagaguguugaaac

SEQ ID NO: 1707502 - RNA, 20 nt, Human
ugaaacugcuuguuuccuag

SEQ ID NO: 1707503 - RNA, 22 nt, Human
ugaaacugcuuguuuccuagca

SEQ ID NO: 1707504 - RNA, 12 nt, Human
agagguuuuucu

SEQ ID NO: 1707505 - RNA, 22 nt, Human
agagguuuuucuuaaauaauaa

SEQ ID NO: 1707506 - RNA, 17 nt, Human
ugaacuaaacuuucaca

SEQ ID NO: 1707507 - RNA, 19 nt, Human
ugaacuaaacuuucacacc

SEQ ID NO: 1707508 - RNA, 13 nt, Human
ugaaauuguaauu

SEQ ID NO: 1707509 - RNA, 14 nt, Human
ugaaauuguaauua

SEQ ID NO: 1707510 - RNA, 15 nt, Human
ugaaauuguaauuau

SEQ ID NO: 1707511 - RNA, 16 nt, Human
ugaaauuguaauuaua

SEQ ID NO: 1707512 - RNA, 19 nt, Human
ugaaauuguaauuauaucu

SEQ ID NO: 1707513 - RNA, 14 nt, Human
ugaaauacuguuug

SEQ ID NO: 1707514 - RNA, 16 nt, Human
ugaaauacuguuugag

SEQ ID NO: 1707515 - RNA, 15 nt, Human
agauuagaauucugu

SEQ ID NO: 1707516 - RNA, 16 nt, Human
agauuagaauucugua

SEQ ID NO: 1707517 - RNA, 22 nt, Human
agauuagaauucuguauagauu

SEQ ID NO: 1707518 - RNA, 23 nt, Human
agauuagaauucuguauagauua

SEQ ID NO: 1707519 - RNA, 21 nt, Human
agauuagagaguguugaaacg

SEQ ID NO: 1707520 - RNA, 17 nt, Human
acuuuggauaauaagga

SEQ ID NO: 1707521 - RNA, 19 nt, Human
acuuuggauaauaaggaaa

SEQ ID NO: 1707522 - RNA, 12 nt, Human
acuuuggauaau

SEQ ID NO: 1707523 - RNA, 16 nt, Human
ucucauuuaauccucu

SEQ ID NO: 1707524 - RNA, 22 nt, Human
ucucagauuuuauuauguaaau

SEQ ID NO: 1707525 - RNA, 23 nt, Human
ucucagauuuuauuauguaaauc

SEQ ID NO: 1707526 - RNA, 13 nt, Human
acuuguguaaaua

SEQ ID NO: 1707527 - RNA, 14 nt, Human
acuguuauuuauaa

SEQ ID NO: 1707528 - RNA, 15 nt, Human
acuguuauuuauaau

SEQ ID NO: 1707529 - RNA, 17 nt, Human
acuguuauuuauaauca

SEQ ID NO: 1707530 - RNA, 20 nt, Human
acuguuauuuauaaucacuu

SEQ ID NO: 1707531 - RNA, 21 nt, Human
acuguuauuuauaaucacuuu

SEQ ID NO: 1707532 - RNA, 14 nt, Human
ucugauccaguuuu

SEQ ID NO: 1707533 - RNA, 21 nt, Human
ucugauccaguuuuguuugga

SEQ ID NO: 1707534 - RNA, 11 nt, Human
ucugauccagu

SEQ ID NO: 1707535 - RNA, 20 nt, Human
ucugugagcaucacaguuuu

SEQ ID NO: 1707536 - RNA, 14 nt, Human
agaauucuguauag

SEQ ID NO: 1707537 - RNA, 12 nt, Human
agaauucuguau

SEQ ID NO: 1707538 - RNA, 14 nt, Human
ucugugaacuugaa

SEQ ID NO: 1707539 - RNA, 17 nt, Human
ucugugaacuugaaauu

SEQ ID NO: 1707540 - RNA, 18 nt, Human
ucugugaacuugaaauuu

SEQ ID NO: 1707541 - RNA, 21 nt, Human
agaaugguccgugcuaaggac

SEQ ID NO: 1707542 - RNA, 23 nt, Human
agaaugguccgugcuaaggacuu

SEQ ID NO: 1707543 - RNA, 14 nt, Human
agaaggcaaaugac

SEQ ID NO: 1707544 - RNA, 15 nt, Human
agaaggcaaaugacu

SEQ ID NO: 1707545 - RNA, 20 nt, Human
agaaggcaaaugacuuugga

SEQ ID NO: 1707546 - RNA, 22 nt, Human
uccugcaaugaagucucugaag

SEQ ID NO: 1707547 - RNA, 12 nt, Human
acucaauuuuaa

SEQ ID NO: 1707548 - RNA, 15 nt, Human
acucaauuuuaacaa

SEQ ID NO: 1707549 - RNA, 19 nt, Human
acggugaauggcuuuguau

SEQ ID NO: 1707550 - RNA, 20 nt, Human
acggugaauggcuuuguaua

SEQ ID NO: 1707551 - RNA, 16 nt, Human
acggugaauggcuuug

SEQ ID NO: 1707552 - RNA, 15 nt, Human
acuaaacuuucacac

SEQ ID NO: 1707553 - RNA, 16 nt, Human
acuaaacuuucacacc

SEQ ID NO: 1707554 - RNA, 13 nt, Human
acggaugauuucu

SEQ ID NO: 1707555 - RNA, 19 nt, Human
accauaaccccggaagcca

SEQ ID NO: 1707556 - RNA, 22 nt, Human
ucagauuuuauuauguaaaucc

SEQ ID NO: 1707557 - RNA, 23 nt, Human
ucagauuuuauuauguaaauccc

SEQ ID NO: 1707558 - RNA, 19 nt, Human
ucagcaaaaauauuuuaug

SEQ ID NO: 1707559 - RNA, 20 nt, Human
ucagcaaaaauauuuuauga

SEQ ID NO: 1707560 - RNA, 18 nt, Human
ucaacugggcugaacacu

SEQ ID NO: 1707561 - RNA, 17 nt, Human
ucaaccaccuuucagau

SEQ ID NO: 1707562 - RNA, 19 nt, Human
acauguauuuguuugcaua

SEQ ID NO: 1707563 - RNA, 17 nt, Human
acauguauuuguuugca

SEQ ID NO: 1707564 - RNA, 18 nt, Human
acauguauuuguuugcau

SEQ ID NO: 1707565 - RNA, 16 nt, Human
acauguauuuguuugc

SEQ ID NO: 1707566 - RNA, 12 nt, Human
ucaacugggcug

SEQ ID NO: 1707567 - RNA, 19 nt, Human
ucaccugucuugccuuuuu

SEQ ID NO: 1707568 - RNA, 20 nt, Human
ucaccugucuugccuuuuuc

SEQ ID NO: 1707569 - RNA, 23 nt, Human
accaguauuguacaaaguauuaa

SEQ ID NO: 1707570 - RNA, 14 nt, Human
accaguauuguaca

SEQ ID NO: 1707571 - RNA, 15 nt, Human
accaguauuguacaa

SEQ ID NO: 1707572 - RNA, 20 nt, Human
accaguauuguacaaaguau

SEQ ID NO: 1707573 - RNA, 22 nt, Human
accaguauuguacaaaguauua

SEQ ID NO: 1707574 - RNA, 20 nt, Human
ucacaguuuugguugcuuua

SEQ ID NO: 1707575 - RNA, 21 nt, Human
ucacaguuuugguugcuuuaa

SEQ ID NO: 1707576 - RNA, 23 nt, Human
ucacaguuuugguugcuuuaaua

SEQ ID NO: 1707577 - RNA, 21 nt, Human
uaacuguuauuuauaaucacu

SEQ ID NO: 1707578 - RNA, 12 nt, Human
uaacauaaaucu

SEQ ID NO: 1707579 - RNA, 16 nt, Human
aauaucaucaguauug

SEQ ID NO: 1707580 - RNA, 20 nt, Human
aaucugugaacuugaaauuu

SEQ ID NO: 1707581 - RNA, 21 nt, Human
aaucugugaacuugaaauuug

SEQ ID NO: 1707582 - RNA, 22 nt, Human
aaucugugaacuugaaauuuga

SEQ ID NO: 1707583 - RNA, 16 nt, Human
uaaggaaaaguuuaau

SEQ ID NO: 1707584 - RNA, 16 nt, Human
uaaucacuuuuuucca

SEQ ID NO: 1707585 - RNA, 17 nt, Human
uaaucacuuuuuuccac

SEQ ID NO: 1707586 - RNA, 19 nt, Human
uaaucacuuuuuuccacau

SEQ ID NO: 1707587 - RNA, 18 nt, Human
uaaucacuuuuuuccaca

SEQ ID NO: 1707588 - RNA, 19 nt, Human
uacuauauaugugaugauc

SEQ ID NO: 1707589 - RNA, 19 nt, Human
aauucccuggccuuucaua

SEQ ID NO: 1707590 - RNA, 20 nt, Human
aauucccuggccuuucauau

SEQ ID NO: 1707591 - RNA, 14 nt, Human
uacuggauuguacu

SEQ ID NO: 1707592 - RNA, 16 nt, Human
aauggacuguggugac

SEQ ID NO: 1707593 - RNA, 16 nt, Human
aaugccaucaauaaaa

SEQ ID NO: 1707594 - RNA, 21 nt, Human
aaugccaucaauaaaaaauua

SEQ ID NO: 1707595 - RNA, 23 nt, Human
aaugccaucaauaaaaaauuaug

SEQ ID NO: 1707596 - RNA, 20 nt, Human
aauuaacauguuaaaccaug

SEQ ID NO: 1707597 - RNA, 19 nt, Human
aauuaacauguuaaaccau

SEQ ID NO: 1707598 - RNA, 13 nt, Human
uacauguauuugu

SEQ ID NO: 1707599 - RNA, 12 nt, Human
uauucaaaguug

SEQ ID NO: 1707600 - RNA, 13 nt, Human
uauucaaaguugc

SEQ ID NO: 1707601 - RNA, 16 nt, Human
uauucaaaguugccua

SEQ ID NO: 1707602 - RNA, 13 nt, Human
acaguauaauuaa

SEQ ID NO: 1707603 - RNA, 15 nt, Human
acaguauaauuaaca

SEQ ID NO: 1707604 - RNA, 20 nt, Human
acaguauaauuaacauguua

SEQ ID NO: 1707605 - RNA, 14 nt, Human
uaugugugaaguga

SEQ ID NO: 1707606 - RNA, 12 nt, Human
uaugugugaagu

SEQ ID NO: 1707607 - RNA, 20 nt, Human
uauauuuacuaaaauggacu

SEQ ID NO: 1707608 - RNA, 21 nt, Human
uauauuuacuaaaauggacug

SEQ ID NO: 1707609 - RNA, 19 nt, Human
uauauuuacuaaaauggac

SEQ ID NO: 1707610 - RNA, 23 nt, Human
acacacuuuugguuaagucuguu

SEQ ID NO: 1707611 - RNA, 17 nt, Human
acaccauuaugugcgcu

SEQ ID NO: 1707612 - RNA, 21 nt, Human
acaccauuaugugcgcugaua

SEQ ID NO: 1707613 - RNA, 21 nt, Human
uagcuagacuggugacugauu

SEQ ID NO: 1707614 - RNA, 22 nt, Human
uagcuagacuggugacugauuc

SEQ ID NO: 1707615 - RNA, 23 nt, Human
uagagauuuuuuuguuguuuguu

SEQ ID NO: 1707616 - RNA, 14 nt, Human
gugaucucauuuaa

SEQ ID NO: 1707617 - RNA, 13 nt, Human
aacuugaaauuug

SEQ ID NO: 1707618 - RNA, 18 nt, Human
aacuugaaauuugaauuu

SEQ ID NO: 1707619 - RNA, 19 nt, Human
aacuugaaauuugaauuuu

SEQ ID NO: 1707620 - RNA, 12 nt, Human
aacuugaaauuu

SEQ ID NO: 1707621 - RNA, 12 nt, Human
gugacuuuggau

SEQ ID NO: 1707622 - RNA, 15 nt, Human
gugacuuuggauaau

SEQ ID NO: 1707623 - RNA, 23 nt, Human
gucuugucucagauuuuauuaug

SEQ ID NO: 1707624 - RNA, 16 nt, Human
aacauguuaaaccaug

SEQ ID NO: 1707625 - RNA, 14 nt, Human
aacauguuaaacca

SEQ ID NO: 1707626 - RNA, 15 nt, Human
aacauguuaaaccau

SEQ ID NO: 1707627 - RNA, 16 nt, Human
aacauugguucuugua

SEQ ID NO: 1707628 - RNA, 18 nt, Human
aacauugguucuuguauu

SEQ ID NO: 1707629 - RNA, 19 nt, Human
aacauugguucuuguauua

SEQ ID NO: 1707630 - RNA, 22 nt, Human
aacauugguucuuguauuaaga

SEQ ID NO: 1707631 - RNA, 23 nt, Human
aacauugguucuuguauuaagaa

SEQ ID NO: 1707632 - RNA, 16 nt, Human
guccgugcuaaggacu

SEQ ID NO: 1707633 - RNA, 17 nt, Human
guccgugcuaaggacuu

SEQ ID NO: 1707634 - RNA, 15 nt, Human
guccgugcuaaggac

SEQ ID NO: 1707635 - RNA, 15 nt, Human
aaauuugaauuuugu

SEQ ID NO: 1707636 - RNA, 22 nt, Human
aaauuugaauuuuguguuagag

SEQ ID NO: 1707637 - RNA, 12 nt, Human
aaauuugaauuu

SEQ ID NO: 1707638 - RNA, 19 nt, Human
guauuguacaaaguauuaa

SEQ ID NO: 1707639 - RNA, 10 nt, Human
guauugaagc

SEQ ID NO: 1707640 - RNA, 13 nt, Human
guauugaagcauu

SEQ ID NO: 1707641 - RNA, 17 nt, Human
guauugaagcauuuuau

SEQ ID NO: 1707642 - RNA, 18 nt, Human
guauugaagcauuuuaua

SEQ ID NO: 1707643 - RNA, 22 nt, Human
guauugaagcauuuuauaaauc

SEQ ID NO: 1707644 - RNA, 21 nt, Human
guauuguacaaaguauuaagc

SEQ ID NO: 1707645 - RNA, 22 nt, Human
guauuguacaaaguauuaagca

SEQ ID NO: 1707646 - RNA, 23 nt, Human
guauuguacaaaguauuaagcau

SEQ ID NO: 1707647 - RNA, 23 nt, Human
aagucagaucugccuaaggacuu

SEQ ID NO: 1707648 - RNA, 14 nt, Human
uaaaaaaaaaauug

SEQ ID NO: 1707649 - RNA, 18 nt, Human
uaaaaaaaaaauugggga

SEQ ID NO: 1707650 - RNA, 12 nt, Human
guuguuuguuua

SEQ ID NO: 1707651 - RNA, 12 nt, Human
aaggaaaaguuu

SEQ ID NO: 1707652 - RNA, 20 nt, Human
aaggaaacuggguuccugca

SEQ ID NO: 1707653 - RNA, 13 nt, Human
guuuauuacagua

SEQ ID NO: 1707654 - RNA, 17 nt, Human
guuuauuacaguauaau

SEQ ID NO: 1707655 - RNA, 13 nt, Human
guuuaauauuaaa

SEQ ID NO: 1707656 - RNA, 14 nt, Human
guuuaauauuaaag

SEQ ID NO: 1707657 - RNA, 15 nt, Human
guuuaauauuaaagc

SEQ ID NO: 1707658 - RNA, 18 nt, Human
guuuaauauuaaagccau

SEQ ID NO: 1707659 - RNA, 18 nt, Human
guuuggaccaaaaaccag

SEQ ID NO: 1707660 - RNA, 13 nt, Human
guuuuaugacuuc

SEQ ID NO: 1707661 - RNA, 18 nt, Human
guuuuaugacuucauuaa

SEQ ID NO: 1707662 - RNA, 18 nt, Human
aagucagaucugccuaag

SEQ ID NO: 1707663 - RNA, 21 nt, Human
aagucagaucugccuaaggac

SEQ ID NO: 1707664 - RNA, 22 nt, Human
aagucagaucugccuaaggacu

SEQ ID NO: 1707665 - RNA, 20 nt, Human
aagccauguuuauuacagua

SEQ ID NO: 1707666 - RNA, 21 nt, Human
aagccauguuuauuacaguau

SEQ ID NO: 1707667 - RNA, 22 nt, Human
aagccauguuuauuacaguaua

SEQ ID NO: 1707668 - RNA, 23 nt, Human
aagccauguuuauuacaguauaa

SEQ ID NO: 1707669 - RNA, 18 nt, Human
guuagagauuuuuuuguu

SEQ ID NO: 1707670 - RNA, 23 nt, Human
aagcauauauuuuuauauuuacu

SEQ ID NO: 1707671 - RNA, 15 nt, Human
aagccauguuuauua

SEQ ID NO: 1707672 - RNA, 16 nt, Human
aagccauguuuauuac

SEQ ID NO: 1707673 - RNA, 17 nt, Human
aagccauguuuauuaca

SEQ ID NO: 1707674 - RNA, 21 nt, Human
aagcauuuuauaaaucgcuuu

SEQ ID NO: 1707675 - RNA, 17 nt, Human
aagcauuuuauaaaucg

SEQ ID NO: 1707676 - RNA, 19 nt, Human
aagcauuuuauaaaucgcu

SEQ ID NO: 1707677 - RNA, 12 nt, Human
aagcauuuuaua

SEQ ID NO: 1707678 - RNA, 14 nt, Human
aagcauuuuauaaa

SEQ ID NO: 1707679 - RNA, 15 nt, Human
aagcauuuuauaaau

SEQ ID NO: 1707680 - RNA, 18 nt, Human
guguaaauacaauuuugu

SEQ ID NO: 1707681 - RNA, 21 nt, Human
guguaaauacaauuuuguuuc

SEQ ID NO: 1707682 - RNA, 22 nt, Human
guguaaauacaauuuuguuucu

SEQ ID NO: 1707683 - RNA, 21 nt, Human
cuauuuuuuuucuguuauaua

SEQ ID NO: 1707684 - RNA, 20 nt, Human
cuauuuuuuuucuguuauau

SEQ ID NO: 1707685 - RNA, 16 nt, Human
ccuuuuuuaaauaaau

SEQ ID NO: 1707686 - RNA, 12 nt, Human
ccuuucauauuu

SEQ ID NO: 1707687 - RNA, 19 nt, Human
ccugucuugccuuuuucau

SEQ ID NO: 1707688 - RNA, 20 nt, Human
ccugucuugccuuuuucauu

SEQ ID NO: 1707689 - RNA, 17 nt, Human
ccugucuugccuuuuuc

SEQ ID NO: 1707690 - RNA, 20 nt, Human
ccuauuuuuuuucuguuaua

SEQ ID NO: 1707691 - RNA, 18 nt, Human
cccaggaauggagccugc

SEQ ID NO: 1707692 - RNA, 19 nt, Human
cccaggaauggagccugca

SEQ ID NO: 1707693 - RNA, 20 nt, Human
cccaggaauggagccugcac

SEQ ID NO: 1707694 - RNA, 22 nt, Human
cccaggaauggagccugcacgg

SEQ ID NO: 1707695 - RNA, 15 nt, Human
ccagcagauuauuca

SEQ ID NO: 1707696 - RNA, 20 nt, Human
ccaguauuguacaaaguauu

SEQ ID NO: 1707697 - RNA, 22 nt, Human
ccaguauuguacaaaguauuaa

SEQ ID NO: 1707698 - RNA, 16 nt, Human
ccaguuuuguuuggac

SEQ ID NO: 1707699 - RNA, 19 nt, Human
ccaguuuuguuuggaccaa

SEQ ID NO: 1707700 - RNA, 23 nt, Human
ccaccuuucagauaacuguuauu

SEQ ID NO: 1707701 - RNA, 18 nt, Human
cauguauuuguuugcaua

SEQ ID NO: 1707702 - RNA, 13 nt, Human
caauaaaaaauua

SEQ ID NO: 1707703 - RNA, 16 nt, Human
caauaaaaaauuauga

SEQ ID NO: 1707704 - RNA, 17 nt, Human
caauaaaaaauuaugac

SEQ ID NO: 1707705 - RNA, 16 nt, Human
caaaguauuaagcaua

SEQ ID NO: 1707706 - RNA, 17 nt, Human
caaaguauuaagcauau

SEQ ID NO: 1707707 - RNA, 19 nt, Human
caaaguauuaagcauauau

SEQ ID NO: 1707708 - RNA, 21 nt, Human
caaaguauuaagcauauauuu

SEQ ID NO: 1707709 - RNA, 14 nt, Human
caaaguauuaagca

SEQ ID NO: 1707710 - RNA, 15 nt, Human
caaaguauuaagcau

SEQ ID NO: 1707711 - RNA, 16 nt, Human
caaccaccuuucagau

SEQ ID NO: 1707712 - RNA, 15 nt, Human
auuuuauaaaucgcu

SEQ ID NO: 1707713 - RNA, 16 nt, Human
auuuuauaaaucgcuu

SEQ ID NO: 1707714 - RNA, 17 nt, Human
auuuuauaaaucgcuuu

SEQ ID NO: 1707715 - RNA, 20 nt, Human
auuuuauaaaucgcuuuuga

SEQ ID NO: 1707716 - RNA, 21 nt, Human
auuuuauaaaucgcuuuugau

SEQ ID NO: 1707717 - RNA, 23 nt, Human
auuuuauaaaucgcuuuugauaa

SEQ ID NO: 1707718 - RNA, 23 nt, Human
auuguacaaaguauuaagcauau

SEQ ID NO: 1707719 - RNA, 22 nt, Human
auuguacaaaguauuaagcaua

SEQ ID NO: 1707720 - RNA, 20 nt, Human
auuguacaaaguauuaagca

SEQ ID NO: 1707721 - RNA, 23 nt, Human
auuuauaaucacuuuuuuccaca

SEQ ID NO: 1707722 - RNA, 19 nt, Human
gguguuguacucaauuuua

SEQ ID NO: 1707723 - RNA, 20 nt, Human
gguguuguacucaauuuuaa

SEQ ID NO: 1707724 - RNA, 20 nt, Human
guacaaaguauuaagcauau

SEQ ID NO: 1707725 - RNA, 21 nt, Human
guacaaaguauuaagcauaua

SEQ ID NO: 1707726 - RNA, 15 nt, Human
aaaauauuuuaugau

SEQ ID NO: 1707727 - RNA, 18 nt, Human
aaaauauuuuaugaucca

SEQ ID NO: 1707728 - RNA, 15 nt, Human
ggaagccugauuaaa

SEQ ID NO: 1707729 - RNA, 18 nt, Human
ggaaacuggguuccugca

SEQ ID NO: 1707730 - RNA, 13 nt, Human
gccauguuuauua

SEQ ID NO: 1707731 - RNA, 11 nt, Human
gccauguuuau

SEQ ID NO: 1707732 - RNA, 14 nt, Human
gccauguuuauuac

SEQ ID NO: 1707733 - RNA, 18 nt, Human
gccauguuuauuacagua

SEQ ID NO: 1707734 - RNA, 22 nt, Human
gccauguuuauuacaguauaau

SEQ ID NO: 1707735 - RNA, 11 nt, Human
gcuaaggacuu

SEQ ID NO: 1707736 - RNA, 12 nt, Human
gcuaaggacuug

SEQ ID NO: 1707737 - RNA, 12 nt, Human
gcguugaaauug

SEQ ID NO: 1707738 - RNA, 23 nt, Human
gcuaaggacuuguuagaucuagu

SEQ ID NO: 1707739 - RNA, 22 nt, Human
gcguucauggaacgcguugaaa

SEQ ID NO: 1707740 - RNA, 18 nt, Human
gcuauuucuauauuuuca

SEQ ID NO: 1707741 - RNA, 19 nt, Human
gcuauuucuauauuuucau

SEQ ID NO: 1707742 - RNA, 20 nt, Human
gcuauuucuauauuuucauu

SEQ ID NO: 1707743 - RNA, 11 nt, Human
gcuauuucuau

SEQ ID NO: 1707744 - RNA, 13 nt, Human
gcuauuucuauau

SEQ ID NO: 1707745 - RNA, 15 nt, Human
gcuauuucuauauuu

SEQ ID NO: 1707746 - RNA, 16 nt, Human
gcuauuucuauauuuu

SEQ ID NO: 1707747 - RNA, 19 nt, Human
gauccagcagauuauucac

SEQ ID NO: 1707748 - RNA, 18 nt, Human
gauccagcagauuauuca

SEQ ID NO: 1707749 - RNA, 16 nt, Human
gaucugccuaaggacu

SEQ ID NO: 1707750 - RNA, 12 nt, Human
gaucugccuaag

SEQ ID NO: 1707751 - RNA, 15 nt, Human
gaucugccuaaggac

SEQ ID NO: 1707752 - RNA, 13 nt, Human
gaugauuucuaug

SEQ ID NO: 1707753 - RNA, 23 nt, Human
gaugauuucuaugcugaguuugu

SEQ ID NO: 1707754 - RNA, 12 nt, Human
gaugauuucuau

SEQ ID NO: 1707755 - RNA, 16 nt, Human
gauacuggauuguacu

SEQ ID NO: 1707756 - RNA, 20 nt, Human
gauacuggauuguacuuugu

SEQ ID NO: 1707757 - RNA, 19 nt, Human
cugugagcaucacaguuuu

SEQ ID NO: 1707758 - RNA, 13 nt, Human
cuguuauauaaau

SEQ ID NO: 1707759 - RNA, 14 nt, Human
cuguuauauaaaug

SEQ ID NO: 1707760 - RNA, 15 nt, Human
cuguuauauaaaugg

SEQ ID NO: 1707761 - RNA, 22 nt, Human
cuguuauauaaaugguuaaaag

SEQ ID NO: 1707762 - RNA, 15 nt, Human
cugugaacuugaaau

SEQ ID NO: 1707763 - RNA, 16 nt, Human
cugugaacuugaaauu

SEQ ID NO: 1707764 - RNA, 17 nt, Human
cugugaacuugaaauuu

SEQ ID NO: 1707765 - RNA, 16 nt, Human
cugugagcaucacagu

SEQ ID NO: 1707766 - RNA, 13 nt, Human
cuggugacugauu

SEQ ID NO: 1707767 - RNA, 14 nt, Human
cuggugacugauuc

SEQ ID NO: 1707768 - RNA, 15 nt, Human
cuggugacugauucu

SEQ ID NO: 1707769 - RNA, 17 nt, Human
cuggugacugauucuuc

SEQ ID NO: 1707770 - RNA, 18 nt, Human
cuggugacugauucuuca

SEQ ID NO: 1707771 - RNA, 15 nt, Human
cuggugcccugcuuu

SEQ ID NO: 1707772 - RNA, 16 nt, Human
cuggugcccugcuuuc

SEQ ID NO: 1707773 - RNA, 19 nt, Human
cuggugcccugcuuucaga

SEQ ID NO: 1707774 - RNA, 21 nt, Human
cuggugcccugcuuucagaua

SEQ ID NO: 1707775 - RNA, 23 nt, Human
cuggugcccugcuuucagauacu

SEQ ID NO: 1707776 - RNA, 14 nt, Human
gaaacuuguguaaa

SEQ ID NO: 1707777 - RNA, 16 nt, Human
gaaacuuguguaaaua

SEQ ID NO: 1707778 - RNA, 20 nt, Human
gaaacuuguguaaauacaau

SEQ ID NO: 1707779 - RNA, 21 nt, Human
cuugucucagauuuuauuaug

SEQ ID NO: 1707780 - RNA, 14 nt, Human
agcuggugcccugc

SEQ ID NO: 1707781 - RNA, 23 nt, Human
aggcugaugccaaguuguuugag

SEQ ID NO: 1707782 - RNA, 23 nt, Human
agccucccuauuuuuuuucuguu

SEQ ID NO: 1707783 - RNA, 22 nt, Human
agccauguuuauuacaguauaa

SEQ ID NO: 1707784 - RNA, 17 nt, Human
agccauguuuauuacag

SEQ ID NO: 1707785 - RNA, 14 nt, Human
agaguguugaaacg

SEQ ID NO: 1707786 - RNA, 12 nt, Human
aucaccugucuu

SEQ ID NO: 1707787 - RNA, 21 nt, Human
aucaccugucuugccuuuuuc

SEQ ID NO: 1707788 - RNA, 24 nt, Human
aucuucucagaaggcaaaugacuu

SEQ ID NO: 1707789 - RNA, 18 nt, Human
auggagccugcacgguga

SEQ ID NO: 1707790 - RNA, 22 nt, Human
auggagccugcacggugaaugg

SEQ ID NO: 1707791 - RNA, 11 nt, Human
aguugaauuua

SEQ ID NO: 1707792 - RNA, 13 nt, Human
aguugaauuuauu

SEQ ID NO: 1707793 - RNA, 17 nt, Human
aguugaauuuauuggcu

SEQ ID NO: 1707794 - RNA, 19 nt, Human
aguugaauuuauuggcuuu

SEQ ID NO: 1707795 - RNA, 20 nt, Human
aguugaauuuauuggcuuuu

SEQ ID NO: 1707796 - RNA, 20 nt, Human
auaauuaacauguuaaacca

SEQ ID NO: 1707797 - RNA, 21 nt, Human
auaauuaacauguuaaaccau

SEQ ID NO: 1707798 - RNA, 22 nt, Human
auaauuaacauguuaaaccaug

SEQ ID NO: 1707799 - RNA, 15 nt, Human
auaccuacauguauu

SEQ ID NO: 1707800 - RNA, 19 nt, Human
auacaauuuuguuucugua

SEQ ID NO: 1707801 - RNA, 20 nt, Human
auacaauuuuguuucuguac

SEQ ID NO: 1707802 - RNA, 14 nt, Human
auaugcuauuucua

SEQ ID NO: 1707803 - RNA, 14 nt, Human
acauaaaucuguga

SEQ ID NO: 1707804 - RNA, 15 nt, Human
acauaaaucugugaa

SEQ ID NO: 1707805 - RNA, 18 nt, Human
acauaaaucugugaacuu

SEQ ID NO: 1707806 - RNA, 14 nt, Human
acaauuuuguuucu

SEQ ID NO: 1707807 - RNA, 15 nt, Human
acaauuuuguuucug

SEQ ID NO: 1707808 - RNA, 17 nt, Human
acaauuuuguuucugua

SEQ ID NO: 1707809 - RNA, 12 nt, Human
acuuuucugaua

SEQ ID NO: 1707810 - RNA, 14 nt, Human
acuggguuccugca

SEQ ID NO: 1707811 - RNA, 21 nt, Human
acuucuuuaauuuuggaauuu

SEQ ID NO: 1707812 - RNA, 23 nt, Human
accuuucagauaacuguuauuua

SEQ ID NO: 1707813 - RNA, 13 nt, Human
acgaugucuucau

SEQ ID NO: 1707814 - RNA, 17 nt, Human
aacagcuggugcccugc

SEQ ID NO: 1707815 - RNA, 20 nt, Human
aaccaguauuguacaaagua

SEQ ID NO: 1707816 - RNA, 15 nt, Human
aaccaguauuguaca

SEQ ID NO: 1707817 - RNA, 21 nt, Human
aaccaguauuguacaaaguau

SEQ ID NO: 1707818 - RNA, 22 nt, Human
aaccaguauuguacaaaguauu

SEQ ID NO: 1707819 - RNA, 16 nt, Human
aaauuggggauucuua

SEQ ID NO: 1707820 - RNA, 17 nt, Human
aaauuggggauucuuaa

SEQ ID NO: 1707821 - RNA, 13 nt, Human
aacuuuucugaua

SEQ ID NO: 1707822 - RNA, 14 nt, Human
aacuuuucugauag

SEQ ID NO: 1707823 - RNA, 12 nt, Human
aacuuuucugau

SEQ ID NO: 1707824 - RNA, 16 nt, Human
aaagagguuuuucuua

SEQ ID NO: 1707825 - RNA, 19 nt, Human
aaagagguuuuucuuaaau

SEQ ID NO: 1707826 - RNA, 17 nt, Human
aaaauuggggauucuua

SEQ ID NO: 1707827 - RNA, 18 nt, Human
aaaauuggggauucuuaa

SEQ ID NO: 1707828 - RNA, 19 nt, Human
aaaauuggggauucuuaaa

SEQ ID NO: 1707829 - RNA, 19 nt, Human
aaauggacuguggugacuu

SEQ ID NO: 1707830 - RNA, 14 nt, Human
aaauacuguuugag

SEQ ID NO: 1707831 - RNA, 18 nt, Human
aaauauuuuaugauccag

SEQ ID NO: 1707832 - RNA, 19 nt, Human
aaauauuuuaugauccagc

SEQ ID NO: 1707833 - RNA, 14 nt, Human
aaauauuuuaugau

SEQ ID NO: 1707834 - RNA, 12 nt, Human
aaggauuuuaug

SEQ ID NO: 1707835 - RNA, 13 nt, Human
aaggauuuuaugc

SEQ ID NO: 1707836 - RNA, 23 nt, Human
aaggauuuuaugcuuuaaacauu

SEQ ID NO: 1707837 - RNA, 16 nt, Human
aaggauuuuaugcuuu

SEQ ID NO: 1707838 - RNA, 20 nt, Human
aaggauuuuaugcuuuaaac

SEQ ID NO: 1707839 - RNA, 21 nt, Human
aaggauuuuaugcuuuaaaca

SEQ ID NO: 1707840 - RNA, 22 nt, Human
aaggauuuuaugcuuuaaacau

SEQ ID NO: 1707841 - RNA, 13 nt, Human
aagccauguuuau

SEQ ID NO: 1707842 - RNA, 12 nt, Human
aaguuguuugag

SEQ ID NO: 1707843 - RNA, 15 nt, Human
aagucuguuuuauga

SEQ ID NO: 1707844 - RNA, 16 nt, Human
aagucuguuuuaugac

SEQ ID NO: 1707845 - RNA, 18 nt, Human
aagucuguuuuaugacuu

SEQ ID NO: 1707846 - RNA, 19 nt, Human
aagucuguuuuaugacuuc

SEQ ID NO: 1707847 - RNA, 20 nt, Human
aagucuguuuuaugacuuca

SEQ ID NO: 1707848 - RNA, 23 nt, Human
aagucuguuuuaugacuucauua

SEQ ID NO: 1707849 - RNA, 19 nt, Human
aagucucugaagugaaacu

SEQ ID NO: 1707850 - RNA, 22 nt, Human
aagucucugaagugaaacugcu

SEQ ID NO: 1707851 - RNA, 18 nt, Human
aagguucuggugugaacu

SEQ ID NO: 1707852 - RNA, 15 nt, Human
aaguaucugacaucu

SEQ ID NO: 1707853 - RNA, 22 nt, Human
aaguaucugacaucucugcaau

SEQ ID NO: 1707854 - RNA, 19 nt, Human
aaucaacugggcugaacac

SEQ ID NO: 1707855 - RNA, 14 nt, Human
aaucaacugggcug

SEQ ID NO: 1707856 - RNA, 14 nt, Human
aauccauuuggaaa

SEQ ID NO: 1707857 - RNA, 15 nt, Human
aauccauuuggaaau

SEQ ID NO: 1707858 - RNA, 17 nt, Human
aauccauuuggaaaucu

SEQ ID NO: 1707859 - RNA, 18 nt, Human
aauccauuuggaaaucuu

SEQ ID NO: 1707860 - RNA, 22 nt, Human
aauccauuuggaaaucuuuaaa

SEQ ID NO: 1707861 - RNA, 22 nt, Human
aaugguccgugcuaaggacuug

SEQ ID NO: 1707862 - RNA, 15 nt, Human
aauggcuuuguauag

SEQ ID NO: 1707863 - RNA, 16 nt, Human
aauggcuuuguauaga

SEQ ID NO: 1707864 - RNA, 18 nt, Human
aauggcuuuguauagaac

SEQ ID NO: 1707865 - RNA, 13 nt, Human
aauggcuuuguau

SEQ ID NO: 1707866 - RNA, 16 nt, Human
aaaaaccaguauugua

SEQ ID NO: 1707867 - RNA, 18 nt, Human
aaaaaccaguauuguaca

SEQ ID NO: 1707868 - RNA, 17 nt, Human
aaaaauuggggauucuu

SEQ ID NO: 1707869 - RNA, 18 nt, Human
aaaaauuggggauucuua

SEQ ID NO: 1707870 - RNA, 19 nt, Human
aaaaauuggggauucuuaa

SEQ ID NO: 1707871 - RNA, 20 nt, Human
aaaaauuggggauucuuaaa

SEQ ID NO: 1707872 - RNA, 23 nt, Human
aaaaaauuggggauucuuaaagu

SEQ ID NO: 1707873 - RNA, 16 nt, Human
uuauuacaguauaauu

SEQ ID NO: 1707874 - RNA, 13 nt, Human
uuauaaucacuuu

SEQ ID NO: 1707875 - RNA, 20 nt, Human
uuauaucugaggaauucugu

SEQ ID NO: 1707876 - RNA, 21 nt, Human
uuauaucugaggaauucugua

SEQ ID NO: 1707877 - RNA, 14 nt, Human
uuauaucugaggaa

SEQ ID NO: 1707878 - RNA, 22 nt, Human
uuauaucugaggaauucuguau

SEQ ID NO: 1707879 - RNA, 23 nt, Human
uuauaucugaggaauucuguaua

SEQ ID NO: 1707880 - RNA, 18 nt, Human
uuauaugcuauuucuaua

SEQ ID NO: 1707881 - RNA, 16 nt, Human
uuauaugcuauuucua

SEQ ID NO: 1707882 - RNA, 16 nt, Human
uucagauacuggauug

SEQ ID NO: 1707883 - RNA, 20 nt, Human
uucagauacuggauuguacu

SEQ ID NO: 1707884 - RNA, 15 nt, Human
uuauuuuauuaugaa

SEQ ID NO: 1707885 - RNA, 16 nt, Human
uuauuuuauuaugaaa

SEQ ID NO: 1707886 - RNA, 14 nt, Human
uuauuuuauuauga

SEQ ID NO: 1707887 - RNA, 20 nt, Human
uuauuuuauuaugaaacuug

SEQ ID NO: 1707888 - RNA, 17 nt, Human
uugaauuuuguguuaga

SEQ ID NO: 1707889 - RNA, 21 nt, Human
uugaauuuuguguuagagauu

SEQ ID NO: 1707890 - RNA, 15 nt, Human
uugaauuuauuggcu

SEQ ID NO: 1707891 - RNA, 18 nt, Human
uugaauuuauuggcuuuu

SEQ ID NO: 1707892 - RNA, 22 nt, Human
uugaauuuauuggcuuuucuga

SEQ ID NO: 1707893 - RNA, 13 nt, Human
uucugauagagga

SEQ ID NO: 1707894 - RNA, 21 nt, Human
uucugauagaggaagccugau

SEQ ID NO: 1707895 - RNA, 13 nt, Human
uuccugcaaugaa

SEQ ID NO: 1707896 - RNA, 21 nt, Human
uuccugcaaugaagucucuga

SEQ ID NO: 1707897 - RNA, 13 nt, Human
uuucagauacugg

SEQ ID NO: 1707898 - RNA, 21 nt, Human
uuucagauacuggauuguacu

SEQ ID NO: 1707899 - RNA, 16 nt, Human
uuuauuauguaaaucc

SEQ ID NO: 1707900 - RNA, 17 nt, Human
uuuauuauguaaauccc

SEQ ID NO: 1707901 - RNA, 14 nt, Human
uuuauuauguaaau

SEQ ID NO: 1707902 - RNA, 21 nt, Human
uuuaauaauuauaugcuauuu

SEQ ID NO: 1707903 - RNA, 18 nt, Human
uuuaauaauuauaugcua

SEQ ID NO: 1707904 - RNA, 16 nt, Human
uuuaacaacagcuggu

SEQ ID NO: 1707905 - RNA, 21 nt, Human
uuguuuggaccaaaaaccagu

SEQ ID NO: 1707906 - RNA, 13 nt, Human
uuggguguauugu

SEQ ID NO: 1707907 - RNA, 15 nt, Human
uuggguguauugugc

SEQ ID NO: 1707908 - RNA, 16 nt, Human
uuggguguauugugcg

SEQ ID NO: 1707909 - RNA, 22 nt, Human
uugucucagauuuuauuaugua

SEQ ID NO: 1707910 - RNA, 16 nt, Human
uugucucagauuuuau

SEQ ID NO: 1707911 - RNA, 20 nt, Human
uugucucagauuuuauuaug

SEQ ID NO: 1707912 - RNA, 13 nt, Human
uugucucagauuu

SEQ ID NO: 1707913 - RNA, 20 nt, Human
uugucuacaccauuaugugc

SEQ ID NO: 1707914 - RNA, 19 nt, Human
uugucuacaccauuaugug

SEQ ID NO: 1707915 - RNA, 12 nt, Human
uuguauuaagaa

SEQ ID NO: 1707916 - RNA, 13 nt, Human
uuguauuaagaau

SEQ ID NO: 1707917 - RNA, 18 nt, Human
uuguauuaagaaugaaau

SEQ ID NO: 1707918 - RNA, 15 nt, Human
uuguacucaauuuua

SEQ ID NO: 1707919 - RNA, 14 nt, Human
uuguacucaauuuu

SEQ ID NO: 1707920 - RNA, 17 nt, Human
uuguuagaucuaguuca

SEQ ID NO: 1707921 - RNA, 17 nt, Human
uuguuguuuguuuaguc

SEQ ID NO: 1707922 - RNA, 15 nt, Human
uuguuugagaaauua

SEQ ID NO: 1707923 - RNA, 21 nt, Human
uuguuugagaaauuaaguauc

SEQ ID NO: 1707924 - RNA, 19 nt, Human
uugugcugggguuaucuga

SEQ ID NO: 1707925 - RNA, 22 nt, Human
uugugcgcuaaacuuuucugau

SEQ ID NO: 1707926 - RNA, 23 nt, Human
uugugcgcuaaacuuuucugaua

SEQ ID NO: 1707927 - RNA, 13 nt, Human
uuuuucauuauuu

SEQ ID NO: 1707928 - RNA, 22 nt, Human
uuuuucauuauuuuauuaugaa

SEQ ID NO: 1707929 - RNA, 21 nt, Human
uuuuuccacauaaggaaacug

SEQ ID NO: 1707930 - RNA, 24 nt, Human
uuuggaccaaaaaccaguauugua

SEQ ID NO: 1707931 - RNA, 15 nt, Human
uuuggaaaucuuuaa

SEQ ID NO: 1707932 - RNA, 18 nt, Human
uuuggaccaaaaaccagu

SEQ ID NO: 1707933 - RNA, 21 nt, Human
uuuggaccaaaaaccaguauu

SEQ ID NO: 1707934 - RNA, 22 nt, Human
uuuggaccaaaaaccaguauug

SEQ ID NO: 1707935 - RNA, 23 nt, Human
uuuccacauaaggaaacuggguu

SEQ ID NO: 1707936 - RNA, 20 nt, Human
uuuccacauaaggaaacugg

SEQ ID NO: 1707937 - RNA, 20 nt, Human
uuuuaugacuucauuaauaa

SEQ ID NO: 1707938 - RNA, 21 nt, Human
uuuuaugacuucauuaauaau

SEQ ID NO: 1707939 - RNA, 13 nt, Human
uuuuauauuuacu

SEQ ID NO: 1707940 - RNA, 14 nt, Human
ugccuaaggacuuc

SEQ ID NO: 1707941 - RNA, 15 nt, Human
ugccuaaggacuucu

SEQ ID NO: 1707942 - RNA, 16 nt, Human
ugccuaaggacuucuu

SEQ ID NO: 1707943 - RNA, 20 nt, Human
ugccuaaggacuucuuuaau

SEQ ID NO: 1707944 - RNA, 12 nt, Human
ugccuaaggacu

SEQ ID NO: 1707945 - RNA, 13 nt, Human
ugccuaaggacuu

SEQ ID NO: 1707946 - RNA, 21 nt, Human
ugccuaaggacuucuuuaauu

SEQ ID NO: 1707947 - RNA, 12 nt, Human
ugcccugcuuuc

SEQ ID NO: 1707948 - RNA, 16 nt, Human
ugcccugcuuucagau

SEQ ID NO: 1707949 - RNA, 17 nt, Human
ugcccugcuuucagaua

SEQ ID NO: 1707950 - RNA, 15 nt, Human
ugcaaugaagucucu

SEQ ID NO: 1707951 - RNA, 18 nt, Human
ugcaaugaagucucugaa

SEQ ID NO: 1707952 - RNA, 22 nt, Human
ugcaaugaagucucugaaguga

SEQ ID NO: 1707953 - RNA, 17 nt, Human
ugagcaucacaguuuug

SEQ ID NO: 1707954 - RNA, 16 nt, Human
ugagcaucacaguuuu

SEQ ID NO: 1707955 - RNA, 14 nt, Human
ugagaaauuaagua

SEQ ID NO: 1707956 - RNA, 13 nt, Human
ugagaaauuaagu

SEQ ID NO: 1707957 - RNA, 13 nt, Human
ugacugauucuuc

SEQ ID NO: 1707958 - RNA, 14 nt, Human
ugacugauucuuca

SEQ ID NO: 1707959 - RNA, 15 nt, Human
ugacugauucuucag

SEQ ID NO: 1707960 - RNA, 16 nt, Human
ugacugauucuucagc

SEQ ID NO: 1707961 - RNA, 17 nt, Human
ugacugauucuucagca

SEQ ID NO: 1707962 - RNA, 19 nt, Human
ugaugccaaguuguuugag

SEQ ID NO: 1707963 - RNA, 15 nt, Human
ugaugccaaguuguu

SEQ ID NO: 1707964 - RNA, 21 nt, Human
ugaugccaaguuguuugagaa

SEQ ID NO: 1707965 - RNA, 23 nt, Human
ugggguuaucugaagucagaucu

SEQ ID NO: 1707966 - RNA, 13 nt, Human
ugggauaaaugcc

SEQ ID NO: 1707967 - RNA, 14 nt, Human
ugggauaaaugcca

SEQ ID NO: 1707968 - RNA, 12 nt, Human
ugggauaaaugc

SEQ ID NO: 1707969 - RNA, 15 nt, Human
uggaccaaaaaccag

SEQ ID NO: 1707970 - RNA, 14 nt, Human
uggaacgcguugaa

SEQ ID NO: 1707971 - RNA, 15 nt, Human
uggaacgcguugaaa

SEQ ID NO: 1707972 - RNA, 16 nt, Human
uggaacgcguugaaau

SEQ ID NO: 1707973 - RNA, 17 nt, Human
uggaacgcguugaaauu

SEQ ID NO: 1707974 - RNA, 17 nt, Human
ugucuacaccauuaugu

SEQ ID NO: 1707975 - RNA, 18 nt, Human
ugucuacaccauuaugug

SEQ ID NO: 1707976 - RNA, 16 nt, Human
ugucucagauuuuauu

SEQ ID NO: 1707977 - RNA, 20 nt, Human
ugucucagauuuuauuaugu

SEQ ID NO: 1707978 - RNA, 22 nt, Human
ugucucagauuuuauuauguaa

SEQ ID NO: 1707979 - RNA, 15 nt, Human
uguauuuguuugcau

SEQ ID NO: 1707980 - RNA, 14 nt, Human
uguauuuguuugca

SEQ ID NO: 1707981 - RNA, 23 nt, Human
uguauagaaccucuuugucuaca

SEQ ID NO: 1707982 - RNA, 15 nt, Human
uguauagauuagaau

SEQ ID NO: 1707983 - RNA, 21 nt, Human
uguauagauuagaauucugua

SEQ ID NO: 1707984 - RNA, 23 nt, Human
uguauagauuagagaguguugaa

SEQ ID NO: 1707985 - RNA, 19 nt, Human
ugguucuuguauuaagaau

SEQ ID NO: 1707986 - RNA, 14 nt, Human
ugguucuuguauua

SEQ ID NO: 1707987 - RNA, 18 nt, Human
ugguucuuguauuaagaa

SEQ ID NO: 1707988 - RNA, 16 nt, Human
uggugacuuuggauaa

SEQ ID NO: 1707989 - RNA, 18 nt, Human
uggugacuuuggauaaua

SEQ ID NO: 1707990 - RNA, 19 nt, Human
uggugacuuuggauaauaa

SEQ ID NO: 1707991 - RNA, 23 nt, Human
uggugacuuuggauaauaaggaa

SEQ ID NO: 1707992 - RNA, 15 nt, Human
uggugacuuuggaua

SEQ ID NO: 1707993 - RNA, 14 nt, Human
ugguugcuuuaaua

SEQ ID NO: 1707994 - RNA, 18 nt, Human
ugguugcuuuaauaucau

SEQ ID NO: 1707995 - RNA, 17 nt, Human
uguacaaaguauuaagc

SEQ ID NO: 1707996 - RNA, 18 nt, Human
uguacaaaguauuaagca

SEQ ID NO: 1707997 - RNA, 19 nt, Human
uguacaaaguauuaagcau

SEQ ID NO: 1707998 - RNA, 20 nt, Human
uguacaaaguauuaagcaua

SEQ ID NO: 1707999 - RNA, 15 nt, Human
uguacaaaguauuaa

SEQ ID NO: 1708000 - RNA, 21 nt, Human
uguacaaaguauuaagcauau

SEQ ID NO: 1708001 - RNA, 15 nt, Human
ucccuggccuuucau

SEQ ID NO: 1708002 - RNA, 11 nt, Human
ucccuggccuu

SEQ ID NO: 1708003 - RNA, 20 nt, Human
ucuaugcugaguuugugcug

SEQ ID NO: 1708004 - RNA, 16 nt, Human
ucuaugcugaguuugu

SEQ ID NO: 1708005 - RNA, 16 nt, Human
ucucugaagugaaacu

SEQ ID NO: 1708006 - RNA, 12 nt, Human
ucugacaucucu

SEQ ID NO: 1708007 - RNA, 14 nt, Human
ucugacaucucugc

SEQ ID NO: 1708008 - RNA, 15 nt, Human
ucugacaucucugca

SEQ ID NO: 1708009 - RNA, 15 nt, Human
ucugaggaauucugu

SEQ ID NO: 1708010 - RNA, 16 nt, Human
ucugaggaauucugua

SEQ ID NO: 1708011 - RNA, 17 nt, Human
ucugaggaauucuguau

SEQ ID NO: 1708012 - RNA, 18 nt, Human
ucugaggaauucuguaua

SEQ ID NO: 1708013 - RNA, 19 nt, Human
ucugaggaauucuguauag

SEQ ID NO: 1708014 - RNA, 14 nt, Human
ucugaggaauucug

SEQ ID NO: 1708015 - RNA, 16 nt, Human
ucuuaaaguugaauuu

SEQ ID NO: 1708016 - RNA, 19 nt, Human
ucuuaaaguugaauuuauu

SEQ ID NO: 1708017 - RNA, 20 nt, Human
ucuuaaaguugaauuuauug

SEQ ID NO: 1708018 - RNA, 21 nt, Human
ucuuaaaguugaauuuauugg

SEQ ID NO: 1708019 - RNA, 22 nt, Human
ucuuaaaguugaauuuauuggc

SEQ ID NO: 1708020 - RNA, 15 nt, Human
ucuuaaauaauaaag

SEQ ID NO: 1708021 - RNA, 19 nt, Human
ucuuaaauaauaaagauca

SEQ ID NO: 1708022 - RNA, 13 nt, Human
ucuuaaaguugaa

SEQ ID NO: 1708023 - RNA, 14 nt, Human
ucuuaaaguugaau

SEQ ID NO: 1708024 - RNA, 12 nt, Human
ucuuaaaguuga

SEQ ID NO: 1708025 - RNA, 21 nt, Human
ucuucagcaaaaauauuuuau

SEQ ID NO: 1708026 - RNA, 22 nt, Human
ucuucagcaaaaauauuuuaug

SEQ ID NO: 1708027 - RNA, 23 nt, Human
ucuucagcaaaaauauuuuauga

SEQ ID NO: 1708028 - RNA, 18 nt, Human
ucuucauaccuacaugua

SEQ ID NO: 1708029 - RNA, 21 nt, Human
ucuucauaccuacauguauuu

SEQ ID NO: 1708030 - RNA, 14 nt, Human
uauuuuuuuucugu

SEQ ID NO: 1708031 - RNA, 18 nt, Human
uauuuuauuaugaaacuu

SEQ ID NO: 1708032 - RNA, 23 nt, Human
uauuuuauuaugaaacuugugua

SEQ ID NO: 1708033 - RNA, 13 nt, Human
uauuuuauuauga

SEQ ID NO: 1708034 - RNA, 17 nt, Human
uauuuauaaucacuuuu

SEQ ID NO: 1708035 - RNA, 15 nt, Human
uauuuucauucuccu

SEQ ID NO: 1708036 - RNA, 23 nt, Human
ucacaccccagacgaugucuuca

SEQ ID NO: 1708037 - RNA, 12 nt, Human
uauuacaguaua

SEQ ID NO: 1708038 - RNA, 13 nt, Human
uauuacaguauaa

SEQ ID NO: 1708039 - RNA, 15 nt, Human
uauguaaaucccauu

SEQ ID NO: 1708040 - RNA, 19 nt, Human
uauguaaaucccauuauuc

SEQ ID NO: 1708041 - RNA, 20 nt, Human
uauguaaaucccauuauuca

SEQ ID NO: 1708042 - RNA, 21 nt, Human
uauguaaaucccauuauucaa

SEQ ID NO: 1708043 - RNA, 23 nt, Human
uauguaaaucccauuauucaaag

SEQ ID NO: 1708044 - RNA, 12 nt, Human
uauguaaauccc

SEQ ID NO: 1708045 - RNA, 16 nt, Human
uauuaagaaugaaaua

SEQ ID NO: 1708046 - RNA, 13 nt, Human
uauuaagaaugaa

SEQ ID NO: 1708047 - RNA, 23 nt, Human
ucauuauuuuauuaugaaacuug

SEQ ID NO: 1708048 - RNA, 22 nt, Human
ucauuauuuuauuaugaaacuu

SEQ ID NO: 1708049 - RNA, 15 nt, Human
ucauaccuacaugua

SEQ ID NO: 1708050 - RNA, 16 nt, Human
ucauaccuacauguau

SEQ ID NO: 1708051 - RNA, 14 nt, Human
ucaucaguauugaa

SEQ ID NO: 1708052 - RNA, 13 nt, Human
ggauucuuaaagu

SEQ ID NO: 1708053 - RNA, 15 nt, Human
ggcuuuguauagaac

SEQ ID NO: 1708054 - RNA, 12 nt, Human
gcuuuguauaga

SEQ ID NO: 1708055 - RNA, 13 nt, Human
gcuuuguauagaa

SEQ ID NO: 1708056 - RNA, 14 nt, Human
gcuuuguauagaac

SEQ ID NO: 1708057 - RNA, 15 nt, Human
gcuuguuuccuagca

SEQ ID NO: 1708058 - RNA, 23 nt, Human
gcuuguuuccuagcacacacuuu

SEQ ID NO: 1708059 - RNA, 22 nt, Human
gcuuuaaacauugguucuugua

SEQ ID NO: 1708060 - RNA, 21 nt, Human
gcugguguaugugugaaguga

SEQ ID NO: 1708061 - RNA, 13 nt, Human
gcagauuauucac

SEQ ID NO: 1708062 - RNA, 16 nt, Human
gcagauuauucacuga

SEQ ID NO: 1708063 - RNA, 15 nt, Human
gauagaggaagccug

SEQ ID NO: 1708064 - RNA, 21 nt, Human
gauagaggaagccugauuaaa

SEQ ID NO: 1708065 - RNA, 22 nt, Human
gauagaggaagccugauuaaag

SEQ ID NO: 1708066 - RNA, 14 nt, Human
gauagaggaagccu

SEQ ID NO: 1708067 - RNA, 16 nt, Human
gaggaauucuguauag

SEQ ID NO: 1708068 - RNA, 17 nt, Human
gaggaauucuguauaga

SEQ ID NO: 1708069 - RNA, 14 nt, Human
gaggaauucuguau

SEQ ID NO: 1708070 - RNA, 23 nt, Human
gagccugcacggugaauggcuuu

SEQ ID NO: 1708071 - RNA, 17 nt, Human
gagccugcacggugaau

SEQ ID NO: 1708072 - RNA, 22 nt, Human
gagccugcacggugaauggcuu

SEQ ID NO: 1708073 - RNA, 14 nt, Human
cuauuucuauauuu

SEQ ID NO: 1708074 - RNA, 16 nt, Human
cuauuucuauauuuuc

SEQ ID NO: 1708075 - RNA, 18 nt, Human
cuauuucuauauuuucau

SEQ ID NO: 1708076 - RNA, 15 nt, Human
cucagauuuuauuau

SEQ ID NO: 1708077 - RNA, 17 nt, Human
cucagauuuuauuaugu

SEQ ID NO: 1708078 - RNA, 18 nt, Human
cucagauuuuauuaugua

SEQ ID NO: 1708079 - RNA, 13 nt, Human
cucagauuuuauu

SEQ ID NO: 1708080 - RNA, 19 nt, Human
cuauauuuucauucuccua

SEQ ID NO: 1708081 - RNA, 15 nt, Human
cuauauuuucauucu

SEQ ID NO: 1708082 - RNA, 18 nt, Human
cuaugcugaguuugugcu

SEQ ID NO: 1708083 - RNA, 22 nt, Human
cuccaauuaaggauuuuaugcu

SEQ ID NO: 1708084 - RNA, 17 nt, Human
cuccaauuaaggauuuu

SEQ ID NO: 1708085 - RNA, 20 nt, Human
cuccaauuaaggauuuuaug

SEQ ID NO: 1708086 - RNA, 19 nt, Human
cucugaagugaaacugcuu

SEQ ID NO: 1708087 - RNA, 23 nt, Human
cucugaagugaaacugcuuguuu

SEQ ID NO: 1708088 - RNA, 23 nt, Human
cucuuugucuacaccauuaugug

SEQ ID NO: 1708089 - RNA, 13 nt, Human
cugaguuugugcu

SEQ ID NO: 1708090 - RNA, 18 nt, Human
cugaguuugugcuggugu

SEQ ID NO: 1708091 - RNA, 22 nt, Human
cugauuugacauagucuggcug

SEQ ID NO: 1708092 - RNA, 23 nt, Human
cugauuugacauagucuggcugu

SEQ ID NO: 1708093 - RNA, 21 nt, Human
cugauuugacauagucuggcu

SEQ ID NO: 1708094 - RNA, 15 nt, Human
gaaauacuguuugag

SEQ ID NO: 1708095 - RNA, 19 nt, Human
gaaauacuguuugagguuu

SEQ ID NO: 1708096 - RNA, 15 nt, Human
gaacgcguugaaauu

SEQ ID NO: 1708097 - RNA, 16 nt, Human
gaacgcguugaaauug

SEQ ID NO: 1708098 - RNA, 15 nt, Human
gaaggcaaaugacuu

SEQ ID NO: 1708099 - RNA, 16 nt, Human
gaaggcaaaugacuuu

SEQ ID NO: 1708100 - RNA, 16 nt, Human
gaagguucugguguga

SEQ ID NO: 1708101 - RNA, 20 nt, Human
gaagguucuggugugaacua

SEQ ID NO: 1708102 - RNA, 14 nt, Human
gaaggcaaaugacu

SEQ ID NO: 1708103 - RNA, 11 nt, Human
cuuuucugaua

SEQ ID NO: 1708104 - RNA, 14 nt, Human
cuuuucugauagag

SEQ ID NO: 1708105 - RNA, 14 nt, Human
cuuucauauuuuag

SEQ ID NO: 1708106 - RNA, 16 nt, Human
cuucauuaauaauaaa

SEQ ID NO: 1708107 - RNA, 17 nt, Human
cuucauuaauaauaaau

SEQ ID NO: 1708108 - RNA, 20 nt, Human
cuucagcaaaaauauuuuau

SEQ ID NO: 1708109 - RNA, 23 nt, Human
cuucagcaaaaauauuuuaugau

SEQ ID NO: 1708110 - RNA, 17 nt, Human
cuucagcaaaaauauuu

SEQ ID NO: 1708111 - RNA, 16 nt, Human
cuucucagaaggcaaa

SEQ ID NO: 1708112 - RNA, 22 nt, Human
cuucucagaaggcaaaugacuu

SEQ ID NO: 1708113 - RNA, 15 nt, Human
cugguguauguguga

SEQ ID NO: 1708114 - RNA, 16 nt, Human
cuggugugaacuaaac

SEQ ID NO: 1708115 - RNA, 17 nt, Human
cuggugugaacuaaacu

SEQ ID NO: 1708116 - RNA, 14 nt, Human
cugggguuaucuga

SEQ ID NO: 1708117 - RNA, 18 nt, Human
cugggcugaacacuccaa

SEQ ID NO: 1708118 - RNA, 15 nt, Human
cuguggugacuuugg

SEQ ID NO: 1708119 - RNA, 17 nt, Human
cuguggugacuuuggau

SEQ ID NO: 1708120 - RNA, 18 nt, Human
cuguggugacuuuggaua

SEQ ID NO: 1708121 - RNA, 20 nt, Human
cuguggugacuuuggauaau

SEQ ID NO: 1708122 - RNA, 23 nt, Human
cuguggugacuuuggauaauaag

SEQ ID NO: 1708123 - RNA, 13 nt, Human
cuguggugacuuu

SEQ ID NO: 1708124 - RNA, 14 nt, Human
cuguggugacuuug

SEQ ID NO: 1708125 - RNA, 12 nt, Human
cuguggugacuu

SEQ ID NO: 1708126 - RNA, 21 nt, Human
cugucuugccuuuuucauuau

SEQ ID NO: 1708127 - RNA, 23 nt, Human
cugucuugccuuuuucauuauuu

SEQ ID NO: 1708128 - RNA, 17 nt, Human
cccugcuuucagauacu

SEQ ID NO: 1708129 - RNA, 14 nt, Human
cccugcuuucagau

SEQ ID NO: 1708130 - RNA, 17 nt, Human
ccuaaauccauuuggaa

SEQ ID NO: 1708131 - RNA, 18 nt, Human
ccuaaauccauuuggaaa

SEQ ID NO: 1708132 - RNA, 12 nt, Human
ccuaaauccauu

SEQ ID NO: 1708133 - RNA, 15 nt, Human
ccgugcuaaggacuu

SEQ ID NO: 1708134 - RNA, 16 nt, Human
ccgugcuaaggacuug

SEQ ID NO: 1708135 - RNA, 14 nt, Human
ccgugcuaaggacu

SEQ ID NO: 1708136 - RNA, 12 nt, Human
ccuuaaaggaag

SEQ ID NO: 1708137 - RNA, 20 nt, Human
ccugcacggugaauggcuuu

SEQ ID NO: 1708138 - RNA, 20 nt, Human
ccugcaaugaagucucugaa

SEQ ID NO: 1708139 - RNA, 21 nt, Human
ccugcacggugaauggcuuug

SEQ ID NO: 1708140 - RNA, 21 nt, Human
ccugcaaugaagucucugaag

SEQ ID NO: 1708141 - RNA, 19 nt, Human
ccugcaaugaagucucuga

SEQ ID NO: 1708142 - RNA, 14 nt, Human
ccauuauucaaagu

SEQ ID NO: 1708143 - RNA, 13 nt, Human
ccauguuuauuac

SEQ ID NO: 1708144 - RNA, 20 nt, Human
ccauguuuauuacaguauaa

SEQ ID NO: 1708145 - RNA, 17 nt, Human
ccauuauucaaaguugc

SEQ ID NO: 1708146 - RNA, 22 nt, Human
ccauuauucaaaguugccuaaa

SEQ ID NO: 1708147 - RNA, 17 nt, Human
ccaugggauaaaugcca

SEQ ID NO: 1708148 - RNA, 13 nt, Human
ccaugggauaaau

SEQ ID NO: 1708149 - RNA, 17 nt, Human
cauuauuuuauuaugaa

SEQ ID NO: 1708150 - RNA, 18 nt, Human
cauuauucaaaguugccu

SEQ ID NO: 1708151 - RNA, 21 nt, Human
cauuauucaaaguugccuaaa

SEQ ID NO: 1708152 - RNA, 22 nt, Human
cauuauucaaaguugccuaaau

SEQ ID NO: 1708153 - RNA, 16 nt, Human
cauuauucaaaguugc

SEQ ID NO: 1708154 - RNA, 14 nt, Human
cauuaauaauaaau

SEQ ID NO: 1708155 - RNA, 17 nt, Human
cauuuggaaaucuuuaa

SEQ ID NO: 1708156 - RNA, 18 nt, Human
cauuuggaaaucuuuaaa

SEQ ID NO: 1708157 - RNA, 11 nt, Human
cauuuggaaau

SEQ ID NO: 1708158 - RNA, 18 nt, Human
caugggauaaaugccauc

SEQ ID NO: 1708159 - RNA, 23 nt, Human
caugggauaaaugccaucaauaa

SEQ ID NO: 1708160 - RNA, 16 nt, Human
caugggauaaaugcca

SEQ ID NO: 1708161 - RNA, 17 nt, Human
caugggauaaaugccau

SEQ ID NO: 1708162 - RNA, 22 nt, Human
cauguuaaaccaugggauaaau

SEQ ID NO: 1708163 - RNA, 23 nt, Human
cauguuuauuacaguauaauuaa

SEQ ID NO: 1708164 - RNA, 13 nt, Human
cauguuaaaccau

SEQ ID NO: 1708165 - RNA, 16 nt, Human
caucaguauugaagca

SEQ ID NO: 1708166 - RNA, 20 nt, Human
caucaguauugaagcauuuu

SEQ ID NO: 1708167 - RNA, 22 nt, Human
caucaguauugaagcauuuuau

SEQ ID NO: 1708168 - RNA, 19 nt, Human
cauagucuggcuguaccca

SEQ ID NO: 1708169 - RNA, 18 nt, Human
cauauauuuuuauauuua

SEQ ID NO: 1708170 - RNA, 20 nt, Human
cauauauuuuuauauuuacu

SEQ ID NO: 1708171 - RNA, 21 nt, Human
cauauauuuuuauauuuacua

SEQ ID NO: 1708172 - RNA, 15 nt, Human
caucucugcaaucuu

SEQ ID NO: 1708173 - RNA, 22 nt, Human
caucucugcaaucuucucagaa

SEQ ID NO: 1708174 - RNA, 14 nt, Human
caguauaauuaaca

SEQ ID NO: 1708175 - RNA, 15 nt, Human
caguauaauuaacau

SEQ ID NO: 1708176 - RNA, 17 nt, Human
caguauaauuaacaugu

SEQ ID NO: 1708177 - RNA, 21 nt, Human
caguauaauuaacauguuaaa

SEQ ID NO: 1708178 - RNA, 21 nt, Human
cagccucccuauuuuuuuucu

SEQ ID NO: 1708179 - RNA, 19 nt, Human
cagcuggugcccugcuuuc

SEQ ID NO: 1708180 - RNA, 20 nt, Human
cagcuggugcccugcuuuca

SEQ ID NO: 1708181 - RNA, 21 nt, Human
cagcuggugcccugcuuucag

SEQ ID NO: 1708182 - RNA, 23 nt, Human
cagcuggugcccugcuuucagau

SEQ ID NO: 1708183 - RNA, 18 nt, Human
cagcuggugcccugcuuu

SEQ ID NO: 1708184 - RNA, 17 nt, Human
caggaauggagccugca

SEQ ID NO: 1708185 - RNA, 23 nt, Human
caggaauggagccugcacgguga

SEQ ID NO: 1708186 - RNA, 14 nt, Human
cagcagauuauuca

SEQ ID NO: 1708187 - RNA, 15 nt, Human
cagcagauuauucac

SEQ ID NO: 1708188 - RNA, 19 nt, Human
cagcagauuauucacugau

SEQ ID NO: 1708189 - RNA, 13 nt, Human
cagauuuuauuau

SEQ ID NO: 1708190 - RNA, 15 nt, Human
cagauuuuauuaugu

SEQ ID NO: 1708191 - RNA, 16 nt, Human
cagauuuuauuaugua

SEQ ID NO: 1708192 - RNA, 18 nt, Human
cagauuuuauuauguaaa

SEQ ID NO: 1708193 - RNA, 20 nt, Human
cagauuuuauuauguaaauc

SEQ ID NO: 1708194 - RNA, 21 nt, Human
cagauuuuauuauguaaaucc

SEQ ID NO: 1708195 - RNA, 22 nt, Human
cagauuuuauuauguaaauccc

SEQ ID NO: 1708196 - RNA, 17 nt, Human
cagcaaaaauauuuuau

SEQ ID NO: 1708197 - RNA, 12 nt, Human
cagauuauucac

SEQ ID NO: 1708198 - RNA, 18 nt, Human
cagauuauucacugauuu

SEQ ID NO: 1708199 - RNA, 23 nt, Human
cagauuauucacugauuugacau

SEQ ID NO: 1708200 - RNA, 18 nt, Human
cagaaggcaaaugacuuu

SEQ ID NO: 1708201 - RNA, 19 nt, Human
cagaaggcaaaugacuuug

SEQ ID NO: 1708202 - RNA, 20 nt, Human
cagaaggcaaaugacuuugg

SEQ ID NO: 1708203 - RNA, 22 nt, Human
cacuuuugguuaagucuguuuu

SEQ ID NO: 1708204 - RNA, 14 nt, Human
cacuuuuuuccaca

SEQ ID NO: 1708205 - RNA, 12 nt, Human
cacuuuuuucca

SEQ ID NO: 1708206 - RNA, 19 nt, Human
cagaucugccuaaggacuu

SEQ ID NO: 1708207 - RNA, 20 nt, Human
cagaucugccuaaggacuuc

SEQ ID NO: 1708208 - RNA, 21 nt, Human
cagaucugccuaaggacuucu

SEQ ID NO: 1708209 - RNA, 23 nt, Human
cagaucugccuaaggacuucuuu

SEQ ID NO: 1708210 - RNA, 16 nt, Human
cagaucugccuaagga

SEQ ID NO: 1708211 - RNA, 17 nt, Human
cagaucugccuaaggac

SEQ ID NO: 1708212 - RNA, 14 nt, Human
cagaucugccuaag

SEQ ID NO: 1708213 - RNA, 20 nt, Human
cagauaacuguuauuuauaa

SEQ ID NO: 1708214 - RNA, 21 nt, Human
cagauaacuguuauuuauaau

SEQ ID NO: 1708215 - RNA, 14 nt, Human
cagauaacuguuau

SEQ ID NO: 1708216 - RNA, 16 nt, Human
cagauaacuguuauuu

SEQ ID NO: 1708217 - RNA, 19 nt, Human
cagauaacuguuauuuaua

SEQ ID NO: 1708218 - RNA, 15 nt, Human
cacucuccauuuaau

SEQ ID NO: 1708219 - RNA, 17 nt, Human
cacucuccauuuaauaa

SEQ ID NO: 1708220 - RNA, 20 nt, Human
cacggugaauggcuuuguau

SEQ ID NO: 1708221 - RNA, 23 nt, Human
cacggugaauggcuuuguauaga

SEQ ID NO: 1708222 - RNA, 20 nt, Human
caccugucuugccuuuuuca

SEQ ID NO: 1708223 - RNA, 17 nt, Human
caccugucuugccuuuu

SEQ ID NO: 1708224 - RNA, 21 nt, Human
cacugauuugacauagucugg

SEQ ID NO: 1708225 - RNA, 23 nt, Human
cacugauuugacauagucuggcu

SEQ ID NO: 1708226 - RNA, 16 nt, Human
aaugucucacugagca

SEQ ID NO: 1708227 - RNA, 19 nt, Human
aaugucucacugagcacug

SEQ ID NO: 1708228 - RNA, 22 nt, Human
aaugucucacugagcacuguuu

SEQ ID NO: 1708229 - RNA, 19 nt, Human
aaugaagacaaaacauaca

SEQ ID NO: 1708230 - RNA, 21 nt, Human
aaugaucugauugaccguguu

SEQ ID NO: 1708231 - RNA, 21 nt, Human
aauaauccuaaacauaugaau

SEQ ID NO: 1708232 - RNA, 20 nt, Human
aagcugcucaacuugcaaaa

SEQ ID NO: 1708233 - RNA, 12 nt, Human
aagcugcucaac

SEQ ID NO: 1708234 - RNA, 23 nt, Human
aagcugcucaacuugcaaaauca

SEQ ID NO: 1708235 - RNA, 14 nt, Human
aaauagaauguaaa

SEQ ID NO: 1708236 - RNA, 17 nt, Human
aaauagaauguaaaugu

SEQ ID NO: 1708237 - RNA, 21 nt, Human
aaauagaauguaaaugucuca

SEQ ID NO: 1708238 - RNA, 19 nt, Human
aaauagaauguaaaugucu

SEQ ID NO: 1708239 - RNA, 14 nt, Human
aaauacuugucugu

SEQ ID NO: 1708240 - RNA, 16 nt, Human
aaauacuugucuguuu

SEQ ID NO: 1708241 - RNA, 19 nt, Human
aaauacuugucuguuuuaa

SEQ ID NO: 1708242 - RNA, 14 nt, Human
aaaucuuccaauuu

SEQ ID NO: 1708243 - RNA, 12 nt, Human
aaaucuuccaau

SEQ ID NO: 1708244 - RNA, 12 nt, Human
aaauaacaauga

SEQ ID NO: 1708245 - RNA, 14 nt, Human
aaacagauguccau

SEQ ID NO: 1708246 - RNA, 22 nt, Human
aaacagauguccaucagaugac

SEQ ID NO: 1708247 - RNA, 13 nt, Human
aagaaaucuauuu

SEQ ID NO: 1708248 - RNA, 21 nt, Human
aacuuagcauuuucugcaucu

SEQ ID NO: 1708249 - RNA, 23 nt, Human
aacuuagcauuuucugcaucucc

SEQ ID NO: 1708250 - RNA, 19 nt, Human
aacugacaagcuccauuua

SEQ ID NO: 1708251 - RNA, 20 nt, Human
aacugacaagcuccauuuaa

SEQ ID NO: 1708252 - RNA, 12 nt, Human
aaauuggagaaa

SEQ ID NO: 1708253 - RNA, 16 nt, Human
aacaaagccacuuuca

SEQ ID NO: 1708254 - RNA, 20 nt, Human
aacaugcagaacaaaugaag

SEQ ID NO: 1708255 - RNA, 12 nt, Human
aacaugcagaac

SEQ ID NO: 1708256 - RNA, 19 nt, Human
aacaugcagaacaaaugaa

SEQ ID NO: 1708257 - RNA, 22 nt, Human
acgugauuagugaaaggaagau

SEQ ID NO: 1708258 - RNA, 17 nt, Human
acuaauacagcugagcu

SEQ ID NO: 1708259 - RNA, 14 nt, Human
acuagcuauggugu

SEQ ID NO: 1708260 - RNA, 20 nt, Human
acuuguaaaggaauuuaaaa

SEQ ID NO: 1708261 - RNA, 19 nt, Human
acuuguaaaggaauuuaaa

SEQ ID NO: 1708262 - RNA, 24 nt, Human
acuguuuucuaguguaucaaaaug

SEQ ID NO: 1708263 - RNA, 19 nt, Human
acuguuuucuaguguauca

SEQ ID NO: 1708264 - RNA, 20 nt, Human
acuguuuucuaguguaucaa

SEQ ID NO: 1708265 - RNA, 21 nt, Human
acuguuuucuaguguaucaaa

SEQ ID NO: 1708266 - RNA, 23 nt, Human
acuguuuucuaguguaucaaaau

SEQ ID NO: 1708267 - RNA, 13 nt, Human
acuguuuucuagu

SEQ ID NO: 1708268 - RNA, 17 nt, Human
acuguuuucuaguguau

SEQ ID NO: 1708269 - RNA, 18 nt, Human
acuguuuucuaguguauc

SEQ ID NO: 1708270 - RNA, 17 nt, Human
acuguuguuaucuguuu

SEQ ID NO: 1708271 - RNA, 20 nt, Human
acugaaguaaaacaaacaau

SEQ ID NO: 1708272 - RNA, 14 nt, Human
agaaaauaacaaua

SEQ ID NO: 1708273 - RNA, 13 nt, Human
aauuuuaucugcc

SEQ ID NO: 1708274 - RNA, 21 nt, Human
acaggguaacuaacuaaaaca

SEQ ID NO: 1708275 - RNA, 22 nt, Human
acaggguaacuaacuaaaacaa

SEQ ID NO: 1708276 - RNA, 14 nt, Human
acagcaucucagcu

SEQ ID NO: 1708277 - RNA, 15 nt, Human
acagcaucucagcuc

SEQ ID NO: 1708278 - RNA, 22 nt, Human
accccaaaauuagccaguaauc

SEQ ID NO: 1708279 - RNA, 23 nt, Human
accccaaaauuagccaguaaucc

SEQ ID NO: 1708280 - RNA, 12 nt, Human
auaguauaaacc

SEQ ID NO: 1708281 - RNA, 19 nt, Human
auauacucaagagugguau

SEQ ID NO: 1708282 - RNA, 19 nt, Human
auaccugaaugcucuguag

SEQ ID NO: 1708283 - RNA, 13 nt, Human
augaugugcuuaa

SEQ ID NO: 1708284 - RNA, 11 nt, Human
augaugugcuu

SEQ ID NO: 1708285 - RNA, 14 nt, Human
augucaagggcagc

SEQ ID NO: 1708286 - RNA, 21 nt, Human
augucaagggcagcuuugcuc

SEQ ID NO: 1708287 - RNA, 23 nt, Human
augucaagggcagcuuugcucau

SEQ ID NO: 1708288 - RNA, 15 nt, Human
augucaagauucagc

SEQ ID NO: 1708289 - RNA, 16 nt, Human
augucaagauucagcu

SEQ ID NO: 1708290 - RNA, 17 nt, Human
augucaagauucagcua

SEQ ID NO: 1708291 - RNA, 18 nt, Human
augucaagauucagcuag

SEQ ID NO: 1708292 - RNA, 18 nt, Human
auguacauagugcuaaca

SEQ ID NO: 1708293 - RNA, 15 nt, Human
auguacauagugcua

SEQ ID NO: 1708294 - RNA, 17 nt, Human
auguacauagugcuaac

SEQ ID NO: 1708295 - RNA, 16 nt, Human
auguggugaaaagcag

SEQ ID NO: 1708296 - RNA, 20 nt, Human
auguggugaaaagcagguug

SEQ ID NO: 1708297 - RNA, 13 nt, Human
auguuugcauaua

SEQ ID NO: 1708298 - RNA, 15 nt, Human
auguuugcauauaag

SEQ ID NO: 1708299 - RNA, 14 nt, Human
auguuugcauauaa

SEQ ID NO: 1708300 - RNA, 22 nt, Human
aucuuauaauuuaaaauaugcu

SEQ ID NO: 1708301 - RNA, 17 nt, Human
augacuccauagaccuu

SEQ ID NO: 1708302 - RNA, 15 nt, Human
auccuuugugaaaaa

SEQ ID NO: 1708303 - RNA, 21 nt, Human
agauaggucagugcaaauacu

SEQ ID NO: 1708304 - RNA, 16 nt, Human
agaugggacaauuaga

SEQ ID NO: 1708305 - RNA, 21 nt, Human
agcugacaaaauacuugucug

SEQ ID NO: 1708306 - RNA, 16 nt, Human
agcugacaaaauacuu

SEQ ID NO: 1708307 - RNA, 14 nt, Human
cuuccauauggauc

SEQ ID NO: 1708308 - RNA, 15 nt, Human
cuuaaagaauucaaa

SEQ ID NO: 1708309 - RNA, 17 nt, Human
cuuaaagaauucaaauu

SEQ ID NO: 1708310 - RNA, 18 nt, Human
cuuaaagaauucaaauuu

SEQ ID NO: 1708311 - RNA, 16 nt, Human
cuuaaauacagcuuuu

SEQ ID NO: 1708312 - RNA, 21 nt, Human
cuguaggaagguacuguauga

SEQ ID NO: 1708313 - RNA, 22 nt, Human
cuguagccuaaacuccaaacau

SEQ ID NO: 1708314 - RNA, 17 nt, Human
cuguaggaagguacugu

SEQ ID NO: 1708315 - RNA, 18 nt, Human
cuguaggaagguacugua

SEQ ID NO: 1708316 - RNA, 19 nt, Human
cuguaggaagguacuguau

SEQ ID NO: 1708317 - RNA, 20 nt, Human
cuguaggaagguacuguaug

SEQ ID NO: 1708318 - RNA, 14 nt, Human
cuguuguuaugaug

SEQ ID NO: 1708319 - RNA, 15 nt, Human
cuguuguuaugaugu

SEQ ID NO: 1708320 - RNA, 17 nt, Human
cuguuguuaugaugugc

SEQ ID NO: 1708321 - RNA, 19 nt, Human
cuguuguuaugaugugcuu

SEQ ID NO: 1708322 - RNA, 23 nt, Human
cuguuguuaugaugugcuuaaca

SEQ ID NO: 1708323 - RNA, 21 nt, Human
cuguuguuaugaugugcuuaa

SEQ ID NO: 1708324 - RNA, 22 nt, Human
cuuaaacaguugcacagcaucu

SEQ ID NO: 1708325 - RNA, 18 nt, Human
cuuaaacaguugcacagc

SEQ ID NO: 1708326 - RNA, 19 nt, Human
cuuaaacaguugcacagca

SEQ ID NO: 1708327 - RNA, 20 nt, Human
cuuaaacaguugcacagcau

SEQ ID NO: 1708328 - RNA, 13 nt, Human
cuguuguuaucug

SEQ ID NO: 1708329 - RNA, 22 nt, Human
cuguuguuaucuguuugagaaa

SEQ ID NO: 1708330 - RNA, 16 nt, Human
cugcucaacuugcaaa

SEQ ID NO: 1708331 - RNA, 14 nt, Human
gaucaaauguuuaa

SEQ ID NO: 1708332 - RNA, 16 nt, Human
gaucaaauguuuaauc

SEQ ID NO: 1708333 - RNA, 20 nt, Human
gaucaaauguuuaaucauau

SEQ ID NO: 1708334 - RNA, 18 nt, Human
gaucaaauguuuaaucau

SEQ ID NO: 1708335 - RNA, 16 nt, Human
gaucugauugaccgug

SEQ ID NO: 1708336 - RNA, 23 nt, Human
gaucugauugaccguguuggucu

SEQ ID NO: 1708337 - RNA, 19 nt, Human
gauccacuggcuggacaaa

SEQ ID NO: 1708338 - RNA, 13 nt, Human
gauccacuggcug

SEQ ID NO: 1708339 - RNA, 13 nt, Human
gcaaaaucaguuu

SEQ ID NO: 1708340 - RNA, 15 nt, Human
gcaaaaucaguuuuc

SEQ ID NO: 1708341 - RNA, 20 nt, Human
gcaucuagcaugucgucaaa

SEQ ID NO: 1708342 - RNA, 13 nt, Human
gaaugaucugauu

SEQ ID NO: 1708343 - RNA, 16 nt, Human
gaaugaucugauugac

SEQ ID NO: 1708344 - RNA, 20 nt, Human
gagaaaaagaaaaaauauau

SEQ ID NO: 1708345 - RNA, 15 nt, Human
gcucaacuugcaaaa

SEQ ID NO: 1708346 - RNA, 16 nt, Human
ggaaaaaauaacaaug

SEQ ID NO: 1708347 - RNA, 18 nt, Human
gcuuuuggauuggacaaa

SEQ ID NO: 1708348 - RNA, 13 nt, Human
gcuguuguuauga

SEQ ID NO: 1708349 - RNA, 14 nt, Human
gcuguuguuaugau

SEQ ID NO: 1708350 - RNA, 15 nt, Human
gcuguuguuaugaug

SEQ ID NO: 1708351 - RNA, 19 nt, Human
gcuguuguuaugaugugcu

SEQ ID NO: 1708352 - RNA, 17 nt, Human
gcuguuguuaugaugug

SEQ ID NO: 1708353 - RNA, 20 nt, Human
aaaauacuugucuguuuuaa

SEQ ID NO: 1708354 - RNA, 14 nt, Human
ggucagugcaaaua

SEQ ID NO: 1708355 - RNA, 17 nt, Human
aaacuucguuuaaugaa

SEQ ID NO: 1708356 - RNA, 14 nt, Human
aaacuucguuuaau

SEQ ID NO: 1708357 - RNA, 21 nt, Human
gguauaucuagguuuaugaca

SEQ ID NO: 1708358 - RNA, 19 nt, Human
gguauaucuagguuuauga

SEQ ID NO: 1708359 - RNA, 13 nt, Human
aaacgcaucuagu

SEQ ID NO: 1708360 - RNA, 23 nt, Human
ggguuuuuauuuccuaugaugua

SEQ ID NO: 1708361 - RNA, 21 nt, Human
guacaaaaaaaucuuccaauu

SEQ ID NO: 1708362 - RNA, 12 nt, Human
guaauccuguag

SEQ ID NO: 1708363 - RNA, 22 nt, Human
guaauaccucuaauaguauaaa

SEQ ID NO: 1708364 - RNA, 21 nt, Human
guaauaccucuaauaguauaa

SEQ ID NO: 1708365 - RNA, 17 nt, Human
guaacuaacuaaaacaa

SEQ ID NO: 1708366 - RNA, 16 nt, Human
guaacuaacuaaaaca

SEQ ID NO: 1708367 - RNA, 18 nt, Human
aaauauaugcuaagucuu

SEQ ID NO: 1708368 - RNA, 14 nt, Human
aaauauauacucaa

SEQ ID NO: 1708369 - RNA, 21 nt, Human
aaagcagguugauaaaucauu

SEQ ID NO: 1708370 - RNA, 20 nt, Human
ggcuaagcuucacuguaaaa

SEQ ID NO: 1708371 - RNA, 22 nt, Human
ggccaagagaugcagugccagg

SEQ ID NO: 1708372 - RNA, 21 nt, Human
ggaucucuucuuaauguacau

SEQ ID NO: 1708373 - RNA, 22 nt, Human
ggaucucuucuuaauguacaua

SEQ ID NO: 1708374 - RNA, 16 nt, Human
auuucagcagcugcag

SEQ ID NO: 1708375 - RNA, 23 nt, Human
auuuauaccucaauuuucacugu

SEQ ID NO: 1708376 - RNA, 14 nt, Human
auugaugauccauu

SEQ ID NO: 1708377 - RNA, 23 nt, Human
auuguaauaggcguaacuaauuu

SEQ ID NO: 1708378 - RNA, 17 nt, Human
auucuugccaaauauaa

SEQ ID NO: 1708379 - RNA, 21 nt, Human
auucaauuugauguggugaaa

SEQ ID NO: 1708380 - RNA, 16 nt, Human
auucaauuugaugugg

SEQ ID NO: 1708381 - RNA, 12 nt, Human
auucaagauucc

SEQ ID NO: 1708382 - RNA, 13 nt, Human
auucaagauuccc

SEQ ID NO: 1708383 - RNA, 21 nt, Human
auuuuaucugccucucuugua

SEQ ID NO: 1708384 - RNA, 22 nt, Human
auuuuaucugccucucuuguaa

SEQ ID NO: 1708385 - RNA, 23 nt, Human
caauaaaauuauagcucuaaugu

SEQ ID NO: 1708386 - RNA, 13 nt, Human
caagauucagcua

SEQ ID NO: 1708387 - RNA, 14 nt, Human
cacuacucagcaug

SEQ ID NO: 1708388 - RNA, 13 nt, Human
cacuacucagcau

SEQ ID NO: 1708389 - RNA, 21 nt, Human
cacuguuucacuacucagcau

SEQ ID NO: 1708390 - RNA, 22 nt, Human
cacuguuucacuacucagcaug

SEQ ID NO: 1708391 - RNA, 21 nt, Human
cacuuucaaucuucaauccuu

SEQ ID NO: 1708392 - RNA, 12 nt, Human
cagaacaaauga

SEQ ID NO: 1708393 - RNA, 14 nt, Human
cagaacaaaugaag

SEQ ID NO: 1708394 - RNA, 16 nt, Human
cagaacaaaugaagac

SEQ ID NO: 1708395 - RNA, 14 nt, Human
cauguuaguaauac

SEQ ID NO: 1708396 - RNA, 16 nt, Human
cauguuaguaauaccu

SEQ ID NO: 1708397 - RNA, 17 nt, Human
cauguuaguaauaccuc

SEQ ID NO: 1708398 - RNA, 18 nt, Human
cauguuaguaauaccucu

SEQ ID NO: 1708399 - RNA, 19 nt, Human
cauguuaguaauaccucua

SEQ ID NO: 1708400 - RNA, 20 nt, Human
cauguuaguaauaccucuaa

SEQ ID NO: 1708401 - RNA, 24 nt, Human
cauguuaguaauaccucuaauagu

SEQ ID NO: 1708402 - RNA, 21 nt, Human
cauucuagagugcauauauuu

SEQ ID NO: 1708403 - RNA, 13 nt, Human
caugauuucaugu

SEQ ID NO: 1708404 - RNA, 14 nt, Human
caugauuucaugua

SEQ ID NO: 1708405 - RNA, 16 nt, Human
caugauuucauguacu

SEQ ID NO: 1708406 - RNA, 17 nt, Human
caugauuucauguacug

SEQ ID NO: 1708407 - RNA, 19 nt, Human
caugauuucauguacugca

SEQ ID NO: 1708408 - RNA, 20 nt, Human
caugauuucauguacugcau

SEQ ID NO: 1708409 - RNA, 13 nt, Human
cauauuaagaaug

SEQ ID NO: 1708410 - RNA, 19 nt, Human
cauauuaagaaugaucuga

SEQ ID NO: 1708411 - RNA, 15 nt, Human
cauauuaagaaugau

SEQ ID NO: 1708412 - RNA, 18 nt, Human
cauauggauccacuggcu

SEQ ID NO: 1708413 - RNA, 17 nt, Human
cauauggauccacuggc

SEQ ID NO: 1708414 - RNA, 22 nt, Human
cauuuguggguuuuuauuuccu

SEQ ID NO: 1708415 - RNA, 23 nt, Human
cauuuguggguuuuuauuuccua

SEQ ID NO: 1708416 - RNA, 17 nt, Human
cauuuguggguuuuuau

SEQ ID NO: 1708417 - RNA, 15 nt, Human
cucaauuuucacugu

SEQ ID NO: 1708418 - RNA, 17 nt, Human
cucaauuuucacugugu

SEQ ID NO: 1708419 - RNA, 15 nt, Human
cucaauaaaauuaua

SEQ ID NO: 1708420 - RNA, 20 nt, Human
cucaauaaaauuauagcucu

SEQ ID NO: 1708421 - RNA, 11 nt, Human
cuacucagcau

SEQ ID NO: 1708422 - RNA, 13 nt, Human
cucuuauuucauc

SEQ ID NO: 1708423 - RNA, 14 nt, Human
cucuuauuucauca

SEQ ID NO: 1708424 - RNA, 16 nt, Human
cugacaaaauacuugu

SEQ ID NO: 1708425 - RNA, 13 nt, Human
cugacaagcucca

SEQ ID NO: 1708426 - RNA, 18 nt, Human
cugacaagcuccauuuaa

SEQ ID NO: 1708427 - RNA, 17 nt, Human
cuccacuuggcauuagc

SEQ ID NO: 1708428 - RNA, 16 nt, Human
aagcacuaaacaaaga

SEQ ID NO: 1708429 - RNA, 19 nt, Human
guuauuauauuuacaaaug

SEQ ID NO: 1708430 - RNA, 20 nt, Human
guuauuauauuuacaaaugg

SEQ ID NO: 1708431 - RNA, 19 nt, Human
guucuucgacuguuguuau

SEQ ID NO: 1708432 - RNA, 15 nt, Human
guuuaugacaguaau

SEQ ID NO: 1708433 - RNA, 17 nt, Human
guuuaugacaguaauug

SEQ ID NO: 1708434 - RNA, 19 nt, Human
guuuauucauaugcauauu

SEQ ID NO: 1708435 - RNA, 18 nt, Human
guuuauucauaugcauau

SEQ ID NO: 1708436 - RNA, 13 nt, Human
guuuauucauaug

SEQ ID NO: 1708437 - RNA, 14 nt, Human
guuuauucauaugc

SEQ ID NO: 1708438 - RNA, 16 nt, Human
guuuauucauaugcau

SEQ ID NO: 1708439 - RNA, 17 nt, Human
guuuauucauaugcaua

SEQ ID NO: 1708440 - RNA, 23 nt, Human
aagguauaucuagguuuaugaca

SEQ ID NO: 1708441 - RNA, 22 nt, Human
aagguauaucuagguuuaugac

SEQ ID NO: 1708442 - RNA, 16 nt, Human
aagucaggaaucauca

SEQ ID NO: 1708443 - RNA, 18 nt, Human
guauugacaaaauguuau

SEQ ID NO: 1708444 - RNA, 19 nt, Human
guauugacaaaauguuauu

SEQ ID NO: 1708445 - RNA, 11 nt, Human
guauugacaaa

SEQ ID NO: 1708446 - RNA, 13 nt, Human
guauugacaaaau

SEQ ID NO: 1708447 - RNA, 15 nt, Human
guauugacaaaaugu

SEQ ID NO: 1708448 - RNA, 16 nt, Human
guauugacaaaauguu

SEQ ID NO: 1708449 - RNA, 17 nt, Human
guauugacaaaauguua

SEQ ID NO: 1708450 - RNA, 16 nt, Human
aaaugucucacugagc

SEQ ID NO: 1708451 - RNA, 17 nt, Human
aaaugucucacugagca

SEQ ID NO: 1708452 - RNA, 17 nt, Human
aaauuguauuacaaauc

SEQ ID NO: 1708453 - RNA, 17 nt, Human
aaauuccaagugauuga

SEQ ID NO: 1708454 - RNA, 20 nt, Human
aaauuagccaguaauccugu

SEQ ID NO: 1708455 - RNA, 21 nt, Human
aaauuagccaguaauccugua

SEQ ID NO: 1708456 - RNA, 22 nt, Human
aaauuagccaguaauccuguag

SEQ ID NO: 1708457 - RNA, 18 nt, Human
aacguuuagcugacaaaa

SEQ ID NO: 1708458 - RNA, 20 nt, Human
aacuaaaacaaagccacuuu

SEQ ID NO: 1708459 - RNA, 13 nt, Human
aacuaaaacaaag

SEQ ID NO: 1708460 - RNA, 17 nt, Human
aacuaaaacaaagccac

SEQ ID NO: 1708461 - RNA, 13 nt, Human
gugauuagugaaa

SEQ ID NO: 1708462 - RNA, 18 nt, Human
acaaaaggauaaugaaua

SEQ ID NO: 1708463 - RNA, 18 nt, Human
uagcaugucgucaaagcu

SEQ ID NO: 1708464 - RNA, 17 nt, Human
uagcauuuucugcaucu

SEQ ID NO: 1708465 - RNA, 19 nt, Human
uagcauuuucugcaucucc

SEQ ID NO: 1708466 - RNA, 10 nt, Human
acaauaccug

SEQ ID NO: 1708467 - RNA, 15 nt, Human
uaguuccccuguuua

SEQ ID NO: 1708468 - RNA, 16 nt, Human
uaguuccccuguuuau

SEQ ID NO: 1708469 - RNA, 21 nt, Human
uagugaaaggaagauaaacgu

SEQ ID NO: 1708470 - RNA, 17 nt, Human
uauauuguucacuucuu

SEQ ID NO: 1708471 - RNA, 21 nt, Human
acaguaauuguguuuacauuu

SEQ ID NO: 1708472 - RNA, 15 nt, Human
acaguaauuguguuu

SEQ ID NO: 1708473 - RNA, 17 nt, Human
acaguaauuguguuuac

SEQ ID NO: 1708474 - RNA, 18 nt, Human
acaguaauuguguuuaca

SEQ ID NO: 1708475 - RNA, 21 nt, Human
acagggaacgugauuagugaa

SEQ ID NO: 1708476 - RNA, 22 nt, Human
acagggaacgugauuagugaaa

SEQ ID NO: 1708477 - RNA, 16 nt, Human
uacauucuucaagauc

SEQ ID NO: 1708478 - RNA, 17 nt, Human
uacauucuucaagaucc

SEQ ID NO: 1708479 - RNA, 21 nt, Human
uacauucuucaagaucccauu

SEQ ID NO: 1708480 - RNA, 20 nt, Human
uacauucuucaagaucccau

SEQ ID NO: 1708481 - RNA, 19 nt, Human
aaugcuuaaagaauucaaa

SEQ ID NO: 1708482 - RNA, 21 nt, Human
aaugcuuaaagaauucaaauu

SEQ ID NO: 1708483 - RNA, 22 nt, Human
aaugcuuaaagaauucaaauuu

SEQ ID NO: 1708484 - RNA, 12 nt, Human
aauguaaauguc

SEQ ID NO: 1708485 - RNA, 13 nt, Human
aauguaaaugucu

SEQ ID NO: 1708486 - RNA, 14 nt, Human
aauguaaaugucuc

SEQ ID NO: 1708487 - RNA, 15 nt, Human
aauguaaaugucuca

SEQ ID NO: 1708488 - RNA, 16 nt, Human
aauguaaaugucucac

SEQ ID NO: 1708489 - RNA, 18 nt, Human
aauguaaaugucucacug

SEQ ID NO: 1708490 - RNA, 24 nt, Human
aauguaaaugucucacugagcacu

SEQ ID NO: 1708491 - RNA, 18 nt, Human
aauuccaagugauugaaa

SEQ ID NO: 1708492 - RNA, 22 nt, Human
aauucaaauuuuaucugccucu

SEQ ID NO: 1708493 - RNA, 14 nt, Human
uaccaccugacauu

SEQ ID NO: 1708494 - RNA, 12 nt, Human
aauuagccagua

SEQ ID NO: 1708495 - RNA, 14 nt, Human
aauuagccaguaau

SEQ ID NO: 1708496 - RNA, 20 nt, Human
aauuagccaguaauccugua

SEQ ID NO: 1708497 - RNA, 17 nt, Human
aauuagccaguaauccu

SEQ ID NO: 1708498 - RNA, 18 nt, Human
aauuagccaguaauccug

SEQ ID NO: 1708499 - RNA, 19 nt, Human
aauuagccaguaauccugu

SEQ ID NO: 1708500 - RNA, 22 nt, Human
aauuagcuuauguuaacugaca

SEQ ID NO: 1708501 - RNA, 16 nt, Human
aauuagcuuauguuaa

SEQ ID NO: 1708502 - RNA, 12 nt, Human
uaaugaauaccu

SEQ ID NO: 1708503 - RNA, 13 nt, Human
uaaugaauaccuu

SEQ ID NO: 1708504 - RNA, 18 nt, Human
uaaugaauaccuuagugc

SEQ ID NO: 1708505 - RNA, 20 nt, Human
uaaugaauaccuuagugcag

SEQ ID NO: 1708506 - RNA, 14 nt, Human
aaugaaugcuuaaa

SEQ ID NO: 1708507 - RNA, 23 nt, Human
uaaugaaugcuuaaagaauucaa

SEQ ID NO: 1708508 - RNA, 13 nt, Human
uaaugaaugcuua

SEQ ID NO: 1708509 - RNA, 18 nt, Human
uaaugaaugcuuaaagaa

SEQ ID NO: 1708510 - RNA, 20 nt, Human
uaaugaaugcuuaaagaauu

SEQ ID NO: 1708511 - RNA, 13 nt, Human
uaauguacauagu

SEQ ID NO: 1708512 - RNA, 19 nt, Human
uaauguacauagugcuaac

SEQ ID NO: 1708513 - RNA, 22 nt, Human
aaucauauaaauagaauguaaa

SEQ ID NO: 1708514 - RNA, 20 nt, Human
aaucauauaaauagaaugua

SEQ ID NO: 1708515 - RNA, 21 nt, Human
aaucauauaaauagaauguaa

SEQ ID NO: 1708516 - RNA, 12 nt, Human
aaucauauaaau

SEQ ID NO: 1708517 - RNA, 17 nt, Human
aaucauauaaauagaau

SEQ ID NO: 1708518 - RNA, 18 nt, Human
aaucauauaaauagaaug

SEQ ID NO: 1708519 - RNA, 19 nt, Human
aaucuuauaauuuaaaaua

SEQ ID NO: 1708520 - RNA, 13 nt, Human
aauccuuugugaa

SEQ ID NO: 1708521 - RNA, 18 nt, Human
aauccuguaggaagguac

SEQ ID NO: 1708522 - RNA, 20 nt, Human
aauccuguaggaagguacug

SEQ ID NO: 1708523 - RNA, 22 nt, Human
aauccuguaggaagguacugua

SEQ ID NO: 1708524 - RNA, 23 nt, Human
aauccuguaggaagguacuguau

SEQ ID NO: 1708525 - RNA, 15 nt, Human
uaacaugaagaccuu

SEQ ID NO: 1708526 - RNA, 20 nt, Human
uaacgauaaaagacagugaa

SEQ ID NO: 1708527 - RNA, 16 nt, Human
ucaauucuugccaaau

SEQ ID NO: 1708528 - RNA, 19 nt, Human
ucaauuuauaccucaauuu

SEQ ID NO: 1708529 - RNA, 16 nt, Human
ucaauuugauguggug

SEQ ID NO: 1708530 - RNA, 15 nt, Human
ucacuguuucacuac

SEQ ID NO: 1708531 - RNA, 14 nt, Human
ucacuguuucacua

SEQ ID NO: 1708532 - RNA, 21 nt, Human
ucacuguuucacuacucagca

SEQ ID NO: 1708533 - RNA, 16 nt, Human
ucacugugcuguuguu

SEQ ID NO: 1708534 - RNA, 19 nt, Human
ucacugugcuguuguuaug

SEQ ID NO: 1708535 - RNA, 20 nt, Human
ucacugugcuguuguuauga

SEQ ID NO: 1708536 - RNA, 15 nt, Human
ucacuguguccaggu

SEQ ID NO: 1708537 - RNA, 23 nt, Human
ucacugugcuguuguuaugaugu

SEQ ID NO: 1708538 - RNA, 13 nt, Human
ucaacuugcaaaa

SEQ ID NO: 1708539 - RNA, 14 nt, Human
ucaacuugcaaaau

SEQ ID NO: 1708540 - RNA, 16 nt, Human
ucaacuugcaaaauca

SEQ ID NO: 1708541 - RNA, 20 nt, Human
ucaacuugcaaaaucaguuu

SEQ ID NO: 1708542 - RNA, 19 nt, Human
ucaacuugcaaaaucaguu

SEQ ID NO: 1708543 - RNA, 15 nt, Human
ucaagucuaccaacc

SEQ ID NO: 1708544 - RNA, 22 nt, Human
ucaagucuaccaaccuguucaa

SEQ ID NO: 1708545 - RNA, 18 nt, Human
ucaagucuaccaauuaua

SEQ ID NO: 1708546 - RNA, 17 nt, Human
ucaaucuucaauccuug

SEQ ID NO: 1708547 - RNA, 21 nt, Human
acauucuucaagaucccauuu

SEQ ID NO: 1708548 - RNA, 21 nt, Human
acauuccuugcugaaacgcau

SEQ ID NO: 1708549 - RNA, 14 nt, Human
acauuccuugcuga

SEQ ID NO: 1708550 - RNA, 14 nt, Human
ucaaauuuuaucug

SEQ ID NO: 1708551 - RNA, 22 nt, Human
ucaaauuuuaucugccucucuu

SEQ ID NO: 1708552 - RNA, 15 nt, Human
ucaguuuuugugaaa

SEQ ID NO: 1708553 - RNA, 17 nt, Human
ucaguuuuugugaaaag

SEQ ID NO: 1708554 - RNA, 20 nt, Human
ucaguuuuccucucaauaaa

SEQ ID NO: 1708555 - RNA, 22 nt, Human
ucauauaaauagaauguaaaug

SEQ ID NO: 1708556 - RNA, 14 nt, Human
ucauauaaauagaa

SEQ ID NO: 1708557 - RNA, 16 nt, Human
ucauauaaauagaaug

SEQ ID NO: 1708558 - RNA, 18 nt, Human
ucauauaaauagaaugua

SEQ ID NO: 1708559 - RNA, 21 nt, Human
ucauauaaauagaauguaaau

SEQ ID NO: 1708560 - RNA, 13 nt, Human
ucauauaaauaga

SEQ ID NO: 1708561 - RNA, 13 nt, Human
ucauaugcauauu

SEQ ID NO: 1708562 - RNA, 13 nt, Human
ucauauuucccau

SEQ ID NO: 1708563 - RNA, 19 nt, Human
ucauauuucccaugauuuc

SEQ ID NO: 1708564 - RNA, 21 nt, Human
ucauauuucccaugauuucau

SEQ ID NO: 1708565 - RNA, 22 nt, Human
ucauauuucccaugauuucaug

SEQ ID NO: 1708566 - RNA, 15 nt, Human
acuaauuuuaaaaug

SEQ ID NO: 1708567 - RNA, 19 nt, Human
acugcaccaguugcugcuu

SEQ ID NO: 1708568 - RNA, 23 nt, Human
acugagcacuguuuucuagugua

SEQ ID NO: 1708569 - RNA, 17 nt, Human
acugagcacuguuuucu

SEQ ID NO: 1708570 - RNA, 13 nt, Human
acugagcacuguu

SEQ ID NO: 1708571 - RNA, 15 nt, Human
acugagcacuguuuu

SEQ ID NO: 1708572 - RNA, 16 nt, Human
acugagcacuguuuuc

SEQ ID NO: 1708573 - RNA, 19 nt, Human
acuccauagaccuuuucau

SEQ ID NO: 1708574 - RNA, 13 nt, Human
agaauguaaaugu

SEQ ID NO: 1708575 - RNA, 14 nt, Human
agaauguaaauguc

SEQ ID NO: 1708576 - RNA, 17 nt, Human
agaauguaaaugucuca

SEQ ID NO: 1708577 - RNA, 19 nt, Human
agaauguaaaugucucacu

SEQ ID NO: 1708578 - RNA, 20 nt, Human
agaauccagcaccggcccca

SEQ ID NO: 1708579 - RNA, 22 nt, Human
agaauguaaaugucucacugag

SEQ ID NO: 1708580 - RNA, 17 nt, Human
agaauucaaauuuuauc

SEQ ID NO: 1708581 - RNA, 12 nt, Human
agaauucaaauu

SEQ ID NO: 1708582 - RNA, 17 nt, Human
acuuacagcaaauccuu

SEQ ID NO: 1708583 - RNA, 13 nt, Human
acuugcaaaauca

SEQ ID NO: 1708584 - RNA, 16 nt, Human
acuugcaaaaucaguu

SEQ ID NO: 1708585 - RNA, 17 nt, Human
acuugcaaaaucaguuu

SEQ ID NO: 1708586 - RNA, 18 nt, Human
acuugcaaaaucaguuuu

SEQ ID NO: 1708587 - RNA, 13 nt, Human
agauucagcuagu

SEQ ID NO: 1708588 - RNA, 21 nt, Human
ugaaugcuuaaagaauucaaa

SEQ ID NO: 1708589 - RNA, 22 nt, Human
ugaaugcuuaaagaauucaaau

SEQ ID NO: 1708590 - RNA, 17 nt, Human
ugaaugcuuaaagaauu

SEQ ID NO: 1708591 - RNA, 15 nt, Human
ugacauuccuugcug

SEQ ID NO: 1708592 - RNA, 14 nt, Human
ugagaagcugcuca

SEQ ID NO: 1708593 - RNA, 16 nt, Human
ugagaagcugcucaac

SEQ ID NO: 1708594 - RNA, 17 nt, Human
ugagaagcugcucaacu

SEQ ID NO: 1708595 - RNA, 13 nt, Human
ugagaagcugcuc

SEQ ID NO: 1708596 - RNA, 21 nt, Human
ugagaagcugcucaacuugca

SEQ ID NO: 1708597 - RNA, 13 nt, Human
ugaaguaaaacaa

SEQ ID NO: 1708598 - RNA, 22 nt, Human
ugaaguaaaacaaacaauaccu

SEQ ID NO: 1708599 - RNA, 23 nt, Human
ugaaguaaaacaaacaauaccug

SEQ ID NO: 1708600 - RNA, 13 nt, Human
ugaaagaaaauaa

SEQ ID NO: 1708601 - RNA, 16 nt, Human
agucagauucuugcau

SEQ ID NO: 1708602 - RNA, 17 nt, Human
agucagauucuugcauc

SEQ ID NO: 1708603 - RNA, 12 nt, Human
aguauugcaaag

SEQ ID NO: 1708604 - RNA, 21 nt, Human
aguauugacaaaauguuauuu

SEQ ID NO: 1708605 - RNA, 22 nt, Human
aguauugacaaaauguuauuuc

SEQ ID NO: 1708606 - RNA, 16 nt, Human
aguauugcaaagucag

SEQ ID NO: 1708607 - RNA, 19 nt, Human
uguagagaaaacaugcaga

SEQ ID NO: 1708608 - RNA, 17 nt, Human
agugagcaguguuagcu

SEQ ID NO: 1708609 - RNA, 17 nt, Human
agugaaagaaaauaaca

SEQ ID NO: 1708610 - RNA, 17 nt, Human
uguagagaaaacaugca

SEQ ID NO: 1708611 - RNA, 16 nt, Human
uguaaaggaauuuaaa

SEQ ID NO: 1708612 - RNA, 22 nt, Human
ugguccaugggccauaugaaaa

SEQ ID NO: 1708613 - RNA, 22 nt, Human
uggugaaaagcagguugauaaa

SEQ ID NO: 1708614 - RNA, 23 nt, Human
uggugaaaagcagguugauaaau

SEQ ID NO: 1708615 - RNA, 19 nt, Human
agguauaucuagguuuaug

SEQ ID NO: 1708616 - RNA, 22 nt, Human
agguauaucuagguuuaugaca

SEQ ID NO: 1708617 - RNA, 15 nt, Human
aggucagugcaaaua

SEQ ID NO: 1708618 - RNA, 22 nt, Human
uggguuuuuauuuccuaugaug

SEQ ID NO: 1708619 - RNA, 14 nt, Human
auaaugaauacuuu

SEQ ID NO: 1708620 - RNA, 22 nt, Human
auaaaccccaccccaaaauuag

SEQ ID NO: 1708621 - RNA, 23 nt, Human
auaaaccccaccccaaaauuagc

SEQ ID NO: 1708622 - RNA, 18 nt, Human
auaaacguggauguuacu

SEQ ID NO: 1708623 - RNA, 17 nt, Human
auaaacguggauguuac

SEQ ID NO: 1708624 - RNA, 21 nt, Human
uuagccaguaauccuguagga

SEQ ID NO: 1708625 - RNA, 14 nt, Human
uuauaccucaauuu

SEQ ID NO: 1708626 - RNA, 22 nt, Human
uuauaccucaauuuucacugug

SEQ ID NO: 1708627 - RNA, 21 nt, Human
uuauaccucaauuuucacugu

SEQ ID NO: 1708628 - RNA, 20 nt, Human
uuauagcucuaauguuugca

SEQ ID NO: 1708629 - RNA, 15 nt, Human
uuauagcucuaaugu

SEQ ID NO: 1708630 - RNA, 16 nt, Human
uuauagcucuaauguu

SEQ ID NO: 1708631 - RNA, 17 nt, Human
uuauagcucuaauguuu

SEQ ID NO: 1708632 - RNA, 18 nt, Human
uuauagcucuaauguuug

SEQ ID NO: 1708633 - RNA, 12 nt, Human
uuauagcucuaa

SEQ ID NO: 1708634 - RNA, 20 nt, Human
auacauucuucaagauccca

SEQ ID NO: 1708635 - RNA, 16 nt, Human
auacauuuuguaccaa

SEQ ID NO: 1708636 - RNA, 21 nt, Human
auacaguucggugagcuacaa

SEQ ID NO: 1708637 - RNA, 16 nt, Human
auacagcuuuuggauu

SEQ ID NO: 1708638 - RNA, 23 nt, Human
auacucaagagugguaucuugca

SEQ ID NO: 1708639 - RNA, 14 nt, Human
uguuguagagaaaa

SEQ ID NO: 1708640 - RNA, 17 nt, Human
uguuguagagaaaacau

SEQ ID NO: 1708641 - RNA, 23 nt, Human
uguuguagagaaaacaugcagaa

SEQ ID NO: 1708642 - RNA, 14 nt, Human
aguuccugugcaca

SEQ ID NO: 1708643 - RNA, 16 nt, Human
aguuccugugcacagc

SEQ ID NO: 1708644 - RNA, 17 nt, Human
aguuccugugcacagcc

SEQ ID NO: 1708645 - RNA, 20 nt, Human
aguuauuauauuuacaaaug

SEQ ID NO: 1708646 - RNA, 14 nt, Human
aguguaaugaauac

SEQ ID NO: 1708647 - RNA, 16 nt, Human
aguguaaugaauaccu

SEQ ID NO: 1708648 - RNA, 22 nt, Human
aguguaaugaauaccuuagugc

SEQ ID NO: 1708649 - RNA, 12 nt, Human
uguuaugaugug

SEQ ID NO: 1708650 - RNA, 14 nt, Human
uguuaugaugugcu

SEQ ID NO: 1708651 - RNA, 16 nt, Human
uguuaugaugugcuua

SEQ ID NO: 1708652 - RNA, 17 nt, Human
uguuaugaugugcuuaa

SEQ ID NO: 1708653 - RNA, 19 nt, Human
uguuaugaugugcuuaaca

SEQ ID NO: 1708654 - RNA, 22 nt, Human
uguuaugaugugcuuaacaggg

SEQ ID NO: 1708655 - RNA, 13 nt, Human
uguuuucuagugu

SEQ ID NO: 1708656 - RNA, 14 nt, Human
uguuuucuagugua

SEQ ID NO: 1708657 - RNA, 15 nt, Human
uguuuucuaguguau

SEQ ID NO: 1708658 - RNA, 16 nt, Human
uguuuucuaguguauc

SEQ ID NO: 1708659 - RNA, 18 nt, Human
uguuuucuaguguaucaa

SEQ ID NO: 1708660 - RNA, 19 nt, Human
uguuuucuaguguaucaaa

SEQ ID NO: 1708661 - RNA, 20 nt, Human
uguuuucuaguguaucaaaa

SEQ ID NO: 1708662 - RNA, 21 nt, Human
uguuuucuaguguaucaaaau

SEQ ID NO: 1708663 - RNA, 13 nt, Human
uguuugcauauaa

SEQ ID NO: 1708664 - RNA, 14 nt, Human
uguuugcauauaag

SEQ ID NO: 1708665 - RNA, 16 nt, Human
aguugcacagcaucuc

SEQ ID NO: 1708666 - RNA, 17 nt, Human
aguugcacagcaucuca

SEQ ID NO: 1708667 - RNA, 12 nt, Human
aguugcacagca

SEQ ID NO: 1708668 - RNA, 13 nt, Human
aguugcacagcau

SEQ ID NO: 1708669 - RNA, 14 nt, Human
aguugcacagcauc

SEQ ID NO: 1708670 - RNA, 15 nt, Human
aguugcacagcaucu

SEQ ID NO: 1708671 - RNA, 11 nt, Human
aguugcacagc

SEQ ID NO: 1708672 - RNA, 22 nt, Human
aguugcauagguuuaauaauuu

SEQ ID NO: 1708673 - RNA, 20 nt, Human
aguugcacagcaucucagcu

SEQ ID NO: 1708674 - RNA, 13 nt, Human
ugauuucauguac

SEQ ID NO: 1708675 - RNA, 15 nt, Human
ugauuucauguacug

SEQ ID NO: 1708676 - RNA, 16 nt, Human
ugauuucauguacugc

SEQ ID NO: 1708677 - RNA, 17 nt, Human
ugauuucauguacugca

SEQ ID NO: 1708678 - RNA, 18 nt, Human
ugauuucauguacugcau

SEQ ID NO: 1708679 - RNA, 18 nt, Human
ugcaauacaaguuucauc

SEQ ID NO: 1708680 - RNA, 23 nt, Human
ugcaauacaaguuucauccagaa

SEQ ID NO: 1708681 - RNA, 16 nt, Human
ugcaauacaaguuuca

SEQ ID NO: 1708682 - RNA, 17 nt, Human
ugcaauacaaguuucau

SEQ ID NO: 1708683 - RNA, 21 nt, Human
agcucuaauguuugcauauaa

SEQ ID NO: 1708684 - RNA, 14 nt, Human
agcucuaauguuug

SEQ ID NO: 1708685 - RNA, 17 nt, Human
agcucuaauguuugcau

SEQ ID NO: 1708686 - RNA, 18 nt, Human
agcucuaauguuugcaua

SEQ ID NO: 1708687 - RNA, 20 nt, Human
agcucuaauguuugcauaua

SEQ ID NO: 1708688 - RNA, 22 nt, Human
agcucuaauguuugcauauaag

SEQ ID NO: 1708689 - RNA, 14 nt, Human
agcuccauuuaaac

SEQ ID NO: 1708690 - RNA, 15 nt, Human
agcuccauuuaaaca

SEQ ID NO: 1708691 - RNA, 18 nt, Human
agcuccauuuaaacagau

SEQ ID NO: 1708692 - RNA, 21 nt, Human
agcuccauuuaaacagauguc

SEQ ID NO: 1708693 - RNA, 19 nt, Human
ugccaggaacccuuaaaca

SEQ ID NO: 1708694 - RNA, 23 nt, Human
ugcauuauuugagaagcugcuca

SEQ ID NO: 1708695 - RNA, 14 nt, Human
agcgcacucuucau

SEQ ID NO: 1708696 - RNA, 15 nt, Human
ugcauuauuugagaa

SEQ ID NO: 1708697 - RNA, 16 nt, Human
ugcauuauuugagaag

SEQ ID NO: 1708698 - RNA, 11 nt, Human
aggaauuuaaa

SEQ ID NO: 1708699 - RNA, 21 nt, Human
ugcuguacugaaguaaaacaa

SEQ ID NO: 1708700 - RNA, 16 nt, Human
ugcuuauauuguucac

SEQ ID NO: 1708701 - RNA, 18 nt, Human
uggacgagaaaacaauaa

SEQ ID NO: 1708702 - RNA, 22 nt, Human
aggcugcuguacugaaguaaaa

SEQ ID NO: 1708703 - RNA, 23 nt, Human
uggcuagauuaaccuucucuguc

SEQ ID NO: 1708704 - RNA, 19 nt, Human
uucuucgacuguuguuauc

SEQ ID NO: 1708705 - RNA, 20 nt, Human
auccaauuagcuuauguuaa

SEQ ID NO: 1708706 - RNA, 22 nt, Human
auccaauuagcuuauguuaacu

SEQ ID NO: 1708707 - RNA, 21 nt, Human
aucaguuacacaugaucauaa

SEQ ID NO: 1708708 - RNA, 24 nt, Human
aucauauaaauagaauguaaaugu

SEQ ID NO: 1708709 - RNA, 14 nt, Human
aucauauaaauaga

SEQ ID NO: 1708710 - RNA, 18 nt, Human
aucauauaaauagaaugu

SEQ ID NO: 1708711 - RNA, 19 nt, Human
aucauauaaauagaaugua

SEQ ID NO: 1708712 - RNA, 21 nt, Human
aucauauaaauagaauguaaa

SEQ ID NO: 1708713 - RNA, 22 nt, Human
aucauauaaauagaauguaaau

SEQ ID NO: 1708714 - RNA, 23 nt, Human
aucauauaaauagaauguaaaug

SEQ ID NO: 1708715 - RNA, 15 nt, Human
uugauaaaucauuuu

SEQ ID NO: 1708716 - RNA, 21 nt, Human
uugauaaaucauuuuauguca

SEQ ID NO: 1708717 - RNA, 18 nt, Human
uugauaaaucauuuuaug

SEQ ID NO: 1708718 - RNA, 17 nt, Human
uugagaaagucagauuc

SEQ ID NO: 1708719 - RNA, 16 nt, Human
uugagaagcugcucaa

SEQ ID NO: 1708720 - RNA, 13 nt, Human
uugagaagcugcu

SEQ ID NO: 1708721 - RNA, 15 nt, Human
uugagaagcugcuca

SEQ ID NO: 1708722 - RNA, 22 nt, Human
auccucuuccauauggauccac

SEQ ID NO: 1708723 - RNA, 21 nt, Human
auccuguaggaagguacugua

SEQ ID NO: 1708724 - RNA, 19 nt, Human
auccuguaggaagguacug

SEQ ID NO: 1708725 - RNA, 20 nt, Human
auccuguaggaagguacugu

SEQ ID NO: 1708726 - RNA, 22 nt, Human
auccuguaggaagguacuguau

SEQ ID NO: 1708727 - RNA, 13 nt, Human
auauuuacaaaug

SEQ ID NO: 1708728 - RNA, 19 nt, Human
uucccuacauuaaacauga

SEQ ID NO: 1708729 - RNA, 14 nt, Human
uucccuacauuaaa

SEQ ID NO: 1708730 - RNA, 20 nt, Human
auaugcaaacaggguaacua

SEQ ID NO: 1708731 - RNA, 17 nt, Human
uuccaauuuaguuguug

SEQ ID NO: 1708732 - RNA, 16 nt, Human
uucacuucacugugcu

SEQ ID NO: 1708733 - RNA, 11 nt, Human
uuaucauguua

SEQ ID NO: 1708734 - RNA, 17 nt, Human
uuaucauguuaguaaua

SEQ ID NO: 1708735 - RNA, 18 nt, Human
uuaucauguuaguaauac

SEQ ID NO: 1708736 - RNA, 22 nt, Human
uuaucauguuaguaauaccucu

SEQ ID NO: 1708737 - RNA, 23 nt, Human
uuaucauguuaguaauaccucua

SEQ ID NO: 1708738 - RNA, 15 nt, Human
uucacuucacugugc

SEQ ID NO: 1708739 - RNA, 13 nt, Human
auauaugcuaagu

SEQ ID NO: 1708740 - RNA, 12 nt, Human
uucauaugcaua

SEQ ID NO: 1708741 - RNA, 20 nt, Human
augcuuauauuguucacuuc

SEQ ID NO: 1708742 - RNA, 15 nt, Human
uuuagcugacaaaau

SEQ ID NO: 1708743 - RNA, 19 nt, Human
uuucuaguguaucaaaaug

SEQ ID NO: 1708744 - RNA, 20 nt, Human
uuucuaguguaucaaaaugc

SEQ ID NO: 1708745 - RNA, 21 nt, Human
uuucuaguguaucaaaaugcu

SEQ ID NO: 1708746 - RNA, 16 nt, Human
uuucuaguguaucaaa

SEQ ID NO: 1708747 - RNA, 13 nt, Human
uuucugcaucucc

SEQ ID NO: 1708748 - RNA, 16 nt, Human
uuucugcaucuccacu

SEQ ID NO: 1708749 - RNA, 15 nt, Human
uuucugcaucuccac

SEQ ID NO: 1708750 - RNA, 13 nt, Human
augaucugauuga

SEQ ID NO: 1708751 - RNA, 13 nt, Human
augaucaaauguu

SEQ ID NO: 1708752 - RNA, 14 nt, Human
augaucaaauguuu

SEQ ID NO: 1708753 - RNA, 15 nt, Human
augaucaaauguuua

SEQ ID NO: 1708754 - RNA, 16 nt, Human
augaucaaauguuuaa

SEQ ID NO: 1708755 - RNA, 17 nt, Human
augaucaaauguuuaau

SEQ ID NO: 1708756 - RNA, 19 nt, Human
augaucaaauguuuaauca

SEQ ID NO: 1708757 - RNA, 20 nt, Human
augaucaaauguuuaaucau

SEQ ID NO: 1708758 - RNA, 12 nt, Human
augaucaaaugu

SEQ ID NO: 1708759 - RNA, 21 nt, Human
augacaagaaaggcugcugua

SEQ ID NO: 1708760 - RNA, 21 nt, Human
augacaguaauuguguuuaca

SEQ ID NO: 1708761 - RNA, 22 nt, Human
augacaguaauuguguuuacau

SEQ ID NO: 1708762 - RNA, 12 nt, Human
augacaguaauu

SEQ ID NO: 1708763 - RNA, 20 nt, Human
augacaguaauuguguuuac

SEQ ID NO: 1708764 - RNA, 15 nt, Human
uugcugaaugcaaga

SEQ ID NO: 1708765 - RNA, 22 nt, Human
auuuucaguuauuauauuuaca

SEQ ID NO: 1708766 - RNA, 13 nt, Human
auuuucacugugu

SEQ ID NO: 1708767 - RNA, 14 nt, Human
auuuucacuguguc

SEQ ID NO: 1708768 - RNA, 18 nt, Human
auucuucaagaucccauu

SEQ ID NO: 1708769 - RNA, 21 nt, Human
auucuucaagaucccauuuga

SEQ ID NO: 1708770 - RNA, 15 nt, Human
auugugcauucuaga

SEQ ID NO: 1708771 - RNA, 18 nt, Human
auuucccaugauuucaug

SEQ ID NO: 1708772 - RNA, 12 nt, Human
auucccucccca

SEQ ID NO: 1708773 - RNA, 11 nt, Human
uuuuauuuccu

SEQ ID NO: 1708774 - RNA, 18 nt, Human
uuuuauuuccuaugaugu

SEQ ID NO: 1708775 - RNA, 16 nt, Human
uuuuauuuccuaugau

SEQ ID NO: 1708776 - RNA, 23 nt, Human
auuaaacaugacuccauagaccu

SEQ ID NO: 1708777 - RNA, 19 nt, Human
uuuuugugaaaagcuccau

SEQ ID NO: 1708778 - RNA, 15 nt, Human
auuacuuaguauugc

SEQ ID NO: 1708779 - RNA, 18 nt, Human
auuacuuaguauugcaaa

SEQ ID NO: 1708780 - RNA, 22 nt, Human
auuacuuaguauugcaaaguca

SEQ ID NO: 1708781 - RNA, 20 nt, Human
uuuuuacccauuuguucaua

SEQ ID NO: 1708782 - RNA, 13 nt, Human
caauuugaugugg

SEQ ID NO: 1708783 - RNA, 16 nt, Human
caauacaaguuucauc

SEQ ID NO: 1708784 - RNA, 21 nt, Human
caauacaaguuucauccagaa

SEQ ID NO: 1708785 - RNA, 12 nt, Human
caaguguaauga

SEQ ID NO: 1708786 - RNA, 15 nt, Human
caaguguaaugaaua

SEQ ID NO: 1708787 - RNA, 19 nt, Human
caaguguaaugaauaccuu

SEQ ID NO: 1708788 - RNA, 18 nt, Human
caaguguaaugaauaccu

SEQ ID NO: 1708789 - RNA, 21 nt, Human
caaaacuucguuuaaugaaug

SEQ ID NO: 1708790 - RNA, 18 nt, Human
caaaauguuauuucccua

SEQ ID NO: 1708791 - RNA, 16 nt, Human
caaaauguuauuuccc

SEQ ID NO: 1708792 - RNA, 17 nt, Human
caaaauguuauuucccu

SEQ ID NO: 1708793 - RNA, 23 nt, Human
caaaauuagccaguaauccugua

SEQ ID NO: 1708794 - RNA, 13 nt, Human
caaaauuagccag

SEQ ID NO: 1708795 - RNA, 20 nt, Human
caaaauuagccaguaauccu

SEQ ID NO: 1708796 - RNA, 21 nt, Human
caaaauuagccaguaauccug

SEQ ID NO: 1708797 - RNA, 22 nt, Human
caaaauuagccaguaauccugu

SEQ ID NO: 1708798 - RNA, 22 nt, Human
caaaaugcucuuauuucaucau

SEQ ID NO: 1708799 - RNA, 13 nt, Human
cacugagcacugu

SEQ ID NO: 1708800 - RNA, 15 nt, Human
cacugagcacuguuu

SEQ ID NO: 1708801 - RNA, 16 nt, Human
cacugagcacuguuuu

SEQ ID NO: 1708802 - RNA, 17 nt, Human
cacugagcacuguuuuc

SEQ ID NO: 1708803 - RNA, 18 nt, Human
cacugagcacuguuuucu

SEQ ID NO: 1708804 - RNA, 22 nt, Human
cacugagcacuguuuucuagug

SEQ ID NO: 1708805 - RNA, 19 nt, Human
cacugagcacuguuuucua

SEQ ID NO: 1708806 - RNA, 14 nt, Human
cacugugcuguugu

SEQ ID NO: 1708807 - RNA, 15 nt, Human
cacugugcuguuguu

SEQ ID NO: 1708808 - RNA, 17 nt, Human
cacugugcuguuguuau

SEQ ID NO: 1708809 - RNA, 19 nt, Human
cacugugcuguuguuauga

SEQ ID NO: 1708810 - RNA, 20 nt, Human
cacugugcuguuguuaugau

SEQ ID NO: 1708811 - RNA, 23 nt, Human
cacugugcuguuguuaugaugug

SEQ ID NO: 1708812 - RNA, 21 nt, Human
cacugugcuguuguuaugaug

SEQ ID NO: 1708813 - RNA, 12 nt, Human
cacuucacugug

SEQ ID NO: 1708814 - RNA, 13 nt, Human
cacuucacugugc

SEQ ID NO: 1708815 - RNA, 15 nt, Human
cacuucacugugcug

SEQ ID NO: 1708816 - RNA, 13 nt, Human
cacuaaacaaaga

SEQ ID NO: 1708817 - RNA, 19 nt, Human
cacucgaggucgggcagca

SEQ ID NO: 1708818 - RNA, 22 nt, Human
caccggccccauuuacccaacu

SEQ ID NO: 1708819 - RNA, 23 nt, Human
cagaugacaagaaaggcugcugu

SEQ ID NO: 1708820 - RNA, 19 nt, Human
cagaacuaccaccugacau

SEQ ID NO: 1708821 - RNA, 14 nt, Human
cagacauugugcua

SEQ ID NO: 1708822 - RNA, 15 nt, Human
cagauucuugcaucc

SEQ ID NO: 1708823 - RNA, 16 nt, Human
cagauguccaucagau

SEQ ID NO: 1708824 - RNA, 19 nt, Human
cagauguccaucagaugac

SEQ ID NO: 1708825 - RNA, 21 nt, Human
cagauguccaucagaugacaa

SEQ ID NO: 1708826 - RNA, 15 nt, Human
cagaugucuauauug

SEQ ID NO: 1708827 - RNA, 18 nt, Human
cagcaaauccuuugugaa

SEQ ID NO: 1708828 - RNA, 16 nt, Human
cagcaaauccuuugug

SEQ ID NO: 1708829 - RNA, 13 nt, Human
cagcaucucagcu

SEQ ID NO: 1708830 - RNA, 14 nt, Human
cagcaucucagcuc

SEQ ID NO: 1708831 - RNA, 15 nt, Human
caggaacguuuagcu

SEQ ID NO: 1708832 - RNA, 23 nt, Human
cagcuuuuggauuggacaaaaug

SEQ ID NO: 1708833 - RNA, 16 nt, Human
cagcuuugcucauauu

SEQ ID NO: 1708834 - RNA, 21 nt, Human
cagcuuugcucauauuuccca

SEQ ID NO: 1708835 - RNA, 20 nt, Human
cagcuuugcucauauuuccc

SEQ ID NO: 1708836 - RNA, 20 nt, Human
caguaucggcacuguacaaa

SEQ ID NO: 1708837 - RNA, 19 nt, Human
caguaucggcacuguacaa

SEQ ID NO: 1708838 - RNA, 14 nt, Human
caguaucggcacug

SEQ ID NO: 1708839 - RNA, 15 nt, Human
caguaucggcacugu

SEQ ID NO: 1708840 - RNA, 16 nt, Human
caguaucggcacugua

SEQ ID NO: 1708841 - RNA, 20 nt, Human
cagugaaagaaaauaacaau

SEQ ID NO: 1708842 - RNA, 16 nt, Human
cagugaaagaaaauaa

SEQ ID NO: 1708843 - RNA, 12 nt, Human
caggguaacuaa

SEQ ID NO: 1708844 - RNA, 19 nt, Human
caggguaacuaacuaaaac

SEQ ID NO: 1708845 - RNA, 22 nt, Human
caggguaacuaacuaaaacaaa

SEQ ID NO: 1708846 - RNA, 21 nt, Human
caggguaacuaacuaaaacaa

SEQ ID NO: 1708847 - RNA, 17 nt, Human
caguaauuguguuuaca

SEQ ID NO: 1708848 - RNA, 18 nt, Human
caguaauuguguuuacau

SEQ ID NO: 1708849 - RNA, 20 nt, Human
caguaauuguguuuacauuu

SEQ ID NO: 1708850 - RNA, 23 nt, Human
caguaauccuguaggaagguacu

SEQ ID NO: 1708851 - RNA, 12 nt, Human
caguaauccugu

SEQ ID NO: 1708852 - RNA, 13 nt, Human
caguaauccugua

SEQ ID NO: 1708853 - RNA, 16 nt, Human
caguaauccuguagga

SEQ ID NO: 1708854 - RNA, 17 nt, Human
caguaauccuguaggaa

SEQ ID NO: 1708855 - RNA, 21 nt, Human
caguaauccuguaggaaggua

SEQ ID NO: 1708856 - RNA, 18 nt, Human
cagggaacgugauuagug

SEQ ID NO: 1708857 - RNA, 19 nt, Human
cagggaacgugauuaguga

SEQ ID NO: 1708858 - RNA, 17 nt, Human
caugaagaccuuuuucu

SEQ ID NO: 1708859 - RNA, 19 nt, Human
caugaagaccuuuuucugc

SEQ ID NO: 1708860 - RNA, 20 nt, Human
caugaagaccuuuuucugca

SEQ ID NO: 1708861 - RNA, 15 nt, Human
caugaagaccuuuuu

SEQ ID NO: 1708862 - RNA, 22 nt, Human
caugaagaccuuuuucugcacu

SEQ ID NO: 1708863 - RNA, 23 nt, Human
cauauaagggaaguaguuaucau

SEQ ID NO: 1708864 - RNA, 17 nt, Human
cauauaaauagaaugua

SEQ ID NO: 1708865 - RNA, 20 nt, Human
cauauaaauagaauguaaau

SEQ ID NO: 1708866 - RNA, 21 nt, Human
cauauaaauagaauguaaaug

SEQ ID NO: 1708867 - RNA, 22 nt, Human
cauauaaauagaauguaaaugu

SEQ ID NO: 1708868 - RNA, 19 nt, Human
cauauaagggaaguaguua

SEQ ID NO: 1708869 - RNA, 19 nt, Human
caucauucacuucacugug

SEQ ID NO: 1708870 - RNA, 16 nt, Human
caucauucacuucacu

SEQ ID NO: 1708871 - RNA, 17 nt, Human
caucauucacuucacug

SEQ ID NO: 1708872 - RNA, 18 nt, Human
caucauucacuucacugu

SEQ ID NO: 1708873 - RNA, 20 nt, Human
caucauucacuucacugugc

SEQ ID NO: 1708874 - RNA, 15 nt, Human
cauguacugcauuau

SEQ ID NO: 1708875 - RNA, 16 nt, Human
cauguacugcauuauu

SEQ ID NO: 1708876 - RNA, 17 nt, Human
cauguacugcauuauuu

SEQ ID NO: 1708877 - RNA, 22 nt, Human
cauguacugcauuauuugagaa

SEQ ID NO: 1708878 - RNA, 23 nt, Human
cauguacugcauuauuugagaag

SEQ ID NO: 1708879 - RNA, 23 nt, Human
cauggaaacaagaugaaauucca

SEQ ID NO: 1708880 - RNA, 20 nt, Human
caugcagaacaaaugaagac

SEQ ID NO: 1708881 - RNA, 19 nt, Human
caugcagaacaaaugaaga

SEQ ID NO: 1708882 - RNA, 23 nt, Human
ccaaaauuagccaguaauccugu

SEQ ID NO: 1708883 - RNA, 14 nt, Human
cauuuucugcaucu

SEQ ID NO: 1708884 - RNA, 16 nt, Human
cauuuucugcaucucc

SEQ ID NO: 1708885 - RNA, 17 nt, Human
cauuuucugcaucucca

SEQ ID NO: 1708886 - RNA, 15 nt, Human
cauuaaacaugacuc

SEQ ID NO: 1708887 - RNA, 14 nt, Human
cauucaagauuccc

SEQ ID NO: 1708888 - RNA, 14 nt, Human
cauucacuucacug

SEQ ID NO: 1708889 - RNA, 17 nt, Human
cauucacuucacugugc

SEQ ID NO: 1708890 - RNA, 18 nt, Human
cauucacuucacugugcu

SEQ ID NO: 1708891 - RNA, 19 nt, Human
cauucacuucacugugcug

SEQ ID NO: 1708892 - RNA, 20 nt, Human
cauucacuucacugugcugu

SEQ ID NO: 1708893 - RNA, 13 nt, Human
cauucuggaauaa

SEQ ID NO: 1708894 - RNA, 12 nt, Human
cauucuucaaga

SEQ ID NO: 1708895 - RNA, 13 nt, Human
cauucuucaagau

SEQ ID NO: 1708896 - RNA, 17 nt, Human
cauucuucaagauccca

SEQ ID NO: 1708897 - RNA, 18 nt, Human
cauuccucccauucaaga

SEQ ID NO: 1708898 - RNA, 19 nt, Human
cauuccucccauucaagau

SEQ ID NO: 1708899 - RNA, 13 nt, Human
ccauuuguucaua

SEQ ID NO: 1708900 - RNA, 16 nt, Human
ccacuggcuggacaaa

SEQ ID NO: 1708901 - RNA, 20 nt, Human
ccaccugacauuccuugcug

SEQ ID NO: 1708902 - RNA, 23 nt, Human
ccacuggcuggacaaacugcacc

SEQ ID NO: 1708903 - RNA, 17 nt, Human
ccugacauuccuugcug

SEQ ID NO: 1708904 - RNA, 18 nt, Human
ccugacauuccuugcuga

SEQ ID NO: 1708905 - RNA, 20 nt, Human
ccugccuuuuaguuccugug

SEQ ID NO: 1708906 - RNA, 22 nt, Human
ccugccuuuuaguuccugugca

SEQ ID NO: 1708907 - RNA, 19 nt, Human
ccuuaaacaguugcacagc

SEQ ID NO: 1708908 - RNA, 20 nt, Human
ccuuaaacaguugcacagca

SEQ ID NO: 1708909 - RNA, 21 nt, Human
ccuguuuauucauaugcauau

SEQ ID NO: 1708910 - RNA, 14 nt, Human
ccuuguccccauga

SEQ ID NO: 1708911 - RNA, 14 nt, Human
ccuugaagguauau

SEQ ID NO: 1708912 - RNA, 16 nt, Human
ccuuuuaguuccugug

SEQ ID NO: 1708913 - RNA, 22 nt, Human
ccuuuuaguuccugugcacagc

SEQ ID NO: 1708914 - RNA, 19 nt, Human
cgacuguuguuaucuguuu

SEQ ID NO: 1708915 - RNA, 11 nt, Human
cgacuguuguu

SEQ ID NO: 1708916 - RNA, 22 nt, Human
ccuaugauguauacugccacua

SEQ ID NO: 1708917 - RNA, 21 nt, Human
cuucaauuuauaccucaauuu

SEQ ID NO: 1708918 - RNA, 13 nt, Human
cuuaguauugcaa

SEQ ID NO: 1708919 - RNA, 18 nt, Human
cuucaagaucccauuuga

SEQ ID NO: 1708920 - RNA, 14 nt, Human
cuuccaaaaauuac

SEQ ID NO: 1708921 - RNA, 19 nt, Human
cuuaacagggaacgugauu

SEQ ID NO: 1708922 - RNA, 20 nt, Human
cuguuuucuaguguaucaaa

SEQ ID NO: 1708923 - RNA, 22 nt, Human
cuguuuucuaguguaucaaaau

SEQ ID NO: 1708924 - RNA, 15 nt, Human
cuguuuucuagugua

SEQ ID NO: 1708925 - RNA, 17 nt, Human
cuguuuucuaguguauc

SEQ ID NO: 1708926 - RNA, 18 nt, Human
cuguuuucuaguguauca

SEQ ID NO: 1708927 - RNA, 21 nt, Human
cuguuuauucauaugcauauu

SEQ ID NO: 1708928 - RNA, 12 nt, Human
cuguuugagaaa

SEQ ID NO: 1708929 - RNA, 13 nt, Human
cuguuugagaaag

SEQ ID NO: 1708930 - RNA, 21 nt, Human
cuuuauuuucuauaauuuaaa

SEQ ID NO: 1708931 - RNA, 19 nt, Human
cuuguaaaggaauuuaaaa

SEQ ID NO: 1708932 - RNA, 20 nt, Human
gaaaaucuuauaauuuaaaa

SEQ ID NO: 1708933 - RNA, 19 nt, Human
gaaaauaacgauaaaagac

SEQ ID NO: 1708934 - RNA, 19 nt, Human
gaaaaucuuauaauuuaaa

SEQ ID NO: 1708935 - RNA, 22 nt, Human
gaaaacaauaacgauaaaagac

SEQ ID NO: 1708936 - RNA, 14 nt, Human
gaaaacaugcagaa

SEQ ID NO: 1708937 - RNA, 13 nt, Human
gaagguacuguau

SEQ ID NO: 1708938 - RNA, 14 nt, Human
gaauacuuuauaaa

SEQ ID NO: 1708939 - RNA, 20 nt, Human
gaauaauccuaaacauauga

SEQ ID NO: 1708940 - RNA, 22 nt, Human
gaacgugauuagugaaaggaag

SEQ ID NO: 1708941 - RNA, 20 nt, Human
gaacguuuagcugacaaaau

SEQ ID NO: 1708942 - RNA, 21 nt, Human
gaacuuguaaaggaauuuaaa

SEQ ID NO: 1708943 - RNA, 18 nt, Human
cugcaauacaaguuucau

SEQ ID NO: 1708944 - RNA, 17 nt, Human
cugccuuuuaguuccug

SEQ ID NO: 1708945 - RNA, 19 nt, Human
cugccuuuuaguuccugug

SEQ ID NO: 1708946 - RNA, 20 nt, Human
cugccuuuuaguuccugugc

SEQ ID NO: 1708947 - RNA, 23 nt, Human
cugccuuuuaguuccugugcaca

SEQ ID NO: 1708948 - RNA, 21 nt, Human
cugccuuuuaguuccugugca

SEQ ID NO: 1708949 - RNA, 14 nt, Human
cugaaugcucugua

SEQ ID NO: 1708950 - RNA, 14 nt, Human
cugagcacuguuuu

SEQ ID NO: 1708951 - RNA, 15 nt, Human
cugagcacuguuuuc

SEQ ID NO: 1708952 - RNA, 23 nt, Human
cugagcacuguuuucuaguguau

SEQ ID NO: 1708953 - RNA, 21 nt, Human
cugagcacuguuuucuagugu

SEQ ID NO: 1708954 - RNA, 13 nt, Human
cugagcacuguuu

SEQ ID NO: 1708955 - RNA, 12 nt, Human
cugagcacuguu

SEQ ID NO: 1708956 - RNA, 19 nt, Human
cuccaaaacuucguuuaau

SEQ ID NO: 1708957 - RNA, 20 nt, Human
cuauauugcugaaugcaaga

SEQ ID NO: 1708958 - RNA, 12 nt, Human
cuagguuuauga

SEQ ID NO: 1708959 - RNA, 16 nt, Human
cuagguuuaugacagu

SEQ ID NO: 1708960 - RNA, 15 nt, Human
cucacugagcacugu

SEQ ID NO: 1708961 - RNA, 16 nt, Human
cucacugagcacuguu

SEQ ID NO: 1708962 - RNA, 18 nt, Human
cucacugagcacuguuuu

SEQ ID NO: 1708963 - RNA, 17 nt, Human
cucacugagcacuguuu

SEQ ID NO: 1708964 - RNA, 13 nt, Human
gagcuacaaaugc

SEQ ID NO: 1708965 - RNA, 12 nt, Human
gagcuacaaaug

SEQ ID NO: 1708966 - RNA, 14 nt, Human
gagcuacaaaugca

SEQ ID NO: 1708967 - RNA, 22 nt, Human
gagcacuguuuucuaguguauc

SEQ ID NO: 1708968 - RNA, 14 nt, Human
gagcacuguuuucu

SEQ ID NO: 1708969 - RNA, 21 nt, Human
gaguugaaaaucuuauaauuu

SEQ ID NO: 1708970 - RNA, 13 nt, Human
gaugugcuuaaca

SEQ ID NO: 1708971 - RNA, 14 nt, Human
gaugugcuuaacag

SEQ ID NO: 1708972 - RNA, 24 nt, Human
gauugaccguguuggucuguacug

SEQ ID NO: 1708973 - RNA, 14 nt, Human
gauuggacaaaaug

SEQ ID NO: 1708974 - RNA, 15 nt, Human
gauuggacaaaauga

SEQ ID NO: 1708975 - RNA, 22 nt, Human
gaugggacaauuagauaaaugu

SEQ ID NO: 1708976 - RNA, 23 nt, Human
gcacuguuuucuaguguaucaaa

SEQ ID NO: 1708977 - RNA, 13 nt, Human
gcacagcaucuca

SEQ ID NO: 1708978 - RNA, 18 nt, Human
gcacagcaucucagcuca

SEQ ID NO: 1708979 - RNA, 19 nt, Human
gcacuguuuucuaguguau

SEQ ID NO: 1708980 - RNA, 20 nt, Human
gcacuguuuucuaguguauc

SEQ ID NO: 1708981 - RNA, 21 nt, Human
gcacuguuuucuaguguauca

SEQ ID NO: 1708982 - RNA, 22 nt, Human
gcacuguuuucuaguguaucaa

SEQ ID NO: 1708983 - RNA, 20 nt, Human
gcaucuaguuccccuguuua

SEQ ID NO: 1708984 - RNA, 22 nt, Human
gcaucuaguuccccuguuuauu

SEQ ID NO: 1708985 - RNA, 22 nt, Human
gcaucucagcucaucuucacug

SEQ ID NO: 1708986 - RNA, 14 nt, Human
gcaucucagcucau

SEQ ID NO: 1708987 - RNA, 17 nt, Human
gccacacgagaaccuga

SEQ ID NO: 1708988 - RNA, 15 nt, Human
gcuuauauuguucac

SEQ ID NO: 1708989 - RNA, 19 nt, Human
gcuggacaaacugcaccag

SEQ ID NO: 1708990 - RNA, 14 nt, Human
gcuggacaaacugc

SEQ ID NO: 1708991 - RNA, 15 nt, Human
gcucauauuucccau

SEQ ID NO: 1708992 - RNA, 15 nt, Human
ucaucaggaacguuu

SEQ ID NO: 1708993 - RNA, 13 nt, Human
ucaucuucacugc

SEQ ID NO: 1708994 - RNA, 18 nt, Human
uccaauuuaguuguugua

SEQ ID NO: 1708995 - RNA, 12 nt, Human
uauuaagaauga

SEQ ID NO: 1708996 - RNA, 23 nt, Human
uaugucaagggcagcuuugcuca

SEQ ID NO: 1708997 - RNA, 16 nt, Human
uaugucaagggcagcu

SEQ ID NO: 1708998 - RNA, 23 nt, Human
uauggauccacuggcuggacaaa

SEQ ID NO: 1708999 - RNA, 22 nt, Human
uauggugccuaguauugacaaa

SEQ ID NO: 1709000 - RNA, 23 nt, Human
uauucuaacuuuuauuuuuauca

SEQ ID NO: 1709001 - RNA, 17 nt, Human
uauugcugaaugcaaga

SEQ ID NO: 1709002 - RNA, 14 nt, Human
ucaauaaaauuaua

SEQ ID NO: 1709003 - RNA, 15 nt, Human
ucaauaaaauuauag

SEQ ID NO: 1709004 - RNA, 17 nt, Human
ucaauaaaauuauagcu

SEQ ID NO: 1709005 - RNA, 19 nt, Human
ucaauaaaauuauagcucu

SEQ ID NO: 1709006 - RNA, 21 nt, Human
ucaaauguuuaaucauauaaa

SEQ ID NO: 1709007 - RNA, 13 nt, Human
ucugcaucuccac

SEQ ID NO: 1709008 - RNA, 11 nt, Human
ucugcaucucc

SEQ ID NO: 1709009 - RNA, 15 nt, Human
ucucuguccgagugu

SEQ ID NO: 1709010 - RNA, 22 nt, Human
ucucaauaaaauuauagcucua

SEQ ID NO: 1709011 - RNA, 23 nt, Human
ucucaauaaaauuauagcucuaa

SEQ ID NO: 1709012 - RNA, 21 nt, Human
ucucaauaaaauuauagcucu

SEQ ID NO: 1709013 - RNA, 13 nt, Human
ucuaauguuugca

SEQ ID NO: 1709014 - RNA, 14 nt, Human
ucuaauguuugcau

SEQ ID NO: 1709015 - RNA, 15 nt, Human
ucuaauguuugcaua

SEQ ID NO: 1709016 - RNA, 16 nt, Human
ucuaauguuugcauau

SEQ ID NO: 1709017 - RNA, 17 nt, Human
ucuaauguuugcauaua

SEQ ID NO: 1709018 - RNA, 19 nt, Human
ucuaauguuugcauauaag

SEQ ID NO: 1709019 - RNA, 18 nt, Human
ucuaauguuugcauauaa

SEQ ID NO: 1709020 - RNA, 12 nt, Human
ucuaauaguaua

SEQ ID NO: 1709021 - RNA, 17 nt, Human
ucuaauaguauaaaccc

SEQ ID NO: 1709022 - RNA, 14 nt, Human
ucuaauaguauaaa

SEQ ID NO: 1709023 - RNA, 13 nt, Human
uccuugaagguau

SEQ ID NO: 1709024 - RNA, 17 nt, Human
uccuugaagguauaucu

SEQ ID NO: 1709025 - RNA, 13 nt, Human
ucccuacauuaaa

SEQ ID NO: 1709026 - RNA, 16 nt, Human
ucccuacauuaaacau

SEQ ID NO: 1709027 - RNA, 16 nt, Human
uguaggaagguacugu

SEQ ID NO: 1709028 - RNA, 18 nt, Human
uguaggaagguacuguau

SEQ ID NO: 1709029 - RNA, 19 nt, Human
uguaggaagguacuguaug

SEQ ID NO: 1709030 - RNA, 20 nt, Human
uguaggaagguacuguauga

SEQ ID NO: 1709031 - RNA, 22 nt, Human
uguaggaagguacuguaugauc

SEQ ID NO: 1709032 - RNA, 20 nt, Human
ugucucacugagcacuguuu

SEQ ID NO: 1709033 - RNA, 14 nt, Human
ugucucacugagca

SEQ ID NO: 1709034 - RNA, 16 nt, Human
ugucuguuuuaaaaac

SEQ ID NO: 1709035 - RNA, 17 nt, Human
ugcuuucgguuccaguu

SEQ ID NO: 1709036 - RNA, 22 nt, Human
ugcuuaacagggaacgugauua

SEQ ID NO: 1709037 - RNA, 18 nt, Human
ugcuuaaagaauucaaau

SEQ ID NO: 1709038 - RNA, 19 nt, Human
ugcuuaaagaauucaaauu

SEQ ID NO: 1709039 - RNA, 20 nt, Human
ugcuuaaagaauucaaauuu

SEQ ID NO: 1709040 - RNA, 14 nt, Human
ugauaaaucauuuu

SEQ ID NO: 1709041 - RNA, 15 nt, Human
ugauaaaucauuuua

SEQ ID NO: 1709042 - RNA, 20 nt, Human
ugauaaaucauuuuauguca

SEQ ID NO: 1709043 - RNA, 21 nt, Human
ugaccguguuggucuguacug

SEQ ID NO: 1709044 - RNA, 19 nt, Human
ugaccguguuggucuguac

SEQ ID NO: 1709045 - RNA, 20 nt, Human
ugaccguguuggucuguacu

SEQ ID NO: 1709046 - RNA, 22 nt, Human
ugcaagaaguggggcagcagca

SEQ ID NO: 1709047 - RNA, 14 nt, Human
ugcaaaaucaguuu

SEQ ID NO: 1709048 - RNA, 15 nt, Human
ugcaaaaucaguuuu

SEQ ID NO: 1709049 - RNA, 20 nt, Human
ugcaaaaucaguuuuccucu

SEQ ID NO: 1709050 - RNA, 17 nt, Human
ugaugugcuuaacaggg

SEQ ID NO: 1709051 - RNA, 13 nt, Human
ugaugugcuuaac

SEQ ID NO: 1709052 - RNA, 22 nt, Human
ugauuuuuuuuuuuuuccuguc

SEQ ID NO: 1709053 - RNA, 14 nt, Human
ugcaucccuggcug

SEQ ID NO: 1709054 - RNA, 21 nt, Human
uuuuaaaguaacccuacaaaa

SEQ ID NO: 1709055 - RNA, 15 nt, Human
uuuuuuccugucaua

SEQ ID NO: 1709056 - RNA, 13 nt, Human
uuuuuuuuccugu

SEQ ID NO: 1709057 - RNA, 12 nt, Human
uuguguuuacau

SEQ ID NO: 1709058 - RNA, 13 nt, Human
uuguguuuacauu

SEQ ID NO: 1709059 - RNA, 18 nt, Human
uuguguuuacauuuuaug

SEQ ID NO: 1709060 - RNA, 22 nt, Human
uuguguuuacauuuuauggugc

SEQ ID NO: 1709061 - RNA, 13 nt, Human
uuguuaucuguuu

SEQ ID NO: 1709062 - RNA, 13 nt, Human
uuguuaugaugug

SEQ ID NO: 1709063 - RNA, 15 nt, Human
uuguuaugaugugcu

SEQ ID NO: 1709064 - RNA, 17 nt, Human
uuguuaugaugugcuua

SEQ ID NO: 1709065 - RNA, 18 nt, Human
uuguuaugaugugcuuaa

SEQ ID NO: 1709066 - RNA, 19 nt, Human
uuuaacucuauaauguguu

SEQ ID NO: 1709067 - RNA, 23 nt, Human
uuuacauuuuauggugccuagua

SEQ ID NO: 1709068 - RNA, 13 nt, Human
uuuacauuuuaug

SEQ ID NO: 1709069 - RNA, 17 nt, Human
uuuacauuuuauggugc

SEQ ID NO: 1709070 - RNA, 22 nt, Human
uuuacauuuuauggugccuagu

SEQ ID NO: 1709071 - RNA, 20 nt, Human
uuuauggcagacauugugcu

SEQ ID NO: 1709072 - RNA, 21 nt, Human
uuuauggcagacauugugcua

SEQ ID NO: 1709073 - RNA, 15 nt, Human
uuccaugucaagauu

SEQ ID NO: 1709074 - RNA, 21 nt, Human
uuccaugucaagauucagcua

SEQ ID NO: 1709075 - RNA, 17 nt, Human
uuccaugucaagauuca

SEQ ID NO: 1709076 - RNA, 18 nt, Human
uucggugagcuacaaaug

SEQ ID NO: 1709077 - RNA, 14 nt, Human
uugacaaaauguua

SEQ ID NO: 1709078 - RNA, 19 nt, Human
uugacaaaauguuauuucc

SEQ ID NO: 1709079 - RNA, 20 nt, Human
uugacaaaauguuauuuccc

SEQ ID NO: 1709080 - RNA, 21 nt, Human
uugacaaaauguuauuucccu

SEQ ID NO: 1709081 - RNA, 12 nt, Human
uuauuugagaag

SEQ ID NO: 1709082 - RNA, 18 nt, Human
uuauuugagaagcugcuc

SEQ ID NO: 1709083 - RNA, 20 nt, Human
uuauuugagaagcugcucaa

SEQ ID NO: 1709084 - RNA, 23 nt, Human
uucaguuauuauauuuacaaaug

SEQ ID NO: 1709085 - RNA, 18 nt, Human
uuccauauggauccacug

SEQ ID NO: 1709086 - RNA, 19 nt, Human
uuccauauggauccacugg

SEQ ID NO: 1709087 - RNA, 21 nt, Human
uuccauauggauccacuggcu

SEQ ID NO: 1709088 - RNA, 22 nt, Human
uuccauauggauccacuggcug

SEQ ID NO: 1709089 - RNA, 22 nt, Human
uuccaaaaauuacuuaguauug

SEQ ID NO: 1709090 - RNA, 18 nt, Human
uuauaagggcaaauugga

SEQ ID NO: 1709091 - RNA, 12 nt, Human
uuauaauuuaaa

SEQ ID NO: 1709092 - RNA, 15 nt, Human
uuagugacuaaacca

SEQ ID NO: 1709093 - RNA, 17 nt, Human
uuagugacuaaaccauu

SEQ ID NO: 1709094 - RNA, 23 nt, Human
uuagugacuaaaccauugugcau

SEQ ID NO: 1709095 - RNA, 22 nt, Human
uuauaagggcaaauuggagaaa

SEQ ID NO: 1709096 - RNA, 16 nt, Human
uuauauuuacaaaugg

SEQ ID NO: 1709097 - RNA, 15 nt, Human
uuauauuguucacuu

SEQ ID NO: 1709098 - RNA, 17 nt, Human
uuauauuguucacuucu

SEQ ID NO: 1709099 - RNA, 16 nt, Human
uuaucuguuugagaaa

SEQ ID NO: 1709100 - RNA, 20 nt, Human
uuaucuguuugagaaaguca

SEQ ID NO: 1709101 - RNA, 14 nt, Human
uuaugauuagcuuu

SEQ ID NO: 1709102 - RNA, 15 nt, Human
cacagcaucucagcu

SEQ ID NO: 1709103 - RNA, 16 nt, Human
cacagcaucucagcuc

SEQ ID NO: 1709104 - RNA, 19 nt, Human
cacagcaucucagcucauc

SEQ ID NO: 1709105 - RNA, 12 nt, Human
cacagcaucuca

SEQ ID NO: 1709106 - RNA, 13 nt, Human
cacagcaucucag

SEQ ID NO: 1709107 - RNA, 14 nt, Human
cacagcaucucagc

SEQ ID NO: 1709108 - RNA, 14 nt, Human
caauuuucacugug

SEQ ID NO: 1709109 - RNA, 20 nt, Human
caauuuucacuguguccagg

SEQ ID NO: 1709110 - RNA, 15 nt, Human
caauuuucacugugu

SEQ ID NO: 1709111 - RNA, 17 nt, Human
cacacgagaaccugaag

SEQ ID NO: 1709112 - RNA, 15 nt, Human
caaauguuuaaucau

SEQ ID NO: 1709113 - RNA, 13 nt, Human
caaauguuuaauc

SEQ ID NO: 1709114 - RNA, 18 nt, Human
caaaaaaaucuuccaauu

SEQ ID NO: 1709115 - RNA, 17 nt, Human
caagcacuaaacaaaga

SEQ ID NO: 1709116 - RNA, 14 nt, Human
caagucuaccaauu

SEQ ID NO: 1709117 - RNA, 22 nt, Human
acuucacugugcuguuguuaug

SEQ ID NO: 1709118 - RNA, 20 nt, Human
acuucacugugcuguuguua

SEQ ID NO: 1709119 - RNA, 21 nt, Human
acuucacugugcuguuguuau

SEQ ID NO: 1709120 - RNA, 24 nt, Human
acuucacugugcuguuguuaugau

SEQ ID NO: 1709121 - RNA, 13 nt, Human
acuucacugugcu

SEQ ID NO: 1709122 - RNA, 14 nt, Human
acuucacugugcug

SEQ ID NO: 1709123 - RNA, 17 nt, Human
acuucacugugcuguug

SEQ ID NO: 1709124 - RNA, 19 nt, Human
acuucacugugcuguuguu

SEQ ID NO: 1709125 - RNA, 18 nt, Human
acuuguaaaggaauuuaa

SEQ ID NO: 1709126 - RNA, 22 nt, Human
acuuuauuuucuauaauuuaaa

SEQ ID NO: 1709127 - RNA, 14 nt, Human
agaaagugagcagu

SEQ ID NO: 1709128 - RNA, 16 nt, Human
agaaagugagcagugu

SEQ ID NO: 1709129 - RNA, 15 nt, Human
agaaaggcugcugua

SEQ ID NO: 1709130 - RNA, 22 nt, Human
acgcaucuaguuccccuguuua

SEQ ID NO: 1709131 - RNA, 11 nt, Human
acucagcaugg

SEQ ID NO: 1709132 - RNA, 11 nt, Human
acaaaauguua

SEQ ID NO: 1709133 - RNA, 12 nt, Human
acaaaauguuau

SEQ ID NO: 1709134 - RNA, 17 nt, Human
acaaaauguuauuuccc

SEQ ID NO: 1709135 - RNA, 21 nt, Human
acaagaaaggcugcuguacug

SEQ ID NO: 1709136 - RNA, 22 nt, Human
acaagaaaggcugcuguacuga

SEQ ID NO: 1709137 - RNA, 14 nt, Human
acccauuuguucau

SEQ ID NO: 1709138 - RNA, 15 nt, Human
acccauuuguucaua

SEQ ID NO: 1709139 - RNA, 23 nt, Human
aaauagcuuggguagcgcacucu

SEQ ID NO: 1709140 - RNA, 22 nt, Human
aaccacuggaaaguuuaugguu

SEQ ID NO: 1709141 - RNA, 17 nt, Human
aaaucuuauaauuuaaa

SEQ ID NO: 1709142 - RNA, 11 nt, Human
aaauguuuaau

SEQ ID NO: 1709143 - RNA, 13 nt, Human
aaauguuuaauca

SEQ ID NO: 1709144 - RNA, 14 nt, Human
aaauguuuaaucau

SEQ ID NO: 1709145 - RNA, 15 nt, Human
aaauguuuaaucaua

SEQ ID NO: 1709146 - RNA, 17 nt, Human
aaauguuuaaucauaua

SEQ ID NO: 1709147 - RNA, 19 nt, Human
aaauguuuaaucauauaaa

SEQ ID NO: 1709148 - RNA, 18 nt, Human
aaauguuuaaucauauaa

SEQ ID NO: 1709149 - RNA, 21 nt, Human
aagauaaacguggauguuacu

SEQ ID NO: 1709150 - RNA, 14 nt, Human
aaguguaaugaaua

SEQ ID NO: 1709151 - RNA, 20 nt, Human
aagucuaccaaccuguucaa

SEQ ID NO: 1709152 - RNA, 22 nt, Human
aagggaaguaguuaucauguua

SEQ ID NO: 1709153 - RNA, 20 nt, Human
aagggaaguaguuaucaugu

SEQ ID NO: 1709154 - RNA, 23 nt, Human
aauguuuaaucauauaaauagaa

SEQ ID NO: 1709155 - RNA, 13 nt, Human
aauguuuaaucau

SEQ ID NO: 1709156 - RNA, 14 nt, Human
aauguuuaaucaua

SEQ ID NO: 1709157 - RNA, 16 nt, Human
aauguuuaaucauaua

SEQ ID NO: 1709158 - RNA, 17 nt, Human
aauguuuaaucauauaa

SEQ ID NO: 1709159 - RNA, 18 nt, Human
aauguuuaaucauauaaa

SEQ ID NO: 1709160 - RNA, 20 nt, Human
aauguuuaaucauauaaaua

SEQ ID NO: 1709161 - RNA, 18 nt, Human
aauguccauucuuuauca

SEQ ID NO: 1709162 - RNA, 13 nt, Human
aauguuugcauau

SEQ ID NO: 1709163 - RNA, 14 nt, Human
aauguuugcauaua

SEQ ID NO: 1709164 - RNA, 15 nt, Human
aauacuugucuguuu

SEQ ID NO: 1709165 - RNA, 16 nt, Human
aauagaauguaaaugu

SEQ ID NO: 1709166 - RNA, 14 nt, Human
aauagaauguaaau

SEQ ID NO: 1709167 - RNA, 15 nt, Human
aauccaaugaaauga

SEQ ID NO: 1709168 - RNA, 15 nt, Human
agaugaaauuccauu

SEQ ID NO: 1709169 - RNA, 16 nt, Human
agagaaaacaugcaga

SEQ ID NO: 1709170 - RNA, 17 nt, Human
agagaaaacaugcagaa

SEQ ID NO: 1709171 - RNA, 23 nt, Human
agagaaaacaugcagaacaaaug

SEQ ID NO: 1709172 - RNA, 15 nt, Human
agcacuguuuucuag

SEQ ID NO: 1709173 - RNA, 13 nt, Human
agcaguguuagcu

SEQ ID NO: 1709174 - RNA, 17 nt, Human
agcaguguuagcuuagu

SEQ ID NO: 1709175 - RNA, 20 nt, Human
agcugcucaacuugcaaaau

SEQ ID NO: 1709176 - RNA, 16 nt, Human
agcugcucaacuugca

SEQ ID NO: 1709177 - RNA, 20 nt, Human
agguaaaagcaucacaugaa

SEQ ID NO: 1709178 - RNA, 18 nt, Human
agguuauuaugauuagcu

SEQ ID NO: 1709179 - RNA, 22 nt, Human
auggaaacaagaugaaauucca

SEQ ID NO: 1709180 - RNA, 21 nt, Human
aucauguuaguaauaccucua

SEQ ID NO: 1709181 - RNA, 22 nt, Human
aucauguuaguaauaccucuaa

SEQ ID NO: 1709182 - RNA, 14 nt, Human
aucauguuaguaau

SEQ ID NO: 1709183 - RNA, 19 nt, Human
aucauguuaguaauaccuc

SEQ ID NO: 1709184 - RNA, 15 nt, Human
auagguuuaauaauu

SEQ ID NO: 1709185 - RNA, 20 nt, Human
auaccucaauuuucacugug

SEQ ID NO: 1709186 - RNA, 14 nt, Human
auaccucuaauagu

SEQ ID NO: 1709187 - RNA, 18 nt, Human
auaccucuaauaguauaa

SEQ ID NO: 1709188 - RNA, 19 nt, Human
auaccucuaauaguauaaa

SEQ ID NO: 1709189 - RNA, 20 nt, Human
auaccucuaauaguauaaac

SEQ ID NO: 1709190 - RNA, 18 nt, Human
auaccuuagugcaguuau

SEQ ID NO: 1709191 - RNA, 18 nt, Human
auaaaggauuaaugucaa

SEQ ID NO: 1709192 - RNA, 23 nt, Human
aguugaaaaucuuauaauuuaaa

SEQ ID NO: 1709193 - RNA, 14 nt, Human
aguuguuguagaga

SEQ ID NO: 1709194 - RNA, 22 nt, Human
aguugaaaaucuuauaauuuaa

SEQ ID NO: 1709195 - RNA, 17 nt, Human
aguguaucaaaaugcuc

SEQ ID NO: 1709196 - RNA, 18 nt, Human
aguguaucaaaaugcucu

SEQ ID NO: 1709197 - RNA, 13 nt, Human
aguguaucaaaau

SEQ ID NO: 1709198 - RNA, 14 nt, Human
aguguaucaaaaug

SEQ ID NO: 1709199 - RNA, 15 nt, Human
aguguaucaaaaugc

SEQ ID NO: 1709200 - RNA, 16 nt, Human
aguguaucaaaaugcu

SEQ ID NO: 1709201 - RNA, 12 nt, Human
aguccuguaaug

SEQ ID NO: 1709202 - RNA, 13 nt, Human
aacuaacuaaaac

SEQ ID NO: 1709203 - RNA, 20 nt, Human
aacagauguccaucagauga

SEQ ID NO: 1709204 - RNA, 19 nt, Human
aacagauguccaucagaug

SEQ ID NO: 1709205 - RNA, 14 nt, Human
aagaucccauuuga

SEQ ID NO: 1709206 - RNA, 15 nt, Human
aagaaaggcugcugu

SEQ ID NO: 1709207 - RNA, 22 nt, Human
aagaaagugagcaguguuagcu

SEQ ID NO: 1709208 - RNA, 20 nt, Human
aagaaaggcugcuguacuga

SEQ ID NO: 1709209 - RNA, 21 nt, Human
aagaauucaaauuuuaucugc

SEQ ID NO: 1709210 - RNA, 12 nt, Human
aagaauucaaau

SEQ ID NO: 1709211 - RNA, 13 nt, Human
aagaauucaaauu

SEQ ID NO: 1709212 - RNA, 17 nt, Human
aagaauucaaauuuuau

SEQ ID NO: 1709213 - RNA, 18 nt, Human
aagaauucaaauuuuauc

SEQ ID NO: 1709214 - RNA, 12 nt, Human
aauaaaaauaau

SEQ ID NO: 1709215 - RNA, 15 nt, Human
aauaacaauaaaaga

SEQ ID NO: 1709216 - RNA, 17 nt, Human
aauacaaguuucaucca

SEQ ID NO: 1709217 - RNA, 22 nt, Human
uaaaccccaccccaaaauuagc

SEQ ID NO: 1709218 - RNA, 14 nt, Human
uaaaccauugugca

SEQ ID NO: 1709219 - RNA, 18 nt, Human
uaaacguggauguuacuc

SEQ ID NO: 1709220 - RNA, 14 nt, Human
uaaacguggauguu

SEQ ID NO: 1709221 - RNA, 14 nt, Human
uaaagaauucaaau

SEQ ID NO: 1709222 - RNA, 15 nt, Human
uaaagaauucaaauu

SEQ ID NO: 1709223 - RNA, 21 nt, Human
uaaaauuauagcucuaauguu

SEQ ID NO: 1709224 - RNA, 20 nt, Human
uaaaauuauagcucuaaugu

SEQ ID NO: 1709225 - RNA, 15 nt, Human
uaaaauuauagcucu

SEQ ID NO: 1709226 - RNA, 16 nt, Human
uaaaauuauagcucua

SEQ ID NO: 1709227 - RNA, 18 nt, Human
uaaaauuauagcucuaau

SEQ ID NO: 1709228 - RNA, 16 nt, Human
aaggcugcuguacuga

SEQ ID NO: 1709229 - RNA, 20 nt, Human
aaguaaaacaaacaauaccu

SEQ ID NO: 1709230 - RNA, 17 nt, Human
aaguaaaacaaacaaua

SEQ ID NO: 1709231 - RNA, 23 nt, Human
guuugcauauaagggaaguaguu

SEQ ID NO: 1709232 - RNA, 15 nt, Human
aagucaacuuagcau

SEQ ID NO: 1709233 - RNA, 22 nt, Human
aagucuuauauauuguagauaa

SEQ ID NO: 1709234 - RNA, 13 nt, Human
aaggauaaugaau

SEQ ID NO: 1709235 - RNA, 19 nt, Human
aaggaaaaaauaacaauga

SEQ ID NO: 1709236 - RNA, 16 nt, Human
aaggaaaaaauaacaa

SEQ ID NO: 1709237 - RNA, 14 nt, Human
guguuuacauuuua

SEQ ID NO: 1709238 - RNA, 17 nt, Human
guuccccuguuuauuca

SEQ ID NO: 1709239 - RNA, 18 nt, Human
guuccccuguuuauucau

SEQ ID NO: 1709240 - RNA, 19 nt, Human
guuccccuguuuauucaua

SEQ ID NO: 1709241 - RNA, 14 nt, Human
uacauuaaacauga

SEQ ID NO: 1709242 - RNA, 12 nt, Human
uacauuaaacau

SEQ ID NO: 1709243 - RNA, 20 nt, Human
uacauuaaacaugacuccau

SEQ ID NO: 1709244 - RNA, 15 nt, Human
uacaaguuucaucca

SEQ ID NO: 1709245 - RNA, 20 nt, Human
uacagcaaauccuuugugaa

SEQ ID NO: 1709246 - RNA, 21 nt, Human
aauguacauagugcuaacaug

SEQ ID NO: 1709247 - RNA, 14 nt, Human
uacagcaaauccuu

SEQ ID NO: 1709248 - RNA, 14 nt, Human
uacaaguuucaucc

SEQ ID NO: 1709249 - RNA, 18 nt, Human
uacaaguuucauccagaa

SEQ ID NO: 1709250 - RNA, 21 nt, Human
uaauaccucuaauaguauaaa

SEQ ID NO: 1709251 - RNA, 23 nt, Human
uaauaccucuaauaguauaaacc

SEQ ID NO: 1709252 - RNA, 15 nt, Human
uaauacagcugagcu

SEQ ID NO: 1709253 - RNA, 14 nt, Human
acaaaaaaaucuuc

SEQ ID NO: 1709254 - RNA, 19 nt, Human
acaaaaaaaucuuccaauu

SEQ ID NO: 1709255 - RNA, 21 nt, Human
uagcaugucgucaaagcugaa

SEQ ID NO: 1709256 - RNA, 18 nt, Human
acaagcacuaaacaaaga

SEQ ID NO: 1709257 - RNA, 16 nt, Human
uacugaaguaaaacaa

SEQ ID NO: 1709258 - RNA, 17 nt, Human
uacugaaguaaaacaaa

SEQ ID NO: 1709259 - RNA, 23 nt, Human
uacucaagagugguaucuugcag

SEQ ID NO: 1709260 - RNA, 22 nt, Human
uacucaagagugguaucuugca

SEQ ID NO: 1709261 - RNA, 21 nt, Human
aauucuugccaaauauaaaua

SEQ ID NO: 1709262 - RNA, 12 nt, Human
aauuugaugugg

SEQ ID NO: 1709263 - RNA, 22 nt, Human
aauuugauguggugaaaagcag

SEQ ID NO: 1709264 - RNA, 20 nt, Human
aauuguguuuacauuuuaug

SEQ ID NO: 1709265 - RNA, 21 nt, Human
aauuguguuuacauuuuaugg

SEQ ID NO: 1709266 - RNA, 22 nt, Human
aauuguguuuacauuuuauggu

SEQ ID NO: 1709267 - RNA, 14 nt, Human
aauuguguuuacau

SEQ ID NO: 1709268 - RNA, 19 nt, Human
aauuguguuuacauuuuau

SEQ ID NO: 1709269 - RNA, 13 nt, Human
uauucauaugcau

SEQ ID NO: 1709270 - RNA, 14 nt, Human
uauucauaugcaua

SEQ ID NO: 1709271 - RNA, 15 nt, Human
uauucauaugcauau

SEQ ID NO: 1709272 - RNA, 16 nt, Human
uauucauaugcauauu

SEQ ID NO: 1709273 - RNA, 17 nt, Human
uauucauaugcauauuu

SEQ ID NO: 1709274 - RNA, 20 nt, Human
acagugaaagaaaauaacaa

SEQ ID NO: 1709275 - RNA, 21 nt, Human
uauugacaaaauguuauuucc

SEQ ID NO: 1709276 - RNA, 12 nt, Human
uauugacaaaau

SEQ ID NO: 1709277 - RNA, 13 nt, Human
uauugacaaaaug

SEQ ID NO: 1709278 - RNA, 16 nt, Human
uauugacaaaauguua

SEQ ID NO: 1709279 - RNA, 22 nt, Human
uauugacaaaauguuauuuccc

SEQ ID NO: 1709280 - RNA, 22 nt, Human
acaguucggugagcuacaaaug

SEQ ID NO: 1709281 - RNA, 19 nt, Human
acaguucggugagcuacaa

SEQ ID NO: 1709282 - RNA, 23 nt, Human
acaguucggugagcuacaaaugc

SEQ ID NO: 1709283 - RNA, 14 nt, Human
uauagcucuaaugu

SEQ ID NO: 1709284 - RNA, 16 nt, Human
uauagcucuaauguuu

SEQ ID NO: 1709285 - RNA, 18 nt, Human
uauagcucuaauguuugc

SEQ ID NO: 1709286 - RNA, 17 nt, Human
uaguuccugugcacagc

SEQ ID NO: 1709287 - RNA, 23 nt, Human
uaguuccccuguuuauucauaug

SEQ ID NO: 1709288 - RNA, 19 nt, Human
uaguuccccuguuuauuca

SEQ ID NO: 1709289 - RNA, 22 nt, Human
uagugacuaaaccauugugcau

SEQ ID NO: 1709290 - RNA, 23 nt, Human
uagugacuaaaccauugugcauu

SEQ ID NO: 1709291 - RNA, 14 nt, Human
uauauuuacaaaug

SEQ ID NO: 1709292 - RNA, 15 nt, Human
uauauuuacaaaugg

SEQ ID NO: 1709293 - RNA, 15 nt, Human
uaucuagguuuauga

SEQ ID NO: 1709294 - RNA, 21 nt, Human
uaucuagguuuaugacaguaa

SEQ ID NO: 1709295 - RNA, 17 nt, Human
uaucuagguuuaugaca

SEQ ID NO: 1709296 - RNA, 23 nt, Human
uaucuugcaguaucggcacugua

SEQ ID NO: 1709297 - RNA, 22 nt, Human
uaucuugcaguaucggcacugu

SEQ ID NO: 1709298 - RNA, 21 nt, Human
uaugaugugcuuaacagggaa

SEQ ID NO: 1709299 - RNA, 19 nt, Human
uaugauguauacugccacu

SEQ ID NO: 1709300 - RNA, 21 nt, Human
uaugauguauacugccacuaa

SEQ ID NO: 1709301 - RNA, 14 nt, Human
uaugaugugcuuaa

SEQ ID NO: 1709302 - RNA, 17 nt, Human
uaugaugugcuuaacag

SEQ ID NO: 1709303 - RNA, 14 nt, Human
acuauaugcaaaca

SEQ ID NO: 1709304 - RNA, 18 nt, Human
acuauaugcaaacagggu

SEQ ID NO: 1709305 - RNA, 13 nt, Human
acuauaugcaaac

SEQ ID NO: 1709306 - RNA, 19 nt, Human
acuaaaacaaagccacuuu

SEQ ID NO: 1709307 - RNA, 17 nt, Human
acguuuagcugacaaaa

SEQ ID NO: 1709308 - RNA, 22 nt, Human
acguuuagcugacaaaauacuu

SEQ ID NO: 1709309 - RNA, 16 nt, Human
acuaaaacaaagccac

SEQ ID NO: 1709310 - RNA, 17 nt, Human
acuguacaaaaaaaucu

SEQ ID NO: 1709311 - RNA, 19 nt, Human
acuguacaaaaaaaucuuc

SEQ ID NO: 1709312 - RNA, 22 nt, Human
acuguacaaaaaaaucuuccaa

SEQ ID NO: 1709313 - RNA, 13 nt, Human
uccugugcacagc

SEQ ID NO: 1709314 - RNA, 14 nt, Human
uccugugcacagcc

SEQ ID NO: 1709315 - RNA, 18 nt, Human
ucauuuguggguuuuuau

SEQ ID NO: 1709316 - RNA, 23 nt, Human
ucauuuguggguuuuuauuuccu

SEQ ID NO: 1709317 - RNA, 22 nt, Human
ucauuuguggguuuuuauuucc

SEQ ID NO: 1709318 - RNA, 14 nt, Human
ucauuuuaugucaa

SEQ ID NO: 1709319 - RNA, 16 nt, Human
accugaaugcucugua

SEQ ID NO: 1709320 - RNA, 17 nt, Human
accuuagugcaguuauu

SEQ ID NO: 1709321 - RNA, 21 nt, Human
accuuagugcaguuauuugcu

SEQ ID NO: 1709322 - RNA, 20 nt, Human
accuuccaugucaagauuca

SEQ ID NO: 1709323 - RNA, 18 nt, Human
ucauguuaguaauaccuc

SEQ ID NO: 1709324 - RNA, 19 nt, Human
ucauguuaguaauaccucu

SEQ ID NO: 1709325 - RNA, 21 nt, Human
ucauguuaguaauaccucuaa

SEQ ID NO: 1709326 - RNA, 14 nt, Human
ucauguuaguaaua

SEQ ID NO: 1709327 - RNA, 17 nt, Human
ucauguuaguaauaccu

SEQ ID NO: 1709328 - RNA, 12 nt, Human
accucuaauagu

SEQ ID NO: 1709329 - RNA, 16 nt, Human
accucuaauaguauaa

SEQ ID NO: 1709330 - RNA, 17 nt, Human
accucuaauaguauaaa

SEQ ID NO: 1709331 - RNA, 20 nt, Human
accucuaauaguauaaaccc

SEQ ID NO: 1709332 - RNA, 19 nt, Human
accucuaauaguauaaacc

SEQ ID NO: 1709333 - RNA, 15 nt, Human
ucauauuaagaauga

SEQ ID NO: 1709334 - RNA, 17 nt, Human
ucauauuaagaaugauc

SEQ ID NO: 1709335 - RNA, 18 nt, Human
ucauauuaagaaugaucu

SEQ ID NO: 1709336 - RNA, 22 nt, Human
ucauauuaagaaugaucugauu

SEQ ID NO: 1709337 - RNA, 14 nt, Human
ucauauuaagaaug

SEQ ID NO: 1709338 - RNA, 20 nt, Human
accucaauuuucacuguguc

SEQ ID NO: 1709339 - RNA, 18 nt, Human
accucaauuuucacugug

SEQ ID NO: 1709340 - RNA, 22 nt, Human
accguguuggucuguacugauu

SEQ ID NO: 1709341 - RNA, 16 nt, Human
accguguuggucugua

SEQ ID NO: 1709342 - RNA, 18 nt, Human
ucaggaacguuuagcuga

SEQ ID NO: 1709343 - RNA, 23 nt, Human
ucaggaacguuuagcugacaaaa

SEQ ID NO: 1709344 - RNA, 22 nt, Human
ucaggaacguuuagcugacaaa

SEQ ID NO: 1709345 - RNA, 13 nt, Human
accauugugcauu

SEQ ID NO: 1709346 - RNA, 14 nt, Human
accaguugcugcuu

SEQ ID NO: 1709347 - RNA, 19 nt, Human
uauuucaucauucacuuca

SEQ ID NO: 1709348 - RNA, 16 nt, Human
ugagcuacaaaugcau

SEQ ID NO: 1709349 - RNA, 14 nt, Human
ugagcuacaaaugc

SEQ ID NO: 1709350 - RNA, 13 nt, Human
ugagcuacaaaug

SEQ ID NO: 1709351 - RNA, 18 nt, Human
ugaggaacggaucagaug

SEQ ID NO: 1709352 - RNA, 22 nt, Human
ugagcacuguuuucuaguguau

SEQ ID NO: 1709353 - RNA, 14 nt, Human
ugagcacuguuuuc

SEQ ID NO: 1709354 - RNA, 15 nt, Human
ugagcacuguuuucu

SEQ ID NO: 1709355 - RNA, 21 nt, Human
ugagcacuguuuucuagugua

SEQ ID NO: 1709356 - RNA, 13 nt, Human
ugagcacuguuuu

SEQ ID NO: 1709357 - RNA, 22 nt, Human
ugacuugaagacuuacagcaaa

SEQ ID NO: 1709358 - RNA, 14 nt, Human
ugacaguaauugug

SEQ ID NO: 1709359 - RNA, 15 nt, Human
ugacaguaauugugu

SEQ ID NO: 1709360 - RNA, 20 nt, Human
ugacaguaauuguguuuaca

SEQ ID NO: 1709361 - RNA, 21 nt, Human
ugacaguaauuguguuuacau

SEQ ID NO: 1709362 - RNA, 22 nt, Human
ugacaguaauuguguuuacauu

SEQ ID NO: 1709363 - RNA, 21 nt, Human
agauguccaucagaugacaag

SEQ ID NO: 1709364 - RNA, 23 nt, Human
agauguccaucagaugacaagaa

SEQ ID NO: 1709365 - RNA, 14 nt, Human
agaugucuauauug

SEQ ID NO: 1709366 - RNA, 20 nt, Human
agauaaacguggauguuacu

SEQ ID NO: 1709367 - RNA, 16 nt, Human
ucuguuuuaaaaaccu

SEQ ID NO: 1709368 - RNA, 12 nt, Human
ucuguuccacau

SEQ ID NO: 1709369 - RNA, 22 nt, Human
ucuuccauauggauccacuggc

SEQ ID NO: 1709370 - RNA, 20 nt, Human
agaaaacaugcagaacaaau

SEQ ID NO: 1709371 - RNA, 18 nt, Human
ucucuucuuaauguacau

SEQ ID NO: 1709372 - RNA, 14 nt, Human
ucucuucuuaaugu

SEQ ID NO: 1709373 - RNA, 13 nt, Human
agaagcugcucaa

SEQ ID NO: 1709374 - RNA, 23 nt, Human
agaagcugcucaacuugcaaaau

SEQ ID NO: 1709375 - RNA, 23 nt, Human
ugcaucuccacuuggcauuagcu

SEQ ID NO: 1709376 - RNA, 18 nt, Human
ugcagaacaaaugaagac

SEQ ID NO: 1709377 - RNA, 14 nt, Human
ugcagaacaaauga

SEQ ID NO: 1709378 - RNA, 15 nt, Human
ugcagaacaaaugaa

SEQ ID NO: 1709379 - RNA, 19 nt, Human
agcuauggugucauaggcu

SEQ ID NO: 1709380 - RNA, 19 nt, Human
ugccacacgagaaccugaa

SEQ ID NO: 1709381 - RNA, 20 nt, Human
agcuuauguuaacugacaag

SEQ ID NO: 1709382 - RNA, 14 nt, Human
ugcucuguagccua

SEQ ID NO: 1709383 - RNA, 14 nt, Human
uggacaaaaugacu

SEQ ID NO: 1709384 - RNA, 18 nt, Human
ugggaaacaaaaggauaa

SEQ ID NO: 1709385 - RNA, 13 nt, Human
agggaaauuucag

SEQ ID NO: 1709386 - RNA, 21 nt, Human
agucuaccaaccuguucaagu

SEQ ID NO: 1709387 - RNA, 11 nt, Human
agucuaccaau

SEQ ID NO: 1709388 - RNA, 22 nt, Human
agguuuaugacaguaauugugu

SEQ ID NO: 1709389 - RNA, 22 nt, Human
uguacaaaaaaaucuuccaauu

SEQ ID NO: 1709390 - RNA, 17 nt, Human
uguacaaaaaaaucuuc

SEQ ID NO: 1709391 - RNA, 21 nt, Human
uguacaaaaaaaucuuccaau

SEQ ID NO: 1709392 - RNA, 21 nt, Human
uguacauagugcuaacaugaa

SEQ ID NO: 1709393 - RNA, 14 nt, Human
uguacauagugcua

SEQ ID NO: 1709394 - RNA, 17 nt, Human
uguacauagugcuaaca

SEQ ID NO: 1709395 - RNA, 19 nt, Human
uguacauagugcuaacaug

SEQ ID NO: 1709396 - RNA, 12 nt, Human
aguaauccugua

SEQ ID NO: 1709397 - RNA, 16 nt, Human
aguaauuguguuuaca

SEQ ID NO: 1709398 - RNA, 18 nt, Human
aguaauuguguuuacauu

SEQ ID NO: 1709399 - RNA, 21 nt, Human
aguaauuguguuuacauuuua

SEQ ID NO: 1709400 - RNA, 22 nt, Human
aguaauuguguuuacauuuuau

SEQ ID NO: 1709401 - RNA, 23 nt, Human
aguaauuguguuuacauuuuaug

SEQ ID NO: 1709402 - RNA, 21 nt, Human
aguaauaccucuaauaguaua

SEQ ID NO: 1709403 - RNA, 22 nt, Human
aguaauaccucuaauaguauaa

SEQ ID NO: 1709404 - RNA, 23 nt, Human
aguaauaccucuaauaguauaaa

SEQ ID NO: 1709405 - RNA, 20 nt, Human
aguaauaccucuaauaguau

SEQ ID NO: 1709406 - RNA, 20 nt, Human
uguacauagugcuaacauga

SEQ ID NO: 1709407 - RNA, 20 nt, Human
uguggguuuuuauuuccuau

SEQ ID NO: 1709408 - RNA, 15 nt, Human
agugguaucuugcag

SEQ ID NO: 1709409 - RNA, 16 nt, Human
agucuuucacauuuaa

SEQ ID NO: 1709410 - RNA, 18 nt, Human
agucuuucacauuuaaau

SEQ ID NO: 1709411 - RNA, 15 nt, Human
agugcaguuauuugc

SEQ ID NO: 1709412 - RNA, 17 nt, Human
agugcaguuauuugcuu

SEQ ID NO: 1709413 - RNA, 18 nt, Human
auagauaggucagugcaa

SEQ ID NO: 1709414 - RNA, 17 nt, Human
auagaccuuuucauuug

SEQ ID NO: 1709415 - RNA, 13 nt, Human
auagaaguaaaaa

SEQ ID NO: 1709416 - RNA, 14 nt, Human
auagaauguaaaug

SEQ ID NO: 1709417 - RNA, 15 nt, Human
auagaauguaaaugu

SEQ ID NO: 1709418 - RNA, 17 nt, Human
auagaauguaaaugucu

SEQ ID NO: 1709419 - RNA, 19 nt, Human
auagaauguaaaugucuca

SEQ ID NO: 1709420 - RNA, 20 nt, Human
auagaauguaaaugucucac

SEQ ID NO: 1709421 - RNA, 15 nt, Human
uuauuauauuuacaa

SEQ ID NO: 1709422 - RNA, 14 nt, Human
uuauuauauuuaca

SEQ ID NO: 1709423 - RNA, 14 nt, Human
uuauucauaugcau

SEQ ID NO: 1709424 - RNA, 16 nt, Human
uuauucauaugcauau

SEQ ID NO: 1709425 - RNA, 15 nt, Human
uuauucauaugcaua

SEQ ID NO: 1709426 - RNA, 17 nt, Human
auacugccacuaaccuu

SEQ ID NO: 1709427 - RNA, 13 nt, Human
uuaugacaguaau

SEQ ID NO: 1709428 - RNA, 15 nt, Human
uuaugacaguaauug

SEQ ID NO: 1709429 - RNA, 16 nt, Human
uuaugacaguaauugu

SEQ ID NO: 1709430 - RNA, 24 nt, Human
uuaugacaguaauuguguuuacau

SEQ ID NO: 1709431 - RNA, 11 nt, Human
uuaugaugugc

SEQ ID NO: 1709432 - RNA, 13 nt, Human
uuaugaugugcuu

SEQ ID NO: 1709433 - RNA, 14 nt, Human
uuaugaugugcuua

SEQ ID NO: 1709434 - RNA, 16 nt, Human
uuaugaugugcuuaac

SEQ ID NO: 1709435 - RNA, 17 nt, Human
uuaugaugugcuuaaca

SEQ ID NO: 1709436 - RNA, 18 nt, Human
uuaugaugugcuuaacag

SEQ ID NO: 1709437 - RNA, 13 nt, Human
auacaaguuucau

SEQ ID NO: 1709438 - RNA, 14 nt, Human
auacaaguuucauc

SEQ ID NO: 1709439 - RNA, 20 nt, Human
aguuuaaauuguaauaggcg

SEQ ID NO: 1709440 - RNA, 17 nt, Human
aguuuaaauuguaauag

SEQ ID NO: 1709441 - RNA, 19 nt, Human
uuaagaaugaucugauuga

SEQ ID NO: 1709442 - RNA, 15 nt, Human
uuaagaaugaucuga

SEQ ID NO: 1709443 - RNA, 13 nt, Human
uuaaucauauaaa

SEQ ID NO: 1709444 - RNA, 15 nt, Human
uuaaucauauaaaua

SEQ ID NO: 1709445 - RNA, 16 nt, Human
uuaaucauauaaauag

SEQ ID NO: 1709446 - RNA, 17 nt, Human
uuaaucauauaaauaga

SEQ ID NO: 1709447 - RNA, 19 nt, Human
uuaaucauauaaauagaau

SEQ ID NO: 1709448 - RNA, 24 nt, Human
uuacuccaaaacuucguuuaauga

SEQ ID NO: 1709449 - RNA, 14 nt, Human
uuaguaauaccucu

SEQ ID NO: 1709450 - RNA, 16 nt, Human
uuaguaauaccucuaa

SEQ ID NO: 1709451 - RNA, 17 nt, Human
uuaguaauaccucuaau

SEQ ID NO: 1709452 - RNA, 15 nt, Human
aucugccucucuugu

SEQ ID NO: 1709453 - RNA, 18 nt, Human
aucugccucucuuguaau

SEQ ID NO: 1709454 - RNA, 14 nt, Human
aucuuauaauuuaa

SEQ ID NO: 1709455 - RNA, 24 nt, Human
aucuugcaguaucggcacuguaca

SEQ ID NO: 1709456 - RNA, 21 nt, Human
aucuugcaguaucggcacugu

SEQ ID NO: 1709457 - RNA, 22 nt, Human
aucuugcaguaucggcacugua

SEQ ID NO: 1709458 - RNA, 13 nt, Human
aucuguuugagaa

SEQ ID NO: 1709459 - RNA, 14 nt, Human
aucuguuugagaaa

SEQ ID NO: 1709460 - RNA, 19 nt, Human
aucuguuugagaaagucag

SEQ ID NO: 1709461 - RNA, 15 nt, Human
aucuguuugagaaag

SEQ ID NO: 1709462 - RNA, 16 nt, Human
uugcucauauuuccca

SEQ ID NO: 1709463 - RNA, 21 nt, Human
augaaugcuuaaagaauucaa

SEQ ID NO: 1709464 - RNA, 20 nt, Human
augaaugcuuaaagaauuca

SEQ ID NO: 1709465 - RNA, 18 nt, Human
augaacuuguaaaggaau

SEQ ID NO: 1709466 - RNA, 19 nt, Human
augaagaccuuuuucugca

SEQ ID NO: 1709467 - RNA, 24 nt, Human
augaagaccuuuuucugcacuaua

SEQ ID NO: 1709468 - RNA, 21 nt, Human
augaagaccuuuuucugcacu

SEQ ID NO: 1709469 - RNA, 22 nt, Human
augaagaccuuuuucugcacua

SEQ ID NO: 1709470 - RNA, 13 nt, Human
augaaauuccauu

SEQ ID NO: 1709471 - RNA, 17 nt, Human
uugaagggaaauuucag

SEQ ID NO: 1709472 - RNA, 23 nt, Human
uugcauauaagggaaguaguuau

SEQ ID NO: 1709473 - RNA, 13 nt, Human
aucucuucuuaau

SEQ ID NO: 1709474 - RNA, 17 nt, Human
aucucuucuuaauguac

SEQ ID NO: 1709475 - RNA, 20 nt, Human
aucucuucuuaauguacaua

SEQ ID NO: 1709476 - RNA, 18 nt, Human
aucucuucuuaauguaca

SEQ ID NO: 1709477 - RNA, 19 nt, Human
aucucuucuuaauguacau

SEQ ID NO: 1709478 - RNA, 22 nt, Human
aucucuucuuaauguacauagu

SEQ ID NO: 1709479 - RNA, 22 nt, Human
aucaaauguuuaaucauauaaa

SEQ ID NO: 1709480 - RNA, 14 nt, Human
uuccugugcacagc

SEQ ID NO: 1709481 - RNA, 15 nt, Human
uuccugugcacagcc

SEQ ID NO: 1709482 - RNA, 19 nt, Human
uuccguagguuauuuucag

SEQ ID NO: 1709483 - RNA, 17 nt, Human
uugaaauuguauuacaa

SEQ ID NO: 1709484 - RNA, 14 nt, Human
aucauuuuauguca

SEQ ID NO: 1709485 - RNA, 23 nt, Human
aucauuuuaugucaagggcagcu

SEQ ID NO: 1709486 - RNA, 17 nt, Human
uuguucauauuaagaau

SEQ ID NO: 1709487 - RNA, 19 nt, Human
uuguucauauuaagaauga

SEQ ID NO: 1709488 - RNA, 18 nt, Human
uuuaaauauaugcuaagu

SEQ ID NO: 1709489 - RNA, 22 nt, Human
augucucacugagcacuguuuu

SEQ ID NO: 1709490 - RNA, 19 nt, Human
augucucacugagcacugu

SEQ ID NO: 1709491 - RNA, 20 nt, Human
augucucacugagcacuguu

SEQ ID NO: 1709492 - RNA, 14 nt, Human
augucucacugagc

SEQ ID NO: 1709493 - RNA, 15 nt, Human
augucucacugagca

SEQ ID NO: 1709494 - RNA, 18 nt, Human
augucucacugagcacug

SEQ ID NO: 1709495 - RNA, 15 nt, Human
auguacugcauuauu

SEQ ID NO: 1709496 - RNA, 13 nt, Human
auguacugcauua

SEQ ID NO: 1709497 - RNA, 20 nt, Human
auguacugcauuauuugaga

SEQ ID NO: 1709498 - RNA, 18 nt, Human
auguaaaugucucacuga

SEQ ID NO: 1709499 - RNA, 19 nt, Human
auguaaaugucucacugag

SEQ ID NO: 1709500 - RNA, 23 nt, Human
auguaaaugucucacugagcacu

SEQ ID NO: 1709501 - RNA, 21 nt, Human
auguaaaugucucacugagca

SEQ ID NO: 1709502 - RNA, 16 nt, Human
auggugccuaguauug

SEQ ID NO: 1709503 - RNA, 19 nt, Human
auggugccuaguauugaca

SEQ ID NO: 1709504 - RNA, 21 nt, Human
auggugccuaguauugacaaa

SEQ ID NO: 1709505 - RNA, 20 nt, Human
auggugccuaguauugacaa

SEQ ID NO: 1709506 - RNA, 14 nt, Human
uuucugcacuauau

SEQ ID NO: 1709507 - RNA, 17 nt, Human
uuucugcacuauaugca

SEQ ID NO: 1709508 - RNA, 23 nt, Human
uuucuuuuuacccauuuguucau

SEQ ID NO: 1709509 - RNA, 13 nt, Human
auuauuugagaag

SEQ ID NO: 1709510 - RNA, 21 nt, Human
auuauuugagaagcugcucaa

SEQ ID NO: 1709511 - RNA, 15 nt, Human
auuauauuuacaaau

SEQ ID NO: 1709512 - RNA, 16 nt, Human
auuuuuuagugacuaa

SEQ ID NO: 1709513 - RNA, 22 nt, Human
auuuuugugauuuugugauuga

SEQ ID NO: 1709514 - RNA, 15 nt, Human
auuuucuauaauuua

SEQ ID NO: 1709515 - RNA, 14 nt, Human
auuuucuauaauuu

SEQ ID NO: 1709516 - RNA, 19 nt, Human
auuggacaguaaaauccac

SEQ ID NO: 1709517 - RNA, 20 nt, Human
auuucuugagguaaaagcau

SEQ ID NO: 1709518 - RNA, 15 nt, Human
auuucccuacauuaa

SEQ ID NO: 1709519 - RNA, 17 nt, Human
auuucccuacauuaaac

SEQ ID NO: 1709520 - RNA, 20 nt, Human
auuucccuacauuaaacaug

SEQ ID NO: 1709521 - RNA, 16 nt, Human
gccuaguauugacaaa

SEQ ID NO: 1709522 - RNA, 14 nt, Human
gccuaguauugaca

SEQ ID NO: 1709523 - RNA, 12 nt, Human
gcuuauguuaac

SEQ ID NO: 1709524 - RNA, 20 nt, Human
ggcagacauugugcuagugc

SEQ ID NO: 1709525 - RNA, 13 nt, Human
ggcacuguacaaa

SEQ ID NO: 1709526 - RNA, 21 nt, Human
aaaacaugcagaacaaaugaa

SEQ ID NO: 1709527 - RNA, 23 nt, Human
aaaacaugcagaacaaaugaaga

SEQ ID NO: 1709528 - RNA, 20 nt, Human
aaaacuucguuuaaugaaug

SEQ ID NO: 1709529 - RNA, 11 nt, Human
aaaaccuguuc

SEQ ID NO: 1709530 - RNA, 23 nt, Human
aaaaccuguucaagucuaccaac

SEQ ID NO: 1709531 - RNA, 22 nt, Human
aaaaccuuccaugucaagauuc

SEQ ID NO: 1709532 - RNA, 14 nt, Human
aaaaauaacaauga

SEQ ID NO: 1709533 - RNA, 13 nt, Human
aaagacagugaaa

SEQ ID NO: 1709534 - RNA, 20 nt, Human
aaacaggguaacuaacuaaa

SEQ ID NO: 1709535 - RNA, 12 nt, Human
aaacaauaccug

SEQ ID NO: 1709536 - RNA, 15 nt, Human
aaaauguuauuuccc

SEQ ID NO: 1709537 - RNA, 16 nt, Human
aaaauguuauuucccu

SEQ ID NO: 1709538 - RNA, 20 nt, Human
guaauaggcguaacuaauuu

SEQ ID NO: 1709539 - RNA, 18 nt, Human
guaauuuggaucucuucu

SEQ ID NO: 1709540 - RNA, 17 nt, Human
guaauuguguuuacauu

SEQ ID NO: 1709541 - RNA, 18 nt, Human
guaauuguguuuacauuu

SEQ ID NO: 1709542 - RNA, 20 nt, Human
guaauuguguuuacauuuua

SEQ ID NO: 1709543 - RNA, 13 nt, Human
guaauuguguuua

SEQ ID NO: 1709544 - RNA, 15 nt, Human
guaauuguguuuaca

SEQ ID NO: 1709545 - RNA, 17 nt, Human
aaaucauuuuaugucaa

SEQ ID NO: 1709546 - RNA, 14 nt, Human
aaaucauuuuaugu

SEQ ID NO: 1709547 - RNA, 15 nt, Human
aaaucauuuuauguc

SEQ ID NO: 1709548 - RNA, 17 nt, Human
guaccaaccauccaauu

SEQ ID NO: 1709549 - RNA, 23 nt, Human
guacuguaugaucaaauguuuaa

SEQ ID NO: 1709550 - RNA, 18 nt, Human
guacuguaugaucaaaug

SEQ ID NO: 1709551 - RNA, 20 nt, Human
guacuguaugaucaaauguu

SEQ ID NO: 1709552 - RNA, 21 nt, Human
guacuguaugaucaaauguuu

SEQ ID NO: 1709553 - RNA, 22 nt, Human
guacuguaugaucaaauguuua

SEQ ID NO: 1709554 - RNA, 14 nt, Human
guacuguaugauca

SEQ ID NO: 1709555 - RNA, 17 nt, Human
guacuguaugaucaaau

SEQ ID NO: 1709556 - RNA, 15 nt, Human
guacugcauuauuug

SEQ ID NO: 1709557 - RNA, 16 nt, Human
guacugauucaauuug

SEQ ID NO: 1709558 - RNA, 15 nt, Human
guacugauucaauuu

SEQ ID NO: 1709559 - RNA, 13 nt, Human
guacugcauuauu

SEQ ID NO: 1709560 - RNA, 22 nt, Human
gacaguaauuguguuuacauuu

SEQ ID NO: 1709561 - RNA, 20 nt, Human
gacaguaauuguguuuacau

SEQ ID NO: 1709562 - RNA, 15 nt, Human
gacaguaauuguguu

SEQ ID NO: 1709563 - RNA, 18 nt, Human
gacaguaauuguguuuac

SEQ ID NO: 1709564 - RNA, 19 nt, Human
gacaguaauuguguuuaca

SEQ ID NO: 1709565 - RNA, 21 nt, Human
gacacucgaggucgggcagca

SEQ ID NO: 1709566 - RNA, 13 nt, Human
gagaagcugcuca

SEQ ID NO: 1709567 - RNA, 22 nt, Human
gagaagcugcucaacuugcaaa

SEQ ID NO: 1709568 - RNA, 21 nt, Human
gauuuuuuuuuuuuuccuguc

SEQ ID NO: 1709569 - RNA, 17 nt, Human
gcaauacaaguuucauc

SEQ ID NO: 1709570 - RNA, 18 nt, Human
gcacacagaggggaguca

SEQ ID NO: 1709571 - RNA, 14 nt, Human
gcacuauaugcaaa

SEQ ID NO: 1709572 - RNA, 15 nt, Human
gcacuauaugcaaac

SEQ ID NO: 1709573 - RNA, 18 nt, Human
gcacuauaugcaaacagg

SEQ ID NO: 1709574 - RNA, 15 nt, Human
gcacucuucauggug

SEQ ID NO: 1709575 - RNA, 13 nt, Human
gcacucuucaugg

SEQ ID NO: 1709576 - RNA, 16 nt, Human
cuuggguagcgcacuc

SEQ ID NO: 1709577 - RNA, 20 nt, Human
cuucucacauuuauauuuuu

SEQ ID NO: 1709578 - RNA, 13 nt, Human
cuucucacauuua

SEQ ID NO: 1709579 - RNA, 18 nt, Human
cuucuuaauguacauagu

SEQ ID NO: 1709580 - RNA, 20 nt, Human
cuucuuaauguacauagugc

SEQ ID NO: 1709581 - RNA, 15 nt, Human
cuucuuaauguacau

SEQ ID NO: 1709582 - RNA, 16 nt, Human
cuucuuaauguacaua

SEQ ID NO: 1709583 - RNA, 15 nt, Human
cuugcaaaaucaguu

SEQ ID NO: 1709584 - RNA, 16 nt, Human
cuugcaaaaucaguuu

SEQ ID NO: 1709585 - RNA, 17 nt, Human
cuugcaaaaucaguuuu

SEQ ID NO: 1709586 - RNA, 22 nt, Human
cuugcaaaaucaguuuuccucu

SEQ ID NO: 1709587 - RNA, 23 nt, Human
cuugaagguauaucuagguuuau

SEQ ID NO: 1709588 - RNA, 13 nt, Human
gaacaaaugaaga

SEQ ID NO: 1709589 - RNA, 14 nt, Human
gaagaccuuuuucu

SEQ ID NO: 1709590 - RNA, 17 nt, Human
gaagaccuuuuucugca

SEQ ID NO: 1709591 - RNA, 21 nt, Human
gaagaccuuuuucugcacuau

SEQ ID NO: 1709592 - RNA, 21 nt, Human
cuuagcauuuucugcaucucc

SEQ ID NO: 1709593 - RNA, 19 nt, Human
cuuagcauuuucugcaucu

SEQ ID NO: 1709594 - RNA, 14 nt, Human
cuguacugauucaa

SEQ ID NO: 1709595 - RNA, 17 nt, Human
cuguacugauucaauuu

SEQ ID NO: 1709596 - RNA, 21 nt, Human
cuguacugauucaauuugaug

SEQ ID NO: 1709597 - RNA, 20 nt, Human
cuguacugaaguaaaacaaa

SEQ ID NO: 1709598 - RNA, 19 nt, Human
cuguacugaaguaaaacaa

SEQ ID NO: 1709599 - RNA, 13 nt, Human
cuguacugauuca

SEQ ID NO: 1709600 - RNA, 15 nt, Human
cauuccuugcugaaa

SEQ ID NO: 1709601 - RNA, 14 nt, Human
caugucaagauuca

SEQ ID NO: 1709602 - RNA, 17 nt, Human
caugucaagauucagcu

SEQ ID NO: 1709603 - RNA, 19 nt, Human
caugucaagauucagcuag

SEQ ID NO: 1709604 - RNA, 18 nt, Human
cagugccaggaacccuua

SEQ ID NO: 1709605 - RNA, 22 nt, Human
auuguguuuacauuuuauggug

SEQ ID NO: 1709606 - RNA, 12 nt, Human
auuguguuuaca

SEQ ID NO: 1709607 - RNA, 23 nt, Human
auuguguuuacauuuuauggugc

SEQ ID NO: 1709608 - RNA, 14 nt, Human
auuguguuuacauu

SEQ ID NO: 1709609 - RNA, 15 nt, Human
auuguguuuacauuu

SEQ ID NO: 1709610 - RNA, 18 nt, Human
auuguguuuacauuuuau

SEQ ID NO: 1709611 - RNA, 19 nt, Human
auuguguuuacauuuuaug

SEQ ID NO: 1709612 - RNA, 13 nt, Human
auucaaauuuuau

SEQ ID NO: 1709613 - RNA, 22 nt, Human
auuuuauggugccuaguauuga

SEQ ID NO: 1709614 - RNA, 21 nt, Human
caaaaggauaaugaauacuuu

SEQ ID NO: 1709615 - RNA, 14 nt, Human
caaccauccaauua

SEQ ID NO: 1709616 - RNA, 22 nt, Human
caaagucaggaaucaucaggaa

SEQ ID NO: 1709617 - RNA, 18 nt, Human
caaagucaggaaucauca

SEQ ID NO: 1709618 - RNA, 19 nt, Human
caaaugaagacaaaacaua

SEQ ID NO: 1709619 - RNA, 14 nt, Human
cacucuucauggug

SEQ ID NO: 1709620 - RNA, 21 nt, Human
cacuguuuucuaguguaucaa

SEQ ID NO: 1709621 - RNA, 23 nt, Human
cacuguuuucuaguguaucaaaa

SEQ ID NO: 1709622 - RNA, 14 nt, Human
cacuguuuucuagu

SEQ ID NO: 1709623 - RNA, 16 nt, Human
cacuguuuucuagugu

SEQ ID NO: 1709624 - RNA, 17 nt, Human
cacuguuuucuagugua

SEQ ID NO: 1709625 - RNA, 13 nt, Human
caaguuucaucca

SEQ ID NO: 1709626 - RNA, 20 nt, Human
caaguuucauccagaacuac

SEQ ID NO: 1709627 - RNA, 16 nt, Human
caaguuucauccagaa

SEQ ID NO: 1709628 - RNA, 13 nt, Human
caauaaaauuaua

SEQ ID NO: 1709629 - RNA, 20 nt, Human
caauaaaauuauagcucuaa

SEQ ID NO: 1709630 - RNA, 20 nt, Human
cuaguuccccuguuuauuca

SEQ ID NO: 1709631 - RNA, 21 nt, Human
cuaguuccccuguuuauucau

SEQ ID NO: 1709632 - RNA, 22 nt, Human
cgcaucuaguuccccuguuuau

SEQ ID NO: 1709633 - RNA, 22 nt, Human
cgaggucgggcagcacaagugu

SEQ ID NO: 1709634 - RNA, 18 nt, Human
cucgguauaguuuuguca

SEQ ID NO: 1709635 - RNA, 19 nt, Human
cuccauagaccuuuucauu

SEQ ID NO: 1709636 - RNA, 21 nt, Human
ccaguugcugcuucaauuuau

SEQ ID NO: 1709637 - RNA, 19 nt, Human
ccaguucuucgacuguugu

SEQ ID NO: 1709638 - RNA, 14 nt, Human
ccuggauuugcaua

SEQ ID NO: 1709639 - RNA, 15 nt, Human
ccauuuguucauauu

SEQ ID NO: 1709640 - RNA, 20 nt, Human
ccauuuguucauauuaagaa

SEQ ID NO: 1709641 - RNA, 16 nt, Human
ccauuuguucauauua

SEQ ID NO: 1709642 - RNA, 22 nt, Human
ccauuugaauuuuuuagugacu

SEQ ID NO: 1709643 - RNA, 20 nt, Human
ccauuaaguaaacaauaaaa

SEQ ID NO: 1709644 - RNA, 16 nt, Human
ccauauggauccacug

SEQ ID NO: 1709645 - RNA, 22 nt, Human
ccagcaccggccccauuuaccc

SEQ ID NO: 1709646 - RNA, 17 nt, Human
ccccaccccaaaauuag

SEQ ID NO: 1709647 - RNA, 15 nt, Human
cccauucaagauucc

SEQ ID NO: 1709648 - RNA, 16 nt, Human
cccaugauuucaugua

SEQ ID NO: 1709649 - RNA, 17 nt, Human
cccaugauuucauguac

SEQ ID NO: 1709650 - RNA, 19 nt, Human
cccaugauuucauguacug

SEQ ID NO: 1709651 - RNA, 20 nt, Human
cccuuaaacaguugcacagc

SEQ ID NO: 1709652 - RNA, 21 nt, Human
cccuuaaacaguugcacagca

SEQ ID NO: 1709653 - RNA, 22 nt, Human
cccuuaaacaguugcacagcau

SEQ ID NO: 1709654 - RNA, 20 nt, Human
cuaaacuccaaacauccucu

SEQ ID NO: 1709655 - RNA, 19 nt, Human
cuaaacuccaaacauccuc

SEQ ID NO: 1709656 - RNA, 21 nt, Human
cuaagcuucacuguaaaauaa

SEQ ID NO: 1709657 - RNA, 17 nt, Human
cuaauacagcugagcua

SEQ ID NO: 1709658 - RNA, 14 nt, Human
cuaauaguauaaac

SEQ ID NO: 1709659 - RNA, 23 nt, Human
cuacacgagauacagaauuuuau

SEQ ID NO: 1709660 - RNA, 18 nt, Human
cuacauuaaacaugacuc

SEQ ID NO: 1709661 - RNA, 16 nt, Human
cuaccaaccuguucaa

SEQ ID NO: 1709662 - RNA, 16 nt, Human
cuaugauguauacugc

SEQ ID NO: 1709663 - RNA, 13 nt, Human
cuaugauguauac

SEQ ID NO: 1709664 - RNA, 14 nt, Human
cuaugauguauacu

SEQ ID NO: 1709665 - RNA, 20 nt, Human
cuaugauguauacugccacu

SEQ ID NO: 1709666 - RNA, 13 nt, Human
cuauaauuuaaau

SEQ ID NO: 1709667 - RNA, 12 nt, Human
cuauaauuuaaa

SEQ ID NO: 1709668 - RNA, 18 nt, Human
cuccauuuaaacagaugu

SEQ ID NO: 1709669 - RNA, 15 nt, Human
cucccauucaagauu

SEQ ID NO: 1709670 - RNA, 21 nt, Human
cucagcucaucuucacugcac

SEQ ID NO: 1709671 - RNA, 13 nt, Human
ccuuugugaaaaa

SEQ ID NO: 1709672 - RNA, 11 nt, Human
ccuaugaugua

SEQ ID NO: 1709673 - RNA, 14 nt, Human
ccuaugauguauac

SEQ ID NO: 1709674 - RNA, 15 nt, Human
ccuaugauguauacu

SEQ ID NO: 1709675 - RNA, 18 nt, Human
ccuaugauguauacugcc

SEQ ID NO: 1709676 - RNA, 17 nt, Human
ccugucauacuuuguua

SEQ ID NO: 1709677 - RNA, 19 nt, Human
ccuguaggaagguacugua

SEQ ID NO: 1709678 - RNA, 18 nt, Human
gaaaaucuuauaauuuaa

SEQ ID NO: 1709679 - RNA, 13 nt, Human
cuuuuucugcacu

SEQ ID NO: 1709680 - RNA, 14 nt, Human
cuuuuucugcacua

SEQ ID NO: 1709681 - RNA, 16 nt, Human
cuuuuucugcacuaua

SEQ ID NO: 1709682 - RNA, 20 nt, Human
cuuuuucugcacuauaugca

SEQ ID NO: 1709683 - RNA, 22 nt, Human
cuuuuucugcacuauaugcaaa

SEQ ID NO: 1709684 - RNA, 17 nt, Human
cuuguacuuuauuuucu

SEQ ID NO: 1709685 - RNA, 19 nt, Human
cuugaguuuaaauuguaau

SEQ ID NO: 1709686 - RNA, 23 nt, Human
cuuuauggcagacauugugcuag

SEQ ID NO: 1709687 - RNA, 16 nt, Human
cuuugucacuguuuca

SEQ ID NO: 1709688 - RNA, 17 nt, Human
cuuugcucauauuuccc

SEQ ID NO: 1709689 - RNA, 19 nt, Human
cuuagugcaguuauuugcu

SEQ ID NO: 1709690 - RNA, 18 nt, Human
cuuauuucaucauucacu

SEQ ID NO: 1709691 - RNA, 15 nt, Human
cuuauuucaucauuc

SEQ ID NO: 1709692 - RNA, 17 nt, Human
cuucaauccuugaaggu

SEQ ID NO: 1709693 - RNA, 15 nt, Human
cuucaauuuauaccu

SEQ ID NO: 1709694 - RNA, 19 nt, Human
cuguaugaucaaauguuua

SEQ ID NO: 1709695 - RNA, 21 nt, Human
cuguaugaucaaauguuuaau

SEQ ID NO: 1709696 - RNA, 13 nt, Human
cuguaugaucaaa

SEQ ID NO: 1709697 - RNA, 14 nt, Human
cuguaugaucaaau

SEQ ID NO: 1709698 - RNA, 15 nt, Human
cuguaugaucaaaug

SEQ ID NO: 1709699 - RNA, 16 nt, Human
cuguaugaucaaaugu

SEQ ID NO: 1709700 - RNA, 17 nt, Human
cuguaugaucaaauguu

SEQ ID NO: 1709701 - RNA, 18 nt, Human
cuguaugaucaaauguuu

SEQ ID NO: 1709702 - RNA, 18 nt, Human
cuguccgagugugccaca

SEQ ID NO: 1709703 - RNA, 23 nt, Human
cuguacaaaaaaaucuuccaauu

SEQ ID NO: 1709704 - RNA, 11 nt, Human
cugugcacagc

SEQ ID NO: 1709705 - RNA, 12 nt, Human
cugugcacagcc

SEQ ID NO: 1709706 - RNA, 13 nt, Human
cugugcacagccc

SEQ ID NO: 1709707 - RNA, 13 nt, Human
cugugcuguuguu

SEQ ID NO: 1709708 - RNA, 17 nt, Human
cugugcuguuguuauga

SEQ ID NO: 1709709 - RNA, 19 nt, Human
cugugcuguuguuaugaug

SEQ ID NO: 1709710 - RNA, 21 nt, Human
cugugcuguuguuaugaugug

SEQ ID NO: 1709711 - RNA, 16 nt, Human
cugccucucuuguaau

SEQ ID NO: 1709712 - RNA, 16 nt, Human
gacuugaagacuuaca

SEQ ID NO: 1709713 - RNA, 23 nt, Human
gaaugcuuaaagaauucaaauuu

SEQ ID NO: 1709714 - RNA, 21 nt, Human
gaaugcuuaaagaauucaaau

SEQ ID NO: 1709715 - RNA, 16 nt, Human
gacaaggaaaaaauaa

SEQ ID NO: 1709716 - RNA, 22 nt, Human
gacaagaaaggcugcuguacug

SEQ ID NO: 1709717 - RNA, 22 nt, Human
gacaauuagauaaauguccauu

SEQ ID NO: 1709718 - RNA, 15 nt, Human
gcaaauuggagaaaa

SEQ ID NO: 1709719 - RNA, 14 nt, Human
gcaaauuggagaaa

SEQ ID NO: 1709720 - RNA, 16 nt, Human
gauucaauuugaugug

SEQ ID NO: 1709721 - RNA, 14 nt, Human
gauguggugaaaag

SEQ ID NO: 1709722 - RNA, 17 nt, Human
gauguuacuccaaaacu

SEQ ID NO: 1709723 - RNA, 22 nt, Human
gcaccaguugcugcuucaauuu

SEQ ID NO: 1709724 - RNA, 20 nt, Human
gauaaaucauuuuaugucaa

SEQ ID NO: 1709725 - RNA, 13 nt, Human
gauaaaucauuuu

SEQ ID NO: 1709726 - RNA, 14 nt, Human
gauaaaucauuuua

SEQ ID NO: 1709727 - RNA, 11 nt, Human
ggacaaaauga

SEQ ID NO: 1709728 - RNA, 11 nt, Human
ggacaaacugc

SEQ ID NO: 1709729 - RNA, 19 nt, Human
ggaaguaguuaucauguua

SEQ ID NO: 1709730 - RNA, 13 nt, Human
ggaaguaguuauc

SEQ ID NO: 1709731 - RNA, 16 nt, Human
ggaaguaguuaucaug

SEQ ID NO: 1709732 - RNA, 19 nt, Human
ggaagguacuguaugauca

SEQ ID NO: 1709733 - RNA, 20 nt, Human
gcuccauuuuuagugaaaua

SEQ ID NO: 1709734 - RNA, 19 nt, Human
gcuccauuuaaacagaugu

SEQ ID NO: 1709735 - RNA, 16 nt, Human
gcuccauuuaaacaga

SEQ ID NO: 1709736 - RNA, 23 nt, Human
gcuccauuuaaacagauguccau

SEQ ID NO: 1709737 - RNA, 13 nt, Human
gcuaacaugaaga

SEQ ID NO: 1709738 - RNA, 22 nt, Human
gcuaacaugaagaccuuuuucu

SEQ ID NO: 1709739 - RNA, 23 nt, Human
guacuuuauuuucuauaauuuaa

SEQ ID NO: 1709740 - RNA, 14 nt, Human
guaaugaauaccuu

SEQ ID NO: 1709741 - RNA, 22 nt, Human
guacauagugcuaacaugaaga

SEQ ID NO: 1709742 - RNA, 17 nt, Human
guaaaugucucacugag

SEQ ID NO: 1709743 - RNA, 19 nt, Human
guaaaugucucacugagca

SEQ ID NO: 1709744 - RNA, 19 nt, Human
guaaaacaaacaauaccug

SEQ ID NO: 1709745 - RNA, 14 nt, Human
gguuuuuauuuccu

SEQ ID NO: 1709746 - RNA, 17 nt, Human
ggugccuaguauugaca

SEQ ID NO: 1709747 - RNA, 19 nt, Human
ggugccuaguauugacaaa

SEQ ID NO: 1709748 - RNA, 17 nt, Human
gguacuguaugaucaaa

SEQ ID NO: 1709749 - RNA, 18 nt, Human
gguacuguaugaucaaau

SEQ ID NO: 1709750 - RNA, 20 nt, Human
gguacuguaugaucaaaugu

SEQ ID NO: 1709751 - RNA, 21 nt, Human
gguacuguaugaucaaauguu

SEQ ID NO: 1709752 - RNA, 16 nt, Human
ggggcagcagcagugg

SEQ ID NO: 1709753 - RNA, 15 nt, Human
gucaagauucagcua

SEQ ID NO: 1709754 - RNA, 16 nt, Human
gucaagauucagcuag

SEQ ID NO: 1709755 - RNA, 19 nt, Human
gucaagauucagcuagugg

SEQ ID NO: 1709756 - RNA, 15 nt, Human
gucuaccaauuauaa

SEQ ID NO: 1709757 - RNA, 22 nt, Human
gucuacauaacuaauacagcug

SEQ ID NO: 1709758 - RNA, 19 nt, Human
gugaaagaaaauaacaaua

SEQ ID NO: 1709759 - RNA, 14 nt, Human
gugagcuacaaaug

SEQ ID NO: 1709760 - RNA, 22 nt, Human
gugcuguuguuaugaugugcuu

SEQ ID NO: 1709761 - RNA, 19 nt, Human
gugcuguuguuaugaugug

SEQ ID NO: 1709762 - RNA, 20 nt, Human
gugcuguuguuaugaugugc

SEQ ID NO: 1709763 - RNA, 14 nt, Human
gugcuguuguuaug

SEQ ID NO: 1709764 - RNA, 15 nt, Human
gugcuguuguuauga

SEQ ID NO: 1709765 - RNA, 17 nt, Human
gugcuguuguuaugaug

SEQ ID NO: 1709766 - RNA, 20 nt, Human
uaucugccucucuuguaauu

SEQ ID NO: 1709767 - RNA, 21 nt, Human
uaucugccucucuuguaauuu

SEQ ID NO: 1709768 - RNA, 16 nt, Human
uaucugccucucuugu

SEQ ID NO: 1709769 - RNA, 23 nt, Human
uaugacaguaauuguguuuacau

SEQ ID NO: 1709770 - RNA, 15 nt, Human
uaugacaguaauugu

SEQ ID NO: 1709771 - RNA, 17 nt, Human
uaugacaguaauugugu

SEQ ID NO: 1709772 - RNA, 18 nt, Human
uaugacaguaauuguguu

SEQ ID NO: 1709773 - RNA, 22 nt, Human
uaugacaguaauuguguuuaca

SEQ ID NO: 1709774 - RNA, 19 nt, Human
uaucuguuugagaaaguca

SEQ ID NO: 1709775 - RNA, 15 nt, Human
uaucuguuugagaaa

SEQ ID NO: 1709776 - RNA, 16 nt, Human
uaucuguuugagaaag

SEQ ID NO: 1709777 - RNA, 20 nt, Human
uaugcuuauauuguucacuu

SEQ ID NO: 1709778 - RNA, 21 nt, Human
uaugauuagcuuugucacugu

SEQ ID NO: 1709779 - RNA, 16 nt, Human
uaugcaaacaggguaa

SEQ ID NO: 1709780 - RNA, 15 nt, Human
uagugcuaacaugaa

SEQ ID NO: 1709781 - RNA, 16 nt, Human
uagugcaguuauuugc

SEQ ID NO: 1709782 - RNA, 16 nt, Human
uaggucagugcaaaua

SEQ ID NO: 1709783 - RNA, 19 nt, Human
ucaacucuugaguuuuuca

SEQ ID NO: 1709784 - RNA, 20 nt, Human
ucaaauguuuaaucauauaa

SEQ ID NO: 1709785 - RNA, 17 nt, Human
ucaaauguuuaaucaua

SEQ ID NO: 1709786 - RNA, 18 nt, Human
ucaaauguuuaaucauau

SEQ ID NO: 1709787 - RNA, 12 nt, Human
ucaaauguuuaa

SEQ ID NO: 1709788 - RNA, 14 nt, Human
ucaaauguuuaauc

SEQ ID NO: 1709789 - RNA, 15 nt, Human
ucaaauguuuaauca

SEQ ID NO: 1709790 - RNA, 19 nt, Human
uauuugagaagcugcucaa

SEQ ID NO: 1709791 - RNA, 12 nt, Human
ucacauuuaaau

SEQ ID NO: 1709792 - RNA, 20 nt, Human
uauugcaaagucaggaauca

SEQ ID NO: 1709793 - RNA, 14 nt, Human
uauugcaaagucag

SEQ ID NO: 1709794 - RNA, 14 nt, Human
uauuaugauuagcu

SEQ ID NO: 1709795 - RNA, 17 nt, Human
uauuauauuuacaaaug

SEQ ID NO: 1709796 - RNA, 17 nt, Human
ucaucauucacuucacu

SEQ ID NO: 1709797 - RNA, 19 nt, Human
ucaucauucacuucacugu

SEQ ID NO: 1709798 - RNA, 21 nt, Human
ucaucauucacuucacugugc

SEQ ID NO: 1709799 - RNA, 22 nt, Human
ucaucauucacuucacugugcu

SEQ ID NO: 1709800 - RNA, 23 nt, Human
ucaucauucacuucacugugcug

SEQ ID NO: 1709801 - RNA, 14 nt, Human
uccaaacauccucu

SEQ ID NO: 1709802 - RNA, 22 nt, Human
ucaggaaucaucaggaacguuu

SEQ ID NO: 1709803 - RNA, 21 nt, Human
uccaguucuucgacuguuguu

SEQ ID NO: 1709804 - RNA, 19 nt, Human
uccaguucuucgacuguug

SEQ ID NO: 1709805 - RNA, 23 nt, Human
uccaguucuucgacuguuguuau

SEQ ID NO: 1709806 - RNA, 20 nt, Human
uccaugggccauaugaaaag

SEQ ID NO: 1709807 - RNA, 17 nt, Human
uccauagaccuuuucau

SEQ ID NO: 1709808 - RNA, 16 nt, Human
uccaucagaugacaag

SEQ ID NO: 1709809 - RNA, 15 nt, Human
ucggcacuguacaaa

SEQ ID NO: 1709810 - RNA, 23 nt, Human
ugacaagaaaggcugcuguacug

SEQ ID NO: 1709811 - RNA, 22 nt, Human
ugacaagaaaggcugcuguacu

SEQ ID NO: 1709812 - RNA, 21 nt, Human
ugacaagcuccauuuaaacag

SEQ ID NO: 1709813 - RNA, 18 nt, Human
ugacaagcuccauuuaaa

SEQ ID NO: 1709814 - RNA, 21 nt, Human
ucuugcaguaucggcacugua

SEQ ID NO: 1709815 - RNA, 20 nt, Human
ucuugcaguaucggcacugu

SEQ ID NO: 1709816 - RNA, 12 nt, Human
ucuuugccaagu

SEQ ID NO: 1709817 - RNA, 16 nt, Human
ugaaauuccauuugua

SEQ ID NO: 1709818 - RNA, 15 nt, Human
ugaaauuccauuugu

SEQ ID NO: 1709819 - RNA, 20 nt, Human
ugaaaagcuccauuuuuagu

SEQ ID NO: 1709820 - RNA, 22 nt, Human
ugaaaagcagguugauaaauca

SEQ ID NO: 1709821 - RNA, 18 nt, Human
ugaaaagcagguugauaa

SEQ ID NO: 1709822 - RNA, 19 nt, Human
ugaaaagcagguugauaaa

SEQ ID NO: 1709823 - RNA, 16 nt, Human
ugagcaguguuagcuu

SEQ ID NO: 1709824 - RNA, 20 nt, Human
ugaugcuacaggauuugaaa

SEQ ID NO: 1709825 - RNA, 23 nt, Human
ugaugcuacaggauuugaaauug

SEQ ID NO: 1709826 - RNA, 16 nt, Human
ugauguggugaaaagc

SEQ ID NO: 1709827 - RNA, 21 nt, Human
ugauugaccguguuggucugu

SEQ ID NO: 1709828 - RNA, 13 nt, Human
ugauuauauguca

SEQ ID NO: 1709829 - RNA, 19 nt, Human
ugauuagcuuugucacugu

SEQ ID NO: 1709830 - RNA, 22 nt, Human
ugauuagugaaaggaagauaaa

SEQ ID NO: 1709831 - RNA, 14 nt, Human
ugauucaauuugau

SEQ ID NO: 1709832 - RNA, 16 nt, Human
ugauucaauuugaugu

SEQ ID NO: 1709833 - RNA, 19 nt, Human
ugauucaauuugauguggu

SEQ ID NO: 1709834 - RNA, 13 nt, Human
ugcugcuucaauu

SEQ ID NO: 1709835 - RNA, 14 nt, Human
ugcugcuucaauuu

SEQ ID NO: 1709836 - RNA, 17 nt, Human
ugcuaacaugaagaccu

SEQ ID NO: 1709837 - RNA, 19 nt, Human
ugcuaacaugaagaccuuu

SEQ ID NO: 1709838 - RNA, 14 nt, Human
ugcucauauuuccc

SEQ ID NO: 1709839 - RNA, 15 nt, Human
ugcucauauuuccca

SEQ ID NO: 1709840 - RNA, 22 nt, Human
ugcucauauuucccaugauuuc

SEQ ID NO: 1709841 - RNA, 24 nt, Human
ugcucauauuucccaugauuucau

SEQ ID NO: 1709842 - RNA, 14 nt, Human
ugcaguuauuugcu

SEQ ID NO: 1709843 - RNA, 16 nt, Human
ugccuaguauugacaa

SEQ ID NO: 1709844 - RNA, 17 nt, Human
ugccuaguauugacaaa

SEQ ID NO: 1709845 - RNA, 18 nt, Human
ugccuaguauugacaaaa

SEQ ID NO: 1709846 - RNA, 22 nt, Human
ugccuaguauugacaaaauguu

SEQ ID NO: 1709847 - RNA, 21 nt, Human
ugccuaguauugacaaaaugu

SEQ ID NO: 1709848 - RNA, 19 nt, Human
uggaucucuucuuaaugua

SEQ ID NO: 1709849 - RNA, 20 nt, Human
uggaucucuucuuaauguac

SEQ ID NO: 1709850 - RNA, 21 nt, Human
uggaucucuucuuaauguaca

SEQ ID NO: 1709851 - RNA, 23 nt, Human
uggaucucuucuuaauguacaua

SEQ ID NO: 1709852 - RNA, 22 nt, Human
uggaucucuucuuaauguacau

SEQ ID NO: 1709853 - RNA, 15 nt, Human
ugcuguuguuaugau

SEQ ID NO: 1709854 - RNA, 16 nt, Human
ugcuguuguuaugaug

SEQ ID NO: 1709855 - RNA, 17 nt, Human
ugcuguuguuaugaugu

SEQ ID NO: 1709856 - RNA, 18 nt, Human
ugcuguuguuaugaugug

SEQ ID NO: 1709857 - RNA, 19 nt, Human
ugcuguuguuaugaugugc

SEQ ID NO: 1709858 - RNA, 20 nt, Human
ugcuguuguuaugaugugcu

SEQ ID NO: 1709859 - RNA, 22 nt, Human
ugcuguuguuaugaugugcuua

SEQ ID NO: 1709860 - RNA, 23 nt, Human
ugcuguuguuaugaugugcuuaa

SEQ ID NO: 1709861 - RNA, 18 nt, Human
uuaauguacauagugcua

SEQ ID NO: 1709862 - RNA, 17 nt, Human
uuaauguacauagugcu

SEQ ID NO: 1709863 - RNA, 20 nt, Human
uuaacugacaagcuccauuu

SEQ ID NO: 1709864 - RNA, 15 nt, Human
uuaaagaauucaaau

SEQ ID NO: 1709865 - RNA, 17 nt, Human
uuaaagaauucaaauuu

SEQ ID NO: 1709866 - RNA, 19 nt, Human
uuaaagaauucaaauuuua

SEQ ID NO: 1709867 - RNA, 14 nt, Human
uuaaagaauucaaa

SEQ ID NO: 1709868 - RNA, 20 nt, Human
uuaaagaauucaaauuuuau

SEQ ID NO: 1709869 - RNA, 17 nt, Human
uguuucacuacucagca

SEQ ID NO: 1709870 - RNA, 12 nt, Human
uuagcugacaaa

SEQ ID NO: 1709871 - RNA, 18 nt, Human
uuagcugacaaaauacuu

SEQ ID NO: 1709872 - RNA, 15 nt, Human
uuagcugacaaaaua

SEQ ID NO: 1709873 - RNA, 17 nt, Human
uuagcuuauguuaacug

SEQ ID NO: 1709874 - RNA, 16 nt, Human
uuagcuuugucacugu

SEQ ID NO: 1709875 - RNA, 12 nt, Human
uuagcuuuguca

SEQ ID NO: 1709876 - RNA, 17 nt, Human
uuaguauugcaaaguca

SEQ ID NO: 1709877 - RNA, 11 nt, Human
uuaguauugca

SEQ ID NO: 1709878 - RNA, 13 nt, Human
uuaguauugcaaa

SEQ ID NO: 1709879 - RNA, 13 nt, Human
uuacuuaguauug

SEQ ID NO: 1709880 - RNA, 15 nt, Human
uuacuuaguauugca

SEQ ID NO: 1709881 - RNA, 19 nt, Human
uuacuuaguauugcaaagu

SEQ ID NO: 1709882 - RNA, 18 nt, Human
uuccuaugauguauacug

SEQ ID NO: 1709883 - RNA, 21 nt, Human
uuccuaugauguauacugcca

SEQ ID NO: 1709884 - RNA, 14 nt, Human
uuccuaugauguau

SEQ ID NO: 1709885 - RNA, 16 nt, Human
uucguuuaaugaaugc

SEQ ID NO: 1709886 - RNA, 18 nt, Human
uuccucccauucaagauu

SEQ ID NO: 1709887 - RNA, 13 nt, Human
uucccaugauuuc

SEQ ID NO: 1709888 - RNA, 18 nt, Human
uucccaugauuucaugua

SEQ ID NO: 1709889 - RNA, 20 nt, Human
uucccaugauuucauguacu

SEQ ID NO: 1709890 - RNA, 21 nt, Human
uucccaugauuucauguacug

SEQ ID NO: 1709891 - RNA, 22 nt, Human
uucccaugauuucauguacugc

SEQ ID NO: 1709892 - RNA, 18 nt, Human
uuaucugccucucuugua

SEQ ID NO: 1709893 - RNA, 21 nt, Human
uuaucugccucucuuguaauu

SEQ ID NO: 1709894 - RNA, 12 nt, Human
uuaguuccugug

SEQ ID NO: 1709895 - RNA, 15 nt, Human
uuaguuccugugcac

SEQ ID NO: 1709896 - RNA, 18 nt, Human
uuaguuccugugcacagc

SEQ ID NO: 1709897 - RNA, 15 nt, Human
uucacuacucagcau

SEQ ID NO: 1709898 - RNA, 15 nt, Human
uucaauuuauaccuc

SEQ ID NO: 1709899 - RNA, 15 nt, Human
uucaauuugaugugg

SEQ ID NO: 1709900 - RNA, 22 nt, Human
uucaauuugauguggugaaaag

SEQ ID NO: 1709901 - RNA, 16 nt, Human
uucaauuugauguggu

SEQ ID NO: 1709902 - RNA, 16 nt, Human
uucaauuuauaccuca

SEQ ID NO: 1709903 - RNA, 14 nt, Human
uucacuacucagca

SEQ ID NO: 1709904 - RNA, 21 nt, Human
uuugaaauuguauuacaaauc

SEQ ID NO: 1709905 - RNA, 19 nt, Human
uuugcuuucgguuccaguu

SEQ ID NO: 1709906 - RNA, 16 nt, Human
uuuccacuucuucauu

SEQ ID NO: 1709907 - RNA, 15 nt, Human
uuuccacuucuucau

SEQ ID NO: 1709908 - RNA, 19 nt, Human
uuuaugacaguaauugugu

SEQ ID NO: 1709909 - RNA, 15 nt, Human
uuuaugacaguaauu

SEQ ID NO: 1709910 - RNA, 16 nt, Human
uuuaugacaguaauug

SEQ ID NO: 1709911 - RNA, 14 nt, Human
uuuaugacaguaau

SEQ ID NO: 1709912 - RNA, 20 nt, Human
uuuaucugccucucuuguaa

SEQ ID NO: 1709913 - RNA, 14 nt, Human
uuuaucugccucuc

SEQ ID NO: 1709914 - RNA, 19 nt, Human
uuuaucugccucucuugua

SEQ ID NO: 1709915 - RNA, 21 nt, Human
uuuaucugccucucuuguaau

SEQ ID NO: 1709916 - RNA, 22 nt, Human
uuuauaccucaauuuucacugu

SEQ ID NO: 1709917 - RNA, 19 nt, Human
uuuaguuccugugcacagc

SEQ ID NO: 1709918 - RNA, 13 nt, Human
uuuaguuccugug

SEQ ID NO: 1709919 - RNA, 12 nt, Human
uuuaguuccugu

SEQ ID NO: 1709920 - RNA, 12 nt, Human
uuuaaucauaua

SEQ ID NO: 1709921 - RNA, 13 nt, Human
uuuaaucauauaa

SEQ ID NO: 1709922 - RNA, 12 nt, Human
uuuaaaaugucu

SEQ ID NO: 1709923 - RNA, 23 nt, Human
uuuaaacagauguccaucagaug

SEQ ID NO: 1709924 - RNA, 14 nt, Human
uuuaaacagauguc

SEQ ID NO: 1709925 - RNA, 20 nt, Human
uuggucuguacugauucaau

SEQ ID NO: 1709926 - RNA, 14 nt, Human
uuggucuguacuga

SEQ ID NO: 1709927 - RNA, 16 nt, Human
uuggucuguacugauu

SEQ ID NO: 1709928 - RNA, 13 nt, Human
uuggacaaaauga

SEQ ID NO: 1709929 - RNA, 21 nt, Human
uugaaaaucuuauaauuuaaa

SEQ ID NO: 1709930 - RNA, 20 nt, Human
uuuguggguuuuuauuuccu

SEQ ID NO: 1709931 - RNA, 15 nt, Human
caaauuuuaucugcc

SEQ ID NO: 1709932 - RNA, 13 nt, Human
caaacaauaccug

SEQ ID NO: 1709933 - RNA, 15 nt, Human
caaacaauaccugaa

SEQ ID NO: 1709934 - RNA, 22 nt, Human
caaacaauaccugaaugcucug

SEQ ID NO: 1709935 - RNA, 21 nt, Human
caaaauacuugucuguuuuaa

SEQ ID NO: 1709936 - RNA, 20 nt, Human
caaaauacuugucuguuuua

SEQ ID NO: 1709937 - RNA, 16 nt, Human
caaaaucaguuuuccu

SEQ ID NO: 1709938 - RNA, 12 nt, Human
caaaaucaguuu

SEQ ID NO: 1709939 - RNA, 15 nt, Human
cacaaguguaaugaa

SEQ ID NO: 1709940 - RNA, 17 nt, Human
cacaaguguaaugaaua

SEQ ID NO: 1709941 - RNA, 16 nt, Human
caauuagcuuauguua

SEQ ID NO: 1709942 - RNA, 20 nt, Human
caaggaaaaaauaacaauga

SEQ ID NO: 1709943 - RNA, 18 nt, Human
caaggaaaaaauaacaau

SEQ ID NO: 1709944 - RNA, 19 nt, Human
caauaccugaaugcucugu

SEQ ID NO: 1709945 - RNA, 17 nt, Human
caauaccugaaugcucu

SEQ ID NO: 1709946 - RNA, 22 nt, Human
auggauccacuggcuggacaaa

SEQ ID NO: 1709947 - RNA, 18 nt, Human
augauguauacugccacu

SEQ ID NO: 1709948 - RNA, 14 nt, Human
aucuucaauccuug

SEQ ID NO: 1709949 - RNA, 22 nt, Human
aucuuccaauuuaguuguugua

SEQ ID NO: 1709950 - RNA, 17 nt, Human
aucuaguuccccuguuu

SEQ ID NO: 1709951 - RNA, 22 nt, Human
aucuaguuccccuguuuauuca

SEQ ID NO: 1709952 - RNA, 23 nt, Human
aucuaguuccccuguuuauucau

SEQ ID NO: 1709953 - RNA, 19 nt, Human
aucuaguuccccuguuuau

SEQ ID NO: 1709954 - RNA, 20 nt, Human
aucuaguuccccuguuuauu

SEQ ID NO: 1709955 - RNA, 21 nt, Human
aucuagguuuaugacaguaau

SEQ ID NO: 1709956 - RNA, 22 nt, Human
aucuagguuuaugacaguaauu

SEQ ID NO: 1709957 - RNA, 23 nt, Human
aucuagguuuaugacaguaauug

SEQ ID NO: 1709958 - RNA, 14 nt, Human
aucuagguuuauga

SEQ ID NO: 1709959 - RNA, 15 nt, Human
aucuagguuuaugac

SEQ ID NO: 1709960 - RNA, 18 nt, Human
aucuagguuuaugacagu

SEQ ID NO: 1709961 - RNA, 23 nt, Human
aucaaaaugcucuuauuucauca

SEQ ID NO: 1709962 - RNA, 20 nt, Human
aucaaaaugcucuuauuuca

SEQ ID NO: 1709963 - RNA, 21 nt, Human
aucaaaaugcucuuauuucau

SEQ ID NO: 1709964 - RNA, 15 nt, Human
aucaaaaugcucuua

SEQ ID NO: 1709965 - RNA, 19 nt, Human
aucaaaaugcucuuauuuc

SEQ ID NO: 1709966 - RNA, 19 nt, Human
auauuucccaugauuucau

SEQ ID NO: 1709967 - RNA, 21 nt, Human
auauuucccaugauuucaugu

SEQ ID NO: 1709968 - RNA, 13 nt, Human
aucaggaacguuu

SEQ ID NO: 1709969 - RNA, 23 nt, Human
aucaggaacguuuagcugacaaa

SEQ ID NO: 1709970 - RNA, 19 nt, Human
auccucaguuuuugugaaa

SEQ ID NO: 1709971 - RNA, 16 nt, Human
auccuugaagguauau

SEQ ID NO: 1709972 - RNA, 23 nt, Human
auccuugaagguauaucuagguu

SEQ ID NO: 1709973 - RNA, 18 nt, Human
auauuucccaugauuuca

SEQ ID NO: 1709974 - RNA, 22 nt, Human
auauuucccaugauuucaugua

SEQ ID NO: 1709975 - RNA, 13 nt, Human
auacuugucuguu

SEQ ID NO: 1709976 - RNA, 16 nt, Human
auacuugucuguuuua

SEQ ID NO: 1709977 - RNA, 14 nt, Human
auaacaaugaaagu

SEQ ID NO: 1709978 - RNA, 19 nt, Human
auaagggcaaauuggagaa

SEQ ID NO: 1709979 - RNA, 12 nt, Human
auaagggaagua

SEQ ID NO: 1709980 - RNA, 22 nt, Human
auaagggaaguaguuaucaugu

SEQ ID NO: 1709981 - RNA, 23 nt, Human
auaagggaaguaguuaucauguu

SEQ ID NO: 1709982 - RNA, 22 nt, Human
agugacuaaaccauugugcauu

SEQ ID NO: 1709983 - RNA, 16 nt, Human
agugacuaaaccauug

SEQ ID NO: 1709984 - RNA, 17 nt, Human
agugacuaaaccauugu

SEQ ID NO: 1709985 - RNA, 15 nt, Human
aguaucggcacugua

SEQ ID NO: 1709986 - RNA, 16 nt, Human
aguaucggcacuguac

SEQ ID NO: 1709987 - RNA, 19 nt, Human
aguaucggcacuguacaaa

SEQ ID NO: 1709988 - RNA, 17 nt, Human
agaugaaauuccauuug

SEQ ID NO: 1709989 - RNA, 18 nt, Human
agaugaaauuccauuugu

SEQ ID NO: 1709990 - RNA, 12 nt, Human
agauucuugcau

SEQ ID NO: 1709991 - RNA, 21 nt, Human
agcacaaguguaaugaauacc

SEQ ID NO: 1709992 - RNA, 18 nt, Human
agcacuguuuucuagugu

SEQ ID NO: 1709993 - RNA, 20 nt, Human
agcacuguuuucuaguguau

SEQ ID NO: 1709994 - RNA, 22 nt, Human
agcacuguuuucuaguguauca

SEQ ID NO: 1709995 - RNA, 17 nt, Human
agggcaaauuggagaaa

SEQ ID NO: 1709996 - RNA, 11 nt, Human
agguacuguau

SEQ ID NO: 1709997 - RNA, 18 nt, Human
agcuucacuguaaaauaa

SEQ ID NO: 1709998 - RNA, 20 nt, Human
aggaaucaucaggaacguuu

SEQ ID NO: 1709999 - RNA, 21 nt, Human
aaaauuacuuaguauugcaaa

SEQ ID NO: 1710000 - RNA, 23 nt, Human
aaaauuacuuaguauugcaaagu

SEQ ID NO: 1710001 - RNA, 17 nt, Human
aaaauuagccaguaauc

SEQ ID NO: 1710002 - RNA, 19 nt, Human
aaaauuagccaguaauccu

SEQ ID NO: 1710003 - RNA, 22 nt, Human
aaaauuacuuaguauugcaaag

SEQ ID NO: 1710004 - RNA, 21 nt, Human
aaaauuagccaguaauccugu

SEQ ID NO: 1710005 - RNA, 15 nt, Human
aaaauuauagcucua

SEQ ID NO: 1710006 - RNA, 19 nt, Human
aaaauuauagcucuaaugu

SEQ ID NO: 1710007 - RNA, 24 nt, Human
aaaauuauagcucuaauguuugca

SEQ ID NO: 1710008 - RNA, 20 nt, Human
aaaccccaccccaaaauuag

SEQ ID NO: 1710009 - RNA, 18 nt, Human
aaagucagauucuugcau

SEQ ID NO: 1710010 - RNA, 15 nt, Human
aaagucaggaaucau

SEQ ID NO: 1710011 - RNA, 23 nt, Human
aacccuuaaacaguugcacagca

SEQ ID NO: 1710012 - RNA, 18 nt, Human
aacccuuaaacaguugca

SEQ ID NO: 1710013 - RNA, 22 nt, Human
aacccuuaaacaguugcacagc

SEQ ID NO: 1710014 - RNA, 15 nt, Human
aacaaacaauaccug

SEQ ID NO: 1710015 - RNA, 14 nt, Human
aacaaaugaagaca

SEQ ID NO: 1710016 - RNA, 12 nt, Human
aacaaaugaaga

SEQ ID NO: 1710017 - RNA, 19 nt, Human
aaaugcucuuauuucauca

SEQ ID NO: 1710018 - RNA, 23 nt, Human
aaaugcucuuauuucaucauuca

SEQ ID NO: 1710019 - RNA, 20 nt, Human
aaguggggcagcagcagugg

SEQ ID NO: 1710020 - RNA, 13 nt, Human
aaguaguuaucau

SEQ ID NO: 1710021 - RNA, 15 nt, Human
aaguaguuaucaugu

SEQ ID NO: 1710022 - RNA, 17 nt, Human
aaguaguuaucauguua

SEQ ID NO: 1710023 - RNA, 19 nt, Human
aaguaguuaucauguuagu

SEQ ID NO: 1710024 - RNA, 18 nt, Human
aaguaguuaucauguuag

SEQ ID NO: 1710025 - RNA, 21 nt, Human
aauaugcuuauauuguucacu

SEQ ID NO: 1710026 - RNA, 19 nt, Human
aauaccuuagugcaguuau

SEQ ID NO: 1710027 - RNA, 14 nt, Human
aaugcucuuauuuc

SEQ ID NO: 1710028 - RNA, 16 nt, Human
aaugcucuuauuucau

SEQ ID NO: 1710029 - RNA, 13 nt, Human
aaucauuuuaugu

SEQ ID NO: 1710030 - RNA, 18 nt, Human
aagggcaaauuggagaaa

SEQ ID NO: 1710031 - RNA, 19 nt, Human
aagggcagcuuugcucaua

SEQ ID NO: 1710032 - RNA, 20 nt, Human
aagggcagcuuugcucauau

SEQ ID NO: 1710033 - RNA, 23 nt, Human
aagacagugaaagaaaauaacaa

SEQ ID NO: 1710034 - RNA, 13 nt, Human
aagauucagcuag

SEQ ID NO: 1710035 - RNA, 14 nt, Human
aagauucagcuagu

SEQ ID NO: 1710036 - RNA, 15 nt, Human
aagauucagcuagug

SEQ ID NO: 1710037 - RNA, 16 nt, Human
acauccucuuccauau

SEQ ID NO: 1710038 - RNA, 21 nt, Human
acaauuagauaaauguccauu

SEQ ID NO: 1710039 - RNA, 14 nt, Human
aauuuucacugugu

SEQ ID NO: 1710040 - RNA, 14 nt, Human
acugauucaauuug

SEQ ID NO: 1710041 - RNA, 11 nt, Human
acuuucaaucu

SEQ ID NO: 1710042 - RNA, 20 nt, Human
acuuucaaucuucaauccuu

SEQ ID NO: 1710043 - RNA, 21 nt, Human
acccuuaaacaguugcacagc

SEQ ID NO: 1710044 - RNA, 23 nt, Human
acccuuaaacaguugcacagcau

SEQ ID NO: 1710045 - RNA, 22 nt, Human
acuaaccuuccaaaaauuacuu

SEQ ID NO: 1710046 - RNA, 22 nt, Human
acuaacuaaaacaaagccacuu

SEQ ID NO: 1710047 - RNA, 14 nt, Human
acuaacuaaaacaa

SEQ ID NO: 1710048 - RNA, 15 nt, Human
acuaacuaaaacaaa

SEQ ID NO: 1710049 - RNA, 11 nt, Human
gugcacagccc

SEQ ID NO: 1710050 - RNA, 14 nt, Human
gugcacagccccua

SEQ ID NO: 1710051 - RNA, 20 nt, Human
aacugcaccaguugcugcuu

SEQ ID NO: 1710052 - RNA, 20 nt, Human
aacugcaauacaaguuucau

SEQ ID NO: 1710053 - RNA, 16 nt, Human
aaccauugugcauucu

SEQ ID NO: 1710054 - RNA, 13 nt, Human
aaccauugugcau

SEQ ID NO: 1710055 - RNA, 22 nt, Human
aacaguugcacagcaucucagc

SEQ ID NO: 1710056 - RNA, 15 nt, Human
aacaguugcacagca

SEQ ID NO: 1710057 - RNA, 17 nt, Human
aacaguugcacagcauc

SEQ ID NO: 1710058 - RNA, 18 nt, Human
aacaguugcacagcaucu

SEQ ID NO: 1710059 - RNA, 20 nt, Human
aacaguugcacagcaucuca

SEQ ID NO: 1710060 - RNA, 14 nt, Human
aacaguugcacagc

SEQ ID NO: 1710061 - RNA, 16 nt, Human
gucuguacugauucaa

SEQ ID NO: 1710062 - RNA, 16 nt, Human
gucuuucacauuuaaa

SEQ ID NO: 1710063 - RNA, 17 nt, Human
aacuaccaccugacauu

SEQ ID NO: 1710064 - RNA, 22 nt, Human
guaucaaaaugcucuuauuuca

SEQ ID NO: 1710065 - RNA, 13 nt, Human
guaucaaaaugcu

SEQ ID NO: 1710066 - RNA, 14 nt, Human
guaucaaaaugcuc

SEQ ID NO: 1710067 - RNA, 19 nt, Human
aacaauaaaaguguccauu

SEQ ID NO: 1710068 - RNA, 12 nt, Human
aacaauaaaaga

SEQ ID NO: 1710069 - RNA, 23 nt, Human
aaauuuuaucugccucucuugua

SEQ ID NO: 1710070 - RNA, 17 nt, Human
aacaagaugaaauucca

SEQ ID NO: 1710071 - RNA, 17 nt, Human
guuuaaucauauaaaua

SEQ ID NO: 1710072 - RNA, 19 nt, Human
guuuaaucauauaaauaga

SEQ ID NO: 1710073 - RNA, 15 nt, Human
guuuaaugaaugcuu

SEQ ID NO: 1710074 - RNA, 18 nt, Human
guuuaaugaaugcuuaaa

SEQ ID NO: 1710075 - RNA, 23 nt, Human
aaggcucuguuccacauauauuu

SEQ ID NO: 1710076 - RNA, 16 nt, Human
aagucuuucacauuua

SEQ ID NO: 1710077 - RNA, 22 nt, Human
uaaaaccuuccaugucaagauu

SEQ ID NO: 1710078 - RNA, 20 nt, Human
uaaaagacagugaaagaaaa

SEQ ID NO: 1710079 - RNA, 18 nt, Human
uaaaaguguccauugaaa

SEQ ID NO: 1710080 - RNA, 16 nt, Human
uaaaaguguccauuga

SEQ ID NO: 1710081 - RNA, 14 nt, Human
aagcagguugauaa

SEQ ID NO: 1710082 - RNA, 15 nt, Human
aagcagguugauaaa

SEQ ID NO: 1710083 - RNA, 19 nt, Human
aagcagguugauaaaucau

SEQ ID NO: 1710084 - RNA, 18 nt, Human
guuauuaugauuagcuuu

SEQ ID NO: 1710085 - RNA, 15 nt, Human
aagaccuuuuucugc

SEQ ID NO: 1710086 - RNA, 16 nt, Human
aagaccuuuuucugca

SEQ ID NO: 1710087 - RNA, 20 nt, Human
aagaccuuuuucugcacuau

SEQ ID NO: 1710088 - RNA, 18 nt, Human
aagaccuuuuucugcacu

SEQ ID NO: 1710089 - RNA, 14 nt, Human
aacuugcaaaauca

SEQ ID NO: 1710090 - RNA, 17 nt, Human
aacuugcaaaaucaguu

SEQ ID NO: 1710091 - RNA, 18 nt, Human
aacuugcaaaaucaguuu

SEQ ID NO: 1710092 - RNA, 19 nt, Human
aacuugcaaaaucaguuuu

SEQ ID NO: 1710093 - RNA, 20 nt, Human
uaacuaaaacaaagccacuu

SEQ ID NO: 1710094 - RNA, 17 nt, Human
uaacuaaaacaaagcca

SEQ ID NO: 1710095 - RNA, 17 nt, Human
aauaccugaaugcucug

SEQ ID NO: 1710096 - RNA, 18 nt, Human
aauaccugaaugcucugu

SEQ ID NO: 1710097 - RNA, 15 nt, Human
aauaccucuaauagu

SEQ ID NO: 1710098 - RNA, 14 nt, Human
aaucaguuuuccuc

SEQ ID NO: 1710099 - RNA, 22 nt, Human
uaauuccguagguuauuuucag

SEQ ID NO: 1710100 - RNA, 14 nt, Human
aauguuauuucccu

SEQ ID NO: 1710101 - RNA, 16 nt, Human
uaccugaaugcucugu

SEQ ID NO: 1710102 - RNA, 14 nt, Human
uaccugaaugcucu

SEQ ID NO: 1710103 - RNA, 13 nt, Human
aauuacuuaguau

SEQ ID NO: 1710104 - RNA, 17 nt, Human
aauuacuuaguauugca

SEQ ID NO: 1710105 - RNA, 23 nt, Human
uauagcucuaauguuugcauaua

SEQ ID NO: 1710106 - RNA, 20 nt, Human
uauagcucuaauguuugcau

SEQ ID NO: 1710107 - RNA, 18 nt, Human
uauaucuagguuuaugac

SEQ ID NO: 1710108 - RNA, 22 nt, Human
uauaucuagguuuaugacagua

SEQ ID NO: 1710109 - RNA, 20 nt, Human
uaugaucaaauguuuaauca

SEQ ID NO: 1710110 - RNA, 22 nt, Human
uaugaucaaauguuuaaucaua

SEQ ID NO: 1710111 - RNA, 14 nt, Human
uaugaucaaauguu

SEQ ID NO: 1710112 - RNA, 15 nt, Human
uaugaucaaauguuu

SEQ ID NO: 1710113 - RNA, 16 nt, Human
uaugaucaaauguuua

SEQ ID NO: 1710114 - RNA, 18 nt, Human
uaugaucaaauguuuaau

SEQ ID NO: 1710115 - RNA, 12 nt, Human
uaugaucaaaug

SEQ ID NO: 1710116 - RNA, 13 nt, Human
uaugaucaaaugu

SEQ ID NO: 1710117 - RNA, 17 nt, Human
uauggugccuaguauug

SEQ ID NO: 1710118 - RNA, 19 nt, Human
uauggugccuaguauugac

SEQ ID NO: 1710119 - RNA, 18 nt, Human
uauggugccuaguauuga

SEQ ID NO: 1710120 - RNA, 23 nt, Human
aauuuggaucucuucuuaaugua

SEQ ID NO: 1710121 - RNA, 22 nt, Human
aauuuggaucucuucuuaaugu

SEQ ID NO: 1710122 - RNA, 16 nt, Human
uagcgcacucuucaug

SEQ ID NO: 1710123 - RNA, 20 nt, Human
uccaauuagcuuauguuaac

SEQ ID NO: 1710124 - RNA, 17 nt, Human
uccaauuagcuuauguu

SEQ ID NO: 1710125 - RNA, 16 nt, Human
ucauaauaaguugcau

SEQ ID NO: 1710126 - RNA, 13 nt, Human
uccauuuaaacag

SEQ ID NO: 1710127 - RNA, 14 nt, Human
uccauuuaaacaga

SEQ ID NO: 1710128 - RNA, 15 nt, Human
uccauuuaaacagau

SEQ ID NO: 1710129 - RNA, 18 nt, Human
uccauuuaaacagauguc

SEQ ID NO: 1710130 - RNA, 21 nt, Human
uccauuuaaacagauguccau

SEQ ID NO: 1710131 - RNA, 18 nt, Human
acaugacuccauagaccu

SEQ ID NO: 1710132 - RNA, 20 nt, Human
acaugacuccauagaccuuu

SEQ ID NO: 1710133 - RNA, 20 nt, Human
acauuuuauggugccuagua

SEQ ID NO: 1710134 - RNA, 18 nt, Human
ucaagagugguaucuugc

SEQ ID NO: 1710135 - RNA, 13 nt, Human
ucagauucuugca

SEQ ID NO: 1710136 - RNA, 14 nt, Human
ucagauucuugcau

SEQ ID NO: 1710137 - RNA, 21 nt, Human
ucacuucacugugcuguuguu

SEQ ID NO: 1710138 - RNA, 14 nt, Human
ucacuucacugugc

SEQ ID NO: 1710139 - RNA, 15 nt, Human
ucacuucacugugcu

SEQ ID NO: 1710140 - RNA, 12 nt, Human
ucacuucacugu

SEQ ID NO: 1710141 - RNA, 19 nt, Human
ucacugagcacuguuuucu

SEQ ID NO: 1710142 - RNA, 16 nt, Human
ucacugagcacuguuu

SEQ ID NO: 1710143 - RNA, 18 nt, Human
ucacugagcacuguuuuc

SEQ ID NO: 1710144 - RNA, 22 nt, Human
ucacugagcacuguuuucuagu

SEQ ID NO: 1710145 - RNA, 14 nt, Human
ucacugagcacugu

SEQ ID NO: 1710146 - RNA, 15 nt, Human
ucacugagcacuguu

SEQ ID NO: 1710147 - RNA, 21 nt, Human
ucuaguuccccuguuuauuca

SEQ ID NO: 1710148 - RNA, 17 nt, Human
ucuaguuccccuguuua

SEQ ID NO: 1710149 - RNA, 22 nt, Human
ucuaguguaucaaaaugcucuu

SEQ ID NO: 1710150 - RNA, 19 nt, Human
ucuaguguaucaaaaugcu

SEQ ID NO: 1710151 - RNA, 12 nt, Human
ucuaguguauca

SEQ ID NO: 1710152 - RNA, 13 nt, Human
ucuaguguaucaa

SEQ ID NO: 1710153 - RNA, 14 nt, Human
ucuaguguaucaaa

SEQ ID NO: 1710154 - RNA, 16 nt, Human
ucuaguguaucaaaau

SEQ ID NO: 1710155 - RNA, 13 nt, Human
ucuauaauuuaaa

SEQ ID NO: 1710156 - RNA, 21 nt, Human
acuuagcauuuucugcaucuc

SEQ ID NO: 1710157 - RNA, 20 nt, Human
acuuagcauuuucugcaucu

SEQ ID NO: 1710158 - RNA, 22 nt, Human
acuuagcauuuucugcaucucc

SEQ ID NO: 1710159 - RNA, 13 nt, Human
acuguaugaucaa

SEQ ID NO: 1710160 - RNA, 14 nt, Human
acuguaugaucaaa

SEQ ID NO: 1710161 - RNA, 15 nt, Human
acuguaugaucaaau

SEQ ID NO: 1710162 - RNA, 16 nt, Human
acuguaugaucaaaug

SEQ ID NO: 1710163 - RNA, 17 nt, Human
acuguaugaucaaaugu

SEQ ID NO: 1710164 - RNA, 18 nt, Human
acuguaugaucaaauguu

SEQ ID NO: 1710165 - RNA, 19 nt, Human
acuguaugaucaaauguuu

SEQ ID NO: 1710166 - RNA, 22 nt, Human
acuguaugaucaaauguuuaau

SEQ ID NO: 1710167 - RNA, 20 nt, Human
acuguaugaucaaauguuua

SEQ ID NO: 1710168 - RNA, 21 nt, Human
acuguaugaucaaauguuuaa

SEQ ID NO: 1710169 - RNA, 24 nt, Human
acuguaugaucaaauguuuaauca

SEQ ID NO: 1710170 - RNA, 14 nt, Human
ucguuuaaugaaug

SEQ ID NO: 1710171 - RNA, 18 nt, Human
ucguuuaaugaaugcuua

SEQ ID NO: 1710172 - RNA, 20 nt, Human
ucguuuaaugaaugcuuaaa

SEQ ID NO: 1710173 - RNA, 13 nt, Human
acuugucuguuuu

SEQ ID NO: 1710174 - RNA, 12 nt, Human
acuugucuguuu

SEQ ID NO: 1710175 - RNA, 13 nt, Human
agaaaucuauuuc

SEQ ID NO: 1710176 - RNA, 18 nt, Human
ucucuuguaauuuggauc

SEQ ID NO: 1710177 - RNA, 18 nt, Human
agaacuaccaccugacau

SEQ ID NO: 1710178 - RNA, 20 nt, Human
ugaaaaucuuauaauuuaaa

SEQ ID NO: 1710179 - RNA, 15 nt, Human
ugaaacgcaucuagu

SEQ ID NO: 1710180 - RNA, 16 nt, Human
ucuucaagaucccauu

SEQ ID NO: 1710181 - RNA, 15 nt, Human
ugaauacuuuauaaa

SEQ ID NO: 1710182 - RNA, 16 nt, Human
ugaauaccuuagugca

SEQ ID NO: 1710183 - RNA, 21 nt, Human
ugaauaccuuagugcaguuau

SEQ ID NO: 1710184 - RNA, 22 nt, Human
ugaauaccuuagugcaguuauu

SEQ ID NO: 1710185 - RNA, 15 nt, Human
ugaagguauaucuag

SEQ ID NO: 1710186 - RNA, 22 nt, Human
ugacaaaauacuugucuguuuu

SEQ ID NO: 1710187 - RNA, 12 nt, Human
ugacaaaauguu

SEQ ID NO: 1710188 - RNA, 13 nt, Human
ugacaaaauguua

SEQ ID NO: 1710189 - RNA, 14 nt, Human
ugacaaaauguuau

SEQ ID NO: 1710190 - RNA, 15 nt, Human
ugacaaaauguuauu

SEQ ID NO: 1710191 - RNA, 20 nt, Human
ugacaaaauguuauuucccu

SEQ ID NO: 1710192 - RNA, 15 nt, Human
agaugcagugccagg

SEQ ID NO: 1710193 - RNA, 20 nt, Human
agauuaaccuucucuguccg

SEQ ID NO: 1710194 - RNA, 21 nt, Human
ugacuccauagaccuuuucau

SEQ ID NO: 1710195 - RNA, 17 nt, Human
ugacuccauagaccuuu

SEQ ID NO: 1710196 - RNA, 20 nt, Human
agcaucacaugaacuuguaa

SEQ ID NO: 1710197 - RNA, 13 nt, Human
ugaucaaauguuu

SEQ ID NO: 1710198 - RNA, 14 nt, Human
ugaucaaauguuua

SEQ ID NO: 1710199 - RNA, 15 nt, Human
ugaucaaauguuuaa

SEQ ID NO: 1710200 - RNA, 16 nt, Human
ugaucaaauguuuaau

SEQ ID NO: 1710201 - RNA, 17 nt, Human
ugaucaaauguuuaauc

SEQ ID NO: 1710202 - RNA, 18 nt, Human
ugaucaaauguuuaauca

SEQ ID NO: 1710203 - RNA, 22 nt, Human
ugaucaaauguuuaaucauaua

SEQ ID NO: 1710204 - RNA, 19 nt, Human
ugaucaaauguuuaaucau

SEQ ID NO: 1710205 - RNA, 20 nt, Human
agcaugucgucaaagcugaa

SEQ ID NO: 1710206 - RNA, 17 nt, Human
agcaugucgucaaagcu

SEQ ID NO: 1710207 - RNA, 22 nt, Human
ugaguaacugauuuguaacaag

SEQ ID NO: 1710208 - RNA, 20 nt, Human
agccacuuucaaucuucaau

SEQ ID NO: 1710209 - RNA, 23 nt, Human
agccacuuucaaucuucaauccu

SEQ ID NO: 1710210 - RNA, 13 nt, Human
ugaugauccauua

SEQ ID NO: 1710211 - RNA, 13 nt, Human
agccaguaauccu

SEQ ID NO: 1710212 - RNA, 14 nt, Human
agccaguaauccug

SEQ ID NO: 1710213 - RNA, 15 nt, Human
agccaguaauccugu

SEQ ID NO: 1710214 - RNA, 20 nt, Human
ugcauacauucuucaagauc

SEQ ID NO: 1710215 - RNA, 19 nt, Human
agcuacuaauuuuaaaaug

SEQ ID NO: 1710216 - RNA, 16 nt, Human
agcucaucuucacugc

SEQ ID NO: 1710217 - RNA, 17 nt, Human
agcucaucuucacugca

SEQ ID NO: 1710218 - RNA, 22 nt, Human
agccccuaagucaacuuagcau

SEQ ID NO: 1710219 - RNA, 18 nt, Human
ugcacuauaugcaaacag

SEQ ID NO: 1710220 - RNA, 20 nt, Human
ugcacuauaugcaaacaggg

SEQ ID NO: 1710221 - RNA, 14 nt, Human
ugcacuauaugcaa

SEQ ID NO: 1710222 - RNA, 15 nt, Human
ugcacuauaugcaaa

SEQ ID NO: 1710223 - RNA, 16 nt, Human
ugcacuauaugcaaac

SEQ ID NO: 1710224 - RNA, 17 nt, Human
ugcacuauaugcaaaca

SEQ ID NO: 1710225 - RNA, 12 nt, Human
ugcacuauaugc

SEQ ID NO: 1710226 - RNA, 18 nt, Human
ugccuuuuaguuccugug

SEQ ID NO: 1710227 - RNA, 16 nt, Human
ugccuuuuaguuccug

SEQ ID NO: 1710228 - RNA, 14 nt, Human
ugggaguacaaaag

SEQ ID NO: 1710229 - RNA, 22 nt, Human
agguacuguaugaucaaauguu

SEQ ID NO: 1710230 - RNA, 15 nt, Human
agguacuguaugauc

SEQ ID NO: 1710231 - RNA, 19 nt, Human
agguacuguaugaucaaau

SEQ ID NO: 1710232 - RNA, 21 nt, Human
agguacuguaugaucaaaugu

SEQ ID NO: 1710233 - RNA, 23 nt, Human
agguacuguaugaucaaauguuu

SEQ ID NO: 1710234 - RNA, 18 nt, Human
uguaccaaccauccaauu

SEQ ID NO: 1710235 - RNA, 16 nt, Human
aguaaaacaaacaaua

SEQ ID NO: 1710236 - RNA, 20 nt, Human
aguaaaacaaacaauaccug

SEQ ID NO: 1710237 - RNA, 19 nt, Human
aguaaaacaaacaauaccu

SEQ ID NO: 1710238 - RNA, 22 nt, Human
uguagguuauuaugauuagcuu

SEQ ID NO: 1710239 - RNA, 12 nt, Human
agguugauaaau

SEQ ID NO: 1710240 - RNA, 22 nt, Human
agguugauaaaucauuuuaugu

SEQ ID NO: 1710241 - RNA, 20 nt, Human
agguugauaaaucauuuuau

SEQ ID NO: 1710242 - RNA, 15 nt, Human
aguaguuaucauguu

SEQ ID NO: 1710243 - RNA, 16 nt, Human
aguaguuaucauguua

SEQ ID NO: 1710244 - RNA, 17 nt, Human
aguaguuaucauguuag

SEQ ID NO: 1710245 - RNA, 23 nt, Human
aguaguuaucauguuaguaauac

SEQ ID NO: 1710246 - RNA, 12 nt, Human
aguaguuaucau

SEQ ID NO: 1710247 - RNA, 13 nt, Human
aguaguuaucaug

SEQ ID NO: 1710248 - RNA, 14 nt, Human
aguaguuaucaugu

SEQ ID NO: 1710249 - RNA, 15 nt, Human
ugucaagauucagcu

SEQ ID NO: 1710250 - RNA, 16 nt, Human
ugucaagauucagcua

SEQ ID NO: 1710251 - RNA, 17 nt, Human
uguggugaaaagcaggu

SEQ ID NO: 1710252 - RNA, 13 nt, Human
uguuuauucauau

SEQ ID NO: 1710253 - RNA, 16 nt, Human
uguuuauucauaugca

SEQ ID NO: 1710254 - RNA, 17 nt, Human
uguuuauucauaugcau

SEQ ID NO: 1710255 - RNA, 18 nt, Human
uguuuauucauaugcaua

SEQ ID NO: 1710256 - RNA, 19 nt, Human
uguuuauucauaugcauau

SEQ ID NO: 1710257 - RNA, 14 nt, Human
uguuggucuguacu

SEQ ID NO: 1710258 - RNA, 15 nt, Human
uguuggucuguacug

SEQ ID NO: 1710259 - RNA, 16 nt, Human
uguuggucuguacuga

SEQ ID NO: 1710260 - RNA, 21 nt, Human
uguuguuaucuguuugagaaa

SEQ ID NO: 1710261 - RNA, 17 nt, Human
uguuguuaugaugugcu

SEQ ID NO: 1710262 - RNA, 14 nt, Human
uguuguuaugaugu

SEQ ID NO: 1710263 - RNA, 15 nt, Human
uguuguuaugaugug

SEQ ID NO: 1710264 - RNA, 19 nt, Human
uguuguuaugaugugcuua

SEQ ID NO: 1710265 - RNA, 12 nt, Human
aguuaucauguu

SEQ ID NO: 1710266 - RNA, 13 nt, Human
aguuaucauguua

SEQ ID NO: 1710267 - RNA, 14 nt, Human
aguuaucauguuag

SEQ ID NO: 1710268 - RNA, 15 nt, Human
aguuaucauguuagu

SEQ ID NO: 1710269 - RNA, 17 nt, Human
aguuaucauguuaguaa

SEQ ID NO: 1710270 - RNA, 18 nt, Human
aguuaucauguuaguaau

SEQ ID NO: 1710271 - RNA, 22 nt, Human
aguuaucauguuaguaauaccu

SEQ ID NO: 1710272 - RNA, 19 nt, Human
aguuaucauguuaguaaua

SEQ ID NO: 1710273 - RNA, 19 nt, Human
aguucggugagcuacaaau

SEQ ID NO: 1710274 - RNA, 18 nt, Human
aguuccccuguuuauuca

SEQ ID NO: 1710275 - RNA, 19 nt, Human
aguuccccuguuuauucau

SEQ ID NO: 1710276 - RNA, 20 nt, Human
aguuccccuguuuauucaua

SEQ ID NO: 1710277 - RNA, 20 nt, Human
aguucggugagcuacaaaug

SEQ ID NO: 1710278 - RNA, 20 nt, Human
uguuauuucccuacauuaaa

SEQ ID NO: 1710279 - RNA, 21 nt, Human
uguuauuucccuacauuaaac

SEQ ID NO: 1710280 - RNA, 23 nt, Human
uguuauuucccuacauuaaacau

SEQ ID NO: 1710281 - RNA, 18 nt, Human
uguuaucuguuugagaaa

SEQ ID NO: 1710282 - RNA, 19 nt, Human
uguuaucuguuugagaaag

SEQ ID NO: 1710283 - RNA, 14 nt, Human
uguuaucuguuuga

SEQ ID NO: 1710284 - RNA, 17 nt, Human
uguuaucuguuugagaa

SEQ ID NO: 1710285 - RNA, 23 nt, Human
aguugcugcuucaauuuauaccu

SEQ ID NO: 1710286 - RNA, 14 nt, Human
aguuuaaauuguaa

SEQ ID NO: 1710287 - RNA, 21 nt, Human
uuaaacaguugcacagcaucu

SEQ ID NO: 1710288 - RNA, 13 nt, Human
uuaaacaguugca

SEQ ID NO: 1710289 - RNA, 17 nt, Human
uuaaacaguugcacagc

SEQ ID NO: 1710290 - RNA, 18 nt, Human
uuaaacaguugcacagca

SEQ ID NO: 1710291 - RNA, 19 nt, Human
uuaaacaguugcacagcau

SEQ ID NO: 1710292 - RNA, 23 nt, Human
uuaaacaguugcacagcaucuca

SEQ ID NO: 1710293 - RNA, 16 nt, Human
uuaaacagauguccau

SEQ ID NO: 1710294 - RNA, 14 nt, Human
auaaauaaaaauaa

SEQ ID NO: 1710295 - RNA, 13 nt, Human
auaaauaaaaaua

SEQ ID NO: 1710296 - RNA, 22 nt, Human
auaacgauaaaagacagugaaa

SEQ ID NO: 1710297 - RNA, 14 nt, Human
auaaaucauuuuau

SEQ ID NO: 1710298 - RNA, 15 nt, Human
auaaaucauuuuaug

SEQ ID NO: 1710299 - RNA, 16 nt, Human
auaaaucauuuuaugu

SEQ ID NO: 1710300 - RNA, 18 nt, Human
auaaaucauuuuauguca

SEQ ID NO: 1710301 - RNA, 19 nt, Human
auaaaucauuuuaugucaa

SEQ ID NO: 1710302 - RNA, 19 nt, Human
uuacccauuuguucauauu

SEQ ID NO: 1710303 - RNA, 17 nt, Human
uuacccauuuguucaua

SEQ ID NO: 1710304 - RNA, 18 nt, Human
auaauccuaaacauauga

SEQ ID NO: 1710305 - RNA, 20 nt, Human
uuagcauuuucugcaucucc

SEQ ID NO: 1710306 - RNA, 15 nt, Human
uuagccaguaauccu

SEQ ID NO: 1710307 - RNA, 18 nt, Human
auguccaucagaugacaa

SEQ ID NO: 1710308 - RNA, 20 nt, Human
auguaguaugcuaugauuaa

SEQ ID NO: 1710309 - RNA, 13 nt, Human
uuugcucauauuu

SEQ ID NO: 1710310 - RNA, 16 nt, Human
uuugcucauauuuccc

SEQ ID NO: 1710311 - RNA, 17 nt, Human
uuugcucauauuuccca

SEQ ID NO: 1710312 - RNA, 23 nt, Human
uuuuauggugccuaguauugaca

SEQ ID NO: 1710313 - RNA, 18 nt, Human
uuuuauggugccuaguau

SEQ ID NO: 1710314 - RNA, 20 nt, Human
auguuaguaauaccucuaau

SEQ ID NO: 1710315 - RNA, 15 nt, Human
auguuaguaauaccu

SEQ ID NO: 1710316 - RNA, 16 nt, Human
auguuaguaauaccuc

SEQ ID NO: 1710317 - RNA, 21 nt, Human
auguuaguaauaccucuaaua

SEQ ID NO: 1710318 - RNA, 17 nt, Human
auuauauuuacaaaugg

SEQ ID NO: 1710319 - RNA, 23 nt, Human
auuauaagggcaaauuggagaaa

SEQ ID NO: 1710320 - RNA, 18 nt, Human
auuauaagggcaaauugg

SEQ ID NO: 1710321 - RNA, 16 nt, Human
auuauauuuacaaaug

SEQ ID NO: 1710322 - RNA, 21 nt, Human
auuauagcucuaauguuugca

SEQ ID NO: 1710323 - RNA, 22 nt, Human
auuauagcucuaauguuugcau

SEQ ID NO: 1710324 - RNA, 23 nt, Human
auuauagcucuaauguuugcaua

SEQ ID NO: 1710325 - RNA, 12 nt, Human
auuauagcucua

SEQ ID NO: 1710326 - RNA, 13 nt, Human
auuauagcucuaa

SEQ ID NO: 1710327 - RNA, 15 nt, Human
auuauagcucuaaug

SEQ ID NO: 1710328 - RNA, 16 nt, Human
auuauagcucuaaugu

SEQ ID NO: 1710329 - RNA, 17 nt, Human
auuauagcucuaauguu

SEQ ID NO: 1710330 - RNA, 18 nt, Human
auuauagcucuaauguuu

SEQ ID NO: 1710331 - RNA, 19 nt, Human
auuauagcucuaauguuug

SEQ ID NO: 1710332 - RNA, 16 nt, Human
auuaagaaugaucuga

SEQ ID NO: 1710333 - RNA, 23 nt, Human
auuaagaaugaucugauugaccg

SEQ ID NO: 1710334 - RNA, 14 nt, Human
auuaagaaugaucu

SEQ ID NO: 1710335 - RNA, 15 nt, Human
auuaagaaugaucug

SEQ ID NO: 1710336 - RNA, 13 nt, Human
auugugcuagugc

SEQ ID NO: 1710337 - RNA, 15 nt, Human
auuguauuacaaauc

SEQ ID NO: 1710338 - RNA, 14 nt, Human
auuguauuacaaau

SEQ ID NO: 1710339 - RNA, 16 nt, Human
auuuacaaaugggaaa

SEQ ID NO: 1710340 - RNA, 19 nt, Human
auuuacccaacucuguaca

SEQ ID NO: 1710341 - RNA, 11 nt, Human
auuuaaacaga

SEQ ID NO: 1710342 - RNA, 12 nt, Human
auuuaaacagau

SEQ ID NO: 1710343 - RNA, 18 nt, Human
auuuaaacagauguccau

SEQ ID NO: 1710344 - RNA, 21 nt, Human
auugaccguguuggucuguac

SEQ ID NO: 1710345 - RNA, 16 nt, Human
uucauauuaagaauga

SEQ ID NO: 1710346 - RNA, 22 nt, Human
uucauauuaagaaugaucugau

SEQ ID NO: 1710347 - RNA, 12 nt, Human
uucacuucacug

SEQ ID NO: 1710348 - RNA, 14 nt, Human
uucacuucacugug

SEQ ID NO: 1710349 - RNA, 17 nt, Human
auaucuagguuuaugac

SEQ ID NO: 1710350 - RNA, 18 nt, Human
auaucuagguuuaugaca

SEQ ID NO: 1710351 - RNA, 19 nt, Human
auaucuagguuuaugacag

SEQ ID NO: 1710352 - RNA, 21 nt, Human
auaucuagguuuaugacagua

SEQ ID NO: 1710353 - RNA, 23 nt, Human
auaucuagguuuaugacaguaau

SEQ ID NO: 1710354 - RNA, 22 nt, Human
auaucuagguuuaugacaguaa

SEQ ID NO: 1710355 - RNA, 17 nt, Human
uuccaguucuucgacug

SEQ ID NO: 1710356 - RNA, 14 nt, Human
auagugcuaacaug

SEQ ID NO: 1710357 - RNA, 19 nt, Human
auagugcuaacaugaagac

SEQ ID NO: 1710358 - RNA, 22 nt, Human
auagugcuaacaugaagaccuu

SEQ ID NO: 1710359 - RNA, 21 nt, Human
auagugcuaacaugaagaccu

SEQ ID NO: 1710360 - RNA, 15 nt, Human
auauaaauagaaugu

SEQ ID NO: 1710361 - RNA, 19 nt, Human
auauaaauagaauguaaau

SEQ ID NO: 1710362 - RNA, 21 nt, Human
auauaaauagaauguaaaugu

SEQ ID NO: 1710363 - RNA, 22 nt, Human
auauaaauagaauguaaauguc

SEQ ID NO: 1710364 - RNA, 13 nt, Human
uucacugugcugu

SEQ ID NO: 1710365 - RNA, 12 nt, Human
uucacugugcug

SEQ ID NO: 1710366 - RNA, 18 nt, Human
uucacugugcuguuguua

SEQ ID NO: 1710367 - RNA, 17 nt, Human
auaggcguaacuaauuu

SEQ ID NO: 1710368 - RNA, 20 nt, Human
uucaagucuaccaauuauaa

SEQ ID NO: 1710369 - RNA, 17 nt, Human
uucaagaucccauuuga

SEQ ID NO: 1710370 - RNA, 11 nt, Human
uucaagauucc

SEQ ID NO: 1710371 - RNA, 23 nt, Human
uuauuuuuuaaagaaaucuauuu

SEQ ID NO: 1710372 - RNA, 16 nt, Human
uucugcacuauaugca

SEQ ID NO: 1710373 - RNA, 22 nt, Human
uucuuuuuacccauuuguucau

SEQ ID NO: 1710374 - RNA, 14 nt, Human
uucuuaauguacau

SEQ ID NO: 1710375 - RNA, 15 nt, Human
uucuuaauguacaua

SEQ ID NO: 1710376 - RNA, 21 nt, Human
uucuuaauguacauagugcua

SEQ ID NO: 1710377 - RNA, 16 nt, Human
uucuucgacuguuguu

SEQ ID NO: 1710378 - RNA, 16 nt, Human
uucgacuguuguuauc

SEQ ID NO: 1710379 - RNA, 21 nt, Human
uucgacuguuguuaucuguuu

SEQ ID NO: 1710380 - RNA, 14 nt, Human
uucuauaauuuaaa

SEQ ID NO: 1710381 - RNA, 13 nt, Human
uucuauaauuuaa

SEQ ID NO: 1710382 - RNA, 12 nt, Human
aucaaauguuua

SEQ ID NO: 1710383 - RNA, 13 nt, Human
aucaaauguuuaa

SEQ ID NO: 1710384 - RNA, 14 nt, Human
aucaaauguuuaau

SEQ ID NO: 1710385 - RNA, 15 nt, Human
aucaaauguuuaauc

SEQ ID NO: 1710386 - RNA, 18 nt, Human
aucaaauguuuaaucaua

SEQ ID NO: 1710387 - RNA, 16 nt, Human
aucaaauguuuaauca

SEQ ID NO: 1710388 - RNA, 17 nt, Human
aucaaauguuuaaucau

SEQ ID NO: 1710389 - RNA, 21 nt, Human
aucaaauguuuaaucauauaa

SEQ ID NO: 1710390 - RNA, 18 nt, Human
uuccccuguuuauucaua

SEQ ID NO: 1710391 - RNA, 19 nt, Human
uuccccuguuuauucauau

SEQ ID NO: 1710392 - RNA, 20 nt, Human
uuguggguuuuuauuuccua

SEQ ID NO: 1710393 - RNA, 18 nt, Human
uuguggguuuuuauuucc

SEQ ID NO: 1710394 - RNA, 14 nt, Human
augauuucauguac

SEQ ID NO: 1710395 - RNA, 13 nt, Human
augauuucaugua

SEQ ID NO: 1710396 - RNA, 16 nt, Human
augauuucauguacug

SEQ ID NO: 1710397 - RNA, 18 nt, Human
uuguuguagagaaaacau

SEQ ID NO: 1710398 - RNA, 13 nt, Human
augcagugccagg

SEQ ID NO: 1710399 - RNA, 16 nt, Human
uuuaaugaaugcuuaa

SEQ ID NO: 1710400 - RNA, 22 nt, Human
uuuaaugaaugcuuaaagaauu

SEQ ID NO: 1710401 - RNA, 20 nt, Human
uuucaucauucacuucacug

SEQ ID NO: 1710402 - RNA, 21 nt, Human
uuucaucauucacuucacugu

SEQ ID NO: 1710403 - RNA, 22 nt, Human
uuucaucauucacuucacugug

SEQ ID NO: 1710404 - RNA, 15 nt, Human
uuucccaugauuuca

SEQ ID NO: 1710405 - RNA, 18 nt, Human
uuucccaugauuucaugu

SEQ ID NO: 1710406 - RNA, 21 nt, Human
uuucccaugauuucauguacu

SEQ ID NO: 1710407 - RNA, 15 nt, Human
uuucauguacugcau

SEQ ID NO: 1710408 - RNA, 16 nt, Human
uuucauguacugcauu

SEQ ID NO: 1710409 - RNA, 20 nt, Human
uuucauguacugcauuauuu

SEQ ID NO: 1710410 - RNA, 22 nt, Human
uuucauguacugcauuauuuga

SEQ ID NO: 1710411 - RNA, 14 nt, Human
uuucccaugauuuc

SEQ ID NO: 1710412 - RNA, 24 nt, Human
uuuauggugccuaguauugacaaa

SEQ ID NO: 1710413 - RNA, 19 nt, Human
uuuauggugccuaguauug

SEQ ID NO: 1710414 - RNA, 21 nt, Human
uugauguggugaaaagcaggu

SEQ ID NO: 1710415 - RNA, 19 nt, Human
uugcacagcaucucagcuc

SEQ ID NO: 1710416 - RNA, 15 nt, Human
uugcacagcaucuca

SEQ ID NO: 1710417 - RNA, 18 nt, Human
uugcacagcaucucagcu

SEQ ID NO: 1710418 - RNA, 16 nt, Human
aucucagcucaucuuc

SEQ ID NO: 1710419 - RNA, 12 nt, Human
aucucagcucau

SEQ ID NO: 1710420 - RNA, 23 nt, Human
uuggaucucuucuuaauguacau

SEQ ID NO: 1710421 - RNA, 12 nt, Human
augaaugcuuaa

SEQ ID NO: 1710422 - RNA, 15 nt, Human
augaaugcuuaaaga

SEQ ID NO: 1710423 - RNA, 13 nt, Human
auuagcuuauguu

SEQ ID NO: 1710424 - RNA, 21 nt, Human
auuagcuuauguuaacugaca

SEQ ID NO: 1710425 - RNA, 22 nt, Human
auuagcuuauguuaacugacaa

SEQ ID NO: 1710426 - RNA, 15 nt, Human
auuaugauuagcuuu

SEQ ID NO: 1710427 - RNA, 23 nt, Human
auuagccaguaauccuguaggaa

SEQ ID NO: 1710428 - RNA, 12 nt, Human
auuagccaguaa

SEQ ID NO: 1710429 - RNA, 14 nt, Human
auuagccaguaauc

SEQ ID NO: 1710430 - RNA, 16 nt, Human
auuagccaguaauccu

SEQ ID NO: 1710431 - RNA, 17 nt, Human
auuagccaguaauccug

SEQ ID NO: 1710432 - RNA, 18 nt, Human
auuagccaguaauccugu

SEQ ID NO: 1710433 - RNA, 19 nt, Human
auuagccaguaauccugua

SEQ ID NO: 1710434 - RNA, 19 nt, Human
auuuuauagcuacuaauuu

SEQ ID NO: 1710435 - RNA, 17 nt, Human
auuuuauagcuacuaau

SEQ ID NO: 1710436 - RNA, 21 nt, Human
auuuguggguuuuuauuuccu

SEQ ID NO: 1710437 - RNA, 22 nt, Human
auuuguggguuuuuauuuccua

SEQ ID NO: 1710438 - RNA, 17 nt, Human
auuugcauacauucuuc

SEQ ID NO: 1710439 - RNA, 20 nt, Human
auuuuuuuuuuuuuccuguc

SEQ ID NO: 1710440 - RNA, 15 nt, Human
caauucuugccaaau

SEQ ID NO: 1710441 - RNA, 22 nt, Human
caauuuauaccucaauuuucac

SEQ ID NO: 1710442 - RNA, 17 nt, Human
caauuuaguuguuguag

SEQ ID NO: 1710443 - RNA, 20 nt, Human
caauuuaguuguuguagaga

SEQ ID NO: 1710444 - RNA, 13 nt, Human
caauuuauaccuc

SEQ ID NO: 1710445 - RNA, 14 nt, Human
caauuuauaccuca

SEQ ID NO: 1710446 - RNA, 22 nt, Human
ccaaaaauuacuuaguauugca

SEQ ID NO: 1710447 - RNA, 13 nt, Human
cagguugauaaau

SEQ ID NO: 1710448 - RNA, 18 nt, Human
cagguugauaaaucauuu

SEQ ID NO: 1710449 - RNA, 15 nt, Human
cagguugauaaauca

SEQ ID NO: 1710450 - RNA, 15 nt, Human
ccaugucaagauuca

SEQ ID NO: 1710451 - RNA, 19 nt, Human
ccaugucaagauucagcua

SEQ ID NO: 1710452 - RNA, 17 nt, Human
ccaugucaagauucagc

SEQ ID NO: 1710453 - RNA, 13 nt, Human
ccccaaaauuagc

SEQ ID NO: 1710454 - RNA, 16 nt, Human
ccguagguuauuuuca

SEQ ID NO: 1710455 - RNA, 19 nt, Human
cuacauaacuaauacagcu

SEQ ID NO: 1710456 - RNA, 16 nt, Human
cuaguuccccuguuua

SEQ ID NO: 1710457 - RNA, 18 nt, Human
cuaguuccccuguuuauu

SEQ ID NO: 1710458 - RNA, 14 nt, Human
ccuuuuucugcacu

SEQ ID NO: 1710459 - RNA, 15 nt, Human
ccuuuuucugcacua

SEQ ID NO: 1710460 - RNA, 17 nt, Human
ccuuuuucugcacuaua

SEQ ID NO: 1710461 - RNA, 21 nt, Human
ccuuuuucugcacuauaugca

SEQ ID NO: 1710462 - RNA, 18 nt, Human
ccuuuuucugcacuauau

SEQ ID NO: 1710463 - RNA, 17 nt, Human
cucucaauaaaauuaua

SEQ ID NO: 1710464 - RNA, 13 nt, Human
cucuguagccuaa

SEQ ID NO: 1710465 - RNA, 22 nt, Human
cugaaggggaaggaaauagcuu

SEQ ID NO: 1710466 - RNA, 16 nt, Human
gccauaugaaaaggcu

SEQ ID NO: 1710467 - RNA, 19 nt, Human
gcuguacugaaguaaaaca

SEQ ID NO: 1710468 - RNA, 20 nt, Human
gcuguacugaaguaaaacaa

SEQ ID NO: 1710469 - RNA, 18 nt, Human
gcugaaacgcaucuaguu

SEQ ID NO: 1710470 - RNA, 16 nt, Human
gcugcuguacugaagu

SEQ ID NO: 1710471 - RNA, 16 nt, Human
gggcaaauuggagaaa

SEQ ID NO: 1710472 - RNA, 18 nt, Human
aaaagcagguugauaaau

SEQ ID NO: 1710473 - RNA, 22 nt, Human
aaaagcagguugauaaaucauu

SEQ ID NO: 1710474 - RNA, 18 nt, Human
aaaaugcucuuauuucau

SEQ ID NO: 1710475 - RNA, 17 nt, Human
aaaaugcucuuauuuca

SEQ ID NO: 1710476 - RNA, 20 nt, Human
aaaaugcucuuauuucauca

SEQ ID NO: 1710477 - RNA, 20 nt, Human
aaacaagcacuaaacaaaga

SEQ ID NO: 1710478 - RNA, 19 nt, Human
aaacaguugcacagcaucu

SEQ ID NO: 1710479 - RNA, 21 nt, Human
aaacaguugcacagcaucuca

SEQ ID NO: 1710480 - RNA, 15 nt, Human
aaacaguugcacagc

SEQ ID NO: 1710481 - RNA, 16 nt, Human
aaacaguugcacagca

SEQ ID NO: 1710482 - RNA, 17 nt, Human
aaacaguugcacagcau

SEQ ID NO: 1710483 - RNA, 18 nt, Human
aaacaguugcacagcauc

SEQ ID NO: 1710484 - RNA, 17 nt, Human
aaacauccucuuccaua

SEQ ID NO: 1710485 - RNA, 16 nt, Human
aaacaugcagaacaaa

SEQ ID NO: 1710486 - RNA, 20 nt, Human
aaacaugcagaacaaaugaa

SEQ ID NO: 1710487 - RNA, 19 nt, Human
aaauaaaaaaaaaaaagag

SEQ ID NO: 1710488 - RNA, 21 nt, Human
gguuuaugacaguaauugugu

SEQ ID NO: 1710489 - RNA, 22 nt, Human
ggucgggcagcacaaguguaau

SEQ ID NO: 1710490 - RNA, 19 nt, Human
gaucucuucuuaauguaca

SEQ ID NO: 1710491 - RNA, 21 nt, Human
gaucucuucuuaauguacaua

SEQ ID NO: 1710492 - RNA, 19 nt, Human
gauuagcuuugucacuguu

SEQ ID NO: 1710493 - RNA, 16 nt, Human
gcagguugauaaauca

SEQ ID NO: 1710494 - RNA, 17 nt, Human
gcagguugauaaaucau

SEQ ID NO: 1710495 - RNA, 19 nt, Human
gcagguugauaaaucauuu

SEQ ID NO: 1710496 - RNA, 20 nt, Human
gcaguaucggcacuguacaa

SEQ ID NO: 1710497 - RNA, 22 nt, Human
gcaguaucggcacuguacaaaa

SEQ ID NO: 1710498 - RNA, 14 nt, Human
gcagaacaaaugaa

SEQ ID NO: 1710499 - RNA, 15 nt, Human
gcagaacaaaugaag

SEQ ID NO: 1710500 - RNA, 14 nt, Human
gaagcugcucaacu

SEQ ID NO: 1710501 - RNA, 20 nt, Human
gaagcugcucaacuugcaaa

SEQ ID NO: 1710502 - RNA, 12 nt, Human
gacaaaauguua

SEQ ID NO: 1710503 - RNA, 16 nt, Human
gacaaaauguuauuuc

SEQ ID NO: 1710504 - RNA, 22 nt, Human
gacaaaauacuugucuguuuua

SEQ ID NO: 1710505 - RNA, 13 nt, Human
gacaaaauguuau

SEQ ID NO: 1710506 - RNA, 14 nt, Human
gacagugaaagaaa

SEQ ID NO: 1710507 - RNA, 16 nt, Human
gagaugcagugccagg

SEQ ID NO: 1710508 - RNA, 15 nt, Human
cuuuuaguuccugug

SEQ ID NO: 1710509 - RNA, 22 nt, Human
cuuuuaguuccugugcacagcc

SEQ ID NO: 1710510 - RNA, 21 nt, Human
cuuuuaguuccugugcacagc

SEQ ID NO: 1710511 - RNA, 19 nt, Human
cuuuuggauuggacaaaau

SEQ ID NO: 1710512 - RNA, 21 nt, Human
cuuuuggauuggacaaaauga

SEQ ID NO: 1710513 - RNA, 23 nt, Human
cuuuuggauuggacaaaaugacu

SEQ ID NO: 1710514 - RNA, 18 nt, Human
cuuuuggauuggacaaaa

SEQ ID NO: 1710515 - RNA, 19 nt, Human
gaaaggcugcuguacugaa

SEQ ID NO: 1710516 - RNA, 20 nt, Human
gaaaggcugcuguacugaag

SEQ ID NO: 1710517 - RNA, 23 nt, Human
gaaaggcugcuguacugaaguaa

SEQ ID NO: 1710518 - RNA, 18 nt, Human
gaaaggcugcuguacuga

SEQ ID NO: 1710519 - RNA, 15 nt, Human
cuucacuguaaaaua

SEQ ID NO: 1710520 - RNA, 17 nt, Human
cugcauuauuugagaag

SEQ ID NO: 1710521 - RNA, 24 nt, Human
cugcauuauuugagaagcugcuca

SEQ ID NO: 1710522 - RNA, 22 nt, Human
cauauuucccaugauuucaugu

SEQ ID NO: 1710523 - RNA, 20 nt, Human
cauaugcauauuuuuuuucu

SEQ ID NO: 1710524 - RNA, 22 nt, Human
caucaagucuuucacauuuaaa

SEQ ID NO: 1710525 - RNA, 18 nt, Human
cauagugcuaacaugaag

SEQ ID NO: 1710526 - RNA, 19 nt, Human
cauagugcuaacaugaaga

SEQ ID NO: 1710527 - RNA, 20 nt, Human
cauagugcuaacaugaagac

SEQ ID NO: 1710528 - RNA, 13 nt, Human
cauauaaauagaa

SEQ ID NO: 1710529 - RNA, 15 nt, Human
cauauaaauagaaug

SEQ ID NO: 1710530 - RNA, 16 nt, Human
cauauaaauagaaugu

SEQ ID NO: 1710531 - RNA, 17 nt, Human
cauagaccuuuucauuu

SEQ ID NO: 1710532 - RNA, 19 nt, Human
cauacuuuguuaggaaggg

SEQ ID NO: 1710533 - RNA, 16 nt, Human
cauccaauuagcuuau

SEQ ID NO: 1710534 - RNA, 20 nt, Human
caucuaguuccccuguuuau

SEQ ID NO: 1710535 - RNA, 23 nt, Human
caucuaguuccccuguuuauuca

SEQ ID NO: 1710536 - RNA, 21 nt, Human
caucuaguuccccuguuuauu

SEQ ID NO: 1710537 - RNA, 21 nt, Human
caucucagcucaucuucacug

SEQ ID NO: 1710538 - RNA, 17 nt, Human
cauaacuaauacagcug

SEQ ID NO: 1710539 - RNA, 22 nt, Human
cauaacuaauacagcugagcua

SEQ ID NO: 1710540 - RNA, 18 nt, Human
cauacauucuucaagauc

SEQ ID NO: 1710541 - RNA, 21 nt, Human
cauacauucuucaagauccca

SEQ ID NO: 1710542 - RNA, 17 nt, Human
cauacauuuuguaccaa

SEQ ID NO: 1710543 - RNA, 18 nt, Human
cauaccauggaggaaggc

SEQ ID NO: 1710544 - RNA, 19 nt, Human
caguugcugcuucaauuua

SEQ ID NO: 1710545 - RNA, 18 nt, Human
caguugcugcuucaauuu

SEQ ID NO: 1710546 - RNA, 22 nt, Human
caguugcacagcaucucagcuc

SEQ ID NO: 1710547 - RNA, 12 nt, Human
caguugcacagc

SEQ ID NO: 1710548 - RNA, 13 nt, Human
caguugcacagca

SEQ ID NO: 1710549 - RNA, 15 nt, Human
caguugcacagcauc

SEQ ID NO: 1710550 - RNA, 16 nt, Human
caguugcacagcaucu

SEQ ID NO: 1710551 - RNA, 17 nt, Human
caguugcacagcaucuc

SEQ ID NO: 1710552 - RNA, 18 nt, Human
caguugcacagcaucuca

SEQ ID NO: 1710553 - RNA, 21 nt, Human
caguugcacagcaucucagcu

SEQ ID NO: 1710554 - RNA, 12 nt, Human
caguuacacaug

SEQ ID NO: 1710555 - RNA, 13 nt, Human
caguguuagcuua

SEQ ID NO: 1710556 - RNA, 14 nt, Human
caguguuagcuuag

SEQ ID NO: 1710557 - RNA, 22 nt, Human
caguucggugagcuacaaaugc

SEQ ID NO: 1710558 - RNA, 18 nt, Human
caguucuucgacuguugu

SEQ ID NO: 1710559 - RNA, 19 nt, Human
caguucuucgacuguuguu

SEQ ID NO: 1710560 - RNA, 14 nt, Human
cauuauuugagaag

SEQ ID NO: 1710561 - RNA, 20 nt, Human
cauuauuugagaagcugcuc

SEQ ID NO: 1710562 - RNA, 22 nt, Human
cauuauuugagaagcugcucaa

SEQ ID NO: 1710563 - RNA, 12 nt, Human
cauuuuauggug

SEQ ID NO: 1710564 - RNA, 17 nt, Human
cauuuuauggugccuag

SEQ ID NO: 1710565 - RNA, 14 nt, Human
cauuuuauggugcc

SEQ ID NO: 1710566 - RNA, 21 nt, Human
cauuuaaacagauguccauca

SEQ ID NO: 1710567 - RNA, 14 nt, Human
cauuuaaacagaug

SEQ ID NO: 1710568 - RNA, 16 nt, Human
cauuuaaacagauguc

SEQ ID NO: 1710569 - RNA, 19 nt, Human
cauuuaaacagauguccau

SEQ ID NO: 1710570 - RNA, 13 nt, Human
cauuuaaacagau

SEQ ID NO: 1710571 - RNA, 18 nt, Human
ccaaccuguucaagucua

SEQ ID NO: 1710572 - RNA, 23 nt, Human
ccauggaggaaggcucuguucca

SEQ ID NO: 1710573 - RNA, 19 nt, Human
ccccuguuuauucauaugc

SEQ ID NO: 1710574 - RNA, 13 nt, Human
ccuaaacauauga

SEQ ID NO: 1710575 - RNA, 19 nt, Human
ccguguuggucuguacuga

SEQ ID NO: 1710576 - RNA, 18 nt, Human
ccguguuggucuguacug

SEQ ID NO: 1710577 - RNA, 16 nt, Human
cuaacaugaagaccuu

SEQ ID NO: 1710578 - RNA, 15 nt, Human
cuaauguuugcauau

SEQ ID NO: 1710579 - RNA, 16 nt, Human
cuaauguuugcauaua

SEQ ID NO: 1710580 - RNA, 18 nt, Human
cuaauguuugcauauaag

SEQ ID NO: 1710581 - RNA, 17 nt, Human
cuaauguuugcauauaa

SEQ ID NO: 1710582 - RNA, 14 nt, Human
cuaguauugacaaa

SEQ ID NO: 1710583 - RNA, 15 nt, Human
cuaguauugacaaaa

SEQ ID NO: 1710584 - RNA, 17 nt, Human
cuaguauugacaaaaug

SEQ ID NO: 1710585 - RNA, 18 nt, Human
cuaguauugacaaaaugu

SEQ ID NO: 1710586 - RNA, 18 nt, Human
cuaguguaucaaaaugcu

SEQ ID NO: 1710587 - RNA, 15 nt, Human
cuaguguaucaaaau

SEQ ID NO: 1710588 - RNA, 20 nt, Human
cuaguauugacaaaauguua

SEQ ID NO: 1710589 - RNA, 19 nt, Human
cuaguauugacaaaauguu

SEQ ID NO: 1710590 - RNA, 13 nt, Human
cucacauuuauau

SEQ ID NO: 1710591 - RNA, 15 nt, Human
cuaacaugaagaccu

SEQ ID NO: 1710592 - RNA, 15 nt, Human
cuaaaccauugugca

SEQ ID NO: 1710593 - RNA, 17 nt, Human
cguuggcuagauuaacc

SEQ ID NO: 1710594 - RNA, 18 nt, Human
cguuuaaugaaugcuuaa

SEQ ID NO: 1710595 - RNA, 13 nt, Human
cguuuaaugaaug

SEQ ID NO: 1710596 - RNA, 14 nt, Human
cguuuaaugaaugc

SEQ ID NO: 1710597 - RNA, 23 nt, Human
cuaaaaccuuccaugucaagauu

SEQ ID NO: 1710598 - RNA, 17 nt, Human
cggugagcuacaaaugc

SEQ ID NO: 1710599 - RNA, 16 nt, Human
cugagcuauguaguau

SEQ ID NO: 1710600 - RNA, 23 nt, Human
cucuucuuaauguacauagugcu

SEQ ID NO: 1710601 - RNA, 24 nt, Human
cucuucuuaauguacauagugcua

SEQ ID NO: 1710602 - RNA, 13 nt, Human
cucuucuuaaugu

SEQ ID NO: 1710603 - RNA, 18 nt, Human
cucuucuuaauguacaua

SEQ ID NO: 1710604 - RNA, 22 nt, Human
cucuucuuaauguacauagugc

SEQ ID NO: 1710605 - RNA, 23 nt, Human
cuguaugaucaaauguuuaauca

SEQ ID NO: 1710606 - RNA, 12 nt, Human
cugcuguacuga

SEQ ID NO: 1710607 - RNA, 13 nt, Human
cugcuguacugaa

SEQ ID NO: 1710608 - RNA, 15 nt, Human
cugcuguacugaagu

SEQ ID NO: 1710609 - RNA, 14 nt, Human
cugcuguacugaag

SEQ ID NO: 1710610 - RNA, 20 nt, Human
cugcacccuggauuugcaua

SEQ ID NO: 1710611 - RNA, 22 nt, Human
cuuuuuacccauuuguucauau

SEQ ID NO: 1710612 - RNA, 13 nt, Human
cuuuucauuugug

SEQ ID NO: 1710613 - RNA, 18 nt, Human
cuugcaguaucggcacug

SEQ ID NO: 1710614 - RNA, 20 nt, Human
cuugcaguaucggcacugua

SEQ ID NO: 1710615 - RNA, 19 nt, Human
cuugcaguaucggcacugu

SEQ ID NO: 1710616 - RNA, 18 nt, Human
cuuguaaaggaauuuaaa

SEQ ID NO: 1710617 - RNA, 17 nt, Human
cuugccaaauauaaaua

SEQ ID NO: 1710618 - RNA, 22 nt, Human
gaacuuguaaaggaauuuaaaa

SEQ ID NO: 1710619 - RNA, 15 nt, Human
gaagauaaacgugga

SEQ ID NO: 1710620 - RNA, 20 nt, Human
gaagguauaucuagguuuau

SEQ ID NO: 1710621 - RNA, 15 nt, Human
gaaagugagcagugu

SEQ ID NO: 1710622 - RNA, 16 nt, Human
gaaagugagcaguguu

SEQ ID NO: 1710623 - RNA, 22 nt, Human
gaaagugagcaguguuagcuua

SEQ ID NO: 1710624 - RNA, 19 nt, Human
gaaagucagauucuugcau

SEQ ID NO: 1710625 - RNA, 17 nt, Human
gagauacagaauuuuau

SEQ ID NO: 1710626 - RNA, 23 nt, Human
gaccugauuucugagcauuuaau

SEQ ID NO: 1710627 - RNA, 17 nt, Human
gaccuuuuucugcacua

SEQ ID NO: 1710628 - RNA, 18 nt, Human
gcagcacaaguguaauga

SEQ ID NO: 1710629 - RNA, 15 nt, Human
gcagcuuugcucaua

SEQ ID NO: 1710630 - RNA, 13 nt, Human
gcagcuuugcuca

SEQ ID NO: 1710631 - RNA, 14 nt, Human
gcagcuuugcucau

SEQ ID NO: 1710632 - RNA, 21 nt, Human
gcacuguacaaaaaaaucuuc

SEQ ID NO: 1710633 - RNA, 17 nt, Human
gcauagguuuaauaauu

SEQ ID NO: 1710634 - RNA, 15 nt, Human
gcauauuuuuuuucu

SEQ ID NO: 1710635 - RNA, 13 nt, Human
gcauagaaguaaa

SEQ ID NO: 1710636 - RNA, 12 nt, Human
gcaguuauuugc

SEQ ID NO: 1710637 - RNA, 11 nt, Human
gcauuauuuga

SEQ ID NO: 1710638 - RNA, 15 nt, Human
gcauuauuugagaag

SEQ ID NO: 1710639 - RNA, 21 nt, Human
gcauuauuugagaagcugcuc

SEQ ID NO: 1710640 - RNA, 22 nt, Human
gaugacaagaaaggcugcugua

SEQ ID NO: 1710641 - RNA, 23 nt, Human
gauagauaggucagugcaaauac

SEQ ID NO: 1710642 - RNA, 18 nt, Human
gcaaauccuuugugaaaa

SEQ ID NO: 1710643 - RNA, 17 nt, Human
gcaaauccuuugugaaa

SEQ ID NO: 1710644 - RNA, 14 nt, Human
gccaguaauccugu

SEQ ID NO: 1710645 - RNA, 19 nt, Human
gccaguaauccuguaggaa

SEQ ID NO: 1710646 - RNA, 16 nt, Human
uuuuggauuggacaaa

SEQ ID NO: 1710647 - RNA, 11 nt, Human
uuuuuccuguc

SEQ ID NO: 1710648 - RNA, 18 nt, Human
uuugaaucaucaagucuu

SEQ ID NO: 1710649 - RNA, 22 nt, Human
uuuccugccuuuuaguuccugu

SEQ ID NO: 1710650 - RNA, 23 nt, Human
uuuccugccuuuuaguuccugug

SEQ ID NO: 1710651 - RNA, 14 nt, Human
uuacauuuuauggu

SEQ ID NO: 1710652 - RNA, 23 nt, Human
uuacauuuuauggugccuaguau

SEQ ID NO: 1710653 - RNA, 21 nt, Human
guagguuauuaugauuagcuu

SEQ ID NO: 1710654 - RNA, 15 nt, Human
guaugaucaaauguu

SEQ ID NO: 1710655 - RNA, 16 nt, Human
guaugaucaaauguuu

SEQ ID NO: 1710656 - RNA, 17 nt, Human
guaugaucaaauguuua

SEQ ID NO: 1710657 - RNA, 22 nt, Human
guaugaucaaauguuuaaucau

SEQ ID NO: 1710658 - RNA, 13 nt, Human
guaugaucaaaug

SEQ ID NO: 1710659 - RNA, 14 nt, Human
guaugaucaaaugu

SEQ ID NO: 1710660 - RNA, 14 nt, Human
guaucuugcaguau

SEQ ID NO: 1710661 - RNA, 22 nt, Human
guaucuugcaguaucggcacug

SEQ ID NO: 1710662 - RNA, 19 nt, Human
guauaucuagguuuaugac

SEQ ID NO: 1710663 - RNA, 20 nt, Human
guauaucuagguuuaugaca

SEQ ID NO: 1710664 - RNA, 23 nt, Human
guauaucuagguuuaugacagua

SEQ ID NO: 1710665 - RNA, 13 nt, Human
guaucggcacugu

SEQ ID NO: 1710666 - RNA, 15 nt, Human
guaucggcacuguac

SEQ ID NO: 1710667 - RNA, 16 nt, Human
guaucggcacuguaca

SEQ ID NO: 1710668 - RNA, 18 nt, Human
guaucggcacuguacaaa

SEQ ID NO: 1710669 - RNA, 21 nt, Human
gucaagggcagcuuugcucau

SEQ ID NO: 1710670 - RNA, 16 nt, Human
gucagauucuugcauc

SEQ ID NO: 1710671 - RNA, 15 nt, Human
gucagauucuugcau

SEQ ID NO: 1710672 - RNA, 17 nt, Human
gucagauucuugcaucc

SEQ ID NO: 1710673 - RNA, 22 nt, Human
gucucacugagcacuguuuucu

SEQ ID NO: 1710674 - RNA, 16 nt, Human
gucucacugagcacug

SEQ ID NO: 1710675 - RNA, 18 nt, Human
gucgucaaagcugaaaug

SEQ ID NO: 1710676 - RNA, 20 nt, Human
gucuguuuuaaaaaccuguu

SEQ ID NO: 1710677 - RNA, 16 nt, Human
gugcaguuauuugcuu

SEQ ID NO: 1710678 - RNA, 23 nt, Human
gugauuuuuuuuuuuuuccuguc

SEQ ID NO: 1710679 - RNA, 23 nt, Human
guggugaaaagcagguugauaaa

SEQ ID NO: 1710680 - RNA, 14 nt, Human
gugguaucuugcag

SEQ ID NO: 1710681 - RNA, 16 nt, Human
guguaaugaauaccuu

SEQ ID NO: 1710682 - RNA, 15 nt, Human
guguaucaaaaugcu

SEQ ID NO: 1710683 - RNA, 17 nt, Human
guggguuuuuauuuccu

SEQ ID NO: 1710684 - RNA, 11 nt, Human
guuaucauguu

SEQ ID NO: 1710685 - RNA, 12 nt, Human
guuaucauguua

SEQ ID NO: 1710686 - RNA, 23 nt, Human
guuaucauguuaguaauaccucu

SEQ ID NO: 1710687 - RNA, 22 nt, Human
guuaucauguuaguaauaccuc

SEQ ID NO: 1710688 - RNA, 14 nt, Human
guuaugaugugcuu

SEQ ID NO: 1710689 - RNA, 16 nt, Human
guuaugaugugcuuaa

SEQ ID NO: 1710690 - RNA, 17 nt, Human
guuaugaugugcuuaac

SEQ ID NO: 1710691 - RNA, 22 nt, Human
guuaugaugugcuuaacaggga

SEQ ID NO: 1710692 - RNA, 17 nt, Human
guuaucuguuugagaaa

SEQ ID NO: 1710693 - RNA, 17 nt, Human
guuauuauauuuacaaa

SEQ ID NO: 1710694 - RNA, 21 nt, Human
guuacuccaaaacuucguuua

SEQ ID NO: 1710695 - RNA, 18 nt, Human
guucauauuaagaaugau

SEQ ID NO: 1710696 - RNA, 15 nt, Human
guuccugugcacagc

SEQ ID NO: 1710697 - RNA, 16 nt, Human
guuccugugcacagcc

SEQ ID NO: 1710698 - RNA, 16 nt, Human
guugcacagcaucuca

SEQ ID NO: 1710699 - RNA, 19 nt, Human
guugcacagcaucucagcu

SEQ ID NO: 1710700 - RNA, 10 nt, Human
guugcacagc

SEQ ID NO: 1710701 - RNA, 11 nt, Human
guugcacagca

SEQ ID NO: 1710702 - RNA, 22 nt, Human
guuuacauuuuauggugccuag

SEQ ID NO: 1710703 - RNA, 15 nt, Human
guuuacauuuuaugg

SEQ ID NO: 1710704 - RNA, 23 nt, Human
guuguuaugaugugcuuaacagg

SEQ ID NO: 1710705 - RNA, 15 nt, Human
guuguuaugaugugc

SEQ ID NO: 1710706 - RNA, 14 nt, Human
guuguuaucuguuu

SEQ ID NO: 1710707 - RNA, 17 nt, Human
guuguuaucuguuugag

SEQ ID NO: 1710708 - RNA, 13 nt, Human
guuguuaugaugu

SEQ ID NO: 1710709 - RNA, 14 nt, Human
guuguuaugaugug

SEQ ID NO: 1710710 - RNA, 15 nt, Human
guuggcuagauuaac

SEQ ID NO: 1710711 - RNA, 17 nt, Human
guuuuccucucaauaaa

SEQ ID NO: 1710712 - RNA, 17 nt, Human
guuuuaaaaaccuguuc

SEQ ID NO: 1710713 - RNA, 22 nt, Human
uaaaacaagcacuaaacaaaga

SEQ ID NO: 1710714 - RNA, 18 nt, Human
uaaaacaaacaauaccug

SEQ ID NO: 1710715 - RNA, 14 nt, Human
uaaaacaaagccac

SEQ ID NO: 1710716 - RNA, 22 nt, Human
uaaaacaaagccacuuucaauc

SEQ ID NO: 1710717 - RNA, 14 nt, Human
uaaaguguuugaaa

SEQ ID NO: 1710718 - RNA, 18 nt, Human
uaaacaugacuccauaga

SEQ ID NO: 1710719 - RNA, 22 nt, Human
uaaacaugacuccauagaccuu

SEQ ID NO: 1710720 - RNA, 15 nt, Human
uaaauguccauucuu

SEQ ID NO: 1710721 - RNA, 15 nt, Human
uaaaugucucacuga

SEQ ID NO: 1710722 - RNA, 17 nt, Human
uaaaugucucacugagc

SEQ ID NO: 1710723 - RNA, 22 nt, Human
uaacugacaagcuccauuuaaa

SEQ ID NO: 1710724 - RNA, 21 nt, Human
uaacugacaagcuccauuuaa

SEQ ID NO: 1710725 - RNA, 11 nt, Human
uaacugacaag

SEQ ID NO: 1710726 - RNA, 16 nt, Human
uaagucaacuuagcau

SEQ ID NO: 1710727 - RNA, 19 nt, Human
uaagggaaguaguuaucau

SEQ ID NO: 1710728 - RNA, 22 nt, Human
uaagggaaguaguuaucauguu

SEQ ID NO: 1710729 - RNA, 16 nt, Human
uaauguuugcauauaa

SEQ ID NO: 1710730 - RNA, 14 nt, Human
uaauguuugcauau

SEQ ID NO: 1710731 - RNA, 15 nt, Human
uaauguuugcauaua

SEQ ID NO: 1710732 - RNA, 22 nt, Human
uauaaauagaauguaaaugucu

SEQ ID NO: 1710733 - RNA, 14 nt, Human
uauaaauagaaugu

SEQ ID NO: 1710734 - RNA, 16 nt, Human
uauaaauagaauguaa

SEQ ID NO: 1710735 - RNA, 19 nt, Human
uauaaauagaauguaaaug

SEQ ID NO: 1710736 - RNA, 20 nt, Human
uauaaauagaauguaaaugu

SEQ ID NO: 1710737 - RNA, 20 nt, Human
uaucauguuaguaauaccuc

SEQ ID NO: 1710738 - RNA, 16 nt, Human
uaucauguuaguaaua

SEQ ID NO: 1710739 - RNA, 19 nt, Human
uaucauguuaguaauaccu

SEQ ID NO: 1710740 - RNA, 21 nt, Human
uaucauguuaguaauaccucu

SEQ ID NO: 1710741 - RNA, 22 nt, Human
uaucaaaaugcucuuauuucau

SEQ ID NO: 1710742 - RNA, 14 nt, Human
uaucaaaaugcucu

SEQ ID NO: 1710743 - RNA, 14 nt, Human
uauauuuugccugu

SEQ ID NO: 1710744 - RNA, 13 nt, Human
uaguauugacaaa

SEQ ID NO: 1710745 - RNA, 14 nt, Human
uaguauugacaaaa

SEQ ID NO: 1710746 - RNA, 17 nt, Human
uaguauugacaaaaugu

SEQ ID NO: 1710747 - RNA, 18 nt, Human
uaguauugacaaaauguu

SEQ ID NO: 1710748 - RNA, 19 nt, Human
uaguauugacaaaauguua

SEQ ID NO: 1710749 - RNA, 21 nt, Human
uaguauugacaaaauguuauu

SEQ ID NO: 1710750 - RNA, 22 nt, Human
uaguauugacaaaauguuauuu

SEQ ID NO: 1710751 - RNA, 16 nt, Human
uaguauugcaaaguca

SEQ ID NO: 1710752 - RNA, 17 nt, Human
uaguuguuguagagaaa

SEQ ID NO: 1710753 - RNA, 20 nt, Human
uagguuauuaugauuagcuu

SEQ ID NO: 1710754 - RNA, 22 nt, Human
uagguuauuaugauuagcuuug

SEQ ID NO: 1710755 - RNA, 15 nt, Human
uagccaguaauccug

SEQ ID NO: 1710756 - RNA, 16 nt, Human
uagccaguaauccugu

SEQ ID NO: 1710757 - RNA, 17 nt, Human
uagccaguaauccugua

SEQ ID NO: 1710758 - RNA, 18 nt, Human
uagccaguaauccuguag

SEQ ID NO: 1710759 - RNA, 22 nt, Human
uagccaguaauccuguaggaag

SEQ ID NO: 1710760 - RNA, 18 nt, Human
uagcugacaaaauacuug

SEQ ID NO: 1710761 - RNA, 17 nt, Human
uagaccuuuucauuugu

SEQ ID NO: 1710762 - RNA, 14 nt, Human
uacuugucuguuuu

SEQ ID NO: 1710763 - RNA, 15 nt, Human
uacuugucuguuuua

SEQ ID NO: 1710764 - RNA, 20 nt, Human
uacuugucuguuuuaaaaac

SEQ ID NO: 1710765 - RNA, 14 nt, Human
uagaauguaaaugu

SEQ ID NO: 1710766 - RNA, 15 nt, Human
uagaauguaaauguc

SEQ ID NO: 1710767 - RNA, 16 nt, Human
uagaauguaaaugucu

SEQ ID NO: 1710768 - RNA, 18 nt, Human
uagaauguaaaugucuca

SEQ ID NO: 1710769 - RNA, 17 nt, Human
uagaauguaaaugucuc

SEQ ID NO: 1710770 - RNA, 18 nt, Human
uaccucaauuuucacugu

SEQ ID NO: 1710771 - RNA, 20 nt, Human
uaccucaauuuucacugugu

SEQ ID NO: 1710772 - RNA, 21 nt, Human
uaccucaauuuucacuguguc

SEQ ID NO: 1710773 - RNA, 22 nt, Human
uaccuuagugcaguuauuugcu

SEQ ID NO: 1710774 - RNA, 14 nt, Human
uaccuuagugcagu

SEQ ID NO: 1710775 - RNA, 16 nt, Human
uaccuuagugcaguua

SEQ ID NO: 1710776 - RNA, 17 nt, Human
uaccuuagugcaguuau

SEQ ID NO: 1710777 - RNA, 18 nt, Human
uaccuuagugcaguuauu

SEQ ID NO: 1710778 - RNA, 19 nt, Human
uaccuuagugcaguuauuu

SEQ ID NO: 1710779 - RNA, 20 nt, Human
uaccuuagugcaguuauuug

SEQ ID NO: 1710780 - RNA, 16 nt, Human
uaccucuaauaguaua

SEQ ID NO: 1710781 - RNA, 17 nt, Human
uaccucuaauaguauaa

SEQ ID NO: 1710782 - RNA, 18 nt, Human
uaccucuaauaguauaaa

SEQ ID NO: 1710783 - RNA, 19 nt, Human
uaccucuaauaguauaaac

SEQ ID NO: 1710784 - RNA, 13 nt, Human
uacuugucuguuu

SEQ ID NO: 1710785 - RNA, 19 nt, Human
uacuccaaaacuucguuua

SEQ ID NO: 1710786 - RNA, 22 nt, Human
uacuccaaaacuucguuuaaug

SEQ ID NO: 1710787 - RNA, 16 nt, Human
uacugcauuauuugag

SEQ ID NO: 1710788 - RNA, 23 nt, Human
uacaguucggugagcuacaaaug

SEQ ID NO: 1710789 - RNA, 15 nt, Human
uacagcugagcuaug

SEQ ID NO: 1710790 - RNA, 19 nt, Human
ugaagaccuuuuucugcac

SEQ ID NO: 1710791 - RNA, 21 nt, Human
ugaagaccuuuuucugcacua

SEQ ID NO: 1710792 - RNA, 22 nt, Human
ugaagaccuuuuucugcacuau

SEQ ID NO: 1710793 - RNA, 23 nt, Human
ugaagaccuuuuucugcacuaua

SEQ ID NO: 1710794 - RNA, 15 nt, Human
ugacuaaaccauugu

SEQ ID NO: 1710795 - RNA, 19 nt, Human
ugacuaaaccauugugcau

SEQ ID NO: 1710796 - RNA, 20 nt, Human
ugagaaagucagauucuugc

SEQ ID NO: 1710797 - RNA, 21 nt, Human
ugagaaagucagauucuugca

SEQ ID NO: 1710798 - RNA, 16 nt, Human
ucuuguaauuuggauc

SEQ ID NO: 1710799 - RNA, 19 nt, Human
ucuugccaaauauaaauaa

SEQ ID NO: 1710800 - RNA, 22 nt, Human
ucuucgacuguuguuaucuguu

SEQ ID NO: 1710801 - RNA, 14 nt, Human
ucuucgacuguugu

SEQ ID NO: 1710802 - RNA, 15 nt, Human
ucuucgacuguuguu

SEQ ID NO: 1710803 - RNA, 17 nt, Human
ucuucgacuguuguuau

SEQ ID NO: 1710804 - RNA, 14 nt, Human
ucuuauaauuuaaa

SEQ ID NO: 1710805 - RNA, 13 nt, Human
ucuuauaauuuaa

SEQ ID NO: 1710806 - RNA, 16 nt, Human
ucuucauggugacacu

SEQ ID NO: 1710807 - RNA, 17 nt, Human
ucuucauggugacacuc

SEQ ID NO: 1710808 - RNA, 21 nt, Human
ucuuuuuacccauuuguucau

SEQ ID NO: 1710809 - RNA, 18 nt, Human
ucugcacuauaugcaaac

SEQ ID NO: 1710810 - RNA, 15 nt, Human
ucugccucucuugua

SEQ ID NO: 1710811 - RNA, 16 nt, Human
uccauauggauccacu

SEQ ID NO: 1710812 - RNA, 21 nt, Human
uccauauggauccacuggcug

SEQ ID NO: 1710813 - RNA, 19 nt, Human
uccauauggauccacuggc

SEQ ID NO: 1710814 - RNA, 23 nt, Human
uccaugucaagauucagcuagug

SEQ ID NO: 1710815 - RNA, 19 nt, Human
ucauguacugcauuauuug

SEQ ID NO: 1710816 - RNA, 16 nt, Human
ucauguacugcauuau

SEQ ID NO: 1710817 - RNA, 17 nt, Human
ucucacugagcacuguu

SEQ ID NO: 1710818 - RNA, 18 nt, Human
ucucacugagcacuguuu

SEQ ID NO: 1710819 - RNA, 11 nt, Human
ucucacugagc

SEQ ID NO: 1710820 - RNA, 16 nt, Human
ucucacugagcacugu

SEQ ID NO: 1710821 - RNA, 14 nt, Human
uccuuugugaaaaa

SEQ ID NO: 1710822 - RNA, 23 nt, Human
uccuugcugaaacgcaucuaguu

SEQ ID NO: 1710823 - RNA, 13 nt, Human
uccucucaauaaa

SEQ ID NO: 1710824 - RNA, 16 nt, Human
uccuaugauguauacu

SEQ ID NO: 1710825 - RNA, 22 nt, Human
uccuaugauguauacugccacu

SEQ ID NO: 1710826 - RNA, 12 nt, Human
uccuaugaugua

SEQ ID NO: 1710827 - RNA, 15 nt, Human
uccuaugauguauac

SEQ ID NO: 1710828 - RNA, 13 nt, Human
ucccaugauuuca

SEQ ID NO: 1710829 - RNA, 14 nt, Human
ucccaugauuucau

SEQ ID NO: 1710830 - RNA, 16 nt, Human
ucccaugauuucaugu

SEQ ID NO: 1710831 - RNA, 19 nt, Human
ucccaugauuucauguacu

SEQ ID NO: 1710832 - RNA, 22 nt, Human
ucccaugauuucauguacugca

SEQ ID NO: 1710833 - RNA, 22 nt, Human
uggaauaauccuaaacauauga

SEQ ID NO: 1710834 - RNA, 13 nt, Human
uggaaacaagaug

SEQ ID NO: 1710835 - RNA, 21 nt, Human
uggauccacuggcuggacaaa

SEQ ID NO: 1710836 - RNA, 21 nt, Human
uggcuugaguuuaaauuguaa

SEQ ID NO: 1710837 - RNA, 14 nt, Human
uggcuggacaaacu

SEQ ID NO: 1710838 - RNA, 12 nt, Human
ugggacaauuag

SEQ ID NO: 1710839 - RNA, 22 nt, Human
ugggacaauuagauaaaugucc

SEQ ID NO: 1710840 - RNA, 23 nt, Human
ugcauauaagggaaguaguuauc

SEQ ID NO: 1710841 - RNA, 21 nt, Human
ugcauauaagggaaguaguua

SEQ ID NO: 1710842 - RNA, 22 nt, Human
ugcauauaagggaaguaguuau

SEQ ID NO: 1710843 - RNA, 19 nt, Human
ugccacuaaccuuccaaaa

SEQ ID NO: 1710844 - RNA, 18 nt, Human
ugccaaauauaaauaaaa

SEQ ID NO: 1710845 - RNA, 17 nt, Human
ugccaaauauaaauaaa

SEQ ID NO: 1710846 - RNA, 22 nt, Human
ugccaaauauaaauaaaaauaa

SEQ ID NO: 1710847 - RNA, 19 nt, Human
ugccaaauauaaauaaaaa

SEQ ID NO: 1710848 - RNA, 20 nt, Human
ugcugaaacgcaucuaguuc

SEQ ID NO: 1710849 - RNA, 23 nt, Human
uguaugaucaaauguuuaaucau

SEQ ID NO: 1710850 - RNA, 12 nt, Human
uguaugaucaaa

SEQ ID NO: 1710851 - RNA, 13 nt, Human
uguaugaucaaau

SEQ ID NO: 1710852 - RNA, 14 nt, Human
uguaugaucaaaug

SEQ ID NO: 1710853 - RNA, 15 nt, Human
uguaugaucaaaugu

SEQ ID NO: 1710854 - RNA, 16 nt, Human
uguaugaucaaauguu

SEQ ID NO: 1710855 - RNA, 18 nt, Human
uguaugaucaaauguuua

SEQ ID NO: 1710856 - RNA, 19 nt, Human
uguaugaucaaauguuuaa

SEQ ID NO: 1710857 - RNA, 20 nt, Human
uguaugaucaaauguuuaau

SEQ ID NO: 1710858 - RNA, 14 nt, Human
uguccaucagauga

SEQ ID NO: 1710859 - RNA, 16 nt, Human
uguccaucagaugaca

SEQ ID NO: 1710860 - RNA, 17 nt, Human
uguccaucagaugacaa

SEQ ID NO: 1710861 - RNA, 18 nt, Human
uguccaucagaugacaag

SEQ ID NO: 1710862 - RNA, 20 nt, Human
uguuuacauuuuauggugcc

SEQ ID NO: 1710863 - RNA, 13 nt, Human
uuaaugaaugcuu

SEQ ID NO: 1710864 - RNA, 15 nt, Human
uuaaugaaugcuuaa

SEQ ID NO: 1710865 - RNA, 17 nt, Human
uuaaugaaugcuuaaag

SEQ ID NO: 1710866 - RNA, 21 nt, Human
uuaaugaaugcuuaaagaauu

SEQ ID NO: 1710867 - RNA, 20 nt, Human
uuaaugaaugcuuaaagaau

SEQ ID NO: 1710868 - RNA, 17 nt, Human
uguucauauuaagaaug

SEQ ID NO: 1710869 - RNA, 18 nt, Human
uguucauauuaagaauga

SEQ ID NO: 1710870 - RNA, 23 nt, Human
uguucauauuaagaaugaucuga

SEQ ID NO: 1710871 - RNA, 16 nt, Human
uguuaguaauaccucu

SEQ ID NO: 1710872 - RNA, 14 nt, Human
uguuaguaauaccu

SEQ ID NO: 1710873 - RNA, 15 nt, Human
uguuaguaauaccuc

SEQ ID NO: 1710874 - RNA, 15 nt, Human
caccaguugcugcuu

SEQ ID NO: 1710875 - RNA, 18 nt, Human
caaucuucaauccuugaa

SEQ ID NO: 1710876 - RNA, 14 nt, Human
caaucuucaauccu

SEQ ID NO: 1710877 - RNA, 15 nt, Human
caaucuucaauccuu

SEQ ID NO: 1710878 - RNA, 16 nt, Human
caaauguuuaaucaua

SEQ ID NO: 1710879 - RNA, 17 nt, Human
caaauguuuaaucauau

SEQ ID NO: 1710880 - RNA, 19 nt, Human
caaauguuuaaucauauaa

SEQ ID NO: 1710881 - RNA, 20 nt, Human
caaauguuuaaucauauaaa

SEQ ID NO: 1710882 - RNA, 13 nt, Human
caaauuggagaaa

SEQ ID NO: 1710883 - RNA, 22 nt, Human
caaauguuuaaucauauaaaua

SEQ ID NO: 1710884 - RNA, 12 nt, Human
caacuugcaaaa

SEQ ID NO: 1710885 - RNA, 15 nt, Human
caacuugcaaaauca

SEQ ID NO: 1710886 - RNA, 20 nt, Human
caagaaaggcugcuguacug

SEQ ID NO: 1710887 - RNA, 18 nt, Human
caacuugcaaaaucaguu

SEQ ID NO: 1710888 - RNA, 19 nt, Human
caacuugcaaaaucaguuu

SEQ ID NO: 1710889 - RNA, 20 nt, Human
caacuugcaaaaucaguuuu

SEQ ID NO: 1710890 - RNA, 18 nt, Human
caagggcagcuuugcuca

SEQ ID NO: 1710891 - RNA, 11 nt, Human
caagggcagcu

SEQ ID NO: 1710892 - RNA, 14 nt, Human
caagggcagcuuug

SEQ ID NO: 1710893 - RNA, 15 nt, Human
auccuugaagguaua

SEQ ID NO: 1710894 - RNA, 14 nt, Human
auccuugaagguau

SEQ ID NO: 1710895 - RNA, 22 nt, Human
auauuuuuuuucuuuuuaccca

SEQ ID NO: 1710896 - RNA, 15 nt, Human
augcucuuauuucau

SEQ ID NO: 1710897 - RNA, 17 nt, Human
augcucuuauuucauca

SEQ ID NO: 1710898 - RNA, 19 nt, Human
augcucuuauuucaucauu

SEQ ID NO: 1710899 - RNA, 18 nt, Human
augcucuuauuucaucau

SEQ ID NO: 1710900 - RNA, 23 nt, Human
augcauauuuuuuuucuuuuuac

SEQ ID NO: 1710901 - RNA, 24 nt, Human
augaauaccuuagugcaguuauuu

SEQ ID NO: 1710902 - RNA, 23 nt, Human
agugcuaacaugaagaccuuuuu

SEQ ID NO: 1710903 - RNA, 16 nt, Human
agugcuaacaugaaga

SEQ ID NO: 1710904 - RNA, 17 nt, Human
agugcuaacaugaagac

SEQ ID NO: 1710905 - RNA, 19 nt, Human
agugcuaacaugaagaccu

SEQ ID NO: 1710906 - RNA, 22 nt, Human
agugcuaacaugaagaccuuuu

SEQ ID NO: 1710907 - RNA, 23 nt, Human
aguaaacaauaaaaguguccauu

SEQ ID NO: 1710908 - RNA, 15 nt, Human
auaaaagacagugaa

SEQ ID NO: 1710909 - RNA, 16 nt, Human
auaaaagacagugaaa

SEQ ID NO: 1710910 - RNA, 18 nt, Human
aguuacacaugaucauaa

SEQ ID NO: 1710911 - RNA, 21 nt, Human
aguggccaagagaugcagugc

SEQ ID NO: 1710912 - RNA, 18 nt, Human
agaugacaagaaaggcug

SEQ ID NO: 1710913 - RNA, 12 nt, Human
agcaaauccuuu

SEQ ID NO: 1710914 - RNA, 20 nt, Human
agcaaauccuuugugaaaaa

SEQ ID NO: 1710915 - RNA, 20 nt, Human
agauagauaggucagugcaa

SEQ ID NO: 1710916 - RNA, 15 nt, Human
agcaucucagcucau

SEQ ID NO: 1710917 - RNA, 14 nt, Human
agaaugaucugauu

SEQ ID NO: 1710918 - RNA, 17 nt, Human
agaaugaucugauugac

SEQ ID NO: 1710919 - RNA, 16 nt, Human
agaaugaucugauuga

SEQ ID NO: 1710920 - RNA, 15 nt, Human
agaacaaaugaagac

SEQ ID NO: 1710921 - RNA, 12 nt, Human
agaacaaaugaa

SEQ ID NO: 1710922 - RNA, 19 nt, Human
agacaaggaaaaaauaaca

SEQ ID NO: 1710923 - RNA, 19 nt, Human
agacaaaacauacauuuug

SEQ ID NO: 1710924 - RNA, 14 nt, Human
agaccuuuuucugc

SEQ ID NO: 1710925 - RNA, 18 nt, Human
agaccuuuuucugcacua

SEQ ID NO: 1710926 - RNA, 20 nt, Human
agaccuuuuucugcacuaua

SEQ ID NO: 1710927 - RNA, 14 nt, Human
aggaagguacugua

SEQ ID NO: 1710928 - RNA, 15 nt, Human
aggaagguacuguau

SEQ ID NO: 1710929 - RNA, 17 nt, Human
aggaagguacuguauga

SEQ ID NO: 1710930 - RNA, 18 nt, Human
aggaagguacuguaugau

SEQ ID NO: 1710931 - RNA, 18 nt, Human
aggaaaaaauaacaauga

SEQ ID NO: 1710932 - RNA, 22 nt, Human
agcuuugucacuguuucacuac

SEQ ID NO: 1710933 - RNA, 13 nt, Human
agcuacaaaugca

SEQ ID NO: 1710934 - RNA, 12 nt, Human
agcuacaaaugc

SEQ ID NO: 1710935 - RNA, 17 nt, Human
aggcucuguuccacaua

SEQ ID NO: 1710936 - RNA, 20 nt, Human
acugacaagcuccauuuaaa

SEQ ID NO: 1710937 - RNA, 17 nt, Human
acugacaagcuccauuu

SEQ ID NO: 1710938 - RNA, 17 nt, Human
acuguaaaauaauaacu

SEQ ID NO: 1710939 - RNA, 20 nt, Human
acuguuucacuacucagcau

SEQ ID NO: 1710940 - RNA, 14 nt, Human
acgcuuaaauacag

SEQ ID NO: 1710941 - RNA, 23 nt, Human
aauuauagcucuaauguuugcau

SEQ ID NO: 1710942 - RNA, 17 nt, Human
aauuauagcucuaaugu

SEQ ID NO: 1710943 - RNA, 18 nt, Human
aauuauagcucuaauguu

SEQ ID NO: 1710944 - RNA, 19 nt, Human
aauuauagcucuaauguuu

SEQ ID NO: 1710945 - RNA, 20 nt, Human
aauuauagcucuaauguuug

SEQ ID NO: 1710946 - RNA, 22 nt, Human
aauuauagcucuaauguuugca

SEQ ID NO: 1710947 - RNA, 11 nt, Human
aauuguaauag

SEQ ID NO: 1710948 - RNA, 20 nt, Human
acaaguguaaugaauaccuu

SEQ ID NO: 1710949 - RNA, 13 nt, Human
acaaguguaauga

SEQ ID NO: 1710950 - RNA, 16 nt, Human
acaaguguaaugaaua

SEQ ID NO: 1710951 - RNA, 22 nt, Human
acaaacugcaccaguugcugcu

SEQ ID NO: 1710952 - RNA, 14 nt, Human
acaaacaauaccug

SEQ ID NO: 1710953 - RNA, 20 nt, Human
aaugaauacuuuauaaagga

SEQ ID NO: 1710954 - RNA, 12 nt, Human
aaugaauaccuu

SEQ ID NO: 1710955 - RNA, 13 nt, Human
aaugaauaccuua

SEQ ID NO: 1710956 - RNA, 23 nt, Human
aacgcaucuaguuccccuguuua

SEQ ID NO: 1710957 - RNA, 22 nt, Human
aacgcaucuaguuccccuguuu

SEQ ID NO: 1710958 - RNA, 21 nt, Human
aagacaaggaaaaaauaacaa

SEQ ID NO: 1710959 - RNA, 20 nt, Human
aacaugacuccauagaccuu

SEQ ID NO: 1710960 - RNA, 18 nt, Human
aacaugaagaccuuuuuc

SEQ ID NO: 1710961 - RNA, 22 nt, Human
aacaugaagaccuuuuucugca

SEQ ID NO: 1710962 - RNA, 14 nt, Human
aacaugaagaccuu

SEQ ID NO: 1710963 - RNA, 23 nt, Human
aacaugaagaccuuuuucugcac

SEQ ID NO: 1710964 - RNA, 20 nt, Human
aaaagacaaggaaaaaauaa

SEQ ID NO: 1710965 - RNA, 18 nt, Human
aaauuauagcucuaaugu

SEQ ID NO: 1710966 - RNA, 18 nt, Human
aaauuagccaguaauccu

SEQ ID NO: 1710967 - RNA, 15 nt, Human
aaauuauagcucuaa

SEQ ID NO: 1710968 - RNA, 21 nt, Human
aaauuauagcucuaauguuug

SEQ ID NO: 1710969 - RNA, 22 nt, Human
aaauguuauuucccuacauuaa

SEQ ID NO: 1710970 - RNA, 18 nt, Human
aaauuacuuaguauugca

SEQ ID NO: 1710971 - RNA, 14 nt, Human
aaauguuauuuccc

SEQ ID NO: 1710972 - RNA, 18 nt, Human
aaauuucagcagcugcag

SEQ ID NO: 1710973 - RNA, 17 nt, Human
aaauuucagcagcugca

SEQ ID NO: 1710974 - RNA, 20 nt, Human
guauugacaaaauguuauuu

SEQ ID NO: 1710975 - RNA, 12 nt, Human
guaguuaucaug

SEQ ID NO: 1710976 - RNA, 13 nt, Human
guaguuaucaugu

SEQ ID NO: 1710977 - RNA, 14 nt, Human
guaguuaucauguu

SEQ ID NO: 1710978 - RNA, 16 nt, Human
guaguuaucauguuag

SEQ ID NO: 1710979 - RNA, 15 nt, Human
guaguuaucauguua

SEQ ID NO: 1710980 - RNA, 15 nt, Human
aaauccuuugugaaa

SEQ ID NO: 1710981 - RNA, 22 nt, Human
guaggaagguacuguaugauca

SEQ ID NO: 1710982 - RNA, 17 nt, Human
guaggaagguacuguau

SEQ ID NO: 1710983 - RNA, 19 nt, Human
guaggaagguacuguauga

SEQ ID NO: 1710984 - RNA, 14 nt, Human
aaaugcauuucuaa

SEQ ID NO: 1710985 - RNA, 19 nt, Human
gucuuauauauuguagaua

SEQ ID NO: 1710986 - RNA, 21 nt, Human
aacaagccuccuuuuaaagua

SEQ ID NO: 1710987 - RNA, 12 nt, Human
aacaauaccuga

SEQ ID NO: 1710988 - RNA, 21 nt, Human
aacaauaccugaaugcucugu

SEQ ID NO: 1710989 - RNA, 20 nt, Human
aacaauaccugaaugcucug

SEQ ID NO: 1710990 - RNA, 16 nt, Human
aacauacauuuuguac

SEQ ID NO: 1710991 - RNA, 19 nt, Human
aacauacauuuuguaccaa

SEQ ID NO: 1710992 - RNA, 23 nt, Human
guuauuucccuacauuaaacaug

SEQ ID NO: 1710993 - RNA, 21 nt, Human
guuauuucccuacauuaaaca

SEQ ID NO: 1710994 - RNA, 14 nt, Human
guuaguaauaccuc

SEQ ID NO: 1710995 - RNA, 20 nt, Human
guuguagagaaaacaugcag

SEQ ID NO: 1710996 - RNA, 16 nt, Human
guugcugcuucaauuu

SEQ ID NO: 1710997 - RNA, 15 nt, Human
guuggucuguacuga

SEQ ID NO: 1710998 - RNA, 16 nt, Human
guuggucuguacugau

SEQ ID NO: 1710999 - RNA, 14 nt, Human
aagguacuguauga

SEQ ID NO: 1711000 - RNA, 15 nt, Human
aagguacuguaugau

SEQ ID NO: 1711001 - RNA, 17 nt, Human
aagguacuguaugauca

SEQ ID NO: 1711002 - RNA, 19 nt, Human
aagguacuguaugaucaaa

SEQ ID NO: 1711003 - RNA, 20 nt, Human
aagguacuguaugaucaaau

SEQ ID NO: 1711004 - RNA, 21 nt, Human
aagguacuguaugaucaaaug

SEQ ID NO: 1711005 - RNA, 22 nt, Human
aagguacuguaugaucaaaugu

SEQ ID NO: 1711006 - RNA, 14 nt, Human
guguuggucuguac

SEQ ID NO: 1711007 - RNA, 19 nt, Human
aagaaugaucugauugacc

SEQ ID NO: 1711008 - RNA, 21 nt, Human
aagacaaaacauacauuuugu

SEQ ID NO: 1711009 - RNA, 12 nt, Human
guggauguuacu

SEQ ID NO: 1711010 - RNA, 18 nt, Human
aagaaguggggcagcagc

SEQ ID NO: 1711011 - RNA, 19 nt, Human
aagaaguggggcagcagca

SEQ ID NO: 1711012 - RNA, 16 nt, Human
gugccuaguauugaca

SEQ ID NO: 1711013 - RNA, 18 nt, Human
gugccuaguauugacaaa

SEQ ID NO: 1711014 - RNA, 20 nt, Human
gugccuaguauugacaaaau

SEQ ID NO: 1711015 - RNA, 14 nt, Human
gugccuaguauuga

SEQ ID NO: 1711016 - RNA, 16 nt, Human
uacauagugcuaacau

SEQ ID NO: 1711017 - RNA, 23 nt, Human
uacauagugcuaacaugaagacc

SEQ ID NO: 1711018 - RNA, 21 nt, Human
uacauagugcuaacaugaaga

SEQ ID NO: 1711019 - RNA, 22 nt, Human
uacauagugcuaacaugaagac

SEQ ID NO: 1711020 - RNA, 19 nt, Human
aauggacuuuuguacauag

SEQ ID NO: 1711021 - RNA, 14 nt, Human
uaauaguauaaacc

SEQ ID NO: 1711022 - RNA, 15 nt, Human
aaucuuccaauuuag

SEQ ID NO: 1711023 - RNA, 23 nt, Human
aaucuuccaauuuaguuguugua

SEQ ID NO: 1711024 - RNA, 12 nt, Human
uaaucauauaaa

SEQ ID NO: 1711025 - RNA, 13 nt, Human
uaaucauauaaau

SEQ ID NO: 1711026 - RNA, 17 nt, Human
uaaucauauaaauagaa

SEQ ID NO: 1711027 - RNA, 19 nt, Human
uaaucauauaaauagaaug

SEQ ID NO: 1711028 - RNA, 20 nt, Human
uaaucauauaaauagaaugu

SEQ ID NO: 1711029 - RNA, 21 nt, Human
uaaucauauaaauagaaugua

SEQ ID NO: 1711030 - RNA, 15 nt, Human
aaucaucaagucuuu

SEQ ID NO: 1711031 - RNA, 16 nt, Human
aaucuuauaauuuaaa

SEQ ID NO: 1711032 - RNA, 14 nt, Human
aaucuuauaauuua

SEQ ID NO: 1711033 - RNA, 20 nt, Human
aauccucaguuuuugugaaa

SEQ ID NO: 1711034 - RNA, 15 nt, Human
aauccuugaagguau

SEQ ID NO: 1711035 - RNA, 20 nt, Human
aauccuugaagguauaucua

SEQ ID NO: 1711036 - RNA, 18 nt, Human
aauaggcguaacuaauuu

SEQ ID NO: 1711037 - RNA, 13 nt, Human
uaagaaugaucug

SEQ ID NO: 1711038 - RNA, 16 nt, Human
uaacuaacuaaaacaa

SEQ ID NO: 1711039 - RNA, 20 nt, Human
uaacuaauacagcugagcua

SEQ ID NO: 1711040 - RNA, 20 nt, Human
uaaauagaauguaaaugucu

SEQ ID NO: 1711041 - RNA, 13 nt, Human
uaaauagaaugua

SEQ ID NO: 1711042 - RNA, 16 nt, Human
uaaauagaauguaaau

SEQ ID NO: 1711043 - RNA, 18 nt, Human
uaaauagaauguaaaugu

SEQ ID NO: 1711044 - RNA, 21 nt, Human
aauaacaaugaaaguugauaa

SEQ ID NO: 1711045 - RNA, 15 nt, Human
aauaacgauaaaaga

SEQ ID NO: 1711046 - RNA, 16 nt, Human
uagcuacuaauuuuaa

SEQ ID NO: 1711047 - RNA, 17 nt, Human
acaagcuccauuuaaac

SEQ ID NO: 1711048 - RNA, 18 nt, Human
acaagcuccauuuaaaca

SEQ ID NO: 1711049 - RNA, 22 nt, Human
acaauaaaaguguccauugaaa

SEQ ID NO: 1711050 - RNA, 22 nt, Human
uagauaggucagugcaaauacu

SEQ ID NO: 1711051 - RNA, 18 nt, Human
acaaagccacuuucaauc

SEQ ID NO: 1711052 - RNA, 15 nt, Human
uacuuaguauugcaa

SEQ ID NO: 1711053 - RNA, 20 nt, Human
uacuuaguauugcaaaguca

SEQ ID NO: 1711054 - RNA, 17 nt, Human
uacuuaguauugcaaag

SEQ ID NO: 1711055 - RNA, 16 nt, Human
aauuuaguuguuguag

SEQ ID NO: 1711056 - RNA, 18 nt, Human
aauuuauaccucaauuuu

SEQ ID NO: 1711057 - RNA, 20 nt, Human
aauuuauaccucaauuuuca

SEQ ID NO: 1711058 - RNA, 21 nt, Human
aauuuauaccucaauuuucac

SEQ ID NO: 1711059 - RNA, 22 nt, Human
uauaagggcaaauuggagaaaa

SEQ ID NO: 1711060 - RNA, 21 nt, Human
uauaagggaaguaguuaucau

SEQ ID NO: 1711061 - RNA, 24 nt, Human
uauaagggaaguaguuaucauguu

SEQ ID NO: 1711062 - RNA, 12 nt, Human
uauauuuacaaa

SEQ ID NO: 1711063 - RNA, 14 nt, Human
acagauguccauca

SEQ ID NO: 1711064 - RNA, 16 nt, Human
acagauguccaucaga

SEQ ID NO: 1711065 - RNA, 22 nt, Human
acagauguccaucagaugacaa

SEQ ID NO: 1711066 - RNA, 21 nt, Human
acagauguccaucagaugaca

SEQ ID NO: 1711067 - RNA, 21 nt, Human
uagguuuaugacaguaauugu

SEQ ID NO: 1711068 - RNA, 12 nt, Human
uaguaauaccuc

SEQ ID NO: 1711069 - RNA, 13 nt, Human
uaguaauaccucu

SEQ ID NO: 1711070 - RNA, 15 nt, Human
uaguaauaccucuaa

SEQ ID NO: 1711071 - RNA, 17 nt, Human
uagguuuaugacaguaa

SEQ ID NO: 1711072 - RNA, 19 nt, Human
uagguuuaugacaguaauu

SEQ ID NO: 1711073 - RNA, 20 nt, Human
uagguuuaugacaguaauug

SEQ ID NO: 1711074 - RNA, 14 nt, Human
uagcuuauguuaac

SEQ ID NO: 1711075 - RNA, 11 nt, Human
uaguuaucaug

SEQ ID NO: 1711076 - RNA, 12 nt, Human
uaguuaucaugu

SEQ ID NO: 1711077 - RNA, 13 nt, Human
uaguuaucauguu

SEQ ID NO: 1711078 - RNA, 14 nt, Human
uaguuaucauguua

SEQ ID NO: 1711079 - RNA, 15 nt, Human
uaguuaucauguuag

SEQ ID NO: 1711080 - RNA, 16 nt, Human
uaguuaucauguuagu

SEQ ID NO: 1711081 - RNA, 23 nt, Human
uaguuaucauguuaguaauaccu

SEQ ID NO: 1711082 - RNA, 18 nt, Human
uaguuuugucacaauuau

SEQ ID NO: 1711083 - RNA, 15 nt, Human
ucaauucuugccaaa

SEQ ID NO: 1711084 - RNA, 15 nt, Human
ucaauuuucacugug

SEQ ID NO: 1711085 - RNA, 16 nt, Human
ucaauuuucacugugu

SEQ ID NO: 1711086 - RNA, 23 nt, Human
accaauuauaagggcaaauugga

SEQ ID NO: 1711087 - RNA, 15 nt, Human
ucacuacucagcaug

SEQ ID NO: 1711088 - RNA, 14 nt, Human
ucacuacucagcau

SEQ ID NO: 1711089 - RNA, 23 nt, Human
accauuucuugagguaaaagcau

SEQ ID NO: 1711090 - RNA, 21 nt, Human
uauuuuuaucaguuacacaug

SEQ ID NO: 1711091 - RNA, 14 nt, Human
ucaaaaugcucuua

SEQ ID NO: 1711092 - RNA, 16 nt, Human
ucaaaaugcucuuauu

SEQ ID NO: 1711093 - RNA, 19 nt, Human
ucaaaaugcucuuauuuca

SEQ ID NO: 1711094 - RNA, 20 nt, Human
ucaaaaugcucuuauuucau

SEQ ID NO: 1711095 - RNA, 22 nt, Human
ucaaaaugcucuuauuucauca

SEQ ID NO: 1711096 - RNA, 21 nt, Human
ucaaaaugcucuuauuucauc

SEQ ID NO: 1711097 - RNA, 14 nt, Human
ucaaagcugaaaug

SEQ ID NO: 1711098 - RNA, 13 nt, Human
acaugaagaccuu

SEQ ID NO: 1711099 - RNA, 14 nt, Human
acaugaagaccuuu

SEQ ID NO: 1711100 - RNA, 20 nt, Human
acaugaagaccuuuuucugc

SEQ ID NO: 1711101 - RNA, 21 nt, Human
acaugaagaccuuuuucugca

SEQ ID NO: 1711102 - RNA, 19 nt, Human
ucaagggcagcuuugcuca

SEQ ID NO: 1711103 - RNA, 20 nt, Human
ucaagggcagcuuugcucau

SEQ ID NO: 1711104 - RNA, 21 nt, Human
ucaagggcagcuuugcucaua

SEQ ID NO: 1711105 - RNA, 23 nt, Human
ucaagggcagcuuugcucauauu

SEQ ID NO: 1711106 - RNA, 13 nt, Human
ucaagauucagcu

SEQ ID NO: 1711107 - RNA, 14 nt, Human
ucaagauucagcua

SEQ ID NO: 1711108 - RNA, 15 nt, Human
ucaagauucagcuag

SEQ ID NO: 1711109 - RNA, 20 nt, Human
acauagugcuaacaugaaga

SEQ ID NO: 1711110 - RNA, 14 nt, Human
acauacauuuugua

SEQ ID NO: 1711111 - RNA, 13 nt, Human
acaguugcacagc

SEQ ID NO: 1711112 - RNA, 14 nt, Human
acaguugcacagca

SEQ ID NO: 1711113 - RNA, 15 nt, Human
acaguugcacagcau

SEQ ID NO: 1711114 - RNA, 19 nt, Human
acaguugcacagcaucuca

SEQ ID NO: 1711115 - RNA, 20 nt, Human
acaguugcacagcaucucag

SEQ ID NO: 1711116 - RNA, 23 nt, Human
acaguugcacagcaucucagcuc

SEQ ID NO: 1711117 - RNA, 13 nt, Human
uauuuccacuucu

SEQ ID NO: 1711118 - RNA, 15 nt, Human
uauuuccuaugaugu

SEQ ID NO: 1711119 - RNA, 16 nt, Human
uauuuccuaugaugua

SEQ ID NO: 1711120 - RNA, 17 nt, Human
uauuuccuaugauguau

SEQ ID NO: 1711121 - RNA, 17 nt, Human
uauuucccuacauuaaa

SEQ ID NO: 1711122 - RNA, 22 nt, Human
uauuucccuacauuaaacauga

SEQ ID NO: 1711123 - RNA, 21 nt, Human
uauuucccaugauuucaugua

SEQ ID NO: 1711124 - RNA, 15 nt, Human
uauuucccaugauuu

SEQ ID NO: 1711125 - RNA, 16 nt, Human
uauuucccaugauuuc

SEQ ID NO: 1711126 - RNA, 18 nt, Human
uauuucccaugauuucau

SEQ ID NO: 1711127 - RNA, 15 nt, Human
uauuucccuacauua

SEQ ID NO: 1711128 - RNA, 16 nt, Human
uauuucccuacauuaa

SEQ ID NO: 1711129 - RNA, 14 nt, Human
acgagaaaacaaua

SEQ ID NO: 1711130 - RNA, 21 nt, Human
acgagaaccugaaggggaagg

SEQ ID NO: 1711131 - RNA, 17 nt, Human
acuacucagcauggaaa

SEQ ID NO: 1711132 - RNA, 12 nt, Human
acuacucagcau

SEQ ID NO: 1711133 - RNA, 13 nt, Human
acuacucagcaug

SEQ ID NO: 1711134 - RNA, 17 nt, Human
ucuaccaaccuguucaa

SEQ ID NO: 1711135 - RNA, 20 nt, Human
ucuaaagccauuguaguccu

SEQ ID NO: 1711136 - RNA, 16 nt, Human
acuuaguauugcaaag

SEQ ID NO: 1711137 - RNA, 19 nt, Human
acuuaguauugcaaaguca

SEQ ID NO: 1711138 - RNA, 20 nt, Human
acuuaguauugcaaagucag

SEQ ID NO: 1711139 - RNA, 21 nt, Human
acuguguccaggugguacuuu

SEQ ID NO: 1711140 - RNA, 13 nt, Human
acugugcuguugu

SEQ ID NO: 1711141 - RNA, 14 nt, Human
acugugcuguuguu

SEQ ID NO: 1711142 - RNA, 18 nt, Human
acugugcuguuguuauga

SEQ ID NO: 1711143 - RNA, 23 nt, Human
acugugcuguuguuaugaugugc

SEQ ID NO: 1711144 - RNA, 22 nt, Human
acugugcuguuguuaugaugug

SEQ ID NO: 1711145 - RNA, 22 nt, Human
ucgggcagcacaaguguaauga

SEQ ID NO: 1711146 - RNA, 21 nt, Human
ucgggcagcacaaguguaaug

SEQ ID NO: 1711147 - RNA, 17 nt, Human
acugcauuauuugagaa

SEQ ID NO: 1711148 - RNA, 14 nt, Human
acugcauuauuuga

SEQ ID NO: 1711149 - RNA, 15 nt, Human
ucgacuguuguuauc

SEQ ID NO: 1711150 - RNA, 14 nt, Human
ucgacuguuguuau

SEQ ID NO: 1711151 - RNA, 17 nt, Human
ucgacuguuguuaucug

SEQ ID NO: 1711152 - RNA, 17 nt, Human
acuucguuuaaugaaug

SEQ ID NO: 1711153 - RNA, 20 nt, Human
acuucguuuaaugaaugcuu

SEQ ID NO: 1711154 - RNA, 18 nt, Human
acuucguuuaaugaaugc

SEQ ID NO: 1711155 - RNA, 16 nt, Human
ucuauuucauaccaug

SEQ ID NO: 1711156 - RNA, 16 nt, Human
ucucagcucaucuuca

SEQ ID NO: 1711157 - RNA, 20 nt, Human
ucucagcucaucuucacugc

SEQ ID NO: 1711158 - RNA, 15 nt, Human
ucuguacugauucaa

SEQ ID NO: 1711159 - RNA, 16 nt, Human
ucuguacugauucaau

SEQ ID NO: 1711160 - RNA, 17 nt, Human
ucuguacugauucaauu

SEQ ID NO: 1711161 - RNA, 23 nt, Human
ucuguacugauucaauuugaugu

SEQ ID NO: 1711162 - RNA, 19 nt, Human
ucuuaauguacauagugcu

SEQ ID NO: 1711163 - RNA, 13 nt, Human
ucuuaauguacau

SEQ ID NO: 1711164 - RNA, 14 nt, Human
ucuuaauguacaua

SEQ ID NO: 1711165 - RNA, 18 nt, Human
agacuuacagcaaauccu

SEQ ID NO: 1711166 - RNA, 20 nt, Human
agacuuacagcaaauccuuu

SEQ ID NO: 1711167 - RNA, 15 nt, Human
agacuuacagcaaau

SEQ ID NO: 1711168 - RNA, 16 nt, Human
ucuucuuaauguacau

SEQ ID NO: 1711169 - RNA, 24 nt, Human
ucuucuuaauguacauagugcuaa

SEQ ID NO: 1711170 - RNA, 17 nt, Human
ucuucuuaauguacaua

SEQ ID NO: 1711171 - RNA, 18 nt, Human
ucuugaguuuuucaggua

SEQ ID NO: 1711172 - RNA, 15 nt, Human
ugaaauuguauuaca

SEQ ID NO: 1711173 - RNA, 18 nt, Human
agcagguugauaaaucau

SEQ ID NO: 1711174 - RNA, 15 nt, Human
agcauuuucugcauc

SEQ ID NO: 1711175 - RNA, 18 nt, Human
agcauuuucugcaucucc

SEQ ID NO: 1711176 - RNA, 19 nt, Human
agcauuuucugcaucucca

SEQ ID NO: 1711177 - RNA, 20 nt, Human
agcauuuucugcaucuccac

SEQ ID NO: 1711178 - RNA, 18 nt, Human
ugcaaagucaggaaucau

SEQ ID NO: 1711179 - RNA, 17 nt, Human
ugcaaagucaggaauca

SEQ ID NO: 1711180 - RNA, 20 nt, Human
ugcaguaucggcacuguaca

SEQ ID NO: 1711181 - RNA, 21 nt, Human
ugcaguaucggcacuguacaa

SEQ ID NO: 1711182 - RNA, 14 nt, Human
uggaguugaaaauc

SEQ ID NO: 1711183 - RNA, 20 nt, Human
uggauuggacaaaaugacuu

SEQ ID NO: 1711184 - RNA, 13 nt, Human
uggauuggacaaa

SEQ ID NO: 1711185 - RNA, 15 nt, Human
uggauuggacaaaau

SEQ ID NO: 1711186 - RNA, 19 nt, Human
uggauuggacaaaaugacu

SEQ ID NO: 1711187 - RNA, 13 nt, Human
ugcucaacuugca

SEQ ID NO: 1711188 - RNA, 16 nt, Human
ugcucaacuugcaaaa

SEQ ID NO: 1711189 - RNA, 20 nt, Human
ugcucaacuugcaaaaucag

SEQ ID NO: 1711190 - RNA, 17 nt, Human
ugcucaacuugcaaaau

SEQ ID NO: 1711191 - RNA, 13 nt, Human
ugcucuuauuuca

SEQ ID NO: 1711192 - RNA, 14 nt, Human
ugcucuuauuucau

SEQ ID NO: 1711193 - RNA, 13 nt, Human
agcuuugcucaua

SEQ ID NO: 1711194 - RNA, 19 nt, Human
agcuuugcucauauuuccc

SEQ ID NO: 1711195 - RNA, 20 nt, Human
agcuuugcucauauuuccca

SEQ ID NO: 1711196 - RNA, 21 nt, Human
agcuuugcucauauuucccau

SEQ ID NO: 1711197 - RNA, 24 nt, Human
uggugccuaguauugacaaaaugu

SEQ ID NO: 1711198 - RNA, 15 nt, Human
uggugccuaguauug

SEQ ID NO: 1711199 - RNA, 19 nt, Human
uggugccuaguauugacaa

SEQ ID NO: 1711200 - RNA, 22 nt, Human
uggugccuaguauugacaaaau

SEQ ID NO: 1711201 - RNA, 12 nt, Human
aguauugacaaa

SEQ ID NO: 1711202 - RNA, 13 nt, Human
aguauugacaaaa

SEQ ID NO: 1711203 - RNA, 14 nt, Human
aguauugacaaaau

SEQ ID NO: 1711204 - RNA, 15 nt, Human
aguauugacaaaaug

SEQ ID NO: 1711205 - RNA, 16 nt, Human
aguauugacaaaaugu

SEQ ID NO: 1711206 - RNA, 17 nt, Human
aguauugacaaaauguu

SEQ ID NO: 1711207 - RNA, 18 nt, Human
aguauugacaaaauguua

SEQ ID NO: 1711208 - RNA, 19 nt, Human
aguauugacaaaauguuau

SEQ ID NO: 1711209 - RNA, 20 nt, Human
aguauugacaaaauguuauu

SEQ ID NO: 1711210 - RNA, 23 nt, Human
ugucaagggcagcuuugcucaua

SEQ ID NO: 1711211 - RNA, 13 nt, Human
uguaucaaaaugc

SEQ ID NO: 1711212 - RNA, 14 nt, Human
uguaucaaaaugcu

SEQ ID NO: 1711213 - RNA, 15 nt, Human
uguaucaaaaugcuc

SEQ ID NO: 1711214 - RNA, 18 nt, Human
uguaucaaaaugcucuua

SEQ ID NO: 1711215 - RNA, 23 nt, Human
uguaucaaaaugcucuuauuuca

SEQ ID NO: 1711216 - RNA, 13 nt, Human
uguauuacaaauc

SEQ ID NO: 1711217 - RNA, 22 nt, Human
uguauuacaaauccaaugaaau

SEQ ID NO: 1711218 - RNA, 21 nt, Human
ugucaagggcagcuuugcuca

SEQ ID NO: 1711219 - RNA, 22 nt, Human
ugucaagggcagcuuugcucau

SEQ ID NO: 1711220 - RNA, 13 nt, Human
aguaaaauccaca

SEQ ID NO: 1711221 - RNA, 12 nt, Human
agguuuaugaca

SEQ ID NO: 1711222 - RNA, 16 nt, Human
agguuuaugacaguaa

SEQ ID NO: 1711223 - RNA, 14 nt, Human
agguuuaugacagu

SEQ ID NO: 1711224 - RNA, 18 nt, Human
agggaacgugauuaguga

SEQ ID NO: 1711225 - RNA, 15 nt, Human
agggaaguaguuauc

SEQ ID NO: 1711226 - RNA, 17 nt, Human
agggaaguaguuaucau

SEQ ID NO: 1711227 - RNA, 20 nt, Human
agggaaguaguuaucauguu

SEQ ID NO: 1711228 - RNA, 17 nt, Human
agggcagcuuugcucau

SEQ ID NO: 1711229 - RNA, 16 nt, Human
agggcagcuuugcuca

SEQ ID NO: 1711230 - RNA, 18 nt, Human
aggguaacuaacuaaaac

SEQ ID NO: 1711231 - RNA, 12 nt, Human
auaaaauuauag

SEQ ID NO: 1711232 - RNA, 17 nt, Human
auaaaauuauagcucua

SEQ ID NO: 1711233 - RNA, 21 nt, Human
auaaaauuauagcucuaaugu

SEQ ID NO: 1711234 - RNA, 19 nt, Human
auaaaauuauagcucuaau

SEQ ID NO: 1711235 - RNA, 14 nt, Human
auaaauagaaugua

SEQ ID NO: 1711236 - RNA, 16 nt, Human
auaaauagaauguaaa

SEQ ID NO: 1711237 - RNA, 20 nt, Human
auaaauagaauguaaauguc

SEQ ID NO: 1711238 - RNA, 19 nt, Human
auaaauagaauguaaaugu

SEQ ID NO: 1711239 - RNA, 15 nt, Human
aguucuucgacuguu

SEQ ID NO: 1711240 - RNA, 17 nt, Human
aguucuucgacuguugu

SEQ ID NO: 1711241 - RNA, 18 nt, Human
aguucuucgacuguuguu

SEQ ID NO: 1711242 - RNA, 19 nt, Human
aguucuucgacuguuguua

SEQ ID NO: 1711243 - RNA, 18 nt, Human
uuaaaaaccuguucaagu

SEQ ID NO: 1711244 - RNA, 21 nt, Human
uuaaaaaccuguucaagucua

SEQ ID NO: 1711245 - RNA, 15 nt, Human
uguggguuuuuauuu

SEQ ID NO: 1711246 - RNA, 15 nt, Human
agugaaagaaaauaa

SEQ ID NO: 1711247 - RNA, 20 nt, Human
agugaaaggaagauaaacgu

SEQ ID NO: 1711248 - RNA, 17 nt, Human
auauuaagaaugaucug

SEQ ID NO: 1711249 - RNA, 13 nt, Human
auauuaagaauga

SEQ ID NO: 1711250 - RNA, 14 nt, Human
auauuaagaaugau

SEQ ID NO: 1711251 - RNA, 18 nt, Human
auauugcugaaugcaaga

SEQ ID NO: 1711252 - RNA, 12 nt, Human
aucagaugacaa

SEQ ID NO: 1711253 - RNA, 21 nt, Human
aucauucacuucacugugcug

SEQ ID NO: 1711254 - RNA, 17 nt, Human
aucauucacuucacugu

SEQ ID NO: 1711255 - RNA, 19 nt, Human
aucauucacuucacugugc

SEQ ID NO: 1711256 - RNA, 22 nt, Human
aucauucacuucacugugcugu

SEQ ID NO: 1711257 - RNA, 16 nt, Human
uucugcaucuccacuu

SEQ ID NO: 1711258 - RNA, 19 nt, Human
aucccuggcugggauccac

SEQ ID NO: 1711259 - RNA, 19 nt, Human
uuauuucccuacauuaaac

SEQ ID NO: 1711260 - RNA, 22 nt, Human
uuauuucccuacauuaaacaug

SEQ ID NO: 1711261 - RNA, 18 nt, Human
auagcuacuaauuuuaaa

SEQ ID NO: 1711262 - RNA, 19 nt, Human
auagcucuaauguuugcau

SEQ ID NO: 1711263 - RNA, 20 nt, Human
auagcucuaauguuugcaua

SEQ ID NO: 1711264 - RNA, 21 nt, Human
auagcucuaauguuugcauau

SEQ ID NO: 1711265 - RNA, 22 nt, Human
auagcucuaauguuugcauaua

SEQ ID NO: 1711266 - RNA, 15 nt, Human
auagcucuaauguuu

SEQ ID NO: 1711267 - RNA, 16 nt, Human
auagcucuaauguuug

SEQ ID NO: 1711268 - RNA, 17 nt, Human
auagcucuaauguuugc

SEQ ID NO: 1711269 - RNA, 18 nt, Human
auagcucuaauguuugca

SEQ ID NO: 1711270 - RNA, 17 nt, Human
auagcuacuaauuuuaa

SEQ ID NO: 1711271 - RNA, 14 nt, Human
auagcuacuaauuu

SEQ ID NO: 1711272 - RNA, 11 nt, Human
uuauuuccuau

SEQ ID NO: 1711273 - RNA, 17 nt, Human
uuauuuccuaugaugua

SEQ ID NO: 1711274 - RNA, 22 nt, Human
uuauuuccuaugauguauacug

SEQ ID NO: 1711275 - RNA, 20 nt, Human
uuauuuccuaugauguauac

SEQ ID NO: 1711276 - RNA, 14 nt, Human
auauaagggaagua

SEQ ID NO: 1711277 - RNA, 22 nt, Human
auauaagggaaguaguuaucau

SEQ ID NO: 1711278 - RNA, 23 nt, Human
auauaagggaaguaguuaucaug

SEQ ID NO: 1711279 - RNA, 19 nt, Human
auauauacucaagaguggu

SEQ ID NO: 1711280 - RNA, 20 nt, Human
uucaucauucacuucacugu

SEQ ID NO: 1711281 - RNA, 19 nt, Human
uucaucauucacuucacug

SEQ ID NO: 1711282 - RNA, 16 nt, Human
auaucuagguuuauga

SEQ ID NO: 1711283 - RNA, 15 nt, Human
aucuuauaauuuaaa

SEQ ID NO: 1711284 - RNA, 16 nt, Human
aucuuauaauuuaaaa

SEQ ID NO: 1711285 - RNA, 23 nt, Human
uuuagugacuaaaccauugugca

SEQ ID NO: 1711286 - RNA, 12 nt, Human
uuuagugacuaa

SEQ ID NO: 1711287 - RNA, 18 nt, Human
augcuacaggauuugaaa

SEQ ID NO: 1711288 - RNA, 18 nt, Human
augcuuaaagaauucaaa

SEQ ID NO: 1711289 - RNA, 19 nt, Human
augcuuaaagaauucaaau

SEQ ID NO: 1711290 - RNA, 21 nt, Human
augcuuaaagaauucaaauuu

SEQ ID NO: 1711291 - RNA, 20 nt, Human
augcuuaaagaauucaaauu

SEQ ID NO: 1711292 - RNA, 16 nt, Human
uuucacuacucagcau

SEQ ID NO: 1711293 - RNA, 11 nt, Human
uuucauguacu

SEQ ID NO: 1711294 - RNA, 12 nt, Human
uuucauguacug

SEQ ID NO: 1711295 - RNA, 24 nt, Human
uuucaucauucacuucacugugcu

SEQ ID NO: 1711296 - RNA, 21 nt, Human
uuuaaauauaugcuaagucuu

SEQ ID NO: 1711297 - RNA, 18 nt, Human
uuuaaaaaaauuccaagu

SEQ ID NO: 1711298 - RNA, 15 nt, Human
augcagaacaaauga

SEQ ID NO: 1711299 - RNA, 18 nt, Human
augcagaacaaaugaaga

SEQ ID NO: 1711300 - RNA, 19 nt, Human
augcagaacaaaugaagac

SEQ ID NO: 1711301 - RNA, 18 nt, Human
auuugagaagcugcucaa

SEQ ID NO: 1711302 - RNA, 20 nt, Human
auuugagaagcugcucaacu

SEQ ID NO: 1711303 - RNA, 20 nt, Human
auuugauguggugaaaagca

SEQ ID NO: 1711304 - RNA, 20 nt, Human
auuuggaucucuucuuaaug

SEQ ID NO: 1711305 - RNA, 12 nt, Human
auuucauguacu

SEQ ID NO: 1711306 - RNA, 16 nt, Human
auuucauguacugcau

SEQ ID NO: 1711307 - RNA, 21 nt, Human
auuucauguacugcauuauuu

SEQ ID NO: 1711308 - RNA, 20 nt, Human
auuucauguacugcauuauu

SEQ ID NO: 1711309 - RNA, 14 nt, Human
auuuccuaugaugu

SEQ ID NO: 1711310 - RNA, 15 nt, Human
auuuccuaugaugua

SEQ ID NO: 1711311 - RNA, 16 nt, Human
auuuccuaugauguau

SEQ ID NO: 1711312 - RNA, 21 nt, Human
auuuccuaugauguauacugc

SEQ ID NO: 1711313 - RNA, 20 nt, Human
auuuccuaugauguauacug

SEQ ID NO: 1711314 - RNA, 16 nt, Human
auuguaguccuguaau

SEQ ID NO: 1711315 - RNA, 15 nt, Human
auuuaguuguuguag

SEQ ID NO: 1711316 - RNA, 18 nt, Human
auuuaguuguuguagaga

SEQ ID NO: 1711317 - RNA, 19 nt, Human
auuuaguuguuguagagaa

SEQ ID NO: 1711318 - RNA, 20 nt, Human
auuuaguuguuguagagaaa

SEQ ID NO: 1711319 - RNA, 16 nt, Human
auugacaaaauguuau

SEQ ID NO: 1711320 - RNA, 17 nt, Human
auugacaaaauguuauu

SEQ ID NO: 1711321 - RNA, 22 nt, Human
auugacaaaauguuauuucccu

SEQ ID NO: 1711322 - RNA, 19 nt, Human
auugacaaaauguuauuuc

SEQ ID NO: 1711323 - RNA, 13 nt, Human
auugacaaaaugu

SEQ ID NO: 1711324 - RNA, 14 nt, Human
auugacaaaauguu

SEQ ID NO: 1711325 - RNA, 15 nt, Human
auugacaaaauguua

SEQ ID NO: 1711326 - RNA, 19 nt, Human
uuuuuauuuccuaugaugu

SEQ ID NO: 1711327 - RNA, 15 nt, Human
uuuuugaagcuguau

SEQ ID NO: 1711328 - RNA, 14 nt, Human
auuaaacaugacuc

SEQ ID NO: 1711329 - RNA, 18 nt, Human
auucacuucacugugcug

SEQ ID NO: 1711330 - RNA, 20 nt, Human
auucacuucacugugcuguu

SEQ ID NO: 1711331 - RNA, 15 nt, Human
auucacuucacugug

SEQ ID NO: 1711332 - RNA, 16 nt, Human
auucacuucacugugc

SEQ ID NO: 1711333 - RNA, 17 nt, Human
auucacuucacugugcu

SEQ ID NO: 1711334 - RNA, 23 nt, Human
auucacuucacugugcuguuguu

SEQ ID NO: 1711335 - RNA, 17 nt, Human
auuccaagugauugaaa

SEQ ID NO: 1711336 - RNA, 20 nt, Human
auuauauggcuugaguuuaa

SEQ ID NO: 1711337 - RNA, 13 nt, Human
uuugagaaaguca

SEQ ID NO: 1711338 - RNA, 22 nt, Human
uuuggauuggacaaaaugacuu

SEQ ID NO: 1711339 - RNA, 15 nt, Human
auguauacugccacu

SEQ ID NO: 1711340 - RNA, 21 nt, Human
auguauacugccacuaaccuu

SEQ ID NO: 1711341 - RNA, 23 nt, Human
augucgucaaagcugaaauggac

SEQ ID NO: 1711342 - RNA, 17 nt, Human
auguuuaaucauauaaa

SEQ ID NO: 1711343 - RNA, 16 nt, Human
auguuuaaucauauaa

SEQ ID NO: 1711344 - RNA, 14 nt, Human
auguuuaaucauau

SEQ ID NO: 1711345 - RNA, 15 nt, Human
auguuuaaucauaua

SEQ ID NO: 1711346 - RNA, 12 nt, Human
uuuucugcacua

SEQ ID NO: 1711347 - RNA, 13 nt, Human
uuuucugcacuau

SEQ ID NO: 1711348 - RNA, 19 nt, Human
uuuucugcacuauaugcaa

SEQ ID NO: 1711349 - RNA, 18 nt, Human
uuuuaguuccugugcaca

SEQ ID NO: 1711350 - RNA, 20 nt, Human
uuuuaguuccugugcacagc

SEQ ID NO: 1711351 - RNA, 16 nt, Human
uuuucuauaauuuaaa

SEQ ID NO: 1711352 - RNA, 12 nt, Human
uuuucuagugua

SEQ ID NO: 1711353 - RNA, 13 nt, Human
uuuucuaguguau

SEQ ID NO: 1711354 - RNA, 17 nt, Human
uuuucuaguguaucaaa

SEQ ID NO: 1711355 - RNA, 22 nt, Human
uuuucuaguguaucaaaaugcu

SEQ ID NO: 1711356 - RNA, 20 nt, Human
uuuucuaguguaucaaaaug

SEQ ID NO: 1711357 - RNA, 16 nt, Human
augugcuuaacaggga

SEQ ID NO: 1711358 - RNA, 21 nt, Human
augugcuuaacagggaacgug

SEQ ID NO: 1711359 - RNA, 23 nt, Human
auguuaacugacaagcuccauuu

SEQ ID NO: 1711360 - RNA, 12 nt, Human
auguuauuuccc

SEQ ID NO: 1711361 - RNA, 15 nt, Human
cacccuggauuugca

SEQ ID NO: 1711362 - RNA, 13 nt, Human
caagaucccauuu

SEQ ID NO: 1711363 - RNA, 15 nt, Human
caagaucccauuuga

SEQ ID NO: 1711364 - RNA, 18 nt, Human
caagaugaaauuccauuu

SEQ ID NO: 1711365 - RNA, 20 nt, Human
caagaugaaauuccauuugu

SEQ ID NO: 1711366 - RNA, 19 nt, Human
caaacauccucuuccauau

SEQ ID NO: 1711367 - RNA, 20 nt, Human
auuuuuaucaguuacacaug

SEQ ID NO: 1711368 - RNA, 19 nt, Human
auuuucuauaauuuaaaua

SEQ ID NO: 1711369 - RNA, 18 nt, Human
auuuucuauaauuuaaau

SEQ ID NO: 1711370 - RNA, 17 nt, Human
auuuucuauaauuuaaa

SEQ ID NO: 1711371 - RNA, 19 nt, Human
auuuucugcaucuccacuu

SEQ ID NO: 1711372 - RNA, 15 nt, Human
auuuucugcaucucc

SEQ ID NO: 1711373 - RNA, 16 nt, Human
auuuucugcaucucca

SEQ ID NO: 1711374 - RNA, 13 nt, Human
auuuguucauauu

SEQ ID NO: 1711375 - RNA, 18 nt, Human
auuagauaaauguccauu

SEQ ID NO: 1711376 - RNA, 13 nt, Human
auucauaugcaua

SEQ ID NO: 1711377 - RNA, 14 nt, Human
auucauaugcauau

SEQ ID NO: 1711378 - RNA, 15 nt, Human
auucauaugcauauu

SEQ ID NO: 1711379 - RNA, 18 nt, Human
auucauaugcauauuuuu

SEQ ID NO: 1711380 - RNA, 16 nt, Human
auucauaugcauauuu

SEQ ID NO: 1711381 - RNA, 16 nt, Human
cauagguuuaauaauu

SEQ ID NO: 1711382 - RNA, 20 nt, Human
cauccucuuccauauggauc

SEQ ID NO: 1711383 - RNA, 22 nt, Human
caguuauuauauuuacaaaugg

SEQ ID NO: 1711384 - RNA, 21 nt, Human
caguuauuauauuuacaaaug

SEQ ID NO: 1711385 - RNA, 17 nt, Human
caguuauuauauuuaca

SEQ ID NO: 1711386 - RNA, 13 nt, Human
cauuuguagguag

SEQ ID NO: 1711387 - RNA, 13 nt, Human
cauuuguucauau

SEQ ID NO: 1711388 - RNA, 14 nt, Human
cauuuguucauauu

SEQ ID NO: 1711389 - RNA, 18 nt, Human
cauuuguucauauuaaga

SEQ ID NO: 1711390 - RNA, 19 nt, Human
cauuuguucauauuaagaa

SEQ ID NO: 1711391 - RNA, 20 nt, Human
cauuuguucauauuaagaau

SEQ ID NO: 1711392 - RNA, 24 nt, Human
ccacuuucaaucuucaauccuuga

SEQ ID NO: 1711393 - RNA, 12 nt, Human
ccacuuggcauu

SEQ ID NO: 1711394 - RNA, 12 nt, Human
ccauugugcauu

SEQ ID NO: 1711395 - RNA, 17 nt, Human
ccauugugcauucuaga

SEQ ID NO: 1711396 - RNA, 20 nt, Human
ccauuuaaacagauguccau

SEQ ID NO: 1711397 - RNA, 13 nt, Human
cuaacuaaaacaa

SEQ ID NO: 1711398 - RNA, 20 nt, Human
cuaacuaaaacaaagccacu

SEQ ID NO: 1711399 - RNA, 17 nt, Human
cuaagucaacuuagcau

SEQ ID NO: 1711400 - RNA, 15 nt, Human
ccuuagugcaguuau

SEQ ID NO: 1711401 - RNA, 20 nt, Human
ccuuagugcaguuauuugcu

SEQ ID NO: 1711402 - RNA, 15 nt, Human
gcucuuauuucauca

SEQ ID NO: 1711403 - RNA, 13 nt, Human
gcucuuauuucau

SEQ ID NO: 1711404 - RNA, 14 nt, Human
gcucuuauuucauc

SEQ ID NO: 1711405 - RNA, 19 nt, Human
gcucuaauguuugcauaua

SEQ ID NO: 1711406 - RNA, 15 nt, Human
gcucuaauguuugca

SEQ ID NO: 1711407 - RNA, 16 nt, Human
gcucuaauguuugcau

SEQ ID NO: 1711408 - RNA, 17 nt, Human
gcucuaauguuugcaua

SEQ ID NO: 1711409 - RNA, 18 nt, Human
gcucuaauguuugcauau

SEQ ID NO: 1711410 - RNA, 19 nt, Human
gcuuaacagggaacgugau

SEQ ID NO: 1711411 - RNA, 15 nt, Human
gcuucaauuuauacc

SEQ ID NO: 1711412 - RNA, 18 nt, Human
gcuuaaagaauucaaauu

SEQ ID NO: 1711413 - RNA, 15 nt, Human
aaagaauucaaauuu

SEQ ID NO: 1711414 - RNA, 16 nt, Human
aaagaauucaaauuuu

SEQ ID NO: 1711415 - RNA, 13 nt, Human
aaaggaauuuaaa

SEQ ID NO: 1711416 - RNA, 22 nt, Human
aaaagcuccauuuuuagugaaa

SEQ ID NO: 1711417 - RNA, 16 nt, Human
aaaaauuacuuaguau

SEQ ID NO: 1711418 - RNA, 17 nt, Human
aaaaaucuuccaauuua

SEQ ID NO: 1711419 - RNA, 21 nt, Human
gacuguuguuaucuguuugag

SEQ ID NO: 1711420 - RNA, 14 nt, Human
gacuguuguuaucu

SEQ ID NO: 1711421 - RNA, 19 nt, Human
gacuguuguuaucuguuug

SEQ ID NO: 1711422 - RNA, 20 nt, Human
gacuguuguuaucuguuuga

SEQ ID NO: 1711423 - RNA, 16 nt, Human
gacauuccuugcugaa

SEQ ID NO: 1711424 - RNA, 23 nt, Human
gaacccuuaaacaguugcacagc

SEQ ID NO: 1711425 - RNA, 19 nt, Human
gaagacaaaacauacauuu

SEQ ID NO: 1711426 - RNA, 23 nt, Human
gaagacaaaacauacauuuugua

SEQ ID NO: 1711427 - RNA, 16 nt, Human
gaguuuaaauuguaau

SEQ ID NO: 1711428 - RNA, 14 nt, Human
gcacaaguguaaug

SEQ ID NO: 1711429 - RNA, 17 nt, Human
gcacaaguguaaugaau

SEQ ID NO: 1711430 - RNA, 19 nt, Human
gcacaaguguaaugaauac

SEQ ID NO: 1711431 - RNA, 21 nt, Human
gcacaaguguaaugaauaccu

SEQ ID NO: 1711432 - RNA, 23 nt, Human
cuuaaagaauucaaauuuuaucu

SEQ ID NO: 1711433 - RNA, 18 nt, Human
cuuacagcaaauccuuug

SEQ ID NO: 1711434 - RNA, 16 nt, Human
cuuacagcaaauccuu

SEQ ID NO: 1711435 - RNA, 14 nt, Human
cuucacugugcugu

SEQ ID NO: 1711436 - RNA, 13 nt, Human
cuucacugugcug

SEQ ID NO: 1711437 - RNA, 14 nt, Human
cugcacuauaugca

SEQ ID NO: 1711438 - RNA, 22 nt, Human
cauuuuguaccaaccauccaau

SEQ ID NO: 1711439 - RNA, 12 nt, Human
cauuuuguacca

SEQ ID NO: 1711440 - RNA, 16 nt, Human
cauugugcauucuaga

SEQ ID NO: 1711441 - RNA, 20 nt, Human
ccaaacauccucuuccauau

SEQ ID NO: 1711442 - RNA, 17 nt, Human
ccacacgagaaccugaa

SEQ ID NO: 1711443 - RNA, 14 nt, Human
ccaguaauccugua

SEQ ID NO: 1711444 - RNA, 12 nt, Human
ccaucagaugac

SEQ ID NO: 1711445 - RNA, 15 nt, Human
ccaugauuucaugua

SEQ ID NO: 1711446 - RNA, 18 nt, Human
ccaugauuucauguacug

SEQ ID NO: 1711447 - RNA, 21 nt, Human
ccaugauuucauguacugcau

SEQ ID NO: 1711448 - RNA, 22 nt, Human
ccaugauuucauguacugcauu

SEQ ID NO: 1711449 - RNA, 20 nt, Human
cccaaaauuagccaguaauc

SEQ ID NO: 1711450 - RNA, 18 nt, Human
cguuuagcugacaaaaua

SEQ ID NO: 1711451 - RNA, 16 nt, Human
cguuuagcugacaaaa

SEQ ID NO: 1711452 - RNA, 20 nt, Human
ccuguaggaagguacuguau

SEQ ID NO: 1711453 - RNA, 12 nt, Human
ccugugcacagc

SEQ ID NO: 1711454 - RNA, 13 nt, Human
ccugugcacagcc

SEQ ID NO: 1711455 - RNA, 16 nt, Human
ccugaaugcucuguag

SEQ ID NO: 1711456 - RNA, 15 nt, Human
ccugaaugcucugua

SEQ ID NO: 1711457 - RNA, 16 nt, Human
ccucaauuuucacugu

SEQ ID NO: 1711458 - RNA, 17 nt, Human
ccucaauuuucacugug

SEQ ID NO: 1711459 - RNA, 23 nt, Human
cugauugaccguguuggucugua

SEQ ID NO: 1711460 - RNA, 17 nt, Human
cugcaccaguugcugcu

SEQ ID NO: 1711461 - RNA, 17 nt, Human
cugauucaauuugaugu

SEQ ID NO: 1711462 - RNA, 16 nt, Human
cugauucaauuugaug

SEQ ID NO: 1711463 - RNA, 23 nt, Human
cuggaauaauccuaaacauauga

SEQ ID NO: 1711464 - RNA, 17 nt, Human
cucgaggucgggcagca

SEQ ID NO: 1711465 - RNA, 21 nt, Human
cucgaggucgggcagcacaag

SEQ ID NO: 1711466 - RNA, 12 nt, Human
cucauauuuccc

SEQ ID NO: 1711467 - RNA, 18 nt, Human
cucauucccuccccagaa

SEQ ID NO: 1711468 - RNA, 15 nt, Human
cucuaauguuugcau

SEQ ID NO: 1711469 - RNA, 17 nt, Human
cucuaauguuugcauau

SEQ ID NO: 1711470 - RNA, 18 nt, Human
cucuaauguuugcauaua

SEQ ID NO: 1711471 - RNA, 21 nt, Human
cugaaguaaaacaaacaauac

SEQ ID NO: 1711472 - RNA, 18 nt, Human
cugacauuccuugcugaa

SEQ ID NO: 1711473 - RNA, 16 nt, Human
cugacauuccuugcug

SEQ ID NO: 1711474 - RNA, 16 nt, Human
cuguuuuaaaaaccug

SEQ ID NO: 1711475 - RNA, 16 nt, Human
cuguuuauucauaugc

SEQ ID NO: 1711476 - RNA, 17 nt, Human
cuguuuauucauaugca

SEQ ID NO: 1711477 - RNA, 20 nt, Human
cuguuuauucauaugcauau

SEQ ID NO: 1711478 - RNA, 13 nt, Human
cuuaauguacaua

SEQ ID NO: 1711479 - RNA, 15 nt, Human
cuuaauguacauagu

SEQ ID NO: 1711480 - RNA, 14 nt, Human
cuuauaauuuaaaa

SEQ ID NO: 1711481 - RNA, 13 nt, Human
cuuauaauuuaaa

SEQ ID NO: 1711482 - RNA, 14 nt, Human
cuuauauuguucac

SEQ ID NO: 1711483 - RNA, 16 nt, Human
cuuauauuguucacuu

SEQ ID NO: 1711484 - RNA, 23 nt, Human
cuucgacuguuguuaucuguuug

SEQ ID NO: 1711485 - RNA, 15 nt, Human
cuucguuuaaugaau

SEQ ID NO: 1711486 - RNA, 14 nt, Human
cuucgacuguuguu

SEQ ID NO: 1711487 - RNA, 22 nt, Human
cuucgacuguuguuaucuguuu

SEQ ID NO: 1711488 - RNA, 19 nt, Human
gaaaauaacaauaaaagac

SEQ ID NO: 1711489 - RNA, 20 nt, Human
cuugcuugauuguauggugg

SEQ ID NO: 1711490 - RNA, 22 nt, Human
cuugcugaaacgcaucuaguuc

SEQ ID NO: 1711491 - RNA, 21 nt, Human
cuugcugaaacgcaucuaguu

SEQ ID NO: 1711492 - RNA, 18 nt, Human
gacuuacagcaaauccuu

SEQ ID NO: 1711493 - RNA, 18 nt, Human
gacuaaaccauugugcau

SEQ ID NO: 1711494 - RNA, 19 nt, Human
gacuaaaccauugugcauu

SEQ ID NO: 1711495 - RNA, 22 nt, Human
gacuaaaccauugugcauucua

SEQ ID NO: 1711496 - RNA, 18 nt, Human
gaaauuguauuacaaauc

SEQ ID NO: 1711497 - RNA, 16 nt, Human
gaaauuguauuacaaa

SEQ ID NO: 1711498 - RNA, 23 nt, Human
gaacguuuagcugacaaaauacu

SEQ ID NO: 1711499 - RNA, 21 nt, Human
gaagacuuacagcaaauccuu

SEQ ID NO: 1711500 - RNA, 20 nt, Human
gaagacuuacagcaaauccu

SEQ ID NO: 1711501 - RNA, 21 nt, Human
gaagauaaacguggauguuac

SEQ ID NO: 1711502 - RNA, 19 nt, Human
gaaguaguuaucauguuag

SEQ ID NO: 1711503 - RNA, 13 nt, Human
gaaguaguuauca

SEQ ID NO: 1711504 - RNA, 14 nt, Human
gaaguaguuaucau

SEQ ID NO: 1711505 - RNA, 15 nt, Human
gaaguaguuaucaug

SEQ ID NO: 1711506 - RNA, 16 nt, Human
gaaguaguuaucaugu

SEQ ID NO: 1711507 - RNA, 17 nt, Human
gaaguaguuaucauguu

SEQ ID NO: 1711508 - RNA, 18 nt, Human
gaaguaguuaucauguua

SEQ ID NO: 1711509 - RNA, 21 nt, Human
gaaguaguuaucauguuagua

SEQ ID NO: 1711510 - RNA, 17 nt, Human
gaauaccuuagugcagu

SEQ ID NO: 1711511 - RNA, 20 nt, Human
gaauaccuuagugcaguuau

SEQ ID NO: 1711512 - RNA, 21 nt, Human
gaauaccuuagugcaguuauu

SEQ ID NO: 1711513 - RNA, 18 nt, Human
gaauucaaauuuuaucug

SEQ ID NO: 1711514 - RNA, 16 nt, Human
gaauucaaauuuuauc

SEQ ID NO: 1711515 - RNA, 13 nt, Human
gaauguaaauguc

SEQ ID NO: 1711516 - RNA, 14 nt, Human
gaauguaaaugucu

SEQ ID NO: 1711517 - RNA, 16 nt, Human
gaauguaaaugucuca

SEQ ID NO: 1711518 - RNA, 17 nt, Human
gauaggucagugcaaau

SEQ ID NO: 1711519 - RNA, 17 nt, Human
gaugaaauuccauuugu

SEQ ID NO: 1711520 - RNA, 22 nt, Human
gaugcagugccaggaacccuua

SEQ ID NO: 1711521 - RNA, 19 nt, Human
gauuucauguacugcauua

SEQ ID NO: 1711522 - RNA, 20 nt, Human
gauuucauguacugcauuau

SEQ ID NO: 1711523 - RNA, 12 nt, Human
gauuucauguac

SEQ ID NO: 1711524 - RNA, 13 nt, Human
gauuucauguacu

SEQ ID NO: 1711525 - RNA, 16 nt, Human
gauuucauguacugca

SEQ ID NO: 1711526 - RNA, 21 nt, Human
gauuucauguacugcauuauu

SEQ ID NO: 1711527 - RNA, 15 nt, Human
gcauauaagggaagu

SEQ ID NO: 1711528 - RNA, 23 nt, Human
gcauauaagggaaguaguuauca

SEQ ID NO: 1711529 - RNA, 14 nt, Human
gcaguguuagcuua

SEQ ID NO: 1711530 - RNA, 13 nt, Human
gcaguguuagcuu

SEQ ID NO: 1711531 - RNA, 15 nt, Human
gcauuagcuaaaacc

SEQ ID NO: 1711532 - RNA, 17 nt, Human
gcauuuucugcaucucc

SEQ ID NO: 1711533 - RNA, 18 nt, Human
gcauuuucugcaucucca

SEQ ID NO: 1711534 - RNA, 23 nt, Human
gccucucuuguaauuuggaucuc

SEQ ID NO: 1711535 - RNA, 20 nt, Human
gccuuuuaguuccugugcac

SEQ ID NO: 1711536 - RNA, 17 nt, Human
gccuuuuaguuccugug

SEQ ID NO: 1711537 - RNA, 16 nt, Human
gccuuuuaguuccugu

SEQ ID NO: 1711538 - RNA, 16 nt, Human
ggugagaauagaaucu

SEQ ID NO: 1711539 - RNA, 21 nt, Human
gguugauaaaucauuuuaugu

SEQ ID NO: 1711540 - RNA, 19 nt, Human
ggguaacuaacuaaaacaa

SEQ ID NO: 1711541 - RNA, 22 nt, Human
ggcuugaguuuaaauuguaaua

SEQ ID NO: 1711542 - RNA, 20 nt, Human
gggaaguaguuaucauguua

SEQ ID NO: 1711543 - RNA, 18 nt, Human
gggaaguaguuaucaugu

SEQ ID NO: 1711544 - RNA, 22 nt, Human
gggaaguaguuaucauguuagu

SEQ ID NO: 1711545 - RNA, 20 nt, Human
ggaaaaaauaacaaugaaag

SEQ ID NO: 1711546 - RNA, 17 nt, Human
ggaacggaucagauguc

SEQ ID NO: 1711547 - RNA, 14 nt, Human
ggaacgugauuagu

SEQ ID NO: 1711548 - RNA, 24 nt, Human
ggcauuagcuaaaaccuuccaugu

SEQ ID NO: 1711549 - RNA, 15 nt, Human
ggcagcuuugcucau

SEQ ID NO: 1711550 - RNA, 14 nt, Human
ggcagcuuugcuca

SEQ ID NO: 1711551 - RNA, 22 nt, Human
ggcagcacaaguguaaugaaua

SEQ ID NO: 1711552 - RNA, 20 nt, Human
ggauccacgacgcuuaaaua

SEQ ID NO: 1711553 - RNA, 22 nt, Human
uauaccucaauuuucacugugu

SEQ ID NO: 1711554 - RNA, 21 nt, Human
uauaccucaauuuucacugug

SEQ ID NO: 1711555 - RNA, 19 nt, Human
uaguguaucaaaaugcucu

SEQ ID NO: 1711556 - RNA, 12 nt, Human
uaguguaucaaa

SEQ ID NO: 1711557 - RNA, 14 nt, Human
uaguguaucaaaau

SEQ ID NO: 1711558 - RNA, 17 nt, Human
uaguguaucaaaaugcu

SEQ ID NO: 1711559 - RNA, 15 nt, Human
uaucaguuacacaug

SEQ ID NO: 1711560 - RNA, 13 nt, Human
uaucggcacugua

SEQ ID NO: 1711561 - RNA, 17 nt, Human
uaucggcacuguacaaa

SEQ ID NO: 1711562 - RNA, 16 nt, Human
uauauuuccacuucuu

SEQ ID NO: 1711563 - RNA, 20 nt, Human
uauauacucaagagugguau

SEQ ID NO: 1711564 - RNA, 19 nt, Human
uagagaaaacaugcagaac

SEQ ID NO: 1711565 - RNA, 14 nt, Human
uaggaagguacugu

SEQ ID NO: 1711566 - RNA, 15 nt, Human
uaggaagguacugua

SEQ ID NO: 1711567 - RNA, 16 nt, Human
uaggaagguacuguau

SEQ ID NO: 1711568 - RNA, 18 nt, Human
uaggaagguacuguauga

SEQ ID NO: 1711569 - RNA, 24 nt, Human
uaggaagguacuguaugaucaaau

SEQ ID NO: 1711570 - RNA, 21 nt, Human
uagcucuaauguuugcauaua

SEQ ID NO: 1711571 - RNA, 19 nt, Human
uagcucuaauguuugcaua

SEQ ID NO: 1711572 - RNA, 20 nt, Human
uagcucuaauguuugcauau

SEQ ID NO: 1711573 - RNA, 17 nt, Human
uagcucuaauguuugca

SEQ ID NO: 1711574 - RNA, 18 nt, Human
uagcucuaauguuugcau

SEQ ID NO: 1711575 - RNA, 14 nt, Human
uacaggauuugaaa

SEQ ID NO: 1711576 - RNA, 13 nt, Human
uacagaauuuuau

SEQ ID NO: 1711577 - RNA, 12 nt, Human
uacauuuuaugg

SEQ ID NO: 1711578 - RNA, 14 nt, Human
uacauuuuguacca

SEQ ID NO: 1711579 - RNA, 16 nt, Human
uacauuuuguaccaac

SEQ ID NO: 1711580 - RNA, 17 nt, Human
uacauuuuguaccaacc

SEQ ID NO: 1711581 - RNA, 14 nt, Human
uacccauuuguuca

SEQ ID NO: 1711582 - RNA, 15 nt, Human
uacccauuuguucau

SEQ ID NO: 1711583 - RNA, 22 nt, Human
uacccauuuguucauauuaaga

SEQ ID NO: 1711584 - RNA, 14 nt, Human
uacugauucaauuu

SEQ ID NO: 1711585 - RNA, 17 nt, Human
uacugauucaauuugau

SEQ ID NO: 1711586 - RNA, 20 nt, Human
uacugauucaauuugaugug

SEQ ID NO: 1711587 - RNA, 11 nt, Human
uacuguaugau

SEQ ID NO: 1711588 - RNA, 13 nt, Human
uacuguaugauca

SEQ ID NO: 1711589 - RNA, 14 nt, Human
uacuguaugaucaa

SEQ ID NO: 1711590 - RNA, 15 nt, Human
uacuguaugaucaaa

SEQ ID NO: 1711591 - RNA, 16 nt, Human
uacuguaugaucaaau

SEQ ID NO: 1711592 - RNA, 17 nt, Human
uacuguaugaucaaaug

SEQ ID NO: 1711593 - RNA, 18 nt, Human
uacuguaugaucaaaugu

SEQ ID NO: 1711594 - RNA, 19 nt, Human
uacuguaugaucaaauguu

SEQ ID NO: 1711595 - RNA, 21 nt, Human
uacuguaugaucaaauguuua

SEQ ID NO: 1711596 - RNA, 22 nt, Human
uacuguaugaucaaauguuuaa

SEQ ID NO: 1711597 - RNA, 13 nt, Human
uaauuguguuuac

SEQ ID NO: 1711598 - RNA, 14 nt, Human
uaauuguguuuaca

SEQ ID NO: 1711599 - RNA, 16 nt, Human
uaauuguguuuacauu

SEQ ID NO: 1711600 - RNA, 17 nt, Human
uaauuguguuuacauuu

SEQ ID NO: 1711601 - RNA, 18 nt, Human
uaauuguguuuacauuuu

SEQ ID NO: 1711602 - RNA, 19 nt, Human
uaauuguguuuacauuuua

SEQ ID NO: 1711603 - RNA, 20 nt, Human
uaauuguguuuacauuuuau

SEQ ID NO: 1711604 - RNA, 22 nt, Human
uaauuguguuuacauuuuaugg

SEQ ID NO: 1711605 - RNA, 21 nt, Human
uaauuguguuuacauuuuaug

SEQ ID NO: 1711606 - RNA, 23 nt, Human
uaauuuggaucucuucuuaaugu

SEQ ID NO: 1711607 - RNA, 14 nt, Human
uaauccuguaggaa

SEQ ID NO: 1711608 - RNA, 18 nt, Human
uaauccuguaggaaggua

SEQ ID NO: 1711609 - RNA, 23 nt, Human
uaauccuguaggaagguacugua

SEQ ID NO: 1711610 - RNA, 22 nt, Human
uaauccuguaggaagguacugu

SEQ ID NO: 1711611 - RNA, 23 nt, Human
uaacagggaacgugauuagugaa

SEQ ID NO: 1711612 - RNA, 15 nt, Human
uaacagggaacguga

SEQ ID NO: 1711613 - RNA, 22 nt, Human
uaacagggaacgugauuaguga

SEQ ID NO: 1711614 - RNA, 19 nt, Human
uaaaucauuuuaugucaag

SEQ ID NO: 1711615 - RNA, 13 nt, Human
uaaaucauuuuau

SEQ ID NO: 1711616 - RNA, 15 nt, Human
uaaaucauuuuaugu

SEQ ID NO: 1711617 - RNA, 12 nt, Human
uaaaucauuuua

SEQ ID NO: 1711618 - RNA, 18 nt, Human
uaaauauaugcuaagucu

SEQ ID NO: 1711619 - RNA, 17 nt, Human
uaaauaaaaauaauccu

SEQ ID NO: 1711620 - RNA, 14 nt, Human
uaaaggaauuuaaa

SEQ ID NO: 1711621 - RNA, 22 nt, Human
uaaacaguugcacagcaucuca

SEQ ID NO: 1711622 - RNA, 16 nt, Human
uaaacaguugcacagc

SEQ ID NO: 1711623 - RNA, 17 nt, Human
uaaacaguugcacagca

SEQ ID NO: 1711624 - RNA, 18 nt, Human
uaaacaguugcacagcau

SEQ ID NO: 1711625 - RNA, 19 nt, Human
uaaacaguugcacagcauc

SEQ ID NO: 1711626 - RNA, 23 nt, Human
uaaacagauguccaucagaugac

SEQ ID NO: 1711627 - RNA, 16 nt, Human
uaaacagauguccauc

SEQ ID NO: 1711628 - RNA, 21 nt, Human
uaaacagauguccaucagaug

SEQ ID NO: 1711629 - RNA, 22 nt, Human
uaaacagauguccaucagauga

SEQ ID NO: 1711630 - RNA, 20 nt, Human
guuuagcugacaaaauacuu

SEQ ID NO: 1711631 - RNA, 15 nt, Human
guuuagcugacaaaa

SEQ ID NO: 1711632 - RNA, 17 nt, Human
guuuagcugacaaaaua

SEQ ID NO: 1711633 - RNA, 14 nt, Human
guuuagcugacaaa

SEQ ID NO: 1711634 - RNA, 14 nt, Human
guuuucuaguguau

SEQ ID NO: 1711635 - RNA, 23 nt, Human
guuuucuaguguaucaaaaugcu

SEQ ID NO: 1711636 - RNA, 15 nt, Human
uaaaaaccuguucaa

SEQ ID NO: 1711637 - RNA, 14 nt, Human
guuuuuauuuccua

SEQ ID NO: 1711638 - RNA, 16 nt, Human
guuuuuauuuccuaug

SEQ ID NO: 1711639 - RNA, 19 nt, Human
guuuuuauuuccuaugaug

SEQ ID NO: 1711640 - RNA, 20 nt, Human
guuuuuauuuccuaugaugu

SEQ ID NO: 1711641 - RNA, 21 nt, Human
guuuuuauuuccuaugaugua

SEQ ID NO: 1711642 - RNA, 23 nt, Human
guuuuucagguauauaccuccau

SEQ ID NO: 1711643 - RNA, 16 nt, Human
ucauucacuucacugu

SEQ ID NO: 1711644 - RNA, 17 nt, Human
ucauucacuucacugug

SEQ ID NO: 1711645 - RNA, 19 nt, Human
ucauucacuucacugugcu

SEQ ID NO: 1711646 - RNA, 20 nt, Human
ucauucacuucacugugcug

SEQ ID NO: 1711647 - RNA, 14 nt, Human
uccaugucaagauu

SEQ ID NO: 1711648 - RNA, 16 nt, Human
uccaugucaagauuca

SEQ ID NO: 1711649 - RNA, 20 nt, Human
uccaugucaagauucagcua

SEQ ID NO: 1711650 - RNA, 14 nt, Human
ucccauucaagauu

SEQ ID NO: 1711651 - RNA, 16 nt, Human
ucccauucaagauucc

SEQ ID NO: 1711652 - RNA, 17 nt, Human
uccccagaauggaggca

SEQ ID NO: 1711653 - RNA, 15 nt, Human
uccccuguuuauuca

SEQ ID NO: 1711654 - RNA, 17 nt, Human
ucuagguuuaugacagu

SEQ ID NO: 1711655 - RNA, 20 nt, Human
uccuguaggaagguacugua

SEQ ID NO: 1711656 - RNA, 22 nt, Human
uccuguaggaagguacuguaug

SEQ ID NO: 1711657 - RNA, 21 nt, Human
uccuguaggaagguacuguau

SEQ ID NO: 1711658 - RNA, 19 nt, Human
ugaaauggacuuuuguaca

SEQ ID NO: 1711659 - RNA, 22 nt, Human
ugaacuuguaaaggaauuuaaa

SEQ ID NO: 1711660 - RNA, 18 nt, Human
ugaagaccuuuuucugca

SEQ ID NO: 1711661 - RNA, 23 nt, Human
ugaagacuuacagcaaauccuuu

SEQ ID NO: 1711662 - RNA, 15 nt, Human
ugaagaccuuuuucu

SEQ ID NO: 1711663 - RNA, 17 nt, Human
ucuuucacauuuaaaua

SEQ ID NO: 1711664 - RNA, 19 nt, Human
ugaaaggaagauaaacgug

SEQ ID NO: 1711665 - RNA, 15 nt, Human
ucuguccgagugugc

SEQ ID NO: 1711666 - RNA, 17 nt, Human
ucuguccgagugugcca

SEQ ID NO: 1711667 - RNA, 21 nt, Human
ucuuccaauuuaguuguugua

SEQ ID NO: 1711668 - RNA, 15 nt, Human
ugccuaguauugaca

SEQ ID NO: 1711669 - RNA, 15 nt, Human
ugcacagcaucucag

SEQ ID NO: 1711670 - RNA, 24 nt, Human
ugcacagccccuaagucaacuuag

SEQ ID NO: 1711671 - RNA, 14 nt, Human
ugcacagcaucuca

SEQ ID NO: 1711672 - RNA, 19 nt, Human
uggcucguuggcuagauua

SEQ ID NO: 1711673 - RNA, 17 nt, Human
uguuuuaaaaaccuguu

SEQ ID NO: 1711674 - RNA, 22 nt, Human
uuaaugucaauucuugccaaau

SEQ ID NO: 1711675 - RNA, 15 nt, Human
uuacagcaaauccuu

SEQ ID NO: 1711676 - RNA, 14 nt, Human
uguuuaaucauaua

SEQ ID NO: 1711677 - RNA, 15 nt, Human
uguuuaaucauauaa

SEQ ID NO: 1711678 - RNA, 16 nt, Human
uguuuaaucauauaaa

SEQ ID NO: 1711679 - RNA, 20 nt, Human
uguuuaaucauauaaauaga

SEQ ID NO: 1711680 - RNA, 23 nt, Human
uguuuaaucauauaaauagaaug

SEQ ID NO: 1711681 - RNA, 24 nt, Human
uguuuaaucauauaaauagaaugu

SEQ ID NO: 1711682 - RNA, 21 nt, Human
uguguuuacauuuuauggugc

SEQ ID NO: 1711683 - RNA, 15 nt, Human
uguauacugccacua

SEQ ID NO: 1711684 - RNA, 17 nt, Human
uguagauaauacaguuc

SEQ ID NO: 1711685 - RNA, 17 nt, Human
uguacugauucaauuug

SEQ ID NO: 1711686 - RNA, 15 nt, Human
uguacugauucaauu

SEQ ID NO: 1711687 - RNA, 16 nt, Human
uguacugauucaauuu

SEQ ID NO: 1711688 - RNA, 14 nt, Human
uguacugaaguaaa

SEQ ID NO: 1711689 - RNA, 18 nt, Human
uguacugaaguaaaacaa

SEQ ID NO: 1711690 - RNA, 11 nt, Human
uguaaugaaua

SEQ ID NO: 1711691 - RNA, 14 nt, Human
uguaaugaauaccu

SEQ ID NO: 1711692 - RNA, 15 nt, Human
uguaaugaauaccuu

SEQ ID NO: 1711693 - RNA, 20 nt, Human
uguaaaugucucacugagca

SEQ ID NO: 1711694 - RNA, 22 nt, Human
uguaaaugucucacugagcacu

SEQ ID NO: 1711695 - RNA, 16 nt, Human
uguaaaugucucacug

SEQ ID NO: 1711696 - RNA, 17 nt, Human
uguaaaugucucacuga

SEQ ID NO: 1711697 - RNA, 19 nt, Human
ugugcuguuguuaugaugu

SEQ ID NO: 1711698 - RNA, 20 nt, Human
ugugcuguuguuaugaugug

SEQ ID NO: 1711699 - RNA, 23 nt, Human
ugugcuguuguuaugaugugcuu

SEQ ID NO: 1711700 - RNA, 15 nt, Human
ugugcuuaacaggga

SEQ ID NO: 1711701 - RNA, 19 nt, Human
ugugcuuaacagggaacgu

SEQ ID NO: 1711702 - RNA, 14 nt, Human
ugugcuguuguuau

SEQ ID NO: 1711703 - RNA, 16 nt, Human
ugugcuguuguuauga

SEQ ID NO: 1711704 - RNA, 14 nt, Human
uucugagcauuuaa

SEQ ID NO: 1711705 - RNA, 12 nt, Human
uucuucaagauc

SEQ ID NO: 1711706 - RNA, 17 nt, Human
uucuucaagaucccauu

SEQ ID NO: 1711707 - RNA, 18 nt, Human
uucuucaagaucccauuu

SEQ ID NO: 1711708 - RNA, 22 nt, Human
uugaccguguuggucuguacug

SEQ ID NO: 1711709 - RNA, 15 nt, Human
uugcaaaaucaguuu

SEQ ID NO: 1711710 - RNA, 21 nt, Human
uugcaaaaucaguuuuccucu

SEQ ID NO: 1711711 - RNA, 16 nt, Human
uugcaaaaucaguuuu

SEQ ID NO: 1711712 - RNA, 22 nt, Human
uugcauacauucuucaagaucc

SEQ ID NO: 1711713 - RNA, 23 nt, Human
uugcaguaucggcacuguacaaa

SEQ ID NO: 1711714 - RNA, 16 nt, Human
uuguaaaggaauuuaa

SEQ ID NO: 1711715 - RNA, 21 nt, Human
uuguagagaaaacaugcagaa

SEQ ID NO: 1711716 - RNA, 14 nt, Human
uuguauuacaaauc

SEQ ID NO: 1711717 - RNA, 17 nt, Human
uuggauuggacaaaaug

SEQ ID NO: 1711718 - RNA, 21 nt, Human
uuggauuggacaaaaugacuu

SEQ ID NO: 1711719 - RNA, 17 nt, Human
uucaaauuuuaucugcc

SEQ ID NO: 1711720 - RNA, 22 nt, Human
uucaauccuugaagguauaucu

SEQ ID NO: 1711721 - RNA, 20 nt, Human
uucaaucuucaauccuugaa

SEQ ID NO: 1711722 - RNA, 14 nt, Human
uuuauucauaugca

SEQ ID NO: 1711723 - RNA, 15 nt, Human
uuuauucauaugcau

SEQ ID NO: 1711724 - RNA, 16 nt, Human
uuuauucauaugcaua

SEQ ID NO: 1711725 - RNA, 14 nt, Human
uuuaaucauauaaa

SEQ ID NO: 1711726 - RNA, 18 nt, Human
uuuaaucauauaaauaga

SEQ ID NO: 1711727 - RNA, 23 nt, Human
uuuaaucauauaaauagaaugua

SEQ ID NO: 1711728 - RNA, 22 nt, Human
uuuaaucauauaaauagaaugu

SEQ ID NO: 1711729 - RNA, 15 nt, Human
uuucagcagcugcag

SEQ ID NO: 1711730 - RNA, 15 nt, Human
uuucaaucuucaauc

SEQ ID NO: 1711731 - RNA, 13 nt, Human
uuucaaucuucaa

SEQ ID NO: 1711732 - RNA, 17 nt, Human
uuuauuuccuaugaugu

SEQ ID NO: 1711733 - RNA, 14 nt, Human
uuuccuaugaugua

SEQ ID NO: 1711734 - RNA, 18 nt, Human
uuuccuaugauguauacu

SEQ ID NO: 1711735 - RNA, 19 nt, Human
uuuuccucucaauaaaauu

SEQ ID NO: 1711736 - RNA, 20 nt, Human
uuuuacccauuuguucauau

SEQ ID NO: 1711737 - RNA, 14 nt, Human
uuuguucauauuaa

SEQ ID NO: 1711738 - RNA, 15 nt, Human
uuuguucauauuaag

SEQ ID NO: 1711739 - RNA, 18 nt, Human
uuugcauacauucuucaa

SEQ ID NO: 1711740 - RNA, 17 nt, Human
uuugcauacauucuuca

SEQ ID NO: 1711741 - RNA, 13 nt, Human
uuuuucugcacua

SEQ ID NO: 1711742 - RNA, 22 nt, Human
uuuuucugcacuauaugcaaac

SEQ ID NO: 1711743 - RNA, 18 nt, Human
uuuuucugcacuauaugc

SEQ ID NO: 1711744 - RNA, 13 nt, Human
cugcacuccagcc

SEQ ID NO: 1711745 - RNA, 23 nt, Human
cugcacuauagccuaggugacag

SEQ ID NO: 1711746 - RNA, 22 nt, Human
cugcacuauagccuaggugaca

SEQ ID NO: 1711747 - RNA, 17 nt, Human
cugcacuccagccugag

SEQ ID NO: 1711748 - RNA, 20 nt, Human
cugcacuccagccugagcga

SEQ ID NO: 1711749 - RNA, 16 nt, Human
cugcacuccagccuga

SEQ ID NO: 1711750 - RNA, 15 nt, Human
cugcacuccagccug

SEQ ID NO: 1711751 - RNA, 20 nt, Human
cugcacuauagccuagguga

SEQ ID NO: 1711752 - RNA, 18 nt, Human
cugcacuauagccuaggu

SEQ ID NO: 1711753 - RNA, 17 nt, Human
cugcacuauagccuagg

SEQ ID NO: 1711754 - RNA, 16 nt, Human
cugcacuauagccuag

SEQ ID NO: 1711755 - RNA, 23 nt, Human
cugcagccucaaccuccugggcu

SEQ ID NO: 1711756 - RNA, 19 nt, Human
cugcacuccagccugggug

SEQ ID NO: 1711757 - RNA, 24 nt, Human
cugcagccucaaccuccugggcua

SEQ ID NO: 1711758 - RNA, 17 nt, Human
cugcacuccagccuggg

SEQ ID NO: 1711759 - RNA, 16 nt, Human
cugcacuccagccugg

SEQ ID NO: 1711760 - RNA, 18 nt, Human
cugcacuccagccugggu

SEQ ID NO: 1711761 - RNA, 20 nt, Human
cugcaggcagccaggccaca

SEQ ID NO: 1711762 - RNA, 19 nt, Human
cugcaggcagccaggccac

SEQ ID NO: 1711763 - RNA, 18 nt, Human
cugcaggcagccaggcca

SEQ ID NO: 1711764 - RNA, 17 nt, Human
cugcaggcagccaggcc

SEQ ID NO: 1711765 - RNA, 16 nt, Human
cugcaggcagccaggc

SEQ ID NO: 1711766 - RNA, 15 nt, Human
cugcaggcagccagg

SEQ ID NO: 1711767 - RNA, 14 nt, Human
cugcaggcagccag

SEQ ID NO: 1711768 - RNA, 13 nt, Human
cugcaggcagcca

SEQ ID NO: 1711769 - RNA, 12 nt, Human
cugcagcuuugu

SEQ ID NO: 1711770 - RNA, 17 nt, Human
cugaugcuucuucagag

SEQ ID NO: 1711771 - RNA, 16 nt, Human
cugaugcuucuucaga

SEQ ID NO: 1711772 - RNA, 15 nt, Human
cucuuaugggcuggg

SEQ ID NO: 1711773 - RNA, 14 nt, Human
cucuuaugggcugg

SEQ ID NO: 1711774 - RNA, 22 nt, Human
cugcaaaggguaucaggugcug

SEQ ID NO: 1711775 - RNA, 21 nt, Human
cugcaaaggguaucaggugcu

SEQ ID NO: 1711776 - RNA, 18 nt, Human
cugcaaagcccagcuuga

SEQ ID NO: 1711777 - RNA, 23 nt, Human
cugaugggcaacccccagccugc

SEQ ID NO: 1711778 - RNA, 22 nt, Human
cugaugggcaacccccagccug

SEQ ID NO: 1711779 - RNA, 24 nt, Human
cugaugggcaacccccagccugcu

SEQ ID NO: 1711780 - RNA, 20 nt, Human
cugaugcuucuucagagacu

SEQ ID NO: 1711781 - RNA, 19 nt, Human
cugaugcuucuucagagac

SEQ ID NO: 1711782 - RNA, 18 nt, Human
cugaugcuucuucagaga

SEQ ID NO: 1711783 - RNA, 21 nt, Human
cugaugggcaacccccagccu

SEQ ID NO: 1711784 - RNA, 18 nt, Human
cugaugggcaacccccag

SEQ ID NO: 1711785 - RNA, 20 nt, Human
cugcaagaauugaagcagga

SEQ ID NO: 1711786 - RNA, 12 nt, Human
cugcaagggagu

SEQ ID NO: 1711787 - RNA, 23 nt, Human
cugcaccgggccacagagaaagu

SEQ ID NO: 1711788 - RNA, 21 nt, Human
cugcaaccugauugugucucu

SEQ ID NO: 1711789 - RNA, 19 nt, Human
cugcaaccugauugugucu

SEQ ID NO: 1711790 - RNA, 14 nt, Human
cugcaaccugauug

SEQ ID NO: 1711791 - RNA, 22 nt, Human
cugcaaccuccgccucuugggu

SEQ ID NO: 1711792 - RNA, 20 nt, Human
cugcaaccuccgccucuugg

SEQ ID NO: 1711793 - RNA, 18 nt, Human
cugcaagaauugaagcag

SEQ ID NO: 1711794 - RNA, 19 nt, Human
cugcaacuuguaaaugugg

SEQ ID NO: 1711795 - RNA, 18 nt, Human
cugcaacuuguaaaugug

SEQ ID NO: 1711796 - RNA, 15 nt, Human
cugcaacuucugccu

SEQ ID NO: 1711797 - RNA, 14 nt, Human
cugcaacuucugcc

SEQ ID NO: 1711798 - RNA, 22 nt, Human
cugcaaccugauugugucucuu

SEQ ID NO: 1711799 - RNA, 22 nt, Human
cugcaaccuucgccaccugggu

SEQ ID NO: 1711800 - RNA, 20 nt, Human
cugcaaccuucgccaccugg

SEQ ID NO: 1711801 - RNA, 19 nt, Human
cugcaaccuucgccaccug

SEQ ID NO: 1711802 - RNA, 17 nt, Human
cugcaaccuucgccacc

SEQ ID NO: 1711803 - RNA, 17 nt, Human
cugcccuuaccugccag

SEQ ID NO: 1711804 - RNA, 16 nt, Human
cugcccuuaccugcca

SEQ ID NO: 1711805 - RNA, 12 nt, Human
cugcccuuaccu

SEQ ID NO: 1711806 - RNA, 19 nt, Human
cugccccuccucucugccc

SEQ ID NO: 1711807 - RNA, 18 nt, Human
cugccccuccucucugcc

SEQ ID NO: 1711808 - RNA, 17 nt, Human
cugccccuccucucugc

SEQ ID NO: 1711809 - RNA, 13 nt, Human
cugccccucccuu

SEQ ID NO: 1711810 - RNA, 17 nt, Human
cugccccucccuucaac

SEQ ID NO: 1711811 - RNA, 14 nt, Human
cugccccucccuuc

SEQ ID NO: 1711812 - RNA, 23 nt, Human
cugccagggacagaggggguggc

SEQ ID NO: 1711813 - RNA, 22 nt, Human
cugccagggacagagggggugg

SEQ ID NO: 1711814 - RNA, 20 nt, Human
cugccagggacagagggggu

SEQ ID NO: 1711815 - RNA, 17 nt, Human
cugcauuuaaaagauac

SEQ ID NO: 1711816 - RNA, 18 nt, Human
cugcauuuaaaagauaca

SEQ ID NO: 1711817 - RNA, 17 nt, Human
cugccagucccccugcc

SEQ ID NO: 1711818 - RNA, 21 nt, Human
cugccagucccccugccccag

SEQ ID NO: 1711819 - RNA, 20 nt, Human
cugccagucccccugcccca

SEQ ID NO: 1711820 - RNA, 22 nt, Human
cugccagucccccugccccagg

SEQ ID NO: 1711821 - RNA, 13 nt, Human
cugccccccagcc

SEQ ID NO: 1711822 - RNA, 19 nt, Human
cugccauccagguucagcu

SEQ ID NO: 1711823 - RNA, 18 nt, Human
cugccauccagguucagc

SEQ ID NO: 1711824 - RNA, 16 nt, Human
cugccauccagguuca

SEQ ID NO: 1711825 - RNA, 16 nt, Human
cugccauauucuguug

SEQ ID NO: 1711826 - RNA, 14 nt, Human
cugcauuuaaaaga

SEQ ID NO: 1711827 - RNA, 13 nt, Human
cugcauuggcuuu

SEQ ID NO: 1711828 - RNA, 21 nt, Human
cuggugccucaccccuugcca

SEQ ID NO: 1711829 - RNA, 21 nt, Human
cuggguggcaccagcagccug

SEQ ID NO: 1711830 - RNA, 14 nt, Human
cuggguguggcgca

SEQ ID NO: 1711831 - RNA, 15 nt, Human
cuggguguggcgcag

SEQ ID NO: 1711832 - RNA, 12 nt, Human
cugggcagagga

SEQ ID NO: 1711833 - RNA, 16 nt, Human
cugggcagaggaaagc

SEQ ID NO: 1711834 - RNA, 13 nt, Human
cugggcagaggaa

SEQ ID NO: 1711835 - RNA, 20 nt, Human
cugggcagaggaaagcaaag

SEQ ID NO: 1711836 - RNA, 20 nt, Human
cugggcagguuggugggggc

SEQ ID NO: 1711837 - RNA, 14 nt, Human
cuggggagaaagua

SEQ ID NO: 1711838 - RNA, 13 nt, Human
cuggggagaaagu

SEQ ID NO: 1711839 - RNA, 20 nt, Human
cuggguggcaccagcagccu

SEQ ID NO: 1711840 - RNA, 18 nt, Human
cuggguggcaccagcagc

SEQ ID NO: 1711841 - RNA, 12 nt, Human
cuggcccuuccu

SEQ ID NO: 1711842 - RNA, 22 nt, Human
cuggcuaugcauuugaaaauuu

SEQ ID NO: 1711843 - RNA, 15 nt, Human
cuggcuaugcauuug

SEQ ID NO: 1711844 - RNA, 16 nt, Human
cuggcuaugcauuuga

SEQ ID NO: 1711845 - RNA, 13 nt, Human
cuggcuaugcauu

SEQ ID NO: 1711846 - RNA, 14 nt, Human
cuggcuaugcauuu

SEQ ID NO: 1711847 - RNA, 22 nt, Human
cugggacaugggaaaggggaag

SEQ ID NO: 1711848 - RNA, 18 nt, Human
cugggacaugggaaaggg

SEQ ID NO: 1711849 - RNA, 14 nt, Human
cugggacaugggaa

SEQ ID NO: 1711850 - RNA, 16 nt, Human
cugggacuacaggcac

SEQ ID NO: 1711851 - RNA, 15 nt, Human
cugggacuacaggca

SEQ ID NO: 1711852 - RNA, 13 nt, Human
cugggacuacagg

SEQ ID NO: 1711853 - RNA, 22 nt, Human
cugggagaaccaaaaagaggcu

SEQ ID NO: 1711854 - RNA, 17 nt, Human
cugggagaaaugaaaaa

SEQ ID NO: 1711855 - RNA, 16 nt, Human
cugggagaaaugaaaa

SEQ ID NO: 1711856 - RNA, 15 nt, Human
cuggaugcagccuca

SEQ ID NO: 1711857 - RNA, 22 nt, Human
cuggaugcagccucacaguccu

SEQ ID NO: 1711858 - RNA, 15 nt, Human
cuggaguucugguuc

SEQ ID NO: 1711859 - RNA, 17 nt, Human
cuggaguucugguuccu

SEQ ID NO: 1711860 - RNA, 16 nt, Human
cuggaguucugguucc

SEQ ID NO: 1711861 - RNA, 23 nt, Human
cuggacugugugcucaggagccc

SEQ ID NO: 1711862 - RNA, 22 nt, Human
cuggacugugugcucaggagcc

SEQ ID NO: 1711863 - RNA, 19 nt, Human
cuggacugugugcucagga

SEQ ID NO: 1711864 - RNA, 20 nt, Human
cugcuuaacuucacauauug

SEQ ID NO: 1711865 - RNA, 19 nt, Human
cugcucacauaucugucau

SEQ ID NO: 1711866 - RNA, 16 nt, Human
cugcucacauaucugu

SEQ ID NO: 1711867 - RNA, 12 nt, Human
cugcugacagug

SEQ ID NO: 1711868 - RNA, 15 nt, Human
cugcugaaggcucga

SEQ ID NO: 1711869 - RNA, 14 nt, Human
cugcugaaggcucg

SEQ ID NO: 1711870 - RNA, 13 nt, Human
cugcugaaggcuc

SEQ ID NO: 1711871 - RNA, 15 nt, Human
cugcugacaguguug

SEQ ID NO: 1711872 - RNA, 13 nt, Human
cugcugacagugu

SEQ ID NO: 1711873 - RNA, 23 nt, Human
cugcugagucccaggcugagccu

SEQ ID NO: 1711874 - RNA, 19 nt, Human
cugcugagucccaggcuga

SEQ ID NO: 1711875 - RNA, 20 nt, Human
cuucaccuuuguccccaccg

SEQ ID NO: 1711876 - RNA, 17 nt, Human
cuucaccuuugucccca

SEQ ID NO: 1711877 - RNA, 18 nt, Human
cuuauugcccacgcugga

SEQ ID NO: 1711878 - RNA, 14 nt, Human
cuucaccuuugucc

SEQ ID NO: 1711879 - RNA, 11 nt, Human
cuucagacaua

SEQ ID NO: 1711880 - RNA, 22 nt, Human
cuucagagacuccugcaggcag

SEQ ID NO: 1711881 - RNA, 21 nt, Human
cuucagagacuccugcaggca

SEQ ID NO: 1711882 - RNA, 16 nt, Human
cuucagagacuccugc

SEQ ID NO: 1711883 - RNA, 22 nt, Human
cuucaucucccaaagugcuggg

SEQ ID NO: 1711884 - RNA, 16 nt, Human
cuucauccuccucaga

SEQ ID NO: 1711885 - RNA, 24 nt, Human
cuucagagacuccugcaggcagcc

SEQ ID NO: 1711886 - RNA, 23 nt, Human
cuucagagacuccugcaggcagc

SEQ ID NO: 1711887 - RNA, 18 nt, Human
cuucaguggcagcugcuu

SEQ ID NO: 1711888 - RNA, 17 nt, Human
cuucaguuaagccuuug

SEQ ID NO: 1711889 - RNA, 15 nt, Human
cuucauccuccucag

SEQ ID NO: 1711890 - RNA, 13 nt, Human
cuucaucccucug

SEQ ID NO: 1711891 - RNA, 18 nt, Human
cuucaguuaagccuuugg

SEQ ID NO: 1711892 - RNA, 20 nt, Human
cuuccaugucgccucugcau

SEQ ID NO: 1711893 - RNA, 19 nt, Human
cuuccaugucgccucugca

SEQ ID NO: 1711894 - RNA, 18 nt, Human
cuuccaugucgccucugc

SEQ ID NO: 1711895 - RNA, 17 nt, Human
cuuccaugucgccucug

SEQ ID NO: 1711896 - RNA, 20 nt, Human
cuuccagugaggcucugccc

SEQ ID NO: 1711897 - RNA, 19 nt, Human
cuuccagugaggcucugcc

SEQ ID NO: 1711898 - RNA, 17 nt, Human
cuuccagugaggcucug

SEQ ID NO: 1711899 - RNA, 18 nt, Human
cuuccagugaggcucugc

SEQ ID NO: 1711900 - RNA, 17 nt, Human
cuuccauggacuuuguu

SEQ ID NO: 1711901 - RNA, 16 nt, Human
cuuccauggacuuugu

SEQ ID NO: 1711902 - RNA, 16 nt, Human
cuuccaugucgccucu

SEQ ID NO: 1711903 - RNA, 15 nt, Human
cuuccaugucgccuc

SEQ ID NO: 1711904 - RNA, 21 nt, Human
cuuaugggcuggguucuaccc

SEQ ID NO: 1711905 - RNA, 14 nt, Human
cuuaugggcugggu

SEQ ID NO: 1711906 - RNA, 23 nt, Human
cuuaugggcuggguucuacccag

SEQ ID NO: 1711907 - RNA, 22 nt, Human
cuuaugggcuggguucuaccca

SEQ ID NO: 1711908 - RNA, 13 nt, Human
cuuauugcccacg

SEQ ID NO: 1711909 - RNA, 12 nt, Human
cuuauugcccac

SEQ ID NO: 1711910 - RNA, 21 nt, Human
cuuagcagggaaacagcuaau

SEQ ID NO: 1711911 - RNA, 18 nt, Human
cuuagcagggaaacagcu

SEQ ID NO: 1711912 - RNA, 17 nt, Human
cuuacccucauguucuu

SEQ ID NO: 1711913 - RNA, 18 nt, Human
cuuacccucauguucuua

SEQ ID NO: 1711914 - RNA, 19 nt, Human
cuuacccucauguucuuaa

SEQ ID NO: 1711915 - RNA, 13 nt, Human
cuuaccucggugc

SEQ ID NO: 1711916 - RNA, 13 nt, Human
cuuaccugccagg

SEQ ID NO: 1711917 - RNA, 21 nt, Human
cuuaccucggugccuuccucu

SEQ ID NO: 1711918 - RNA, 19 nt, Human
cuuaccucggugccuuccu

SEQ ID NO: 1711919 - RNA, 13 nt, Human
cuuacacaauggu

SEQ ID NO: 1711920 - RNA, 20 nt, Human
cuguugggccaggagccucc

SEQ ID NO: 1711921 - RNA, 17 nt, Human
cuguugggccaggagcc

SEQ ID NO: 1711922 - RNA, 16 nt, Human
cuguugggccaggagc

SEQ ID NO: 1711923 - RNA, 20 nt, Human
cuuaaaauauuccugcauuu

SEQ ID NO: 1711924 - RNA, 18 nt, Human
cuuaaaauauuccugcau

SEQ ID NO: 1711925 - RNA, 17 nt, Human
cuguugcugccucaugc

SEQ ID NO: 1711926 - RNA, 16 nt, Human
cuguugcugccucaug

SEQ ID NO: 1711927 - RNA, 15 nt, Human
cuguugcugccucau

SEQ ID NO: 1711928 - RNA, 14 nt, Human
cuguugcugccuca

SEQ ID NO: 1711929 - RNA, 14 nt, Human
cuguucagcuccag

SEQ ID NO: 1711930 - RNA, 13 nt, Human
cuguucagcucca

SEQ ID NO: 1711931 - RNA, 19 nt, Human
cugugucuugcaauggcag

SEQ ID NO: 1711932 - RNA, 16 nt, Human
cugugucuugcaaugg

SEQ ID NO: 1711933 - RNA, 20 nt, Human
cugugucuugcaauggcagc

SEQ ID NO: 1711934 - RNA, 15 nt, Human
cuguucacucuacuu

SEQ ID NO: 1711935 - RNA, 17 nt, Human
cugugacuucagcucug

SEQ ID NO: 1711936 - RNA, 22 nt, Human
cugugacuucagcucuguuuua

SEQ ID NO: 1711937 - RNA, 19 nt, Human
cugugucucccuucauccu

SEQ ID NO: 1711938 - RNA, 14 nt, Human
cugugucucccuuc

SEQ ID NO: 1711939 - RNA, 14 nt, Human
cugugucuugcaau

SEQ ID NO: 1711940 - RNA, 19 nt, Human
cugugucagguggggcagc

SEQ ID NO: 1711941 - RNA, 20 nt, Human
cugugucagcauagaaguaa

SEQ ID NO: 1711942 - RNA, 21 nt, Human
cugugucagguggggcagcuu

SEQ ID NO: 1711943 - RNA, 11 nt, Human
cugugcugccc

SEQ ID NO: 1711944 - RNA, 22 nt, Human
cugugcugagucugaaggcugg

SEQ ID NO: 1711945 - RNA, 20 nt, Human
cugugcugagucugaaggcu

SEQ ID NO: 1711946 - RNA, 22 nt, Human
cuuucaauaggaaaaacugauu

SEQ ID NO: 1711947 - RNA, 21 nt, Human
cuuucaauaggaaaaacugau

SEQ ID NO: 1711948 - RNA, 20 nt, Human
cuuucaauaggaaaaacuga

SEQ ID NO: 1711949 - RNA, 23 nt, Human
cuuucaauaggaaaaacugauuu

SEQ ID NO: 1711950 - RNA, 13 nt, Human
cuuguggacacag

SEQ ID NO: 1711951 - RNA, 15 nt, Human
cuuguggacacagcu

SEQ ID NO: 1711952 - RNA, 14 nt, Human
cuuguggacacagc

SEQ ID NO: 1711953 - RNA, 16 nt, Human
cuuguggacacagcuc

SEQ ID NO: 1711954 - RNA, 15 nt, Human
cuuuucaaaacauuu

SEQ ID NO: 1711955 - RNA, 19 nt, Human
cuuuuauuuagcaccaggg

SEQ ID NO: 1711956 - RNA, 19 nt, Human
cuuuuauaaacuuuaccuu

SEQ ID NO: 1711957 - RNA, 16 nt, Human
cuuuuauaaacuuuac

SEQ ID NO: 1711958 - RNA, 18 nt, Human
cuuuuauaaacuuuaccu

SEQ ID NO: 1711959 - RNA, 15 nt, Human
cuuuuauaaacuuua

SEQ ID NO: 1711960 - RNA, 18 nt, Human
cuuuuaggccaaaaaaau

SEQ ID NO: 1711961 - RNA, 16 nt, Human
cuuuuaggccaaaaaa

SEQ ID NO: 1711962 - RNA, 16 nt, Human
cuuuggucuacacugu

SEQ ID NO: 1711963 - RNA, 20 nt, Human
cuuuggucuacacugugcug

SEQ ID NO: 1711964 - RNA, 15 nt, Human
cuuuggugaacauug

SEQ ID NO: 1711965 - RNA, 22 nt, Human
cuuucggggagaggcugaggac

SEQ ID NO: 1711966 - RNA, 17 nt, Human
cuuucuaaugugugaau

SEQ ID NO: 1711967 - RNA, 22 nt, Human
cuuugacgccaucccagcccca

SEQ ID NO: 1711968 - RNA, 21 nt, Human
cuuugacgccaucccagcccc

SEQ ID NO: 1711969 - RNA, 19 nt, Human
cuuugacgccaucccagcc

SEQ ID NO: 1711970 - RNA, 16 nt, Human
cuuugagcuuaagaau

SEQ ID NO: 1711971 - RNA, 21 nt, Human
cuucuucagagacuccugcag

SEQ ID NO: 1711972 - RNA, 20 nt, Human
cuucuucagagacuccugca

SEQ ID NO: 1711973 - RNA, 22 nt, Human
cuucuucagagacuccugcagg

SEQ ID NO: 1711974 - RNA, 20 nt, Human
cuugaaugaugccaugagga

SEQ ID NO: 1711975 - RNA, 13 nt, Human
cuugcucugcuga

SEQ ID NO: 1711976 - RNA, 23 nt, Human
cuugccgucuaccugaggggccu

SEQ ID NO: 1711977 - RNA, 20 nt, Human
cuugccgucuaccugagggg

SEQ ID NO: 1711978 - RNA, 12 nt, Human
cuugacagggca

SEQ ID NO: 1711979 - RNA, 23 nt, Human
cuugaaugaugccaugaggaaca

SEQ ID NO: 1711980 - RNA, 12 nt, Human
cuugcucugcug

SEQ ID NO: 1711981 - RNA, 22 nt, Human
gcacaagcugcacccucaggca

SEQ ID NO: 1711982 - RNA, 14 nt, Human
gcacaccgggcacu

SEQ ID NO: 1711983 - RNA, 14 nt, Human
gcacacauuuuuua

SEQ ID NO: 1711984 - RNA, 20 nt, Human
gcacaccgggcacucagaag

SEQ ID NO: 1711985 - RNA, 19 nt, Human
gcacagugcaucucagccc

SEQ ID NO: 1711986 - RNA, 21 nt, Human
gcacagugcaucucagcccac

SEQ ID NO: 1711987 - RNA, 20 nt, Human
gcacagugcaucucagccca

SEQ ID NO: 1711988 - RNA, 18 nt, Human
gcaagucagaauagaaau

SEQ ID NO: 1711989 - RNA, 22 nt, Human
gcacaucagcacgauuucuguu

SEQ ID NO: 1711990 - RNA, 23 nt, Human
gcacaucagcacgauuucuguuu

SEQ ID NO: 1711991 - RNA, 14 nt, Human
gcaccgggccacag

SEQ ID NO: 1711992 - RNA, 23 nt, Human
gcaccgggccacagagaaaguac

SEQ ID NO: 1711993 - RNA, 21 nt, Human
gcaccuaccaccacgcccggc

SEQ ID NO: 1711994 - RNA, 22 nt, Human
gcaccuaccaccacgcccggcu

SEQ ID NO: 1711995 - RNA, 17 nt, Human
gcacuccccugcugggu

SEQ ID NO: 1711996 - RNA, 17 nt, Human
gcacucagaagacacug

SEQ ID NO: 1711997 - RNA, 16 nt, Human
gcacucagaagacacu

SEQ ID NO: 1711998 - RNA, 13 nt, Human
gcacucagaagac

SEQ ID NO: 1711999 - RNA, 22 nt, Human
gcacuccccugcuggguguggc

SEQ ID NO: 1712000 - RNA, 12 nt, Human
gauucuucugcu

SEQ ID NO: 1712001 - RNA, 18 nt, Human
gauucuuccucccucccu

SEQ ID NO: 1712002 - RNA, 17 nt, Human
gauucuuccucccuccc

SEQ ID NO: 1712003 - RNA, 20 nt, Human
gauuuuuuacagcugccugc

SEQ ID NO: 1712004 - RNA, 17 nt, Human
gauucuccugccucagc

SEQ ID NO: 1712005 - RNA, 15 nt, Human
gauucuccugccuca

SEQ ID NO: 1712006 - RNA, 18 nt, Human
gauucuccugccucagcc

SEQ ID NO: 1712007 - RNA, 20 nt, Human
gauuauaggcaccuaccacc

SEQ ID NO: 1712008 - RNA, 14 nt, Human
gauuauauuaugaa

SEQ ID NO: 1712009 - RNA, 20 nt, Human
gauguauguugaagccuuug

SEQ ID NO: 1712010 - RNA, 21 nt, Human
gauguauguugaagccuuugu

SEQ ID NO: 1712011 - RNA, 12 nt, Human
gauuauuggaaa

SEQ ID NO: 1712012 - RNA, 17 nt, Human
gauguagaggagaaacu

SEQ ID NO: 1712013 - RNA, 18 nt, Human
gauguagaggagaaacug

SEQ ID NO: 1712014 - RNA, 12 nt, Human
gauguaaagaug

SEQ ID NO: 1712015 - RNA, 18 nt, Human
gauguaaaagacuuuuuu

SEQ ID NO: 1712016 - RNA, 14 nt, Human
gaugaucuuugcag

SEQ ID NO: 1712017 - RNA, 21 nt, Human
gaugaucuaggaagacuuugg

SEQ ID NO: 1712018 - RNA, 15 nt, Human
gaugaucuaggaaga

SEQ ID NO: 1712019 - RNA, 16 nt, Human
gaugagugagcaugcc

SEQ ID NO: 1712020 - RNA, 16 nt, Human
gaguuuaaauuguaau

SEQ ID NO: 1712021 - RNA, 22 nt, Human
gaguuguuacauuuuuaagugc

SEQ ID NO: 1712022 - RNA, 18 nt, Human
gaguugauucagcucugc

SEQ ID NO: 1712023 - RNA, 20 nt, Human
gagugacagaggcagcccca

SEQ ID NO: 1712024 - RNA, 19 nt, Human
gagugcaaugacacagucu

SEQ ID NO: 1712025 - RNA, 17 nt, Human
gaguugauucagcucug

SEQ ID NO: 1712026 - RNA, 16 nt, Human
gaguugauucagcucu

SEQ ID NO: 1712027 - RNA, 15 nt, Human
gaguugauucagcuc

SEQ ID NO: 1712028 - RNA, 18 nt, Human
gagugacagaggcagccc

SEQ ID NO: 1712029 - RNA, 13 nt, Human
gagucccaccuug

SEQ ID NO: 1712030 - RNA, 12 nt, Human
gagucccaccuu

SEQ ID NO: 1712031 - RNA, 22 nt, Human
gagucagaaguuucugccgcag

SEQ ID NO: 1712032 - RNA, 16 nt, Human
gagucaccaagcccag

SEQ ID NO: 1712033 - RNA, 17 nt, Human
gagucaccaagcccagu

SEQ ID NO: 1712034 - RNA, 15 nt, Human
gaggucgaggcagga

SEQ ID NO: 1712035 - RNA, 23 nt, Human
gaggugaccccagguuucuaugu

SEQ ID NO: 1712036 - RNA, 19 nt, Human
gaggcuccacuuggucugu

SEQ ID NO: 1712037 - RNA, 14 nt, Human
gaggcucagauugu

SEQ ID NO: 1712038 - RNA, 18 nt, Human
gaggcuacuguaaggcaa

SEQ ID NO: 1712039 - RNA, 12 nt, Human
gaggcuccacuu

SEQ ID NO: 1712040 - RNA, 23 nt, Human
gaggcuccacuuggucugugaga

SEQ ID NO: 1712041 - RNA, 22 nt, Human
gaggcuagugugguguuuccug

SEQ ID NO: 1712042 - RNA, 19 nt, Human
gaggccagagacacaagcc

SEQ ID NO: 1712043 - RNA, 14 nt, Human
gaggccagagacac

SEQ ID NO: 1712044 - RNA, 13 nt, Human
gaggccagagaca

SEQ ID NO: 1712045 - RNA, 17 nt, Human
gaggcaucgcaauguaa

SEQ ID NO: 1712046 - RNA, 14 nt, Human
gaggcagggucuca

SEQ ID NO: 1712047 - RNA, 15 nt, Human
gaggacgcucucugg

SEQ ID NO: 1712048 - RNA, 18 nt, Human
gaggcagggucucacucu

SEQ ID NO: 1712049 - RNA, 15 nt, Human
gaggcagggucucac

SEQ ID NO: 1712050 - RNA, 22 nt, Human
gaggccaaggugggaggauugc

SEQ ID NO: 1712051 - RNA, 17 nt, Human
gaggccaaggugggagg

SEQ ID NO: 1712052 - RNA, 12 nt, Human
gaggggccucuu

SEQ ID NO: 1712053 - RNA, 20 nt, Human
gagccuuccaggggugggac

SEQ ID NO: 1712054 - RNA, 19 nt, Human
gagccuugaacuuugaccu

SEQ ID NO: 1712055 - RNA, 23 nt, Human
gagccuuccaggggugggacacc

SEQ ID NO: 1712056 - RNA, 13 nt, Human
gagccuugaacuu

SEQ ID NO: 1712057 - RNA, 21 nt, Human
gagcgcccacuagacccacug

SEQ ID NO: 1712058 - RNA, 16 nt, Human
gaagacaaugacuuac

SEQ ID NO: 1712059 - RNA, 23 nt, Human
gaagacaaugugaaaagaaaaau

SEQ ID NO: 1712060 - RNA, 22 nt, Human
gaagacaaugacuuacuguaca

SEQ ID NO: 1712061 - RNA, 23 nt, Human
gaagcaacccaaauguucaucaa

SEQ ID NO: 1712062 - RNA, 20 nt, Human
gaagcaaugcuucaucccuu

SEQ ID NO: 1712063 - RNA, 20 nt, Human
gaagcacaugccucucucag

SEQ ID NO: 1712064 - RNA, 17 nt, Human
gaagcacaugccucucu

SEQ ID NO: 1712065 - RNA, 15 nt, Human
gaagcacaugccucu

SEQ ID NO: 1712066 - RNA, 15 nt, Human
gaagcagaggaagga

SEQ ID NO: 1712067 - RNA, 21 nt, Human
gaagcacaugccucucucagg

SEQ ID NO: 1712068 - RNA, 20 nt, Human
gaacucugacaacagacuuc

SEQ ID NO: 1712069 - RNA, 12 nt, Human
gaacuggcugca

SEQ ID NO: 1712070 - RNA, 11 nt, Human
gaacuggcugc

SEQ ID NO: 1712071 - RNA, 20 nt, Human
gaagcuaucguaaaauuaag

SEQ ID NO: 1712072 - RNA, 19 nt, Human
gaagcuccgcuuucuaccc

SEQ ID NO: 1712073 - RNA, 22 nt, Human
gaagcuccgcuuucuacccagc

SEQ ID NO: 1712074 - RNA, 17 nt, Human
gaaggccccgcccaggc

SEQ ID NO: 1712075 - RNA, 19 nt, Human
gaaggcuggguucugaucc

SEQ ID NO: 1712076 - RNA, 15 nt, Human
gaaggcuggguucug

SEQ ID NO: 1712077 - RNA, 21 nt, Human
gaaggcucgagcaugccugga

SEQ ID NO: 1712078 - RNA, 19 nt, Human
gaaggccccgcccaggcuu

SEQ ID NO: 1712079 - RNA, 18 nt, Human
gaaggccccgcccaggcu

SEQ ID NO: 1712080 - RNA, 22 nt, Human
gaaggcuggguucugauccuag

SEQ ID NO: 1712081 - RNA, 20 nt, Human
gaaggcuggguucugauccu

SEQ ID NO: 1712082 - RNA, 21 nt, Human
gaagggcuuggacucaagcaa

SEQ ID NO: 1712083 - RNA, 20 nt, Human
gaauauuagugaccucagcu

SEQ ID NO: 1712084 - RNA, 15 nt, Human
gaauauugcugaugg

SEQ ID NO: 1712085 - RNA, 14 nt, Human
gaauauugcugaug

SEQ ID NO: 1712086 - RNA, 20 nt, Human
gaauauugcugauggugcaa

SEQ ID NO: 1712087 - RNA, 19 nt, Human
gaauauugcugauggugca

SEQ ID NO: 1712088 - RNA, 22 nt, Human
gaaggggagauaaggguaucug

SEQ ID NO: 1712089 - RNA, 18 nt, Human
gaaguuuaauugacuuau

SEQ ID NO: 1712090 - RNA, 15 nt, Human
gacauugcggacagc

SEQ ID NO: 1712091 - RNA, 14 nt, Human
gacauugcggacag

SEQ ID NO: 1712092 - RNA, 21 nt, Human
gacagugagacucugucucag

SEQ ID NO: 1712093 - RNA, 19 nt, Human
gacagcccgggcucugccu

SEQ ID NO: 1712094 - RNA, 18 nt, Human
gacagcccgggcucugcc

SEQ ID NO: 1712095 - RNA, 20 nt, Human
gacagcccgggcucugccuc

SEQ ID NO: 1712096 - RNA, 16 nt, Human
gacagaagcagcucuu

SEQ ID NO: 1712097 - RNA, 19 nt, Human
gacauuguuggccaaagcc

SEQ ID NO: 1712098 - RNA, 18 nt, Human
gaccagggauuuccauga

SEQ ID NO: 1712099 - RNA, 19 nt, Human
gaccaucccugaaggcccc

SEQ ID NO: 1712100 - RNA, 18 nt, Human
gaccaucccugaaggccc

SEQ ID NO: 1712101 - RNA, 13 nt, Human
gaccaucccugaa

SEQ ID NO: 1712102 - RNA, 12 nt, Human
gaccaucccuga

SEQ ID NO: 1712103 - RNA, 20 nt, Human
gaccagggauuuccaugaug

SEQ ID NO: 1712104 - RNA, 13 nt, Human
gaccauacuaauu

SEQ ID NO: 1712105 - RNA, 21 nt, Human
gacagaaagcagaacagugau

SEQ ID NO: 1712106 - RNA, 17 nt, Human
gacagcccgggcucugc

SEQ ID NO: 1712107 - RNA, 15 nt, Human
gacagaagcagcucu

SEQ ID NO: 1712108 - RNA, 16 nt, Human
gacacagcucuucucc

SEQ ID NO: 1712109 - RNA, 14 nt, Human
gacacagcucuucu

SEQ ID NO: 1712110 - RNA, 12 nt, Human
gacacaggcccg

SEQ ID NO: 1712111 - RNA, 23 nt, Human
gacacagcucuucuccaggcugu

SEQ ID NO: 1712112 - RNA, 22 nt, Human
gacacagcucuucuccaggcug

SEQ ID NO: 1712113 - RNA, 17 nt, Human
gacacagcucuucucca

SEQ ID NO: 1712114 - RNA, 22 nt, Human
gacugugugcucaggagcccug

SEQ ID NO: 1712115 - RNA, 14 nt, Human
gacugaauuucuuu

SEQ ID NO: 1712116 - RNA, 16 nt, Human
gacugaauuucuuuug

SEQ ID NO: 1712117 - RNA, 23 nt, Human
gacuguacuccucccaggcgccc

SEQ ID NO: 1712118 - RNA, 18 nt, Human
gacuguacuccucccagg

SEQ ID NO: 1712119 - RNA, 11 nt, Human
gacuguagaaa

SEQ ID NO: 1712120 - RNA, 19 nt, Human
gacucugucucaaaaaaac

SEQ ID NO: 1712121 - RNA, 22 nt, Human
gacucaccucccccaucucuuc

SEQ ID NO: 1712122 - RNA, 15 nt, Human
gacucaccuccccca

SEQ ID NO: 1712123 - RNA, 16 nt, Human
gacucugccuccucuu

SEQ ID NO: 1712124 - RNA, 12 nt, Human
gacucugccucc

SEQ ID NO: 1712125 - RNA, 15 nt, Human
gacgcucucuggccu

SEQ ID NO: 1712126 - RNA, 19 nt, Human
gacgcuacccgggaagggg

SEQ ID NO: 1712127 - RNA, 18 nt, Human
gacgcuacccgggaaggg

SEQ ID NO: 1712128 - RNA, 16 nt, Human
gacgcuacccgggaag

SEQ ID NO: 1712129 - RNA, 18 nt, Human
gacgccaucccagcccca

SEQ ID NO: 1712130 - RNA, 17 nt, Human
gacgccaucccagcccc

SEQ ID NO: 1712131 - RNA, 19 nt, Human
gacgccaucccagccccaa

SEQ ID NO: 1712132 - RNA, 16 nt, Human
gacgcucucuggccuu

SEQ ID NO: 1712133 - RNA, 17 nt, Human
gacgcucucuggccuuc

SEQ ID NO: 1712134 - RNA, 20 nt, Human
gaccaucccugaaggccccg

SEQ ID NO: 1712135 - RNA, 14 nt, Human
gaccucugcagcaa

SEQ ID NO: 1712136 - RNA, 16 nt, Human
gacgccaucccagccc

SEQ ID NO: 1712137 - RNA, 14 nt, Human
gaccugaggcccuu

SEQ ID NO: 1712138 - RNA, 13 nt, Human
gaccugaggcccu

SEQ ID NO: 1712139 - RNA, 11 nt, Human
gaccugaggcc

SEQ ID NO: 1712140 - RNA, 22 nt, Human
gggaacagacuggaagcacagc

SEQ ID NO: 1712141 - RNA, 19 nt, Human
aaaaaucucaaauuucuaa

SEQ ID NO: 1712142 - RNA, 20 nt, Human
aaaaaucucaaauuucuaaa

SEQ ID NO: 1712143 - RNA, 14 nt, Human
gggaacagacugga

SEQ ID NO: 1712144 - RNA, 15 nt, Human
aaaaccaauguucuc

SEQ ID NO: 1712145 - RNA, 18 nt, Human
aaaacguggcugcuucaa

SEQ ID NO: 1712146 - RNA, 17 nt, Human
aaaacguggcugcuuca

SEQ ID NO: 1712147 - RNA, 16 nt, Human
aaaacguggcugcuuc

SEQ ID NO: 1712148 - RNA, 14 nt, Human
aaaacguggcugcu

SEQ ID NO: 1712149 - RNA, 21 nt, Human
aaaacguggcugcuucaagga

SEQ ID NO: 1712150 - RNA, 19 nt, Human
aaaaccaagccguggcuuc

SEQ ID NO: 1712151 - RNA, 22 nt, Human
aaaacugauuuuuuuuuccuuc

SEQ ID NO: 1712152 - RNA, 18 nt, Human
aaaacugauuuuuuuuuc

SEQ ID NO: 1712153 - RNA, 20 nt, Human
aaaacugcugacuguuuucu

SEQ ID NO: 1712154 - RNA, 19 nt, Human
aaaacugcucauaugaugu

SEQ ID NO: 1712155 - RNA, 22 nt, Human
aaaagcuccauuuuuagugaaa

SEQ ID NO: 1712156 - RNA, 14 nt, Human
aaaagcugggcagg

SEQ ID NO: 1712157 - RNA, 21 nt, Human
aaaacuuuaugcuaagugaaa

SEQ ID NO: 1712158 - RNA, 18 nt, Human
aaaagccuguuuaagaga

SEQ ID NO: 1712159 - RNA, 16 nt, Human
aaaagccuguuuaaga

SEQ ID NO: 1712160 - RNA, 20 nt, Human
gggaggcagagguugcagug

SEQ ID NO: 1712161 - RNA, 19 nt, Human
gggaggccaaggugggagg

SEQ ID NO: 1712162 - RNA, 13 nt, Human
gggagggcuccag

SEQ ID NO: 1712163 - RNA, 11 nt, Human
gggagggcucc

SEQ ID NO: 1712164 - RNA, 13 nt, Human
gggagggccuggg

SEQ ID NO: 1712165 - RNA, 15 nt, Human
gggauuuccaugaug

SEQ ID NO: 1712166 - RNA, 19 nt, Human
aaaagggacugagaaauuu

SEQ ID NO: 1712167 - RNA, 16 nt, Human
aaaagggacugagaaa

SEQ ID NO: 1712168 - RNA, 18 nt, Human
aaaagggaacugaacauu

SEQ ID NO: 1712169 - RNA, 14 nt, Human
aaaauaccagccag

SEQ ID NO: 1712170 - RNA, 15 nt, Human
aaaauaccagccagu

SEQ ID NO: 1712171 - RNA, 12 nt, Human
aaaauaaauuau

SEQ ID NO: 1712172 - RNA, 18 nt, Human
aaaauauauaucaaauau

SEQ ID NO: 1712173 - RNA, 13 nt, Human
aaaauauagcuaa

SEQ ID NO: 1712174 - RNA, 12 nt, Human
aaaauagccugc

SEQ ID NO: 1712175 - RNA, 18 nt, Human
aaaauaguggugugauuu

SEQ ID NO: 1712176 - RNA, 17 nt, Human
ggcugcagggaguccga

SEQ ID NO: 1712177 - RNA, 20 nt, Human
ggcugcaugcgggcuuccuc

SEQ ID NO: 1712178 - RNA, 22 nt, Human
ggcugcaugcgggcuuccuccu

SEQ ID NO: 1712179 - RNA, 24 nt, Human
ggcucuuccaggcugggagagccu

SEQ ID NO: 1712180 - RNA, 23 nt, Human
ggcucuuccaggcugggagagcc

SEQ ID NO: 1712181 - RNA, 18 nt, Human
ggcucgagcaugccugga

SEQ ID NO: 1712182 - RNA, 16 nt, Human
ggcucccuucccaccu

SEQ ID NO: 1712183 - RNA, 18 nt, Human
ggcucccuucccaccucu

SEQ ID NO: 1712184 - RNA, 17 nt, Human
ggcucccuucccaccuc

SEQ ID NO: 1712185 - RNA, 22 nt, Human
ggcucccuucccaccucucuca

SEQ ID NO: 1712186 - RNA, 20 nt, Human
ggcucccuucccaccucucu

SEQ ID NO: 1712187 - RNA, 17 nt, Human
ggcuccucccggugccc

SEQ ID NO: 1712188 - RNA, 12 nt, Human
ggcuccugccac

SEQ ID NO: 1712189 - RNA, 13 nt, Human
ggcuccugccacc

SEQ ID NO: 1712190 - RNA, 13 nt, Human
ggcugggagagcc

SEQ ID NO: 1712191 - RNA, 22 nt, Human
ggcuggccuggccccucagggu

SEQ ID NO: 1712192 - RNA, 17 nt, Human
ggcuggccuggccccuc

SEQ ID NO: 1712193 - RNA, 15 nt, Human
ggcuggcccugcccu

SEQ ID NO: 1712194 - RNA, 14 nt, Human
ggcuggcccugccc

SEQ ID NO: 1712195 - RNA, 13 nt, Human
ggcuggcccugcc

SEQ ID NO: 1712196 - RNA, 20 nt, Human
ggcuggcgugcaguggugcg

SEQ ID NO: 1712197 - RNA, 16 nt, Human
ggcuggcgugcagugg

SEQ ID NO: 1712198 - RNA, 14 nt, Human
ggcuggcgugcagu

SEQ ID NO: 1712199 - RNA, 16 nt, Human
ggcuggcccugcccug

SEQ ID NO: 1712200 - RNA, 13 nt, Human
aaaaaaacacaaa

SEQ ID NO: 1712201 - RNA, 20 nt, Human
aaaaagcuccaaaugcagcu

SEQ ID NO: 1712202 - RNA, 23 nt, Human
gggaaaaucagccugcuccagcu

SEQ ID NO: 1712203 - RNA, 13 nt, Human
gggaaaaucagcc

SEQ ID NO: 1712204 - RNA, 16 nt, Human
ggcuucaguggcagcu

SEQ ID NO: 1712205 - RNA, 15 nt, Human
ggcugucaauuacag

SEQ ID NO: 1712206 - RNA, 23 nt, Human
ggcuguaucccaugagccucagc

SEQ ID NO: 1712207 - RNA, 22 nt, Human
ggcuguaucccaugagccucag

SEQ ID NO: 1712208 - RNA, 20 nt, Human
ggcuguaucccaugagccuc

SEQ ID NO: 1712209 - RNA, 15 nt, Human
ggcuucaguggcagc

SEQ ID NO: 1712210 - RNA, 16 nt, Human
ggcuggugucaccuga

SEQ ID NO: 1712211 - RNA, 19 nt, Human
ggcuguaucccaugagccu

SEQ ID NO: 1712212 - RNA, 13 nt, Human
aaaggaauuuaaa

SEQ ID NO: 1712213 - RNA, 11 nt, Human
aaaggaaagag

SEQ ID NO: 1712214 - RNA, 17 nt, Human
aaagcagugcaugcugu

SEQ ID NO: 1712215 - RNA, 22 nt, Human
aaagcagugcaugcugucccuu

SEQ ID NO: 1712216 - RNA, 21 nt, Human
aaagcagugcaugcugucccu

SEQ ID NO: 1712217 - RNA, 18 nt, Human
aaagcuaggccuggccag

SEQ ID NO: 1712218 - RNA, 13 nt, Human
aaagcuagaaaug

SEQ ID NO: 1712219 - RNA, 14 nt, Human
ggucugugagaugc

SEQ ID NO: 1712220 - RNA, 24 nt, Human
ggucugugagaugcuagaacuccc

SEQ ID NO: 1712221 - RNA, 12 nt, Human
ggucuguucuuu

SEQ ID NO: 1712222 - RNA, 22 nt, Human
ggucuugaacuccuggccucaa

SEQ ID NO: 1712223 - RNA, 21 nt, Human
ggucuugaacuccuggccuca

SEQ ID NO: 1712224 - RNA, 17 nt, Human
ggucuguucuuuccaaa

SEQ ID NO: 1712225 - RNA, 19 nt, Human
ggucuguucuuuccaaagu

SEQ ID NO: 1712226 - RNA, 21 nt, Human
ggugauccacucgccuucauc

SEQ ID NO: 1712227 - RNA, 22 nt, Human
ggugcacaagcuccaagcuccc

SEQ ID NO: 1712228 - RNA, 16 nt, Human
ggugcacaagcuccaa

SEQ ID NO: 1712229 - RNA, 18 nt, Human
ggugcaaaguucccuacu

SEQ ID NO: 1712230 - RNA, 17 nt, Human
aaagaauggaaggugga

SEQ ID NO: 1712231 - RNA, 15 nt, Human
aaagacuguacaaag

SEQ ID NO: 1712232 - RNA, 19 nt, Human
aaagacuuuuccaacccuc

SEQ ID NO: 1712233 - RNA, 18 nt, Human
aaagaggcuaugugagca

SEQ ID NO: 1712234 - RNA, 13 nt, Human
aaagaggcuaugu

SEQ ID NO: 1712235 - RNA, 15 nt, Human
aaagaugagugagca

SEQ ID NO: 1712236 - RNA, 16 nt, Human
aaagauguucuggaua

SEQ ID NO: 1712237 - RNA, 20 nt, Human
aaagaugagcuuugucuacu

SEQ ID NO: 1712238 - RNA, 14 nt, Human
aaacuuuaccuuuu

SEQ ID NO: 1712239 - RNA, 14 nt, Human
ggucccaccccaca

SEQ ID NO: 1712240 - RNA, 12 nt, Human
ggucccacccca

SEQ ID NO: 1712241 - RNA, 22 nt, Human
gguccacccaggagccccgagg

SEQ ID NO: 1712242 - RNA, 20 nt, Human
gguccacccaggagccccga

SEQ ID NO: 1712243 - RNA, 23 nt, Human
gguauuggcuagagguucaaaga

SEQ ID NO: 1712244 - RNA, 19 nt, Human
gguccacccaggagccccg

SEQ ID NO: 1712245 - RNA, 18 nt, Human
gguauaaguggugugugu

SEQ ID NO: 1712246 - RNA, 21 nt, Human
aaaauguaggguuauaauaau

SEQ ID NO: 1712247 - RNA, 21 nt, Human
aaaauggacguguuaugacuc

SEQ ID NO: 1712248 - RNA, 19 nt, Human
aaaauuuuuaaucuuuaau

SEQ ID NO: 1712249 - RNA, 16 nt, Human
aaaauuuuuaaucuuu

SEQ ID NO: 1712250 - RNA, 18 nt, Human
aaacaagaccacguuucu

SEQ ID NO: 1712251 - RNA, 13 nt, Human
aaacaaagaaauu

SEQ ID NO: 1712252 - RNA, 16 nt, Human
aaacaugcuacacacu

SEQ ID NO: 1712253 - RNA, 22 nt, Human
aaacaugcuacacacugcaugu

SEQ ID NO: 1712254 - RNA, 17 nt, Human
ggggaccucaggccugg

SEQ ID NO: 1712255 - RNA, 16 nt, Human
ggggaccucaggccug

SEQ ID NO: 1712256 - RNA, 15 nt, Human
ggggaccucaggccu

SEQ ID NO: 1712257 - RNA, 13 nt, Human
ggggaccucaggc

SEQ ID NO: 1712258 - RNA, 23 nt, Human
ggggcccugccuccuuugugagg

SEQ ID NO: 1712259 - RNA, 19 nt, Human
ggggcccugccuccuuugu

SEQ ID NO: 1712260 - RNA, 16 nt, Human
ggggcccugccuccuu

SEQ ID NO: 1712261 - RNA, 19 nt, Human
ggggccaguuggucccccu

SEQ ID NO: 1712262 - RNA, 17 nt, Human
ggggccaguuggucccc

SEQ ID NO: 1712263 - RNA, 16 nt, Human
ggggccaggcuggguc

SEQ ID NO: 1712264 - RNA, 14 nt, Human
ggggccaggcuggg

SEQ ID NO: 1712265 - RNA, 13 nt, Human
ggggccaggcugg

SEQ ID NO: 1712266 - RNA, 23 nt, Human
aaacggccucacuaggcuucugg

SEQ ID NO: 1712267 - RNA, 21 nt, Human
aaaccacauuggagauguuua

SEQ ID NO: 1712268 - RNA, 20 nt, Human
aaacguggcugcuucaagga

SEQ ID NO: 1712269 - RNA, 17 nt, Human
aaacguggcugcuucaa

SEQ ID NO: 1712270 - RNA, 16 nt, Human
aaacguggcugcuuca

SEQ ID NO: 1712271 - RNA, 12 nt, Human
aaacgugaaaau

SEQ ID NO: 1712272 - RNA, 16 nt, Human
aaacuggauuaaacuu

SEQ ID NO: 1712273 - RNA, 21 nt, Human
aaacugcccccucugcccugc

SEQ ID NO: 1712274 - RNA, 20 nt, Human
aaacugcccccucugcccug

SEQ ID NO: 1712275 - RNA, 19 nt, Human
aaacugcccccucugcccu

SEQ ID NO: 1712276 - RNA, 17 nt, Human
aaacugcccccucugcc

SEQ ID NO: 1712277 - RNA, 13 nt, Human
aaacugcccccuc

SEQ ID NO: 1712278 - RNA, 11 nt, Human
aaacugccccc

SEQ ID NO: 1712279 - RNA, 12 nt, Human
aaacugcccccu

SEQ ID NO: 1712280 - RNA, 11 nt, Human
aaacuccugac

SEQ ID NO: 1712281 - RNA, 15 nt, Human
aaacuccagaugcca

SEQ ID NO: 1712282 - RNA, 22 nt, Human
aaacuccagaugccacaaugga

SEQ ID NO: 1712283 - RNA, 14 nt, Human
aaacauuaaaauau

SEQ ID NO: 1712284 - RNA, 16 nt, Human
aaaccaagccguggcu

SEQ ID NO: 1712285 - RNA, 14 nt, Human
aaaccaagccgugg

SEQ ID NO: 1712286 - RNA, 23 nt, Human
gggucucacuauguugcccaggc

SEQ ID NO: 1712287 - RNA, 12 nt, Human
gggucucacucu

SEQ ID NO: 1712288 - RNA, 22 nt, Human
gggucucacuauguugcccagg

SEQ ID NO: 1712289 - RNA, 23 nt, Human
aaacauguuucuuuguaaugaaa

SEQ ID NO: 1712290 - RNA, 22 nt, Human
aaacauguuucuuuguaaugaa

SEQ ID NO: 1712291 - RNA, 19 nt, Human
aaacauguuucuuuguaau

SEQ ID NO: 1712292 - RNA, 20 nt, Human
ggguaucaggugcugccauc

SEQ ID NO: 1712293 - RNA, 23 nt, Human
ggauuaaacuuaaucuaaaugga

SEQ ID NO: 1712294 - RNA, 21 nt, Human
ggauuuugauccaagcugguc

SEQ ID NO: 1712295 - RNA, 13 nt, Human
ggauguucuggga

SEQ ID NO: 1712296 - RNA, 21 nt, Human
ggaugaauuccaaauucugcu

SEQ ID NO: 1712297 - RNA, 22 nt, Human
ggaugagaaagguugaagcacc

SEQ ID NO: 1712298 - RNA, 12 nt, Human
ggaugagaaagg

SEQ ID NO: 1712299 - RNA, 12 nt, Human
ggcagaaggaag

SEQ ID NO: 1712300 - RNA, 17 nt, Human
ggcagccaggccacaag

SEQ ID NO: 1712301 - RNA, 15 nt, Human
ggcagccaggccaca

SEQ ID NO: 1712302 - RNA, 12 nt, Human
ggcagagcagag

SEQ ID NO: 1712303 - RNA, 10 nt, Human
ggcagagcag

SEQ ID NO: 1712304 - RNA, 18 nt, Human
ggcagccgugccuucagc

SEQ ID NO: 1712305 - RNA, 21 nt, Human
ggcagccgugccuucagcucu

SEQ ID NO: 1712306 - RNA, 19 nt, Human
ggcagccgugccuucagcu

SEQ ID NO: 1712307 - RNA, 22 nt, Human
ggcagccgugccuucagcucua

SEQ ID NO: 1712308 - RNA, 14 nt, Human
ggccucccaacuca

SEQ ID NO: 1712309 - RNA, 13 nt, Human
ggccucccaacuc

SEQ ID NO: 1712310 - RNA, 14 nt, Human
ggcccuuccuuuuc

SEQ ID NO: 1712311 - RNA, 13 nt, Human
ggccucccaaagu

SEQ ID NO: 1712312 - RNA, 22 nt, Human
ggcccuuccucuccacugccuu

SEQ ID NO: 1712313 - RNA, 19 nt, Human
ggcccuuccucuccacugc

SEQ ID NO: 1712314 - RNA, 23 nt, Human
ggcccuuccucuccacugccuuc

SEQ ID NO: 1712315 - RNA, 17 nt, Human
ggcccgacagccuggca

SEQ ID NO: 1712316 - RNA, 16 nt, Human
ggcccgacagccuggc

SEQ ID NO: 1712317 - RNA, 19 nt, Human
ggccagguggccacuccag

SEQ ID NO: 1712318 - RNA, 12 nt, Human
ggcauuguggga

SEQ ID NO: 1712319 - RNA, 12 nt, Human
ggccaaaggaag

SEQ ID NO: 1712320 - RNA, 15 nt, Human
ggccaaagccaaagc

SEQ ID NO: 1712321 - RNA, 13 nt, Human
ggccaaaggaagc

SEQ ID NO: 1712322 - RNA, 20 nt, Human
ggccagaugcaccagcccuu

SEQ ID NO: 1712323 - RNA, 19 nt, Human
ggccagaugcaccagcccu

SEQ ID NO: 1712324 - RNA, 23 nt, Human
ggccagagggagugacagaggca

SEQ ID NO: 1712325 - RNA, 13 nt, Human
ggccaagguggga

SEQ ID NO: 1712326 - RNA, 21 nt, Human
ggccaaggaugccccgucccc

SEQ ID NO: 1712327 - RNA, 15 nt, Human
ggaggcugagauggg

SEQ ID NO: 1712328 - RNA, 19 nt, Human
ggaggcugagaugggagaa

SEQ ID NO: 1712329 - RNA, 21 nt, Human
ggaggcucuggagcccacugu

SEQ ID NO: 1712330 - RNA, 16 nt, Human
ggaggucgaggcagga

SEQ ID NO: 1712331 - RNA, 15 nt, Human
ggaggucgaggcagg

SEQ ID NO: 1712332 - RNA, 18 nt, Human
ggaggucgaggcaggagg

SEQ ID NO: 1712333 - RNA, 21 nt, Human
ggaggcaugugaugagaggaa

SEQ ID NO: 1712334 - RNA, 12 nt, Human
ggaggaagagaa

SEQ ID NO: 1712335 - RNA, 20 nt, Human
ggaggaaaaccaagccgugg

SEQ ID NO: 1712336 - RNA, 22 nt, Human
ggaggaaaaccaagccguggcu

SEQ ID NO: 1712337 - RNA, 21 nt, Human
ggaggaaaaccaagccguggc

SEQ ID NO: 1712338 - RNA, 13 nt, Human
ggaggccagccuu

SEQ ID NO: 1712339 - RNA, 20 nt, Human
ggaggccaaggugggaggau

SEQ ID NO: 1712340 - RNA, 18 nt, Human
ggaggccaaggugggagg

SEQ ID NO: 1712341 - RNA, 20 nt, Human
ggaggcucuggagcccacug

SEQ ID NO: 1712342 - RNA, 17 nt, Human
ggaggcucuggagccca

SEQ ID NO: 1712343 - RNA, 16 nt, Human
ggagcugaguggggga

SEQ ID NO: 1712344 - RNA, 22 nt, Human
ggagcugccuguucagcuccag

SEQ ID NO: 1712345 - RNA, 22 nt, Human
ggagcccacuguacuugcucuu

SEQ ID NO: 1712346 - RNA, 18 nt, Human
ggagcccacuguacuugc

SEQ ID NO: 1712347 - RNA, 21 nt, Human
ggagcagccacauuccugaug

SEQ ID NO: 1712348 - RNA, 13 nt, Human
ggagcagccacau

SEQ ID NO: 1712349 - RNA, 15 nt, Human
ggagcccacuguacu

SEQ ID NO: 1712350 - RNA, 18 nt, Human
ggacuuuuauuuccagug

SEQ ID NO: 1712351 - RNA, 19 nt, Human
ggagaaaauggacguguua

SEQ ID NO: 1712352 - RNA, 17 nt, Human
ggacuuggaagcuccgc

SEQ ID NO: 1712353 - RNA, 15 nt, Human
ggacuuggaagcucc

SEQ ID NO: 1712354 - RNA, 22 nt, Human
ggagaaccaaaaagaggcuaug

SEQ ID NO: 1712355 - RNA, 18 nt, Human
ggagaaaugaaaaaauau

SEQ ID NO: 1712356 - RNA, 13 nt, Human
ggagaacuagaga

SEQ ID NO: 1712357 - RNA, 16 nt, Human
ggagacugucucaaga

SEQ ID NO: 1712358 - RNA, 22 nt, Human
ggacucaaugcacugacauugu

SEQ ID NO: 1712359 - RNA, 16 nt, Human
ggacuaggguccuggg

SEQ ID NO: 1712360 - RNA, 12 nt, Human
ggaccucaggcc

SEQ ID NO: 1712361 - RNA, 20 nt, Human
ggacuacaggugugagucac

SEQ ID NO: 1712362 - RNA, 23 nt, Human
ggacugugugcucaggagcccug

SEQ ID NO: 1712363 - RNA, 22 nt, Human
ggacugugugcucaggagcccu

SEQ ID NO: 1712364 - RNA, 17 nt, Human
ggacuuagcugggagaa

SEQ ID NO: 1712365 - RNA, 15 nt, Human
ggagagcuagcagca

SEQ ID NO: 1712366 - RNA, 18 nt, Human
ggagagccuuccaggggu

SEQ ID NO: 1712367 - RNA, 17 nt, Human
ggagagccuuccagggg

SEQ ID NO: 1712368 - RNA, 22 nt, Human
ggagagccuuccagggguggga

SEQ ID NO: 1712369 - RNA, 16 nt, Human
ggagagccuuccaggg

SEQ ID NO: 1712370 - RNA, 13 nt, Human
ggagagccuucca

SEQ ID NO: 1712371 - RNA, 14 nt, Human
ggagagagacucca

SEQ ID NO: 1712372 - RNA, 19 nt, Human
gcuuguacauaaugcgugc

SEQ ID NO: 1712373 - RNA, 18 nt, Human
ggacccugaggcccagag

SEQ ID NO: 1712374 - RNA, 15 nt, Human
ggacccugaggccca

SEQ ID NO: 1712375 - RNA, 14 nt, Human
ggacccugaggccc

SEQ ID NO: 1712376 - RNA, 21 nt, Human
ggacccggaggggccuggcag

SEQ ID NO: 1712377 - RNA, 20 nt, Human
ggacccggaggggccuggca

SEQ ID NO: 1712378 - RNA, 19 nt, Human
ggacccugaggcccagagg

SEQ ID NO: 1712379 - RNA, 21 nt, Human
ggaccccgagccuggcuccaa

SEQ ID NO: 1712380 - RNA, 22 nt, Human
gcuucaaggauccugagccaga

SEQ ID NO: 1712381 - RNA, 14 nt, Human
gcuuaacuucacau

SEQ ID NO: 1712382 - RNA, 20 nt, Human
gcuucacggaagagccuugc

SEQ ID NO: 1712383 - RNA, 13 nt, Human
gcugugcugcccu

SEQ ID NO: 1712384 - RNA, 12 nt, Human
gcugugcugccc

SEQ ID NO: 1712385 - RNA, 21 nt, Human
gcugugcucuggacaggcaug

SEQ ID NO: 1712386 - RNA, 22 nt, Human
gcugugcugcccugcccaccug

SEQ ID NO: 1712387 - RNA, 19 nt, Human
gcugugcugcccugcccac

SEQ ID NO: 1712388 - RNA, 22 nt, Human
gcuguuggcugggggccucagu

SEQ ID NO: 1712389 - RNA, 21 nt, Human
gcuguuggcugggggccucag

SEQ ID NO: 1712390 - RNA, 23 nt, Human
gcuguaucccaugagccucagca

SEQ ID NO: 1712391 - RNA, 20 nt, Human
gcuguaucccaugagccuca

SEQ ID NO: 1712392 - RNA, 14 nt, Human
gcugguuuuucagu

SEQ ID NO: 1712393 - RNA, 15 nt, Human
gcugguuuuucaguu

SEQ ID NO: 1712394 - RNA, 21 nt, Human
gcuggguuggaggguguccca

SEQ ID NO: 1712395 - RNA, 14 nt, Human
gcuggguuggaggg

SEQ ID NO: 1712396 - RNA, 15 nt, Human
gcuggguucugaucc

SEQ ID NO: 1712397 - RNA, 15 nt, Human
gcuggguucuaccca

SEQ ID NO: 1712398 - RNA, 23 nt, Human
gcuucccgcucagcccucccugc

SEQ ID NO: 1712399 - RNA, 18 nt, Human
gcuucccgcucagcccuc

SEQ ID NO: 1712400 - RNA, 17 nt, Human
gcuucccgcucagcccu

SEQ ID NO: 1712401 - RNA, 16 nt, Human
gcuucccgcucagccc

SEQ ID NO: 1712402 - RNA, 15 nt, Human
gcuucccgcucagcc

SEQ ID NO: 1712403 - RNA, 14 nt, Human
gcuuguacauaaug

SEQ ID NO: 1712404 - RNA, 16 nt, Human
gcuuguacauaaugcg

SEQ ID NO: 1712405 - RNA, 19 nt, Human
gcuugggcuucauccuccu

SEQ ID NO: 1712406 - RNA, 15 nt, Human
gcuugggaauuuuau

SEQ ID NO: 1712407 - RNA, 19 nt, Human
gcuugaaacccguggcgcu

SEQ ID NO: 1712408 - RNA, 14 nt, Human
gcuggagcucugcc

SEQ ID NO: 1712409 - RNA, 17 nt, Human
gcuggagcucugcccau

SEQ ID NO: 1712410 - RNA, 12 nt, Human
gcuggagugcag

SEQ ID NO: 1712411 - RNA, 19 nt, Human
gcugggauuacagguguga

SEQ ID NO: 1712412 - RNA, 18 nt, Human
gcugggauuacaggugug

SEQ ID NO: 1712413 - RNA, 17 nt, Human
gcugggauuacaggugu

SEQ ID NO: 1712414 - RNA, 17 nt, Human
gcugggauuacagggau

SEQ ID NO: 1712415 - RNA, 15 nt, Human
gcugggcagaggaaa

SEQ ID NO: 1712416 - RNA, 14 nt, Human
gcugggcagaggaa

SEQ ID NO: 1712417 - RNA, 13 nt, Human
gcugggcagagga

SEQ ID NO: 1712418 - RNA, 19 nt, Human
gcuggccuggccccucagg

SEQ ID NO: 1712419 - RNA, 18 nt, Human
gcuggccuggccccucag

SEQ ID NO: 1712420 - RNA, 16 nt, Human
gcugggauuacaggug

SEQ ID NO: 1712421 - RNA, 23 nt, Human
gcugggauuacaggcuccugcca

SEQ ID NO: 1712422 - RNA, 22 nt, Human
gcugggauuacaggcuccugcc

SEQ ID NO: 1712423 - RNA, 17 nt, Human
gcuggccuggccccuca

SEQ ID NO: 1712424 - RNA, 16 nt, Human
gcuggccuggccccuc

SEQ ID NO: 1712425 - RNA, 15 nt, Human
gcuggagugcaguga

SEQ ID NO: 1712426 - RNA, 14 nt, Human
gcuggagugcagug

SEQ ID NO: 1712427 - RNA, 20 nt, Human
gcugggcucccuucccaccu

SEQ ID NO: 1712428 - RNA, 17 nt, Human
gcugggcucccuuccca

SEQ ID NO: 1712429 - RNA, 16 nt, Human
gcugggcucccuuccc

SEQ ID NO: 1712430 - RNA, 12 nt, Human
gcugggcucccu

SEQ ID NO: 1712431 - RNA, 19 nt, Human
gcugggcagaggaaagcaa

SEQ ID NO: 1712432 - RNA, 17 nt, Human
gcugggcagaggaaagc

SEQ ID NO: 1712433 - RNA, 16 nt, Human
gcugggcagaggaaag

SEQ ID NO: 1712434 - RNA, 14 nt, Human
gcugggcagguugg

SEQ ID NO: 1712435 - RNA, 16 nt, Human
gcugggucgcccugga

SEQ ID NO: 1712436 - RNA, 18 nt, Human
gcugggucgcccuggacu

SEQ ID NO: 1712437 - RNA, 17 nt, Human
gcugggucgcccuggac

SEQ ID NO: 1712438 - RNA, 15 nt, Human
gcuggguguggcgca

SEQ ID NO: 1712439 - RNA, 19 nt, Human
gcugggucgcccuggacug

SEQ ID NO: 1712440 - RNA, 18 nt, Human
gcugccugggaucccuca

SEQ ID NO: 1712441 - RNA, 16 nt, Human
gcugccugggaucccu

SEQ ID NO: 1712442 - RNA, 19 nt, Human
gcugccugggaucccucau

SEQ ID NO: 1712443 - RNA, 13 nt, Human
gcugccugggauc

SEQ ID NO: 1712444 - RNA, 18 nt, Human
gcugagggugagugggug

SEQ ID NO: 1712445 - RNA, 17 nt, Human
gcugcaccggcuggccu

SEQ ID NO: 1712446 - RNA, 16 nt, Human
gcugcaccggcuggcc

SEQ ID NO: 1712447 - RNA, 22 nt, Human
gcugcaccggcuggccuggccc

SEQ ID NO: 1712448 - RNA, 19 nt, Human
gcugcaccggcuggccugg

SEQ ID NO: 1712449 - RNA, 18 nt, Human
gcugcaccggcuggccug

SEQ ID NO: 1712450 - RNA, 23 nt, Human
gcugccauccagguucagcuugu

SEQ ID NO: 1712451 - RNA, 21 nt, Human
gcugccauccagguucagcuu

SEQ ID NO: 1712452 - RNA, 21 nt, Human
gcugccagccgagauagccaa

SEQ ID NO: 1712453 - RNA, 19 nt, Human
gcugccagccgagauagcc

SEQ ID NO: 1712454 - RNA, 22 nt, Human
gcuccugccaccacgcccggcu

SEQ ID NO: 1712455 - RNA, 21 nt, Human
gcucccaggcauuccccagga

SEQ ID NO: 1712456 - RNA, 20 nt, Human
gcucccaggcauuccccagg

SEQ ID NO: 1712457 - RNA, 23 nt, Human
gcucccaggcauuccccaggagg

SEQ ID NO: 1712458 - RNA, 22 nt, Human
gcucccaggcauuccccaggag

SEQ ID NO: 1712459 - RNA, 14 nt, Human
gcuccccagcccca

SEQ ID NO: 1712460 - RNA, 19 nt, Human
gcuccccuaaagccucaaa

SEQ ID NO: 1712461 - RNA, 16 nt, Human
gcucucaggccagcug

SEQ ID NO: 1712462 - RNA, 15 nt, Human
gcucucaggccagcu

SEQ ID NO: 1712463 - RNA, 14 nt, Human
gcucucaggccagc

SEQ ID NO: 1712464 - RNA, 13 nt, Human
gcucucaggccag

SEQ ID NO: 1712465 - RNA, 22 nt, Human
gcucuacagcuaaucagcauuc

SEQ ID NO: 1712466 - RNA, 20 nt, Human
gcucuacagcuaaucagcau

SEQ ID NO: 1712467 - RNA, 12 nt, Human
gcucuuccaggc

SEQ ID NO: 1712468 - RNA, 16 nt, Human
gcucuuccaggcuggg

SEQ ID NO: 1712469 - RNA, 15 nt, Human
gcucuuccaggcugg

SEQ ID NO: 1712470 - RNA, 15 nt, Human
gcucuguccugggag

SEQ ID NO: 1712471 - RNA, 15 nt, Human
gcucuggccuccaag

SEQ ID NO: 1712472 - RNA, 17 nt, Human
gcucuggccuccaaguc

SEQ ID NO: 1712473 - RNA, 16 nt, Human
gcucuguccugggagu

SEQ ID NO: 1712474 - RNA, 19 nt, Human
gcucugucgcccaggcugg

SEQ ID NO: 1712475 - RNA, 17 nt, Human
gcugaaugguuuucaaa

SEQ ID NO: 1712476 - RNA, 20 nt, Human
gcugaaggcucgagcaugcc

SEQ ID NO: 1712477 - RNA, 12 nt, Human
gcugaaggcucg

SEQ ID NO: 1712478 - RNA, 15 nt, Human
gcugacagacacagg

SEQ ID NO: 1712479 - RNA, 14 nt, Human
gcugacagacacag

SEQ ID NO: 1712480 - RNA, 16 nt, Human
gcugacagacacaggc

SEQ ID NO: 1712481 - RNA, 17 nt, Human
gcugacagacacaggcc

SEQ ID NO: 1712482 - RNA, 23 nt, Human
gcucuggagcccacuguacuugc

SEQ ID NO: 1712483 - RNA, 21 nt, Human
gcucugagcaaauguggcucc

SEQ ID NO: 1712484 - RNA, 20 nt, Human
gcucugagcaaauguggcuc

SEQ ID NO: 1712485 - RNA, 16 nt, Human
gcuaguaucaaaagaa

SEQ ID NO: 1712486 - RNA, 15 nt, Human
gcuaggccuggccag

SEQ ID NO: 1712487 - RNA, 14 nt, Human
gcuaggccuggcca

SEQ ID NO: 1712488 - RNA, 21 nt, Human
gcuauugucaccagggcugga

SEQ ID NO: 1712489 - RNA, 20 nt, Human
gcuauugucaccagggcugg

SEQ ID NO: 1712490 - RNA, 16 nt, Human
gcuauugucaccaggg

SEQ ID NO: 1712491 - RNA, 18 nt, Human
gcuaggaacacuccuuca

SEQ ID NO: 1712492 - RNA, 21 nt, Human
gcuaggaacacuccuucacag

SEQ ID NO: 1712493 - RNA, 19 nt, Human
gcuaggaacacuccuucac

SEQ ID NO: 1712494 - RNA, 19 nt, Human
gccuguucagcuccagcuc

SEQ ID NO: 1712495 - RNA, 20 nt, Human
gccuguucagcuccagcuca

SEQ ID NO: 1712496 - RNA, 14 nt, Human
gccuguucagcucc

SEQ ID NO: 1712497 - RNA, 22 nt, Human
gcucagguggggucacucuggc

SEQ ID NO: 1712498 - RNA, 21 nt, Human
gcucagguggggucacucugg

SEQ ID NO: 1712499 - RNA, 15 nt, Human
gcucagagagggugg

SEQ ID NO: 1712500 - RNA, 20 nt, Human
gcucagagagggugggagug

SEQ ID NO: 1712501 - RNA, 18 nt, Human
gcucagagagggugggag

SEQ ID NO: 1712502 - RNA, 22 nt, Human
gcucagagagggugggaguggg

SEQ ID NO: 1712503 - RNA, 14 nt, Human
gcucaggagcccug

SEQ ID NO: 1712504 - RNA, 16 nt, Human
gcucagggccuggcuc

SEQ ID NO: 1712505 - RNA, 13 nt, Human
gcucagggccugg

SEQ ID NO: 1712506 - RNA, 17 nt, Human
gcucagggccuggcuca

SEQ ID NO: 1712507 - RNA, 12 nt, Human
gcucagggccug

SEQ ID NO: 1712508 - RNA, 21 nt, Human
gcucaggagcccugggaggcu

SEQ ID NO: 1712509 - RNA, 18 nt, Human
gcucaggagcccugggag

SEQ ID NO: 1712510 - RNA, 15 nt, Human
gcucaggagcccugg

SEQ ID NO: 1712511 - RNA, 22 nt, Human
gccagacaucaacagauaaaua

SEQ ID NO: 1712512 - RNA, 15 nt, Human
gccagaauuucaaac

SEQ ID NO: 1712513 - RNA, 23 nt, Human
gccagcaggcucucaggccagcu

SEQ ID NO: 1712514 - RNA, 21 nt, Human
gccagcaggcucucaggccag

SEQ ID NO: 1712515 - RNA, 20 nt, Human
gccagcaggcucucaggcca

SEQ ID NO: 1712516 - RNA, 19 nt, Human
gccagcaggcucucaggcc

SEQ ID NO: 1712517 - RNA, 18 nt, Human
gccagcaggcucucaggc

SEQ ID NO: 1712518 - RNA, 17 nt, Human
gccagcaggcucucagg

SEQ ID NO: 1712519 - RNA, 16 nt, Human
gccagcaggcucucag

SEQ ID NO: 1712520 - RNA, 13 nt, Human
gccagcaggcucu

SEQ ID NO: 1712521 - RNA, 13 nt, Human
gccaggccagagg

SEQ ID NO: 1712522 - RNA, 17 nt, Human
gccaggcccucugccca

SEQ ID NO: 1712523 - RNA, 16 nt, Human
gccaggcccucugccc

SEQ ID NO: 1712524 - RNA, 21 nt, Human
gccaggcccucugcccacucc

SEQ ID NO: 1712525 - RNA, 20 nt, Human
gccaggcccucugcccacuc

SEQ ID NO: 1712526 - RNA, 19 nt, Human
gccaggcccucugcccacu

SEQ ID NO: 1712527 - RNA, 23 nt, Human
gccaggccacaagacccuugugg

SEQ ID NO: 1712528 - RNA, 12 nt, Human
gccaggccagag

SEQ ID NO: 1712529 - RNA, 20 nt, Human
gccauauucuguuggccagu

SEQ ID NO: 1712530 - RNA, 19 nt, Human
gccauauucuguuggccag

SEQ ID NO: 1712531 - RNA, 14 nt, Human
gccauguuggccag

SEQ ID NO: 1712532 - RNA, 18 nt, Human
gccauguuggccaggcug

SEQ ID NO: 1712533 - RNA, 17 nt, Human
gccauguuggccaggcu

SEQ ID NO: 1712534 - RNA, 16 nt, Human
gccauguuggccaggc

SEQ ID NO: 1712535 - RNA, 15 nt, Human
gccauguuggccagg

SEQ ID NO: 1712536 - RNA, 24 nt, Human
gccauguuggccaggcuggucuca

SEQ ID NO: 1712537 - RNA, 22 nt, Human
gccauguuggccaggcuggucu

SEQ ID NO: 1712538 - RNA, 20 nt, Human
gccauguuggccaggcuggu

SEQ ID NO: 1712539 - RNA, 19 nt, Human
gccauguuggccaggcugg

SEQ ID NO: 1712540 - RNA, 18 nt, Human
gccauuccccgucucugg

SEQ ID NO: 1712541 - RNA, 17 nt, Human
gccauuccccgucucug

SEQ ID NO: 1712542 - RNA, 17 nt, Human
gcccacgcuggagugca

SEQ ID NO: 1712543 - RNA, 16 nt, Human
gcccacgcuggagugc

SEQ ID NO: 1712544 - RNA, 15 nt, Human
gcccacgcuggagug

SEQ ID NO: 1712545 - RNA, 14 nt, Human
gcccacgcccccac

SEQ ID NO: 1712546 - RNA, 13 nt, Human
gcccacgccccca

SEQ ID NO: 1712547 - RNA, 18 nt, Human
gcccaccuuggcucaagu

SEQ ID NO: 1712548 - RNA, 18 nt, Human
gcacuuggagacuuguau

SEQ ID NO: 1712549 - RNA, 20 nt, Human
gccacauuccugaugcuucu

SEQ ID NO: 1712550 - RNA, 16 nt, Human
gccacauuccugaugc

SEQ ID NO: 1712551 - RNA, 21 nt, Human
gccaccaacauacucccaucu

SEQ ID NO: 1712552 - RNA, 20 nt, Human
gccaccaacauacucccauc

SEQ ID NO: 1712553 - RNA, 19 nt, Human
gccaccaacauacucccau

SEQ ID NO: 1712554 - RNA, 22 nt, Human
gccaccaacauacucccaucug

SEQ ID NO: 1712555 - RNA, 13 nt, Human
gccaccacgcccg

SEQ ID NO: 1712556 - RNA, 14 nt, Human
gccaccacgcccgg

SEQ ID NO: 1712557 - RNA, 19 nt, Human
gccacugugaagagaacca

SEQ ID NO: 1712558 - RNA, 18 nt, Human
gccacugugaagagaacc

SEQ ID NO: 1712559 - RNA, 17 nt, Human
gccacugccucuuccuc

SEQ ID NO: 1712560 - RNA, 16 nt, Human
gccacugccucuuccu

SEQ ID NO: 1712561 - RNA, 13 nt, Human
gccacugccucuu

SEQ ID NO: 1712562 - RNA, 12 nt, Human
gccacugccucu

SEQ ID NO: 1712563 - RNA, 21 nt, Human
gccacuugaugacccccaacc

SEQ ID NO: 1712564 - RNA, 23 nt, Human
gccacugcaccgggccacagaga

SEQ ID NO: 1712565 - RNA, 19 nt, Human
gccacccuggggagaaagu

SEQ ID NO: 1712566 - RNA, 13 nt, Human
gccacccugggga

SEQ ID NO: 1712567 - RNA, 21 nt, Human
gccacugcacuauagccuagg

SEQ ID NO: 1712568 - RNA, 15 nt, Human
gccuggccccucagg

SEQ ID NO: 1712569 - RNA, 17 nt, Human
gccuggccccucagggu

SEQ ID NO: 1712570 - RNA, 16 nt, Human
gccuggccccucaggg

SEQ ID NO: 1712571 - RNA, 10 nt, Human
gccuggccug

SEQ ID NO: 1712572 - RNA, 22 nt, Human
gccuggccccucagggucccug

SEQ ID NO: 1712573 - RNA, 20 nt, Human
gccuggccccucaggguccc

SEQ ID NO: 1712574 - RNA, 18 nt, Human
gccugggaucccucaucc

SEQ ID NO: 1712575 - RNA, 21 nt, Human
gccugggaucccucauccuca

SEQ ID NO: 1712576 - RNA, 14 nt, Human
gccugggaucccuc

SEQ ID NO: 1712577 - RNA, 22 nt, Human
gccugggaggucaaggcugcag

SEQ ID NO: 1712578 - RNA, 21 nt, Human
gccugggaggucaaggcugca

SEQ ID NO: 1712579 - RNA, 16 nt, Human
gccugccucuucucua

SEQ ID NO: 1712580 - RNA, 17 nt, Human
gccugccuguucccauu

SEQ ID NO: 1712581 - RNA, 13 nt, Human
gccuccuccagcc

SEQ ID NO: 1712582 - RNA, 13 nt, Human
gccuccugugugu

SEQ ID NO: 1712583 - RNA, 12 nt, Human
gccucugggacu

SEQ ID NO: 1712584 - RNA, 14 nt, Human
gccucugggacugg

SEQ ID NO: 1712585 - RNA, 20 nt, Human
gccugcccaggccccugcca

SEQ ID NO: 1712586 - RNA, 19 nt, Human
gccugcccaggccccugcc

SEQ ID NO: 1712587 - RNA, 18 nt, Human
gccugcccaggccccugc

SEQ ID NO: 1712588 - RNA, 23 nt, Human
gccucuucucuacucuagggaaa

SEQ ID NO: 1712589 - RNA, 12 nt, Human
gccucuucucua

SEQ ID NO: 1712590 - RNA, 12 nt, Human
gccucuuccucc

SEQ ID NO: 1712591 - RNA, 22 nt, Human
gccucuuccucccucauuccac

SEQ ID NO: 1712592 - RNA, 19 nt, Human
gccccaaaacucuccucug

SEQ ID NO: 1712593 - RNA, 18 nt, Human
gccccaaaacucuccucu

SEQ ID NO: 1712594 - RNA, 14 nt, Human
gccccugcccggcu

SEQ ID NO: 1712595 - RNA, 13 nt, Human
gccccugcccggc

SEQ ID NO: 1712596 - RNA, 14 nt, Human
gcccccucugcccu

SEQ ID NO: 1712597 - RNA, 22 nt, Human
gccccuggaugcagccucacag

SEQ ID NO: 1712598 - RNA, 18 nt, Human
gccccuggaugcagccuc

SEQ ID NO: 1712599 - RNA, 16 nt, Human
gccccuggaugcagcc

SEQ ID NO: 1712600 - RNA, 15 nt, Human
gccccugcccggcug

SEQ ID NO: 1712601 - RNA, 22 nt, Human
gcccuaaaguguauuuuuuuac

SEQ ID NO: 1712602 - RNA, 15 nt, Human
gcccacucccugcaa

SEQ ID NO: 1712603 - RNA, 14 nt, Human
gcccacucccugca

SEQ ID NO: 1712604 - RNA, 19 nt, Human
gcccacucccugcaaccug

SEQ ID NO: 1712605 - RNA, 13 nt, Human
gcccacucccugc

SEQ ID NO: 1712606 - RNA, 23 nt, Human
gcccacuagacccacuggacuca

SEQ ID NO: 1712607 - RNA, 17 nt, Human
gcccacuagacccacug

SEQ ID NO: 1712608 - RNA, 23 nt, Human
gcccugcugagucccaggcugag

SEQ ID NO: 1712609 - RNA, 22 nt, Human
gcccugcugagucccaggcuga

SEQ ID NO: 1712610 - RNA, 21 nt, Human
gcccugcugagucccaggcug

SEQ ID NO: 1712611 - RNA, 22 nt, Human
gcccugccuccuuugugaggaa

SEQ ID NO: 1712612 - RNA, 16 nt, Human
gcccugccuccuuugu

SEQ ID NO: 1712613 - RNA, 16 nt, Human
gcccugcugaguccca

SEQ ID NO: 1712614 - RNA, 16 nt, Human
gccgccaugcuccugg

SEQ ID NO: 1712615 - RNA, 15 nt, Human
gccgccaugcuccug

SEQ ID NO: 1712616 - RNA, 20 nt, Human
gcccuuaccugccaggaagc

SEQ ID NO: 1712617 - RNA, 16 nt, Human
gcccuuaccugccagg

SEQ ID NO: 1712618 - RNA, 13 nt, Human
ccuuaucaaagga

SEQ ID NO: 1712619 - RNA, 20 nt, Human
ccuuaggugauccacucgcc

SEQ ID NO: 1712620 - RNA, 12 nt, Human
ccuuauggaaca

SEQ ID NO: 1712621 - RNA, 18 nt, Human
ccuuaucaaaggacacca

SEQ ID NO: 1712622 - RNA, 14 nt, Human
ccuuaucaaaggac

SEQ ID NO: 1712623 - RNA, 18 nt, Human
ccuuauggaacacucuga

SEQ ID NO: 1712624 - RNA, 17 nt, Human
ccuuauggaacacucug

SEQ ID NO: 1712625 - RNA, 16 nt, Human
ccuuauggaacacucu

SEQ ID NO: 1712626 - RNA, 14 nt, Human
ccuuauggaacacu

SEQ ID NO: 1712627 - RNA, 20 nt, Human
ccuuauggaacacucugaga

SEQ ID NO: 1712628 - RNA, 19 nt, Human
ccuuauggaacacucugag

SEQ ID NO: 1712629 - RNA, 22 nt, Human
ccuuauggaacacucugagacu

SEQ ID NO: 1712630 - RNA, 19 nt, Human
ccuucccaccucucucacu

SEQ ID NO: 1712631 - RNA, 14 nt, Human
ccuucccaccucuc

SEQ ID NO: 1712632 - RNA, 12 nt, Human
ccuucccaccuc

SEQ ID NO: 1712633 - RNA, 15 nt, Human
ccuucccaugcccug

SEQ ID NO: 1712634 - RNA, 19 nt, Human
ccuguucagcuccagcuca

SEQ ID NO: 1712635 - RNA, 16 nt, Human
ccuguucagcuccagc

SEQ ID NO: 1712636 - RNA, 15 nt, Human
ccuguucagcuccag

SEQ ID NO: 1712637 - RNA, 14 nt, Human
ccuguucagcucca

SEQ ID NO: 1712638 - RNA, 21 nt, Human
ccuguucagcuccagcucacc

SEQ ID NO: 1712639 - RNA, 20 nt, Human
ccuguucagcuccagcucac

SEQ ID NO: 1712640 - RNA, 23 nt, Human
ccuguucagcuccagcucaccag

SEQ ID NO: 1712641 - RNA, 17 nt, Human
ccuguucuggcagaguu

SEQ ID NO: 1712642 - RNA, 12 nt, Human
ccuguucuggca

SEQ ID NO: 1712643 - RNA, 16 nt, Human
ccuguucugcuuuccu

SEQ ID NO: 1712644 - RNA, 18 nt, Human
ccuguucccaugagauga

SEQ ID NO: 1712645 - RNA, 12 nt, Human
ccuguucccauu

SEQ ID NO: 1712646 - RNA, 20 nt, Human
ccuguugggccaggagccuc

SEQ ID NO: 1712647 - RNA, 19 nt, Human
ccuguugggccaggagccu

SEQ ID NO: 1712648 - RNA, 18 nt, Human
ccuguugggccaggagcc

SEQ ID NO: 1712649 - RNA, 17 nt, Human
ccuguugggccaggagc

SEQ ID NO: 1712650 - RNA, 16 nt, Human
ccuguugggccaggag

SEQ ID NO: 1712651 - RNA, 20 nt, Human
ccuuagcagggaaacagcua

SEQ ID NO: 1712652 - RNA, 19 nt, Human
ccuuagcagggaaacagcu

SEQ ID NO: 1712653 - RNA, 16 nt, Human
ccuuagcaaauucugu

SEQ ID NO: 1712654 - RNA, 13 nt, Human
ccuguucagcucc

SEQ ID NO: 1712655 - RNA, 21 nt, Human
ccuguucacucuacuuagcau

SEQ ID NO: 1712656 - RNA, 17 nt, Human
ccuucucuucacaguca

SEQ ID NO: 1712657 - RNA, 21 nt, Human
ccuucuguccuacucuguguc

SEQ ID NO: 1712658 - RNA, 20 nt, Human
ccuucuguccuacucugugu

SEQ ID NO: 1712659 - RNA, 22 nt, Human
ccuucuguccuacucuguguca

SEQ ID NO: 1712660 - RNA, 19 nt, Human
ccuucccccuccaauccca

SEQ ID NO: 1712661 - RNA, 18 nt, Human
ccuuccuaauuccacagc

SEQ ID NO: 1712662 - RNA, 20 nt, Human
ccuuccuaauuccacagcug

SEQ ID NO: 1712663 - RNA, 19 nt, Human
ccuuccuaauuccacagcu

SEQ ID NO: 1712664 - RNA, 16 nt, Human
ccuucucugaaggaca

SEQ ID NO: 1712665 - RNA, 14 nt, Human
ccuucucugaagga

SEQ ID NO: 1712666 - RNA, 23 nt, Human
ccuucucuccagccccuggaugc

SEQ ID NO: 1712667 - RNA, 21 nt, Human
ccuucucuccagccccuggau

SEQ ID NO: 1712668 - RNA, 20 nt, Human
ccuuccucuccacugccuuc

SEQ ID NO: 1712669 - RNA, 20 nt, Human
ccuucucuccagccccugga

SEQ ID NO: 1712670 - RNA, 17 nt, Human
ccuuccucuccacugcc

SEQ ID NO: 1712671 - RNA, 16 nt, Human
ccuuccucuccacugc

SEQ ID NO: 1712672 - RNA, 15 nt, Human
ccuuccucuccacug

SEQ ID NO: 1712673 - RNA, 14 nt, Human
ccuuccucuccacu

SEQ ID NO: 1712674 - RNA, 21 nt, Human
ccuuccuaauuccacagcugc

SEQ ID NO: 1712675 - RNA, 15 nt, Human
ccuuucaauaggaaa

SEQ ID NO: 1712676 - RNA, 14 nt, Human
ccuuuauucuggca

SEQ ID NO: 1712677 - RNA, 17 nt, Human
ccuuucaauaggaaaaa

SEQ ID NO: 1712678 - RNA, 18 nt, Human
ccuuucaauaggaaaaac

SEQ ID NO: 1712679 - RNA, 14 nt, Human
ccuugcauaauggu

SEQ ID NO: 1712680 - RNA, 14 nt, Human
cuaaguuuuuaugg

SEQ ID NO: 1712681 - RNA, 19 nt, Human
cuacaaaaagcauaaaaau

SEQ ID NO: 1712682 - RNA, 20 nt, Human
cuaauaaaauuuaaaagucu

SEQ ID NO: 1712683 - RNA, 22 nt, Human
cuaacuugucuuuggacccuga

SEQ ID NO: 1712684 - RNA, 14 nt, Human
cuaacuugucuuug

SEQ ID NO: 1712685 - RNA, 16 nt, Human
cuaacuuuccuucauu

SEQ ID NO: 1712686 - RNA, 22 nt, Human
cuaagaaagcccuuaggaagaa

SEQ ID NO: 1712687 - RNA, 20 nt, Human
cuaacgaaguauccuucagc

SEQ ID NO: 1712688 - RNA, 19 nt, Human
cuaaaguguauuuuuuuac

SEQ ID NO: 1712689 - RNA, 23 nt, Human
cuaaaguaaaaacaaagaaauua

SEQ ID NO: 1712690 - RNA, 16 nt, Human
cuaaagccucaaaaca

SEQ ID NO: 1712691 - RNA, 11 nt, Human
cuaaagcugcc

SEQ ID NO: 1712692 - RNA, 19 nt, Human
cguguuaugacuccagaau

SEQ ID NO: 1712693 - RNA, 15 nt, Human
cguguuaugacucca

SEQ ID NO: 1712694 - RNA, 18 nt, Human
cgugaguccuggcauggg

SEQ ID NO: 1712695 - RNA, 19 nt, Human
cgugaguccuggcauggga

SEQ ID NO: 1712696 - RNA, 16 nt, Human
cgugaggccagagaca

SEQ ID NO: 1712697 - RNA, 15 nt, Human
cgugacaacacuugu

SEQ ID NO: 1712698 - RNA, 14 nt, Human
cgugacaacacuug

SEQ ID NO: 1712699 - RNA, 20 nt, Human
cgugagccacugcaccgggc

SEQ ID NO: 1712700 - RNA, 15 nt, Human
cgugagccacugcac

SEQ ID NO: 1712701 - RNA, 14 nt, Human
cgugagccacugca

SEQ ID NO: 1712702 - RNA, 14 nt, Human
cgugaggccagaga

SEQ ID NO: 1712703 - RNA, 22 nt, Human
cgugagccacugcaccgggcca

SEQ ID NO: 1712704 - RNA, 20 nt, Human
cgcugccccuggcagccccu

SEQ ID NO: 1712705 - RNA, 19 nt, Human
cgcugccccuggcagcccc

SEQ ID NO: 1712706 - RNA, 21 nt, Human
cgcucuuggcagguacucagc

SEQ ID NO: 1712707 - RNA, 22 nt, Human
cgcucuguugcccaggcuggag

SEQ ID NO: 1712708 - RNA, 20 nt, Human
cgcucugucgcccaggcugg

SEQ ID NO: 1712709 - RNA, 19 nt, Human
cgcucuguugcccaggcug

SEQ ID NO: 1712710 - RNA, 18 nt, Human
cgcuggagugcagugagc

SEQ ID NO: 1712711 - RNA, 17 nt, Human
cgcuggagugcagugag

SEQ ID NO: 1712712 - RNA, 20 nt, Human
ccuuuucgcaggauucuucc

SEQ ID NO: 1712713 - RNA, 22 nt, Human
cgcaggcuggcccugcccuggu

SEQ ID NO: 1712714 - RNA, 21 nt, Human
cgcaggcuggcccugcccugg

SEQ ID NO: 1712715 - RNA, 21 nt, Human
cgagucucuucuccacuggau

SEQ ID NO: 1712716 - RNA, 20 nt, Human
cgagucucuucuccacugga

SEQ ID NO: 1712717 - RNA, 18 nt, Human
cgagucucuucuccacug

SEQ ID NO: 1712718 - RNA, 17 nt, Human
cgagucucuucuccacu

SEQ ID NO: 1712719 - RNA, 18 nt, Human
cggcuaauuuuuguauuu

SEQ ID NO: 1712720 - RNA, 23 nt, Human
cggagucccaccuuggcugcagg

SEQ ID NO: 1712721 - RNA, 15 nt, Human
cggaggggccuggca

SEQ ID NO: 1712722 - RNA, 22 nt, Human
cggagucccaccuuggcugcag

SEQ ID NO: 1712723 - RNA, 21 nt, Human
cggagucccaccuuggcugca

SEQ ID NO: 1712724 - RNA, 17 nt, Human
cggagacggagucccac

SEQ ID NO: 1712725 - RNA, 20 nt, Human
cggagacggagucccaccuu

SEQ ID NO: 1712726 - RNA, 14 nt, Human
cggcucacugcagc

SEQ ID NO: 1712727 - RNA, 13 nt, Human
cgggcucugccuc

SEQ ID NO: 1712728 - RNA, 12 nt, Human
cgggcucugccu

SEQ ID NO: 1712729 - RNA, 20 nt, Human
cgggcugggagcucugcaga

SEQ ID NO: 1712730 - RNA, 16 nt, Human
cgggcugggagcucug

SEQ ID NO: 1712731 - RNA, 19 nt, Human
cgggcucagcaaaagaugc

SEQ ID NO: 1712732 - RNA, 20 nt, Human
cgggccuggagaacuagaga

SEQ ID NO: 1712733 - RNA, 16 nt, Human
cgggccuggagaacua

SEQ ID NO: 1712734 - RNA, 22 nt, Human
cguacacauuuuauuuuauuau

SEQ ID NO: 1712735 - RNA, 20 nt, Human
cgguggcucacgccuguaau

SEQ ID NO: 1712736 - RNA, 17 nt, Human
cguaaagcuagaaauga

SEQ ID NO: 1712737 - RNA, 23 nt, Human
cucagaagacacugaugggcaac

SEQ ID NO: 1712738 - RNA, 22 nt, Human
cucagccucccgaauagcuggg

SEQ ID NO: 1712739 - RNA, 21 nt, Human
cucagccucccgaauagcugg

SEQ ID NO: 1712740 - RNA, 19 nt, Human
cucagccucccgaauagcu

SEQ ID NO: 1712741 - RNA, 22 nt, Human
cucagaagacacugaugggcaa

SEQ ID NO: 1712742 - RNA, 20 nt, Human
cucagaagacacugaugggc

SEQ ID NO: 1712743 - RNA, 17 nt, Human
cucagaagacacugaug

SEQ ID NO: 1712744 - RNA, 15 nt, Human
cucagaagacacuga

SEQ ID NO: 1712745 - RNA, 13 nt, Human
cucagaagacacu

SEQ ID NO: 1712746 - RNA, 17 nt, Human
cucaccuuucccaucuu

SEQ ID NO: 1712747 - RNA, 13 nt, Human
cucaggccugggg

SEQ ID NO: 1712748 - RNA, 20 nt, Human
cucaggccagcugcuugggc

SEQ ID NO: 1712749 - RNA, 18 nt, Human
cucaggccagcugcuugg

SEQ ID NO: 1712750 - RNA, 17 nt, Human
cucaggccagcugcuug

SEQ ID NO: 1712751 - RNA, 16 nt, Human
cucaggccagcugcuu

SEQ ID NO: 1712752 - RNA, 11 nt, Human
cucaggccugg

SEQ ID NO: 1712753 - RNA, 22 nt, Human
cucaggccugggggcugggcag

SEQ ID NO: 1712754 - RNA, 20 nt, Human
cucaggccaaacucaccugc

SEQ ID NO: 1712755 - RNA, 19 nt, Human
cucaggccaaacucaccug

SEQ ID NO: 1712756 - RNA, 21 nt, Human
cucaggccaaacucaccugcc

SEQ ID NO: 1712757 - RNA, 16 nt, Human
cucaguccaugaagau

SEQ ID NO: 1712758 - RNA, 17 nt, Human
cucaguccauagcagag

SEQ ID NO: 1712759 - RNA, 15 nt, Human
cucaguccauagcag

SEQ ID NO: 1712760 - RNA, 14 nt, Human
cucagguugucuga

SEQ ID NO: 1712761 - RNA, 22 nt, Human
cucagucuggcccuuccuuuuc

SEQ ID NO: 1712762 - RNA, 23 nt, Human
cucaggugucccugcacuugcag

SEQ ID NO: 1712763 - RNA, 22 nt, Human
cucagguugucugaagucacug

SEQ ID NO: 1712764 - RNA, 14 nt, Human
cuaucucccccagc

SEQ ID NO: 1712765 - RNA, 13 nt, Human
cuaucucccccag

SEQ ID NO: 1712766 - RNA, 14 nt, Human
cuaugugagaccau

SEQ ID NO: 1712767 - RNA, 18 nt, Human
cuauguucuaagaaguga

SEQ ID NO: 1712768 - RNA, 14 nt, Human
cuauguugcccagg

SEQ ID NO: 1712769 - RNA, 17 nt, Human
cuaugugagcacaaagg

SEQ ID NO: 1712770 - RNA, 22 nt, Human
cuauguugcccaggcaggucuu

SEQ ID NO: 1712771 - RNA, 21 nt, Human
cuauguugcccaggcaggucu

SEQ ID NO: 1712772 - RNA, 19 nt, Human
cuauguugcccaggcaggu

SEQ ID NO: 1712773 - RNA, 18 nt, Human
cuauguugcccaggcagg

SEQ ID NO: 1712774 - RNA, 17 nt, Human
cuauccuacuuccccuu

SEQ ID NO: 1712775 - RNA, 23 nt, Human
cucaauuauuuugcauuuuuucu

SEQ ID NO: 1712776 - RNA, 19 nt, Human
cucuauguucuaagaagug

SEQ ID NO: 1712777 - RNA, 14 nt, Human
cucucuggccuucg

SEQ ID NO: 1712778 - RNA, 16 nt, Human
cucucuggccuucggc

SEQ ID NO: 1712779 - RNA, 13 nt, Human
cucucuggccuuc

SEQ ID NO: 1712780 - RNA, 16 nt, Human
cucuccuccagaguca

SEQ ID NO: 1712781 - RNA, 15 nt, Human
cucuccuccagaguc

SEQ ID NO: 1712782 - RNA, 13 nt, Human
cucuccuccagag

SEQ ID NO: 1712783 - RNA, 16 nt, Human
cucgguguggagaagc

SEQ ID NO: 1712784 - RNA, 23 nt, Human
cucgguguggagaagcggcuggc

SEQ ID NO: 1712785 - RNA, 17 nt, Human
cucgguguggagaagcg

SEQ ID NO: 1712786 - RNA, 23 nt, Human
cuccuuugugaggaagccgcugg

SEQ ID NO: 1712787 - RNA, 18 nt, Human
cuccuuugugaggaagcc

SEQ ID NO: 1712788 - RNA, 17 nt, Human
cuccuuugugaggaagc

SEQ ID NO: 1712789 - RNA, 20 nt, Human
cuccuuucacaaccuucugu

SEQ ID NO: 1712790 - RNA, 21 nt, Human
cucugcacaagcugcacccuc

SEQ ID NO: 1712791 - RNA, 20 nt, Human
cucugcacaagcugcacccu

SEQ ID NO: 1712792 - RNA, 16 nt, Human
cucugcacuccccugc

SEQ ID NO: 1712793 - RNA, 15 nt, Human
cucugcacuccccug

SEQ ID NO: 1712794 - RNA, 13 nt, Human
cucuguacagagc

SEQ ID NO: 1712795 - RNA, 15 nt, Human
cucuguacagagccc

SEQ ID NO: 1712796 - RNA, 14 nt, Human
cucuguacagagcc

SEQ ID NO: 1712797 - RNA, 15 nt, Human
cucugcugcuggcug

SEQ ID NO: 1712798 - RNA, 14 nt, Human
cucugcugcuggcu

SEQ ID NO: 1712799 - RNA, 16 nt, Human
cucugcugcuggcugg

SEQ ID NO: 1712800 - RNA, 16 nt, Human
cucuguacagagccca

SEQ ID NO: 1712801 - RNA, 13 nt, Human
cucuguccuggga

SEQ ID NO: 1712802 - RNA, 13 nt, Human
cucugcugcuggc

SEQ ID NO: 1712803 - RNA, 23 nt, Human
cucugcugacagacacaggcccg

SEQ ID NO: 1712804 - RNA, 22 nt, Human
cucugcugacagacacaggccc

SEQ ID NO: 1712805 - RNA, 21 nt, Human
cucugcugacagacacaggcc

SEQ ID NO: 1712806 - RNA, 18 nt, Human
cucugcacuccccugcug

SEQ ID NO: 1712807 - RNA, 17 nt, Human
cucugcacuccccugcu

SEQ ID NO: 1712808 - RNA, 21 nt, Human
cucugcuccucuccccagcaa

SEQ ID NO: 1712809 - RNA, 13 nt, Human
cucugcagguccc

SEQ ID NO: 1712810 - RNA, 16 nt, Human
cuccccuaaagccuca

SEQ ID NO: 1712811 - RNA, 23 nt, Human
cuccccuaaagccucaaaacaaa

SEQ ID NO: 1712812 - RNA, 15 nt, Human
cucccaggcauuccc

SEQ ID NO: 1712813 - RNA, 20 nt, Human
cucccucuuucccucccuuc

SEQ ID NO: 1712814 - RNA, 20 nt, Human
cucccugaaguaagcaaaga

SEQ ID NO: 1712815 - RNA, 22 nt, Human
cuccaggcuguaucccaugagc

SEQ ID NO: 1712816 - RNA, 20 nt, Human
cuccaggcuguaucccauga

SEQ ID NO: 1712817 - RNA, 23 nt, Human
cuccaggcuccuuuagcgcccag

SEQ ID NO: 1712818 - RNA, 15 nt, Human
cuccaggcuccuuua

SEQ ID NO: 1712819 - RNA, 23 nt, Human
cuccaggugcacaagcuccaagc

SEQ ID NO: 1712820 - RNA, 21 nt, Human
cucccacaggcccuuccucuc

SEQ ID NO: 1712821 - RNA, 20 nt, Human
cucccacaggcccuuccucu

SEQ ID NO: 1712822 - RNA, 16 nt, Human
cucccacaggcccuuc

SEQ ID NO: 1712823 - RNA, 14 nt, Human
cucccacaggcccu

SEQ ID NO: 1712824 - RNA, 15 nt, Human
cucccacaggcccuu

SEQ ID NO: 1712825 - RNA, 13 nt, Human
cuccuaccuggua

SEQ ID NO: 1712826 - RNA, 18 nt, Human
cuccugggcuaagugauc

SEQ ID NO: 1712827 - RNA, 19 nt, Human
cuccuggccucaagugauu

SEQ ID NO: 1712828 - RNA, 19 nt, Human
cuccuggcccacugcaucg

SEQ ID NO: 1712829 - RNA, 18 nt, Human
cuccucuugccacugccu

SEQ ID NO: 1712830 - RNA, 12 nt, Human
cuccucuugcca

SEQ ID NO: 1712831 - RNA, 16 nt, Human
cuccucuugccacugc

SEQ ID NO: 1712832 - RNA, 15 nt, Human
cuccucuugccacug

SEQ ID NO: 1712833 - RNA, 14 nt, Human
cuccucugcugcug

SEQ ID NO: 1712834 - RNA, 13 nt, Human
cuccucugcugcu

SEQ ID NO: 1712835 - RNA, 15 nt, Human
cuccucugcugcugg

SEQ ID NO: 1712836 - RNA, 15 nt, Human
cuccucuguccaggc

SEQ ID NO: 1712837 - RNA, 12 nt, Human
cuccucugucca

SEQ ID NO: 1712838 - RNA, 16 nt, Human
cuccuguaccucuuga

SEQ ID NO: 1712839 - RNA, 14 nt, Human
cuccuggggguucu

SEQ ID NO: 1712840 - RNA, 15 nt, Human
cuccuuucaccacau

SEQ ID NO: 1712841 - RNA, 17 nt, Human
cuccuuucacaaccuuc

SEQ ID NO: 1712842 - RNA, 16 nt, Human
cuccuuucacaaccuu

SEQ ID NO: 1712843 - RNA, 13 nt, Human
cuccuuucacaac

SEQ ID NO: 1712844 - RNA, 14 nt, Human
cuccuuguguuacu

SEQ ID NO: 1712845 - RNA, 21 nt, Human
cccaaccugcucuccucuugc

SEQ ID NO: 1712846 - RNA, 14 nt, Human
cccaaccugcucuc

SEQ ID NO: 1712847 - RNA, 13 nt, Human
cccaaccugcucu

SEQ ID NO: 1712848 - RNA, 23 nt, Human
cccaaccugcucuccucuugcca

SEQ ID NO: 1712849 - RNA, 22 nt, Human
ccauuguggucacaggaaguag

SEQ ID NO: 1712850 - RNA, 15 nt, Human
cccacccaagggccu

SEQ ID NO: 1712851 - RNA, 18 nt, Human
cccacccaagggccuggc

SEQ ID NO: 1712852 - RNA, 17 nt, Human
cccaagcucugcuccuc

SEQ ID NO: 1712853 - RNA, 21 nt, Human
cccaagaauagaugcugacug

SEQ ID NO: 1712854 - RNA, 20 nt, Human
cccaagaauagaugcugacu

SEQ ID NO: 1712855 - RNA, 23 nt, Human
cccaagccuacuuuugccauuga

SEQ ID NO: 1712856 - RNA, 16 nt, Human
cccaagccuggcaagg

SEQ ID NO: 1712857 - RNA, 18 nt, Human
cccaccgcagacaggacc

SEQ ID NO: 1712858 - RNA, 15 nt, Human
cccaccgcagacagg

SEQ ID NO: 1712859 - RNA, 23 nt, Human
cccacuguacuugcucuugaugc

SEQ ID NO: 1712860 - RNA, 19 nt, Human
cccacuguacuugcucuug

SEQ ID NO: 1712861 - RNA, 18 nt, Human
cccacuguacuugcucuu

SEQ ID NO: 1712862 - RNA, 18 nt, Human
ccaugaggaacaaggcaa

SEQ ID NO: 1712863 - RNA, 17 nt, Human
ccaugaggaacaaggca

SEQ ID NO: 1712864 - RNA, 16 nt, Human
ccaugaggaacaaggc

SEQ ID NO: 1712865 - RNA, 13 nt, Human
ccaugagccucag

SEQ ID NO: 1712866 - RNA, 20 nt, Human
ccaugucucugagcauuaga

SEQ ID NO: 1712867 - RNA, 15 nt, Human
ccaugucucgacuca

SEQ ID NO: 1712868 - RNA, 14 nt, Human
ccaugucucgacuc

SEQ ID NO: 1712869 - RNA, 15 nt, Human
ccccauuguggucac

SEQ ID NO: 1712870 - RNA, 14 nt, Human
cccccuuccaugga

SEQ ID NO: 1712871 - RNA, 12 nt, Human
ccccgcccaggc

SEQ ID NO: 1712872 - RNA, 14 nt, Human
ccccgcccaggcuu

SEQ ID NO: 1712873 - RNA, 13 nt, Human
ccccggccaccug

SEQ ID NO: 1712874 - RNA, 18 nt, Human
ccccggccaccugcggug

SEQ ID NO: 1712875 - RNA, 14 nt, Human
ccccggccaccugc

SEQ ID NO: 1712876 - RNA, 21 nt, Human
ccccaaaacucuccucugcug

SEQ ID NO: 1712877 - RNA, 20 nt, Human
ccccaaaacucuccucugcu

SEQ ID NO: 1712878 - RNA, 18 nt, Human
ccccaaaacucuccucug

SEQ ID NO: 1712879 - RNA, 14 nt, Human
ccccagccccaaaa

SEQ ID NO: 1712880 - RNA, 14 nt, Human
ccccagccccaucc

SEQ ID NO: 1712881 - RNA, 21 nt, Human
ccccauucugccugcccaggc

SEQ ID NO: 1712882 - RNA, 12 nt, Human
ccccagccccaa

SEQ ID NO: 1712883 - RNA, 10 nt, Human
ccccagcccc

SEQ ID NO: 1712884 - RNA, 23 nt, Human
cccagccccaaaacucuccucug

SEQ ID NO: 1712885 - RNA, 21 nt, Human
cccagccccaaaacucuccuc

SEQ ID NO: 1712886 - RNA, 19 nt, Human
cccagcccacuucugccau

SEQ ID NO: 1712887 - RNA, 19 nt, Human
cccauccucuguacagagc

SEQ ID NO: 1712888 - RNA, 15 nt, Human
cccauccucuguaca

SEQ ID NO: 1712889 - RNA, 20 nt, Human
cccauccucuguacagagcc

SEQ ID NO: 1712890 - RNA, 14 nt, Human
cccauccucuguac

SEQ ID NO: 1712891 - RNA, 20 nt, Human
cccaggcuggcgugcagugg

SEQ ID NO: 1712892 - RNA, 19 nt, Human
cccaggcuggcgugcagug

SEQ ID NO: 1712893 - RNA, 21 nt, Human
cccaggcuggcgugcaguggu

SEQ ID NO: 1712894 - RNA, 18 nt, Human
cccaggcuggcgugcagu

SEQ ID NO: 1712895 - RNA, 23 nt, Human
cccagcuggggccaggcuggguc

SEQ ID NO: 1712896 - RNA, 22 nt, Human
cccagcuggggccaggcugggu

SEQ ID NO: 1712897 - RNA, 12 nt, Human
ccacuuggucug

SEQ ID NO: 1712898 - RNA, 19 nt, Human
ccacugcaccgggccacag

SEQ ID NO: 1712899 - RNA, 17 nt, Human
ccacugcaccgggccac

SEQ ID NO: 1712900 - RNA, 14 nt, Human
ccacugcaccgggc

SEQ ID NO: 1712901 - RNA, 13 nt, Human
ccacugcaccggg

SEQ ID NO: 1712902 - RNA, 20 nt, Human
ccacugcacuauagccuagg

SEQ ID NO: 1712903 - RNA, 19 nt, Human
ccacugcacuauagccuag

SEQ ID NO: 1712904 - RNA, 18 nt, Human
ccacugcacuccagccug

SEQ ID NO: 1712905 - RNA, 13 nt, Human
ccacuuucuagcc

SEQ ID NO: 1712906 - RNA, 19 nt, Human
ccacuuucuagccagagga

SEQ ID NO: 1712907 - RNA, 18 nt, Human
ccacuuucuagccagagg

SEQ ID NO: 1712908 - RNA, 20 nt, Human
ccacuuucuagccagaggag

SEQ ID NO: 1712909 - RNA, 20 nt, Human
ccacuuggucugugagaugc

SEQ ID NO: 1712910 - RNA, 22 nt, Human
ccacuuggucugugagaugcua

SEQ ID NO: 1712911 - RNA, 15 nt, Human
ccacuuggucuguga

SEQ ID NO: 1712912 - RNA, 16 nt, Human
ccacuuggucugugag

SEQ ID NO: 1712913 - RNA, 17 nt, Human
ccacuuggucugugaga

SEQ ID NO: 1712914 - RNA, 19 nt, Human
ccacuuggucugugagaug

SEQ ID NO: 1712915 - RNA, 17 nt, Human
ccagacccggcugcgug

SEQ ID NO: 1712916 - RNA, 14 nt, Human
ccacuuuuguucuu

SEQ ID NO: 1712917 - RNA, 15 nt, Human
ccacuuuuguucuug

SEQ ID NO: 1712918 - RNA, 21 nt, Human
ccacuuuuguucuugguuugu

SEQ ID NO: 1712919 - RNA, 22 nt, Human
ccacuuuuguucuugguuugua

SEQ ID NO: 1712920 - RNA, 18 nt, Human
ccagagacacaagccuuc

SEQ ID NO: 1712921 - RNA, 16 nt, Human
ccagagacacaagccu

SEQ ID NO: 1712922 - RNA, 14 nt, Human
ccagaugcaccagc

SEQ ID NO: 1712923 - RNA, 13 nt, Human
ccagaugcaccag

SEQ ID NO: 1712924 - RNA, 13 nt, Human
ccagagagggugg

SEQ ID NO: 1712925 - RNA, 16 nt, Human
ccagucaccccggcca

SEQ ID NO: 1712926 - RNA, 22 nt, Human
ccaguaucuugaagacuuuucu

SEQ ID NO: 1712927 - RNA, 19 nt, Human
ccaguaucuugaagacuuu

SEQ ID NO: 1712928 - RNA, 23 nt, Human
ccaggggugggacacccugugau

SEQ ID NO: 1712929 - RNA, 22 nt, Human
ccaggggugggacacccuguga

SEQ ID NO: 1712930 - RNA, 21 nt, Human
ccaggggugggacacccugug

SEQ ID NO: 1712931 - RNA, 20 nt, Human
ccaggggugggacacccugu

SEQ ID NO: 1712932 - RNA, 13 nt, Human
ccaggcugagccu

SEQ ID NO: 1712933 - RNA, 16 nt, Human
ccaggcugagccucag

SEQ ID NO: 1712934 - RNA, 14 nt, Human
ccaggcugagccuc

SEQ ID NO: 1712935 - RNA, 22 nt, Human
ccaggcugagccucagucuccc

SEQ ID NO: 1712936 - RNA, 19 nt, Human
ccaggcugagccucagucu

SEQ ID NO: 1712937 - RNA, 17 nt, Human
ccaggcugagccucagu

SEQ ID NO: 1712938 - RNA, 18 nt, Human
ccagucaccccggccacc

SEQ ID NO: 1712939 - RNA, 17 nt, Human
ccagucaccccggccac

SEQ ID NO: 1712940 - RNA, 19 nt, Human
ccagucaccccggccaccu

SEQ ID NO: 1712941 - RNA, 19 nt, Human
ccaggaaaggcuccaggag

SEQ ID NO: 1712942 - RNA, 18 nt, Human
ccaggaaaggcuccagga

SEQ ID NO: 1712943 - RNA, 17 nt, Human
ccaggaaaggcuccagg

SEQ ID NO: 1712944 - RNA, 20 nt, Human
ccaggaaaggcuccaggagc

SEQ ID NO: 1712945 - RNA, 17 nt, Human
ccagccccuucugaccc

SEQ ID NO: 1712946 - RNA, 16 nt, Human
ccagccccuucugacc

SEQ ID NO: 1712947 - RNA, 15 nt, Human
ccagccccuucugac

SEQ ID NO: 1712948 - RNA, 18 nt, Human
ccagccccuggaugcagc

SEQ ID NO: 1712949 - RNA, 21 nt, Human
ccagcgagcccugguggcagu

SEQ ID NO: 1712950 - RNA, 18 nt, Human
ccagccccuucugaccca

SEQ ID NO: 1712951 - RNA, 15 nt, Human
ccagccccuggaugc

SEQ ID NO: 1712952 - RNA, 14 nt, Human
ccagccccuggaug

SEQ ID NO: 1712953 - RNA, 13 nt, Human
ccagccccuggau

SEQ ID NO: 1712954 - RNA, 23 nt, Human
ccagccccauccucuguacagag

SEQ ID NO: 1712955 - RNA, 13 nt, Human
ccagcagccugga

SEQ ID NO: 1712956 - RNA, 14 nt, Human
ccagcagccuggac

SEQ ID NO: 1712957 - RNA, 12 nt, Human
ccagcagccugg

SEQ ID NO: 1712958 - RNA, 11 nt, Human
ccagcagccug

SEQ ID NO: 1712959 - RNA, 16 nt, Human
ccagcagaaaugccuu

SEQ ID NO: 1712960 - RNA, 17 nt, Human
ccagcagaaaugccuua

SEQ ID NO: 1712961 - RNA, 22 nt, Human
ccagcagaaaugccuuacccuc

SEQ ID NO: 1712962 - RNA, 14 nt, Human
ccuaaucuucugaa

SEQ ID NO: 1712963 - RNA, 19 nt, Human
ccuagcauacguacacauu

SEQ ID NO: 1712964 - RNA, 20 nt, Human
ccuaaugcgcaggcuggccc

SEQ ID NO: 1712965 - RNA, 17 nt, Human
ccuagcacuuugggagg

SEQ ID NO: 1712966 - RNA, 20 nt, Human
ccuagccugugccucuggga

SEQ ID NO: 1712967 - RNA, 21 nt, Human
ccuagcauacguacacauuuu

SEQ ID NO: 1712968 - RNA, 20 nt, Human
ccuaacgaaguauccuucag

SEQ ID NO: 1712969 - RNA, 16 nt, Human
ccgugaggccagagac

SEQ ID NO: 1712970 - RNA, 14 nt, Human
ccgugaggccagag

SEQ ID NO: 1712971 - RNA, 13 nt, Human
ccgugaggccaga

SEQ ID NO: 1712972 - RNA, 12 nt, Human
ccgugaggccag

SEQ ID NO: 1712973 - RNA, 17 nt, Human
ccgucuaccugaggggc

SEQ ID NO: 1712974 - RNA, 14 nt, Human
ccggcuccaggcuc

SEQ ID NO: 1712975 - RNA, 13 nt, Human
ccggcuccaggcu

SEQ ID NO: 1712976 - RNA, 15 nt, Human
ccgucuaccugaggg

SEQ ID NO: 1712977 - RNA, 14 nt, Human
ccgucuaccugagg

SEQ ID NO: 1712978 - RNA, 15 nt, Human
ccggcuccaggcucc

SEQ ID NO: 1712979 - RNA, 15 nt, Human
ccggccccugcuggu

SEQ ID NO: 1712980 - RNA, 16 nt, Human
ccggccaccugcggug

SEQ ID NO: 1712981 - RNA, 18 nt, Human
ccggcaggguccuagaaa

SEQ ID NO: 1712982 - RNA, 22 nt, Human
cccugugauggggcccugccuc

SEQ ID NO: 1712983 - RNA, 21 nt, Human
cccugugauggggcccugccu

SEQ ID NO: 1712984 - RNA, 23 nt, Human
cccugugauggggcccugccucc

SEQ ID NO: 1712985 - RNA, 13 nt, Human
cccugucuaauga

SEQ ID NO: 1712986 - RNA, 17 nt, Human
ccgcagacaggaccagg

SEQ ID NO: 1712987 - RNA, 16 nt, Human
ccgcagacaggaccag

SEQ ID NO: 1712988 - RNA, 12 nt, Human
ccgcccaggcuu

SEQ ID NO: 1712989 - RNA, 15 nt, Human
cccuuccucuuucca

SEQ ID NO: 1712990 - RNA, 17 nt, Human
ccgaaaacguggcugcu

SEQ ID NO: 1712991 - RNA, 16 nt, Human
ccgaaaacguggcugc

SEQ ID NO: 1712992 - RNA, 19 nt, Human
ccgaaagggacuuggaagc

SEQ ID NO: 1712993 - RNA, 17 nt, Human
ccgaccagacaccuuga

SEQ ID NO: 1712994 - RNA, 13 nt, Human
ccgaccagacacc

SEQ ID NO: 1712995 - RNA, 18 nt, Human
ccgaccagacaccuugac

SEQ ID NO: 1712996 - RNA, 15 nt, Human
ccgaccaccugccca

SEQ ID NO: 1712997 - RNA, 17 nt, Human
ccgaauagcugggacua

SEQ ID NO: 1712998 - RNA, 16 nt, Human
ccgaauagcugggacu

SEQ ID NO: 1712999 - RNA, 23 nt, Human
ccgaaggugaggagcuugaaacc

SEQ ID NO: 1713000 - RNA, 16 nt, Human
cccugagcuuucugcu

SEQ ID NO: 1713001 - RNA, 20 nt, Human
cccugcccaccuggccucug

SEQ ID NO: 1713002 - RNA, 17 nt, Human
cccugcccggcugcgga

SEQ ID NO: 1713003 - RNA, 14 nt, Human
cccugcccggcugc

SEQ ID NO: 1713004 - RNA, 17 nt, Human
cccugccccucccuuca

SEQ ID NO: 1713005 - RNA, 23 nt, Human
cccugccccucccuucaaccauu

SEQ ID NO: 1713006 - RNA, 19 nt, Human
cccugccccucccuucaac

SEQ ID NO: 1713007 - RNA, 18 nt, Human
cccugccccucccuucaa

SEQ ID NO: 1713008 - RNA, 14 nt, Human
cccugccccccagc

SEQ ID NO: 1713009 - RNA, 15 nt, Human
cccugccccccagcc

SEQ ID NO: 1713010 - RNA, 20 nt, Human
cccugccccccagcccuccu

SEQ ID NO: 1713011 - RNA, 22 nt, Human
cccugcccaccuggccucugca

SEQ ID NO: 1713012 - RNA, 19 nt, Human
cccuggauccaucaggcca

SEQ ID NO: 1713013 - RNA, 21 nt, Human
cccuggaugcagccucacagu

SEQ ID NO: 1713014 - RNA, 17 nt, Human
cccuggaugcagccuca

SEQ ID NO: 1713015 - RNA, 13 nt, Human
cccuggaugcagc

SEQ ID NO: 1713016 - RNA, 11 nt, Human
cccugcccugu

SEQ ID NO: 1713017 - RNA, 23 nt, Human
cccugcccugguuuccugcccug

SEQ ID NO: 1713018 - RNA, 22 nt, Human
cccugcccugguuuccugcccu

SEQ ID NO: 1713019 - RNA, 12 nt, Human
cccugcccuggu

SEQ ID NO: 1713020 - RNA, 11 nt, Human
cccugcccugg

SEQ ID NO: 1713021 - RNA, 20 nt, Human
cccuggcucccacaggcccu

SEQ ID NO: 1713022 - RNA, 18 nt, Human
cccugaaagcccugagcu

SEQ ID NO: 1713023 - RNA, 14 nt, Human
cccuccucucugcc

SEQ ID NO: 1713024 - RNA, 23 nt, Human
cccucgaggcggaucuuuggaca

SEQ ID NO: 1713025 - RNA, 22 nt, Human
cccucgaggcggaucuuuggac

SEQ ID NO: 1713026 - RNA, 18 nt, Human
cccuccuccuggacuccu

SEQ ID NO: 1713027 - RNA, 16 nt, Human
cccuccuccuggacuc

SEQ ID NO: 1713028 - RNA, 11 nt, Human
cccuccuccug

SEQ ID NO: 1713029 - RNA, 22 nt, Human
cccugacaacacucauugaccu

SEQ ID NO: 1713030 - RNA, 16 nt, Human
cccugacaacacucau

SEQ ID NO: 1713031 - RNA, 22 nt, Human
cccugaaggccccgcccaggcu

SEQ ID NO: 1713032 - RNA, 20 nt, Human
cccugaaggccccgcccagg

SEQ ID NO: 1713033 - RNA, 14 nt, Human
cccugacaacacuc

SEQ ID NO: 1713034 - RNA, 19 nt, Human
cccugaaggccccgcccag

SEQ ID NO: 1713035 - RNA, 16 nt, Human
cccugaaggccccgcc

SEQ ID NO: 1713036 - RNA, 14 nt, Human
cccugaaggccccg

SEQ ID NO: 1713037 - RNA, 13 nt, Human
cccugaaggcccc

SEQ ID NO: 1713038 - RNA, 12 nt, Human
cccugaaggccc

SEQ ID NO: 1713039 - RNA, 20 nt, Human
ccucugccugaagucacaca

SEQ ID NO: 1713040 - RNA, 11 nt, Human
ccucugccuga

SEQ ID NO: 1713041 - RNA, 23 nt, Human
ccucugccucugacacacagcuc

SEQ ID NO: 1713042 - RNA, 21 nt, Human
ccucugccucugacacacagc

SEQ ID NO: 1713043 - RNA, 20 nt, Human
ccucugccucugacacacag

SEQ ID NO: 1713044 - RNA, 14 nt, Human
ccucugcccugcgg

SEQ ID NO: 1713045 - RNA, 13 nt, Human
ccucugcccugcg

SEQ ID NO: 1713046 - RNA, 12 nt, Human
ccucugcccugc

SEQ ID NO: 1713047 - RNA, 11 nt, Human
ccucugcccug

SEQ ID NO: 1713048 - RNA, 12 nt, Human
ccucucucacuc

SEQ ID NO: 1713049 - RNA, 20 nt, Human
ccucucugcaggucccuaau

SEQ ID NO: 1713050 - RNA, 19 nt, Human
ccucucugcaggucccuaa

SEQ ID NO: 1713051 - RNA, 18 nt, Human
ccucucugcaggucccua

SEQ ID NO: 1713052 - RNA, 17 nt, Human
ccucucugcaggucccu

SEQ ID NO: 1713053 - RNA, 16 nt, Human
ccucucugcagguccc

SEQ ID NO: 1713054 - RNA, 16 nt, Human
ccuccgccucccgggu

SEQ ID NO: 1713055 - RNA, 13 nt, Human
ccuccgccucccg

SEQ ID NO: 1713056 - RNA, 15 nt, Human
ccucgaacuggcugc

SEQ ID NO: 1713057 - RNA, 16 nt, Human
ccucgaacuggcugca

SEQ ID NO: 1713058 - RNA, 16 nt, Human
ccucgagguuucucaa

SEQ ID NO: 1713059 - RNA, 20 nt, Human
ccuccuuugugaggaagccg

SEQ ID NO: 1713060 - RNA, 19 nt, Human
ccuccuuugugaggaagcc

SEQ ID NO: 1713061 - RNA, 18 nt, Human
ccuccuuugugaggaagc

SEQ ID NO: 1713062 - RNA, 18 nt, Human
ccucagccuccugaguag

SEQ ID NO: 1713063 - RNA, 15 nt, Human
ccucagccuccugag

SEQ ID NO: 1713064 - RNA, 23 nt, Human
ccucccaacucaccccagcccca

SEQ ID NO: 1713065 - RNA, 21 nt, Human
ccucccaacucaccccagccc

SEQ ID NO: 1713066 - RNA, 20 nt, Human
ccucccaacucaccccagcc

SEQ ID NO: 1713067 - RNA, 17 nt, Human
ccucccaacucacccca

SEQ ID NO: 1713068 - RNA, 11 nt, Human
ccucaggcagg

SEQ ID NO: 1713069 - RNA, 16 nt, Human
ccugaggggccucuua

SEQ ID NO: 1713070 - RNA, 12 nt, Human
ccugaggggccu

SEQ ID NO: 1713071 - RNA, 21 nt, Human
ccugaggcugggcucccuucc

SEQ ID NO: 1713072 - RNA, 19 nt, Human
ccugaggcugggcucccuu

SEQ ID NO: 1713073 - RNA, 17 nt, Human
ccugaggcugggcuccc

SEQ ID NO: 1713074 - RNA, 21 nt, Human
ccugcaggcagccaggccaca

SEQ ID NO: 1713075 - RNA, 20 nt, Human
ccugcaggcagccaggccac

SEQ ID NO: 1713076 - RNA, 19 nt, Human
ccugcaggcagccaggcca

SEQ ID NO: 1713077 - RNA, 18 nt, Human
ccugcaggcagccaggcc

SEQ ID NO: 1713078 - RNA, 23 nt, Human
ccugcaggcagccaggccacaag

SEQ ID NO: 1713079 - RNA, 14 nt, Human
ccugcagagggcac

SEQ ID NO: 1713080 - RNA, 17 nt, Human
ccugcaggcagccaggc

SEQ ID NO: 1713081 - RNA, 16 nt, Human
ccugcaggcagccagg

SEQ ID NO: 1713082 - RNA, 12 nt, Human
ccugcagagggc

SEQ ID NO: 1713083 - RNA, 15 nt, Human
ccugcaggcagccag

SEQ ID NO: 1713084 - RNA, 21 nt, Human
ccucugccugaagucacacag

SEQ ID NO: 1713085 - RNA, 15 nt, Human
ccucugccugucucc

SEQ ID NO: 1713086 - RNA, 19 nt, Human
ccucugccugucuccccca

SEQ ID NO: 1713087 - RNA, 19 nt, Human
ccucuuuggucuacacugu

SEQ ID NO: 1713088 - RNA, 16 nt, Human
ccucuuugagugaagc

SEQ ID NO: 1713089 - RNA, 20 nt, Human
ccugccuccuuugugaggaa

SEQ ID NO: 1713090 - RNA, 19 nt, Human
ccugccuccuuugugagga

SEQ ID NO: 1713091 - RNA, 15 nt, Human
ccugccuccuuugug

SEQ ID NO: 1713092 - RNA, 13 nt, Human
ccugccuccuuug

SEQ ID NO: 1713093 - RNA, 22 nt, Human
ccugccuccuuugugaggaagc

SEQ ID NO: 1713094 - RNA, 21 nt, Human
ccugccuccuuugugaggaag

SEQ ID NO: 1713095 - RNA, 23 nt, Human
ccugccuccuuugugaggaagcc

SEQ ID NO: 1713096 - RNA, 17 nt, Human
ccugccucucugcaggu

SEQ ID NO: 1713097 - RNA, 16 nt, Human
ccugcugcaguugcca

SEQ ID NO: 1713098 - RNA, 12 nt, Human
ccugcugcaguu

SEQ ID NO: 1713099 - RNA, 11 nt, Human
ccugcugcagu

SEQ ID NO: 1713100 - RNA, 22 nt, Human
ccugcugcaguugccagucacc

SEQ ID NO: 1713101 - RNA, 15 nt, Human
ccugccucuucucua

SEQ ID NO: 1713102 - RNA, 21 nt, Human
ccugccucucugcaggucccu

SEQ ID NO: 1713103 - RNA, 20 nt, Human
ccugccucucugcagguccc

SEQ ID NO: 1713104 - RNA, 21 nt, Human
cauuuguuucuuucucugagg

SEQ ID NO: 1713105 - RNA, 22 nt, Human
cauuuguuucuuucucugagga

SEQ ID NO: 1713106 - RNA, 23 nt, Human
cauuuuuuuuaagaaaaaggaug

SEQ ID NO: 1713107 - RNA, 23 nt, Human
cauuuguuucuuucucugaggac

SEQ ID NO: 1713108 - RNA, 21 nt, Human
cauuuggugguuucagaaaug

SEQ ID NO: 1713109 - RNA, 14 nt, Human
ccaaaaggcagaag

SEQ ID NO: 1713110 - RNA, 17 nt, Human
ccaaaaaaugcuugcuu

SEQ ID NO: 1713111 - RNA, 16 nt, Human
cauuuaggugaggaag

SEQ ID NO: 1713112 - RNA, 18 nt, Human
cauuuaggugaggaagca

SEQ ID NO: 1713113 - RNA, 16 nt, Human
cauuggagauguuuag

SEQ ID NO: 1713114 - RNA, 21 nt, Human
ccaacucaccccagccccaaa

SEQ ID NO: 1713115 - RNA, 15 nt, Human
ccaagcucugcuccu

SEQ ID NO: 1713116 - RNA, 14 nt, Human
ccaagcucugcucc

SEQ ID NO: 1713117 - RNA, 16 nt, Human
ccaagcucugcuccuc

SEQ ID NO: 1713118 - RNA, 17 nt, Human
ccaagcucugcuccucu

SEQ ID NO: 1713119 - RNA, 16 nt, Human
ccaaaucauaguggcu

SEQ ID NO: 1713120 - RNA, 23 nt, Human
ccaaaucagcugcuacuacuccu

SEQ ID NO: 1713121 - RNA, 15 nt, Human
ccaaaucagcugcua

SEQ ID NO: 1713122 - RNA, 13 nt, Human
ccaacucacccca

SEQ ID NO: 1713123 - RNA, 16 nt, Human
ccaacuauggccugug

SEQ ID NO: 1713124 - RNA, 15 nt, Human
ccaacuauggccugu

SEQ ID NO: 1713125 - RNA, 14 nt, Human
ccaacuauggccug

SEQ ID NO: 1713126 - RNA, 14 nt, Human
ccaaugggagcuca

SEQ ID NO: 1713127 - RNA, 23 nt, Human
ccaauggacuaacuugucuuugg

SEQ ID NO: 1713128 - RNA, 21 nt, Human
ccaauggagacugucucaaga

SEQ ID NO: 1713129 - RNA, 22 nt, Human
ccaaaguacacuguuucaaacu

SEQ ID NO: 1713130 - RNA, 14 nt, Human
ccaaagugcuggga

SEQ ID NO: 1713131 - RNA, 21 nt, Human
cauucuccaccugccagggac

SEQ ID NO: 1713132 - RNA, 19 nt, Human
cauucuccaccugccaggg

SEQ ID NO: 1713133 - RNA, 18 nt, Human
cauucuccaccugccagg

SEQ ID NO: 1713134 - RNA, 17 nt, Human
cauucuccaccugccag

SEQ ID NO: 1713135 - RNA, 20 nt, Human
cauucuccuuguguuacuaa

SEQ ID NO: 1713136 - RNA, 19 nt, Human
cauguuggccaggcugguc

SEQ ID NO: 1713137 - RNA, 20 nt, Human
cauguuggccaggcugcucu

SEQ ID NO: 1713138 - RNA, 17 nt, Human
cauguuggccaggcugg

SEQ ID NO: 1713139 - RNA, 18 nt, Human
cauguuggccaggcuggu

SEQ ID NO: 1713140 - RNA, 18 nt, Human
cauguucuuaauucuuag

SEQ ID NO: 1713141 - RNA, 17 nt, Human
cauguuacauaagauaa

SEQ ID NO: 1713142 - RNA, 16 nt, Human
cauguuacauaagaua

SEQ ID NO: 1713143 - RNA, 16 nt, Human
cauguccaagaagccc

SEQ ID NO: 1713144 - RNA, 15 nt, Human
cauguccaagaagcc

SEQ ID NO: 1713145 - RNA, 13 nt, Human
cauguucuuaauu

SEQ ID NO: 1713146 - RNA, 16 nt, Human
cauguucuuaauucuu

SEQ ID NO: 1713147 - RNA, 21 nt, Human
cauguuacauaagauaaaugu

SEQ ID NO: 1713148 - RNA, 18 nt, Human
caugggaaaggggaaguu

SEQ ID NO: 1713149 - RNA, 20 nt, Human
caugggaaaugucaacaagu

SEQ ID NO: 1713150 - RNA, 21 nt, Human
cauggccucuucagaucucua

SEQ ID NO: 1713151 - RNA, 14 nt, Human
cauggccgugaacu

SEQ ID NO: 1713152 - RNA, 22 nt, Human
cauggccucuucagaucucuaa

SEQ ID NO: 1713153 - RNA, 16 nt, Human
caugcuccuggcccac

SEQ ID NO: 1713154 - RNA, 14 nt, Human
caugcuccuggccc

SEQ ID NO: 1713155 - RNA, 17 nt, Human
caugcuccuggcccacu

SEQ ID NO: 1713156 - RNA, 20 nt, Human
caugcuccuggcccacugca

SEQ ID NO: 1713157 - RNA, 15 nt, Human
cauggccagguggcc

SEQ ID NO: 1713158 - RNA, 12 nt, Human
caugcaagguca

SEQ ID NO: 1713159 - RNA, 15 nt, Human
caugcaaggucauuu

SEQ ID NO: 1713160 - RNA, 13 nt, Human
caugacaaagacu

SEQ ID NO: 1713161 - RNA, 16 nt, Human
caugaauuugugaagg

SEQ ID NO: 1713162 - RNA, 21 nt, Human
caugaauauuuaguguucaua

SEQ ID NO: 1713163 - RNA, 17 nt, Human
caguuauuauauuuaca

SEQ ID NO: 1713164 - RNA, 21 nt, Human
caguuauuauauuuacaaaug

SEQ ID NO: 1713165 - RNA, 20 nt, Human
caguggugcgaucuggguuc

SEQ ID NO: 1713166 - RNA, 19 nt, Human
caguggugcgaucuggguu

SEQ ID NO: 1713167 - RNA, 21 nt, Human
cagugguaugaucacggcuca

SEQ ID NO: 1713168 - RNA, 20 nt, Human
caguuacucagaauucucua

SEQ ID NO: 1713169 - RNA, 22 nt, Human
cagugauuaccagggacugagg

SEQ ID NO: 1713170 - RNA, 23 nt, Human
cagucugauucccaagcucugcu

SEQ ID NO: 1713171 - RNA, 22 nt, Human
cagugcccacaggaucagucug

SEQ ID NO: 1713172 - RNA, 21 nt, Human
cagugcccacaggaucagucu

SEQ ID NO: 1713173 - RNA, 18 nt, Human
cagugggagcugccuguu

SEQ ID NO: 1713174 - RNA, 17 nt, Human
cagugggagcugccugu

SEQ ID NO: 1713175 - RNA, 16 nt, Human
cagugggagcugccug

SEQ ID NO: 1713176 - RNA, 20 nt, Human
cagugguaugaucacggcuc

SEQ ID NO: 1713177 - RNA, 22 nt, Human
cagucugauucccaagcucugc

SEQ ID NO: 1713178 - RNA, 21 nt, Human
cagucugauucccaagcucug

SEQ ID NO: 1713179 - RNA, 22 nt, Human
caguuauuauauuuacaaaugg

SEQ ID NO: 1713180 - RNA, 22 nt, Human
cauccucuguacagagcccacg

SEQ ID NO: 1713181 - RNA, 12 nt, Human
caucccagcccc

SEQ ID NO: 1713182 - RNA, 11 nt, Human
caucccagccc

SEQ ID NO: 1713183 - RNA, 20 nt, Human
caucccaaacccuucagugc

SEQ ID NO: 1713184 - RNA, 19 nt, Human
caucccaaacccuucagug

SEQ ID NO: 1713185 - RNA, 21 nt, Human
caucagcacgauuucuguuua

SEQ ID NO: 1713186 - RNA, 18 nt, Human
cauccugaggcuccacuu

SEQ ID NO: 1713187 - RNA, 19 nt, Human
cauccugaggcuccacuug

SEQ ID NO: 1713188 - RNA, 21 nt, Human
caucuaaacugcccccucugc

SEQ ID NO: 1713189 - RNA, 15 nt, Human
caucuaaacugcccc

SEQ ID NO: 1713190 - RNA, 16 nt, Human
cauagguuuaauaauu

SEQ ID NO: 1713191 - RNA, 20 nt, Human
cauagcagcuuauucacaag

SEQ ID NO: 1713192 - RNA, 19 nt, Human
cauagcagcuuauucacaa

SEQ ID NO: 1713193 - RNA, 23 nt, Human
cauagcagagaaugaaagggccc

SEQ ID NO: 1713194 - RNA, 21 nt, Human
cauauuauuuuauguugcaua

SEQ ID NO: 1713195 - RNA, 23 nt, Human
cauaaugcgugcauaccacuuuu

SEQ ID NO: 1713196 - RNA, 11 nt, Human
caguuuuccuu

SEQ ID NO: 1713197 - RNA, 16 nt, Human
cauacaguuugcacuu

SEQ ID NO: 1713198 - RNA, 23 nt, Human
cauacaggaagguagaaauaucu

SEQ ID NO: 1713199 - RNA, 18 nt, Human
cauaauuauuauuuggcc

SEQ ID NO: 1713200 - RNA, 22 nt, Human
caguuguuagugugucuuagug

SEQ ID NO: 1713201 - RNA, 18 nt, Human
caguuguuagugugucuu

SEQ ID NO: 1713202 - RNA, 23 nt, Human
caguuuguuaguaugaggcauuu

SEQ ID NO: 1713203 - RNA, 17 nt, Human
cagaggggguggccucc

SEQ ID NO: 1713204 - RNA, 19 nt, Human
cagauacuuggggggcuga

SEQ ID NO: 1713205 - RNA, 16 nt, Human
cagaggggguggccuc

SEQ ID NO: 1713206 - RNA, 14 nt, Human
cagaggggguggcc

SEQ ID NO: 1713207 - RNA, 19 nt, Human
cagauagauauaugcucug

SEQ ID NO: 1713208 - RNA, 22 nt, Human
cagauauaaaagacugaccaau

SEQ ID NO: 1713209 - RNA, 14 nt, Human
cagauccccaagcc

SEQ ID NO: 1713210 - RNA, 19 nt, Human
cagaggaaagcaaaggaga

SEQ ID NO: 1713211 - RNA, 17 nt, Human
cagaggaaagcaaagga

SEQ ID NO: 1713212 - RNA, 13 nt, Human
cagaggggguggc

SEQ ID NO: 1713213 - RNA, 20 nt, Human
cagaggaaagcaaaggagau

SEQ ID NO: 1713214 - RNA, 23 nt, Human
cagagaggguggugaccucugcc

SEQ ID NO: 1713215 - RNA, 20 nt, Human
cagagagguuaaggugggua

SEQ ID NO: 1713216 - RNA, 13 nt, Human
cagagcugccacc

SEQ ID NO: 1713217 - RNA, 22 nt, Human
cagagaggguggugaccucugc

SEQ ID NO: 1713218 - RNA, 20 nt, Human
cagagaggguggugaccucu

SEQ ID NO: 1713219 - RNA, 17 nt, Human
cagagaggguggugacc

SEQ ID NO: 1713220 - RNA, 13 nt, Human
cagagaggguggg

SEQ ID NO: 1713221 - RNA, 12 nt, Human
cagagagggugg

SEQ ID NO: 1713222 - RNA, 14 nt, Human
cagcacgauuucug

SEQ ID NO: 1713223 - RNA, 15 nt, Human
cagcacgauuucugu

SEQ ID NO: 1713224 - RNA, 18 nt, Human
cagcacgggggccaagga

SEQ ID NO: 1713225 - RNA, 18 nt, Human
cagauugcaacaggcugg

SEQ ID NO: 1713226 - RNA, 20 nt, Human
cagauugcaacaggcugggc

SEQ ID NO: 1713227 - RNA, 19 nt, Human
cagauugcaacaggcuggg

SEQ ID NO: 1713228 - RNA, 20 nt, Human
cagauuucacucuccuuggu

SEQ ID NO: 1713229 - RNA, 13 nt, Human
cagauuucacucu

SEQ ID NO: 1713230 - RNA, 13 nt, Human
cagauuuaugcau

SEQ ID NO: 1713231 - RNA, 19 nt, Human
cagcaccaucucuccuccu

SEQ ID NO: 1713232 - RNA, 17 nt, Human
cagcaccaucucuccuc

SEQ ID NO: 1713233 - RNA, 19 nt, Human
cagauuugaacucuucaau

SEQ ID NO: 1713234 - RNA, 21 nt, Human
cagacuggaagcacagcuuca

SEQ ID NO: 1713235 - RNA, 20 nt, Human
cagacuggaagcacagcuuc

SEQ ID NO: 1713236 - RNA, 18 nt, Human
cagacuggaagcacagcu

SEQ ID NO: 1713237 - RNA, 17 nt, Human
cagacuggaagcacagc

SEQ ID NO: 1713238 - RNA, 16 nt, Human
cagacuggaagcacag

SEQ ID NO: 1713239 - RNA, 14 nt, Human
cagacuggaagcac

SEQ ID NO: 1713240 - RNA, 13 nt, Human
cagacuggaagca

SEQ ID NO: 1713241 - RNA, 23 nt, Human
cagacaggcaagcaccuccugcc

SEQ ID NO: 1713242 - RNA, 22 nt, Human
cagacaggcaagcaccuccugc

SEQ ID NO: 1713243 - RNA, 17 nt, Human
cagacucuacagaggcc

SEQ ID NO: 1713244 - RNA, 21 nt, Human
cagacucuacagaggccaugg

SEQ ID NO: 1713245 - RNA, 20 nt, Human
cagacucuacagaggccaug

SEQ ID NO: 1713246 - RNA, 19 nt, Human
cagacucuacagaggccau

SEQ ID NO: 1713247 - RNA, 18 nt, Human
cagacucuacagaggcca

SEQ ID NO: 1713248 - RNA, 23 nt, Human
cagacucuacagaggccaugggc

SEQ ID NO: 1713249 - RNA, 21 nt, Human
cagacaggcaagcaccuccug

SEQ ID NO: 1713250 - RNA, 20 nt, Human
cagacaggcaagcaccuccu

SEQ ID NO: 1713251 - RNA, 18 nt, Human
cagacaggcaagcaccuc

SEQ ID NO: 1713252 - RNA, 13 nt, Human
cagacaggcaagc

SEQ ID NO: 1713253 - RNA, 11 nt, Human
cagacaggcaa

SEQ ID NO: 1713254 - RNA, 24 nt, Human
cagacaggaccagggauuuccaug

SEQ ID NO: 1713255 - RNA, 17 nt, Human
cagacaggaccagggau

SEQ ID NO: 1713256 - RNA, 18 nt, Human
cagacagcugccugggau

SEQ ID NO: 1713257 - RNA, 17 nt, Human
cagacagcugccuggga

SEQ ID NO: 1713258 - RNA, 16 nt, Human
cagacagcugccuggg

SEQ ID NO: 1713259 - RNA, 15 nt, Human
cagacagcugccugg

SEQ ID NO: 1713260 - RNA, 16 nt, Human
cagacaggaccaggga

SEQ ID NO: 1713261 - RNA, 15 nt, Human
cagacaggaccaggg

SEQ ID NO: 1713262 - RNA, 13 nt, Human
cagacaggaccag

SEQ ID NO: 1713263 - RNA, 14 nt, Human
cagacagcugccug

SEQ ID NO: 1713264 - RNA, 13 nt, Human
cagacagcugccu

SEQ ID NO: 1713265 - RNA, 14 nt, Human
cagacagcccucca

SEQ ID NO: 1713266 - RNA, 16 nt, Human
cagcugucaaggcuca

SEQ ID NO: 1713267 - RNA, 17 nt, Human
caggaaaggcuccagga

SEQ ID NO: 1713268 - RNA, 16 nt, Human
caggaaaggcuccagg

SEQ ID NO: 1713269 - RNA, 20 nt, Human
caggaaaggcuccaggagca

SEQ ID NO: 1713270 - RNA, 19 nt, Human
caggaaaggcuccaggagc

SEQ ID NO: 1713271 - RNA, 21 nt, Human
cagcugacuuuucuguccgag

SEQ ID NO: 1713272 - RNA, 14 nt, Human
cagcugagaggcug

SEQ ID NO: 1713273 - RNA, 16 nt, Human
cagccugcuccagcug

SEQ ID NO: 1713274 - RNA, 19 nt, Human
cagccugcuccagcuguuc

SEQ ID NO: 1713275 - RNA, 17 nt, Human
cagccugcuccagcugu

SEQ ID NO: 1713276 - RNA, 15 nt, Human
cagcuaacauggaag

SEQ ID NO: 1713277 - RNA, 20 nt, Human
cagcgcuggccgggaccccg

SEQ ID NO: 1713278 - RNA, 21 nt, Human
caggcugggagagccuuccag

SEQ ID NO: 1713279 - RNA, 21 nt, Human
caggcgugagccaccgugccu

SEQ ID NO: 1713280 - RNA, 14 nt, Human
caggccuccuacag

SEQ ID NO: 1713281 - RNA, 15 nt, Human
caggccuguccaaca

SEQ ID NO: 1713282 - RNA, 12 nt, Human
caggccuccuac

SEQ ID NO: 1713283 - RNA, 16 nt, Human
caggggaaaagaggag

SEQ ID NO: 1713284 - RNA, 14 nt, Human
caggggaaaagagg

SEQ ID NO: 1713285 - RNA, 17 nt, Human
caggggaaaaucagccu

SEQ ID NO: 1713286 - RNA, 23 nt, Human
caggcugggagagccuuccaggg

SEQ ID NO: 1713287 - RNA, 22 nt, Human
caggcugggagagccuuccagg

SEQ ID NO: 1713288 - RNA, 19 nt, Human
caggaggaucacuugaguc

SEQ ID NO: 1713289 - RNA, 19 nt, Human
caggaggccagccuugacc

SEQ ID NO: 1713290 - RNA, 18 nt, Human
caggaggccagccuugac

SEQ ID NO: 1713291 - RNA, 22 nt, Human
caggaggccagccuugaccauu

SEQ ID NO: 1713292 - RNA, 17 nt, Human
caggcaaugcuggcugu

SEQ ID NO: 1713293 - RNA, 16 nt, Human
caggcaaugcuggcug

SEQ ID NO: 1713294 - RNA, 15 nt, Human
caggcaaugcuggcu

SEQ ID NO: 1713295 - RNA, 23 nt, Human
caggaccucaggugagaagcaga

SEQ ID NO: 1713296 - RNA, 16 nt, Human
caggaccucaggugag

SEQ ID NO: 1713297 - RNA, 12 nt, Human
caggccaggccc

SEQ ID NO: 1713298 - RNA, 11 nt, Human
caggccaggcc

SEQ ID NO: 1713299 - RNA, 14 nt, Human
auucauauuuacuu

SEQ ID NO: 1713300 - RNA, 16 nt, Human
auuacaggugugaacc

SEQ ID NO: 1713301 - RNA, 23 nt, Human
auuaugugccagauuuaugcaua

SEQ ID NO: 1713302 - RNA, 21 nt, Human
auuaugugccagauuuaugca

SEQ ID NO: 1713303 - RNA, 13 nt, Human
auuaugugccaga

SEQ ID NO: 1713304 - RNA, 15 nt, Human
auucucuuauccaac

SEQ ID NO: 1713305 - RNA, 16 nt, Human
auucucuccuguaccu

SEQ ID NO: 1713306 - RNA, 20 nt, Human
auucucuaguuugauuaaau

SEQ ID NO: 1713307 - RNA, 14 nt, Human
auucucuuauccaa

SEQ ID NO: 1713308 - RNA, 12 nt, Human
auucucuuaucc

SEQ ID NO: 1713309 - RNA, 23 nt, Human
auucucuaguuugauuaaauucu

SEQ ID NO: 1713310 - RNA, 21 nt, Human
auucgcuacuaugauuuaauu

SEQ ID NO: 1713311 - RNA, 21 nt, Human
auuaacaugaauauuuagugu

SEQ ID NO: 1713312 - RNA, 16 nt, Human
auuacaggcuccugcc

SEQ ID NO: 1713313 - RNA, 15 nt, Human
auuacaggcuccugc

SEQ ID NO: 1713314 - RNA, 13 nt, Human
auuacagguguga

SEQ ID NO: 1713315 - RNA, 19 nt, Human
auuacaggcuccugccacc

SEQ ID NO: 1713316 - RNA, 17 nt, Human
auuacaggcuccugcca

SEQ ID NO: 1713317 - RNA, 15 nt, Human
auuaauggaaauguu

SEQ ID NO: 1713318 - RNA, 19 nt, Human
auuuguucuauagcuuuuc

SEQ ID NO: 1713319 - RNA, 14 nt, Human
auuuguuauaauga

SEQ ID NO: 1713320 - RNA, 15 nt, Human
auuuugaaaaacugc

SEQ ID NO: 1713321 - RNA, 13 nt, Human
auuuugaaaaacu

SEQ ID NO: 1713322 - RNA, 17 nt, Human
auuuucuauaauuuaaa

SEQ ID NO: 1713323 - RNA, 18 nt, Human
auuuucuauaauuuaaau

SEQ ID NO: 1713324 - RNA, 19 nt, Human
auuuucuauaauuuaaaua

SEQ ID NO: 1713325 - RNA, 22 nt, Human
auuuuguuuuugucuuaaaaag

SEQ ID NO: 1713326 - RNA, 13 nt, Human
auuuuuaaagaaa

SEQ ID NO: 1713327 - RNA, 15 nt, Human
auuuuuuucugaauu

SEQ ID NO: 1713328 - RNA, 16 nt, Human
auuuuuauuaaauuau

SEQ ID NO: 1713329 - RNA, 20 nt, Human
caaaagguuaauaaaguaau

SEQ ID NO: 1713330 - RNA, 21 nt, Human
caaaagguauuuuaaucacca

SEQ ID NO: 1713331 - RNA, 19 nt, Human
caaaagcaucuaugugaga

SEQ ID NO: 1713332 - RNA, 13 nt, Human
caaaagcauguga

SEQ ID NO: 1713333 - RNA, 15 nt, Human
auuuuuuuuguuuca

SEQ ID NO: 1713334 - RNA, 17 nt, Human
caaaccaucauugaaau

SEQ ID NO: 1713335 - RNA, 16 nt, Human
caaaccaucauugaaa

SEQ ID NO: 1713336 - RNA, 14 nt, Human
caaaccaucauuga

SEQ ID NO: 1713337 - RNA, 18 nt, Human
auuuaauuugaaauaugg

SEQ ID NO: 1713338 - RNA, 15 nt, Human
auuuauauaaauuuu

SEQ ID NO: 1713339 - RNA, 14 nt, Human
auuucacucuccuu

SEQ ID NO: 1713340 - RNA, 12 nt, Human
auuucacucucc

SEQ ID NO: 1713341 - RNA, 20 nt, Human
auuucuguuuagauaauaca

SEQ ID NO: 1713342 - RNA, 19 nt, Human
auuucuguuuagauaauac

SEQ ID NO: 1713343 - RNA, 21 nt, Human
auuucuguuuagauaauacac

SEQ ID NO: 1713344 - RNA, 14 nt, Human
caagaccacguuuc

SEQ ID NO: 1713345 - RNA, 16 nt, Human
caagaccacguuucua

SEQ ID NO: 1713346 - RNA, 18 nt, Human
caagcaagaaacacuggg

SEQ ID NO: 1713347 - RNA, 13 nt, Human
caagcaagaaaca

SEQ ID NO: 1713348 - RNA, 19 nt, Human
caagcaaaugugaaucauu

SEQ ID NO: 1713349 - RNA, 17 nt, Human
caagcaaaugugaauca

SEQ ID NO: 1713350 - RNA, 15 nt, Human
caagcaaaugugaau

SEQ ID NO: 1713351 - RNA, 13 nt, Human
caagcaccuccug

SEQ ID NO: 1713352 - RNA, 14 nt, Human
caagcaccuccugc

SEQ ID NO: 1713353 - RNA, 18 nt, Human
caagcaccuagccucgcu

SEQ ID NO: 1713354 - RNA, 13 nt, Human
caacuauggccug

SEQ ID NO: 1713355 - RNA, 16 nt, Human
caaccccuucgcuccu

SEQ ID NO: 1713356 - RNA, 14 nt, Human
caaccccuucgcuc

SEQ ID NO: 1713357 - RNA, 17 nt, Human
caaccccuucgcuccug

SEQ ID NO: 1713358 - RNA, 14 nt, Human
caacccccagccug

SEQ ID NO: 1713359 - RNA, 14 nt, Human
caacuauggccugu

SEQ ID NO: 1713360 - RNA, 20 nt, Human
caacucccugccccccagcc

SEQ ID NO: 1713361 - RNA, 19 nt, Human
caacucccugccccccagc

SEQ ID NO: 1713362 - RNA, 15 nt, Human
caagaagcccaggaa

SEQ ID NO: 1713363 - RNA, 21 nt, Human
caacucccugccccccagccc

SEQ ID NO: 1713364 - RNA, 17 nt, Human
caagaaggaugauucaa

SEQ ID NO: 1713365 - RNA, 18 nt, Human
caagaagcccaggaaagg

SEQ ID NO: 1713366 - RNA, 18 nt, Human
caagaauagaugcugacu

SEQ ID NO: 1713367 - RNA, 19 nt, Human
caagaauagcauuguaaaa

SEQ ID NO: 1713368 - RNA, 14 nt, Human
caaucaaaucugcu

SEQ ID NO: 1713369 - RNA, 15 nt, Human
caauggcagccuugg

SEQ ID NO: 1713370 - RNA, 14 nt, Human
caauggcagccuug

SEQ ID NO: 1713371 - RNA, 13 nt, Human
caauggcagccuu

SEQ ID NO: 1713372 - RNA, 16 nt, Human
caauggcagccuuggc

SEQ ID NO: 1713373 - RNA, 12 nt, Human
caaugcuggcug

SEQ ID NO: 1713374 - RNA, 20 nt, Human
caauuggauacgacaacuug

SEQ ID NO: 1713375 - RNA, 17 nt, Human
caauauuguacaguuuu

SEQ ID NO: 1713376 - RNA, 18 nt, Human
caauauuguacaguuuuu

SEQ ID NO: 1713377 - RNA, 16 nt, Human
caauauuguacaguuu

SEQ ID NO: 1713378 - RNA, 20 nt, Human
caauuuauuauggcacauca

SEQ ID NO: 1713379 - RNA, 18 nt, Human
caagcuccaagcucccag

SEQ ID NO: 1713380 - RNA, 17 nt, Human
caagcuccaagcuccca

SEQ ID NO: 1713381 - RNA, 21 nt, Human
caagcuccaagcucccaggca

SEQ ID NO: 1713382 - RNA, 19 nt, Human
caagcuccaagcucccagg

SEQ ID NO: 1713383 - RNA, 17 nt, Human
caagcuccaucuccacu

SEQ ID NO: 1713384 - RNA, 21 nt, Human
caagcuccaucuccacuccag

SEQ ID NO: 1713385 - RNA, 17 nt, Human
caagcucccaggcauuc

SEQ ID NO: 1713386 - RNA, 15 nt, Human
caagcucccaggcau

SEQ ID NO: 1713387 - RNA, 14 nt, Human
caagcucccaggca

SEQ ID NO: 1713388 - RNA, 12 nt, Human
caagcucccagg

SEQ ID NO: 1713389 - RNA, 16 nt, Human
caagcucugcuccucu

SEQ ID NO: 1713390 - RNA, 15 nt, Human
caagcucugcuccuc

SEQ ID NO: 1713391 - RNA, 16 nt, Human
caaggcaaggcuguca

SEQ ID NO: 1713392 - RNA, 14 nt, Human
caaggcaaggcugu

SEQ ID NO: 1713393 - RNA, 20 nt, Human
caaggauugcuacuguccua

SEQ ID NO: 1713394 - RNA, 17 nt, Human
caaguauuauaccuuuu

SEQ ID NO: 1713395 - RNA, 22 nt, Human
caaguauuauaccuuuuuuaga

SEQ ID NO: 1713396 - RNA, 12 nt, Human
cacccugcucuc

SEQ ID NO: 1713397 - RNA, 12 nt, Human
cacccuccuuuc

SEQ ID NO: 1713398 - RNA, 12 nt, Human
caccugccaggg

SEQ ID NO: 1713399 - RNA, 11 nt, Human
caccugccagg

SEQ ID NO: 1713400 - RNA, 21 nt, Human
caccugccccucaacucuccu

SEQ ID NO: 1713401 - RNA, 18 nt, Human
caccugccccucaacucu

SEQ ID NO: 1713402 - RNA, 13 nt, Human
caccugccaggga

SEQ ID NO: 1713403 - RNA, 20 nt, Human
caccugcggugcuaucuccc

SEQ ID NO: 1713404 - RNA, 19 nt, Human
caccugcggugcuaucucc

SEQ ID NO: 1713405 - RNA, 17 nt, Human
caccugcggugcuaucu

SEQ ID NO: 1713406 - RNA, 16 nt, Human
caccugcggugcuauc

SEQ ID NO: 1713407 - RNA, 16 nt, Human
cacuccagaccccugg

SEQ ID NO: 1713408 - RNA, 14 nt, Human
cacuccagaccccu

SEQ ID NO: 1713409 - RNA, 15 nt, Human
cacuacauucuguua

SEQ ID NO: 1713410 - RNA, 16 nt, Human
cacuagacccacugga

SEQ ID NO: 1713411 - RNA, 13 nt, Human
cacuacauucugu

SEQ ID NO: 1713412 - RNA, 14 nt, Human
cacuacauucuguu

SEQ ID NO: 1713413 - RNA, 22 nt, Human
cacggaagagccuugcggaagg

SEQ ID NO: 1713414 - RNA, 16 nt, Human
cacggaagagccuugc

SEQ ID NO: 1713415 - RNA, 15 nt, Human
cacgcuggagugcag

SEQ ID NO: 1713416 - RNA, 20 nt, Human
cacgcuggagugcagugagc

SEQ ID NO: 1713417 - RNA, 18 nt, Human
cacgcuggagugcaguga

SEQ ID NO: 1713418 - RNA, 17 nt, Human
cacgcuggagugcagug

SEQ ID NO: 1713419 - RNA, 16 nt, Human
cacgcuggagugcagu

SEQ ID NO: 1713420 - RNA, 21 nt, Human
cacgcuggagugcagugagcc

SEQ ID NO: 1713421 - RNA, 21 nt, Human
cacuccagugagacagcucug

SEQ ID NO: 1713422 - RNA, 17 nt, Human
cacuccagaccccuggc

SEQ ID NO: 1713423 - RNA, 22 nt, Human
cacaucuugcucugcugacaga

SEQ ID NO: 1713424 - RNA, 21 nt, Human
cacaucuugcucugcugacag

SEQ ID NO: 1713425 - RNA, 20 nt, Human
cacaucuugcucugcugaca

SEQ ID NO: 1713426 - RNA, 15 nt, Human
cacaucuugcucugc

SEQ ID NO: 1713427 - RNA, 14 nt, Human
cacaucuugcucug

SEQ ID NO: 1713428 - RNA, 13 nt, Human
cacaucuugcucu

SEQ ID NO: 1713429 - RNA, 12 nt, Human
cacccagcccac

SEQ ID NO: 1713430 - RNA, 22 nt, Human
caccagccccagugcccacagg

SEQ ID NO: 1713431 - RNA, 21 nt, Human
caccagccccagugcccacag

SEQ ID NO: 1713432 - RNA, 18 nt, Human
caccagccccagugccca

SEQ ID NO: 1713433 - RNA, 19 nt, Human
caccagcccuuagcaggga

SEQ ID NO: 1713434 - RNA, 21 nt, Human
caccagcccuuagcagggaaa

SEQ ID NO: 1713435 - RNA, 17 nt, Human
caccagccccagugccc

SEQ ID NO: 1713436 - RNA, 18 nt, Human
cacauuuauucugcucac

SEQ ID NO: 1713437 - RNA, 17 nt, Human
cacauuuauucugcuca

SEQ ID NO: 1713438 - RNA, 23 nt, Human
cacaucuugcucugcugacagac

SEQ ID NO: 1713439 - RNA, 20 nt, Human
auguuacauaagauaaaugu

SEQ ID NO: 1713440 - RNA, 19 nt, Human
auguuacauaagauaaaug

SEQ ID NO: 1713441 - RNA, 13 nt, Human
auguuggccaggc

SEQ ID NO: 1713442 - RNA, 21 nt, Human
uuuuagacccuauugcugcuu

SEQ ID NO: 1713443 - RNA, 17 nt, Human
uuuuagaguugauacua

SEQ ID NO: 1713444 - RNA, 16 nt, Human
auguugcccaggcagg

SEQ ID NO: 1713445 - RNA, 15 nt, Human
auguugcccaggcag

SEQ ID NO: 1713446 - RNA, 14 nt, Human
auguugcccaggca

SEQ ID NO: 1713447 - RNA, 13 nt, Human
auguugcccaggc

SEQ ID NO: 1713448 - RNA, 18 nt, Human
auguugaaagaucaaaag

SEQ ID NO: 1713449 - RNA, 12 nt, Human
auguugaaagau

SEQ ID NO: 1713450 - RNA, 15 nt, Human
auguguguuuuaaaa

SEQ ID NO: 1713451 - RNA, 21 nt, Human
augugccagguuuuuggucug

SEQ ID NO: 1713452 - RNA, 18 nt, Human
uuuuaaaaaacugcugac

SEQ ID NO: 1713453 - RNA, 21 nt, Human
uuuuaaaaaacugcugacugu

SEQ ID NO: 1713454 - RNA, 16 nt, Human
uuuucuauaauuuaaa

SEQ ID NO: 1713455 - RNA, 14 nt, Human
uuuucaguguacau

SEQ ID NO: 1713456 - RNA, 18 nt, Human
uuuuauggcuuuugugca

SEQ ID NO: 1713457 - RNA, 19 nt, Human
uuuuauggcuuuugugcau

SEQ ID NO: 1713458 - RNA, 15 nt, Human
uuuuaguagagacag

SEQ ID NO: 1713459 - RNA, 12 nt, Human
uuuuauuaaauu

SEQ ID NO: 1713460 - RNA, 21 nt, Human
uuuuauggcuuuugugcauua

SEQ ID NO: 1713461 - RNA, 13 nt, Human
uuuucuguucuuu

SEQ ID NO: 1713462 - RNA, 21 nt, Human
uuuucuuaaccagaucauugu

SEQ ID NO: 1713463 - RNA, 17 nt, Human
auguuggccaggcuggu

SEQ ID NO: 1713464 - RNA, 19 nt, Human
auuaaaacacaacaucuuu

SEQ ID NO: 1713465 - RNA, 23 nt, Human
auuaaaaaucucaaauuucuaaa

SEQ ID NO: 1713466 - RNA, 15 nt, Human
auguuuuuuuuuaaa

SEQ ID NO: 1713467 - RNA, 23 nt, Human
augucgucaaagcugaaauggac

SEQ ID NO: 1713468 - RNA, 13 nt, Human
augugagaccauu

SEQ ID NO: 1713469 - RNA, 14 nt, Human
augugagacugguu

SEQ ID NO: 1713470 - RNA, 19 nt, Human
auguauauuuuauaucaau

SEQ ID NO: 1713471 - RNA, 12 nt, Human
auguaucaauga

SEQ ID NO: 1713472 - RNA, 17 nt, Human
auguaucaaauacauuu

SEQ ID NO: 1713473 - RNA, 17 nt, Human
auguccaagaagcccag

SEQ ID NO: 1713474 - RNA, 16 nt, Human
auguccaagaagccca

SEQ ID NO: 1713475 - RNA, 14 nt, Human
uuuguacagacaac

SEQ ID NO: 1713476 - RNA, 16 nt, Human
uuuguaauuuuuuuau

SEQ ID NO: 1713477 - RNA, 15 nt, Human
augugaugagaggaa

SEQ ID NO: 1713478 - RNA, 18 nt, Human
augugauccuuuuggagu

SEQ ID NO: 1713479 - RNA, 14 nt, Human
uuugucuuaaaaag

SEQ ID NO: 1713480 - RNA, 13 nt, Human
uuugucuuaaaaa

SEQ ID NO: 1713481 - RNA, 23 nt, Human
uuugucuuaaaaaguggaaaaau

SEQ ID NO: 1713482 - RNA, 16 nt, Human
uuugugauacaaugcu

SEQ ID NO: 1713483 - RNA, 22 nt, Human
uuugugauacaaugcugugccc

SEQ ID NO: 1713484 - RNA, 15 nt, Human
uuugugauacaaugc

SEQ ID NO: 1713485 - RNA, 19 nt, Human
uuugugcauuaucuagaua

SEQ ID NO: 1713486 - RNA, 22 nt, Human
uuugugcauuaucuagauacug

SEQ ID NO: 1713487 - RNA, 13 nt, Human
uuuguuucauauu

SEQ ID NO: 1713488 - RNA, 16 nt, Human
uuuguuucugaaaggg

SEQ ID NO: 1713489 - RNA, 14 nt, Human
uuuguuucugaaag

SEQ ID NO: 1713490 - RNA, 22 nt, Human
uuugggguacccacugcucugg

SEQ ID NO: 1713491 - RNA, 21 nt, Human
uuugggguacccacugcucug

SEQ ID NO: 1713492 - RNA, 13 nt, Human
uuuggggaagaac

SEQ ID NO: 1713493 - RNA, 13 nt, Human
uuuggcugcugaa

SEQ ID NO: 1713494 - RNA, 12 nt, Human
uuuggcugcuga

SEQ ID NO: 1713495 - RNA, 14 nt, Human
uuugggcugcccug

SEQ ID NO: 1713496 - RNA, 22 nt, Human
uuuggauuggaugaauuccaaa

SEQ ID NO: 1713497 - RNA, 13 nt, Human
uuugcuguagaag

SEQ ID NO: 1713498 - RNA, 20 nt, Human
uuugcuggagcucugcccau

SEQ ID NO: 1713499 - RNA, 19 nt, Human
uuugcuggggccgaaagaa

SEQ ID NO: 1713500 - RNA, 22 nt, Human
uuugcuggggccgaaagaacag

SEQ ID NO: 1713501 - RNA, 18 nt, Human
uuugauucagacagcugc

SEQ ID NO: 1713502 - RNA, 18 nt, Human
uuugaccucugcagcaau

SEQ ID NO: 1713503 - RNA, 13 nt, Human
uuugagacagagu

SEQ ID NO: 1713504 - RNA, 15 nt, Human
uuugauccaagcugg

SEQ ID NO: 1713505 - RNA, 15 nt, Human
uuugauucagacagc

SEQ ID NO: 1713506 - RNA, 23 nt, Human
uuucccucccuuccucuuuccau

SEQ ID NO: 1713507 - RNA, 19 nt, Human
uuugaccucugcagcaaua

SEQ ID NO: 1713508 - RNA, 21 nt, Human
uuugaccucugcagcaauaaa

SEQ ID NO: 1713509 - RNA, 14 nt, Human
uuugacaaggggca

SEQ ID NO: 1713510 - RNA, 18 nt, Human
uuugacaaagguaaauca

SEQ ID NO: 1713511 - RNA, 20 nt, Human
auuauauggcuugaguuuaa

SEQ ID NO: 1713512 - RNA, 17 nt, Human
auuccaagugauugaaa

SEQ ID NO: 1713513 - RNA, 12 nt, Human
auuccacagcug

SEQ ID NO: 1713514 - RNA, 13 nt, Human
auuccacagcugc

SEQ ID NO: 1713515 - RNA, 18 nt, Human
auuccagagaguggcucc

SEQ ID NO: 1713516 - RNA, 17 nt, Human
auucccaagcucugcuc

SEQ ID NO: 1713517 - RNA, 19 nt, Human
auucccaagcucugcuccu

SEQ ID NO: 1713518 - RNA, 18 nt, Human
auucccaagcucugcucc

SEQ ID NO: 1713519 - RNA, 20 nt, Human
auuccccaggaggccagccu

SEQ ID NO: 1713520 - RNA, 22 nt, Human
auuccccaggaggccagccuug

SEQ ID NO: 1713521 - RNA, 14 nt, Human
auucagccuggcuu

SEQ ID NO: 1713522 - RNA, 15 nt, Human
auucagccuggcuuc

SEQ ID NO: 1713523 - RNA, 21 nt, Human
uuuugugaaguuuaauugacu

SEQ ID NO: 1713524 - RNA, 16 nt, Human
uuuuguuuuugucuua

SEQ ID NO: 1713525 - RNA, 15 nt, Human
uuuuugaagcuguau

SEQ ID NO: 1713526 - RNA, 15 nt, Human
uuuuuggaagugaaa

SEQ ID NO: 1713527 - RNA, 19 nt, Human
uuuuuggaagugaaaacuu

SEQ ID NO: 1713528 - RNA, 22 nt, Human
uuuuugggaaaagaaaagucaa

SEQ ID NO: 1713529 - RNA, 19 nt, Human
auuaaguacuauguaucaa

SEQ ID NO: 1713530 - RNA, 18 nt, Human
auuaaguacuauguauca

SEQ ID NO: 1713531 - RNA, 13 nt, Human
auuaaggaagaca

SEQ ID NO: 1713532 - RNA, 11 nt, Human
uuuuuguauuu

SEQ ID NO: 1713533 - RNA, 13 nt, Human
auuaaguuguuaa

SEQ ID NO: 1713534 - RNA, 13 nt, Human
auuacuucugcua

SEQ ID NO: 1713535 - RNA, 14 nt, Human
auuacuucugcuac

SEQ ID NO: 1713536 - RNA, 13 nt, Human
auuagagaagaga

SEQ ID NO: 1713537 - RNA, 12 nt, Human
auugcaccacug

SEQ ID NO: 1713538 - RNA, 19 nt, Human
auugcaacaggcugggcuu

SEQ ID NO: 1713539 - RNA, 18 nt, Human
auugcaacaggcugggcu

SEQ ID NO: 1713540 - RNA, 17 nt, Human
auugcaacaggcugggc

SEQ ID NO: 1713541 - RNA, 23 nt, Human
auuggcuagagguucaaagauau

SEQ ID NO: 1713542 - RNA, 19 nt, Human
auuggcuagagguucaaag

SEQ ID NO: 1713543 - RNA, 20 nt, Human
auuggcuagagguucaaaga

SEQ ID NO: 1713544 - RNA, 22 nt, Human
auuggcuagagguucaaagaua

SEQ ID NO: 1713545 - RNA, 16 nt, Human
auugcauuuccugaca

SEQ ID NO: 1713546 - RNA, 23 nt, Human
auuuauaaaaauaaaaaacacug

SEQ ID NO: 1713547 - RNA, 17 nt, Human
auuuaguguucauaaau

SEQ ID NO: 1713548 - RNA, 20 nt, Human
auuuacuucuuauacauuug

SEQ ID NO: 1713549 - RNA, 19 nt, Human
auuuacuucuuauacauuu

SEQ ID NO: 1713550 - RNA, 16 nt, Human
auuuaguguucauaaa

SEQ ID NO: 1713551 - RNA, 15 nt, Human
auuuauaaacuuuuu

SEQ ID NO: 1713552 - RNA, 16 nt, Human
auuguaguccuguaau

SEQ ID NO: 1713553 - RNA, 17 nt, Human
auuguuuucaguguaca

SEQ ID NO: 1713554 - RNA, 17 nt, Human
auuuaaaaaaaaaccug

SEQ ID NO: 1713555 - RNA, 19 nt, Human
auuguuuucaguguacaug

SEQ ID NO: 1713556 - RNA, 18 nt, Human
auuguuuucaguguacau

SEQ ID NO: 1713557 - RNA, 14 nt, Human
auuuaaaaaaaauc

SEQ ID NO: 1713558 - RNA, 21 nt, Human
auuuccuaaauauauuuuaag

SEQ ID NO: 1713559 - RNA, 16 nt, Human
auuucccaaagcagug

SEQ ID NO: 1713560 - RNA, 14 nt, Human
auuucccaaagcag

SEQ ID NO: 1713561 - RNA, 17 nt, Human
auuuccguuaaaauacc

SEQ ID NO: 1713562 - RNA, 14 nt, Human
auuuccuaaauaua

SEQ ID NO: 1713563 - RNA, 21 nt, Human
auuuggugguuucagaaaugu

SEQ ID NO: 1713564 - RNA, 21 nt, Human
auuugaggucuguucuuucca

SEQ ID NO: 1713565 - RNA, 22 nt, Human
auuugaggucuguucuuuccaa

SEQ ID NO: 1713566 - RNA, 16 nt, Human
auuugagcagggcuca

SEQ ID NO: 1713567 - RNA, 15 nt, Human
auuugagcagggcuc

SEQ ID NO: 1713568 - RNA, 17 nt, Human
auuugaggucuguucuu

SEQ ID NO: 1713569 - RNA, 18 nt, Human
auuugaggucuguucuuu

SEQ ID NO: 1713570 - RNA, 16 nt, Human
auuucuuccacaagag

SEQ ID NO: 1713571 - RNA, 23 nt, Human
augcacuuuguucuggcucuucc

SEQ ID NO: 1713572 - RNA, 18 nt, Human
uuuaaaaaaauuccaagu

SEQ ID NO: 1713573 - RNA, 18 nt, Human
augcagagguccacaaca

SEQ ID NO: 1713574 - RNA, 17 nt, Human
augcagagguccacaac

SEQ ID NO: 1713575 - RNA, 21 nt, Human
augcacuuuguucuggcucuu

SEQ ID NO: 1713576 - RNA, 13 nt, Human
augauuucauuca

SEQ ID NO: 1713577 - RNA, 17 nt, Human
uuguucuugguuuguaa

SEQ ID NO: 1713578 - RNA, 19 nt, Human
uuguucuugguuuguaaau

SEQ ID NO: 1713579 - RNA, 20 nt, Human
uuguucuugguuuguaaauu

SEQ ID NO: 1713580 - RNA, 17 nt, Human
augauuuaauuugaaau

SEQ ID NO: 1713581 - RNA, 21 nt, Human
uuuaaauauaugcuaagucuu

SEQ ID NO: 1713582 - RNA, 13 nt, Human
uuuaaaugaaagu

SEQ ID NO: 1713583 - RNA, 21 nt, Human
uuuaaaugaaagugagacuuu

SEQ ID NO: 1713584 - RNA, 11 nt, Human
uuuaaaugcac

SEQ ID NO: 1713585 - RNA, 21 nt, Human
uuuaaaaaauuaaucugggcc

SEQ ID NO: 1713586 - RNA, 23 nt, Human
uuuaaaaauacagauagauauau

SEQ ID NO: 1713587 - RNA, 16 nt, Human
uuuaaugaaagacugu

SEQ ID NO: 1713588 - RNA, 22 nt, Human
uuuaaggguuuguggaaaauga

SEQ ID NO: 1713589 - RNA, 20 nt, Human
uuuaaggguuuguggaaaau

SEQ ID NO: 1713590 - RNA, 17 nt, Human
uuuaaggguuuguggaa

SEQ ID NO: 1713591 - RNA, 20 nt, Human
uuuaaggaugcuuguacaua

SEQ ID NO: 1713592 - RNA, 21 nt, Human
uuuaaggaugcuuguacauaa

SEQ ID NO: 1713593 - RNA, 22 nt, Human
uuuaaggaugcuuguacauaau

SEQ ID NO: 1713594 - RNA, 21 nt, Human
uuuaagcuguuacugucuuca

SEQ ID NO: 1713595 - RNA, 19 nt, Human
uuuaaggaugcuuguacau

SEQ ID NO: 1713596 - RNA, 12 nt, Human
uuuaagagaaau

SEQ ID NO: 1713597 - RNA, 14 nt, Human
uuuaagaggcaggg

SEQ ID NO: 1713598 - RNA, 14 nt, Human
uuuaagagacagcc

SEQ ID NO: 1713599 - RNA, 23 nt, Human
augaguccccuguuuguuucuga

SEQ ID NO: 1713600 - RNA, 13 nt, Human
augaguccccugu

SEQ ID NO: 1713601 - RNA, 21 nt, Human
uugucauauaagauucauauu

SEQ ID NO: 1713602 - RNA, 17 nt, Human
uugucacacacuuuggc

SEQ ID NO: 1713603 - RNA, 17 nt, Human
augagguacugagagug

SEQ ID NO: 1713604 - RNA, 18 nt, Human
augagguacugagaguga

SEQ ID NO: 1713605 - RNA, 15 nt, Human
augagguacugagag

SEQ ID NO: 1713606 - RNA, 18 nt, Human
augaggucagagccugca

SEQ ID NO: 1713607 - RNA, 16 nt, Human
augaggucagagccug

SEQ ID NO: 1713608 - RNA, 15 nt, Human
augaggucagagccu

SEQ ID NO: 1713609 - RNA, 21 nt, Human
augagguacaaccuguucugc

SEQ ID NO: 1713610 - RNA, 20 nt, Human
augaggucagagccugcagu

SEQ ID NO: 1713611 - RNA, 19 nt, Human
augaggucagagccugcag

SEQ ID NO: 1713612 - RNA, 22 nt, Human
augaggucagagccugcaguua

SEQ ID NO: 1713613 - RNA, 22 nt, Human
uugugaugucccaacuuguaaa

SEQ ID NO: 1713614 - RNA, 18 nt, Human
uugugaugucccaacuug

SEQ ID NO: 1713615 - RNA, 20 nt, Human
uuguccccaccgcagacagg

SEQ ID NO: 1713616 - RNA, 18 nt, Human
uuguccccaccgcagaca

SEQ ID NO: 1713617 - RNA, 16 nt, Human
uuguccccgacccuug

SEQ ID NO: 1713618 - RNA, 15 nt, Human
uuguccccgacccuu

SEQ ID NO: 1713619 - RNA, 18 nt, Human
uugugaggaagccgcugg

SEQ ID NO: 1713620 - RNA, 17 nt, Human
uugugaggaagccgcug

SEQ ID NO: 1713621 - RNA, 20 nt, Human
uugugauacaaugcugugcc

SEQ ID NO: 1713622 - RNA, 13 nt, Human
uugugaggaagcc

SEQ ID NO: 1713623 - RNA, 11 nt, Human
uuucagaaaug

SEQ ID NO: 1713624 - RNA, 12 nt, Human
uuucagaaaugu

SEQ ID NO: 1713625 - RNA, 16 nt, Human
uuucccuauuagagaa

SEQ ID NO: 1713626 - RNA, 21 nt, Human
uuucagaaagaaguggggaca

SEQ ID NO: 1713627 - RNA, 12 nt, Human
uuucaaacuuua

SEQ ID NO: 1713628 - RNA, 15 nt, Human
uuucaaacuuuacua

SEQ ID NO: 1713629 - RNA, 20 nt, Human
augcuucucacugccaugcc

SEQ ID NO: 1713630 - RNA, 16 nt, Human
augcuucucacugcca

SEQ ID NO: 1713631 - RNA, 18 nt, Human
auggaagacagcucuuau

SEQ ID NO: 1713632 - RNA, 17 nt, Human
auggaagacagcucuua

SEQ ID NO: 1713633 - RNA, 14 nt, Human
auggaaggggcuga

SEQ ID NO: 1713634 - RNA, 20 nt, Human
augcuggcuguuggcugggg

SEQ ID NO: 1713635 - RNA, 19 nt, Human
augcuggcuguuggcuggg

SEQ ID NO: 1713636 - RNA, 18 nt, Human
augcuggcuguuggcugg

SEQ ID NO: 1713637 - RNA, 19 nt, Human
augcuccuggcccacugca

SEQ ID NO: 1713638 - RNA, 14 nt, Human
augcuccuggccca

SEQ ID NO: 1713639 - RNA, 14 nt, Human
uuuaucagaauucu

SEQ ID NO: 1713640 - RNA, 18 nt, Human
augcuacaggauuugaaa

SEQ ID NO: 1713641 - RNA, 22 nt, Human
augcgugcauaccacuuuuguu

SEQ ID NO: 1713642 - RNA, 12 nt, Human
augcgugugugu

SEQ ID NO: 1713643 - RNA, 17 nt, Human
augccucucucaggcca

SEQ ID NO: 1713644 - RNA, 13 nt, Human
augcgcaggcugg

SEQ ID NO: 1713645 - RNA, 22 nt, Human
augcgcaggcuggcccugcccu

SEQ ID NO: 1713646 - RNA, 20 nt, Human
augcgcaggcuggcccugcc

SEQ ID NO: 1713647 - RNA, 18 nt, Human
augcgcaggcuggcccug

SEQ ID NO: 1713648 - RNA, 14 nt, Human
augcgcaggcuggc

SEQ ID NO: 1713649 - RNA, 15 nt, Human
augccucucucaggc

SEQ ID NO: 1713650 - RNA, 14 nt, Human
augccucucucagg

SEQ ID NO: 1713651 - RNA, 13 nt, Human
augccucucucag

SEQ ID NO: 1713652 - RNA, 23 nt, Human
uuuaaugaaagacuguacaaagu

SEQ ID NO: 1713653 - RNA, 21 nt, Human
uuuaaugaaagacuguacaaa

SEQ ID NO: 1713654 - RNA, 16 nt, Human
augcccagccccuucu

SEQ ID NO: 1713655 - RNA, 21 nt, Human
augccaugaggaacaaggcaa

SEQ ID NO: 1713656 - RNA, 17 nt, Human
augcccagccccuucug

SEQ ID NO: 1713657 - RNA, 18 nt, Human
augccccgucccccucug

SEQ ID NO: 1713658 - RNA, 21 nt, Human
augccccgucccccucuggcu

SEQ ID NO: 1713659 - RNA, 15 nt, Human
uuuacuucuuauaca

SEQ ID NO: 1713660 - RNA, 14 nt, Human
uuuacuucuuauac

SEQ ID NO: 1713661 - RNA, 13 nt, Human
uuuacuucuuaua

SEQ ID NO: 1713662 - RNA, 11 nt, Human
uuuacuuaaac

SEQ ID NO: 1713663 - RNA, 16 nt, Human
uuuacugcagcuuugu

SEQ ID NO: 1713664 - RNA, 18 nt, Human
uuuaccugaagucuuugu

SEQ ID NO: 1713665 - RNA, 22 nt, Human
uuuaccugaagucuuuguacag

SEQ ID NO: 1713666 - RNA, 20 nt, Human
uuuacccuucuuuucugacu

SEQ ID NO: 1713667 - RNA, 16 nt, Human
augcgugugugugugu

SEQ ID NO: 1713668 - RNA, 16 nt, Human
aucuuauaauuuaaaa

SEQ ID NO: 1713669 - RNA, 14 nt, Human
aucuugcucugcug

SEQ ID NO: 1713670 - RNA, 15 nt, Human
aucuuauaauuuaaa

SEQ ID NO: 1713671 - RNA, 16 nt, Human
aucuugcucugcugac

SEQ ID NO: 1713672 - RNA, 15 nt, Human
aucuugcucugcuga

SEQ ID NO: 1713673 - RNA, 17 nt, Human
aucuugcucugcugaca

SEQ ID NO: 1713674 - RNA, 22 nt, Human
aucugucauuugagcagggcuc

SEQ ID NO: 1713675 - RNA, 17 nt, Human
aucugucauuugagcag

SEQ ID NO: 1713676 - RNA, 12 nt, Human
aucugucauuug

SEQ ID NO: 1713677 - RNA, 17 nt, Human
uuggaaaauaaauuauu

SEQ ID NO: 1713678 - RNA, 15 nt, Human
uuggaaaauaaauca

SEQ ID NO: 1713679 - RNA, 12 nt, Human
uuggaaaauaaa

SEQ ID NO: 1713680 - RNA, 20 nt, Human
uugcuuugugauuuuuguaa

SEQ ID NO: 1713681 - RNA, 16 nt, Human
uugcuuuguaugcacu

SEQ ID NO: 1713682 - RNA, 16 nt, Human
uugcuuuuaaaaucca

SEQ ID NO: 1713683 - RNA, 18 nt, Human
uugcucuugaugccuggc

SEQ ID NO: 1713684 - RNA, 17 nt, Human
uugcucuugaugccugg

SEQ ID NO: 1713685 - RNA, 14 nt, Human
uugcucuugaugcc

SEQ ID NO: 1713686 - RNA, 15 nt, Human
uugcuuugugauuuu

SEQ ID NO: 1713687 - RNA, 13 nt, Human
uugcuuuguaugc

SEQ ID NO: 1713688 - RNA, 17 nt, Human
uugcuuuggaaguuuua

SEQ ID NO: 1713689 - RNA, 23 nt, Human
augaaccacaucuugcucugcug

SEQ ID NO: 1713690 - RNA, 16 nt, Human
augaaagugagacuuu

SEQ ID NO: 1713691 - RNA, 17 nt, Human
augaaugaaacauuuug

SEQ ID NO: 1713692 - RNA, 15 nt, Human
augaagcaaugcuuc

SEQ ID NO: 1713693 - RNA, 14 nt, Human
augaagcaaugcuu

SEQ ID NO: 1713694 - RNA, 18 nt, Human
augaaugucagugugacu

SEQ ID NO: 1713695 - RNA, 16 nt, Human
augaaugucaguguga

SEQ ID NO: 1713696 - RNA, 18 nt, Human
uuggugguuucagaaaug

SEQ ID NO: 1713697 - RNA, 19 nt, Human
uuggugguuucagaaaugu

SEQ ID NO: 1713698 - RNA, 19 nt, Human
uuggugucgggcaugacac

SEQ ID NO: 1713699 - RNA, 18 nt, Human
uuggugucgggcaugaca

SEQ ID NO: 1713700 - RNA, 17 nt, Human
uuggugucgggcaugac

SEQ ID NO: 1713701 - RNA, 14 nt, Human
uugguuuguaaauu

SEQ ID NO: 1713702 - RNA, 13 nt, Human
uuguaaauuguca

SEQ ID NO: 1713703 - RNA, 14 nt, Human
uuguaaauuucucu

SEQ ID NO: 1713704 - RNA, 12 nt, Human
uuguaaugaaaa

SEQ ID NO: 1713705 - RNA, 22 nt, Human
uuguaagcaugcacaaauucug

SEQ ID NO: 1713706 - RNA, 14 nt, Human
uuguaauauguaaa

SEQ ID NO: 1713707 - RNA, 15 nt, Human
uuguaauauguaaau

SEQ ID NO: 1713708 - RNA, 15 nt, Human
uuguaauaauaaaga

SEQ ID NO: 1713709 - RNA, 12 nt, Human
aucugaaaaugu

SEQ ID NO: 1713710 - RNA, 16 nt, Human
aucucuuguuuaaauu

SEQ ID NO: 1713711 - RNA, 22 nt, Human
aucucuuuguucuaaagaugga

SEQ ID NO: 1713712 - RNA, 23 nt, Human
aucucacacaugagcaucaggcc

SEQ ID NO: 1713713 - RNA, 16 nt, Human
aucucaaauuucuaaa

SEQ ID NO: 1713714 - RNA, 17 nt, Human
aucucaaauuucuaaau

SEQ ID NO: 1713715 - RNA, 23 nt, Human
uugauguucuuucacccuuuucu

SEQ ID NO: 1713716 - RNA, 18 nt, Human
uugcaacuuuguauaaaa

SEQ ID NO: 1713717 - RNA, 17 nt, Human
uugcaacuuuguauaaa

SEQ ID NO: 1713718 - RNA, 16 nt, Human
uugcaacuuuguauaa

SEQ ID NO: 1713719 - RNA, 15 nt, Human
uugauuaaauucuug

SEQ ID NO: 1713720 - RNA, 16 nt, Human
uugauuaaauucuugc

SEQ ID NO: 1713721 - RNA, 20 nt, Human
uugauuaaauucuugcaaag

SEQ ID NO: 1713722 - RNA, 21 nt, Human
uugauuaaauucuugcaaagu

SEQ ID NO: 1713723 - RNA, 23 nt, Human
uugcccaggcuggcgugcagugg

SEQ ID NO: 1713724 - RNA, 14 nt, Human
uugcccaggcuggc

SEQ ID NO: 1713725 - RNA, 12 nt, Human
uugcccaggcug

SEQ ID NO: 1713726 - RNA, 11 nt, Human
uugcccaggcu

SEQ ID NO: 1713727 - RNA, 18 nt, Human
uugcccaggcaggucuug

SEQ ID NO: 1713728 - RNA, 16 nt, Human
uugcccaggcaggucu

SEQ ID NO: 1713729 - RNA, 14 nt, Human
uugcccaggcaggu

SEQ ID NO: 1713730 - RNA, 13 nt, Human
uugcccaggcagg

SEQ ID NO: 1713731 - RNA, 14 nt, Human
uugcaauggcagcc

SEQ ID NO: 1713732 - RNA, 22 nt, Human
uugcaauagaaauccaauugga

SEQ ID NO: 1713733 - RNA, 15 nt, Human
uugcaauagaaaucc

SEQ ID NO: 1713734 - RNA, 21 nt, Human
uugcaccacugcacuccagcc

SEQ ID NO: 1713735 - RNA, 14 nt, Human
uugcaugaggcuag

SEQ ID NO: 1713736 - RNA, 16 nt, Human
uugacaucaacugcau

SEQ ID NO: 1713737 - RNA, 19 nt, Human
uugacagggcacaccgggc

SEQ ID NO: 1713738 - RNA, 12 nt, Human
uugacagggcac

SEQ ID NO: 1713739 - RNA, 10 nt, Human
uugacagggc

SEQ ID NO: 1713740 - RNA, 19 nt, Human
uugacaggauuauuggaaa

SEQ ID NO: 1713741 - RNA, 17 nt, Human
uugaccauucuccaccu

SEQ ID NO: 1713742 - RNA, 11 nt, Human
uugagacagag

SEQ ID NO: 1713743 - RNA, 10 nt, Human
uugagacaga

SEQ ID NO: 1713744 - RNA, 12 nt, Human
uugagcagggcu

SEQ ID NO: 1713745 - RNA, 16 nt, Human
uugagcagggcucagc

SEQ ID NO: 1713746 - RNA, 21 nt, Human
aucucaaauaacuaaaaggua

SEQ ID NO: 1713747 - RNA, 14 nt, Human
aucucaaauaacua

SEQ ID NO: 1713748 - RNA, 23 nt, Human
aucucaaauaacuaaaagguaug

SEQ ID NO: 1713749 - RNA, 14 nt, Human
aucucaaauuucua

SEQ ID NO: 1713750 - RNA, 19 nt, Human
aucuaggaagacuuuggaa

SEQ ID NO: 1713751 - RNA, 18 nt, Human
aucuaggaagacuuugga

SEQ ID NO: 1713752 - RNA, 17 nt, Human
aucuaggaagacuuugg

SEQ ID NO: 1713753 - RNA, 19 nt, Human
aucuagauacuguaucaug

SEQ ID NO: 1713754 - RNA, 21 nt, Human
uugagugcugucuccauguuu

SEQ ID NO: 1713755 - RNA, 11 nt, Human
uugagugccuu

SEQ ID NO: 1713756 - RNA, 17 nt, Human
uugauacuacaguuugu

SEQ ID NO: 1713757 - RNA, 18 nt, Human
uugauagcacagacccug

SEQ ID NO: 1713758 - RNA, 18 nt, Human
aucuagauacuguaucau

SEQ ID NO: 1713759 - RNA, 23 nt, Human
aucuaauauguaacaagccaccc

SEQ ID NO: 1713760 - RNA, 18 nt, Human
auauauucagccuggcuu

SEQ ID NO: 1713761 - RNA, 21 nt, Human
uucauauuuuaaacagaggau

SEQ ID NO: 1713762 - RNA, 17 nt, Human
uucauauuuuaaacaga

SEQ ID NO: 1713763 - RNA, 21 nt, Human
uucaucauccuaagcuauuca

SEQ ID NO: 1713764 - RNA, 18 nt, Human
uucaucauccuaagcuau

SEQ ID NO: 1713765 - RNA, 21 nt, Human
uucauauuuacuucuuauaca

SEQ ID NO: 1713766 - RNA, 16 nt, Human
uucauauuuacuucuu

SEQ ID NO: 1713767 - RNA, 14 nt, Human
uucaguaauaacuc

SEQ ID NO: 1713768 - RNA, 22 nt, Human
auaucugaaaauguauguguaa

SEQ ID NO: 1713769 - RNA, 20 nt, Human
auaugauuuaaaucagccgu

SEQ ID NO: 1713770 - RNA, 13 nt, Human
auaugcacacauu

SEQ ID NO: 1713771 - RNA, 14 nt, Human
auaugucaagccau

SEQ ID NO: 1713772 - RNA, 19 nt, Human
uucacugcuggcugccuua

SEQ ID NO: 1713773 - RNA, 18 nt, Human
uucacugcuggcugccuu

SEQ ID NO: 1713774 - RNA, 17 nt, Human
uucacugcuggcugccu

SEQ ID NO: 1713775 - RNA, 16 nt, Human
uucacugcuggcugcc

SEQ ID NO: 1713776 - RNA, 15 nt, Human
uucacugcuggcugc

SEQ ID NO: 1713777 - RNA, 13 nt, Human
uucacugcuggcu

SEQ ID NO: 1713778 - RNA, 15 nt, Human
uucagaaagaagugg

SEQ ID NO: 1713779 - RNA, 17 nt, Human
uucagaucucuaacuuc

SEQ ID NO: 1713780 - RNA, 19 nt, Human
uucagccaagaauucuuaa

SEQ ID NO: 1713781 - RNA, 22 nt, Human
uucagcaccuacaguguacagu

SEQ ID NO: 1713782 - RNA, 23 nt, Human
uucagcaccuacaguguacaguc

SEQ ID NO: 1713783 - RNA, 17 nt, Human
auauaaauuuuuuuugu

SEQ ID NO: 1713784 - RNA, 22 nt, Human
auauaaauuuuuuuuguuucau

SEQ ID NO: 1713785 - RNA, 16 nt, Human
uucaaaauuguuacaa

SEQ ID NO: 1713786 - RNA, 15 nt, Human
uucaaggauccugag

SEQ ID NO: 1713787 - RNA, 21 nt, Human
uucaaggauccugagccagau

SEQ ID NO: 1713788 - RNA, 19 nt, Human
uucaaggauccugagccag

SEQ ID NO: 1713789 - RNA, 18 nt, Human
uucaaggauccugagcca

SEQ ID NO: 1713790 - RNA, 16 nt, Human
uucaaggauccugagc

SEQ ID NO: 1713791 - RNA, 22 nt, Human
uucaagugauucucaugccuca

SEQ ID NO: 1713792 - RNA, 20 nt, Human
uucaagugauucucaugccu

SEQ ID NO: 1713793 - RNA, 20 nt, Human
uucaagugauucuccugccu

SEQ ID NO: 1713794 - RNA, 22 nt, Human
auaggaauugacccacaagaaa

SEQ ID NO: 1713795 - RNA, 17 nt, Human
auaggcacaggaaacca

SEQ ID NO: 1713796 - RNA, 22 nt, Human
auaggcaccuaccaccacgccc

SEQ ID NO: 1713797 - RNA, 21 nt, Human
auaggaauugacccacaagaa

SEQ ID NO: 1713798 - RNA, 19 nt, Human
auaggaacuuaaauaaugu

SEQ ID NO: 1713799 - RNA, 22 nt, Human
uucaccauguuggccaggcugg

SEQ ID NO: 1713800 - RNA, 22 nt, Human
uucaccauguuggccaggcugc

SEQ ID NO: 1713801 - RNA, 22 nt, Human
auagcuuacaagccagcuggag

SEQ ID NO: 1713802 - RNA, 17 nt, Human
uucacauauugauuucc

SEQ ID NO: 1713803 - RNA, 19 nt, Human
uucacauuguauucagagu

SEQ ID NO: 1713804 - RNA, 22 nt, Human
uucaccacaugugcacaugcac

SEQ ID NO: 1713805 - RNA, 13 nt, Human
uucacaguucucu

SEQ ID NO: 1713806 - RNA, 14 nt, Human
auagcuacuaauuu

SEQ ID NO: 1713807 - RNA, 17 nt, Human
auagcuacuaauuuuaa

SEQ ID NO: 1713808 - RNA, 20 nt, Human
auagcgucauaacuagaacu

SEQ ID NO: 1713809 - RNA, 18 nt, Human
auagcgucauaacuagaa

SEQ ID NO: 1713810 - RNA, 17 nt, Human
auaagauaaaugugcug

SEQ ID NO: 1713811 - RNA, 13 nt, Human
auaagauaaaugu

SEQ ID NO: 1713812 - RNA, 18 nt, Human
auagccugccucuucucu

SEQ ID NO: 1713813 - RNA, 12 nt, Human
auagcugggacu

SEQ ID NO: 1713814 - RNA, 21 nt, Human
auagcucaggugucccugcac

SEQ ID NO: 1713815 - RNA, 20 nt, Human
auagcucaggugucccugca

SEQ ID NO: 1713816 - RNA, 22 nt, Human
auagcucaggugucccugcacu

SEQ ID NO: 1713817 - RNA, 18 nt, Human
auagcuacuaauuuuaaa

SEQ ID NO: 1713818 - RNA, 19 nt, Human
auagcucaggugucccugc

SEQ ID NO: 1713819 - RNA, 15 nt, Human
uuauuuaguauuuau

SEQ ID NO: 1713820 - RNA, 16 nt, Human
uuauuuaguuccuuga

SEQ ID NO: 1713821 - RNA, 17 nt, Human
uuauuuagcaccaggga

SEQ ID NO: 1713822 - RNA, 17 nt, Human
auagcugggacuacagg

SEQ ID NO: 1713823 - RNA, 22 nt, Human
auagcuggucuuauuuguaaag

SEQ ID NO: 1713824 - RNA, 23 nt, Human
auagcuggucuuauuuguaaagc

SEQ ID NO: 1713825 - RNA, 14 nt, Human
uuauuuaaauuuua

SEQ ID NO: 1713826 - RNA, 22 nt, Human
uuauuuaaugaaagacuguaca

SEQ ID NO: 1713827 - RNA, 18 nt, Human
uuauuuaaugaaagacug

SEQ ID NO: 1713828 - RNA, 16 nt, Human
aucccauaugccuggg

SEQ ID NO: 1713829 - RNA, 17 nt, Human
aucccauaugccugggc

SEQ ID NO: 1713830 - RNA, 16 nt, Human
auccagguucagcuug

SEQ ID NO: 1713831 - RNA, 15 nt, Human
auccagguucagcuu

SEQ ID NO: 1713832 - RNA, 17 nt, Human
auccaggguggugguga

SEQ ID NO: 1713833 - RNA, 17 nt, Human
aucccaggauguacaag

SEQ ID NO: 1713834 - RNA, 15 nt, Human
uucugaaagggacgc

SEQ ID NO: 1713835 - RNA, 19 nt, Human
aucauugaaaucuuuuugc

SEQ ID NO: 1713836 - RNA, 20 nt, Human
aucauugaaaucuuuuugcu

SEQ ID NO: 1713837 - RNA, 22 nt, Human
uucugggacacaguucaauucu

SEQ ID NO: 1713838 - RNA, 11 nt, Human
uucugggacac

SEQ ID NO: 1713839 - RNA, 10 nt, Human
uucugggaca

SEQ ID NO: 1713840 - RNA, 23 nt, Human
uucugccgcagcccugcagaggg

SEQ ID NO: 1713841 - RNA, 14 nt, Human
aucauucauuuucu

SEQ ID NO: 1713842 - RNA, 22 nt, Human
aucauuaaagccugaguuugcu

SEQ ID NO: 1713843 - RNA, 15 nt, Human
aucauugaaaucuuu

SEQ ID NO: 1713844 - RNA, 14 nt, Human
aucauugaaaucuu

SEQ ID NO: 1713845 - RNA, 23 nt, Human
aucauaguggcuuaaaacaacac

SEQ ID NO: 1713846 - RNA, 15 nt, Human
aucagcacgauuucu

SEQ ID NO: 1713847 - RNA, 16 nt, Human
aucagcacgauuucug

SEQ ID NO: 1713848 - RNA, 17 nt, Human
aucagcacgauuucugu

SEQ ID NO: 1713849 - RNA, 18 nt, Human
aucagcacgauuucuguu

SEQ ID NO: 1713850 - RNA, 13 nt, Human
uucuaggccuggg

SEQ ID NO: 1713851 - RNA, 23 nt, Human
uucucagaaucucaaauaacuaa

SEQ ID NO: 1713852 - RNA, 22 nt, Human
uucucagaaucucaaauaacua

SEQ ID NO: 1713853 - RNA, 19 nt, Human
uucucagaaucucaaauaa

SEQ ID NO: 1713854 - RNA, 21 nt, Human
auauugcugauggugcaauga

SEQ ID NO: 1713855 - RNA, 17 nt, Human
auauugcugauggugca

SEQ ID NO: 1713856 - RNA, 17 nt, Human
auauugccauuaugcuu

SEQ ID NO: 1713857 - RNA, 20 nt, Human
auauuguuuucaguguacau

SEQ ID NO: 1713858 - RNA, 20 nt, Human
auauuuguauuuaaaugaaa

SEQ ID NO: 1713859 - RNA, 14 nt, Human
auauuuuaaacaga

SEQ ID NO: 1713860 - RNA, 22 nt, Human
auauuaaggaagacaaugugaa

SEQ ID NO: 1713861 - RNA, 24 nt, Human
auauuaagaaagacuaucuaaaug

SEQ ID NO: 1713862 - RNA, 18 nt, Human
auauguuuuaagaggcag

SEQ ID NO: 1713863 - RNA, 20 nt, Human
auauguuuuaagaggcaggg

SEQ ID NO: 1713864 - RNA, 19 nt, Human
auauugauuuccguuaaaa

SEQ ID NO: 1713865 - RNA, 13 nt, Human
auauugaugugug

SEQ ID NO: 1713866 - RNA, 21 nt, Human
auauugauuuccguuaaaaua

SEQ ID NO: 1713867 - RNA, 22 nt, Human
auauugauuuccguuaaaauac

SEQ ID NO: 1713868 - RNA, 22 nt, Human
auauugauccagaaagaaaacu

SEQ ID NO: 1713869 - RNA, 15 nt, Human
auauugauccagaaa

SEQ ID NO: 1713870 - RNA, 16 nt, Human
auauucuguuggccag

SEQ ID NO: 1713871 - RNA, 21 nt, Human
aucaagaugugacauguuuua

SEQ ID NO: 1713872 - RNA, 13 nt, Human
aucaaguauuaua

SEQ ID NO: 1713873 - RNA, 14 nt, Human
aucaaguauuauac

SEQ ID NO: 1713874 - RNA, 18 nt, Human
aucaaguauuauaccuuu

SEQ ID NO: 1713875 - RNA, 22 nt, Human
aucacggcucacugcagccuca

SEQ ID NO: 1713876 - RNA, 14 nt, Human
aucacguaaagcua

SEQ ID NO: 1713877 - RNA, 21 nt, Human
aucacguaaagcuagaaauga

SEQ ID NO: 1713878 - RNA, 20 nt, Human
uuccuuuuaaaacacuucca

SEQ ID NO: 1713879 - RNA, 22 nt, Human
uuccuuuuaaaacacuuccaua

SEQ ID NO: 1713880 - RNA, 21 nt, Human
uuccuuuuaaaacacuuccau

SEQ ID NO: 1713881 - RNA, 14 nt, Human
auauuuuaagacga

SEQ ID NO: 1713882 - RNA, 15 nt, Human
uuccuaauccucuag

SEQ ID NO: 1713883 - RNA, 13 nt, Human
uuccuaauccucu

SEQ ID NO: 1713884 - RNA, 17 nt, Human
uuccuaauccucuagga

SEQ ID NO: 1713885 - RNA, 17 nt, Human
uuccuguucccaugaga

SEQ ID NO: 1713886 - RNA, 11 nt, Human
uuccucuuucc

SEQ ID NO: 1713887 - RNA, 14 nt, Human
uuccuucagugccu

SEQ ID NO: 1713888 - RNA, 11 nt, Human
uuccuucagug

SEQ ID NO: 1713889 - RNA, 17 nt, Human
uuccuguugucaagaau

SEQ ID NO: 1713890 - RNA, 20 nt, Human
uuccuguucuuaagacguga

SEQ ID NO: 1713891 - RNA, 15 nt, Human
uuccuucagugccuu

SEQ ID NO: 1713892 - RNA, 20 nt, Human
auauuuucaacgcagcccug

SEQ ID NO: 1713893 - RNA, 19 nt, Human
auauuuucaacgcagcccu

SEQ ID NO: 1713894 - RNA, 15 nt, Human
agugaaagaaaauaa

SEQ ID NO: 1713895 - RNA, 16 nt, Human
agugaacaaauuuaca

SEQ ID NO: 1713896 - RNA, 20 nt, Human
agugaacaaauuuacagaga

SEQ ID NO: 1713897 - RNA, 20 nt, Human
ugugauggggcccugccucc

SEQ ID NO: 1713898 - RNA, 19 nt, Human
ugugauggggcccugccuc

SEQ ID NO: 1713899 - RNA, 18 nt, Human
ugugaugagaggaaauca

SEQ ID NO: 1713900 - RNA, 18 nt, Human
ugugccagauuuaugcau

SEQ ID NO: 1713901 - RNA, 16 nt, Human
ugugccaugugccagg

SEQ ID NO: 1713902 - RNA, 12 nt, Human
ugugccaugugc

SEQ ID NO: 1713903 - RNA, 20 nt, Human
ugugccagguuuuuggucug

SEQ ID NO: 1713904 - RNA, 20 nt, Human
ugugccagauuuaugcauau

SEQ ID NO: 1713905 - RNA, 17 nt, Human
uguggaguucaucuuga

SEQ ID NO: 1713906 - RNA, 21 nt, Human
uguggaguucaucuugaauug

SEQ ID NO: 1713907 - RNA, 21 nt, Human
ugugcccccauguaagcaccc

SEQ ID NO: 1713908 - RNA, 21 nt, Human
agugaguugauagcacagacc

SEQ ID NO: 1713909 - RNA, 15 nt, Human
agugagucgaggaca

SEQ ID NO: 1713910 - RNA, 20 nt, Human
agugaggcucugcccuuggu

SEQ ID NO: 1713911 - RNA, 19 nt, Human
agugaggcucugcccuugg

SEQ ID NO: 1713912 - RNA, 21 nt, Human
agugaggcucugcccuugguu

SEQ ID NO: 1713913 - RNA, 14 nt, Human
agugagggauuauc

SEQ ID NO: 1713914 - RNA, 17 nt, Human
agugaggcucugcccuu

SEQ ID NO: 1713915 - RNA, 16 nt, Human
agugaggcucugcccu

SEQ ID NO: 1713916 - RNA, 14 nt, Human
agugaggcucugcc

SEQ ID NO: 1713917 - RNA, 15 nt, Human
agugaggcucugccc

SEQ ID NO: 1713918 - RNA, 18 nt, Human
uguggccaaguucuuagu

SEQ ID NO: 1713919 - RNA, 21 nt, Human
ugugaaccaccacacccagcc

SEQ ID NO: 1713920 - RNA, 20 nt, Human
ugugaaccaccacacccagc

SEQ ID NO: 1713921 - RNA, 19 nt, Human
ugugaaccaccacacccag

SEQ ID NO: 1713922 - RNA, 14 nt, Human
ugugaagagaacca

SEQ ID NO: 1713923 - RNA, 21 nt, Human
ugugaaaggaaagagggaggu

SEQ ID NO: 1713924 - RNA, 18 nt, Human
ugugaaaggaaagaggcu

SEQ ID NO: 1713925 - RNA, 15 nt, Human
ugugaaaggaaagag

SEQ ID NO: 1713926 - RNA, 12 nt, Human
ugugaaauuauu

SEQ ID NO: 1713927 - RNA, 18 nt, Human
ugucuuguguuucuuuag

SEQ ID NO: 1713928 - RNA, 15 nt, Human
ugucuuguguuucuu

SEQ ID NO: 1713929 - RNA, 14 nt, Human
agucuuuguacaga

SEQ ID NO: 1713930 - RNA, 22 nt, Human
agucuuguauuaaguuguuaau

SEQ ID NO: 1713931 - RNA, 15 nt, Human
agucuuggcucacug

SEQ ID NO: 1713932 - RNA, 16 nt, Human
agucuuguauuaaguu

SEQ ID NO: 1713933 - RNA, 18 nt, Human
agucuuguauuaaguugu

SEQ ID NO: 1713934 - RNA, 17 nt, Human
agucucuucuccacugg

SEQ ID NO: 1713935 - RNA, 18 nt, Human
agucucuucuccacugga

SEQ ID NO: 1713936 - RNA, 16 nt, Human
agucucuucuccacug

SEQ ID NO: 1713937 - RNA, 15 nt, Human
agucucuucuccacu

SEQ ID NO: 1713938 - RNA, 15 nt, Human
ugugagaugcuagaa

SEQ ID NO: 1713939 - RNA, 19 nt, Human
ugugagaugcuagaacucc

SEQ ID NO: 1713940 - RNA, 22 nt, Human
ugugagaugcuagaacucccuu

SEQ ID NO: 1713941 - RNA, 16 nt, Human
ugugacugaauuucuu

SEQ ID NO: 1713942 - RNA, 15 nt, Human
ugugacugaauuucu

SEQ ID NO: 1713943 - RNA, 14 nt, Human
agucucuucuccac

SEQ ID NO: 1713944 - RNA, 13 nt, Human
agucucuucucca

SEQ ID NO: 1713945 - RNA, 16 nt, Human
uguggucccaccccac

SEQ ID NO: 1713946 - RNA, 15 nt, Human
uguggucccacccca

SEQ ID NO: 1713947 - RNA, 13 nt, Human
uguggucccaccc

SEQ ID NO: 1713948 - RNA, 16 nt, Human
ugugguguuuccuggc

SEQ ID NO: 1713949 - RNA, 14 nt, Human
ugugguguuuccug

SEQ ID NO: 1713950 - RNA, 20 nt, Human
ugugguguuuccuggcacug

SEQ ID NO: 1713951 - RNA, 20 nt, Human
uguggucacaggaaguagag

SEQ ID NO: 1713952 - RNA, 23 nt, Human
uguggguuucuaaagcugccagc

SEQ ID NO: 1713953 - RNA, 21 nt, Human
uguggguuucuaaagcugcca

SEQ ID NO: 1713954 - RNA, 23 nt, Human
agugaguugauagcacagacccu

SEQ ID NO: 1713955 - RNA, 22 nt, Human
agugaguugauagcacagaccc

SEQ ID NO: 1713956 - RNA, 12 nt, Human
agugcugcauuu

SEQ ID NO: 1713957 - RNA, 13 nt, Human
agugcugcauuua

SEQ ID NO: 1713958 - RNA, 21 nt, Human
agugcugggauuacaggugug

SEQ ID NO: 1713959 - RNA, 16 nt, Human
agugcugcauuuaaaa

SEQ ID NO: 1713960 - RNA, 17 nt, Human
agugcugcauuuaaaag

SEQ ID NO: 1713961 - RNA, 20 nt, Human
agugcugggauuacaggugu

SEQ ID NO: 1713962 - RNA, 19 nt, Human
agugcugcauuuaaaagau

SEQ ID NO: 1713963 - RNA, 23 nt, Human
uguguguuuauugucaaaguggu

SEQ ID NO: 1713964 - RNA, 19 nt, Human
uguguguuuauugucaaag

SEQ ID NO: 1713965 - RNA, 11 nt, Human
ugugugugugc

SEQ ID NO: 1713966 - RNA, 17 nt, Human
uguguaagaaauacaga

SEQ ID NO: 1713967 - RNA, 20 nt, Human
ugugucucuugguccugcug

SEQ ID NO: 1713968 - RNA, 17 nt, Human
ugugucucuugguccug

SEQ ID NO: 1713969 - RNA, 22 nt, Human
ugugucucuugguccugcugca

SEQ ID NO: 1713970 - RNA, 21 nt, Human
ugugucucuugguccugcugc

SEQ ID NO: 1713971 - RNA, 21 nt, Human
ugugucuugcaauggcagccu

SEQ ID NO: 1713972 - RNA, 20 nt, Human
uguuccacaaguuaaauaaa

SEQ ID NO: 1713973 - RNA, 20 nt, Human
agugugucuuagugugugca

SEQ ID NO: 1713974 - RNA, 16 nt, Human
uguucugggacacagu

SEQ ID NO: 1713975 - RNA, 18 nt, Human
uguugcccaggcaggucu

SEQ ID NO: 1713976 - RNA, 17 nt, Human
uguugcccaggcagguc

SEQ ID NO: 1713977 - RNA, 16 nt, Human
uguugcccaggcaggu

SEQ ID NO: 1713978 - RNA, 15 nt, Human
uguugcccaggcagg

SEQ ID NO: 1713979 - RNA, 12 nt, Human
uguugcccaggc

SEQ ID NO: 1713980 - RNA, 13 nt, Human
uguugcccaggca

SEQ ID NO: 1713981 - RNA, 18 nt, Human
uguucugugauauaagug

SEQ ID NO: 1713982 - RNA, 15 nt, Human
uguucugugauauaa

SEQ ID NO: 1713983 - RNA, 20 nt, Human
agugugguguuuccuggcac

SEQ ID NO: 1713984 - RNA, 19 nt, Human
agugugguguuuccuggca

SEQ ID NO: 1713985 - RNA, 17 nt, Human
agugugguguuuccugg

SEQ ID NO: 1713986 - RNA, 20 nt, Human
agugugccugaagucccaga

SEQ ID NO: 1713987 - RNA, 16 nt, Human
agugugguguuuccug

SEQ ID NO: 1713988 - RNA, 21 nt, Human
agugguggugaacagaacaaa

SEQ ID NO: 1713989 - RNA, 17 nt, Human
aguggugguuuucuguu

SEQ ID NO: 1713990 - RNA, 18 nt, Human
aguggugguuuucuguuc

SEQ ID NO: 1713991 - RNA, 19 nt, Human
aguggugguuuucuguucu

SEQ ID NO: 1713992 - RNA, 20 nt, Human
aguggugguuuucuguucuu

SEQ ID NO: 1713993 - RNA, 21 nt, Human
aguggugguuuucuguucuuu

SEQ ID NO: 1713994 - RNA, 23 nt, Human
aguggugguuuucuguucuuucu

SEQ ID NO: 1713995 - RNA, 17 nt, Human
aguggugcgaucugggu

SEQ ID NO: 1713996 - RNA, 14 nt, Human
uguuacaaauugua

SEQ ID NO: 1713997 - RNA, 17 nt, Human
aguggaaguaguggagc

SEQ ID NO: 1713998 - RNA, 13 nt, Human
uuaaauaauguga

SEQ ID NO: 1713999 - RNA, 20 nt, Human
uuaaauucuugcaaaguauc

SEQ ID NO: 1714000 - RNA, 15 nt, Human
uuaaauuucuaccgc

SEQ ID NO: 1714001 - RNA, 20 nt, Human
aguucuuaguugcuguaugu

SEQ ID NO: 1714002 - RNA, 21 nt, Human
aguucuuaguugcuguauguc

SEQ ID NO: 1714003 - RNA, 21 nt, Human
aguuggguggaugccuggugg

SEQ ID NO: 1714004 - RNA, 13 nt, Human
aguuggcuucuaa

SEQ ID NO: 1714005 - RNA, 16 nt, Human
aguuggcuaggacccc

SEQ ID NO: 1714006 - RNA, 18 nt, Human
aguuggucccccuuccau

SEQ ID NO: 1714007 - RNA, 23 nt, Human
aguuguuugauucagacagcugc

SEQ ID NO: 1714008 - RNA, 21 nt, Human
aguuguuugauucagacagcu

SEQ ID NO: 1714009 - RNA, 22 nt, Human
uguuugauucagacagcugccu

SEQ ID NO: 1714010 - RNA, 17 nt, Human
uguuugauucagacagc

SEQ ID NO: 1714011 - RNA, 19 nt, Human
uguuucuuuguaaugaaaa

SEQ ID NO: 1714012 - RNA, 18 nt, Human
uguuucuuuguaaugaaa

SEQ ID NO: 1714013 - RNA, 20 nt, Human
uguuucuuucucugaggaca

SEQ ID NO: 1714014 - RNA, 21 nt, Human
uguuucuuucucugaggacaa

SEQ ID NO: 1714015 - RNA, 19 nt, Human
uguuuauugucaaaguggu

SEQ ID NO: 1714016 - RNA, 19 nt, Human
uguugcccaggcaggucuu

SEQ ID NO: 1714017 - RNA, 19 nt, Human
uguugccuugcauaauggu

SEQ ID NO: 1714018 - RNA, 13 nt, Human
uguuuggagacag

SEQ ID NO: 1714019 - RNA, 21 nt, Human
uguuuuauuuuaauucaguug

SEQ ID NO: 1714020 - RNA, 20 nt, Human
uguuuuccaugaguccccug

SEQ ID NO: 1714021 - RNA, 21 nt, Human
aguucugcagauaaacaguag

SEQ ID NO: 1714022 - RNA, 16 nt, Human
aguucugcagauaaac

SEQ ID NO: 1714023 - RNA, 14 nt, Human
aguucugguuccua

SEQ ID NO: 1714024 - RNA, 16 nt, Human
aguucuuaguugcugu

SEQ ID NO: 1714025 - RNA, 14 nt, Human
auaaauaacuuuuu

SEQ ID NO: 1714026 - RNA, 18 nt, Human
auaaacacucuugaaaaa

SEQ ID NO: 1714027 - RNA, 19 nt, Human
auaacuagaacugaauuuu

SEQ ID NO: 1714028 - RNA, 14 nt, Human
uuacaggaaguacu

SEQ ID NO: 1714029 - RNA, 14 nt, Human
uuacagcugccugc

SEQ ID NO: 1714030 - RNA, 13 nt, Human
uuacagcugccug

SEQ ID NO: 1714031 - RNA, 14 nt, Human
uuagaaauauaauu

SEQ ID NO: 1714032 - RNA, 12 nt, Human
uuagaaauauaa

SEQ ID NO: 1714033 - RNA, 11 nt, Human
uuagaaauaua

SEQ ID NO: 1714034 - RNA, 11 nt, Human
uuagacagagu

SEQ ID NO: 1714035 - RNA, 13 nt, Human
uuagaaccuuucu

SEQ ID NO: 1714036 - RNA, 20 nt, Human
uuacauaagauaaaugugcu

SEQ ID NO: 1714037 - RNA, 18 nt, Human
uuacucagaauucucuag

SEQ ID NO: 1714038 - RNA, 23 nt, Human
uuacucagaauucucuaguuuga

SEQ ID NO: 1714039 - RNA, 20 nt, Human
auaaaauuuuuaaucuuuaa

SEQ ID NO: 1714040 - RNA, 23 nt, Human
auaaacaagaccacguuucuaaa

SEQ ID NO: 1714041 - RNA, 15 nt, Human
auaaacaagaccacg

SEQ ID NO: 1714042 - RNA, 22 nt, Human
auaaacaagaccacguuucuaa

SEQ ID NO: 1714043 - RNA, 16 nt, Human
auaaaauuaaagcuga

SEQ ID NO: 1714044 - RNA, 19 nt, Human
uuaauuuuuuugagacaga

SEQ ID NO: 1714045 - RNA, 15 nt, Human
uuaauucuuagcuca

SEQ ID NO: 1714046 - RNA, 20 nt, Human
uuaaugaaagacuguacaaa

SEQ ID NO: 1714047 - RNA, 23 nt, Human
uuaaugaaagacuguacaaagua

SEQ ID NO: 1714048 - RNA, 13 nt, Human
uuaauaaagacag

SEQ ID NO: 1714049 - RNA, 14 nt, Human
uuaauaaagacagg

SEQ ID NO: 1714050 - RNA, 17 nt, Human
uuaauaaacacucuuga

SEQ ID NO: 1714051 - RNA, 13 nt, Human
uuaauaaacacuc

SEQ ID NO: 1714052 - RNA, 20 nt, Human
uuaaguuaguuccacugaga

SEQ ID NO: 1714053 - RNA, 17 nt, Human
uuaagugaaaauauagc

SEQ ID NO: 1714054 - RNA, 17 nt, Human
uuaaguacuauguauca

SEQ ID NO: 1714055 - RNA, 14 nt, Human
uuaagugcugcauu

SEQ ID NO: 1714056 - RNA, 22 nt, Human
uuaaguuacacauuuuucagau

SEQ ID NO: 1714057 - RNA, 22 nt, Human
uuaagugcugcauuuaaaagau

SEQ ID NO: 1714058 - RNA, 13 nt, Human
uuaagaggcaggg

SEQ ID NO: 1714059 - RNA, 16 nt, Human
uuaagaggcagggucu

SEQ ID NO: 1714060 - RNA, 15 nt, Human
uuaagaggcaggguc

SEQ ID NO: 1714061 - RNA, 18 nt, Human
uuaaguaaggaauuuuau

SEQ ID NO: 1714062 - RNA, 15 nt, Human
auaaaaguacauguu

SEQ ID NO: 1714063 - RNA, 21 nt, Human
auaaaaguacauguuaaacuu

SEQ ID NO: 1714064 - RNA, 21 nt, Human
agggucucacucugucgccca

SEQ ID NO: 1714065 - RNA, 16 nt, Human
agggucucacucuguc

SEQ ID NO: 1714066 - RNA, 15 nt, Human
agggucucacucugu

SEQ ID NO: 1714067 - RNA, 14 nt, Human
agggucucacucug

SEQ ID NO: 1714068 - RNA, 15 nt, Human
aggguaaggcugugg

SEQ ID NO: 1714069 - RNA, 18 nt, Human
aggggugggacacccugu

SEQ ID NO: 1714070 - RNA, 20 nt, Human
aggggguggccucccaacuc

SEQ ID NO: 1714071 - RNA, 21 nt, Human
aggggaauguuugccucugcc

SEQ ID NO: 1714072 - RNA, 20 nt, Human
aggggaauguuugccucugc

SEQ ID NO: 1714073 - RNA, 19 nt, Human
aggggaauguuugccucug

SEQ ID NO: 1714074 - RNA, 18 nt, Human
aggggagcaugggaagug

SEQ ID NO: 1714075 - RNA, 22 nt, Human
uggguggcaccagcagccugga

SEQ ID NO: 1714076 - RNA, 21 nt, Human
uggguggcaccagcagccugg

SEQ ID NO: 1714077 - RNA, 20 nt, Human
uggguggcaccagcagccug

SEQ ID NO: 1714078 - RNA, 17 nt, Human
uggguggcaccagcagc

SEQ ID NO: 1714079 - RNA, 20 nt, Human
ugguagagugugccugaagu

SEQ ID NO: 1714080 - RNA, 17 nt, Human
ugguagcuuuucccuuc

SEQ ID NO: 1714081 - RNA, 16 nt, Human
aggguggugaccucug

SEQ ID NO: 1714082 - RNA, 18 nt, Human
ugggucgcccuggacugu

SEQ ID NO: 1714083 - RNA, 16 nt, Human
ugggucgcccuggacu

SEQ ID NO: 1714084 - RNA, 15 nt, Human
uggggaggggcugug

SEQ ID NO: 1714085 - RNA, 21 nt, Human
uggggccaguuggucccccuu

SEQ ID NO: 1714086 - RNA, 12 nt, Human
uggggcccugcc

SEQ ID NO: 1714087 - RNA, 23 nt, Human
uggggcugcaccggcuggccugg

SEQ ID NO: 1714088 - RNA, 22 nt, Human
uggggcugcaccggcuggccug

SEQ ID NO: 1714089 - RNA, 15 nt, Human
uggggaccucaggcc

SEQ ID NO: 1714090 - RNA, 14 nt, Human
uggggaccucaggc

SEQ ID NO: 1714091 - RNA, 15 nt, Human
agggcuccagacaca

SEQ ID NO: 1714092 - RNA, 12 nt, Human
agggcuccagac

SEQ ID NO: 1714093 - RNA, 17 nt, Human
uggggaccucaggccug

SEQ ID NO: 1714094 - RNA, 16 nt, Human
uggggaccucaggccu

SEQ ID NO: 1714095 - RNA, 12 nt, Human
uggggaggacaa

SEQ ID NO: 1714096 - RNA, 22 nt, Human
uggggucacucuggcagcucag

SEQ ID NO: 1714097 - RNA, 16 nt, Human
uggggucacucuggca

SEQ ID NO: 1714098 - RNA, 14 nt, Human
uggggucacucugg

SEQ ID NO: 1714099 - RNA, 13 nt, Human
uggggucacucug

SEQ ID NO: 1714100 - RNA, 20 nt, Human
ugggguacccacugcucugg

SEQ ID NO: 1714101 - RNA, 19 nt, Human
ugggguacccacugcucug

SEQ ID NO: 1714102 - RNA, 18 nt, Human
ugggguacccacugcucu

SEQ ID NO: 1714103 - RNA, 17 nt, Human
ugggguacccacugcuc

SEQ ID NO: 1714104 - RNA, 13 nt, Human
aggggaaaagagg

SEQ ID NO: 1714105 - RNA, 14 nt, Human
aggggaacagacug

SEQ ID NO: 1714106 - RNA, 22 nt, Human
aggggaaaaucagccugcucca

SEQ ID NO: 1714107 - RNA, 18 nt, Human
aggggaaaaucagccugc

SEQ ID NO: 1714108 - RNA, 13 nt, Human
aggggaauguuug

SEQ ID NO: 1714109 - RNA, 21 nt, Human
aggggaauaaacuguugaguc

SEQ ID NO: 1714110 - RNA, 17 nt, Human
agggcauggccaggugg

SEQ ID NO: 1714111 - RNA, 15 nt, Human
agggagggcuccaga

SEQ ID NO: 1714112 - RNA, 14 nt, Human
agggagggcuccag

SEQ ID NO: 1714113 - RNA, 16 nt, Human
agggagggcuccagac

SEQ ID NO: 1714114 - RNA, 17 nt, Human
agggagggcuccagaca

SEQ ID NO: 1714115 - RNA, 14 nt, Human
agggcacugguggc

SEQ ID NO: 1714116 - RNA, 16 nt, Human
agggcacugguggccc

SEQ ID NO: 1714117 - RNA, 23 nt, Human
agggcucagcggggacagcuccu

SEQ ID NO: 1714118 - RNA, 22 nt, Human
agggcucagcggggacagcucc

SEQ ID NO: 1714119 - RNA, 20 nt, Human
agggcucagcggggacagcu

SEQ ID NO: 1714120 - RNA, 19 nt, Human
agggcucagcggggacagc

SEQ ID NO: 1714121 - RNA, 17 nt, Human
agggagggagggcucca

SEQ ID NO: 1714122 - RNA, 15 nt, Human
agggagggagggcuc

SEQ ID NO: 1714123 - RNA, 19 nt, Human
ugggccccugccucucugc

SEQ ID NO: 1714124 - RNA, 15 nt, Human
ugggccccugccucu

SEQ ID NO: 1714125 - RNA, 20 nt, Human
ugggccccugccucucugca

SEQ ID NO: 1714126 - RNA, 21 nt, Human
ugggcccccaaauggaaaugg

SEQ ID NO: 1714127 - RNA, 16 nt, Human
ugggcccccaaaugga

SEQ ID NO: 1714128 - RNA, 22 nt, Human
ugggccccaguuguauuuauuu

SEQ ID NO: 1714129 - RNA, 18 nt, Human
ugggccccaguuguauuu

SEQ ID NO: 1714130 - RNA, 20 nt, Human
ugggaggccaaggugggagg

SEQ ID NO: 1714131 - RNA, 19 nt, Human
ugggaggccaaggugggag

SEQ ID NO: 1714132 - RNA, 22 nt, Human
ugggaggaucucuugagccugg

SEQ ID NO: 1714133 - RNA, 21 nt, Human
ugggaggaucucuugagccug

SEQ ID NO: 1714134 - RNA, 20 nt, Human
ugggaggaucucuugagccu

SEQ ID NO: 1714135 - RNA, 13 nt, Human
ugggcagagcaga

SEQ ID NO: 1714136 - RNA, 18 nt, Human
ugggccaggagccuccug

SEQ ID NO: 1714137 - RNA, 12 nt, Human
ugggcagagcag

SEQ ID NO: 1714138 - RNA, 11 nt, Human
ugggcagagca

SEQ ID NO: 1714139 - RNA, 12 nt, Human
ugggcagaagga

SEQ ID NO: 1714140 - RNA, 21 nt, Human
agggaauuucuucaacucccu

SEQ ID NO: 1714141 - RNA, 22 nt, Human
agggaaggauacaaaagcaugu

SEQ ID NO: 1714142 - RNA, 22 nt, Human
agggaaggggacaaggacuagg

SEQ ID NO: 1714143 - RNA, 13 nt, Human
agggaaggggaca

SEQ ID NO: 1714144 - RNA, 20 nt, Human
aggcccggcuccaggcuccu

SEQ ID NO: 1714145 - RNA, 18 nt, Human
aggcccggcuccaggcuc

SEQ ID NO: 1714146 - RNA, 21 nt, Human
aggcccggcuccaggcuccuu

SEQ ID NO: 1714147 - RNA, 23 nt, Human
agggaggacgcucucuggccuuc

SEQ ID NO: 1714148 - RNA, 21 nt, Human
agggaggacgcucucuggccu

SEQ ID NO: 1714149 - RNA, 22 nt, Human
agggaggacgcucucuggccuu

SEQ ID NO: 1714150 - RNA, 16 nt, Human
ugggacuacaggcacc

SEQ ID NO: 1714151 - RNA, 15 nt, Human
ugggacuacaggcac

SEQ ID NO: 1714152 - RNA, 14 nt, Human
ugggacuacaggca

SEQ ID NO: 1714153 - RNA, 20 nt, Human
ugggacucaaugcacugaca

SEQ ID NO: 1714154 - RNA, 16 nt, Human
ugggagagccuuccag

SEQ ID NO: 1714155 - RNA, 18 nt, Human
ugggagacugcugaguca

SEQ ID NO: 1714156 - RNA, 21 nt, Human
ugggagagaagagaaugcaca

SEQ ID NO: 1714157 - RNA, 19 nt, Human
ugggagagaagagaaugca

SEQ ID NO: 1714158 - RNA, 18 nt, Human
uguagaaaagggaacuga

SEQ ID NO: 1714159 - RNA, 19 nt, Human
uguagaaaagggaacugaa

SEQ ID NO: 1714160 - RNA, 20 nt, Human
uguagaaaagggaacugaac

SEQ ID NO: 1714161 - RNA, 21 nt, Human
uguagaaaagggaacugaaca

SEQ ID NO: 1714162 - RNA, 23 nt, Human
uguacuugcucuugaugccuggc

SEQ ID NO: 1714163 - RNA, 22 nt, Human
uguacuugcucuugaugccugg

SEQ ID NO: 1714164 - RNA, 16 nt, Human
uguagaggagaaacug

SEQ ID NO: 1714165 - RNA, 14 nt, Human
uguagagcuucugg

SEQ ID NO: 1714166 - RNA, 18 nt, Human
uguagagccagggucuca

SEQ ID NO: 1714167 - RNA, 16 nt, Human
uguagagccagggucu

SEQ ID NO: 1714168 - RNA, 23 nt, Human
uguagaaaagggaacugaacauu

SEQ ID NO: 1714169 - RNA, 13 nt, Human
aguaaaauccaca

SEQ ID NO: 1714170 - RNA, 17 nt, Human
aguaauaugcacacauu

SEQ ID NO: 1714171 - RNA, 14 nt, Human
aguaauaugcacac

SEQ ID NO: 1714172 - RNA, 15 nt, Human
aguaauaugcacaca

SEQ ID NO: 1714173 - RNA, 20 nt, Human
aguagaagucuuagauguau

SEQ ID NO: 1714174 - RNA, 19 nt, Human
aguagaagucuuagaugua

SEQ ID NO: 1714175 - RNA, 21 nt, Human
aguagaagucuuagauguaua

SEQ ID NO: 1714176 - RNA, 12 nt, Human
aguaccauuuaa

SEQ ID NO: 1714177 - RNA, 23 nt, Human
aguaccauuuaauggggaggaca

SEQ ID NO: 1714178 - RNA, 14 nt, Human
aguacauguuaaac

SEQ ID NO: 1714179 - RNA, 20 nt, Human
uguaggcauaaagucagggg

SEQ ID NO: 1714180 - RNA, 17 nt, Human
uguaggcauaaagucag

SEQ ID NO: 1714181 - RNA, 11 nt, Human
aguagagacag

SEQ ID NO: 1714182 - RNA, 19 nt, Human
uguauucucuccuguaccu

SEQ ID NO: 1714183 - RNA, 20 nt, Human
uguauucucuccuguaccuc

SEQ ID NO: 1714184 - RNA, 22 nt, Human
uguauuacaaauccaaugaaau

SEQ ID NO: 1714185 - RNA, 13 nt, Human
uguauuacaaauc

SEQ ID NO: 1714186 - RNA, 17 nt, Human
uguaucaaugaguaaca

SEQ ID NO: 1714187 - RNA, 14 nt, Human
uguaucaaauacau

SEQ ID NO: 1714188 - RNA, 21 nt, Human
uguaucaaauacauuuaaaac

SEQ ID NO: 1714189 - RNA, 23 nt, Human
uguaucaaauacauuuaaaacau

SEQ ID NO: 1714190 - RNA, 18 nt, Human
uguaugucucgugguagg

SEQ ID NO: 1714191 - RNA, 15 nt, Human
ugucaauuacaggaa

SEQ ID NO: 1714192 - RNA, 14 nt, Human
ugucaauuacagga

SEQ ID NO: 1714193 - RNA, 17 nt, Human
ugucaauuacaggaagu

SEQ ID NO: 1714194 - RNA, 19 nt, Human
ugucaauuacaggaaguac

SEQ ID NO: 1714195 - RNA, 18 nt, Human
aguauuacuucugcuaca

SEQ ID NO: 1714196 - RNA, 17 nt, Human
aguaugguggcuggguu

SEQ ID NO: 1714197 - RNA, 15 nt, Human
aguauuacuucugcu

SEQ ID NO: 1714198 - RNA, 16 nt, Human
aguaugguggcugggu

SEQ ID NO: 1714199 - RNA, 15 nt, Human
aguaugguggcuggg

SEQ ID NO: 1714200 - RNA, 19 nt, Human
agucaccccggccaccugc

SEQ ID NO: 1714201 - RNA, 23 nt, Human
agucacacagugagucgaggaca

SEQ ID NO: 1714202 - RNA, 15 nt, Human
agucacacagugagu

SEQ ID NO: 1714203 - RNA, 23 nt, Human
agucacacaguauuacuucugcu

SEQ ID NO: 1714204 - RNA, 17 nt, Human
uggugcgaucuggguuc

SEQ ID NO: 1714205 - RNA, 16 nt, Human
uggugcgaucuggguu

SEQ ID NO: 1714206 - RNA, 18 nt, Human
uggugcugccacacuuca

SEQ ID NO: 1714207 - RNA, 13 nt, Human
uggugcugccaca

SEQ ID NO: 1714208 - RNA, 23 nt, Human
uggugugaccacugcagaagaca

SEQ ID NO: 1714209 - RNA, 20 nt, Human
ugguuaggcauugugggaag

SEQ ID NO: 1714210 - RNA, 18 nt, Human
ugguuaggcauuguggga

SEQ ID NO: 1714211 - RNA, 12 nt, Human
ugguggcagugg

SEQ ID NO: 1714212 - RNA, 15 nt, Human
ugguggcagcugcgg

SEQ ID NO: 1714213 - RNA, 13 nt, Human
ugguggcagcugc

SEQ ID NO: 1714214 - RNA, 14 nt, Human
ugguggcagcugcg

SEQ ID NO: 1714215 - RNA, 21 nt, Human
ugguggagaggcccggccucu

SEQ ID NO: 1714216 - RNA, 18 nt, Human
aggucagagccugcaguu

SEQ ID NO: 1714217 - RNA, 17 nt, Human
aggucagagccugcagu

SEQ ID NO: 1714218 - RNA, 15 nt, Human
aggucagagccugca

SEQ ID NO: 1714219 - RNA, 14 nt, Human
aggucagagccugc

SEQ ID NO: 1714220 - RNA, 13 nt, Human
aggucagagccug

SEQ ID NO: 1714221 - RNA, 16 nt, Human
uggucagauuugaacu

SEQ ID NO: 1714222 - RNA, 15 nt, Human
uggucagauuugaac

SEQ ID NO: 1714223 - RNA, 16 nt, Human
aggucuugaacuccug

SEQ ID NO: 1714224 - RNA, 19 nt, Human
agguccacaacacacagau

SEQ ID NO: 1714225 - RNA, 15 nt, Human
aggugacagagugag

SEQ ID NO: 1714226 - RNA, 13 nt, Human
aggugacagagug

SEQ ID NO: 1714227 - RNA, 17 nt, Human
aggucuugaacuccugg

SEQ ID NO: 1714228 - RNA, 18 nt, Human
aggucuugaacuccuggc

SEQ ID NO: 1714229 - RNA, 13 nt, Human
aggugaccccagg

SEQ ID NO: 1714230 - RNA, 22 nt, Human
aggugacagagugagacucugu

SEQ ID NO: 1714231 - RNA, 16 nt, Human
aggugagaagcagagg

SEQ ID NO: 1714232 - RNA, 23 nt, Human
aggugagaagcagaggaaggaga

SEQ ID NO: 1714233 - RNA, 21 nt, Human
aggugagaagcagaggaagga

SEQ ID NO: 1714234 - RNA, 19 nt, Human
uguaaauaaagaacuagca

SEQ ID NO: 1714235 - RNA, 21 nt, Human
uguaaauacuguuuuuaacaa

SEQ ID NO: 1714236 - RNA, 16 nt, Human
uguaaauagcucaggu

SEQ ID NO: 1714237 - RNA, 15 nt, Human
uguaaauagcucagg

SEQ ID NO: 1714238 - RNA, 14 nt, Human
ugguuauggagagg

SEQ ID NO: 1714239 - RNA, 13 nt, Human
ugguuuccugccc

SEQ ID NO: 1714240 - RNA, 12 nt, Human
ugguuuccugcc

SEQ ID NO: 1714241 - RNA, 17 nt, Human
ugguuaugaauacuuug

SEQ ID NO: 1714242 - RNA, 20 nt, Human
ugguuuccugcccugggagg

SEQ ID NO: 1714243 - RNA, 15 nt, Human
ugguuuccugcccug

SEQ ID NO: 1714244 - RNA, 14 nt, Human
ugguuuccugcccu

SEQ ID NO: 1714245 - RNA, 17 nt, Human
ugguuuucaaaauaaaa

SEQ ID NO: 1714246 - RNA, 15 nt, Human
ugguuuucaaaauaa

SEQ ID NO: 1714247 - RNA, 14 nt, Human
ugguuuucaaaaua

SEQ ID NO: 1714248 - RNA, 15 nt, Human
ugguuuguaaauuaa

SEQ ID NO: 1714249 - RNA, 14 nt, Human
agguuuaagcuguu

SEQ ID NO: 1714250 - RNA, 20 nt, Human
aggugugcucugaucaucca

SEQ ID NO: 1714251 - RNA, 15 nt, Human
aggugugcucugauc

SEQ ID NO: 1714252 - RNA, 17 nt, Human
aggugugaaccaccaca

SEQ ID NO: 1714253 - RNA, 19 nt, Human
agguggggucacucuggca

SEQ ID NO: 1714254 - RNA, 21 nt, Human
aggugauccacccaccucagc

SEQ ID NO: 1714255 - RNA, 20 nt, Human
aggugcauauuuauaaaaau

SEQ ID NO: 1714256 - RNA, 20 nt, Human
aggugauccacccaccucag

SEQ ID NO: 1714257 - RNA, 14 nt, Human
aggugauccaccca

SEQ ID NO: 1714258 - RNA, 23 nt, Human
agguggggcagcuugaggguugg

SEQ ID NO: 1714259 - RNA, 18 nt, Human
aggugggauccuccaggu

SEQ ID NO: 1714260 - RNA, 17 nt, Human
aggugggauccuccagg

SEQ ID NO: 1714261 - RNA, 16 nt, Human
aggugggauccuccag

SEQ ID NO: 1714262 - RNA, 18 nt, Human
aggugccucaagagaagg

SEQ ID NO: 1714263 - RNA, 15 nt, Human
aggugggauccucca

SEQ ID NO: 1714264 - RNA, 14 nt, Human
aggaaaagcugcug

SEQ ID NO: 1714265 - RNA, 22 nt, Human
agcuuuccccaugucucgacuc

SEQ ID NO: 1714266 - RNA, 20 nt, Human
agcuugcccuggugccucac

SEQ ID NO: 1714267 - RNA, 23 nt, Human
agcuugaccgugaggccagagac

SEQ ID NO: 1714268 - RNA, 22 nt, Human
agcuugaccgugaggccagaga

SEQ ID NO: 1714269 - RNA, 20 nt, Human
agcuugaccgugaggccaga

SEQ ID NO: 1714270 - RNA, 15 nt, Human
agcuuacaagccagc

SEQ ID NO: 1714271 - RNA, 17 nt, Human
agcuuacaagccagcug

SEQ ID NO: 1714272 - RNA, 19 nt, Human
agcuuacaagccagcugga

SEQ ID NO: 1714273 - RNA, 15 nt, Human
ugcgguccacccagg

SEQ ID NO: 1714274 - RNA, 14 nt, Human
ugcgguccacccag

SEQ ID NO: 1714275 - RNA, 17 nt, Human
ugcgguccacccaggag

SEQ ID NO: 1714276 - RNA, 20 nt, Human
ugcuaauuuugaaaaacugc

SEQ ID NO: 1714277 - RNA, 19 nt, Human
ugcuaauuuugaaaaacug

SEQ ID NO: 1714278 - RNA, 18 nt, Human
ugcuaauuuugaaaaacu

SEQ ID NO: 1714279 - RNA, 16 nt, Human
ugcuaauuuugaaaaa

SEQ ID NO: 1714280 - RNA, 13 nt, Human
agcuuaacagugu

SEQ ID NO: 1714281 - RNA, 13 nt, Human
agcuguuuaugca

SEQ ID NO: 1714282 - RNA, 15 nt, Human
ugcucuugaacuccu

SEQ ID NO: 1714283 - RNA, 22 nt, Human
ugcucuugaacuccugaccuca

SEQ ID NO: 1714284 - RNA, 20 nt, Human
ugcucuugaacuccugaccu

SEQ ID NO: 1714285 - RNA, 17 nt, Human
ugcucuugaugccuggc

SEQ ID NO: 1714286 - RNA, 16 nt, Human
ugcucugcugacagac

SEQ ID NO: 1714287 - RNA, 15 nt, Human
ugcucugcugacaga

SEQ ID NO: 1714288 - RNA, 14 nt, Human
ugcucugcugacag

SEQ ID NO: 1714289 - RNA, 19 nt, Human
ugcucugaucauccacugu

SEQ ID NO: 1714290 - RNA, 21 nt, Human
ugcuccagcuguucagcuggu

SEQ ID NO: 1714291 - RNA, 18 nt, Human
ugcuaucucccccagccc

SEQ ID NO: 1714292 - RNA, 16 nt, Human
aggaaaagcugcugac

SEQ ID NO: 1714293 - RNA, 17 nt, Human
ugcuaucucccccagcc

SEQ ID NO: 1714294 - RNA, 14 nt, Human
ugcuaucuccccca

SEQ ID NO: 1714295 - RNA, 13 nt, Human
ugcuaucuccccc

SEQ ID NO: 1714296 - RNA, 23 nt, Human
aggaaaccaguuaggucucaaua

SEQ ID NO: 1714297 - RNA, 14 nt, Human
aggaagcucagggc

SEQ ID NO: 1714298 - RNA, 13 nt, Human
aggaagcucaggg

SEQ ID NO: 1714299 - RNA, 13 nt, Human
aggaagccagcag

SEQ ID NO: 1714300 - RNA, 18 nt, Human
aggaagcagcuuucccca

SEQ ID NO: 1714301 - RNA, 16 nt, Human
aggaagcucagggccu

SEQ ID NO: 1714302 - RNA, 15 nt, Human
aggaagcucagggcc

SEQ ID NO: 1714303 - RNA, 15 nt, Human
aggaaggcugagagg

SEQ ID NO: 1714304 - RNA, 15 nt, Human
agcuccuucuguccu

SEQ ID NO: 1714305 - RNA, 23 nt, Human
agcucccaggcauuccccaggag

SEQ ID NO: 1714306 - RNA, 13 nt, Human
agcucccaggcau

SEQ ID NO: 1714307 - RNA, 16 nt, Human
agcuccaucuccacuc

SEQ ID NO: 1714308 - RNA, 15 nt, Human
agcuccaucuccacu

SEQ ID NO: 1714309 - RNA, 13 nt, Human
agcuccaucucca

SEQ ID NO: 1714310 - RNA, 21 nt, Human
agcuccuucuguccuacucug

SEQ ID NO: 1714311 - RNA, 16 nt, Human
agcuccuucuguccua

SEQ ID NO: 1714312 - RNA, 17 nt, Human
agcucugguccauagag

SEQ ID NO: 1714313 - RNA, 12 nt, Human
agcucuggucca

SEQ ID NO: 1714314 - RNA, 19 nt, Human
ugcccuuaccugccaggaa

SEQ ID NO: 1714315 - RNA, 18 nt, Human
ugcccuuaccugccagga

SEQ ID NO: 1714316 - RNA, 13 nt, Human
ugccucagccucc

SEQ ID NO: 1714317 - RNA, 12 nt, Human
ugccucagccuc

SEQ ID NO: 1714318 - RNA, 14 nt, Human
ugccgcagcccugc

SEQ ID NO: 1714319 - RNA, 12 nt, Human
ugccgcagcccu

SEQ ID NO: 1714320 - RNA, 23 nt, Human
agcucuguccugggagugagcug

SEQ ID NO: 1714321 - RNA, 21 nt, Human
agcucuguccugggagugagc

SEQ ID NO: 1714322 - RNA, 16 nt, Human
agcucuguccugggag

SEQ ID NO: 1714323 - RNA, 20 nt, Human
agcugccagccgagauagcc

SEQ ID NO: 1714324 - RNA, 19 nt, Human
agcuguuacugucuucagu

SEQ ID NO: 1714325 - RNA, 14 nt, Human
ugccuguucccauu

SEQ ID NO: 1714326 - RNA, 17 nt, Human
ugccuguugggccagga

SEQ ID NO: 1714327 - RNA, 16 nt, Human
ugccuguugggccagg

SEQ ID NO: 1714328 - RNA, 20 nt, Human
ugccuuacccucauguucuu

SEQ ID NO: 1714329 - RNA, 16 nt, Human
ugccuuggggacaaga

SEQ ID NO: 1714330 - RNA, 21 nt, Human
ugccuuacccucauguucuua

SEQ ID NO: 1714331 - RNA, 20 nt, Human
agcugggguggggaccucag

SEQ ID NO: 1714332 - RNA, 16 nt, Human
agcugggacuacaggu

SEQ ID NO: 1714333 - RNA, 23 nt, Human
agcugggacuacaggcacccacc

SEQ ID NO: 1714334 - RNA, 20 nt, Human
agcugggacuacaggcaccc

SEQ ID NO: 1714335 - RNA, 23 nt, Human
agcugggguggggaccucaggcc

SEQ ID NO: 1714336 - RNA, 22 nt, Human
agcugggguggggaccucaggc

SEQ ID NO: 1714337 - RNA, 18 nt, Human
agcugugcucuggacagg

SEQ ID NO: 1714338 - RNA, 17 nt, Human
agcugugcucuggacag

SEQ ID NO: 1714339 - RNA, 19 nt, Human
agcugugcucuggacaggc

SEQ ID NO: 1714340 - RNA, 18 nt, Human
agcuguuacugucuucag

SEQ ID NO: 1714341 - RNA, 19 nt, Human
agcuggccgggagccugau

SEQ ID NO: 1714342 - RNA, 18 nt, Human
agcuggccgggagccuga

SEQ ID NO: 1714343 - RNA, 16 nt, Human
agcugcuugggcuuca

SEQ ID NO: 1714344 - RNA, 20 nt, Human
agcugcuugggcuucauccu

SEQ ID NO: 1714345 - RNA, 21 nt, Human
ugccuggauggggcugcaccg

SEQ ID NO: 1714346 - RNA, 20 nt, Human
ugccuggauggggcugcacc

SEQ ID NO: 1714347 - RNA, 17 nt, Human
ugccuggauggggcugc

SEQ ID NO: 1714348 - RNA, 16 nt, Human
ugccuggauggggcug

SEQ ID NO: 1714349 - RNA, 16 nt, Human
agcugccuguucagcu

SEQ ID NO: 1714350 - RNA, 14 nt, Human
agcugccuguucag

SEQ ID NO: 1714351 - RNA, 18 nt, Human
agcugccuguucagcucc

SEQ ID NO: 1714352 - RNA, 19 nt, Human
agcugccuguucagcucca

SEQ ID NO: 1714353 - RNA, 17 nt, Human
ugccucugccucugaca

SEQ ID NO: 1714354 - RNA, 20 nt, Human
ugccucugccucugacacac

SEQ ID NO: 1714355 - RNA, 18 nt, Human
ugccucugccucugacac

SEQ ID NO: 1714356 - RNA, 14 nt, Human
ugccucagccuccc

SEQ ID NO: 1714357 - RNA, 23 nt, Human
ugccugcccaggccccugccacc

SEQ ID NO: 1714358 - RNA, 22 nt, Human
ugccugcccaggccccugccac

SEQ ID NO: 1714359 - RNA, 12 nt, Human
ugccucugccug

SEQ ID NO: 1714360 - RNA, 24 nt, Human
ugccugcccaggccccugccaccc

SEQ ID NO: 1714361 - RNA, 22 nt, Human
ugccugcuuuuuauggccugug

SEQ ID NO: 1714362 - RNA, 21 nt, Human
ugccugcuuuuuauggccugu

SEQ ID NO: 1714363 - RNA, 20 nt, Human
ugccugcuuuuuauggccug

SEQ ID NO: 1714364 - RNA, 23 nt, Human
uggcacaucagcacgauuucugu

SEQ ID NO: 1714365 - RNA, 13 nt, Human
uggauggaagggg

SEQ ID NO: 1714366 - RNA, 23 nt, Human
uggaugccugguggcagcugcgg

SEQ ID NO: 1714367 - RNA, 21 nt, Human
uggaugccugguggcagcugc

SEQ ID NO: 1714368 - RNA, 14 nt, Human
uggaguugaaaauc

SEQ ID NO: 1714369 - RNA, 14 nt, Human
uggagugcagugag

SEQ ID NO: 1714370 - RNA, 17 nt, Human
uggagugcaaugacaca

SEQ ID NO: 1714371 - RNA, 20 nt, Human
aggcauuugcugaauacaga

SEQ ID NO: 1714372 - RNA, 16 nt, Human
aggcauuugcugaaua

SEQ ID NO: 1714373 - RNA, 14 nt, Human
aggccccgcccagg

SEQ ID NO: 1714374 - RNA, 13 nt, Human
aggcccggcucca

SEQ ID NO: 1714375 - RNA, 15 nt, Human
aggcccggccucuca

SEQ ID NO: 1714376 - RNA, 14 nt, Human
aggcccggccucuc

SEQ ID NO: 1714377 - RNA, 13 nt, Human
aggcccggccucu

SEQ ID NO: 1714378 - RNA, 13 nt, Human
aggcccagagggc

SEQ ID NO: 1714379 - RNA, 15 nt, Human
aggccagccuugacc

SEQ ID NO: 1714380 - RNA, 12 nt, Human
aggccagcugcu

SEQ ID NO: 1714381 - RNA, 13 nt, Human
aggccagccuuga

SEQ ID NO: 1714382 - RNA, 22 nt, Human
uggcagcucaccucucccuugg

SEQ ID NO: 1714383 - RNA, 21 nt, Human
uggcagcucaccucucccuug

SEQ ID NO: 1714384 - RNA, 23 nt, Human
uggcagcucaccucucccuugga

SEQ ID NO: 1714385 - RNA, 13 nt, Human
uggcagcucagag

SEQ ID NO: 1714386 - RNA, 20 nt, Human
uggcacccggccccugcugg

SEQ ID NO: 1714387 - RNA, 19 nt, Human
uggcacccggccccugcug

SEQ ID NO: 1714388 - RNA, 18 nt, Human
uggcacccggccccugcu

SEQ ID NO: 1714389 - RNA, 17 nt, Human
aggcaagcaccuccugc

SEQ ID NO: 1714390 - RNA, 17 nt, Human
uggagccaauggagacu

SEQ ID NO: 1714391 - RNA, 19 nt, Human
aggcaagcaccuccugccu

SEQ ID NO: 1714392 - RNA, 18 nt, Human
aggcaagcaccuccugcc

SEQ ID NO: 1714393 - RNA, 20 nt, Human
aggcaagcaccuccugccuc

SEQ ID NO: 1714394 - RNA, 16 nt, Human
aggcaaggcugucaau

SEQ ID NO: 1714395 - RNA, 17 nt, Human
aggcaaggcugucaauu

SEQ ID NO: 1714396 - RNA, 14 nt, Human
uggagaaaauggac

SEQ ID NO: 1714397 - RNA, 17 nt, Human
aggauugcuacuguccu

SEQ ID NO: 1714398 - RNA, 15 nt, Human
aggauugcuacuguc

SEQ ID NO: 1714399 - RNA, 18 nt, Human
aggauugcuacuguccua

SEQ ID NO: 1714400 - RNA, 20 nt, Human
aggcauuuaggccaugggac

SEQ ID NO: 1714401 - RNA, 18 nt, Human
aggcauugugggaagggg

SEQ ID NO: 1714402 - RNA, 22 nt, Human
aggcauaaagucagggguuccc

SEQ ID NO: 1714403 - RNA, 22 nt, Human
aggcaggucuugaacuccuggc

SEQ ID NO: 1714404 - RNA, 12 nt, Human
aggcagggucuc

SEQ ID NO: 1714405 - RNA, 17 nt, Human
aggcaggugggauggau

SEQ ID NO: 1714406 - RNA, 15 nt, Human
aggcauaaagucagg

SEQ ID NO: 1714407 - RNA, 19 nt, Human
aggacuuuucuuuguggcu

SEQ ID NO: 1714408 - RNA, 17 nt, Human
aggacuuuucuuugugg

SEQ ID NO: 1714409 - RNA, 18 nt, Human
aggagaaacuggaacucu

SEQ ID NO: 1714410 - RNA, 19 nt, Human
aggagaaacuggaacucuc

SEQ ID NO: 1714411 - RNA, 23 nt, Human
aggacuuuucuuuguggcuuccu

SEQ ID NO: 1714412 - RNA, 22 nt, Human
aggacuuuucuuuguggcuucc

SEQ ID NO: 1714413 - RNA, 19 nt, Human
aggacucugccuccucuuc

SEQ ID NO: 1714414 - RNA, 18 nt, Human
aggacucugccuccucuu

SEQ ID NO: 1714415 - RNA, 17 nt, Human
aggacucugccuccucu

SEQ ID NO: 1714416 - RNA, 16 nt, Human
aggacucugccuccuc

SEQ ID NO: 1714417 - RNA, 14 nt, Human
aggacucugccucc

SEQ ID NO: 1714418 - RNA, 13 nt, Human
aggacucugccuc

SEQ ID NO: 1714419 - RNA, 12 nt, Human
aggacucugccu

SEQ ID NO: 1714420 - RNA, 13 nt, Human
aggagcagccaca

SEQ ID NO: 1714421 - RNA, 12 nt, Human
aggagcagccac

SEQ ID NO: 1714422 - RNA, 16 nt, Human
aggagccuccugcccu

SEQ ID NO: 1714423 - RNA, 17 nt, Human
aggagccccgaggccuu

SEQ ID NO: 1714424 - RNA, 23 nt, Human
aggagcccugggaggcucuggag

SEQ ID NO: 1714425 - RNA, 13 nt, Human
aggacgcucucug

SEQ ID NO: 1714426 - RNA, 14 nt, Human
aggacgcucucugg

SEQ ID NO: 1714427 - RNA, 16 nt, Human
aggacgcucucuggcc

SEQ ID NO: 1714428 - RNA, 17 nt, Human
aggacgcucucuggccu

SEQ ID NO: 1714429 - RNA, 19 nt, Human
aggacgcucucuggccuuc

SEQ ID NO: 1714430 - RNA, 20 nt, Human
aggacgcucucuggccuucg

SEQ ID NO: 1714431 - RNA, 15 nt, Human
aggacuaggguccug

SEQ ID NO: 1714432 - RNA, 18 nt, Human
aggacuaggguccugggg

SEQ ID NO: 1714433 - RNA, 16 nt, Human
aggacuaggguccugg

SEQ ID NO: 1714434 - RNA, 19 nt, Human
aggacuaggguccugggga

SEQ ID NO: 1714435 - RNA, 18 nt, Human
ugcuuuuggucuguguga

SEQ ID NO: 1714436 - RNA, 23 nt, Human
ugcuuuuuaauauugauaugcuu

SEQ ID NO: 1714437 - RNA, 20 nt, Human
ugcuuuugucuaugggacuc

SEQ ID NO: 1714438 - RNA, 22 nt, Human
ugcuuugugauuuuuguaauuu

SEQ ID NO: 1714439 - RNA, 17 nt, Human
ugcuuugggcugcccug

SEQ ID NO: 1714440 - RNA, 16 nt, Human
ugcuuugggcugcccu

SEQ ID NO: 1714441 - RNA, 15 nt, Human
ugcuugagcucagga

SEQ ID NO: 1714442 - RNA, 17 nt, Human
aggagccuccugcccuu

SEQ ID NO: 1714443 - RNA, 15 nt, Human
ugcuuugggcugccc

SEQ ID NO: 1714444 - RNA, 14 nt, Human
ugcuuugggcugcc

SEQ ID NO: 1714445 - RNA, 16 nt, Human
uggaagacagcucuua

SEQ ID NO: 1714446 - RNA, 23 nt, Human
uggaaauuuguuauaaugaauga

SEQ ID NO: 1714447 - RNA, 21 nt, Human
uggaaauuuguuauaaugaau

SEQ ID NO: 1714448 - RNA, 16 nt, Human
ugcuuuuuauggccug

SEQ ID NO: 1714449 - RNA, 19 nt, Human
aggauucuuccucccuccc

SEQ ID NO: 1714450 - RNA, 17 nt, Human
aggauucuuccucccuc

SEQ ID NO: 1714451 - RNA, 23 nt, Human
aggaugaucuaggaagacuuugg

SEQ ID NO: 1714452 - RNA, 22 nt, Human
aggaugaucuaggaagacuuug

SEQ ID NO: 1714453 - RNA, 22 nt, Human
aggaugcacagaguuguuacau

SEQ ID NO: 1714454 - RNA, 13 nt, Human
aggaucagucuga

SEQ ID NO: 1714455 - RNA, 17 nt, Human
aggauaucggcauuugu

SEQ ID NO: 1714456 - RNA, 21 nt, Human
aggauaucggcauuuguuucu

SEQ ID NO: 1714457 - RNA, 16 nt, Human
ugcauaccacuuuugu

SEQ ID NO: 1714458 - RNA, 18 nt, Human
ugcauaccacuuuuguuc

SEQ ID NO: 1714459 - RNA, 20 nt, Human
ugcauaccacuuuuguucuu

SEQ ID NO: 1714460 - RNA, 13 nt, Human
ugcauacucauua

SEQ ID NO: 1714461 - RNA, 21 nt, Human
ugcauaccacuuuuguucuug

SEQ ID NO: 1714462 - RNA, 19 nt, Human
ugcauacucauuaggaugg

SEQ ID NO: 1714463 - RNA, 17 nt, Human
ugcauagaauaaaauuu

SEQ ID NO: 1714464 - RNA, 15 nt, Human
ugcaucucagcccac

SEQ ID NO: 1714465 - RNA, 14 nt, Human
ugcaucucagccca

SEQ ID NO: 1714466 - RNA, 13 nt, Human
ugcaucucagccc

SEQ ID NO: 1714467 - RNA, 18 nt, Human
ugcaugcugucccuuacg

SEQ ID NO: 1714468 - RNA, 21 nt, Human
ugcaugcugucccuuacguga

SEQ ID NO: 1714469 - RNA, 19 nt, Human
ugcaugcugucccuuacgu

SEQ ID NO: 1714470 - RNA, 18 nt, Human
ugcagccucacaguccuu

SEQ ID NO: 1714471 - RNA, 21 nt, Human
ugcagccucacaguccuuacc

SEQ ID NO: 1714472 - RNA, 22 nt, Human
ugcaggucccuaauaaagcugu

SEQ ID NO: 1714473 - RNA, 11 nt, Human
ugcaggucccu

SEQ ID NO: 1714474 - RNA, 18 nt, Human
agccuccugcccuuaccu

SEQ ID NO: 1714475 - RNA, 14 nt, Human
agccuccugcccuu

SEQ ID NO: 1714476 - RNA, 13 nt, Human
agccuccugcccu

SEQ ID NO: 1714477 - RNA, 21 nt, Human
ugcagacaggcaagcaccucc

SEQ ID NO: 1714478 - RNA, 13 nt, Human
ugcagacaggcaa

SEQ ID NO: 1714479 - RNA, 12 nt, Human
ugcagacaggca

SEQ ID NO: 1714480 - RNA, 13 nt, Human
ugccauaauuacu

SEQ ID NO: 1714481 - RNA, 22 nt, Human
ugccagccgagauagccaaggc

SEQ ID NO: 1714482 - RNA, 17 nt, Human
ugccagccgagauagcc

SEQ ID NO: 1714483 - RNA, 16 nt, Human
ugcauuuaaaagauac

SEQ ID NO: 1714484 - RNA, 14 nt, Human
ugccaaugggagcu

SEQ ID NO: 1714485 - RNA, 13 nt, Human
ugccaauggacua

SEQ ID NO: 1714486 - RNA, 18 nt, Human
ugccaaugggagcucaug

SEQ ID NO: 1714487 - RNA, 19 nt, Human
agccuugcggaagguucua

SEQ ID NO: 1714488 - RNA, 21 nt, Human
agccuugaccauucuccaccu

SEQ ID NO: 1714489 - RNA, 19 nt, Human
agccuugaccauucuccac

SEQ ID NO: 1714490 - RNA, 18 nt, Human
agccuugaccauucucca

SEQ ID NO: 1714491 - RNA, 16 nt, Human
agccuugggaccccug

SEQ ID NO: 1714492 - RNA, 20 nt, Human
agccuuagaagucacacagu

SEQ ID NO: 1714493 - RNA, 22 nt, Human
agccuuagaagucacacaguau

SEQ ID NO: 1714494 - RNA, 15 nt, Human
agccuguuuaagaga

SEQ ID NO: 1714495 - RNA, 13 nt, Human
agccuugaacuuu

SEQ ID NO: 1714496 - RNA, 19 nt, Human
agccugugccucugggacu

SEQ ID NO: 1714497 - RNA, 18 nt, Human
agccugugccucugggac

SEQ ID NO: 1714498 - RNA, 17 nt, Human
agccugugccucuggga

SEQ ID NO: 1714499 - RNA, 23 nt, Human
ugcaaaguucccuacuuccugug

SEQ ID NO: 1714500 - RNA, 20 nt, Human
ugcaaaguaucccuacugua

SEQ ID NO: 1714501 - RNA, 21 nt, Human
ugcaaaggguaucaggugcug

SEQ ID NO: 1714502 - RNA, 17 nt, Human
ugcaaagcccagcuuga

SEQ ID NO: 1714503 - RNA, 15 nt, Human
ugcaaagcccagcuu

SEQ ID NO: 1714504 - RNA, 14 nt, Human
ugcaaagcccagcu

SEQ ID NO: 1714505 - RNA, 20 nt, Human
ugcaaaccaucauugaaauc

SEQ ID NO: 1714506 - RNA, 18 nt, Human
ugcaaaccaucauugaaa

SEQ ID NO: 1714507 - RNA, 18 nt, Human
ugauuuccguuaaaauac

SEQ ID NO: 1714508 - RNA, 13 nt, Human
ugcaaaccaucau

SEQ ID NO: 1714509 - RNA, 12 nt, Human
ugcaaaccauca

SEQ ID NO: 1714510 - RNA, 12 nt, Human
ugauuuggaaaa

SEQ ID NO: 1714511 - RNA, 13 nt, Human
ugauuucauucaa

SEQ ID NO: 1714512 - RNA, 20 nt, Human
ugauuucagcaccuacagug

SEQ ID NO: 1714513 - RNA, 18 nt, Human
agccacggccaggccaga

SEQ ID NO: 1714514 - RNA, 17 nt, Human
agccacggccaggccag

SEQ ID NO: 1714515 - RNA, 13 nt, Human
ugcaacaggcugg

SEQ ID NO: 1714516 - RNA, 12 nt, Human
agcccaggccuc

SEQ ID NO: 1714517 - RNA, 15 nt, Human
ugcaaggucauuuuu

SEQ ID NO: 1714518 - RNA, 22 nt, Human
ugcagaagacaguauggcagcu

SEQ ID NO: 1714519 - RNA, 17 nt, Human
ugcacuccagccugagc

SEQ ID NO: 1714520 - RNA, 15 nt, Human
ugcacuccagccugg

SEQ ID NO: 1714521 - RNA, 16 nt, Human
ugcacuccagccuggg

SEQ ID NO: 1714522 - RNA, 15 nt, Human
ugcacuccagccuga

SEQ ID NO: 1714523 - RNA, 14 nt, Human
ugcacuccagccug

SEQ ID NO: 1714524 - RNA, 16 nt, Human
ugcaccggcuggccug

SEQ ID NO: 1714525 - RNA, 15 nt, Human
ugcaccggcuggccu

SEQ ID NO: 1714526 - RNA, 14 nt, Human
ugcaccggcuggcc

SEQ ID NO: 1714527 - RNA, 13 nt, Human
ugcaccagcccuu

SEQ ID NO: 1714528 - RNA, 21 nt, Human
ugcaccacugcacuccagccu

SEQ ID NO: 1714529 - RNA, 20 nt, Human
agcccugggaggcucuggag

SEQ ID NO: 1714530 - RNA, 18 nt, Human
agcccugggaggcucugg

SEQ ID NO: 1714531 - RNA, 17 nt, Human
agcccugggaggcucug

SEQ ID NO: 1714532 - RNA, 18 nt, Human
agccccgugggguuccuc

SEQ ID NO: 1714533 - RNA, 21 nt, Human
agcccaggccuccuacagcuu

SEQ ID NO: 1714534 - RNA, 19 nt, Human
agcccaggccuccuacagc

SEQ ID NO: 1714535 - RNA, 14 nt, Human
agcccaggccuccu

SEQ ID NO: 1714536 - RNA, 14 nt, Human
agccccgaggccuu

SEQ ID NO: 1714537 - RNA, 15 nt, Human
agcccgggcucugcc

SEQ ID NO: 1714538 - RNA, 14 nt, Human
agcccgggcucugc

SEQ ID NO: 1714539 - RNA, 13 nt, Human
agcccgggcucug

SEQ ID NO: 1714540 - RNA, 19 nt, Human
agccccuucugacccaugc

SEQ ID NO: 1714541 - RNA, 16 nt, Human
agccccuucugaccca

SEQ ID NO: 1714542 - RNA, 15 nt, Human
agccccuucugaccc

SEQ ID NO: 1714543 - RNA, 14 nt, Human
agccccuucugacc

SEQ ID NO: 1714544 - RNA, 19 nt, Human
agcccugcagagggcacag

SEQ ID NO: 1714545 - RNA, 16 nt, Human
agcccugcagagggca

SEQ ID NO: 1714546 - RNA, 15 nt, Human
agcccugcagagggc

SEQ ID NO: 1714547 - RNA, 14 nt, Human
agcccugcagaggg

SEQ ID NO: 1714548 - RNA, 16 nt, Human
agcccgggcucugccu

SEQ ID NO: 1714549 - RNA, 13 nt, Human
agcauuuuguaau

SEQ ID NO: 1714550 - RNA, 22 nt, Human
agcauuuugcuaaaugugaaug

SEQ ID NO: 1714551 - RNA, 15 nt, Human
agcauuuugcuaaau

SEQ ID NO: 1714552 - RNA, 18 nt, Human
agccaaacauccuacaag

SEQ ID NO: 1714553 - RNA, 16 nt, Human
agcauuugucaacaaa

SEQ ID NO: 1714554 - RNA, 22 nt, Human
agcauucucacuccuaccuggu

SEQ ID NO: 1714555 - RNA, 20 nt, Human
agcauucucacuccuaccug

SEQ ID NO: 1714556 - RNA, 18 nt, Human
agcauucucacuccuacc

SEQ ID NO: 1714557 - RNA, 19 nt, Human
agcauggcugccaauggga

SEQ ID NO: 1714558 - RNA, 17 nt, Human
agcauuagauuucucau

SEQ ID NO: 1714559 - RNA, 21 nt, Human
agcauauucaggaagcucagg

SEQ ID NO: 1714560 - RNA, 19 nt, Human
agcauauucaggaagcuca

SEQ ID NO: 1714561 - RNA, 17 nt, Human
agcauauucaggaagcu

SEQ ID NO: 1714562 - RNA, 14 nt, Human
ugaucacggcucac

SEQ ID NO: 1714563 - RNA, 13 nt, Human
ugaucacggcuca

SEQ ID NO: 1714564 - RNA, 15 nt, Human
ugaucacggcucacu

SEQ ID NO: 1714565 - RNA, 18 nt, Human
ugaucacggcucacugca

SEQ ID NO: 1714566 - RNA, 14 nt, Human
ugaucaccugcccu

SEQ ID NO: 1714567 - RNA, 18 nt, Human
ugauacaaugcugugccc

SEQ ID NO: 1714568 - RNA, 12 nt, Human
agcaucaggcca

SEQ ID NO: 1714569 - RNA, 21 nt, Human
agcaucaggccaggcccucug

SEQ ID NO: 1714570 - RNA, 22 nt, Human
agcaucaggccaggcccucugc

SEQ ID NO: 1714571 - RNA, 23 nt, Human
agcaucaggccaggcccucugcc

SEQ ID NO: 1714572 - RNA, 13 nt, Human
agcauggcugcca

SEQ ID NO: 1714573 - RNA, 23 nt, Human
ugauccagaaagaaaacuuguau

SEQ ID NO: 1714574 - RNA, 13 nt, Human
ugauccagaaaga

SEQ ID NO: 1714575 - RNA, 14 nt, Human
ugauccacucgccu

SEQ ID NO: 1714576 - RNA, 18 nt, Human
ugauccacucgccuucau

SEQ ID NO: 1714577 - RNA, 20 nt, Human
ugauccucccaccucagccu

SEQ ID NO: 1714578 - RNA, 19 nt, Human
ugauccucccaccucagcc

SEQ ID NO: 1714579 - RNA, 13 nt, Human
ugaucuaggaaga

SEQ ID NO: 1714580 - RNA, 18 nt, Human
ugauccucccaccucagc

SEQ ID NO: 1714581 - RNA, 13 nt, Human
agccaccacgccc

SEQ ID NO: 1714582 - RNA, 16 nt, Human
agccacggccaggcca

SEQ ID NO: 1714583 - RNA, 17 nt, Human
ugauuaaauucuugcaa

SEQ ID NO: 1714584 - RNA, 13 nt, Human
ugauuaaauucuu

SEQ ID NO: 1714585 - RNA, 16 nt, Human
ugauuaaauucuugca

SEQ ID NO: 1714586 - RNA, 22 nt, Human
ugauggggcccugccuccuuug

SEQ ID NO: 1714587 - RNA, 23 nt, Human
ugauggguuaguggauggaaggg

SEQ ID NO: 1714588 - RNA, 19 nt, Human
ugauggguuaguggaugga

SEQ ID NO: 1714589 - RNA, 19 nt, Human
ugauguuuuccaugagucc

SEQ ID NO: 1714590 - RNA, 23 nt, Human
ugauguuuuccaugaguccccug

SEQ ID NO: 1714591 - RNA, 17 nt, Human
ugauguuuuccaugagu

SEQ ID NO: 1714592 - RNA, 21 nt, Human
ugauguuuuaaggaugcuugu

SEQ ID NO: 1714593 - RNA, 13 nt, Human
ugauggggcccug

SEQ ID NO: 1714594 - RNA, 22 nt, Human
ugaugggcaacccccagccugc

SEQ ID NO: 1714595 - RNA, 17 nt, Human
ugauggcuuaugauagc

SEQ ID NO: 1714596 - RNA, 21 nt, Human
ugaugaucuuugcagacaggc

SEQ ID NO: 1714597 - RNA, 20 nt, Human
ugaugaucuuugcagacagg

SEQ ID NO: 1714598 - RNA, 19 nt, Human
ugaugaucuuugcagacag

SEQ ID NO: 1714599 - RNA, 23 nt, Human
ugaugaaaugaggucagagccug

SEQ ID NO: 1714600 - RNA, 18 nt, Human
ugaugaaauguaaauacu

SEQ ID NO: 1714601 - RNA, 15 nt, Human
ugaucuaggaagacu

SEQ ID NO: 1714602 - RNA, 14 nt, Human
ugaucuaggaagac

SEQ ID NO: 1714603 - RNA, 22 nt, Human
ugaugaaaugaggucagagccu

SEQ ID NO: 1714604 - RNA, 19 nt, Human
agcauaaaaauuagccaag

SEQ ID NO: 1714605 - RNA, 14 nt, Human
agcaguuugcuuug

SEQ ID NO: 1714606 - RNA, 23 nt, Human
agcauaaaaauuagccaagugug

SEQ ID NO: 1714607 - RNA, 16 nt, Human
ugaguacguugugcau

SEQ ID NO: 1714608 - RNA, 17 nt, Human
ugaguacguugugcauu

SEQ ID NO: 1714609 - RNA, 18 nt, Human
ugaguacguugugcauuu

SEQ ID NO: 1714610 - RNA, 19 nt, Human
ugaguacguugugcauuug

SEQ ID NO: 1714611 - RNA, 14 nt, Human
ugauacaaugcugu

SEQ ID NO: 1714612 - RNA, 15 nt, Human
ugauacaaugcugug

SEQ ID NO: 1714613 - RNA, 23 nt, Human
ugagugggggaucacagccucug

SEQ ID NO: 1714614 - RNA, 21 nt, Human
ugagugggggaucacagccuc

SEQ ID NO: 1714615 - RNA, 14 nt, Human
ugagugccuuacac

SEQ ID NO: 1714616 - RNA, 13 nt, Human
ugagugccuuaca

SEQ ID NO: 1714617 - RNA, 17 nt, Human
ugagugcagcucuggag

SEQ ID NO: 1714618 - RNA, 16 nt, Human
ugagugccuuacacaa

SEQ ID NO: 1714619 - RNA, 13 nt, Human
ugaguccagaagu

SEQ ID NO: 1714620 - RNA, 14 nt, Human
ugaguacuacaguc

SEQ ID NO: 1714621 - RNA, 20 nt, Human
ugaguacguugugcauuugg

SEQ ID NO: 1714622 - RNA, 18 nt, Human
ugagucaccaagcccagu

SEQ ID NO: 1714623 - RNA, 11 nt, Human
agcagccacau

SEQ ID NO: 1714624 - RNA, 15 nt, Human
agcagccacauuccu

SEQ ID NO: 1714625 - RNA, 13 nt, Human
agcaggacaugga

SEQ ID NO: 1714626 - RNA, 16 nt, Human
agcagcagggagggcu

SEQ ID NO: 1714627 - RNA, 19 nt, Human
ugacccaugcugcccugug

SEQ ID NO: 1714628 - RNA, 18 nt, Human
ugacccaugcugcccugu

SEQ ID NO: 1714629 - RNA, 17 nt, Human
ugacccaugcugcccug

SEQ ID NO: 1714630 - RNA, 20 nt, Human
ugacccaugcugcccuguga

SEQ ID NO: 1714631 - RNA, 20 nt, Human
agcagggagggcuucugcca

SEQ ID NO: 1714632 - RNA, 15 nt, Human
agcagggcucagcgg

SEQ ID NO: 1714633 - RNA, 14 nt, Human
agcagggcucagcg

SEQ ID NO: 1714634 - RNA, 13 nt, Human
agcagggcucagc

SEQ ID NO: 1714635 - RNA, 22 nt, Human
agcagggcucagcggggacagc

SEQ ID NO: 1714636 - RNA, 19 nt, Human
agcaggcucucaggccagc

SEQ ID NO: 1714637 - RNA, 18 nt, Human
agcaggcucucaggccag

SEQ ID NO: 1714638 - RNA, 17 nt, Human
agcaggcucucaggcca

SEQ ID NO: 1714639 - RNA, 16 nt, Human
agcaggcucucaggcc

SEQ ID NO: 1714640 - RNA, 15 nt, Human
agcaggcucucaggc

SEQ ID NO: 1714641 - RNA, 14 nt, Human
agcaggcucucagg

SEQ ID NO: 1714642 - RNA, 13 nt, Human
agcaggcucucag

SEQ ID NO: 1714643 - RNA, 17 nt, Human
agcaggcucgggcuccc

SEQ ID NO: 1714644 - RNA, 23 nt, Human
agcaggcucucaggccagcugcu

SEQ ID NO: 1714645 - RNA, 22 nt, Human
agcaggcucucaggccagcugc

SEQ ID NO: 1714646 - RNA, 21 nt, Human
agcaggcucucaggccagcug

SEQ ID NO: 1714647 - RNA, 15 nt, Human
agcagggaaacagcu

SEQ ID NO: 1714648 - RNA, 14 nt, Human
agcagggaaacagc

SEQ ID NO: 1714649 - RNA, 13 nt, Human
agcagggaaacag

SEQ ID NO: 1714650 - RNA, 15 nt, Human
agcaggcugugaguu

SEQ ID NO: 1714651 - RNA, 15 nt, Human
ugaaauuguauuaca

SEQ ID NO: 1714652 - RNA, 17 nt, Human
ugaaauaagccagacau

SEQ ID NO: 1714653 - RNA, 18 nt, Human
ugaaauaagccagacauc

SEQ ID NO: 1714654 - RNA, 20 nt, Human
ugaaauaagccagacaucaa

SEQ ID NO: 1714655 - RNA, 23 nt, Human
ugaaauaagccagacaucaacag

SEQ ID NO: 1714656 - RNA, 18 nt, Human
agagcugccaccugccug

SEQ ID NO: 1714657 - RNA, 21 nt, Human
ucuuuggacccugaggcccag

SEQ ID NO: 1714658 - RNA, 17 nt, Human
ucuuuggacccugaggc

SEQ ID NO: 1714659 - RNA, 12 nt, Human
agagcagagacc

SEQ ID NO: 1714660 - RNA, 21 nt, Human
agagcaccuuagacagucccu

SEQ ID NO: 1714661 - RNA, 18 nt, Human
agagcagagaccaucccu

SEQ ID NO: 1714662 - RNA, 17 nt, Human
agagcagagaccauccc

SEQ ID NO: 1714663 - RNA, 20 nt, Human
agagcagagaccaucccuga

SEQ ID NO: 1714664 - RNA, 21 nt, Human
agagccuugcggaagguucua

SEQ ID NO: 1714665 - RNA, 11 nt, Human
agagccuugcg

SEQ ID NO: 1714666 - RNA, 15 nt, Human
agagguugcagugag

SEQ ID NO: 1714667 - RNA, 19 nt, Human
agagguccacaacacacag

SEQ ID NO: 1714668 - RNA, 13 nt, Human
agaggcugaggac

SEQ ID NO: 1714669 - RNA, 19 nt, Human
agaggcagccccauucugc

SEQ ID NO: 1714670 - RNA, 13 nt, Human
agaggcagcccca

SEQ ID NO: 1714671 - RNA, 13 nt, Human
agaggcagggucu

SEQ ID NO: 1714672 - RNA, 10 nt, Human
agaggcaggg

SEQ ID NO: 1714673 - RNA, 19 nt, Human
agaggccaugggccuccug

SEQ ID NO: 1714674 - RNA, 10 nt, Human
agaggcucag

SEQ ID NO: 1714675 - RNA, 18 nt, Human
agaggcucagauuguaau

SEQ ID NO: 1714676 - RNA, 19 nt, Human
ugaacaaauuuacagagac

SEQ ID NO: 1714677 - RNA, 20 nt, Human
ugaacaaauuuacagagaca

SEQ ID NO: 1714678 - RNA, 15 nt, Human
ugaaauuuuuauuaa

SEQ ID NO: 1714679 - RNA, 12 nt, Human
ugaaccugaaua

SEQ ID NO: 1714680 - RNA, 22 nt, Human
ugaaccgaugagaaauaaaguu

SEQ ID NO: 1714681 - RNA, 15 nt, Human
ugaacuccuggccuc

SEQ ID NO: 1714682 - RNA, 14 nt, Human
ugaacuccuggccu

SEQ ID NO: 1714683 - RNA, 12 nt, Human
ugaacuccuggc

SEQ ID NO: 1714684 - RNA, 21 nt, Human
ugaacuaggauuguaguccca

SEQ ID NO: 1714685 - RNA, 19 nt, Human
ugaacuuugaccucugcag

SEQ ID NO: 1714686 - RNA, 20 nt, Human
ugaacuuugaccucugcagc

SEQ ID NO: 1714687 - RNA, 22 nt, Human
ugaacuuugaccucugcagcaa

SEQ ID NO: 1714688 - RNA, 15 nt, Human
agagcuuaacagugu

SEQ ID NO: 1714689 - RNA, 22 nt, Human
agagcuucuguugcugccucau

SEQ ID NO: 1714690 - RNA, 18 nt, Human
agaucacgccacugcacu

SEQ ID NO: 1714691 - RNA, 17 nt, Human
agaucacgccacugcac

SEQ ID NO: 1714692 - RNA, 15 nt, Human
ugaauuucuuuugcc

SEQ ID NO: 1714693 - RNA, 16 nt, Human
agaucacgccacugca

SEQ ID NO: 1714694 - RNA, 15 nt, Human
agaucacgccacugc

SEQ ID NO: 1714695 - RNA, 14 nt, Human
agaucacgccacug

SEQ ID NO: 1714696 - RNA, 12 nt, Human
agauaaaugugc

SEQ ID NO: 1714697 - RNA, 17 nt, Human
agauaaagguucaugca

SEQ ID NO: 1714698 - RNA, 16 nt, Human
agaguuguuacauuuu

SEQ ID NO: 1714699 - RNA, 12 nt, Human
agaguuguuaca

SEQ ID NO: 1714700 - RNA, 20 nt, Human
agaguugaugguuguacaua

SEQ ID NO: 1714701 - RNA, 17 nt, Human
agaguugauacuacagu

SEQ ID NO: 1714702 - RNA, 20 nt, Human
agaguugauacuacaguuug

SEQ ID NO: 1714703 - RNA, 22 nt, Human
agaguugauacuacaguuuguu

SEQ ID NO: 1714704 - RNA, 20 nt, Human
ugaaugguuuucaaaauaaa

SEQ ID NO: 1714705 - RNA, 19 nt, Human
ugaaugucagugugacuga

SEQ ID NO: 1714706 - RNA, 15 nt, Human
agaugcaccagcccu

SEQ ID NO: 1714707 - RNA, 14 nt, Human
agaugcaccagccc

SEQ ID NO: 1714708 - RNA, 14 nt, Human
agaugcuagaacuc

SEQ ID NO: 1714709 - RNA, 15 nt, Human
agaugcuagaacucc

SEQ ID NO: 1714710 - RNA, 17 nt, Human
ugacccacaagaaauga

SEQ ID NO: 1714711 - RNA, 13 nt, Human
ugacccacugcuu

SEQ ID NO: 1714712 - RNA, 12 nt, Human
ugacccacugcu

SEQ ID NO: 1714713 - RNA, 15 nt, Human
agaugcuucucacug

SEQ ID NO: 1714714 - RNA, 21 nt, Human
ugacauuguuggccaaagcca

SEQ ID NO: 1714715 - RNA, 20 nt, Human
ugacauuguuggccaaagcc

SEQ ID NO: 1714716 - RNA, 22 nt, Human
ugacauuguagagcuucuggca

SEQ ID NO: 1714717 - RNA, 18 nt, Human
ugaccaaugauggucacc

SEQ ID NO: 1714718 - RNA, 19 nt, Human
ugaccaauauuguacaguu

SEQ ID NO: 1714719 - RNA, 21 nt, Human
ugaccaauauuguacaguuuu

SEQ ID NO: 1714720 - RNA, 17 nt, Human
ugaccaauauuguacag

SEQ ID NO: 1714721 - RNA, 18 nt, Human
ugaccaauauuguacagu

SEQ ID NO: 1714722 - RNA, 15 nt, Human
agaucagccugggca

SEQ ID NO: 1714723 - RNA, 13 nt, Human
agaucagccuggg

SEQ ID NO: 1714724 - RNA, 12 nt, Human
agaucauuguga

SEQ ID NO: 1714725 - RNA, 20 nt, Human
ugacagggcacaccgggcac

SEQ ID NO: 1714726 - RNA, 21 nt, Human
ugacagggcacaccgggcacu

SEQ ID NO: 1714727 - RNA, 16 nt, Human
ugacagggcacaccgg

SEQ ID NO: 1714728 - RNA, 11 nt, Human
ugacagggcac

SEQ ID NO: 1714729 - RNA, 14 nt, Human
ugacaggccugucc

SEQ ID NO: 1714730 - RNA, 21 nt, Human
ugacacacagcucuguccugg

SEQ ID NO: 1714731 - RNA, 20 nt, Human
ugacaggcaaugcuggcugu

SEQ ID NO: 1714732 - RNA, 20 nt, Human
ucuugagccuugaacuuuga

SEQ ID NO: 1714733 - RNA, 18 nt, Human
ucuugagccuugaacuuu

SEQ ID NO: 1714734 - RNA, 19 nt, Human
ucuugagccuugaacuuug

SEQ ID NO: 1714735 - RNA, 15 nt, Human
agacucauucuucug

SEQ ID NO: 1714736 - RNA, 17 nt, Human
ucuugagccuugaacuu

SEQ ID NO: 1714737 - RNA, 21 nt, Human
agacucaguggggaggggcug

SEQ ID NO: 1714738 - RNA, 16 nt, Human
agaccugccccuccuc

SEQ ID NO: 1714739 - RNA, 23 nt, Human
agaccugccccuccucucugccc

SEQ ID NO: 1714740 - RNA, 22 nt, Human
agaccugccccuccucucugcc

SEQ ID NO: 1714741 - RNA, 14 nt, Human
agacccggcugcgu

SEQ ID NO: 1714742 - RNA, 21 nt, Human
agaccccuggcuuuucacugc

SEQ ID NO: 1714743 - RNA, 15 nt, Human
agaccccuggcuuuu

SEQ ID NO: 1714744 - RNA, 23 nt, Human
ucuucuguacgucugacaggcaa

SEQ ID NO: 1714745 - RNA, 23 nt, Human
agacauacuaaccagcagaaaug

SEQ ID NO: 1714746 - RNA, 14 nt, Human
agacauagaauuaa

SEQ ID NO: 1714747 - RNA, 17 nt, Human
ucuuauuuaaugaaaga

SEQ ID NO: 1714748 - RNA, 22 nt, Human
ucuucugcuucagccucccgag

SEQ ID NO: 1714749 - RNA, 22 nt, Human
ucuucuguacgucugacaggca

SEQ ID NO: 1714750 - RNA, 21 nt, Human
ucuucuguacgucugacaggc

SEQ ID NO: 1714751 - RNA, 14 nt, Human
agacugucucaaga

SEQ ID NO: 1714752 - RNA, 15 nt, Human
agacuuccagagccu

SEQ ID NO: 1714753 - RNA, 16 nt, Human
agacuguacaaaguag

SEQ ID NO: 1714754 - RNA, 15 nt, Human
agacuguacaaagua

SEQ ID NO: 1714755 - RNA, 20 nt, Human
agacucgcgacaaugcaaac

SEQ ID NO: 1714756 - RNA, 24 nt, Human
agagacagaaagcagaacagugau

SEQ ID NO: 1714757 - RNA, 15 nt, Human
agagacacaagccuu

SEQ ID NO: 1714758 - RNA, 14 nt, Human
agagaaaaaagcca

SEQ ID NO: 1714759 - RNA, 22 nt, Human
agagaaaaaauauuuuccugcc

SEQ ID NO: 1714760 - RNA, 19 nt, Human
agacuuuuuuuaaauagua

SEQ ID NO: 1714761 - RNA, 18 nt, Human
agacuuguaugaaagaug

SEQ ID NO: 1714762 - RNA, 19 nt, Human
agacucgcgacaaugcaaa

SEQ ID NO: 1714763 - RNA, 18 nt, Human
agacucgcgacaaugcaa

SEQ ID NO: 1714764 - RNA, 17 nt, Human
agacucgcgacaaugca

SEQ ID NO: 1714765 - RNA, 15 nt, Human
agacucgcgacaaug

SEQ ID NO: 1714766 - RNA, 17 nt, Human
ucuuucuuccucugcug

SEQ ID NO: 1714767 - RNA, 16 nt, Human
ucuuucuuccucugcu

SEQ ID NO: 1714768 - RNA, 15 nt, Human
ucuuucuuccucugc

SEQ ID NO: 1714769 - RNA, 13 nt, Human
ucuuucugcuuug

SEQ ID NO: 1714770 - RNA, 20 nt, Human
ucuuuauaauucuacuuuga

SEQ ID NO: 1714771 - RNA, 18 nt, Human
ucuuucuggcuaugcauu

SEQ ID NO: 1714772 - RNA, 22 nt, Human
ucuuucugcagaaacagaaagg

SEQ ID NO: 1714773 - RNA, 19 nt, Human
ucuuucuggcuaugcauuu

SEQ ID NO: 1714774 - RNA, 14 nt, Human
ucuuucuuccucug

SEQ ID NO: 1714775 - RNA, 14 nt, Human
ucuugguuuguaaa

SEQ ID NO: 1714776 - RNA, 20 nt, Human
ucuuuaaugucacaggcagg

SEQ ID NO: 1714777 - RNA, 16 nt, Human
ucuugguuuguaaauu

SEQ ID NO: 1714778 - RNA, 22 nt, Human
ucuuuaaugucacaggcagguc

SEQ ID NO: 1714779 - RNA, 14 nt, Human
ucuuuaauuuuaca

SEQ ID NO: 1714780 - RNA, 15 nt, Human
ucuuuaguuuuugug

SEQ ID NO: 1714781 - RNA, 12 nt, Human
agacagucccug

SEQ ID NO: 1714782 - RNA, 16 nt, Human
agacagcugccuggga

SEQ ID NO: 1714783 - RNA, 15 nt, Human
agacagcugccuggg

SEQ ID NO: 1714784 - RNA, 14 nt, Human
agacagucccugcc

SEQ ID NO: 1714785 - RNA, 13 nt, Human
agacagucccugc

SEQ ID NO: 1714786 - RNA, 12 nt, Human
ucuuagauguau

SEQ ID NO: 1714787 - RNA, 14 nt, Human
ucuuagauguauau

SEQ ID NO: 1714788 - RNA, 19 nt, Human
ucuuacugucuuuuuucua

SEQ ID NO: 1714789 - RNA, 17 nt, Human
agacacaggcccggcuc

SEQ ID NO: 1714790 - RNA, 22 nt, Human
agacacaggcccggcuccaggc

SEQ ID NO: 1714791 - RNA, 21 nt, Human
agacacaggcccggcuccagg

SEQ ID NO: 1714792 - RNA, 20 nt, Human
agacacaggcccggcuccag

SEQ ID NO: 1714793 - RNA, 19 nt, Human
agacacaggcccggcucca

SEQ ID NO: 1714794 - RNA, 13 nt, Human
agacacaagccuu

SEQ ID NO: 1714795 - RNA, 14 nt, Human
agacacaagccuuc

SEQ ID NO: 1714796 - RNA, 17 nt, Human
agaauucucuuauccaa

SEQ ID NO: 1714797 - RNA, 18 nt, Human
agaauucucuaguuugau

SEQ ID NO: 1714798 - RNA, 19 nt, Human
agaauucucuaguuugauu

SEQ ID NO: 1714799 - RNA, 24 nt, Human
agacacauguccaagaagcccagg

SEQ ID NO: 1714800 - RNA, 22 nt, Human
agacaccuugacagggcacacc

SEQ ID NO: 1714801 - RNA, 22 nt, Human
agacacauguccaagaagccca

SEQ ID NO: 1714802 - RNA, 21 nt, Human
agacacauguccaagaagccc

SEQ ID NO: 1714803 - RNA, 23 nt, Human
agacacaggcccggcuccaggcu

SEQ ID NO: 1714804 - RNA, 14 nt, Human
agacagcugccugg

SEQ ID NO: 1714805 - RNA, 13 nt, Human
agacagcugccug

SEQ ID NO: 1714806 - RNA, 12 nt, Human
agacagaaaaaa

SEQ ID NO: 1714807 - RNA, 18 nt, Human
ucuguacgucugacaggc

SEQ ID NO: 1714808 - RNA, 23 nt, Human
ucuguuuagauaauacaccacua

SEQ ID NO: 1714809 - RNA, 16 nt, Human
ucuguuuagauaauac

SEQ ID NO: 1714810 - RNA, 19 nt, Human
ucuguuuagauaauacacc

SEQ ID NO: 1714811 - RNA, 19 nt, Human
ucuguucugcacacagcac

SEQ ID NO: 1714812 - RNA, 18 nt, Human
ucuguucugcacacagca

SEQ ID NO: 1714813 - RNA, 17 nt, Human
ucuguucugcacacagc

SEQ ID NO: 1714814 - RNA, 20 nt, Human
agaauucucagaaucucaaa

SEQ ID NO: 1714815 - RNA, 20 nt, Human
agaauuauaauuaguuccuc

SEQ ID NO: 1714816 - RNA, 14 nt, Human
agaauucucuaguu

SEQ ID NO: 1714817 - RNA, 23 nt, Human
ucuggguuccuuccucugagccu

SEQ ID NO: 1714818 - RNA, 22 nt, Human
ucuggguuccuuccucugagcc

SEQ ID NO: 1714819 - RNA, 19 nt, Human
agaauuaguggcacuugcu

SEQ ID NO: 1714820 - RNA, 21 nt, Human
agaauguguuuaaacuugguu

SEQ ID NO: 1714821 - RNA, 23 nt, Human
agaaccccaggguccuguagccc

SEQ ID NO: 1714822 - RNA, 16 nt, Human
agaaauuuccacucag

SEQ ID NO: 1714823 - RNA, 22 nt, Human
agaaauuuccacucaggucugu

SEQ ID NO: 1714824 - RNA, 13 nt, Human
ucucagggccugg

SEQ ID NO: 1714825 - RNA, 12 nt, Human
ucucagggccug

SEQ ID NO: 1714826 - RNA, 15 nt, Human
ucucagggccugguc

SEQ ID NO: 1714827 - RNA, 14 nt, Human
ucucagggccuggu

SEQ ID NO: 1714828 - RNA, 19 nt, Human
ucucagggccuggucguuu

SEQ ID NO: 1714829 - RNA, 16 nt, Human
ucuccaggcuguaucc

SEQ ID NO: 1714830 - RNA, 15 nt, Human
ucuccaagcaggaca

SEQ ID NO: 1714831 - RNA, 17 nt, Human
ucuccaaaauaaaacuu

SEQ ID NO: 1714832 - RNA, 19 nt, Human
ucuccaaaauaaaacuuuu

SEQ ID NO: 1714833 - RNA, 22 nt, Human
ucuccaaaauaaaacuuuuuaa

SEQ ID NO: 1714834 - RNA, 21 nt, Human
ucuccuccuuuucacaguucu

SEQ ID NO: 1714835 - RNA, 17 nt, Human
acuuucuagccagagga

SEQ ID NO: 1714836 - RNA, 14 nt, Human
acuuugaccucugc

SEQ ID NO: 1714837 - RNA, 16 nt, Human
ucuccauguuugaugu

SEQ ID NO: 1714838 - RNA, 16 nt, Human
acuucaggcucuucuc

SEQ ID NO: 1714839 - RNA, 14 nt, Human
acuucaggcucuuc

SEQ ID NO: 1714840 - RNA, 16 nt, Human
acuucagcugacuuuu

SEQ ID NO: 1714841 - RNA, 11 nt, Human
acuucagcuga

SEQ ID NO: 1714842 - RNA, 11 nt, Human
ucucacuccuu

SEQ ID NO: 1714843 - RNA, 14 nt, Human
acuucuccacccug

SEQ ID NO: 1714844 - RNA, 12 nt, Human
ucucacucuguc

SEQ ID NO: 1714845 - RNA, 16 nt, Human
ucucacucugucgccc

SEQ ID NO: 1714846 - RNA, 13 nt, Human
ucucacuccuuga

SEQ ID NO: 1714847 - RNA, 16 nt, Human
ucucacuauguugccc

SEQ ID NO: 1714848 - RNA, 15 nt, Human
acuuccugugacuuc

SEQ ID NO: 1714849 - RNA, 18 nt, Human
acuucuccacccugcucu

SEQ ID NO: 1714850 - RNA, 16 nt, Human
acuucuccacccugcu

SEQ ID NO: 1714851 - RNA, 15 nt, Human
acuucuccacccugc

SEQ ID NO: 1714852 - RNA, 21 nt, Human
acuugaacccauauuuguaca

SEQ ID NO: 1714853 - RNA, 19 nt, Human
acuugaacccgggaggcag

SEQ ID NO: 1714854 - RNA, 20 nt, Human
acuugaacccgggaggcaga

SEQ ID NO: 1714855 - RNA, 21 nt, Human
acuugaacccgggaggcagag

SEQ ID NO: 1714856 - RNA, 19 nt, Human
acuugagcccagagugaac

SEQ ID NO: 1714857 - RNA, 18 nt, Human
acuuguggacacagcucu

SEQ ID NO: 1714858 - RNA, 17 nt, Human
acuuguggacacagcuc

SEQ ID NO: 1714859 - RNA, 16 nt, Human
acuuguggacacagcu

SEQ ID NO: 1714860 - RNA, 14 nt, Human
acuugcucuugaug

SEQ ID NO: 1714861 - RNA, 18 nt, Human
ucugaagucacugcacag

SEQ ID NO: 1714862 - RNA, 16 nt, Human
ucugaagucacugcac

SEQ ID NO: 1714863 - RNA, 15 nt, Human
ucugaagucacugca

SEQ ID NO: 1714864 - RNA, 12 nt, Human
ucugacacacag

SEQ ID NO: 1714865 - RNA, 16 nt, Human
ucugacaacagacuuc

SEQ ID NO: 1714866 - RNA, 15 nt, Human
ucugacaacagacuu

SEQ ID NO: 1714867 - RNA, 14 nt, Human
agaaaugaaagcag

SEQ ID NO: 1714868 - RNA, 23 nt, Human
agaaaugaaaaaauauauaucaa

SEQ ID NO: 1714869 - RNA, 18 nt, Human
agaaaugaaaaaauauau

SEQ ID NO: 1714870 - RNA, 14 nt, Human
agaaagaaaaucag

SEQ ID NO: 1714871 - RNA, 20 nt, Human
agaaauaucugaaaauguau

SEQ ID NO: 1714872 - RNA, 19 nt, Human
agaaauaucugaaaaugua

SEQ ID NO: 1714873 - RNA, 14 nt, Human
agaaauauaauuga

SEQ ID NO: 1714874 - RNA, 17 nt, Human
agaaaugaaaaaauaua

SEQ ID NO: 1714875 - RNA, 15 nt, Human
agaaaucuaaaaaac

SEQ ID NO: 1714876 - RNA, 12 nt, Human
agaaaucuaaaa

SEQ ID NO: 1714877 - RNA, 23 nt, Human
ucugagacucgcgacaaugcaaa

SEQ ID NO: 1714878 - RNA, 14 nt, Human
ucugaccuuaaaug

SEQ ID NO: 1714879 - RNA, 19 nt, Human
ucugcacuccccugcuggg

SEQ ID NO: 1714880 - RNA, 18 nt, Human
ucugcacuccccugcugg

SEQ ID NO: 1714881 - RNA, 18 nt, Human
ucugauucccaagcucug

SEQ ID NO: 1714882 - RNA, 23 nt, Human
ucugaugcaagcaagaaacacug

SEQ ID NO: 1714883 - RNA, 22 nt, Human
ucugcacuccccugcugggugu

SEQ ID NO: 1714884 - RNA, 18 nt, Human
ucugcagcaauaaagcag

SEQ ID NO: 1714885 - RNA, 20 nt, Human
ucugcacuccccugcugggu

SEQ ID NO: 1714886 - RNA, 17 nt, Human
ucugcaggucccuaaua

SEQ ID NO: 1714887 - RNA, 16 nt, Human
ucugcaggucccuaau

SEQ ID NO: 1714888 - RNA, 15 nt, Human
ucugcaggucccuaa

SEQ ID NO: 1714889 - RNA, 17 nt, Human
agaaauuuauaaacuuu

SEQ ID NO: 1714890 - RNA, 16 nt, Human
agaaauuuauaaacuu

SEQ ID NO: 1714891 - RNA, 22 nt, Human
agaaauuaugugccagauuuau

SEQ ID NO: 1714892 - RNA, 21 nt, Human
agaaauuaugugccagauuua

SEQ ID NO: 1714893 - RNA, 13 nt, Human
agaaauuaugugc

SEQ ID NO: 1714894 - RNA, 18 nt, Human
ucugcaggucccuaauaa

SEQ ID NO: 1714895 - RNA, 12 nt, Human
ucucuggccuuc

SEQ ID NO: 1714896 - RNA, 19 nt, Human
ucucuggaauuugaaacac

SEQ ID NO: 1714897 - RNA, 15 nt, Human
ucucuggaauuugaa

SEQ ID NO: 1714898 - RNA, 17 nt, Human
ucucugcccuccaagac

SEQ ID NO: 1714899 - RNA, 16 nt, Human
ucucugcccuccaaga

SEQ ID NO: 1714900 - RNA, 15 nt, Human
ucucugcccuccaag

SEQ ID NO: 1714901 - RNA, 11 nt, Human
ucucugcccuc

SEQ ID NO: 1714902 - RNA, 14 nt, Human
ucucuccuguaccu

SEQ ID NO: 1714903 - RNA, 16 nt, Human
ucucuccuguaccucu

SEQ ID NO: 1714904 - RNA, 17 nt, Human
ucucuccuguaccucuu

SEQ ID NO: 1714905 - RNA, 19 nt, Human
ucucuccagccccuggaug

SEQ ID NO: 1714906 - RNA, 18 nt, Human
ucucuccagccccuggau

SEQ ID NO: 1714907 - RNA, 17 nt, Human
ucucuccagccccugga

SEQ ID NO: 1714908 - RNA, 15 nt, Human
acuuugaccucugca

SEQ ID NO: 1714909 - RNA, 16 nt, Human
acuuugaccucugcag

SEQ ID NO: 1714910 - RNA, 18 nt, Human
acuuugaccucugcagca

SEQ ID NO: 1714911 - RNA, 15 nt, Human
ucucucacuccuuga

SEQ ID NO: 1714912 - RNA, 13 nt, Human
ucucucacuccuu

SEQ ID NO: 1714913 - RNA, 21 nt, Human
ucucuggccuucggccuccau

SEQ ID NO: 1714914 - RNA, 22 nt, Human
ucucuggccuucggccuccauc

SEQ ID NO: 1714915 - RNA, 23 nt, Human
ucucuggccuucggccuccaucc

SEQ ID NO: 1714916 - RNA, 18 nt, Human
ucucuugagccugggagg

SEQ ID NO: 1714917 - RNA, 16 nt, Human
ucucuugauucauaau

SEQ ID NO: 1714918 - RNA, 14 nt, Human
ucucuugauucaua

SEQ ID NO: 1714919 - RNA, 21 nt, Human
ucucuuuaaugucacaggcag

SEQ ID NO: 1714920 - RNA, 20 nt, Human
ucucuuuaaugucacaggca

SEQ ID NO: 1714921 - RNA, 13 nt, Human
agaaaaagaaaaa

SEQ ID NO: 1714922 - RNA, 17 nt, Human
agaaaaaggaugcacag

SEQ ID NO: 1714923 - RNA, 19 nt, Human
agaaaacuuguauuaugug

SEQ ID NO: 1714924 - RNA, 18 nt, Human
agaaaaaggaugcacaga

SEQ ID NO: 1714925 - RNA, 21 nt, Human
agaaaacuuguauuaugugug

SEQ ID NO: 1714926 - RNA, 23 nt, Human
uccuuuagcgcccaguugggugg

SEQ ID NO: 1714927 - RNA, 22 nt, Human
uccuuuagcgcccaguugggug

SEQ ID NO: 1714928 - RNA, 16 nt, Human
ucgcgacaaugcaaac

SEQ ID NO: 1714929 - RNA, 13 nt, Human
ucgaggacaggga

SEQ ID NO: 1714930 - RNA, 19 nt, Human
ucgcgacaaugcaaaccau

SEQ ID NO: 1714931 - RNA, 18 nt, Human
ucgagcaugccuggaugg

SEQ ID NO: 1714932 - RNA, 16 nt, Human
ucgagcaugccuggau

SEQ ID NO: 1714933 - RNA, 18 nt, Human
ucgcuauugucaccaggg

SEQ ID NO: 1714934 - RNA, 23 nt, Human
ucgcuagcauuucccaacacaaa

SEQ ID NO: 1714935 - RNA, 19 nt, Human
uccuuuagcgcccaguugg

SEQ ID NO: 1714936 - RNA, 15 nt, Human
uccuuuagcgcccag

SEQ ID NO: 1714937 - RNA, 21 nt, Human
uccuuuaauuuuuuacuauuu

SEQ ID NO: 1714938 - RNA, 14 nt, Human
uccuuguguuacua

SEQ ID NO: 1714939 - RNA, 23 nt, Human
uccuuguguuacuaaguuuuuau

SEQ ID NO: 1714940 - RNA, 17 nt, Human
uccuucagugccuuaug

SEQ ID NO: 1714941 - RNA, 16 nt, Human
uccuucagugccuuau

SEQ ID NO: 1714942 - RNA, 15 nt, Human
uccuucagugccuua

SEQ ID NO: 1714943 - RNA, 16 nt, Human
acuggccucugcugau

SEQ ID NO: 1714944 - RNA, 14 nt, Human
acuggccucugcug

SEQ ID NO: 1714945 - RNA, 21 nt, Human
acugccuauuuuaauaaacac

SEQ ID NO: 1714946 - RNA, 16 nt, Human
acugccuauuuuaaua

SEQ ID NO: 1714947 - RNA, 15 nt, Human
acugccucuuccucc

SEQ ID NO: 1714948 - RNA, 14 nt, Human
acugccucuuccuc

SEQ ID NO: 1714949 - RNA, 22 nt, Human
uccuagaaauuccccacccuga

SEQ ID NO: 1714950 - RNA, 21 nt, Human
uccuagaaauuccccacccug

SEQ ID NO: 1714951 - RNA, 16 nt, Human
acugcauaugaaagga

SEQ ID NO: 1714952 - RNA, 15 nt, Human
acugcauguuuguga

SEQ ID NO: 1714953 - RNA, 16 nt, Human
acugcauguuugugau

SEQ ID NO: 1714954 - RNA, 23 nt, Human
acugcauccuccgccucccgggu

SEQ ID NO: 1714955 - RNA, 22 nt, Human
acugcaucaagaugugacaugu

SEQ ID NO: 1714956 - RNA, 20 nt, Human
acugcaucaagaugugacau

SEQ ID NO: 1714957 - RNA, 20 nt, Human
acugcauccuccgccucccg

SEQ ID NO: 1714958 - RNA, 17 nt, Human
acugcauccuccgccuc

SEQ ID NO: 1714959 - RNA, 14 nt, Human
acugcuuuuggucu

SEQ ID NO: 1714960 - RNA, 20 nt, Human
acugcuuaacuucacauauu

SEQ ID NO: 1714961 - RNA, 17 nt, Human
acugcuuccagugaggc

SEQ ID NO: 1714962 - RNA, 15 nt, Human
acuggauuaaacuua

SEQ ID NO: 1714963 - RNA, 18 nt, Human
acugcuuaacuucacaua

SEQ ID NO: 1714964 - RNA, 15 nt, Human
acugcuggcugccuu

SEQ ID NO: 1714965 - RNA, 14 nt, Human
acugcuggcugccu

SEQ ID NO: 1714966 - RNA, 12 nt, Human
ucgggcaugaca

SEQ ID NO: 1714967 - RNA, 11 nt, Human
ucgggcaugac

SEQ ID NO: 1714968 - RNA, 21 nt, Human
ucgggaggucgaggcaggagg

SEQ ID NO: 1714969 - RNA, 19 nt, Human
ucgggaggucgaggcagga

SEQ ID NO: 1714970 - RNA, 17 nt, Human
ucgggaggucgaggcag

SEQ ID NO: 1714971 - RNA, 18 nt, Human
ucggcucacugcauccuc

SEQ ID NO: 1714972 - RNA, 13 nt, Human
ucguaaaauuaag

SEQ ID NO: 1714973 - RNA, 16 nt, Human
ucguaaaauuaagaaa

SEQ ID NO: 1714974 - RNA, 22 nt, Human
ucguuuucaaaauuguuacaaa

SEQ ID NO: 1714975 - RNA, 17 nt, Human
ucguuugaaucacagua

SEQ ID NO: 1714976 - RNA, 17 nt, Human
acuguccuacccacccu

SEQ ID NO: 1714977 - RNA, 23 nt, Human
acuguccuacccacccuccuuuc

SEQ ID NO: 1714978 - RNA, 18 nt, Human
acuguccuacccacccuc

SEQ ID NO: 1714979 - RNA, 16 nt, Human
acugggagaaaugaaa

SEQ ID NO: 1714980 - RNA, 12 nt, Human
acugugugcuca

SEQ ID NO: 1714981 - RNA, 21 nt, Human
acugugugcucaggagcccug

SEQ ID NO: 1714982 - RNA, 20 nt, Human
acugugugcucaggagcccu

SEQ ID NO: 1714983 - RNA, 19 nt, Human
acugugugcucaggagccc

SEQ ID NO: 1714984 - RNA, 15 nt, Human
acugugugcucagga

SEQ ID NO: 1714985 - RNA, 16 nt, Human
acuuagaaauugcauu

SEQ ID NO: 1714986 - RNA, 14 nt, Human
acuucagcucuguu

SEQ ID NO: 1714987 - RNA, 13 nt, Human
acuuaaucuaaau

SEQ ID NO: 1714988 - RNA, 15 nt, Human
acuuaaucuaaaugg

SEQ ID NO: 1714989 - RNA, 16 nt, Human
acuuaaucuaaaugga

SEQ ID NO: 1714990 - RNA, 18 nt, Human
acuguugcccaggcuggc

SEQ ID NO: 1714991 - RNA, 17 nt, Human
acuguugcccaggcugg

SEQ ID NO: 1714992 - RNA, 14 nt, Human
acuguugcccaggc

SEQ ID NO: 1714993 - RNA, 13 nt, Human
acuguugcccagg

SEQ ID NO: 1714994 - RNA, 12 nt, Human
acuguugcccag

SEQ ID NO: 1714995 - RNA, 17 nt, Human
acuuaaauaaugugaaa

SEQ ID NO: 1714996 - RNA, 18 nt, Human
acuuaaauaaugugaaac

SEQ ID NO: 1714997 - RNA, 16 nt, Human
acuuaaauaaugugaa

SEQ ID NO: 1714998 - RNA, 15 nt, Human
acuuaaauaauguga

SEQ ID NO: 1714999 - RNA, 20 nt, Human
ucuaaagccauuguaguccu

SEQ ID NO: 1715000 - RNA, 14 nt, Human
ucuaaagcugccag

SEQ ID NO: 1715001 - RNA, 13 nt, Human
ucuaaagcugcca

SEQ ID NO: 1715002 - RNA, 15 nt, Human
ucuaaagcugccagc

SEQ ID NO: 1715003 - RNA, 16 nt, Human
ucuaaagcugccagcc

SEQ ID NO: 1715004 - RNA, 14 nt, Human
acuguucucugccc

SEQ ID NO: 1715005 - RNA, 20 nt, Human
acuguucucugcccuccaag

SEQ ID NO: 1715006 - RNA, 15 nt, Human
acuguucucugcccu

SEQ ID NO: 1715007 - RNA, 21 nt, Human
acuguucucugcccuccaaga

SEQ ID NO: 1715008 - RNA, 17 nt, Human
acuacucccccaggugg

SEQ ID NO: 1715009 - RNA, 21 nt, Human
acuacuagggaaaugccuuug

SEQ ID NO: 1715010 - RNA, 12 nt, Human
acucaccccagc

SEQ ID NO: 1715011 - RNA, 17 nt, Human
ucccgaguagcugggac

SEQ ID NO: 1715012 - RNA, 16 nt, Human
ucccgaguagcuggga

SEQ ID NO: 1715013 - RNA, 18 nt, Human
ucccgaguagcugggacu

SEQ ID NO: 1715014 - RNA, 20 nt, Human
ucccgaguagcugggacuac

SEQ ID NO: 1715015 - RNA, 20 nt, Human
ucccgaguagcugagauuau

SEQ ID NO: 1715016 - RNA, 15 nt, Human
ucccgaguagcuggg

SEQ ID NO: 1715017 - RNA, 20 nt, Human
ucccgaauagcugggacuac

SEQ ID NO: 1715018 - RNA, 17 nt, Human
ucccugaaggccccgcc

SEQ ID NO: 1715019 - RNA, 16 nt, Human
ucccugaaggccccgc

SEQ ID NO: 1715020 - RNA, 14 nt, Human
ucccucuuucccuc

SEQ ID NO: 1715021 - RNA, 20 nt, Human
ucccucuuucccucccuucc

SEQ ID NO: 1715022 - RNA, 18 nt, Human
ucccucuuucccucccuu

SEQ ID NO: 1715023 - RNA, 21 nt, Human
ucccucuuucccucccuuccu

SEQ ID NO: 1715024 - RNA, 15 nt, Human
ucccugaaggccccg

SEQ ID NO: 1715025 - RNA, 11 nt, Human
ucccugaaggc

SEQ ID NO: 1715026 - RNA, 22 nt, Human
ucccggcugcccuuucugggca

SEQ ID NO: 1715027 - RNA, 18 nt, Human
ucccggcugcccuuucug

SEQ ID NO: 1715028 - RNA, 15 nt, Human
ucccggcugcccuuu

SEQ ID NO: 1715029 - RNA, 14 nt, Human
ucccggcugcccuu

SEQ ID NO: 1715030 - RNA, 13 nt, Human
ucccggcugcccu

SEQ ID NO: 1715031 - RNA, 12 nt, Human
ucccuuuuccuu

SEQ ID NO: 1715032 - RNA, 14 nt, Human
ucccuuuuccauga

SEQ ID NO: 1715033 - RNA, 16 nt, Human
uccuagaaauucccca

SEQ ID NO: 1715034 - RNA, 14 nt, Human
uccuacuuccccuu

SEQ ID NO: 1715035 - RNA, 17 nt, Human
uccggucccugucccag

SEQ ID NO: 1715036 - RNA, 19 nt, Human
uccuaaauauauuuuaaga

SEQ ID NO: 1715037 - RNA, 12 nt, Human
ucccugucccag

SEQ ID NO: 1715038 - RNA, 15 nt, Human
ucccugguggcagcu

SEQ ID NO: 1715039 - RNA, 21 nt, Human
acuccugcaggcagccaggcc

SEQ ID NO: 1715040 - RNA, 17 nt, Human
ucccuuacgugaguccu

SEQ ID NO: 1715041 - RNA, 17 nt, Human
acuccagaauuucccaa

SEQ ID NO: 1715042 - RNA, 15 nt, Human
acuccagaauuuccc

SEQ ID NO: 1715043 - RNA, 15 nt, Human
acucauugaccugag

SEQ ID NO: 1715044 - RNA, 14 nt, Human
acucauugaccuga

SEQ ID NO: 1715045 - RNA, 15 nt, Human
acucauucuucugua

SEQ ID NO: 1715046 - RNA, 13 nt, Human
acuccagccuggg

SEQ ID NO: 1715047 - RNA, 12 nt, Human
acuccagccugg

SEQ ID NO: 1715048 - RNA, 23 nt, Human
acuccagaauuucccaaagcagu

SEQ ID NO: 1715049 - RNA, 17 nt, Human
acuccugcaggcagcca

SEQ ID NO: 1715050 - RNA, 15 nt, Human
acuccugaccucaag

SEQ ID NO: 1715051 - RNA, 19 nt, Human
acuccugcaggcagccagg

SEQ ID NO: 1715052 - RNA, 18 nt, Human
acuccugcaggcagccag

SEQ ID NO: 1715053 - RNA, 13 nt, Human
acuccucugucca

SEQ ID NO: 1715054 - RNA, 14 nt, Human
acuccucuguccag

SEQ ID NO: 1715055 - RNA, 13 nt, Human
uccaugaagaugu

SEQ ID NO: 1715056 - RNA, 21 nt, Human
uccaugaagauguagaggaga

SEQ ID NO: 1715057 - RNA, 20 nt, Human
uccauccugaggcuccacuu

SEQ ID NO: 1715058 - RNA, 21 nt, Human
uccauccugaggcuccacuug

SEQ ID NO: 1715059 - RNA, 23 nt, Human
acgccagauucuuuccugaggcu

SEQ ID NO: 1715060 - RNA, 22 nt, Human
acgccagauucuuuccugaggc

SEQ ID NO: 1715061 - RNA, 16 nt, Human
uccaucuaaacugccc

SEQ ID NO: 1715062 - RNA, 18 nt, Human
uccaucuaaacugccccc

SEQ ID NO: 1715063 - RNA, 18 nt, Human
ucccaaacccuucagugc

SEQ ID NO: 1715064 - RNA, 16 nt, Human
ucccaaagcagugcau

SEQ ID NO: 1715065 - RNA, 18 nt, Human
ucccaaagcagugcaugc

SEQ ID NO: 1715066 - RNA, 17 nt, Human
ucccaaagcagugcaug

SEQ ID NO: 1715067 - RNA, 21 nt, Human
ucccaaagcagugcaugcugu

SEQ ID NO: 1715068 - RNA, 14 nt, Human
ucccaaagugcugg

SEQ ID NO: 1715069 - RNA, 13 nt, Human
ucccaaagugcug

SEQ ID NO: 1715070 - RNA, 20 nt, Human
acgggaggguaaggcugugg

SEQ ID NO: 1715071 - RNA, 13 nt, Human
ucccacagcgcug

SEQ ID NO: 1715072 - RNA, 20 nt, Human
ucccaccccacacacgccag

SEQ ID NO: 1715073 - RNA, 15 nt, Human
ucccaccccacacac

SEQ ID NO: 1715074 - RNA, 16 nt, Human
ucccacaaaggagagc

SEQ ID NO: 1715075 - RNA, 23 nt, Human
acguggcugcuucaaggauccug

SEQ ID NO: 1715076 - RNA, 17 nt, Human
acgguuuuacugcagcu

SEQ ID NO: 1715077 - RNA, 15 nt, Human
acgguuuuacugcag

SEQ ID NO: 1715078 - RNA, 22 nt, Human
acguauaaaagccuguuuaaga

SEQ ID NO: 1715079 - RNA, 22 nt, Human
ucccauaugccugggcagaagg

SEQ ID NO: 1715080 - RNA, 15 nt, Human
ucccaucacccgcua

SEQ ID NO: 1715081 - RNA, 21 nt, Human
uccccaccgcagacaggacca

SEQ ID NO: 1715082 - RNA, 18 nt, Human
uccccaccgcagacagga

SEQ ID NO: 1715083 - RNA, 17 nt, Human
uccccaccgcagacagg

SEQ ID NO: 1715084 - RNA, 22 nt, Human
uccccaccgcagacaggaccag

SEQ ID NO: 1715085 - RNA, 12 nt, Human
uccccacccuga

SEQ ID NO: 1715086 - RNA, 17 nt, Human
uccccaugucucgacuc

SEQ ID NO: 1715087 - RNA, 15 nt, Human
acuacauucuguuaa

SEQ ID NO: 1715088 - RNA, 17 nt, Human
ucccagcugugcucugg

SEQ ID NO: 1715089 - RNA, 12 nt, Human
ucccagccccaa

SEQ ID NO: 1715090 - RNA, 15 nt, Human
acuacaguuuguuag

SEQ ID NO: 1715091 - RNA, 11 nt, Human
acuacauucug

SEQ ID NO: 1715092 - RNA, 12 nt, Human
acuacauucugu

SEQ ID NO: 1715093 - RNA, 13 nt, Human
acuacauucuguu

SEQ ID NO: 1715094 - RNA, 14 nt, Human
acuacauucuguua

SEQ ID NO: 1715095 - RNA, 12 nt, Human
acuaaccacgcu

SEQ ID NO: 1715096 - RNA, 11 nt, Human
acuacaggcac

SEQ ID NO: 1715097 - RNA, 13 nt, Human
acuacaguuuguu

SEQ ID NO: 1715098 - RNA, 14 nt, Human
acuacaguuuguua

SEQ ID NO: 1715099 - RNA, 15 nt, Human
acuacaggcacccac

SEQ ID NO: 1715100 - RNA, 19 nt, Human
acgccagauucuuuccuga

SEQ ID NO: 1715101 - RNA, 16 nt, Human
acgagcaggcuucuuc

SEQ ID NO: 1715102 - RNA, 14 nt, Human
acgagaaaacaaua

SEQ ID NO: 1715103 - RNA, 21 nt, Human
accuuuuuuauacauaaacaa

SEQ ID NO: 1715104 - RNA, 22 nt, Human
accuuuuuuauacauaaacaag

SEQ ID NO: 1715105 - RNA, 19 nt, Human
accuuuuuuauacauaaac

SEQ ID NO: 1715106 - RNA, 20 nt, Human
accuuuuuuauacauaaaca

SEQ ID NO: 1715107 - RNA, 21 nt, Human
uccaggcuguaucccaugagc

SEQ ID NO: 1715108 - RNA, 12 nt, Human
uccagccccugg

SEQ ID NO: 1715109 - RNA, 15 nt, Human
uccagagaguggcuc

SEQ ID NO: 1715110 - RNA, 17 nt, Human
uccagagaguggcuccu

SEQ ID NO: 1715111 - RNA, 16 nt, Human
uccagagaguggcucc

SEQ ID NO: 1715112 - RNA, 13 nt, Human
uccagccccugga

SEQ ID NO: 1715113 - RNA, 14 nt, Human
uccagccccuggau

SEQ ID NO: 1715114 - RNA, 14 nt, Human
uccaggcuguaucc

SEQ ID NO: 1715115 - RNA, 20 nt, Human
accuuuugagugccuuacac

SEQ ID NO: 1715116 - RNA, 17 nt, Human
accuuuugagugccuua

SEQ ID NO: 1715117 - RNA, 14 nt, Human
accuuuugagugcc

SEQ ID NO: 1715118 - RNA, 19 nt, Human
uccaccuucccaugcccug

SEQ ID NO: 1715119 - RNA, 18 nt, Human
uccaccuucccaugcccu

SEQ ID NO: 1715120 - RNA, 16 nt, Human
uccaccuucccaugcc

SEQ ID NO: 1715121 - RNA, 17 nt, Human
uccacucaggucuguuu

SEQ ID NO: 1715122 - RNA, 13 nt, Human
uccagacacaugu

SEQ ID NO: 1715123 - RNA, 22 nt, Human
uccagaauuucccaaagcagug

SEQ ID NO: 1715124 - RNA, 20 nt, Human
uccagaauuucccaaagcag

SEQ ID NO: 1715125 - RNA, 22 nt, Human
uccacugccuucgauacaccgg

SEQ ID NO: 1715126 - RNA, 15 nt, Human
uccacugccuucgau

SEQ ID NO: 1715127 - RNA, 13 nt, Human
uccacugccuucg

SEQ ID NO: 1715128 - RNA, 16 nt, Human
uccagaauuucccaaa

SEQ ID NO: 1715129 - RNA, 18 nt, Human
uccagacccggcugcgug

SEQ ID NO: 1715130 - RNA, 15 nt, Human
uccagacccggcugc

SEQ ID NO: 1715131 - RNA, 19 nt, Human
uccagacccggcugcgugg

SEQ ID NO: 1715132 - RNA, 14 nt, Human
uccagagacuggga

SEQ ID NO: 1715133 - RNA, 17 nt, Human
accuggccucugcacuc

SEQ ID NO: 1715134 - RNA, 16 nt, Human
accuggccucugcacu

SEQ ID NO: 1715135 - RNA, 14 nt, Human
accuggccucugca

SEQ ID NO: 1715136 - RNA, 17 nt, Human
uccacccaggagccccg

SEQ ID NO: 1715137 - RNA, 15 nt, Human
uccacccaggagccc

SEQ ID NO: 1715138 - RNA, 14 nt, Human
uccacccaggagcc

SEQ ID NO: 1715139 - RNA, 12 nt, Human
uccacccaggag

SEQ ID NO: 1715140 - RNA, 19 nt, Human
uccacccaccucagccucc

SEQ ID NO: 1715141 - RNA, 18 nt, Human
uccacccaccucagccuc

SEQ ID NO: 1715142 - RNA, 20 nt, Human
accuuagacagucccugcca

SEQ ID NO: 1715143 - RNA, 19 nt, Human
accuuagacagucccugcc

SEQ ID NO: 1715144 - RNA, 18 nt, Human
accuuagacagucccugc

SEQ ID NO: 1715145 - RNA, 19 nt, Human
accuguuucugcagccacu

SEQ ID NO: 1715146 - RNA, 21 nt, Human
accuggucacaggacucugcc

SEQ ID NO: 1715147 - RNA, 20 nt, Human
accuggccucugcacucccc

SEQ ID NO: 1715148 - RNA, 18 nt, Human
accuggccucugcacucc

SEQ ID NO: 1715149 - RNA, 23 nt, Human
accuggccucugcacuccccugc

SEQ ID NO: 1715150 - RNA, 21 nt, Human
uccaagcuggucccacucagu

SEQ ID NO: 1715151 - RNA, 19 nt, Human
uccaaguccacaguggaac

SEQ ID NO: 1715152 - RNA, 18 nt, Human
uccaaucccaccaacccu

SEQ ID NO: 1715153 - RNA, 20 nt, Human
uccaagcuggucccacucag

SEQ ID NO: 1715154 - RNA, 16 nt, Human
uccaagcuggucccac

SEQ ID NO: 1715155 - RNA, 12 nt, Human
uccaagaagccc

SEQ ID NO: 1715156 - RNA, 15 nt, Human
accugccaggaagcc

SEQ ID NO: 1715157 - RNA, 14 nt, Human
accugccaggaagc

SEQ ID NO: 1715158 - RNA, 12 nt, Human
accugccaggaa

SEQ ID NO: 1715159 - RNA, 14 nt, Human
uccaacccucauca

SEQ ID NO: 1715160 - RNA, 17 nt, Human
uccaacccucaucacca

SEQ ID NO: 1715161 - RNA, 16 nt, Human
uccaacccucaucacc

SEQ ID NO: 1715162 - RNA, 23 nt, Human
uccaacccucaucaccaacgucu

SEQ ID NO: 1715163 - RNA, 16 nt, Human
accuacaguguacagu

SEQ ID NO: 1715164 - RNA, 17 nt, Human
accuacaguguacaguc

SEQ ID NO: 1715165 - RNA, 18 nt, Human
accuacaguguacagucu

SEQ ID NO: 1715166 - RNA, 20 nt, Human
accuacaguguacagucuug

SEQ ID NO: 1715167 - RNA, 15 nt, Human
accuacaguguacag

SEQ ID NO: 1715168 - RNA, 20 nt, Human
accuaccaccacgcccggcu

SEQ ID NO: 1715169 - RNA, 16 nt, Human
accuaccaccacgccc

SEQ ID NO: 1715170 - RNA, 15 nt, Human
ucaggaagcucaggg

SEQ ID NO: 1715171 - RNA, 14 nt, Human
ucaggaagcucagg

SEQ ID NO: 1715172 - RNA, 13 nt, Human
ucaggaagcucag

SEQ ID NO: 1715173 - RNA, 20 nt, Human
accuaacaacauuguagccu

SEQ ID NO: 1715174 - RNA, 22 nt, Human
ucauccuucuggaauaaggaga

SEQ ID NO: 1715175 - RNA, 14 nt, Human
ucaucuaggauuuu

SEQ ID NO: 1715176 - RNA, 18 nt, Human
ucaucuagguaaauuaca

SEQ ID NO: 1715177 - RNA, 19 nt, Human
ucauccuccucagaucuuc

SEQ ID NO: 1715178 - RNA, 13 nt, Human
ucauccuccucag

SEQ ID NO: 1715179 - RNA, 18 nt, Human
ucauccucauacccaccc

SEQ ID NO: 1715180 - RNA, 14 nt, Human
ucauccuucuggaa

SEQ ID NO: 1715181 - RNA, 12 nt, Human
accuccugccuc

SEQ ID NO: 1715182 - RNA, 13 nt, Human
accuccugccucg

SEQ ID NO: 1715183 - RNA, 23 nt, Human
accuccugccucgaacuggcugc

SEQ ID NO: 1715184 - RNA, 15 nt, Human
ucauccuaagcuauu

SEQ ID NO: 1715185 - RNA, 13 nt, Human
ucauugaaaucuu

SEQ ID NO: 1715186 - RNA, 12 nt, Human
ucauugaaaucu

SEQ ID NO: 1715187 - RNA, 12 nt, Human
ucauucuucugu

SEQ ID NO: 1715188 - RNA, 19 nt, Human
accucggugccuuccucuu

SEQ ID NO: 1715189 - RNA, 13 nt, Human
accuccugggcua

SEQ ID NO: 1715190 - RNA, 15 nt, Human
ucauugaccugaggc

SEQ ID NO: 1715191 - RNA, 14 nt, Human
ucauugaccugagg

SEQ ID NO: 1715192 - RNA, 12 nt, Human
ucauugaccuga

SEQ ID NO: 1715193 - RNA, 22 nt, Human
ucauugaaaucuuuuugcuuug

SEQ ID NO: 1715194 - RNA, 19 nt, Human
ucauugaccugaggcccuu

SEQ ID NO: 1715195 - RNA, 18 nt, Human
accugauugugucucuug

SEQ ID NO: 1715196 - RNA, 17 nt, Human
accugauugugucucuu

SEQ ID NO: 1715197 - RNA, 15 nt, Human
accugauugugucuc

SEQ ID NO: 1715198 - RNA, 21 nt, Human
accugaggcccuucucuccag

SEQ ID NO: 1715199 - RNA, 20 nt, Human
accugaggcccuucucucca

SEQ ID NO: 1715200 - RNA, 16 nt, Human
accugaggcccuucuc

SEQ ID NO: 1715201 - RNA, 15 nt, Human
accugaggcccuucu

SEQ ID NO: 1715202 - RNA, 22 nt, Human
accugaggcccuucucuccagc

SEQ ID NO: 1715203 - RNA, 14 nt, Human
accugaggcccuuc

SEQ ID NO: 1715204 - RNA, 22 nt, Human
uauuucccucaccuuucccauc

SEQ ID NO: 1715205 - RNA, 23 nt, Human
uauuuccuauauuguuuucagug

SEQ ID NO: 1715206 - RNA, 20 nt, Human
acaguugaaaaacagcugag

SEQ ID NO: 1715207 - RNA, 16 nt, Human
acaguugaaaaacagc

SEQ ID NO: 1715208 - RNA, 15 nt, Human
acaguugaaaaacag

SEQ ID NO: 1715209 - RNA, 13 nt, Human
acauacuaaccag

SEQ ID NO: 1715210 - RNA, 21 nt, Human
acauacuaaccagcagaaaug

SEQ ID NO: 1715211 - RNA, 22 nt, Human
acauacuaaccagcagaaaugc

SEQ ID NO: 1715212 - RNA, 13 nt, Human
acauacucccauc

SEQ ID NO: 1715213 - RNA, 14 nt, Human
acauacucugcuua

SEQ ID NO: 1715214 - RNA, 17 nt, Human
acauacucccaucugug

SEQ ID NO: 1715215 - RNA, 15 nt, Human
acaguuuuuauugcu

SEQ ID NO: 1715216 - RNA, 16 nt, Human
acaguuuguuaguaug

SEQ ID NO: 1715217 - RNA, 20 nt, Human
acaguuuguuaguaugaggc

SEQ ID NO: 1715218 - RNA, 21 nt, Human
acauagugaugguuccccugu

SEQ ID NO: 1715219 - RNA, 16 nt, Human
acauagugaugguucc

SEQ ID NO: 1715220 - RNA, 14 nt, Human
acauagaauuaaca

SEQ ID NO: 1715221 - RNA, 18 nt, Human
acauagaauuaacacaug

SEQ ID NO: 1715222 - RNA, 21 nt, Human
acauagcuuacaagccagcug

SEQ ID NO: 1715223 - RNA, 14 nt, Human
acauauugauuucc

SEQ ID NO: 1715224 - RNA, 16 nt, Human
acauauugauuuccgu

SEQ ID NO: 1715225 - RNA, 18 nt, Human
acauauugauuuccguua

SEQ ID NO: 1715226 - RNA, 22 nt, Human
acauauugauuuccguuaaaau

SEQ ID NO: 1715227 - RNA, 23 nt, Human
acauauugauuuccguuaaaaua

SEQ ID NO: 1715228 - RNA, 13 nt, Human
acaucaacagaua

SEQ ID NO: 1715229 - RNA, 18 nt, Human
acaucaacaucuugguca

SEQ ID NO: 1715230 - RNA, 16 nt, Human
acaucaacaucuuggu

SEQ ID NO: 1715231 - RNA, 23 nt, Human
acaucucccuuuuccaugacugu

SEQ ID NO: 1715232 - RNA, 14 nt, Human
acaucuugcucugc

SEQ ID NO: 1715233 - RNA, 13 nt, Human
acaucuugcucug

SEQ ID NO: 1715234 - RNA, 19 nt, Human
acaucuugcucugcugaca

SEQ ID NO: 1715235 - RNA, 18 nt, Human
acaucuugcucugcugac

SEQ ID NO: 1715236 - RNA, 21 nt, Human
acaucuugcucugcugacaga

SEQ ID NO: 1715237 - RNA, 17 nt, Human
acaugaaaacacauuuu

SEQ ID NO: 1715238 - RNA, 18 nt, Human
acaugaaaacacauuuuu

SEQ ID NO: 1715239 - RNA, 19 nt, Human
acaugaaaacacauuuuuc

SEQ ID NO: 1715240 - RNA, 23 nt, Human
ucaaguauuauaccuuuuuuaga

SEQ ID NO: 1715241 - RNA, 16 nt, Human
ucaaguauuauaccuu

SEQ ID NO: 1715242 - RNA, 21 nt, Human
ucaaguauuauaccuuuuuua

SEQ ID NO: 1715243 - RNA, 15 nt, Human
ucaaguauuauaccu

SEQ ID NO: 1715244 - RNA, 11 nt, Human
ucaaguauuau

SEQ ID NO: 1715245 - RNA, 15 nt, Human
ucaagacuuccagag

SEQ ID NO: 1715246 - RNA, 19 nt, Human
ucaagaauagcauuguaaa

SEQ ID NO: 1715247 - RNA, 15 nt, Human
acauucuguuaauca

SEQ ID NO: 1715248 - RNA, 15 nt, Human
ucaaauuucuaaauc

SEQ ID NO: 1715249 - RNA, 16 nt, Human
ucaaauuucuaaaucu

SEQ ID NO: 1715250 - RNA, 12 nt, Human
acauucuguuaa

SEQ ID NO: 1715251 - RNA, 16 nt, Human
ucaacagguuuuccug

SEQ ID NO: 1715252 - RNA, 17 nt, Human
ucaaauuucuaaaucuc

SEQ ID NO: 1715253 - RNA, 21 nt, Human
acauguccaagaagcccagga

SEQ ID NO: 1715254 - RNA, 22 nt, Human
acauuagcaguuugcuuuguau

SEQ ID NO: 1715255 - RNA, 18 nt, Human
acauuagcaguuugcuuu

SEQ ID NO: 1715256 - RNA, 18 nt, Human
ucaaauaacuaaaaggua

SEQ ID NO: 1715257 - RNA, 21 nt, Human
ucaaauacauuuaaaacauua

SEQ ID NO: 1715258 - RNA, 22 nt, Human
ucaaauacauuuaaaacauuaa

SEQ ID NO: 1715259 - RNA, 19 nt, Human
acaugauccugcaauucca

SEQ ID NO: 1715260 - RNA, 19 nt, Human
acaugagcaucaggccagg

SEQ ID NO: 1715261 - RNA, 18 nt, Human
acaugagcaucaggccag

SEQ ID NO: 1715262 - RNA, 17 nt, Human
acaugagcaucaggcca

SEQ ID NO: 1715263 - RNA, 17 nt, Human
acaugaucuucuuuaua

SEQ ID NO: 1715264 - RNA, 15 nt, Human
acaugaucuucuuua

SEQ ID NO: 1715265 - RNA, 22 nt, Human
acaugcuacacacugcauguuu

SEQ ID NO: 1715266 - RNA, 20 nt, Human
acaugagcaucaggccaggc

SEQ ID NO: 1715267 - RNA, 14 nt, Human
ucaaagcugaaaug

SEQ ID NO: 1715268 - RNA, 19 nt, Human
ucaaaauuguuacaaauug

SEQ ID NO: 1715269 - RNA, 16 nt, Human
ucaaaauuguuacaaa

SEQ ID NO: 1715270 - RNA, 13 nt, Human
ucaaaaguuuguu

SEQ ID NO: 1715271 - RNA, 14 nt, Human
ucaaaaguuuguuu

SEQ ID NO: 1715272 - RNA, 18 nt, Human
ucaaaagaaagaaaauca

SEQ ID NO: 1715273 - RNA, 23 nt, Human
accauuucuugagguaaaagcau

SEQ ID NO: 1715274 - RNA, 11 nt, Human
acccacugcuc

SEQ ID NO: 1715275 - RNA, 10 nt, Human
acccacugcu

SEQ ID NO: 1715276 - RNA, 11 nt, Human
acccacugcuu

SEQ ID NO: 1715277 - RNA, 15 nt, Human
acccacugcucuggu

SEQ ID NO: 1715278 - RNA, 14 nt, Human
acccacugcucugg

SEQ ID NO: 1715279 - RNA, 13 nt, Human
acccacugcucug

SEQ ID NO: 1715280 - RNA, 21 nt, Human
acccagauaaagguucaugca

SEQ ID NO: 1715281 - RNA, 22 nt, Human
accauggucggaaaacaugcua

SEQ ID NO: 1715282 - RNA, 23 nt, Human
ucacucuuauugcccacgcugga

SEQ ID NO: 1715283 - RNA, 21 nt, Human
ucacucuuauugcccacgcug

SEQ ID NO: 1715284 - RNA, 15 nt, Human
ucacuccuaccuggu

SEQ ID NO: 1715285 - RNA, 22 nt, Human
ucagaaguuucugccgcagccc

SEQ ID NO: 1715286 - RNA, 19 nt, Human
ucagaaguuucugccgcag

SEQ ID NO: 1715287 - RNA, 19 nt, Human
ucagaaguuucucagcucc

SEQ ID NO: 1715288 - RNA, 14 nt, Human
ucagaagacacuga

SEQ ID NO: 1715289 - RNA, 18 nt, Human
ucagagccugcaguuauu

SEQ ID NO: 1715290 - RNA, 15 nt, Human
ucagagccugcaguu

SEQ ID NO: 1715291 - RNA, 14 nt, Human
ucagagccugcagu

SEQ ID NO: 1715292 - RNA, 13 nt, Human
ucagagccugcag

SEQ ID NO: 1715293 - RNA, 12 nt, Human
ucagagccugca

SEQ ID NO: 1715294 - RNA, 23 nt, Human
ucagagagggugggagugggccc

SEQ ID NO: 1715295 - RNA, 21 nt, Human
ucagagagggugggagugggc

SEQ ID NO: 1715296 - RNA, 16 nt, Human
ucagagagggugggag

SEQ ID NO: 1715297 - RNA, 20 nt, Human
ucagagacuccugcaggcag

SEQ ID NO: 1715298 - RNA, 17 nt, Human
ucagagacuccugcagg

SEQ ID NO: 1715299 - RNA, 21 nt, Human
ucagagacuccugcaggcagc

SEQ ID NO: 1715300 - RNA, 19 nt, Human
ucagaaucucaaauaacua

SEQ ID NO: 1715301 - RNA, 18 nt, Human
ucagaaucucaaauaacu

SEQ ID NO: 1715302 - RNA, 17 nt, Human
ucagaaucucucuucuu

SEQ ID NO: 1715303 - RNA, 23 nt, Human
accccagcuggggccaggcuggg

SEQ ID NO: 1715304 - RNA, 24 nt, Human
acccagcgagcccugguggcagug

SEQ ID NO: 1715305 - RNA, 22 nt, Human
ucagccaagaauucuuaaauau

SEQ ID NO: 1715306 - RNA, 23 nt, Human
ucagccguguaaccauggaccca

SEQ ID NO: 1715307 - RNA, 23 nt, Human
acccagcgagcccugguggcagu

SEQ ID NO: 1715308 - RNA, 19 nt, Human
acccagcgagcccuggugg

SEQ ID NO: 1715309 - RNA, 14 nt, Human
ucagcggggacagc

SEQ ID NO: 1715310 - RNA, 16 nt, Human
ucagcucacugcaacc

SEQ ID NO: 1715311 - RNA, 13 nt, Human
ucagcucacugca

SEQ ID NO: 1715312 - RNA, 20 nt, Human
ucagcuuguaaauagcucag

SEQ ID NO: 1715313 - RNA, 12 nt, Human
ucagcucaugga

SEQ ID NO: 1715314 - RNA, 15 nt, Human
accccuucgcuccug

SEQ ID NO: 1715315 - RNA, 14 nt, Human
accccuucgcuccu

SEQ ID NO: 1715316 - RNA, 16 nt, Human
accccuucgcuccugu

SEQ ID NO: 1715317 - RNA, 12 nt, Human
acccccacccaa

SEQ ID NO: 1715318 - RNA, 15 nt, Human
accccuguaggccuc

SEQ ID NO: 1715319 - RNA, 16 nt, Human
accccuguaggccuca

SEQ ID NO: 1715320 - RNA, 17 nt, Human
accccuguaggccucag

SEQ ID NO: 1715321 - RNA, 20 nt, Human
ucacuauguugcccaggcag

SEQ ID NO: 1715322 - RNA, 19 nt, Human
ucacuauguugcccaggca

SEQ ID NO: 1715323 - RNA, 18 nt, Human
ucacuauguugcccaggc

SEQ ID NO: 1715324 - RNA, 14 nt, Human
accagggacugagg

SEQ ID NO: 1715325 - RNA, 17 nt, Human
accagagcccaccuugg

SEQ ID NO: 1715326 - RNA, 21 nt, Human
accagccuccaugcugccucc

SEQ ID NO: 1715327 - RNA, 20 nt, Human
accagccuccaugcugccuc

SEQ ID NO: 1715328 - RNA, 19 nt, Human
accagccuccaugcugccu

SEQ ID NO: 1715329 - RNA, 14 nt, Human
accagccuccaugc

SEQ ID NO: 1715330 - RNA, 16 nt, Human
ucaccugaagacucau

SEQ ID NO: 1715331 - RNA, 15 nt, Human
ucaccucucccuugg

SEQ ID NO: 1715332 - RNA, 15 nt, Human
ucaccugccccucaa

SEQ ID NO: 1715333 - RNA, 13 nt, Human
ucaccugccccuc

SEQ ID NO: 1715334 - RNA, 15 nt, Human
accacuuuuguucuu

SEQ ID NO: 1715335 - RNA, 16 nt, Human
accacuuuuguucuug

SEQ ID NO: 1715336 - RNA, 21 nt, Human
accacuuuuguucuugguuug

SEQ ID NO: 1715337 - RNA, 22 nt, Human
ucaccccggccaccugcggugc

SEQ ID NO: 1715338 - RNA, 21 nt, Human
accacugcacuccagccuggg

SEQ ID NO: 1715339 - RNA, 23 nt, Human
accacugcucugaugaagaggag

SEQ ID NO: 1715340 - RNA, 17 nt, Human
accacugcucugaugaa

SEQ ID NO: 1715341 - RNA, 15 nt, Human
accacugcucugaug

SEQ ID NO: 1715342 - RNA, 20 nt, Human
accacugcacuccagccugg

SEQ ID NO: 1715343 - RNA, 17 nt, Human
accacugcacuccagcc

SEQ ID NO: 1715344 - RNA, 18 nt, Human
ucaccccggccaccugcg

SEQ ID NO: 1715345 - RNA, 17 nt, Human
ucaccccggccaccugc

SEQ ID NO: 1715346 - RNA, 17 nt, Human
accagacaccuugacag

SEQ ID NO: 1715347 - RNA, 14 nt, Human
accagacaccuuga

SEQ ID NO: 1715348 - RNA, 16 nt, Human
accagagcccaccuug

SEQ ID NO: 1715349 - RNA, 14 nt, Human
accagagcccaccu

SEQ ID NO: 1715350 - RNA, 12 nt, Human
accagagcccac

SEQ ID NO: 1715351 - RNA, 22 nt, Human
accacuuuuguucuugguuugu

SEQ ID NO: 1715352 - RNA, 14 nt, Human
accacacuccagcu

SEQ ID NO: 1715353 - RNA, 15 nt, Human
ucaauucuugccaaa

SEQ ID NO: 1715354 - RNA, 15 nt, Human
accaauguucucucu

SEQ ID NO: 1715355 - RNA, 18 nt, Human
accaauauuguacaguuu

SEQ ID NO: 1715356 - RNA, 19 nt, Human
accaauauuguacaguuuu

SEQ ID NO: 1715357 - RNA, 15 nt, Human
accaauauuguacag

SEQ ID NO: 1715358 - RNA, 16 nt, Human
accaauauuguacagu

SEQ ID NO: 1715359 - RNA, 17 nt, Human
accaauauuguacaguu

SEQ ID NO: 1715360 - RNA, 22 nt, Human
accaacauacucccaucuguga

SEQ ID NO: 1715361 - RNA, 21 nt, Human
accaacauacucccaucugug

SEQ ID NO: 1715362 - RNA, 19 nt, Human
accaacauacucccaucug

SEQ ID NO: 1715363 - RNA, 20 nt, Human
ucaagugauucucaugccuc

SEQ ID NO: 1715364 - RNA, 23 nt, Human
ucaagugaaaaaggaggaagaga

SEQ ID NO: 1715365 - RNA, 17 nt, Human
ucaagugauucucaugc

SEQ ID NO: 1715366 - RNA, 15 nt, Human
ucaagugaaaaagga

SEQ ID NO: 1715367 - RNA, 22 nt, Human
ucaaguccucuuuucugagagg

SEQ ID NO: 1715368 - RNA, 15 nt, Human
ucacaguucucuccu

SEQ ID NO: 1715369 - RNA, 15 nt, Human
ucacauaucugucau

SEQ ID NO: 1715370 - RNA, 12 nt, Human
ucacauaucugu

SEQ ID NO: 1715371 - RNA, 22 nt, Human
ucacacgucuggcuucacagau

SEQ ID NO: 1715372 - RNA, 16 nt, Human
ucacaacaaccugguc

SEQ ID NO: 1715373 - RNA, 15 nt, Human
ucaccccggccaccu

SEQ ID NO: 1715374 - RNA, 20 nt, Human
ucaccccagccccaaaacuc

SEQ ID NO: 1715375 - RNA, 14 nt, Human
ucaccccagcccca

SEQ ID NO: 1715376 - RNA, 13 nt, Human
ucaccccagcccc

SEQ ID NO: 1715377 - RNA, 10 nt, Human
uaguuuuugu

SEQ ID NO: 1715378 - RNA, 18 nt, Human
uaguucagguaacaggca

SEQ ID NO: 1715379 - RNA, 21 nt, Human
uauaaaaauaaaaaacacugg

SEQ ID NO: 1715380 - RNA, 20 nt, Human
uauaaaaauaaaaaacacug

SEQ ID NO: 1715381 - RNA, 14 nt, Human
uauaaaagacugac

SEQ ID NO: 1715382 - RNA, 22 nt, Human
acacauguccaagaagcccagg

SEQ ID NO: 1715383 - RNA, 21 nt, Human
acacauguccaagaagcccag

SEQ ID NO: 1715384 - RNA, 13 nt, Human
acacccagcccac

SEQ ID NO: 1715385 - RNA, 12 nt, Human
acacccagccca

SEQ ID NO: 1715386 - RNA, 13 nt, Human
acacauuuuauuu

SEQ ID NO: 1715387 - RNA, 19 nt, Human
acacauguccaagaagccc

SEQ ID NO: 1715388 - RNA, 18 nt, Human
acacauguccaagaagcc

SEQ ID NO: 1715389 - RNA, 13 nt, Human
acacauguccaag

SEQ ID NO: 1715390 - RNA, 18 nt, Human
acaccucugcacaagcug

SEQ ID NO: 1715391 - RNA, 19 nt, Human
acaccucugcacaagcugc

SEQ ID NO: 1715392 - RNA, 16 nt, Human
acaccuugacagggca

SEQ ID NO: 1715393 - RNA, 15 nt, Human
acaccuugacagggc

SEQ ID NO: 1715394 - RNA, 14 nt, Human
acaccuugacaggg

SEQ ID NO: 1715395 - RNA, 19 nt, Human
acacuaaccacgcuggacc

SEQ ID NO: 1715396 - RNA, 17 nt, Human
acacuaaccacgcugga

SEQ ID NO: 1715397 - RNA, 16 nt, Human
acacuaaccacgcugg

SEQ ID NO: 1715398 - RNA, 22 nt, Human
uauaaccaguguuguggauuua

SEQ ID NO: 1715399 - RNA, 19 nt, Human
uauaacuauguugauaaaa

SEQ ID NO: 1715400 - RNA, 15 nt, Human
acaaugguuuucuug

SEQ ID NO: 1715401 - RNA, 21 nt, Human
acaaugguuuucuuguguguu

SEQ ID NO: 1715402 - RNA, 14 nt, Human
acacacacauacac

SEQ ID NO: 1715403 - RNA, 12 nt, Human
acacacagcucu

SEQ ID NO: 1715404 - RNA, 11 nt, Human
acacacagcuc

SEQ ID NO: 1715405 - RNA, 21 nt, Human
uagguuggcaaaaaggcagga

SEQ ID NO: 1715406 - RNA, 13 nt, Human
acacagugagucg

SEQ ID NO: 1715407 - RNA, 17 nt, Human
acacagugaccauacua

SEQ ID NO: 1715408 - RNA, 11 nt, Human
acacagugagu

SEQ ID NO: 1715409 - RNA, 19 nt, Human
acacagucuuggcucacug

SEQ ID NO: 1715410 - RNA, 13 nt, Human
uaguagagacagg

SEQ ID NO: 1715411 - RNA, 14 nt, Human
uaguagagacaggg

SEQ ID NO: 1715412 - RNA, 23 nt, Human
acagaugggugcuuggaggaagg

SEQ ID NO: 1715413 - RNA, 20 nt, Human
acagauguaaaagacuuuuu

SEQ ID NO: 1715414 - RNA, 21 nt, Human
acagaguuguuacauuuuuaa

SEQ ID NO: 1715415 - RNA, 22 nt, Human
acagaguuguuacauuuuuaag

SEQ ID NO: 1715416 - RNA, 20 nt, Human
acagauagauauaugcucug

SEQ ID NO: 1715417 - RNA, 20 nt, Human
acagauacuccuccaagguu

SEQ ID NO: 1715418 - RNA, 23 nt, Human
acagcccgggcucugccucccau

SEQ ID NO: 1715419 - RNA, 22 nt, Human
acagcccgggcucugccuccca

SEQ ID NO: 1715420 - RNA, 21 nt, Human
acagcccgggcucugccuccc

SEQ ID NO: 1715421 - RNA, 16 nt, Human
acagcaaggagauuua

SEQ ID NO: 1715422 - RNA, 23 nt, Human
uaugaaagauggcugugccucug

SEQ ID NO: 1715423 - RNA, 22 nt, Human
uaugaaagauggcugugccucu

SEQ ID NO: 1715424 - RNA, 20 nt, Human
uaugaaagauggcugugccu

SEQ ID NO: 1715425 - RNA, 19 nt, Human
uaucccuacuguaauuugu

SEQ ID NO: 1715426 - RNA, 20 nt, Human
uaucccuacuguaauuugug

SEQ ID NO: 1715427 - RNA, 16 nt, Human
uaucccggcugcccuu

SEQ ID NO: 1715428 - RNA, 15 nt, Human
uaucucagggccugg

SEQ ID NO: 1715429 - RNA, 13 nt, Human
uaucucagggccu

SEQ ID NO: 1715430 - RNA, 17 nt, Human
uauccuacuuccccuuc

SEQ ID NO: 1715431 - RNA, 14 nt, Human
uauccuacuucccc

SEQ ID NO: 1715432 - RNA, 14 nt, Human
acagagcccacgcc

SEQ ID NO: 1715433 - RNA, 21 nt, Human
acagagcaagugagacccugu

SEQ ID NO: 1715434 - RNA, 17 nt, Human
acagaguuguuacauuu

SEQ ID NO: 1715435 - RNA, 18 nt, Human
acagaguuguuacauuuu

SEQ ID NO: 1715436 - RNA, 19 nt, Human
acagaguuguuacauuuuu

SEQ ID NO: 1715437 - RNA, 20 nt, Human
acagaguuguuacauuuuua

SEQ ID NO: 1715438 - RNA, 16 nt, Human
acagaguuguuacauu

SEQ ID NO: 1715439 - RNA, 12 nt, Human
uauauuuacaaa

SEQ ID NO: 1715440 - RNA, 19 nt, Human
acagaaagcagaacaguga

SEQ ID NO: 1715441 - RNA, 17 nt, Human
acagacacaggcccggc

SEQ ID NO: 1715442 - RNA, 22 nt, Human
acagacacaggcccggcuccag

SEQ ID NO: 1715443 - RNA, 18 nt, Human
acagacacaggcccggcu

SEQ ID NO: 1715444 - RNA, 22 nt, Human
acagacuggaagcacagcuuca

SEQ ID NO: 1715445 - RNA, 21 nt, Human
acagacuggaagcacagcuuc

SEQ ID NO: 1715446 - RNA, 19 nt, Human
acagacuggaagcacagcu

SEQ ID NO: 1715447 - RNA, 17 nt, Human
acagacuggaagcacag

SEQ ID NO: 1715448 - RNA, 13 nt, Human
acacuuaaaaaug

SEQ ID NO: 1715449 - RNA, 15 nt, Human
acacuuaaaaauggu

SEQ ID NO: 1715450 - RNA, 16 nt, Human
acacuguuucaaacuu

SEQ ID NO: 1715451 - RNA, 15 nt, Human
acacuguuucaaacu

SEQ ID NO: 1715452 - RNA, 23 nt, Human
acacuuguugauuaauggaaaug

SEQ ID NO: 1715453 - RNA, 20 nt, Human
acacuuguugauuaauggaa

SEQ ID NO: 1715454 - RNA, 14 nt, Human
acacuccagugaga

SEQ ID NO: 1715455 - RNA, 13 nt, Human
acacucugagacu

SEQ ID NO: 1715456 - RNA, 11 nt, Human
acacucugaga

SEQ ID NO: 1715457 - RNA, 15 nt, Human
acacuguucucugcc

SEQ ID NO: 1715458 - RNA, 14 nt, Human
acacuguucucugc

SEQ ID NO: 1715459 - RNA, 20 nt, Human
acacuguucucugcccucca

SEQ ID NO: 1715460 - RNA, 18 nt, Human
acacuguucucugcccuc

SEQ ID NO: 1715461 - RNA, 17 nt, Human
acacuguucucugcccu

SEQ ID NO: 1715462 - RNA, 16 nt, Human
acacuguucucugccc

SEQ ID NO: 1715463 - RNA, 23 nt, Human
acacuguucucugcccuccaaga

SEQ ID NO: 1715464 - RNA, 22 nt, Human
acacuguucucugcccuccaag

SEQ ID NO: 1715465 - RNA, 22 nt, Human
aauuuauaaacuuuuuucuuac

SEQ ID NO: 1715466 - RNA, 13 nt, Human
aauuuauuauggc

SEQ ID NO: 1715467 - RNA, 14 nt, Human
aauuuauuauggca

SEQ ID NO: 1715468 - RNA, 17 nt, Human
aauuuauuauggcacau

SEQ ID NO: 1715469 - RNA, 17 nt, Human
aauuuacagagacagaa

SEQ ID NO: 1715470 - RNA, 18 nt, Human
aauuuacagagacagaaa

SEQ ID NO: 1715471 - RNA, 17 nt, Human
aauuuaccugaagucuu

SEQ ID NO: 1715472 - RNA, 15 nt, Human
aauuuacauacucug

SEQ ID NO: 1715473 - RNA, 15 nt, Human
aauuugaaacacuuu

SEQ ID NO: 1715474 - RNA, 18 nt, Human
uacuucuccacccugcuc

SEQ ID NO: 1715475 - RNA, 13 nt, Human
uacuucuccaccc

SEQ ID NO: 1715476 - RNA, 23 nt, Human
uacuuccugugacuucagcucug

SEQ ID NO: 1715477 - RNA, 20 nt, Human
uacuuccccuuccuaauucc

SEQ ID NO: 1715478 - RNA, 18 nt, Human
uacuuccccuuccuaauu

SEQ ID NO: 1715479 - RNA, 15 nt, Human
uacuuccccuuccua

SEQ ID NO: 1715480 - RNA, 14 nt, Human
uacuuccccuuccu

SEQ ID NO: 1715481 - RNA, 15 nt, Human
uacuucugcuacaua

SEQ ID NO: 1715482 - RNA, 20 nt, Human
uacuucuccacccugcucuc

SEQ ID NO: 1715483 - RNA, 15 nt, Human
uacuucuuauacauu

SEQ ID NO: 1715484 - RNA, 14 nt, Human
uacuucuuauacau

SEQ ID NO: 1715485 - RNA, 16 nt, Human
uacuucuuauacauuu

SEQ ID NO: 1715486 - RNA, 15 nt, Human
uacuugaaaauuaac

SEQ ID NO: 1715487 - RNA, 23 nt, Human
uacuuugauauuuucaacgcagc

SEQ ID NO: 1715488 - RNA, 17 nt, Human
uacugagagugaacaaa

SEQ ID NO: 1715489 - RNA, 19 nt, Human
uacugagagugaacaaauu

SEQ ID NO: 1715490 - RNA, 16 nt, Human
uacuguaauuugugau

SEQ ID NO: 1715491 - RNA, 17 nt, Human
uacuguaauuugugaua

SEQ ID NO: 1715492 - RNA, 15 nt, Human
uacuguaauuuguga

SEQ ID NO: 1715493 - RNA, 18 nt, Human
uacuguacaugaaaacac

SEQ ID NO: 1715494 - RNA, 23 nt, Human
uacuguacagacagaaaaaacug

SEQ ID NO: 1715495 - RNA, 19 nt, Human
uacuguacagacagaaaaa

SEQ ID NO: 1715496 - RNA, 18 nt, Human
uacuaaaaauacaaaaaa

SEQ ID NO: 1715497 - RNA, 14 nt, Human
uacuaaaaauacaa

SEQ ID NO: 1715498 - RNA, 13 nt, Human
uacgugaguccug

SEQ ID NO: 1715499 - RNA, 16 nt, Human
uacgucugacaggcaa

SEQ ID NO: 1715500 - RNA, 22 nt, Human
uacucuacccucuuagaaaaac

SEQ ID NO: 1715501 - RNA, 18 nt, Human
uacuagggaaaugccuuu

SEQ ID NO: 1715502 - RNA, 13 nt, Human
aauugacccacaa

SEQ ID NO: 1715503 - RNA, 24 nt, Human
uacgcuccaucgcugucaucucag

SEQ ID NO: 1715504 - RNA, 15 nt, Human
uacgucugacaggca

SEQ ID NO: 1715505 - RNA, 21 nt, Human
acaaagcgugguggacaugca

SEQ ID NO: 1715506 - RNA, 18 nt, Human
acaaagcccuuccauguc

SEQ ID NO: 1715507 - RNA, 14 nt, Human
acaaaacuuuucua

SEQ ID NO: 1715508 - RNA, 22 nt, Human
uagauaggucagugcaaauacu

SEQ ID NO: 1715509 - RNA, 22 nt, Human
aauuuuuaaucuuuaauuuuac

SEQ ID NO: 1715510 - RNA, 22 nt, Human
aauuuuuuuaucgucacugcuu

SEQ ID NO: 1715511 - RNA, 16 nt, Human
aauuuguuauaaugaa

SEQ ID NO: 1715512 - RNA, 20 nt, Human
acaaucucggcucacugcau

SEQ ID NO: 1715513 - RNA, 18 nt, Human
acaaucucggcucacugc

SEQ ID NO: 1715514 - RNA, 18 nt, Human
acaagcgugagccacugc

SEQ ID NO: 1715515 - RNA, 22 nt, Human
acaagcuccaagcucccaggca

SEQ ID NO: 1715516 - RNA, 19 nt, Human
acaagcuccaagcucccag

SEQ ID NO: 1715517 - RNA, 17 nt, Human
acaagcuccaagcuccc

SEQ ID NO: 1715518 - RNA, 16 nt, Human
acaagcuccaagcucc

SEQ ID NO: 1715519 - RNA, 15 nt, Human
acaagcuccaagcuc

SEQ ID NO: 1715520 - RNA, 16 nt, Human
uagcuacuaauuuuaa

SEQ ID NO: 1715521 - RNA, 16 nt, Human
uagcucaggugucccu

SEQ ID NO: 1715522 - RNA, 17 nt, Human
acaacaucuuuuucuac

SEQ ID NO: 1715523 - RNA, 13 nt, Human
acaagacacagug

SEQ ID NO: 1715524 - RNA, 17 nt, Human
acaaauuuacagagaca

SEQ ID NO: 1715525 - RNA, 21 nt, Human
acaaauucugucucuggauua

SEQ ID NO: 1715526 - RNA, 13 nt, Human
acaagcuccaagc

SEQ ID NO: 1715527 - RNA, 17 nt, Human
acaagcgugagccacug

SEQ ID NO: 1715528 - RNA, 22 nt, Human
acaagagcccaggccuccuaca

SEQ ID NO: 1715529 - RNA, 19 nt, Human
acaagagcuuaacagugug

SEQ ID NO: 1715530 - RNA, 18 nt, Human
acaagagcuuaacagugu

SEQ ID NO: 1715531 - RNA, 16 nt, Human
acaagaccacguuucu

SEQ ID NO: 1715532 - RNA, 14 nt, Human
acaagacacaguga

SEQ ID NO: 1715533 - RNA, 17 nt, Human
acaagaccacguuucua

SEQ ID NO: 1715534 - RNA, 18 nt, Human
acaagaccacguuucuaa

SEQ ID NO: 1715535 - RNA, 15 nt, Human
aauaacgauaaaaga

SEQ ID NO: 1715536 - RNA, 21 nt, Human
aauaacaaugaaaguugauaa

SEQ ID NO: 1715537 - RNA, 20 nt, Human
aauaaauugcuccuugacau

SEQ ID NO: 1715538 - RNA, 16 nt, Human
aauaaauugcuccuug

SEQ ID NO: 1715539 - RNA, 18 nt, Human
aauaaaacuuuuuaaaau

SEQ ID NO: 1715540 - RNA, 12 nt, Human
aauaaaacuuuu

SEQ ID NO: 1715541 - RNA, 14 nt, Human
aauaaaacuuuuua

SEQ ID NO: 1715542 - RNA, 15 nt, Human
aauaaaacuuuuuaa

SEQ ID NO: 1715543 - RNA, 16 nt, Human
aauaaaucauaaaacu

SEQ ID NO: 1715544 - RNA, 20 nt, Human
aaguuuuuauggcuuuugug

SEQ ID NO: 1715545 - RNA, 15 nt, Human
aaguuuuguaaauuu

SEQ ID NO: 1715546 - RNA, 22 nt, Human
uaaaguaaaaacaaagaaauua

SEQ ID NO: 1715547 - RNA, 21 nt, Human
uaaaguaaaaacaaagaaauu

SEQ ID NO: 1715548 - RNA, 19 nt, Human
uaaaguaaaaacaaagaaa

SEQ ID NO: 1715549 - RNA, 22 nt, Human
uaaagguucaugcaaacuuuau

SEQ ID NO: 1715550 - RNA, 14 nt, Human
uaaaucuccaaaau

SEQ ID NO: 1715551 - RNA, 15 nt, Human
uaaaucuccaaaaua

SEQ ID NO: 1715552 - RNA, 18 nt, Human
uaaaucuccaaaauaaaa

SEQ ID NO: 1715553 - RNA, 18 nt, Human
uaaauuaacuuuuauaaa

SEQ ID NO: 1715554 - RNA, 17 nt, Human
uaaauuaacuuuuauaa

SEQ ID NO: 1715555 - RNA, 15 nt, Human
uaaauuaacuuuuau

SEQ ID NO: 1715556 - RNA, 16 nt, Human
uaaauuaacuuuuaua

SEQ ID NO: 1715557 - RNA, 12 nt, Human
uaaauuaacuuu

SEQ ID NO: 1715558 - RNA, 14 nt, Human
uaaauuaacuuuua

SEQ ID NO: 1715559 - RNA, 24 nt, Human
uaaauguuuuuuuuuaaagacuuu

SEQ ID NO: 1715560 - RNA, 20 nt, Human
uaaauguugaaagaucaaaa

SEQ ID NO: 1715561 - RNA, 15 nt, Human
uaaauguugaaagau

SEQ ID NO: 1715562 - RNA, 23 nt, Human
uaaaugcaccuggaauauauaac

SEQ ID NO: 1715563 - RNA, 19 nt, Human
uaaaugcaaccauuugaaa

SEQ ID NO: 1715564 - RNA, 21 nt, Human
uaaauaaaguuuguugaaaca

SEQ ID NO: 1715565 - RNA, 12 nt, Human
uaaauaaaguuu

SEQ ID NO: 1715566 - RNA, 19 nt, Human
uaaauaaugugaaacugga

SEQ ID NO: 1715567 - RNA, 13 nt, Human
aauaauuuuguaa

SEQ ID NO: 1715568 - RNA, 14 nt, Human
aauaauuuuguaau

SEQ ID NO: 1715569 - RNA, 15 nt, Human
aauaauuuuguaaug

SEQ ID NO: 1715570 - RNA, 12 nt, Human
aauaacuuuuuu

SEQ ID NO: 1715571 - RNA, 21 nt, Human
uaacuaaaauaauuuuguaau

SEQ ID NO: 1715572 - RNA, 20 nt, Human
uaacuaaaauaauuuuguaa

SEQ ID NO: 1715573 - RNA, 15 nt, Human
uaacuuuuauaaacu

SEQ ID NO: 1715574 - RNA, 17 nt, Human
uaacuuuuauaaacuuu

SEQ ID NO: 1715575 - RNA, 18 nt, Human
uaacuuuuauaaacuuua

SEQ ID NO: 1715576 - RNA, 19 nt, Human
uaacuuuuauaaacuuuac

SEQ ID NO: 1715577 - RNA, 17 nt, Human
uaagacauuuuuggaag

SEQ ID NO: 1715578 - RNA, 19 nt, Human
aauaucuuuuuuuuaauaa

SEQ ID NO: 1715579 - RNA, 20 nt, Human
aauaucugaaaauguaugug

SEQ ID NO: 1715580 - RNA, 19 nt, Human
aauaucugaaaauguaugu

SEQ ID NO: 1715581 - RNA, 18 nt, Human
aauaucugaaaauguaug

SEQ ID NO: 1715582 - RNA, 17 nt, Human
aauaucugaaaauguau

SEQ ID NO: 1715583 - RNA, 16 nt, Human
aauaucugaaaaugua

SEQ ID NO: 1715584 - RNA, 13 nt, Human
aauauuguacagu

SEQ ID NO: 1715585 - RNA, 14 nt, Human
aauauuguacaguu

SEQ ID NO: 1715586 - RNA, 15 nt, Human
aauaugcacacauuu

SEQ ID NO: 1715587 - RNA, 18 nt, Human
aauauugauaugcuuaua

SEQ ID NO: 1715588 - RNA, 22 nt, Human
aauauugcugauggugcaauga

SEQ ID NO: 1715589 - RNA, 21 nt, Human
aauauugcugauggugcaaug

SEQ ID NO: 1715590 - RNA, 18 nt, Human
aauauugcugauggugca

SEQ ID NO: 1715591 - RNA, 15 nt, Human
aauauugcugauggu

SEQ ID NO: 1715592 - RNA, 13 nt, Human
aauauugcugaug

SEQ ID NO: 1715593 - RNA, 12 nt, Human
aauauugcugau

SEQ ID NO: 1715594 - RNA, 11 nt, Human
aauauugcuga

SEQ ID NO: 1715595 - RNA, 18 nt, Human
aauaggcguaacuaauuu

SEQ ID NO: 1715596 - RNA, 16 nt, Human
aauaggaaaaacugau

SEQ ID NO: 1715597 - RNA, 15 nt, Human
aauaggaaaaacuga

SEQ ID NO: 1715598 - RNA, 15 nt, Human
aauagcuuuaaugau

SEQ ID NO: 1715599 - RNA, 16 nt, Human
aauagcuuuaaugaua

SEQ ID NO: 1715600 - RNA, 18 nt, Human
aauaggaaaaacugauuu

SEQ ID NO: 1715601 - RNA, 17 nt, Human
aauaggaaaaacugauu

SEQ ID NO: 1715602 - RNA, 19 nt, Human
aauaggaaaaacugauuuu

SEQ ID NO: 1715603 - RNA, 18 nt, Human
aauagacaauuuauuaug

SEQ ID NO: 1715604 - RNA, 23 nt, Human
aauagacaauuuauuauggcaca

SEQ ID NO: 1715605 - RNA, 16 nt, Human
aauagacagcaugaga

SEQ ID NO: 1715606 - RNA, 18 nt, Human
aauagacccacaagaggc

SEQ ID NO: 1715607 - RNA, 14 nt, Human
aauagcugggacua

SEQ ID NO: 1715608 - RNA, 13 nt, Human
aauagcugggacu

SEQ ID NO: 1715609 - RNA, 20 nt, Human
aauagccugccucuucucua

SEQ ID NO: 1715610 - RNA, 16 nt, Human
aauagaugcugacugu

SEQ ID NO: 1715611 - RNA, 14 nt, Human
uaacaugauuuggg

SEQ ID NO: 1715612 - RNA, 14 nt, Human
uaacauggaaguac

SEQ ID NO: 1715613 - RNA, 15 nt, Human
uaacuaaaagguaug

SEQ ID NO: 1715614 - RNA, 12 nt, Human
uaacuaaaauaa

SEQ ID NO: 1715615 - RNA, 18 nt, Human
uaacuaaaauaauuuugu

SEQ ID NO: 1715616 - RNA, 19 nt, Human
uaacuaaaauaauuuugua

SEQ ID NO: 1715617 - RNA, 14 nt, Human
uaacuaaaagguau

SEQ ID NO: 1715618 - RNA, 16 nt, Human
uaacauggaaguacua

SEQ ID NO: 1715619 - RNA, 15 nt, Human
uaacauggaaguacu

SEQ ID NO: 1715620 - RNA, 12 nt, Human
aaucuaaaugga

SEQ ID NO: 1715621 - RNA, 18 nt, Human
aaucuaaauggaaccacu

SEQ ID NO: 1715622 - RNA, 13 nt, Human
aaucuaaauggaa

SEQ ID NO: 1715623 - RNA, 15 nt, Human
aaucuaaauggaacc

SEQ ID NO: 1715624 - RNA, 14 nt, Human
aaucuuauaauuua

SEQ ID NO: 1715625 - RNA, 16 nt, Human
aaucuuauaauuuaaa

SEQ ID NO: 1715626 - RNA, 14 nt, Human
aaucucaaauuucu

SEQ ID NO: 1715627 - RNA, 15 nt, Human
aaucucaaauaacua

SEQ ID NO: 1715628 - RNA, 12 nt, Human
aaucucaaauuu

SEQ ID NO: 1715629 - RNA, 15 nt, Human
aaucaucaagucuuu

SEQ ID NO: 1715630 - RNA, 17 nt, Human
uaauaaaaguacauguu

SEQ ID NO: 1715631 - RNA, 17 nt, Human
aaucauggugcucagag

SEQ ID NO: 1715632 - RNA, 12 nt, Human
aaucagcauucu

SEQ ID NO: 1715633 - RNA, 17 nt, Human
aaucagacuaugaaguu

SEQ ID NO: 1715634 - RNA, 14 nt, Human
aaucagacuaugaa

SEQ ID NO: 1715635 - RNA, 20 nt, Human
uaaguuuuuauggcuuuugu

SEQ ID NO: 1715636 - RNA, 19 nt, Human
uaaugaaagacuguacaaa

SEQ ID NO: 1715637 - RNA, 18 nt, Human
uaaugaaagacuguacaa

SEQ ID NO: 1715638 - RNA, 17 nt, Human
uaaugaaagacuguaca

SEQ ID NO: 1715639 - RNA, 14 nt, Human
uaaugaaagacugu

SEQ ID NO: 1715640 - RNA, 23 nt, Human
uaaugaaagacuguacaaaguag

SEQ ID NO: 1715641 - RNA, 22 nt, Human
uaaugaaagacuguacaaagua

SEQ ID NO: 1715642 - RNA, 15 nt, Human
uaaugacaggccugu

SEQ ID NO: 1715643 - RNA, 20 nt, Human
uaaugacaggccuguccaac

SEQ ID NO: 1715644 - RNA, 21 nt, Human
uaaugacuuaagcacacuuga

SEQ ID NO: 1715645 - RNA, 15 nt, Human
uaaugacuuaagcac

SEQ ID NO: 1715646 - RNA, 20 nt, Human
aaucuucugaacuuggcgcu

SEQ ID NO: 1715647 - RNA, 13 nt, Human
aaucuucugaacu

SEQ ID NO: 1715648 - RNA, 21 nt, Human
uaauagcgucauaacuagaac

SEQ ID NO: 1715649 - RNA, 13 nt, Human
uaaugaggaaacu

SEQ ID NO: 1715650 - RNA, 15 nt, Human
aaugagccuggcaag

SEQ ID NO: 1715651 - RNA, 18 nt, Human
aaugacuuacuguacaug

SEQ ID NO: 1715652 - RNA, 14 nt, Human
aaugacuuacugua

SEQ ID NO: 1715653 - RNA, 17 nt, Human
aaugacuuacuguacau

SEQ ID NO: 1715654 - RNA, 15 nt, Human
aaugaaaaccacauu

SEQ ID NO: 1715655 - RNA, 15 nt, Human
aaugacaggccuguc

SEQ ID NO: 1715656 - RNA, 19 nt, Human
aauggacuuuuguacauag

SEQ ID NO: 1715657 - RNA, 21 nt, Human
aauggacguguuaugacucca

SEQ ID NO: 1715658 - RNA, 15 nt, Human
uacacauuuuucaga

SEQ ID NO: 1715659 - RNA, 17 nt, Human
uacacauuuuucagaua

SEQ ID NO: 1715660 - RNA, 21 nt, Human
uacacauuuuucagauauaaa

SEQ ID NO: 1715661 - RNA, 19 nt, Human
uacacauuuuucagauaua

SEQ ID NO: 1715662 - RNA, 19 nt, Human
uacaccacuacauucuguu

SEQ ID NO: 1715663 - RNA, 20 nt, Human
uacaccacuacauucuguua

SEQ ID NO: 1715664 - RNA, 15 nt, Human
uacaccacuacauuc

SEQ ID NO: 1715665 - RNA, 16 nt, Human
uacaccacuacauucu

SEQ ID NO: 1715666 - RNA, 17 nt, Human
uacaccacuacauucug

SEQ ID NO: 1715667 - RNA, 18 nt, Human
uacaccacuacauucugu

SEQ ID NO: 1715668 - RNA, 22 nt, Human
uacaggcgugagccaccgugcc

SEQ ID NO: 1715669 - RNA, 15 nt, Human
uacaggcuccugcca

SEQ ID NO: 1715670 - RNA, 14 nt, Human
uacaggcuccugcc

SEQ ID NO: 1715671 - RNA, 17 nt, Human
uacaggcuccugccacc

SEQ ID NO: 1715672 - RNA, 14 nt, Human
uacacuccagugag

SEQ ID NO: 1715673 - RNA, 18 nt, Human
uacagaggccaugggccu

SEQ ID NO: 1715674 - RNA, 15 nt, Human
uacaggcauagaguu

SEQ ID NO: 1715675 - RNA, 19 nt, Human
uacauauaagugauugcug

SEQ ID NO: 1715676 - RNA, 22 nt, Human
uacauauaagugauugcugguu

SEQ ID NO: 1715677 - RNA, 12 nt, Human
aauguacugcau

SEQ ID NO: 1715678 - RNA, 21 nt, Human
uacauaaugcgugcauaccac

SEQ ID NO: 1715679 - RNA, 19 nt, Human
uacauaaugcgugcauacc

SEQ ID NO: 1715680 - RNA, 20 nt, Human
uacauaaugcgugcauacca

SEQ ID NO: 1715681 - RNA, 15 nt, Human
uacaguaucucaggg

SEQ ID NO: 1715682 - RNA, 17 nt, Human
uacauaaugcgugcaua

SEQ ID NO: 1715683 - RNA, 11 nt, Human
aaugugauaug

SEQ ID NO: 1715684 - RNA, 14 nt, Human
aauguggcuccugg

SEQ ID NO: 1715685 - RNA, 14 nt, Human
aauguauuuuuccu

SEQ ID NO: 1715686 - RNA, 14 nt, Human
aaugugacucaaga

SEQ ID NO: 1715687 - RNA, 14 nt, Human
aauguauguguaag

SEQ ID NO: 1715688 - RNA, 12 nt, Human
aauguaugugua

SEQ ID NO: 1715689 - RNA, 18 nt, Human
aauguacugcauaugaaa

SEQ ID NO: 1715690 - RNA, 14 nt, Human
aauguacugcauau

SEQ ID NO: 1715691 - RNA, 16 nt, Human
aauggacguguuauga

SEQ ID NO: 1715692 - RNA, 24 nt, Human
aaugcccagccccuucugacccau

SEQ ID NO: 1715693 - RNA, 23 nt, Human
aaugcccagccccuucugaccca

SEQ ID NO: 1715694 - RNA, 22 nt, Human
aaugcccagccccuucugaccc

SEQ ID NO: 1715695 - RNA, 20 nt, Human
aaugcccagccccuucugac

SEQ ID NO: 1715696 - RNA, 20 nt, Human
aaugcugugcccuaaagugu

SEQ ID NO: 1715697 - RNA, 21 nt, Human
aaugcugugcccuaaagugua

SEQ ID NO: 1715698 - RNA, 13 nt, Human
aaugcugugcccu

SEQ ID NO: 1715699 - RNA, 15 nt, Human
aaugcccagccccuu

SEQ ID NO: 1715700 - RNA, 14 nt, Human
aaugcccagccccu

SEQ ID NO: 1715701 - RNA, 16 nt, Human
aaugcauaaaauguua

SEQ ID NO: 1715702 - RNA, 14 nt, Human
uacaaggacagccc

SEQ ID NO: 1715703 - RNA, 13 nt, Human
aaugcauaaaaug

SEQ ID NO: 1715704 - RNA, 13 nt, Human
uaauuccacagcu

SEQ ID NO: 1715705 - RNA, 17 nt, Human
uaauuccacagcugcuc

SEQ ID NO: 1715706 - RNA, 14 nt, Human
uaauuccacagcug

SEQ ID NO: 1715707 - RNA, 20 nt, Human
uacaaaaagcauaaaaauua

SEQ ID NO: 1715708 - RNA, 15 nt, Human
uacaaaagcauguga

SEQ ID NO: 1715709 - RNA, 15 nt, Human
gugccucaagagaag

SEQ ID NO: 1715710 - RNA, 21 nt, Human
gugaaccaccacacccagccc

SEQ ID NO: 1715711 - RNA, 23 nt, Human
gugccuuauggaacacucugaga

SEQ ID NO: 1715712 - RNA, 21 nt, Human
gugccuuauggaacacucuga

SEQ ID NO: 1715713 - RNA, 14 nt, Human
gugccuuauggaac

SEQ ID NO: 1715714 - RNA, 14 nt, Human
gugccucugggacu

SEQ ID NO: 1715715 - RNA, 15 nt, Human
gugccucugccuguc

SEQ ID NO: 1715716 - RNA, 13 nt, Human
gugccucugggac

SEQ ID NO: 1715717 - RNA, 12 nt, Human
gugccucuggga

SEQ ID NO: 1715718 - RNA, 13 nt, Human
gugccucugccug

SEQ ID NO: 1715719 - RNA, 13 nt, Human
aacuuuaccuuuu

SEQ ID NO: 1715720 - RNA, 18 nt, Human
aacuugucuuuggacccu

SEQ ID NO: 1715721 - RNA, 22 nt, Human
aacuugucuuuggacccugagg

SEQ ID NO: 1715722 - RNA, 16 nt, Human
aacuuguauuaugugu

SEQ ID NO: 1715723 - RNA, 15 nt, Human
aacuuguauuaugug

SEQ ID NO: 1715724 - RNA, 12 nt, Human
aacuugggaacu

SEQ ID NO: 1715725 - RNA, 16 nt, Human
aagaagugaaaaucua

SEQ ID NO: 1715726 - RNA, 22 nt, Human
aagaagugaaaaucuacacucc

SEQ ID NO: 1715727 - RNA, 21 nt, Human
gugcuaucucccccagcccca

SEQ ID NO: 1715728 - RNA, 22 nt, Human
gugcuaggaacacuccuucaca

SEQ ID NO: 1715729 - RNA, 18 nt, Human
gugcuaggaacacuccuu

SEQ ID NO: 1715730 - RNA, 17 nt, Human
aagaauagcuuuaauga

SEQ ID NO: 1715731 - RNA, 17 nt, Human
aagaauagcauuguaaa

SEQ ID NO: 1715732 - RNA, 18 nt, Human
aagaauagcauuguaaaa

SEQ ID NO: 1715733 - RNA, 23 nt, Human
aagaauagcauuguaaaagcauu

SEQ ID NO: 1715734 - RNA, 13 nt, Human
aagaaagaaaauc

SEQ ID NO: 1715735 - RNA, 22 nt, Human
aagaaagacuaucuaaauguug

SEQ ID NO: 1715736 - RNA, 20 nt, Human
aagaaagacuaucuaaaugu

SEQ ID NO: 1715737 - RNA, 13 nt, Human
aagaaauauaccu

SEQ ID NO: 1715738 - RNA, 15 nt, Human
aagaaaaaggaugca

SEQ ID NO: 1715739 - RNA, 17 nt, Human
aagaaaaaggaugcaca

SEQ ID NO: 1715740 - RNA, 18 nt, Human
aagaaaaaggaugcacag

SEQ ID NO: 1715741 - RNA, 21 nt, Human
guggaugccugguggcagcug

SEQ ID NO: 1715742 - RNA, 21 nt, Human
guggauggaaggggcugacag

SEQ ID NO: 1715743 - RNA, 22 nt, Human
guggacacagcucuucuccagg

SEQ ID NO: 1715744 - RNA, 18 nt, Human
guggacacagcucuucuc

SEQ ID NO: 1715745 - RNA, 23 nt, Human
guggacacagcucuucuccaggc

SEQ ID NO: 1715746 - RNA, 20 nt, Human
gugcugggauuacaggugug

SEQ ID NO: 1715747 - RNA, 20 nt, Human
gugcugggauuacaggcgug

SEQ ID NO: 1715748 - RNA, 19 nt, Human
guggaaguaguggagcccc

SEQ ID NO: 1715749 - RNA, 22 nt, Human
gugcugggauuacaagcgugag

SEQ ID NO: 1715750 - RNA, 21 nt, Human
gugcugggauuacaagcguga

SEQ ID NO: 1715751 - RNA, 22 nt, Human
gugcuaucucccccagccccau

SEQ ID NO: 1715752 - RNA, 12 nt, Human
gugcuauguucu

SEQ ID NO: 1715753 - RNA, 15 nt, Human
gugcucaggagcccu

SEQ ID NO: 1715754 - RNA, 16 nt, Human
aagaauugaagcagga

SEQ ID NO: 1715755 - RNA, 16 nt, Human
guggcagcucaccucu

SEQ ID NO: 1715756 - RNA, 14 nt, Human
guggcagcucaccu

SEQ ID NO: 1715757 - RNA, 20 nt, Human
guggcagcucaccucucccu

SEQ ID NO: 1715758 - RNA, 19 nt, Human
guggcaccagcagccugga

SEQ ID NO: 1715759 - RNA, 20 nt, Human
guggauuuaacagaaaugua

SEQ ID NO: 1715760 - RNA, 18 nt, Human
guggauuuaacagaaaug

SEQ ID NO: 1715761 - RNA, 19 nt, Human
guggauuuaacagaaaugu

SEQ ID NO: 1715762 - RNA, 23 nt, Human
guguuuccuggcacugcuuccag

SEQ ID NO: 1715763 - RNA, 18 nt, Human
guguguaugcgugugugu

SEQ ID NO: 1715764 - RNA, 17 nt, Human
gugugacuacuccccca

SEQ ID NO: 1715765 - RNA, 18 nt, Human
gugucuuuuuucacuaca

SEQ ID NO: 1715766 - RNA, 17 nt, Human
gugugaaaaugugugug

SEQ ID NO: 1715767 - RNA, 18 nt, Human
gugucuugcaauggcagc

SEQ ID NO: 1715768 - RNA, 17 nt, Human
gugucuugcaauggcag

SEQ ID NO: 1715769 - RNA, 18 nt, Human
aagagguuuuaaaaaaau

SEQ ID NO: 1715770 - RNA, 20 nt, Human
guggugguuuucuguucuuu

SEQ ID NO: 1715771 - RNA, 17 nt, Human
gugguuuucuguucuuu

SEQ ID NO: 1715772 - RNA, 12 nt, Human
aagaugcagccg

SEQ ID NO: 1715773 - RNA, 18 nt, Human
aagaugugacauguuuua

SEQ ID NO: 1715774 - RNA, 14 nt, Human
aagaugugacaugu

SEQ ID NO: 1715775 - RNA, 22 nt, Human
aagcaaagacuuuccucuuagu

SEQ ID NO: 1715776 - RNA, 13 nt, Human
aagcaaaggagau

SEQ ID NO: 1715777 - RNA, 12 nt, Human
aagcaaaggaga

SEQ ID NO: 1715778 - RNA, 15 nt, Human
aagcaagauuucaga

SEQ ID NO: 1715779 - RNA, 22 nt, Human
gugggacacccugugauggggc

SEQ ID NO: 1715780 - RNA, 23 nt, Human
guggcgcagcauauucaggaagc

SEQ ID NO: 1715781 - RNA, 13 nt, Human
gugggauccucca

SEQ ID NO: 1715782 - RNA, 14 nt, Human
gugggagugggccc

SEQ ID NO: 1715783 - RNA, 13 nt, Human
gugggagugggcc

SEQ ID NO: 1715784 - RNA, 16 nt, Human
gugguuucagaaaugu

SEQ ID NO: 1715785 - RNA, 14 nt, Human
guggugguuuucug

SEQ ID NO: 1715786 - RNA, 14 nt, Human
guggguacgggagg

SEQ ID NO: 1715787 - RNA, 20 nt, Human
gugggggaucacagccucug

SEQ ID NO: 1715788 - RNA, 18 nt, Human
aagacuaucuaaauguug

SEQ ID NO: 1715789 - RNA, 17 nt, Human
aagacugaguacguugu

SEQ ID NO: 1715790 - RNA, 17 nt, Human
aagacuguacaaaguag

SEQ ID NO: 1715791 - RNA, 21 nt, Human
aagacugaguacguugugcau

SEQ ID NO: 1715792 - RNA, 22 nt, Human
aagacugaguacguugugcauu

SEQ ID NO: 1715793 - RNA, 17 nt, Human
aagacuaucuaaauguu

SEQ ID NO: 1715794 - RNA, 16 nt, Human
aagacuaucuaaaugu

SEQ ID NO: 1715795 - RNA, 21 nt, Human
aagacccuuguggucccaccc

SEQ ID NO: 1715796 - RNA, 18 nt, Human
aagacccuugugguccca

SEQ ID NO: 1715797 - RNA, 22 nt, Human
aagacccuuguggucccacccc

SEQ ID NO: 1715798 - RNA, 19 nt, Human
guggcccgacagccuggca

SEQ ID NO: 1715799 - RNA, 18 nt, Human
guggcccgacagccuggc

SEQ ID NO: 1715800 - RNA, 16 nt, Human
aagagcuuaacagugu

SEQ ID NO: 1715801 - RNA, 16 nt, Human
aaggguaucaggugcu

SEQ ID NO: 1715802 - RNA, 17 nt, Human
aaggguaucaggugcug

SEQ ID NO: 1715803 - RNA, 15 nt, Human
aaguaauaugcacac

SEQ ID NO: 1715804 - RNA, 16 nt, Human
aaguaauaugcacaca

SEQ ID NO: 1715805 - RNA, 19 nt, Human
guuucuaaaggcuaccuuu

SEQ ID NO: 1715806 - RNA, 12 nt, Human
aaguaauaugca

SEQ ID NO: 1715807 - RNA, 22 nt, Human
aaguaaaaacaaagaaauuaug

SEQ ID NO: 1715808 - RNA, 20 nt, Human
aaguaaaaacaaagaaauua

SEQ ID NO: 1715809 - RNA, 13 nt, Human
aaguaaaaacaaa

SEQ ID NO: 1715810 - RNA, 23 nt, Human
aaggggaauguuugccucugccu

SEQ ID NO: 1715811 - RNA, 22 nt, Human
aaggggaauguuugccucugcc

SEQ ID NO: 1715812 - RNA, 17 nt, Human
aagggccuggccugagc

SEQ ID NO: 1715813 - RNA, 14 nt, Human
aagggccuggccug

SEQ ID NO: 1715814 - RNA, 19 nt, Human
aagggccuggccugagcug

SEQ ID NO: 1715815 - RNA, 17 nt, Human
guuucugucguuaaaaa

SEQ ID NO: 1715816 - RNA, 22 nt, Human
guuucuaaaggcuaccuuugua

SEQ ID NO: 1715817 - RNA, 23 nt, Human
guuucuaaaggcuaccuuuguau

SEQ ID NO: 1715818 - RNA, 22 nt, Human
guuugauucagacagcugccug

SEQ ID NO: 1715819 - RNA, 22 nt, Human
guuucugucguuaaaaacagau

SEQ ID NO: 1715820 - RNA, 16 nt, Human
guuugccucugccucu

SEQ ID NO: 1715821 - RNA, 13 nt, Human
guuugccucugcc

SEQ ID NO: 1715822 - RNA, 11 nt, Human
guuuucuguuc

SEQ ID NO: 1715823 - RNA, 12 nt, Human
guuuucuguucu

SEQ ID NO: 1715824 - RNA, 20 nt, Human
guuuucuuaaccagaucauu

SEQ ID NO: 1715825 - RNA, 15 nt, Human
guuuuacugcagcuu

SEQ ID NO: 1715826 - RNA, 18 nt, Human
guuuggggaugagaaagg

SEQ ID NO: 1715827 - RNA, 20 nt, Human
guuugggccccagaggcugg

SEQ ID NO: 1715828 - RNA, 23 nt, Human
guuuuacaauaaaaucuugaaaa

SEQ ID NO: 1715829 - RNA, 18 nt, Human
guuggucccccuuccaug

SEQ ID NO: 1715830 - RNA, 13 nt, Human
guuggguggaugc

SEQ ID NO: 1715831 - RNA, 18 nt, Human
guuguaccgcaaugugac

SEQ ID NO: 1715832 - RNA, 12 nt, Human
guuguauucauu

SEQ ID NO: 1715833 - RNA, 20 nt, Human
guuuaagacauuuuuggaag

SEQ ID NO: 1715834 - RNA, 21 nt, Human
guugcccaggcuggcgugcag

SEQ ID NO: 1715835 - RNA, 19 nt, Human
guugcccaggcaggucuug

SEQ ID NO: 1715836 - RNA, 18 nt, Human
guugcccaggcaggucuu

SEQ ID NO: 1715837 - RNA, 17 nt, Human
guugcccaggcaggucu

SEQ ID NO: 1715838 - RNA, 14 nt, Human
aaggcuccaggagc

SEQ ID NO: 1715839 - RNA, 19 nt, Human
aaggcuaccuuuguauucu

SEQ ID NO: 1715840 - RNA, 18 nt, Human
aaggccaaaggaagcaca

SEQ ID NO: 1715841 - RNA, 23 nt, Human
aaggaugaucuaggaagacuuug

SEQ ID NO: 1715842 - RNA, 18 nt, Human
aaggaugaucuaggaaga

SEQ ID NO: 1715843 - RNA, 17 nt, Human
aaggauccugagccaga

SEQ ID NO: 1715844 - RNA, 15 nt, Human
aaggauccugagcca

SEQ ID NO: 1715845 - RNA, 14 nt, Human
aaggauccugagcc

SEQ ID NO: 1715846 - RNA, 23 nt, Human
guugaugaucuuugcagacaggc

SEQ ID NO: 1715847 - RNA, 21 nt, Human
guugaugccugugaacugaac

SEQ ID NO: 1715848 - RNA, 20 nt, Human
aaggauccugagccagauuu

SEQ ID NO: 1715849 - RNA, 22 nt, Human
aaggaugcacagaguuguuaca

SEQ ID NO: 1715850 - RNA, 18 nt, Human
aaggaugcacagaguugu

SEQ ID NO: 1715851 - RNA, 15 nt, Human
aaggaugcuuguaca

SEQ ID NO: 1715852 - RNA, 16 nt, Human
aaggaugcuuguacau

SEQ ID NO: 1715853 - RNA, 17 nt, Human
aaggaugcuuguacaua

SEQ ID NO: 1715854 - RNA, 19 nt, Human
aaggaugcuuguacauaau

SEQ ID NO: 1715855 - RNA, 19 nt, Human
aaggaugccccgucccccu

SEQ ID NO: 1715856 - RNA, 17 nt, Human
guuaguaugaggcauuu

SEQ ID NO: 1715857 - RNA, 20 nt, Human
guuaguaugaggcauuuguu

SEQ ID NO: 1715858 - RNA, 13 nt, Human
guuagauuaagaa

SEQ ID NO: 1715859 - RNA, 16 nt, Human
guuagauuaagaaaua

SEQ ID NO: 1715860 - RNA, 16 nt, Human
guuacacauuuuucag

SEQ ID NO: 1715861 - RNA, 22 nt, Human
guuaaguugauggugaugaaau

SEQ ID NO: 1715862 - RNA, 18 nt, Human
guuaaugauagcuacugu

SEQ ID NO: 1715863 - RNA, 12 nt, Human
guuaauaaaagu

SEQ ID NO: 1715864 - RNA, 18 nt, Human
guguuuuaaaaugagaaa

SEQ ID NO: 1715865 - RNA, 16 nt, Human
guuaagccuuuggaaa

SEQ ID NO: 1715866 - RNA, 13 nt, Human
guuaagccuuugg

SEQ ID NO: 1715867 - RNA, 12 nt, Human
guuaagccuuug

SEQ ID NO: 1715868 - RNA, 17 nt, Human
guucagcuccagcucac

SEQ ID NO: 1715869 - RNA, 16 nt, Human
guucagcuccagcuca

SEQ ID NO: 1715870 - RNA, 18 nt, Human
guucagcuccagcucacc

SEQ ID NO: 1715871 - RNA, 19 nt, Human
guucaggguuggccccugc

SEQ ID NO: 1715872 - RNA, 18 nt, Human
guucaggguuggccccug

SEQ ID NO: 1715873 - RNA, 17 nt, Human
guucaggguuggccccu

SEQ ID NO: 1715874 - RNA, 22 nt, Human
aagcuaggccuggccagaugca

SEQ ID NO: 1715875 - RNA, 18 nt, Human
aagcuaggccuggccaga

SEQ ID NO: 1715876 - RNA, 17 nt, Human
aagcuaggccuggccag

SEQ ID NO: 1715877 - RNA, 19 nt, Human
aagccuccuccagccgcca

SEQ ID NO: 1715878 - RNA, 13 nt, Human
guucucuccuucu

SEQ ID NO: 1715879 - RNA, 16 nt, Human
guucuacccaggugcu

SEQ ID NO: 1715880 - RNA, 22 nt, Human
guucccuuugacgccaucccag

SEQ ID NO: 1715881 - RNA, 21 nt, Human
guucccuuugacgccauccca

SEQ ID NO: 1715882 - RNA, 20 nt, Human
guucccuuugacgccauccc

SEQ ID NO: 1715883 - RNA, 14 nt, Human
guucuucaucuaag

SEQ ID NO: 1715884 - RNA, 21 nt, Human
guucuugguuuguaaauuaac

SEQ ID NO: 1715885 - RNA, 19 nt, Human
guucuuaguugcuguaugu

SEQ ID NO: 1715886 - RNA, 17 nt, Human
guucuuaguuugcaguu

SEQ ID NO: 1715887 - RNA, 22 nt, Human
guugaugaucuuugcagacagg

SEQ ID NO: 1715888 - RNA, 20 nt, Human
guuccauggccucuucagau

SEQ ID NO: 1715889 - RNA, 20 nt, Human
guucccauuugcuccuuucu

SEQ ID NO: 1715890 - RNA, 16 nt, Human
guucccauuugcuccu

SEQ ID NO: 1715891 - RNA, 20 nt, Human
guucccuacuuccugugacu

SEQ ID NO: 1715892 - RNA, 21 nt, Human
aagcucuacugaggugcuaug

SEQ ID NO: 1715893 - RNA, 22 nt, Human
aagcuauucaguaauaacucua

SEQ ID NO: 1715894 - RNA, 17 nt, Human
aagcuaucguaaaauua

SEQ ID NO: 1715895 - RNA, 15 nt, Human
aacauacucccaucu

SEQ ID NO: 1715896 - RNA, 14 nt, Human
aacauacucccauc

SEQ ID NO: 1715897 - RNA, 14 nt, Human
aacauugcaauaga

SEQ ID NO: 1715898 - RNA, 15 nt, Human
aacauugcaauagaa

SEQ ID NO: 1715899 - RNA, 16 nt, Human
aacauugcaauagaaa

SEQ ID NO: 1715900 - RNA, 20 nt, Human
aacauuuguucuauagcuuu

SEQ ID NO: 1715901 - RNA, 16 nt, Human
aacauuguagccucaa

SEQ ID NO: 1715902 - RNA, 17 nt, Human
aacauugcaauagaaau

SEQ ID NO: 1715903 - RNA, 22 nt, Human
aacauuuguucuauagcuuuuc

SEQ ID NO: 1715904 - RNA, 22 nt, Human
aacaguagugauaguuguaccg

SEQ ID NO: 1715905 - RNA, 23 nt, Human
aacaggcugggcuucaguggcag

SEQ ID NO: 1715906 - RNA, 13 nt, Human
aacaggcugggcu

SEQ ID NO: 1715907 - RNA, 22 nt, Human
aacaggcugggcuucaguggca

SEQ ID NO: 1715908 - RNA, 19 nt, Human
aacagacuggaagcacagc

SEQ ID NO: 1715909 - RNA, 21 nt, Human
guccggucccugucccagugc

SEQ ID NO: 1715910 - RNA, 13 nt, Human
guccgagcuuuga

SEQ ID NO: 1715911 - RNA, 15 nt, Human
gucccaacuuguaaa

SEQ ID NO: 1715912 - RNA, 10 nt, Human
aacagaaaug

SEQ ID NO: 1715913 - RNA, 11 nt, Human
aacagaaaugu

SEQ ID NO: 1715914 - RNA, 21 nt, Human
aacagaaauguacagcaagga

SEQ ID NO: 1715915 - RNA, 23 nt, Human
aacaaggcaaggcugucaauuac

SEQ ID NO: 1715916 - RNA, 21 nt, Human
aacaagccuccuuuuaaagua

SEQ ID NO: 1715917 - RNA, 15 nt, Human
aacaaggcaaggcug

SEQ ID NO: 1715918 - RNA, 16 nt, Human
aacaagaccacguuuc

SEQ ID NO: 1715919 - RNA, 17 nt, Human
aacaagaccacguuucu

SEQ ID NO: 1715920 - RNA, 19 nt, Human
aacaagaccacguuucuaa

SEQ ID NO: 1715921 - RNA, 20 nt, Human
aacaagaccacguuucuaaa

SEQ ID NO: 1715922 - RNA, 15 nt, Human
gucacaggcaggucc

SEQ ID NO: 1715923 - RNA, 13 nt, Human
gucacaggcaggu

SEQ ID NO: 1715924 - RNA, 16 nt, Human
gucacaggcaggucca

SEQ ID NO: 1715925 - RNA, 23 nt, Human
aaauuuuuaaucuuuaauuuuac

SEQ ID NO: 1715926 - RNA, 21 nt, Human
aacacucauugaccugaggcc

SEQ ID NO: 1715927 - RNA, 11 nt, Human
aacacucugag

SEQ ID NO: 1715928 - RNA, 12 nt, Human
aacacuccuuca

SEQ ID NO: 1715929 - RNA, 13 nt, Human
aacacucugagac

SEQ ID NO: 1715930 - RNA, 12 nt, Human
aacacucugaga

SEQ ID NO: 1715931 - RNA, 14 nt, Human
aacacucugagacu

SEQ ID NO: 1715932 - RNA, 20 nt, Human
aacacuguucucugcccucc

SEQ ID NO: 1715933 - RNA, 15 nt, Human
aacacuguucucugc

SEQ ID NO: 1715934 - RNA, 15 nt, Human
guccacaacacacag

SEQ ID NO: 1715935 - RNA, 22 nt, Human
gucauuugagcagggcucagcg

SEQ ID NO: 1715936 - RNA, 21 nt, Human
aacacuguucucugcccucca

SEQ ID NO: 1715937 - RNA, 21 nt, Human
gucauuugagcagggcucagc

SEQ ID NO: 1715938 - RNA, 11 nt, Human
aacacuuccau

SEQ ID NO: 1715939 - RNA, 19 nt, Human
gucuuauauauuguagaua

SEQ ID NO: 1715940 - RNA, 15 nt, Human
gucuuagauguauau

SEQ ID NO: 1715941 - RNA, 15 nt, Human
gucuuuggacccuga

SEQ ID NO: 1715942 - RNA, 14 nt, Human
gucuuuggacccug

SEQ ID NO: 1715943 - RNA, 17 nt, Human
gucuuuggacccugagg

SEQ ID NO: 1715944 - RNA, 18 nt, Human
gucuuuggacccugaggc

SEQ ID NO: 1715945 - RNA, 19 nt, Human
gucuuuucuugcaugaggc

SEQ ID NO: 1715946 - RNA, 14 nt, Human
gucuuuucuugcau

SEQ ID NO: 1715947 - RNA, 24 nt, Human
gucuuuucuugcaugaggcuagug

SEQ ID NO: 1715948 - RNA, 15 nt, Human
gucuggcuucacaga

SEQ ID NO: 1715949 - RNA, 15 nt, Human
aacguggcugcuuca

SEQ ID NO: 1715950 - RNA, 20 nt, Human
aaccugcucuccucuugcca

SEQ ID NO: 1715951 - RNA, 11 nt, Human
aaccugcucuc

SEQ ID NO: 1715952 - RNA, 15 nt, Human
aaccugcucuccucu

SEQ ID NO: 1715953 - RNA, 19 nt, Human
aacguggcugcuucaagga

SEQ ID NO: 1715954 - RNA, 16 nt, Human
aacguggcugcuucaa

SEQ ID NO: 1715955 - RNA, 22 nt, Human
aacguggcugcuucaaggaucc

SEQ ID NO: 1715956 - RNA, 19 nt, Human
aacucccugccccccagcc

SEQ ID NO: 1715957 - RNA, 13 nt, Human
aacucccugcccc

SEQ ID NO: 1715958 - RNA, 13 nt, Human
aacucccuuucaa

SEQ ID NO: 1715959 - RNA, 14 nt, Human
aacucccuuucaac

SEQ ID NO: 1715960 - RNA, 19 nt, Human
gugaaccaccacacccagc

SEQ ID NO: 1715961 - RNA, 13 nt, Human
aacccaaauguuc

SEQ ID NO: 1715962 - RNA, 18 nt, Human
aacccaaauguucaucaa

SEQ ID NO: 1715963 - RNA, 11 nt, Human
aacccagcucu

SEQ ID NO: 1715964 - RNA, 14 nt, Human
aacccagcucuggu

SEQ ID NO: 1715965 - RNA, 13 nt, Human
aacccagcucugg

SEQ ID NO: 1715966 - RNA, 20 nt, Human
aacccauauuuguacaccaa

SEQ ID NO: 1715967 - RNA, 17 nt, Human
aacccagcucuggucca

SEQ ID NO: 1715968 - RNA, 15 nt, Human
aacccccagccugcu

SEQ ID NO: 1715969 - RNA, 14 nt, Human
aacccccagccugc

SEQ ID NO: 1715970 - RNA, 13 nt, Human
aacccccagccug

SEQ ID NO: 1715971 - RNA, 14 nt, Human
aaccuccugggcua

SEQ ID NO: 1715972 - RNA, 17 nt, Human
aaccuccgccucuuggg

SEQ ID NO: 1715973 - RNA, 21 nt, Human
aaccaucauugaaaucuuuuu

SEQ ID NO: 1715974 - RNA, 23 nt, Human
aaccaucauugaaaucuuuuugc

SEQ ID NO: 1715975 - RNA, 20 nt, Human
aaccaucauugaaaucuuuu

SEQ ID NO: 1715976 - RNA, 19 nt, Human
aaccaucauugaaaucuuu

SEQ ID NO: 1715977 - RNA, 22 nt, Human
aaccacaucuugcucugcugac

SEQ ID NO: 1715978 - RNA, 20 nt, Human
aaccacaucuugcucugcug

SEQ ID NO: 1715979 - RNA, 16 nt, Human
gucucccucccuuggg

SEQ ID NO: 1715980 - RNA, 14 nt, Human
aaaugcauuucuaa

SEQ ID NO: 1715981 - RNA, 13 nt, Human
aaaugcccagccc

SEQ ID NO: 1715982 - RNA, 13 nt, Human
aaaugcccagcuu

SEQ ID NO: 1715983 - RNA, 18 nt, Human
aaaugcccagccccuucu

SEQ ID NO: 1715984 - RNA, 15 nt, Human
aaaugcccagccccu

SEQ ID NO: 1715985 - RNA, 14 nt, Human
aaaugcccagcccc

SEQ ID NO: 1715986 - RNA, 23 nt, Human
aaaugccuuacccucauguucuu

SEQ ID NO: 1715987 - RNA, 20 nt, Human
aaaugggcagagcagagacc

SEQ ID NO: 1715988 - RNA, 18 nt, Human
aaaugggcagagcagaga

SEQ ID NO: 1715989 - RNA, 15 nt, Human
aaaugggcagagcag

SEQ ID NO: 1715990 - RNA, 14 nt, Human
aaaugcaccuggaa

SEQ ID NO: 1715991 - RNA, 18 nt, Human
aaaugcaccuggaauaua

SEQ ID NO: 1715992 - RNA, 22 nt, Human
aaaugcaccuggaauauauaac

SEQ ID NO: 1715993 - RNA, 13 nt, Human
aaaugcauguugc

SEQ ID NO: 1715994 - RNA, 21 nt, Human
aaaugaaagcagggacuugaa

SEQ ID NO: 1715995 - RNA, 22 nt, Human
aaaugaaagcagggacuugaac

SEQ ID NO: 1715996 - RNA, 14 nt, Human
aaaugaaagugaga

SEQ ID NO: 1715997 - RNA, 11 nt, Human
aaaugagaaau

SEQ ID NO: 1715998 - RNA, 19 nt, Human
aaaugaggucagagccugc

SEQ ID NO: 1715999 - RNA, 17 nt, Human
aaaugaggucagagccu

SEQ ID NO: 1716000 - RNA, 23 nt, Human
aaaugagguacucuccuggaaau

SEQ ID NO: 1716001 - RNA, 16 nt, Human
aaaugagguacucucc

SEQ ID NO: 1716002 - RNA, 23 nt, Human
aaaugauccccagcuguuuaugc

SEQ ID NO: 1716003 - RNA, 19 nt, Human
aaaugagccuggcaagaau

SEQ ID NO: 1716004 - RNA, 13 nt, Human
aaaugagccuggc

SEQ ID NO: 1716005 - RNA, 16 nt, Human
aaaugagaaaucuaaa

SEQ ID NO: 1716006 - RNA, 14 nt, Human
aaaugagaaaucua

SEQ ID NO: 1716007 - RNA, 13 nt, Human
aaaugagaaaucu

SEQ ID NO: 1716008 - RNA, 18 nt, Human
guaggaagguuaauguuc

SEQ ID NO: 1716009 - RNA, 15 nt, Human
guaggacuguagaaa

SEQ ID NO: 1716010 - RNA, 15 nt, Human
guaggaagacuuugg

SEQ ID NO: 1716011 - RNA, 21 nt, Human
guagcugggacuacaggcacc

SEQ ID NO: 1716012 - RNA, 18 nt, Human
guagcugggauuacaggc

SEQ ID NO: 1716013 - RNA, 19 nt, Human
guagcugggacuacaggca

SEQ ID NO: 1716014 - RNA, 18 nt, Human
guagcugggacuacaggc

SEQ ID NO: 1716015 - RNA, 12 nt, Human
guagcugggacu

SEQ ID NO: 1716016 - RNA, 17 nt, Human
guagcuggauuacaggc

SEQ ID NO: 1716017 - RNA, 14 nt, Human
aaaggaugcacaga

SEQ ID NO: 1716018 - RNA, 17 nt, Human
aaaggagagcuagcagc

SEQ ID NO: 1716019 - RNA, 13 nt, Human
aaaucgaugcagu

SEQ ID NO: 1716020 - RNA, 18 nt, Human
aaaucccuuaccucggug

SEQ ID NO: 1716021 - RNA, 15 nt, Human
aaaucccauuuaaaa

SEQ ID NO: 1716022 - RNA, 19 nt, Human
aaaucuacacuccagugag

SEQ ID NO: 1716023 - RNA, 17 nt, Human
aaaugaaaaucgugaca

SEQ ID NO: 1716024 - RNA, 11 nt, Human
aaaugaaaauu

SEQ ID NO: 1716025 - RNA, 15 nt, Human
aaaucucaaauuucu

SEQ ID NO: 1716026 - RNA, 16 nt, Human
aaaucucaaauuucua

SEQ ID NO: 1716027 - RNA, 17 nt, Human
aaaucucaaauuucuaa

SEQ ID NO: 1716028 - RNA, 19 nt, Human
aaaucucaaauuucuaaau

SEQ ID NO: 1716029 - RNA, 17 nt, Human
guauaaaagccuguuua

SEQ ID NO: 1716030 - RNA, 19 nt, Human
aaaugggggugcauuugag

SEQ ID NO: 1716031 - RNA, 17 nt, Human
aaaugggggugcauuug

SEQ ID NO: 1716032 - RNA, 18 nt, Human
aaaugggggugcauuuga

SEQ ID NO: 1716033 - RNA, 15 nt, Human
aaaugggggugcauu

SEQ ID NO: 1716034 - RNA, 16 nt, Human
aaaugggggugcauuu

SEQ ID NO: 1716035 - RNA, 22 nt, Human
guauauugauccagaaagaaaa

SEQ ID NO: 1716036 - RNA, 18 nt, Human
guauaaaagggacugaga

SEQ ID NO: 1716037 - RNA, 21 nt, Human
guauaaaagccuguuuaagag

SEQ ID NO: 1716038 - RNA, 18 nt, Human
guauaaaagccuguuuaa

SEQ ID NO: 1716039 - RNA, 15 nt, Human
guauucuuauuuaau

SEQ ID NO: 1716040 - RNA, 13 nt, Human
guaugguggcugg

SEQ ID NO: 1716041 - RNA, 15 nt, Human
guaugggagagaaga

SEQ ID NO: 1716042 - RNA, 16 nt, Human
guaugggacuggccuc

SEQ ID NO: 1716043 - RNA, 14 nt, Human
guaugggagagaag

SEQ ID NO: 1716044 - RNA, 15 nt, Human
guaucccuacuguaa

SEQ ID NO: 1716045 - RNA, 17 nt, Human
aaauuucagcagcugca

SEQ ID NO: 1716046 - RNA, 18 nt, Human
aaauuucagcagcugcag

SEQ ID NO: 1716047 - RNA, 12 nt, Human
aaauuucuaaau

SEQ ID NO: 1716048 - RNA, 14 nt, Human
guauuuuuuuacua

SEQ ID NO: 1716049 - RNA, 15 nt, Human
guauuuuuuuacuaa

SEQ ID NO: 1716050 - RNA, 22 nt, Human
aaauuuccacucaggucuguuu

SEQ ID NO: 1716051 - RNA, 14 nt, Human
aaauuuccacucag

SEQ ID NO: 1716052 - RNA, 20 nt, Human
gucacacaguauuacuucug

SEQ ID NO: 1716053 - RNA, 16 nt, Human
gucacacacuuuggcu

SEQ ID NO: 1716054 - RNA, 17 nt, Human
guauuuuuuuacuaaua

SEQ ID NO: 1716055 - RNA, 21 nt, Human
guauuuuuuuacuaauagaca

SEQ ID NO: 1716056 - RNA, 18 nt, Human
gucaaaguggugagaggc

SEQ ID NO: 1716057 - RNA, 19 nt, Human
gucaaaguggugagaggca

SEQ ID NO: 1716058 - RNA, 21 nt, Human
aaauuaacuuuuauaaacuuu

SEQ ID NO: 1716059 - RNA, 20 nt, Human
aaauguuaaguugaugguga

SEQ ID NO: 1716060 - RNA, 22 nt, Human
aaauuaacuuuuauaaacuuua

SEQ ID NO: 1716061 - RNA, 23 nt, Human
aaauuaacuuuuauaaacuuuac

SEQ ID NO: 1716062 - RNA, 22 nt, Human
guauuggcuagagguucaaaga

SEQ ID NO: 1716063 - RNA, 16 nt, Human
guauuuaauucauguu

SEQ ID NO: 1716064 - RNA, 14 nt, Human
aaauucaugcugcu

SEQ ID NO: 1716065 - RNA, 20 nt, Human
aaaagacaaggaaaaaauaa

SEQ ID NO: 1716066 - RNA, 17 nt, Human
aaaagaaagaaaaucag

SEQ ID NO: 1716067 - RNA, 16 nt, Human
aaaagaaaagucaagg

SEQ ID NO: 1716068 - RNA, 17 nt, Human
aaaacacauuuuucuua

SEQ ID NO: 1716069 - RNA, 19 nt, Human
aaaacacuguucucugccc

SEQ ID NO: 1716070 - RNA, 11 nt, Human
aaaagaaaaag

SEQ ID NO: 1716071 - RNA, 14 nt, Human
aaaauaaaacuuuu

SEQ ID NO: 1716072 - RNA, 21 nt, Human
aaaaucagccugcuccagcug

SEQ ID NO: 1716073 - RNA, 17 nt, Human
aaaaucagccugcucca

SEQ ID NO: 1716074 - RNA, 13 nt, Human
aaaaucagccugc

SEQ ID NO: 1716075 - RNA, 16 nt, Human
aaaauaaaacuuuuua

SEQ ID NO: 1716076 - RNA, 15 nt, Human
aaagcccaaaguggu

SEQ ID NO: 1716077 - RNA, 23 nt, Human
aaacugauuuuuuuuuccuucag

SEQ ID NO: 1716078 - RNA, 22 nt, Human
aaacugauuuuuuuuuccuuca

SEQ ID NO: 1716079 - RNA, 23 nt, Human
aaacucuuaaaacccaagugccu

SEQ ID NO: 1716080 - RNA, 12 nt, Human
aaacucuuaaaa

SEQ ID NO: 1716081 - RNA, 16 nt, Human
aaaccgccaaggcugg

SEQ ID NO: 1716082 - RNA, 15 nt, Human
aaaccgccaaggcug

SEQ ID NO: 1716083 - RNA, 18 nt, Human
aaacucuguuacacuuuu

SEQ ID NO: 1716084 - RNA, 22 nt, Human
aaacucuguuacacuuuuugga

SEQ ID NO: 1716085 - RNA, 16 nt, Human
aaacccagcucugguc

SEQ ID NO: 1716086 - RNA, 12 nt, Human
aaacccagcucu

SEQ ID NO: 1716087 - RNA, 18 nt, Human
aaacccagcucuggucca

SEQ ID NO: 1716088 - RNA, 15 nt, Human
aaaaucucaaauuuc

SEQ ID NO: 1716089 - RNA, 16 nt, Human
aaaaucucaaauuucu

SEQ ID NO: 1716090 - RNA, 18 nt, Human
aaaaucucaaauuucuaa

SEQ ID NO: 1716091 - RNA, 22 nt, Human
aacauggccuuugcuugaaaga

SEQ ID NO: 1716092 - RNA, 11 nt, Human
aacaggcagau

SEQ ID NO: 1716093 - RNA, 23 nt, Human
aaauucuucuccacuuucuagcc

SEQ ID NO: 1716094 - RNA, 15 nt, Human
aaauucuugcaaagu

SEQ ID NO: 1716095 - RNA, 18 nt, Human
aaauucuugcaaaguauc

SEQ ID NO: 1716096 - RNA, 23 nt, Human
aacauggccuuugcuugaaagaa

SEQ ID NO: 1716097 - RNA, 12 nt, Human
aacccucagagc

SEQ ID NO: 1716098 - RNA, 19 nt, Human
aacccucagagccaccccu

SEQ ID NO: 1716099 - RNA, 23 nt, Human
aaccuuuugagugccuuacacaa

SEQ ID NO: 1716100 - RNA, 16 nt, Human
aaccuuuugagugccu

SEQ ID NO: 1716101 - RNA, 18 nt, Human
aaccuuuguuugcaucug

SEQ ID NO: 1716102 - RNA, 19 nt, Human
aaaugcuguaacuuucuga

SEQ ID NO: 1716103 - RNA, 22 nt, Human
aaaugcugguuuuucaguuuuc

SEQ ID NO: 1716104 - RNA, 14 nt, Human
aaaugaaaaaauau

SEQ ID NO: 1716105 - RNA, 14 nt, Human
aaaucuuuuugcuu

SEQ ID NO: 1716106 - RNA, 13 nt, Human
aaaucuuuuugcu

SEQ ID NO: 1716107 - RNA, 19 nt, Human
aaaucuccaaaauaaaacu

SEQ ID NO: 1716108 - RNA, 22 nt, Human
aaauauuuagauguaauuuugu

SEQ ID NO: 1716109 - RNA, 20 nt, Human
aaaggaugcccaaagaugca

SEQ ID NO: 1716110 - RNA, 17 nt, Human
aaauguucaucaaugaa

SEQ ID NO: 1716111 - RNA, 13 nt, Human
aaauguucaucaa

SEQ ID NO: 1716112 - RNA, 21 nt, Human
aagacaaggaaaaaauaacaa

SEQ ID NO: 1716113 - RNA, 20 nt, Human
aagacaaugugaaaagaaaa

SEQ ID NO: 1716114 - RNA, 19 nt, Human
aagacaaugugaaaagaaa

SEQ ID NO: 1716115 - RNA, 22 nt, Human
aagacaaugacuuacuguacau

SEQ ID NO: 1716116 - RNA, 16 nt, Human
aacgcagcccugcuuu

SEQ ID NO: 1716117 - RNA, 12 nt, Human
aacgcagcccug

SEQ ID NO: 1716118 - RNA, 14 nt, Human
aagaacuagcauaa

SEQ ID NO: 1716119 - RNA, 13 nt, Human
aagagaaaaaaua

SEQ ID NO: 1716120 - RNA, 19 nt, Human
aagacuuuucuuucagcca

SEQ ID NO: 1716121 - RNA, 12 nt, Human
aagacuuuucuu

SEQ ID NO: 1716122 - RNA, 21 nt, Human
aagacuuuuccaacccucauc

SEQ ID NO: 1716123 - RNA, 15 nt, Human
aagaccacguuucua

SEQ ID NO: 1716124 - RNA, 17 nt, Human
aagaccacguuucuaaa

SEQ ID NO: 1716125 - RNA, 23 nt, Human
aagacagauacuccuccaagguu

SEQ ID NO: 1716126 - RNA, 12 nt, Human
aagacagagucu

SEQ ID NO: 1716127 - RNA, 19 nt, Human
aagcugcacccucaggcag

SEQ ID NO: 1716128 - RNA, 13 nt, Human
aagcugcacccuc

SEQ ID NO: 1716129 - RNA, 22 nt, Human
aagcuagacgagcaggcuucuu

SEQ ID NO: 1716130 - RNA, 13 nt, Human
aaggcaaggcugu

SEQ ID NO: 1716131 - RNA, 15 nt, Human
aaggcaaggcuguca

SEQ ID NO: 1716132 - RNA, 16 nt, Human
aaggcaaggcugucaa

SEQ ID NO: 1716133 - RNA, 22 nt, Human
aaggcagggagggccugggccc

SEQ ID NO: 1716134 - RNA, 19 nt, Human
aaggcagggagggccuggg

SEQ ID NO: 1716135 - RNA, 17 nt, Human
aagauacaguuacucag

SEQ ID NO: 1716136 - RNA, 23 nt, Human
aagauacaguuacucagaauucu

SEQ ID NO: 1716137 - RNA, 21 nt, Human
aagauaauauuaaggaagaca

SEQ ID NO: 1716138 - RNA, 19 nt, Human
aagauaauauuaaggaaga

SEQ ID NO: 1716139 - RNA, 18 nt, Human
aagccauaauuguucuua

SEQ ID NO: 1716140 - RNA, 21 nt, Human
aagccagguuccacagaggac

SEQ ID NO: 1716141 - RNA, 23 nt, Human
aagccagguuccacagaggacac

SEQ ID NO: 1716142 - RNA, 14 nt, Human
aagcggcuggcagc

SEQ ID NO: 1716143 - RNA, 15 nt, Human
aagcgugagccacug

SEQ ID NO: 1716144 - RNA, 16 nt, Human
aagcgugagccacugc

SEQ ID NO: 1716145 - RNA, 13 nt, Human
aagcuagaaauga

SEQ ID NO: 1716146 - RNA, 10 nt, Human
aagccuuugu

SEQ ID NO: 1716147 - RNA, 20 nt, Human
aaugaauacuuuauaaagga

SEQ ID NO: 1716148 - RNA, 20 nt, Human
aaugaugccaugaggaacaa

SEQ ID NO: 1716149 - RNA, 20 nt, Human
aaugauguauguugaagccu

SEQ ID NO: 1716150 - RNA, 20 nt, Human
aaugaaagacuguacaaagu

SEQ ID NO: 1716151 - RNA, 18 nt, Human
aaugaaagacuguacaaa

SEQ ID NO: 1716152 - RNA, 21 nt, Human
aaugaaagacuguacaaagua

SEQ ID NO: 1716153 - RNA, 14 nt, Human
aaugaagcaaugcu

SEQ ID NO: 1716154 - RNA, 13 nt, Human
aauauuaagaaag

SEQ ID NO: 1716155 - RNA, 23 nt, Human
aauauguggaguucaucuugaau

SEQ ID NO: 1716156 - RNA, 16 nt, Human
aauauauaucaaauau

SEQ ID NO: 1716157 - RNA, 21 nt, Human
aaucaccgaaaacguggcugc

SEQ ID NO: 1716158 - RNA, 22 nt, Human
aaucaaugcuauaacuauguug

SEQ ID NO: 1716159 - RNA, 23 nt, Human
aaucaccgaaaacguggcugcuu

SEQ ID NO: 1716160 - RNA, 15 nt, Human
aaucacguaaagcua

SEQ ID NO: 1716161 - RNA, 23 nt, Human
aaucaaguuggcuucuaaucaaa

SEQ ID NO: 1716162 - RNA, 11 nt, Human
aauaaagacag

SEQ ID NO: 1716163 - RNA, 12 nt, Human
aauaaagacagg

SEQ ID NO: 1716164 - RNA, 14 nt, Human
aauaaagcagcguu

SEQ ID NO: 1716165 - RNA, 17 nt, Human
aauaaugugaaacugga

SEQ ID NO: 1716166 - RNA, 22 nt, Human
aauaaugugaaacuggauuaaa

SEQ ID NO: 1716167 - RNA, 19 nt, Human
aauaauguuaacauggaca

SEQ ID NO: 1716168 - RNA, 12 nt, Human
aagugcugggau

SEQ ID NO: 1716169 - RNA, 22 nt, Human
aagugcugggauuacaggugug

SEQ ID NO: 1716170 - RNA, 22 nt, Human
aagugcugcauuuaaaagauac

SEQ ID NO: 1716171 - RNA, 22 nt, Human
aaguuguaggcauaaagucagg

SEQ ID NO: 1716172 - RNA, 16 nt, Human
aauaaacacucuugaa

SEQ ID NO: 1716173 - RNA, 11 nt, Human
aauaaacacuc

SEQ ID NO: 1716174 - RNA, 19 nt, Human
aauaaacacucuugaaaaa

SEQ ID NO: 1716175 - RNA, 15 nt, Human
acaaguuaaauaaau

SEQ ID NO: 1716176 - RNA, 20 nt, Human
acaaggcaaggcugucaauu

SEQ ID NO: 1716177 - RNA, 19 nt, Human
acaaggcaaggcugucaau

SEQ ID NO: 1716178 - RNA, 17 nt, Human
acaaggcaaggcuguca

SEQ ID NO: 1716179 - RNA, 16 nt, Human
acaaggcaaggcuguc

SEQ ID NO: 1716180 - RNA, 15 nt, Human
acaccaauauucaua

SEQ ID NO: 1716181 - RNA, 23 nt, Human
acaccagagcccaccuuggcuca

SEQ ID NO: 1716182 - RNA, 18 nt, Human
acaccagagcccaccuug

SEQ ID NO: 1716183 - RNA, 18 nt, Human
acacagcucuucuccagg

SEQ ID NO: 1716184 - RNA, 19 nt, Human
acacagcucuucuccaggc

SEQ ID NO: 1716185 - RNA, 16 nt, Human
acacagcucuucucca

SEQ ID NO: 1716186 - RNA, 14 nt, Human
acacagcucuucuc

SEQ ID NO: 1716187 - RNA, 11 nt, Human
aauuguaauag

SEQ ID NO: 1716188 - RNA, 17 nt, Human
aauuucccaaagcagug

SEQ ID NO: 1716189 - RNA, 15 nt, Human
aauuucccaaagcag

SEQ ID NO: 1716190 - RNA, 21 nt, Human
aauuuccacucaggucuguuu

SEQ ID NO: 1716191 - RNA, 19 nt, Human
aauuauacccccugcaaag

SEQ ID NO: 1716192 - RNA, 19 nt, Human
aauuaugaguuauuuuuau

SEQ ID NO: 1716193 - RNA, 22 nt, Human
aauuguaaggaaugauuaauua

SEQ ID NO: 1716194 - RNA, 13 nt, Human
aauucuuaaauau

SEQ ID NO: 1716195 - RNA, 22 nt, Human
aauuggauacgacaacuugcac

SEQ ID NO: 1716196 - RNA, 18 nt, Human
aauucuguuuuucuaggc

SEQ ID NO: 1716197 - RNA, 14 nt, Human
aauucuguuuuucu

SEQ ID NO: 1716198 - RNA, 21 nt, Human
aauucucauuugucacacacu

SEQ ID NO: 1716199 - RNA, 14 nt, Human
aauucuccugccuc

SEQ ID NO: 1716200 - RNA, 16 nt, Human
aauucuccugccucag

SEQ ID NO: 1716201 - RNA, 15 nt, Human
aauucuccugccuca

SEQ ID NO: 1716202 - RNA, 15 nt, Human
aauucucuuauccaa

SEQ ID NO: 1716203 - RNA, 15 nt, Human
aauucucuaguuuga

SEQ ID NO: 1716204 - RNA, 17 nt, Human
aauucucuaguuugauu

SEQ ID NO: 1716205 - RNA, 19 nt, Human
aauucucagaaucucaaau

SEQ ID NO: 1716206 - RNA, 13 nt, Human
aauucuaugccug

SEQ ID NO: 1716207 - RNA, 15 nt, Human
aauucuaugccuguc

SEQ ID NO: 1716208 - RNA, 14 nt, Human
aauucuacuuugag

SEQ ID NO: 1716209 - RNA, 22 nt, Human
aauucuagcuuugagcuuaaga

SEQ ID NO: 1716210 - RNA, 17 nt, Human
acauguguuggcagccu

SEQ ID NO: 1716211 - RNA, 17 nt, Human
acauguuaaacuuacuu

SEQ ID NO: 1716212 - RNA, 19 nt, Human
acauguuuuucuucucccu

SEQ ID NO: 1716213 - RNA, 15 nt, Human
acauaagauaaaugu

SEQ ID NO: 1716214 - RNA, 20 nt, Human
acauaaguauuuaauucaug

SEQ ID NO: 1716215 - RNA, 20 nt, Human
acauacaggaagguagaaau

SEQ ID NO: 1716216 - RNA, 16 nt, Human
acauacaauuccaaac

SEQ ID NO: 1716217 - RNA, 13 nt, Human
acaugcacgugug

SEQ ID NO: 1716218 - RNA, 17 nt, Human
accaacgucugugccau

SEQ ID NO: 1716219 - RNA, 14 nt, Human
accaacgucugugc

SEQ ID NO: 1716220 - RNA, 13 nt, Human
accacguuucuaa

SEQ ID NO: 1716221 - RNA, 14 nt, Human
accacguuucuaaa

SEQ ID NO: 1716222 - RNA, 16 nt, Human
accacgcuggaccuug

SEQ ID NO: 1716223 - RNA, 14 nt, Human
accacgcuggaccu

SEQ ID NO: 1716224 - RNA, 18 nt, Human
accacgcuggaccuugaa

SEQ ID NO: 1716225 - RNA, 21 nt, Human
accaacgucugugccauuuug

SEQ ID NO: 1716226 - RNA, 14 nt, Human
accaagccguggcu

SEQ ID NO: 1716227 - RNA, 18 nt, Human
accaagccguggcuuccc

SEQ ID NO: 1716228 - RNA, 17 nt, Human
accaagccguggcuucc

SEQ ID NO: 1716229 - RNA, 16 nt, Human
accaagccguggcuuc

SEQ ID NO: 1716230 - RNA, 15 nt, Human
accaagccguggcuu

SEQ ID NO: 1716231 - RNA, 16 nt, Human
accagagcugccaccu

SEQ ID NO: 1716232 - RNA, 14 nt, Human
accagagcugccac

SEQ ID NO: 1716233 - RNA, 13 nt, Human
accagagcugcca

SEQ ID NO: 1716234 - RNA, 19 nt, Human
acagugauuaccagggacu

SEQ ID NO: 1716235 - RNA, 13 nt, Human
acagugcaucuca

SEQ ID NO: 1716236 - RNA, 18 nt, Human
acagugcaucucagccca

SEQ ID NO: 1716237 - RNA, 17 nt, Human
acagugcaucucagccc

SEQ ID NO: 1716238 - RNA, 15 nt, Human
acagugcaucucagc

SEQ ID NO: 1716239 - RNA, 23 nt, Human
acaggcacccaccaucaugucug

SEQ ID NO: 1716240 - RNA, 18 nt, Human
acaguggaaccagcccag

SEQ ID NO: 1716241 - RNA, 14 nt, Human
acaggauuauugga

SEQ ID NO: 1716242 - RNA, 17 nt, Human
acaggcaaugcuggcug

SEQ ID NO: 1716243 - RNA, 14 nt, Human
acaggcacccacca

SEQ ID NO: 1716244 - RNA, 16 nt, Human
acaggcaaugcuggcu

SEQ ID NO: 1716245 - RNA, 15 nt, Human
acaggcaaugcuggc

SEQ ID NO: 1716246 - RNA, 20 nt, Human
acagcucuucuccaggcugu

SEQ ID NO: 1716247 - RNA, 19 nt, Human
acagcucuucuccaggcug

SEQ ID NO: 1716248 - RNA, 19 nt, Human
acgcugugcugcccugccc

SEQ ID NO: 1716249 - RNA, 22 nt, Human
acgcugugcugcccugcccacc

SEQ ID NO: 1716250 - RNA, 23 nt, Human
acgcagcccugcuuugggcugcc

SEQ ID NO: 1716251 - RNA, 22 nt, Human
acgcagcccugcuuugggcugc

SEQ ID NO: 1716252 - RNA, 12 nt, Human
acgcagcccugc

SEQ ID NO: 1716253 - RNA, 19 nt, Human
acggacacucaaaagcugg

SEQ ID NO: 1716254 - RNA, 17 nt, Human
acggacacucaaaagcu

SEQ ID NO: 1716255 - RNA, 19 nt, Human
acggaauaguuggcuagga

SEQ ID NO: 1716256 - RNA, 13 nt, Human
acgucugugccau

SEQ ID NO: 1716257 - RNA, 12 nt, Human
acgucugugcca

SEQ ID NO: 1716258 - RNA, 20 nt, Human
acgauuucuguuuagauaau

SEQ ID NO: 1716259 - RNA, 23 nt, Human
acgauuucuguuuagauaauaca

SEQ ID NO: 1716260 - RNA, 19 nt, Human
acgauuucuguuuagauaa

SEQ ID NO: 1716261 - RNA, 18 nt, Human
acuaauggggcggugaga

SEQ ID NO: 1716262 - RNA, 12 nt, Human
accuuggcucaa

SEQ ID NO: 1716263 - RNA, 23 nt, Human
accucugccugaagucacacagu

SEQ ID NO: 1716264 - RNA, 20 nt, Human
accucugccugaagucacac

SEQ ID NO: 1716265 - RNA, 12 nt, Human
accucugccuga

SEQ ID NO: 1716266 - RNA, 20 nt, Human
accugccccucaacucuccu

SEQ ID NO: 1716267 - RNA, 15 nt, Human
accugccccucaacu

SEQ ID NO: 1716268 - RNA, 12 nt, Human
accugccccuca

SEQ ID NO: 1716269 - RNA, 23 nt, Human
accugccaggaagccagcaggcu

SEQ ID NO: 1716270 - RNA, 22 nt, Human
accugccaggaagccagcaggc

SEQ ID NO: 1716271 - RNA, 21 nt, Human
accugccaggaagccagcagg

SEQ ID NO: 1716272 - RNA, 18 nt, Human
accuguggccaaguucuu

SEQ ID NO: 1716273 - RNA, 17 nt, Human
accuguggccaaguucu

SEQ ID NO: 1716274 - RNA, 21 nt, Human
acccugucucuacuaaaaaua

SEQ ID NO: 1716275 - RNA, 16 nt, Human
acccugugauggggcc

SEQ ID NO: 1716276 - RNA, 16 nt, Human
acccuggggagaaagu

SEQ ID NO: 1716277 - RNA, 16 nt, Human
acccucaggcaggugg

SEQ ID NO: 1716278 - RNA, 15 nt, Human
acccucaggcaggug

SEQ ID NO: 1716279 - RNA, 13 nt, Human
acccucaucacca

SEQ ID NO: 1716280 - RNA, 14 nt, Human
acccucaggcaggu

SEQ ID NO: 1716281 - RNA, 13 nt, Human
acccucaggcagg

SEQ ID NO: 1716282 - RNA, 18 nt, Human
acccucagagccaccccu

SEQ ID NO: 1716283 - RNA, 23 nt, Human
acccuggcacuauaauguaagcu

SEQ ID NO: 1716284 - RNA, 18 nt, Human
acccuggcacccagggug

SEQ ID NO: 1716285 - RNA, 23 nt, Human
acccucaucaccaacgucugugc

SEQ ID NO: 1716286 - RNA, 13 nt, Human
acccuauugcugc

SEQ ID NO: 1716287 - RNA, 19 nt, Human
acccuauugcugcuugagg

SEQ ID NO: 1716288 - RNA, 14 nt, Human
acccuauugcugcu

SEQ ID NO: 1716289 - RNA, 11 nt, Human
acccucagagc

SEQ ID NO: 1716290 - RNA, 21 nt, Human
accucaggugauccacccacc

SEQ ID NO: 1716291 - RNA, 20 nt, Human
accucaggugauccacccac

SEQ ID NO: 1716292 - RNA, 11 nt, Human
accucaggccu

SEQ ID NO: 1716293 - RNA, 16 nt, Human
accgggcacucagaag

SEQ ID NO: 1716294 - RNA, 14 nt, Human
accgggcacucaga

SEQ ID NO: 1716295 - RNA, 12 nt, Human
accgggcacuca

SEQ ID NO: 1716296 - RNA, 21 nt, Human
acccugugauggggcccugcc

SEQ ID NO: 1716297 - RNA, 20 nt, Human
acccugugauggggcccugc

SEQ ID NO: 1716298 - RNA, 19 nt, Human
acccugugauggggcccug

SEQ ID NO: 1716299 - RNA, 17 nt, Human
acccugugauggggccc

SEQ ID NO: 1716300 - RNA, 23 nt, Human
accgugaggccagagacacaagc

SEQ ID NO: 1716301 - RNA, 19 nt, Human
accgugccuggccacgccc

SEQ ID NO: 1716302 - RNA, 11 nt, Human
accucagccuc

SEQ ID NO: 1716303 - RNA, 12 nt, Human
accucagccucc

SEQ ID NO: 1716304 - RNA, 18 nt, Human
accgugaggccagagaca

SEQ ID NO: 1716305 - RNA, 23 nt, Human
accgggcugggagcucugcagag

SEQ ID NO: 1716306 - RNA, 21 nt, Human
accgggcugggagcucugcag

SEQ ID NO: 1716307 - RNA, 19 nt, Human
acuguuucaaacuuuacua

SEQ ID NO: 1716308 - RNA, 15 nt, Human
acuguuucaaacuuu

SEQ ID NO: 1716309 - RNA, 18 nt, Human
acuguuucaaacuuuacu

SEQ ID NO: 1716310 - RNA, 20 nt, Human
acuuaaaauauuccugcauu

SEQ ID NO: 1716311 - RNA, 15 nt, Human
acuucaaaaguuugu

SEQ ID NO: 1716312 - RNA, 22 nt, Human
acuuaaaaaugguuuaaauggu

SEQ ID NO: 1716313 - RNA, 21 nt, Human
acuucagacauagaauuaaca

SEQ ID NO: 1716314 - RNA, 13 nt, Human
acuuggucuguga

SEQ ID NO: 1716315 - RNA, 23 nt, Human
acuuggggggcugaggugggagg

SEQ ID NO: 1716316 - RNA, 16 nt, Human
acuugaaaauuaacau

SEQ ID NO: 1716317 - RNA, 14 nt, Human
acuugaaaauuaac

SEQ ID NO: 1716318 - RNA, 12 nt, Human
acuugaaaauua

SEQ ID NO: 1716319 - RNA, 17 nt, Human
acuguaaaauaauaacu

SEQ ID NO: 1716320 - RNA, 12 nt, Human
acugguggcccg

SEQ ID NO: 1716321 - RNA, 12 nt, Human
acuggaacucuc

SEQ ID NO: 1716322 - RNA, 15 nt, Human
acugccuauuuuaau

SEQ ID NO: 1716323 - RNA, 19 nt, Human
acugcccaggccugccugu

SEQ ID NO: 1716324 - RNA, 14 nt, Human
acugccaugccagc

SEQ ID NO: 1716325 - RNA, 18 nt, Human
acugugccaugugccagg

SEQ ID NO: 1716326 - RNA, 17 nt, Human
acugugccaugugccag

SEQ ID NO: 1716327 - RNA, 16 nt, Human
acugugaagagaacca

SEQ ID NO: 1716328 - RNA, 23 nt, Human
acugucuuuuuucuaaaguaaaa

SEQ ID NO: 1716329 - RNA, 22 nt, Human
acugucuuuuuucuaaaguaaa

SEQ ID NO: 1716330 - RNA, 16 nt, Human
acugucuuuuuucuaa

SEQ ID NO: 1716331 - RNA, 23 nt, Human
acugaauuucuuuugccguuauu

SEQ ID NO: 1716332 - RNA, 18 nt, Human
acugacauuguuggccaa

SEQ ID NO: 1716333 - RNA, 17 nt, Human
acugacauuguuggcca

SEQ ID NO: 1716334 - RNA, 12 nt, Human
acugaauuucuu

SEQ ID NO: 1716335 - RNA, 16 nt, Human
acugauuuuuuuuucc

SEQ ID NO: 1716336 - RNA, 20 nt, Human
acugauuuuuuuuuccuuca

SEQ ID NO: 1716337 - RNA, 19 nt, Human
acugauuuuuuuuuccuuc

SEQ ID NO: 1716338 - RNA, 18 nt, Human
acugauuuuuuuuuccuu

SEQ ID NO: 1716339 - RNA, 17 nt, Human
acugauuuuuuuuuccu

SEQ ID NO: 1716340 - RNA, 22 nt, Human
acugacauuguuggccaaagcc

SEQ ID NO: 1716341 - RNA, 14 nt, Human
acugauuacugccu

SEQ ID NO: 1716342 - RNA, 20 nt, Human
acugauguaugaggaauuuc

SEQ ID NO: 1716343 - RNA, 15 nt, Human
acucuacagaggcca

SEQ ID NO: 1716344 - RNA, 14 nt, Human
acucccuuucaaca

SEQ ID NO: 1716345 - RNA, 18 nt, Human
acucccugccccccagcc

SEQ ID NO: 1716346 - RNA, 22 nt, Human
acucccaucugugaaaggaaag

SEQ ID NO: 1716347 - RNA, 15 nt, Human
acucccaagcuggac

SEQ ID NO: 1716348 - RNA, 22 nt, Human
aggcucuggagcccacuguacu

SEQ ID NO: 1716349 - RNA, 13 nt, Human
aggcugaggacuu

SEQ ID NO: 1716350 - RNA, 11 nt, Human
aggcugaggac

SEQ ID NO: 1716351 - RNA, 13 nt, Human
aggcugagccuca

SEQ ID NO: 1716352 - RNA, 11 nt, Human
aggcugagccu

SEQ ID NO: 1716353 - RNA, 13 nt, Human
aggcucuucuccu

SEQ ID NO: 1716354 - RNA, 23 nt, Human
aggcuguaucccaugagccucag

SEQ ID NO: 1716355 - RNA, 19 nt, Human
aggcugcagugagccgaga

SEQ ID NO: 1716356 - RNA, 17 nt, Human
aggcugcagugagccga

SEQ ID NO: 1716357 - RNA, 12 nt, Human
aggcugucaauu

SEQ ID NO: 1716358 - RNA, 19 nt, Human
aggcugucaauuacaggaa

SEQ ID NO: 1716359 - RNA, 24 nt, Human
aggcuguaucccaugagccucagc

SEQ ID NO: 1716360 - RNA, 20 nt, Human
aggcccucugcccacucccu

SEQ ID NO: 1716361 - RNA, 19 nt, Human
aggcccucugcccacuccc

SEQ ID NO: 1716362 - RNA, 21 nt, Human
aggcccucugcccacucccug

SEQ ID NO: 1716363 - RNA, 14 nt, Human
agggccuggcucag

SEQ ID NO: 1716364 - RNA, 13 nt, Human
agggccuggcuca

SEQ ID NO: 1716365 - RNA, 18 nt, Human
agggccuggcucaggugg

SEQ ID NO: 1716366 - RNA, 14 nt, Human
agggacugagaaau

SEQ ID NO: 1716367 - RNA, 13 nt, Human
agggacugagaaa

SEQ ID NO: 1716368 - RNA, 15 nt, Human
agggacugagaaauu

SEQ ID NO: 1716369 - RNA, 17 nt, Human
agggacugagaaauuua

SEQ ID NO: 1716370 - RNA, 13 nt, Human
aggaaguagagga

SEQ ID NO: 1716371 - RNA, 19 nt, Human
aggaaguacuggagaaaau

SEQ ID NO: 1716372 - RNA, 16 nt, Human
aggagagcccuucauu

SEQ ID NO: 1716373 - RNA, 14 nt, Human
aggaggucucuaag

SEQ ID NO: 1716374 - RNA, 12 nt, Human
aggagugagcac

SEQ ID NO: 1716375 - RNA, 15 nt, Human
aggaggucucuaaga

SEQ ID NO: 1716376 - RNA, 14 nt, Human
aggagugagcacua

SEQ ID NO: 1716377 - RNA, 18 nt, Human
aggaguuucguuuucaaa

SEQ ID NO: 1716378 - RNA, 23 nt, Human
aggccagcugcuugggcuucauc

SEQ ID NO: 1716379 - RNA, 17 nt, Human
aggcccucugcccacuc

SEQ ID NO: 1716380 - RNA, 17 nt, Human
aggccaugggccuccug

SEQ ID NO: 1716381 - RNA, 16 nt, Human
aggccaugggccuccu

SEQ ID NO: 1716382 - RNA, 14 nt, Human
aggccaugggccuc

SEQ ID NO: 1716383 - RNA, 23 nt, Human
aggccaggcccucugcccacucc

SEQ ID NO: 1716384 - RNA, 19 nt, Human
aggccaggcccucugccca

SEQ ID NO: 1716385 - RNA, 18 nt, Human
aggccaggcccucugccc

SEQ ID NO: 1716386 - RNA, 17 nt, Human
aggccaggcccucugcc

SEQ ID NO: 1716387 - RNA, 16 nt, Human
aggccaggcccucugc

SEQ ID NO: 1716388 - RNA, 16 nt, Human
aggccagcugcuuggg

SEQ ID NO: 1716389 - RNA, 14 nt, Human
aggccagcugcuug

SEQ ID NO: 1716390 - RNA, 13 nt, Human
aggccagcugcuu

SEQ ID NO: 1716391 - RNA, 23 nt, Human
aggcauuccccaggaggccagcc

SEQ ID NO: 1716392 - RNA, 22 nt, Human
aggcauuccccaggaggccagc

SEQ ID NO: 1716393 - RNA, 17 nt, Human
aggcauuccccaggagg

SEQ ID NO: 1716394 - RNA, 22 nt, Human
aggcauguucucugaggacacu

SEQ ID NO: 1716395 - RNA, 20 nt, Human
aggcauguucucugaggaca

SEQ ID NO: 1716396 - RNA, 21 nt, Human
aggcauuccccaggaggccag

SEQ ID NO: 1716397 - RNA, 18 nt, Human
aggcagccaggccacaag

SEQ ID NO: 1716398 - RNA, 17 nt, Human
aggcaucgcaauguaag

SEQ ID NO: 1716399 - RNA, 24 nt, Human
aggcaugugaugagaggaaaucac

SEQ ID NO: 1716400 - RNA, 23 nt, Human
aggcaugugaugagaggaaauca

SEQ ID NO: 1716401 - RNA, 12 nt, Human
aggcauguucuc

SEQ ID NO: 1716402 - RNA, 22 nt, Human
aggcaugugccacccacccaac

SEQ ID NO: 1716403 - RNA, 20 nt, Human
aggcagagguugcagugagc

SEQ ID NO: 1716404 - RNA, 13 nt, Human
aggcagauacagg

SEQ ID NO: 1716405 - RNA, 22 nt, Human
aggcagaacucaucuagguaaa

SEQ ID NO: 1716406 - RNA, 16 nt, Human
aggcagccaggccaca

SEQ ID NO: 1716407 - RNA, 15 nt, Human
aggcagccaggccac

SEQ ID NO: 1716408 - RNA, 14 nt, Human
aggcagccaggcca

SEQ ID NO: 1716409 - RNA, 12 nt, Human
agcuacaaaugc

SEQ ID NO: 1716410 - RNA, 15 nt, Human
agcuaaugggacacu

SEQ ID NO: 1716411 - RNA, 14 nt, Human
agcuaaugggacac

SEQ ID NO: 1716412 - RNA, 13 nt, Human
agcuaaugggaca

SEQ ID NO: 1716413 - RNA, 19 nt, Human
agcuaagguuuagauaaau

SEQ ID NO: 1716414 - RNA, 13 nt, Human
agcuacaaaugca

SEQ ID NO: 1716415 - RNA, 21 nt, Human
agcucaccagccccagugccc

SEQ ID NO: 1716416 - RNA, 15 nt, Human
agcucaccagcccca

SEQ ID NO: 1716417 - RNA, 14 nt, Human
agcucaccagcccc

SEQ ID NO: 1716418 - RNA, 13 nt, Human
agcucaccagccc

SEQ ID NO: 1716419 - RNA, 13 nt, Human
agcgacagugaga

SEQ ID NO: 1716420 - RNA, 15 nt, Human
agcgacagugagacu

SEQ ID NO: 1716421 - RNA, 17 nt, Human
agcgacagugagacucu

SEQ ID NO: 1716422 - RNA, 15 nt, Human
agcgauucuucugcu

SEQ ID NO: 1716423 - RNA, 19 nt, Human
agcgauucuucugcuucag

SEQ ID NO: 1716424 - RNA, 17 nt, Human
agcgauucuucugcuuc

SEQ ID NO: 1716425 - RNA, 20 nt, Human
agcuaacauggaaguacuau

SEQ ID NO: 1716426 - RNA, 19 nt, Human
agcuaacauggaaguacua

SEQ ID NO: 1716427 - RNA, 18 nt, Human
agccugggcaaugugaua

SEQ ID NO: 1716428 - RNA, 14 nt, Human
agccuggacccugu

SEQ ID NO: 1716429 - RNA, 18 nt, Human
agccuggcacagggcagu

SEQ ID NO: 1716430 - RNA, 17 nt, Human
agccuggcacagggcag

SEQ ID NO: 1716431 - RNA, 20 nt, Human
agccuggcacagggcagugg

SEQ ID NO: 1716432 - RNA, 17 nt, Human
agccugcugccugcuuu

SEQ ID NO: 1716433 - RNA, 22 nt, Human
agcuuuguuuguugucagcuga

SEQ ID NO: 1716434 - RNA, 21 nt, Human
agcuuuguuuguugucagcug

SEQ ID NO: 1716435 - RNA, 18 nt, Human
aggaaaaaauaacaauga

SEQ ID NO: 1716436 - RNA, 19 nt, Human
aggaaaaccaagccguggc

SEQ ID NO: 1716437 - RNA, 14 nt, Human
aggaagguagaaau

SEQ ID NO: 1716438 - RNA, 15 nt, Human
aggaaguacuggaga

SEQ ID NO: 1716439 - RNA, 11 nt, Human
aggaaguacug

SEQ ID NO: 1716440 - RNA, 12 nt, Human
aggaacacuccu

SEQ ID NO: 1716441 - RNA, 23 nt, Human
aggaaaaccaagccguggcuucc

SEQ ID NO: 1716442 - RNA, 22 nt, Human
aggaaaaccaagccguggcuuc

SEQ ID NO: 1716443 - RNA, 21 nt, Human
aggaaaaccaagccguggcuu

SEQ ID NO: 1716444 - RNA, 20 nt, Human
aggaaaaccaagccguggcu

SEQ ID NO: 1716445 - RNA, 15 nt, Human
aggaacacuccuuca

SEQ ID NO: 1716446 - RNA, 16 nt, Human
agcugucaaggcucag

SEQ ID NO: 1716447 - RNA, 15 nt, Human
agcuggucccacuca

SEQ ID NO: 1716448 - RNA, 16 nt, Human
agcuggguuggaaaac

SEQ ID NO: 1716449 - RNA, 20 nt, Human
agcuggguuggaaaacagua

SEQ ID NO: 1716450 - RNA, 16 nt, Human
agcugguugagguuuc

SEQ ID NO: 1716451 - RNA, 21 nt, Human
agcugacuuuucuguccgagc

SEQ ID NO: 1716452 - RNA, 15 nt, Human
agcugacuuuucugu

SEQ ID NO: 1716453 - RNA, 23 nt, Human
agcucaccagccccagugcccac

SEQ ID NO: 1716454 - RNA, 22 nt, Human
agcucaccagccccagugccca

SEQ ID NO: 1716455 - RNA, 18 nt, Human
agacgaaacauuuguucu

SEQ ID NO: 1716456 - RNA, 17 nt, Human
agacccaaaaggcagaa

SEQ ID NO: 1716457 - RNA, 23 nt, Human
agaccaucccugaaggccccgcc

SEQ ID NO: 1716458 - RNA, 14 nt, Human
agaccacguuucua

SEQ ID NO: 1716459 - RNA, 23 nt, Human
agacagcccgggcucugccuccc

SEQ ID NO: 1716460 - RNA, 22 nt, Human
agacagcccgggcucugccucc

SEQ ID NO: 1716461 - RNA, 14 nt, Human
agacaauuuauuau

SEQ ID NO: 1716462 - RNA, 21 nt, Human
agacagcccgggcucugccuc

SEQ ID NO: 1716463 - RNA, 13 nt, Human
agacagcccucca

SEQ ID NO: 1716464 - RNA, 20 nt, Human
agacgcugugcugcccugcc

SEQ ID NO: 1716465 - RNA, 19 nt, Human
agacgcugugcugcccugc

SEQ ID NO: 1716466 - RNA, 18 nt, Human
agacgcugugcugcccug

SEQ ID NO: 1716467 - RNA, 17 nt, Human
agacgcugugcugcccu

SEQ ID NO: 1716468 - RNA, 15 nt, Human
agacuaucuaaaugu

SEQ ID NO: 1716469 - RNA, 19 nt, Human
agacaaggaaaaaauaaca

SEQ ID NO: 1716470 - RNA, 20 nt, Human
agacaaugugaaaagaaaaa

SEQ ID NO: 1716471 - RNA, 15 nt, Human
agaauuuugagcagg

SEQ ID NO: 1716472 - RNA, 16 nt, Human
agacucuuuggacacu

SEQ ID NO: 1716473 - RNA, 23 nt, Human
agagagcaagacgcugugcugcc

SEQ ID NO: 1716474 - RNA, 19 nt, Human
agagagcaagacgcugugc

SEQ ID NO: 1716475 - RNA, 11 nt, Human
agagagcaaga

SEQ ID NO: 1716476 - RNA, 18 nt, Human
agagcccacgcccccacu

SEQ ID NO: 1716477 - RNA, 12 nt, Human
agacugaccaau

SEQ ID NO: 1716478 - RNA, 21 nt, Human
agacugaccaauauuguacag

SEQ ID NO: 1716479 - RNA, 22 nt, Human
agaacagugauuaccagggacu

SEQ ID NO: 1716480 - RNA, 18 nt, Human
agaaccaaaaagaggcua

SEQ ID NO: 1716481 - RNA, 17 nt, Human
agaaccaaaaagaggcu

SEQ ID NO: 1716482 - RNA, 17 nt, Human
agaacaucccuccuggg

SEQ ID NO: 1716483 - RNA, 13 nt, Human
agaacaucccucc

SEQ ID NO: 1716484 - RNA, 18 nt, Human
agaaugcucuuuacuuca

SEQ ID NO: 1716485 - RNA, 23 nt, Human
agaaugcacaaacagaggccgcc

SEQ ID NO: 1716486 - RNA, 17 nt, Human
agaaucucaaauaacua

SEQ ID NO: 1716487 - RNA, 16 nt, Human
agaaugaaagggccca

SEQ ID NO: 1716488 - RNA, 20 nt, Human
agaaccaggcaacuugggaa

SEQ ID NO: 1716489 - RNA, 21 nt, Human
agaaccaaaaagaggcuaugu

SEQ ID NO: 1716490 - RNA, 17 nt, Human
agaaccaggcaacuugg

SEQ ID NO: 1716491 - RNA, 23 nt, Human
agaagagaaugcacaaacagagg

SEQ ID NO: 1716492 - RNA, 15 nt, Human
agaagagaaugcaca

SEQ ID NO: 1716493 - RNA, 14 nt, Human
agaagucacacagu

SEQ ID NO: 1716494 - RNA, 19 nt, Human
agaagucuuagauguauau

SEQ ID NO: 1716495 - RNA, 17 nt, Human
agaagucuuagauguau

SEQ ID NO: 1716496 - RNA, 18 nt, Human
agaagaugaaugagcaaa

SEQ ID NO: 1716497 - RNA, 19 nt, Human
agaagauggcacuuauaac

SEQ ID NO: 1716498 - RNA, 16 nt, Human
agcaucuaugugagac

SEQ ID NO: 1716499 - RNA, 23 nt, Human
agccagcaggcucucaggccagc

SEQ ID NO: 1716500 - RNA, 21 nt, Human
agccagcaggcucucaggcca

SEQ ID NO: 1716501 - RNA, 22 nt, Human
agccagcaggcucucaggccag

SEQ ID NO: 1716502 - RNA, 20 nt, Human
agcccacgcccccacuggug

SEQ ID NO: 1716503 - RNA, 19 nt, Human
agcccacgcccccacuggu

SEQ ID NO: 1716504 - RNA, 18 nt, Human
agcccacgcccccacugg

SEQ ID NO: 1716505 - RNA, 17 nt, Human
agcccacgcccccacug

SEQ ID NO: 1716506 - RNA, 13 nt, Human
agcccaccuuggc

SEQ ID NO: 1716507 - RNA, 23 nt, Human
agcccaccccucaacaccucugc

SEQ ID NO: 1716508 - RNA, 22 nt, Human
agccagauuucacucuccuugg

SEQ ID NO: 1716509 - RNA, 20 nt, Human
agccagauuucacucuccuu

SEQ ID NO: 1716510 - RNA, 17 nt, Human
agccagauuucacucuc

SEQ ID NO: 1716511 - RNA, 14 nt, Human
agccagauuucacu

SEQ ID NO: 1716512 - RNA, 17 nt, Human
agccaacuauggccugu

SEQ ID NO: 1716513 - RNA, 16 nt, Human
agcagccuggacccug

SEQ ID NO: 1716514 - RNA, 16 nt, Human
agcagugcaugcuguc

SEQ ID NO: 1716515 - RNA, 13 nt, Human
agcagugcaugcu

SEQ ID NO: 1716516 - RNA, 19 nt, Human
agcagcguuucuaugacac

SEQ ID NO: 1716517 - RNA, 20 nt, Human
agcagccuggacccugugga

SEQ ID NO: 1716518 - RNA, 18 nt, Human
agcagugcaugcuguccc

SEQ ID NO: 1716519 - RNA, 17 nt, Human
agcagugcaugcugucc

SEQ ID NO: 1716520 - RNA, 21 nt, Human
agcacagacccugcccugugg

SEQ ID NO: 1716521 - RNA, 20 nt, Human
agcaauucuccugccucagc

SEQ ID NO: 1716522 - RNA, 19 nt, Human
agcaauucuccugccucag

SEQ ID NO: 1716523 - RNA, 18 nt, Human
agcaauucuccugccuca

SEQ ID NO: 1716524 - RNA, 17 nt, Human
agcaauucuccugccuc

SEQ ID NO: 1716525 - RNA, 15 nt, Human
agcaauucuccugcc

SEQ ID NO: 1716526 - RNA, 20 nt, Human
agauagauaggucagugcaa

SEQ ID NO: 1716527 - RNA, 20 nt, Human
agauagccaaggccaaagga

SEQ ID NO: 1716528 - RNA, 15 nt, Human
agauauaaaagacug

SEQ ID NO: 1716529 - RNA, 13 nt, Human
agaguugaagaca

SEQ ID NO: 1716530 - RNA, 15 nt, Human
agaguugaagacaga

SEQ ID NO: 1716531 - RNA, 14 nt, Human
agaguugaagacag

SEQ ID NO: 1716532 - RNA, 20 nt, Human
agagggucugaggaauccag

SEQ ID NO: 1716533 - RNA, 15 nt, Human
agaguggcuccuccc

SEQ ID NO: 1716534 - RNA, 14 nt, Human
agaguggcuccucc

SEQ ID NO: 1716535 - RNA, 13 nt, Human
agaguggcuccuc

SEQ ID NO: 1716536 - RNA, 12 nt, Human
agaguggcuccu

SEQ ID NO: 1716537 - RNA, 19 nt, Human
agcaaauucuguuuuucua

SEQ ID NO: 1716538 - RNA, 19 nt, Human
agauugcaacaggcugggc

SEQ ID NO: 1716539 - RNA, 17 nt, Human
agauugcaacaggcugg

SEQ ID NO: 1716540 - RNA, 16 nt, Human
agauugcaccacugca

SEQ ID NO: 1716541 - RNA, 16 nt, Human
agauucuuuccugagg

SEQ ID NO: 1716542 - RNA, 15 nt, Human
agauucuuuccugag

SEQ ID NO: 1716543 - RNA, 18 nt, Human
agauucuuuccugaggcu

SEQ ID NO: 1716544 - RNA, 16 nt, Human
agauugcaacaggcug

SEQ ID NO: 1716545 - RNA, 17 nt, Human
agauugagauguguuca

SEQ ID NO: 1716546 - RNA, 18 nt, Human
agaugacaucugucuagg

SEQ ID NO: 1716547 - RNA, 22 nt, Human
agauggcugugccucugccugu

SEQ ID NO: 1716548 - RNA, 21 nt, Human
agauggcugugccucugccug

SEQ ID NO: 1716549 - RNA, 20 nt, Human
agauggcugugccucugccu

SEQ ID NO: 1716550 - RNA, 19 nt, Human
agauggcugugccucugcc

SEQ ID NO: 1716551 - RNA, 18 nt, Human
agauggcugugccucugc

SEQ ID NO: 1716552 - RNA, 17 nt, Human
agauggcugugccucug

SEQ ID NO: 1716553 - RNA, 14 nt, Human
agauucuuuccuga

SEQ ID NO: 1716554 - RNA, 20 nt, Human
agaugggugcuuggaggaag

SEQ ID NO: 1716555 - RNA, 22 nt, Human
agaugggugcuuggaggaagga

SEQ ID NO: 1716556 - RNA, 23 nt, Human
agaucucugcuuuggaaaucaca

SEQ ID NO: 1716557 - RNA, 18 nt, Human
agaucucugcuuuggaaa

SEQ ID NO: 1716558 - RNA, 13 nt, Human
aguuacacauuuu

SEQ ID NO: 1716559 - RNA, 16 nt, Human
aguuacacauuuuuca

SEQ ID NO: 1716560 - RNA, 19 nt, Human
aguuacacauuuuucagau

SEQ ID NO: 1716561 - RNA, 18 nt, Human
aguuacacuaaaagguga

SEQ ID NO: 1716562 - RNA, 14 nt, Human
aguucauacccugu

SEQ ID NO: 1716563 - RNA, 21 nt, Human
aguuccaccaucaagccacca

SEQ ID NO: 1716564 - RNA, 18 nt, Human
aguuccaccaucaagcca

SEQ ID NO: 1716565 - RNA, 18 nt, Human
aguugaaaaacagcugag

SEQ ID NO: 1716566 - RNA, 17 nt, Human
aguugaagacagagcua

SEQ ID NO: 1716567 - RNA, 16 nt, Human
aguugaagacagagcu

SEQ ID NO: 1716568 - RNA, 17 nt, Human
aguugaaaaacagcuga

SEQ ID NO: 1716569 - RNA, 13 nt, Human
aguuccacugaga

SEQ ID NO: 1716570 - RNA, 15 nt, Human
aguuccacugagacc

SEQ ID NO: 1716571 - RNA, 22 nt, Human
aguuguuagugugucuuagugu

SEQ ID NO: 1716572 - RNA, 17 nt, Human
aguuguuagugugucuu

SEQ ID NO: 1716573 - RNA, 20 nt, Human
aguuguuagauuaagaaaua

SEQ ID NO: 1716574 - RNA, 16 nt, Human
auaaaagacagugaaa

SEQ ID NO: 1716575 - RNA, 15 nt, Human
auaaaagacagugaa

SEQ ID NO: 1716576 - RNA, 11 nt, Human
aguuugcaguu

SEQ ID NO: 1716577 - RNA, 14 nt, Human
aguuugauuaaauu

SEQ ID NO: 1716578 - RNA, 20 nt, Human
aguuucugucguuaaaaaca

SEQ ID NO: 1716579 - RNA, 22 nt, Human
aguuucugucguuaaaaacaga

SEQ ID NO: 1716580 - RNA, 23 nt, Human
aguuucugucguuaaaaacagau

SEQ ID NO: 1716581 - RNA, 15 nt, Human
auacaccacuacauu

SEQ ID NO: 1716582 - RNA, 12 nt, Human
auaauguuaaca

SEQ ID NO: 1716583 - RNA, 23 nt, Human
auacaaugcugugcccuaaagug

SEQ ID NO: 1716584 - RNA, 21 nt, Human
auaaagaugagugagcaugcc

SEQ ID NO: 1716585 - RNA, 17 nt, Human
auacaccacuacauucu

SEQ ID NO: 1716586 - RNA, 18 nt, Human
auacaccgggccuggaga

SEQ ID NO: 1716587 - RNA, 14 nt, Human
auacaccgggccug

SEQ ID NO: 1716588 - RNA, 21 nt, Human
aguaaaugggggugcauuuga

SEQ ID NO: 1716589 - RNA, 19 nt, Human
aguaaaugggggugcauuu

SEQ ID NO: 1716590 - RNA, 20 nt, Human
aguaaaugggggugcauuug

SEQ ID NO: 1716591 - RNA, 17 nt, Human
aguaacuuacuuaggug

SEQ ID NO: 1716592 - RNA, 15 nt, Human
aguacuggagaaaau

SEQ ID NO: 1716593 - RNA, 22 nt, Human
aguacuucuccacccugcucuc

SEQ ID NO: 1716594 - RNA, 21 nt, Human
aguacuucuccacccugcucu

SEQ ID NO: 1716595 - RNA, 20 nt, Human
aguacuucuccacccugcuc

SEQ ID NO: 1716596 - RNA, 22 nt, Human
aguauauugauccagaaagaaa

SEQ ID NO: 1716597 - RNA, 20 nt, Human
agugauucuccugccucagc

SEQ ID NO: 1716598 - RNA, 19 nt, Human
agugauucuccugccucag

SEQ ID NO: 1716599 - RNA, 18 nt, Human
agugauucuccugccuca

SEQ ID NO: 1716600 - RNA, 22 nt, Human
agugccuuauggaacacucuga

SEQ ID NO: 1716601 - RNA, 21 nt, Human
agugccuuauggaacacucug

SEQ ID NO: 1716602 - RNA, 20 nt, Human
agugccuuauggaacacucu

SEQ ID NO: 1716603 - RNA, 19 nt, Human
agugccuuauggaacacuc

SEQ ID NO: 1716604 - RNA, 13 nt, Human
agugauuaccagg

SEQ ID NO: 1716605 - RNA, 23 nt, Human
agugauccucccaccucagccuc

SEQ ID NO: 1716606 - RNA, 22 nt, Human
agugauccucccaccucagccu

SEQ ID NO: 1716607 - RNA, 20 nt, Human
agugauccucccaccucagc

SEQ ID NO: 1716608 - RNA, 14 nt, Human
agugacagaggcag

SEQ ID NO: 1716609 - RNA, 19 nt, Human
agugacagaggcagcccca

SEQ ID NO: 1716610 - RNA, 16 nt, Human
agugacagaggcagcc

SEQ ID NO: 1716611 - RNA, 18 nt, Human
agucuggcccuuccuuuu

SEQ ID NO: 1716612 - RNA, 16 nt, Human
agucgaggacagggag

SEQ ID NO: 1716613 - RNA, 19 nt, Human
aguccuuaccagcagagca

SEQ ID NO: 1716614 - RNA, 22 nt, Human
agucugauucccaagcucugcu

SEQ ID NO: 1716615 - RNA, 21 nt, Human
agucugauucccaagcucugc

SEQ ID NO: 1716616 - RNA, 18 nt, Human
aguccuuaccagcagagc

SEQ ID NO: 1716617 - RNA, 16 nt, Human
aguccuuaccagcaga

SEQ ID NO: 1716618 - RNA, 14 nt, Human
aguccucuuuucug

SEQ ID NO: 1716619 - RNA, 12 nt, Human
augaauacuuug

SEQ ID NO: 1716620 - RNA, 17 nt, Human
augaauaaagacaccua

SEQ ID NO: 1716621 - RNA, 13 nt, Human
augaaguacucau

SEQ ID NO: 1716622 - RNA, 23 nt, Human
augaaguaauaugcacacauuuu

SEQ ID NO: 1716623 - RNA, 14 nt, Human
augaaguaauaugc

SEQ ID NO: 1716624 - RNA, 21 nt, Human
augaaguaauaugcacacauu

SEQ ID NO: 1716625 - RNA, 12 nt, Human
augaaagacugu

SEQ ID NO: 1716626 - RNA, 23 nt, Human
augaagcauuuacuuuguguuca

SEQ ID NO: 1716627 - RNA, 21 nt, Human
augagcuuugucuacuucaaa

SEQ ID NO: 1716628 - RNA, 12 nt, Human
augagccuggca

SEQ ID NO: 1716629 - RNA, 11 nt, Human
augagccuggc

SEQ ID NO: 1716630 - RNA, 21 nt, Human
augagccucagcauccuggca

SEQ ID NO: 1716631 - RNA, 18 nt, Human
augaccuuucaauaggaa

SEQ ID NO: 1716632 - RNA, 15 nt, Human
augaccuuucaauag

SEQ ID NO: 1716633 - RNA, 13 nt, Human
augaccuuucaau

SEQ ID NO: 1716634 - RNA, 23 nt, Human
aucuaggaagacuuuggaaagag

SEQ ID NO: 1716635 - RNA, 11 nt, Human
aucuaggauuu

SEQ ID NO: 1716636 - RNA, 19 nt, Human
aucuaggauuuuaagggaa

SEQ ID NO: 1716637 - RNA, 24 nt, Human
augcauauuauuuuauguugcaua

SEQ ID NO: 1716638 - RNA, 21 nt, Human
augccugguggcagcugcggu

SEQ ID NO: 1716639 - RNA, 18 nt, Human
augccugguggcagcugc

SEQ ID NO: 1716640 - RNA, 19 nt, Human
augccugguggcagcugcg

SEQ ID NO: 1716641 - RNA, 14 nt, Human
augccugguggcag

SEQ ID NO: 1716642 - RNA, 13 nt, Human
augccugguggca

SEQ ID NO: 1716643 - RNA, 12 nt, Human
augccugguggc

SEQ ID NO: 1716644 - RNA, 11 nt, Human
augccuggugg

SEQ ID NO: 1716645 - RNA, 16 nt, Human
augcuuugaucccuuc

SEQ ID NO: 1716646 - RNA, 19 nt, Human
augcucugcauguuacaua

SEQ ID NO: 1716647 - RNA, 18 nt, Human
augcucugcauguuacau

SEQ ID NO: 1716648 - RNA, 22 nt, Human
augcuucuucagagacuccugc

SEQ ID NO: 1716649 - RNA, 20 nt, Human
augcuucuucagagacuccu

SEQ ID NO: 1716650 - RNA, 17 nt, Human
augcuucuucagagacu

SEQ ID NO: 1716651 - RNA, 14 nt, Human
augcuucuucagag

SEQ ID NO: 1716652 - RNA, 15 nt, Human
augggacagggagga

SEQ ID NO: 1716653 - RNA, 14 nt, Human
aucaaaagaaagaa

SEQ ID NO: 1716654 - RNA, 18 nt, Human
auauuuuuuucuuuucuu

SEQ ID NO: 1716655 - RNA, 12 nt, Human
aucaaaggacac

SEQ ID NO: 1716656 - RNA, 19 nt, Human
aucaaagagguuuuaaaaa

SEQ ID NO: 1716657 - RNA, 20 nt, Human
aucaaaagguuaauaaagua

SEQ ID NO: 1716658 - RNA, 24 nt, Human
aucaaaagguuaauaaaguaauua

SEQ ID NO: 1716659 - RNA, 14 nt, Human
auagcacagacccu

SEQ ID NO: 1716660 - RNA, 15 nt, Human
auagcacagacccug

SEQ ID NO: 1716661 - RNA, 14 nt, Human
aucgaccugccucg

SEQ ID NO: 1716662 - RNA, 22 nt, Human
aucuaggaagacuuuggaaaga

SEQ ID NO: 1716663 - RNA, 21 nt, Human
auccacugugccaugugccag

SEQ ID NO: 1716664 - RNA, 23 nt, Human
auccacuuuaucuugaauaaugu

SEQ ID NO: 1716665 - RNA, 20 nt, Human
aucaugacaaagacugagua

SEQ ID NO: 1716666 - RNA, 15 nt, Human
aucauccuaagcuau

SEQ ID NO: 1716667 - RNA, 13 nt, Human
aucaaauacauuu

SEQ ID NO: 1716668 - RNA, 14 nt, Human
aucaaauacauuua

SEQ ID NO: 1716669 - RNA, 19 nt, Human
aucauggagguuugaagau

SEQ ID NO: 1716670 - RNA, 21 nt, Human
caaggggaauguuugccucug

SEQ ID NO: 1716671 - RNA, 15 nt, Human
caagggccuggccug

SEQ ID NO: 1716672 - RNA, 14 nt, Human
caagggccuggccu

SEQ ID NO: 1716673 - RNA, 13 nt, Human
caagggccuggcc

SEQ ID NO: 1716674 - RNA, 13 nt, Human
caaggucauuuuu

SEQ ID NO: 1716675 - RNA, 23 nt, Human
caaggggaauguuugccucugcc

SEQ ID NO: 1716676 - RNA, 18 nt, Human
caagugauucuccugccu

SEQ ID NO: 1716677 - RNA, 19 nt, Human
caagugauucuccugccuc

SEQ ID NO: 1716678 - RNA, 19 nt, Human
caagugagacccugucuca

SEQ ID NO: 1716679 - RNA, 15 nt, Human
caagugagacccugu

SEQ ID NO: 1716680 - RNA, 20 nt, Human
caagugauucuccugccuca

SEQ ID NO: 1716681 - RNA, 21 nt, Human
caagugauucuccugccucag

SEQ ID NO: 1716682 - RNA, 14 nt, Human
caagugagacccug

SEQ ID NO: 1716683 - RNA, 23 nt, Human
caagugaaaaaggaggaagagaa

SEQ ID NO: 1716684 - RNA, 22 nt, Human
caagugaaaaaggaggaagaga

SEQ ID NO: 1716685 - RNA, 16 nt, Human
caagggccuggccuga

SEQ ID NO: 1716686 - RNA, 15 nt, Human
caagaaaugaaagca

SEQ ID NO: 1716687 - RNA, 13 nt, Human
caagaaaugaaag

SEQ ID NO: 1716688 - RNA, 13 nt, Human
caagaccuucucc

SEQ ID NO: 1716689 - RNA, 20 nt, Human
caagacgcugugcugcccug

SEQ ID NO: 1716690 - RNA, 22 nt, Human
caagacgcugugcugcccugcc

SEQ ID NO: 1716691 - RNA, 21 nt, Human
caagacgcugugcugcccugc

SEQ ID NO: 1716692 - RNA, 23 nt, Human
caagacgcugugcugcccugccc

SEQ ID NO: 1716693 - RNA, 17 nt, Human
caagagggucugaggaa

SEQ ID NO: 1716694 - RNA, 16 nt, Human
caagagggucugagga

SEQ ID NO: 1716695 - RNA, 12 nt, Human
caagagggucug

SEQ ID NO: 1716696 - RNA, 20 nt, Human
caagagggcacugguggccc

SEQ ID NO: 1716697 - RNA, 19 nt, Human
caagagggcacugguggcc

SEQ ID NO: 1716698 - RNA, 18 nt, Human
caagagggcacugguggc

SEQ ID NO: 1716699 - RNA, 17 nt, Human
caagagggcacuggugg

SEQ ID NO: 1716700 - RNA, 21 nt, Human
caaggcugucaauuacaggaa

SEQ ID NO: 1716701 - RNA, 23 nt, Human
caagggaauuucuucaacucccu

SEQ ID NO: 1716702 - RNA, 14 nt, Human
caaggcugucaauu

SEQ ID NO: 1716703 - RNA, 13 nt, Human
caaggcugucaau

SEQ ID NO: 1716704 - RNA, 21 nt, Human
caaggcugggggaagaagcuc

SEQ ID NO: 1716705 - RNA, 17 nt, Human
caaggauccugagccag

SEQ ID NO: 1716706 - RNA, 16 nt, Human
caaggauccugagcca

SEQ ID NO: 1716707 - RNA, 15 nt, Human
caaggauccugagcc

SEQ ID NO: 1716708 - RNA, 14 nt, Human
caaggauccugagc

SEQ ID NO: 1716709 - RNA, 21 nt, Human
caaggacuaggguccugggga

SEQ ID NO: 1716710 - RNA, 20 nt, Human
caaggacuaggguccugggg

SEQ ID NO: 1716711 - RNA, 19 nt, Human
caaggacuaggguccuggg

SEQ ID NO: 1716712 - RNA, 18 nt, Human
caaggacuaggguccugg

SEQ ID NO: 1716713 - RNA, 16 nt, Human
caaggacuaggguccu

SEQ ID NO: 1716714 - RNA, 17 nt, Human
caaauuuacagagacag

SEQ ID NO: 1716715 - RNA, 23 nt, Human
caaauuuacagagacagaaagca

SEQ ID NO: 1716716 - RNA, 14 nt, Human
caacaggcugggcu

SEQ ID NO: 1716717 - RNA, 17 nt, Human
caacaggcugggcuuca

SEQ ID NO: 1716718 - RNA, 15 nt, Human
caacauacucccauc

SEQ ID NO: 1716719 - RNA, 14 nt, Human
caacauacucccau

SEQ ID NO: 1716720 - RNA, 16 nt, Human
caacauacucccaucu

SEQ ID NO: 1716721 - RNA, 23 nt, Human
caacugcaucaagaugugacaug

SEQ ID NO: 1716722 - RNA, 20 nt, Human
caacugcaucaagaugugac

SEQ ID NO: 1716723 - RNA, 17 nt, Human
caacugcaucaagaugu

SEQ ID NO: 1716724 - RNA, 16 nt, Human
caacugcauuggcuuu

SEQ ID NO: 1716725 - RNA, 21 nt, Human
caaccugauugugucucuugg

SEQ ID NO: 1716726 - RNA, 19 nt, Human
caaccugauugugucucuu

SEQ ID NO: 1716727 - RNA, 17 nt, Human
caaccugauugugucuc

SEQ ID NO: 1716728 - RNA, 17 nt, Human
caaauuguaagcaugca

SEQ ID NO: 1716729 - RNA, 22 nt, Human
caaauauuuagauguaauuuug

SEQ ID NO: 1716730 - RNA, 23 nt, Human
caaauauuuagauguaauuuugu

SEQ ID NO: 1716731 - RNA, 17 nt, Human
caaauauuccagagacu

SEQ ID NO: 1716732 - RNA, 13 nt, Human
caaauauuccaga

SEQ ID NO: 1716733 - RNA, 21 nt, Human
caaauauuuagauguaauuuu

SEQ ID NO: 1716734 - RNA, 19 nt, Human
caaaguggugagaggcauc

SEQ ID NO: 1716735 - RNA, 21 nt, Human
caaaguucccuacuuccugug

SEQ ID NO: 1716736 - RNA, 22 nt, Human
caaaguucccuacuuccuguga

SEQ ID NO: 1716737 - RNA, 14 nt, Human
caaaggagauugga

SEQ ID NO: 1716738 - RNA, 18 nt, Human
caaagcccuuccaugucg

SEQ ID NO: 1716739 - RNA, 20 nt, Human
caaaggagauuggaaggaac

SEQ ID NO: 1716740 - RNA, 17 nt, Human
caaaguggugagaggca

SEQ ID NO: 1716741 - RNA, 16 nt, Human
caaaguggugagaggc

SEQ ID NO: 1716742 - RNA, 23 nt, Human
caaaggguaucaggugcugccau

SEQ ID NO: 1716743 - RNA, 18 nt, Human
caaagugguauagaaaug

SEQ ID NO: 1716744 - RNA, 19 nt, Human
caaagugguauagaaaugc

SEQ ID NO: 1716745 - RNA, 21 nt, Human
caaaggguaucaggugcugcc

SEQ ID NO: 1716746 - RNA, 20 nt, Human
caaaggguaucaggugcugc

SEQ ID NO: 1716747 - RNA, 12 nt, Human
caaagaaauuau

SEQ ID NO: 1716748 - RNA, 15 nt, Human
caaagaaauuaugug

SEQ ID NO: 1716749 - RNA, 13 nt, Human
caaagaaauuaug

SEQ ID NO: 1716750 - RNA, 21 nt, Human
caaagagguuuuaaaaaaauc

SEQ ID NO: 1716751 - RNA, 14 nt, Human
caaagagguuuuaa

SEQ ID NO: 1716752 - RNA, 13 nt, Human
caaagcccagcuu

SEQ ID NO: 1716753 - RNA, 19 nt, Human
caaagcccaaagugguaua

SEQ ID NO: 1716754 - RNA, 17 nt, Human
caaagcccaaaguggua

SEQ ID NO: 1716755 - RNA, 20 nt, Human
caacaggcugggcuucagug

SEQ ID NO: 1716756 - RNA, 18 nt, Human
caaucucggcucacugca

SEQ ID NO: 1716757 - RNA, 13 nt, Human
caaugcacuuugu

SEQ ID NO: 1716758 - RNA, 14 nt, Human
caaugcacugacau

SEQ ID NO: 1716759 - RNA, 23 nt, Human
caaugcaaaccaucauugaaauc

SEQ ID NO: 1716760 - RNA, 22 nt, Human
caaugcaaaccaucauugaaau

SEQ ID NO: 1716761 - RNA, 21 nt, Human
caaugcaaaccaucauugaaa

SEQ ID NO: 1716762 - RNA, 14 nt, Human
caaugcaaaccauc

SEQ ID NO: 1716763 - RNA, 14 nt, Human
caaugauggucacc

SEQ ID NO: 1716764 - RNA, 14 nt, Human
caaugaccuuucaa

SEQ ID NO: 1716765 - RNA, 16 nt, Human
caaugaccuuucaaua

SEQ ID NO: 1716766 - RNA, 15 nt, Human
caaugaccuuucaau

SEQ ID NO: 1716767 - RNA, 13 nt, Human
caaugauggucac

SEQ ID NO: 1716768 - RNA, 21 nt, Human
caaugaccuuucaauaggaaa

SEQ ID NO: 1716769 - RNA, 17 nt, Human
cacaaacgggcucagca

SEQ ID NO: 1716770 - RNA, 18 nt, Human
caaugguuuucuugugug

SEQ ID NO: 1716771 - RNA, 14 nt, Human
caaugcacuuuguu

SEQ ID NO: 1716772 - RNA, 13 nt, Human
cacaagaaaugaa

SEQ ID NO: 1716773 - RNA, 15 nt, Human
cacaagaaaugaaag

SEQ ID NO: 1716774 - RNA, 17 nt, Human
cacaaagguagcuuuuc

SEQ ID NO: 1716775 - RNA, 23 nt, Human
cacaagaaaugaaagcagggacu

SEQ ID NO: 1716776 - RNA, 23 nt, Human
cacaagacccaaaaggcagaagc

SEQ ID NO: 1716777 - RNA, 19 nt, Human
cacaaucucggcucacugc

SEQ ID NO: 1716778 - RNA, 14 nt, Human
cacacacuuuggcu

SEQ ID NO: 1716779 - RNA, 20 nt, Human
cacacagauuugagcucagc

SEQ ID NO: 1716780 - RNA, 18 nt, Human
cacacagauuugagcuca

SEQ ID NO: 1716781 - RNA, 20 nt, Human
cacacaccagagcccaccuu

SEQ ID NO: 1716782 - RNA, 16 nt, Human
cacacaccagagccca

SEQ ID NO: 1716783 - RNA, 15 nt, Human
cacacaccagagccc

SEQ ID NO: 1716784 - RNA, 24 nt, Human
cacaaucucggcucacugcauccu

SEQ ID NO: 1716785 - RNA, 23 nt, Human
cacaaucucggcucacugcaucc

SEQ ID NO: 1716786 - RNA, 22 nt, Human
cacaaucucggcucacugcauc

SEQ ID NO: 1716787 - RNA, 20 nt, Human
cacaaucucggcucacugca

SEQ ID NO: 1716788 - RNA, 15 nt, Human
cacacagcucugucc

SEQ ID NO: 1716789 - RNA, 14 nt, Human
cacacagcucuguc

SEQ ID NO: 1716790 - RNA, 13 nt, Human
cacacagcucugu

SEQ ID NO: 1716791 - RNA, 22 nt, Human
cacacagauuugagcucagccc

SEQ ID NO: 1716792 - RNA, 22 nt, Human
cacaccagagcccaccuuggcu

SEQ ID NO: 1716793 - RNA, 21 nt, Human
cacaccagagcccaccuuggc

SEQ ID NO: 1716794 - RNA, 16 nt, Human
cacacagcucuguccu

SEQ ID NO: 1716795 - RNA, 20 nt, Human
cacacccagcccacuucugc

SEQ ID NO: 1716796 - RNA, 14 nt, Human
cacacccagcccac

SEQ ID NO: 1716797 - RNA, 21 nt, Human
caccauauuaccacagacaua

SEQ ID NO: 1716798 - RNA, 18 nt, Human
caccauaggucaccuuua

SEQ ID NO: 1716799 - RNA, 15 nt, Human
caccaucaagccacc

SEQ ID NO: 1716800 - RNA, 14 nt, Human
caccaucaagccac

SEQ ID NO: 1716801 - RNA, 13 nt, Human
caccaucaagcca

SEQ ID NO: 1716802 - RNA, 18 nt, Human
caccaucaugucuggcua

SEQ ID NO: 1716803 - RNA, 17 nt, Human
caccaucaugucuggcu

SEQ ID NO: 1716804 - RNA, 15 nt, Human
caccaucaugucugg

SEQ ID NO: 1716805 - RNA, 24 nt, Human
caccaucaagccaccaacauacuc

SEQ ID NO: 1716806 - RNA, 19 nt, Human
caccaucaagccaccaaca

SEQ ID NO: 1716807 - RNA, 17 nt, Human
caccaucaagccaccaa

SEQ ID NO: 1716808 - RNA, 16 nt, Human
caccaucaagccacca

SEQ ID NO: 1716809 - RNA, 20 nt, Human
caccauguuggccaggcugg

SEQ ID NO: 1716810 - RNA, 20 nt, Human
caccauguuggccaggcugc

SEQ ID NO: 1716811 - RNA, 19 nt, Human
caccauguuggccaggcug

SEQ ID NO: 1716812 - RNA, 15 nt, Human
caccagagcccaccu

SEQ ID NO: 1716813 - RNA, 22 nt, Human
caccagagcccaccuuggcuca

SEQ ID NO: 1716814 - RNA, 20 nt, Human
caccagagcccaccuuggcu

SEQ ID NO: 1716815 - RNA, 18 nt, Human
caccagagcccaccuugg

SEQ ID NO: 1716816 - RNA, 17 nt, Human
caccagagcccaccuug

SEQ ID NO: 1716817 - RNA, 19 nt, Human
caccacacccagcccacuu

SEQ ID NO: 1716818 - RNA, 15 nt, Human
caccacgcccggcua

SEQ ID NO: 1716819 - RNA, 14 nt, Human
caccacgcccggcu

SEQ ID NO: 1716820 - RNA, 22 nt, Human
cacauguccaagaagcccagga

SEQ ID NO: 1716821 - RNA, 21 nt, Human
cacauguccaagaagcccagg

SEQ ID NO: 1716822 - RNA, 19 nt, Human
cacauguccaagaagccca

SEQ ID NO: 1716823 - RNA, 18 nt, Human
cacauguccaagaagccc

SEQ ID NO: 1716824 - RNA, 17 nt, Human
caccaacgucugugcca

SEQ ID NO: 1716825 - RNA, 23 nt, Human
cacauguccaagaagcccaggaa

SEQ ID NO: 1716826 - RNA, 18 nt, Human
caccaacuacuaccugua

SEQ ID NO: 1716827 - RNA, 12 nt, Human
caccaagcccag

SEQ ID NO: 1716828 - RNA, 13 nt, Human
caccaagcccagu

SEQ ID NO: 1716829 - RNA, 17 nt, Human
cacaugagcaucaggcc

SEQ ID NO: 1716830 - RNA, 13 nt, Human
cacaugagcauca

SEQ ID NO: 1716831 - RNA, 21 nt, Human
cacaugagcaucaggccaggc

SEQ ID NO: 1716832 - RNA, 20 nt, Human
cacaugagcaucaggccagg

SEQ ID NO: 1716833 - RNA, 19 nt, Human
cacaugagcaucaggccag

SEQ ID NO: 1716834 - RNA, 18 nt, Human
cacaugagcaucaggcca

SEQ ID NO: 1716835 - RNA, 21 nt, Human
cacaugccucucucaggccaa

SEQ ID NO: 1716836 - RNA, 20 nt, Human
cacaugccucucucaggcca

SEQ ID NO: 1716837 - RNA, 17 nt, Human
cacauguccaagaagcc

SEQ ID NO: 1716838 - RNA, 16 nt, Human
cacauguccaagaagc

SEQ ID NO: 1716839 - RNA, 18 nt, Human
cacaugcacgugugugca

SEQ ID NO: 1716840 - RNA, 20 nt, Human
cacaugcaaggucauuuuuu

SEQ ID NO: 1716841 - RNA, 17 nt, Human
cacaugcaaggucauuu

SEQ ID NO: 1716842 - RNA, 19 nt, Human
cacaugcaaggucauuuuu

SEQ ID NO: 1716843 - RNA, 20 nt, Human
cacagcucuucuccaggcug

SEQ ID NO: 1716844 - RNA, 19 nt, Human
cacagcucuucuccaggcu

SEQ ID NO: 1716845 - RNA, 21 nt, Human
cacagcucuucuccaggcugu

SEQ ID NO: 1716846 - RNA, 16 nt, Human
cacaggacucugccuc

SEQ ID NO: 1716847 - RNA, 15 nt, Human
cacaggacucugccu

SEQ ID NO: 1716848 - RNA, 17 nt, Human
cacaggaucagucugau

SEQ ID NO: 1716849 - RNA, 23 nt, Human
cacaguccuuaccagcagagcac

SEQ ID NO: 1716850 - RNA, 14 nt, Human
cacaggcccggcuc

SEQ ID NO: 1716851 - RNA, 22 nt, Human
cacacggacacucaaaagcugg

SEQ ID NO: 1716852 - RNA, 18 nt, Human
cacagcucuucuccaggc

SEQ ID NO: 1716853 - RNA, 13 nt, Human
cacccaagggccu

SEQ ID NO: 1716854 - RNA, 13 nt, Human
uuuugaaaaacug

SEQ ID NO: 1716855 - RNA, 12 nt, Human
uuuuuuacuaau

SEQ ID NO: 1716856 - RNA, 20 nt, Human
uuuuuuauacaggaugauga

SEQ ID NO: 1716857 - RNA, 17 nt, Human
uuuuuuccuucagugcc

SEQ ID NO: 1716858 - RNA, 16 nt, Human
uuugccagugggaacu

SEQ ID NO: 1716859 - RNA, 15 nt, Human
uuugccagugggaac

SEQ ID NO: 1716860 - RNA, 18 nt, Human
uuugccauguuggccagg

SEQ ID NO: 1716861 - RNA, 14 nt, Human
uuugcagacaggca

SEQ ID NO: 1716862 - RNA, 23 nt, Human
uuugcauaacguauaaaagccug

SEQ ID NO: 1716863 - RNA, 19 nt, Human
uuugcauaacguauaaaag

SEQ ID NO: 1716864 - RNA, 13 nt, Human
uuugagugccuua

SEQ ID NO: 1716865 - RNA, 17 nt, Human
uuugaggucuguucuuu

SEQ ID NO: 1716866 - RNA, 22 nt, Human
uuugaggucuguucuuuccaaa

SEQ ID NO: 1716867 - RNA, 14 nt, Human
uuugagcucagccc

SEQ ID NO: 1716868 - RNA, 15 nt, Human
uuugagcagggcuca

SEQ ID NO: 1716869 - RNA, 22 nt, Human
uuucuuacugucuuuuuucuaa

SEQ ID NO: 1716870 - RNA, 21 nt, Human
uuuguccccaccgcagacagg

SEQ ID NO: 1716871 - RNA, 13 nt, Human
uuuguccccaccg

SEQ ID NO: 1716872 - RNA, 22 nt, Human
uuuguaaauuaacuuuuauaaa

SEQ ID NO: 1716873 - RNA, 20 nt, Human
uuugguuaugaauacuuugc

SEQ ID NO: 1716874 - RNA, 15 nt, Human
uuuguaaauuaacuu

SEQ ID NO: 1716875 - RNA, 16 nt, Human
uuuguaaauuaacuuu

SEQ ID NO: 1716876 - RNA, 17 nt, Human
uuuguaaauuaacuuuu

SEQ ID NO: 1716877 - RNA, 16 nt, Human
uuuuacagcugccugc

SEQ ID NO: 1716878 - RNA, 15 nt, Human
uuuuaaaaugagaaa

SEQ ID NO: 1716879 - RNA, 22 nt, Human
uuuuaaaaugagaaaucuaaaa

SEQ ID NO: 1716880 - RNA, 20 nt, Human
uuuuauaucaauuuaaaaaa

SEQ ID NO: 1716881 - RNA, 14 nt, Human
uuuuacuguacaga

SEQ ID NO: 1716882 - RNA, 19 nt, Human
uuuuaucgucacugcuuaa

SEQ ID NO: 1716883 - RNA, 18 nt, Human
uuuuaucgucacugcuua

SEQ ID NO: 1716884 - RNA, 20 nt, Human
uuuuaugauacuugaaaauu

SEQ ID NO: 1716885 - RNA, 16 nt, Human
uuuuaugauacuugaa

SEQ ID NO: 1716886 - RNA, 15 nt, Human
uuuuccuucagugcc

SEQ ID NO: 1716887 - RNA, 14 nt, Human
uuuucuucucccuc

SEQ ID NO: 1716888 - RNA, 17 nt, Human
uuuucuugcaugaggcu

SEQ ID NO: 1716889 - RNA, 19 nt, Human
uuuuccaugaguccccugu

SEQ ID NO: 1716890 - RNA, 18 nt, Human
uuuuccaugaguccccug

SEQ ID NO: 1716891 - RNA, 22 nt, Human
uuuucaacgcagcccugcuuug

SEQ ID NO: 1716892 - RNA, 21 nt, Human
uuuucaacgcagcccugcuuu

SEQ ID NO: 1716893 - RNA, 17 nt, Human
uuuucaacgcagcccug

SEQ ID NO: 1716894 - RNA, 20 nt, Human
uuuucacugcuggcugccuu

SEQ ID NO: 1716895 - RNA, 19 nt, Human
uuuucacugcuggcugccu

SEQ ID NO: 1716896 - RNA, 15 nt, Human
uuuucacaguucucu

SEQ ID NO: 1716897 - RNA, 22 nt, Human
uuuccucaaaacuucagacaua

SEQ ID NO: 1716898 - RNA, 21 nt, Human
uuuccucuuuggucuacacug

SEQ ID NO: 1716899 - RNA, 23 nt, Human
uuuccugacagaaggacucaggu

SEQ ID NO: 1716900 - RNA, 17 nt, Human
uuucuaaagcugccagc

SEQ ID NO: 1716901 - RNA, 14 nt, Human
uuucuaaagcugcc

SEQ ID NO: 1716902 - RNA, 14 nt, Human
uuucuaaaggcuac

SEQ ID NO: 1716903 - RNA, 18 nt, Human
uuucuaaaggcuaccuuu

SEQ ID NO: 1716904 - RNA, 15 nt, Human
uuucuagccagagga

SEQ ID NO: 1716905 - RNA, 15 nt, Human
uuucuaaugugugaa

SEQ ID NO: 1716906 - RNA, 13 nt, Human
uuuauuuccagug

SEQ ID NO: 1716907 - RNA, 22 nt, Human
uuucaauaggaaaaacugauuu

SEQ ID NO: 1716908 - RNA, 20 nt, Human
uuucaauaggaaaaacugau

SEQ ID NO: 1716909 - RNA, 15 nt, Human
uuucagcagcugcag

SEQ ID NO: 1716910 - RNA, 12 nt, Human
uuuccaaaguac

SEQ ID NO: 1716911 - RNA, 15 nt, Human
uuuccaaaguacacu

SEQ ID NO: 1716912 - RNA, 13 nt, Human
uuuccaggaaggc

SEQ ID NO: 1716913 - RNA, 22 nt, Human
uuucauugcugggcuugucugu

SEQ ID NO: 1716914 - RNA, 16 nt, Human
uuucagccaagaauuc

SEQ ID NO: 1716915 - RNA, 15 nt, Human
uuucagccaagaauu

SEQ ID NO: 1716916 - RNA, 20 nt, Human
uuguauuuuacuaauaaaau

SEQ ID NO: 1716917 - RNA, 15 nt, Human
uuguauuuauuuagu

SEQ ID NO: 1716918 - RNA, 23 nt, Human
uuguauuuaaaugaaagugagac

SEQ ID NO: 1716919 - RNA, 15 nt, Human
uuuacuuuguguuca

SEQ ID NO: 1716920 - RNA, 13 nt, Human
uuuauugcuuguu

SEQ ID NO: 1716921 - RNA, 14 nt, Human
uuuaugcauauuau

SEQ ID NO: 1716922 - RNA, 16 nt, Human
uuuauugucaaagugg

SEQ ID NO: 1716923 - RNA, 14 nt, Human
uuuauugucaaagu

SEQ ID NO: 1716924 - RNA, 14 nt, Human
uuuauaaacuuuac

SEQ ID NO: 1716925 - RNA, 16 nt, Human
uuuaucgucacugcuu

SEQ ID NO: 1716926 - RNA, 16 nt, Human
uuuauaaacuuuaccu

SEQ ID NO: 1716927 - RNA, 21 nt, Human
uuuaucgucacugcuuaacuu

SEQ ID NO: 1716928 - RNA, 18 nt, Human
uucaauucucauuuguca

SEQ ID NO: 1716929 - RNA, 16 nt, Human
uucaaucccaggaugu

SEQ ID NO: 1716930 - RNA, 15 nt, Human
uucaacgcagcccug

SEQ ID NO: 1716931 - RNA, 14 nt, Human
uucaacgcagcccu

SEQ ID NO: 1716932 - RNA, 21 nt, Human
uucaacagguuuuccugaaga

SEQ ID NO: 1716933 - RNA, 13 nt, Human
uucaacgcagccc

SEQ ID NO: 1716934 - RNA, 20 nt, Human
uucaaccauuccccauggga

SEQ ID NO: 1716935 - RNA, 17 nt, Human
uucaaccauuccccaug

SEQ ID NO: 1716936 - RNA, 23 nt, Human
uucaaauuguaagcaugcacaaa

SEQ ID NO: 1716937 - RNA, 13 nt, Human
uucaaagauauuu

SEQ ID NO: 1716938 - RNA, 15 nt, Human
uucaaagcaaauguc

SEQ ID NO: 1716939 - RNA, 13 nt, Human
uuauuuugaugua

SEQ ID NO: 1716940 - RNA, 16 nt, Human
uuauuuugauguaaag

SEQ ID NO: 1716941 - RNA, 14 nt, Human
uuacgugaguccug

SEQ ID NO: 1716942 - RNA, 13 nt, Human
uuacgugaguccu

SEQ ID NO: 1716943 - RNA, 15 nt, Human
uucagagacuccugc

SEQ ID NO: 1716944 - RNA, 12 nt, Human
uucagaggcuca

SEQ ID NO: 1716945 - RNA, 13 nt, Human
uucagaggcucag

SEQ ID NO: 1716946 - RNA, 22 nt, Human
uucagaggcucagauuguaaua

SEQ ID NO: 1716947 - RNA, 14 nt, Human
uucacucuccuugg

SEQ ID NO: 1716948 - RNA, 19 nt, Human
uucaggaagcucagggccu

SEQ ID NO: 1716949 - RNA, 17 nt, Human
uucaggaagcucagggc

SEQ ID NO: 1716950 - RNA, 20 nt, Human
uucaggaagcucagggccug

SEQ ID NO: 1716951 - RNA, 15 nt, Human
uucaggcucuucucc

SEQ ID NO: 1716952 - RNA, 17 nt, Human
uucagcugacuuuucug

SEQ ID NO: 1716953 - RNA, 18 nt, Human
uucagcugcauacaguuu

SEQ ID NO: 1716954 - RNA, 16 nt, Human
uucaggaagcucaggg

SEQ ID NO: 1716955 - RNA, 21 nt, Human
uucagcugguugagguuucaa

SEQ ID NO: 1716956 - RNA, 24 nt, Human
uucagcucugcaagaauugaagca

SEQ ID NO: 1716957 - RNA, 17 nt, Human
uucagcucugcaagaau

SEQ ID NO: 1716958 - RNA, 23 nt, Human
uucagcuccagcucaccagcccc

SEQ ID NO: 1716959 - RNA, 19 nt, Human
uuccacuuauaggaauuga

SEQ ID NO: 1716960 - RNA, 21 nt, Human
uuccacuuagaaauugcauuu

SEQ ID NO: 1716961 - RNA, 17 nt, Human
uuccaugaguccccugu

SEQ ID NO: 1716962 - RNA, 19 nt, Human
uuccaugucgccucugcau

SEQ ID NO: 1716963 - RNA, 18 nt, Human
uuccaugucgccucugca

SEQ ID NO: 1716964 - RNA, 17 nt, Human
uuccaugucgccucugc

SEQ ID NO: 1716965 - RNA, 14 nt, Human
uuccccaagacauu

SEQ ID NO: 1716966 - RNA, 21 nt, Human
uuccaugucgccucugcauuc

SEQ ID NO: 1716967 - RNA, 20 nt, Human
uuccaugucgccucugcauu

SEQ ID NO: 1716968 - RNA, 17 nt, Human
uucaucuugaauuguaa

SEQ ID NO: 1716969 - RNA, 12 nt, Human
uucaucuugaau

SEQ ID NO: 1716970 - RNA, 11 nt, Human
uucaucuugaa

SEQ ID NO: 1716971 - RNA, 20 nt, Human
uucaucuuccaacucaaacu

SEQ ID NO: 1716972 - RNA, 19 nt, Human
uucauuuaggugaggaagc

SEQ ID NO: 1716973 - RNA, 13 nt, Human
uucaguggcagcu

SEQ ID NO: 1716974 - RNA, 21 nt, Human
uucagugccuuauggaacacu

SEQ ID NO: 1716975 - RNA, 19 nt, Human
uucagugccuuauggaaca

SEQ ID NO: 1716976 - RNA, 16 nt, Human
uucaggcucuucuccu

SEQ ID NO: 1716977 - RNA, 23 nt, Human
uucauaaugacuuaagcacacuu

SEQ ID NO: 1716978 - RNA, 13 nt, Human
uucauaaugacuu

SEQ ID NO: 1716979 - RNA, 15 nt, Human
uucaucuaggauuuu

SEQ ID NO: 1716980 - RNA, 12 nt, Human
uucaguuuucag

SEQ ID NO: 1716981 - RNA, 20 nt, Human
uuccuagguauaauucacau

SEQ ID NO: 1716982 - RNA, 23 nt, Human
uuccucauaguaugguggcuggg

SEQ ID NO: 1716983 - RNA, 21 nt, Human
uuccucccucccucuuucccu

SEQ ID NO: 1716984 - RNA, 19 nt, Human
uuccucccucccucuuucc

SEQ ID NO: 1716985 - RNA, 12 nt, Human
uuccucccuccc

SEQ ID NO: 1716986 - RNA, 22 nt, Human
uuccucccucccucuuucccuc

SEQ ID NO: 1716987 - RNA, 19 nt, Human
uucccuuugacgccauccc

SEQ ID NO: 1716988 - RNA, 22 nt, Human
uuccccacuugagaauuacccu

SEQ ID NO: 1716989 - RNA, 22 nt, Human
uucggccuccauccugaggcuc

SEQ ID NO: 1716990 - RNA, 18 nt, Human
uucggccuccauccugag

SEQ ID NO: 1716991 - RNA, 19 nt, Human
uucggccuccauccugagg

SEQ ID NO: 1716992 - RNA, 17 nt, Human
uucuaaaggcuaccuuu

SEQ ID NO: 1716993 - RNA, 18 nt, Human
uucuaaaggcuaccuuug

SEQ ID NO: 1716994 - RNA, 16 nt, Human
uucuaaaggcuaccuu

SEQ ID NO: 1716995 - RNA, 13 nt, Human
uucuaaagaugga

SEQ ID NO: 1716996 - RNA, 17 nt, Human
uuccuuccucugagccu

SEQ ID NO: 1716997 - RNA, 13 nt, Human
uuccuuccucuga

SEQ ID NO: 1716998 - RNA, 19 nt, Human
uuccuucauucaacccacc

SEQ ID NO: 1716999 - RNA, 23 nt, Human
uuccuucagugccuuauggaaca

SEQ ID NO: 1717000 - RNA, 19 nt, Human
uuccuucagugccuuaugg

SEQ ID NO: 1717001 - RNA, 16 nt, Human
uuccuucagugccuua

SEQ ID NO: 1717002 - RNA, 11 nt, Human
uuccugcccug

SEQ ID NO: 1717003 - RNA, 22 nt, Human
uuccugcccugggaggcaguga

SEQ ID NO: 1717004 - RNA, 16 nt, Human
uuccugcccugggagg

SEQ ID NO: 1717005 - RNA, 13 nt, Human
uuccugcccuggg

SEQ ID NO: 1717006 - RNA, 16 nt, Human
uucuaugacacaugca

SEQ ID NO: 1717007 - RNA, 17 nt, Human
uucuaugacacaugcaa

SEQ ID NO: 1717008 - RNA, 14 nt, Human
uucuauuguuucuu

SEQ ID NO: 1717009 - RNA, 12 nt, Human
uucucaugccuc

SEQ ID NO: 1717010 - RNA, 11 nt, Human
uucucaugccu

SEQ ID NO: 1717011 - RNA, 21 nt, Human
uucucaugccucagccuccug

SEQ ID NO: 1717012 - RNA, 14 nt, Human
uucucaugccucag

SEQ ID NO: 1717013 - RNA, 13 nt, Human
uucucaaagaaau

SEQ ID NO: 1717014 - RNA, 15 nt, Human
uucucaaagaaauuu

SEQ ID NO: 1717015 - RNA, 19 nt, Human
uucucaaagaaauuuccac

SEQ ID NO: 1717016 - RNA, 20 nt, Human
uucucaaagaaauuuccacu

SEQ ID NO: 1717017 - RNA, 18 nt, Human
uucucuccagccccugga

SEQ ID NO: 1717018 - RNA, 13 nt, Human
uucuccacccugc

SEQ ID NO: 1717019 - RNA, 16 nt, Human
uucuccaagcaggaca

SEQ ID NO: 1717020 - RNA, 11 nt, Human
uucuccaggcu

SEQ ID NO: 1717021 - RNA, 20 nt, Human
uucugacccaugcugcccug

SEQ ID NO: 1717022 - RNA, 18 nt, Human
uucugacccaugcugccc

SEQ ID NO: 1717023 - RNA, 21 nt, Human
uucugacccaugcugcccugu

SEQ ID NO: 1717024 - RNA, 17 nt, Human
uuggcaaaaaggcagga

SEQ ID NO: 1717025 - RNA, 14 nt, Human
uuggauuguccccg

SEQ ID NO: 1717026 - RNA, 18 nt, Human
uuggauuuuugucuugug

SEQ ID NO: 1717027 - RNA, 20 nt, Human
uuggaagugaaaacuuugua

SEQ ID NO: 1717028 - RNA, 15 nt, Human
uuggaaguuuuaauc

SEQ ID NO: 1717029 - RNA, 19 nt, Human
uuggaaggaacguccccug

SEQ ID NO: 1717030 - RNA, 11 nt, Human
uuggaaggaac

SEQ ID NO: 1717031 - RNA, 20 nt, Human
uugcuggggccgaaagaaca

SEQ ID NO: 1717032 - RNA, 20 nt, Human
uugcuguagaagauggcacu

SEQ ID NO: 1717033 - RNA, 11 nt, Human
uugcccaggca

SEQ ID NO: 1717034 - RNA, 23 nt, Human
uugcccacgcuggagugcaguga

SEQ ID NO: 1717035 - RNA, 18 nt, Human
uugccagucaccccggcc

SEQ ID NO: 1717036 - RNA, 18 nt, Human
uugccacugccucuuccu

SEQ ID NO: 1717037 - RNA, 14 nt, Human
uugccucugccucu

SEQ ID NO: 1717038 - RNA, 11 nt, Human
uugccucugcc

SEQ ID NO: 1717039 - RNA, 18 nt, Human
uugccucugccucugaca

SEQ ID NO: 1717040 - RNA, 16 nt, Human
uugccucugccucuga

SEQ ID NO: 1717041 - RNA, 22 nt, Human
uugcugauggugcaaugaccuu

SEQ ID NO: 1717042 - RNA, 20 nt, Human
uugcugauggugcaaugacc

SEQ ID NO: 1717043 - RNA, 11 nt, Human
uugcugccuca

SEQ ID NO: 1717044 - RNA, 15 nt, Human
uugcugccucaugcu

SEQ ID NO: 1717045 - RNA, 12 nt, Human
uugcugccucau

SEQ ID NO: 1717046 - RNA, 14 nt, Human
uuguauuacaaauc

SEQ ID NO: 1717047 - RNA, 21 nt, Human
uuguauucucuccuguaccuc

SEQ ID NO: 1717048 - RNA, 14 nt, Human
uuguauucagaguu

SEQ ID NO: 1717049 - RNA, 15 nt, Human
uuguagagccagggu

SEQ ID NO: 1717050 - RNA, 14 nt, Human
uuguagagccaggg

SEQ ID NO: 1717051 - RNA, 14 nt, Human
uuguacauaaugcg

SEQ ID NO: 1717052 - RNA, 16 nt, Human
uuguacaguuuuuauu

SEQ ID NO: 1717053 - RNA, 12 nt, Human
uuguacaguuuu

SEQ ID NO: 1717054 - RNA, 13 nt, Human
uuguacaguuuuu

SEQ ID NO: 1717055 - RNA, 16 nt, Human
uuguaaaggaauuuaa

SEQ ID NO: 1717056 - RNA, 13 nt, Human
uugguccugcugc

SEQ ID NO: 1717057 - RNA, 12 nt, Human
uugguccugcug

SEQ ID NO: 1717058 - RNA, 16 nt, Human
uuggucccccuuccau

SEQ ID NO: 1717059 - RNA, 22 nt, Human
uuggucccccuuccauggacuu

SEQ ID NO: 1717060 - RNA, 13 nt, Human
uuguacagacaac

SEQ ID NO: 1717061 - RNA, 12 nt, Human
uuguacagacaa

SEQ ID NO: 1717062 - RNA, 22 nt, Human
uuggcuuuggguugcaggaccu

SEQ ID NO: 1717063 - RNA, 12 nt, Human
uugggaggcuga

SEQ ID NO: 1717064 - RNA, 16 nt, Human
uugggaggccauuugu

SEQ ID NO: 1717065 - RNA, 16 nt, Human
uuggguggaugccugg

SEQ ID NO: 1717066 - RNA, 14 nt, Human
uugguaaaccuuuu

SEQ ID NO: 1717067 - RNA, 12 nt, Human
uugguaaaccuu

SEQ ID NO: 1717068 - RNA, 22 nt, Human
uuggcugggggccucagugcca

SEQ ID NO: 1717069 - RNA, 21 nt, Human
uuggcugggggccucagugcc

SEQ ID NO: 1717070 - RNA, 18 nt, Human
uuggcugggggccucagu

SEQ ID NO: 1717071 - RNA, 24 nt, Human
uuggccaaagccaaagcuaggccu

SEQ ID NO: 1717072 - RNA, 14 nt, Human
uuggccaggcuggu

SEQ ID NO: 1717073 - RNA, 13 nt, Human
uuggcauucccca

SEQ ID NO: 1717074 - RNA, 22 nt, Human
uugcagacaggcaagcaccucc

SEQ ID NO: 1717075 - RNA, 16 nt, Human
uugcagacaggcaagc

SEQ ID NO: 1717076 - RNA, 14 nt, Human
uugcauagaauaaa

SEQ ID NO: 1717077 - RNA, 15 nt, Human
uugccacugccucuu

SEQ ID NO: 1717078 - RNA, 14 nt, Human
uugccacugccucu

SEQ ID NO: 1717079 - RNA, 17 nt, Human
uugcaacaggcugggcu

SEQ ID NO: 1717080 - RNA, 14 nt, Human
uugcaacaggcugg

SEQ ID NO: 1717081 - RNA, 18 nt, Human
uugauuuccguuaaaaua

SEQ ID NO: 1717082 - RNA, 23 nt, Human
uugauagcacagacccugcccug

SEQ ID NO: 1717083 - RNA, 21 nt, Human
uugauagcacagacccugccc

SEQ ID NO: 1717084 - RNA, 22 nt, Human
uugaccugaggcccuucucucc

SEQ ID NO: 1717085 - RNA, 19 nt, Human
uugaccugaggcccuucuc

SEQ ID NO: 1717086 - RNA, 12 nt, Human
uugaccugaggc

SEQ ID NO: 1717087 - RNA, 22 nt, Human
uugacgccaucccagccccaau

SEQ ID NO: 1717088 - RNA, 15 nt, Human
uugacgccaucccag

SEQ ID NO: 1717089 - RNA, 14 nt, Human
uugacgccauccca

SEQ ID NO: 1717090 - RNA, 15 nt, Human
uugaccucaggugau

SEQ ID NO: 1717091 - RNA, 21 nt, Human
uugaccgugaggccagagaca

SEQ ID NO: 1717092 - RNA, 20 nt, Human
uugaccgugaggccagagac

SEQ ID NO: 1717093 - RNA, 20 nt, Human
uugauagcacagacccugcc

SEQ ID NO: 1717094 - RNA, 19 nt, Human
uugauagcacagacccugc

SEQ ID NO: 1717095 - RNA, 13 nt, Human
uucuugguuugua

SEQ ID NO: 1717096 - RNA, 16 nt, Human
uucuugguuuguaaau

SEQ ID NO: 1717097 - RNA, 23 nt, Human
uucuugguuuguaaauuaacuuu

SEQ ID NO: 1717098 - RNA, 17 nt, Human
uucuugguuuguaaauu

SEQ ID NO: 1717099 - RNA, 18 nt, Human
uucuugguuuguaaauua

SEQ ID NO: 1717100 - RNA, 14 nt, Human
uucuucaacucccu

SEQ ID NO: 1717101 - RNA, 23 nt, Human
uucuuauuuaaugaaagacugua

SEQ ID NO: 1717102 - RNA, 19 nt, Human
uucuuauuuaaugaaagac

SEQ ID NO: 1717103 - RNA, 11 nt, Human
uucuguucuuu

SEQ ID NO: 1717104 - RNA, 14 nt, Human
uucugagcauuuaa

SEQ ID NO: 1717105 - RNA, 21 nt, Human
uucuguccgagcuuugaaaau

SEQ ID NO: 1717106 - RNA, 17 nt, Human
uucuguccgagcuuuga

SEQ ID NO: 1717107 - RNA, 23 nt, Human
uucuguggguuucuaaagcugcc

SEQ ID NO: 1717108 - RNA, 16 nt, Human
uucuguggcucacaga

SEQ ID NO: 1717109 - RNA, 12 nt, Human
uucuguggcuca

SEQ ID NO: 1717110 - RNA, 17 nt, Human
uucuguccuacucugug

SEQ ID NO: 1717111 - RNA, 19 nt, Human
uucuguccuacucuguguc

SEQ ID NO: 1717112 - RNA, 22 nt, Human
uugaaaacacuguucucugccc

SEQ ID NO: 1717113 - RNA, 18 nt, Human
uucuuuauaauucuacuu

SEQ ID NO: 1717114 - RNA, 21 nt, Human
uugaaaacacuguucucugcc

SEQ ID NO: 1717115 - RNA, 19 nt, Human
uugaaaacacuguucucug

SEQ ID NO: 1717116 - RNA, 15 nt, Human
uugaaaaaugcaugu

SEQ ID NO: 1717117 - RNA, 17 nt, Human
uugaagacagagcuaca

SEQ ID NO: 1717118 - RNA, 19 nt, Human
uugaagacuuuucuuucag

SEQ ID NO: 1717119 - RNA, 22 nt, Human
uugaacuuugaccucugcagca

SEQ ID NO: 1717120 - RNA, 16 nt, Human
uugaacugauaaagau

SEQ ID NO: 1717121 - RNA, 19 nt, Human
uugaacucuucaaucucuu

SEQ ID NO: 1717122 - RNA, 22 nt, Human
ugugcuuauguaugagguacaa

SEQ ID NO: 1717123 - RNA, 20 nt, Human
ugugcgugcauguguguuca

SEQ ID NO: 1717124 - RNA, 17 nt, Human
ugugccucugggacugg

SEQ ID NO: 1717125 - RNA, 15 nt, Human
ugugccucugccugu

SEQ ID NO: 1717126 - RNA, 16 nt, Human
ugugccucugggacug

SEQ ID NO: 1717127 - RNA, 15 nt, Human
ugugccucugggacu

SEQ ID NO: 1717128 - RNA, 13 nt, Human
ugugccucuggga

SEQ ID NO: 1717129 - RNA, 14 nt, Human
ugugccucugccug

SEQ ID NO: 1717130 - RNA, 22 nt, Human
ugugcacaugcacgugugugca

SEQ ID NO: 1717131 - RNA, 12 nt, Human
ugugggaagggg

SEQ ID NO: 1717132 - RNA, 14 nt, Human
uguggacacagcuc

SEQ ID NO: 1717133 - RNA, 17 nt, Human
uguggaaaaugaaaauu

SEQ ID NO: 1717134 - RNA, 21 nt, Human
uguggagaagcggcuggcagc

SEQ ID NO: 1717135 - RNA, 12 nt, Human
uguggagaagcg

SEQ ID NO: 1717136 - RNA, 21 nt, Human
uguggcuccuggggguucuuu

SEQ ID NO: 1717137 - RNA, 16 nt, Human
uguggacacagcucuu

SEQ ID NO: 1717138 - RNA, 15 nt, Human
uguggacacagcucu

SEQ ID NO: 1717139 - RNA, 22 nt, Human
ugugaccacugcagaagacagu

SEQ ID NO: 1717140 - RNA, 15 nt, Human
ugugacauguuuuau

SEQ ID NO: 1717141 - RNA, 21 nt, Human
ugugacaaggauugcuacugu

SEQ ID NO: 1717142 - RNA, 16 nt, Human
ugugaaucauuuuacc

SEQ ID NO: 1717143 - RNA, 23 nt, Human
ugugaguacuacaguccucccau

SEQ ID NO: 1717144 - RNA, 20 nt, Human
ugugaguacuacaguccucc

SEQ ID NO: 1717145 - RNA, 19 nt, Human
ugugaguacuacaguccuc

SEQ ID NO: 1717146 - RNA, 18 nt, Human
ugugaguacuacaguccu

SEQ ID NO: 1717147 - RNA, 21 nt, Human
ugugauacaaugcugugcccu

SEQ ID NO: 1717148 - RNA, 13 nt, Human
ugugauauaagug

SEQ ID NO: 1717149 - RNA, 21 nt, Human
ugucucaguccaugaagaugu

SEQ ID NO: 1717150 - RNA, 22 nt, Human
ugucucaguccaugaagaugua

SEQ ID NO: 1717151 - RNA, 13 nt, Human
uguccccaccgca

SEQ ID NO: 1717152 - RNA, 23 nt, Human
ugucucaagagggcacugguggc

SEQ ID NO: 1717153 - RNA, 21 nt, Human
ugucucaagagggcacuggug

SEQ ID NO: 1717154 - RNA, 20 nt, Human
ugucucaagagggcacuggu

SEQ ID NO: 1717155 - RNA, 17 nt, Human
ugucucaggucccugca

SEQ ID NO: 1717156 - RNA, 16 nt, Human
ugucucaggucccugc

SEQ ID NO: 1717157 - RNA, 14 nt, Human
ugugaaaggaaaga

SEQ ID NO: 1717158 - RNA, 13 nt, Human
ugugaaaggaaag

SEQ ID NO: 1717159 - RNA, 13 nt, Human
ugugaaacauguu

SEQ ID NO: 1717160 - RNA, 18 nt, Human
ugucuuuggacccugagg

SEQ ID NO: 1717161 - RNA, 17 nt, Human
ugucuuuggacccugag

SEQ ID NO: 1717162 - RNA, 22 nt, Human
ugucuuuggacccugaggccca

SEQ ID NO: 1717163 - RNA, 19 nt, Human
ugucuuuggacccugaggc

SEQ ID NO: 1717164 - RNA, 14 nt, Human
ugucuuuuuucuaa

SEQ ID NO: 1717165 - RNA, 16 nt, Human
ugucuuuuuucacuac

SEQ ID NO: 1717166 - RNA, 13 nt, Human
uguaaauuaacuu

SEQ ID NO: 1717167 - RNA, 14 nt, Human
uguaaauuaacuuu

SEQ ID NO: 1717168 - RNA, 15 nt, Human
uguaaauuaacuuuu

SEQ ID NO: 1717169 - RNA, 16 nt, Human
uguaaauuaacuuuua

SEQ ID NO: 1717170 - RNA, 17 nt, Human
uguaaauuaacuuuuau

SEQ ID NO: 1717171 - RNA, 17 nt, Human
ugguaggacuguagaaa

SEQ ID NO: 1717172 - RNA, 18 nt, Human
ugguaggacuguagaaaa

SEQ ID NO: 1717173 - RNA, 23 nt, Human
uguaacuaaaauaauuuuguaau

SEQ ID NO: 1717174 - RNA, 14 nt, Human
uguaacuaaaauaa

SEQ ID NO: 1717175 - RNA, 15 nt, Human
uguaacuaaaauaau

SEQ ID NO: 1717176 - RNA, 15 nt, Human
uguaaucacagcuac

SEQ ID NO: 1717177 - RNA, 12 nt, Human
uguaaugacagg

SEQ ID NO: 1717178 - RNA, 23 nt, Human
uguaauguaucaaauacauuuaa

SEQ ID NO: 1717179 - RNA, 12 nt, Human
uguacagucuug

SEQ ID NO: 1717180 - RNA, 14 nt, Human
uguacagucuugua

SEQ ID NO: 1717181 - RNA, 15 nt, Human
uguacagucuuguau

SEQ ID NO: 1717182 - RNA, 17 nt, Human
uguacagucuuguauua

SEQ ID NO: 1717183 - RNA, 15 nt, Human
uguaccgcaauguga

SEQ ID NO: 1717184 - RNA, 23 nt, Human
uguaccucuugagccuugaacuu

SEQ ID NO: 1717185 - RNA, 22 nt, Human
uguaccucuugagccuugaacu

SEQ ID NO: 1717186 - RNA, 14 nt, Human
uguaccucuugagc

SEQ ID NO: 1717187 - RNA, 17 nt, Human
uguagauaauacaguuc

SEQ ID NO: 1717188 - RNA, 13 nt, Human
uguacuccuccca

SEQ ID NO: 1717189 - RNA, 12 nt, Human
uguacuccuccc

SEQ ID NO: 1717190 - RNA, 16 nt, Human
uguacgucugacaggc

SEQ ID NO: 1717191 - RNA, 17 nt, Human
uguacgucugacaggca

SEQ ID NO: 1717192 - RNA, 23 nt, Human
uguaucccaugagccucagcauc

SEQ ID NO: 1717193 - RNA, 19 nt, Human
uguaucccaugagccucag

SEQ ID NO: 1717194 - RNA, 14 nt, Human
uguaugcacuuugu

SEQ ID NO: 1717195 - RNA, 20 nt, Human
ugucagugugacugaucucu

SEQ ID NO: 1717196 - RNA, 12 nt, Human
ugucagugugac

SEQ ID NO: 1717197 - RNA, 23 nt, Human
ugucccaaaaagaaaggagggga

SEQ ID NO: 1717198 - RNA, 23 nt, Human
ugucauucgcuacuaugauuuaa

SEQ ID NO: 1717199 - RNA, 22 nt, Human
ugugugucuaggcaggaccugu

SEQ ID NO: 1717200 - RNA, 13 nt, Human
uguguuuauuguc

SEQ ID NO: 1717201 - RNA, 22 nt, Human
uguguuuaggaacuacugagga

SEQ ID NO: 1717202 - RNA, 17 nt, Human
uguuagauuaagaaaua

SEQ ID NO: 1717203 - RNA, 20 nt, Human
uguuagauuaagaaauagac

SEQ ID NO: 1717204 - RNA, 14 nt, Human
uguucagcuccagc

SEQ ID NO: 1717205 - RNA, 11 nt, Human
uguucagcugg

SEQ ID NO: 1717206 - RNA, 18 nt, Human
uguucagcuccagcucac

SEQ ID NO: 1717207 - RNA, 16 nt, Human
uguucagcuccagcuc

SEQ ID NO: 1717208 - RNA, 15 nt, Human
uguucagcuccagcu

SEQ ID NO: 1717209 - RNA, 16 nt, Human
uguuacugucuucagu

SEQ ID NO: 1717210 - RNA, 15 nt, Human
uguuacugucuucag

SEQ ID NO: 1717211 - RNA, 22 nt, Human
uguuacauuuuuaagugcugca

SEQ ID NO: 1717212 - RNA, 13 nt, Human
uguuacauuuuua

SEQ ID NO: 1717213 - RNA, 17 nt, Human
uguuuacagauccccaa

SEQ ID NO: 1717214 - RNA, 14 nt, Human
uguuggccaggcug

SEQ ID NO: 1717215 - RNA, 18 nt, Human
uguuggccaggcugcucu

SEQ ID NO: 1717216 - RNA, 13 nt, Human
uguuggccaggcu

SEQ ID NO: 1717217 - RNA, 14 nt, Human
uguugcugccucau

SEQ ID NO: 1717218 - RNA, 11 nt, Human
uguuggccagg

SEQ ID NO: 1717219 - RNA, 20 nt, Human
uguuggauuuuugucuugug

SEQ ID NO: 1717220 - RNA, 17 nt, Human
uguuggauuuuugucuu

SEQ ID NO: 1717221 - RNA, 13 nt, Human
uguugcugccuca

SEQ ID NO: 1717222 - RNA, 11 nt, Human
uguugaaagau

SEQ ID NO: 1717223 - RNA, 20 nt, Human
uguucuuucuggcuaugcau

SEQ ID NO: 1717224 - RNA, 22 nt, Human
uguucuuucuggcuaugcauuu

SEQ ID NO: 1717225 - RNA, 15 nt, Human
uguucugacccugcu

SEQ ID NO: 1717226 - RNA, 19 nt, Human
uguucucugcccuccaaga

SEQ ID NO: 1717227 - RNA, 14 nt, Human
uguucuuucuggcu

SEQ ID NO: 1717228 - RNA, 17 nt, Human
uguucugcacacagcac

SEQ ID NO: 1717229 - RNA, 18 nt, Human
uguucugacccugcuuca

SEQ ID NO: 1717230 - RNA, 12 nt, Human
uguucucugccc

SEQ ID NO: 1717231 - RNA, 18 nt, Human
uguucucugaggacacua

SEQ ID NO: 1717232 - RNA, 16 nt, Human
uguucucugaggacac

SEQ ID NO: 1717233 - RNA, 12 nt, Human
uguucuauagcu

SEQ ID NO: 1717234 - RNA, 13 nt, Human
uguucauaaauaa

SEQ ID NO: 1717235 - RNA, 14 nt, Human
uuacauuuccuaaa

SEQ ID NO: 1717236 - RNA, 20 nt, Human
uuacagagacagaaagcaga

SEQ ID NO: 1717237 - RNA, 23 nt, Human
uuacaauaaaaucuugaaaaugc

SEQ ID NO: 1717238 - RNA, 14 nt, Human
uuaccagcagagca

SEQ ID NO: 1717239 - RNA, 20 nt, Human
uuacauuuuuaagugcugca

SEQ ID NO: 1717240 - RNA, 21 nt, Human
uuacauuuuuaagugcugcau

SEQ ID NO: 1717241 - RNA, 22 nt, Human
uuacauuuuuaagugcugcauu

SEQ ID NO: 1717242 - RNA, 23 nt, Human
uuacauuuuuaagugcugcauuu

SEQ ID NO: 1717243 - RNA, 19 nt, Human
uuaccuuuuuuauacauaa

SEQ ID NO: 1717244 - RNA, 20 nt, Human
uuaccuuuuuuauacauaaa

SEQ ID NO: 1717245 - RNA, 22 nt, Human
uuaccuuuuuuauacauaaaca

SEQ ID NO: 1717246 - RNA, 20 nt, Human
uuacgguuuuccagguuuaa

SEQ ID NO: 1717247 - RNA, 22 nt, Human
uuaaugucaauucuugccaaau

SEQ ID NO: 1717248 - RNA, 17 nt, Human
uuaaugucacaggcagg

SEQ ID NO: 1717249 - RNA, 14 nt, Human
uuaauggaaauguu

SEQ ID NO: 1717250 - RNA, 18 nt, Human
uuaaugucacaggcaggu

SEQ ID NO: 1717251 - RNA, 22 nt, Human
uuaaggaugcuuguacauaaug

SEQ ID NO: 1717252 - RNA, 17 nt, Human
uuaaggaugcuuguaca

SEQ ID NO: 1717253 - RNA, 18 nt, Human
uuaaggaugcuuguacau

SEQ ID NO: 1717254 - RNA, 19 nt, Human
uuaaggaugcuuguacaua

SEQ ID NO: 1717255 - RNA, 20 nt, Human
uuaaggaugcuuguacauaa

SEQ ID NO: 1717256 - RNA, 21 nt, Human
uuaaggaagacaaugugaaaa

SEQ ID NO: 1717257 - RNA, 18 nt, Human
uguuuuaaaaugagaaau

SEQ ID NO: 1717258 - RNA, 17 nt, Human
uguuuguugucagcuga

SEQ ID NO: 1717259 - RNA, 22 nt, Human
uguuuccuggcacugcuuccag

SEQ ID NO: 1717260 - RNA, 21 nt, Human
uguuuccuggcacugcuucca

SEQ ID NO: 1717261 - RNA, 20 nt, Human
uguuuccuggcacugcuucc

SEQ ID NO: 1717262 - RNA, 23 nt, Human
uguuuccuggcacugcuuccagu

SEQ ID NO: 1717263 - RNA, 13 nt, Human
uguuuuugucuua

SEQ ID NO: 1717264 - RNA, 23 nt, Human
uguuuuaaaaugagaaaucuaaa

SEQ ID NO: 1717265 - RNA, 15 nt, Human
uuaaauguagaaagu

SEQ ID NO: 1717266 - RNA, 18 nt, Human
uuaaaugcccagccccuu

SEQ ID NO: 1717267 - RNA, 13 nt, Human
uuaaaugcccagc

SEQ ID NO: 1717268 - RNA, 16 nt, Human
uuaaaugcaccuggaa

SEQ ID NO: 1717269 - RNA, 17 nt, Human
uuaaaugcaccuggaau

SEQ ID NO: 1717270 - RNA, 18 nt, Human
uuaaaugcaccuggaaua

SEQ ID NO: 1717271 - RNA, 18 nt, Human
uuaaauaguaaaaauaaa

SEQ ID NO: 1717272 - RNA, 15 nt, Human
uuaaaacauuaaaau

SEQ ID NO: 1717273 - RNA, 16 nt, Human
uuaaacuuaaucuaaa

SEQ ID NO: 1717274 - RNA, 18 nt, Human
uuaaacuuaaucuaaaug

SEQ ID NO: 1717275 - RNA, 20 nt, Human
uuaaacuuaaucuaaaugga

SEQ ID NO: 1717276 - RNA, 22 nt, Human
uuaaacuuaaucuaaauggaac

SEQ ID NO: 1717277 - RNA, 14 nt, Human
uuaaagacuuuuau

SEQ ID NO: 1717278 - RNA, 15 nt, Human
uggcucuuccaggcu

SEQ ID NO: 1717279 - RNA, 13 nt, Human
uggcucuuccagg

SEQ ID NO: 1717280 - RNA, 12 nt, Human
uggcugggggcc

SEQ ID NO: 1717281 - RNA, 16 nt, Human
uggcucuuccaggcug

SEQ ID NO: 1717282 - RNA, 20 nt, Human
uggcucagguggggucacuc

SEQ ID NO: 1717283 - RNA, 22 nt, Human
uggcucagguggggucacucug

SEQ ID NO: 1717284 - RNA, 14 nt, Human
uggcuaaauucaug

SEQ ID NO: 1717285 - RNA, 20 nt, Human
uggcuccaaacccucgaggc

SEQ ID NO: 1717286 - RNA, 18 nt, Human
uggcuccaaacccucgag

SEQ ID NO: 1717287 - RNA, 16 nt, Human
uggcuccaaacccucg

SEQ ID NO: 1717288 - RNA, 20 nt, Human
uggccuucggccuccauccu

SEQ ID NO: 1717289 - RNA, 17 nt, Human
uggccuucggccuccau

SEQ ID NO: 1717290 - RNA, 18 nt, Human
uggccuucggccuccauc

SEQ ID NO: 1717291 - RNA, 15 nt, Human
uggccagaugcacca

SEQ ID NO: 1717292 - RNA, 22 nt, Human
uggcgugcaguggugcgaucug

SEQ ID NO: 1717293 - RNA, 14 nt, Human
uggcgcugccccug

SEQ ID NO: 1717294 - RNA, 15 nt, Human
uggcgcugccccugg

SEQ ID NO: 1717295 - RNA, 15 nt, Human
uggcugggggccuca

SEQ ID NO: 1717296 - RNA, 22 nt, Human
uggcugguuagagguucccuuu

SEQ ID NO: 1717297 - RNA, 14 nt, Human
uggcugggggccuc

SEQ ID NO: 1717298 - RNA, 22 nt, Human
ugggaaugaaugucagugugac

SEQ ID NO: 1717299 - RNA, 15 nt, Human
uggcuuuucacugcu

SEQ ID NO: 1717300 - RNA, 14 nt, Human
uggcuuuucacugc

SEQ ID NO: 1717301 - RNA, 16 nt, Human
ugggacaugggaaagg

SEQ ID NO: 1717302 - RNA, 16 nt, Human
ugggacagggcauggc

SEQ ID NO: 1717303 - RNA, 23 nt, Human
ugggagcugccuguucagcucca

SEQ ID NO: 1717304 - RNA, 22 nt, Human
ugggguggggggggugcugggc

SEQ ID NO: 1717305 - RNA, 21 nt, Human
ugggguggggggggugcuggg

SEQ ID NO: 1717306 - RNA, 17 nt, Human
ugggguggggaccucag

SEQ ID NO: 1717307 - RNA, 19 nt, Human
ugggguggggggggugcug

SEQ ID NO: 1717308 - RNA, 17 nt, Human
uggguuggaaaacagua

SEQ ID NO: 1717309 - RNA, 21 nt, Human
uggguuccagcaauucuccug

SEQ ID NO: 1717310 - RNA, 22 nt, Human
uggguuccuuccucugagccuu

SEQ ID NO: 1717311 - RNA, 21 nt, Human
uggguuccuuccucugagccu

SEQ ID NO: 1717312 - RNA, 16 nt, Human
uggguucacugcaacc

SEQ ID NO: 1717313 - RNA, 23 nt, Human
uggguucaagcgauucuucugcu

SEQ ID NO: 1717314 - RNA, 14 nt, Human
uggguguggcgcag

SEQ ID NO: 1717315 - RNA, 23 nt, Human
ugggugucaagagggucugagga

SEQ ID NO: 1717316 - RNA, 21 nt, Human
ugggugucaagagggucugag

SEQ ID NO: 1717317 - RNA, 22 nt, Human
ugggcuuggggaccagagcugc

SEQ ID NO: 1717318 - RNA, 21 nt, Human
ugggcuuggggaccagagcug

SEQ ID NO: 1717319 - RNA, 16 nt, Human
uggggcagcuugaggg

SEQ ID NO: 1717320 - RNA, 20 nt, Human
ugggcuucaguggcagcugc

SEQ ID NO: 1717321 - RNA, 19 nt, Human
ugggcuuggggaccagagc

SEQ ID NO: 1717322 - RNA, 19 nt, Human
ugggcuucaguggcagcug

SEQ ID NO: 1717323 - RNA, 18 nt, Human
ugggcuucaguggcagcu

SEQ ID NO: 1717324 - RNA, 19 nt, Human
ugggcgugagaccugcccc

SEQ ID NO: 1717325 - RNA, 18 nt, Human
ugggcgugagaccugccc

SEQ ID NO: 1717326 - RNA, 17 nt, Human
ugggcgugagaccugcc

SEQ ID NO: 1717327 - RNA, 24 nt, Human
ugggagcugccuguucagcuccag

SEQ ID NO: 1717328 - RNA, 22 nt, Human
ugggccuccugugugugcgccu

SEQ ID NO: 1717329 - RNA, 16 nt, Human
ugggccuccugugugu

SEQ ID NO: 1717330 - RNA, 18 nt, Human
ugggccuucagggaguga

SEQ ID NO: 1717331 - RNA, 14 nt, Human
ugggccuccugugu

SEQ ID NO: 1717332 - RNA, 22 nt, Human
uggccacuccagaccccuggcu

SEQ ID NO: 1717333 - RNA, 20 nt, Human
uggcagugggagcugccugu

SEQ ID NO: 1717334 - RNA, 19 nt, Human
uggcagugggagcugccug

SEQ ID NO: 1717335 - RNA, 16 nt, Human
uggcagugggagcugc

SEQ ID NO: 1717336 - RNA, 15 nt, Human
uggcagugggagcug

SEQ ID NO: 1717337 - RNA, 14 nt, Human
uggcagugggagcu

SEQ ID NO: 1717338 - RNA, 15 nt, Human
uggaugccugguggc

SEQ ID NO: 1717339 - RNA, 14 nt, Human
uggaugccuggugg

SEQ ID NO: 1717340 - RNA, 18 nt, Human
uggcacugcuuccaguga

SEQ ID NO: 1717341 - RNA, 16 nt, Human
uggcacugcuuccagu

SEQ ID NO: 1717342 - RNA, 14 nt, Human
uggcacugcuucca

SEQ ID NO: 1717343 - RNA, 22 nt, Human
uggcagcugcgguccacccagg

SEQ ID NO: 1717344 - RNA, 21 nt, Human
uggcagcugcgguccacccag

SEQ ID NO: 1717345 - RNA, 23 nt, Human
uggcagcugcgguccacccagga

SEQ ID NO: 1717346 - RNA, 22 nt, Human
uggaggcaugugaugagaggaa

SEQ ID NO: 1717347 - RNA, 13 nt, Human
uggauaccauuau

SEQ ID NO: 1717348 - RNA, 15 nt, Human
uggauaccauuauau

SEQ ID NO: 1717349 - RNA, 19 nt, Human
uggauacgacaacuugcac

SEQ ID NO: 1717350 - RNA, 17 nt, Human
uggacaggcauguucuc

SEQ ID NO: 1717351 - RNA, 16 nt, Human
uggacaggcauguucu

SEQ ID NO: 1717352 - RNA, 12 nt, Human
uggacaggcaug

SEQ ID NO: 1717353 - RNA, 13 nt, Human
uggagauguuuag

SEQ ID NO: 1717354 - RNA, 20 nt, Human
uggagaggcccggccucuca

SEQ ID NO: 1717355 - RNA, 14 nt, Human
ugcuuguuggauuu

SEQ ID NO: 1717356 - RNA, 18 nt, Human
ugcuuguuaacugagugc

SEQ ID NO: 1717357 - RNA, 16 nt, Human
ugcuucuucagagacu

SEQ ID NO: 1717358 - RNA, 12 nt, Human
ugcuucucacug

SEQ ID NO: 1717359 - RNA, 18 nt, Human
ugcuuccagugaggcucu

SEQ ID NO: 1717360 - RNA, 14 nt, Human
ugcugccuccagaa

SEQ ID NO: 1717361 - RNA, 13 nt, Human
ugcugccucaugc

SEQ ID NO: 1717362 - RNA, 20 nt, Human
ugcuuccagugaggcucugc

SEQ ID NO: 1717363 - RNA, 19 nt, Human
ugcuuccagugaggcucug

SEQ ID NO: 1717364 - RNA, 21 nt, Human
ugcuuccagugaggcucugcc

SEQ ID NO: 1717365 - RNA, 14 nt, Human
uggaacucucgagc

SEQ ID NO: 1717366 - RNA, 12 nt, Human
uggaagacagcu

SEQ ID NO: 1717367 - RNA, 11 nt, Human
uggaagacagc

SEQ ID NO: 1717368 - RNA, 15 nt, Human
uggaaaauaaaucaa

SEQ ID NO: 1717369 - RNA, 11 nt, Human
uggaaaauaaa

SEQ ID NO: 1717370 - RNA, 20 nt, Human
uggaaaaaccacccccaaau

SEQ ID NO: 1717371 - RNA, 16 nt, Human
uggaaaauaaauuauu

SEQ ID NO: 1717372 - RNA, 15 nt, Human
uggaaaauaaauuau

SEQ ID NO: 1717373 - RNA, 15 nt, Human
uggaagacagcucuu

SEQ ID NO: 1717374 - RNA, 14 nt, Human
uggaagacagcucu

SEQ ID NO: 1717375 - RNA, 21 nt, Human
uggaagugugugaucuguggg

SEQ ID NO: 1717376 - RNA, 23 nt, Human
ugcacagcuaacauggaaguacu

SEQ ID NO: 1717377 - RNA, 20 nt, Human
ugcacagcuaacauggaagu

SEQ ID NO: 1717378 - RNA, 18 nt, Human
ugcacagcuaacauggaa

SEQ ID NO: 1717379 - RNA, 18 nt, Human
ugcacagugcaucucagc

SEQ ID NO: 1717380 - RNA, 20 nt, Human
ugcacagugcaucucagccc

SEQ ID NO: 1717381 - RNA, 19 nt, Human
ugcacagugcaucucagcc

SEQ ID NO: 1717382 - RNA, 17 nt, Human
ugcacagcuaacaugga

SEQ ID NO: 1717383 - RNA, 23 nt, Human
ugcacagaguuguuacauuuuua

SEQ ID NO: 1717384 - RNA, 21 nt, Human
ugcacagaguuguuacauuuu

SEQ ID NO: 1717385 - RNA, 22 nt, Human
ugcacagaguuguuacauuuuu

SEQ ID NO: 1717386 - RNA, 16 nt, Human
ugaaggcuggguucug

SEQ ID NO: 1717387 - RNA, 20 nt, Human
ugaagucuuuguacagacaa

SEQ ID NO: 1717388 - RNA, 17 nt, Human
ugaagucuuuguacaga

SEQ ID NO: 1717389 - RNA, 22 nt, Human
ugaagucuuuguacagacaaca

SEQ ID NO: 1717390 - RNA, 16 nt, Human
ugcacguacacacaca

SEQ ID NO: 1717391 - RNA, 19 nt, Human
ugcacguacacacacauac

SEQ ID NO: 1717392 - RNA, 21 nt, Human
ugcacuugcagacucuacaga

SEQ ID NO: 1717393 - RNA, 16 nt, Human
ugcagauaaacaguag

SEQ ID NO: 1717394 - RNA, 17 nt, Human
ugcagauaaacaguagu

SEQ ID NO: 1717395 - RNA, 20 nt, Human
ugcacuuuguucuggcucuu

SEQ ID NO: 1717396 - RNA, 19 nt, Human
ugcacuuuguucuggcucu

SEQ ID NO: 1717397 - RNA, 18 nt, Human
ugcacuuuguucuggcuc

SEQ ID NO: 1717398 - RNA, 15 nt, Human
ugcacuuuguucugg

SEQ ID NO: 1717399 - RNA, 14 nt, Human
ugcaggaccucagg

SEQ ID NO: 1717400 - RNA, 22 nt, Human
ugcagcuuuaaaaaauuaaucu

SEQ ID NO: 1717401 - RNA, 16 nt, Human
ugcaggaccucaggug

SEQ ID NO: 1717402 - RNA, 15 nt, Human
ugcaggaccucaggu

SEQ ID NO: 1717403 - RNA, 18 nt, Human
ugcaggaccucaggugag

SEQ ID NO: 1717404 - RNA, 14 nt, Human
ugcagcaauaaagc

SEQ ID NO: 1717405 - RNA, 15 nt, Human
ugcagcaauaaagca

SEQ ID NO: 1717406 - RNA, 16 nt, Human
ugcagcaauaaagcag

SEQ ID NO: 1717407 - RNA, 13 nt, Human
ugcagcuuuaaaa

SEQ ID NO: 1717408 - RNA, 19 nt, Human
ugcauguuacauaagauaa

SEQ ID NO: 1717409 - RNA, 19 nt, Human
ugcaggcagccaggccaca

SEQ ID NO: 1717410 - RNA, 18 nt, Human
ugcaggcagccaggccac

SEQ ID NO: 1717411 - RNA, 17 nt, Human
ugcaggcagccaggcca

SEQ ID NO: 1717412 - RNA, 16 nt, Human
ugcaggcagccaggcc

SEQ ID NO: 1717413 - RNA, 15 nt, Human
ugcaucguuucaucu

SEQ ID NO: 1717414 - RNA, 17 nt, Human
ugcaucguuucaucuuc

SEQ ID NO: 1717415 - RNA, 21 nt, Human
ugcauccuccgccucccgggu

SEQ ID NO: 1717416 - RNA, 18 nt, Human
ugcauccuccgccucccg

SEQ ID NO: 1717417 - RNA, 14 nt, Human
ugccagucaccccg

SEQ ID NO: 1717418 - RNA, 22 nt, Human
ugccagggacagaggggguggc

SEQ ID NO: 1717419 - RNA, 11 nt, Human
ugccagggaca

SEQ ID NO: 1717420 - RNA, 10 nt, Human
ugcccagccc

SEQ ID NO: 1717421 - RNA, 19 nt, Human
ugcccaccuggccucugca

SEQ ID NO: 1717422 - RNA, 18 nt, Human
ugcccaccuggccucugc

SEQ ID NO: 1717423 - RNA, 17 nt, Human
ugcccaccuggccucug

SEQ ID NO: 1717424 - RNA, 15 nt, Human
ugcccaccuggccuc

SEQ ID NO: 1717425 - RNA, 16 nt, Human
ugccuccuuugugagg

SEQ ID NO: 1717426 - RNA, 18 nt, Human
ugccuccuuugugaggaa

SEQ ID NO: 1717427 - RNA, 17 nt, Human
ugccuccuuugugagga

SEQ ID NO: 1717428 - RNA, 18 nt, Human
ugccugaagucacacagu

SEQ ID NO: 1717429 - RNA, 22 nt, Human
ugccugaagucacacagugagu

SEQ ID NO: 1717430 - RNA, 19 nt, Human
ugccuaaggcugaacuugu

SEQ ID NO: 1717431 - RNA, 23 nt, Human
ugcccaggcuggcgugcaguggu

SEQ ID NO: 1717432 - RNA, 12 nt, Human
ugcccagccccu

SEQ ID NO: 1717433 - RNA, 11 nt, Human
ugcccagcccc

SEQ ID NO: 1717434 - RNA, 23 nt, Human
ugcggugcuaucucccccagccc

SEQ ID NO: 1717435 - RNA, 13 nt, Human
ugcgccuacagga

SEQ ID NO: 1717436 - RNA, 19 nt, Human
ugcgcaggcuggcccugcc

SEQ ID NO: 1717437 - RNA, 17 nt, Human
ugcgcaggcuggcccug

SEQ ID NO: 1717438 - RNA, 16 nt, Human
ugcgcaggcuggcccu

SEQ ID NO: 1717439 - RNA, 13 nt, Human
ugcgcaggcuggc

SEQ ID NO: 1717440 - RNA, 22 nt, Human
ugccuuauggaacacucugaga

SEQ ID NO: 1717441 - RNA, 21 nt, Human
ugccuuauggaacacucugag

SEQ ID NO: 1717442 - RNA, 20 nt, Human
ugccuuauggaacacucuga

SEQ ID NO: 1717443 - RNA, 18 nt, Human
ugccuuauggaacacucu

SEQ ID NO: 1717444 - RNA, 15 nt, Human
ugccuggcggggugg

SEQ ID NO: 1717445 - RNA, 18 nt, Human
ugccuucagcucuacagc

SEQ ID NO: 1717446 - RNA, 17 nt, Human
ugccuucagcucuacag

SEQ ID NO: 1717447 - RNA, 13 nt, Human
ugccuucagcucu

SEQ ID NO: 1717448 - RNA, 19 nt, Human
ugcugacagacacaggccc

SEQ ID NO: 1717449 - RNA, 16 nt, Human
ugcugacagacacagg

SEQ ID NO: 1717450 - RNA, 15 nt, Human
ugcugacagacacag

SEQ ID NO: 1717451 - RNA, 16 nt, Human
ugcugcaguugccagu

SEQ ID NO: 1717452 - RNA, 15 nt, Human
ugcugcaguugccag

SEQ ID NO: 1717453 - RNA, 23 nt, Human
ugcugauggugcaaugaccuuuc

SEQ ID NO: 1717454 - RNA, 20 nt, Human
ugcugauggugcaaugaccu

SEQ ID NO: 1717455 - RNA, 23 nt, Human
ugcugaauacagaggcaacugca

SEQ ID NO: 1717456 - RNA, 18 nt, Human
ugcugaauacagaggcaa

SEQ ID NO: 1717457 - RNA, 22 nt, Human
ugcugaaugguuuucaaaauaa

SEQ ID NO: 1717458 - RNA, 18 nt, Human
ugcugaaugguuuucaaa

SEQ ID NO: 1717459 - RNA, 17 nt, Human
ugcugaaugguuuucaa

SEQ ID NO: 1717460 - RNA, 19 nt, Human
ugcuccuggcccacugcau

SEQ ID NO: 1717461 - RNA, 19 nt, Human
ugcuagaacucccuuucaa

SEQ ID NO: 1717462 - RNA, 18 nt, Human
ugcuagaacucccuuuca

SEQ ID NO: 1717463 - RNA, 15 nt, Human
ugcgugcauaccacu

SEQ ID NO: 1717464 - RNA, 20 nt, Human
ugcuagaacucccuuucaac

SEQ ID NO: 1717465 - RNA, 21 nt, Human
ugcuagaacucccuuucaaca

SEQ ID NO: 1717466 - RNA, 19 nt, Human
ugcuaggaacacuccuuca

SEQ ID NO: 1717467 - RNA, 17 nt, Human
ugcuaggaacacuccuu

SEQ ID NO: 1717468 - RNA, 16 nt, Human
ugcuaggaacacuccu

SEQ ID NO: 1717469 - RNA, 19 nt, Human
ugcuccucuccccagcaag

SEQ ID NO: 1717470 - RNA, 20 nt, Human
ugcuaggaacacuccuucac

SEQ ID NO: 1717471 - RNA, 14 nt, Human
ugcucaggagcccu

SEQ ID NO: 1717472 - RNA, 16 nt, Human
ugcucagcugucaagg

SEQ ID NO: 1717473 - RNA, 20 nt, Human
ugcucagcugucaaggcuca

SEQ ID NO: 1717474 - RNA, 21 nt, Human
ucuuccacaagagcccaggcc

SEQ ID NO: 1717475 - RNA, 16 nt, Human
ucuucaguaagccgug

SEQ ID NO: 1717476 - RNA, 14 nt, Human
ucuuccaggcuggg

SEQ ID NO: 1717477 - RNA, 13 nt, Human
ucuucuccacugg

SEQ ID NO: 1717478 - RNA, 21 nt, Human
ucuucuccacuuucuagccag

SEQ ID NO: 1717479 - RNA, 19 nt, Human
ucuucuccacuuucuagcc

SEQ ID NO: 1717480 - RNA, 15 nt, Human
ucuucaguaagccgu

SEQ ID NO: 1717481 - RNA, 13 nt, Human
ucuuaugggcugg

SEQ ID NO: 1717482 - RNA, 15 nt, Human
ucuuauacauuugau

SEQ ID NO: 1717483 - RNA, 16 nt, Human
ucuuaguggauguucu

SEQ ID NO: 1717484 - RNA, 14 nt, Human
ucuuagugugugca

SEQ ID NO: 1717485 - RNA, 16 nt, Human
ucuucuccacuggaug

SEQ ID NO: 1717486 - RNA, 12 nt, Human
ucuucuccaggc

SEQ ID NO: 1717487 - RNA, 14 nt, Human
ucuucuccaggcug

SEQ ID NO: 1717488 - RNA, 13 nt, Human
ucuucuccaggcu

SEQ ID NO: 1717489 - RNA, 18 nt, Human
ucuugaacuccuggccuc

SEQ ID NO: 1717490 - RNA, 17 nt, Human
ucuugaacuccuggccu

SEQ ID NO: 1717491 - RNA, 16 nt, Human
ucuugaacuccuggcc

SEQ ID NO: 1717492 - RNA, 15 nt, Human
ucuucuccaggcugu

SEQ ID NO: 1717493 - RNA, 21 nt, Human
ucuugaauuguaaggaaugau

SEQ ID NO: 1717494 - RNA, 16 nt, Human
ucuuguauuaaguugu

SEQ ID NO: 1717495 - RNA, 18 nt, Human
ucuuguauuaaguuguua

SEQ ID NO: 1717496 - RNA, 22 nt, Human
ucuuguauuaaguuguuaauaa

SEQ ID NO: 1717497 - RNA, 11 nt, Human
ucuugcucugc

SEQ ID NO: 1717498 - RNA, 13 nt, Human
ucuugcucugcug

SEQ ID NO: 1717499 - RNA, 12 nt, Human
ucuugcucugcu

SEQ ID NO: 1717500 - RNA, 21 nt, Human
ucuuguuuuuuuuuuccacuu

SEQ ID NO: 1717501 - RNA, 18 nt, Human
ucuuguuuuuuuuuucca

SEQ ID NO: 1717502 - RNA, 22 nt, Human
ucuguggguuucuaaagcugcc

SEQ ID NO: 1717503 - RNA, 19 nt, Human
ucuguccgagcuuugaaaa

SEQ ID NO: 1717504 - RNA, 17 nt, Human
ucuguacgucugacagg

SEQ ID NO: 1717505 - RNA, 23 nt, Human
ucuguggguuucuaaagcugcca

SEQ ID NO: 1717506 - RNA, 18 nt, Human
ucuuaaaaaguggaaaaa

SEQ ID NO: 1717507 - RNA, 19 nt, Human
ucuguuacacuuuuuggaa

SEQ ID NO: 1717508 - RNA, 18 nt, Human
ucuggagguacgaaaaga

SEQ ID NO: 1717509 - RNA, 14 nt, Human
ucuggcuaugcauu

SEQ ID NO: 1717510 - RNA, 17 nt, Human
ucuggcuaugcauuuga

SEQ ID NO: 1717511 - RNA, 23 nt, Human
ucuggagcccacuguacuugcuc

SEQ ID NO: 1717512 - RNA, 23 nt, Human
ucuguacagagcccacgccccca

SEQ ID NO: 1717513 - RNA, 12 nt, Human
ucugggacacag

SEQ ID NO: 1717514 - RNA, 13 nt, Human
ucugggacacagu

SEQ ID NO: 1717515 - RNA, 16 nt, Human
ucuggcucuuccaggc

SEQ ID NO: 1717516 - RNA, 15 nt, Human
ucuggcucuuccagg

SEQ ID NO: 1717517 - RNA, 17 nt, Human
ucuggcucuuccaggcu

SEQ ID NO: 1717518 - RNA, 17 nt, Human
ugaaaggaaagaggcuc

SEQ ID NO: 1717519 - RNA, 12 nt, Human
ugaaaggaaaga

SEQ ID NO: 1717520 - RNA, 18 nt, Human
ugaaagcagggacuugaa

SEQ ID NO: 1717521 - RNA, 19 nt, Human
ugaaagcagggacuugaac

SEQ ID NO: 1717522 - RNA, 23 nt, Human
ugaaagcagggacuugaacccau

SEQ ID NO: 1717523 - RNA, 18 nt, Human
ugaaacccugucucuacu

SEQ ID NO: 1717524 - RNA, 21 nt, Human
ugaaagauggcugugccucug

SEQ ID NO: 1717525 - RNA, 23 nt, Human
ugaaagauggcugugccucugcc

SEQ ID NO: 1717526 - RNA, 22 nt, Human
ugaaagauggcugugccucugc

SEQ ID NO: 1717527 - RNA, 18 nt, Human
ugaaagggcccagagagg

SEQ ID NO: 1717528 - RNA, 17 nt, Human
ugaaagggcccagagag

SEQ ID NO: 1717529 - RNA, 16 nt, Human
ugaaagggcccagaga

SEQ ID NO: 1717530 - RNA, 17 nt, Human
ugaaaucuuuuugcuuu

SEQ ID NO: 1717531 - RNA, 15 nt, Human
ugaaaucauucauuu

SEQ ID NO: 1717532 - RNA, 20 nt, Human
ugaaaugaggucagagccug

SEQ ID NO: 1717533 - RNA, 19 nt, Human
ugaaaugaggucagagccu

SEQ ID NO: 1717534 - RNA, 22 nt, Human
ugaaaugaggucagagccugca

SEQ ID NO: 1717535 - RNA, 21 nt, Human
ugaaaugaggucagagccugc

SEQ ID NO: 1717536 - RNA, 23 nt, Human
ugaaaugaggucagagccugcag

SEQ ID NO: 1717537 - RNA, 17 nt, Human
ucuuucacauuuaaaua

SEQ ID NO: 1717538 - RNA, 17 nt, Human
ucuuuugccguuauuaa

SEQ ID NO: 1717539 - RNA, 19 nt, Human
ucuuuugccguuauuaaaa

SEQ ID NO: 1717540 - RNA, 20 nt, Human
ucuuuugguuaugaauacuu

SEQ ID NO: 1717541 - RNA, 19 nt, Human
ugaaaacuuuaugcuaagu

SEQ ID NO: 1717542 - RNA, 15 nt, Human
ugaaaagaaaaauga

SEQ ID NO: 1717543 - RNA, 13 nt, Human
ugaaaacuuugua

SEQ ID NO: 1717544 - RNA, 16 nt, Human
ugaaaacuuuguagua

SEQ ID NO: 1717545 - RNA, 16 nt, Human
ucuuuuugcuuugcuu

SEQ ID NO: 1717546 - RNA, 22 nt, Human
ugaagacuuuucuuucagccaa

SEQ ID NO: 1717547 - RNA, 17 nt, Human
ugaagacuuuucuuuca

SEQ ID NO: 1717548 - RNA, 14 nt, Human
ugaagacuuuucuu

SEQ ID NO: 1717549 - RNA, 23 nt, Human
ugaacuggguacuuguggacaca

SEQ ID NO: 1717550 - RNA, 22 nt, Human
ugaacuuguaaaggaauuuaaa

SEQ ID NO: 1717551 - RNA, 16 nt, Human
ugaagacagagcuaca

SEQ ID NO: 1717552 - RNA, 14 nt, Human
ugaagacagagcua

SEQ ID NO: 1717553 - RNA, 12 nt, Human
ugaacuugguuc

SEQ ID NO: 1717554 - RNA, 14 nt, Human
ugaacuuggcgcug

SEQ ID NO: 1717555 - RNA, 19 nt, Human
ugaacuggguacuugugga

SEQ ID NO: 1717556 - RNA, 21 nt, Human
ugaaggcucgagcaugccugg

SEQ ID NO: 1717557 - RNA, 20 nt, Human
ugaaggcucgagcaugccug

SEQ ID NO: 1717558 - RNA, 19 nt, Human
ugaaauggacuuuuguaca

SEQ ID NO: 1717559 - RNA, 13 nt, Human
ugaacauuccaga

SEQ ID NO: 1717560 - RNA, 14 nt, Human
ugaacauuccagag

SEQ ID NO: 1717561 - RNA, 15 nt, Human
ugaacauugcaauag

SEQ ID NO: 1717562 - RNA, 17 nt, Human
ugaacauugcaauagaa

SEQ ID NO: 1717563 - RNA, 18 nt, Human
ugaacauugcaauagaaa

SEQ ID NO: 1717564 - RNA, 15 nt, Human
ugaacucuucaaucu

SEQ ID NO: 1717565 - RNA, 22 nt, Human
ugaaccacaucuugcucugcug

SEQ ID NO: 1717566 - RNA, 21 nt, Human
ugaaccacaucuugcucugcu

SEQ ID NO: 1717567 - RNA, 20 nt, Human
ugaaccacaucuugcucugc

SEQ ID NO: 1717568 - RNA, 18 nt, Human
ugaacucuucaaucucuu

SEQ ID NO: 1717569 - RNA, 14 nt, Human
ugaacugaacucug

SEQ ID NO: 1717570 - RNA, 15 nt, Human
ugaacugauaaagau

SEQ ID NO: 1717571 - RNA, 13 nt, Human
ugaacugauaaag

SEQ ID NO: 1717572 - RNA, 19 nt, Human
ugaacugaacucugacaac

SEQ ID NO: 1717573 - RNA, 17 nt, Human
ugaacugaacucugaca

SEQ ID NO: 1717574 - RNA, 15 nt, Human
uccugguguggaaga

SEQ ID NO: 1717575 - RNA, 17 nt, Human
uccuggcccacugcauc

SEQ ID NO: 1717576 - RNA, 22 nt, Human
uccuggcaugggaaugaauguc

SEQ ID NO: 1717577 - RNA, 10 nt, Human
ucccucccuu

SEQ ID NO: 1717578 - RNA, 19 nt, Human
uccuucuguccuacucugu

SEQ ID NO: 1717579 - RNA, 12 nt, Human
uccuucuguccu

SEQ ID NO: 1717580 - RNA, 14 nt, Human
uccuuaccagcaga

SEQ ID NO: 1717581 - RNA, 16 nt, Human
uccuucaaagcaaaug

SEQ ID NO: 1717582 - RNA, 17 nt, Human
ucgaguuacagacaaag

SEQ ID NO: 1717583 - RNA, 15 nt, Human
ucgaguuacagacaa

SEQ ID NO: 1717584 - RNA, 14 nt, Human
ucgagugagacaga

SEQ ID NO: 1717585 - RNA, 23 nt, Human
ucgagugagacagacuagaaguu

SEQ ID NO: 1717586 - RNA, 23 nt, Human
uccuuuuggagucagacagaugu

SEQ ID NO: 1717587 - RNA, 14 nt, Human
uccuuuuggaguca

SEQ ID NO: 1717588 - RNA, 14 nt, Human
ucgcccaggcugga

SEQ ID NO: 1717589 - RNA, 12 nt, Human
ucgcccaggcug

SEQ ID NO: 1717590 - RNA, 19 nt, Human
ucgcccaggcuggagugca

SEQ ID NO: 1717591 - RNA, 17 nt, Human
ucgcaauguaagacucg

SEQ ID NO: 1717592 - RNA, 14 nt, Human
ucucaaacuccuga

SEQ ID NO: 1717593 - RNA, 19 nt, Human
ucucaaagaaauuuccacu

SEQ ID NO: 1717594 - RNA, 21 nt, Human
ucucaaacucuugaccucagg

SEQ ID NO: 1717595 - RNA, 13 nt, Human
ucucaaacucuug

SEQ ID NO: 1717596 - RNA, 22 nt, Human
ucucaaacucuugaccucaggu

SEQ ID NO: 1717597 - RNA, 17 nt, Human
ucucaaagaaauuucca

SEQ ID NO: 1717598 - RNA, 21 nt, Human
ucucagaaucucaaauaacua

SEQ ID NO: 1717599 - RNA, 17 nt, Human
ucucagaaucucaaaua

SEQ ID NO: 1717600 - RNA, 17 nt, Human
ucucacucugucgccca

SEQ ID NO: 1717601 - RNA, 22 nt, Human
ucucacucugucgcccagucug

SEQ ID NO: 1717602 - RNA, 18 nt, Human
ucucacucugucgcccag

SEQ ID NO: 1717603 - RNA, 21 nt, Human
ucucacuguugcccaggcugg

SEQ ID NO: 1717604 - RNA, 20 nt, Human
ucucacuguugcccaggcug

SEQ ID NO: 1717605 - RNA, 19 nt, Human
ucucacuguugcccaggcu

SEQ ID NO: 1717606 - RNA, 18 nt, Human
ucucacuguugcccaggc

SEQ ID NO: 1717607 - RNA, 17 nt, Human
ucuacacuccagugaga

SEQ ID NO: 1717608 - RNA, 14 nt, Human
ucuacacugugcug

SEQ ID NO: 1717609 - RNA, 12 nt, Human
ucuacacugugc

SEQ ID NO: 1717610 - RNA, 19 nt, Human
ucuacugaggugcuauguu

SEQ ID NO: 1717611 - RNA, 18 nt, Human
ucuacugaggugcuaugu

SEQ ID NO: 1717612 - RNA, 15 nt, Human
ucuacacugugcuga

SEQ ID NO: 1717613 - RNA, 21 nt, Human
ucuacacugugcugagucuga

SEQ ID NO: 1717614 - RNA, 22 nt, Human
ucuagggaaaaaccagcgugug

SEQ ID NO: 1717615 - RNA, 22 nt, Human
ucuacugaggugcuauguucuu

SEQ ID NO: 1717616 - RNA, 22 nt, Human
ucuaacuucaccauauuaccac

SEQ ID NO: 1717617 - RNA, 15 nt, Human
ucuaacuucaccaua

SEQ ID NO: 1717618 - RNA, 16 nt, Human
ucuaacuucaccauau

SEQ ID NO: 1717619 - RNA, 11 nt, Human
ucucugcaggu

SEQ ID NO: 1717620 - RNA, 18 nt, Human
ucucuucacagucacauu

SEQ ID NO: 1717621 - RNA, 11 nt, Human
ucucuucucca

SEQ ID NO: 1717622 - RNA, 16 nt, Human
ucucuucuccacugga

SEQ ID NO: 1717623 - RNA, 15 nt, Human
ucucuucuccacugg

SEQ ID NO: 1717624 - RNA, 14 nt, Human
ucucuucuccacug

SEQ ID NO: 1717625 - RNA, 13 nt, Human
ucucuucuccacu

SEQ ID NO: 1717626 - RNA, 16 nt, Human
ucugaaaauguaugug

SEQ ID NO: 1717627 - RNA, 16 nt, Human
ucucuuuucaaaacau

SEQ ID NO: 1717628 - RNA, 15 nt, Human
ucucuuuucaaaaca

SEQ ID NO: 1717629 - RNA, 17 nt, Human
ucucuuuguucuaaaga

SEQ ID NO: 1717630 - RNA, 13 nt, Human
ucugaaagggacg

SEQ ID NO: 1717631 - RNA, 23 nt, Human
ucugaaaauguauguguaaguau

SEQ ID NO: 1717632 - RNA, 14 nt, Human
ucugaggacaagag

SEQ ID NO: 1717633 - RNA, 17 nt, Human
ucugaggacaagagaaa

SEQ ID NO: 1717634 - RNA, 23 nt, Human
ucugaggacacuaaccacgcugg

SEQ ID NO: 1717635 - RNA, 20 nt, Human
ucugaggacacuaaccacgc

SEQ ID NO: 1717636 - RNA, 17 nt, Human
ucugaggaauccagacc

SEQ ID NO: 1717637 - RNA, 16 nt, Human
ucugaggaauccagac

SEQ ID NO: 1717638 - RNA, 22 nt, Human
ucugagcauuagauuucucauu

SEQ ID NO: 1717639 - RNA, 14 nt, Human
ucugcacaagcugc

SEQ ID NO: 1717640 - RNA, 19 nt, Human
ucugcacaagcugcacccu

SEQ ID NO: 1717641 - RNA, 23 nt, Human
ucugauucccaagcucugcuccu

SEQ ID NO: 1717642 - RNA, 18 nt, Human
ucugaggacaagagaaaa

SEQ ID NO: 1717643 - RNA, 20 nt, Human
ucugaacuuggcgcugcccc

SEQ ID NO: 1717644 - RNA, 21 nt, Human
ucugaacuuggcgcugccccu

SEQ ID NO: 1717645 - RNA, 14 nt, Human
ucugacccaugcug

SEQ ID NO: 1717646 - RNA, 18 nt, Human
ucugacccaugcugcccu

SEQ ID NO: 1717647 - RNA, 17 nt, Human
ucugacccaugcugccc

SEQ ID NO: 1717648 - RNA, 16 nt, Human
ucugacccaugcugcc

SEQ ID NO: 1717649 - RNA, 15 nt, Human
ucugacccaugcugc

SEQ ID NO: 1717650 - RNA, 20 nt, Human
ucugagcauuagauuucuca

SEQ ID NO: 1717651 - RNA, 21 nt, Human
ucucagugucaaugcagcccc

SEQ ID NO: 1717652 - RNA, 15 nt, Human
ucucaggucccugca

SEQ ID NO: 1717653 - RNA, 17 nt, Human
ucucccccagccccauc

SEQ ID NO: 1717654 - RNA, 15 nt, Human
ucucccccagcccca

SEQ ID NO: 1717655 - RNA, 14 nt, Human
ucucccccagcccc

SEQ ID NO: 1717656 - RNA, 20 nt, Human
ucucccccagccccauccuc

SEQ ID NO: 1717657 - RNA, 18 nt, Human
ucucccccagccccaucc

SEQ ID NO: 1717658 - RNA, 22 nt, Human
ucucccccagccccauccucug

SEQ ID NO: 1717659 - RNA, 22 nt, Human
ucuccugccucagccucccaaa

SEQ ID NO: 1717660 - RNA, 18 nt, Human
ucucuaguuugauuaaau

SEQ ID NO: 1717661 - RNA, 19 nt, Human
ucucuaguuugauuaaauu

SEQ ID NO: 1717662 - RNA, 15 nt, Human
ucucuacaaaaagca

SEQ ID NO: 1717663 - RNA, 13 nt, Human
ucuccuguaccuc

SEQ ID NO: 1717664 - RNA, 21 nt, Human
ucucuacugucucaguuuaca

SEQ ID NO: 1717665 - RNA, 13 nt, Human
ucucugaggacac

SEQ ID NO: 1717666 - RNA, 14 nt, Human
ucucugaggacacu

SEQ ID NO: 1717667 - RNA, 15 nt, Human
ucucucgugaguaua

SEQ ID NO: 1717668 - RNA, 18 nt, Human
uccccuguuuguuucuga

SEQ ID NO: 1717669 - RNA, 22 nt, Human
uccccuuccuaauuccacagcu

SEQ ID NO: 1717670 - RNA, 21 nt, Human
uccccuuccuaauuccacagc

SEQ ID NO: 1717671 - RNA, 12 nt, Human
ucccuaauaaag

SEQ ID NO: 1717672 - RNA, 11 nt, Human
ucccuaauaaa

SEQ ID NO: 1717673 - RNA, 15 nt, Human
ucccucccucuuucc

SEQ ID NO: 1717674 - RNA, 16 nt, Human
ucccuacuuccuguga

SEQ ID NO: 1717675 - RNA, 15 nt, Human
ucccuacuuccugug

SEQ ID NO: 1717676 - RNA, 17 nt, Human
ucccucccucuuucccu

SEQ ID NO: 1717677 - RNA, 15 nt, Human
ucccuacuguaauuu

SEQ ID NO: 1717678 - RNA, 13 nt, Human
ucccuaauaaagc

SEQ ID NO: 1717679 - RNA, 21 nt, Human
uccccugcuggguguggcgca

SEQ ID NO: 1717680 - RNA, 20 nt, Human
uccccugcuggguguggcgc

SEQ ID NO: 1717681 - RNA, 15 nt, Human
uccccugcugggugu

SEQ ID NO: 1717682 - RNA, 14 nt, Human
uccccugcugggug

SEQ ID NO: 1717683 - RNA, 23 nt, Human
uccccuguccccgcacugggcuu

SEQ ID NO: 1717684 - RNA, 22 nt, Human
uccccuguagagugggagcuga

SEQ ID NO: 1717685 - RNA, 15 nt, Human
uccccuguucacucu

SEQ ID NO: 1717686 - RNA, 19 nt, Human
uccccuguagagugggagc

SEQ ID NO: 1717687 - RNA, 24 nt, Human
uccccugcuggguguggcgcagca

SEQ ID NO: 1717688 - RNA, 21 nt, Human
ucccccuuccauggacuuugu

SEQ ID NO: 1717689 - RNA, 20 nt, Human
uccccgcacugggcuugggg

SEQ ID NO: 1717690 - RNA, 13 nt, Human
uccccaggaggcc

SEQ ID NO: 1717691 - RNA, 15 nt, Human
uccccagcuguuuau

SEQ ID NO: 1717692 - RNA, 14 nt, Human
uccccagcuguuua

SEQ ID NO: 1717693 - RNA, 13 nt, Human
ucccccucuggcu

SEQ ID NO: 1717694 - RNA, 13 nt, Human
ucccccugcccca

SEQ ID NO: 1717695 - RNA, 17 nt, Human
ucccccaucucuucugg

SEQ ID NO: 1717696 - RNA, 23 nt, Human
ucccaucucacacaugagcauca

SEQ ID NO: 1717697 - RNA, 20 nt, Human
ucccaucucacacaugagca

SEQ ID NO: 1717698 - RNA, 18 nt, Human
ucccaggcugagccucag

SEQ ID NO: 1717699 - RNA, 16 nt, Human
ucccaggcugagccuc

SEQ ID NO: 1717700 - RNA, 21 nt, Human
ucccaucugugaaaggaaaga

SEQ ID NO: 1717701 - RNA, 12 nt, Human
ucccaugcccug

SEQ ID NO: 1717702 - RNA, 22 nt, Human
ucccaggcauuccccaggaggc

SEQ ID NO: 1717703 - RNA, 23 nt, Human
ucccaggcauuccccaggaggcc

SEQ ID NO: 1717704 - RNA, 15 nt, Human
ucccaggcugagccu

SEQ ID NO: 1717705 - RNA, 21 nt, Human
ucccaggcgccccuucccccu

SEQ ID NO: 1717706 - RNA, 18 nt, Human
ucccaggcgccccuuccc

SEQ ID NO: 1717707 - RNA, 20 nt, Human
ucccaggcgccccuuccccc

SEQ ID NO: 1717708 - RNA, 21 nt, Human
ucccaggcauuccccaggagg

SEQ ID NO: 1717709 - RNA, 20 nt, Human
ucccaggcauuccccaggag

SEQ ID NO: 1717710 - RNA, 15 nt, Human
ucccaccucagccuc

SEQ ID NO: 1717711 - RNA, 14 nt, Human
ucccaccucagccu

SEQ ID NO: 1717712 - RNA, 13 nt, Human
ucccaccucagcc

SEQ ID NO: 1717713 - RNA, 22 nt, Human
ucccaaggcucugagcaaaugu

SEQ ID NO: 1717714 - RNA, 13 nt, Human
ucccaacucaccc

SEQ ID NO: 1717715 - RNA, 15 nt, Human
ucccaacucacccca

SEQ ID NO: 1717716 - RNA, 14 nt, Human
ucccaacucacccc

SEQ ID NO: 1717717 - RNA, 16 nt, Human
ucccaacucaccccag

SEQ ID NO: 1717718 - RNA, 15 nt, Human
ucccaagcucugcuc

SEQ ID NO: 1717719 - RNA, 14 nt, Human
ucccaagcucugcu

SEQ ID NO: 1717720 - RNA, 13 nt, Human
ucccaagcucugc

SEQ ID NO: 1717721 - RNA, 12 nt, Human
ucccaagcucug

SEQ ID NO: 1717722 - RNA, 17 nt, Human
ucccaagcucugcuccu

SEQ ID NO: 1717723 - RNA, 18 nt, Human
ucccaaggcucugagcaa

SEQ ID NO: 1717724 - RNA, 23 nt, Human
uccagcucaccagccccagugcc

SEQ ID NO: 1717725 - RNA, 16 nt, Human
uccauccaggccauuc

SEQ ID NO: 1717726 - RNA, 15 nt, Human
uccauggacuuuguu

SEQ ID NO: 1717727 - RNA, 14 nt, Human
uccauggacuuugu

SEQ ID NO: 1717728 - RNA, 16 nt, Human
uccaaaauaaaacuuu

SEQ ID NO: 1717729 - RNA, 17 nt, Human
uccaaaauaaaacuuuu

SEQ ID NO: 1717730 - RNA, 19 nt, Human
uccaaacuaccuuccaguu

SEQ ID NO: 1717731 - RNA, 13 nt, Human
uccaagcaaaugu

SEQ ID NO: 1717732 - RNA, 19 nt, Human
uccaagaccuucuccuuca

SEQ ID NO: 1717733 - RNA, 20 nt, Human
uccaagaagcccaggaaagg

SEQ ID NO: 1717734 - RNA, 22 nt, Human
uccaagaagcccaggaaaggcu

SEQ ID NO: 1717735 - RNA, 23 nt, Human
uccagccaaagccuccuccagcc

SEQ ID NO: 1717736 - RNA, 14 nt, Human
uccacuuggucugu

SEQ ID NO: 1717737 - RNA, 12 nt, Human
uccacuuggucu

SEQ ID NO: 1717738 - RNA, 13 nt, Human
uccacuuggucug

SEQ ID NO: 1717739 - RNA, 13 nt, Human
uccaccugccagg

SEQ ID NO: 1717740 - RNA, 14 nt, Human
uccaccuacaugag

SEQ ID NO: 1717741 - RNA, 12 nt, Human
uccaccugccag

SEQ ID NO: 1717742 - RNA, 14 nt, Human
uccacaacacacag

SEQ ID NO: 1717743 - RNA, 14 nt, Human
uccacaagagccca

SEQ ID NO: 1717744 - RNA, 15 nt, Human
uccacaagagcccag

SEQ ID NO: 1717745 - RNA, 18 nt, Human
ucauuaggugugacugaa

SEQ ID NO: 1717746 - RNA, 21 nt, Human
ucauuaggugugacugaauuu

SEQ ID NO: 1717747 - RNA, 22 nt, Human
ucauuaggugugacugaauuuc

SEQ ID NO: 1717748 - RNA, 16 nt, Human
ucauuaggugugacug

SEQ ID NO: 1717749 - RNA, 15 nt, Human
ucauacccaccccca

SEQ ID NO: 1717750 - RNA, 14 nt, Human
ucauacccaccccc

SEQ ID NO: 1717751 - RNA, 20 nt, Human
ucauacccacccccacccaa

SEQ ID NO: 1717752 - RNA, 21 nt, Human
ucauacccacccccacccaag

SEQ ID NO: 1717753 - RNA, 15 nt, Human
ucaguuacucuucag

SEQ ID NO: 1717754 - RNA, 13 nt, Human
ucauaaugacuua

SEQ ID NO: 1717755 - RNA, 17 nt, Human
ucaguuguuaguguguc

SEQ ID NO: 1717756 - RNA, 15 nt, Human
ucauaauuauuauuu

SEQ ID NO: 1717757 - RNA, 13 nt, Human
ucauacccacccc

SEQ ID NO: 1717758 - RNA, 17 nt, Human
ucagugugacugaucuc

SEQ ID NO: 1717759 - RNA, 13 nt, Human
ucagugugacuga

SEQ ID NO: 1717760 - RNA, 11 nt, Human
ucaguguacau

SEQ ID NO: 1717761 - RNA, 23 nt, Human
ucagugguuggcaauuguuucaa

SEQ ID NO: 1717762 - RNA, 15 nt, Human
ucagucuggcccuuc

SEQ ID NO: 1717763 - RNA, 20 nt, Human
ucaguggggcccauggaugu

SEQ ID NO: 1717764 - RNA, 24 nt, Human
ucagucugauucccaagcucugcu

SEQ ID NO: 1717765 - RNA, 22 nt, Human
ucacuuuuauuuagcaccaggg

SEQ ID NO: 1717766 - RNA, 12 nt, Human
ucacuuuuauuu

SEQ ID NO: 1717767 - RNA, 15 nt, Human
ucacugcuuaacuuc

SEQ ID NO: 1717768 - RNA, 17 nt, Human
ucacugcuuaacuucac

SEQ ID NO: 1717769 - RNA, 18 nt, Human
ucacugcuuaacuucaca

SEQ ID NO: 1717770 - RNA, 20 nt, Human
ucacugcuuaacuucacaua

SEQ ID NO: 1717771 - RNA, 16 nt, Human
ucacucugucgcccag

SEQ ID NO: 1717772 - RNA, 12 nt, Human
ucacucugucgc

SEQ ID NO: 1717773 - RNA, 19 nt, Human
ucacucugucgcccagucu

SEQ ID NO: 1717774 - RNA, 22 nt, Human
ucacucugucgcccagucugga

SEQ ID NO: 1717775 - RNA, 22 nt, Human
ucagaguugaugguuguacaua

SEQ ID NO: 1717776 - RNA, 21 nt, Human
ucagaggggaauaaacuguug

SEQ ID NO: 1717777 - RNA, 19 nt, Human
ucagcacgauuucuguuua

SEQ ID NO: 1717778 - RNA, 22 nt, Human
ucagacauagaauuaacacaug

SEQ ID NO: 1717779 - RNA, 19 nt, Human
ucagacauagaauuaacac

SEQ ID NO: 1717780 - RNA, 20 nt, Human
ucagacagcugccugggauc

SEQ ID NO: 1717781 - RNA, 19 nt, Human
ucagacagcugccugggau

SEQ ID NO: 1717782 - RNA, 18 nt, Human
ucagacagcugccuggga

SEQ ID NO: 1717783 - RNA, 17 nt, Human
ucagacagcugccuggg

SEQ ID NO: 1717784 - RNA, 16 nt, Human
ucagacagcugccugg

SEQ ID NO: 1717785 - RNA, 15 nt, Human
ucagacagcugccug

SEQ ID NO: 1717786 - RNA, 20 nt, Human
ucacucuacuuagcaugucc

SEQ ID NO: 1717787 - RNA, 19 nt, Human
ucacucuacuuagcauguc

SEQ ID NO: 1717788 - RNA, 14 nt, Human
ucacucuccuuggu

SEQ ID NO: 1717789 - RNA, 12 nt, Human
ucacucuccuug

SEQ ID NO: 1717790 - RNA, 13 nt, Human
ucacucuggcagc

SEQ ID NO: 1717791 - RNA, 12 nt, Human
ucacucuggcag

SEQ ID NO: 1717792 - RNA, 23 nt, Human
ucacucuccuuggugucgggcau

SEQ ID NO: 1717793 - RNA, 22 nt, Human
ucacucuggcagcucagagagg

SEQ ID NO: 1717794 - RNA, 20 nt, Human
ucacucuggcagcucagaga

SEQ ID NO: 1717795 - RNA, 19 nt, Human
ucacucuggcagcucagag

SEQ ID NO: 1717796 - RNA, 18 nt, Human
ucacucuggcagcucaga

SEQ ID NO: 1717797 - RNA, 17 nt, Human
ucacucuggcagcucag

SEQ ID NO: 1717798 - RNA, 16 nt, Human
ucacucuggcagcuca

SEQ ID NO: 1717799 - RNA, 15 nt, Human
ucacucuggcagcuc

SEQ ID NO: 1717800 - RNA, 14 nt, Human
ucacucuggcagcu

SEQ ID NO: 1717801 - RNA, 13 nt, Human
ucacuccuugaaa

SEQ ID NO: 1717802 - RNA, 18 nt, Human
ucacuccuaccugguaau

SEQ ID NO: 1717803 - RNA, 17 nt, Human
ucacggaagagccuugc

SEQ ID NO: 1717804 - RNA, 16 nt, Human
ucacggaagagccuug

SEQ ID NO: 1717805 - RNA, 14 nt, Human
ucacggaagagccu

SEQ ID NO: 1717806 - RNA, 20 nt, Human
ucacggcucacugcagccuc

SEQ ID NO: 1717807 - RNA, 15 nt, Human
ucacggcucacugca

SEQ ID NO: 1717808 - RNA, 13 nt, Human
ucacggcucacug

SEQ ID NO: 1717809 - RNA, 12 nt, Human
ucaccuuugucc

SEQ ID NO: 1717810 - RNA, 14 nt, Human
ucaccuuucccauc

SEQ ID NO: 1717811 - RNA, 13 nt, Human
ucaccuuuauucu

SEQ ID NO: 1717812 - RNA, 15 nt, Human
ucacaggcaggucca

SEQ ID NO: 1717813 - RNA, 12 nt, Human
ucacaggcaggu

SEQ ID NO: 1717814 - RNA, 22 nt, Human
ucaccuuuguccccaccgcaga

SEQ ID NO: 1717815 - RNA, 18 nt, Human
ucaccuuuguccccaccg

SEQ ID NO: 1717816 - RNA, 17 nt, Human
ucaccuuuguccccacc

SEQ ID NO: 1717817 - RNA, 15 nt, Human
ucaccuuugucccca

SEQ ID NO: 1717818 - RNA, 14 nt, Human
ucaccuuugucccc

SEQ ID NO: 1717819 - RNA, 20 nt, Human
ucacgccuguaauccuagca

SEQ ID NO: 1717820 - RNA, 19 nt, Human
ucacgccuguaauccuagc

SEQ ID NO: 1717821 - RNA, 14 nt, Human
ucacgccacugcac

SEQ ID NO: 1717822 - RNA, 13 nt, Human
ucacgccacugca

SEQ ID NO: 1717823 - RNA, 16 nt, Human
ucacgccacugcacua

SEQ ID NO: 1717824 - RNA, 23 nt, Human
uauuuauuaaaugcccagccccu

SEQ ID NO: 1717825 - RNA, 20 nt, Human
uaucugaaaauguaugugua

SEQ ID NO: 1717826 - RNA, 15 nt, Human
uaucugaaaauguau

SEQ ID NO: 1717827 - RNA, 14 nt, Human
uaucugaaaaugua

SEQ ID NO: 1717828 - RNA, 16 nt, Human
uauuuuauguugcaua

SEQ ID NO: 1717829 - RNA, 15 nt, Human
uauuuuauguugcau

SEQ ID NO: 1717830 - RNA, 21 nt, Human
uauuuucaacgcagcccugcu

SEQ ID NO: 1717831 - RNA, 23 nt, Human
ucaaacggccucacuaggcuucu

SEQ ID NO: 1717832 - RNA, 22 nt, Human
ucaaaacgguuuuacugcagcu

SEQ ID NO: 1717833 - RNA, 14 nt, Human
ucaaacucuuaaaa

SEQ ID NO: 1717834 - RNA, 16 nt, Human
ucaaacgugaaaaugc

SEQ ID NO: 1717835 - RNA, 15 nt, Human
ucaaacgugaaaaug

SEQ ID NO: 1717836 - RNA, 15 nt, Human
uauuuuuuuacuaau

SEQ ID NO: 1717837 - RNA, 22 nt, Human
uauuuuuuucugaauuauuuuc

SEQ ID NO: 1717838 - RNA, 15 nt, Human
ucaaaaacauucuua

SEQ ID NO: 1717839 - RNA, 14 nt, Human
ucaaccuccugggc

SEQ ID NO: 1717840 - RNA, 13 nt, Human
ucaaccuccuggg

SEQ ID NO: 1717841 - RNA, 15 nt, Human
ucaaacuuuacuaug

SEQ ID NO: 1717842 - RNA, 13 nt, Human
ucaaacuuuacua

SEQ ID NO: 1717843 - RNA, 22 nt, Human
ucaaacucuugaccucagguga

SEQ ID NO: 1717844 - RNA, 16 nt, Human
ucaaacuuuacuaugg

SEQ ID NO: 1717845 - RNA, 22 nt, Human
ucaagugauucuccugccucag

SEQ ID NO: 1717846 - RNA, 20 nt, Human
ucaaggauccugagccagau

SEQ ID NO: 1717847 - RNA, 23 nt, Human
ucaaggauccugagccagauuuc

SEQ ID NO: 1717848 - RNA, 19 nt, Human
ucaaggauccugagccaga

SEQ ID NO: 1717849 - RNA, 18 nt, Human
ucaaggauccugagccag

SEQ ID NO: 1717850 - RNA, 17 nt, Human
ucaagcgauucuucugc

SEQ ID NO: 1717851 - RNA, 16 nt, Human
ucaagcgauucuucug

SEQ ID NO: 1717852 - RNA, 11 nt, Human
ucacaggcagg

SEQ ID NO: 1717853 - RNA, 19 nt, Human
ucacaggaaguagaggagg

SEQ ID NO: 1717854 - RNA, 23 nt, Human
ucacacagugagucgaggacagg

SEQ ID NO: 1717855 - RNA, 22 nt, Human
ucacacagugagucgaggacag

SEQ ID NO: 1717856 - RNA, 21 nt, Human
ucacacaugagcaucaggcca

SEQ ID NO: 1717857 - RNA, 13 nt, Human
ucacacagugagu

SEQ ID NO: 1717858 - RNA, 22 nt, Human
ucacacaguauuacuucugcua

SEQ ID NO: 1717859 - RNA, 21 nt, Human
ucacacaguauuacuucugcu

SEQ ID NO: 1717860 - RNA, 20 nt, Human
ucaauuacaggaaguacugg

SEQ ID NO: 1717861 - RNA, 19 nt, Human
ucaauuacaggaaguacug

SEQ ID NO: 1717862 - RNA, 17 nt, Human
ucaaugcuauaacuaug

SEQ ID NO: 1717863 - RNA, 18 nt, Human
ucaaugcacugacauugu

SEQ ID NO: 1717864 - RNA, 18 nt, Human
ucaauuacaggaaguacu

SEQ ID NO: 1717865 - RNA, 13 nt, Human
ucaauuacaggaa

SEQ ID NO: 1717866 - RNA, 14 nt, Human
ucaaugcacugaca

SEQ ID NO: 1717867 - RNA, 14 nt, Human
ucaauaggaaaaac

SEQ ID NO: 1717868 - RNA, 17 nt, Human
ucaauaggaaaaacuga

SEQ ID NO: 1717869 - RNA, 13 nt, Human
ucaauaggaaaaa

SEQ ID NO: 1717870 - RNA, 12 nt, Human
guuuuucaguuu

SEQ ID NO: 1717871 - RNA, 14 nt, Human
guuuuucaguuuuc

SEQ ID NO: 1717872 - RNA, 11 nt, Human
uaaaaaacacu

SEQ ID NO: 1717873 - RNA, 23 nt, Human
uaaaaaacugcugacuguuuucu

SEQ ID NO: 1717874 - RNA, 20 nt, Human
uaaaaaacugcugacuguuu

SEQ ID NO: 1717875 - RNA, 12 nt, Human
uaaaaaacacug

SEQ ID NO: 1717876 - RNA, 16 nt, Human
guuuguugugaggauu

SEQ ID NO: 1717877 - RNA, 16 nt, Human
guuuucaguguacaug

SEQ ID NO: 1717878 - RNA, 17 nt, Human
guuuucaguguacaugg

SEQ ID NO: 1717879 - RNA, 19 nt, Human
guuuucucuugagagggug

SEQ ID NO: 1717880 - RNA, 12 nt, Human
guuuucucuuga

SEQ ID NO: 1717881 - RNA, 19 nt, Human
guuuuuauggcuuuugugc

SEQ ID NO: 1717882 - RNA, 22 nt, Human
guuuuuauggcuuuugugcauu

SEQ ID NO: 1717883 - RNA, 23 nt, Human
guuuuuauggcuuuugugcauua

SEQ ID NO: 1717884 - RNA, 16 nt, Human
guuuaguaaucauauu

SEQ ID NO: 1717885 - RNA, 13 nt, Human
guuuagaaagcuu

SEQ ID NO: 1717886 - RNA, 17 nt, Human
guuuagaaagcuugccc

SEQ ID NO: 1717887 - RNA, 21 nt, Human
gguuggccccugcccggcugc

SEQ ID NO: 1717888 - RNA, 14 nt, Human
guuucagaaaugug

SEQ ID NO: 1717889 - RNA, 18 nt, Human
guuucagaaauguguuau

SEQ ID NO: 1717890 - RNA, 20 nt, Human
guuuccuggcacugcuucca

SEQ ID NO: 1717891 - RNA, 16 nt, Human
guuuccuggcacugcu

SEQ ID NO: 1717892 - RNA, 17 nt, Human
guuuccugcccugggag

SEQ ID NO: 1717893 - RNA, 13 nt, Human
guuuccugcccug

SEQ ID NO: 1717894 - RNA, 22 nt, Human
guuuccuggcacugcuuccagu

SEQ ID NO: 1717895 - RNA, 21 nt, Human
guuuccuggcacugcuuccag

SEQ ID NO: 1717896 - RNA, 16 nt, Human
guuuccuuauauuaug

SEQ ID NO: 1717897 - RNA, 22 nt, Human
guuuccugcccugggaggcagu

SEQ ID NO: 1717898 - RNA, 19 nt, Human
guuuguggaaaaugaaaau

SEQ ID NO: 1717899 - RNA, 18 nt, Human
guuuguuccccaagacau

SEQ ID NO: 1717900 - RNA, 17 nt, Human
guuuguaaauuaacuuu

SEQ ID NO: 1717901 - RNA, 19 nt, Human
guuuguaaauuaacuuuua

SEQ ID NO: 1717902 - RNA, 20 nt, Human
guuuguaaauuaacuuuuau

SEQ ID NO: 1717903 - RNA, 17 nt, Human
guuugauuaaauucuug

SEQ ID NO: 1717904 - RNA, 19 nt, Human
guuugauuaaauucuugca

SEQ ID NO: 1717905 - RNA, 22 nt, Human
guuugauuaaauucuugcaaag

SEQ ID NO: 1717906 - RNA, 15 nt, Human
guuucuaaagcugcc

SEQ ID NO: 1717907 - RNA, 14 nt, Human
guuucuaaagcugc

SEQ ID NO: 1717908 - RNA, 16 nt, Human
guuucuaaagcugcca

SEQ ID NO: 1717909 - RNA, 20 nt, Human
guuucuaaagcugccagccg

SEQ ID NO: 1717910 - RNA, 16 nt, Human
guuugaaccaagaacu

SEQ ID NO: 1717911 - RNA, 17 nt, Human
guuucuuuguaaugaaa

SEQ ID NO: 1717912 - RNA, 14 nt, Human
guuucuuuguaaug

SEQ ID NO: 1717913 - RNA, 19 nt, Human
guuucuuucucugaggaca

SEQ ID NO: 1717914 - RNA, 20 nt, Human
guuucuuucucugaggacaa

SEQ ID NO: 1717915 - RNA, 21 nt, Human
uaaacacucuugaaaaaugca

SEQ ID NO: 1717916 - RNA, 23 nt, Human
uaaacaagaccacguuucuaaag

SEQ ID NO: 1717917 - RNA, 19 nt, Human
uaaacaagaccacguuucu

SEQ ID NO: 1717918 - RNA, 18 nt, Human
uaaacaagaccacguuuc

SEQ ID NO: 1717919 - RNA, 21 nt, Human
uaaacugcccccucugcccug

SEQ ID NO: 1717920 - RNA, 20 nt, Human
uaaacugcccccucugcccu

SEQ ID NO: 1717921 - RNA, 23 nt, Human
uaaacugcccccucugcccugcg

SEQ ID NO: 1717922 - RNA, 22 nt, Human
uaaacugcccccucugcccugc

SEQ ID NO: 1717923 - RNA, 22 nt, Human
uaaacuuuaccuuuuuuauaca

SEQ ID NO: 1717924 - RNA, 16 nt, Human
uaaacuuuaccuuuuu

SEQ ID NO: 1717925 - RNA, 14 nt, Human
uaaacuuaaucuaa

SEQ ID NO: 1717926 - RNA, 13 nt, Human
uaaacuuaaucua

SEQ ID NO: 1717927 - RNA, 18 nt, Human
uaaacuuaaucuaaaugg

SEQ ID NO: 1717928 - RNA, 19 nt, Human
uaaacuuaaucuaaaugga

SEQ ID NO: 1717929 - RNA, 16 nt, Human
uaaaaugagaaaucua

SEQ ID NO: 1717930 - RNA, 15 nt, Human
uaaaaugagaaaucu

SEQ ID NO: 1717931 - RNA, 13 nt, Human
uaaaaugagaaau

SEQ ID NO: 1717932 - RNA, 15 nt, Human
uaaaaaugguuuaaa

SEQ ID NO: 1717933 - RNA, 21 nt, Human
uaaaagggacugagaaauuua

SEQ ID NO: 1717934 - RNA, 20 nt, Human
uaaaagggacugagaaauuu

SEQ ID NO: 1717935 - RNA, 19 nt, Human
uaaaagggacugagaaauu

SEQ ID NO: 1717936 - RNA, 17 nt, Human
uaaaagggacugagaaa

SEQ ID NO: 1717937 - RNA, 14 nt, Human
uaaaagcauuuugu

SEQ ID NO: 1717938 - RNA, 15 nt, Human
uaaaagcauuuugua

SEQ ID NO: 1717939 - RNA, 16 nt, Human
uaaaagcauuuuguaa

SEQ ID NO: 1717940 - RNA, 17 nt, Human
uaaaagcauuuuguaau

SEQ ID NO: 1717941 - RNA, 18 nt, Human
uaaaagcauuuuguaaua

SEQ ID NO: 1717942 - RNA, 14 nt, Human
uaaaggaauuuaaa

SEQ ID NO: 1717943 - RNA, 14 nt, Human
uaaagcuagaaaug

SEQ ID NO: 1717944 - RNA, 15 nt, Human
uaaagcuagaaauga

SEQ ID NO: 1717945 - RNA, 20 nt, Human
uaaacuuuuuucuuacuguc

SEQ ID NO: 1717946 - RNA, 17 nt, Human
uaaauaaaaauaauccu

SEQ ID NO: 1717947 - RNA, 13 nt, Human
uaaaguuucuguu

SEQ ID NO: 1717948 - RNA, 14 nt, Human
uaaaguuuguugaa

SEQ ID NO: 1717949 - RNA, 22 nt, Human
uaaaguguauuuuuuuacuaau

SEQ ID NO: 1717950 - RNA, 23 nt, Human
uaaaguguauuuuuuuacuaaua

SEQ ID NO: 1717951 - RNA, 21 nt, Human
uaaaguguauuuuuuuacuaa

SEQ ID NO: 1717952 - RNA, 18 nt, Human
uaaauauaugcuaagucu

SEQ ID NO: 1717953 - RNA, 22 nt, Human
uaaauauauuuuaagacgaaac

SEQ ID NO: 1717954 - RNA, 16 nt, Human
uaaauauauuuuaaga

SEQ ID NO: 1717955 - RNA, 19 nt, Human
uaaaucagccguguaacca

SEQ ID NO: 1717956 - RNA, 20 nt, Human
uaaaucagacuaugaaguuu

SEQ ID NO: 1717957 - RNA, 19 nt, Human
uaaaucaaguuggcuucua

SEQ ID NO: 1717958 - RNA, 15 nt, Human
uaaauugcuccuuga

SEQ ID NO: 1717959 - RNA, 14 nt, Human
uaacagaaauguac

SEQ ID NO: 1717960 - RNA, 15 nt, Human
uaacagaaauguaca

SEQ ID NO: 1717961 - RNA, 13 nt, Human
uaacagaaaugua

SEQ ID NO: 1717962 - RNA, 19 nt, Human
uaacaggcagauacaggaa

SEQ ID NO: 1717963 - RNA, 14 nt, Human
uaaccagcagaaau

SEQ ID NO: 1717964 - RNA, 16 nt, Human
uaaccagcagaaaugc

SEQ ID NO: 1717965 - RNA, 19 nt, Human
uaaccagcagaaaugccuu

SEQ ID NO: 1717966 - RNA, 20 nt, Human
uaacuuuuauaaacuuuacc

SEQ ID NO: 1717967 - RNA, 17 nt, Human
uaacugagugccuuuug

SEQ ID NO: 1717968 - RNA, 16 nt, Human
uaacugagugccuuuu

SEQ ID NO: 1717969 - RNA, 15 nt, Human
uaagcaugcacaaau

SEQ ID NO: 1717970 - RNA, 13 nt, Human
uaagccagacauc

SEQ ID NO: 1717971 - RNA, 20 nt, Human
uaagccagacaucaacagau

SEQ ID NO: 1717972 - RNA, 21 nt, Human
uaagccagacaucaacagaua

SEQ ID NO: 1717973 - RNA, 19 nt, Human
uaaggaugcuuguacauaa

SEQ ID NO: 1717974 - RNA, 21 nt, Human
uaagccuuuggaaacagcucg

SEQ ID NO: 1717975 - RNA, 17 nt, Human
uaagccuuuggaaacag

SEQ ID NO: 1717976 - RNA, 14 nt, Human
uaagccuuuggaaa

SEQ ID NO: 1717977 - RNA, 20 nt, Human
uaaggaugcuuguacauaau

SEQ ID NO: 1717978 - RNA, 21 nt, Human
uaaggaugcuuguacauaaug

SEQ ID NO: 1717979 - RNA, 22 nt, Human
uaaggaugcuuguacauaaugc

SEQ ID NO: 1717980 - RNA, 23 nt, Human
uaaggaugcuuguacauaaugcg

SEQ ID NO: 1717981 - RNA, 15 nt, Human
uaaggcaaucauggu

SEQ ID NO: 1717982 - RNA, 21 nt, Human
uaacuuuuauaaacuuuaccu

SEQ ID NO: 1717983 - RNA, 22 nt, Human
uaacuuuuauaaacuuuaccuu

SEQ ID NO: 1717984 - RNA, 22 nt, Human
uaagaaccuuuugagugccuua

SEQ ID NO: 1717985 - RNA, 15 nt, Human
uaagaaauacagacu

SEQ ID NO: 1717986 - RNA, 22 nt, Human
uaagaggcagggucucacucug

SEQ ID NO: 1717987 - RNA, 23 nt, Human
uaagagggagggagggcuccaga

SEQ ID NO: 1717988 - RNA, 22 nt, Human
uaagagggagggagggcuccag

SEQ ID NO: 1717989 - RNA, 12 nt, Human
uaagagggaggg

SEQ ID NO: 1717990 - RNA, 14 nt, Human
uaagauaaaugugc

SEQ ID NO: 1717991 - RNA, 17 nt, Human
uaagauaaaugugcuga

SEQ ID NO: 1717992 - RNA, 16 nt, Human
uaagauaaaugugcug

SEQ ID NO: 1717993 - RNA, 18 nt, Human
uaagaucguucucugccu

SEQ ID NO: 1717994 - RNA, 16 nt, Human
uaaucguguccccuau

SEQ ID NO: 1717995 - RNA, 16 nt, Human
uaaucgaccugccucg

SEQ ID NO: 1717996 - RNA, 14 nt, Human
uaaucgaccugccu

SEQ ID NO: 1717997 - RNA, 13 nt, Human
uaaucgaccugcc

SEQ ID NO: 1717998 - RNA, 19 nt, Human
uaaugccacuaaauugaca

SEQ ID NO: 1717999 - RNA, 23 nt, Human
uaaugaugucguuugaaucacag

SEQ ID NO: 1718000 - RNA, 17 nt, Human
uaaugaugucguuugaa

SEQ ID NO: 1718001 - RNA, 16 nt, Human
uaaugauaugcuugua

SEQ ID NO: 1718002 - RNA, 15 nt, Human
uaaugauaugcuugu

SEQ ID NO: 1718003 - RNA, 11 nt, Human
uaaucuaaaug

SEQ ID NO: 1718004 - RNA, 11 nt, Human
uaauaaagcug

SEQ ID NO: 1718005 - RNA, 20 nt, Human
uaagugguacuaacuuuccu

SEQ ID NO: 1718006 - RNA, 13 nt, Human
uaauaaagacagg

SEQ ID NO: 1718007 - RNA, 16 nt, Human
uaauaauaaagaauag

SEQ ID NO: 1718008 - RNA, 21 nt, Human
uaauaguucagguaacaggca

SEQ ID NO: 1718009 - RNA, 14 nt, Human
uaauacaccacuac

SEQ ID NO: 1718010 - RNA, 14 nt, Human
uaauuugugauaca

SEQ ID NO: 1718011 - RNA, 15 nt, Human
uaauuugugauacaa

SEQ ID NO: 1718012 - RNA, 18 nt, Human
uaauuugugauacaaugc

SEQ ID NO: 1718013 - RNA, 19 nt, Human
uaauuugugauacaaugcu

SEQ ID NO: 1718014 - RNA, 22 nt, Human
uaauuugugauacaaugcugug

SEQ ID NO: 1718015 - RNA, 17 nt, Human
uaauuaaaacacaacau

SEQ ID NO: 1718016 - RNA, 23 nt, Human
uaaugcgcaggcuggcccugccc

SEQ ID NO: 1718017 - RNA, 14 nt, Human
uaaugcgugcauac

SEQ ID NO: 1718018 - RNA, 22 nt, Human
uaaugcgcaggcuggcccugcc

SEQ ID NO: 1718019 - RNA, 19 nt, Human
uaaugcgcaggcuggcccu

SEQ ID NO: 1718020 - RNA, 20 nt, Human
uaauugacaggauuauugga

SEQ ID NO: 1718021 - RNA, 22 nt, Human
uaauugacaggauuauuggaaa

SEQ ID NO: 1718022 - RNA, 18 nt, Human
uaauucuuagcucauucu

SEQ ID NO: 1718023 - RNA, 21 nt, Human
uacuguaucaugacaaagacu

SEQ ID NO: 1718024 - RNA, 17 nt, Human
uacugcauaugaaagga

SEQ ID NO: 1718025 - RNA, 21 nt, Human
uacuugcucuugaugccuggc

SEQ ID NO: 1718026 - RNA, 18 nt, Human
uacuuguggacacagcuc

SEQ ID NO: 1718027 - RNA, 15 nt, Human
uacuuguggacacag

SEQ ID NO: 1718028 - RNA, 19 nt, Human
uacuuguggacacagcucu

SEQ ID NO: 1718029 - RNA, 23 nt, Human
uagaaauaucugaaaauguaugu

SEQ ID NO: 1718030 - RNA, 21 nt, Human
uagaaauaucugaaaauguau

SEQ ID NO: 1718031 - RNA, 20 nt, Human
uagaaauaucugaaaaugua

SEQ ID NO: 1718032 - RNA, 15 nt, Human
uagaaauauaauuga

SEQ ID NO: 1718033 - RNA, 15 nt, Human
uagaaagaagaugaa

SEQ ID NO: 1718034 - RNA, 15 nt, Human
uacugaggugcuaug

SEQ ID NO: 1718035 - RNA, 17 nt, Human
uacucccaucugugaaa

SEQ ID NO: 1718036 - RNA, 16 nt, Human
uacucccaucugugaa

SEQ ID NO: 1718037 - RNA, 14 nt, Human
uacucccaucugug

SEQ ID NO: 1718038 - RNA, 12 nt, Human
uacucccaucug

SEQ ID NO: 1718039 - RNA, 20 nt, Human
uacuacaguuuguuaguaug

SEQ ID NO: 1718040 - RNA, 20 nt, Human
uacuacaguccucccaucuc

SEQ ID NO: 1718041 - RNA, 14 nt, Human
uacuaccuguaaug

SEQ ID NO: 1718042 - RNA, 12 nt, Human
uacucaccucac

SEQ ID NO: 1718043 - RNA, 14 nt, Human
uacucaccucaccc

SEQ ID NO: 1718044 - RNA, 16 nt, Human
uacucagaauucucua

SEQ ID NO: 1718045 - RNA, 22 nt, Human
uacucagaauucucuaguuuga

SEQ ID NO: 1718046 - RNA, 22 nt, Human
uacccaucccauaugccugggc

SEQ ID NO: 1718047 - RNA, 18 nt, Human
uaccuuuuuuauacauaa

SEQ ID NO: 1718048 - RNA, 19 nt, Human
uaccuuuuuuauacauaaa

SEQ ID NO: 1718049 - RNA, 20 nt, Human
uaccuuuuuuauacauaaac

SEQ ID NO: 1718050 - RNA, 20 nt, Human
uaccuuuguauucucuccug

SEQ ID NO: 1718051 - RNA, 19 nt, Human
uaccuuugacaaagguaaa

SEQ ID NO: 1718052 - RNA, 22 nt, Human
uaccuuuuuuauacauaaacaa

SEQ ID NO: 1718053 - RNA, 14 nt, Human
uacgacaacuugca

SEQ ID NO: 1718054 - RNA, 15 nt, Human
uacgacaacuugcac

SEQ ID NO: 1718055 - RNA, 19 nt, Human
uacuaaccagcagaaaugc

SEQ ID NO: 1718056 - RNA, 18 nt, Human
uacuaaccagcagaaaug

SEQ ID NO: 1718057 - RNA, 17 nt, Human
uacuacaguccucccau

SEQ ID NO: 1718058 - RNA, 12 nt, Human
uacuacaguccu

SEQ ID NO: 1718059 - RNA, 13 nt, Human
uacuaacuuuccu

SEQ ID NO: 1718060 - RNA, 22 nt, Human
uacuaauaaaauuuaaaagucu

SEQ ID NO: 1718061 - RNA, 15 nt, Human
uacuaauagacaauu

SEQ ID NO: 1718062 - RNA, 17 nt, Human
uacuaauagacaauuua

SEQ ID NO: 1718063 - RNA, 21 nt, Human
uacauuuuguauauuuguauu

SEQ ID NO: 1718064 - RNA, 21 nt, Human
uacaugagguacugagaguga

SEQ ID NO: 1718065 - RNA, 22 nt, Human
uacaugagguacugagagugaa

SEQ ID NO: 1718066 - RNA, 22 nt, Human
uacauaagauaaaugugcugaa

SEQ ID NO: 1718067 - RNA, 19 nt, Human
uacaguuacucagaauucu

SEQ ID NO: 1718068 - RNA, 23 nt, Human
uacaguuacucagaauucucuag

SEQ ID NO: 1718069 - RNA, 19 nt, Human
uacauaagauaaaugugcu

SEQ ID NO: 1718070 - RNA, 18 nt, Human
uacauaagauaaaugugc

SEQ ID NO: 1718071 - RNA, 18 nt, Human
uacaguuccuagguauaa

SEQ ID NO: 1718072 - RNA, 15 nt, Human
uaccaccacgcccgg

SEQ ID NO: 1718073 - RNA, 23 nt, Human
uaccauuuugggguacccacugc

SEQ ID NO: 1718074 - RNA, 13 nt, Human
uaccacagacaua

SEQ ID NO: 1718075 - RNA, 22 nt, Human
uacccaggugcuaggaacacuc

SEQ ID NO: 1718076 - RNA, 18 nt, Human
uacccagcgagcccuggu

SEQ ID NO: 1718077 - RNA, 14 nt, Human
uacccacugcucug

SEQ ID NO: 1718078 - RNA, 13 nt, Human
uacccacugcucu

SEQ ID NO: 1718079 - RNA, 12 nt, Human
uacccacugcuc

SEQ ID NO: 1718080 - RNA, 11 nt, Human
uacccacugcu

SEQ ID NO: 1718081 - RNA, 19 nt, Human
uacccacccccacccaagg

SEQ ID NO: 1718082 - RNA, 17 nt, Human
uacccacccccacccaa

SEQ ID NO: 1718083 - RNA, 23 nt, Human
uacccacccccacccaagggccu

SEQ ID NO: 1718084 - RNA, 15 nt, Human
uacccacccccaccc

SEQ ID NO: 1718085 - RNA, 12 nt, Human
uacccaccccca

SEQ ID NO: 1718086 - RNA, 13 nt, Human
uacagaauuuuau

SEQ ID NO: 1718087 - RNA, 24 nt, Human
uacagcaaggagauuuacaacugg

SEQ ID NO: 1718088 - RNA, 17 nt, Human
uacacuguuucaaacuu

SEQ ID NO: 1718089 - RNA, 18 nt, Human
uacacuguuucaaacuuu

SEQ ID NO: 1718090 - RNA, 19 nt, Human
uacacuguuucaaacuuua

SEQ ID NO: 1718091 - RNA, 13 nt, Human
uacacuuuaugca

SEQ ID NO: 1718092 - RNA, 14 nt, Human
uacaggauuugaaa

SEQ ID NO: 1718093 - RNA, 16 nt, Human
uacaggcacccaccau

SEQ ID NO: 1718094 - RNA, 19 nt, Human
uacaggaaaagcugcugac

SEQ ID NO: 1718095 - RNA, 13 nt, Human
uacaguguacagu

SEQ ID NO: 1718096 - RNA, 22 nt, Human
uacaguguacagucuuguauua

SEQ ID NO: 1718097 - RNA, 15 nt, Human
uacaguguacagucu

SEQ ID NO: 1718098 - RNA, 16 nt, Human
uacaguguacagucuu

SEQ ID NO: 1718099 - RNA, 22 nt, Human
uacagcuugaccgugaggccag

SEQ ID NO: 1718100 - RNA, 18 nt, Human
uacaggaaaagcugcuga

SEQ ID NO: 1718101 - RNA, 17 nt, Human
uacaggaaaagcugcug

SEQ ID NO: 1718102 - RNA, 23 nt, Human
uacagcuugaccgugaggccaga

SEQ ID NO: 1718103 - RNA, 12 nt, Human
uaauuuuguaau

SEQ ID NO: 1718104 - RNA, 19 nt, Human
uaauuuuguaauguaucaa

SEQ ID NO: 1718105 - RNA, 17 nt, Human
uaauuuugaaaaacugc

SEQ ID NO: 1718106 - RNA, 13 nt, Human
uaauuuugaaaaa

SEQ ID NO: 1718107 - RNA, 19 nt, Human
uacaagagcuuaacagugu

SEQ ID NO: 1718108 - RNA, 15 nt, Human
uacaagacacaguga

SEQ ID NO: 1718109 - RNA, 22 nt, Human
uacacacugcauguuugugauu

SEQ ID NO: 1718110 - RNA, 16 nt, Human
uacacugugcugaguc

SEQ ID NO: 1718111 - RNA, 14 nt, Human
uacacuguuucaaa

SEQ ID NO: 1718112 - RNA, 15 nt, Human
uacacacacauacac

SEQ ID NO: 1718113 - RNA, 21 nt, Human
uacacacacacgcgugcacac

SEQ ID NO: 1718114 - RNA, 17 nt, Human
uacacacugcauguuug

SEQ ID NO: 1718115 - RNA, 23 nt, Human
uacacaaugguuuucuugugugu

SEQ ID NO: 1718116 - RNA, 21 nt, Human
uacacaaugguuuucuugugu

SEQ ID NO: 1718117 - RNA, 17 nt, Human
uacacaaugguuuucuu

SEQ ID NO: 1718118 - RNA, 21 nt, Human
uagcucuaggagggcuggcaa

SEQ ID NO: 1718119 - RNA, 17 nt, Human
uagccugccucuucucu

SEQ ID NO: 1718120 - RNA, 22 nt, Human
uagcucauucuccuuguguuac

SEQ ID NO: 1718121 - RNA, 20 nt, Human
uagcugggacuacaggcacc

SEQ ID NO: 1718122 - RNA, 12 nt, Human
uagcugggacua

SEQ ID NO: 1718123 - RNA, 18 nt, Human
uagcugggacuacaggug

SEQ ID NO: 1718124 - RNA, 22 nt, Human
uagcugggagaaagagagagcu

SEQ ID NO: 1718125 - RNA, 11 nt, Human
uagcugggacu

SEQ ID NO: 1718126 - RNA, 14 nt, Human
uagcccaaaaccaa

SEQ ID NO: 1718127 - RNA, 18 nt, Human
uagcccucacccuggggc

SEQ ID NO: 1718128 - RNA, 13 nt, Human
uagccccauaauu

SEQ ID NO: 1718129 - RNA, 15 nt, Human
uaggaagguuaaugu

SEQ ID NO: 1718130 - RNA, 23 nt, Human
uaggaauugacccacaagaaaug

SEQ ID NO: 1718131 - RNA, 20 nt, Human
uaggaauugacccacaagaa

SEQ ID NO: 1718132 - RNA, 16 nt, Human
uaggaauuguguuuau

SEQ ID NO: 1718133 - RNA, 14 nt, Human
uaggaauuguguuu

SEQ ID NO: 1718134 - RNA, 13 nt, Human
uaggccaugggac

SEQ ID NO: 1718135 - RNA, 17 nt, Human
uaggccguuccuucaaa

SEQ ID NO: 1718136 - RNA, 13 nt, Human
uaggccuggccag

SEQ ID NO: 1718137 - RNA, 14 nt, Human
uaggccuggccaga

SEQ ID NO: 1718138 - RNA, 19 nt, Human
uaggccucaggugaaacuc

SEQ ID NO: 1718139 - RNA, 17 nt, Human
uaggaagacuuuggaaa

SEQ ID NO: 1718140 - RNA, 16 nt, Human
uaggaagacuuuggaa

SEQ ID NO: 1718141 - RNA, 15 nt, Human
uaggaagacuuugga

SEQ ID NO: 1718142 - RNA, 14 nt, Human
uaggaagacuuugg

SEQ ID NO: 1718143 - RNA, 13 nt, Human
uaggaagacuuug

SEQ ID NO: 1718144 - RNA, 17 nt, Human
uaggaacacuccuucac

SEQ ID NO: 1718145 - RNA, 21 nt, Human
uaggaacuuaaauaaugugaa

SEQ ID NO: 1718146 - RNA, 14 nt, Human
uaggaacacuccuu

SEQ ID NO: 1718147 - RNA, 13 nt, Human
uaggaacacuccu

SEQ ID NO: 1718148 - RNA, 23 nt, Human
uagaaccaggcaacuugggaacu

SEQ ID NO: 1718149 - RNA, 12 nt, Human
uagaaccaggca

SEQ ID NO: 1718150 - RNA, 21 nt, Human
uagaaccucgagguuucucaa

SEQ ID NO: 1718151 - RNA, 16 nt, Human
uagagagagaccacuu

SEQ ID NO: 1718152 - RNA, 19 nt, Human
uagagguucaaagauauuu

SEQ ID NO: 1718153 - RNA, 16 nt, Human
uagagguucaaagaua

SEQ ID NO: 1718154 - RNA, 21 nt, Human
uagagguucaaagauauuuug

SEQ ID NO: 1718155 - RNA, 12 nt, Human
uagauguauaua

SEQ ID NO: 1718156 - RNA, 16 nt, Human
uagauguaauuuugug

SEQ ID NO: 1718157 - RNA, 18 nt, Human
uagauaauacaccacuac

SEQ ID NO: 1718158 - RNA, 23 nt, Human
uagcagagaaugaaagggcccag

SEQ ID NO: 1718159 - RNA, 19 nt, Human
uagcagagaaugaaagggc

SEQ ID NO: 1718160 - RNA, 16 nt, Human
uagcacuuugggaggc

SEQ ID NO: 1718161 - RNA, 20 nt, Human
uauaugcucugcauguuaca

SEQ ID NO: 1718162 - RNA, 14 nt, Human
uauauuuuaagacg

SEQ ID NO: 1718163 - RNA, 13 nt, Human
uauauuuuaagac

SEQ ID NO: 1718164 - RNA, 19 nt, Human
uaucgucacugcuuaacuu

SEQ ID NO: 1718165 - RNA, 15 nt, Human
uaucuaaauguugaa

SEQ ID NO: 1718166 - RNA, 22 nt, Human
uaucaugugaaaucauucauuu

SEQ ID NO: 1718167 - RNA, 17 nt, Human
uaucaugugaaaucauu

SEQ ID NO: 1718168 - RNA, 21 nt, Human
uaucaugucaaacgugaaaau

SEQ ID NO: 1718169 - RNA, 22 nt, Human
uauccugcuucugauaugcagu

SEQ ID NO: 1718170 - RNA, 17 nt, Human
uaucaugacaaagacug

SEQ ID NO: 1718171 - RNA, 16 nt, Human
uaucaugucaaacgug

SEQ ID NO: 1718172 - RNA, 16 nt, Human
uaucaugacaaagacu

SEQ ID NO: 1718173 - RNA, 19 nt, Human
uauauuuuuuguuaaauga

SEQ ID NO: 1718174 - RNA, 17 nt, Human
uaucaggugcugccauc

SEQ ID NO: 1718175 - RNA, 15 nt, Human
uaguggauguucuga

SEQ ID NO: 1718176 - RNA, 15 nt, Human
uaguggauggaaggg

SEQ ID NO: 1718177 - RNA, 18 nt, Human
uaguggauggaaggggcu

SEQ ID NO: 1718178 - RNA, 21 nt, Human
uaguuguaccgcaaugugacu

SEQ ID NO: 1718179 - RNA, 12 nt, Human
uaguuugcaguu

SEQ ID NO: 1718180 - RNA, 23 nt, Human
uaguuugauuaaauucuugcaaa

SEQ ID NO: 1718181 - RNA, 13 nt, Human
uaguuucuccaag

SEQ ID NO: 1718182 - RNA, 13 nt, Human
uagugaugguucc

SEQ ID NO: 1718183 - RNA, 18 nt, Human
uagugaugguuccccugu

SEQ ID NO: 1718184 - RNA, 14 nt, Human
uagugaugguuccc

SEQ ID NO: 1718185 - RNA, 17 nt, Human
uauacccccugcaaagc

SEQ ID NO: 1718186 - RNA, 20 nt, Human
uauacucuuauagacaacau

SEQ ID NO: 1718187 - RNA, 17 nt, Human
uauaauucuacuuugag

SEQ ID NO: 1718188 - RNA, 20 nt, Human
uauaauucacauuguauuca

SEQ ID NO: 1718189 - RNA, 20 nt, Human
uauaauguaagcucuacuga

SEQ ID NO: 1718190 - RNA, 19 nt, Human
uauaauguaagcucuacug

SEQ ID NO: 1718191 - RNA, 14 nt, Human
uauaauguaagcuc

SEQ ID NO: 1718192 - RNA, 17 nt, Human
uauaaauuuuuuuuguu

SEQ ID NO: 1718193 - RNA, 21 nt, Human
uauaaauuuuuuuuguuucau

SEQ ID NO: 1718194 - RNA, 18 nt, Human
uauaaugaaugaaacauu

SEQ ID NO: 1718195 - RNA, 20 nt, Human
uauaaugaaugaaacauuuu

SEQ ID NO: 1718196 - RNA, 19 nt, Human
ggcaacccccagccugcua

SEQ ID NO: 1718197 - RNA, 21 nt, Human
ggaucagucugauucccaagc

SEQ ID NO: 1718198 - RNA, 19 nt, Human
ggcaacugcauuggcuuug

SEQ ID NO: 1718199 - RNA, 15 nt, Human
ggcaaggcugucaau

SEQ ID NO: 1718200 - RNA, 23 nt, Human
ggcaacuugggaacuagacuccc

SEQ ID NO: 1718201 - RNA, 18 nt, Human
ggcaacuugggaacuaga

SEQ ID NO: 1718202 - RNA, 18 nt, Human
ggcaacugcauuggcuuu

SEQ ID NO: 1718203 - RNA, 16 nt, Human
ggcagagcagagacca

SEQ ID NO: 1718204 - RNA, 15 nt, Human
ggcagagcagagacc

SEQ ID NO: 1718205 - RNA, 20 nt, Human
ggcagagcagagaccauccc

SEQ ID NO: 1718206 - RNA, 16 nt, Human
ggcacccggccccugc

SEQ ID NO: 1718207 - RNA, 15 nt, Human
ggcacccggccccug

SEQ ID NO: 1718208 - RNA, 17 nt, Human
ggcacccggccccugcu

SEQ ID NO: 1718209 - RNA, 16 nt, Human
ggcaaggcugucaauu

SEQ ID NO: 1718210 - RNA, 23 nt, Human
ggcagauacaggaaaagcugcug

SEQ ID NO: 1718211 - RNA, 23 nt, Human
ggcagaguugaagacagagcuac

SEQ ID NO: 1718212 - RNA, 17 nt, Human
ggcagaggaaagcaaag

SEQ ID NO: 1718213 - RNA, 13 nt, Human
ggcagguccaggg

SEQ ID NO: 1718214 - RNA, 14 nt, Human
ggcaggaaggcuga

SEQ ID NO: 1718215 - RNA, 23 nt, Human
ggcaggucuugaacuccuggccu

SEQ ID NO: 1718216 - RNA, 19 nt, Human
ggcagcugcgguccaccca

SEQ ID NO: 1718217 - RNA, 21 nt, Human
ggcagcuugaggguugggcug

SEQ ID NO: 1718218 - RNA, 21 nt, Human
ggcagcucaccucucccuugg

SEQ ID NO: 1718219 - RNA, 18 nt, Human
ggcagcucaccucucccu

SEQ ID NO: 1718220 - RNA, 22 nt, Human
ggcagcucaccucucccuugga

SEQ ID NO: 1718221 - RNA, 13 nt, Human
ggcagcucagaga

SEQ ID NO: 1718222 - RNA, 23 nt, Human
ggcauguucucugaggacacuaa

SEQ ID NO: 1718223 - RNA, 15 nt, Human
ggcagguuggugggg

SEQ ID NO: 1718224 - RNA, 17 nt, Human
ggccacaagacccuugu

SEQ ID NO: 1718225 - RNA, 16 nt, Human
ggccacaagacccuug

SEQ ID NO: 1718226 - RNA, 15 nt, Human
ggcauuccccaggag

SEQ ID NO: 1718227 - RNA, 16 nt, Human
ggcauuccccaggagg

SEQ ID NO: 1718228 - RNA, 12 nt, Human
ggccaaguucuu

SEQ ID NO: 1718229 - RNA, 22 nt, Human
ggccaccugcggugcuaucucc

SEQ ID NO: 1718230 - RNA, 16 nt, Human
ggccaccugcggugcu

SEQ ID NO: 1718231 - RNA, 11 nt, Human
ggccacuguga

SEQ ID NO: 1718232 - RNA, 14 nt, Human
ggccaggagccucc

SEQ ID NO: 1718233 - RNA, 16 nt, Human
ggccacugugaagaga

SEQ ID NO: 1718234 - RNA, 16 nt, Human
ggccaggagccuccug

SEQ ID NO: 1718235 - RNA, 11 nt, Human
ggccaggcugg

SEQ ID NO: 1718236 - RNA, 22 nt, Human
ggccaggcugggucgcccugga

SEQ ID NO: 1718237 - RNA, 18 nt, Human
ggccaggcugggucgccc

SEQ ID NO: 1718238 - RNA, 16 nt, Human
ggccaggccagaggga

SEQ ID NO: 1718239 - RNA, 14 nt, Human
ggccaggccagagg

SEQ ID NO: 1718240 - RNA, 22 nt, Human
ggccaugggacagggaggacgc

SEQ ID NO: 1718241 - RNA, 13 nt, Human
ggccaugggccuc

SEQ ID NO: 1718242 - RNA, 12 nt, Human
ggccaggcuggu

SEQ ID NO: 1718243 - RNA, 12 nt, Human
ggccccugccac

SEQ ID NO: 1718244 - RNA, 16 nt, Human
ggccccugccacccug

SEQ ID NO: 1718245 - RNA, 13 nt, Human
ggccccugccacc

SEQ ID NO: 1718246 - RNA, 13 nt, Human
ggccccugcccgg

SEQ ID NO: 1718247 - RNA, 18 nt, Human
ggccccugccacccuggg

SEQ ID NO: 1718248 - RNA, 17 nt, Human
ggccccugccacccugg

SEQ ID NO: 1718249 - RNA, 21 nt, Human
ggccccucagggucccuggug

SEQ ID NO: 1718250 - RNA, 20 nt, Human
ggccccucagggucccuggu

SEQ ID NO: 1718251 - RNA, 19 nt, Human
ggccccucagggucccugg

SEQ ID NO: 1718252 - RNA, 16 nt, Human
ggccccucaggguccc

SEQ ID NO: 1718253 - RNA, 20 nt, Human
ggaggacgcucucuggccuu

SEQ ID NO: 1718254 - RNA, 21 nt, Human
ggaggacgcucucuggccuuc

SEQ ID NO: 1718255 - RNA, 19 nt, Human
ggaggacgcucucuggccu

SEQ ID NO: 1718256 - RNA, 21 nt, Human
ggaggaucucuugagccuggg

SEQ ID NO: 1718257 - RNA, 17 nt, Human
ggaggaucucuugagcc

SEQ ID NO: 1718258 - RNA, 23 nt, Human
ggaggaucacuugaguccagaag

SEQ ID NO: 1718259 - RNA, 15 nt, Human
ggaggauguucuggg

SEQ ID NO: 1718260 - RNA, 12 nt, Human
ggagggagggcu

SEQ ID NO: 1718261 - RNA, 13 nt, Human
ggagggcuccaga

SEQ ID NO: 1718262 - RNA, 12 nt, Human
ggagggcuccag

SEQ ID NO: 1718263 - RNA, 21 nt, Human
ggagugaguugauagcacaga

SEQ ID NO: 1718264 - RNA, 14 nt, Human
ggagugagcugguu

SEQ ID NO: 1718265 - RNA, 12 nt, Human
ggagugagcugg

SEQ ID NO: 1718266 - RNA, 21 nt, Human
ggagugacagaggcagcccca

SEQ ID NO: 1718267 - RNA, 19 nt, Human
ggagugacagaggcagccc

SEQ ID NO: 1718268 - RNA, 18 nt, Human
ggagugacagaggcagcc

SEQ ID NO: 1718269 - RNA, 17 nt, Human
ggagugacagaggcagc

SEQ ID NO: 1718270 - RNA, 23 nt, Human
ggagugaguugauagcacagacc

SEQ ID NO: 1718271 - RNA, 16 nt, Human
ggaucacagccucuga

SEQ ID NO: 1718272 - RNA, 15 nt, Human
ggagggcuccagaca

SEQ ID NO: 1718273 - RNA, 14 nt, Human
ggagggcuccagac

SEQ ID NO: 1718274 - RNA, 17 nt, Human
ggagggcuccagacaca

SEQ ID NO: 1718275 - RNA, 21 nt, Human
ggagucccaccuuggcugcag

SEQ ID NO: 1718276 - RNA, 20 nt, Human
ggagucccaccuuggcugca

SEQ ID NO: 1718277 - RNA, 16 nt, Human
ggagugacagaggcag

SEQ ID NO: 1718278 - RNA, 11 nt, Human
ggagugacaga

SEQ ID NO: 1718279 - RNA, 20 nt, Human
ggaagccagcaggcucucag

SEQ ID NO: 1718280 - RNA, 12 nt, Human
ggacuccucugu

SEQ ID NO: 1718281 - RNA, 14 nt, Human
ggacuccucugucc

SEQ ID NO: 1718282 - RNA, 15 nt, Human
ggacuccucugucca

SEQ ID NO: 1718283 - RNA, 11 nt, Human
ggacucugccu

SEQ ID NO: 1718284 - RNA, 13 nt, Human
ggacucuaaaguc

SEQ ID NO: 1718285 - RNA, 21 nt, Human
ggagagcuagcagcagggagg

SEQ ID NO: 1718286 - RNA, 17 nt, Human
ggagagcuagcagcagg

SEQ ID NO: 1718287 - RNA, 21 nt, Human
ggacugccagucccccugccc

SEQ ID NO: 1718288 - RNA, 21 nt, Human
ggagaccccuuggggagcagg

SEQ ID NO: 1718289 - RNA, 15 nt, Human
ggagaggggcacagg

SEQ ID NO: 1718290 - RNA, 20 nt, Human
ggagauuuacaacuggggga

SEQ ID NO: 1718291 - RNA, 20 nt, Human
ggagcaaaaucgaugcagug

SEQ ID NO: 1718292 - RNA, 13 nt, Human
ggagcccugggag

SEQ ID NO: 1718293 - RNA, 12 nt, Human
ggagcccuggga

SEQ ID NO: 1718294 - RNA, 23 nt, Human
ggaacuagacucccaagcuggac

SEQ ID NO: 1718295 - RNA, 20 nt, Human
ggaacagacuggaagcacag

SEQ ID NO: 1718296 - RNA, 19 nt, Human
ggaacagacuggaagcaca

SEQ ID NO: 1718297 - RNA, 14 nt, Human
ggaaaauaaauuau

SEQ ID NO: 1718298 - RNA, 15 nt, Human
ggaaaaucagccugc

SEQ ID NO: 1718299 - RNA, 17 nt, Human
ggaacagacuggaagca

SEQ ID NO: 1718300 - RNA, 14 nt, Human
ggaagccagcaggc

SEQ ID NO: 1718301 - RNA, 13 nt, Human
ggaagccagcagg

SEQ ID NO: 1718302 - RNA, 18 nt, Human
ggaagccagcaggcucuc

SEQ ID NO: 1718303 - RNA, 17 nt, Human
ggaagccagcaggcucu

SEQ ID NO: 1718304 - RNA, 16 nt, Human
ggaagccagcaggcuc

SEQ ID NO: 1718305 - RNA, 15 nt, Human
ggaagccagcaggcu

SEQ ID NO: 1718306 - RNA, 22 nt, Human
ggaagcacaugccucucucagg

SEQ ID NO: 1718307 - RNA, 21 nt, Human
ggaagcacaugccucucucag

SEQ ID NO: 1718308 - RNA, 23 nt, Human
ggaagcacaugccucucucaggc

SEQ ID NO: 1718309 - RNA, 13 nt, Human
ggaagcagcuuuc

SEQ ID NO: 1718310 - RNA, 17 nt, Human
ggaagcacaugccucuc

SEQ ID NO: 1718311 - RNA, 15 nt, Human
ggaagcacaugccuc

SEQ ID NO: 1718312 - RNA, 14 nt, Human
ggaagcacaugccu

SEQ ID NO: 1718313 - RNA, 13 nt, Human
ggaagcacaugcc

SEQ ID NO: 1718314 - RNA, 17 nt, Human
ggaagcacagcuucauu

SEQ ID NO: 1718315 - RNA, 13 nt, Human
ggaagagccuugc

SEQ ID NO: 1718316 - RNA, 20 nt, Human
ggaaaaaauaacaaugaaag

SEQ ID NO: 1718317 - RNA, 14 nt, Human
gcuuuuacuuaaac

SEQ ID NO: 1718318 - RNA, 16 nt, Human
gcuuugggcugcccug

SEQ ID NO: 1718319 - RNA, 15 nt, Human
gcuuugggcugcccu

SEQ ID NO: 1718320 - RNA, 15 nt, Human
ggaaaaauagccugc

SEQ ID NO: 1718321 - RNA, 22 nt, Human
ggaaaaccaagccguggcuucc

SEQ ID NO: 1718322 - RNA, 14 nt, Human
ggaaaaacugauuu

SEQ ID NO: 1718323 - RNA, 19 nt, Human
ggaaaaaccacccccaaau

SEQ ID NO: 1718324 - RNA, 13 nt, Human
ggaaaaauagccu

SEQ ID NO: 1718325 - RNA, 14 nt, Human
gcuuugggcugccc

SEQ ID NO: 1718326 - RNA, 17 nt, Human
gcuugcccuggugccuc

SEQ ID NO: 1718327 - RNA, 19 nt, Human
gcuugcccuggugccucac

SEQ ID NO: 1718328 - RNA, 13 nt, Human
gcuuggaggaagg

SEQ ID NO: 1718329 - RNA, 15 nt, Human
gcuuggaggaaggaa

SEQ ID NO: 1718330 - RNA, 14 nt, Human
gcuuggaggaagga

SEQ ID NO: 1718331 - RNA, 22 nt, Human
gcuugcagagaugaggccgcca

SEQ ID NO: 1718332 - RNA, 16 nt, Human
gcuucuguugcugccu

SEQ ID NO: 1718333 - RNA, 13 nt, Human
gcuguucagcugg

SEQ ID NO: 1718334 - RNA, 20 nt, Human
gcuuccagugaggcucugcc

SEQ ID NO: 1718335 - RNA, 19 nt, Human
gcuuccagugaggcucugc

SEQ ID NO: 1718336 - RNA, 21 nt, Human
gcuuccagugaggcucugccc

SEQ ID NO: 1718337 - RNA, 17 nt, Human
gcuucucacugccaugc

SEQ ID NO: 1718338 - RNA, 20 nt, Human
gcuggucccacucaguccau

SEQ ID NO: 1718339 - RNA, 18 nt, Human
gcuggugucaccugaaga

SEQ ID NO: 1718340 - RNA, 16 nt, Human
gcuggugucaccugaa

SEQ ID NO: 1718341 - RNA, 22 nt, Human
gcugguucaggguuggccccug

SEQ ID NO: 1718342 - RNA, 16 nt, Human
gcugucaauuacagga

SEQ ID NO: 1718343 - RNA, 14 nt, Human
gcugucaaggcuca

SEQ ID NO: 1718344 - RNA, 15 nt, Human
gcugguucaggguug

SEQ ID NO: 1718345 - RNA, 21 nt, Human
gcugguuagagguucccuuug

SEQ ID NO: 1718346 - RNA, 23 nt, Human
gcugucaauuacaggaaguacug

SEQ ID NO: 1718347 - RNA, 22 nt, Human
gcugucaauuacaggaaguacu

SEQ ID NO: 1718348 - RNA, 19 nt, Human
gcugucaauuacaggaagu

SEQ ID NO: 1718349 - RNA, 17 nt, Human
gcugucaauuacaggaa

SEQ ID NO: 1718350 - RNA, 21 nt, Human
gcugucccuuacgugaguccu

SEQ ID NO: 1718351 - RNA, 22 nt, Human
gcugucccuuacgugaguccug

SEQ ID NO: 1718352 - RNA, 19 nt, Human
gcugucccuuacgugaguc

SEQ ID NO: 1718353 - RNA, 17 nt, Human
gcugucuccauguuuga

SEQ ID NO: 1718354 - RNA, 23 nt, Human
gcugucuguuguauucauugugg

SEQ ID NO: 1718355 - RNA, 18 nt, Human
gcugggagagccuuccag

SEQ ID NO: 1718356 - RNA, 17 nt, Human
gcugggagagccuucca

SEQ ID NO: 1718357 - RNA, 13 nt, Human
gcugggagagccu

SEQ ID NO: 1718358 - RNA, 12 nt, Human
gcugggagagcc

SEQ ID NO: 1718359 - RNA, 22 nt, Human
gcugggagagccuuccaggggu

SEQ ID NO: 1718360 - RNA, 19 nt, Human
gcugggagagccuuccagg

SEQ ID NO: 1718361 - RNA, 17 nt, Human
gcugggcuucaguggca

SEQ ID NO: 1718362 - RNA, 21 nt, Human
gcugggauuacaggcuccugc

SEQ ID NO: 1718363 - RNA, 20 nt, Human
gcugggauuacaggcuccug

SEQ ID NO: 1718364 - RNA, 19 nt, Human
gcugggauuacaggcuccu

SEQ ID NO: 1718365 - RNA, 18 nt, Human
gcugggauuacaggcgug

SEQ ID NO: 1718366 - RNA, 17 nt, Human
gcugggauuacaggcgu

SEQ ID NO: 1718367 - RNA, 15 nt, Human
gcugggagcucugca

SEQ ID NO: 1718368 - RNA, 16 nt, Human
gcugggagcucugcag

SEQ ID NO: 1718369 - RNA, 20 nt, Human
gcugggggccucagugccac

SEQ ID NO: 1718370 - RNA, 19 nt, Human
gcugggggccucagugcca

SEQ ID NO: 1718371 - RNA, 19 nt, Human
gcuggucccacucagucca

SEQ ID NO: 1718372 - RNA, 15 nt, Human
gcuggucccacucag

SEQ ID NO: 1718373 - RNA, 13 nt, Human
gcugggggccuca

SEQ ID NO: 1718374 - RNA, 23 nt, Human
gcugggggaagaagcucucuccu

SEQ ID NO: 1718375 - RNA, 12 nt, Human
gcuggggccagu

SEQ ID NO: 1718376 - RNA, 19 nt, Human
gcugggcuucaguggcagc

SEQ ID NO: 1718377 - RNA, 18 nt, Human
gcugggcuucaguggcag

SEQ ID NO: 1718378 - RNA, 19 nt, Human
gcuggggccaggcuggguc

SEQ ID NO: 1718379 - RNA, 16 nt, Human
gcuggggccaggcugg

SEQ ID NO: 1718380 - RNA, 22 nt, Human
gcuagcagcagggagggcuucu

SEQ ID NO: 1718381 - RNA, 19 nt, Human
gcugcccuggugcugccac

SEQ ID NO: 1718382 - RNA, 18 nt, Human
gcugcccuggugcugcca

SEQ ID NO: 1718383 - RNA, 11 nt, Human
gcugcccugug

SEQ ID NO: 1718384 - RNA, 22 nt, Human
gcugcccuggugcugccacacu

SEQ ID NO: 1718385 - RNA, 20 nt, Human
gcugcccuggugcugccaca

SEQ ID NO: 1718386 - RNA, 14 nt, Human
gcugcccugugagu

SEQ ID NO: 1718387 - RNA, 12 nt, Human
gcugcccuguga

SEQ ID NO: 1718388 - RNA, 23 nt, Human
gcugcccuggugcugccacacuu

SEQ ID NO: 1718389 - RNA, 17 nt, Human
gcugcccuuucugggca

SEQ ID NO: 1718390 - RNA, 16 nt, Human
gcugcuugggcuucau

SEQ ID NO: 1718391 - RNA, 22 nt, Human
gcugcuucaaggauccugagcc

SEQ ID NO: 1718392 - RNA, 21 nt, Human
gcugcuucaaggauccugagc

SEQ ID NO: 1718393 - RNA, 23 nt, Human
gcugcuucaaggauccugagcca

SEQ ID NO: 1718394 - RNA, 18 nt, Human
gcugcgguccacccagga

SEQ ID NO: 1718395 - RNA, 17 nt, Human
gcugcgguccacccagg

SEQ ID NO: 1718396 - RNA, 19 nt, Human
gcugcgguccacccaggag

SEQ ID NO: 1718397 - RNA, 13 nt, Human
gcugcuucaagga

SEQ ID NO: 1718398 - RNA, 22 nt, Human
gcuggaccuugaacuggguacu

SEQ ID NO: 1718399 - RNA, 21 nt, Human
gcuggaccuugaacuggguac

SEQ ID NO: 1718400 - RNA, 22 nt, Human
gcugcuugggcuucauccuccu

SEQ ID NO: 1718401 - RNA, 17 nt, Human
gcugcuugggcuucauc

SEQ ID NO: 1718402 - RNA, 18 nt, Human
gcuggaccuugaacuggg

SEQ ID NO: 1718403 - RNA, 16 nt, Human
gcuggauuacaggcau

SEQ ID NO: 1718404 - RNA, 20 nt, Human
gcugggacuacaggcaccca

SEQ ID NO: 1718405 - RNA, 19 nt, Human
gcugggacuacaggcaccc

SEQ ID NO: 1718406 - RNA, 18 nt, Human
gcugggacuacaggcacc

SEQ ID NO: 1718407 - RNA, 13 nt, Human
gcugggacuacag

SEQ ID NO: 1718408 - RNA, 19 nt, Human
gcugggacuacagguguga

SEQ ID NO: 1718409 - RNA, 20 nt, Human
gcugggacaugggaaagggg

SEQ ID NO: 1718410 - RNA, 17 nt, Human
gcuggccgggagccuga

SEQ ID NO: 1718411 - RNA, 13 nt, Human
gcuggcccugccc

SEQ ID NO: 1718412 - RNA, 13 nt, Human
gcuggccgggacc

SEQ ID NO: 1718413 - RNA, 12 nt, Human
gcuggcccugcc

SEQ ID NO: 1718414 - RNA, 16 nt, Human
gggaagggggcuggga

SEQ ID NO: 1718415 - RNA, 14 nt, Human
gggaagggggcugg

SEQ ID NO: 1718416 - RNA, 17 nt, Human
gggaagggggcugggac

SEQ ID NO: 1718417 - RNA, 14 nt, Human
ggcuuuugugcauu

SEQ ID NO: 1718418 - RNA, 21 nt, Human
gggaaggauacaaaagcaugu

SEQ ID NO: 1718419 - RNA, 23 nt, Human
gggaaggauacaaaagcauguga

SEQ ID NO: 1718420 - RNA, 22 nt, Human
gggaaggcagggagggccuggg

SEQ ID NO: 1718421 - RNA, 15 nt, Human
gggaccucaggccug

SEQ ID NO: 1718422 - RNA, 13 nt, Human
gggaccucaggcc

SEQ ID NO: 1718423 - RNA, 12 nt, Human
gggaccucaggc

SEQ ID NO: 1718424 - RNA, 16 nt, Human
gggacucaaugcacug

SEQ ID NO: 1718425 - RNA, 17 nt, Human
gggacuacaggcaccca

SEQ ID NO: 1718426 - RNA, 14 nt, Human
gggaccccugagcu

SEQ ID NO: 1718427 - RNA, 20 nt, Human
gggaccccgagccuggcucc

SEQ ID NO: 1718428 - RNA, 18 nt, Human
gggaccccgagccuggcu

SEQ ID NO: 1718429 - RNA, 17 nt, Human
gggaauuucuucaacuc

SEQ ID NO: 1718430 - RNA, 23 nt, Human
gggacaaggacuaggguccuggg

SEQ ID NO: 1718431 - RNA, 22 nt, Human
ggcuugaguuuaaauuguaaua

SEQ ID NO: 1718432 - RNA, 21 nt, Human
ggcuuggggaccagagcugcc

SEQ ID NO: 1718433 - RNA, 10 nt, Human
ggcuuuugug

SEQ ID NO: 1718434 - RNA, 22 nt, Human
ggcuuuucacugcuggcugccu

SEQ ID NO: 1718435 - RNA, 19 nt, Human
ggcuuuucacugcuggcug

SEQ ID NO: 1718436 - RNA, 17 nt, Human
ggcuuuucacugcuggc

SEQ ID NO: 1718437 - RNA, 15 nt, Human
ggcuuuucacugcug

SEQ ID NO: 1718438 - RNA, 14 nt, Human
ggcuuuucacugcu

SEQ ID NO: 1718439 - RNA, 21 nt, Human
ggcuuagucacugagacagcc

SEQ ID NO: 1718440 - RNA, 12 nt, Human
ggcugggcuuca

SEQ ID NO: 1718441 - RNA, 18 nt, Human
ggcugggcucccuuccca

SEQ ID NO: 1718442 - RNA, 17 nt, Human
ggcugggcucccuuccc

SEQ ID NO: 1718443 - RNA, 17 nt, Human
ggcugggcuucaguggc

SEQ ID NO: 1718444 - RNA, 13 nt, Human
ggcugggcuucag

SEQ ID NO: 1718445 - RNA, 18 nt, Human
ggcugggcuucaguggca

SEQ ID NO: 1718446 - RNA, 18 nt, Human
ggcugcaaaggguaucag

SEQ ID NO: 1718447 - RNA, 23 nt, Human
ggcugcaaaggguaucaggugcu

SEQ ID NO: 1718448 - RNA, 22 nt, Human
ggcugcaaaggguaucaggugc

SEQ ID NO: 1718449 - RNA, 19 nt, Human
ggcugcaccggcuggccug

SEQ ID NO: 1718450 - RNA, 18 nt, Human
ggcugcaccggcuggccu

SEQ ID NO: 1718451 - RNA, 17 nt, Human
ggcugcaccggcuggcc

SEQ ID NO: 1718452 - RNA, 24 nt, Human
ggcugcaaaggguaucaggugcug

SEQ ID NO: 1718453 - RNA, 15 nt, Human
ggcugaggugggagg

SEQ ID NO: 1718454 - RNA, 13 nt, Human
ggcugagguggga

SEQ ID NO: 1718455 - RNA, 17 nt, Human
ggccccugcccggcugc

SEQ ID NO: 1718456 - RNA, 16 nt, Human
ggccccugcccggcug

SEQ ID NO: 1718457 - RNA, 20 nt, Human
ggccccugcccggcugcgga

SEQ ID NO: 1718458 - RNA, 14 nt, Human
ggcucuggagccca

SEQ ID NO: 1718459 - RNA, 13 nt, Human
ggcucuggagccc

SEQ ID NO: 1718460 - RNA, 23 nt, Human
ggcugcuucaaggauccugagcc

SEQ ID NO: 1718461 - RNA, 19 nt, Human
ggcugggagagccuuccag

SEQ ID NO: 1718462 - RNA, 23 nt, Human
ggcugggagagccuuccaggggu

SEQ ID NO: 1718463 - RNA, 20 nt, Human
ggcugggagagccuuccagg

SEQ ID NO: 1718464 - RNA, 14 nt, Human
ggcugggcagagga

SEQ ID NO: 1718465 - RNA, 13 nt, Human
ggcugggcagagg

SEQ ID NO: 1718466 - RNA, 19 nt, Human
ggcugggcagaggaaagca

SEQ ID NO: 1718467 - RNA, 15 nt, Human
ggcugggcagaggaa

SEQ ID NO: 1718468 - RNA, 17 nt, Human
ggcugcugaaggcucga

SEQ ID NO: 1718469 - RNA, 15 nt, Human
ggcugcugaaggcuc

SEQ ID NO: 1718470 - RNA, 18 nt, Human
ggcugcugaaggcucgag

SEQ ID NO: 1718471 - RNA, 14 nt, Human
ggcugcugaaggcu

SEQ ID NO: 1718472 - RNA, 13 nt, Human
ggcugcagggagu

SEQ ID NO: 1718473 - RNA, 12 nt, Human
ggcugcagggag

SEQ ID NO: 1718474 - RNA, 22 nt, Human
ggcugcuucaaggauccugagc

SEQ ID NO: 1718475 - RNA, 14 nt, Human
ggcugcuucaagga

SEQ ID NO: 1718476 - RNA, 12 nt, Human
ggcugcuucaag

SEQ ID NO: 1718477 - RNA, 11 nt, Human
ggcugcuucaa

SEQ ID NO: 1718478 - RNA, 21 nt, Human
gggcacagaaaauggaagaca

SEQ ID NO: 1718479 - RNA, 20 nt, Human
gggcacagaaaauggaagac

SEQ ID NO: 1718480 - RNA, 18 nt, Human
gggcacagaaaauggaag

SEQ ID NO: 1718481 - RNA, 23 nt, Human
gggcacaccgggcacucagaaga

SEQ ID NO: 1718482 - RNA, 16 nt, Human
gggcacagggucucua

SEQ ID NO: 1718483 - RNA, 13 nt, Human
gggcacagggucu

SEQ ID NO: 1718484 - RNA, 19 nt, Human
gggcacucagaagacacug

SEQ ID NO: 1718485 - RNA, 16 nt, Human
gggcacucagaagaca

SEQ ID NO: 1718486 - RNA, 14 nt, Human
gggcaccggggccu

SEQ ID NO: 1718487 - RNA, 18 nt, Human
gggcagaaggaagacuuc

SEQ ID NO: 1718488 - RNA, 14 nt, Human
gggcagaaggaaga

SEQ ID NO: 1718489 - RNA, 20 nt, Human
gggcacucagaagacacuga

SEQ ID NO: 1718490 - RNA, 16 nt, Human
gggcacugguggcccg

SEQ ID NO: 1718491 - RNA, 13 nt, Human
gggcacugguggc

SEQ ID NO: 1718492 - RNA, 12 nt, Human
gggcagagcaga

SEQ ID NO: 1718493 - RNA, 11 nt, Human
gggcagagcag

SEQ ID NO: 1718494 - RNA, 17 nt, Human
gggcagguugguggggg

SEQ ID NO: 1718495 - RNA, 14 nt, Human
gggagugagcuggu

SEQ ID NO: 1718496 - RNA, 11 nt, Human
gggagugagcu

SEQ ID NO: 1718497 - RNA, 18 nt, Human
gggagugacagaggcagc

SEQ ID NO: 1718498 - RNA, 16 nt, Human
gggaggugaccccagg

SEQ ID NO: 1718499 - RNA, 17 nt, Human
gggaggugggauccucc

SEQ ID NO: 1718500 - RNA, 13 nt, Human
gggacugagaaau

SEQ ID NO: 1718501 - RNA, 13 nt, Human
gggauagagagag

SEQ ID NO: 1718502 - RNA, 21 nt, Human
gggauaugauuuaaaucagcc

SEQ ID NO: 1718503 - RNA, 16 nt, Human
gggauccuccaggugc

SEQ ID NO: 1718504 - RNA, 15 nt, Human
gggauccuccaggug

SEQ ID NO: 1718505 - RNA, 18 nt, Human
gggcaacccuggugacca

SEQ ID NO: 1718506 - RNA, 23 nt, Human
gggauccuggaguucugguuccu

SEQ ID NO: 1718507 - RNA, 17 nt, Human
gggcccagagagggugg

SEQ ID NO: 1718508 - RNA, 16 nt, Human
gggccacagagaaagu

SEQ ID NO: 1718509 - RNA, 23 nt, Human
gggccacagagaaaguacuucuc

SEQ ID NO: 1718510 - RNA, 12 nt, Human
gggcaugacacg

SEQ ID NO: 1718511 - RNA, 20 nt, Human
gggcauggccagguggccac

SEQ ID NO: 1718512 - RNA, 17 nt, Human
gggcauggccagguggc

SEQ ID NO: 1718513 - RNA, 15 nt, Human
gggcauggccaggug

SEQ ID NO: 1718514 - RNA, 13 nt, Human
gggccuggcuccc

SEQ ID NO: 1718515 - RNA, 17 nt, Human
gggccuggcucaggugg

SEQ ID NO: 1718516 - RNA, 18 nt, Human
gggccuggccugagcugg

SEQ ID NO: 1718517 - RNA, 14 nt, Human
gggccuggccugag

SEQ ID NO: 1718518 - RNA, 19 nt, Human
gggccuggccugagcuggg

SEQ ID NO: 1718519 - RNA, 13 nt, Human
gggccuggccuga

SEQ ID NO: 1718520 - RNA, 13 nt, Human
gggcccugccucc

SEQ ID NO: 1718521 - RNA, 22 nt, Human
gggccccugccucucugcaggu

SEQ ID NO: 1718522 - RNA, 21 nt, Human
gggccccugccucucugcagg

SEQ ID NO: 1718523 - RNA, 19 nt, Human
gggccccugccucucugca

SEQ ID NO: 1718524 - RNA, 18 nt, Human
gggccccugccucucugc

SEQ ID NO: 1718525 - RNA, 17 nt, Human
gggccccugccucucug

SEQ ID NO: 1718526 - RNA, 15 nt, Human
gggccccugccucuc

SEQ ID NO: 1718527 - RNA, 13 nt, Human
gggccccugccuc

SEQ ID NO: 1718528 - RNA, 14 nt, Human
gggccccagaggcu

SEQ ID NO: 1718529 - RNA, 14 nt, Human
gggucucacucugu

SEQ ID NO: 1718530 - RNA, 17 nt, Human
ggguaagugagagaggg

SEQ ID NO: 1718531 - RNA, 21 nt, Human
gggucugaggaauccagaccc

SEQ ID NO: 1718532 - RNA, 12 nt, Human
gggucugaggaa

SEQ ID NO: 1718533 - RNA, 12 nt, Human
gggguggccucc

SEQ ID NO: 1718534 - RNA, 18 nt, Human
ggggugcugggccccugc

SEQ ID NO: 1718535 - RNA, 17 nt, Human
gggguggggaccucagg

SEQ ID NO: 1718536 - RNA, 20 nt, Human
gggguggggggggugcuggg

SEQ ID NO: 1718537 - RNA, 22 nt, Human
ggggcugcaccggcuggccugg

SEQ ID NO: 1718538 - RNA, 21 nt, Human
ggggcugcaccggcuggccug

SEQ ID NO: 1718539 - RNA, 12 nt, Human
ggggcugcaccg

SEQ ID NO: 1718540 - RNA, 19 nt, Human
ggggcugaggugggaggau

SEQ ID NO: 1718541 - RNA, 23 nt, Human
ggggcugcaccggcuggccuggc

SEQ ID NO: 1718542 - RNA, 22 nt, Human
gggggaggugggauccuccagg

SEQ ID NO: 1718543 - RNA, 18 nt, Human
ggggaggggcugugggcg

SEQ ID NO: 1718544 - RNA, 24 nt, Human
ggggaaaaucagccugcuccagcu

SEQ ID NO: 1718545 - RNA, 21 nt, Human
ggggaaaaucagccugcucca

SEQ ID NO: 1718546 - RNA, 19 nt, Human
ggggaaaaucagccugcuc

SEQ ID NO: 1718547 - RNA, 17 nt, Human
ggggaaaaucagccugc

SEQ ID NO: 1718548 - RNA, 16 nt, Human
ggggaaaaucagccug

SEQ ID NO: 1718549 - RNA, 11 nt, Human
gggccugggcc

SEQ ID NO: 1718550 - RNA, 16 nt, Human
ggggcaacccugguga

SEQ ID NO: 1718551 - RNA, 17 nt, Human
ggggcugaggugggagg

SEQ ID NO: 1718552 - RNA, 19 nt, Human
ggguuccuuccucugagcc

SEQ ID NO: 1718553 - RNA, 12 nt, Human
ggguucuaccca

SEQ ID NO: 1718554 - RNA, 21 nt, Human
ggguuccuuccucugagccuu

SEQ ID NO: 1718555 - RNA, 20 nt, Human
ggguuccuuccucugagccu

SEQ ID NO: 1718556 - RNA, 17 nt, Human
ggguucuacccaggugc

SEQ ID NO: 1718557 - RNA, 16 nt, Human
ggguucuuucuuccuc

SEQ ID NO: 1718558 - RNA, 17 nt, Human
ggguucuuucuuccucu

SEQ ID NO: 1718559 - RNA, 19 nt, Human
ggguucuuucuuccucugc

SEQ ID NO: 1718560 - RNA, 23 nt, Human
ggguucaagcgauucuucugcuu

SEQ ID NO: 1718561 - RNA, 22 nt, Human
ggguucaagcgauucuucugcu

SEQ ID NO: 1718562 - RNA, 18 nt, Human
gggugcugggccccugcc

SEQ ID NO: 1718563 - RNA, 17 nt, Human
gggugcugggccccugc

SEQ ID NO: 1718564 - RNA, 19 nt, Human
gggugacagagcaagugag

SEQ ID NO: 1718565 - RNA, 17 nt, Human
gggugaagugaagacaa

SEQ ID NO: 1718566 - RNA, 12 nt, Human
ggucacucuggc

SEQ ID NO: 1718567 - RNA, 18 nt, Human
ggucacaggacucugccu

SEQ ID NO: 1718568 - RNA, 16 nt, Human
ggucacaggacucugc

SEQ ID NO: 1718569 - RNA, 11 nt, Human
ggucagagccu

SEQ ID NO: 1718570 - RNA, 16 nt, Human
ggucccaccccacaca

SEQ ID NO: 1718571 - RNA, 15 nt, Human
ggucccaccccacac

SEQ ID NO: 1718572 - RNA, 17 nt, Human
gguacuuguggacacag

SEQ ID NO: 1718573 - RNA, 16 nt, Human
gguacuuguggacaca

SEQ ID NO: 1718574 - RNA, 22 nt, Human
gguagaaauaucugaaaaugua

SEQ ID NO: 1718575 - RNA, 20 nt, Human
gguacuuguggacacagcuc

SEQ ID NO: 1718576 - RNA, 13 nt, Human
gguacccacugcu

SEQ ID NO: 1718577 - RNA, 16 nt, Human
gguacccacugcucug

SEQ ID NO: 1718578 - RNA, 11 nt, Human
gguacccacug

SEQ ID NO: 1718579 - RNA, 22 nt, Human
gguagaagcccuucuaccuucc

SEQ ID NO: 1718580 - RNA, 23 nt, Human
gguagaaauaucugaaaauguau

SEQ ID NO: 1718581 - RNA, 13 nt, Human
gguugagguuuca

SEQ ID NO: 1718582 - RNA, 18 nt, Human
gguucuuucauuugcuuu

SEQ ID NO: 1718583 - RNA, 16 nt, Human
gguucuuucuuccucu

SEQ ID NO: 1718584 - RNA, 14 nt, Human
gguucuuucuuccu

SEQ ID NO: 1718585 - RNA, 21 nt, Human
gguucaaagauauuuugcuuu

SEQ ID NO: 1718586 - RNA, 13 nt, Human
gguucaaagauau

SEQ ID NO: 1718587 - RNA, 23 nt, Human
gguuauuuugauguaaagauguu

SEQ ID NO: 1718588 - RNA, 21 nt, Human
gguuacccaguuagcucucaa

SEQ ID NO: 1718589 - RNA, 13 nt, Human
gguuauggagagg

SEQ ID NO: 1718590 - RNA, 22 nt, Human
gguuaguggauggaaggggcug

SEQ ID NO: 1718591 - RNA, 21 nt, Human
gguuaguggauggaaggggcu

SEQ ID NO: 1718592 - RNA, 17 nt, Human
gguuaggcauuguggga

SEQ ID NO: 1718593 - RNA, 17 nt, Human
ggugucaagagggucug

SEQ ID NO: 1718594 - RNA, 19 nt, Human
ggugucaagagggucugag

SEQ ID NO: 1718595 - RNA, 19 nt, Human
ggugucaccugaagacuca

SEQ ID NO: 1718596 - RNA, 15 nt, Human
ggugguuuucuguuc

SEQ ID NO: 1718597 - RNA, 18 nt, Human
ggugguuuucuguucuuu

SEQ ID NO: 1718598 - RNA, 21 nt, Human
ggugguuauggagaggguguc

SEQ ID NO: 1718599 - RNA, 17 nt, Human
ggugguuucagaaaugu

SEQ ID NO: 1718600 - RNA, 18 nt, Human
ggugguuucagaaaugug

SEQ ID NO: 1718601 - RNA, 12 nt, Human
gguggcuggguu

SEQ ID NO: 1718602 - RNA, 15 nt, Human
gguggugaccucugc

SEQ ID NO: 1718603 - RNA, 14 nt, Human
gguggugaccucug

SEQ ID NO: 1718604 - RNA, 16 nt, Human
gguggugaccucugcc

SEQ ID NO: 1718605 - RNA, 15 nt, Human
ggugagaagcagagg

SEQ ID NO: 1718606 - RNA, 16 nt, Human
ggugagaggggaacag

SEQ ID NO: 1718607 - RNA, 15 nt, Human
ggugcgaucuggguu

SEQ ID NO: 1718608 - RNA, 20 nt, Human
ggugcuaucucccccagccc

SEQ ID NO: 1718609 - RNA, 19 nt, Human
ggugcuaucucccccagcc

SEQ ID NO: 1718610 - RNA, 17 nt, Human
ggugcuaucucccccag

SEQ ID NO: 1718611 - RNA, 16 nt, Human
ggugcuaucuccccca

SEQ ID NO: 1718612 - RNA, 22 nt, Human
gguggccucccaacucacccca

SEQ ID NO: 1718613 - RNA, 23 nt, Human
gguggccacuccagaccccuggc

SEQ ID NO: 1718614 - RNA, 22 nt, Human
gguggccacuccagaccccugg

SEQ ID NO: 1718615 - RNA, 21 nt, Human
gguggccacuccagaccccug

SEQ ID NO: 1718616 - RNA, 20 nt, Human
gguggccacuccagaccccu

SEQ ID NO: 1718617 - RNA, 23 nt, Human
gguggccucccaacucaccccag

SEQ ID NO: 1718618 - RNA, 22 nt, Human
gguggcagugggagcugccugu

SEQ ID NO: 1718619 - RNA, 19 nt, Human
gguggcagugggagcugcc

SEQ ID NO: 1718620 - RNA, 21 nt, Human
ggugcugccauccagguucag

SEQ ID NO: 1718621 - RNA, 21 nt, Human
ggugcuaucucccccagcccc

SEQ ID NO: 1718622 - RNA, 15 nt, Human
ggugcugccauccag

SEQ ID NO: 1718623 - RNA, 22 nt, Human
ggugaccagcaccaucucuccu

SEQ ID NO: 1718624 - RNA, 14 nt, Human
ggucugacccacug

SEQ ID NO: 1718625 - RNA, 23 nt, Human
ggucucacucugucgcccagucu

SEQ ID NO: 1718626 - RNA, 22 nt, Human
ggucucacucugucgcccaguc

SEQ ID NO: 1718627 - RNA, 21 nt, Human
ggucucacuauguugcccagg

SEQ ID NO: 1718628 - RNA, 17 nt, Human
ggucccaccccacacac

SEQ ID NO: 1718629 - RNA, 17 nt, Human
ggucucaaacuccugac

SEQ ID NO: 1718630 - RNA, 19 nt, Human
gccuucggccuccauccug

SEQ ID NO: 1718631 - RNA, 18 nt, Human
gccuucggccuccauccu

SEQ ID NO: 1718632 - RNA, 13 nt, Human
gccuucagcucua

SEQ ID NO: 1718633 - RNA, 16 nt, Human
gccuucagcucuacag

SEQ ID NO: 1718634 - RNA, 18 nt, Human
gccuguaaucacagcuac

SEQ ID NO: 1718635 - RNA, 17 nt, Human
gccugguggcagcugcg

SEQ ID NO: 1718636 - RNA, 16 nt, Human
gccugguggcagcugc

SEQ ID NO: 1718637 - RNA, 15 nt, Human
gccugguggcagcug

SEQ ID NO: 1718638 - RNA, 22 nt, Human
gccuuauggaacacucugagac

SEQ ID NO: 1718639 - RNA, 21 nt, Human
gccuuauggaacacucugaga

SEQ ID NO: 1718640 - RNA, 23 nt, Human
gccuuauggaacacucugagacu

SEQ ID NO: 1718641 - RNA, 17 nt, Human
gccuuagaaccuuucuu

SEQ ID NO: 1718642 - RNA, 20 nt, Human
gccuuagaagucacacagua

SEQ ID NO: 1718643 - RNA, 16 nt, Human
gccuuagaaccuuucu

SEQ ID NO: 1718644 - RNA, 19 nt, Human
gccuuacccucauguucuu

SEQ ID NO: 1718645 - RNA, 22 nt, Human
gcuagacgagcaggcuucuucc

SEQ ID NO: 1718646 - RNA, 21 nt, Human
gcuagacgagcaggcuucuuc

SEQ ID NO: 1718647 - RNA, 18 nt, Human
gcuaacauggaaguacua

SEQ ID NO: 1718648 - RNA, 17 nt, Human
gcuaacauggaaguacu

SEQ ID NO: 1718649 - RNA, 15 nt, Human
gcgugagccacugca

SEQ ID NO: 1718650 - RNA, 16 nt, Human
gcgugagccacugcac

SEQ ID NO: 1718651 - RNA, 16 nt, Human
gcgugagaccugcccc

SEQ ID NO: 1718652 - RNA, 14 nt, Human
gcgugagccacugc

SEQ ID NO: 1718653 - RNA, 22 nt, Human
gcuacacaggggaaaagaggag

SEQ ID NO: 1718654 - RNA, 23 nt, Human
gcgguccacccaggagccccgag

SEQ ID NO: 1718655 - RNA, 23 nt, Human
gcggggacagcuccuucuguccu

SEQ ID NO: 1718656 - RNA, 19 nt, Human
gcggggacagcuccuucug

SEQ ID NO: 1718657 - RNA, 23 nt, Human
gcggacagccacggccaggccag

SEQ ID NO: 1718658 - RNA, 19 nt, Human
gcggacagccacggccagg

SEQ ID NO: 1718659 - RNA, 19 nt, Human
gcggaaugaaccacaucuu

SEQ ID NO: 1718660 - RNA, 17 nt, Human
gcgcugccccuggcagc

SEQ ID NO: 1718661 - RNA, 19 nt, Human
gcgcuggccgggaccccga

SEQ ID NO: 1718662 - RNA, 14 nt, Human
gcgcugccccuggc

SEQ ID NO: 1718663 - RNA, 21 nt, Human
gcgccuacaggagugagcacu

SEQ ID NO: 1718664 - RNA, 20 nt, Human
gcgccuacaggagugagcac

SEQ ID NO: 1718665 - RNA, 15 nt, Human
gccucugacacacag

SEQ ID NO: 1718666 - RNA, 16 nt, Human
gccucugcacuccccu

SEQ ID NO: 1718667 - RNA, 16 nt, Human
gccucugacacacagc

SEQ ID NO: 1718668 - RNA, 20 nt, Human
gccucugcacuccccugcug

SEQ ID NO: 1718669 - RNA, 19 nt, Human
gccucugcacuccccugcu

SEQ ID NO: 1718670 - RNA, 18 nt, Human
gccucugcacuccccugc

SEQ ID NO: 1718671 - RNA, 17 nt, Human
gccucugcacuccccug

SEQ ID NO: 1718672 - RNA, 15 nt, Human
gccugaagucacaca

SEQ ID NO: 1718673 - RNA, 21 nt, Human
gccucugcacuccccugcugg

SEQ ID NO: 1718674 - RNA, 12 nt, Human
gccucugcauuc

SEQ ID NO: 1718675 - RNA, 15 nt, Human
gccucugcauucagg

SEQ ID NO: 1718676 - RNA, 12 nt, Human
gccugcccaggc

SEQ ID NO: 1718677 - RNA, 11 nt, Human
gccugcccagg

SEQ ID NO: 1718678 - RNA, 14 nt, Human
gccuggacccugug

SEQ ID NO: 1718679 - RNA, 20 nt, Human
gccucccgaauagcugggac

SEQ ID NO: 1718680 - RNA, 23 nt, Human
gccucccgaguagcugggacuac

SEQ ID NO: 1718681 - RNA, 21 nt, Human
gccucccgaguagcugggacu

SEQ ID NO: 1718682 - RNA, 19 nt, Human
gccucccgaauagcuggga

SEQ ID NO: 1718683 - RNA, 18 nt, Human
gccucccgaauagcuggg

SEQ ID NO: 1718684 - RNA, 22 nt, Human
gccucagccucccaaagugcug

SEQ ID NO: 1718685 - RNA, 14 nt, Human
gccucagccuccca

SEQ ID NO: 1718686 - RNA, 12 nt, Human
gccucagccucc

SEQ ID NO: 1718687 - RNA, 15 nt, Human
gccucucccaucacu

SEQ ID NO: 1718688 - RNA, 18 nt, Human
gccucucugcaggucccu

SEQ ID NO: 1718689 - RNA, 17 nt, Human
gccucucugcagguccc

SEQ ID NO: 1718690 - RNA, 16 nt, Human
gccucucugcaggucc

SEQ ID NO: 1718691 - RNA, 14 nt, Human
gccucucugcaggu

SEQ ID NO: 1718692 - RNA, 10 nt, Human
gccucucugc

SEQ ID NO: 1718693 - RNA, 15 nt, Human
gccguggcuucccgc

SEQ ID NO: 1718694 - RNA, 13 nt, Human
gccguggcuuccc

SEQ ID NO: 1718695 - RNA, 12 nt, Human
gccguggcuucc

SEQ ID NO: 1718696 - RNA, 11 nt, Human
gccguggcuuc

SEQ ID NO: 1718697 - RNA, 23 nt, Human
gccgucuaccugaggggccucuu

SEQ ID NO: 1718698 - RNA, 22 nt, Human
gccgucuaccugaggggccucu

SEQ ID NO: 1718699 - RNA, 20 nt, Human
gccgucuaccugaggggccu

SEQ ID NO: 1718700 - RNA, 18 nt, Human
gccgucuaccugaggggc

SEQ ID NO: 1718701 - RNA, 14 nt, Human
gccuaaggcugaac

SEQ ID NO: 1718702 - RNA, 17 nt, Human
gccuauuuuaauaaaca

SEQ ID NO: 1718703 - RNA, 21 nt, Human
gccucagcauccuggcacccg

SEQ ID NO: 1718704 - RNA, 18 nt, Human
gccucagcauccuggcac

SEQ ID NO: 1718705 - RNA, 24 nt, Human
gccucaagugauucuccugccuca

SEQ ID NO: 1718706 - RNA, 22 nt, Human
gccucaagugauucuccugccu

SEQ ID NO: 1718707 - RNA, 13 nt, Human
gcccuucucucca

SEQ ID NO: 1718708 - RNA, 22 nt, Human
gcccuuccucuccacugccuuc

SEQ ID NO: 1718709 - RNA, 16 nt, Human
gccgagauagccaagg

SEQ ID NO: 1718710 - RNA, 19 nt, Human
gccgcagcccugcagaggg

SEQ ID NO: 1718711 - RNA, 12 nt, Human
gccgggguggau

SEQ ID NO: 1718712 - RNA, 17 nt, Human
gccgcagcccugcagag

SEQ ID NO: 1718713 - RNA, 16 nt, Human
gccgcagcccugcaga

SEQ ID NO: 1718714 - RNA, 15 nt, Human
gccgcagcccugcag

SEQ ID NO: 1718715 - RNA, 19 nt, Human
gccgagauagccaaggcca

SEQ ID NO: 1718716 - RNA, 17 nt, Human
gccgagauagccaaggc

SEQ ID NO: 1718717 - RNA, 17 nt, Human
gccccgugggguuccuc

SEQ ID NO: 1718718 - RNA, 21 nt, Human
gccccgucccccucuggcucc

SEQ ID NO: 1718719 - RNA, 17 nt, Human
gccccgucccccucugg

SEQ ID NO: 1718720 - RNA, 23 nt, Human
gccccgaggccuucucugaagga

SEQ ID NO: 1718721 - RNA, 23 nt, Human
gccccauucugccugcccaggcc

SEQ ID NO: 1718722 - RNA, 22 nt, Human
gccccauucugccugcccaggc

SEQ ID NO: 1718723 - RNA, 14 nt, Human
gccccgcccaggcu

SEQ ID NO: 1718724 - RNA, 19 nt, Human
gccccugcacuccagccug

SEQ ID NO: 1718725 - RNA, 23 nt, Human
gccccuggcagccccuguucugg

SEQ ID NO: 1718726 - RNA, 13 nt, Human
gccccugcacaaa

SEQ ID NO: 1718727 - RNA, 18 nt, Human
gccccucccacagcgcug

SEQ ID NO: 1718728 - RNA, 17 nt, Human
gccccuucccccuccaa

SEQ ID NO: 1718729 - RNA, 21 nt, Human
gccccucagggucccuggugg

SEQ ID NO: 1718730 - RNA, 19 nt, Human
gccccucagggucccuggu

SEQ ID NO: 1718731 - RNA, 23 nt, Human
gccccucaacucuccuccagagu

SEQ ID NO: 1718732 - RNA, 22 nt, Human
gcccucugcccacucccugcaa

SEQ ID NO: 1718733 - RNA, 20 nt, Human
gcccgggcucugccucccau

SEQ ID NO: 1718734 - RNA, 19 nt, Human
gcccgggcucugccuccca

SEQ ID NO: 1718735 - RNA, 21 nt, Human
gcccgggcucugccucccauc

SEQ ID NO: 1718736 - RNA, 15 nt, Human
gcccucccugccccu

SEQ ID NO: 1718737 - RNA, 18 nt, Human
gcccgggcucugccuccc

SEQ ID NO: 1718738 - RNA, 15 nt, Human
gcccgggcucugccu

SEQ ID NO: 1718739 - RNA, 14 nt, Human
gcccgggcucugcc

SEQ ID NO: 1718740 - RNA, 13 nt, Human
gcccgggcucugc

SEQ ID NO: 1718741 - RNA, 12 nt, Human
gcccgggcucug

SEQ ID NO: 1718742 - RNA, 15 nt, Human
gcccggcuccaggcu

SEQ ID NO: 1718743 - RNA, 14 nt, Human
gcccggcuccaggc

SEQ ID NO: 1718744 - RNA, 13 nt, Human
gcccggcuccagg

SEQ ID NO: 1718745 - RNA, 20 nt, Human
gccccuucugacccaugcug

SEQ ID NO: 1718746 - RNA, 19 nt, Human
gccccuucugacccaugcu

SEQ ID NO: 1718747 - RNA, 18 nt, Human
gcccaggccuccuacagc

SEQ ID NO: 1718748 - RNA, 16 nt, Human
gcccaggaaaggcucc

SEQ ID NO: 1718749 - RNA, 15 nt, Human
gcccaggaaaggcuc

SEQ ID NO: 1718750 - RNA, 12 nt, Human
gcccaggaaagg

SEQ ID NO: 1718751 - RNA, 11 nt, Human
gcccaggcugg

SEQ ID NO: 1718752 - RNA, 17 nt, Human
gcccaggccugccuguu

SEQ ID NO: 1718753 - RNA, 15 nt, Human
gcccaggcuggcgug

SEQ ID NO: 1718754 - RNA, 14 nt, Human
gcccaggcuggcgu

SEQ ID NO: 1718755 - RNA, 16 nt, Human
gcccaggcuggcgugc

SEQ ID NO: 1718756 - RNA, 22 nt, Human
gcccagucuggaaugcaguggu

SEQ ID NO: 1718757 - RNA, 15 nt, Human
gcccaguugggugga

SEQ ID NO: 1718758 - RNA, 21 nt, Human
gccccauucugccugcccagg

SEQ ID NO: 1718759 - RNA, 20 nt, Human
gccccauucugccugcccag

SEQ ID NO: 1718760 - RNA, 18 nt, Human
gccccauucugccugccc

SEQ ID NO: 1718761 - RNA, 17 nt, Human
gccccauucugccugcc

SEQ ID NO: 1718762 - RNA, 23 nt, Human
gccccauccucuguacagagccc

SEQ ID NO: 1718763 - RNA, 21 nt, Human
gccccagugcccacaggauca

SEQ ID NO: 1718764 - RNA, 17 nt, Human
gccccagugcccacagg

SEQ ID NO: 1718765 - RNA, 16 nt, Human
gccccagugcccacag

SEQ ID NO: 1718766 - RNA, 22 nt, Human
gcccaucugggggccucuucug

SEQ ID NO: 1718767 - RNA, 16 nt, Human
gcccaaagaugcagcc

SEQ ID NO: 1718768 - RNA, 15 nt, Human
gcccaaagaugcagc

SEQ ID NO: 1718769 - RNA, 16 nt, Human
gccauuuguguuuaua

SEQ ID NO: 1718770 - RNA, 19 nt, Human
gcccaaagugguauagaaa

SEQ ID NO: 1718771 - RNA, 15 nt, Human
gcccaccccucaaca

SEQ ID NO: 1718772 - RNA, 18 nt, Human
gcccacaggaucagucug

SEQ ID NO: 1718773 - RNA, 13 nt, Human
gcccacaggauca

SEQ ID NO: 1718774 - RNA, 19 nt, Human
gcccacaggaucagucuga

SEQ ID NO: 1718775 - RNA, 14 nt, Human
gccaugggacaggg

SEQ ID NO: 1718776 - RNA, 19 nt, Human
gccaugggacagggaggac

SEQ ID NO: 1718777 - RNA, 17 nt, Human
gccauuucuuccacaag

SEQ ID NO: 1718778 - RNA, 22 nt, Human
gccauuucuuccacaagagccc

SEQ ID NO: 1718779 - RNA, 20 nt, Human
gccauuucuuccacaagagc

SEQ ID NO: 1718780 - RNA, 17 nt, Human
gccaucccagccccaau

SEQ ID NO: 1718781 - RNA, 16 nt, Human
gccaucccagccccaa

SEQ ID NO: 1718782 - RNA, 15 nt, Human
gccaucccagcccca

SEQ ID NO: 1718783 - RNA, 14 nt, Human
gccaucccagcccc

SEQ ID NO: 1718784 - RNA, 13 nt, Human
gccaucccagccc

SEQ ID NO: 1718785 - RNA, 20 nt, Human
gccauccagguucagcuugu

SEQ ID NO: 1718786 - RNA, 19 nt, Human
gccauccagguucagcuug

SEQ ID NO: 1718787 - RNA, 18 nt, Human
gccagguggccacuccag

SEQ ID NO: 1718788 - RNA, 22 nt, Human
gccaggggaaaaucagccugcu

SEQ ID NO: 1718789 - RNA, 21 nt, Human
gccaggggaaaaucagccugc

SEQ ID NO: 1718790 - RNA, 17 nt, Human
gccaggggaaaaucagc

SEQ ID NO: 1718791 - RNA, 23 nt, Human
gccaggggaaaaucagccugcuc

SEQ ID NO: 1718792 - RNA, 18 nt, Human
gccaggaagccagcaggc

SEQ ID NO: 1718793 - RNA, 17 nt, Human
gccaggaagccagcagg

SEQ ID NO: 1718794 - RNA, 11 nt, Human
gccaggaagcc

SEQ ID NO: 1718795 - RNA, 19 nt, Human
gccaggaagccagcaggcu

SEQ ID NO: 1718796 - RNA, 20 nt, Human
gccaggaagccagcaggcuc

SEQ ID NO: 1718797 - RNA, 22 nt, Human
gccacguucuuacuaguuuccc

SEQ ID NO: 1718798 - RNA, 16 nt, Human
gccacggccaggccag

SEQ ID NO: 1718799 - RNA, 17 nt, Human
gccacggccaggccaga

SEQ ID NO: 1718800 - RNA, 21 nt, Human
gccacuauuguuagucucuug

SEQ ID NO: 1718801 - RNA, 15 nt, Human
gccacggccaggcca

SEQ ID NO: 1718802 - RNA, 14 nt, Human
gccacggccaggcc

SEQ ID NO: 1718803 - RNA, 18 nt, Human
gccacugcaccgggccac

SEQ ID NO: 1718804 - RNA, 17 nt, Human
gccacugcaccgggcca

SEQ ID NO: 1718805 - RNA, 19 nt, Human
gccacugcaccgggccaca

SEQ ID NO: 1718806 - RNA, 19 nt, Human
gccacuccagaccccuggc

SEQ ID NO: 1718807 - RNA, 18 nt, Human
gccacuccagaccccugg

SEQ ID NO: 1718808 - RNA, 16 nt, Human
gccacuccagaccccu

SEQ ID NO: 1718809 - RNA, 18 nt, Human
gccagagggagugacaga

SEQ ID NO: 1718810 - RNA, 15 nt, Human
gccagagacacaagc

SEQ ID NO: 1718811 - RNA, 12 nt, Human
gccagagacaca

SEQ ID NO: 1718812 - RNA, 15 nt, Human
gccagcugcuugggc

SEQ ID NO: 1718813 - RNA, 16 nt, Human
gccagcugcuugggcu

SEQ ID NO: 1718814 - RNA, 14 nt, Human
gccagcugcuuggg

SEQ ID NO: 1718815 - RNA, 22 nt, Human
gccagccuugaccauucuccac

SEQ ID NO: 1718816 - RNA, 21 nt, Human
gccagccuugaccauucucca

SEQ ID NO: 1718817 - RNA, 20 nt, Human
gccagccuugaccauucucc

SEQ ID NO: 1718818 - RNA, 14 nt, Human
gccagccuugacca

SEQ ID NO: 1718819 - RNA, 12 nt, Human
gccagccuugac

SEQ ID NO: 1718820 - RNA, 20 nt, Human
gccagccgagauagccaagg

SEQ ID NO: 1718821 - RNA, 21 nt, Human
gccagccgagauagccaaggc

SEQ ID NO: 1718822 - RNA, 16 nt, Human
gccagauucuuuccug

SEQ ID NO: 1718823 - RNA, 20 nt, Human
gccagagggagugacagagg

SEQ ID NO: 1718824 - RNA, 19 nt, Human
gccagagggagugacagag

SEQ ID NO: 1718825 - RNA, 19 nt, Human
gccagauucuuuccugagg

SEQ ID NO: 1718826 - RNA, 17 nt, Human
gccagauucuuuccuga

SEQ ID NO: 1718827 - RNA, 22 nt, Human
gcauuuugcuaaaugugaauga

SEQ ID NO: 1718828 - RNA, 12 nt, Human
gcauuuuguaau

SEQ ID NO: 1718829 - RNA, 20 nt, Human
gccaaaggaagcacaugccu

SEQ ID NO: 1718830 - RNA, 16 nt, Human
gccaaaggaagcacau

SEQ ID NO: 1718831 - RNA, 14 nt, Human
gccaaaggaagcac

SEQ ID NO: 1718832 - RNA, 19 nt, Human
gccaaacucaccugccccu

SEQ ID NO: 1718833 - RNA, 21 nt, Human
gccaaacucaccugccccuca

SEQ ID NO: 1718834 - RNA, 17 nt, Human
gcauuuuacuguacaga

SEQ ID NO: 1718835 - RNA, 16 nt, Human
gcauuuuacuguacag

SEQ ID NO: 1718836 - RNA, 21 nt, Human
gcauuuggugguuucagaaau

SEQ ID NO: 1718837 - RNA, 23 nt, Human
gcauuugcugaauacagaggcaa

SEQ ID NO: 1718838 - RNA, 12 nt, Human
gcauuccccacu

SEQ ID NO: 1718839 - RNA, 12 nt, Human
gcauuccccagg

SEQ ID NO: 1718840 - RNA, 15 nt, Human
gcauucucacuccua

SEQ ID NO: 1718841 - RNA, 13 nt, Human
gcauucucacucc

SEQ ID NO: 1718842 - RNA, 18 nt, Human
gcauucucacuccuaccu

SEQ ID NO: 1718843 - RNA, 20 nt, Human
gcauuagauuucucauuugc

SEQ ID NO: 1718844 - RNA, 15 nt, Human
gcaugcugucccuua

SEQ ID NO: 1718845 - RNA, 17 nt, Human
gcauguuugugauugac

SEQ ID NO: 1718846 - RNA, 15 nt, Human
gcaugaauuugugaa

SEQ ID NO: 1718847 - RNA, 17 nt, Human
gcaucaggccaggcccu

SEQ ID NO: 1718848 - RNA, 16 nt, Human
gcaucaggccaggccc

SEQ ID NO: 1718849 - RNA, 15 nt, Human
gcaucaggccaggcc

SEQ ID NO: 1718850 - RNA, 13 nt, Human
gcaucaggccagg

SEQ ID NO: 1718851 - RNA, 20 nt, Human
gcaugacacgaauauugcug

SEQ ID NO: 1718852 - RNA, 17 nt, Human
gcaugaauuugugaagg

SEQ ID NO: 1718853 - RNA, 22 nt, Human
gcaugccuggauggggcugcac

SEQ ID NO: 1718854 - RNA, 17 nt, Human
gcaugccuggauggggc

SEQ ID NO: 1718855 - RNA, 18 nt, Human
gcagugggagcugccugu

SEQ ID NO: 1718856 - RNA, 17 nt, Human
gcagugggagcugccug

SEQ ID NO: 1718857 - RNA, 15 nt, Human
gcauauucaggaagc

SEQ ID NO: 1718858 - RNA, 23 nt, Human
gcauauuauuuuauguugcauag

SEQ ID NO: 1718859 - RNA, 18 nt, Human
gcauauuauuuuauguug

SEQ ID NO: 1718860 - RNA, 20 nt, Human
gcauauucaggaagcucagg

SEQ ID NO: 1718861 - RNA, 18 nt, Human
gcauauucaggaagcuca

SEQ ID NO: 1718862 - RNA, 17 nt, Human
gcauauucaggaagcuc

SEQ ID NO: 1718863 - RNA, 21 nt, Human
gcaucaagaugugacauguuu

SEQ ID NO: 1718864 - RNA, 19 nt, Human
gcauauuuauaaaaauaaa

SEQ ID NO: 1718865 - RNA, 17 nt, Human
gcagggagggccugggc

SEQ ID NO: 1718866 - RNA, 14 nt, Human
gcagggagggccug

SEQ ID NO: 1718867 - RNA, 20 nt, Human
gcaggauucuuccucccucc

SEQ ID NO: 1718868 - RNA, 12 nt, Human
gcagggcucagc

SEQ ID NO: 1718869 - RNA, 14 nt, Human
gcagggcucagcgg

SEQ ID NO: 1718870 - RNA, 16 nt, Human
gcagggagggcuucug

SEQ ID NO: 1718871 - RNA, 22 nt, Human
gcagggagggccugggccccag

SEQ ID NO: 1718872 - RNA, 18 nt, Human
gcagggagggccugggcc

SEQ ID NO: 1718873 - RNA, 16 nt, Human
gcagugggagcugccu

SEQ ID NO: 1718874 - RNA, 23 nt, Human
gcagugcuuccaaggauggacca

SEQ ID NO: 1718875 - RNA, 11 nt, Human
gcaggucccua

SEQ ID NO: 1718876 - RNA, 10 nt, Human
gcaggucccu

SEQ ID NO: 1718877 - RNA, 13 nt, Human
gcaggucccuaau

SEQ ID NO: 1718878 - RNA, 12 nt, Human
gcaggucccuaa

SEQ ID NO: 1718879 - RNA, 14 nt, Human
gcagaagacaguau

SEQ ID NO: 1718880 - RNA, 14 nt, Human
gcagaaggaagacu

SEQ ID NO: 1718881 - RNA, 13 nt, Human
gcagaaggaagac

SEQ ID NO: 1718882 - RNA, 12 nt, Human
gcagaaggaaga

SEQ ID NO: 1718883 - RNA, 23 nt, Human
gcacugggcuuggggaccagagc

SEQ ID NO: 1718884 - RNA, 22 nt, Human
gcacugggcuuggggaccagag

SEQ ID NO: 1718885 - RNA, 18 nt, Human
gcacccggccccugcugg

SEQ ID NO: 1718886 - RNA, 17 nt, Human
gcacuaaggugugcucu

SEQ ID NO: 1718887 - RNA, 18 nt, Human
gcacuaaggugugcucug

SEQ ID NO: 1718888 - RNA, 19 nt, Human
gcacuaaggugugcucuga

SEQ ID NO: 1718889 - RNA, 17 nt, Human
gcacugaggaccagcca

SEQ ID NO: 1718890 - RNA, 14 nt, Human
gcaaugaccuuuca

SEQ ID NO: 1718891 - RNA, 13 nt, Human
gcaaugaccuuuc

SEQ ID NO: 1718892 - RNA, 19 nt, Human
gcacagcuaacauggaagu

SEQ ID NO: 1718893 - RNA, 16 nt, Human
gcacagcuucauuucc

SEQ ID NO: 1718894 - RNA, 21 nt, Human
gcacagcuucauuuccugugu

SEQ ID NO: 1718895 - RNA, 19 nt, Human
gcaccacugcacuccagcc

SEQ ID NO: 1718896 - RNA, 15 nt, Human
gcaccuccugccucg

SEQ ID NO: 1718897 - RNA, 14 nt, Human
gcaccuccugccuc

SEQ ID NO: 1718898 - RNA, 17 nt, Human
gcacccggccccugcug

SEQ ID NO: 1718899 - RNA, 15 nt, Human
gcacccggccccugc

SEQ ID NO: 1718900 - RNA, 14 nt, Human
gcacccggccccug

SEQ ID NO: 1718901 - RNA, 17 nt, Human
gcagaguugaagacaga

SEQ ID NO: 1718902 - RNA, 16 nt, Human
gcagaguugaagacag

SEQ ID NO: 1718903 - RNA, 19 nt, Human
gcagaguugaagacagagc

SEQ ID NO: 1718904 - RNA, 20 nt, Human
gcagaguugaagacagagcu

SEQ ID NO: 1718905 - RNA, 12 nt, Human
gcagcaauaaag

SEQ ID NO: 1718906 - RNA, 15 nt, Human
gcagcacagcugaga

SEQ ID NO: 1718907 - RNA, 19 nt, Human
gcagagaccaucccugaag

SEQ ID NO: 1718908 - RNA, 17 nt, Human
gcagagaccaucccuga

SEQ ID NO: 1718909 - RNA, 15 nt, Human
gcagagaccaucccu

SEQ ID NO: 1718910 - RNA, 14 nt, Human
gcagagaccauccc

SEQ ID NO: 1718911 - RNA, 15 nt, Human
gcagaguugaagaca

SEQ ID NO: 1718912 - RNA, 21 nt, Human
gcagagaauucucuuauccaa

SEQ ID NO: 1718913 - RNA, 23 nt, Human
gcagagaaugaaagggcccagag

SEQ ID NO: 1718914 - RNA, 22 nt, Human
gcagagaaugaaagggcccaga

SEQ ID NO: 1718915 - RNA, 21 nt, Human
gcagagaaugaaagggcccag

SEQ ID NO: 1718916 - RNA, 20 nt, Human
gcagagaaugaaagggccca

SEQ ID NO: 1718917 - RNA, 19 nt, Human
gcagagaaugaaagggccc

SEQ ID NO: 1718918 - RNA, 18 nt, Human
gcagaaggaagacuucau

SEQ ID NO: 1718919 - RNA, 20 nt, Human
gcaggaggaucacuugaguc

SEQ ID NO: 1718920 - RNA, 21 nt, Human
gcaggaguuucguuuucaaaa

SEQ ID NO: 1718921 - RNA, 20 nt, Human
gcaggaguuucguuuucaaa

SEQ ID NO: 1718922 - RNA, 18 nt, Human
gcagccgugccuucagcu

SEQ ID NO: 1718923 - RNA, 22 nt, Human
gcagccucaaccuccugggcua

SEQ ID NO: 1718924 - RNA, 21 nt, Human
gcagccucaaccuccugggcu

SEQ ID NO: 1718925 - RNA, 14 nt, Human
gcagccuggacccu

SEQ ID NO: 1718926 - RNA, 20 nt, Human
gcagccucaaccuccugggc

SEQ ID NO: 1718927 - RNA, 19 nt, Human
gcagccucaaccuccuggg

SEQ ID NO: 1718928 - RNA, 14 nt, Human
gcagccgugccuuc

SEQ ID NO: 1718929 - RNA, 17 nt, Human
gcagccgugccuucagc

SEQ ID NO: 1718930 - RNA, 15 nt, Human
gcagccgugccuuca

SEQ ID NO: 1718931 - RNA, 22 nt, Human
gauuucuguuuagauaauacac

SEQ ID NO: 1718932 - RNA, 21 nt, Human
gauuucuguuuagauaauaca

SEQ ID NO: 1718933 - RNA, 16 nt, Human
gauugggaauccgccc

SEQ ID NO: 1718934 - RNA, 16 nt, Human
gauugcaacaggcugg

SEQ ID NO: 1718935 - RNA, 22 nt, Human
gauucuuuccugaggcugggcu

SEQ ID NO: 1718936 - RNA, 20 nt, Human
gauucuuuccugaggcuggg

SEQ ID NO: 1718937 - RNA, 18 nt, Human
gauucccaagcucugcuc

SEQ ID NO: 1718938 - RNA, 19 nt, Human
gauucuuuccugaggcugg

SEQ ID NO: 1718939 - RNA, 17 nt, Human
gauucccaagcucugcu

SEQ ID NO: 1718940 - RNA, 16 nt, Human
gauucccaagcucugc

SEQ ID NO: 1718941 - RNA, 18 nt, Human
gauugcuugagcucagga

SEQ ID NO: 1718942 - RNA, 18 nt, Human
gauugcaacaggcugggc

SEQ ID NO: 1718943 - RNA, 17 nt, Human
gauugcaacaggcuggg

SEQ ID NO: 1718944 - RNA, 20 nt, Human
gaugccugugaacugaacuc

SEQ ID NO: 1718945 - RNA, 17 nt, Human
gaugccugguggcagcu

SEQ ID NO: 1718946 - RNA, 16 nt, Human
gaugcuagaacucccu

SEQ ID NO: 1718947 - RNA, 18 nt, Human
gauguucuagcauggcug

SEQ ID NO: 1718948 - RNA, 21 nt, Human
gauguuuuaaggaugcuugua

SEQ ID NO: 1718949 - RNA, 14 nt, Human
gauguucugggaca

SEQ ID NO: 1718950 - RNA, 18 nt, Human
gauguucuggauaccauu

SEQ ID NO: 1718951 - RNA, 18 nt, Human
gauucagacagcugccug

SEQ ID NO: 1718952 - RNA, 17 nt, Human
gauucagacagcugccu

SEQ ID NO: 1718953 - RNA, 14 nt, Human
gauucagacagcug

SEQ ID NO: 1718954 - RNA, 13 nt, Human
gauucagacagcu

SEQ ID NO: 1718955 - RNA, 21 nt, Human
gauuacaagcgugagccacug

SEQ ID NO: 1718956 - RNA, 13 nt, Human
gauuacaagcgug

SEQ ID NO: 1718957 - RNA, 15 nt, Human
gauucccaagcucug

SEQ ID NO: 1718958 - RNA, 17 nt, Human
gcaauccugcaagaaca

SEQ ID NO: 1718959 - RNA, 18 nt, Human
gcaaggcugucaauuaca

SEQ ID NO: 1718960 - RNA, 14 nt, Human
gcaaggcugucaau

SEQ ID NO: 1718961 - RNA, 21 nt, Human
gcaagggaauuucuucaacuc

SEQ ID NO: 1718962 - RNA, 22 nt, Human
gcaacuuuguauaaaagggacu

SEQ ID NO: 1718963 - RNA, 20 nt, Human
gcaagcaccuccugccucga

SEQ ID NO: 1718964 - RNA, 18 nt, Human
gcaagcaccuccugccuc

SEQ ID NO: 1718965 - RNA, 16 nt, Human
gcaagcaccuccugcc

SEQ ID NO: 1718966 - RNA, 15 nt, Human
gcaagcaccuccugc

SEQ ID NO: 1718967 - RNA, 18 nt, Human
gcaagcaagaaacacugg

SEQ ID NO: 1718968 - RNA, 14 nt, Human
gcaaauggccucau

SEQ ID NO: 1718969 - RNA, 12 nt, Human
gcaaaugugaau

SEQ ID NO: 1718970 - RNA, 18 nt, Human
gcaacugcauuggcuuug

SEQ ID NO: 1718971 - RNA, 20 nt, Human
gcaaacuuuauuuuguguuu

SEQ ID NO: 1718972 - RNA, 23 nt, Human
gcaaaguucccuacuuccuguga

SEQ ID NO: 1718973 - RNA, 21 nt, Human
gcaaaccaucauugaaaucuu

SEQ ID NO: 1718974 - RNA, 20 nt, Human
gcaaaccaucauugaaaucu

SEQ ID NO: 1718975 - RNA, 19 nt, Human
gcaaaccaucauugaaauc

SEQ ID NO: 1718976 - RNA, 17 nt, Human
gcaaaccaucauugaaa

SEQ ID NO: 1718977 - RNA, 16 nt, Human
gcaaaccaucauugaa

SEQ ID NO: 1718978 - RNA, 18 nt, Human
gcaaacuuuauuuugugu

SEQ ID NO: 1718979 - RNA, 16 nt, Human
gaugaaauguaaauac

SEQ ID NO: 1718980 - RNA, 21 nt, Human
gaugaaaugaggucagagccu

SEQ ID NO: 1718981 - RNA, 15 nt, Human
gaugaaaugagguca

SEQ ID NO: 1718982 - RNA, 19 nt, Human
gaucuucuuuauaauucua

SEQ ID NO: 1718983 - RNA, 22 nt, Human
gaucuucuguggguuucuaaag

SEQ ID NO: 1718984 - RNA, 23 nt, Human
gaugcaccagcccuuagcaggga

SEQ ID NO: 1718985 - RNA, 15 nt, Human
gaugcaccagcccuu

SEQ ID NO: 1718986 - RNA, 14 nt, Human
gaugagaggaaauc

SEQ ID NO: 1718987 - RNA, 20 nt, Human
gaugaccuugaaugaugcca

SEQ ID NO: 1718988 - RNA, 18 nt, Human
gaugaccuugaaugaugc

SEQ ID NO: 1718989 - RNA, 16 nt, Human
gaugccugguggcagc

SEQ ID NO: 1718990 - RNA, 15 nt, Human
gaugccugguggcag

SEQ ID NO: 1718991 - RNA, 14 nt, Human
gaugcagugcuucc

SEQ ID NO: 1718992 - RNA, 14 nt, Human
gaugccugguggca

SEQ ID NO: 1718993 - RNA, 16 nt, Human
gaugagaggaaaucac

SEQ ID NO: 1718994 - RNA, 20 nt, Human
gaucuaggaagacuuuggaa

SEQ ID NO: 1718995 - RNA, 18 nt, Human
gaucuaggaagacuuugg

SEQ ID NO: 1718996 - RNA, 14 nt, Human
gaucuaggaagacu

SEQ ID NO: 1718997 - RNA, 13 nt, Human
gaucuaggaagac

SEQ ID NO: 1718998 - RNA, 12 nt, Human
gauccugagcca

SEQ ID NO: 1718999 - RNA, 16 nt, Human
gauccucccaggcuuc

SEQ ID NO: 1719000 - RNA, 16 nt, Human
gaucauccacugugcc

SEQ ID NO: 1719001 - RNA, 13 nt, Human
gaucauccacugu

SEQ ID NO: 1719002 - RNA, 18 nt, Human
gauccucccaccucagcc

SEQ ID NO: 1719003 - RNA, 17 nt, Human
gauccucccaccucagc

SEQ ID NO: 1719004 - RNA, 16 nt, Human
gauccucccaccucag

SEQ ID NO: 1719005 - RNA, 14 nt, Human
gauccuccaggugc

SEQ ID NO: 1719006 - RNA, 18 nt, Human
gauccuaggcauuugcug

SEQ ID NO: 1719007 - RNA, 23 nt, Human
gauccuaaugaaugcauaaaaug

SEQ ID NO: 1719008 - RNA, 17 nt, Human
gauaggucagugcaaau

SEQ ID NO: 1719009 - RNA, 17 nt, Human
gauacaaaagcauguga

SEQ ID NO: 1719010 - RNA, 16 nt, Human
gauacaaaagcaugug

SEQ ID NO: 1719011 - RNA, 18 nt, Human
gauaauucuagcuuugag

SEQ ID NO: 1719012 - RNA, 20 nt, Human
gauagugucccacggugccu

SEQ ID NO: 1719013 - RNA, 18 nt, Human
gauauaaaagacugacca

SEQ ID NO: 1719014 - RNA, 18 nt, Human
gauauaugcucugcaugu

SEQ ID NO: 1719015 - RNA, 23 nt, Human
gaucacggcucacugcagccuca

SEQ ID NO: 1719016 - RNA, 16 nt, Human
gaucacauguggacuu

SEQ ID NO: 1719017 - RNA, 12 nt, Human
gauaauacacca

SEQ ID NO: 1719018 - RNA, 23 nt, Human
gauaauacaccacuacauucugu

SEQ ID NO: 1719019 - RNA, 24 nt, Human
gauaauacaccacuacauucuguu

SEQ ID NO: 1719020 - RNA, 13 nt, Human
gauaaacaguagu

SEQ ID NO: 1719021 - RNA, 13 nt, Human
gaguucugguucc

SEQ ID NO: 1719022 - RNA, 22 nt, Human
gaaugguuuucaaaauaaaaau

SEQ ID NO: 1719023 - RNA, 14 nt, Human
gaaugucaguguga

SEQ ID NO: 1719024 - RNA, 23 nt, Human
gaaugaaccacaucuugcucugc

SEQ ID NO: 1719025 - RNA, 22 nt, Human
gaaugaaccacaucuugcucug

SEQ ID NO: 1719026 - RNA, 11 nt, Human
gaaugcagugg

SEQ ID NO: 1719027 - RNA, 14 nt, Human
gaaugcauaaaaug

SEQ ID NO: 1719028 - RNA, 13 nt, Human
gaaugcuuuagga

SEQ ID NO: 1719029 - RNA, 21 nt, Human
gaaugucagugugacugaucu

SEQ ID NO: 1719030 - RNA, 20 nt, Human
gaaugucagugugacugauc

SEQ ID NO: 1719031 - RNA, 17 nt, Human
gaauucucagaaucuca

SEQ ID NO: 1719032 - RNA, 17 nt, Human
gaauucucuaguuugau

SEQ ID NO: 1719033 - RNA, 19 nt, Human
gaauucucuaguuugauua

SEQ ID NO: 1719034 - RNA, 14 nt, Human
gaauugaagcagga

SEQ ID NO: 1719035 - RNA, 14 nt, Human
gaauugaaaaacca

SEQ ID NO: 1719036 - RNA, 15 nt, Human
gaauuucccaaagca

SEQ ID NO: 1719037 - RNA, 22 nt, Human
gaauuguaaggaaugauuaauu

SEQ ID NO: 1719038 - RNA, 23 nt, Human
gaauuguguuuauaauuuuaaau

SEQ ID NO: 1719039 - RNA, 15 nt, Human
gaauuguguuuauaa

SEQ ID NO: 1719040 - RNA, 22 nt, Human
gaauagcugggacuacaggugu

SEQ ID NO: 1719041 - RNA, 23 nt, Human
gaauagcugggacuacaggugug

SEQ ID NO: 1719042 - RNA, 22 nt, Human
gaauagcuuuaaugauaugcuu

SEQ ID NO: 1719043 - RNA, 15 nt, Human
gaauaccuguccccc

SEQ ID NO: 1719044 - RNA, 13 nt, Human
gaauaccuguccc

SEQ ID NO: 1719045 - RNA, 21 nt, Human
gaauacagaggcaacugcauu

SEQ ID NO: 1719046 - RNA, 17 nt, Human
gaauaauacaguaucuc

SEQ ID NO: 1719047 - RNA, 19 nt, Human
gaauaacauguaauuaagu

SEQ ID NO: 1719048 - RNA, 18 nt, Human
gaauaacauguaauuaag

SEQ ID NO: 1719049 - RNA, 20 nt, Human
gaaguuugagaucagccugg

SEQ ID NO: 1719050 - RNA, 14 nt, Human
gaaguauccuucag

SEQ ID NO: 1719051 - RNA, 23 nt, Human
gaaguaguggagccccugcucug

SEQ ID NO: 1719052 - RNA, 16 nt, Human
gaaguauccuucagcc

SEQ ID NO: 1719053 - RNA, 20 nt, Human
gaaguuucugccgcagcccu

SEQ ID NO: 1719054 - RNA, 15 nt, Human
gaagucuuagaugua

SEQ ID NO: 1719055 - RNA, 21 nt, Human
gaaguuucugccgcagcccug

SEQ ID NO: 1719056 - RNA, 18 nt, Human
gaagucuuagauguauau

SEQ ID NO: 1719057 - RNA, 19 nt, Human
gaagggggcugggacaugg

SEQ ID NO: 1719058 - RNA, 16 nt, Human
gaagggggcugggaca

SEQ ID NO: 1719059 - RNA, 22 nt, Human
gaaguaauaugcacacauuuuu

SEQ ID NO: 1719060 - RNA, 18 nt, Human
gaaguacuauaauuuacc

SEQ ID NO: 1719061 - RNA, 15 nt, Human
gaaguacuggagaaa

SEQ ID NO: 1719062 - RNA, 20 nt, Human
gaagauaauauuaaggaaga

SEQ ID NO: 1719063 - RNA, 18 nt, Human
gaagauguagaggagaaa

SEQ ID NO: 1719064 - RNA, 18 nt, Human
gaagcauuuacuuugugu

SEQ ID NO: 1719065 - RNA, 17 nt, Human
gaagcauuuacuuugug

SEQ ID NO: 1719066 - RNA, 23 nt, Human
gaagcccuucuaccuuccugcaa

SEQ ID NO: 1719067 - RNA, 19 nt, Human
gaagcccaggaaaggcucc

SEQ ID NO: 1719068 - RNA, 16 nt, Human
gaagcccaggaaaggc

SEQ ID NO: 1719069 - RNA, 15 nt, Human
gaagcccaggaaagg

SEQ ID NO: 1719070 - RNA, 13 nt, Human
gaagcccaggaaa

SEQ ID NO: 1719071 - RNA, 22 nt, Human
gaagccagcaggcucucaggcc

SEQ ID NO: 1719072 - RNA, 21 nt, Human
gaagccagcaggcucucaggc

SEQ ID NO: 1719073 - RNA, 20 nt, Human
gaagccagcaggcucucagg

SEQ ID NO: 1719074 - RNA, 19 nt, Human
gaagagaaugcacaaacag

SEQ ID NO: 1719075 - RNA, 20 nt, Human
gaagacuuuucuuucagcca

SEQ ID NO: 1719076 - RNA, 17 nt, Human
gaagacuuuggaaagag

SEQ ID NO: 1719077 - RNA, 14 nt, Human
gaagacuuuggaaa

SEQ ID NO: 1719078 - RNA, 13 nt, Human
gaagacuuuggaa

SEQ ID NO: 1719079 - RNA, 11 nt, Human
gaagacuuugg

SEQ ID NO: 1719080 - RNA, 23 nt, Human
gaacuuugaccucugcagcaaua

SEQ ID NO: 1719081 - RNA, 21 nt, Human
gaacucaucuagguaaauuac

SEQ ID NO: 1719082 - RNA, 20 nt, Human
gaacucaucuagguaaauua

SEQ ID NO: 1719083 - RNA, 22 nt, Human
gaacucaucuagguaaauuaca

SEQ ID NO: 1719084 - RNA, 12 nt, Human
gaacguuuuucc

SEQ ID NO: 1719085 - RNA, 15 nt, Human
gaacguuuuuccugu

SEQ ID NO: 1719086 - RNA, 22 nt, Human
gaaccuuuugagugccuuacac

SEQ ID NO: 1719087 - RNA, 14 nt, Human
gaacuacugaggau

SEQ ID NO: 1719088 - RNA, 21 nt, Human
gaaccuuuugagugccuuaca

SEQ ID NO: 1719089 - RNA, 19 nt, Human
gaaccuuuugagugccuua

SEQ ID NO: 1719090 - RNA, 18 nt, Human
gaaccuuuugagugccuu

SEQ ID NO: 1719091 - RNA, 14 nt, Human
gaacaucccuccug

SEQ ID NO: 1719092 - RNA, 13 nt, Human
gaacauugcaaua

SEQ ID NO: 1719093 - RNA, 15 nt, Human
gaacauugcaauaga

SEQ ID NO: 1719094 - RNA, 17 nt, Human
gaacauugcaauagaaa

SEQ ID NO: 1719095 - RNA, 15 nt, Human
gaacauugguucuuu

SEQ ID NO: 1719096 - RNA, 16 nt, Human
gaaauuguauuacaaa

SEQ ID NO: 1719097 - RNA, 23 nt, Human
gaaaauaaaucaaugcuauaacu

SEQ ID NO: 1719098 - RNA, 18 nt, Human
gaaauuguauuacaaauc

SEQ ID NO: 1719099 - RNA, 17 nt, Human
gaaauuuauaaacuuuu

SEQ ID NO: 1719100 - RNA, 16 nt, Human
gaaauuuauaaacuuu

SEQ ID NO: 1719101 - RNA, 14 nt, Human
gaacacucugagac

SEQ ID NO: 1719102 - RNA, 13 nt, Human
gaacacucugaga

SEQ ID NO: 1719103 - RNA, 16 nt, Human
gaacagugauuaccag

SEQ ID NO: 1719104 - RNA, 20 nt, Human
gaacagugauuaccagggac

SEQ ID NO: 1719105 - RNA, 15 nt, Human
gaacacucugagacu

SEQ ID NO: 1719106 - RNA, 23 nt, Human
gacuaacuugucuuuggacccug

SEQ ID NO: 1719107 - RNA, 16 nt, Human
gacuaacuugucuuug

SEQ ID NO: 1719108 - RNA, 15 nt, Human
gacguguuaugacuc

SEQ ID NO: 1719109 - RNA, 14 nt, Human
gacguguuaugacu

SEQ ID NO: 1719110 - RNA, 11 nt, Human
gacguguuaug

SEQ ID NO: 1719111 - RNA, 13 nt, Human
gacggagucccac

SEQ ID NO: 1719112 - RNA, 22 nt, Human
gacgcugugcugcccugcccac

SEQ ID NO: 1719113 - RNA, 20 nt, Human
gaccuuucaauaggaaaaac

SEQ ID NO: 1719114 - RNA, 19 nt, Human
gaccuuucaauaggaaaaa

SEQ ID NO: 1719115 - RNA, 11 nt, Human
gaccuuucaau

SEQ ID NO: 1719116 - RNA, 22 nt, Human
gaccuuuaagagaaaugagcug

SEQ ID NO: 1719117 - RNA, 16 nt, Human
gacgugauuuugcugu

SEQ ID NO: 1719118 - RNA, 17 nt, Human
gacgugauuuugcugua

SEQ ID NO: 1719119 - RNA, 14 nt, Human
gaccuugaacuggg

SEQ ID NO: 1719120 - RNA, 21 nt, Human
gaccuucuccuucaccuuugu

SEQ ID NO: 1719121 - RNA, 20 nt, Human
gaccuucuccuucaccuuug

SEQ ID NO: 1719122 - RNA, 16 nt, Human
gaccuucuccuucacc

SEQ ID NO: 1719123 - RNA, 15 nt, Human
gaccuucuccuucac

SEQ ID NO: 1719124 - RNA, 14 nt, Human
gaccuucuccuuca

SEQ ID NO: 1719125 - RNA, 15 nt, Human
gacccuugugguccc

SEQ ID NO: 1719126 - RNA, 23 nt, Human
gacccuugccgucuaccugaggg

SEQ ID NO: 1719127 - RNA, 20 nt, Human
gacccuugccgucuaccuga

SEQ ID NO: 1719128 - RNA, 19 nt, Human
gacccuugccgucuaccug

SEQ ID NO: 1719129 - RNA, 19 nt, Human
gaccuguggccaaguucuu

SEQ ID NO: 1719130 - RNA, 14 nt, Human
gaccuuaaaugcaa

SEQ ID NO: 1719131 - RNA, 23 nt, Human
gacuggccaagguuuggggaaga

SEQ ID NO: 1719132 - RNA, 17 nt, Human
gacuggauguaccacca

SEQ ID NO: 1719133 - RNA, 15 nt, Human
gacuuacuguacaug

SEQ ID NO: 1719134 - RNA, 16 nt, Human
gacuuacuguacauga

SEQ ID NO: 1719135 - RNA, 12 nt, Human
gacuuacuguac

SEQ ID NO: 1719136 - RNA, 18 nt, Human
gacuuacuguacaugaaa

SEQ ID NO: 1719137 - RNA, 23 nt, Human
gacuuacuguacaugaaaacaca

SEQ ID NO: 1719138 - RNA, 20 nt, Human
gacuucaucccucuggggcu

SEQ ID NO: 1719139 - RNA, 12 nt, Human
gacuucaucccu

SEQ ID NO: 1719140 - RNA, 14 nt, Human
gacuucagcucugu

SEQ ID NO: 1719141 - RNA, 15 nt, Human
gacuuagcugggaga

SEQ ID NO: 1719142 - RNA, 16 nt, Human
gacuuauuuauauaaa

SEQ ID NO: 1719143 - RNA, 20 nt, Human
gacugccagucccccugccc

SEQ ID NO: 1719144 - RNA, 16 nt, Human
gacugaggggagggga

SEQ ID NO: 1719145 - RNA, 18 nt, Human
gacugaguacguugugca

SEQ ID NO: 1719146 - RNA, 13 nt, Human
gacugagaaauuu

SEQ ID NO: 1719147 - RNA, 21 nt, Human
gacuccugcaggcagccaggc

SEQ ID NO: 1719148 - RNA, 20 nt, Human
gacuccugcaggcagccagg

SEQ ID NO: 1719149 - RNA, 19 nt, Human
gacuccugcaggcagccag

SEQ ID NO: 1719150 - RNA, 18 nt, Human
gacuccugcaggcagcca

SEQ ID NO: 1719151 - RNA, 15 nt, Human
gacuacaggcaccca

SEQ ID NO: 1719152 - RNA, 13 nt, Human
gacuacaggcacc

SEQ ID NO: 1719153 - RNA, 18 nt, Human
gacuacaggcacccacca

SEQ ID NO: 1719154 - RNA, 15 nt, Human
gacucuacagaggcc

SEQ ID NO: 1719155 - RNA, 15 nt, Human
gacucuaaagucugu

SEQ ID NO: 1719156 - RNA, 21 nt, Human
gacucuacagaggccaugggc

SEQ ID NO: 1719157 - RNA, 11 nt, Human
gacugagaaau

SEQ ID NO: 1719158 - RNA, 21 nt, Human
gacugaccaauauuguacagu

SEQ ID NO: 1719159 - RNA, 22 nt, Human
gacugaccaauauuguacaguu

SEQ ID NO: 1719160 - RNA, 20 nt, Human
gacccaaaaggcagaagcaa

SEQ ID NO: 1719161 - RNA, 19 nt, Human
gacccacuggacucaccuc

SEQ ID NO: 1719162 - RNA, 18 nt, Human
gacccaaaaggcagaagc

SEQ ID NO: 1719163 - RNA, 19 nt, Human
gacccaaaaggcagaagca

SEQ ID NO: 1719164 - RNA, 20 nt, Human
gacccaugcugcccugugag

SEQ ID NO: 1719165 - RNA, 19 nt, Human
gacccaugcugcccuguga

SEQ ID NO: 1719166 - RNA, 18 nt, Human
gacccaugcugcccugug

SEQ ID NO: 1719167 - RNA, 13 nt, Human
gacccaugcugcc

SEQ ID NO: 1719168 - RNA, 22 nt, Human
gacccugcccugugggccccca

SEQ ID NO: 1719169 - RNA, 20 nt, Human
gacccugcccugugggcccc

SEQ ID NO: 1719170 - RNA, 18 nt, Human
gacccugaggcccagagg

SEQ ID NO: 1719171 - RNA, 16 nt, Human
gacccugaggcccaga

SEQ ID NO: 1719172 - RNA, 12 nt, Human
gacccugaggcc

SEQ ID NO: 1719173 - RNA, 11 nt, Human
gacccugaggc

SEQ ID NO: 1719174 - RNA, 16 nt, Human
gaccacugcagaagac

SEQ ID NO: 1719175 - RNA, 18 nt, Human
gaccacugcagaagacag

SEQ ID NO: 1719176 - RNA, 22 nt, Human
gaccagacaccuugacagggca

SEQ ID NO: 1719177 - RNA, 21 nt, Human
gaccagcaccaucucuccucc

SEQ ID NO: 1719178 - RNA, 20 nt, Human
gaccagcaccaucucuccuc

SEQ ID NO: 1719179 - RNA, 24 nt, Human
gaccagacaccuugacagggcaca

SEQ ID NO: 1719180 - RNA, 23 nt, Human
gaccagacaccuugacagggcac

SEQ ID NO: 1719181 - RNA, 21 nt, Human
gaccagagcugccaccugccu

SEQ ID NO: 1719182 - RNA, 18 nt, Human
gaccacaaaacuuuucua

SEQ ID NO: 1719183 - RNA, 17 nt, Human
gaccaauauuguacagu

SEQ ID NO: 1719184 - RNA, 18 nt, Human
gaccaauauuguacaguu

SEQ ID NO: 1719185 - RNA, 19 nt, Human
gaccaauauuguacaguuu

SEQ ID NO: 1719186 - RNA, 21 nt, Human
gaccaauauuguacaguuuuu

SEQ ID NO: 1719187 - RNA, 22 nt, Human
gaccacacuccagcugggauca

SEQ ID NO: 1719188 - RNA, 16 nt, Human
gaccacacuccagcug

SEQ ID NO: 1719189 - RNA, 14 nt, Human
gaccacacuccagc

SEQ ID NO: 1719190 - RNA, 18 nt, Human
gacaggcaagcaccuccu

SEQ ID NO: 1719191 - RNA, 17 nt, Human
gacaggcaagcaccucc

SEQ ID NO: 1719192 - RNA, 13 nt, Human
gacaggcaagcac

SEQ ID NO: 1719193 - RNA, 19 nt, Human
gacaggcaaugcuggcugu

SEQ ID NO: 1719194 - RNA, 18 nt, Human
gacaggcaaugcuggcug

SEQ ID NO: 1719195 - RNA, 21 nt, Human
gacaggcaagcaccuccugcc

SEQ ID NO: 1719196 - RNA, 20 nt, Human
gacaggcaagcaccuccugc

SEQ ID NO: 1719197 - RNA, 21 nt, Human
gacaggcauguucucugagga

SEQ ID NO: 1719198 - RNA, 20 nt, Human
gacaggcauguucucugagg

SEQ ID NO: 1719199 - RNA, 23 nt, Human
gacaggcaaugcuggcuguuggc

SEQ ID NO: 1719200 - RNA, 24 nt, Human
gacaggcaaugcuggcuguuggcu

SEQ ID NO: 1719201 - RNA, 16 nt, Human
gacaucaacugcauca

SEQ ID NO: 1719202 - RNA, 23 nt, Human
gacaucaacugcaucaagaugug

SEQ ID NO: 1719203 - RNA, 22 nt, Human
gacaggcauguucucugaggac

SEQ ID NO: 1719204 - RNA, 14 nt, Human
gacagggcauggcc

SEQ ID NO: 1719205 - RNA, 22 nt, Human
gacagggcauggccagguggcc

SEQ ID NO: 1719206 - RNA, 20 nt, Human
gacagggcauggccaggugg

SEQ ID NO: 1719207 - RNA, 15 nt, Human
gacagggcauggcca

SEQ ID NO: 1719208 - RNA, 16 nt, Human
gacagagugagacucu

SEQ ID NO: 1719209 - RNA, 21 nt, Human
gacagagucucacuguugccc

SEQ ID NO: 1719210 - RNA, 19 nt, Human
gacagagugagacucuguc

SEQ ID NO: 1719211 - RNA, 13 nt, Human
gacagagggggug

SEQ ID NO: 1719212 - RNA, 23 nt, Human
gacagaggcagccccauucugcc

SEQ ID NO: 1719213 - RNA, 20 nt, Human
gacagagcuacacaggggaa

SEQ ID NO: 1719214 - RNA, 12 nt, Human
gacagaggcagc

SEQ ID NO: 1719215 - RNA, 16 nt, Human
gacagacagcccucca

SEQ ID NO: 1719216 - RNA, 18 nt, Human
gaauuucccaaagcagug

SEQ ID NO: 1719217 - RNA, 16 nt, Human
gaauuucccaaagcag

SEQ ID NO: 1719218 - RNA, 22 nt, Human
gaauuucccaaagcagugcaug

SEQ ID NO: 1719219 - RNA, 22 nt, Human
gacacgaauauugcugauggug

SEQ ID NO: 1719220 - RNA, 22 nt, Human
gacagacacaggcccggcucca

SEQ ID NO: 1719221 - RNA, 20 nt, Human
gacagacacaggcccggcuc

SEQ ID NO: 1719222 - RNA, 17 nt, Human
gacagacacaggcccgg

SEQ ID NO: 1719223 - RNA, 16 nt, Human
gacacuagaagauuuu

SEQ ID NO: 1719224 - RNA, 20 nt, Human
cuugcuugauuguauggugg

SEQ ID NO: 1719225 - RNA, 20 nt, Human
cuuggaagcuccgcuuucua

SEQ ID NO: 1719226 - RNA, 22 nt, Human
cuugcucugcugacagacacag

SEQ ID NO: 1719227 - RNA, 19 nt, Human
cuugcucuugaugccuggc

SEQ ID NO: 1719228 - RNA, 18 nt, Human
cuugcucuugaugccugg

SEQ ID NO: 1719229 - RNA, 17 nt, Human
cuugcucuugaugccug

SEQ ID NO: 1719230 - RNA, 18 nt, Human
cuugcccuggugccucac

SEQ ID NO: 1719231 - RNA, 13 nt, Human
cuugccacugccu

SEQ ID NO: 1719232 - RNA, 14 nt, Human
cuugcaugaggcua

SEQ ID NO: 1719233 - RNA, 13 nt, Human
cuugcaugaggcu

SEQ ID NO: 1719234 - RNA, 17 nt, Human
cuugcaugaggcuagug

SEQ ID NO: 1719235 - RNA, 15 nt, Human
cuugagccugggagg

SEQ ID NO: 1719236 - RNA, 12 nt, Human
cuugagccuggg

SEQ ID NO: 1719237 - RNA, 17 nt, Human
cuugaggguugggcugg

SEQ ID NO: 1719238 - RNA, 15 nt, Human
cuugaggguugggcu

SEQ ID NO: 1719239 - RNA, 17 nt, Human
cuucuggcacuuggaga

SEQ ID NO: 1719240 - RNA, 21 nt, Human
cuugcagacucuacagaggcc

SEQ ID NO: 1719241 - RNA, 18 nt, Human
cuugcaauggcagccuug

SEQ ID NO: 1719242 - RNA, 17 nt, Human
cuugcaauggcagccuu

SEQ ID NO: 1719243 - RNA, 16 nt, Human
cuugcaauggcagccu

SEQ ID NO: 1719244 - RNA, 15 nt, Human
cuugcaauggcagcc

SEQ ID NO: 1719245 - RNA, 19 nt, Human
cuugaguugauucagcucu

SEQ ID NO: 1719246 - RNA, 18 nt, Human
cuugaguugauucagcuc

SEQ ID NO: 1719247 - RNA, 20 nt, Human
cuugaguugauucagcucug

SEQ ID NO: 1719248 - RNA, 21 nt, Human
cuugaguugauucagcucugc

SEQ ID NO: 1719249 - RNA, 19 nt, Human
cuuuaccuuuuuuauacau

SEQ ID NO: 1719250 - RNA, 20 nt, Human
cuuuaccuuuuuuauacaua

SEQ ID NO: 1719251 - RNA, 17 nt, Human
cuuuaccuuuuuuauac

SEQ ID NO: 1719252 - RNA, 21 nt, Human
cuuuaaaaagcuccaaaugca

SEQ ID NO: 1719253 - RNA, 22 nt, Human
cuuuaaaaaauuaaucugggcc

SEQ ID NO: 1719254 - RNA, 19 nt, Human
cuuguggucccaccccaca

SEQ ID NO: 1719255 - RNA, 16 nt, Human
cuuguggucccacccc

SEQ ID NO: 1719256 - RNA, 16 nt, Human
cuuguuaagauaguua

SEQ ID NO: 1719257 - RNA, 15 nt, Human
cuuguggucccaccc

SEQ ID NO: 1719258 - RNA, 15 nt, Human
cuuggggccuaugca

SEQ ID NO: 1719259 - RNA, 20 nt, Human
cuugguuuguaaauuaacuu

SEQ ID NO: 1719260 - RNA, 14 nt, Human
cuugguuuguaaau

SEQ ID NO: 1719261 - RNA, 15 nt, Human
cuugguuuguaaauu

SEQ ID NO: 1719262 - RNA, 22 nt, Human
cuuggagccaauggagacuguc

SEQ ID NO: 1719263 - RNA, 20 nt, Human
cuugggccacugugaagaga

SEQ ID NO: 1719264 - RNA, 19 nt, Human
gaaaauaacaauaaaagac

SEQ ID NO: 1719265 - RNA, 22 nt, Human
gaaaagucaaggguaggguggg

SEQ ID NO: 1719266 - RNA, 14 nt, Human
gaaaacguggcugc

SEQ ID NO: 1719267 - RNA, 19 nt, Human
gaaaacaugcuacacacug

SEQ ID NO: 1719268 - RNA, 22 nt, Human
gaaaacacuguucucugcccuc

SEQ ID NO: 1719269 - RNA, 19 nt, Human
gaaaacacuguucucugcc

SEQ ID NO: 1719270 - RNA, 21 nt, Human
gaaaacacuguucucugcccu

SEQ ID NO: 1719271 - RNA, 20 nt, Human
gaaaacacuguucucugccc

SEQ ID NO: 1719272 - RNA, 16 nt, Human
gaaaacaugcuacaca

SEQ ID NO: 1719273 - RNA, 18 nt, Human
gaaaacaugcuacacacu

SEQ ID NO: 1719274 - RNA, 16 nt, Human
cuuuuuuagaguugau

SEQ ID NO: 1719275 - RNA, 15 nt, Human
cuuuucuguuugcua

SEQ ID NO: 1719276 - RNA, 21 nt, Human
cuuuguuuguugucagcugaa

SEQ ID NO: 1719277 - RNA, 17 nt, Human
cuuuguuuuacugucuu

SEQ ID NO: 1719278 - RNA, 22 nt, Human
cuuuuguucuugguuuguaaau

SEQ ID NO: 1719279 - RNA, 23 nt, Human
cuuuggaaagacuuuuccaaccc

SEQ ID NO: 1719280 - RNA, 12 nt, Human
cuuuggaaagac

SEQ ID NO: 1719281 - RNA, 14 nt, Human
cuuugcuugaaaga

SEQ ID NO: 1719282 - RNA, 19 nt, Human
cuuugacaaagguaaauca

SEQ ID NO: 1719283 - RNA, 12 nt, Human
cuuugugauuuu

SEQ ID NO: 1719284 - RNA, 13 nt, Human
cuuuguggcuucc

SEQ ID NO: 1719285 - RNA, 21 nt, Human
cuuuguucuggcucuuccagg

SEQ ID NO: 1719286 - RNA, 16 nt, Human
cuuuguucuggcucuu

SEQ ID NO: 1719287 - RNA, 23 nt, Human
cuuugggaggccaaggugggagg

SEQ ID NO: 1719288 - RNA, 23 nt, Human
cuuugugaggaagccgcuggggc

SEQ ID NO: 1719289 - RNA, 17 nt, Human
cuuugggccuggcuccc

SEQ ID NO: 1719290 - RNA, 19 nt, Human
cuuuccucaaaacuucaga

SEQ ID NO: 1719291 - RNA, 16 nt, Human
cuuuccucuuuggucu

SEQ ID NO: 1719292 - RNA, 13 nt, Human
cuuucugaaauaa

SEQ ID NO: 1719293 - RNA, 17 nt, Human
cuuugacaaagguaaau

SEQ ID NO: 1719294 - RNA, 19 nt, Human
cuuucuuuuuuuuuuuuga

SEQ ID NO: 1719295 - RNA, 16 nt, Human
cuuucuuccucugcug

SEQ ID NO: 1719296 - RNA, 15 nt, Human
cuuucugcagaaaca

SEQ ID NO: 1719297 - RNA, 13 nt, Human
cuucgcuccugug

SEQ ID NO: 1719298 - RNA, 15 nt, Human
cuucgcuccuguguc

SEQ ID NO: 1719299 - RNA, 14 nt, Human
cuucgcuccugugu

SEQ ID NO: 1719300 - RNA, 16 nt, Human
cuucgcuccugugucu

SEQ ID NO: 1719301 - RNA, 17 nt, Human
cuucggccuccauccug

SEQ ID NO: 1719302 - RNA, 18 nt, Human
cuucggccuccauccuga

SEQ ID NO: 1719303 - RNA, 19 nt, Human
cuucggccuccauccugag

SEQ ID NO: 1719304 - RNA, 21 nt, Human
cuucgggaggucgaggcagga

SEQ ID NO: 1719305 - RNA, 20 nt, Human
cuucgggaggucgaggcagg

SEQ ID NO: 1719306 - RNA, 17 nt, Human
cuucugccauauucugu

SEQ ID NO: 1719307 - RNA, 15 nt, Human
cuucugccauauucu

SEQ ID NO: 1719308 - RNA, 20 nt, Human
cuucugccauuucugagauc

SEQ ID NO: 1719309 - RNA, 21 nt, Human
cuucugccauauucuguuggc

SEQ ID NO: 1719310 - RNA, 17 nt, Human
cuucugcuucagccucc

SEQ ID NO: 1719311 - RNA, 16 nt, Human
cuucugcuucagccuc

SEQ ID NO: 1719312 - RNA, 18 nt, Human
cuucugcuucagccuccc

SEQ ID NO: 1719313 - RNA, 22 nt, Human
cuucuccuucaccuuugucccc

SEQ ID NO: 1719314 - RNA, 17 nt, Human
cuucuccuuucacaacc

SEQ ID NO: 1719315 - RNA, 14 nt, Human
cuucuccuuucaca

SEQ ID NO: 1719316 - RNA, 22 nt, Human
cuucuccuuucacaaccuucug

SEQ ID NO: 1719317 - RNA, 20 nt, Human
cuucuccuuucacaaccuuc

SEQ ID NO: 1719318 - RNA, 15 nt, Human
cuucuccacccugcu

SEQ ID NO: 1719319 - RNA, 14 nt, Human
cuucuccacccugc

SEQ ID NO: 1719320 - RNA, 16 nt, Human
cuucuccacccugcuc

SEQ ID NO: 1719321 - RNA, 17 nt, Human
cuucuccaggcuguauc

SEQ ID NO: 1719322 - RNA, 11 nt, Human
cuucagcugac

SEQ ID NO: 1719323 - RNA, 14 nt, Human
cuucaggcucuucu

SEQ ID NO: 1719324 - RNA, 18 nt, Human
cuucaggcucuucuccuu

SEQ ID NO: 1719325 - RNA, 17 nt, Human
cuucaggcucuucuccu

SEQ ID NO: 1719326 - RNA, 16 nt, Human
cuucaggcucuucucc

SEQ ID NO: 1719327 - RNA, 15 nt, Human
cuucaggcucuucuc

SEQ ID NO: 1719328 - RNA, 12 nt, Human
cuucagugccuu

SEQ ID NO: 1719329 - RNA, 11 nt, Human
cuucagugccu

SEQ ID NO: 1719330 - RNA, 14 nt, Human
cuucagugccuuau

SEQ ID NO: 1719331 - RNA, 13 nt, Human
cuucagugccuua

SEQ ID NO: 1719332 - RNA, 18 nt, Human
cuucauuuccugugucuu

SEQ ID NO: 1719333 - RNA, 22 nt, Human
cuuccacaagagcccaggccuc

SEQ ID NO: 1719334 - RNA, 23 nt, Human
cuuccacaagagcccaggccucc

SEQ ID NO: 1719335 - RNA, 14 nt, Human
cuucauuuggagau

SEQ ID NO: 1719336 - RNA, 13 nt, Human
cuucauuuggaga

SEQ ID NO: 1719337 - RNA, 24 nt, Human
cuuccaggggugggacacccugug

SEQ ID NO: 1719338 - RNA, 22 nt, Human
cuuccaggggugggacacccug

SEQ ID NO: 1719339 - RNA, 14 nt, Human
cuuccagugaggcu

SEQ ID NO: 1719340 - RNA, 15 nt, Human
cuuccagugaggcuc

SEQ ID NO: 1719341 - RNA, 18 nt, Human
cuucccgcucagcccucc

SEQ ID NO: 1719342 - RNA, 17 nt, Human
cuucccgcucagcccuc

SEQ ID NO: 1719343 - RNA, 16 nt, Human
cuucccgcucagcccu

SEQ ID NO: 1719344 - RNA, 15 nt, Human
cuucccgcucagccc

SEQ ID NO: 1719345 - RNA, 14 nt, Human
cuuaucaaaggaca

SEQ ID NO: 1719346 - RNA, 16 nt, Human
cuuaucaaaggacacc

SEQ ID NO: 1719347 - RNA, 15 nt, Human
cuuauuuaaugaaag

SEQ ID NO: 1719348 - RNA, 23 nt, Human
cuuaugauagcaaauggccucau

SEQ ID NO: 1719349 - RNA, 13 nt, Human
cuuauaauuuaaa

SEQ ID NO: 1719350 - RNA, 20 nt, Human
cuuaggugauccacucgccu

SEQ ID NO: 1719351 - RNA, 17 nt, Human
cuuagguuggcaaaaag

SEQ ID NO: 1719352 - RNA, 14 nt, Human
cuuauaauuuaaaa

SEQ ID NO: 1719353 - RNA, 19 nt, Human
cuuauaggaauugacccac

SEQ ID NO: 1719354 - RNA, 15 nt, Human
cuuauacauuugaua

SEQ ID NO: 1719355 - RNA, 19 nt, Human
cuuacuaguuucccuugca

SEQ ID NO: 1719356 - RNA, 15 nt, Human
cuuacgugaguccug

SEQ ID NO: 1719357 - RNA, 16 nt, Human
cuuacuguacaugaaa

SEQ ID NO: 1719358 - RNA, 14 nt, Human
cuuacuuaguguua

SEQ ID NO: 1719359 - RNA, 18 nt, Human
cuuagacagucccugcca

SEQ ID NO: 1719360 - RNA, 17 nt, Human
cuuagacagucccugcc

SEQ ID NO: 1719361 - RNA, 19 nt, Human
cuuagacagucccugccaa

SEQ ID NO: 1719362 - RNA, 16 nt, Human
cuuagacagucccugc

SEQ ID NO: 1719363 - RNA, 15 nt, Human
cuuagacagucccug

SEQ ID NO: 1719364 - RNA, 14 nt, Human
cuuagacagucccu

SEQ ID NO: 1719365 - RNA, 15 nt, Human
cuuagaagucacaca

SEQ ID NO: 1719366 - RNA, 17 nt, Human
cuuagaaauugcauuuc

SEQ ID NO: 1719367 - RNA, 15 nt, Human
cuuagaaccuuucuu

SEQ ID NO: 1719368 - RNA, 18 nt, Human
cuguuuguuucugaaagg

SEQ ID NO: 1719369 - RNA, 12 nt, Human
cuguuuagauaa

SEQ ID NO: 1719370 - RNA, 17 nt, Human
cugguugaugccuguga

SEQ ID NO: 1719371 - RNA, 23 nt, Human
cuguuuguuucugaaagggacgc

SEQ ID NO: 1719372 - RNA, 21 nt, Human
cuguuuguuucugaaagggac

SEQ ID NO: 1719373 - RNA, 21 nt, Human
cuguuuuauuuuaauucaguu

SEQ ID NO: 1719374 - RNA, 14 nt, Human
cuguuuucucuuga

SEQ ID NO: 1719375 - RNA, 17 nt, Human
cuguuuucucuugagag

SEQ ID NO: 1719376 - RNA, 18 nt, Human
cuuaaugccacuaaauug

SEQ ID NO: 1719377 - RNA, 14 nt, Human
cuuaaucuaaaugg

SEQ ID NO: 1719378 - RNA, 16 nt, Human
cuuaaucuaaauggaa

SEQ ID NO: 1719379 - RNA, 16 nt, Human
cuuaaguuuauacucu

SEQ ID NO: 1719380 - RNA, 19 nt, Human
cuuaaguuaguuccacuga

SEQ ID NO: 1719381 - RNA, 21 nt, Human
cuuaaguuaguuccacugaga

SEQ ID NO: 1719382 - RNA, 12 nt, Human
cuuaacuucaca

SEQ ID NO: 1719383 - RNA, 14 nt, Human
cuuaacuucacaua

SEQ ID NO: 1719384 - RNA, 15 nt, Human
cuuaacuucacauau

SEQ ID NO: 1719385 - RNA, 16 nt, Human
cuuaacuucacauauu

SEQ ID NO: 1719386 - RNA, 17 nt, Human
cuuaacuucacauauug

SEQ ID NO: 1719387 - RNA, 22 nt, Human
cuuaacuucacauauugauuuc

SEQ ID NO: 1719388 - RNA, 22 nt, Human
cuuaaaugcaaccauuugaaac

SEQ ID NO: 1719389 - RNA, 21 nt, Human
cugacauuguuggccaaagcc

SEQ ID NO: 1719390 - RNA, 11 nt, Human
cugacccacug

SEQ ID NO: 1719391 - RNA, 19 nt, Human
cugacaggcaaugcuggcu

SEQ ID NO: 1719392 - RNA, 18 nt, Human
cugacaggcaaugcuggc

SEQ ID NO: 1719393 - RNA, 17 nt, Human
cugacaggcaaugcugg

SEQ ID NO: 1719394 - RNA, 16 nt, Human
cugacaggcaaugcug

SEQ ID NO: 1719395 - RNA, 20 nt, Human
cugacaggcaaugcuggcug

SEQ ID NO: 1719396 - RNA, 21 nt, Human
cugacaggcaaugcuggcugu

SEQ ID NO: 1719397 - RNA, 17 nt, Human
cugacauuguuggccaa

SEQ ID NO: 1719398 - RNA, 21 nt, Human
cugacagacacaggcccggcu

SEQ ID NO: 1719399 - RNA, 19 nt, Human
cugacagacagcccuccau

SEQ ID NO: 1719400 - RNA, 17 nt, Human
cugacagacagcccucc

SEQ ID NO: 1719401 - RNA, 11 nt, Human
cugacaggcaa

SEQ ID NO: 1719402 - RNA, 19 nt, Human
cugacagacacaggcccgg

SEQ ID NO: 1719403 - RNA, 21 nt, Human
cugaauauugccauuaugcuu

SEQ ID NO: 1719404 - RNA, 16 nt, Human
cugaagucacacagug

SEQ ID NO: 1719405 - RNA, 15 nt, Human
cugaagucacacagu

SEQ ID NO: 1719406 - RNA, 14 nt, Human
cugaagucacacag

SEQ ID NO: 1719407 - RNA, 24 nt, Human
cugaagucuuuguacagacaacaa

SEQ ID NO: 1719408 - RNA, 22 nt, Human
cugaagucacugcacagugcau

SEQ ID NO: 1719409 - RNA, 16 nt, Human
cugaagucacugcaca

SEQ ID NO: 1719410 - RNA, 17 nt, Human
cugaagucacugcacag

SEQ ID NO: 1719411 - RNA, 16 nt, Human
cugaauacagaggcaa

SEQ ID NO: 1719412 - RNA, 21 nt, Human
cugaacuuggcgcugccccug

SEQ ID NO: 1719413 - RNA, 16 nt, Human
cugaacuuggcgcugc

SEQ ID NO: 1719414 - RNA, 15 nt, Human
cugaacuuggcgcug

SEQ ID NO: 1719415 - RNA, 21 nt, Human
cugaagacucauucuucugua

SEQ ID NO: 1719416 - RNA, 21 nt, Human
cucuuuggucuacacugugcu

SEQ ID NO: 1719417 - RNA, 19 nt, Human
cucuuuggucuacacugug

SEQ ID NO: 1719418 - RNA, 18 nt, Human
cucuuugggccuggcucc

SEQ ID NO: 1719419 - RNA, 21 nt, Human
cugaaccuggguaacuaggga

SEQ ID NO: 1719420 - RNA, 23 nt, Human
cucuucaguuaagccuuuggaaa

SEQ ID NO: 1719421 - RNA, 20 nt, Human
cucuucaguuaagccuuugg

SEQ ID NO: 1719422 - RNA, 19 nt, Human
cucuucaguuaagccuuug

SEQ ID NO: 1719423 - RNA, 24 nt, Human
cucuuaaaacccaagugccuuagc

SEQ ID NO: 1719424 - RNA, 13 nt, Human
cucuuaaaaccca

SEQ ID NO: 1719425 - RNA, 19 nt, Human
cucuggcagcucagagagg

SEQ ID NO: 1719426 - RNA, 20 nt, Human
cucuggcagcucagagaggg

SEQ ID NO: 1719427 - RNA, 19 nt, Human
cucuguucugcacacagca

SEQ ID NO: 1719428 - RNA, 21 nt, Human
cucuguucugcacacagcacg

SEQ ID NO: 1719429 - RNA, 20 nt, Human
cucuguucugcacacagcac

SEQ ID NO: 1719430 - RNA, 18 nt, Human
cucuggcagcucagagag

SEQ ID NO: 1719431 - RNA, 17 nt, Human
cucuggcagcucagaga

SEQ ID NO: 1719432 - RNA, 15 nt, Human
cucuggagcccacug

SEQ ID NO: 1719433 - RNA, 12 nt, Human
cucuucuccagg

SEQ ID NO: 1719434 - RNA, 19 nt, Human
cucuucuccacuggaugga

SEQ ID NO: 1719435 - RNA, 14 nt, Human
cucuucuccacugg

SEQ ID NO: 1719436 - RNA, 17 nt, Human
cucuucuccacuggaug

SEQ ID NO: 1719437 - RNA, 15 nt, Human
cucuucuccacugga

SEQ ID NO: 1719438 - RNA, 21 nt, Human
cucuuccaggcugggagagcc

SEQ ID NO: 1719439 - RNA, 22 nt, Human
cucuuccaggcugggagagccu

SEQ ID NO: 1719440 - RNA, 23 nt, Human
cucuuccaggcugggagagccuu

SEQ ID NO: 1719441 - RNA, 16 nt, Human
cucuucuccuuucaca

SEQ ID NO: 1719442 - RNA, 15 nt, Human
cucuucuccuuucac

SEQ ID NO: 1719443 - RNA, 13 nt, Human
cucuucuccuuuc

SEQ ID NO: 1719444 - RNA, 18 nt, Human
cucuuuggacacucacac

SEQ ID NO: 1719445 - RNA, 15 nt, Human
cucuuuggacacuca

SEQ ID NO: 1719446 - RNA, 13 nt, Human
cucuuucccuccc

SEQ ID NO: 1719447 - RNA, 17 nt, Human
cucuuuccaucuacccu

SEQ ID NO: 1719448 - RNA, 15 nt, Human
cucuugaccucaggu

SEQ ID NO: 1719449 - RNA, 13 nt, Human
cucuugaccucag

SEQ ID NO: 1719450 - RNA, 16 nt, Human
cucuugaccucaggug

SEQ ID NO: 1719451 - RNA, 18 nt, Human
cucuucuggguuccuucc

SEQ ID NO: 1719452 - RNA, 18 nt, Human
cucuugaacuccugaccu

SEQ ID NO: 1719453 - RNA, 19 nt, Human
cucuugguccugcugcagu

SEQ ID NO: 1719454 - RNA, 18 nt, Human
cucuugguccugcugcag

SEQ ID NO: 1719455 - RNA, 23 nt, Human
cucucaggccagcugcuugggcu

SEQ ID NO: 1719456 - RNA, 16 nt, Human
cucuccacugccuucg

SEQ ID NO: 1719457 - RNA, 21 nt, Human
cucuccauucccguggaacgu

SEQ ID NO: 1719458 - RNA, 13 nt, Human
cucuccagccccu

SEQ ID NO: 1719459 - RNA, 12 nt, Human
cucuccagcccc

SEQ ID NO: 1719460 - RNA, 18 nt, Human
cucucccaucacuucccu

SEQ ID NO: 1719461 - RNA, 14 nt, Human
cucucccaucacuu

SEQ ID NO: 1719462 - RNA, 20 nt, Human
cucucccaucacuucccuac

SEQ ID NO: 1719463 - RNA, 13 nt, Human
cucucccaucacu

SEQ ID NO: 1719464 - RNA, 13 nt, Human
cucuccuguaccu

SEQ ID NO: 1719465 - RNA, 14 nt, Human
cucuccuguaccuc

SEQ ID NO: 1719466 - RNA, 15 nt, Human
cucuccuguaccucu

SEQ ID NO: 1719467 - RNA, 13 nt, Human
cucuccccagcaa

SEQ ID NO: 1719468 - RNA, 22 nt, Human
cucuccuguaccucuugagccu

SEQ ID NO: 1719469 - RNA, 17 nt, Human
cucuccuguaccucuug

SEQ ID NO: 1719470 - RNA, 18 nt, Human
cucuccuguaccucuuga

SEQ ID NO: 1719471 - RNA, 13 nt, Human
cucucucaggcca

SEQ ID NO: 1719472 - RNA, 12 nt, Human
cucucucaggcc

SEQ ID NO: 1719473 - RNA, 16 nt, Human
cucucucacuccuuga

SEQ ID NO: 1719474 - RNA, 15 nt, Human
cucucucacuccuug

SEQ ID NO: 1719475 - RNA, 22 nt, Human
cucucugcaggucccuaauaaa

SEQ ID NO: 1719476 - RNA, 19 nt, Human
cucucugcaggucccuaau

SEQ ID NO: 1719477 - RNA, 17 nt, Human
cucucugcaggucccua

SEQ ID NO: 1719478 - RNA, 16 nt, Human
cucucugcaggucccu

SEQ ID NO: 1719479 - RNA, 14 nt, Human
cucucugcaggucc

SEQ ID NO: 1719480 - RNA, 13 nt, Human
cucucugcagguc

SEQ ID NO: 1719481 - RNA, 12 nt, Human
cucucugcaggu

SEQ ID NO: 1719482 - RNA, 10 nt, Human
cucugcacaa

SEQ ID NO: 1719483 - RNA, 23 nt, Human
cucugcauacucauuaggauggc

SEQ ID NO: 1719484 - RNA, 23 nt, Human
cucugcaggucccuaauaaagcu

SEQ ID NO: 1719485 - RNA, 22 nt, Human
cucugcaagaauugaagcagga

SEQ ID NO: 1719486 - RNA, 17 nt, Human
cucugaugaagaggagu

SEQ ID NO: 1719487 - RNA, 20 nt, Human
cucugagacucgcgacaaug

SEQ ID NO: 1719488 - RNA, 21 nt, Human
cucucugcccuaaugcgcagg

SEQ ID NO: 1719489 - RNA, 13 nt, Human
cucucugcccuaa

SEQ ID NO: 1719490 - RNA, 12 nt, Human
cucucugcccua

SEQ ID NO: 1719491 - RNA, 16 nt, Human
cucugagcaaaugugg

SEQ ID NO: 1719492 - RNA, 15 nt, Human
cucugagccuuggga

SEQ ID NO: 1719493 - RNA, 23 nt, Human
cucugcccuccaagaccuucucc

SEQ ID NO: 1719494 - RNA, 16 nt, Human
cucugcccuccaagac

SEQ ID NO: 1719495 - RNA, 15 nt, Human
cucugcccuccaaga

SEQ ID NO: 1719496 - RNA, 14 nt, Human
cucugcccuccaag

SEQ ID NO: 1719497 - RNA, 12 nt, Human
cucugcccuugg

SEQ ID NO: 1719498 - RNA, 12 nt, Human
cucugcccugcg

SEQ ID NO: 1719499 - RNA, 14 nt, Human
cucugccuccucuu

SEQ ID NO: 1719500 - RNA, 11 nt, Human
cucugcccugc

SEQ ID NO: 1719501 - RNA, 23 nt, Human
cucugcccuaaugcgcaggcugg

SEQ ID NO: 1719502 - RNA, 16 nt, Human
cucugccucugacaca

SEQ ID NO: 1719503 - RNA, 14 nt, Human
cucugccucugaca

SEQ ID NO: 1719504 - RNA, 16 nt, Human
cucugccuccucuuca

SEQ ID NO: 1719505 - RNA, 15 nt, Human
cucugccuccucuuc

SEQ ID NO: 1719506 - RNA, 14 nt, Human
cucuggaauuugaa

SEQ ID NO: 1719507 - RNA, 15 nt, Human
cucugcuuuggaaau

SEQ ID NO: 1719508 - RNA, 14 nt, Human
cucuggacaggcau

SEQ ID NO: 1719509 - RNA, 12 nt, Human
cucuggagccca

SEQ ID NO: 1719510 - RNA, 14 nt, Human
cucauucuucugua

SEQ ID NO: 1719511 - RNA, 13 nt, Human
cucauucuucugu

SEQ ID NO: 1719512 - RNA, 18 nt, Human
cucauuccaccuucccau

SEQ ID NO: 1719513 - RNA, 21 nt, Human
cucauuccaccuucccaugcc

SEQ ID NO: 1719514 - RNA, 15 nt, Human
cucauugaccugagg

SEQ ID NO: 1719515 - RNA, 13 nt, Human
cucauugaccuga

SEQ ID NO: 1719516 - RNA, 23 nt, Human
cucauucuucuguacgucugaca

SEQ ID NO: 1719517 - RNA, 16 nt, Human
cucauugaccugaggc

SEQ ID NO: 1719518 - RNA, 17 nt, Human
cucauuaggauggcuag

SEQ ID NO: 1719519 - RNA, 18 nt, Human
cucauuaggauggcuagu

SEQ ID NO: 1719520 - RNA, 21 nt, Human
cucauuagcauuuugcuaaau

SEQ ID NO: 1719521 - RNA, 17 nt, Human
cucaucuccccaucauu

SEQ ID NO: 1719522 - RNA, 21 nt, Human
cucaucuagguaaauuacagu

SEQ ID NO: 1719523 - RNA, 15 nt, Human
cucauacccaccccc

SEQ ID NO: 1719524 - RNA, 19 nt, Human
cucauaguaugguggcugg

SEQ ID NO: 1719525 - RNA, 18 nt, Human
cucauaguaugguggcug

SEQ ID NO: 1719526 - RNA, 20 nt, Human
cucauaguaugguggcuggg

SEQ ID NO: 1719527 - RNA, 14 nt, Human
cucaggugagaagc

SEQ ID NO: 1719528 - RNA, 19 nt, Human
cucaggugucccugcacuu

SEQ ID NO: 1719529 - RNA, 18 nt, Human
cucaggugucccugcacu

SEQ ID NO: 1719530 - RNA, 17 nt, Human
cucaggugucccugcac

SEQ ID NO: 1719531 - RNA, 16 nt, Human
cucaggugucccugca

SEQ ID NO: 1719532 - RNA, 15 nt, Human
cucaggugucccugc

SEQ ID NO: 1719533 - RNA, 23 nt, Human
cucagguggggucacucuggcag

SEQ ID NO: 1719534 - RNA, 22 nt, Human
cucagguggggucacucuggca

SEQ ID NO: 1719535 - RNA, 14 nt, Human
cucagggucccugg

SEQ ID NO: 1719536 - RNA, 18 nt, Human
cucaggucccugcagggc

SEQ ID NO: 1719537 - RNA, 17 nt, Human
cucaggucccugcaggg

SEQ ID NO: 1719538 - RNA, 15 nt, Human
cucaggucuguuuuc

SEQ ID NO: 1719539 - RNA, 12 nt, Human
cucagggucccu

SEQ ID NO: 1719540 - RNA, 23 nt, Human
cuaaaagguaugcaaucaaaucu

SEQ ID NO: 1719541 - RNA, 23 nt, Human
cuccauccugaggcuccacuugg

SEQ ID NO: 1719542 - RNA, 17 nt, Human
cuccaucuaaacugccc

SEQ ID NO: 1719543 - RNA, 20 nt, Human
cuccaucgcugucaucucag

SEQ ID NO: 1719544 - RNA, 13 nt, Human
cuccaucuccacu

SEQ ID NO: 1719545 - RNA, 18 nt, Human
cuccaucuaaacugcccc

SEQ ID NO: 1719546 - RNA, 21 nt, Human
cuccauccugaggcuccacuu

SEQ ID NO: 1719547 - RNA, 11 nt, Human
cuccaggcucc

SEQ ID NO: 1719548 - RNA, 19 nt, Human
cuccagcuguucagcuggu

SEQ ID NO: 1719549 - RNA, 18 nt, Human
cuccagcuguucagcugg

SEQ ID NO: 1719550 - RNA, 13 nt, Human
cuccagcuguuca

SEQ ID NO: 1719551 - RNA, 19 nt, Human
cuccagcuggguuggaaaa

SEQ ID NO: 1719552 - RNA, 14 nt, Human
cucccaggcgcccc

SEQ ID NO: 1719553 - RNA, 22 nt, Human
cucccaggcauuccccaggagg

SEQ ID NO: 1719554 - RNA, 21 nt, Human
cucccaggcauuccccaggag

SEQ ID NO: 1719555 - RNA, 20 nt, Human
cucccaggcauuccccagga

SEQ ID NO: 1719556 - RNA, 19 nt, Human
cucccaggcauuccccagg

SEQ ID NO: 1719557 - RNA, 17 nt, Human
cucccaggcauucccca

SEQ ID NO: 1719558 - RNA, 22 nt, Human
cucccaaggggcccaaauucuu

SEQ ID NO: 1719559 - RNA, 21 nt, Human
cucccaaggggcccaaauucu

SEQ ID NO: 1719560 - RNA, 14 nt, Human
cuccaugugggcua

SEQ ID NO: 1719561 - RNA, 24 nt, Human
cuccauucccguggaacguuuuuc

SEQ ID NO: 1719562 - RNA, 17 nt, Human
cuccaccugccagggac

SEQ ID NO: 1719563 - RNA, 21 nt, Human
cuccaccugccagggacagag

SEQ ID NO: 1719564 - RNA, 18 nt, Human
cuccaccugccagggaca

SEQ ID NO: 1719565 - RNA, 12 nt, Human
cuccacccugcu

SEQ ID NO: 1719566 - RNA, 11 nt, Human
cuccacccugc

SEQ ID NO: 1719567 - RNA, 20 nt, Human
cuccacauauuucagugagg

SEQ ID NO: 1719568 - RNA, 20 nt, Human
cuccagcucaccagccccag

SEQ ID NO: 1719569 - RNA, 19 nt, Human
cuccagcucaccagcccca

SEQ ID NO: 1719570 - RNA, 11 nt, Human
cuccacugccu

SEQ ID NO: 1719571 - RNA, 20 nt, Human
cuccagaccccuggcuuuuc

SEQ ID NO: 1719572 - RNA, 19 nt, Human
cuccagaccccuggcuuuu

SEQ ID NO: 1719573 - RNA, 18 nt, Human
cuccagaccccuggcuuu

SEQ ID NO: 1719574 - RNA, 17 nt, Human
cuccagaccccuggcuu

SEQ ID NO: 1719575 - RNA, 15 nt, Human
cuccagaccccuggc

SEQ ID NO: 1719576 - RNA, 17 nt, Human
cucgagguuucucaaag

SEQ ID NO: 1719577 - RNA, 16 nt, Human
cucgaguuacagacaa

SEQ ID NO: 1719578 - RNA, 20 nt, Human
cucgaguuacagacaaagcg

SEQ ID NO: 1719579 - RNA, 15 nt, Human
cucgcgacaaugcaa

SEQ ID NO: 1719580 - RNA, 19 nt, Human
cucgcuauugucaccaggg

SEQ ID NO: 1719581 - RNA, 13 nt, Human
cucgcgacaaugc

SEQ ID NO: 1719582 - RNA, 19 nt, Human
cucggacuuagcugggaga

SEQ ID NO: 1719583 - RNA, 18 nt, Human
cucggacuuagcugggag

SEQ ID NO: 1719584 - RNA, 21 nt, Human
cucgcuauugucaccagggcu

SEQ ID NO: 1719585 - RNA, 22 nt, Human
cucgcuauugucaccagggcug

SEQ ID NO: 1719586 - RNA, 22 nt, Human
cucuaaagucuguugauuaaag

SEQ ID NO: 1719587 - RNA, 19 nt, Human
cucuaacaguggacaaagu

SEQ ID NO: 1719588 - RNA, 15 nt, Human
cucuaacaguggaca

SEQ ID NO: 1719589 - RNA, 22 nt, Human
cucggccucccaaagugcuggg

SEQ ID NO: 1719590 - RNA, 23 nt, Human
cucggccucccaaagugcuggga

SEQ ID NO: 1719591 - RNA, 20 nt, Human
cuccuucuguccuacucugu

SEQ ID NO: 1719592 - RNA, 15 nt, Human
cuccuucuguccuac

SEQ ID NO: 1719593 - RNA, 14 nt, Human
cuccuucuguccua

SEQ ID NO: 1719594 - RNA, 21 nt, Human
cuccuugaaaacacuguucuc

SEQ ID NO: 1719595 - RNA, 11 nt, Human
cuccuucuucc

SEQ ID NO: 1719596 - RNA, 11 nt, Human
cuccugugugu

SEQ ID NO: 1719597 - RNA, 23 nt, Human
cuccugugucuugcaauggcagc

SEQ ID NO: 1719598 - RNA, 15 nt, Human
cuccugugucuugca

SEQ ID NO: 1719599 - RNA, 11 nt, Human
cuccugccacc

SEQ ID NO: 1719600 - RNA, 21 nt, Human
cuccugcaggcagccaggcca

SEQ ID NO: 1719601 - RNA, 15 nt, Human
cuccugcaggcagcc

SEQ ID NO: 1719602 - RNA, 22 nt, Human
cuccugcaggcagccaggccac

SEQ ID NO: 1719603 - RNA, 16 nt, Human
cuccugcaggcagcca

SEQ ID NO: 1719604 - RNA, 21 nt, Human
cuccuucaccuuuguccccac

SEQ ID NO: 1719605 - RNA, 19 nt, Human
cuccuucaccuuugucccc

SEQ ID NO: 1719606 - RNA, 16 nt, Human
cuccuucaccuuuguc

SEQ ID NO: 1719607 - RNA, 14 nt, Human
cuccuucaccuuug

SEQ ID NO: 1719608 - RNA, 14 nt, Human
cuccugugugugcg

SEQ ID NO: 1719609 - RNA, 22 nt, Human
cuccuaucagaaguuucucagc

SEQ ID NO: 1719610 - RNA, 12 nt, Human
cuccucagaucu

SEQ ID NO: 1719611 - RNA, 14 nt, Human
cuccucagaucuuc

SEQ ID NO: 1719612 - RNA, 19 nt, Human
cuccucuugccacugccuc

SEQ ID NO: 1719613 - RNA, 14 nt, Human
cuccugcaggcagc

SEQ ID NO: 1719614 - RNA, 13 nt, Human
cuccugcaggcag

SEQ ID NO: 1719615 - RNA, 22 nt, Human
cuccugaguagcugggauuaca

SEQ ID NO: 1719616 - RNA, 17 nt, Human
cuccugaguagcuggga

SEQ ID NO: 1719617 - RNA, 21 nt, Human
cuccugaguagcuggauuaca

SEQ ID NO: 1719618 - RNA, 14 nt, Human
cuccugaccuuagg

SEQ ID NO: 1719619 - RNA, 14 nt, Human
cuccugaccucagg

SEQ ID NO: 1719620 - RNA, 13 nt, Human
cucccuuucaaca

SEQ ID NO: 1719621 - RNA, 20 nt, Human
cucccuuggauuguccccga

SEQ ID NO: 1719622 - RNA, 17 nt, Human
cucccuuggauuguccc

SEQ ID NO: 1719623 - RNA, 17 nt, Human
cucccuuucuucccuac

SEQ ID NO: 1719624 - RNA, 16 nt, Human
cucccuucucuucaca

SEQ ID NO: 1719625 - RNA, 13 nt, Human
cucccuuccucuu

SEQ ID NO: 1719626 - RNA, 14 nt, Human
cucccuuccucuuu

SEQ ID NO: 1719627 - RNA, 23 nt, Human
cucccuucccaccucucucacuc

SEQ ID NO: 1719628 - RNA, 10 nt, Human
cucccuuccu

SEQ ID NO: 1719629 - RNA, 20 nt, Human
cucccuucaaccauucccca

SEQ ID NO: 1719630 - RNA, 19 nt, Human
cucccuucaaccauucccc

SEQ ID NO: 1719631 - RNA, 18 nt, Human
cucccuucaaccauuccc

SEQ ID NO: 1719632 - RNA, 12 nt, Human
cucccuucaacc

SEQ ID NO: 1719633 - RNA, 18 nt, Human
cucccaucucacacauga

SEQ ID NO: 1719634 - RNA, 15 nt, Human
cucccaucucacaca

SEQ ID NO: 1719635 - RNA, 21 nt, Human
cucccaucucacacaugagca

SEQ ID NO: 1719636 - RNA, 14 nt, Human
cucccaucucacac

SEQ ID NO: 1719637 - RNA, 14 nt, Human
cucccaucacccgc

SEQ ID NO: 1719638 - RNA, 23 nt, Human
cuggaauaauccuaaacauauga

SEQ ID NO: 1719639 - RNA, 21 nt, Human
cuggaagugcuaauuuugaaa

SEQ ID NO: 1719640 - RNA, 18 nt, Human
cuggaagcacagcuucau

SEQ ID NO: 1719641 - RNA, 15 nt, Human
cuggaagcacagcuu

SEQ ID NO: 1719642 - RNA, 15 nt, Human
cuggaaugcaguggu

SEQ ID NO: 1719643 - RNA, 14 nt, Human
cuggaaugcagugg

SEQ ID NO: 1719644 - RNA, 18 nt, Human
cugcuuugggcugcccug

SEQ ID NO: 1719645 - RNA, 20 nt, Human
cugcuuugggcugcccuggu

SEQ ID NO: 1719646 - RNA, 19 nt, Human
cugcuuugggcugcccugg

SEQ ID NO: 1719647 - RNA, 23 nt, Human
cugcuuugggcugcccuggugcu

SEQ ID NO: 1719648 - RNA, 22 nt, Human
cugcuuugggcugcccuggugc

SEQ ID NO: 1719649 - RNA, 21 nt, Human
cugcuuugggcugcccuggug

SEQ ID NO: 1719650 - RNA, 12 nt, Human
cugcucugauga

SEQ ID NO: 1719651 - RNA, 21 nt, Human
cuggagcccacuguacuugcu

SEQ ID NO: 1719652 - RNA, 20 nt, Human
cuggagcccacuguacuugc

SEQ ID NO: 1719653 - RNA, 17 nt, Human
cuggagcccacuguacu

SEQ ID NO: 1719654 - RNA, 16 nt, Human
cuggagcccacuguac

SEQ ID NO: 1719655 - RNA, 15 nt, Human
cuggagcccacugua

SEQ ID NO: 1719656 - RNA, 13 nt, Human
cuggagcccacug

SEQ ID NO: 1719657 - RNA, 16 nt, Human
cuggacucaccucccc

SEQ ID NO: 1719658 - RNA, 23 nt, Human
cuggcacuauaauguaagcucua

SEQ ID NO: 1719659 - RNA, 14 nt, Human
cuggcacugcuucc

SEQ ID NO: 1719660 - RNA, 13 nt, Human
cuggcacugcuuc

SEQ ID NO: 1719661 - RNA, 17 nt, Human
cuggcacagggcagugg

SEQ ID NO: 1719662 - RNA, 15 nt, Human
cuggauggggcugca

SEQ ID NO: 1719663 - RNA, 21 nt, Human
cuggauggaggaaaaccaagc

SEQ ID NO: 1719664 - RNA, 16 nt, Human
cuggauggggcugcac

SEQ ID NO: 1719665 - RNA, 15 nt, Human
cuggauguaccacca

SEQ ID NO: 1719666 - RNA, 13 nt, Human
cuggauuaaacuu

SEQ ID NO: 1719667 - RNA, 23 nt, Human
cuggauuaaacuuaaucuaaaug

SEQ ID NO: 1719668 - RNA, 17 nt, Human
cuggauuauauuaugaa

SEQ ID NO: 1719669 - RNA, 23 nt, Human
cuggauuauucaaaaugauguau

SEQ ID NO: 1719670 - RNA, 16 nt, Human
cuggccaacgggguga

SEQ ID NO: 1719671 - RNA, 16 nt, Human
cuggccagaugcacca

SEQ ID NO: 1719672 - RNA, 18 nt, Human
cuggcacugcuuccagug

SEQ ID NO: 1719673 - RNA, 17 nt, Human
cuggcacugcuuccagu

SEQ ID NO: 1719674 - RNA, 16 nt, Human
cuggcacugcuuccag

SEQ ID NO: 1719675 - RNA, 15 nt, Human
cuggcacugcuucca

SEQ ID NO: 1719676 - RNA, 20 nt, Human
cuggccagaugcaccagccc

SEQ ID NO: 1719677 - RNA, 19 nt, Human
cuggccagaugcaccagcc

SEQ ID NO: 1719678 - RNA, 18 nt, Human
cuggccagaugcaccagc

SEQ ID NO: 1719679 - RNA, 17 nt, Human
cuggccagaugcaccag

SEQ ID NO: 1719680 - RNA, 21 nt, Human
cuggccagaugcaccagcccu

SEQ ID NO: 1719681 - RNA, 22 nt, Human
cuggccagaugcaccagcccuu

SEQ ID NO: 1719682 - RNA, 17 nt, Human
cuggccuagcauacgua

SEQ ID NO: 1719683 - RNA, 13 nt, Human
cuggcccacugca

SEQ ID NO: 1719684 - RNA, 12 nt, Human
cuggcccacugc

SEQ ID NO: 1719685 - RNA, 23 nt, Human
cuggccuagcauacguacacauu

SEQ ID NO: 1719686 - RNA, 22 nt, Human
cuggccucaagugauucuccug

SEQ ID NO: 1719687 - RNA, 18 nt, Human
cuggucccacucagucca

SEQ ID NO: 1719688 - RNA, 15 nt, Human
cuggucccacucagu

SEQ ID NO: 1719689 - RNA, 21 nt, Human
cugguccauagagagcaagac

SEQ ID NO: 1719690 - RNA, 18 nt, Human
cugguccauagagagcaa

SEQ ID NO: 1719691 - RNA, 19 nt, Human
cuggguucuacccaggugc

SEQ ID NO: 1719692 - RNA, 17 nt, Human
cugguccauagagagca

SEQ ID NO: 1719693 - RNA, 15 nt, Human
cugguccauagagag

SEQ ID NO: 1719694 - RNA, 13 nt, Human
cuggguuggaggg

SEQ ID NO: 1719695 - RNA, 18 nt, Human
cuggguuggaaaacagua

SEQ ID NO: 1719696 - RNA, 13 nt, Human
cuggguuggaaaa

SEQ ID NO: 1719697 - RNA, 23 nt, Human
cugguggcagugggagcugccug

SEQ ID NO: 1719698 - RNA, 19 nt, Human
cugguggcagugggagcug

SEQ ID NO: 1719699 - RNA, 18 nt, Human
cuggucucaaacuccuga

SEQ ID NO: 1719700 - RNA, 19 nt, Human
cugggcucccuucccaccu

SEQ ID NO: 1719701 - RNA, 21 nt, Human
cugggcuuggggaccagagcu

SEQ ID NO: 1719702 - RNA, 20 nt, Human
cugggcuuggggaccagagc

SEQ ID NO: 1719703 - RNA, 17 nt, Human
cugggcuuggggaccag

SEQ ID NO: 1719704 - RNA, 13 nt, Human
cugggcuugggga

SEQ ID NO: 1719705 - RNA, 23 nt, Human
cugggcuucaguggcagcugcuu

SEQ ID NO: 1719706 - RNA, 22 nt, Human
cugggcuucaguggcagcugcu

SEQ ID NO: 1719707 - RNA, 21 nt, Human
cugggcuucaguggcagcugc

SEQ ID NO: 1719708 - RNA, 20 nt, Human
cugggcuucaguggcagcug

SEQ ID NO: 1719709 - RNA, 19 nt, Human
cugggcuucaguggcagcu

SEQ ID NO: 1719710 - RNA, 18 nt, Human
cugggcuucaguggcagc

SEQ ID NO: 1719711 - RNA, 19 nt, Human
cugggccccugccucucug

SEQ ID NO: 1719712 - RNA, 18 nt, Human
cugggggccucagugcca

SEQ ID NO: 1719713 - RNA, 17 nt, Human
cugggggccucagugcc

SEQ ID NO: 1719714 - RNA, 13 nt, Human
cugggggccucag

SEQ ID NO: 1719715 - RNA, 19 nt, Human
cugggguggggaccucagg

SEQ ID NO: 1719716 - RNA, 18 nt, Human
cugggguggggaccucag

SEQ ID NO: 1719717 - RNA, 17 nt, Human
cugggguggggaccuca

SEQ ID NO: 1719718 - RNA, 20 nt, Human
cuggguacuuguggacacag

SEQ ID NO: 1719719 - RNA, 23 nt, Human
cugggguggggaccucaggccug

SEQ ID NO: 1719720 - RNA, 22 nt, Human
cugggguggggaccucaggccu

SEQ ID NO: 1719721 - RNA, 21 nt, Human
cugggguggggaccucaggcc

SEQ ID NO: 1719722 - RNA, 23 nt, Human
cuggguacuuguggacacagcuc

SEQ ID NO: 1719723 - RNA, 21 nt, Human
cuggguacuuguggacacagc

SEQ ID NO: 1719724 - RNA, 15 nt, Human
cugggagcucugcag

SEQ ID NO: 1719725 - RNA, 14 nt, Human
cugggagcucugca

SEQ ID NO: 1719726 - RNA, 13 nt, Human
cugggagcucugc

SEQ ID NO: 1719727 - RNA, 18 nt, Human
cugggaggucaaggcugc

SEQ ID NO: 1719728 - RNA, 16 nt, Human
cugggaggcucuggag

SEQ ID NO: 1719729 - RNA, 15 nt, Human
cugggaggcucugga

SEQ ID NO: 1719730 - RNA, 16 nt, Human
cugggaggcagugaug

SEQ ID NO: 1719731 - RNA, 14 nt, Human
cugggaggcaguga

SEQ ID NO: 1719732 - RNA, 13 nt, Human
cugggagugagcu

SEQ ID NO: 1719733 - RNA, 16 nt, Human
cugggagugagcuggu

SEQ ID NO: 1719734 - RNA, 23 nt, Human
cugggauuacaggcuccugccac

SEQ ID NO: 1719735 - RNA, 22 nt, Human
cugggauuacaggcuccugcca

SEQ ID NO: 1719736 - RNA, 21 nt, Human
cugggauuacaggcuccugcc

SEQ ID NO: 1719737 - RNA, 21 nt, Human
cugggauuacaggcgugagcc

SEQ ID NO: 1719738 - RNA, 20 nt, Human
cugggauuacaggcuccugc

SEQ ID NO: 1719739 - RNA, 19 nt, Human
cugggauuacaggcuccug

SEQ ID NO: 1719740 - RNA, 20 nt, Human
cugggcaaugugauaaaacc

SEQ ID NO: 1719741 - RNA, 10 nt, Human
cugggccccu

SEQ ID NO: 1719742 - RNA, 17 nt, Human
cugggccccugccucuc

SEQ ID NO: 1719743 - RNA, 16 nt, Human
cugggccccugccucu

SEQ ID NO: 1719744 - RNA, 12 nt, Human
cugggccccugc

SEQ ID NO: 1719745 - RNA, 15 nt, Human
cuggccugagcuggg

SEQ ID NO: 1719746 - RNA, 17 nt, Human
cuggcucuuccaggcug

SEQ ID NO: 1719747 - RNA, 13 nt, Human
cuggccugagcug

SEQ ID NO: 1719748 - RNA, 19 nt, Human
cuggcucuuccaggcuggg

SEQ ID NO: 1719749 - RNA, 18 nt, Human
cuggcucuuccaggcugg

SEQ ID NO: 1719750 - RNA, 20 nt, Human
cuggcucuuccaggcuggga

SEQ ID NO: 1719751 - RNA, 19 nt, Human
cuggcugccuuagaaccuu

SEQ ID NO: 1719752 - RNA, 14 nt, Human
cuggcugccuuaga

SEQ ID NO: 1719753 - RNA, 19 nt, Human
cuggcuguuggcugggggc

SEQ ID NO: 1719754 - RNA, 22 nt, Human
cuggcuggguggcaccagcagc

SEQ ID NO: 1719755 - RNA, 21 nt, Human
cuggcuggguggcaccagcag

SEQ ID NO: 1719756 - RNA, 20 nt, Human
cuggcuguuggcugggggcc

SEQ ID NO: 1719757 - RNA, 14 nt, Human
cuggcuucacagau

SEQ ID NO: 1719758 - RNA, 16 nt, Human
cuggcuuuucacugcu

SEQ ID NO: 1719759 - RNA, 15 nt, Human
cuggcuuuucacugc

SEQ ID NO: 1719760 - RNA, 19 nt, Human
cugggaacaccauagguca

SEQ ID NO: 1719761 - RNA, 22 nt, Human
cuggcuuuucacugcuggcugc

SEQ ID NO: 1719762 - RNA, 20 nt, Human
cuggcuuuucacugcuggcu

SEQ ID NO: 1719763 - RNA, 19 nt, Human
cuggcuuuucacugcuggc

SEQ ID NO: 1719764 - RNA, 17 nt, Human
cuggcuuuucacugcug

SEQ ID NO: 1719765 - RNA, 15 nt, Human
cugauucccaagcuc

SEQ ID NO: 1719766 - RNA, 18 nt, Human
cugauucccaagcucugc

SEQ ID NO: 1719767 - RNA, 17 nt, Human
cugauucccaagcucug

SEQ ID NO: 1719768 - RNA, 20 nt, Human
cugauucccaagcucugcuc

SEQ ID NO: 1719769 - RNA, 19 nt, Human
cugauucccaagcucugcu

SEQ ID NO: 1719770 - RNA, 22 nt, Human
cugauucccaagcucugcuccu

SEQ ID NO: 1719771 - RNA, 21 nt, Human
cugauaaagaugagugagcau

SEQ ID NO: 1719772 - RNA, 14 nt, Human
cugaucucucguga

SEQ ID NO: 1719773 - RNA, 16 nt, Human
cugagucugaaggcug

SEQ ID NO: 1719774 - RNA, 15 nt, Human
cugagucugaaggcu

SEQ ID NO: 1719775 - RNA, 14 nt, Human
cugagucugaaggc

SEQ ID NO: 1719776 - RNA, 13 nt, Human
cugagucugaagg

SEQ ID NO: 1719777 - RNA, 17 nt, Human
cugagucugaaggcugg

SEQ ID NO: 1719778 - RNA, 14 nt, Human
cugagugccuuuug

SEQ ID NO: 1719779 - RNA, 13 nt, Human
cugauaaagauga

SEQ ID NO: 1719780 - RNA, 22 nt, Human
cugagugggggaucacagccuc

SEQ ID NO: 1719781 - RNA, 16 nt, Human
cugagugccuuuuggu

SEQ ID NO: 1719782 - RNA, 15 nt, Human
cugagugccuuuugg

SEQ ID NO: 1719783 - RNA, 12 nt, Human
cugacccacugc

SEQ ID NO: 1719784 - RNA, 22 nt, Human
cugcacagugcaucucagccca

SEQ ID NO: 1719785 - RNA, 21 nt, Human
cugcacagugcaucucagccc

SEQ ID NO: 1719786 - RNA, 18 nt, Human
cugcacccucaggcaggu

SEQ ID NO: 1719787 - RNA, 17 nt, Human
cugcacccucaggcagg

SEQ ID NO: 1719788 - RNA, 16 nt, Human
cugcacaagcugcacc

SEQ ID NO: 1719789 - RNA, 15 nt, Human
cugcacaagcugcac

SEQ ID NO: 1719790 - RNA, 14 nt, Human
cugcacaagcugca

SEQ ID NO: 1719791 - RNA, 13 nt, Human
cugcacaagcugc

SEQ ID NO: 1719792 - RNA, 18 nt, Human
cugcacaagcugcacccu

SEQ ID NO: 1719793 - RNA, 18 nt, Human
cugcacagugcaucucag

SEQ ID NO: 1719794 - RNA, 13 nt, Human
cugcacaaagccc

SEQ ID NO: 1719795 - RNA, 21 nt, Human
cugcacaaagcccuuccaugu

SEQ ID NO: 1719796 - RNA, 20 nt, Human
cugcacaaagcccuuccaug

SEQ ID NO: 1719797 - RNA, 18 nt, Human
cugcacaaagcccuucca

SEQ ID NO: 1719798 - RNA, 23 nt, Human
cugcagaagacaguauggcagcu

SEQ ID NO: 1719799 - RNA, 13 nt, Human
cugcagaagacag

SEQ ID NO: 1719800 - RNA, 20 nt, Human
cugcagagcaggaaacauga

SEQ ID NO: 1719801 - RNA, 20 nt, Human
cugcaccggcuggccuggcc

SEQ ID NO: 1719802 - RNA, 19 nt, Human
cugcaccggcuggccuggc

SEQ ID NO: 1719803 - RNA, 18 nt, Human
cugcaccggcuggccugg

SEQ ID NO: 1719804 - RNA, 17 nt, Human
cugcaccggcuggccug

SEQ ID NO: 1719805 - RNA, 17 nt, Human
cugcacuugcagacucu

SEQ ID NO: 1719806 - RNA, 16 nt, Human
cugcacuugcagacuc

SEQ ID NO: 1719807 - RNA, 14 nt, Human
cugcacuugcagac

SEQ ID NO: 1719808 - RNA, 11 nt, Human
cugcagccuca

SEQ ID NO: 1719809 - RNA, 20 nt, Human
cugcagccucaaccuccugg

SEQ ID NO: 1719810 - RNA, 19 nt, Human
cugcagccucaaccuccug

SEQ ID NO: 1719811 - RNA, 22 nt, Human
cugcagccucaaccuccugggc

SEQ ID NO: 1719812 - RNA, 22 nt, Human
cugcagggaguccgaaagggac

SEQ ID NO: 1719813 - RNA, 16 nt, Human
cugcagggccaagcac

SEQ ID NO: 1719814 - RNA, 17 nt, Human
cugcagggacugccagu

SEQ ID NO: 1719815 - RNA, 15 nt, Human
cugcagggacugcca

SEQ ID NO: 1719816 - RNA, 15 nt, Human
cugccuaagugcagc

SEQ ID NO: 1719817 - RNA, 13 nt, Human
cugccuauuuuaa

SEQ ID NO: 1719818 - RNA, 22 nt, Human
cugcccugggaggcagugaugg

SEQ ID NO: 1719819 - RNA, 15 nt, Human
cugcccugggaggca

SEQ ID NO: 1719820 - RNA, 11 nt, Human
cugcccuggga

SEQ ID NO: 1719821 - RNA, 13 nt, Human
cugcccugggagg

SEQ ID NO: 1719822 - RNA, 12 nt, Human
cugcccugggag

SEQ ID NO: 1719823 - RNA, 13 nt, Human
cugccucagccuc

SEQ ID NO: 1719824 - RNA, 14 nt, Human
cugccucagccucc

SEQ ID NO: 1719825 - RNA, 15 nt, Human
cugccugcccaggcc

SEQ ID NO: 1719826 - RNA, 14 nt, Human
cugccugcccaggc

SEQ ID NO: 1719827 - RNA, 13 nt, Human
cugccugcccagg

SEQ ID NO: 1719828 - RNA, 14 nt, Human
cugccucuucucua

SEQ ID NO: 1719829 - RNA, 13 nt, Human
cugccucuucucu

SEQ ID NO: 1719830 - RNA, 12 nt, Human
cugccucuuccu

SEQ ID NO: 1719831 - RNA, 14 nt, Human
cugccucucugcag

SEQ ID NO: 1719832 - RNA, 13 nt, Human
cugccucucugca

SEQ ID NO: 1719833 - RNA, 12 nt, Human
cugccucucugc

SEQ ID NO: 1719834 - RNA, 18 nt, Human
cugcuccucuccccagca

SEQ ID NO: 1719835 - RNA, 17 nt, Human
cugcuccucuccccagc

SEQ ID NO: 1719836 - RNA, 16 nt, Human
cugcuccucuccccag

SEQ ID NO: 1719837 - RNA, 15 nt, Human
cugcuccagcuguuc

SEQ ID NO: 1719838 - RNA, 19 nt, Human
cugcuccccuaaagccuca

SEQ ID NO: 1719839 - RNA, 14 nt, Human
cugcuccagcuguu

SEQ ID NO: 1719840 - RNA, 16 nt, Human
cugcgguccacccagg

SEQ ID NO: 1719841 - RNA, 17 nt, Human
cugcgguccacccagga

SEQ ID NO: 1719842 - RNA, 21 nt, Human
cugcggaaugaaccacaucuu

SEQ ID NO: 1719843 - RNA, 15 nt, Human
cugcgguccacccag

SEQ ID NO: 1719844 - RNA, 20 nt, Human
cugcggaaugaaccacaucu

SEQ ID NO: 1719845 - RNA, 20 nt, Human
cugccacccuggggagaaag

SEQ ID NO: 1719846 - RNA, 16 nt, Human
cugccacccuggggag

SEQ ID NO: 1719847 - RNA, 15 nt, Human
cugccacccugggga

SEQ ID NO: 1719848 - RNA, 19 nt, Human
cugccaccacgcccggcua

SEQ ID NO: 1719849 - RNA, 22 nt, Human
cugccacacuucaggcucuucu

SEQ ID NO: 1719850 - RNA, 17 nt, Human
cugccacacuucaggcu

SEQ ID NO: 1719851 - RNA, 13 nt, Human
cugccacacuuca

SEQ ID NO: 1719852 - RNA, 19 nt, Human
cugccaggaagccagcagg

SEQ ID NO: 1719853 - RNA, 18 nt, Human
cugccaggaagccagcag

SEQ ID NO: 1719854 - RNA, 16 nt, Human
cugccaggaagccagc

SEQ ID NO: 1719855 - RNA, 15 nt, Human
cugccaggaagccag

SEQ ID NO: 1719856 - RNA, 19 nt, Human
cugccagccgagauagcca

SEQ ID NO: 1719857 - RNA, 19 nt, Human
cugccaugccagcuuaucu

SEQ ID NO: 1719858 - RNA, 17 nt, Human
cugccaugccagcuuau

SEQ ID NO: 1719859 - RNA, 16 nt, Human
cugccauuucugagau

SEQ ID NO: 1719860 - RNA, 17 nt, Human
cugcccaaccugcucuc

SEQ ID NO: 1719861 - RNA, 13 nt, Human
cugcccaggcccc

SEQ ID NO: 1719862 - RNA, 19 nt, Human
cugcccaaccugcucuccu

SEQ ID NO: 1719863 - RNA, 17 nt, Human
cugccccuggcagcccc

SEQ ID NO: 1719864 - RNA, 16 nt, Human
cugccccuggcagccc

SEQ ID NO: 1719865 - RNA, 15 nt, Human
cugccccuggcagcc

SEQ ID NO: 1719866 - RNA, 14 nt, Human
cugccccuggcagc

SEQ ID NO: 1719867 - RNA, 18 nt, Human
cugcccaggccugccugu

SEQ ID NO: 1719868 - RNA, 19 nt, Human
cugcccaggccugccuguu

SEQ ID NO: 1719869 - RNA, 15 nt, Human
cugcccggcugcgga

SEQ ID NO: 1719870 - RNA, 19 nt, Human
cugcccuccaagaccuucu

SEQ ID NO: 1719871 - RNA, 11 nt, Human
cugcccggcug

SEQ ID NO: 1719872 - RNA, 16 nt, Human
cugcccugcccaccug

SEQ ID NO: 1719873 - RNA, 15 nt, Human
cugcccugcccaccu

SEQ ID NO: 1719874 - RNA, 14 nt, Human
cugcccugcccacc

SEQ ID NO: 1719875 - RNA, 13 nt, Human
cugcccugcccac

SEQ ID NO: 1719876 - RNA, 17 nt, Human
ccucacaguccuuacca

SEQ ID NO: 1719877 - RNA, 17 nt, Human
ccuaucagaaguuucuc

SEQ ID NO: 1719878 - RNA, 12 nt, Human
ccucaccccacu

SEQ ID NO: 1719879 - RNA, 22 nt, Human
ccucacaguccuuaccagcaga

SEQ ID NO: 1719880 - RNA, 20 nt, Human
ccucacaguccuuaccagca

SEQ ID NO: 1719881 - RNA, 15 nt, Human
ccucaccccacugug

SEQ ID NO: 1719882 - RNA, 17 nt, Human
ccucaccuuucccaucu

SEQ ID NO: 1719883 - RNA, 22 nt, Human
ccgggaggcagagguugcagug

SEQ ID NO: 1719884 - RNA, 13 nt, Human
ccggcuggccugg

SEQ ID NO: 1719885 - RNA, 15 nt, Human
ccgggcacucagaag

SEQ ID NO: 1719886 - RNA, 15 nt, Human
ccggcuggccuggcc

SEQ ID NO: 1719887 - RNA, 12 nt, Human
ccggcuggccug

SEQ ID NO: 1719888 - RNA, 12 nt, Human
ccggcugcccuu

SEQ ID NO: 1719889 - RNA, 17 nt, Human
ccgugccuucagcucua

SEQ ID NO: 1719890 - RNA, 16 nt, Human
ccgugccuucagcucu

SEQ ID NO: 1719891 - RNA, 15 nt, Human
ccgugccuucagcuc

SEQ ID NO: 1719892 - RNA, 14 nt, Human
ccgugccuucagcu

SEQ ID NO: 1719893 - RNA, 20 nt, Human
ccgggcacucagaagacacu

SEQ ID NO: 1719894 - RNA, 19 nt, Human
ccgggccuggagaacuaga

SEQ ID NO: 1719895 - RNA, 23 nt, Human
ccguggcuucccgcucagcccuc

SEQ ID NO: 1719896 - RNA, 21 nt, Human
ccguggcuucccgcucagccc

SEQ ID NO: 1719897 - RNA, 15 nt, Human
ccguggcuucccgcu

SEQ ID NO: 1719898 - RNA, 14 nt, Human
ccuaaaguguauuu

SEQ ID NO: 1719899 - RNA, 13 nt, Human
ccuaaagccucaa

SEQ ID NO: 1719900 - RNA, 19 nt, Human
ccuaaagccucaaaacaaa

SEQ ID NO: 1719901 - RNA, 12 nt, Human
ccuaaagagaua

SEQ ID NO: 1719902 - RNA, 17 nt, Human
ccuaauuccacagcugc

SEQ ID NO: 1719903 - RNA, 16 nt, Human
ccuaauuccacagcug

SEQ ID NO: 1719904 - RNA, 15 nt, Human
ccuaauuccacagcu

SEQ ID NO: 1719905 - RNA, 14 nt, Human
ccuaauuccacagc

SEQ ID NO: 1719906 - RNA, 17 nt, Human
ccuaauucuaugccugu

SEQ ID NO: 1719907 - RNA, 12 nt, Human
ccuaccugguaa

SEQ ID NO: 1719908 - RNA, 20 nt, Human
cccuuccucuccacugccuu

SEQ ID NO: 1719909 - RNA, 21 nt, Human
cccuuccucuccacugccuuc

SEQ ID NO: 1719910 - RNA, 17 nt, Human
cccuuccucuccacugc

SEQ ID NO: 1719911 - RNA, 16 nt, Human
cccuuccucuccacug

SEQ ID NO: 1719912 - RNA, 19 nt, Human
cccuuaccucggugccuuc

SEQ ID NO: 1719913 - RNA, 21 nt, Human
cccuuaccacugcucugauga

SEQ ID NO: 1719914 - RNA, 17 nt, Human
cccuuaccacugcucug

SEQ ID NO: 1719915 - RNA, 13 nt, Human
cccuuccucucca

SEQ ID NO: 1719916 - RNA, 18 nt, Human
cccuugccgucuaccuga

SEQ ID NO: 1719917 - RNA, 17 nt, Human
cccuugccgucuaccug

SEQ ID NO: 1719918 - RNA, 22 nt, Human
cccuugccgucuaccugagggg

SEQ ID NO: 1719919 - RNA, 20 nt, Human
cccuuugacgccaucccagc

SEQ ID NO: 1719920 - RNA, 22 nt, Human
cccuuucugggcaccggggccu

SEQ ID NO: 1719921 - RNA, 16 nt, Human
cccuuguggucccacc

SEQ ID NO: 1719922 - RNA, 14 nt, Human
cccuugugguccca

SEQ ID NO: 1719923 - RNA, 18 nt, Human
cccuuggggagcaggcuc

SEQ ID NO: 1719924 - RNA, 18 nt, Human
cccuuguggucccacccc

SEQ ID NO: 1719925 - RNA, 20 nt, Human
cccuuguggucccaccccac

SEQ ID NO: 1719926 - RNA, 18 nt, Human
ccgagaucacgccacugc

SEQ ID NO: 1719927 - RNA, 16 nt, Human
ccgagccuggcuccaa

SEQ ID NO: 1719928 - RNA, 19 nt, Human
ccgagccuggcuccaaacc

SEQ ID NO: 1719929 - RNA, 22 nt, Human
ccgagucucuucuccacuggau

SEQ ID NO: 1719930 - RNA, 13 nt, Human
cccuuuucuguuu

SEQ ID NO: 1719931 - RNA, 11 nt, Human
cccuuuuccuu

SEQ ID NO: 1719932 - RNA, 18 nt, Human
cccuuuuuuggcugcuga

SEQ ID NO: 1719933 - RNA, 17 nt, Human
cccuuuuuuggcugcug

SEQ ID NO: 1719934 - RNA, 22 nt, Human
ccgagauagccaaggccaaagg

SEQ ID NO: 1719935 - RNA, 19 nt, Human
ccgagauagccaaggccaa

SEQ ID NO: 1719936 - RNA, 17 nt, Human
ccgagaaggaagccucc

SEQ ID NO: 1719937 - RNA, 19 nt, Human
cccuuuuuuggcugcugaa

SEQ ID NO: 1719938 - RNA, 23 nt, Human
cccccaaccaaguggcucccaca

SEQ ID NO: 1719939 - RNA, 22 nt, Human
ccccaggaggccagccuugacc

SEQ ID NO: 1719940 - RNA, 21 nt, Human
ccccaggaggccagccuugac

SEQ ID NO: 1719941 - RNA, 15 nt, Human
ccccaggaggccagc

SEQ ID NO: 1719942 - RNA, 14 nt, Human
ccccaggaggccag

SEQ ID NO: 1719943 - RNA, 13 nt, Human
ccccaggaggcca

SEQ ID NO: 1719944 - RNA, 14 nt, Human
ccccacuggugaca

SEQ ID NO: 1719945 - RNA, 13 nt, Human
ccccacuggugac

SEQ ID NO: 1719946 - RNA, 12 nt, Human
ccccacugguga

SEQ ID NO: 1719947 - RNA, 21 nt, Human
cccccgcugucagccauuccu

SEQ ID NO: 1719948 - RNA, 16 nt, Human
cccccucugcccugcg

SEQ ID NO: 1719949 - RNA, 14 nt, Human
cccccucugcccug

SEQ ID NO: 1719950 - RNA, 13 nt, Human
cccccucugcccu

SEQ ID NO: 1719951 - RNA, 21 nt, Human
ccccgucucugguuccucccc

SEQ ID NO: 1719952 - RNA, 20 nt, Human
ccccgucccccucuggcucc

SEQ ID NO: 1719953 - RNA, 16 nt, Human
ccccgucccccucugg

SEQ ID NO: 1719954 - RNA, 12 nt, Human
cccccagcccca

SEQ ID NO: 1719955 - RNA, 16 nt, Human
cccccaucucuucugg

SEQ ID NO: 1719956 - RNA, 16 nt, Human
cccuguuuguuucuga

SEQ ID NO: 1719957 - RNA, 15 nt, Human
cccuguuuguuucug

SEQ ID NO: 1719958 - RNA, 16 nt, Human
cccuguuucagaggcu

SEQ ID NO: 1719959 - RNA, 19 nt, Human
cccuguuucagaggcucag

SEQ ID NO: 1719960 - RNA, 18 nt, Human
cccugugggcccccaaau

SEQ ID NO: 1719961 - RNA, 16 nt, Human
cccugugggcccccaa

SEQ ID NO: 1719962 - RNA, 21 nt, Human
cccuguagagugggagcugag

SEQ ID NO: 1719963 - RNA, 23 nt, Human
cccugguuuccugcccugggagg

SEQ ID NO: 1719964 - RNA, 22 nt, Human
cccugguuuccugcccugggag

SEQ ID NO: 1719965 - RNA, 19 nt, Human
cccugguggcagugggagc

SEQ ID NO: 1719966 - RNA, 16 nt, Human
cccugguggcaguggg

SEQ ID NO: 1719967 - RNA, 21 nt, Human
cccugguggcagugggagcug

SEQ ID NO: 1719968 - RNA, 21 nt, Human
cccugguuuccugcccuggga

SEQ ID NO: 1719969 - RNA, 20 nt, Human
ccccucagggucccuggugg

SEQ ID NO: 1719970 - RNA, 18 nt, Human
ccccucagggucccuggu

SEQ ID NO: 1719971 - RNA, 17 nt, Human
ccccucagggucccugg

SEQ ID NO: 1719972 - RNA, 19 nt, Human
ccccuaaagccucaaaaca

SEQ ID NO: 1719973 - RNA, 19 nt, Human
ccugaagucacacagugag

SEQ ID NO: 1719974 - RNA, 17 nt, Human
ccugaagucacacagug

SEQ ID NO: 1719975 - RNA, 16 nt, Human
ccugaagucacacagu

SEQ ID NO: 1719976 - RNA, 15 nt, Human
ccugaagucacacag

SEQ ID NO: 1719977 - RNA, 13 nt, Human
ccugaaggccccg

SEQ ID NO: 1719978 - RNA, 20 nt, Human
ccugaagcuaucguaaaauu

SEQ ID NO: 1719979 - RNA, 21 nt, Human
ccugaagacucauucuucugu

SEQ ID NO: 1719980 - RNA, 23 nt, Human
ccugaagcuaucguaaaauuaag

SEQ ID NO: 1719981 - RNA, 22 nt, Human
ccugaagcuaucguaaaauuaa

SEQ ID NO: 1719982 - RNA, 18 nt, Human
ccugaaagaggaaugaag

SEQ ID NO: 1719983 - RNA, 23 nt, Human
ccugaaagaggaaugaaguacuc

SEQ ID NO: 1719984 - RNA, 22 nt, Human
ccucuuuggucuacacugugcu

SEQ ID NO: 1719985 - RNA, 19 nt, Human
ccucuuccucccucauucc

SEQ ID NO: 1719986 - RNA, 16 nt, Human
ccucuuccucccucau

SEQ ID NO: 1719987 - RNA, 15 nt, Human
ccucuuccucccuca

SEQ ID NO: 1719988 - RNA, 17 nt, Human
ccucuuaugggcugggu

SEQ ID NO: 1719989 - RNA, 14 nt, Human
ccucuuaugggcug

SEQ ID NO: 1719990 - RNA, 16 nt, Human
ccucuuaugggcuggg

SEQ ID NO: 1719991 - RNA, 15 nt, Human
ccucuuaugggcugg

SEQ ID NO: 1719992 - RNA, 14 nt, Human
ccucuuagaaaaac

SEQ ID NO: 1719993 - RNA, 21 nt, Human
ccucuguucugcacacagcac

SEQ ID NO: 1719994 - RNA, 23 nt, Human
ccucuguacagagcccacgcccc

SEQ ID NO: 1719995 - RNA, 18 nt, Human
ccucuguacagagcccac

SEQ ID NO: 1719996 - RNA, 17 nt, Human
ccucuguacagagccca

SEQ ID NO: 1719997 - RNA, 16 nt, Human
ccucuguacagagccc

SEQ ID NO: 1719998 - RNA, 15 nt, Human
ccucuguacagagcc

SEQ ID NO: 1719999 - RNA, 14 nt, Human
ccucuguacagagc

SEQ ID NO: 1720000 - RNA, 17 nt, Human
ccucuguccaggcacug

SEQ ID NO: 1720001 - RNA, 23 nt, Human
ccugauugugucucuugguccug

SEQ ID NO: 1720002 - RNA, 18 nt, Human
ccugaugcuucuucagag

SEQ ID NO: 1720003 - RNA, 17 nt, Human
ccugaugcuucuucaga

SEQ ID NO: 1720004 - RNA, 18 nt, Human
ccugaggcuccacuuggu

SEQ ID NO: 1720005 - RNA, 20 nt, Human
ccugaggcuccacuuggucu

SEQ ID NO: 1720006 - RNA, 14 nt, Human
ccugaugcuucuuc

SEQ ID NO: 1720007 - RNA, 20 nt, Human
ccugaggcccuucucuccag

SEQ ID NO: 1720008 - RNA, 19 nt, Human
ccugaggcccuucucucca

SEQ ID NO: 1720009 - RNA, 17 nt, Human
ccugaggcccuucucuc

SEQ ID NO: 1720010 - RNA, 16 nt, Human
ccugaggcccuucucu

SEQ ID NO: 1720011 - RNA, 22 nt, Human
ccugaggcccuucucuccagcc

SEQ ID NO: 1720012 - RNA, 21 nt, Human
ccugaggcccuucucuccagc

SEQ ID NO: 1720013 - RNA, 23 nt, Human
ccugaggcccuucucuccagccc

SEQ ID NO: 1720014 - RNA, 16 nt, Human
ccugacaacacucauu

SEQ ID NO: 1720015 - RNA, 15 nt, Human
ccugacaacacucau

SEQ ID NO: 1720016 - RNA, 14 nt, Human
ccugacaacacuca

SEQ ID NO: 1720017 - RNA, 12 nt, Human
ccugacaacacu

SEQ ID NO: 1720018 - RNA, 14 nt, Human
ccugaggcccagag

SEQ ID NO: 1720019 - RNA, 13 nt, Human
ccugaggcccaga

SEQ ID NO: 1720020 - RNA, 12 nt, Human
ccugaggcccag

SEQ ID NO: 1720021 - RNA, 23 nt, Human
ccugacaacacucauugaccuga

SEQ ID NO: 1720022 - RNA, 21 nt, Human
ccucacuaucccggcugcccu

SEQ ID NO: 1720023 - RNA, 21 nt, Human
ccucacuaggcuucugguuga

SEQ ID NO: 1720024 - RNA, 22 nt, Human
ccucacuaucccggcugcccuu

SEQ ID NO: 1720025 - RNA, 17 nt, Human
ccucagcauccuggcac

SEQ ID NO: 1720026 - RNA, 16 nt, Human
ccucagcauccuggca

SEQ ID NO: 1720027 - RNA, 14 nt, Human
ccucagggucccug

SEQ ID NO: 1720028 - RNA, 23 nt, Human
ccucaggccugggggcugggcag

SEQ ID NO: 1720029 - RNA, 21 nt, Human
ccucaggccugggggcugggc

SEQ ID NO: 1720030 - RNA, 14 nt, Human
ccucaggccugggg

SEQ ID NO: 1720031 - RNA, 11 nt, Human
ccucaggccug

SEQ ID NO: 1720032 - RNA, 14 nt, Human
ccucagucucccuc

SEQ ID NO: 1720033 - RNA, 15 nt, Human
ccucagucuggcccu

SEQ ID NO: 1720034 - RNA, 15 nt, Human
ccucagggucccugg

SEQ ID NO: 1720035 - RNA, 21 nt, Human
ccucagguaaucgaccugccu

SEQ ID NO: 1720036 - RNA, 16 nt, Human
ccucaggugagaagca

SEQ ID NO: 1720037 - RNA, 23 nt, Human
ccucagguaaucgaccugccucg

SEQ ID NO: 1720038 - RNA, 22 nt, Human
ccucagguaaucgaccugccuc

SEQ ID NO: 1720039 - RNA, 19 nt, Human
ccucaggugauccacccac

SEQ ID NO: 1720040 - RNA, 17 nt, Human
ccucaggugauccaccc

SEQ ID NO: 1720041 - RNA, 22 nt, Human
ccucaggugauccacccaccuc

SEQ ID NO: 1720042 - RNA, 16 nt, Human
ccucccucccucuuuc

SEQ ID NO: 1720043 - RNA, 13 nt, Human
ccucccugccccu

SEQ ID NO: 1720044 - RNA, 13 nt, Human
ccucccggugccc

SEQ ID NO: 1720045 - RNA, 15 nt, Human
ccucccucccucuuu

SEQ ID NO: 1720046 - RNA, 13 nt, Human
ccucccucccucu

SEQ ID NO: 1720047 - RNA, 16 nt, Human
ccucccggugcccaag

SEQ ID NO: 1720048 - RNA, 13 nt, Human
ccuccugccucga

SEQ ID NO: 1720049 - RNA, 14 nt, Human
ccuccuccuggacu

SEQ ID NO: 1720050 - RNA, 22 nt, Human
ccuccugugugugcgccuacag

SEQ ID NO: 1720051 - RNA, 15 nt, Human
ccuccugugugugcg

SEQ ID NO: 1720052 - RNA, 13 nt, Human
ccuccugugugug

SEQ ID NO: 1720053 - RNA, 13 nt, Human
ccuccugggcuaa

SEQ ID NO: 1720054 - RNA, 17 nt, Human
ccuccugggaaugaagc

SEQ ID NO: 1720055 - RNA, 13 nt, Human
ccuccuggacucc

SEQ ID NO: 1720056 - RNA, 13 nt, Human
ccucucugcccua

SEQ ID NO: 1720057 - RNA, 16 nt, Human
ccucugacacacagcu

SEQ ID NO: 1720058 - RNA, 23 nt, Human
ccucugaaaaccaauguucucuc

SEQ ID NO: 1720059 - RNA, 12 nt, Human
ccucucccauca

SEQ ID NO: 1720060 - RNA, 19 nt, Human
ccucuccacugccuucgau

SEQ ID NO: 1720061 - RNA, 16 nt, Human
ccucuccacugccuuc

SEQ ID NO: 1720062 - RNA, 14 nt, Human
ccucuccacugccu

SEQ ID NO: 1720063 - RNA, 13 nt, Human
ccucuccacugcc

SEQ ID NO: 1720064 - RNA, 12 nt, Human
ccucuccacugc

SEQ ID NO: 1720065 - RNA, 23 nt, Human
ccuccugugugugcgccuacagg

SEQ ID NO: 1720066 - RNA, 20 nt, Human
ccuccuuaucaaaggacacc

SEQ ID NO: 1720067 - RNA, 18 nt, Human
ccuccuuaucaaaggaca

SEQ ID NO: 1720068 - RNA, 12 nt, Human
ccucugggacug

SEQ ID NO: 1720069 - RNA, 17 nt, Human
ccucuggcuccagcugg

SEQ ID NO: 1720070 - RNA, 16 nt, Human
ccucuggcuccagcug

SEQ ID NO: 1720071 - RNA, 15 nt, Human
ccucugcacaagcug

SEQ ID NO: 1720072 - RNA, 11 nt, Human
ccucugcacaa

SEQ ID NO: 1720073 - RNA, 18 nt, Human
ccucugacacacagcucu

SEQ ID NO: 1720074 - RNA, 17 nt, Human
ccucugacacacagcuc

SEQ ID NO: 1720075 - RNA, 19 nt, Human
ccucugcacaagcugcacc

SEQ ID NO: 1720076 - RNA, 17 nt, Human
ccucugcacaagcugca

SEQ ID NO: 1720077 - RNA, 20 nt, Human
ccucugcacaagcugcaccc

SEQ ID NO: 1720078 - RNA, 21 nt, Human
ccucugcacuccccugcuggg

SEQ ID NO: 1720079 - RNA, 20 nt, Human
ccucugcacuccccugcugg

SEQ ID NO: 1720080 - RNA, 15 nt, Human
ccucugcacuccccu

SEQ ID NO: 1720081 - RNA, 14 nt, Human
ccucugcacucccc

SEQ ID NO: 1720082 - RNA, 22 nt, Human
ccucugcacuccccugcugggu

SEQ ID NO: 1720083 - RNA, 17 nt, Human
ccugugccucugggacu

SEQ ID NO: 1720084 - RNA, 15 nt, Human
ccugugccucuggga

SEQ ID NO: 1720085 - RNA, 19 nt, Human
ccugugccucugggacugg

SEQ ID NO: 1720086 - RNA, 19 nt, Human
ccugugauggggcccugcc

SEQ ID NO: 1720087 - RNA, 18 nt, Human
ccugugauggggcccugc

SEQ ID NO: 1720088 - RNA, 17 nt, Human
ccugugauggggcccug

SEQ ID NO: 1720089 - RNA, 21 nt, Human
ccugugauggggcccugccuc

SEQ ID NO: 1720090 - RNA, 20 nt, Human
ccugugauggggcccugccu

SEQ ID NO: 1720091 - RNA, 22 nt, Human
ccugugauggggcccugccucc

SEQ ID NO: 1720092 - RNA, 18 nt, Human
ccuguccccgcacugggc

SEQ ID NO: 1720093 - RNA, 17 nt, Human
ccugucccccugacaac

SEQ ID NO: 1720094 - RNA, 20 nt, Human
ccugugaguacuacaguccu

SEQ ID NO: 1720095 - RNA, 22 nt, Human
ccugugagcuaggaauuguguu

SEQ ID NO: 1720096 - RNA, 23 nt, Human
ccuguagagugggagcugagugg

SEQ ID NO: 1720097 - RNA, 21 nt, Human
ccuguagagugggagcugagu

SEQ ID NO: 1720098 - RNA, 15 nt, Human
ccuggugcugccaca

SEQ ID NO: 1720099 - RNA, 21 nt, Human
ccuggugcugccacacuucag

SEQ ID NO: 1720100 - RNA, 18 nt, Human
ccuggugcugccacacuu

SEQ ID NO: 1720101 - RNA, 13 nt, Human
ccugguggcagcu

SEQ ID NO: 1720102 - RNA, 12 nt, Human
ccugguggcagc

SEQ ID NO: 1720103 - RNA, 20 nt, Human
ccuguaauccuagcacuuug

SEQ ID NO: 1720104 - RNA, 18 nt, Human
ccugguggcagcucaccu

SEQ ID NO: 1720105 - RNA, 17 nt, Human
ccugguggcagcucacc

SEQ ID NO: 1720106 - RNA, 16 nt, Human
ccugguggcagcucac

SEQ ID NO: 1720107 - RNA, 14 nt, Human
ccugguggcagcuc

SEQ ID NO: 1720108 - RNA, 16 nt, Human
ccuggccccucagggu

SEQ ID NO: 1720109 - RNA, 14 nt, Human
ccuggccccucagg

SEQ ID NO: 1720110 - RNA, 12 nt, Human
ccuggcggggug

SEQ ID NO: 1720111 - RNA, 20 nt, Human
ccuggcuccaaacccucgag

SEQ ID NO: 1720112 - RNA, 23 nt, Human
ccuggcaugggaaugaaugucag

SEQ ID NO: 1720113 - RNA, 18 nt, Human
ccuggcaugggaaugaau

SEQ ID NO: 1720114 - RNA, 15 nt, Human
ccugggcagaaggaa

SEQ ID NO: 1720115 - RNA, 14 nt, Human
ccugggcagaagga

SEQ ID NO: 1720116 - RNA, 12 nt, Human
ccugggcagaag

SEQ ID NO: 1720117 - RNA, 20 nt, Human
ccugggaucccucauccuca

SEQ ID NO: 1720118 - RNA, 16 nt, Human
ccugggaucccucauc

SEQ ID NO: 1720119 - RNA, 20 nt, Human
ccugggaggucaaggcugca

SEQ ID NO: 1720120 - RNA, 21 nt, Human
ccugggaggcucuggagccca

SEQ ID NO: 1720121 - RNA, 13 nt, Human
ccugggaggcucu

SEQ ID NO: 1720122 - RNA, 13 nt, Human
ccugggaggcagu

SEQ ID NO: 1720123 - RNA, 17 nt, Human
ccuggcaugggaaugaa

SEQ ID NO: 1720124 - RNA, 16 nt, Human
ccuggcaugggaauga

SEQ ID NO: 1720125 - RNA, 19 nt, Human
ccuggcagccgugccuuca

SEQ ID NO: 1720126 - RNA, 18 nt, Human
ccuggcagccgugccuuc

SEQ ID NO: 1720127 - RNA, 12 nt, Human
ccuggcagccgu

SEQ ID NO: 1720128 - RNA, 21 nt, Human
ccuggcacugcuuccagugag

SEQ ID NO: 1720129 - RNA, 16 nt, Human
ccuggcagccccuguu

SEQ ID NO: 1720130 - RNA, 17 nt, Human
ccuggcacugcuuccag

SEQ ID NO: 1720131 - RNA, 20 nt, Human
ccuggcacugcuuccaguga

SEQ ID NO: 1720132 - RNA, 14 nt, Human
ccuggacccugugg

SEQ ID NO: 1720133 - RNA, 13 nt, Human
ccuggacccugug

SEQ ID NO: 1720134 - RNA, 20 nt, Human
ccuggacugugugcucagga

SEQ ID NO: 1720135 - RNA, 17 nt, Human
ccuggacugugugcuca

SEQ ID NO: 1720136 - RNA, 14 nt, Human
ccuggacuccugca

SEQ ID NO: 1720137 - RNA, 17 nt, Human
ccugcuuugggcugccc

SEQ ID NO: 1720138 - RNA, 19 nt, Human
ccugcuuugggcugcccug

SEQ ID NO: 1720139 - RNA, 18 nt, Human
ccugcuuugggcugcccu

SEQ ID NO: 1720140 - RNA, 20 nt, Human
ccugcuuuuuauggccugug

SEQ ID NO: 1720141 - RNA, 19 nt, Human
ccugcugguucaggguugg

SEQ ID NO: 1720142 - RNA, 13 nt, Human
ccugcugguucag

SEQ ID NO: 1720143 - RNA, 22 nt, Human
ccugcuccagcuguucagcugg

SEQ ID NO: 1720144 - RNA, 14 nt, Human
ccugcuccagcugu

SEQ ID NO: 1720145 - RNA, 13 nt, Human
ccugcuccagcug

SEQ ID NO: 1720146 - RNA, 12 nt, Human
ccugcuccagcu

SEQ ID NO: 1720147 - RNA, 17 nt, Human
ccugcuaauuccccaga

SEQ ID NO: 1720148 - RNA, 23 nt, Human
ccugcgucucauacucaccucac

SEQ ID NO: 1720149 - RNA, 16 nt, Human
ccugcaaccugauugu

SEQ ID NO: 1720150 - RNA, 19 nt, Human
ccugcaacaccuuguuucc

SEQ ID NO: 1720151 - RNA, 18 nt, Human
ccugcaacaccuuguuuc

SEQ ID NO: 1720152 - RNA, 19 nt, Human
ccuugaacuuugaccucug

SEQ ID NO: 1720153 - RNA, 17 nt, Human
ccuugaaugaugccaug

SEQ ID NO: 1720154 - RNA, 16 nt, Human
ccuugaacuggguacu

SEQ ID NO: 1720155 - RNA, 17 nt, Human
ccuugaacuuugaccuc

SEQ ID NO: 1720156 - RNA, 14 nt, Human
ccuugaacugggua

SEQ ID NO: 1720157 - RNA, 22 nt, Human
ccuugaaaacacuguucucugc

SEQ ID NO: 1720158 - RNA, 21 nt, Human
ccuugaaaacacuguucucug

SEQ ID NO: 1720159 - RNA, 19 nt, Human
ccuugaaaacacuguucuc

SEQ ID NO: 1720160 - RNA, 18 nt, Human
ccuucgcuccugugucuu

SEQ ID NO: 1720161 - RNA, 15 nt, Human
ccuucgcuccugugu

SEQ ID NO: 1720162 - RNA, 14 nt, Human
ccuucgcuccugug

SEQ ID NO: 1720163 - RNA, 13 nt, Human
ccuucgcuccugu

SEQ ID NO: 1720164 - RNA, 15 nt, Human
ccuugaaaacacugu

SEQ ID NO: 1720165 - RNA, 16 nt, Human
ccuucuuuuucuucuu

SEQ ID NO: 1720166 - RNA, 14 nt, Human
ccuucuuuuucuuc

SEQ ID NO: 1720167 - RNA, 23 nt, Human
ccuugaguugauucagcucugca

SEQ ID NO: 1720168 - RNA, 22 nt, Human
ccuugaguugauucagcucugc

SEQ ID NO: 1720169 - RNA, 21 nt, Human
ccuugaccauucuccaccugc

SEQ ID NO: 1720170 - RNA, 22 nt, Human
ccuugaccauucuccaccugcc

SEQ ID NO: 1720171 - RNA, 20 nt, Human
ccuugaccauucuccaccug

SEQ ID NO: 1720172 - RNA, 19 nt, Human
ccuugaccauucuccaccu

SEQ ID NO: 1720173 - RNA, 17 nt, Human
ccuugacagggcacacc

SEQ ID NO: 1720174 - RNA, 15 nt, Human
ccuugacagggcaca

SEQ ID NO: 1720175 - RNA, 14 nt, Human
ccuugacagggcac

SEQ ID NO: 1720176 - RNA, 13 nt, Human
ccuugacagggca

SEQ ID NO: 1720177 - RNA, 11 nt, Human
ccuuuggcuuc

SEQ ID NO: 1720178 - RNA, 19 nt, Human
ccuucagugccuuauggaa

SEQ ID NO: 1720179 - RNA, 17 nt, Human
ccuuagacagucccugc

SEQ ID NO: 1720180 - RNA, 16 nt, Human
ccuuagacagucccug

SEQ ID NO: 1720181 - RNA, 18 nt, Human
ccuuagaaccuuucuuac

SEQ ID NO: 1720182 - RNA, 16 nt, Human
ccuuagaaccuuucuu

SEQ ID NO: 1720183 - RNA, 15 nt, Human
ccuuagaaccuuucu

SEQ ID NO: 1720184 - RNA, 14 nt, Human
ccuuagaaccuuuc

SEQ ID NO: 1720185 - RNA, 19 nt, Human
ccuuagacagucccugcca

SEQ ID NO: 1720186 - RNA, 18 nt, Human
ccuuagacagucccugcc

SEQ ID NO: 1720187 - RNA, 21 nt, Human
ccuuagacagucccugccaau

SEQ ID NO: 1720188 - RNA, 14 nt, Human
ccuucaaccauucc

SEQ ID NO: 1720189 - RNA, 19 nt, Human
ccuucaaagcaaaugucuu

SEQ ID NO: 1720190 - RNA, 15 nt, Human
ccuucaaagcaaaug

SEQ ID NO: 1720191 - RNA, 14 nt, Human
ccuuaccugccagg

SEQ ID NO: 1720192 - RNA, 20 nt, Human
ccuuaccucggugccuuccu

SEQ ID NO: 1720193 - RNA, 16 nt, Human
ccuuaccagcagagca

SEQ ID NO: 1720194 - RNA, 15 nt, Human
ccuuaccagcagagc

SEQ ID NO: 1720195 - RNA, 17 nt, Human
ccuuaccagcagagcac

SEQ ID NO: 1720196 - RNA, 14 nt, Human
ccuuaccagcagag

SEQ ID NO: 1720197 - RNA, 20 nt, Human
ccuguggccaaguucuuagu

SEQ ID NO: 1720198 - RNA, 14 nt, Human
ccuuccucuuucca

SEQ ID NO: 1720199 - RNA, 13 nt, Human
ccuucgccaccug

SEQ ID NO: 1720200 - RNA, 23 nt, Human
ccuucgauacaccgggccuggag

SEQ ID NO: 1720201 - RNA, 22 nt, Human
ccuucgauacaccgggccugga

SEQ ID NO: 1720202 - RNA, 20 nt, Human
ccuucgauacaccgggccug

SEQ ID NO: 1720203 - RNA, 15 nt, Human
ccuucgauacaccgg

SEQ ID NO: 1720204 - RNA, 22 nt, Human
ccuuccaggggugggacacccu

SEQ ID NO: 1720205 - RNA, 18 nt, Human
ccuuccaggggugggaca

SEQ ID NO: 1720206 - RNA, 23 nt, Human
ccuuccaugucgccucugcauuc

SEQ ID NO: 1720207 - RNA, 21 nt, Human
ccuuccaugucgccucugcau

SEQ ID NO: 1720208 - RNA, 20 nt, Human
ccuuccaugucgccucugca

SEQ ID NO: 1720209 - RNA, 19 nt, Human
ccuuccaugucgccucugc

SEQ ID NO: 1720210 - RNA, 16 nt, Human
ccuuccagggguggga

SEQ ID NO: 1720211 - RNA, 15 nt, Human
ccuuccagggguggg

SEQ ID NO: 1720212 - RNA, 14 nt, Human
ccuucagugccuua

SEQ ID NO: 1720213 - RNA, 13 nt, Human
ccuucagugccuu

SEQ ID NO: 1720214 - RNA, 10 nt, Human
ccuucagugc

SEQ ID NO: 1720215 - RNA, 15 nt, Human
ccuucagugccuuau

SEQ ID NO: 1720216 - RNA, 20 nt, Human
ccuucagugccuuauggaac

SEQ ID NO: 1720217 - RNA, 22 nt, Human
cguuccuucaaagcaaaugucu

SEQ ID NO: 1720218 - RNA, 12 nt, Human
cguucucugccu

SEQ ID NO: 1720219 - RNA, 20 nt, Human
cguuucuaugacacaugcaa

SEQ ID NO: 1720220 - RNA, 19 nt, Human
cguuucuaaaggcuaccuu

SEQ ID NO: 1720221 - RNA, 21 nt, Human
cguuucuaaaggcuaccuuug

SEQ ID NO: 1720222 - RNA, 17 nt, Human
cguggcugcuucaagga

SEQ ID NO: 1720223 - RNA, 15 nt, Human
cguggcugcuucaag

SEQ ID NO: 1720224 - RNA, 14 nt, Human
cguggcugcuucaa

SEQ ID NO: 1720225 - RNA, 12 nt, Human
cguggcugcuuc

SEQ ID NO: 1720226 - RNA, 16 nt, Human
cgugccuggccacgcc

SEQ ID NO: 1720227 - RNA, 12 nt, Human
cgugccuggcca

SEQ ID NO: 1720228 - RNA, 18 nt, Human
cgugccuucagcucuaca

SEQ ID NO: 1720229 - RNA, 16 nt, Human
cgugccuucagcucua

SEQ ID NO: 1720230 - RNA, 15 nt, Human
cgugccuucagcucu

SEQ ID NO: 1720231 - RNA, 13 nt, Human
cgugccuucagcu

SEQ ID NO: 1720232 - RNA, 14 nt, Human
cgucuaccugaggg

SEQ ID NO: 1720233 - RNA, 14 nt, Human
cgucugacaggcaa

SEQ ID NO: 1720234 - RNA, 13 nt, Human
cgucugacaggca

SEQ ID NO: 1720235 - RNA, 14 nt, Human
cguccccugucccc

SEQ ID NO: 1720236 - RNA, 11 nt, Human
cguccccuguc

SEQ ID NO: 1720237 - RNA, 22 nt, Human
cgucccccucuggcuccagcug

SEQ ID NO: 1720238 - RNA, 19 nt, Human
cgugcauaccacuuuuguu

SEQ ID NO: 1720239 - RNA, 22 nt, Human
cgugcacacaccagagcccacc

SEQ ID NO: 1720240 - RNA, 14 nt, Human
cgugcauaccacuu

SEQ ID NO: 1720241 - RNA, 18 nt, Human
cgugcauaccacuuuugu

SEQ ID NO: 1720242 - RNA, 21 nt, Human
cgugcacacaccagagcccac

SEQ ID NO: 1720243 - RNA, 20 nt, Human
cgugcacacaccagagccca

SEQ ID NO: 1720244 - RNA, 12 nt, Human
cgugacaacacu

SEQ ID NO: 1720245 - RNA, 23 nt, Human
cggugcuaucucccccagcccca

SEQ ID NO: 1720246 - RNA, 22 nt, Human
cguauaaaagccuguuuaagag

SEQ ID NO: 1720247 - RNA, 21 nt, Human
cguauaaaagccuguuuaaga

SEQ ID NO: 1720248 - RNA, 17 nt, Human
cguauaaaagccuguuu

SEQ ID NO: 1720249 - RNA, 16 nt, Human
cguauaaaagccuguu

SEQ ID NO: 1720250 - RNA, 22 nt, Human
cguauaugucucaggucccugc

SEQ ID NO: 1720251 - RNA, 21 nt, Human
cgucccccucuggcuccagcu

SEQ ID NO: 1720252 - RNA, 14 nt, Human
cgucccccucuggc

SEQ ID NO: 1720253 - RNA, 14 nt, Human
cgucauaacuagaa

SEQ ID NO: 1720254 - RNA, 16 nt, Human
cgucauaacuagaacu

SEQ ID NO: 1720255 - RNA, 17 nt, Human
cgucauaacuagaacug

SEQ ID NO: 1720256 - RNA, 19 nt, Human
cggaucuuuggacagaagc

SEQ ID NO: 1720257 - RNA, 16 nt, Human
cggaucuuuggacaga

SEQ ID NO: 1720258 - RNA, 20 nt, Human
cggacagccacggccaggcc

SEQ ID NO: 1720259 - RNA, 13 nt, Human
cgcuccugugucu

SEQ ID NO: 1720260 - RNA, 17 nt, Human
cgcuauugucaccaggg

SEQ ID NO: 1720261 - RNA, 18 nt, Human
cggacagccacggccagg

SEQ ID NO: 1720262 - RNA, 16 nt, Human
cggacagccacggcca

SEQ ID NO: 1720263 - RNA, 15 nt, Human
cggacagccacggcc

SEQ ID NO: 1720264 - RNA, 20 nt, Human
cggaaugaaccacaucuugc

SEQ ID NO: 1720265 - RNA, 16 nt, Human
cggccuccauccugag

SEQ ID NO: 1720266 - RNA, 17 nt, Human
cggccuccauccugagg

SEQ ID NO: 1720267 - RNA, 19 nt, Human
cggcuggccuggccccuca

SEQ ID NO: 1720268 - RNA, 18 nt, Human
cggcuggccuggccccuc

SEQ ID NO: 1720269 - RNA, 16 nt, Human
cggcuggccuggcccc

SEQ ID NO: 1720270 - RNA, 15 nt, Human
cggcuggccuggccc

SEQ ID NO: 1720271 - RNA, 15 nt, Human
cggccuuuggcuuca

SEQ ID NO: 1720272 - RNA, 14 nt, Human
cggccucccaaagu

SEQ ID NO: 1720273 - RNA, 12 nt, Human
cgggcaugacac

SEQ ID NO: 1720274 - RNA, 15 nt, Human
cgggcaugacacgaa

SEQ ID NO: 1720275 - RNA, 17 nt, Human
cgggaggucgaggcagg

SEQ ID NO: 1720276 - RNA, 16 nt, Human
cgggaggucgaggcag

SEQ ID NO: 1720277 - RNA, 20 nt, Human
cgggaggauguucugggaca

SEQ ID NO: 1720278 - RNA, 21 nt, Human
cgggagccugaucaccugccc

SEQ ID NO: 1720279 - RNA, 22 nt, Human
cgggagccugaucaccugcccu

SEQ ID NO: 1720280 - RNA, 21 nt, Human
cgggaggauguucugggacac

SEQ ID NO: 1720281 - RNA, 14 nt, Human
ccuuuaagagaaau

SEQ ID NO: 1720282 - RNA, 13 nt, Human
ccuuuaagagaaa

SEQ ID NO: 1720283 - RNA, 19 nt, Human
ccuuguggucccaccccac

SEQ ID NO: 1720284 - RNA, 16 nt, Human
ccuuguggucccaccc

SEQ ID NO: 1720285 - RNA, 20 nt, Human
ccuuguggucccaccccaca

SEQ ID NO: 1720286 - RNA, 14 nt, Human
ccuuggcugcaggg

SEQ ID NO: 1720287 - RNA, 13 nt, Human
ccuuggcugcagg

SEQ ID NO: 1720288 - RNA, 12 nt, Human
ccuuggcugcag

SEQ ID NO: 1720289 - RNA, 16 nt, Human
ccuuugcuugaaagaa

SEQ ID NO: 1720290 - RNA, 14 nt, Human
ccuuugacaaaggu

SEQ ID NO: 1720291 - RNA, 11 nt, Human
cgcaaugugac

SEQ ID NO: 1720292 - RNA, 12 nt, Human
cgauuucuguuu

SEQ ID NO: 1720293 - RNA, 19 nt, Human
cgauucuucugcuucagcc

SEQ ID NO: 1720294 - RNA, 13 nt, Human
cgauucuucugcu

SEQ ID NO: 1720295 - RNA, 21 nt, Human
cgauucuucugcuucagccuc

SEQ ID NO: 1720296 - RNA, 19 nt, Human
cgaucuggguucacugcaa

SEQ ID NO: 1720297 - RNA, 19 nt, Human
cgaggccuucucugaagga

SEQ ID NO: 1720298 - RNA, 18 nt, Human
cgaggccuucucugaagg

SEQ ID NO: 1720299 - RNA, 12 nt, Human
cgaggacaggga

SEQ ID NO: 1720300 - RNA, 13 nt, Human
cgaggacagggag

SEQ ID NO: 1720301 - RNA, 14 nt, Human
cgaggacagggagg

SEQ ID NO: 1720302 - RNA, 15 nt, Human
ccuuuguauucucuc

SEQ ID NO: 1720303 - RNA, 18 nt, Human
ccuuuguauucucuccug

SEQ ID NO: 1720304 - RNA, 20 nt, Human
ccuuuguauucucuccugua

SEQ ID NO: 1720305 - RNA, 14 nt, Human
cgcuaagagggagg

SEQ ID NO: 1720306 - RNA, 16 nt, Human
cgcuaagagggaggga

SEQ ID NO: 1720307 - RNA, 15 nt, Human
cgcuaagagggaggg

SEQ ID NO: 1720308 - RNA, 21 nt, Human
cgcuaagagggagggagggcu

SEQ ID NO: 1720309 - RNA, 20 nt, Human
cgcuacuaugauuuaauuug

SEQ ID NO: 1720310 - RNA, 20 nt, Human
cgcgugcacacaccagagcc

SEQ ID NO: 1720311 - RNA, 19 nt, Human
cgcgugcacacaccagagc

SEQ ID NO: 1720312 - RNA, 16 nt, Human
cgcgugcacacaccag

SEQ ID NO: 1720313 - RNA, 17 nt, Human
cgcgacaaugcaaacca

SEQ ID NO: 1720314 - RNA, 16 nt, Human
cgcgacaaugcaaacc

SEQ ID NO: 1720315 - RNA, 15 nt, Human
cgcccccacugguga

SEQ ID NO: 1720316 - RNA, 12 nt, Human
cgcccaggcugg

SEQ ID NO: 1720317 - RNA, 20 nt, Human
cgcccaggcuggagugcaau

SEQ ID NO: 1720318 - RNA, 19 nt, Human
cgcccaggcuggagugcaa

SEQ ID NO: 1720319 - RNA, 14 nt, Human
cgcagacaggacca

SEQ ID NO: 1720320 - RNA, 13 nt, Human
cgcagacaggacc

SEQ ID NO: 1720321 - RNA, 18 nt, Human
cccaaaaggcagaagcaa

SEQ ID NO: 1720322 - RNA, 13 nt, Human
cccaaaaggcaga

SEQ ID NO: 1720323 - RNA, 20 nt, Human
ccauuuugggguacccacug

SEQ ID NO: 1720324 - RNA, 23 nt, Human
ccauuuuggauucuuauggacaa

SEQ ID NO: 1720325 - RNA, 22 nt, Human
ccauuuugggguacccacugcu

SEQ ID NO: 1720326 - RNA, 15 nt, Human
cccaaagaugcagcc

SEQ ID NO: 1720327 - RNA, 12 nt, Human
cccaaagaugca

SEQ ID NO: 1720328 - RNA, 16 nt, Human
cccaaagcagugcaug

SEQ ID NO: 1720329 - RNA, 18 nt, Human
ccauucugccugcccagg

SEQ ID NO: 1720330 - RNA, 17 nt, Human
ccauucugccugcccag

SEQ ID NO: 1720331 - RNA, 18 nt, Human
ccauucuccaccugccag

SEQ ID NO: 1720332 - RNA, 17 nt, Human
ccauucuccaccugcca

SEQ ID NO: 1720333 - RNA, 20 nt, Human
ccauucugccugcccaggcc

SEQ ID NO: 1720334 - RNA, 19 nt, Human
ccauucugccugcccaggc

SEQ ID NO: 1720335 - RNA, 21 nt, Human
ccauucugccugcccaggccc

SEQ ID NO: 1720336 - RNA, 16 nt, Human
ccauucuccaccugcc

SEQ ID NO: 1720337 - RNA, 15 nt, Human
ccauucuccaccugc

SEQ ID NO: 1720338 - RNA, 14 nt, Human
ccauggacuuuguu

SEQ ID NO: 1720339 - RNA, 13 nt, Human
ccauggacuuugu

SEQ ID NO: 1720340 - RNA, 21 nt, Human
cccacaaaggagagcuagcag

SEQ ID NO: 1720341 - RNA, 18 nt, Human
ccaugauguuuuccauga

SEQ ID NO: 1720342 - RNA, 21 nt, Human
ccaugauuaaccacuucagcu

SEQ ID NO: 1720343 - RNA, 19 nt, Human
ccaugauuaaccacuucag

SEQ ID NO: 1720344 - RNA, 14 nt, Human
ccaugaagauguag

SEQ ID NO: 1720345 - RNA, 13 nt, Human
ccaugcugcccug

SEQ ID NO: 1720346 - RNA, 11 nt, Human
ccaugcugccc

SEQ ID NO: 1720347 - RNA, 13 nt, Human
ccaugcuccuggc

SEQ ID NO: 1720348 - RNA, 14 nt, Human
ccaugcugcccugu

SEQ ID NO: 1720349 - RNA, 22 nt, Human
ccaucauugaaaucuuuuugcu

SEQ ID NO: 1720350 - RNA, 19 nt, Human
ccauccucuguacagagcc

SEQ ID NO: 1720351 - RNA, 12 nt, Human
ccauccucugua

SEQ ID NO: 1720352 - RNA, 13 nt, Human
ccaucaccagaca

SEQ ID NO: 1720353 - RNA, 19 nt, Human
ccagugaggcucugcccuu

SEQ ID NO: 1720354 - RNA, 18 nt, Human
ccagugaggcucugcccu

SEQ ID NO: 1720355 - RNA, 20 nt, Human
ccagugaggcucugcccuug

SEQ ID NO: 1720356 - RNA, 23 nt, Human
ccauacuaauuauacccccugca

SEQ ID NO: 1720357 - RNA, 13 nt, Human
ccauacuaauuau

SEQ ID NO: 1720358 - RNA, 12 nt, Human
ccauacuaauua

SEQ ID NO: 1720359 - RNA, 20 nt, Human
ccauccucuguacagagccc

SEQ ID NO: 1720360 - RNA, 15 nt, Human
ccagguucagcuugu

SEQ ID NO: 1720361 - RNA, 14 nt, Human
ccagguucagcuug

SEQ ID NO: 1720362 - RNA, 21 nt, Human
ccaggugcuaggaacacuccu

SEQ ID NO: 1720363 - RNA, 20 nt, Human
ccagugaaaucaguuacucu

SEQ ID NO: 1720364 - RNA, 13 nt, Human
ccaguaucuugaa

SEQ ID NO: 1720365 - RNA, 19 nt, Human
ccaggugcuaggaacacuc

SEQ ID NO: 1720366 - RNA, 13 nt, Human
ccaggccccugcc

SEQ ID NO: 1720367 - RNA, 19 nt, Human
ccaggcuggucucaaacuc

SEQ ID NO: 1720368 - RNA, 21 nt, Human
ccaggcuggucucgaacuccu

SEQ ID NO: 1720369 - RNA, 20 nt, Human
ccaggcuguaucccaugagc

SEQ ID NO: 1720370 - RNA, 12 nt, Human
ccagggaagggg

SEQ ID NO: 1720371 - RNA, 19 nt, Human
ccaggcuuuuuuaucaugu

SEQ ID NO: 1720372 - RNA, 16 nt, Human
ccaggagcagccacau

SEQ ID NO: 1720373 - RNA, 15 nt, Human
ccaggagcagccaca

SEQ ID NO: 1720374 - RNA, 15 nt, Human
ccaggagccccgagg

SEQ ID NO: 1720375 - RNA, 19 nt, Human
ccaggagccuccugcccuu

SEQ ID NO: 1720376 - RNA, 16 nt, Human
ccaggagccccgaggc

SEQ ID NO: 1720377 - RNA, 18 nt, Human
ccaggagccuccugcccu

SEQ ID NO: 1720378 - RNA, 14 nt, Human
ccaggagccuccug

SEQ ID NO: 1720379 - RNA, 13 nt, Human
ccaggagccuccu

SEQ ID NO: 1720380 - RNA, 12 nt, Human
ccaggaggccag

SEQ ID NO: 1720381 - RNA, 13 nt, Human
ccaggaggccagc

SEQ ID NO: 1720382 - RNA, 14 nt, Human
ccaggaggccagcc

SEQ ID NO: 1720383 - RNA, 22 nt, Human
ccaggcauuccccaggaggcca

SEQ ID NO: 1720384 - RNA, 23 nt, Human
ccaggcauuccccaggaggccag

SEQ ID NO: 1720385 - RNA, 24 nt, Human
ccaggcauuccccaggaggccagc

SEQ ID NO: 1720386 - RNA, 21 nt, Human
ccaggccacaagacccuugug

SEQ ID NO: 1720387 - RNA, 14 nt, Human
ccaggcauucccca

SEQ ID NO: 1720388 - RNA, 17 nt, Human
ccaggcauuccccagga

SEQ ID NO: 1720389 - RNA, 13 nt, Human
ccaggcauggugg

SEQ ID NO: 1720390 - RNA, 22 nt, Human
ccaggaagccagcaggcucuca

SEQ ID NO: 1720391 - RNA, 23 nt, Human
ccagcuggggccaggcugggucg

SEQ ID NO: 1720392 - RNA, 22 nt, Human
ccagcuggggccaggcuggguc

SEQ ID NO: 1720393 - RNA, 21 nt, Human
ccagcuggggccaggcugggu

SEQ ID NO: 1720394 - RNA, 20 nt, Human
ccagcuggggccaggcuggg

SEQ ID NO: 1720395 - RNA, 19 nt, Human
ccagcuggggccaggcugg

SEQ ID NO: 1720396 - RNA, 18 nt, Human
ccagcuggggccaggcug

SEQ ID NO: 1720397 - RNA, 17 nt, Human
ccagcuggggccaggcu

SEQ ID NO: 1720398 - RNA, 16 nt, Human
ccagcgagcccuggug

SEQ ID NO: 1720399 - RNA, 15 nt, Human
ccagcgagcccuggu

SEQ ID NO: 1720400 - RNA, 14 nt, Human
ccagcgagcccugg

SEQ ID NO: 1720401 - RNA, 22 nt, Human
ccagccuugaccauucuccacc

SEQ ID NO: 1720402 - RNA, 13 nt, Human
ccagcucuggucc

SEQ ID NO: 1720403 - RNA, 12 nt, Human
ccagcucugguc

SEQ ID NO: 1720404 - RNA, 11 nt, Human
ccagcucuggu

SEQ ID NO: 1720405 - RNA, 20 nt, Human
ccagccuugaccauucucca

SEQ ID NO: 1720406 - RNA, 19 nt, Human
ccagccuugaccauucucc

SEQ ID NO: 1720407 - RNA, 16 nt, Human
ccagagcccaccuugg

SEQ ID NO: 1720408 - RNA, 22 nt, Human
ccagagcccaccuuggcucaag

SEQ ID NO: 1720409 - RNA, 24 nt, Human
ccagcuggagaaauaugguacuca

SEQ ID NO: 1720410 - RNA, 23 nt, Human
ccagcugcuugggcuucauccuc

SEQ ID NO: 1720411 - RNA, 20 nt, Human
ccagcugcuugggcuucauc

SEQ ID NO: 1720412 - RNA, 22 nt, Human
ccagcucugguccauagagagc

SEQ ID NO: 1720413 - RNA, 21 nt, Human
ccagcucugguccauagagag

SEQ ID NO: 1720414 - RNA, 17 nt, Human
ccagcucugguccauag

SEQ ID NO: 1720415 - RNA, 14 nt, Human
ccagcucuggucca

SEQ ID NO: 1720416 - RNA, 22 nt, Human
cccaggugcuaggaacacuccu

SEQ ID NO: 1720417 - RNA, 23 nt, Human
cccaggugcuaggaacacuccuu

SEQ ID NO: 1720418 - RNA, 20 nt, Human
cccagucuggaaugcagugg

SEQ ID NO: 1720419 - RNA, 13 nt, Human
cccagugcccaca

SEQ ID NO: 1720420 - RNA, 18 nt, Human
cccaggccuccuacagcu

SEQ ID NO: 1720421 - RNA, 17 nt, Human
cccaggccuccuacagc

SEQ ID NO: 1720422 - RNA, 14 nt, Human
cccaggcugagccu

SEQ ID NO: 1720423 - RNA, 18 nt, Human
cccaggcgccccuucccc

SEQ ID NO: 1720424 - RNA, 16 nt, Human
cccaggccugccuguu

SEQ ID NO: 1720425 - RNA, 15 nt, Human
cccaggccugccugu

SEQ ID NO: 1720426 - RNA, 22 nt, Human
cccaggaggccagccuugacca

SEQ ID NO: 1720427 - RNA, 13 nt, Human
cccaggaggccag

SEQ ID NO: 1720428 - RNA, 21 nt, Human
cccaggagccccgaggccuuc

SEQ ID NO: 1720429 - RNA, 13 nt, Human
cccaggcaggucu

SEQ ID NO: 1720430 - RNA, 11 nt, Human
cccaggcaggu

SEQ ID NO: 1720431 - RNA, 22 nt, Human
cccaggccccugccacccuggg

SEQ ID NO: 1720432 - RNA, 21 nt, Human
cccaggccccugccacccugg

SEQ ID NO: 1720433 - RNA, 18 nt, Human
cccaggccccugccaccc

SEQ ID NO: 1720434 - RNA, 16 nt, Human
cccaggccccugccac

SEQ ID NO: 1720435 - RNA, 11 nt, Human
cccaggccccu

SEQ ID NO: 1720436 - RNA, 21 nt, Human
cccaggcauuccccaggaggc

SEQ ID NO: 1720437 - RNA, 20 nt, Human
cccaggcauuccccaggagg

SEQ ID NO: 1720438 - RNA, 17 nt, Human
cccaggcaggucuugaa

SEQ ID NO: 1720439 - RNA, 23 nt, Human
cccaggcauuccccaggaggcca

SEQ ID NO: 1720440 - RNA, 22 nt, Human
cccaggcauuccccaggaggcc

SEQ ID NO: 1720441 - RNA, 18 nt, Human
cccagcgagcccuggugg

SEQ ID NO: 1720442 - RNA, 17 nt, Human
cccagcgagcccuggug

SEQ ID NO: 1720443 - RNA, 23 nt, Human
cccagcgagcccugguggcagug

SEQ ID NO: 1720444 - RNA, 19 nt, Human
cccagcgagcccugguggc

SEQ ID NO: 1720445 - RNA, 11 nt, Human
cccagccccuu

SEQ ID NO: 1720446 - RNA, 23 nt, Human
cccagauugcaacaggcugggcu

SEQ ID NO: 1720447 - RNA, 23 nt, Human
cccagcaagugagagcugggugu

SEQ ID NO: 1720448 - RNA, 22 nt, Human
cccagcaagugagagcugggug

SEQ ID NO: 1720449 - RNA, 21 nt, Human
cccagcaagugagagcugggu

SEQ ID NO: 1720450 - RNA, 20 nt, Human
cccagcaagugagagcuggg

SEQ ID NO: 1720451 - RNA, 19 nt, Human
cccagcaagugagagcugg

SEQ ID NO: 1720452 - RNA, 12 nt, Human
cccagccugcua

SEQ ID NO: 1720453 - RNA, 18 nt, Human
cccagccccuucugaccc

SEQ ID NO: 1720454 - RNA, 18 nt, Human
cccagcaagugagagcug

SEQ ID NO: 1720455 - RNA, 16 nt, Human
cccagcaagugagagc

SEQ ID NO: 1720456 - RNA, 22 nt, Human
cccagauugcaacaggcugggc

SEQ ID NO: 1720457 - RNA, 21 nt, Human
cccagauugcaacaggcuggg

SEQ ID NO: 1720458 - RNA, 20 nt, Human
cccagauugcaacaggcugg

SEQ ID NO: 1720459 - RNA, 20 nt, Human
cccagagggccugcaaggga

SEQ ID NO: 1720460 - RNA, 23 nt, Human
cccaagggccuggccugagcugg

SEQ ID NO: 1720461 - RNA, 19 nt, Human
cccaagggccuggccugag

SEQ ID NO: 1720462 - RNA, 18 nt, Human
cccaagggccuggccuga

SEQ ID NO: 1720463 - RNA, 13 nt, Human
cccaacacaaaga

SEQ ID NO: 1720464 - RNA, 22 nt, Human
ccccucagggucccugguggca

SEQ ID NO: 1720465 - RNA, 17 nt, Human
ccccaggaggccagccu

SEQ ID NO: 1720466 - RNA, 21 nt, Human
ccccacccaagggccuggccu

SEQ ID NO: 1720467 - RNA, 20 nt, Human
ccccacccaagggccuggcc

SEQ ID NO: 1720468 - RNA, 14 nt, Human
ccccacccaagggc

SEQ ID NO: 1720469 - RNA, 14 nt, Human
ccccaagccuggca

SEQ ID NO: 1720470 - RNA, 13 nt, Human
ccccaagccuggc

SEQ ID NO: 1720471 - RNA, 22 nt, Human
ccccaaauggaaaugggcagag

SEQ ID NO: 1720472 - RNA, 13 nt, Human
cccauucugccug

SEQ ID NO: 1720473 - RNA, 18 nt, Human
cccagugccgagaaggaa

SEQ ID NO: 1720474 - RNA, 20 nt, Human
cccagugcccacaggaucag

SEQ ID NO: 1720475 - RNA, 15 nt, Human
cccagugcccacagg

SEQ ID NO: 1720476 - RNA, 16 nt, Human
cccaugcugcccugug

SEQ ID NO: 1720477 - RNA, 15 nt, Human
cccaugcugcccugu

SEQ ID NO: 1720478 - RNA, 18 nt, Human
cccaugcugcccugugag

SEQ ID NO: 1720479 - RNA, 17 nt, Human
cccaugcugcccuguga

SEQ ID NO: 1720480 - RNA, 12 nt, Human
ccacacuccagc

SEQ ID NO: 1720481 - RNA, 16 nt, Human
ccacaggaucagucug

SEQ ID NO: 1720482 - RNA, 16 nt, Human
ccacaggcccuuccuc

SEQ ID NO: 1720483 - RNA, 15 nt, Human
ccacaggcccuuccu

SEQ ID NO: 1720484 - RNA, 23 nt, Human
ccacaggcccuuccucuccacug

SEQ ID NO: 1720485 - RNA, 22 nt, Human
ccacaggcccuuccucuccacu

SEQ ID NO: 1720486 - RNA, 19 nt, Human
ccacaggcccuuccucucc

SEQ ID NO: 1720487 - RNA, 18 nt, Human
ccacaggcccuuccucuc

SEQ ID NO: 1720488 - RNA, 17 nt, Human
ccacaggcccuuccucu

SEQ ID NO: 1720489 - RNA, 22 nt, Human
ccacacccagcccacuucugcc

SEQ ID NO: 1720490 - RNA, 21 nt, Human
ccacacccagcccacuucugc

SEQ ID NO: 1720491 - RNA, 15 nt, Human
ccacacccagcccac

SEQ ID NO: 1720492 - RNA, 20 nt, Human
ccacacccagcccacuucug

SEQ ID NO: 1720493 - RNA, 21 nt, Human
ccaccaacauacucccaucug

SEQ ID NO: 1720494 - RNA, 15 nt, Human
ccaccaacccucaga

SEQ ID NO: 1720495 - RNA, 16 nt, Human
ccacauuccugaugcu

SEQ ID NO: 1720496 - RNA, 16 nt, Human
ccacaugugcacaugc

SEQ ID NO: 1720497 - RNA, 17 nt, Human
ccacaucuugcucugcu

SEQ ID NO: 1720498 - RNA, 18 nt, Human
ccacaucuugcucugcug

SEQ ID NO: 1720499 - RNA, 19 nt, Human
ccacaucuugcucugcuga

SEQ ID NO: 1720500 - RNA, 20 nt, Human
ccacaucuugcucugcugac

SEQ ID NO: 1720501 - RNA, 20 nt, Human
ccacaguggaaccagcccag

SEQ ID NO: 1720502 - RNA, 16 nt, Human
ccaauauucauagcag

SEQ ID NO: 1720503 - RNA, 17 nt, Human
ccacccccacccaaggg

SEQ ID NO: 1720504 - RNA, 23 nt, Human
ccacccaggagccccgaggccuu

SEQ ID NO: 1720505 - RNA, 13 nt, Human
ccacugcagaaga

SEQ ID NO: 1720506 - RNA, 18 nt, Human
ccacugcagaagacagua

SEQ ID NO: 1720507 - RNA, 19 nt, Human
ccacuuagaaauugcauuu

SEQ ID NO: 1720508 - RNA, 14 nt, Human
ccacuucagcugac

SEQ ID NO: 1720509 - RNA, 13 nt, Human
ccacuucagcuga

SEQ ID NO: 1720510 - RNA, 21 nt, Human
ccacuuagaaauugcauuucc

SEQ ID NO: 1720511 - RNA, 18 nt, Human
ccagaauuucccaaagca

SEQ ID NO: 1720512 - RNA, 22 nt, Human
ccagaaguuugagaucagccug

SEQ ID NO: 1720513 - RNA, 23 nt, Human
ccagaaguuugagaucagccugg

SEQ ID NO: 1720514 - RNA, 19 nt, Human
ccagaauuucccaaagcag

SEQ ID NO: 1720515 - RNA, 12 nt, Human
ccagaauuuccc

SEQ ID NO: 1720516 - RNA, 13 nt, Human
ccagaauuucaaa

SEQ ID NO: 1720517 - RNA, 23 nt, Human
ccagaauggucuuucuaaugugu

SEQ ID NO: 1720518 - RNA, 16 nt, Human
ccagaaugcuuuagga

SEQ ID NO: 1720519 - RNA, 21 nt, Human
ccagacaccuugacagggcac

SEQ ID NO: 1720520 - RNA, 21 nt, Human
ccagaauuucccaaagcagug

SEQ ID NO: 1720521 - RNA, 14 nt, Human
ccagaccccuggcu

SEQ ID NO: 1720522 - RNA, 18 nt, Human
ccagaccccuggcuuuuc

SEQ ID NO: 1720523 - RNA, 17 nt, Human
ccagaccccuggcuuuu

SEQ ID NO: 1720524 - RNA, 16 nt, Human
ccagaccccuggcuuu

SEQ ID NO: 1720525 - RNA, 15 nt, Human
ccagaccccuggcuu

SEQ ID NO: 1720526 - RNA, 20 nt, Human
ccacuccagaccccuggcuu

SEQ ID NO: 1720527 - RNA, 18 nt, Human
ccacucaguccauagcag

SEQ ID NO: 1720528 - RNA, 22 nt, Human
ccacuccagaccccuggcuuuu

SEQ ID NO: 1720529 - RNA, 21 nt, Human
ccacuccagaccccuggcuuu

SEQ ID NO: 1720530 - RNA, 11 nt, Human
ccacucagguc

SEQ ID NO: 1720531 - RNA, 16 nt, Human
ccacucaggucuguuu

SEQ ID NO: 1720532 - RNA, 16 nt, Human
ccacuacauucuguua

SEQ ID NO: 1720533 - RNA, 17 nt, Human
ccacuacauucuguuaa

SEQ ID NO: 1720534 - RNA, 17 nt, Human
ccacuagacccacugga

SEQ ID NO: 1720535 - RNA, 15 nt, Human
ccacuagacccacug

SEQ ID NO: 1720536 - RNA, 11 nt, Human
ccacuacauuc

SEQ ID NO: 1720537 - RNA, 15 nt, Human
ccacuacauucuguu

SEQ ID NO: 1720538 - RNA, 14 nt, Human
ccacuacauucugu

SEQ ID NO: 1720539 - RNA, 15 nt, Human
ccaccccacacacgc

SEQ ID NO: 1720540 - RNA, 15 nt, Human
ccacccccacccaag

SEQ ID NO: 1720541 - RNA, 16 nt, Human
ccacgcuggagugcag

SEQ ID NO: 1720542 - RNA, 18 nt, Human
ccacggccaggccagagg

SEQ ID NO: 1720543 - RNA, 16 nt, Human
ccacggccaggccaga

SEQ ID NO: 1720544 - RNA, 19 nt, Human
ccacgcuggagugcaguga

SEQ ID NO: 1720545 - RNA, 18 nt, Human
ccacgcuggagugcagug

SEQ ID NO: 1720546 - RNA, 23 nt, Human
ccacggccaggccagagggagug

SEQ ID NO: 1720547 - RNA, 14 nt, Human
ccacgguguucugu

SEQ ID NO: 1720548 - RNA, 20 nt, Human
ccaaacucaccugccccuca

SEQ ID NO: 1720549 - RNA, 19 nt, Human
ccaaagcagugcaugcugu

SEQ ID NO: 1720550 - RNA, 19 nt, Human
ccaaagccaaagcuaggcc

SEQ ID NO: 1720551 - RNA, 23 nt, Human
ccaaagcagugcaugcugucccu

SEQ ID NO: 1720552 - RNA, 22 nt, Human
ccaaagccuccuccagccgcca

SEQ ID NO: 1720553 - RNA, 17 nt, Human
ccaaagccuccuccagc

SEQ ID NO: 1720554 - RNA, 23 nt, Human
ccaaaggaagcacaugccucucu

SEQ ID NO: 1720555 - RNA, 15 nt, Human
ccaaaggaagcacau

SEQ ID NO: 1720556 - RNA, 15 nt, Human
ccaaagcuaggccug

SEQ ID NO: 1720557 - RNA, 17 nt, Human
ccaaagcuaggccuggc

SEQ ID NO: 1720558 - RNA, 16 nt, Human
ccaaagcuaggccugg

SEQ ID NO: 1720559 - RNA, 21 nt, Human
ccaaagcuaggccuggccaga

SEQ ID NO: 1720560 - RNA, 20 nt, Human
ccaaaguacacuguuucaaa

SEQ ID NO: 1720561 - RNA, 17 nt, Human
ccaaauuuucuuuuuau

SEQ ID NO: 1720562 - RNA, 15 nt, Human
ccaaaguacacuguu

SEQ ID NO: 1720563 - RNA, 18 nt, Human
ccaaaguacacuguuuca

SEQ ID NO: 1720564 - RNA, 16 nt, Human
ccaacauacucccauc

SEQ ID NO: 1720565 - RNA, 20 nt, Human
ccaacauacucccaucugug

SEQ ID NO: 1720566 - RNA, 19 nt, Human
ccaacauacucccaucugu

SEQ ID NO: 1720567 - RNA, 18 nt, Human
ccaacauacucccaucug

SEQ ID NO: 1720568 - RNA, 17 nt, Human
ccaacauacucccaucu

SEQ ID NO: 1720569 - RNA, 22 nt, Human
ccaacauacucccaucugugaa

SEQ ID NO: 1720570 - RNA, 21 nt, Human
ccaacauacucccaucuguga

SEQ ID NO: 1720571 - RNA, 13 nt, Human
ccaacaucaacau

SEQ ID NO: 1720572 - RNA, 20 nt, Human
ccaaccaaguggcucccaca

SEQ ID NO: 1720573 - RNA, 23 nt, Human
ccaagcagagguugggaggccau

SEQ ID NO: 1720574 - RNA, 20 nt, Human
ccaagaagcccaggaaaggc

SEQ ID NO: 1720575 - RNA, 19 nt, Human
ccaagaagcccaggaaagg

SEQ ID NO: 1720576 - RNA, 19 nt, Human
ccaagaauagaugcugacu

SEQ ID NO: 1720577 - RNA, 20 nt, Human
ccaagaauagaugcugacug

SEQ ID NO: 1720578 - RNA, 12 nt, Human
ccaacccucauc

SEQ ID NO: 1720579 - RNA, 15 nt, Human
ccaagaagcccagga

SEQ ID NO: 1720580 - RNA, 15 nt, Human
ccaacccucagagcc

SEQ ID NO: 1720581 - RNA, 14 nt, Human
ccaacccucagagc

SEQ ID NO: 1720582 - RNA, 17 nt, Human
ccaaggccaaaggaagc

SEQ ID NO: 1720583 - RNA, 22 nt, Human
ccaagcucccaggcauucccca

SEQ ID NO: 1720584 - RNA, 16 nt, Human
ccaagcucccaggcau

SEQ ID NO: 1720585 - RNA, 15 nt, Human
ccaagcucccaggca

SEQ ID NO: 1720586 - RNA, 14 nt, Human
ccaagcucccaggc

SEQ ID NO: 1720587 - RNA, 22 nt, Human
ccaagccuacuuuugccauuga

SEQ ID NO: 1720588 - RNA, 13 nt, Human
ccaagccguggcu

SEQ ID NO: 1720589 - RNA, 15 nt, Human
ccaagccuggcaagg

SEQ ID NO: 1720590 - RNA, 21 nt, Human
ccaaggccaaaggaagcacau

SEQ ID NO: 1720591 - RNA, 18 nt, Human
ccaaggccaaaggaagca

SEQ ID NO: 1720592 - RNA, 15 nt, Human
ccaagggccuggccu

SEQ ID NO: 1720593 - RNA, 18 nt, Human
ccaagggccuggccugag

SEQ ID NO: 1720594 - RNA, 16 nt, Human
ccaagggccuggccug

SEQ ID NO: 1720595 - RNA, 19 nt, Human
ccaagggccuggccugagc

SEQ ID NO: 1720596 - RNA, 22 nt, Human
ccaaggggaauguuugccucug

SEQ ID NO: 1720597 - RNA, 23 nt, Human
ccaagguuuggggaagaacgaag

SEQ ID NO: 1720598 - RNA, 13 nt, Human
ccaaggugggagg

SEQ ID NO: 1720599 - RNA, 18 nt, Human
ccaaggugggaggauugc

SEQ ID NO: 1720600 - RNA, 20 nt, Human
ccaagucaagugaaaaagga

SEQ ID NO: 1720601 - RNA, 22 nt, Human
ccaauaguuguugauuggcagg

SEQ ID NO: 1720602 - RNA, 13 nt, Human
cauugugggaagg

SEQ ID NO: 1720603 - RNA, 17 nt, Human
cauuguuggccaaagcc

SEQ ID NO: 1720604 - RNA, 18 nt, Human
cauuguuggccaaagcca

SEQ ID NO: 1720605 - RNA, 23 nt, Human
cauuguauucagaguugaugguu

SEQ ID NO: 1720606 - RNA, 15 nt, Human
cacccaagggccugg

SEQ ID NO: 1720607 - RNA, 14 nt, Human
cacccaagggccug

SEQ ID NO: 1720608 - RNA, 21 nt, Human
cauuguagagcuucuggcacu

SEQ ID NO: 1720609 - RNA, 19 nt, Human
cauuguagagcuucuggca

SEQ ID NO: 1720610 - RNA, 17 nt, Human
cauuguagagcuucugg

SEQ ID NO: 1720611 - RNA, 16 nt, Human
cauuguagagcuucug

SEQ ID NO: 1720612 - RNA, 15 nt, Human
cauuguagagcuucu

SEQ ID NO: 1720613 - RNA, 22 nt, Human
cauuuaauggggaggacaaaau

SEQ ID NO: 1720614 - RNA, 17 nt, Human
cauuuaggccaugggac

SEQ ID NO: 1720615 - RNA, 20 nt, Human
cauuuccugacagaaggacu

SEQ ID NO: 1720616 - RNA, 13 nt, Human
cauuuccugacag

SEQ ID NO: 1720617 - RNA, 15 nt, Human
cauuuccuaaauaua

SEQ ID NO: 1720618 - RNA, 21 nt, Human
cauuuaaaagauacaguuacu

SEQ ID NO: 1720619 - RNA, 21 nt, Human
cauuuaaaacauuaaaauaua

SEQ ID NO: 1720620 - RNA, 12 nt, Human
cauuuaaaagau

SEQ ID NO: 1720621 - RNA, 20 nt, Human
cauuuaaaacauuaaaauau

SEQ ID NO: 1720622 - RNA, 15 nt, Human
cauuuaaaagauaca

SEQ ID NO: 1720623 - RNA, 16 nt, Human
cauuuaaaagauacag

SEQ ID NO: 1720624 - RNA, 13 nt, Human
cauuuccuguguc

SEQ ID NO: 1720625 - RNA, 12 nt, Human
cauuuccugugu

SEQ ID NO: 1720626 - RNA, 13 nt, Human
cauuuuguaauaa

SEQ ID NO: 1720627 - RNA, 16 nt, Human
cauuuuguaauaauaa

SEQ ID NO: 1720628 - RNA, 12 nt, Human
cauuuuguaaua

SEQ ID NO: 1720629 - RNA, 23 nt, Human
cauuuuucuuagggaaggauaca

SEQ ID NO: 1720630 - RNA, 20 nt, Human
cauuuuucagauauaaaaga

SEQ ID NO: 1720631 - RNA, 18 nt, Human
cauuuuucagauauaaaa

SEQ ID NO: 1720632 - RNA, 17 nt, Human
ccaaacucaccugcccc

SEQ ID NO: 1720633 - RNA, 20 nt, Human
ccaaacauccuacaagacac

SEQ ID NO: 1720634 - RNA, 19 nt, Human
ccaaacauccuacaagaca

SEQ ID NO: 1720635 - RNA, 14 nt, Human
cauuugcuccuuuc

SEQ ID NO: 1720636 - RNA, 13 nt, Human
cauuugcuccuuu

SEQ ID NO: 1720637 - RNA, 17 nt, Human
cauuuguuugaacugau

SEQ ID NO: 1720638 - RNA, 13 nt, Human
cauuugcugaaua

SEQ ID NO: 1720639 - RNA, 20 nt, Human
cauuuguuugaacugauaaa

SEQ ID NO: 1720640 - RNA, 22 nt, Human
cauuuguuugaacugauaaaga

SEQ ID NO: 1720641 - RNA, 18 nt, Human
cauuugagcagggcucag

SEQ ID NO: 1720642 - RNA, 17 nt, Human
cauuugagcagggcuca

SEQ ID NO: 1720643 - RNA, 20 nt, Human
cauuugagcagggcucagcg

SEQ ID NO: 1720644 - RNA, 22 nt, Human
cauuugaaaauuuugauguuuu

SEQ ID NO: 1720645 - RNA, 20 nt, Human
cauuugaaaauuuugauguu

SEQ ID NO: 1720646 - RNA, 19 nt, Human
cauuugaaaccccuguagg

SEQ ID NO: 1720647 - RNA, 21 nt, Human
cauuugaaaccccuguaggcc

SEQ ID NO: 1720648 - RNA, 13 nt, Human
uuuuuucuuacug

SEQ ID NO: 1720649 - RNA, 13 nt, Human
cugcauguuacau

SEQ ID NO: 1720650 - RNA, 15 nt, Human
cugcauguuugugau

SEQ ID NO: 1720651 - RNA, 20 nt, Human
cugcauuuaaaagauacagu

SEQ ID NO: 1720652 - RNA, 22 nt, Human
cugcauuuaaaagauacaguua

SEQ ID NO: 1720653 - RNA, 13 nt, Human
cugcauuugugaa

SEQ ID NO: 1720654 - RNA, 20 nt, Human
cugcauucaggaucaaaccc

SEQ ID NO: 1720655 - RNA, 17 nt, Human
cugccaaugggagcuca

SEQ ID NO: 1720656 - RNA, 15 nt, Human
cugccaaugggagcu

SEQ ID NO: 1720657 - RNA, 22 nt, Human
cugcauuugugaaaugauggug

SEQ ID NO: 1720658 - RNA, 17 nt, Human
cugcauuugugaaauga

SEQ ID NO: 1720659 - RNA, 15 nt, Human
cugcauuugugaaau

SEQ ID NO: 1720660 - RNA, 14 nt, Human
cugcauuugugaaa

SEQ ID NO: 1720661 - RNA, 23 nt, Human
cugccauauucuguuggccagug

SEQ ID NO: 1720662 - RNA, 22 nt, Human
cugccauauucuguuggccagu

SEQ ID NO: 1720663 - RNA, 21 nt, Human
cugccauauucuguuggccag

SEQ ID NO: 1720664 - RNA, 20 nt, Human
cugccauauucuguuggcca

SEQ ID NO: 1720665 - RNA, 15 nt, Human
cugccagggacagag

SEQ ID NO: 1720666 - RNA, 12 nt, Human
cugccagggaca

SEQ ID NO: 1720667 - RNA, 11 nt, Human
cugccagggac

SEQ ID NO: 1720668 - RNA, 12 nt, Human
cugccauccagg

SEQ ID NO: 1720669 - RNA, 19 nt, Human
cugccccagggcucccggc

SEQ ID NO: 1720670 - RNA, 15 nt, Human
cugcccccucugccc

SEQ ID NO: 1720671 - RNA, 14 nt, Human
cugcccccucugcc

SEQ ID NO: 1720672 - RNA, 18 nt, Human
cugcccugugggccccca

SEQ ID NO: 1720673 - RNA, 16 nt, Human
cugcccugugggcccc

SEQ ID NO: 1720674 - RNA, 15 nt, Human
cugcccugugggccc

SEQ ID NO: 1720675 - RNA, 13 nt, Human
cugcccugugagu

SEQ ID NO: 1720676 - RNA, 12 nt, Human
cugcccugugag

SEQ ID NO: 1720677 - RNA, 23 nt, Human
cugcccugguuuccugcccuggg

SEQ ID NO: 1720678 - RNA, 22 nt, Human
cugcccugguuuccugcccugg

SEQ ID NO: 1720679 - RNA, 21 nt, Human
cugcccuggugcugccacacu

SEQ ID NO: 1720680 - RNA, 20 nt, Human
cugcccuggugcugccacac

SEQ ID NO: 1720681 - RNA, 22 nt, Human
cugccccucaacucuccuccag

SEQ ID NO: 1720682 - RNA, 14 nt, Human
cugccccucaacuc

SEQ ID NO: 1720683 - RNA, 19 nt, Human
cugcccccucugcccugcg

SEQ ID NO: 1720684 - RNA, 18 nt, Human
cugcccccucugcccugc

SEQ ID NO: 1720685 - RNA, 17 nt, Human
cugcccccucugcccug

SEQ ID NO: 1720686 - RNA, 16 nt, Human
cugcccccucugcccu

SEQ ID NO: 1720687 - RNA, 19 nt, Human
cugcccuggugcugccaca

SEQ ID NO: 1720688 - RNA, 18 nt, Human
cugcccuggugcugccac

SEQ ID NO: 1720689 - RNA, 16 nt, Human
cugcccuggugcugcc

SEQ ID NO: 1720690 - RNA, 17 nt, Human
cugcccuggugcugcca

SEQ ID NO: 1720691 - RNA, 19 nt, Human
cugagacucgcgacaaugc

SEQ ID NO: 1720692 - RNA, 17 nt, Human
cugagacucgcgacaau

SEQ ID NO: 1720693 - RNA, 20 nt, Human
cugagacucgcgacaaugca

SEQ ID NO: 1720694 - RNA, 16 nt, Human
cuggaaauauuaagaa

SEQ ID NO: 1720695 - RNA, 23 nt, Human
cugcuucagccucccgaguagcu

SEQ ID NO: 1720696 - RNA, 18 nt, Human
cugcuuuuuauggccugu

SEQ ID NO: 1720697 - RNA, 17 nt, Human
cuggaacacuaaugagg

SEQ ID NO: 1720698 - RNA, 13 nt, Human
cuggacugugugc

SEQ ID NO: 1720699 - RNA, 13 nt, Human
cugcuuaacuuca

SEQ ID NO: 1720700 - RNA, 13 nt, Human
cugcuucagccuc

SEQ ID NO: 1720701 - RNA, 15 nt, Human
cugcuuaacuucaca

SEQ ID NO: 1720702 - RNA, 17 nt, Human
cugcuuaacuucacaua

SEQ ID NO: 1720703 - RNA, 16 nt, Human
cugcuucagccucccg

SEQ ID NO: 1720704 - RNA, 14 nt, Human
cugcuucagccucc

SEQ ID NO: 1720705 - RNA, 22 nt, Human
cugcuuuuuaaagaaugcucuu

SEQ ID NO: 1720706 - RNA, 17 nt, Human
cugcuuuuuauggccug

SEQ ID NO: 1720707 - RNA, 11 nt, Human
cugcugacagu

SEQ ID NO: 1720708 - RNA, 23 nt, Human
cugcugacagacacaggcccggc

SEQ ID NO: 1720709 - RNA, 21 nt, Human
cugcugacagacacaggcccg

SEQ ID NO: 1720710 - RNA, 20 nt, Human
cugcugacagacacaggccc

SEQ ID NO: 1720711 - RNA, 19 nt, Human
cugcugacagacacaggcc

SEQ ID NO: 1720712 - RNA, 18 nt, Human
cugcugacagacacaggc

SEQ ID NO: 1720713 - RNA, 15 nt, Human
cugcugacagacaca

SEQ ID NO: 1720714 - RNA, 19 nt, Human
cugcccugugggcccccaa

SEQ ID NO: 1720715 - RNA, 19 nt, Human
cugccucgaacuggcugca

SEQ ID NO: 1720716 - RNA, 18 nt, Human
cugccucgaacuggcugc

SEQ ID NO: 1720717 - RNA, 17 nt, Human
cugccucgaacuggcug

SEQ ID NO: 1720718 - RNA, 15 nt, Human
cugccucgaacuggc

SEQ ID NO: 1720719 - RNA, 23 nt, Human
cugccugggaucccucauccuca

SEQ ID NO: 1720720 - RNA, 15 nt, Human
cugccuguucagcuc

SEQ ID NO: 1720721 - RNA, 14 nt, Human
cugccuguucagcu

SEQ ID NO: 1720722 - RNA, 19 nt, Human
cugccuguugggccaggag

SEQ ID NO: 1720723 - RNA, 18 nt, Human
cugccuguugggccagga

SEQ ID NO: 1720724 - RNA, 14 nt, Human
cugccuguugggcc

SEQ ID NO: 1720725 - RNA, 16 nt, Human
cugccuguugggccag

SEQ ID NO: 1720726 - RNA, 16 nt, Human
cugcuaauuccccaga

SEQ ID NO: 1720727 - RNA, 15 nt, Human
cugcuacagagcaga

SEQ ID NO: 1720728 - RNA, 22 nt, Human
cuggguuccuuccucugagccu

SEQ ID NO: 1720729 - RNA, 18 nt, Human
cuggguuccuuccucuga

SEQ ID NO: 1720730 - RNA, 14 nt, Human
cuggguucacugca

SEQ ID NO: 1720731 - RNA, 22 nt, Human
cuggguuccagcaauucuccug

SEQ ID NO: 1720732 - RNA, 21 nt, Human
cuggugacuuuccucuuuggu

SEQ ID NO: 1720733 - RNA, 20 nt, Human
cuggugacuuuccucuuugg

SEQ ID NO: 1720734 - RNA, 15 nt, Human
cuggugacuuuccuc

SEQ ID NO: 1720735 - RNA, 14 nt, Human
cuggguucuaccca

SEQ ID NO: 1720736 - RNA, 23 nt, Human
cuggguuccuuccucugagccuu

SEQ ID NO: 1720737 - RNA, 17 nt, Human
cuggguguggcgcagca

SEQ ID NO: 1720738 - RNA, 16 nt, Human
cuggguguggcgcagc

SEQ ID NO: 1720739 - RNA, 22 nt, Human
cuggguggcaccagcagccugg

SEQ ID NO: 1720740 - RNA, 23 nt, Human
cuggguggcaccagcagccugga

SEQ ID NO: 1720741 - RNA, 23 nt, Human
cuggugacuuuccucuuuggucu

SEQ ID NO: 1720742 - RNA, 17 nt, Human
cugggcagaaggaagac

SEQ ID NO: 1720743 - RNA, 17 nt, Human
cuggggaaccugacccc

SEQ ID NO: 1720744 - RNA, 16 nt, Human
cuggggaaccugaccc

SEQ ID NO: 1720745 - RNA, 15 nt, Human
cuggggaaccugacc

SEQ ID NO: 1720746 - RNA, 18 nt, Human
cugggcagaaggaagacu

SEQ ID NO: 1720747 - RNA, 16 nt, Human
cuggggccgaaagaac

SEQ ID NO: 1720748 - RNA, 18 nt, Human
cuggggccaggcuggguc

SEQ ID NO: 1720749 - RNA, 13 nt, Human
cugggacacaguu

SEQ ID NO: 1720750 - RNA, 12 nt, Human
cugggacacagu

SEQ ID NO: 1720751 - RNA, 20 nt, Human
cuggcuccagcuggccggga

SEQ ID NO: 1720752 - RNA, 18 nt, Human
cuggcuccagcuggccgg

SEQ ID NO: 1720753 - RNA, 14 nt, Human
cuggcuccagcugg

SEQ ID NO: 1720754 - RNA, 13 nt, Human
cuggcuccagcug

SEQ ID NO: 1720755 - RNA, 15 nt, Human
cuggcucccacaggc

SEQ ID NO: 1720756 - RNA, 21 nt, Human
cuggccccucagggucccugg

SEQ ID NO: 1720757 - RNA, 20 nt, Human
cuggccccucagggucccug

SEQ ID NO: 1720758 - RNA, 18 nt, Human
cuggccccucaggguccc

SEQ ID NO: 1720759 - RNA, 17 nt, Human
cuggccccucagggucc

SEQ ID NO: 1720760 - RNA, 20 nt, Human
cuggcuccaaacccucgagg

SEQ ID NO: 1720761 - RNA, 19 nt, Human
cuggcuccaaacccucgag

SEQ ID NO: 1720762 - RNA, 13 nt, Human
cuggcucaucucu

SEQ ID NO: 1720763 - RNA, 15 nt, Human
cuggcagcucagaga

SEQ ID NO: 1720764 - RNA, 13 nt, Human
cuggccccucagg

SEQ ID NO: 1720765 - RNA, 14 nt, Human
cuggcagcucagag

SEQ ID NO: 1720766 - RNA, 13 nt, Human
cuggcagcucaga

SEQ ID NO: 1720767 - RNA, 12 nt, Human
cuggcagcucag

SEQ ID NO: 1720768 - RNA, 16 nt, Human
cuggacugugugcuca

SEQ ID NO: 1720769 - RNA, 21 nt, Human
cuguaggaagguuaauguuca

SEQ ID NO: 1720770 - RNA, 12 nt, Human
cuguaggccuca

SEQ ID NO: 1720771 - RNA, 13 nt, Human
cuguaggccucag

SEQ ID NO: 1720772 - RNA, 22 nt, Human
cuguaggccucaggugaaacuc

SEQ ID NO: 1720773 - RNA, 23 nt, Human
cuguacuugcucuugaugccugg

SEQ ID NO: 1720774 - RNA, 22 nt, Human
cuguacuugcucuugaugccug

SEQ ID NO: 1720775 - RNA, 18 nt, Human
cugucagccauuccuguu

SEQ ID NO: 1720776 - RNA, 16 nt, Human
cugucauuugagcagg

SEQ ID NO: 1720777 - RNA, 18 nt, Human
cugucauuugagcagggc

SEQ ID NO: 1720778 - RNA, 17 nt, Human
cugucauuugagcaggg

SEQ ID NO: 1720779 - RNA, 20 nt, Human
cugucauuugagcagggcuc

SEQ ID NO: 1720780 - RNA, 12 nt, Human
cuguccugccua

SEQ ID NO: 1720781 - RNA, 21 nt, Human
cugguuuccugcccugggagg

SEQ ID NO: 1720782 - RNA, 18 nt, Human
cugguuuccugcccuggg

SEQ ID NO: 1720783 - RNA, 22 nt, Human
cugguuuccugcccugggaggc

SEQ ID NO: 1720784 - RNA, 15 nt, Human
cugugaagagaacca

SEQ ID NO: 1720785 - RNA, 16 nt, Human
cugugagaugcuagaa

SEQ ID NO: 1720786 - RNA, 21 nt, Human
cugugagaugcuagaacuccc

SEQ ID NO: 1720787 - RNA, 15 nt, Human
cugugcucuggacag

SEQ ID NO: 1720788 - RNA, 14 nt, Human
cugugcucuggaca

SEQ ID NO: 1720789 - RNA, 13 nt, Human
cugucgcccaguc

SEQ ID NO: 1720790 - RNA, 16 nt, Human
cugucgcccaggcugg

SEQ ID NO: 1720791 - RNA, 15 nt, Human
cuucacuguaaaaua

SEQ ID NO: 1720792 - RNA, 17 nt, Human
cuucagagacuccugca

SEQ ID NO: 1720793 - RNA, 19 nt, Human
cuucagagacuccugcagg

SEQ ID NO: 1720794 - RNA, 18 nt, Human
cuucagagacuccugcag

SEQ ID NO: 1720795 - RNA, 20 nt, Human
cuucagagacuccugcaggc

SEQ ID NO: 1720796 - RNA, 21 nt, Human
cuuccagugaggcucugcccu

SEQ ID NO: 1720797 - RNA, 23 nt, Human
cuuccagugaggcucugcccuug

SEQ ID NO: 1720798 - RNA, 22 nt, Human
cuuccagugaggcucugcccuu

SEQ ID NO: 1720799 - RNA, 23 nt, Human
cuucccaccucucucacuccuug

SEQ ID NO: 1720800 - RNA, 21 nt, Human
cuucccaccucucucacuccu

SEQ ID NO: 1720801 - RNA, 11 nt, Human
cuucccaccuc

SEQ ID NO: 1720802 - RNA, 21 nt, Human
cuuccauaaucuggacuccuc

SEQ ID NO: 1720803 - RNA, 11 nt, Human
cuuccauaauc

SEQ ID NO: 1720804 - RNA, 16 nt, Human
cuuauggaacacucug

SEQ ID NO: 1720805 - RNA, 13 nt, Human
cuuauggaacacu

SEQ ID NO: 1720806 - RNA, 21 nt, Human
cuuauggaacacucugagacu

SEQ ID NO: 1720807 - RNA, 20 nt, Human
cuuauggaacacucugagac

SEQ ID NO: 1720808 - RNA, 19 nt, Human
cuuauggaacacucugaga

SEQ ID NO: 1720809 - RNA, 17 nt, Human
cuuauggaacacucuga

SEQ ID NO: 1720810 - RNA, 19 nt, Human
cuucacggaagagccuugc

SEQ ID NO: 1720811 - RNA, 15 nt, Human
cuucacggaagagcc

SEQ ID NO: 1720812 - RNA, 22 nt, Human
cuucaccuuuguccccaccgca

SEQ ID NO: 1720813 - RNA, 21 nt, Human
cuucaccuuuguccccaccgc

SEQ ID NO: 1720814 - RNA, 19 nt, Human
cugugcugagucugaaggc

SEQ ID NO: 1720815 - RNA, 14 nt, Human
cugugcugagucug

SEQ ID NO: 1720816 - RNA, 12 nt, Human
cugugcugaguc

SEQ ID NO: 1720817 - RNA, 12 nt, Human
cuugaugccugg

SEQ ID NO: 1720818 - RNA, 13 nt, Human
cuugaugccuggc

SEQ ID NO: 1720819 - RNA, 20 nt, Human
cuuggcgcugccccuggcag

SEQ ID NO: 1720820 - RNA, 17 nt, Human
cuuggcgcugccccugg

SEQ ID NO: 1720821 - RNA, 14 nt, Human
cuuggcgcugcccc

SEQ ID NO: 1720822 - RNA, 12 nt, Human
cuuggcgcugcc

SEQ ID NO: 1720823 - RNA, 20 nt, Human
cuugacagggcacaccgggc

SEQ ID NO: 1720824 - RNA, 13 nt, Human
cuugacagggcac

SEQ ID NO: 1720825 - RNA, 15 nt, Human
cuugacagggcacac

SEQ ID NO: 1720826 - RNA, 14 nt, Human
cuugacagggcaca

SEQ ID NO: 1720827 - RNA, 19 nt, Human
cuugaauuguaaggaauga

SEQ ID NO: 1720828 - RNA, 23 nt, Human
cuucugacccaugcugcccugug

SEQ ID NO: 1720829 - RNA, 22 nt, Human
cuucugacccaugcugcccugu

SEQ ID NO: 1720830 - RNA, 21 nt, Human
cuucugacccaugcugcccug

SEQ ID NO: 1720831 - RNA, 20 nt, Human
cuucugacccaugcugcccu

SEQ ID NO: 1720832 - RNA, 21 nt, Human
cuucuguugcugccucaugcu

SEQ ID NO: 1720833 - RNA, 23 nt, Human
cuucuucagagacuccugcaggc

SEQ ID NO: 1720834 - RNA, 20 nt, Human
cuucuguugcugccucaugc

SEQ ID NO: 1720835 - RNA, 19 nt, Human
cuucuguugcugccucaug

SEQ ID NO: 1720836 - RNA, 18 nt, Human
cuucuguugcugccucau

SEQ ID NO: 1720837 - RNA, 17 nt, Human
cuucuguugcugccuca

SEQ ID NO: 1720838 - RNA, 17 nt, Human
cuuccugcaacaccuug

SEQ ID NO: 1720839 - RNA, 13 nt, Human
cuucuagaaccag

SEQ ID NO: 1720840 - RNA, 17 nt, Human
cuucuagaaccaggcaa

SEQ ID NO: 1720841 - RNA, 22 nt, Human
gaaaggcuccaggagcagccac

SEQ ID NO: 1720842 - RNA, 21 nt, Human
gaaaggcuccaggagcagcca

SEQ ID NO: 1720843 - RNA, 20 nt, Human
gaaagacuaucuaaauguug

SEQ ID NO: 1720844 - RNA, 21 nt, Human
gaaagaaaauaccaaggaaca

SEQ ID NO: 1720845 - RNA, 22 nt, Human
gaaagggacuuggaagcuccgc

SEQ ID NO: 1720846 - RNA, 19 nt, Human
gaaagggacuuggaagcuc

SEQ ID NO: 1720847 - RNA, 20 nt, Human
gaaagggacgcuacccggga

SEQ ID NO: 1720848 - RNA, 19 nt, Human
gaaaucaccgaaaacgugg

SEQ ID NO: 1720849 - RNA, 13 nt, Human
cuuuuggagucag

SEQ ID NO: 1720850 - RNA, 16 nt, Human
cuuuugccguuauuaa

SEQ ID NO: 1720851 - RNA, 23 nt, Human
cuuuugcccacacuugggagcaa

SEQ ID NO: 1720852 - RNA, 13 nt, Human
cuuuugccauuga

SEQ ID NO: 1720853 - RNA, 15 nt, Human
cuuuuggcauuuuac

SEQ ID NO: 1720854 - RNA, 21 nt, Human
cuuuugguuaugaauacuuug

SEQ ID NO: 1720855 - RNA, 18 nt, Human
cuuuugucuaugggacuc

SEQ ID NO: 1720856 - RNA, 23 nt, Human
cuuuuuuggcugcugaaggcucg

SEQ ID NO: 1720857 - RNA, 12 nt, Human
cuuuugugcauu

SEQ ID NO: 1720858 - RNA, 13 nt, Human
cuuuugugcauua

SEQ ID NO: 1720859 - RNA, 20 nt, Human
cuuuuuuuuuuuugagacag

SEQ ID NO: 1720860 - RNA, 21 nt, Human
cuuuuuuuuuuuugagacaga

SEQ ID NO: 1720861 - RNA, 22 nt, Human
cuuuuuuuuuuuuuaaagacag

SEQ ID NO: 1720862 - RNA, 23 nt, Human
cuuuuuuuuuuuuuaaagacaga

SEQ ID NO: 1720863 - RNA, 14 nt, Human
gaaaauuuuaaaaa

SEQ ID NO: 1720864 - RNA, 14 nt, Human
gaaaaacugauuuu

SEQ ID NO: 1720865 - RNA, 21 nt, Human
gaaaauggaagacagcucuua

SEQ ID NO: 1720866 - RNA, 23 nt, Human
gaaaaugcuguauuagucacaga

SEQ ID NO: 1720867 - RNA, 18 nt, Human
gaaaagaaaaaugagccu

SEQ ID NO: 1720868 - RNA, 23 nt, Human
gaaaauggacguguuaugacucc

SEQ ID NO: 1720869 - RNA, 19 nt, Human
gaaaauggacguguuauga

SEQ ID NO: 1720870 - RNA, 15 nt, Human
gaaaauguaugugua

SEQ ID NO: 1720871 - RNA, 13 nt, Human
cuuuuauaaacuu

SEQ ID NO: 1720872 - RNA, 14 nt, Human
cuuuuauaaacuuu

SEQ ID NO: 1720873 - RNA, 18 nt, Human
cuuuuaugugaaacaugu

SEQ ID NO: 1720874 - RNA, 14 nt, Human
cuuuuaugugaaac

SEQ ID NO: 1720875 - RNA, 16 nt, Human
cuuucuagccagagga

SEQ ID NO: 1720876 - RNA, 22 nt, Human
cuuugauauuuucaacgcagcc

SEQ ID NO: 1720877 - RNA, 15 nt, Human
cuuucuagccagagg

SEQ ID NO: 1720878 - RNA, 13 nt, Human
cuuuguaaugaaa

SEQ ID NO: 1720879 - RNA, 15 nt, Human
cuuuguaaauuguca

SEQ ID NO: 1720880 - RNA, 21 nt, Human
cuuugggcugcccuggugcug

SEQ ID NO: 1720881 - RNA, 20 nt, Human
cuuugggcugcccuggugcu

SEQ ID NO: 1720882 - RNA, 19 nt, Human
cuuugggcugcccuggugc

SEQ ID NO: 1720883 - RNA, 15 nt, Human
cuuugggcugcccug

SEQ ID NO: 1720884 - RNA, 14 nt, Human
cuuugggcugcccu

SEQ ID NO: 1720885 - RNA, 22 nt, Human
cuuuccugaggcugggcucccu

SEQ ID NO: 1720886 - RNA, 20 nt, Human
cuuucagccaagaauucuua

SEQ ID NO: 1720887 - RNA, 23 nt, Human
cuuucagccaagaauucuuaaau

SEQ ID NO: 1720888 - RNA, 16 nt, Human
cuuucacaaccuucug

SEQ ID NO: 1720889 - RNA, 14 nt, Human
cuuucacaaccuuc

SEQ ID NO: 1720890 - RNA, 22 nt, Human
gagaggcauccaguaucuugaa

SEQ ID NO: 1720891 - RNA, 21 nt, Human
gagaugaugccaugggcccuc

SEQ ID NO: 1720892 - RNA, 16 nt, Human
gagacuccugcaggca

SEQ ID NO: 1720893 - RNA, 15 nt, Human
gagacuccugcaggc

SEQ ID NO: 1720894 - RNA, 18 nt, Human
gagacuccugcaggcagc

SEQ ID NO: 1720895 - RNA, 17 nt, Human
gagacuccugcaggcag

SEQ ID NO: 1720896 - RNA, 14 nt, Human
gagaggcauccagu

SEQ ID NO: 1720897 - RNA, 13 nt, Human
gagauuuacaacu

SEQ ID NO: 1720898 - RNA, 18 nt, Human
gagauugcaccacugcac

SEQ ID NO: 1720899 - RNA, 21 nt, Human
gagauugcaccacugcacucc

SEQ ID NO: 1720900 - RNA, 14 nt, Human
gagauguagccccu

SEQ ID NO: 1720901 - RNA, 21 nt, Human
gagcggagaaaggaagggcug

SEQ ID NO: 1720902 - RNA, 18 nt, Human
gagcggagaaaggaaggg

SEQ ID NO: 1720903 - RNA, 22 nt, Human
gagcugccuguucagcuccagc

SEQ ID NO: 1720904 - RNA, 21 nt, Human
gagcugccuguucagcuccag

SEQ ID NO: 1720905 - RNA, 17 nt, Human
gagccuuccaggggugg

SEQ ID NO: 1720906 - RNA, 16 nt, Human
gagccuuccaggggug

SEQ ID NO: 1720907 - RNA, 15 nt, Human
gagccuuccaggggu

SEQ ID NO: 1720908 - RNA, 14 nt, Human
gagccuuccagggg

SEQ ID NO: 1720909 - RNA, 13 nt, Human
gagccccgaggcc

SEQ ID NO: 1720910 - RNA, 22 nt, Human
gagccuugaacuuugaccucug

SEQ ID NO: 1720911 - RNA, 18 nt, Human
gagcugggugucaagagg

SEQ ID NO: 1720912 - RNA, 14 nt, Human
gagcagggcucagc

SEQ ID NO: 1720913 - RNA, 21 nt, Human
gagcagggcucagcggggaca

SEQ ID NO: 1720914 - RNA, 12 nt, Human
gagcaucaggcc

SEQ ID NO: 1720915 - RNA, 22 nt, Human
gagcaugccuggauggggcugc

SEQ ID NO: 1720916 - RNA, 13 nt, Human
gagcaucaggcca

SEQ ID NO: 1720917 - RNA, 11 nt, Human
gacuuuccucu

SEQ ID NO: 1720918 - RNA, 21 nt, Human
gacuuuucuuuguggcuuccu

SEQ ID NO: 1720919 - RNA, 23 nt, Human
gacuuuucuuucagccaagaauu

SEQ ID NO: 1720920 - RNA, 15 nt, Human
gagaaucacuugaac

SEQ ID NO: 1720921 - RNA, 14 nt, Human
gagaaucacuugaa

SEQ ID NO: 1720922 - RNA, 13 nt, Human
gagaccugccccu

SEQ ID NO: 1720923 - RNA, 12 nt, Human
gagaccugcccc

SEQ ID NO: 1720924 - RNA, 11 nt, Human
gagaccugccc

SEQ ID NO: 1720925 - RNA, 21 nt, Human
gagacccugucucaaaaaaag

SEQ ID NO: 1720926 - RNA, 15 nt, Human
gagaagcggcuggca

SEQ ID NO: 1720927 - RNA, 13 nt, Human
gagaagcggcugg

SEQ ID NO: 1720928 - RNA, 16 nt, Human
gagaagcggcuggcag

SEQ ID NO: 1720929 - RNA, 12 nt, Human
gagaaggaagcc

SEQ ID NO: 1720930 - RNA, 20 nt, Human
gagaaggacccggaggggcc

SEQ ID NO: 1720931 - RNA, 23 nt, Human
gagaaggacccggaggggccugg

SEQ ID NO: 1720932 - RNA, 22 nt, Human
gagaaggacccggaggggccug

SEQ ID NO: 1720933 - RNA, 12 nt, Human
gacucugucuca

SEQ ID NO: 1720934 - RNA, 22 nt, Human
gacuaucuaaauguugaaagau

SEQ ID NO: 1720935 - RNA, 18 nt, Human
gacuaggguccuggggaa

SEQ ID NO: 1720936 - RNA, 16 nt, Human
gacuaggguccugggg

SEQ ID NO: 1720937 - RNA, 15 nt, Human
gacuaggguccuggg

SEQ ID NO: 1720938 - RNA, 14 nt, Human
gacagugaaagaaa

SEQ ID NO: 1720939 - RNA, 11 nt, Human
gacagcuccuu

SEQ ID NO: 1720940 - RNA, 19 nt, Human
gacagccuggcacagggca

SEQ ID NO: 1720941 - RNA, 13 nt, Human
gacagccuggcac

SEQ ID NO: 1720942 - RNA, 13 nt, Human
gacagcccuccau

SEQ ID NO: 1720943 - RNA, 22 nt, Human
gacaggguuuugccauguuggc

SEQ ID NO: 1720944 - RNA, 20 nt, Human
gacaggguuuugccauguug

SEQ ID NO: 1720945 - RNA, 16 nt, Human
gacacuuaaaaauggu

SEQ ID NO: 1720946 - RNA, 15 nt, Human
gacacugaugggcaa

SEQ ID NO: 1720947 - RNA, 13 nt, Human
gacacugaugggc

SEQ ID NO: 1720948 - RNA, 23 nt, Human
gacagcccgggcucugccuccca

SEQ ID NO: 1720949 - RNA, 22 nt, Human
gacagcccgggcucugccuccc

SEQ ID NO: 1720950 - RNA, 21 nt, Human
gacagcccgggcucugccucc

SEQ ID NO: 1720951 - RNA, 12 nt, Human
gacagacacagg

SEQ ID NO: 1720952 - RNA, 21 nt, Human
gacacacagcucuguccuggg

SEQ ID NO: 1720953 - RNA, 14 nt, Human
gacacacagcucug

SEQ ID NO: 1720954 - RNA, 19 nt, Human
gacacacagcucuguccug

SEQ ID NO: 1720955 - RNA, 18 nt, Human
gacacacagcucuguccu

SEQ ID NO: 1720956 - RNA, 17 nt, Human
gacacacagcucugucc

SEQ ID NO: 1720957 - RNA, 15 nt, Human
gacacacagcucugu

SEQ ID NO: 1720958 - RNA, 21 nt, Human
gaauuuugugcccccauguaa

SEQ ID NO: 1720959 - RNA, 20 nt, Human
gaauuuugugcccccaugua

SEQ ID NO: 1720960 - RNA, 23 nt, Human
gaauuuuggcugugucucccuuc

SEQ ID NO: 1720961 - RNA, 19 nt, Human
gaauuuuggcugugucucc

SEQ ID NO: 1720962 - RNA, 21 nt, Human
gaauuuuauuuuuugggaaaa

SEQ ID NO: 1720963 - RNA, 18 nt, Human
gaauuuuauugacacagu

SEQ ID NO: 1720964 - RNA, 17 nt, Human
gaaggcucgagcaugcc

SEQ ID NO: 1720965 - RNA, 16 nt, Human
gaaggcucgagcaugc

SEQ ID NO: 1720966 - RNA, 19 nt, Human
gaaggcucgagcaugccug

SEQ ID NO: 1720967 - RNA, 18 nt, Human
gaagucuuuguacagaca

SEQ ID NO: 1720968 - RNA, 20 nt, Human
gaagucuuuguacagacaac

SEQ ID NO: 1720969 - RNA, 19 nt, Human
gaagucuuuguacagacaa

SEQ ID NO: 1720970 - RNA, 15 nt, Human
gaaguggggacagag

SEQ ID NO: 1720971 - RNA, 15 nt, Human
gaagcucagggccug

SEQ ID NO: 1720972 - RNA, 14 nt, Human
gaagcucagggccu

SEQ ID NO: 1720973 - RNA, 19 nt, Human
gaagcucagggccuggcuc

SEQ ID NO: 1720974 - RNA, 18 nt, Human
gaagcucagggccuggcu

SEQ ID NO: 1720975 - RNA, 17 nt, Human
gaagcucagggccuggc

SEQ ID NO: 1720976 - RNA, 16 nt, Human
gaagcucagggccugg

SEQ ID NO: 1720977 - RNA, 21 nt, Human
gaagcucagggccuggcucag

SEQ ID NO: 1720978 - RNA, 20 nt, Human
gaagcucagggccuggcuca

SEQ ID NO: 1720979 - RNA, 23 nt, Human
gaagcucagggccuggcucaggu

SEQ ID NO: 1720980 - RNA, 18 nt, Human
gaaauccagggugguggu

SEQ ID NO: 1720981 - RNA, 13 nt, Human
gaaauccagggug

SEQ ID NO: 1720982 - RNA, 22 nt, Human
gaaugaaugucagugugacuga

SEQ ID NO: 1720983 - RNA, 18 nt, Human
gaaugaaugucaguguga

SEQ ID NO: 1720984 - RNA, 14 nt, Human
gaaugaaugucagu

SEQ ID NO: 1720985 - RNA, 11 nt, Human
gaaugaauguc

SEQ ID NO: 1720986 - RNA, 23 nt, Human
gcagagcaccuuagacagucccu

SEQ ID NO: 1720987 - RNA, 22 nt, Human
gcagagcaccuuagacaguccc

SEQ ID NO: 1720988 - RNA, 19 nt, Human
gcagagcaccuuagacagu

SEQ ID NO: 1720989 - RNA, 15 nt, Human
gcagagcagagacca

SEQ ID NO: 1720990 - RNA, 14 nt, Human
gcagagcagagacc

SEQ ID NO: 1720991 - RNA, 12 nt, Human
gcagagcagaga

SEQ ID NO: 1720992 - RNA, 24 nt, Human
gcagagcaccuuagacagucccug

SEQ ID NO: 1720993 - RNA, 20 nt, Human
gcagagcagagaccaucccu

SEQ ID NO: 1720994 - RNA, 19 nt, Human
gcagagcagagaccauccc

SEQ ID NO: 1720995 - RNA, 12 nt, Human
gcacugacauug

SEQ ID NO: 1720996 - RNA, 13 nt, Human
gcaagugagagcu

SEQ ID NO: 1720997 - RNA, 14 nt, Human
gcacaagcugcacc

SEQ ID NO: 1720998 - RNA, 23 nt, Human
gcacaagcuccaagcucccaggc

SEQ ID NO: 1720999 - RNA, 22 nt, Human
gcacaagcuccaagcucccagg

SEQ ID NO: 1721000 - RNA, 23 nt, Human
gcaauaaggggagaguaacccug

SEQ ID NO: 1721001 - RNA, 15 nt, Human
gcaagugagagcugg

SEQ ID NO: 1721002 - RNA, 23 nt, Human
gauucugaccuuaaaugcaacca

SEQ ID NO: 1721003 - RNA, 20 nt, Human
gauucugaccuuaaaugcaa

SEQ ID NO: 1721004 - RNA, 21 nt, Human
gauucugaccuuaaaugcaac

SEQ ID NO: 1721005 - RNA, 21 nt, Human
gcacaaucucggcucacugca

SEQ ID NO: 1721006 - RNA, 22 nt, Human
gcacaaucucggcucacugcau

SEQ ID NO: 1721007 - RNA, 13 nt, Human
gcacaugccucuc

SEQ ID NO: 1721008 - RNA, 19 nt, Human
gcacaucagcacgauuucu

SEQ ID NO: 1721009 - RNA, 20 nt, Human
gcacaucagcacgauuucug

SEQ ID NO: 1721010 - RNA, 21 nt, Human
gcacaucagcacgauuucugu

SEQ ID NO: 1721011 - RNA, 22 nt, Human
gcacaugccucucucaggccaa

SEQ ID NO: 1721012 - RNA, 21 nt, Human
gcacaugccucucucaggcca

SEQ ID NO: 1721013 - RNA, 20 nt, Human
gcacaugccucucucaggcc

SEQ ID NO: 1721014 - RNA, 19 nt, Human
gcacaugccucucucaggc

SEQ ID NO: 1721015 - RNA, 18 nt, Human
gcacaugccucucucagg

SEQ ID NO: 1721016 - RNA, 17 nt, Human
gcacaugccucucucag

SEQ ID NO: 1721017 - RNA, 14 nt, Human
gcacaugccucucu

SEQ ID NO: 1721018 - RNA, 19 nt, Human
gcaccggcuggccuggccc

SEQ ID NO: 1721019 - RNA, 23 nt, Human
gcaccggcuggccuggccccuca

SEQ ID NO: 1721020 - RNA, 21 nt, Human
gcaccggcuggccuggccccu

SEQ ID NO: 1721021 - RNA, 13 nt, Human
gcagggagggccu

SEQ ID NO: 1721022 - RNA, 10 nt, Human
gcagggaggg

SEQ ID NO: 1721023 - RNA, 19 nt, Human
gcagggacuugaacccaua

SEQ ID NO: 1721024 - RNA, 13 nt, Human
gcagggaaacagc

SEQ ID NO: 1721025 - RNA, 22 nt, Human
gcaggcucucaggccagcugcu

SEQ ID NO: 1721026 - RNA, 20 nt, Human
gcaggcucucaggccagcug

SEQ ID NO: 1721027 - RNA, 19 nt, Human
gcagcugcgguccacccag

SEQ ID NO: 1721028 - RNA, 17 nt, Human
gcagcugcgguccaccc

SEQ ID NO: 1721029 - RNA, 23 nt, Human
gcaggcucucaggccagcugcuu

SEQ ID NO: 1721030 - RNA, 14 nt, Human
gcaggcuggcccug

SEQ ID NO: 1721031 - RNA, 18 nt, Human
gcaggcuggcccugcccu

SEQ ID NO: 1721032 - RNA, 17 nt, Human
gcaggcuggcccugccc

SEQ ID NO: 1721033 - RNA, 16 nt, Human
gcaggcuggcccugcc

SEQ ID NO: 1721034 - RNA, 15 nt, Human
gcaggcuggcccugc

SEQ ID NO: 1721035 - RNA, 21 nt, Human
gcaggcuggcccugcccuggu

SEQ ID NO: 1721036 - RNA, 20 nt, Human
gcaggcuggcccugcccugg

SEQ ID NO: 1721037 - RNA, 19 nt, Human
gcaggcuggcccugcccug

SEQ ID NO: 1721038 - RNA, 22 nt, Human
gcauaacguauaaaagccuguu

SEQ ID NO: 1721039 - RNA, 17 nt, Human
gcauaccacuuuuguuc

SEQ ID NO: 1721040 - RNA, 20 nt, Human
gcauaccacuuuuguucuug

SEQ ID NO: 1721041 - RNA, 14 nt, Human
gcauacguacacau

SEQ ID NO: 1721042 - RNA, 14 nt, Human
gcagccaggccaca

SEQ ID NO: 1721043 - RNA, 13 nt, Human
gcagccaggccac

SEQ ID NO: 1721044 - RNA, 16 nt, Human
gcagccaggccacaag

SEQ ID NO: 1721045 - RNA, 12 nt, Human
gcagccaggcca

SEQ ID NO: 1721046 - RNA, 14 nt, Human
gcagccacuauugu

SEQ ID NO: 1721047 - RNA, 16 nt, Human
gcagccacauuccuga

SEQ ID NO: 1721048 - RNA, 14 nt, Human
gauuaccagggacu

SEQ ID NO: 1721049 - RNA, 18 nt, Human
gauuacugccuauuuuaa

SEQ ID NO: 1721050 - RNA, 20 nt, Human
gauuacaggugugagccacc

SEQ ID NO: 1721051 - RNA, 20 nt, Human
gauuacaggugugaaccacc

SEQ ID NO: 1721052 - RNA, 18 nt, Human
gaucucuugagccuggga

SEQ ID NO: 1721053 - RNA, 17 nt, Human
gaucucuugagccuggg

SEQ ID NO: 1721054 - RNA, 16 nt, Human
gaucucuugagccugg

SEQ ID NO: 1721055 - RNA, 12 nt, Human
gaucucuugagc

SEQ ID NO: 1721056 - RNA, 15 nt, Human
gaucucuaacuucac

SEQ ID NO: 1721057 - RNA, 16 nt, Human
gauauuuugcuuugug

SEQ ID NO: 1721058 - RNA, 15 nt, Human
gauauuuuuuucuuu

SEQ ID NO: 1721059 - RNA, 17 nt, Human
gauauuuuuuucuuuuc

SEQ ID NO: 1721060 - RNA, 21 nt, Human
gaugaucuuugcagacaggca

SEQ ID NO: 1721061 - RNA, 20 nt, Human
gaugaucuuugcagacaggc

SEQ ID NO: 1721062 - RNA, 21 nt, Human
gaugaugaaaugaggucagag

SEQ ID NO: 1721063 - RNA, 20 nt, Human
gauauguaccuaacgaagua

SEQ ID NO: 1721064 - RNA, 17 nt, Human
gauacuugaaaauuaac

SEQ ID NO: 1721065 - RNA, 18 nt, Human
gauaugcaguuuuccuua

SEQ ID NO: 1721066 - RNA, 12 nt, Human
gauaugcuugua

SEQ ID NO: 1721067 - RNA, 22 nt, Human
gauaugcuuguaacuaaaauaa

SEQ ID NO: 1721068 - RNA, 16 nt, Human
gauacuugaaaauuaa

SEQ ID NO: 1721069 - RNA, 14 nt, Human
gauacccaucccau

SEQ ID NO: 1721070 - RNA, 13 nt, Human
gauacccauccca

SEQ ID NO: 1721071 - RNA, 16 nt, Human
gauacuacaguuuguu

SEQ ID NO: 1721072 - RNA, 11 nt, Human
gauacuacagu

SEQ ID NO: 1721073 - RNA, 17 nt, Human
gauacgacaacuugcac

SEQ ID NO: 1721074 - RNA, 16 nt, Human
gaguuguuacauuuuu

SEQ ID NO: 1721075 - RNA, 20 nt, Human
gaguuguuacauuuuuaagu

SEQ ID NO: 1721076 - RNA, 13 nt, Human
gagugcagugagc

SEQ ID NO: 1721077 - RNA, 20 nt, Human
gaguuugggguaugggagag

SEQ ID NO: 1721078 - RNA, 13 nt, Human
gaggucuguucuu

SEQ ID NO: 1721079 - RNA, 14 nt, Human
gaggucuguucuuu

SEQ ID NO: 1721080 - RNA, 11 nt, Human
gaggugggagg

SEQ ID NO: 1721081 - RNA, 12 nt, Human
gaggugggaucc

SEQ ID NO: 1721082 - RNA, 12 nt, Human
gagugagcuggu

SEQ ID NO: 1721083 - RNA, 21 nt, Human
gagucccaccuuggcugcagg

SEQ ID NO: 1721084 - RNA, 24 nt, Human
gagugagcacuaaggugugcucug

SEQ ID NO: 1721085 - RNA, 12 nt, Human
gagugcagugag

SEQ ID NO: 1721086 - RNA, 11 nt, Human
gagugcaguga

SEQ ID NO: 1721087 - RNA, 14 nt, Human
gagucaccaagccc

SEQ ID NO: 1721088 - RNA, 13 nt, Human
gagucaccaagcc

SEQ ID NO: 1721089 - RNA, 15 nt, Human
gagucaccaagccca

SEQ ID NO: 1721090 - RNA, 20 nt, Human
gagucccaccuuggcugcag

SEQ ID NO: 1721091 - RNA, 16 nt, Human
gagucccaccuuggcu

SEQ ID NO: 1721092 - RNA, 14 nt, Human
ggucggaaaacaug

SEQ ID NO: 1721093 - RNA, 18 nt, Human
ggucgcuugggaauuuua

SEQ ID NO: 1721094 - RNA, 17 nt, Human
ggucuacacugugcuga

SEQ ID NO: 1721095 - RNA, 13 nt, Human
ggucggaaaacau

SEQ ID NO: 1721096 - RNA, 13 nt, Human
aaagcaaaggaga

SEQ ID NO: 1721097 - RNA, 22 nt, Human
aaagauucugaccuuaaaugca

SEQ ID NO: 1721098 - RNA, 23 nt, Human
gguccugcugcaguugccaguca

SEQ ID NO: 1721099 - RNA, 21 nt, Human
gguccugcugcaguugccagu

SEQ ID NO: 1721100 - RNA, 13 nt, Human
aaagcaaaugucu

SEQ ID NO: 1721101 - RNA, 17 nt, Human
aaagcagggacuugaac

SEQ ID NO: 1721102 - RNA, 19 nt, Human
aaagcaggcagaacucauc

SEQ ID NO: 1721103 - RNA, 17 nt, Human
aaagcaggcagaacuca

SEQ ID NO: 1721104 - RNA, 16 nt, Human
aaagcagcguuucuau

SEQ ID NO: 1721105 - RNA, 18 nt, Human
aaagcagcguuucuauga

SEQ ID NO: 1721106 - RNA, 22 nt, Human
aaagcagcguuucuaugacaca

SEQ ID NO: 1721107 - RNA, 21 nt, Human
gguggaugccugguggcagcu

SEQ ID NO: 1721108 - RNA, 14 nt, Human
gguggaugccuggu

SEQ ID NO: 1721109 - RNA, 20 nt, Human
ggugcugggccccugccucu

SEQ ID NO: 1721110 - RNA, 20 nt, Human
ggugcaaugaccuuucaaua

SEQ ID NO: 1721111 - RNA, 19 nt, Human
ggugcaaugaccuuucaau

SEQ ID NO: 1721112 - RNA, 18 nt, Human
ggugcaaugaccuuucaa

SEQ ID NO: 1721113 - RNA, 17 nt, Human
ggguuucuaaagcugcc

SEQ ID NO: 1721114 - RNA, 20 nt, Human
gguaacaggcagauacagga

SEQ ID NO: 1721115 - RNA, 14 nt, Human
gguaacaggcagau

SEQ ID NO: 1721116 - RNA, 18 nt, Human
gguaacuagggaagauaa

SEQ ID NO: 1721117 - RNA, 23 nt, Human
gguacaaccuguucugcuuuccu

SEQ ID NO: 1721118 - RNA, 24 nt, Human
gguacaaccuguucugcuuuccuc

SEQ ID NO: 1721119 - RNA, 18 nt, Human
gguaaucgaccugccucg

SEQ ID NO: 1721120 - RNA, 17 nt, Human
gguaaucgaccugccuc

SEQ ID NO: 1721121 - RNA, 14 nt, Human
gguaaucgaccugc

SEQ ID NO: 1721122 - RNA, 15 nt, Human
ggguggcaccagcag

SEQ ID NO: 1721123 - RNA, 17 nt, Human
ggguggaugccuggugg

SEQ ID NO: 1721124 - RNA, 13 nt, Human
ggguggaugccug

SEQ ID NO: 1721125 - RNA, 12 nt, Human
ggggccuggcag

SEQ ID NO: 1721126 - RNA, 11 nt, Human
ggggccuggca

SEQ ID NO: 1721127 - RNA, 20 nt, Human
ggguggggaccucaggccug

SEQ ID NO: 1721128 - RNA, 19 nt, Human
ggguggcaccagcagccug

SEQ ID NO: 1721129 - RNA, 17 nt, Human
ggguguggcgcagcaua

SEQ ID NO: 1721130 - RNA, 12 nt, Human
ggguggugaccu

SEQ ID NO: 1721131 - RNA, 18 nt, Human
ggguggggggggugcugg

SEQ ID NO: 1721132 - RNA, 17 nt, Human
aaagacuaucuaaaugu

SEQ ID NO: 1721133 - RNA, 19 nt, Human
aaagacaccuacugagugg

SEQ ID NO: 1721134 - RNA, 13 nt, Human
aaagacaccuacu

SEQ ID NO: 1721135 - RNA, 16 nt, Human
aaagaauagaagcuaa

SEQ ID NO: 1721136 - RNA, 15 nt, Human
gguccauagagagca

SEQ ID NO: 1721137 - RNA, 17 nt, Human
aaacuuuaccuuuuuua

SEQ ID NO: 1721138 - RNA, 22 nt, Human
aaacuuuaccuuuuuuauacau

SEQ ID NO: 1721139 - RNA, 18 nt, Human
aaacuuuacuauggcccu

SEQ ID NO: 1721140 - RNA, 12 nt, Human
aaacuuuacuau

SEQ ID NO: 1721141 - RNA, 18 nt, Human
aaagaaguggggacagag

SEQ ID NO: 1721142 - RNA, 16 nt, Human
gguccacccaggagcc

SEQ ID NO: 1721143 - RNA, 15 nt, Human
gguccacccaggagc

SEQ ID NO: 1721144 - RNA, 13 nt, Human
gguccacccagga

SEQ ID NO: 1721145 - RNA, 12 nt, Human
gguccacccagg

SEQ ID NO: 1721146 - RNA, 17 nt, Human
gguccacccaggagccc

SEQ ID NO: 1721147 - RNA, 14 nt, Human
gguaugcaaucaaa

SEQ ID NO: 1721148 - RNA, 22 nt, Human
gguaugaucacggcucacugca

SEQ ID NO: 1721149 - RNA, 16 nt, Human
gguccacaacacacag

SEQ ID NO: 1721150 - RNA, 14 nt, Human
gguagcuuuucccu

SEQ ID NO: 1721151 - RNA, 16 nt, Human
gguuuagaaagcuugc

SEQ ID NO: 1721152 - RNA, 20 nt, Human
gguuccuuccucugagccuu

SEQ ID NO: 1721153 - RNA, 19 nt, Human
gguuccuuccucugagccu

SEQ ID NO: 1721154 - RNA, 14 nt, Human
gguuucagaaaugu

SEQ ID NO: 1721155 - RNA, 15 nt, Human
gguuucagaaaugug

SEQ ID NO: 1721156 - RNA, 12 nt, Human
gguuucagaaau

SEQ ID NO: 1721157 - RNA, 13 nt, Human
gguuucagaaaug

SEQ ID NO: 1721158 - RNA, 19 nt, Human
gguuucaccauguuggcca

SEQ ID NO: 1721159 - RNA, 21 nt, Human
gguucccuuugacgccauccc

SEQ ID NO: 1721160 - RNA, 22 nt, Human
gguucccuuugacgccauccca

SEQ ID NO: 1721161 - RNA, 16 nt, Human
gguuccuccccuccuc

SEQ ID NO: 1721162 - RNA, 24 nt, Human
gguuccagcaauucuccugccuca

SEQ ID NO: 1721163 - RNA, 15 nt, Human
gguuccccuguucac

SEQ ID NO: 1721164 - RNA, 23 nt, Human
gguuccagcaauucuccugccuc

SEQ ID NO: 1721165 - RNA, 21 nt, Human
gguucaggguuggccccugcc

SEQ ID NO: 1721166 - RNA, 18 nt, Human
gguucaggguuggccccu

SEQ ID NO: 1721167 - RNA, 22 nt, Human
gguucaggguuggccccugccc

SEQ ID NO: 1721168 - RNA, 13 nt, Human
ggugugcucugau

SEQ ID NO: 1721169 - RNA, 21 nt, Human
ggugugcggccuuuggcuuca

SEQ ID NO: 1721170 - RNA, 12 nt, Human
gguguggaagag

SEQ ID NO: 1721171 - RNA, 16 nt, Human
ggugugaccacugcag

SEQ ID NO: 1721172 - RNA, 16 nt, Human
ggugugacugaauuuc

SEQ ID NO: 1721173 - RNA, 18 nt, Human
ggugugagucaccaagcc

SEQ ID NO: 1721174 - RNA, 16 nt, Human
ggugucgggcaugaca

SEQ ID NO: 1721175 - RNA, 13 nt, Human
ggugucgggcaug

SEQ ID NO: 1721176 - RNA, 23 nt, Human
gguggggucacucuggcagcuca

SEQ ID NO: 1721177 - RNA, 15 nt, Human
gguggggucacucug

SEQ ID NO: 1721178 - RNA, 17 nt, Human
gguggggggggugcugg

SEQ ID NO: 1721179 - RNA, 17 nt, Human
gguggggcagcuugagg

SEQ ID NO: 1721180 - RNA, 13 nt, Human
gguggggcagcuu

SEQ ID NO: 1721181 - RNA, 19 nt, Human
ggugggauccuccaggugc

SEQ ID NO: 1721182 - RNA, 15 nt, Human
ggugggauccuccag

SEQ ID NO: 1721183 - RNA, 14 nt, Human
ggugggauccucca

SEQ ID NO: 1721184 - RNA, 20 nt, Human
ggugggaggauugcuugagc

SEQ ID NO: 1721185 - RNA, 18 nt, Human
aaagccuguuuaagagac

SEQ ID NO: 1721186 - RNA, 16 nt, Human
aaagccuguuuaagag

SEQ ID NO: 1721187 - RNA, 13 nt, Human
aaauaaugugaaa

SEQ ID NO: 1721188 - RNA, 12 nt, Human
aaauaaugugaa

SEQ ID NO: 1721189 - RNA, 23 nt, Human
aaaguucccuacuuccugugacu

SEQ ID NO: 1721190 - RNA, 23 nt, Human
aaaguuucucuuuucaaaacauu

SEQ ID NO: 1721191 - RNA, 21 nt, Human
aaaguuucucuuuucaaaaca

SEQ ID NO: 1721192 - RNA, 16 nt, Human
aaaguuuguugaaaca

SEQ ID NO: 1721193 - RNA, 14 nt, Human
aaaguuuguuugcu

SEQ ID NO: 1721194 - RNA, 21 nt, Human
aaaguucccuacuuccuguga

SEQ ID NO: 1721195 - RNA, 12 nt, Human
aaaguggugaga

SEQ ID NO: 1721196 - RNA, 22 nt, Human
aaacauccuacaagacacagug

SEQ ID NO: 1721197 - RNA, 18 nt, Human
aaacauccuacaagacac

SEQ ID NO: 1721198 - RNA, 20 nt, Human
ggggacagcuccuucugucc

SEQ ID NO: 1721199 - RNA, 14 nt, Human
ggggacagcuccuu

SEQ ID NO: 1721200 - RNA, 12 nt, Human
ggggacagcucc

SEQ ID NO: 1721201 - RNA, 20 nt, Human
aaacaagcacuaaacaaaga

SEQ ID NO: 1721202 - RNA, 16 nt, Human
aaacacauuuuucuua

SEQ ID NO: 1721203 - RNA, 20 nt, Human
aaacaagaccacguuucuaa

SEQ ID NO: 1721204 - RNA, 12 nt, Human
aaaaugugugug

SEQ ID NO: 1721205 - RNA, 15 nt, Human
aaaaugugauaugua

SEQ ID NO: 1721206 - RNA, 22 nt, Human
gggcuggguucuacccaggugc

SEQ ID NO: 1721207 - RNA, 13 nt, Human
aaaaugucuuuau

SEQ ID NO: 1721208 - RNA, 18 nt, Human
gggcugcaugcgggcuuc

SEQ ID NO: 1721209 - RNA, 21 nt, Human
gggcugcaugcgggcuuccuc

SEQ ID NO: 1721210 - RNA, 18 nt, Human
gggcucagcaaaagaugc

SEQ ID NO: 1721211 - RNA, 22 nt, Human
gggcugcaccggcuggccuggc

SEQ ID NO: 1721212 - RNA, 10 nt, Human
gggcucagca

SEQ ID NO: 1721213 - RNA, 20 nt, Human
gggcuggguucuacccaggu

SEQ ID NO: 1721214 - RNA, 12 nt, Human
gggcugggcaga

SEQ ID NO: 1721215 - RNA, 18 nt, Human
gggcugggagcucugcag

SEQ ID NO: 1721216 - RNA, 16 nt, Human
gggcugggagcucugc

SEQ ID NO: 1721217 - RNA, 21 nt, Human
gggcugcccuggugcugccac

SEQ ID NO: 1721218 - RNA, 15 nt, Human
gggcugcccuggugc

SEQ ID NO: 1721219 - RNA, 14 nt, Human
gggcugcccuggug

SEQ ID NO: 1721220 - RNA, 13 nt, Human
gggcugcccuggu

SEQ ID NO: 1721221 - RNA, 21 nt, Human
aaaaugcuguauuagucacag

SEQ ID NO: 1721222 - RNA, 11 nt, Human
gggccaggagc

SEQ ID NO: 1721223 - RNA, 13 nt, Human
gggccaggcuggg

SEQ ID NO: 1721224 - RNA, 12 nt, Human
gggccaggagcc

SEQ ID NO: 1721225 - RNA, 21 nt, Human
gggccaggcugggucgcccug

SEQ ID NO: 1721226 - RNA, 15 nt, Human
gggccaggcuggguc

SEQ ID NO: 1721227 - RNA, 14 nt, Human
gggccaggcugggu

SEQ ID NO: 1721228 - RNA, 21 nt, Human
aaaaugagccuggcaagaaug

SEQ ID NO: 1721229 - RNA, 14 nt, Human
aaaaugagccuggc

SEQ ID NO: 1721230 - RNA, 23 nt, Human
gggccaguuggucccccuuccau

SEQ ID NO: 1721231 - RNA, 22 nt, Human
gggccaguuggucccccuucca

SEQ ID NO: 1721232 - RNA, 18 nt, Human
gggccaguuggucccccu

SEQ ID NO: 1721233 - RNA, 14 nt, Human
gggccaguuggucc

SEQ ID NO: 1721234 - RNA, 20 nt, Human
gggccucuuaugggcugggu

SEQ ID NO: 1721235 - RNA, 13 nt, Human
gggccuccugugu

SEQ ID NO: 1721236 - RNA, 15 nt, Human
gggccuccugugugu

SEQ ID NO: 1721237 - RNA, 22 nt, Human
gggccucggacuuagcugggag

SEQ ID NO: 1721238 - RNA, 15 nt, Human
gggcgggaggauguu

SEQ ID NO: 1721239 - RNA, 23 nt, Human
gggcuacaccuuagccugcccuc

SEQ ID NO: 1721240 - RNA, 19 nt, Human
gggaggucgaggcaggagg

SEQ ID NO: 1721241 - RNA, 18 nt, Human
gggaggucgaggcaggag

SEQ ID NO: 1721242 - RNA, 17 nt, Human
gggaggucgaggcagga

SEQ ID NO: 1721243 - RNA, 18 nt, Human
gggagggcuccagacaca

SEQ ID NO: 1721244 - RNA, 17 nt, Human
gggagggcuccagacac

SEQ ID NO: 1721245 - RNA, 15 nt, Human
gggagggcuccagac

SEQ ID NO: 1721246 - RNA, 14 nt, Human
gggagggcuccaga

SEQ ID NO: 1721247 - RNA, 22 nt, Human
gggaggcucuggagcccacugu

SEQ ID NO: 1721248 - RNA, 23 nt, Human
gggcagagcagagaccaucccug

SEQ ID NO: 1721249 - RNA, 14 nt, Human
gggcagaggaaagc

SEQ ID NO: 1721250 - RNA, 22 nt, Human
gggcagagcagagaccaucccu

SEQ ID NO: 1721251 - RNA, 17 nt, Human
gggcagagcagagacca

SEQ ID NO: 1721252 - RNA, 16 nt, Human
gggcagagcagagacc

SEQ ID NO: 1721253 - RNA, 20 nt, Human
gggcaacccccagccugcua

SEQ ID NO: 1721254 - RNA, 18 nt, Human
gggcaacccccagccugc

SEQ ID NO: 1721255 - RNA, 16 nt, Human
gggcaacccccagccu

SEQ ID NO: 1721256 - RNA, 16 nt, Human
gggauuguaaaauggu

SEQ ID NO: 1721257 - RNA, 17 nt, Human
gggauuguaaaauggug

SEQ ID NO: 1721258 - RNA, 15 nt, Human
gggauuacaggugug

SEQ ID NO: 1721259 - RNA, 12 nt, Human
gggauuacaggu

SEQ ID NO: 1721260 - RNA, 21 nt, Human
gggauuacaggcuccugccac

SEQ ID NO: 1721261 - RNA, 16 nt, Human
gggauuacaggcuccu

SEQ ID NO: 1721262 - RNA, 13 nt, Human
gggauuacaggcu

SEQ ID NO: 1721263 - RNA, 14 nt, Human
gggauuacaggcgu

SEQ ID NO: 1721264 - RNA, 19 nt, Human
aaaagguaugcaaucaaau

SEQ ID NO: 1721265 - RNA, 23 nt, Human
aaaaauaugaccacacuccagcu

SEQ ID NO: 1721266 - RNA, 21 nt, Human
aaaaauaugaccacacuccag

SEQ ID NO: 1721267 - RNA, 21 nt, Human
gggacagcuccuucuguccua

SEQ ID NO: 1721268 - RNA, 23 nt, Human
gggacagaggggguggccuccca

SEQ ID NO: 1721269 - RNA, 22 nt, Human
gggacagaggggguggccuccc

SEQ ID NO: 1721270 - RNA, 13 nt, Human
gggacagaggggg

SEQ ID NO: 1721271 - RNA, 13 nt, Human
gggaaggauacaa

SEQ ID NO: 1721272 - RNA, 16 nt, Human
gggaaggauacaaaag

SEQ ID NO: 1721273 - RNA, 14 nt, Human
aaaaaucucaaauu

SEQ ID NO: 1721274 - RNA, 17 nt, Human
aaaaaucucaaauuucu

SEQ ID NO: 1721275 - RNA, 21 nt, Human
aaaaccaauguucucucuucu

SEQ ID NO: 1721276 - RNA, 15 nt, Human
aaaacaugcuacaca

SEQ ID NO: 1721277 - RNA, 13 nt, Human
aaaagaugcuucu

SEQ ID NO: 1721278 - RNA, 23 nt, Human
aaaacugcugacuguuuucucuu

SEQ ID NO: 1721279 - RNA, 22 nt, Human
aaaacugcugacuguuuucucu

SEQ ID NO: 1721280 - RNA, 15 nt, Human
aaaacccagauaaag

SEQ ID NO: 1721281 - RNA, 21 nt, Human
ggaguuggaagugugugaucu

SEQ ID NO: 1721282 - RNA, 14 nt, Human
ggaguggccacaga

SEQ ID NO: 1721283 - RNA, 15 nt, Human
ggaguucugguuccu

SEQ ID NO: 1721284 - RNA, 14 nt, Human
ggauccugagccag

SEQ ID NO: 1721285 - RNA, 13 nt, Human
ggauccugagcca

SEQ ID NO: 1721286 - RNA, 14 nt, Human
ggauccuccaggug

SEQ ID NO: 1721287 - RNA, 15 nt, Human
ggauccuccaggugc

SEQ ID NO: 1721288 - RNA, 18 nt, Human
ggauggauuuccagccaa

SEQ ID NO: 1721289 - RNA, 16 nt, Human
ggauggggcugcaccg

SEQ ID NO: 1721290 - RNA, 21 nt, Human
ggauguacaaggacagccccu

SEQ ID NO: 1721291 - RNA, 15 nt, Human
ggagugcagugagcc

SEQ ID NO: 1721292 - RNA, 22 nt, Human
ggauguugaaaaaguucugcag

SEQ ID NO: 1721293 - RNA, 16 nt, Human
ggauguucugggacac

SEQ ID NO: 1721294 - RNA, 15 nt, Human
ggauguucugggaca

SEQ ID NO: 1721295 - RNA, 24 nt, Human
ggcacagaaaauggaagacagcuc

SEQ ID NO: 1721296 - RNA, 22 nt, Human
ggcacaaucucggcucacugca

SEQ ID NO: 1721297 - RNA, 16 nt, Human
ggcacagggcaguggg

SEQ ID NO: 1721298 - RNA, 16 nt, Human
ggagcaucagugcccu

SEQ ID NO: 1721299 - RNA, 20 nt, Human
ggaggucaaggcugcaguga

SEQ ID NO: 1721300 - RNA, 14 nt, Human
ggaggugaccccag

SEQ ID NO: 1721301 - RNA, 14 nt, Human
ggaggucgaggcag

SEQ ID NO: 1721302 - RNA, 16 nt, Human
ggaggggggagguggg

SEQ ID NO: 1721303 - RNA, 21 nt, Human
ggagcugccuguucagcucca

SEQ ID NO: 1721304 - RNA, 12 nt, Human
ggagcugccugu

SEQ ID NO: 1721305 - RNA, 22 nt, Human
ggagccccgaggccuucucuga

SEQ ID NO: 1721306 - RNA, 16 nt, Human
ggagccccgaggccuu

SEQ ID NO: 1721307 - RNA, 16 nt, Human
ggagccaauggagacu

SEQ ID NO: 1721308 - RNA, 19 nt, Human
ggaggaaggaaacccagcu

SEQ ID NO: 1721309 - RNA, 23 nt, Human
ggaggaaggaaacccagcucugg

SEQ ID NO: 1721310 - RNA, 20 nt, Human
ggaggaaggaaacccagcuc

SEQ ID NO: 1721311 - RNA, 11 nt, Human
ggaggccagcc

SEQ ID NO: 1721312 - RNA, 12 nt, Human
ggaggccagccu

SEQ ID NO: 1721313 - RNA, 23 nt, Human
ggccuucggccuccauccugagg

SEQ ID NO: 1721314 - RNA, 12 nt, Human
ggccuucucuga

SEQ ID NO: 1721315 - RNA, 21 nt, Human
ggccugugucuaguuguuuga

SEQ ID NO: 1721316 - RNA, 20 nt, Human
ggccuguggaucaaauccag

SEQ ID NO: 1721317 - RNA, 21 nt, Human
ggccuggccagaugcaccagc

SEQ ID NO: 1721318 - RNA, 14 nt, Human
ggccuuuggcuuca

SEQ ID NO: 1721319 - RNA, 13 nt, Human
ggccuuuggcuuc

SEQ ID NO: 1721320 - RNA, 16 nt, Human
ggccuucucugaagga

SEQ ID NO: 1721321 - RNA, 15 nt, Human
ggccuucucugaagg

SEQ ID NO: 1721322 - RNA, 13 nt, Human
ggccuccauccug

SEQ ID NO: 1721323 - RNA, 23 nt, Human
ggccuccaaguccacaguggaac

SEQ ID NO: 1721324 - RNA, 15 nt, Human
ggccugagcugggau

SEQ ID NO: 1721325 - RNA, 23 nt, Human
ggcucagcggggacagcuccuuc

SEQ ID NO: 1721326 - RNA, 22 nt, Human
ggcucagcggggacagcuccuu

SEQ ID NO: 1721327 - RNA, 21 nt, Human
ggcucagcggggacagcuccu

SEQ ID NO: 1721328 - RNA, 23 nt, Human
ggcucagcaaaagaugcuucuca

SEQ ID NO: 1721329 - RNA, 19 nt, Human
ggcgugcaguggugcgauc

SEQ ID NO: 1721330 - RNA, 14 nt, Human
ggcgugcaguggug

SEQ ID NO: 1721331 - RNA, 16 nt, Human
ggcucacugcagccuc

SEQ ID NO: 1721332 - RNA, 17 nt, Human
ggcucacugcagccuca

SEQ ID NO: 1721333 - RNA, 19 nt, Human
ggcucacugcauccuccgc

SEQ ID NO: 1721334 - RNA, 16 nt, Human
ggcucacugcauccuc

SEQ ID NO: 1721335 - RNA, 18 nt, Human
ggcccuucucuccagccc

SEQ ID NO: 1721336 - RNA, 19 nt, Human
ggcccuucucuccagcccc

SEQ ID NO: 1721337 - RNA, 17 nt, Human
ggcccuuccucuccacu

SEQ ID NO: 1721338 - RNA, 17 nt, Human
ggcccuucucuccagcc

SEQ ID NO: 1721339 - RNA, 16 nt, Human
ggcccuucucuccagc

SEQ ID NO: 1721340 - RNA, 18 nt, Human
ggcccuuccucuccacug

SEQ ID NO: 1721341 - RNA, 15 nt, Human
ggcccuuccucucca

SEQ ID NO: 1721342 - RNA, 13 nt, Human
ggcccuuccucuc

SEQ ID NO: 1721343 - RNA, 15 nt, Human
ggcccgacagccugg

SEQ ID NO: 1721344 - RNA, 18 nt, Human
ggcauuuuacuguacaga

SEQ ID NO: 1721345 - RNA, 19 nt, Human
ggcagugggagcugccugu

SEQ ID NO: 1721346 - RNA, 18 nt, Human
ggcagugggagcugccug

SEQ ID NO: 1721347 - RNA, 18 nt, Human
ggcauccaguaucuugaa

SEQ ID NO: 1721348 - RNA, 17 nt, Human
ggcagugggagcugccu

SEQ ID NO: 1721349 - RNA, 24 nt, Human
ggcacugcuuccagugaggcucug

SEQ ID NO: 1721350 - RNA, 16 nt, Human
ggcaccagcagccugg

SEQ ID NO: 1721351 - RNA, 15 nt, Human
ggcaccagcagccug

SEQ ID NO: 1721352 - RNA, 16 nt, Human
ggccagugugacaagg

SEQ ID NO: 1721353 - RNA, 17 nt, Human
ggccaaacucaccugcc

SEQ ID NO: 1721354 - RNA, 21 nt, Human
ggccaaacucaccugccccuc

SEQ ID NO: 1721355 - RNA, 14 nt, Human
ggccaggcuggucu

SEQ ID NO: 1721356 - RNA, 18 nt, Human
ggccaggcuggucucaaa

SEQ ID NO: 1721357 - RNA, 16 nt, Human
ggccaggcuggucuca

SEQ ID NO: 1721358 - RNA, 12 nt, Human
gcugcugacagu

SEQ ID NO: 1721359 - RNA, 16 nt, Human
gcugccccuggcagcc

SEQ ID NO: 1721360 - RNA, 15 nt, Human
gcugccccuggcagc

SEQ ID NO: 1721361 - RNA, 13 nt, Human
gcugccccuggca

SEQ ID NO: 1721362 - RNA, 17 nt, Human
gcugccauccagguuca

SEQ ID NO: 1721363 - RNA, 17 nt, Human
gcugccccuggcagccc

SEQ ID NO: 1721364 - RNA, 15 nt, Human
gcugcacccucaggc

SEQ ID NO: 1721365 - RNA, 13 nt, Human
gcugcacccucag

SEQ ID NO: 1721366 - RNA, 16 nt, Human
gcugcacccucaggca

SEQ ID NO: 1721367 - RNA, 13 nt, Human
gcugccauccagg

SEQ ID NO: 1721368 - RNA, 12 nt, Human
gcugccauccag

SEQ ID NO: 1721369 - RNA, 14 nt, Human
gcucuguccuggga

SEQ ID NO: 1721370 - RNA, 23 nt, Human
gcucugucgcccaggcuggagug

SEQ ID NO: 1721371 - RNA, 17 nt, Human
gcucuggagcccacugu

SEQ ID NO: 1721372 - RNA, 13 nt, Human
gcugacagacaca

SEQ ID NO: 1721373 - RNA, 16 nt, Human
gcugagccucagucuc

SEQ ID NO: 1721374 - RNA, 12 nt, Human
gcugagccucag

SEQ ID NO: 1721375 - RNA, 22 nt, Human
gcugaauacagaggcaacugca

SEQ ID NO: 1721376 - RNA, 17 nt, Human
gcugaauacagaggcaa

SEQ ID NO: 1721377 - RNA, 23 nt, Human
gcugaaggcucgagcaugccugg

SEQ ID NO: 1721378 - RNA, 20 nt, Human
gcugaacuuguuuucuggga

SEQ ID NO: 1721379 - RNA, 21 nt, Human
gcucugcccauccugccccug

SEQ ID NO: 1721380 - RNA, 16 nt, Human
gcucuggagcccacug

SEQ ID NO: 1721381 - RNA, 15 nt, Human
gcucuggagcccacu

SEQ ID NO: 1721382 - RNA, 15 nt, Human
gcucugcccauccug

SEQ ID NO: 1721383 - RNA, 22 nt, Human
gcucugaucauccacugugcca

SEQ ID NO: 1721384 - RNA, 21 nt, Human
gcucugaucauccacugugcc

SEQ ID NO: 1721385 - RNA, 20 nt, Human
gcucugaucauccacugugc

SEQ ID NO: 1721386 - RNA, 20 nt, Human
gcuccacuuggucugugaga

SEQ ID NO: 1721387 - RNA, 9 nt, Human
gcuccagac

SEQ ID NO: 1721388 - RNA, 23 nt, Human
gcuccagacacauguccaagaag

SEQ ID NO: 1721389 - RNA, 21 nt, Human
gcuccagacacauguccaaga

SEQ ID NO: 1721390 - RNA, 18 nt, Human
gcuccagacacaugucca

SEQ ID NO: 1721391 - RNA, 14 nt, Human
gcuccagcucacca

SEQ ID NO: 1721392 - RNA, 13 nt, Human
gcuccagcucacc

SEQ ID NO: 1721393 - RNA, 17 nt, Human
gcuccagcucaccagcc

SEQ ID NO: 1721394 - RNA, 15 nt, Human
gcuccucuccccagc

SEQ ID NO: 1721395 - RNA, 19 nt, Human
gcuccucccggugcccaag

SEQ ID NO: 1721396 - RNA, 20 nt, Human
gcucucaggccagcugcuug

SEQ ID NO: 1721397 - RNA, 19 nt, Human
gcucucaggccagcugcuu

SEQ ID NO: 1721398 - RNA, 18 nt, Human
gcucucaggccagcugcu

SEQ ID NO: 1721399 - RNA, 17 nt, Human
gcucucaggccagcugc

SEQ ID NO: 1721400 - RNA, 19 nt, Human
gcuccucuccccagcaagu

SEQ ID NO: 1721401 - RNA, 16 nt, Human
gcuccucuccccagca

SEQ ID NO: 1721402 - RNA, 19 nt, Human
gcucuacugaggugcuaug

SEQ ID NO: 1721403 - RNA, 18 nt, Human
gcucucaaguuaucaggg

SEQ ID NO: 1721404 - RNA, 19 nt, Human
gcuguauuagucacagaga

SEQ ID NO: 1721405 - RNA, 23 nt, Human
gcugguucaggguuggccccugc

SEQ ID NO: 1721406 - RNA, 15 nt, Human
gcuucaguggcagcu

SEQ ID NO: 1721407 - RNA, 14 nt, Human
gcuucaguggcagc

SEQ ID NO: 1721408 - RNA, 14 nt, Human
gcuucaaggauccu

SEQ ID NO: 1721409 - RNA, 18 nt, Human
gcuucaaggauccugagc

SEQ ID NO: 1721410 - RNA, 16 nt, Human
gcuucaaauuguaagc

SEQ ID NO: 1721411 - RNA, 12 nt, Human
gcugugccucug

SEQ ID NO: 1721412 - RNA, 14 nt, Human
gcuguuggcugggg

SEQ ID NO: 1721413 - RNA, 13 nt, Human
gcuguuggcuggg

SEQ ID NO: 1721414 - RNA, 13 nt, Human
gcuuacaagccag

SEQ ID NO: 1721415 - RNA, 19 nt, Human
gcuuacaagccagcuggag

SEQ ID NO: 1721416 - RNA, 22 nt, Human
gcuuacaagccagcuggagaaa

SEQ ID NO: 1721417 - RNA, 23 nt, Human
gcuuccagugaggcucugcccuu

SEQ ID NO: 1721418 - RNA, 12 nt, Human
gcuucuucagag

SEQ ID NO: 1721419 - RNA, 15 nt, Human
gcuucuucagagacu

SEQ ID NO: 1721420 - RNA, 20 nt, Human
gcuugaccgugaggccagag

SEQ ID NO: 1721421 - RNA, 17 nt, Human
gcuuguaaauagcucag

SEQ ID NO: 1721422 - RNA, 22 nt, Human
gcuugaccuuuaagagaaauga

SEQ ID NO: 1721423 - RNA, 16 nt, Human
gcuugaccgugaggcc

SEQ ID NO: 1721424 - RNA, 18 nt, Human
gcuugaccuuuaagagaa

SEQ ID NO: 1721425 - RNA, 23 nt, Human
gcuugaccgugaggccagagaca

SEQ ID NO: 1721426 - RNA, 19 nt, Human
gcuuguaaauagcucaggu

SEQ ID NO: 1721427 - RNA, 18 nt, Human
gcuuguaaauagcucagg

SEQ ID NO: 1721428 - RNA, 21 nt, Human
gcuuuccccaugucucgacuc

SEQ ID NO: 1721429 - RNA, 22 nt, Human
gcuuuccccaugucucgacuca

SEQ ID NO: 1721430 - RNA, 16 nt, Human
gcuuuccucuuccuga

SEQ ID NO: 1721431 - RNA, 22 nt, Human
gcuuccagugaggcucugcccu

SEQ ID NO: 1721432 - RNA, 14 nt, Human
ggaaaugggcagag

SEQ ID NO: 1721433 - RNA, 22 nt, Human
ggaaaugggcagagcagagacc

SEQ ID NO: 1721434 - RNA, 18 nt, Human
ggaaaugggcagagcaga

SEQ ID NO: 1721435 - RNA, 17 nt, Human
ggaaaugggcagagcag

SEQ ID NO: 1721436 - RNA, 16 nt, Human
ggaaaugggcagagca

SEQ ID NO: 1721437 - RNA, 21 nt, Human
ggaacaaggcaaggcugucaa

SEQ ID NO: 1721438 - RNA, 17 nt, Human
ggaacaaggcaaggcug

SEQ ID NO: 1721439 - RNA, 15 nt, Human
ggaacaaggcaaggc

SEQ ID NO: 1721440 - RNA, 17 nt, Human
ggaaaugucaacaagua

SEQ ID NO: 1721441 - RNA, 19 nt, Human
ggaacacuccuucacagau

SEQ ID NO: 1721442 - RNA, 17 nt, Human
ggaacugaacauuccag

SEQ ID NO: 1721443 - RNA, 15 nt, Human
ggaacacuccuucac

SEQ ID NO: 1721444 - RNA, 23 nt, Human
ggaacaaggcaaggcugucaauu

SEQ ID NO: 1721445 - RNA, 13 nt, Human
ggaacaccuccuc

SEQ ID NO: 1721446 - RNA, 17 nt, Human
ggaacaccauaggucac

SEQ ID NO: 1721447 - RNA, 16 nt, Human
ggaagacaaugugaaa

SEQ ID NO: 1721448 - RNA, 14 nt, Human
ggaagacaauguga

SEQ ID NO: 1721449 - RNA, 12 nt, Human
ggaagacuuugg

SEQ ID NO: 1721450 - RNA, 20 nt, Human
ggaagacuucaucccucugg

SEQ ID NO: 1721451 - RNA, 17 nt, Human
ggaagacuucaucccuc

SEQ ID NO: 1721452 - RNA, 22 nt, Human
ggaagacaaugugaaaagaaaa

SEQ ID NO: 1721453 - RNA, 18 nt, Human
gcuuuugucuaugggacu

SEQ ID NO: 1721454 - RNA, 15 nt, Human
gcuuuuggucugugu

SEQ ID NO: 1721455 - RNA, 12 nt, Human
gcuuuugugcau

SEQ ID NO: 1721456 - RNA, 20 nt, Human
gcuuuuuuaucaugugaaau

SEQ ID NO: 1721457 - RNA, 18 nt, Human
gcuuuuuuaucaugugaa

SEQ ID NO: 1721458 - RNA, 15 nt, Human
gcuuuuuuaucaugu

SEQ ID NO: 1721459 - RNA, 16 nt, Human
ggaaacccagcucugg

SEQ ID NO: 1721460 - RNA, 18 nt, Human
ggaaaauuuuaaaaauac

SEQ ID NO: 1721461 - RNA, 17 nt, Human
gcuuugaucccuucuua

SEQ ID NO: 1721462 - RNA, 14 nt, Human
gcuuugaucccuuc

SEQ ID NO: 1721463 - RNA, 16 nt, Human
gccauaugaaaaggcu

SEQ ID NO: 1721464 - RNA, 21 nt, Human
gccaguuggucccccuuccau

SEQ ID NO: 1721465 - RNA, 20 nt, Human
gccaguuggucccccuucca

SEQ ID NO: 1721466 - RNA, 18 nt, Human
gccaguuggucccccuuc

SEQ ID NO: 1721467 - RNA, 16 nt, Human
gccaguuggucccccu

SEQ ID NO: 1721468 - RNA, 23 nt, Human
gccaguuggucccccuuccaugg

SEQ ID NO: 1721469 - RNA, 22 nt, Human
gccaguuggucccccuuccaug

SEQ ID NO: 1721470 - RNA, 13 nt, Human
gccaguugguccc

SEQ ID NO: 1721471 - RNA, 13 nt, Human
gccagugugacaa

SEQ ID NO: 1721472 - RNA, 15 nt, Human
gccaggcccucugcc

SEQ ID NO: 1721473 - RNA, 14 nt, Human
gccaggcccucugc

SEQ ID NO: 1721474 - RNA, 13 nt, Human
gccaggcccucug

SEQ ID NO: 1721475 - RNA, 22 nt, Human
gccaggccagagggagugacag

SEQ ID NO: 1721476 - RNA, 15 nt, Human
gccaggccagaggga

SEQ ID NO: 1721477 - RNA, 21 nt, Human
gccaggccacaagacccuugu

SEQ ID NO: 1721478 - RNA, 18 nt, Human
gccaggccacaagacccu

SEQ ID NO: 1721479 - RNA, 13 nt, Human
gccaggccacaag

SEQ ID NO: 1721480 - RNA, 15 nt, Human
gccauguguuccaag

SEQ ID NO: 1721481 - RNA, 16 nt, Human
gccauguguuccaagg

SEQ ID NO: 1721482 - RNA, 14 nt, Human
gccaugugccaggu

SEQ ID NO: 1721483 - RNA, 13 nt, Human
gcccaggccccug

SEQ ID NO: 1721484 - RNA, 15 nt, Human
gcccaggccccugcc

SEQ ID NO: 1721485 - RNA, 16 nt, Human
gcccaggcaggucuug

SEQ ID NO: 1721486 - RNA, 14 nt, Human
gcccaggcaggucu

SEQ ID NO: 1721487 - RNA, 13 nt, Human
gcccaggcagguc

SEQ ID NO: 1721488 - RNA, 18 nt, Human
gcccaggccccugccacc

SEQ ID NO: 1721489 - RNA, 17 nt, Human
gcccaggccccugccac

SEQ ID NO: 1721490 - RNA, 15 nt, Human
gccccuggaugcagc

SEQ ID NO: 1721491 - RNA, 16 nt, Human
gcccucacccuggggc

SEQ ID NO: 1721492 - RNA, 17 nt, Human
gcccucacccuggggcu

SEQ ID NO: 1721493 - RNA, 22 nt, Human
gccccugcugguucaggguugg

SEQ ID NO: 1721494 - RNA, 18 nt, Human
gccccugccucucugcag

SEQ ID NO: 1721495 - RNA, 17 nt, Human
gccccugccucucugca

SEQ ID NO: 1721496 - RNA, 16 nt, Human
gccccugccucucugc

SEQ ID NO: 1721497 - RNA, 15 nt, Human
gccccugccucucug

SEQ ID NO: 1721498 - RNA, 20 nt, Human
gcgugguggacaugcacagc

SEQ ID NO: 1721499 - RNA, 14 nt, Human
gcgugcacacacca

SEQ ID NO: 1721500 - RNA, 18 nt, Human
gcgugcacacaccagagc

SEQ ID NO: 1721501 - RNA, 19 nt, Human
gcgugcacacaccagagcc

SEQ ID NO: 1721502 - RNA, 16 nt, Human
gcggccuuuggcuuca

SEQ ID NO: 1721503 - RNA, 17 nt, Human
gcguuucuaugacacau

SEQ ID NO: 1721504 - RNA, 16 nt, Human
gcuaauuuuucauuuu

SEQ ID NO: 1721505 - RNA, 18 nt, Human
gcuaauuuugaaaaacug

SEQ ID NO: 1721506 - RNA, 17 nt, Human
gcuacuugggaggcuga

SEQ ID NO: 1721507 - RNA, 11 nt, Human
gcuagaaauga

SEQ ID NO: 1721508 - RNA, 19 nt, Human
gcuacuguaaggcaaucau

SEQ ID NO: 1721509 - RNA, 18 nt, Human
gcuacuguaaggcaauca

SEQ ID NO: 1721510 - RNA, 20 nt, Human
gcuacuguccuacccacccu

SEQ ID NO: 1721511 - RNA, 19 nt, Human
gcuacuguccuacccaccc

SEQ ID NO: 1721512 - RNA, 14 nt, Human
gcgauucuucugcu

SEQ ID NO: 1721513 - RNA, 17 nt, Human
gcgauucuucugcuuca

SEQ ID NO: 1721514 - RNA, 13 nt, Human
gcgauucuucugc

SEQ ID NO: 1721515 - RNA, 16 nt, Human
gccuccauccugaggc

SEQ ID NO: 1721516 - RNA, 20 nt, Human
gccuccauccugaggcucca

SEQ ID NO: 1721517 - RNA, 21 nt, Human
gccuccuuugugaggaagccg

SEQ ID NO: 1721518 - RNA, 20 nt, Human
gccuccuuugugaggaagcc

SEQ ID NO: 1721519 - RNA, 19 nt, Human
gccuccuuugugaggaagc

SEQ ID NO: 1721520 - RNA, 11 nt, Human
gccuccaugcu

SEQ ID NO: 1721521 - RNA, 17 nt, Human
gccuccaagcuccaucu

SEQ ID NO: 1721522 - RNA, 22 nt, Human
gccuccaauuuuuuaagugaaa

SEQ ID NO: 1721523 - RNA, 13 nt, Human
gccugcuccagcu

SEQ ID NO: 1721524 - RNA, 23 nt, Human
gccugcuaauuccccagauugca

SEQ ID NO: 1721525 - RNA, 17 nt, Human
gccugcuaauuccccag

SEQ ID NO: 1721526 - RNA, 13 nt, Human
gccucggacuuag

SEQ ID NO: 1721527 - RNA, 14 nt, Human
cugacagaaggacu

SEQ ID NO: 1721528 - RNA, 15 nt, Human
cugacagacacaggc

SEQ ID NO: 1721529 - RNA, 14 nt, Human
cugacagacacagg

SEQ ID NO: 1721530 - RNA, 12 nt, Human
cugacagacaca

SEQ ID NO: 1721531 - RNA, 20 nt, Human
cugacccaugcugcccugug

SEQ ID NO: 1721532 - RNA, 19 nt, Human
cugacccaugcugcccugu

SEQ ID NO: 1721533 - RNA, 17 nt, Human
cugacccaugcugcccu

SEQ ID NO: 1721534 - RNA, 18 nt, Human
cugacccaugcugcccug

SEQ ID NO: 1721535 - RNA, 23 nt, Human
cugacccugcuucaaauauuucc

SEQ ID NO: 1721536 - RNA, 15 nt, Human
cugaccuuaaaugca

SEQ ID NO: 1721537 - RNA, 19 nt, Human
cugaccuuaaaugcaacca

SEQ ID NO: 1721538 - RNA, 16 nt, Human
cucuugccacugccuc

SEQ ID NO: 1721539 - RNA, 20 nt, Human
cucuugccacugccucuucc

SEQ ID NO: 1721540 - RNA, 19 nt, Human
cucuugccacugccucuuc

SEQ ID NO: 1721541 - RNA, 18 nt, Human
cucuugccacugccucuu

SEQ ID NO: 1721542 - RNA, 17 nt, Human
cucuugccacugccucu

SEQ ID NO: 1721543 - RNA, 18 nt, Human
cugaaggccccgcccagg

SEQ ID NO: 1721544 - RNA, 17 nt, Human
cugaaggccccgcccag

SEQ ID NO: 1721545 - RNA, 14 nt, Human
cugaaggccccgcc

SEQ ID NO: 1721546 - RNA, 13 nt, Human
cugaaggccccgc

SEQ ID NO: 1721547 - RNA, 21 nt, Human
cugaaggacauugcggacagc

SEQ ID NO: 1721548 - RNA, 20 nt, Human
cugaaggacauugcggacag

SEQ ID NO: 1721549 - RNA, 19 nt, Human
cugaaggacauugcggaca

SEQ ID NO: 1721550 - RNA, 16 nt, Human
cugaaaauguaugugu

SEQ ID NO: 1721551 - RNA, 22 nt, Human
cugaaggaauaaauugcuccuu

SEQ ID NO: 1721552 - RNA, 21 nt, Human
cucuguacagagcccacgccc

SEQ ID NO: 1721553 - RNA, 17 nt, Human
cucuguacagagcccac

SEQ ID NO: 1721554 - RNA, 20 nt, Human
cucugcugacagacacaggc

SEQ ID NO: 1721555 - RNA, 19 nt, Human
cucugcugacagacacagg

SEQ ID NO: 1721556 - RNA, 18 nt, Human
cucugcugacagacacag

SEQ ID NO: 1721557 - RNA, 17 nt, Human
cucugcugacagacaca

SEQ ID NO: 1721558 - RNA, 18 nt, Human
cucugguccauagagagc

SEQ ID NO: 1721559 - RNA, 16 nt, Human
cucugguccauagaga

SEQ ID NO: 1721560 - RNA, 19 nt, Human
cucugguccauagagagca

SEQ ID NO: 1721561 - RNA, 14 nt, Human
cucugguuccuccc

SEQ ID NO: 1721562 - RNA, 23 nt, Human
cucugcagcaauaaagcagcguu

SEQ ID NO: 1721563 - RNA, 18 nt, Human
cucugcagcaauaaagca

SEQ ID NO: 1721564 - RNA, 19 nt, Human
cucugcagcaauaaagcag

SEQ ID NO: 1721565 - RNA, 14 nt, Human
cucugcacuccccu

SEQ ID NO: 1721566 - RNA, 14 nt, Human
cucucacuccuuga

SEQ ID NO: 1721567 - RNA, 12 nt, Human
cucucacuccuu

SEQ ID NO: 1721568 - RNA, 19 nt, Human
cucucagauuguaccauug

SEQ ID NO: 1721569 - RNA, 15 nt, Human
cucucacuccuugaa

SEQ ID NO: 1721570 - RNA, 12 nt, Human
cucucuggccuu

SEQ ID NO: 1721571 - RNA, 11 nt, Human
cucucuggccu

SEQ ID NO: 1721572 - RNA, 12 nt, Human
cucuccuccaga

SEQ ID NO: 1721573 - RNA, 15 nt, Human
cucugaaggacauug

SEQ ID NO: 1721574 - RNA, 20 nt, Human
cucgggauuaguacacacuu

SEQ ID NO: 1721575 - RNA, 21 nt, Human
cuccagugagacagcucugca

SEQ ID NO: 1721576 - RNA, 13 nt, Human
cucccaccucagc

SEQ ID NO: 1721577 - RNA, 12 nt, Human
cucccaccucag

SEQ ID NO: 1721578 - RNA, 19 nt, Human
cuccgcuuucuacccagcg

SEQ ID NO: 1721579 - RNA, 19 nt, Human
cuccagacacauguccaag

SEQ ID NO: 1721580 - RNA, 17 nt, Human
cuccagacacaugucca

SEQ ID NO: 1721581 - RNA, 21 nt, Human
cuccagaauuucccaaagcag

SEQ ID NO: 1721582 - RNA, 18 nt, Human
cuccagaauuucccaaag

SEQ ID NO: 1721583 - RNA, 15 nt, Human
cuccagaauuuccca

SEQ ID NO: 1721584 - RNA, 22 nt, Human
cuccacuuucuagccagaggag

SEQ ID NO: 1721585 - RNA, 21 nt, Human
cuccaagaccuucuccuucac

SEQ ID NO: 1721586 - RNA, 18 nt, Human
cuccaagaccuucuccuu

SEQ ID NO: 1721587 - RNA, 17 nt, Human
cuccaagaccuucuccu

SEQ ID NO: 1721588 - RNA, 16 nt, Human
cuccaagaccuucucc

SEQ ID NO: 1721589 - RNA, 14 nt, Human
cuccagaccccugg

SEQ ID NO: 1721590 - RNA, 11 nt, Human
cuccaggugca

SEQ ID NO: 1721591 - RNA, 21 nt, Human
cucaggccugggggcugggca

SEQ ID NO: 1721592 - RNA, 20 nt, Human
cucaggccugggggcugggc

SEQ ID NO: 1721593 - RNA, 14 nt, Human
cucaggccuggggg

SEQ ID NO: 1721594 - RNA, 22 nt, Human
cucaggccagcugcuugggcuu

SEQ ID NO: 1721595 - RNA, 21 nt, Human
cucaggccagcugcuugggcu

SEQ ID NO: 1721596 - RNA, 15 nt, Human
cucaggccagcugcu

SEQ ID NO: 1721597 - RNA, 14 nt, Human
cucaggccagcugc

SEQ ID NO: 1721598 - RNA, 13 nt, Human
cucagcggggaca

SEQ ID NO: 1721599 - RNA, 14 nt, Human
cucagcgaaugaau

SEQ ID NO: 1721600 - RNA, 13 nt, Human
cucaggccagcug

SEQ ID NO: 1721601 - RNA, 13 nt, Human
cucagccuccuga

SEQ ID NO: 1721602 - RNA, 12 nt, Human
cucagccuccug

SEQ ID NO: 1721603 - RNA, 14 nt, Human
cucagccuccugag

SEQ ID NO: 1721604 - RNA, 22 nt, Human
cucagccuccugaguagcugga

SEQ ID NO: 1721605 - RNA, 13 nt, Human
cucagccucccaa

SEQ ID NO: 1721606 - RNA, 16 nt, Human
cuaucccggcugcccu

SEQ ID NO: 1721607 - RNA, 15 nt, Human
cuaucccggcugccc

SEQ ID NO: 1721608 - RNA, 16 nt, Human
cucagccucccaaagu

SEQ ID NO: 1721609 - RNA, 14 nt, Human
cucagccucccaaa

SEQ ID NO: 1721610 - RNA, 21 nt, Human
cucagccucccaaagugcugg

SEQ ID NO: 1721611 - RNA, 17 nt, Human
cuaucccggcugcccuu

SEQ ID NO: 1721612 - RNA, 23 nt, Human
cucagccucccgaauagcuggga

SEQ ID NO: 1721613 - RNA, 13 nt, Human
cucagccucccga

SEQ ID NO: 1721614 - RNA, 22 nt, Human
cucagccucccaaagugcuggg

SEQ ID NO: 1721615 - RNA, 18 nt, Human
cucagucuggcccuuccu

SEQ ID NO: 1721616 - RNA, 17 nt, Human
cucagucuggcccuucc

SEQ ID NO: 1721617 - RNA, 13 nt, Human
cucagugccacua

SEQ ID NO: 1721618 - RNA, 20 nt, Human
cucagucuggcccuuccuuu

SEQ ID NO: 1721619 - RNA, 12 nt, Human
cucauguucuua

SEQ ID NO: 1721620 - RNA, 14 nt, Human
cucauguucuuaau

SEQ ID NO: 1721621 - RNA, 18 nt, Human
cucauguucuuaauucuu

SEQ ID NO: 1721622 - RNA, 19 nt, Human
cucauguucuuaauucuua

SEQ ID NO: 1721623 - RNA, 20 nt, Human
cucaugccucagccuccuga

SEQ ID NO: 1721624 - RNA, 18 nt, Human
cucaugccucagccuccu

SEQ ID NO: 1721625 - RNA, 16 nt, Human
cuccaaagucucugga

SEQ ID NO: 1721626 - RNA, 12 nt, Human
ccuuuuuuauac

SEQ ID NO: 1721627 - RNA, 15 nt, Human
cgacagugagacucu

SEQ ID NO: 1721628 - RNA, 16 nt, Human
cgacagugagacucug

SEQ ID NO: 1721629 - RNA, 17 nt, Human
ccuuuuuuauacauaaa

SEQ ID NO: 1721630 - RNA, 18 nt, Human
ccuuuuuuauacauaaac

SEQ ID NO: 1721631 - RNA, 23 nt, Human
cgaccagacaccuugacagggca

SEQ ID NO: 1721632 - RNA, 14 nt, Human
cgaccaccugccca

SEQ ID NO: 1721633 - RNA, 12 nt, Human
cgaccaccugcc

SEQ ID NO: 1721634 - RNA, 19 nt, Human
ccuuuuuuauacauaaaca

SEQ ID NO: 1721635 - RNA, 20 nt, Human
ccuuuagcgcccaguugggu

SEQ ID NO: 1721636 - RNA, 14 nt, Human
ccuuuagcgcccag

SEQ ID NO: 1721637 - RNA, 20 nt, Human
ccuugccgucuaccugaggg

SEQ ID NO: 1721638 - RNA, 17 nt, Human
ccuugccgucuaccuga

SEQ ID NO: 1721639 - RNA, 20 nt, Human
ccuucugacccaugcugccc

SEQ ID NO: 1721640 - RNA, 17 nt, Human
ccuucugacccaugcug

SEQ ID NO: 1721641 - RNA, 16 nt, Human
ccuucugacccaugcu

SEQ ID NO: 1721642 - RNA, 12 nt, Human
ccuucugaccca

SEQ ID NO: 1721643 - RNA, 15 nt, Human
ccuggccugagcugg

SEQ ID NO: 1721644 - RNA, 14 nt, Human
ccuggccugagcug

SEQ ID NO: 1721645 - RNA, 20 nt, Human
ccuggccugagcugggauga

SEQ ID NO: 1721646 - RNA, 20 nt, Human
ccuucugaaaaaguauccug

SEQ ID NO: 1721647 - RNA, 22 nt, Human
ccuucugacccaugcugcccug

SEQ ID NO: 1721648 - RNA, 21 nt, Human
ccuucugacccaugcugcccu

SEQ ID NO: 1721649 - RNA, 23 nt, Human
ccuucugacccaugcugcccugu

SEQ ID NO: 1721650 - RNA, 22 nt, Human
ccuucuggaauaaggagaauga

SEQ ID NO: 1721651 - RNA, 18 nt, Human
cggcucacugcagccuca

SEQ ID NO: 1721652 - RNA, 17 nt, Human
cggcucacugcauccuc

SEQ ID NO: 1721653 - RNA, 19 nt, Human
cggcucacugcagccucaa

SEQ ID NO: 1721654 - RNA, 21 nt, Human
cggcucacugcauccuccgcc

SEQ ID NO: 1721655 - RNA, 14 nt, Human
cggagucccaccuu

SEQ ID NO: 1721656 - RNA, 18 nt, Human
cggaggggccuggcagcc

SEQ ID NO: 1721657 - RNA, 16 nt, Human
cggaggggccuggcag

SEQ ID NO: 1721658 - RNA, 16 nt, Human
cgaguagcugggacua

SEQ ID NO: 1721659 - RNA, 15 nt, Human
cgaguagcugggacu

SEQ ID NO: 1721660 - RNA, 14 nt, Human
cgaguagcugggac

SEQ ID NO: 1721661 - RNA, 13 nt, Human
cgaguagcuggga

SEQ ID NO: 1721662 - RNA, 18 nt, Human
cgaguuacagacaaagcg

SEQ ID NO: 1721663 - RNA, 17 nt, Human
cgaguuacagacaaagc

SEQ ID NO: 1721664 - RNA, 12 nt, Human
cgccaaggcugg

SEQ ID NO: 1721665 - RNA, 20 nt, Human
cgcaggcuggcccugcccug

SEQ ID NO: 1721666 - RNA, 19 nt, Human
cgcaggcuggcccugcccu

SEQ ID NO: 1721667 - RNA, 18 nt, Human
cgcaggcuggcccugccc

SEQ ID NO: 1721668 - RNA, 17 nt, Human
cgcaggcuggcccugcc

SEQ ID NO: 1721669 - RNA, 15 nt, Human
cgcaggcuggcccug

SEQ ID NO: 1721670 - RNA, 14 nt, Human
cgcaggcuggcccu

SEQ ID NO: 1721671 - RNA, 16 nt, Human
cgccaaggcuggggga

SEQ ID NO: 1721672 - RNA, 13 nt, Human
cgccaaggcuggg

SEQ ID NO: 1721673 - RNA, 23 nt, Human
cgccaaggcugggggaagaagcu

SEQ ID NO: 1721674 - RNA, 14 nt, Human
cgccuacaggagug

SEQ ID NO: 1721675 - RNA, 16 nt, Human
cgaccugccucggccu

SEQ ID NO: 1721676 - RNA, 22 nt, Human
cuaguuccaccaucaagccacc

SEQ ID NO: 1721677 - RNA, 20 nt, Human
cuaguuccaccaucaagcca

SEQ ID NO: 1721678 - RNA, 18 nt, Human
cuaguuccaccaucaagc

SEQ ID NO: 1721679 - RNA, 21 nt, Human
cuagggaaaaaccagcgugug

SEQ ID NO: 1721680 - RNA, 19 nt, Human
cuagggaaaaaccagcgug

SEQ ID NO: 1721681 - RNA, 16 nt, Human
cuagaacucccuuuca

SEQ ID NO: 1721682 - RNA, 17 nt, Human
cuagaacucccuuucaa

SEQ ID NO: 1721683 - RNA, 18 nt, Human
cuagaacucccuuucaac

SEQ ID NO: 1721684 - RNA, 19 nt, Human
cuagaacucccuuucaaca

SEQ ID NO: 1721685 - RNA, 22 nt, Human
cuagcagcagggagggcuucug

SEQ ID NO: 1721686 - RNA, 15 nt, Human
cuagaacugaauuuu

SEQ ID NO: 1721687 - RNA, 17 nt, Human
cuagcauggcugccaau

SEQ ID NO: 1721688 - RNA, 23 nt, Human
cuagcagcagggagggcuucugc

SEQ ID NO: 1721689 - RNA, 19 nt, Human
cuagcauuucccaacacaa

SEQ ID NO: 1721690 - RNA, 19 nt, Human
cuagaaauuccccacccug

SEQ ID NO: 1721691 - RNA, 14 nt, Human
cuaccugaggggcc

SEQ ID NO: 1721692 - RNA, 11 nt, Human
cuaccugaggg

SEQ ID NO: 1721693 - RNA, 15 nt, Human
cuaccugaggggccu

SEQ ID NO: 1721694 - RNA, 18 nt, Human
cuacauacaauuccaaac

SEQ ID NO: 1721695 - RNA, 15 nt, Human
cuacaugagguacug

SEQ ID NO: 1721696 - RNA, 19 nt, Human
cuacaguugaaaaacagcu

SEQ ID NO: 1721697 - RNA, 20 nt, Human
cuacaguguacagucuugua

SEQ ID NO: 1721698 - RNA, 13 nt, Human
cuacaguugaaaa

SEQ ID NO: 1721699 - RNA, 15 nt, Human
cuacaguguacaguc

SEQ ID NO: 1721700 - RNA, 16 nt, Human
cuacaguguacagucu

SEQ ID NO: 1721701 - RNA, 17 nt, Human
cuacaguguacagucuu

SEQ ID NO: 1721702 - RNA, 18 nt, Human
cuacaguccucccaucuc

SEQ ID NO: 1721703 - RNA, 17 nt, Human
cuacaguccucccaucu

SEQ ID NO: 1721704 - RNA, 16 nt, Human
cuacaguccucccauc

SEQ ID NO: 1721705 - RNA, 15 nt, Human
cuacaguccucccau

SEQ ID NO: 1721706 - RNA, 15 nt, Human
cuacaagacacagug

SEQ ID NO: 1721707 - RNA, 22 nt, Human
cuaagugauccucccaccucag

SEQ ID NO: 1721708 - RNA, 20 nt, Human
cuaagugauccucccaccuc

SEQ ID NO: 1721709 - RNA, 18 nt, Human
cuaagugaggaugaaaaa

SEQ ID NO: 1721710 - RNA, 20 nt, Human
cuaagugaaauaagccagac

SEQ ID NO: 1721711 - RNA, 23 nt, Human
cuaagugaaauaagccagacauc

SEQ ID NO: 1721712 - RNA, 23 nt, Human
cuaaacugcccccucugcccugc

SEQ ID NO: 1721713 - RNA, 22 nt, Human
cuaaacugcccccucugcccug

SEQ ID NO: 1721714 - RNA, 23 nt, Human
cgugagccaccgugccuggccac

SEQ ID NO: 1721715 - RNA, 16 nt, Human
cgugagaccugccccu

SEQ ID NO: 1721716 - RNA, 14 nt, Human
cgugagaccugccc

SEQ ID NO: 1721717 - RNA, 13 nt, Human
cgugagaccugcc

SEQ ID NO: 1721718 - RNA, 17 nt, Human
cggcucuggccuccaag

SEQ ID NO: 1721719 - RNA, 15 nt, Human
cuaacuucaccauau

SEQ ID NO: 1721720 - RNA, 16 nt, Human
cuaacuucaccauauu

SEQ ID NO: 1721721 - RNA, 16 nt, Human
ccguagguuauuuuca

SEQ ID NO: 1721722 - RNA, 19 nt, Human
ccggcuaauuuuuguauuu

SEQ ID NO: 1721723 - RNA, 17 nt, Human
ccggcuaugggggcacu

SEQ ID NO: 1721724 - RNA, 23 nt, Human
ccggcuaugggggcacugaggac

SEQ ID NO: 1721725 - RNA, 22 nt, Human
ccggcuaugggggcacugagga

SEQ ID NO: 1721726 - RNA, 12 nt, Human
ccggcuccaggc

SEQ ID NO: 1721727 - RNA, 23 nt, Human
ccuaauaaagcuguguggcaguc

SEQ ID NO: 1721728 - RNA, 14 nt, Human
ccuaauaaagcugu

SEQ ID NO: 1721729 - RNA, 18 nt, Human
ccgucucugguuccuccc

SEQ ID NO: 1721730 - RNA, 23 nt, Human
ccuaggcauuugcugaauacaga

SEQ ID NO: 1721731 - RNA, 15 nt, Human
ccucauguccacugg

SEQ ID NO: 1721732 - RNA, 13 nt, Human
ccucagccuccug

SEQ ID NO: 1721733 - RNA, 22 nt, Human
ccucagccucccgaauagcugg

SEQ ID NO: 1721734 - RNA, 23 nt, Human
ccucagccucccaaagugcuggg

SEQ ID NO: 1721735 - RNA, 20 nt, Human
ccucauguccacugguucuu

SEQ ID NO: 1721736 - RNA, 14 nt, Human
ccucagccuccuga

SEQ ID NO: 1721737 - RNA, 13 nt, Human
ccucauguucuua

SEQ ID NO: 1721738 - RNA, 18 nt, Human
ccucauuagcauuuugcu

SEQ ID NO: 1721739 - RNA, 22 nt, Human
ccuccaagcuccaucuccacuc

SEQ ID NO: 1721740 - RNA, 21 nt, Human
ccuccaagcuccaucuccacu

SEQ ID NO: 1721741 - RNA, 19 nt, Human
ccucauguucuuaauucuu

SEQ ID NO: 1721742 - RNA, 22 nt, Human
ccucccaaggggcccaaauucu

SEQ ID NO: 1721743 - RNA, 22 nt, Human
ccuccaaucccaccaacccuca

SEQ ID NO: 1721744 - RNA, 18 nt, Human
ccuccaaguccacagugg

SEQ ID NO: 1721745 - RNA, 21 nt, Human
ccuccaaguccacaguggaac

SEQ ID NO: 1721746 - RNA, 20 nt, Human
ccucccaggcgccccuuccc

SEQ ID NO: 1721747 - RNA, 14 nt, Human
ccucccaggcgccc

SEQ ID NO: 1721748 - RNA, 22 nt, Human
ccucagccucccaaagugcugg

SEQ ID NO: 1721749 - RNA, 11 nt, Human
ccucagccucc

SEQ ID NO: 1721750 - RNA, 15 nt, Human
ccucaagagaaggca

SEQ ID NO: 1721751 - RNA, 15 nt, Human
ccucaacucuccucc

SEQ ID NO: 1721752 - RNA, 15 nt, Human
ccuauuuuaauaaac

SEQ ID NO: 1721753 - RNA, 16 nt, Human
cccuggcagccccugu

SEQ ID NO: 1721754 - RNA, 14 nt, Human
cccuggcagccccu

SEQ ID NO: 1721755 - RNA, 19 nt, Human
cccuggcucccacaggccc

SEQ ID NO: 1721756 - RNA, 17 nt, Human
cccuggcucccacaggc

SEQ ID NO: 1721757 - RNA, 17 nt, Human
cccuggcuuuucacugc

SEQ ID NO: 1721758 - RNA, 13 nt, Human
cccuggcuuuuca

SEQ ID NO: 1721759 - RNA, 13 nt, Human
cccugcccugugg

SEQ ID NO: 1721760 - RNA, 12 nt, Human
cccugcccugug

SEQ ID NO: 1721761 - RNA, 15 nt, Human
cccucacccuggggc

SEQ ID NO: 1721762 - RNA, 20 nt, Human
cccugcccugugggccccca

SEQ ID NO: 1721763 - RNA, 16 nt, Human
cccugcccugugggcc

SEQ ID NO: 1721764 - RNA, 15 nt, Human
cccugcccugugggc

SEQ ID NO: 1721765 - RNA, 14 nt, Human
cccugcccuguggg

SEQ ID NO: 1721766 - RNA, 13 nt, Human
cccuggcagcccc

SEQ ID NO: 1721767 - RNA, 12 nt, Human
cccuggcagccc

SEQ ID NO: 1721768 - RNA, 21 nt, Human
cccugcccugugggcccccaa

SEQ ID NO: 1721769 - RNA, 20 nt, Human
ccgaauagcugggacuacag

SEQ ID NO: 1721770 - RNA, 17 nt, Human
ccgccaaggcuggggga

SEQ ID NO: 1721771 - RNA, 16 nt, Human
ccgacccuugccgucu

SEQ ID NO: 1721772 - RNA, 20 nt, Human
ccgcccaggcuuagucacug

SEQ ID NO: 1721773 - RNA, 16 nt, Human
ccgccaugcuccuggc

SEQ ID NO: 1721774 - RNA, 18 nt, Human
cccuucgcuccugugucu

SEQ ID NO: 1721775 - RNA, 16 nt, Human
cccuucgcuccugugu

SEQ ID NO: 1721776 - RNA, 16 nt, Human
cccuucuaccuuccug

SEQ ID NO: 1721777 - RNA, 23 nt, Human
cccuucugacccaugcugcccug

SEQ ID NO: 1721778 - RNA, 22 nt, Human
cccuucugacccaugcugcccu

SEQ ID NO: 1721779 - RNA, 21 nt, Human
cccuucugacccaugcugccc

SEQ ID NO: 1721780 - RNA, 18 nt, Human
ccucugcugcuggcuggu

SEQ ID NO: 1721781 - RNA, 17 nt, Human
ccucugcugcuggcugg

SEQ ID NO: 1721782 - RNA, 16 nt, Human
ccucugcugcuggcug

SEQ ID NO: 1721783 - RNA, 15 nt, Human
ccucugcugcuggcu

SEQ ID NO: 1721784 - RNA, 14 nt, Human
ccucugcugcuggc

SEQ ID NO: 1721785 - RNA, 13 nt, Human
ccucugcugcugg

SEQ ID NO: 1721786 - RNA, 18 nt, Human
ccucugcugauccuccca

SEQ ID NO: 1721787 - RNA, 15 nt, Human
ccucugcugauccuc

SEQ ID NO: 1721788 - RNA, 22 nt, Human
ccucugccugaagucacacagu

SEQ ID NO: 1721789 - RNA, 12 nt, Human
ccucugccuguc

SEQ ID NO: 1721790 - RNA, 22 nt, Human
ccucucugcaggucccuaauaa

SEQ ID NO: 1721791 - RNA, 21 nt, Human
ccucucugcaggucccuaaua

SEQ ID NO: 1721792 - RNA, 23 nt, Human
ccucucugcaggucccuaauaaa

SEQ ID NO: 1721793 - RNA, 12 nt, Human
ccucucugcccu

SEQ ID NO: 1721794 - RNA, 12 nt, Human
ccucucucaggc

SEQ ID NO: 1721795 - RNA, 17 nt, Human
ccucucucacuccuuga

SEQ ID NO: 1721796 - RNA, 15 nt, Human
ccucucucacuccuu

SEQ ID NO: 1721797 - RNA, 14 nt, Human
ccucucucacuccu

SEQ ID NO: 1721798 - RNA, 13 nt, Human
ccucucucacucc

SEQ ID NO: 1721799 - RNA, 14 nt, Human
ccucucucaggcca

SEQ ID NO: 1721800 - RNA, 15 nt, Human
ccucucugcaggucc

SEQ ID NO: 1721801 - RNA, 13 nt, Human
ccucucugcaggu

SEQ ID NO: 1721802 - RNA, 22 nt, Human
ccugcacuugcagacucuacag

SEQ ID NO: 1721803 - RNA, 20 nt, Human
ccugaguagcuggauuacag

SEQ ID NO: 1721804 - RNA, 15 nt, Human
ccugaguagcuggau

SEQ ID NO: 1721805 - RNA, 19 nt, Human
ccugaguagcuggauuaca

SEQ ID NO: 1721806 - RNA, 13 nt, Human
ccucuugagccuu

SEQ ID NO: 1721807 - RNA, 19 nt, Human
ccucuugagccuugaacuu

SEQ ID NO: 1721808 - RNA, 13 nt, Human
ccucuuggguuca

SEQ ID NO: 1721809 - RNA, 14 nt, Human
ccucuugccacugc

SEQ ID NO: 1721810 - RNA, 15 nt, Human
ccuggccucugcacu

SEQ ID NO: 1721811 - RNA, 14 nt, Human
ccuggccucugcac

SEQ ID NO: 1721812 - RNA, 13 nt, Human
ccuggccugagcu

SEQ ID NO: 1721813 - RNA, 16 nt, Human
ccuggccucugcacuc

SEQ ID NO: 1721814 - RNA, 12 nt, Human
ccuggccucugc

SEQ ID NO: 1721815 - RNA, 18 nt, Human
ccuggcacccggccccug

SEQ ID NO: 1721816 - RNA, 18 nt, Human
ccuggcacagggcagugg

SEQ ID NO: 1721817 - RNA, 17 nt, Human
ccuggcacagggcagug

SEQ ID NO: 1721818 - RNA, 16 nt, Human
ccuggcacagggcagu

SEQ ID NO: 1721819 - RNA, 13 nt, Human
ccuggaugcagcc

SEQ ID NO: 1721820 - RNA, 21 nt, Human
ccuggauccaucaggccacuu

SEQ ID NO: 1721821 - RNA, 17 nt, Human
ccuggaugcagccucac

SEQ ID NO: 1721822 - RNA, 14 nt, Human
ccuggaugcagccu

SEQ ID NO: 1721823 - RNA, 19 nt, Human
ccuggaugcagccucacag

SEQ ID NO: 1721824 - RNA, 17 nt, Human
ccuggaguucugguucc

SEQ ID NO: 1721825 - RNA, 16 nt, Human
ccuggaguucugguuc

SEQ ID NO: 1721826 - RNA, 15 nt, Human
ccuggaguucugguu

SEQ ID NO: 1721827 - RNA, 18 nt, Human
ccugcccaggccccugcc

SEQ ID NO: 1721828 - RNA, 16 nt, Human
ccugcccaggccccug

SEQ ID NO: 1721829 - RNA, 15 nt, Human
ccugcccaggccccu

SEQ ID NO: 1721830 - RNA, 14 nt, Human
ccugcccaggcccc

SEQ ID NO: 1721831 - RNA, 20 nt, Human
ccugcuggguguggcgcagc

SEQ ID NO: 1721832 - RNA, 14 nt, Human
ccugcugggugugg

SEQ ID NO: 1721833 - RNA, 21 nt, Human
ccugcuggguguggcgcagca

SEQ ID NO: 1721834 - RNA, 12 nt, Human
ccugcugggugu

SEQ ID NO: 1721835 - RNA, 23 nt, Human
ccccaaaacucuccucugcugcu

SEQ ID NO: 1721836 - RNA, 22 nt, Human
cccauuguggucacaggaagua

SEQ ID NO: 1721837 - RNA, 23 nt, Human
cccauuguggucacaggaaguag

SEQ ID NO: 1721838 - RNA, 22 nt, Human
ccccaaaacucuccucugcugc

SEQ ID NO: 1721839 - RNA, 22 nt, Human
ccccagcaagugagagcugggu

SEQ ID NO: 1721840 - RNA, 13 nt, Human
ccccagaggcugg

SEQ ID NO: 1721841 - RNA, 22 nt, Human
cccccaaauggaaaugggcaga

SEQ ID NO: 1721842 - RNA, 23 nt, Human
ccccgacccuugccgucuaccug

SEQ ID NO: 1721843 - RNA, 23 nt, Human
ccccgaggccuucucugaaggac

SEQ ID NO: 1721844 - RNA, 23 nt, Human
cccgggaggcagagguugcagug

SEQ ID NO: 1721845 - RNA, 18 nt, Human
cccuauuagagaagagau

SEQ ID NO: 1721846 - RNA, 17 nt, Human
cccuauugguaaagaau

SEQ ID NO: 1721847 - RNA, 17 nt, Human
cccggccaccugcggug

SEQ ID NO: 1721848 - RNA, 16 nt, Human
cccggcuccaggcucc

SEQ ID NO: 1721849 - RNA, 15 nt, Human
cccggcuccaggcuc

SEQ ID NO: 1721850 - RNA, 14 nt, Human
cccggcuccaggcu

SEQ ID NO: 1721851 - RNA, 13 nt, Human
cccggcuccaggc

SEQ ID NO: 1721852 - RNA, 12 nt, Human
cccggcuccagg

SEQ ID NO: 1721853 - RNA, 14 nt, Human
cccggccaccugcg

SEQ ID NO: 1721854 - RNA, 13 nt, Human
cccggccaccugc

SEQ ID NO: 1721855 - RNA, 14 nt, Human
cccgaauagcuggg

SEQ ID NO: 1721856 - RNA, 19 nt, Human
ccccucuggcuccagcugg

SEQ ID NO: 1721857 - RNA, 20 nt, Human
cccauauuuguacaccaaua

SEQ ID NO: 1721858 - RNA, 17 nt, Human
cccaggcuggcgugcag

SEQ ID NO: 1721859 - RNA, 13 nt, Human
cccaggcuggcgu

SEQ ID NO: 1721860 - RNA, 15 nt, Human
cccagcuugaaaccu

SEQ ID NO: 1721861 - RNA, 13 nt, Human
cccauccucugua

SEQ ID NO: 1721862 - RNA, 23 nt, Human
cccagcucugguccauagagagc

SEQ ID NO: 1721863 - RNA, 12 nt, Human
cccacucccugc

SEQ ID NO: 1721864 - RNA, 18 nt, Human
cccacuagacccacugga

SEQ ID NO: 1721865 - RNA, 13 nt, Human
cccacugcucugg

SEQ ID NO: 1721866 - RNA, 12 nt, Human
cccacugcucug

SEQ ID NO: 1721867 - RNA, 19 nt, Human
cccacugcuuuuggucugu

SEQ ID NO: 1721868 - RNA, 22 nt, Human
cccacugcuuuuggucugugug

SEQ ID NO: 1721869 - RNA, 22 nt, Human
cccacccaagggccuggccuga

SEQ ID NO: 1721870 - RNA, 21 nt, Human
cccacccaagggccuggccug

SEQ ID NO: 1721871 - RNA, 20 nt, Human
cccacccaagggccuggccu

SEQ ID NO: 1721872 - RNA, 15 nt, Human
cccacccccacccaa

SEQ ID NO: 1721873 - RNA, 17 nt, Human
cccacccccacccaagg

SEQ ID NO: 1721874 - RNA, 18 nt, Human
cccacccugaaagcccug

SEQ ID NO: 1721875 - RNA, 20 nt, Human
ccauggucggaaaacaugcu

SEQ ID NO: 1721876 - RNA, 23 nt, Human
ccaugagccucagcauccuggca

SEQ ID NO: 1721877 - RNA, 21 nt, Human
ccaugagccucagcauccugg

SEQ ID NO: 1721878 - RNA, 20 nt, Human
ccaucccugaaggccccgcc

SEQ ID NO: 1721879 - RNA, 17 nt, Human
ccaucccugaaggcccc

SEQ ID NO: 1721880 - RNA, 15 nt, Human
ccaucccugaaggcc

SEQ ID NO: 1721881 - RNA, 14 nt, Human
ccaucccugaaggc

SEQ ID NO: 1721882 - RNA, 15 nt, Human
ccaucccagccccaa

SEQ ID NO: 1721883 - RNA, 14 nt, Human
ccaucccagcccca

SEQ ID NO: 1721884 - RNA, 23 nt, Human
ccaguuggucccccuuccaugga

SEQ ID NO: 1721885 - RNA, 23 nt, Human
ccaguuggguggaugccuggugg

SEQ ID NO: 1721886 - RNA, 21 nt, Human
ccaguuguuagauuaagaaau

SEQ ID NO: 1721887 - RNA, 20 nt, Human
ccaguuggguggaugccugg

SEQ ID NO: 1721888 - RNA, 19 nt, Human
ccaguuggguggaugccug

SEQ ID NO: 1721889 - RNA, 17 nt, Human
ccaguuggguggaugcc

SEQ ID NO: 1721890 - RNA, 17 nt, Human
ccaggggugggacaccc

SEQ ID NO: 1721891 - RNA, 14 nt, Human
ccaggggugggaca

SEQ ID NO: 1721892 - RNA, 19 nt, Human
ccaggggugggacacccug

SEQ ID NO: 1721893 - RNA, 13 nt, Human
ccaggggugggac

SEQ ID NO: 1721894 - RNA, 20 nt, Human
ccaggggaaaaucagccugc

SEQ ID NO: 1721895 - RNA, 19 nt, Human
ccaggggaaaaucagccug

SEQ ID NO: 1721896 - RNA, 18 nt, Human
ccaggcuggcgugcagug

SEQ ID NO: 1721897 - RNA, 17 nt, Human
ccaggcuggcgugcagu

SEQ ID NO: 1721898 - RNA, 19 nt, Human
ccaggcuggcgugcagugg

SEQ ID NO: 1721899 - RNA, 21 nt, Human
ccaggcuccuuuagcgcccag

SEQ ID NO: 1721900 - RNA, 20 nt, Human
ccaggcuccuuuagcgccca

SEQ ID NO: 1721901 - RNA, 18 nt, Human
ccaggcacugcugcccag

SEQ ID NO: 1721902 - RNA, 16 nt, Human
ccaggcacugcugccc

SEQ ID NO: 1721903 - RNA, 15 nt, Human
ccagcaggcucucag

SEQ ID NO: 1721904 - RNA, 13 nt, Human
ccagcaggcucuc

SEQ ID NO: 1721905 - RNA, 16 nt, Human
ccagcuguucagcugg

SEQ ID NO: 1721906 - RNA, 22 nt, Human
ccagcucaccagccccagugcc

SEQ ID NO: 1721907 - RNA, 16 nt, Human
ccagcucaccagcccc

SEQ ID NO: 1721908 - RNA, 15 nt, Human
ccagcucaccagccc

SEQ ID NO: 1721909 - RNA, 19 nt, Human
ccagcuuaaaggggcuaga

SEQ ID NO: 1721910 - RNA, 16 nt, Human
ccagcuuaucucaggg

SEQ ID NO: 1721911 - RNA, 17 nt, Human
ccagcuguucagcuggu

SEQ ID NO: 1721912 - RNA, 12 nt, Human
ccagccccugga

SEQ ID NO: 1721913 - RNA, 11 nt, Human
ccagccccugg

SEQ ID NO: 1721914 - RNA, 13 nt, Human
ccaggaagccagc

SEQ ID NO: 1721915 - RNA, 14 nt, Human
ccaggaagccagca

SEQ ID NO: 1721916 - RNA, 12 nt, Human
ccaggaagccag

SEQ ID NO: 1721917 - RNA, 15 nt, Human
ccaggaaaggcucca

SEQ ID NO: 1721918 - RNA, 14 nt, Human
ccaggaaaggcucc

SEQ ID NO: 1721919 - RNA, 16 nt, Human
ccaggaaaggcuccag

SEQ ID NO: 1721920 - RNA, 19 nt, Human
ccagagggccugcaaggga

SEQ ID NO: 1721921 - RNA, 18 nt, Human
ccagagggccugcaaggg

SEQ ID NO: 1721922 - RNA, 17 nt, Human
ccagagggccugcaagg

SEQ ID NO: 1721923 - RNA, 16 nt, Human
ccaccuuggcucaagu

SEQ ID NO: 1721924 - RNA, 20 nt, Human
ccagagggccugcaagggag

SEQ ID NO: 1721925 - RNA, 15 nt, Human
ccagaugcaccagcc

SEQ ID NO: 1721926 - RNA, 17 nt, Human
ccagaugcaccagcccu

SEQ ID NO: 1721927 - RNA, 18 nt, Human
ccagaugcaccagcccuu

SEQ ID NO: 1721928 - RNA, 23 nt, Human
ccagaugcaccagcccuuagcag

SEQ ID NO: 1721929 - RNA, 23 nt, Human
cagguuuuuggucugacccacug

SEQ ID NO: 1721930 - RNA, 21 nt, Human
caggguuggccccugcccggc

SEQ ID NO: 1721931 - RNA, 17 nt, Human
caggguuggccccugcc

SEQ ID NO: 1721932 - RNA, 14 nt, Human
caggugcugccauc

SEQ ID NO: 1721933 - RNA, 13 nt, Human
caggugcugccau

SEQ ID NO: 1721934 - RNA, 17 nt, Human
cagucaccccggccacc

SEQ ID NO: 1721935 - RNA, 16 nt, Human
cagucaccccggccac

SEQ ID NO: 1721936 - RNA, 14 nt, Human
cagucaccccggcc

SEQ ID NO: 1721937 - RNA, 19 nt, Human
caguaaaugggggugcauu

SEQ ID NO: 1721938 - RNA, 20 nt, Human
caguaaaugggggugcauuu

SEQ ID NO: 1721939 - RNA, 18 nt, Human
caguaaaugggggugcau

SEQ ID NO: 1721940 - RNA, 23 nt, Human
cagggucucacucugucgcccag

SEQ ID NO: 1721941 - RNA, 21 nt, Human
cagggucucuaccauccccug

SEQ ID NO: 1721942 - RNA, 16 nt, Human
caggguuggccccugc

SEQ ID NO: 1721943 - RNA, 15 nt, Human
caggguuggccccug

SEQ ID NO: 1721944 - RNA, 22 nt, Human
cagggaggacgcucucuggccu

SEQ ID NO: 1721945 - RNA, 15 nt, Human
caggcugggcuucag

SEQ ID NO: 1721946 - RNA, 14 nt, Human
caggcugggcuuca

SEQ ID NO: 1721947 - RNA, 15 nt, Human
cagggcucagcgggg

SEQ ID NO: 1721948 - RNA, 12 nt, Human
cagggcucagcg

SEQ ID NO: 1721949 - RNA, 20 nt, Human
cagggcucagcggggacagc

SEQ ID NO: 1721950 - RNA, 16 nt, Human
cagggagggcuucugc

SEQ ID NO: 1721951 - RNA, 18 nt, Human
cagggagggccugggccc

SEQ ID NO: 1721952 - RNA, 17 nt, Human
cagggagggccugggcc

SEQ ID NO: 1721953 - RNA, 20 nt, Human
caggcugggagagccuucca

SEQ ID NO: 1721954 - RNA, 19 nt, Human
caggcugggagagccuucc

SEQ ID NO: 1721955 - RNA, 18 nt, Human
caggcugggagagccuuc

SEQ ID NO: 1721956 - RNA, 16 nt, Human
caggcugggagagccu

SEQ ID NO: 1721957 - RNA, 19 nt, Human
caggcuggcgugcaguggu

SEQ ID NO: 1721958 - RNA, 18 nt, Human
caggcuggcgugcagugg

SEQ ID NO: 1721959 - RNA, 17 nt, Human
caggcuggcgugcagug

SEQ ID NO: 1721960 - RNA, 23 nt, Human
caggccugggggcugggcagagg

SEQ ID NO: 1721961 - RNA, 22 nt, Human
caggccugggggcugggcagag

SEQ ID NO: 1721962 - RNA, 20 nt, Human
caggccugggggcugggcag

SEQ ID NO: 1721963 - RNA, 13 nt, Human
caggaccucaggu

SEQ ID NO: 1721964 - RNA, 21 nt, Human
caggaccagggauuuccauga

SEQ ID NO: 1721965 - RNA, 13 nt, Human
caggaccagggau

SEQ ID NO: 1721966 - RNA, 16 nt, Human
caggccaggcccucug

SEQ ID NO: 1721967 - RNA, 15 nt, Human
caggccaggcccucu

SEQ ID NO: 1721968 - RNA, 14 nt, Human
caggccaggcccuc

SEQ ID NO: 1721969 - RNA, 13 nt, Human
caggccaggcccu

SEQ ID NO: 1721970 - RNA, 15 nt, Human
caggccagcugcuug

SEQ ID NO: 1721971 - RNA, 13 nt, Human
caggccagcugcu

SEQ ID NO: 1721972 - RNA, 23 nt, Human
caggcacugcugcccagccucca

SEQ ID NO: 1721973 - RNA, 20 nt, Human
caggcaaugcuggcuguugg

SEQ ID NO: 1721974 - RNA, 19 nt, Human
caggcaaugcuggcuguug

SEQ ID NO: 1721975 - RNA, 13 nt, Human
caggaggccagcc

SEQ ID NO: 1721976 - RNA, 12 nt, Human
caggaggccagc

SEQ ID NO: 1721977 - RNA, 21 nt, Human
caggcaaugcuggcuguuggc

SEQ ID NO: 1721978 - RNA, 17 nt, Human
caggcacugcugcccag

SEQ ID NO: 1721979 - RNA, 16 nt, Human
caggcacugcugccca

SEQ ID NO: 1721980 - RNA, 16 nt, Human
cagcuuauucacaaga

SEQ ID NO: 1721981 - RNA, 17 nt, Human
cagcuuauucacaagac

SEQ ID NO: 1721982 - RNA, 19 nt, Human
cagcuguucagcugguuga

SEQ ID NO: 1721983 - RNA, 16 nt, Human
cagcuguucagcuggu

SEQ ID NO: 1721984 - RNA, 15 nt, Human
cagcuguucagcugg

SEQ ID NO: 1721985 - RNA, 20 nt, Human
caggaaaagcugcugacagu

SEQ ID NO: 1721986 - RNA, 19 nt, Human
caggaaaagcugcugacag

SEQ ID NO: 1721987 - RNA, 22 nt, Human
caggaaaggcuccaggagcagc

SEQ ID NO: 1721988 - RNA, 21 nt, Human
caggaaaggcuccaggagcag

SEQ ID NO: 1721989 - RNA, 23 nt, Human
caggaaaggcuccaggagcagcc

SEQ ID NO: 1721990 - RNA, 16 nt, Human
cagaucauugugaaau

SEQ ID NO: 1721991 - RNA, 22 nt, Human
cagaucauugugaaauuauuca

SEQ ID NO: 1721992 - RNA, 23 nt, Human
cagauacaggaaaagcugcugac

SEQ ID NO: 1721993 - RNA, 20 nt, Human
cagagacuccugcaggcagc

SEQ ID NO: 1721994 - RNA, 22 nt, Human
cagagacuccugcaggcagcca

SEQ ID NO: 1721995 - RNA, 21 nt, Human
cagagacuccugcaggcagcc

SEQ ID NO: 1721996 - RNA, 23 nt, Human
cagagacuccugcaggcagccag

SEQ ID NO: 1721997 - RNA, 22 nt, Human
cagagagggugggagugggccc

SEQ ID NO: 1721998 - RNA, 20 nt, Human
cagagagggugggagugggc

SEQ ID NO: 1721999 - RNA, 14 nt, Human
cagagccugcaguu

SEQ ID NO: 1722000 - RNA, 23 nt, Human
cagagagggugggagugggccca

SEQ ID NO: 1722001 - RNA, 16 nt, Human
cagagagggugggagu

SEQ ID NO: 1722002 - RNA, 22 nt, Human
cagagcuacacaggggaaaaga

SEQ ID NO: 1722003 - RNA, 17 nt, Human
cagagcuacacagggga

SEQ ID NO: 1722004 - RNA, 19 nt, Human
cagccccgugggguuccuc

SEQ ID NO: 1722005 - RNA, 13 nt, Human
cagccccugcaca

SEQ ID NO: 1722006 - RNA, 22 nt, Human
cagccccauucugccugcccag

SEQ ID NO: 1722007 - RNA, 20 nt, Human
cagccccauucugccugccc

SEQ ID NO: 1722008 - RNA, 19 nt, Human
cagccccauucugccugcc

SEQ ID NO: 1722009 - RNA, 24 nt, Human
cagccccauucugccugcccaggc

SEQ ID NO: 1722010 - RNA, 23 nt, Human
cagccccauucugccugcccagg

SEQ ID NO: 1722011 - RNA, 23 nt, Human
cagccugagcgacagugagacuc

SEQ ID NO: 1722012 - RNA, 17 nt, Human
cagccucugaaaaccaa

SEQ ID NO: 1722013 - RNA, 23 nt, Human
cagccgccaugcuccuggcccac

SEQ ID NO: 1722014 - RNA, 15 nt, Human
cagcccuuagcaggg

SEQ ID NO: 1722015 - RNA, 13 nt, Human
cagcccuuagcag

SEQ ID NO: 1722016 - RNA, 14 nt, Human
cagcggggacagcu

SEQ ID NO: 1722017 - RNA, 19 nt, Human
cagcguuucuaugacacau

SEQ ID NO: 1722018 - RNA, 16 nt, Human
cagcguuucuaugaca

SEQ ID NO: 1722019 - RNA, 14 nt, Human
cagcguuucuauga

SEQ ID NO: 1722020 - RNA, 18 nt, Human
cagcauauucaggaagcu

SEQ ID NO: 1722021 - RNA, 17 nt, Human
cagcauauucaggaagc

SEQ ID NO: 1722022 - RNA, 16 nt, Human
cagcauauucaggaag

SEQ ID NO: 1722023 - RNA, 21 nt, Human
cagauugcaacaggcugggcu

SEQ ID NO: 1722024 - RNA, 19 nt, Human
cagauuucacucuccuugg

SEQ ID NO: 1722025 - RNA, 18 nt, Human
cagauuucacucuccuug

SEQ ID NO: 1722026 - RNA, 16 nt, Human
cagauuucacucuccu

SEQ ID NO: 1722027 - RNA, 15 nt, Human
cagauuucacucucc

SEQ ID NO: 1722028 - RNA, 14 nt, Human
cagauuugagcuca

SEQ ID NO: 1722029 - RNA, 13 nt, Human
cagauuugagcuc

SEQ ID NO: 1722030 - RNA, 16 nt, Human
cagauuugagcucagc

SEQ ID NO: 1722031 - RNA, 13 nt, Human
cagauuuggaaag

SEQ ID NO: 1722032 - RNA, 17 nt, Human
ccaaaacucuccucugc

SEQ ID NO: 1722033 - RNA, 22 nt, Human
cauuuggugguuucagaaaugu

SEQ ID NO: 1722034 - RNA, 23 nt, Human
cauuuggugguuucagaaaugug

SEQ ID NO: 1722035 - RNA, 20 nt, Human
cauuuuugaauacaggcaua

SEQ ID NO: 1722036 - RNA, 18 nt, Human
cauuuuugaauacaggca

SEQ ID NO: 1722037 - RNA, 16 nt, Human
cauuuauucugcucac

SEQ ID NO: 1722038 - RNA, 18 nt, Human
cauuucauuugugccaga

SEQ ID NO: 1722039 - RNA, 21 nt, Human
cauugcggacagccacggcca

SEQ ID NO: 1722040 - RNA, 17 nt, Human
cauugcggacagccacg

SEQ ID NO: 1722041 - RNA, 15 nt, Human
cauugcggacagcca

SEQ ID NO: 1722042 - RNA, 14 nt, Human
cauugcggacagcc

SEQ ID NO: 1722043 - RNA, 18 nt, Human
cauugcugggcuugucug

SEQ ID NO: 1722044 - RNA, 16 nt, Human
cauucuccuuguguua

SEQ ID NO: 1722045 - RNA, 18 nt, Human
cauuaucuagauacugua

SEQ ID NO: 1722046 - RNA, 13 nt, Human
cauuaugaugugu

SEQ ID NO: 1722047 - RNA, 16 nt, Human
cauucucacuccuacc

SEQ ID NO: 1722048 - RNA, 17 nt, Human
cauucucacuccuaccu

SEQ ID NO: 1722049 - RNA, 15 nt, Human
cauuaggauggcuag

SEQ ID NO: 1722050 - RNA, 12 nt, Human
cauuaucuagau

SEQ ID NO: 1722051 - RNA, 16 nt, Human
cauuaucuagauacug

SEQ ID NO: 1722052 - RNA, 17 nt, Human
cauuaucuagauacugu

SEQ ID NO: 1722053 - RNA, 15 nt, Human
cauguucucugagga

SEQ ID NO: 1722054 - RNA, 22 nt, Human
cauggcugccaaugggagcuca

SEQ ID NO: 1722055 - RNA, 20 nt, Human
ccaauguucucucuucucca

SEQ ID NO: 1722056 - RNA, 22 nt, Human
ccaaugcacuuuguucuggcuc

SEQ ID NO: 1722057 - RNA, 20 nt, Human
ccaaugcacuuuguucuggc

SEQ ID NO: 1722058 - RNA, 23 nt, Human
ccaaugcacuuuguucuggcucu

SEQ ID NO: 1722059 - RNA, 22 nt, Human
ccaaagugcugggauuacaggc

SEQ ID NO: 1722060 - RNA, 22 nt, Human
ccaaagugcugggauuacaggg

SEQ ID NO: 1722061 - RNA, 19 nt, Human
ccaaagugcugggauuaca

SEQ ID NO: 1722062 - RNA, 12 nt, Human
ccaaaugcagcu

SEQ ID NO: 1722063 - RNA, 22 nt, Human
ccaaagugcugggauuacaggu

SEQ ID NO: 1722064 - RNA, 19 nt, Human
ccaaagugguauagaaaug

SEQ ID NO: 1722065 - RNA, 22 nt, Human
ccaaagugguauagaaaugcug

SEQ ID NO: 1722066 - RNA, 11 nt, Human
ccaacuuguaa

SEQ ID NO: 1722067 - RNA, 17 nt, Human
ccaccaucaagccacca

SEQ ID NO: 1722068 - RNA, 16 nt, Human
ccaccaucaagccacc

SEQ ID NO: 1722069 - RNA, 22 nt, Human
ccacacuucaggcucuucuccu

SEQ ID NO: 1722070 - RNA, 17 nt, Human
ccaccgcagacaggacc

SEQ ID NO: 1722071 - RNA, 14 nt, Human
ccaccgcagacagg

SEQ ID NO: 1722072 - RNA, 20 nt, Human
ccaccaucaagccaccaaca

SEQ ID NO: 1722073 - RNA, 18 nt, Human
ccaccaucaccagacagg

SEQ ID NO: 1722074 - RNA, 13 nt, Human
ccacccugcucuc

SEQ ID NO: 1722075 - RNA, 15 nt, Human
ccaccuuggcucaag

SEQ ID NO: 1722076 - RNA, 14 nt, Human
ccaccuuggcucaa

SEQ ID NO: 1722077 - RNA, 18 nt, Human
ccaccgcagacaggacca

SEQ ID NO: 1722078 - RNA, 19 nt, Human
ccaccgcagacaggaccag

SEQ ID NO: 1722079 - RNA, 23 nt, Human
ccaccgggcugggagcucugcag

SEQ ID NO: 1722080 - RNA, 14 nt, Human
caugacacgaauau

SEQ ID NO: 1722081 - RNA, 14 nt, Human
caugaauuugugaa

SEQ ID NO: 1722082 - RNA, 18 nt, Human
caugacacgaauauugcu

SEQ ID NO: 1722083 - RNA, 17 nt, Human
caugacacgaauauugc

SEQ ID NO: 1722084 - RNA, 18 nt, Human
caugcugcccugugagua

SEQ ID NO: 1722085 - RNA, 16 nt, Human
caugcugcccugugag

SEQ ID NO: 1722086 - RNA, 19 nt, Human
cauggccuuugcuugaaag

SEQ ID NO: 1722087 - RNA, 22 nt, Human
cauggccuuugcuugaaagaaa

SEQ ID NO: 1722088 - RNA, 14 nt, Human
caugcugccuccag

SEQ ID NO: 1722089 - RNA, 12 nt, Human
caugcugccucc

SEQ ID NO: 1722090 - RNA, 17 nt, Human
caugcaaggucauuuuu

SEQ ID NO: 1722091 - RNA, 18 nt, Human
caugcaaggucauuuuuu

SEQ ID NO: 1722092 - RNA, 22 nt, Human
caugcaaggucauuuuuuuuaa

SEQ ID NO: 1722093 - RNA, 19 nt, Human
caucagcacgauuucuguu

SEQ ID NO: 1722094 - RNA, 13 nt, Human
caucaggccaggc

SEQ ID NO: 1722095 - RNA, 17 nt, Human
caucagcacgauuucug

SEQ ID NO: 1722096 - RNA, 18 nt, Human
caucagcacgauuucugu

SEQ ID NO: 1722097 - RNA, 23 nt, Human
caucaggccaggcccucugccca

SEQ ID NO: 1722098 - RNA, 22 nt, Human
caucaggccaggcccucugccc

SEQ ID NO: 1722099 - RNA, 21 nt, Human
caucaggccaggcccucugcc

SEQ ID NO: 1722100 - RNA, 14 nt, Human
caucaggccaggcc

SEQ ID NO: 1722101 - RNA, 14 nt, Human
caucccagccccaa

SEQ ID NO: 1722102 - RNA, 13 nt, Human
caucccagcccca

SEQ ID NO: 1722103 - RNA, 16 nt, Human
caucccagccccaaug

SEQ ID NO: 1722104 - RNA, 17 nt, Human
caucccagccccaauga

SEQ ID NO: 1722105 - RNA, 22 nt, Human
caucuuagguuggcaaaaaggc

SEQ ID NO: 1722106 - RNA, 21 nt, Human
caucuuagguuggcaaaaagg

SEQ ID NO: 1722107 - RNA, 19 nt, Human
caucugugaaaggaaagag

SEQ ID NO: 1722108 - RNA, 18 nt, Human
caucugugaaaggaaaga

SEQ ID NO: 1722109 - RNA, 12 nt, Human
caucgcaaugua

SEQ ID NO: 1722110 - RNA, 15 nt, Human
cauacaauuccaaac

SEQ ID NO: 1722111 - RNA, 21 nt, Human
cauaaugcgugcauaccacuu

SEQ ID NO: 1722112 - RNA, 12 nt, Human
cauagcccucac

SEQ ID NO: 1722113 - RNA, 19 nt, Human
cauagcccucacccugggg

SEQ ID NO: 1722114 - RNA, 15 nt, Human
cauagcccucacccu

SEQ ID NO: 1722115 - RNA, 17 nt, Human
cauauuaccacagacau

SEQ ID NO: 1722116 - RNA, 20 nt, Human
cauauuaccacagacauacu

SEQ ID NO: 1722117 - RNA, 21 nt, Human
cauauuaccacagacauacua

SEQ ID NO: 1722118 - RNA, 22 nt, Human
cauauuaccacagacauacuaa

SEQ ID NO: 1722119 - RNA, 21 nt, Human
caguuuguuaguaugaggcau

SEQ ID NO: 1722120 - RNA, 19 nt, Human
cauaaucuggacuccucug

SEQ ID NO: 1722121 - RNA, 20 nt, Human
cauaaucuggacuccucugu

SEQ ID NO: 1722122 - RNA, 22 nt, Human
cauaaucuggacuccucugucc

SEQ ID NO: 1722123 - RNA, 21 nt, Human
cauaaucuggacuccucuguc

SEQ ID NO: 1722124 - RNA, 14 nt, Human
cauaaugcgugcau

SEQ ID NO: 1722125 - RNA, 17 nt, Human
cauaaugcgugcauacc

SEQ ID NO: 1722126 - RNA, 23 nt, Human
cauaaucuggacuccucugucca

SEQ ID NO: 1722127 - RNA, 12 nt, Human
caguuugcuuug

SEQ ID NO: 1722128 - RNA, 21 nt, Human
caguuugcuuuguaugcacuu

SEQ ID NO: 1722129 - RNA, 14 nt, Human
caguuugcuuugua

SEQ ID NO: 1722130 - RNA, 18 nt, Human
cagucaccccggccaccu

SEQ ID NO: 1722131 - RNA, 14 nt, Human
cacaagagcccagg

SEQ ID NO: 1722132 - RNA, 13 nt, Human
caauuuauuaugg

SEQ ID NO: 1722133 - RNA, 15 nt, Human
cacaagcuccaagcu

SEQ ID NO: 1722134 - RNA, 14 nt, Human
cacaagcuccaagc

SEQ ID NO: 1722135 - RNA, 13 nt, Human
cacaagcuccaag

SEQ ID NO: 1722136 - RNA, 16 nt, Human
cacaagagcccaggcc

SEQ ID NO: 1722137 - RNA, 23 nt, Human
cacaagcugcacccucaggcagg

SEQ ID NO: 1722138 - RNA, 17 nt, Human
cacaagcugcacccuca

SEQ ID NO: 1722139 - RNA, 23 nt, Human
cacaagcuccaagcucccaggca

SEQ ID NO: 1722140 - RNA, 17 nt, Human
cacaagcuccaagcucc

SEQ ID NO: 1722141 - RNA, 17 nt, Human
cacaagagcccaggccu

SEQ ID NO: 1722142 - RNA, 15 nt, Human
caauucuugccaaau

SEQ ID NO: 1722143 - RNA, 12 nt, Human
caauggcagccu

SEQ ID NO: 1722144 - RNA, 11 nt, Human
caauggcagcc

SEQ ID NO: 1722145 - RNA, 20 nt, Human
caauggagacugucucaaga

SEQ ID NO: 1722146 - RNA, 20 nt, Human
cacacagcucuguccuggga

SEQ ID NO: 1722147 - RNA, 17 nt, Human
cacacagcucuguccug

SEQ ID NO: 1722148 - RNA, 20 nt, Human
cacacaugagcaucaggcca

SEQ ID NO: 1722149 - RNA, 23 nt, Human
cacacagugagucgaggacaggg

SEQ ID NO: 1722150 - RNA, 21 nt, Human
cacacagugagucgaggacag

SEQ ID NO: 1722151 - RNA, 15 nt, Human
cacacauacacacac

SEQ ID NO: 1722152 - RNA, 23 nt, Human
cacacaguauuacuucugcuaca

SEQ ID NO: 1722153 - RNA, 20 nt, Human
cacacaguauuacuucugcu

SEQ ID NO: 1722154 - RNA, 18 nt, Human
cacacagugagucgagga

SEQ ID NO: 1722155 - RNA, 22 nt, Human
cacagaaaauggaagacagcuc

SEQ ID NO: 1722156 - RNA, 20 nt, Human
cacagaaaauggaagacagc

SEQ ID NO: 1722157 - RNA, 19 nt, Human
cacagaaaauggaagacag

SEQ ID NO: 1722158 - RNA, 18 nt, Human
cacagaaaauggaagaca

SEQ ID NO: 1722159 - RNA, 22 nt, Human
cacacaugagcaucaggccagg

SEQ ID NO: 1722160 - RNA, 21 nt, Human
cacacaugagcaucaggccag

SEQ ID NO: 1722161 - RNA, 19 nt, Human
cacagaaaauucuucucca

SEQ ID NO: 1722162 - RNA, 23 nt, Human
cacagaaaauggaagacagcucu

SEQ ID NO: 1722163 - RNA, 13 nt, Human
cacagacccugcc

SEQ ID NO: 1722164 - RNA, 11 nt, Human
cacagccucug

SEQ ID NO: 1722165 - RNA, 19 nt, Human
cacagacauacuaaccagc

SEQ ID NO: 1722166 - RNA, 21 nt, Human
cacagacauacuaaccagcag

SEQ ID NO: 1722167 - RNA, 23 nt, Human
cacaggcccuuccucuccacugc

SEQ ID NO: 1722168 - RNA, 22 nt, Human
cacagcgcuggccgggaccccg

SEQ ID NO: 1722169 - RNA, 19 nt, Human
cacagcgcuggccgggacc

SEQ ID NO: 1722170 - RNA, 18 nt, Human
cacaggggaaaagaggag

SEQ ID NO: 1722171 - RNA, 17 nt, Human
cacaggggaaaagagga

SEQ ID NO: 1722172 - RNA, 19 nt, Human
cacaggggaaaagaggagu

SEQ ID NO: 1722173 - RNA, 21 nt, Human
cacaguauuacuucugcuaca

SEQ ID NO: 1722174 - RNA, 20 nt, Human
cacaguauuacuucugcuac

SEQ ID NO: 1722175 - RNA, 17 nt, Human
caaguccacaguggaac

SEQ ID NO: 1722176 - RNA, 17 nt, Human
caagucaagugaaaaag

SEQ ID NO: 1722177 - RNA, 13 nt, Human
caagucaagugaa

SEQ ID NO: 1722178 - RNA, 21 nt, Human
caaguaugaauaaagacaccu

SEQ ID NO: 1722179 - RNA, 19 nt, Human
caaguaugaauaaagacac

SEQ ID NO: 1722180 - RNA, 16 nt, Human
caaggccaaaggaagc

SEQ ID NO: 1722181 - RNA, 15 nt, Human
caaggccaaaggaag

SEQ ID NO: 1722182 - RNA, 18 nt, Human
caaggccaaaggaagcac

SEQ ID NO: 1722183 - RNA, 17 nt, Human
caaggccaaaggaagca

SEQ ID NO: 1722184 - RNA, 16 nt, Human
caaguaugaauaaaga

SEQ ID NO: 1722185 - RNA, 18 nt, Human
caagcugcacccucaggc

SEQ ID NO: 1722186 - RNA, 14 nt, Human
caagcugcacccuc

SEQ ID NO: 1722187 - RNA, 14 nt, Human
caagcucugcuccu

SEQ ID NO: 1722188 - RNA, 13 nt, Human
caagcugcacccu

SEQ ID NO: 1722189 - RNA, 20 nt, Human
caagcugcacccucaggcag

SEQ ID NO: 1722190 - RNA, 12 nt, Human
caagcuccaagc

SEQ ID NO: 1722191 - RNA, 13 nt, Human
caagcucugcucc

SEQ ID NO: 1722192 - RNA, 19 nt, Human
caagcucuaucaccaagga

SEQ ID NO: 1722193 - RNA, 19 nt, Human
caauaaagcagcguuucua

SEQ ID NO: 1722194 - RNA, 16 nt, Human
cacuccagccugggug

SEQ ID NO: 1722195 - RNA, 16 nt, Human
cacuccagugagacag

SEQ ID NO: 1722196 - RNA, 15 nt, Human
cacuccagcugggau

SEQ ID NO: 1722197 - RNA, 12 nt, Human
cacuccagcugg

SEQ ID NO: 1722198 - RNA, 11 nt, Human
cacuccagcug

SEQ ID NO: 1722199 - RNA, 14 nt, Human
cacuaggcuucugg

SEQ ID NO: 1722200 - RNA, 15 nt, Human
cacuccccugcuggg

SEQ ID NO: 1722201 - RNA, 14 nt, Human
cacuccccugcugg

SEQ ID NO: 1722202 - RNA, 13 nt, Human
cacuccccugcug

SEQ ID NO: 1722203 - RNA, 12 nt, Human
cacuccccugcu

SEQ ID NO: 1722204 - RNA, 21 nt, Human
cacugcagaagacaguauggc

SEQ ID NO: 1722205 - RNA, 12 nt, Human
cacugcagccuc

SEQ ID NO: 1722206 - RNA, 20 nt, Human
cacugcacuccagccugggu

SEQ ID NO: 1722207 - RNA, 19 nt, Human
cacugcacuccagccuggg

SEQ ID NO: 1722208 - RNA, 18 nt, Human
cacugcacuccagccugg

SEQ ID NO: 1722209 - RNA, 16 nt, Human
cacugcacuccagccu

SEQ ID NO: 1722210 - RNA, 15 nt, Human
cacugcacuccagcc

SEQ ID NO: 1722211 - RNA, 19 nt, Human
cacugcacuauagccuagg

SEQ ID NO: 1722212 - RNA, 13 nt, Human
cacugcagccuca

SEQ ID NO: 1722213 - RNA, 16 nt, Human
cacugcauguuuguga

SEQ ID NO: 1722214 - RNA, 16 nt, Human
cacugcauccuccgcc

SEQ ID NO: 1722215 - RNA, 14 nt, Human
cacugcauccuccg

SEQ ID NO: 1722216 - RNA, 18 nt, Human
cacugcauccuccgccuc

SEQ ID NO: 1722217 - RNA, 18 nt, Human
cacugggagaaaugaaaa

SEQ ID NO: 1722218 - RNA, 24 nt, Human
cacuuagaaauugcauuuccugac

SEQ ID NO: 1722219 - RNA, 23 nt, Human
cacuuaggaacguaaucgugucc

SEQ ID NO: 1722220 - RNA, 22 nt, Human
cacugguucuucuuggucucag

SEQ ID NO: 1722221 - RNA, 23 nt, Human
cacugguggcccgacagccuggc

SEQ ID NO: 1722222 - RNA, 18 nt, Human
cacuuacacuuuaugcac

SEQ ID NO: 1722223 - RNA, 16 nt, Human
cacuuacacuuuaugc

SEQ ID NO: 1722224 - RNA, 11 nt, Human
caccccagccc

SEQ ID NO: 1722225 - RNA, 13 nt, Human
caccuuggcugca

SEQ ID NO: 1722226 - RNA, 15 nt, Human
caccuuggcucaagu

SEQ ID NO: 1722227 - RNA, 14 nt, Human
caccuuggcugcag

SEQ ID NO: 1722228 - RNA, 24 nt, Human
caccugccuguugggccaggagcc

SEQ ID NO: 1722229 - RNA, 19 nt, Human
caccugccuguugggccag

SEQ ID NO: 1722230 - RNA, 17 nt, Human
caccugccuguugggcc

SEQ ID NO: 1722231 - RNA, 14 nt, Human
cacccucaggcagg

SEQ ID NO: 1722232 - RNA, 16 nt, Human
cacccuggggagaaag

SEQ ID NO: 1722233 - RNA, 15 nt, Human
cacccuggggagaaa

SEQ ID NO: 1722234 - RNA, 17 nt, Human
cacccugaaagcccuga

SEQ ID NO: 1722235 - RNA, 13 nt, Human
caccucagccucc

SEQ ID NO: 1722236 - RNA, 20 nt, Human
caccuacaguguacagucuu

SEQ ID NO: 1722237 - RNA, 23 nt, Human
caccuacaguguacagucuugua

SEQ ID NO: 1722238 - RNA, 14 nt, Human
caccucagccuccc

SEQ ID NO: 1722239 - RNA, 17 nt, Human
cacccuggggagaaagu

SEQ ID NO: 1722240 - RNA, 13 nt, Human
caccuacagugua

SEQ ID NO: 1722241 - RNA, 16 nt, Human
caccuacaguguacag

SEQ ID NO: 1722242 - RNA, 17 nt, Human
caccuacaguguacagu

SEQ ID NO: 1722243 - RNA, 16 nt, Human
caccugccccucaacu

SEQ ID NO: 1722244 - RNA, 15 nt, Human
caccugccccucaac

SEQ ID NO: 1722245 - RNA, 14 nt, Human
caccugccccucaa

SEQ ID NO: 1722246 - RNA, 23 nt, Human
caccugccucggccucccaaagu

SEQ ID NO: 1722247 - RNA, 20 nt, Human
caaaaaaaaaaaaaaauuag

SEQ ID NO: 1722248 - RNA, 16 nt, Human
caaaagaugcuucuca

SEQ ID NO: 1722249 - RNA, 15 nt, Human
caaaaggcagaagca

SEQ ID NO: 1722250 - RNA, 18 nt, Human
caaaagaugcuucucacu

SEQ ID NO: 1722251 - RNA, 19 nt, Human
caaaccaucauugaaaucu

SEQ ID NO: 1722252 - RNA, 21 nt, Human
caaaccaucauugaaaucuuu

SEQ ID NO: 1722253 - RNA, 20 nt, Human
caaagauauuuugcuuugug

SEQ ID NO: 1722254 - RNA, 20 nt, Human
caaauggaaaugggcagagc

SEQ ID NO: 1722255 - RNA, 22 nt, Human
caaauggaaaugggcagagcag

SEQ ID NO: 1722256 - RNA, 21 nt, Human
caaauggaaaugggcagagca

SEQ ID NO: 1722257 - RNA, 20 nt, Human
caacaccucugcacaagcug

SEQ ID NO: 1722258 - RNA, 22 nt, Human
caacacucacauuuauucugcu

SEQ ID NO: 1722259 - RNA, 14 nt, Human
caacacuaacauga

SEQ ID NO: 1722260 - RNA, 22 nt, Human
caaagauauuuugcuuugugau

SEQ ID NO: 1722261 - RNA, 23 nt, Human
caaagauauuuugcuuugugauu

SEQ ID NO: 1722262 - RNA, 17 nt, Human
caaagcagugcaugcug

SEQ ID NO: 1722263 - RNA, 15 nt, Human
caaagcagugcaugc

SEQ ID NO: 1722264 - RNA, 22 nt, Human
caaaguacacuguuucaaacuu

SEQ ID NO: 1722265 - RNA, 21 nt, Human
caaaguagaagucuuagaugu

SEQ ID NO: 1722266 - RNA, 14 nt, Human
caaaguagaagucu

SEQ ID NO: 1722267 - RNA, 21 nt, Human
caaagucucuggaauuugaaa

SEQ ID NO: 1722268 - RNA, 15 nt, Human
auuugccaauaauaa

SEQ ID NO: 1722269 - RNA, 16 nt, Human
auuugccaauaauaau

SEQ ID NO: 1722270 - RNA, 22 nt, Human
auuuguuugaacugauaaagau

SEQ ID NO: 1722271 - RNA, 23 nt, Human
auuuguuugaacugauaaagaug

SEQ ID NO: 1722272 - RNA, 17 nt, Human
auuuuauagcuacuaau

SEQ ID NO: 1722273 - RNA, 19 nt, Human
auuuuauagcuacuaauuu

SEQ ID NO: 1722274 - RNA, 18 nt, Human
auuuguuucuuucucuga

SEQ ID NO: 1722275 - RNA, 17 nt, Human
auuugugauacaaugcu

SEQ ID NO: 1722276 - RNA, 20 nt, Human
auuugugauacaaugcugug

SEQ ID NO: 1722277 - RNA, 14 nt, Human
auuugugccagaau

SEQ ID NO: 1722278 - RNA, 13 nt, Human
auuugcuccuuuc

SEQ ID NO: 1722279 - RNA, 12 nt, Human
auuuggaaaaua

SEQ ID NO: 1722280 - RNA, 13 nt, Human
auuuggaaaauaa

SEQ ID NO: 1722281 - RNA, 14 nt, Human
auuugcuuuggaag

SEQ ID NO: 1722282 - RNA, 15 nt, Human
auuugcuuuggaagu

SEQ ID NO: 1722283 - RNA, 13 nt, Human
auuugcuuuggaa

SEQ ID NO: 1722284 - RNA, 17 nt, Human
auuagcaguuugcuuug

SEQ ID NO: 1722285 - RNA, 19 nt, Human
auuagcauuugucaacaaa

SEQ ID NO: 1722286 - RNA, 23 nt, Human
auuagauuucucauuugccaaua

SEQ ID NO: 1722287 - RNA, 17 nt, Human
auuacaggaaguacugg

SEQ ID NO: 1722288 - RNA, 22 nt, Human
auuacaagcgugagccacugca

SEQ ID NO: 1722289 - RNA, 18 nt, Human
auguuugccucugccucu

SEQ ID NO: 1722290 - RNA, 23 nt, Human
auguuugggagacugcugaguca

SEQ ID NO: 1722291 - RNA, 23 nt, Human
auuaugcaugaaguaauaugcac

SEQ ID NO: 1722292 - RNA, 19 nt, Human
auucacaagacccaaaagg

SEQ ID NO: 1722293 - RNA, 16 nt, Human
auuaggugugacugaa

SEQ ID NO: 1722294 - RNA, 18 nt, Human
auuaggugugacugaauu

SEQ ID NO: 1722295 - RNA, 21 nt, Human
auuaggugugacugaauuucu

SEQ ID NO: 1722296 - RNA, 19 nt, Human
auucauagcagcuuauuca

SEQ ID NO: 1722297 - RNA, 22 nt, Human
auucauagcagcuuauucacaa

SEQ ID NO: 1722298 - RNA, 19 nt, Human
auucauaaugacuuaagca

SEQ ID NO: 1722299 - RNA, 21 nt, Human
auucauaauuauuauuuggcc

SEQ ID NO: 1722300 - RNA, 15 nt, Human
auucauaaugacuua

SEQ ID NO: 1722301 - RNA, 14 nt, Human
auucauaaugacuu

SEQ ID NO: 1722302 - RNA, 14 nt, Human
auuguaaaauggug

SEQ ID NO: 1722303 - RNA, 18 nt, Human
auugcuugagcucaggag

SEQ ID NO: 1722304 - RNA, 23 nt, Human
auugugucucuugguccugcugc

SEQ ID NO: 1722305 - RNA, 21 nt, Human
auugugucucuugguccugcu

SEQ ID NO: 1722306 - RNA, 16 nt, Human
auuguuagucucuuga

SEQ ID NO: 1722307 - RNA, 14 nt, Human
auugcuugagcuca

SEQ ID NO: 1722308 - RNA, 12 nt, Human
auugcugcuuga

SEQ ID NO: 1722309 - RNA, 23 nt, Human
auugcugauggugcaaugaccuu

SEQ ID NO: 1722310 - RNA, 19 nt, Human
auugcugauggugcaauga

SEQ ID NO: 1722311 - RNA, 18 nt, Human
auugcugauggugcaaug

SEQ ID NO: 1722312 - RNA, 16 nt, Human
auugcugauggugcaa

SEQ ID NO: 1722313 - RNA, 15 nt, Human
auugcugauggugca

SEQ ID NO: 1722314 - RNA, 12 nt, Human
auugcuccuuga

SEQ ID NO: 1722315 - RNA, 14 nt, Human
auucuucugcuuca

SEQ ID NO: 1722316 - RNA, 11 nt, Human
auucuuuccug

SEQ ID NO: 1722317 - RNA, 12 nt, Human
auucuucugcuu

SEQ ID NO: 1722318 - RNA, 11 nt, Human
auucuucugcu

SEQ ID NO: 1722319 - RNA, 14 nt, Human
auucugaccuuaaa

SEQ ID NO: 1722320 - RNA, 13 nt, Human
auucuuuccugag

SEQ ID NO: 1722321 - RNA, 21 nt, Human
auugauaagaaccuuuugagu

SEQ ID NO: 1722322 - RNA, 15 nt, Human
auugcuacuguccua

SEQ ID NO: 1722323 - RNA, 17 nt, Human
auugauaugcuuauaca

SEQ ID NO: 1722324 - RNA, 22 nt, Human
auugcuacuguccuacccaccc

SEQ ID NO: 1722325 - RNA, 20 nt, Human
auugcuacuguccuacccac

SEQ ID NO: 1722326 - RNA, 20 nt, Human
augaaugucagugugacuga

SEQ ID NO: 1722327 - RNA, 18 nt, Human
augaagauguagaggaga

SEQ ID NO: 1722328 - RNA, 13 nt, Human
augaaugaauggc

SEQ ID NO: 1722329 - RNA, 15 nt, Human
augaaagggcccaga

SEQ ID NO: 1722330 - RNA, 14 nt, Human
uuggggauauuuuu

SEQ ID NO: 1722331 - RNA, 18 nt, Human
uugggccccagaggcugg

SEQ ID NO: 1722332 - RNA, 22 nt, Human
uuggggggcugaggugggagga

SEQ ID NO: 1722333 - RNA, 23 nt, Human
uuggcgcugccccuggcagcccc

SEQ ID NO: 1722334 - RNA, 18 nt, Human
uuggcuagagguucaaag

SEQ ID NO: 1722335 - RNA, 15 nt, Human
augaaagcagggacu

SEQ ID NO: 1722336 - RNA, 13 nt, Human
aucuuuuuauuca

SEQ ID NO: 1722337 - RNA, 23 nt, Human
aucuuuggacagaagcagcucuu

SEQ ID NO: 1722338 - RNA, 13 nt, Human
uuggcugcaggga

SEQ ID NO: 1722339 - RNA, 22 nt, Human
aucuuuaauuuuacauuuccua

SEQ ID NO: 1722340 - RNA, 21 nt, Human
aucuuuaauuuuacauuuccu

SEQ ID NO: 1722341 - RNA, 16 nt, Human
aucuuuaauuuuacau

SEQ ID NO: 1722342 - RNA, 22 nt, Human
aucuuuggacagaagcagcucu

SEQ ID NO: 1722343 - RNA, 17 nt, Human
augagaaaaugucuuua

SEQ ID NO: 1722344 - RNA, 16 nt, Human
augacuuacuguacau

SEQ ID NO: 1722345 - RNA, 17 nt, Human
augacuuacuguacaug

SEQ ID NO: 1722346 - RNA, 18 nt, Human
augacacgaauauugcug

SEQ ID NO: 1722347 - RNA, 22 nt, Human
augacuuaagcacacuugacau

SEQ ID NO: 1722348 - RNA, 14 nt, Human
augacuuacuguac

SEQ ID NO: 1722349 - RNA, 22 nt, Human
augagaaagguugaagcaccaa

SEQ ID NO: 1722350 - RNA, 21 nt, Human
augagaaagguugaagcacca

SEQ ID NO: 1722351 - RNA, 18 nt, Human
augagaaaucuaaaaaac

SEQ ID NO: 1722352 - RNA, 15 nt, Human
augagaaaucuaaaa

SEQ ID NO: 1722353 - RNA, 23 nt, Human
augagaaaucuaaaaaacgaaaa

SEQ ID NO: 1722354 - RNA, 14 nt, Human
augacacaugcaag

SEQ ID NO: 1722355 - RNA, 22 nt, Human
augacacaugcaaggucauuuu

SEQ ID NO: 1722356 - RNA, 14 nt, Human
aucucagggccugg

SEQ ID NO: 1722357 - RNA, 11 nt, Human
aucucagccca

SEQ ID NO: 1722358 - RNA, 15 nt, Human
aucucacacaugagc

SEQ ID NO: 1722359 - RNA, 16 nt, Human
aucucacacaugagca

SEQ ID NO: 1722360 - RNA, 19 nt, Human
auccuaguuccaccaucaa

SEQ ID NO: 1722361 - RNA, 15 nt, Human
auccuaguuccacca

SEQ ID NO: 1722362 - RNA, 15 nt, Human
aucuccacuccagau

SEQ ID NO: 1722363 - RNA, 13 nt, Human
aucuccaaaauaa

SEQ ID NO: 1722364 - RNA, 13 nt, Human
aucucccccagcc

SEQ ID NO: 1722365 - RNA, 12 nt, Human
aucucccccagc

SEQ ID NO: 1722366 - RNA, 14 nt, Human
aucucccccagccc

SEQ ID NO: 1722367 - RNA, 16 nt, Human
aucuccccaucauugg

SEQ ID NO: 1722368 - RNA, 16 nt, Human
uugauucagacagcug

SEQ ID NO: 1722369 - RNA, 15 nt, Human
uugauucagacagcu

SEQ ID NO: 1722370 - RNA, 19 nt, Human
uugcacaaaccaauuaaac

SEQ ID NO: 1722371 - RNA, 12 nt, Human
uugcaugaggcu

SEQ ID NO: 1722372 - RNA, 14 nt, Human
uugcaccacugcac

SEQ ID NO: 1722373 - RNA, 14 nt, Human
uugcaucugaaaau

SEQ ID NO: 1722374 - RNA, 16 nt, Human
uugaugugugucuagg

SEQ ID NO: 1722375 - RNA, 14 nt, Human
uugauucagacagc

SEQ ID NO: 1722376 - RNA, 23 nt, Human
uugauggugaugaaauguaaaua

SEQ ID NO: 1722377 - RNA, 14 nt, Human
uugauguaaagaug

SEQ ID NO: 1722378 - RNA, 23 nt, Human
uugauguaaagauguucuggaua

SEQ ID NO: 1722379 - RNA, 15 nt, Human
uugaugggauuuggu

SEQ ID NO: 1722380 - RNA, 12 nt, Human
uugaugccuggc

SEQ ID NO: 1722381 - RNA, 19 nt, Human
aucucuucuggguuccuuc

SEQ ID NO: 1722382 - RNA, 18 nt, Human
uugccgucuaccugaggg

SEQ ID NO: 1722383 - RNA, 15 nt, Human
uugccgucuaccuga

SEQ ID NO: 1722384 - RNA, 19 nt, Human
uugccgucuaccugagggg

SEQ ID NO: 1722385 - RNA, 14 nt, Human
uugccguuauuaaa

SEQ ID NO: 1722386 - RNA, 13 nt, Human
uugccgucuaccu

SEQ ID NO: 1722387 - RNA, 18 nt, Human
aucugaugcaagcaagaa

SEQ ID NO: 1722388 - RNA, 19 nt, Human
aucuggguucacugcaacc

SEQ ID NO: 1722389 - RNA, 17 nt, Human
aucuggguucacugcaa

SEQ ID NO: 1722390 - RNA, 19 nt, Human
aucuugcucugcugacaga

SEQ ID NO: 1722391 - RNA, 18 nt, Human
aucuugaauuguaaggaa

SEQ ID NO: 1722392 - RNA, 24 nt, Human
uuuauggcuuuugugcauuaucua

SEQ ID NO: 1722393 - RNA, 22 nt, Human
uuuaugggucagaguuccgacu

SEQ ID NO: 1722394 - RNA, 20 nt, Human
uuuauggcuuuugugcauua

SEQ ID NO: 1722395 - RNA, 16 nt, Human
uuuaguaucuuuuuau

SEQ ID NO: 1722396 - RNA, 17 nt, Human
uuuagauguaauuuugu

SEQ ID NO: 1722397 - RNA, 15 nt, Human
augcuagaacucccu

SEQ ID NO: 1722398 - RNA, 16 nt, Human
augcuagaacucccuu

SEQ ID NO: 1722399 - RNA, 19 nt, Human
augcuagaacucccuuuca

SEQ ID NO: 1722400 - RNA, 22 nt, Human
augcuguaacuuucugaaauaa

SEQ ID NO: 1722401 - RNA, 13 nt, Human
augcugguuuuuc

SEQ ID NO: 1722402 - RNA, 15 nt, Human
augcucugcauguua

SEQ ID NO: 1722403 - RNA, 16 nt, Human
auggaacacucugaga

SEQ ID NO: 1722404 - RNA, 15 nt, Human
auggaagacagcucu

SEQ ID NO: 1722405 - RNA, 15 nt, Human
auggaacacucugag

SEQ ID NO: 1722406 - RNA, 14 nt, Human
auggaacacucuga

SEQ ID NO: 1722407 - RNA, 11 nt, Human
auggaacacuc

SEQ ID NO: 1722408 - RNA, 23 nt, Human
augcugucccuuacgugaguccu

SEQ ID NO: 1722409 - RNA, 19 nt, Human
augcugucccuuacgugag

SEQ ID NO: 1722410 - RNA, 14 nt, Human
auggacaugaucuu

SEQ ID NO: 1722411 - RNA, 19 nt, Human
auggacaugaucuucuuua

SEQ ID NO: 1722412 - RNA, 17 nt, Human
uuucauauuuuaaacag

SEQ ID NO: 1722413 - RNA, 16 nt, Human
auggaagacagcucuu

SEQ ID NO: 1722414 - RNA, 14 nt, Human
uuucacugcuggcu

SEQ ID NO: 1722415 - RNA, 18 nt, Human
uuucacugcuggcugccu

SEQ ID NO: 1722416 - RNA, 17 nt, Human
uuucacugcuggcugcc

SEQ ID NO: 1722417 - RNA, 22 nt, Human
uuucacugcuggcugccuuaga

SEQ ID NO: 1722418 - RNA, 20 nt, Human
uuucacugcuggcugccuua

SEQ ID NO: 1722419 - RNA, 13 nt, Human
uuucagaaaugug

SEQ ID NO: 1722420 - RNA, 20 nt, Human
auggcuaguaucaaaagaaa

SEQ ID NO: 1722421 - RNA, 20 nt, Human
auggccuuugcuugaaagaa

SEQ ID NO: 1722422 - RNA, 21 nt, Human
auggccgggcgcgguggcuca

SEQ ID NO: 1722423 - RNA, 16 nt, Human
auggccagguggccac

SEQ ID NO: 1722424 - RNA, 22 nt, Human
auggccagguggccacuccaga

SEQ ID NO: 1722425 - RNA, 23 nt, Human
auggacguguuaugacuccagaa

SEQ ID NO: 1722426 - RNA, 18 nt, Human
auggauuuccagccaaag

SEQ ID NO: 1722427 - RNA, 20 nt, Human
auggacguguuaugacucca

SEQ ID NO: 1722428 - RNA, 19 nt, Human
auggacguguuaugacucc

SEQ ID NO: 1722429 - RNA, 17 nt, Human
auggcacaucagcacga

SEQ ID NO: 1722430 - RNA, 23 nt, Human
auggcacaucagcacgauuucug

SEQ ID NO: 1722431 - RNA, 22 nt, Human
auggcacaaucucggcucacug

SEQ ID NO: 1722432 - RNA, 19 nt, Human
auggcaaggacugcaggga

SEQ ID NO: 1722433 - RNA, 17 nt, Human
uuuaagugcugcauuua

SEQ ID NO: 1722434 - RNA, 19 nt, Human
uuuaagugcugcauuuaaa

SEQ ID NO: 1722435 - RNA, 15 nt, Human
uuuaagugcugcauu

SEQ ID NO: 1722436 - RNA, 16 nt, Human
uuuaagugcugcauuu

SEQ ID NO: 1722437 - RNA, 12 nt, Human
uuuaauuuuaca

SEQ ID NO: 1722438 - RNA, 15 nt, Human
uuguuuuacugucuu

SEQ ID NO: 1722439 - RNA, 14 nt, Human
uuuaaauguuuuuu

SEQ ID NO: 1722440 - RNA, 16 nt, Human
uuguuuucaguguaca

SEQ ID NO: 1722441 - RNA, 13 nt, Human
uuguuuucagugu

SEQ ID NO: 1722442 - RNA, 15 nt, Human
augcacuuuguucug

SEQ ID NO: 1722443 - RNA, 16 nt, Human
augcacuuuguucugg

SEQ ID NO: 1722444 - RNA, 13 nt, Human
augcagccucaca

SEQ ID NO: 1722445 - RNA, 15 nt, Human
augcagccucacagu

SEQ ID NO: 1722446 - RNA, 14 nt, Human
augcagccucacag

SEQ ID NO: 1722447 - RNA, 17 nt, Human
augcagccucacagucc

SEQ ID NO: 1722448 - RNA, 15 nt, Human
augccacuaaauuga

SEQ ID NO: 1722449 - RNA, 17 nt, Human
augccacuaaauugaca

SEQ ID NO: 1722450 - RNA, 11 nt, Human
augcccagccc

SEQ ID NO: 1722451 - RNA, 15 nt, Human
augcaguuuuccuua

SEQ ID NO: 1722452 - RNA, 19 nt, Human
augauuaaccacuucagcu

SEQ ID NO: 1722453 - RNA, 21 nt, Human
augauuaaccacuucagcuga

SEQ ID NO: 1722454 - RNA, 20 nt, Human
augauuaaccacuucagcug

SEQ ID NO: 1722455 - RNA, 17 nt, Human
augauuucagcucacug

SEQ ID NO: 1722456 - RNA, 21 nt, Human
augauucaacagguuuuccug

SEQ ID NO: 1722457 - RNA, 19 nt, Human
augauuucagcucacugca

SEQ ID NO: 1722458 - RNA, 14 nt, Human
augauuuuuaaaga

SEQ ID NO: 1722459 - RNA, 16 nt, Human
augauuuuuaaagaaa

SEQ ID NO: 1722460 - RNA, 12 nt, Human
augcacuuuguu

SEQ ID NO: 1722461 - RNA, 14 nt, Human
augcaccagcccuu

SEQ ID NO: 1722462 - RNA, 13 nt, Human
augcaccagcccu

SEQ ID NO: 1722463 - RNA, 19 nt, Human
uugugauacaaugcugugc

SEQ ID NO: 1722464 - RNA, 18 nt, Human
uugugauacaaugcugug

SEQ ID NO: 1722465 - RNA, 21 nt, Human
uugugaggaagccgcuggggc

SEQ ID NO: 1722466 - RNA, 13 nt, Human
uugugguuaaucu

SEQ ID NO: 1722467 - RNA, 14 nt, Human
uuguguaagaaaua

SEQ ID NO: 1722468 - RNA, 18 nt, Human
uuguguaagaaauacaga

SEQ ID NO: 1722469 - RNA, 19 nt, Human
uuguucuggcucuuccagg

SEQ ID NO: 1722470 - RNA, 17 nt, Human
uuguguguuuauuguca

SEQ ID NO: 1722471 - RNA, 22 nt, Human
uuguucuggcucuuccaggcug

SEQ ID NO: 1722472 - RNA, 20 nt, Human
uuguucuggcucuuccaggc

SEQ ID NO: 1722473 - RNA, 17 nt, Human
uuccccuguucacucua

SEQ ID NO: 1722474 - RNA, 14 nt, Human
uuccccuguucacu

SEQ ID NO: 1722475 - RNA, 22 nt, Human
uuccccuuccuaauuccacagc

SEQ ID NO: 1722476 - RNA, 17 nt, Human
uucccuacuuccuguga

SEQ ID NO: 1722477 - RNA, 16 nt, Human
uucccuacuuccugug

SEQ ID NO: 1722478 - RNA, 14 nt, Human
uucccuacuuccug

SEQ ID NO: 1722479 - RNA, 20 nt, Human
uucccuuuuuuggcugcuga

SEQ ID NO: 1722480 - RNA, 19 nt, Human
uucccuuuuuuggcugcug

SEQ ID NO: 1722481 - RNA, 18 nt, Human
uucccuuuuuuggcugcu

SEQ ID NO: 1722482 - RNA, 22 nt, Human
uucccccuguuucagaggcuca

SEQ ID NO: 1722483 - RNA, 22 nt, Human
aucaaccccuucgcuccugugu

SEQ ID NO: 1722484 - RNA, 20 nt, Human
aucaaccccuucgcuccugu

SEQ ID NO: 1722485 - RNA, 19 nt, Human
aucaaccccuucgcuccug

SEQ ID NO: 1722486 - RNA, 23 nt, Human
aucaaguuggcuucuaaucaaag

SEQ ID NO: 1722487 - RNA, 22 nt, Human
aucaaguuggcuucuaaucaaa

SEQ ID NO: 1722488 - RNA, 20 nt, Human
uuccuucaaagcaaaugucu

SEQ ID NO: 1722489 - RNA, 12 nt, Human
uuccucuccacu

SEQ ID NO: 1722490 - RNA, 16 nt, Human
uuccucuccacugccu

SEQ ID NO: 1722491 - RNA, 15 nt, Human
uuccucuccacugcc

SEQ ID NO: 1722492 - RNA, 14 nt, Human
uuccucuccacugc

SEQ ID NO: 1722493 - RNA, 13 nt, Human
uuccucuccacug

SEQ ID NO: 1722494 - RNA, 13 nt, Human
uucuauaauuuaa

SEQ ID NO: 1722495 - RNA, 14 nt, Human
uucuauaauuuaaa

SEQ ID NO: 1722496 - RNA, 21 nt, Human
uucucacugccaugccagcuu

SEQ ID NO: 1722497 - RNA, 13 nt, Human
uucucagaaucuc

SEQ ID NO: 1722498 - RNA, 13 nt, Human
uucucagcuccca

SEQ ID NO: 1722499 - RNA, 14 nt, Human
aucaggccaggccc

SEQ ID NO: 1722500 - RNA, 13 nt, Human
aucaggccaggcc

SEQ ID NO: 1722501 - RNA, 19 nt, Human
aucagacuaugaaguuuuu

SEQ ID NO: 1722502 - RNA, 20 nt, Human
uucgauacaccgggccugga

SEQ ID NO: 1722503 - RNA, 21 nt, Human
uucgcaggauucuuccucccu

SEQ ID NO: 1722504 - RNA, 19 nt, Human
uucuaaaucuccaaaauaa

SEQ ID NO: 1722505 - RNA, 13 nt, Human
uucgcuccugugu

SEQ ID NO: 1722506 - RNA, 15 nt, Human
uucuaaaguaaaaac

SEQ ID NO: 1722507 - RNA, 12 nt, Human
uucuugcaaagu

SEQ ID NO: 1722508 - RNA, 13 nt, Human
uucuugcaaagua

SEQ ID NO: 1722509 - RNA, 22 nt, Human
uucuuucuggcuaugcauuuga

SEQ ID NO: 1722510 - RNA, 15 nt, Human
uucuuucuuccucug

SEQ ID NO: 1722511 - RNA, 13 nt, Human
uucuuucuuccuc

SEQ ID NO: 1722512 - RNA, 13 nt, Human
uucuuaauucuua

SEQ ID NO: 1722513 - RNA, 23 nt, Human
uucuuccucccucccucuuuccc

SEQ ID NO: 1722514 - RNA, 13 nt, Human
uucuuccucugcu

SEQ ID NO: 1722515 - RNA, 12 nt, Human
uucuuccucugc

SEQ ID NO: 1722516 - RNA, 11 nt, Human
uucuuccucug

SEQ ID NO: 1722517 - RNA, 20 nt, Human
uucuguuuuucuaggccugg

SEQ ID NO: 1722518 - RNA, 21 nt, Human
uucuguuggccagugugacaa

SEQ ID NO: 1722519 - RNA, 17 nt, Human
uucuguugcugccucau

SEQ ID NO: 1722520 - RNA, 18 nt, Human
uucuguucuuucuggcua

SEQ ID NO: 1722521 - RNA, 16 nt, Human
uucuguugcugccuca

SEQ ID NO: 1722522 - RNA, 15 nt, Human
uucuguugcugccuc

SEQ ID NO: 1722523 - RNA, 16 nt, Human
uugaaaguuuacagga

SEQ ID NO: 1722524 - RNA, 20 nt, Human
uugaaauauaggaacuuaaa

SEQ ID NO: 1722525 - RNA, 11 nt, Human
uugaaaucuuu

SEQ ID NO: 1722526 - RNA, 21 nt, Human
uugaaauauggucuuuugguu

SEQ ID NO: 1722527 - RNA, 21 nt, Human
uugaaauuuuuauuaaauuau

SEQ ID NO: 1722528 - RNA, 18 nt, Human
uugaacccgggaggcaga

SEQ ID NO: 1722529 - RNA, 13 nt, Human
auccuaguuccac

SEQ ID NO: 1722530 - RNA, 21 nt, Human
auccuaggcauuugcugaaua

SEQ ID NO: 1722531 - RNA, 19 nt, Human
auccuaaugaaugcauaaa

SEQ ID NO: 1722532 - RNA, 14 nt, Human
auccuacaagacac

SEQ ID NO: 1722533 - RNA, 13 nt, Human
auccuaaugaaug

SEQ ID NO: 1722534 - RNA, 12 nt, Human
auccuaaugaau

SEQ ID NO: 1722535 - RNA, 13 nt, Human
uucugccgcagcc

SEQ ID NO: 1722536 - RNA, 19 nt, Human
uucugcagccacuauuguu

SEQ ID NO: 1722537 - RNA, 14 nt, Human
uucugacccaugcu

SEQ ID NO: 1722538 - RNA, 16 nt, Human
uucugacccaugcugc

SEQ ID NO: 1722539 - RNA, 15 nt, Human
uucugcacacagcac

SEQ ID NO: 1722540 - RNA, 17 nt, Human
uucucuacucuagggaa

SEQ ID NO: 1722541 - RNA, 16 nt, Human
uucucuuuucaaaaca

SEQ ID NO: 1722542 - RNA, 14 nt, Human
uucuccugccucag

SEQ ID NO: 1722543 - RNA, 13 nt, Human
uucuccugccuca

SEQ ID NO: 1722544 - RNA, 12 nt, Human
uucuccugccuc

SEQ ID NO: 1722545 - RNA, 23 nt, Human
aucaggccaggcccucugcccac

SEQ ID NO: 1722546 - RNA, 22 nt, Human
aucaggccaggcccucugccca

SEQ ID NO: 1722547 - RNA, 21 nt, Human
aucaggccaggcccucugccc

SEQ ID NO: 1722548 - RNA, 21 nt, Human
aucauugaaaucuuuuugcuu

SEQ ID NO: 1722549 - RNA, 15 nt, Human
aucccaccaacccuc

SEQ ID NO: 1722550 - RNA, 15 nt, Human
uucuggcucuuccag

SEQ ID NO: 1722551 - RNA, 16 nt, Human
uucugccgcagcccug

SEQ ID NO: 1722552 - RNA, 15 nt, Human
uucugccgcagcccu

SEQ ID NO: 1722553 - RNA, 14 nt, Human
uucugccgcagccc

SEQ ID NO: 1722554 - RNA, 18 nt, Human
uucuggcuaugcauuuga

SEQ ID NO: 1722555 - RNA, 20 nt, Human
uucuggcuaugcauuugaaa

SEQ ID NO: 1722556 - RNA, 22 nt, Human
uucugguugaugccugugaacu

SEQ ID NO: 1722557 - RNA, 17 nt, Human
uuauuuuuuucugaauu

SEQ ID NO: 1722558 - RNA, 13 nt, Human
uuauuuuuuucug

SEQ ID NO: 1722559 - RNA, 17 nt, Human
uuauuuuuagacagagu

SEQ ID NO: 1722560 - RNA, 18 nt, Human
uuauuuuuagacagaguc

SEQ ID NO: 1722561 - RNA, 21 nt, Human
uucaagcgauucuucugcuuc

SEQ ID NO: 1722562 - RNA, 17 nt, Human
uucaaaauaaaaaugag

SEQ ID NO: 1722563 - RNA, 20 nt, Human
uucaaaaguuuguuugcuua

SEQ ID NO: 1722564 - RNA, 21 nt, Human
uucaaaauuguuacaaauugu

SEQ ID NO: 1722565 - RNA, 23 nt, Human
uucacaagacccaaaaggcagaa

SEQ ID NO: 1722566 - RNA, 17 nt, Human
uucaagugauucucaug

SEQ ID NO: 1722567 - RNA, 20 nt, Human
uucacaguucucuccuucuu

SEQ ID NO: 1722568 - RNA, 15 nt, Human
uucacaguucucucc

SEQ ID NO: 1722569 - RNA, 20 nt, Human
uucacagaugggugcuugga

SEQ ID NO: 1722570 - RNA, 17 nt, Human
auaggcguaacuaauuu

SEQ ID NO: 1722571 - RNA, 17 nt, Human
auaggaaaaacugauuu

SEQ ID NO: 1722572 - RNA, 16 nt, Human
auaggaaaaacugauu

SEQ ID NO: 1722573 - RNA, 14 nt, Human
auaggaaaaacuga

SEQ ID NO: 1722574 - RNA, 12 nt, Human
auaggaaaaacu

SEQ ID NO: 1722575 - RNA, 22 nt, Human
auagcuuuucccuuuuuuuaag

SEQ ID NO: 1722576 - RNA, 22 nt, Human
uucacuuaaguuaguuccacug

SEQ ID NO: 1722577 - RNA, 15 nt, Human
uucacuuacagcacc

SEQ ID NO: 1722578 - RNA, 16 nt, Human
auauaaaagacugacc

SEQ ID NO: 1722579 - RNA, 13 nt, Human
auauauaaccagu

SEQ ID NO: 1722580 - RNA, 12 nt, Human
auauauaaccag

SEQ ID NO: 1722581 - RNA, 17 nt, Human
auaguggcuuaaaacaa

SEQ ID NO: 1722582 - RNA, 15 nt, Human
auaguggugugauuu

SEQ ID NO: 1722583 - RNA, 21 nt, Human
auagugaggcaucgcaaugua

SEQ ID NO: 1722584 - RNA, 20 nt, Human
auaguuguaccgcaauguga

SEQ ID NO: 1722585 - RNA, 22 nt, Human
auaguuggcuaggaccccucca

SEQ ID NO: 1722586 - RNA, 22 nt, Human
auaguuaagcgugcauaaguua

SEQ ID NO: 1722587 - RNA, 23 nt, Human
uuccauaaucuggacuccucugu

SEQ ID NO: 1722588 - RNA, 22 nt, Human
uuccauaaucuggacuccucug

SEQ ID NO: 1722589 - RNA, 19 nt, Human
uuccauaaucuggacuccu

SEQ ID NO: 1722590 - RNA, 23 nt, Human
uucccaaagcagugcaugcuguc

SEQ ID NO: 1722591 - RNA, 22 nt, Human
uuccagugaggcucugcccuug

SEQ ID NO: 1722592 - RNA, 21 nt, Human
uuccagugaggcucugcccuu

SEQ ID NO: 1722593 - RNA, 20 nt, Human
uuccagugaggcucugcccu

SEQ ID NO: 1722594 - RNA, 19 nt, Human
uuccagugaggcucugccc

SEQ ID NO: 1722595 - RNA, 17 nt, Human
uuccagugaggcucugc

SEQ ID NO: 1722596 - RNA, 21 nt, Human
uuccaggggugggacacccug

SEQ ID NO: 1722597 - RNA, 13 nt, Human
uuccaggcuggga

SEQ ID NO: 1722598 - RNA, 13 nt, Human
uucccaacacaaa

SEQ ID NO: 1722599 - RNA, 15 nt, Human
uucccaacacaaaga

SEQ ID NO: 1722600 - RNA, 16 nt, Human
uucccaagcucugcuc

SEQ ID NO: 1722601 - RNA, 15 nt, Human
uucccaagcucugcu

SEQ ID NO: 1722602 - RNA, 14 nt, Human
uucccaagcucugc

SEQ ID NO: 1722603 - RNA, 13 nt, Human
uucccaagcucug

SEQ ID NO: 1722604 - RNA, 18 nt, Human
uucccaagcucugcuccu

SEQ ID NO: 1722605 - RNA, 22 nt, Human
uucccaccucucucacuccuug

SEQ ID NO: 1722606 - RNA, 12 nt, Human
uucccaccucuc

SEQ ID NO: 1722607 - RNA, 19 nt, Human
uuccaccaucaagccacca

SEQ ID NO: 1722608 - RNA, 22 nt, Human
uuccacaagagcccaggccucc

SEQ ID NO: 1722609 - RNA, 17 nt, Human
uuccaggggugggacac

SEQ ID NO: 1722610 - RNA, 13 nt, Human
uuccacagaggac

SEQ ID NO: 1722611 - RNA, 17 nt, Human
uuccaaggguacuaagg

SEQ ID NO: 1722612 - RNA, 15 nt, Human
uuccaaggguacuaa

SEQ ID NO: 1722613 - RNA, 18 nt, Human
uucauuuaggugaggaag

SEQ ID NO: 1722614 - RNA, 16 nt, Human
auauguggaguucauc

SEQ ID NO: 1722615 - RNA, 15 nt, Human
auauguggaguucau

SEQ ID NO: 1722616 - RNA, 14 nt, Human
auauauuuuaagac

SEQ ID NO: 1722617 - RNA, 20 nt, Human
auaucugaaaauguaugugu

SEQ ID NO: 1722618 - RNA, 17 nt, Human
auaucugaaaauguaug

SEQ ID NO: 1722619 - RNA, 16 nt, Human
auaucugaaaauguau

SEQ ID NO: 1722620 - RNA, 14 nt, Human
auaugcacacauuu

SEQ ID NO: 1722621 - RNA, 15 nt, Human
auaugcacacauuuu

SEQ ID NO: 1722622 - RNA, 16 nt, Human
auaugcacacauuuuu

SEQ ID NO: 1722623 - RNA, 22 nt, Human
auaugcacacauuuuuuaaaug

SEQ ID NO: 1722624 - RNA, 16 nt, Human
auauguaacaagccac

SEQ ID NO: 1722625 - RNA, 17 nt, Human
auauguaacaagccacc

SEQ ID NO: 1722626 - RNA, 22 nt, Human
auauguaaaugguaugucauuc

SEQ ID NO: 1722627 - RNA, 11 nt, Human
uucagaaaugu

SEQ ID NO: 1722628 - RNA, 13 nt, Human
uucagaaaugugu

SEQ ID NO: 1722629 - RNA, 13 nt, Human
uucagugccuuau

SEQ ID NO: 1722630 - RNA, 12 nt, Human
uucagugccuua

SEQ ID NO: 1722631 - RNA, 16 nt, Human
uucagugccaaaaaca

SEQ ID NO: 1722632 - RNA, 18 nt, Human
uucagugccuuauggaac

SEQ ID NO: 1722633 - RNA, 19 nt, Human
uucauaauuauuauuuggc

SEQ ID NO: 1722634 - RNA, 13 nt, Human
auauauuuuaaga

SEQ ID NO: 1722635 - RNA, 12 nt, Human
auauauuuuaag

SEQ ID NO: 1722636 - RNA, 17 nt, Human
uucaucccucuggggcu

SEQ ID NO: 1722637 - RNA, 21 nt, Human
uucaucccucuggggcuguuc

SEQ ID NO: 1722638 - RNA, 21 nt, Human
auugacccacaagaaaugaaa

SEQ ID NO: 1722639 - RNA, 18 nt, Human
auugacaggauuauugga

SEQ ID NO: 1722640 - RNA, 15 nt, Human
auugcaacaggcugg

SEQ ID NO: 1722641 - RNA, 13 nt, Human
auugaccugaggc

SEQ ID NO: 1722642 - RNA, 17 nt, Human
auugaccugaggcccuu

SEQ ID NO: 1722643 - RNA, 21 nt, Human
auugcaacaggcugggcuuca

SEQ ID NO: 1722644 - RNA, 16 nt, Human
auugcaacaggcuggg

SEQ ID NO: 1722645 - RNA, 12 nt, Human
auugcaauagaa

SEQ ID NO: 1722646 - RNA, 23 nt, Human
auugccauuucuuccacaagagc

SEQ ID NO: 1722647 - RNA, 17 nt, Human
auugcauuuccugacag

SEQ ID NO: 1722648 - RNA, 21 nt, Human
auugcccacgcuggagugcag

SEQ ID NO: 1722649 - RNA, 17 nt, Human
auugcccacgcuggagu

SEQ ID NO: 1722650 - RNA, 19 nt, Human
auugcggacagccacggcc

SEQ ID NO: 1722651 - RNA, 18 nt, Human
auugcggacagccacggc

SEQ ID NO: 1722652 - RNA, 16 nt, Human
auugcggacagccacg

SEQ ID NO: 1722653 - RNA, 20 nt, Human
auugacacuuaaaaaugguu

SEQ ID NO: 1722654 - RNA, 17 nt, Human
auucuccaccugccagg

SEQ ID NO: 1722655 - RNA, 16 nt, Human
auucuccaccugccag

SEQ ID NO: 1722656 - RNA, 13 nt, Human
auucuccaccugc

SEQ ID NO: 1722657 - RNA, 20 nt, Human
auucucagaaucucaaauaa

SEQ ID NO: 1722658 - RNA, 18 nt, Human
auucucagaaucucaaau

SEQ ID NO: 1722659 - RNA, 16 nt, Human
auucuacuuugagugc

SEQ ID NO: 1722660 - RNA, 13 nt, Human
auucuacuuugag

SEQ ID NO: 1722661 - RNA, 14 nt, Human
auucucagaaucuc

SEQ ID NO: 1722662 - RNA, 18 nt, Human
auucuccaccugccaggg

SEQ ID NO: 1722663 - RNA, 14 nt, Human
auugcuacuguccu

SEQ ID NO: 1722664 - RNA, 19 nt, Human
auuuaaaacauuaaaauau

SEQ ID NO: 1722665 - RNA, 20 nt, Human
auuuaaaacauuaaaauaua

SEQ ID NO: 1722666 - RNA, 21 nt, Human
auuuaaaacauuaaaauauaa

SEQ ID NO: 1722667 - RNA, 20 nt, Human
auuuaacagaaauguacagc

SEQ ID NO: 1722668 - RNA, 17 nt, Human
auuuaacagaaauguac

SEQ ID NO: 1722669 - RNA, 19 nt, Human
auuuaacagaaauguacag

SEQ ID NO: 1722670 - RNA, 15 nt, Human
auuuaacagaaaugu

SEQ ID NO: 1722671 - RNA, 16 nt, Human
auuuaacagaaaugua

SEQ ID NO: 1722672 - RNA, 22 nt, Human
auuuacaacugggggaggguga

SEQ ID NO: 1722673 - RNA, 19 nt, Human
auuuacccuucuuuucuga

SEQ ID NO: 1722674 - RNA, 16 nt, Human
auuuacaaaugggaaa

SEQ ID NO: 1722675 - RNA, 23 nt, Human
auuuaauuuuuuugagacagagu

SEQ ID NO: 1722676 - RNA, 19 nt, Human
auuuaauuuuuuugagaca

SEQ ID NO: 1722677 - RNA, 14 nt, Human
auuguauuacaaau

SEQ ID NO: 1722678 - RNA, 15 nt, Human
auuguauuacaaauc

SEQ ID NO: 1722679 - RNA, 13 nt, Human
auugugccccugc

SEQ ID NO: 1722680 - RNA, 15 nt, Human
auugugaaauuauuc

SEQ ID NO: 1722681 - RNA, 23 nt, Human
auuggcuuuggguugcaggaccu

SEQ ID NO: 1722682 - RNA, 13 nt, Human
auuuaaaagauac

SEQ ID NO: 1722683 - RNA, 15 nt, Human
auuugaggucuguuc

SEQ ID NO: 1722684 - RNA, 23 nt, Human
auuugaggucuguucuuuccaaa

SEQ ID NO: 1722685 - RNA, 17 nt, Human
auuugagcagggcucag

SEQ ID NO: 1722686 - RNA, 20 nt, Human
auuucuuuugccguuauuaa

SEQ ID NO: 1722687 - RNA, 18 nt, Human
auuuggugguuucagaaa

SEQ ID NO: 1722688 - RNA, 20 nt, Human
auuuggugguuucagaaaug

SEQ ID NO: 1722689 - RNA, 17 nt, Human
auuuggugguuucagaa

SEQ ID NO: 1722690 - RNA, 20 nt, Human
auuuauuaaaugcccagccc

SEQ ID NO: 1722691 - RNA, 22 nt, Human
auuuauuaaaugcccagccccu

SEQ ID NO: 1722692 - RNA, 13 nt, Human
auuuauuauggca

SEQ ID NO: 1722693 - RNA, 21 nt, Human
auuucuaaaucuccaaaauaa

SEQ ID NO: 1722694 - RNA, 12 nt, Human
auuucuaaaucu

SEQ ID NO: 1722695 - RNA, 13 nt, Human
auuucuaaaucuc

SEQ ID NO: 1722696 - RNA, 14 nt, Human
auuuccugugucuu

SEQ ID NO: 1722697 - RNA, 16 nt, Human
auuuauuauggcacau

SEQ ID NO: 1722698 - RNA, 17 nt, Human
auuuuauuaugcaugaa

SEQ ID NO: 1722699 - RNA, 14 nt, Human
auuuuauuaugcau

SEQ ID NO: 1722700 - RNA, 15 nt, Human
auuuuauuaugcaug

SEQ ID NO: 1722701 - RNA, 13 nt, Human
auuuuauuaugca

SEQ ID NO: 1722702 - RNA, 21 nt, Human
auuuuacuuuaaaaggagcca

SEQ ID NO: 1722703 - RNA, 18 nt, Human
auuuuauguugcauagaa

SEQ ID NO: 1722704 - RNA, 14 nt, Human
auuuuauguugcau

SEQ ID NO: 1722705 - RNA, 21 nt, Human
auuuuauguugcauagaauaa

SEQ ID NO: 1722706 - RNA, 20 nt, Human
auuuuacuguacagacagaa

SEQ ID NO: 1722707 - RNA, 22 nt, Human
auuuuacuguacagacagaaaa

SEQ ID NO: 1722708 - RNA, 23 nt, Human
auuucuuuugccguuauuaaaaa

SEQ ID NO: 1722709 - RNA, 22 nt, Human
uuuuuguuccacaaguuaaaua

SEQ ID NO: 1722710 - RNA, 19 nt, Human
auuaccacagacauacuaa

SEQ ID NO: 1722711 - RNA, 12 nt, Human
auuaccagggac

SEQ ID NO: 1722712 - RNA, 22 nt, Human
auuaccugaauuuuggcugugu

SEQ ID NO: 1722713 - RNA, 16 nt, Human
auuauauuuacaaaug

SEQ ID NO: 1722714 - RNA, 17 nt, Human
auuauauuuacaaaugg

SEQ ID NO: 1722715 - RNA, 18 nt, Human
auuauuuuauguugcaua

SEQ ID NO: 1722716 - RNA, 16 nt, Human
auuauuuuauguugca

SEQ ID NO: 1722717 - RNA, 23 nt, Human
auuauuuauuaaaugcccagccc

SEQ ID NO: 1722718 - RNA, 16 nt, Human
auucaaaaugauguau

SEQ ID NO: 1722719 - RNA, 14 nt, Human
auucagcucaugga

SEQ ID NO: 1722720 - RNA, 22 nt, Human
auucaggaagcucagggccugg

SEQ ID NO: 1722721 - RNA, 21 nt, Human
auucaggaagcucagggccug

SEQ ID NO: 1722722 - RNA, 18 nt, Human
auucagcucugcaagaau

SEQ ID NO: 1722723 - RNA, 14 nt, Human
auucagcucugcaa

SEQ ID NO: 1722724 - RNA, 16 nt, Human
auucaguuguuagugu

SEQ ID NO: 1722725 - RNA, 23 nt, Human
auucaggaagcucagggccuggc

SEQ ID NO: 1722726 - RNA, 21 nt, Human
auucaguuguuagugugucuu

SEQ ID NO: 1722727 - RNA, 19 nt, Human
auuccccaggaggccagcc

SEQ ID NO: 1722728 - RNA, 16 nt, Human
auuccccaggaggcca

SEQ ID NO: 1722729 - RNA, 20 nt, Human
auuccccagauugcaacagg

SEQ ID NO: 1722730 - RNA, 20 nt, Human
auuccacuuauaggaauuga

SEQ ID NO: 1722731 - RNA, 21 nt, Human
uuuuaaguuacacauuuuuca

SEQ ID NO: 1722732 - RNA, 22 nt, Human
uuuuaaguuacacauuuuucag

SEQ ID NO: 1722733 - RNA, 16 nt, Human
uuuuaagugcugcauu

SEQ ID NO: 1722734 - RNA, 17 nt, Human
uuuuaagugcugcauuu

SEQ ID NO: 1722735 - RNA, 21 nt, Human
uuuuaagugcugcauuuaaaa

SEQ ID NO: 1722736 - RNA, 15 nt, Human
auguugaagccuuug

SEQ ID NO: 1722737 - RNA, 16 nt, Human
auguugaagccuuugu

SEQ ID NO: 1722738 - RNA, 19 nt, Human
auguucaucaaugaaugaa

SEQ ID NO: 1722739 - RNA, 21 nt, Human
auguucaucauccuaagcuau

SEQ ID NO: 1722740 - RNA, 12 nt, Human
uuuuauaaacuu

SEQ ID NO: 1722741 - RNA, 13 nt, Human
uuuuauaaacuuu

SEQ ID NO: 1722742 - RNA, 19 nt, Human
uuuuaguugcaacuuugua

SEQ ID NO: 1722743 - RNA, 23 nt, Human
uuuuagaguugauacuacaguuu

SEQ ID NO: 1722744 - RNA, 16 nt, Human
auguuggccaggcugg

SEQ ID NO: 1722745 - RNA, 16 nt, Human
auguuggccaggcugc

SEQ ID NO: 1722746 - RNA, 14 nt, Human
auguuggccaggcu

SEQ ID NO: 1722747 - RNA, 15 nt, Human
auguugcauagaaua

SEQ ID NO: 1722748 - RNA, 18 nt, Human
uuuuaugugaaacauguu

SEQ ID NO: 1722749 - RNA, 19 nt, Human
uuuuaugugaaacauguuu

SEQ ID NO: 1722750 - RNA, 22 nt, Human
uuuuauguugcauagaauaaaa

SEQ ID NO: 1722751 - RNA, 19 nt, Human
uuuuauaaacuuuaccuuu

SEQ ID NO: 1722752 - RNA, 14 nt, Human
uuuuauaaacuuua

SEQ ID NO: 1722753 - RNA, 17 nt, Human
uuuuauaaacuuuaccu

SEQ ID NO: 1722754 - RNA, 19 nt, Human
uuuuccagguuuaagcugu

SEQ ID NO: 1722755 - RNA, 21 nt, Human
uuuuauucagcucauggacuu

SEQ ID NO: 1722756 - RNA, 22 nt, Human
uuuucagauauaaaagacugac

SEQ ID NO: 1722757 - RNA, 19 nt, Human
uuuucagauauaaaagacu

SEQ ID NO: 1722758 - RNA, 21 nt, Human
uuuucagauauaaaagacuga

SEQ ID NO: 1722759 - RNA, 17 nt, Human
auuaaccacuucagcug

SEQ ID NO: 1722760 - RNA, 20 nt, Human
auuaaccacuucagcugacu

SEQ ID NO: 1722761 - RNA, 18 nt, Human
auuaaccacuucagcuga

SEQ ID NO: 1722762 - RNA, 17 nt, Human
auuaaacuuaaucuaaa

SEQ ID NO: 1722763 - RNA, 16 nt, Human
auuaaacuuaaucuaa

SEQ ID NO: 1722764 - RNA, 19 nt, Human
auuaaacuuaaucuaaaug

SEQ ID NO: 1722765 - RNA, 21 nt, Human
auuaaacuuaaucuaaaugga

SEQ ID NO: 1722766 - RNA, 11 nt, Human
auuaagaaaua

SEQ ID NO: 1722767 - RNA, 12 nt, Human
auuaagaaauag

SEQ ID NO: 1722768 - RNA, 14 nt, Human
auuaagaaagacua

SEQ ID NO: 1722769 - RNA, 13 nt, Human
auuaagaaagacu

SEQ ID NO: 1722770 - RNA, 23 nt, Human
auuaacuuuuauaaacuuuaccu

SEQ ID NO: 1722771 - RNA, 16 nt, Human
auuaacuuuuauaaac

SEQ ID NO: 1722772 - RNA, 17 nt, Human
auuaacuuuuauaaacu

SEQ ID NO: 1722773 - RNA, 19 nt, Human
auuaacuuuuauaaacuuu

SEQ ID NO: 1722774 - RNA, 20 nt, Human
auuaacuuuuauaaacuuua

SEQ ID NO: 1722775 - RNA, 12 nt, Human
auuaacuuuuau

SEQ ID NO: 1722776 - RNA, 14 nt, Human
auguuuuccaugag

SEQ ID NO: 1722777 - RNA, 18 nt, Human
auguuuuucuucucccuc

SEQ ID NO: 1722778 - RNA, 17 nt, Human
auguuuuucuucucccu

SEQ ID NO: 1722779 - RNA, 13 nt, Human
auuaaaauauaau

SEQ ID NO: 1722780 - RNA, 18 nt, Human
auuaaaauauaaucucua

SEQ ID NO: 1722781 - RNA, 21 nt, Human
uuugcuguagaagauggcacu

SEQ ID NO: 1722782 - RNA, 15 nt, Human
uuugcuucaaaaaca

SEQ ID NO: 1722783 - RNA, 22 nt, Human
uuugggaggccaaggugggagg

SEQ ID NO: 1722784 - RNA, 14 nt, Human
uuuggggauauuuu

SEQ ID NO: 1722785 - RNA, 22 nt, Human
uuugccauguuggccaggcugg

SEQ ID NO: 1722786 - RNA, 22 nt, Human
uuugggggaaaauuuagaaaua

SEQ ID NO: 1722787 - RNA, 15 nt, Human
auguaucaaugagua

SEQ ID NO: 1722788 - RNA, 12 nt, Human
auguauguguaa

SEQ ID NO: 1722789 - RNA, 15 nt, Human
auguaucugagcagg

SEQ ID NO: 1722790 - RNA, 20 nt, Human
augucccaacuuguaaaaau

SEQ ID NO: 1722791 - RNA, 16 nt, Human
auguccacugguucuu

SEQ ID NO: 1722792 - RNA, 24 nt, Human
augucccuaccgagucucuucucc

SEQ ID NO: 1722793 - RNA, 23 nt, Human
auguccaagaagcccaggaaagg

SEQ ID NO: 1722794 - RNA, 18 nt, Human
auguccaagaagcccagg

SEQ ID NO: 1722795 - RNA, 19 nt, Human
auguccaagaagcccagga

SEQ ID NO: 1722796 - RNA, 16 nt, Human
augucagugugacuga

SEQ ID NO: 1722797 - RNA, 15 nt, Human
augucagugugacug

SEQ ID NO: 1722798 - RNA, 21 nt, Human
augucagugugacugaucucu

SEQ ID NO: 1722799 - RNA, 16 nt, Human
uuugugagcaggcugu

SEQ ID NO: 1722800 - RNA, 19 nt, Human
uuugugaggaagccgcugg

SEQ ID NO: 1722801 - RNA, 18 nt, Human
uuugugaggaagccgcug

SEQ ID NO: 1722802 - RNA, 17 nt, Human
uuuguuucuuucucuga

SEQ ID NO: 1722803 - RNA, 12 nt, Human
uuuguuugaacu

SEQ ID NO: 1722804 - RNA, 13 nt, Human
uuuguuugaacug

SEQ ID NO: 1722805 - RNA, 14 nt, Human
uuuguuugaacuga

SEQ ID NO: 1722806 - RNA, 13 nt, Human
uuuguagagccag

SEQ ID NO: 1722807 - RNA, 13 nt, Human
uuuguaaauuguc

SEQ ID NO: 1722808 - RNA, 22 nt, Human
uuuuaaaacacuuccauaaucu

SEQ ID NO: 1722809 - RNA, 16 nt, Human
uuuuaaaacacuucca

SEQ ID NO: 1722810 - RNA, 18 nt, Human
uuuguuugaacugauaaa

SEQ ID NO: 1722811 - RNA, 15 nt, Human
uuuuaagaggcaggg

SEQ ID NO: 1722812 - RNA, 16 nt, Human
uuuuaagaggcagggu

SEQ ID NO: 1722813 - RNA, 15 nt, Human
uuuuaagugcugcau

SEQ ID NO: 1722814 - RNA, 16 nt, Human
uuuuaaguaaggaauu

SEQ ID NO: 1722815 - RNA, 23 nt, Human
uuuuaaggguuuguggaaaauga

SEQ ID NO: 1722816 - RNA, 20 nt, Human
uuuuaaggguuuguggaaaa

SEQ ID NO: 1722817 - RNA, 18 nt, Human
uuagccaagugugguaga

SEQ ID NO: 1722818 - RNA, 14 nt, Human
uuagcggagacgga

SEQ ID NO: 1722819 - RNA, 18 nt, Human
uuagcaaauucuguuuuu

SEQ ID NO: 1722820 - RNA, 12 nt, Human
uuagcaccaggg

SEQ ID NO: 1722821 - RNA, 18 nt, Human
auaauuuaccugaagucu

SEQ ID NO: 1722822 - RNA, 20 nt, Human
uuagggaaggauacaaaagc

SEQ ID NO: 1722823 - RNA, 21 nt, Human
uuaggugugacugaauuucuu

SEQ ID NO: 1722824 - RNA, 16 nt, Human
uuaggugaggaagcaa

SEQ ID NO: 1722825 - RNA, 16 nt, Human
uuaggugugacugaau

SEQ ID NO: 1722826 - RNA, 22 nt, Human
uuaguuugcaguuacacuaaaa

SEQ ID NO: 1722827 - RNA, 15 nt, Human
uuaguuucuccaagc

SEQ ID NO: 1722828 - RNA, 18 nt, Human
auaauccuaaacauauga

SEQ ID NO: 1722829 - RNA, 22 nt, Human
auaaucuggacuccucugucca

SEQ ID NO: 1722830 - RNA, 20 nt, Human
auaaucuggacuccucuguc

SEQ ID NO: 1722831 - RNA, 19 nt, Human
auaaucuggacuccucugu

SEQ ID NO: 1722832 - RNA, 18 nt, Human
auaaucuggacuccucug

SEQ ID NO: 1722833 - RNA, 18 nt, Human
auaaucucuccauucccg

SEQ ID NO: 1722834 - RNA, 22 nt, Human
auaauugacaggauuauuggaa

SEQ ID NO: 1722835 - RNA, 15 nt, Human
auaaugaaugaaaca

SEQ ID NO: 1722836 - RNA, 15 nt, Human
auaaugcgugcauac

SEQ ID NO: 1722837 - RNA, 20 nt, Human
auaaugcgugcauaccacuu

SEQ ID NO: 1722838 - RNA, 12 nt, Human
auaauacaccac

SEQ ID NO: 1722839 - RNA, 18 nt, Human
auaauacaccacuacauu

SEQ ID NO: 1722840 - RNA, 20 nt, Human
auaauacaccacuacauucu

SEQ ID NO: 1722841 - RNA, 19 nt, Human
auaauacuugcuuuggaaa

SEQ ID NO: 1722842 - RNA, 14 nt, Human
uuagacagucccug

SEQ ID NO: 1722843 - RNA, 23 nt, Human
auaauaaagaauagcuuuaauga

SEQ ID NO: 1722844 - RNA, 13 nt, Human
auaauaaagaaua

SEQ ID NO: 1722845 - RNA, 14 nt, Human
auaauaaagaauag

SEQ ID NO: 1722846 - RNA, 19 nt, Human
uuacccucauguucuuaau

SEQ ID NO: 1722847 - RNA, 24 nt, Human
uuacaggcgugagccaccgugccu

SEQ ID NO: 1722848 - RNA, 18 nt, Human
uuacaggcuccugccacc

SEQ ID NO: 1722849 - RNA, 16 nt, Human
uuacaggcuccugcca

SEQ ID NO: 1722850 - RNA, 20 nt, Human
uuaccuuugacaaagguaaa

SEQ ID NO: 1722851 - RNA, 13 nt, Human
uuaccuuugacaa

SEQ ID NO: 1722852 - RNA, 13 nt, Human
uuagacagucccu

SEQ ID NO: 1722853 - RNA, 20 nt, Human
uuagacagagucucacuguu

SEQ ID NO: 1722854 - RNA, 13 nt, Human
uuagacagagucu

SEQ ID NO: 1722855 - RNA, 17 nt, Human
uuagaaauugcauuucc

SEQ ID NO: 1722856 - RNA, 23 nt, Human
uuacucuucaguuaagccuuugg

SEQ ID NO: 1722857 - RNA, 11 nt, Human
auaaauuauuu

SEQ ID NO: 1722858 - RNA, 22 nt, Human
auaacgauaaaagacagugaaa

SEQ ID NO: 1722859 - RNA, 14 nt, Human
auaacguauaaaag

SEQ ID NO: 1722860 - RNA, 16 nt, Human
auaacuaaaagguaug

SEQ ID NO: 1722861 - RNA, 13 nt, Human
auaaauaaaaaua

SEQ ID NO: 1722862 - RNA, 17 nt, Human
auaaagguucaugcaaa

SEQ ID NO: 1722863 - RNA, 15 nt, Human
auaaagguucaugca

SEQ ID NO: 1722864 - RNA, 14 nt, Human
auaaauaaaaauaa

SEQ ID NO: 1722865 - RNA, 15 nt, Human
auaaauaguuuauga

SEQ ID NO: 1722866 - RNA, 13 nt, Human
uuaaacagaggau

SEQ ID NO: 1722867 - RNA, 14 nt, Human
uuaaaaaucucaaa

SEQ ID NO: 1722868 - RNA, 15 nt, Human
uuaaaaaucucaaau

SEQ ID NO: 1722869 - RNA, 16 nt, Human
uuaaaaaucucaaauu

SEQ ID NO: 1722870 - RNA, 17 nt, Human
uuaaaaaucucaaauuu

SEQ ID NO: 1722871 - RNA, 15 nt, Human
uuaaauaaugugaaa

SEQ ID NO: 1722872 - RNA, 19 nt, Human
uuaaauaaugugaaacugg

SEQ ID NO: 1722873 - RNA, 16 nt, Human
uuaaauaaugugaaac

SEQ ID NO: 1722874 - RNA, 18 nt, Human
uuaaauaaugugaaacug

SEQ ID NO: 1722875 - RNA, 19 nt, Human
uuaacagaaauguacagca

SEQ ID NO: 1722876 - RNA, 20 nt, Human
uuaacagaaauguacagcaa

SEQ ID NO: 1722877 - RNA, 14 nt, Human
aguuuaaauuguaa

SEQ ID NO: 1722878 - RNA, 13 nt, Human
aguuggucccccu

SEQ ID NO: 1722879 - RNA, 11 nt, Human
aguuggucccc

SEQ ID NO: 1722880 - RNA, 17 nt, Human
aguuggucccccuucca

SEQ ID NO: 1722881 - RNA, 13 nt, Human
uuaaaaaaaaucc

SEQ ID NO: 1722882 - RNA, 14 nt, Human
aguuuaauugacuu

SEQ ID NO: 1722883 - RNA, 15 nt, Human
aguuuaauugacuua

SEQ ID NO: 1722884 - RNA, 18 nt, Human
aguuuaauugacuuauuu

SEQ ID NO: 1722885 - RNA, 23 nt, Human
aguugccagucaccccggccacc

SEQ ID NO: 1722886 - RNA, 13 nt, Human
aguugggcuuccu

SEQ ID NO: 1722887 - RNA, 19 nt, Human
aguugggcuuccucauagu

SEQ ID NO: 1722888 - RNA, 17 nt, Human
aguuggguggaugccug

SEQ ID NO: 1722889 - RNA, 15 nt, Human
uuaagugcugcauuu

SEQ ID NO: 1722890 - RNA, 16 nt, Human
uuaagugcugcauuua

SEQ ID NO: 1722891 - RNA, 19 nt, Human
uuaagugcugcauuuaaaa

SEQ ID NO: 1722892 - RNA, 9 nt, Human
uuaaggugg

SEQ ID NO: 1722893 - RNA, 22 nt, Human
uuaagaaagacuaucuaaaugu

SEQ ID NO: 1722894 - RNA, 22 nt, Human
uuaagaaauagacagcaugaga

SEQ ID NO: 1722895 - RNA, 22 nt, Human
uuaaucauuaggugugacugaa

SEQ ID NO: 1722896 - RNA, 23 nt, Human
uuaaucauuaggugugacugaau

SEQ ID NO: 1722897 - RNA, 21 nt, Human
uuaaucugggccagaauuuca

SEQ ID NO: 1722898 - RNA, 17 nt, Human
uuaaucucuaacagugg

SEQ ID NO: 1722899 - RNA, 13 nt, Human
uuaaucauuaggu

SEQ ID NO: 1722900 - RNA, 22 nt, Human
uuaauauuuauaggucacuuug

SEQ ID NO: 1722901 - RNA, 19 nt, Human
uuaaugaaagacuguacaa

SEQ ID NO: 1722902 - RNA, 21 nt, Human
uuaauugacuuauuuauauaa

SEQ ID NO: 1722903 - RNA, 18 nt, Human
uuaaugaaagacuguaca

SEQ ID NO: 1722904 - RNA, 22 nt, Human
uuaaucugguuuauuuuuguuc

SEQ ID NO: 1722905 - RNA, 18 nt, Human
uuaaucucuaacagugga

SEQ ID NO: 1722906 - RNA, 23 nt, Human
aguuuuuauggcuuuugugcauu

SEQ ID NO: 1722907 - RNA, 12 nt, Human
aguuuuguaaau

SEQ ID NO: 1722908 - RNA, 15 nt, Human
aguuuuguaaauuuc

SEQ ID NO: 1722909 - RNA, 18 nt, Human
auaaaagccuguuuaaga

SEQ ID NO: 1722910 - RNA, 13 nt, Human
auaaaagccuguu

SEQ ID NO: 1722911 - RNA, 15 nt, Human
aguuuuuauugcuug

SEQ ID NO: 1722912 - RNA, 20 nt, Human
aguuuuuauugcuuguugga

SEQ ID NO: 1722913 - RNA, 20 nt, Human
uuaagaaaaaggaugcacag

SEQ ID NO: 1722914 - RNA, 21 nt, Human
uuaagaaaaaggaugcacaga

SEQ ID NO: 1722915 - RNA, 16 nt, Human
aguggaaccagcccag

SEQ ID NO: 1722916 - RNA, 18 nt, Human
uguucuuaguuugcaguu

SEQ ID NO: 1722917 - RNA, 18 nt, Human
uguucuagcauggcugcc

SEQ ID NO: 1722918 - RNA, 21 nt, Human
aguuacucuucaguuaagccu

SEQ ID NO: 1722919 - RNA, 15 nt, Human
uguugcccaggcugg

SEQ ID NO: 1722920 - RNA, 14 nt, Human
uguugcccaggcug

SEQ ID NO: 1722921 - RNA, 21 nt, Human
uguugcccaggcuggagugca

SEQ ID NO: 1722922 - RNA, 13 nt, Human
uguugcccaggcu

SEQ ID NO: 1722923 - RNA, 19 nt, Human
uguucuuucacccuuuucu

SEQ ID NO: 1722924 - RNA, 22 nt, Human
uguucuugguuuguaaauuaac

SEQ ID NO: 1722925 - RNA, 20 nt, Human
uguucuugguuuguaaauua

SEQ ID NO: 1722926 - RNA, 21 nt, Human
aguguucauaaauaaaguuug

SEQ ID NO: 1722927 - RNA, 20 nt, Human
aguucggugagcuacaaaug

SEQ ID NO: 1722928 - RNA, 19 nt, Human
aguucggugagcuacaaau

SEQ ID NO: 1722929 - RNA, 12 nt, Human
aguucucuccuu

SEQ ID NO: 1722930 - RNA, 16 nt, Human
aguucaauucucauuu

SEQ ID NO: 1722931 - RNA, 23 nt, Human
aguuccucauuagcauuuugcua

SEQ ID NO: 1722932 - RNA, 15 nt, Human
aguucccuacuuccu

SEQ ID NO: 1722933 - RNA, 17 nt, Human
uguuuauugucaaagug

SEQ ID NO: 1722934 - RNA, 14 nt, Human
uguuuauugucaaa

SEQ ID NO: 1722935 - RNA, 17 nt, Human
uguuuaguaaucauauu

SEQ ID NO: 1722936 - RNA, 14 nt, Human
uguuuaguaaucau

SEQ ID NO: 1722937 - RNA, 13 nt, Human
uguuuaguaauca

SEQ ID NO: 1722938 - RNA, 12 nt, Human
ugugguuucauu

SEQ ID NO: 1722939 - RNA, 19 nt, Human
ugugucagcauagaaguaa

SEQ ID NO: 1722940 - RNA, 16 nt, Human
agugcuuccaaggaug

SEQ ID NO: 1722941 - RNA, 21 nt, Human
agugccuguaaucacagcuac

SEQ ID NO: 1722942 - RNA, 15 nt, Human
agugccuuacacaau

SEQ ID NO: 1722943 - RNA, 17 nt, Human
agugccuuacacaaugg

SEQ ID NO: 1722944 - RNA, 20 nt, Human
agugcugcauuuaaaagaua

SEQ ID NO: 1722945 - RNA, 19 nt, Human
agugcugggauuacaggug

SEQ ID NO: 1722946 - RNA, 20 nt, Human
agugcugggauuacaggcgu

SEQ ID NO: 1722947 - RNA, 17 nt, Human
agugcugggauuacagg

SEQ ID NO: 1722948 - RNA, 22 nt, Human
agugcugcauuuaaaagauaca

SEQ ID NO: 1722949 - RNA, 20 nt, Human
agugcugggauuacaagcgu

SEQ ID NO: 1722950 - RNA, 21 nt, Human
uguuaacauggacaugaucuu

SEQ ID NO: 1722951 - RNA, 19 nt, Human
uguuaaugauagcuacugu

SEQ ID NO: 1722952 - RNA, 19 nt, Human
aguggaaaaauagccugcc

SEQ ID NO: 1722953 - RNA, 18 nt, Human
aguggaaaaauagccugc

SEQ ID NO: 1722954 - RNA, 11 nt, Human
aguggaaaaau

SEQ ID NO: 1722955 - RNA, 16 nt, Human
ugugucucuugguccu

SEQ ID NO: 1722956 - RNA, 20 nt, Human
ugugucuaggcaggaccugu

SEQ ID NO: 1722957 - RNA, 13 nt, Human
ugugucucuuggu

SEQ ID NO: 1722958 - RNA, 19 nt, Human
ugugucuaggcaggaccug

SEQ ID NO: 1722959 - RNA, 19 nt, Human
ugugucagguggggcagcu

SEQ ID NO: 1722960 - RNA, 17 nt, Human
ugugucagguggggcag

SEQ ID NO: 1722961 - RNA, 20 nt, Human
ugugucagguggggcagcuu

SEQ ID NO: 1722962 - RNA, 14 nt, Human
uguguuaugaagca

SEQ ID NO: 1722963 - RNA, 16 nt, Human
agugcaaugacacagu

SEQ ID NO: 1722964 - RNA, 18 nt, Human
agugcaaugacacagucu

SEQ ID NO: 1722965 - RNA, 24 nt, Human
agugauucuccugccucagccucc

SEQ ID NO: 1722966 - RNA, 22 nt, Human
agugauucuccugccucagccu

SEQ ID NO: 1722967 - RNA, 16 nt, Human
agugagucgaggacag

SEQ ID NO: 1722968 - RNA, 14 nt, Human
agugcccacaggau

SEQ ID NO: 1722969 - RNA, 14 nt, Human
agugcaugcugucc

SEQ ID NO: 1722970 - RNA, 16 nt, Human
agugccaaaaacaaca

SEQ ID NO: 1722971 - RNA, 14 nt, Human
agugcaucucagcc

SEQ ID NO: 1722972 - RNA, 15 nt, Human
agugcaucucagccc

SEQ ID NO: 1722973 - RNA, 17 nt, Human
agugcaucucagcccac

SEQ ID NO: 1722974 - RNA, 16 nt, Human
agugcaucucagccca

SEQ ID NO: 1722975 - RNA, 15 nt, Human
ugugcucuggacagg

SEQ ID NO: 1722976 - RNA, 23 nt, Human
ugugcucugaucauccacugugc

SEQ ID NO: 1722977 - RNA, 22 nt, Human
ugugcucugaucauccacugug

SEQ ID NO: 1722978 - RNA, 13 nt, Human
ugugccucugccu

SEQ ID NO: 1722979 - RNA, 12 nt, Human
ugugccucugcc

SEQ ID NO: 1722980 - RNA, 20 nt, Human
ugugcccuaaaguguauuuu

SEQ ID NO: 1722981 - RNA, 21 nt, Human
ugugcccuaaaguguauuuuu

SEQ ID NO: 1722982 - RNA, 19 nt, Human
agucucacuguugcccagg

SEQ ID NO: 1722983 - RNA, 18 nt, Human
agucucacuguugcccag

SEQ ID NO: 1722984 - RNA, 20 nt, Human
agucucacuguugcccaggc

SEQ ID NO: 1722985 - RNA, 21 nt, Human
agucucacuguugcccaggcu

SEQ ID NO: 1722986 - RNA, 15 nt, Human
ugugcugcccugccc

SEQ ID NO: 1722987 - RNA, 14 nt, Human
ugugcugcccugcc

SEQ ID NO: 1722988 - RNA, 13 nt, Human
ugugcugcccugc

SEQ ID NO: 1722989 - RNA, 19 nt, Human
ugugcucuggacaggcaug

SEQ ID NO: 1722990 - RNA, 18 nt, Human
ugugcucuggacaggcau

SEQ ID NO: 1722991 - RNA, 16 nt, Human
ugugcucuggacaggc

SEQ ID NO: 1722992 - RNA, 15 nt, Human
ugucaagccauaauu

SEQ ID NO: 1722993 - RNA, 19 nt, Human
ugucaagagggucugagga

SEQ ID NO: 1722994 - RNA, 16 nt, Human
uguauuuuuuuacuaa

SEQ ID NO: 1722995 - RNA, 21 nt, Human
ugucaagaauagcauuguaaa

SEQ ID NO: 1722996 - RNA, 14 nt, Human
uguauuuuuuuacu

SEQ ID NO: 1722997 - RNA, 16 nt, Human
aguaggaagacuuugg

SEQ ID NO: 1722998 - RNA, 22 nt, Human
aguaggaagacuuuggaaagac

SEQ ID NO: 1722999 - RNA, 19 nt, Human
aguaggaagacuuuggaaa

SEQ ID NO: 1723000 - RNA, 18 nt, Human
aguaggaagacuuuggaa

SEQ ID NO: 1723001 - RNA, 17 nt, Human
aguaggaagacuuugga

SEQ ID NO: 1723002 - RNA, 23 nt, Human
ugucauuugcuggagcucugccc

SEQ ID NO: 1723003 - RNA, 16 nt, Human
ugucagguggggcagc

SEQ ID NO: 1723004 - RNA, 19 nt, Human
ugucagcugaaccugggua

SEQ ID NO: 1723005 - RNA, 16 nt, Human
ugucagcugaaccugg

SEQ ID NO: 1723006 - RNA, 13 nt, Human
agucacugcacag

SEQ ID NO: 1723007 - RNA, 19 nt, Human
agucacugagacagcccgg

SEQ ID NO: 1723008 - RNA, 14 nt, Human
agucaccaagccca

SEQ ID NO: 1723009 - RNA, 13 nt, Human
agucaccaagccc

SEQ ID NO: 1723010 - RNA, 16 nt, Human
agucagacagaugugg

SEQ ID NO: 1723011 - RNA, 15 nt, Human
ugucgggcaugacac

SEQ ID NO: 1723012 - RNA, 14 nt, Human
ugucgggcaugaca

SEQ ID NO: 1723013 - RNA, 17 nt, Human
ugucguuaaaaacagau

SEQ ID NO: 1723014 - RNA, 15 nt, Human
ugucgcccagucugg

SEQ ID NO: 1723015 - RNA, 14 nt, Human
ugucgcccagucug

SEQ ID NO: 1723016 - RNA, 12 nt, Human
ugucgggcauga

SEQ ID NO: 1723017 - RNA, 13 nt, Human
ugucgccucugca

SEQ ID NO: 1723018 - RNA, 16 nt, Human
uguccuacccacccuc

SEQ ID NO: 1723019 - RNA, 16 nt, Human
ugucgcccaggcugga

SEQ ID NO: 1723020 - RNA, 15 nt, Human
ugucgcccaggcugg

SEQ ID NO: 1723021 - RNA, 14 nt, Human
uguccgagcuuuga

SEQ ID NO: 1723022 - RNA, 13 nt, Human
uguccgagcuuug

SEQ ID NO: 1723023 - RNA, 23 nt, Human
aguccgaaagggacuuggaagcu

SEQ ID NO: 1723024 - RNA, 17 nt, Human
agucucacuguugccca

SEQ ID NO: 1723025 - RNA, 16 nt, Human
agucucacuguugccc

SEQ ID NO: 1723026 - RNA, 12 nt, Human
agucccugccaa

SEQ ID NO: 1723027 - RNA, 22 nt, Human
aguccaggcuuuuuuaucaugu

SEQ ID NO: 1723028 - RNA, 17 nt, Human
aggugguuauggagagg

SEQ ID NO: 1723029 - RNA, 14 nt, Human
agguuggugggggc

SEQ ID NO: 1723030 - RNA, 17 nt, Human
uguaacuuucugaaaua

SEQ ID NO: 1723031 - RNA, 19 nt, Human
uguaagaucguucucugcc

SEQ ID NO: 1723032 - RNA, 20 nt, Human
uguaagaucguucucugccu

SEQ ID NO: 1723033 - RNA, 15 nt, Human
aggugcacaagcucc

SEQ ID NO: 1723034 - RNA, 20 nt, Human
aggugcacaagcuccaagcu

SEQ ID NO: 1723035 - RNA, 18 nt, Human
aggugcacaagcuccaag

SEQ ID NO: 1723036 - RNA, 17 nt, Human
aggugcacaagcuccaa

SEQ ID NO: 1723037 - RNA, 16 nt, Human
aggugcacaagcucca

SEQ ID NO: 1723038 - RNA, 23 nt, Human
aggucuugaacuccuggccucaa

SEQ ID NO: 1723039 - RNA, 10 nt, Human
aggucccuaa

SEQ ID NO: 1723040 - RNA, 21 nt, Human
aggugcacaagcuccaagcuc

SEQ ID NO: 1723041 - RNA, 14 nt, Human
agguggccacucca

SEQ ID NO: 1723042 - RNA, 17 nt, Human
agguggccacuccagac

SEQ ID NO: 1723043 - RNA, 20 nt, Human
aggugggauccuccaggugc

SEQ ID NO: 1723044 - RNA, 20 nt, Human
uguaggaagguuaauguuca

SEQ ID NO: 1723045 - RNA, 18 nt, Human
uguaggaagguuaauguu

SEQ ID NO: 1723046 - RNA, 12 nt, Human
aguagagacagg

SEQ ID NO: 1723047 - RNA, 17 nt, Human
aguagaagucuuagaug

SEQ ID NO: 1723048 - RNA, 16 nt, Human
aguacacuguuucaaa

SEQ ID NO: 1723049 - RNA, 20 nt, Human
aguacacuguuucaaacuuu

SEQ ID NO: 1723050 - RNA, 14 nt, Human
aguacacuguuuca

SEQ ID NO: 1723051 - RNA, 19 nt, Human
aguacuuuuggcauuuuac

SEQ ID NO: 1723052 - RNA, 21 nt, Human
aguaauccaagcaaaugugaa

SEQ ID NO: 1723053 - RNA, 14 nt, Human
aguaauccaccugc

SEQ ID NO: 1723054 - RNA, 15 nt, Human
aguaauccaagcaaa

SEQ ID NO: 1723055 - RNA, 23 nt, Human
aguaaggaauuuuauuuuuuucu

SEQ ID NO: 1723056 - RNA, 18 nt, Human
aguaauaugcacacauuu

SEQ ID NO: 1723057 - RNA, 19 nt, Human
aguaauaugcacacauuuu

SEQ ID NO: 1723058 - RNA, 20 nt, Human
aguaauaugcacacauuuuu

SEQ ID NO: 1723059 - RNA, 12 nt, Human
aguaaaaauaaa

SEQ ID NO: 1723060 - RNA, 15 nt, Human
aguaaaaauaaaauu

SEQ ID NO: 1723061 - RNA, 11 nt, Human
agguuuuccug

SEQ ID NO: 1723062 - RNA, 14 nt, Human
uguaauuugugaua

SEQ ID NO: 1723063 - RNA, 18 nt, Human
uguagaggagaaacugga

SEQ ID NO: 1723064 - RNA, 14 nt, Human
uguagagugggagc

SEQ ID NO: 1723065 - RNA, 13 nt, Human
uguagagugggag

SEQ ID NO: 1723066 - RNA, 13 nt, Human
aggguugggcugg

SEQ ID NO: 1723067 - RNA, 23 nt, Human
aggguuggccccugcccggcugc

SEQ ID NO: 1723068 - RNA, 18 nt, Human
aggguuggccccugcccg

SEQ ID NO: 1723069 - RNA, 23 nt, Human
agguacuuucauauuuuaaacag

SEQ ID NO: 1723070 - RNA, 19 nt, Human
agguagaaauaucugaaaa

SEQ ID NO: 1723071 - RNA, 17 nt, Human
agguagaaauaucugaa

SEQ ID NO: 1723072 - RNA, 23 nt, Human
agguagaaauaucugaaaaugua

SEQ ID NO: 1723073 - RNA, 21 nt, Human
agguaugcaaucaaaucugcu

SEQ ID NO: 1723074 - RNA, 23 nt, Human
agguauaauucacauuguauuca

SEQ ID NO: 1723075 - RNA, 20 nt, Human
agguauaaguggugugugua

SEQ ID NO: 1723076 - RNA, 19 nt, Human
agguauaaguggugugugu

SEQ ID NO: 1723077 - RNA, 12 nt, Human
aggucagagccu

SEQ ID NO: 1723078 - RNA, 17 nt, Human
aggucauuuuuuuuaag

SEQ ID NO: 1723079 - RNA, 20 nt, Human
aggucauuuuuuuuaagaaa

SEQ ID NO: 1723080 - RNA, 18 nt, Human
aggucaccuuuauucugg

SEQ ID NO: 1723081 - RNA, 19 nt, Human
aggucaccuuuauucuggc

SEQ ID NO: 1723082 - RNA, 13 nt, Human
aggguuauaauaa

SEQ ID NO: 1723083 - RNA, 22 nt, Human
aggguguccggucccuguccca

SEQ ID NO: 1723084 - RNA, 17 nt, Human
uggucugacccacugcu

SEQ ID NO: 1723085 - RNA, 16 nt, Human
uggucugacccacugc

SEQ ID NO: 1723086 - RNA, 20 nt, Human
uggucaccaaaucagcugcu

SEQ ID NO: 1723087 - RNA, 22 nt, Human
uggucagauuugaacucuucaa

SEQ ID NO: 1723088 - RNA, 18 nt, Human
uggucaccaaaucagcug

SEQ ID NO: 1723089 - RNA, 15 nt, Human
uggucccaccccaca

SEQ ID NO: 1723090 - RNA, 14 nt, Human
uggucccaccccac

SEQ ID NO: 1723091 - RNA, 13 nt, Human
uggucccacucag

SEQ ID NO: 1723092 - RNA, 16 nt, Human
uggucccaccccacac

SEQ ID NO: 1723093 - RNA, 16 nt, Human
uggucucaaacucuug

SEQ ID NO: 1723094 - RNA, 19 nt, Human
uggucuaucuuugagcgcc

SEQ ID NO: 1723095 - RNA, 23 nt, Human
uggucucaaacucuugaccucag

SEQ ID NO: 1723096 - RNA, 17 nt, Human
uggucucaaacucuuga

SEQ ID NO: 1723097 - RNA, 18 nt, Human
uggucucaaacuccugac

SEQ ID NO: 1723098 - RNA, 16 nt, Human
ugguacuaacuuuccu

SEQ ID NO: 1723099 - RNA, 17 nt, Human
ugguacucauuaaaaaa

SEQ ID NO: 1723100 - RNA, 20 nt, Human
ugguagcuuuucccuucuuu

SEQ ID NO: 1723101 - RNA, 21 nt, Human
ugguagcuuuucccuucuuuu

SEQ ID NO: 1723102 - RNA, 23 nt, Human
uggucacaggacucugccuccuc

SEQ ID NO: 1723103 - RNA, 22 nt, Human
uggucacaggacucugccuccu

SEQ ID NO: 1723104 - RNA, 19 nt, Human
ugggugcuuggaggaagga

SEQ ID NO: 1723105 - RNA, 15 nt, Human
ugggugcuuggagga

SEQ ID NO: 1723106 - RNA, 22 nt, Human
ugggugcuuggaggaaggaaac

SEQ ID NO: 1723107 - RNA, 15 nt, Human
agggugggagugggc

SEQ ID NO: 1723108 - RNA, 21 nt, Human
ugggucgcccuggacugugug

SEQ ID NO: 1723109 - RNA, 22 nt, Human
agggucucacucugucgcccag

SEQ ID NO: 1723110 - RNA, 23 nt, Human
agggucucacuauguugcccagg

SEQ ID NO: 1723111 - RNA, 22 nt, Human
agggucucacuauguugcccag

SEQ ID NO: 1723112 - RNA, 21 nt, Human
agggucucacuauguugccca

SEQ ID NO: 1723113 - RNA, 24 nt, Human
agggguucccuuuuuuggcugcug

SEQ ID NO: 1723114 - RNA, 18 nt, Human
aggggguggccucccaac

SEQ ID NO: 1723115 - RNA, 17 nt, Human
aggggguggccucccaa

SEQ ID NO: 1723116 - RNA, 15 nt, Human
aggggguggccuccc

SEQ ID NO: 1723117 - RNA, 22 nt, Human
aggggugggacacccugugaug

SEQ ID NO: 1723118 - RNA, 20 nt, Human
aggggugggacacccuguga

SEQ ID NO: 1723119 - RNA, 23 nt, Human
aggggagcaaaaucgaugcagug

SEQ ID NO: 1723120 - RNA, 15 nt, Human
aggggccuggcagcc

SEQ ID NO: 1723121 - RNA, 23 nt, Human
aggggccuggcagccgugccuuc

SEQ ID NO: 1723122 - RNA, 18 nt, Human
aggggccuggcagccgug

SEQ ID NO: 1723123 - RNA, 19 nt, Human
uggggucacucuggcagcu

SEQ ID NO: 1723124 - RNA, 20 nt, Human
uggggucacucuggcagcuc

SEQ ID NO: 1723125 - RNA, 14 nt, Human
ugggaguacaaaag

SEQ ID NO: 1723126 - RNA, 16 nt, Human
ugggcaacccccagcc

SEQ ID NO: 1723127 - RNA, 23 nt, Human
ugggaggucaaggcugcagugag

SEQ ID NO: 1723128 - RNA, 20 nt, Human
ugggaggucaaggcugcagu

SEQ ID NO: 1723129 - RNA, 19 nt, Human
ugggaggucaaggcugcag

SEQ ID NO: 1723130 - RNA, 18 nt, Human
ugggaggucaaggcugca

SEQ ID NO: 1723131 - RNA, 16 nt, Human
ugggccaggagccucc

SEQ ID NO: 1723132 - RNA, 14 nt, Human
ugggccaggagccu

SEQ ID NO: 1723133 - RNA, 20 nt, Human
ugggcccaaugcacuuuguu

SEQ ID NO: 1723134 - RNA, 13 nt, Human
ugggccaggagcc

SEQ ID NO: 1723135 - RNA, 18 nt, Human
ugggccagaauuucaaac

SEQ ID NO: 1723136 - RNA, 21 nt, Human
ugggcaacccccagccugcua

SEQ ID NO: 1723137 - RNA, 20 nt, Human
ugggcaacccccagccugcu

SEQ ID NO: 1723138 - RNA, 17 nt, Human
ugggcaacccccagccu

SEQ ID NO: 1723139 - RNA, 17 nt, Human
ugggccagaauuucaaa

SEQ ID NO: 1723140 - RNA, 23 nt, Human
agggcccagagaggguggugacc

SEQ ID NO: 1723141 - RNA, 15 nt, Human
agggagggcuucugc

SEQ ID NO: 1723142 - RNA, 19 nt, Human
agggagugacagaggcagc

SEQ ID NO: 1723143 - RNA, 18 nt, Human
agggagugacagaggcag

SEQ ID NO: 1723144 - RNA, 17 nt, Human
agggagugacagaggca

SEQ ID NO: 1723145 - RNA, 17 nt, Human
agggaggugaccccagg

SEQ ID NO: 1723146 - RNA, 21 nt, Human
ugggcucccuucccaccucuc

SEQ ID NO: 1723147 - RNA, 20 nt, Human
ugggcucccuucccaccucu

SEQ ID NO: 1723148 - RNA, 21 nt, Human
ugggcugcccuggugcugcca

SEQ ID NO: 1723149 - RNA, 20 nt, Human
ugggcugcccuggugcugcc

SEQ ID NO: 1723150 - RNA, 19 nt, Human
ugggcugcccuggugcugc

SEQ ID NO: 1723151 - RNA, 17 nt, Human
ugggcugcccuggugcu

SEQ ID NO: 1723152 - RNA, 19 nt, Human
ugggcucccuucccaccuc

SEQ ID NO: 1723153 - RNA, 18 nt, Human
ugggcucccuucccaccu

SEQ ID NO: 1723154 - RNA, 23 nt, Human
agggcuucugccauuucugagau

SEQ ID NO: 1723155 - RNA, 15 nt, Human
uggggaccagagcug

SEQ ID NO: 1723156 - RNA, 14 nt, Human
uggggaccagagcu

SEQ ID NO: 1723157 - RNA, 17 nt, Human
uggggacagagcagaac

SEQ ID NO: 1723158 - RNA, 18 nt, Human
uggggaccagagcugcca

SEQ ID NO: 1723159 - RNA, 17 nt, Human
uggggaccagagcugcc

SEQ ID NO: 1723160 - RNA, 13 nt, Human
uggggaccucagg

SEQ ID NO: 1723161 - RNA, 19 nt, Human
ugggcuggguucuacccag

SEQ ID NO: 1723162 - RNA, 18 nt, Human
ugggcuggguucuaccca

SEQ ID NO: 1723163 - RNA, 20 nt, Human
uggggcugcaccggcuggcc

SEQ ID NO: 1723164 - RNA, 14 nt, Human
ugggguacccacug

SEQ ID NO: 1723165 - RNA, 15 nt, Human
ugggguaugggagag

SEQ ID NO: 1723166 - RNA, 18 nt, Human
uggggucacucuggcagc

SEQ ID NO: 1723167 - RNA, 17 nt, Human
uggggucacucuggcag

SEQ ID NO: 1723168 - RNA, 16 nt, Human
ugggguacccacugcu

SEQ ID NO: 1723169 - RNA, 15 nt, Human
ugggguacccacugc

SEQ ID NO: 1723170 - RNA, 18 nt, Human
uggggcggugagagggga

SEQ ID NO: 1723171 - RNA, 23 nt, Human
uggggcuaggaaauccagggugg

SEQ ID NO: 1723172 - RNA, 16 nt, Human
uggggcccugccuccu

SEQ ID NO: 1723173 - RNA, 15 nt, Human
uggggcccugccucc

SEQ ID NO: 1723174 - RNA, 23 nt, Human
uggggaccucaggccugggggcu

SEQ ID NO: 1723175 - RNA, 12 nt, Human
uggggagaaagu

SEQ ID NO: 1723176 - RNA, 14 nt, Human
uggggcccugccuc

SEQ ID NO: 1723177 - RNA, 22 nt, Human
ugcggacagccacggccaggcc

SEQ ID NO: 1723178 - RNA, 23 nt, Human
ugcggacagccacggccaggcca

SEQ ID NO: 1723179 - RNA, 21 nt, Human
ugcggugcuaucucccccagc

SEQ ID NO: 1723180 - RNA, 17 nt, Human
ugcggugcuaucucccc

SEQ ID NO: 1723181 - RNA, 18 nt, Human
ugcgguccacccaggagc

SEQ ID NO: 1723182 - RNA, 16 nt, Human
ugcgggucacaggagg

SEQ ID NO: 1723183 - RNA, 14 nt, Human
ugcgggucacagga

SEQ ID NO: 1723184 - RNA, 17 nt, Human
ugcgggucacaggaggg

SEQ ID NO: 1723185 - RNA, 19 nt, Human
ugcggccuuuggcuucacg

SEQ ID NO: 1723186 - RNA, 17 nt, Human
ugcggccuuuggcuuca

SEQ ID NO: 1723187 - RNA, 20 nt, Human
ugcgggcuuccuccuggugu

SEQ ID NO: 1723188 - RNA, 11 nt, Human
ugcuacacacu

SEQ ID NO: 1723189 - RNA, 19 nt, Human
agcuugaccgugaggccag

SEQ ID NO: 1723190 - RNA, 18 nt, Human
agcuuguaaauagcucag

SEQ ID NO: 1723191 - RNA, 22 nt, Human
agcuugaggguugggcuggugu

SEQ ID NO: 1723192 - RNA, 18 nt, Human
agcuugaggguugggcug

SEQ ID NO: 1723193 - RNA, 14 nt, Human
agcuugaggguugg

SEQ ID NO: 1723194 - RNA, 20 nt, Human
agcugccuguucagcuccag

SEQ ID NO: 1723195 - RNA, 15 nt, Human
ugccuggauggggcu

SEQ ID NO: 1723196 - RNA, 14 nt, Human
ugccuggauggggc

SEQ ID NO: 1723197 - RNA, 22 nt, Human
agcugccuguucagcuccagcu

SEQ ID NO: 1723198 - RNA, 21 nt, Human
agcugccuguucagcuccagc

SEQ ID NO: 1723199 - RNA, 21 nt, Human
agcugcuugggcuucauccuc

SEQ ID NO: 1723200 - RNA, 22 nt, Human
agcugcuuuugucuaugggacu

SEQ ID NO: 1723201 - RNA, 21 nt, Human
agcugcuuuugucuaugggac

SEQ ID NO: 1723202 - RNA, 22 nt, Human
agcuggaucuccauucucucag

SEQ ID NO: 1723203 - RNA, 15 nt, Human
ugccucugccucuga

SEQ ID NO: 1723204 - RNA, 14 nt, Human
ugccucugccucug

SEQ ID NO: 1723205 - RNA, 13 nt, Human
ugccucugccucu

SEQ ID NO: 1723206 - RNA, 14 nt, Human
ugcccaggcagguc

SEQ ID NO: 1723207 - RNA, 13 nt, Human
ugcccaggcaggu

SEQ ID NO: 1723208 - RNA, 12 nt, Human
ugcccaggcagg

SEQ ID NO: 1723209 - RNA, 16 nt, Human
ugccugcccaggcccc

SEQ ID NO: 1723210 - RNA, 15 nt, Human
ugccugcccaggccc

SEQ ID NO: 1723211 - RNA, 14 nt, Human
ugccugcccaggcc

SEQ ID NO: 1723212 - RNA, 15 nt, Human
ugccugcccuauucu

SEQ ID NO: 1723213 - RNA, 14 nt, Human
agcuguuacugucu

SEQ ID NO: 1723214 - RNA, 20 nt, Human
ugccuguucagcuccagcuc

SEQ ID NO: 1723215 - RNA, 18 nt, Human
ugccuguucagcuccagc

SEQ ID NO: 1723216 - RNA, 14 nt, Human
agcuguucagcugg

SEQ ID NO: 1723217 - RNA, 13 nt, Human
agcuguucagcug

SEQ ID NO: 1723218 - RNA, 16 nt, Human
ugccuuauggaacacu

SEQ ID NO: 1723219 - RNA, 15 nt, Human
ugccuuauggaacac

SEQ ID NO: 1723220 - RNA, 19 nt, Human
ugccuguugggccaggagc

SEQ ID NO: 1723221 - RNA, 21 nt, Human
ugccuguucagcuccagcuca

SEQ ID NO: 1723222 - RNA, 20 nt, Human
ugccuguugggccaggagcc

SEQ ID NO: 1723223 - RNA, 15 nt, Human
agcugggacuacagg

SEQ ID NO: 1723224 - RNA, 20 nt, Human
agcugugcucuggacaggca

SEQ ID NO: 1723225 - RNA, 23 nt, Human
agcugugcucuggacaggcaugu

SEQ ID NO: 1723226 - RNA, 21 nt, Human
agcugugcucuggacaggcau

SEQ ID NO: 1723227 - RNA, 16 nt, Human
agcuguguggcagucu

SEQ ID NO: 1723228 - RNA, 14 nt, Human
agcuguguggcagu

SEQ ID NO: 1723229 - RNA, 12 nt, Human
aggaagcucagg

SEQ ID NO: 1723230 - RNA, 22 nt, Human
aggaaggaaacccagcucuggu

SEQ ID NO: 1723231 - RNA, 20 nt, Human
aggaaggaaacccagcucug

SEQ ID NO: 1723232 - RNA, 23 nt, Human
aggaaggaaacccagcucugguc

SEQ ID NO: 1723233 - RNA, 23 nt, Human
aggaagccagcaggcucucaggc

SEQ ID NO: 1723234 - RNA, 22 nt, Human
aggaagccagcaggcucucagg

SEQ ID NO: 1723235 - RNA, 21 nt, Human
aggaagccagcaggcucucag

SEQ ID NO: 1723236 - RNA, 22 nt, Human
aggaagcacaugccucucucag

SEQ ID NO: 1723237 - RNA, 20 nt, Human
aggaagccgcuggggccagu

SEQ ID NO: 1723238 - RNA, 19 nt, Human
aggaagccgcuggggccag

SEQ ID NO: 1723239 - RNA, 18 nt, Human
aggaagccgcuggggcca

SEQ ID NO: 1723240 - RNA, 19 nt, Human
aggaaaucaccgaaaacgu

SEQ ID NO: 1723241 - RNA, 15 nt, Human
aggaaaucaccgaaa

SEQ ID NO: 1723242 - RNA, 17 nt, Human
aggaagcacaugccucu

SEQ ID NO: 1723243 - RNA, 16 nt, Human
aggaagcacaugccuc

SEQ ID NO: 1723244 - RNA, 11 nt, Human
aggaagcacau

SEQ ID NO: 1723245 - RNA, 14 nt, Human
aggaaauccagggu

SEQ ID NO: 1723246 - RNA, 16 nt, Human
aggaaaggcuccagga

SEQ ID NO: 1723247 - RNA, 15 nt, Human
aggaaaggcuccagg

SEQ ID NO: 1723248 - RNA, 14 nt, Human
aggaaaggcuccag

SEQ ID NO: 1723249 - RNA, 13 nt, Human
aggaaaggcucca

SEQ ID NO: 1723250 - RNA, 16 nt, Human
ugcugacuguuuucuc

SEQ ID NO: 1723251 - RNA, 22 nt, Human
ugcugacuguacuccucccagg

SEQ ID NO: 1723252 - RNA, 21 nt, Human
ugcugacuguacuccucccag

SEQ ID NO: 1723253 - RNA, 14 nt, Human
ugcucuggacaggc

SEQ ID NO: 1723254 - RNA, 16 nt, Human
ugcucuggacaggcau

SEQ ID NO: 1723255 - RNA, 15 nt, Human
ugcucuggacaggca

SEQ ID NO: 1723256 - RNA, 17 nt, Human
ugcucuggacaggcaug

SEQ ID NO: 1723257 - RNA, 19 nt, Human
ugcugacuguacuccuccc

SEQ ID NO: 1723258 - RNA, 16 nt, Human
ugcugacuguacuccu

SEQ ID NO: 1723259 - RNA, 19 nt, Human
ugcuaucucccccagcccc

SEQ ID NO: 1723260 - RNA, 21 nt, Human
agcuuuaaugauaugcuugua

SEQ ID NO: 1723261 - RNA, 20 nt, Human
ugcuaucucccccagcccca

SEQ ID NO: 1723262 - RNA, 18 nt, Human
ugcugcccugcccaccug

SEQ ID NO: 1723263 - RNA, 17 nt, Human
ugcugcccugcccaccu

SEQ ID NO: 1723264 - RNA, 16 nt, Human
ugcugcccugcccacc

SEQ ID NO: 1723265 - RNA, 13 nt, Human
ugcugcccugccc

SEQ ID NO: 1723266 - RNA, 21 nt, Human
ugcugcccugcccaccuggcc

SEQ ID NO: 1723267 - RNA, 19 nt, Human
ugcugcccugcccaccugg

SEQ ID NO: 1723268 - RNA, 11 nt, Human
ugcugcccugu

SEQ ID NO: 1723269 - RNA, 17 nt, Human
ugcugggauuacaggug

SEQ ID NO: 1723270 - RNA, 21 nt, Human
ugcugggauuacaagcgugag

SEQ ID NO: 1723271 - RNA, 21 nt, Human
ugcuggcuguuggcugggggc

SEQ ID NO: 1723272 - RNA, 19 nt, Human
ugcuggcuguuggcugggg

SEQ ID NO: 1723273 - RNA, 19 nt, Human
ugcugggauuacaagcgug

SEQ ID NO: 1723274 - RNA, 13 nt, Human
ugcuggcugccuu

SEQ ID NO: 1723275 - RNA, 19 nt, Human
aggacacuaaccacgcugg

SEQ ID NO: 1723276 - RNA, 17 nt, Human
aggacagccccuccucc

SEQ ID NO: 1723277 - RNA, 18 nt, Human
aggacacuaaccacgcug

SEQ ID NO: 1723278 - RNA, 16 nt, Human
ugcuuccagugaggcu

SEQ ID NO: 1723279 - RNA, 23 nt, Human
ugcuucaaggauccugagccaga

SEQ ID NO: 1723280 - RNA, 21 nt, Human
ugcuucaaggauccugagcca

SEQ ID NO: 1723281 - RNA, 20 nt, Human
ugcuucaaggauccugagcc

SEQ ID NO: 1723282 - RNA, 12 nt, Human
ugcuucaaggau

SEQ ID NO: 1723283 - RNA, 17 nt, Human
ugcugucccuuacguga

SEQ ID NO: 1723284 - RNA, 15 nt, Human
ugcugucccuuuucc

SEQ ID NO: 1723285 - RNA, 19 nt, Human
ugcugucccuuacgugagu

SEQ ID NO: 1723286 - RNA, 17 nt, Human
ugcugucccuuuuccuu

SEQ ID NO: 1723287 - RNA, 13 nt, Human
ugcugugcaaaug

SEQ ID NO: 1723288 - RNA, 13 nt, Human
ugcuucaaaaaca

SEQ ID NO: 1723289 - RNA, 21 nt, Human
ugcuucaaaaacauucuuaca

SEQ ID NO: 1723290 - RNA, 17 nt, Human
aggccccgcccaggcuu

SEQ ID NO: 1723291 - RNA, 12 nt, Human
aggccccugcca

SEQ ID NO: 1723292 - RNA, 23 nt, Human
uggccagugugacaaggauugcu

SEQ ID NO: 1723293 - RNA, 19 nt, Human
uggccagguggccacucca

SEQ ID NO: 1723294 - RNA, 17 nt, Human
uggccagguggccacuc

SEQ ID NO: 1723295 - RNA, 16 nt, Human
uggccagguggccacu

SEQ ID NO: 1723296 - RNA, 23 nt, Human
uggccaaagccaaagcuaggccu

SEQ ID NO: 1723297 - RNA, 21 nt, Human
uggccaaagccaaagcuaggc

SEQ ID NO: 1723298 - RNA, 15 nt, Human
uggccagguggccac

SEQ ID NO: 1723299 - RNA, 11 nt, Human
uggccaggugg

SEQ ID NO: 1723300 - RNA, 14 nt, Human
uggccuucggccuc

SEQ ID NO: 1723301 - RNA, 18 nt, Human
aggccugggggcugggca

SEQ ID NO: 1723302 - RNA, 12 nt, Human
aggccuggggac

SEQ ID NO: 1723303 - RNA, 20 nt, Human
aggccugggggcugggcaga

SEQ ID NO: 1723304 - RNA, 21 nt, Human
uggccuggccccucagggucc

SEQ ID NO: 1723305 - RNA, 18 nt, Human
uggccuggccccucaggg

SEQ ID NO: 1723306 - RNA, 18 nt, Human
uggccugagcugggauga

SEQ ID NO: 1723307 - RNA, 13 nt, Human
uggcccacgcacu

SEQ ID NO: 1723308 - RNA, 14 nt, Human
uggcccugcccugg

SEQ ID NO: 1723309 - RNA, 13 nt, Human
uggccucuucaga

SEQ ID NO: 1723310 - RNA, 23 nt, Human
uggccgggcgcgguggcucacgc

SEQ ID NO: 1723311 - RNA, 18 nt, Human
uggcacagggcaguggga

SEQ ID NO: 1723312 - RNA, 14 nt, Human
aggccagagggagu

SEQ ID NO: 1723313 - RNA, 19 nt, Human
aggccacaagacccuugug

SEQ ID NO: 1723314 - RNA, 18 nt, Human
aggccacaagacccuugu

SEQ ID NO: 1723315 - RNA, 17 nt, Human
aggccacaagacccuug

SEQ ID NO: 1723316 - RNA, 19 nt, Human
uggcagcucaccucucccu

SEQ ID NO: 1723317 - RNA, 16 nt, Human
aggccacaagacccuu

SEQ ID NO: 1723318 - RNA, 15 nt, Human
uggcagcucaccucu

SEQ ID NO: 1723319 - RNA, 17 nt, Human
uggcagccuuggcaaac

SEQ ID NO: 1723320 - RNA, 21 nt, Human
aggcccagagggccugcaagg

SEQ ID NO: 1723321 - RNA, 20 nt, Human
aggccagagggagugacaga

SEQ ID NO: 1723322 - RNA, 16 nt, Human
aggccccgcccaggcu

SEQ ID NO: 1723323 - RNA, 20 nt, Human
uggagguacgaaaagagggg

SEQ ID NO: 1723324 - RNA, 16 nt, Human
aggccaaggugggagg

SEQ ID NO: 1723325 - RNA, 20 nt, Human
aggccaaaggaagcacaugc

SEQ ID NO: 1723326 - RNA, 19 nt, Human
aggccaaaggaagcacaug

SEQ ID NO: 1723327 - RNA, 18 nt, Human
aggccaaaggaagcacau

SEQ ID NO: 1723328 - RNA, 16 nt, Human
aggccaaaggaagcac

SEQ ID NO: 1723329 - RNA, 17 nt, Human
aggcagccccauucugc

SEQ ID NO: 1723330 - RNA, 16 nt, Human
aggcagccccauucug

SEQ ID NO: 1723331 - RNA, 14 nt, Human
uggaguauauguca

SEQ ID NO: 1723332 - RNA, 15 nt, Human
uggauggaaggggcu

SEQ ID NO: 1723333 - RNA, 13 nt, Human
uggauuguccccg

SEQ ID NO: 1723334 - RNA, 21 nt, Human
uggauuguccccgacccuugc

SEQ ID NO: 1723335 - RNA, 13 nt, Human
uggauuggauuug

SEQ ID NO: 1723336 - RNA, 17 nt, Human
uggauuauauuaugaag

SEQ ID NO: 1723337 - RNA, 18 nt, Human
aggaucucuugagccugg

SEQ ID NO: 1723338 - RNA, 17 nt, Human
aggaucucuugagccug

SEQ ID NO: 1723339 - RNA, 19 nt, Human
aggaucucuugagccuggg

SEQ ID NO: 1723340 - RNA, 14 nt, Human
uggacacagcucuu

SEQ ID NO: 1723341 - RNA, 13 nt, Human
uggacacagcucu

SEQ ID NO: 1723342 - RNA, 22 nt, Human
uggacacagcucuucuccaggc

SEQ ID NO: 1723343 - RNA, 20 nt, Human
uggaccuugaacuggguacu

SEQ ID NO: 1723344 - RNA, 23 nt, Human
uggacccuguggaugauaaaaca

SEQ ID NO: 1723345 - RNA, 21 nt, Human
uggacccugaggcccagaggg

SEQ ID NO: 1723346 - RNA, 20 nt, Human
uggacccugaggcccagagg

SEQ ID NO: 1723347 - RNA, 19 nt, Human
uggacccugaggcccagag

SEQ ID NO: 1723348 - RNA, 18 nt, Human
uggacccugaggcccaga

SEQ ID NO: 1723349 - RNA, 16 nt, Human
uggacccugaggccca

SEQ ID NO: 1723350 - RNA, 23 nt, Human
uggacacagcucuucuccaggcu

SEQ ID NO: 1723351 - RNA, 13 nt, Human
aggcaaucauggu

SEQ ID NO: 1723352 - RNA, 22 nt, Human
aggcacccaccaucaugucugg

SEQ ID NO: 1723353 - RNA, 21 nt, Human
aggcacccaccaucaugucug

SEQ ID NO: 1723354 - RNA, 20 nt, Human
aggcacccaccaucaugucu

SEQ ID NO: 1723355 - RNA, 14 nt, Human
aggcaaugcuggcu

SEQ ID NO: 1723356 - RNA, 20 nt, Human
aggcaccuaccaccacgccc

SEQ ID NO: 1723357 - RNA, 22 nt, Human
uggagaagcggcuggcagccca

SEQ ID NO: 1723358 - RNA, 13 nt, Human
uggagaagcggcu

SEQ ID NO: 1723359 - RNA, 14 nt, Human
uggagaacuagaga

SEQ ID NO: 1723360 - RNA, 15 nt, Human
uggacugugugcuca

SEQ ID NO: 1723361 - RNA, 18 nt, Human
uggaaaugggcagagcag

SEQ ID NO: 1723362 - RNA, 17 nt, Human
uggaaaugggcagagca

SEQ ID NO: 1723363 - RNA, 16 nt, Human
uggaagcacagcuuca

SEQ ID NO: 1723364 - RNA, 18 nt, Human
uggaaguacuauaauuua

SEQ ID NO: 1723365 - RNA, 23 nt, Human
uggaaggggacacgugacagccg

SEQ ID NO: 1723366 - RNA, 14 nt, Human
aggauccugagcca

SEQ ID NO: 1723367 - RNA, 13 nt, Human
aggauccugagcc

SEQ ID NO: 1723368 - RNA, 21 nt, Human
ugcuugaggcaacucaucuua

SEQ ID NO: 1723369 - RNA, 16 nt, Human
ugcuuggaggaaggaa

SEQ ID NO: 1723370 - RNA, 15 nt, Human
ugcuuggaggaagga

SEQ ID NO: 1723371 - RNA, 14 nt, Human
ugcuuggaggaagg

SEQ ID NO: 1723372 - RNA, 12 nt, Human
ugcuuguacaua

SEQ ID NO: 1723373 - RNA, 13 nt, Human
ugcuuguacauaa

SEQ ID NO: 1723374 - RNA, 15 nt, Human
ugcuuguaacuaaaa

SEQ ID NO: 1723375 - RNA, 17 nt, Human
ugcuuuuggucugugug

SEQ ID NO: 1723376 - RNA, 14 nt, Human
ugcuuuuggucugu

SEQ ID NO: 1723377 - RNA, 17 nt, Human
ugcuuugugauuuuugu

SEQ ID NO: 1723378 - RNA, 14 nt, Human
ugcuuguacauaau

SEQ ID NO: 1723379 - RNA, 16 nt, Human
ugcuuguacauaaugc

SEQ ID NO: 1723380 - RNA, 22 nt, Human
ugcuuguacauaaugcgugcau

SEQ ID NO: 1723381 - RNA, 12 nt, Human
ugcuuugugauu

SEQ ID NO: 1723382 - RNA, 14 nt, Human
ugcuuugugauuuu

SEQ ID NO: 1723383 - RNA, 16 nt, Human
ugcuuugugauuuuug

SEQ ID NO: 1723384 - RNA, 23 nt, Human
ugcacuauagccuaggugacaga

SEQ ID NO: 1723385 - RNA, 23 nt, Human
agcccuucuaccuuccugcaaca

SEQ ID NO: 1723386 - RNA, 13 nt, Human
agccguggcuucc

SEQ ID NO: 1723387 - RNA, 21 nt, Human
agccguggcuucccgcucagc

SEQ ID NO: 1723388 - RNA, 14 nt, Human
agccguggcuuccc

SEQ ID NO: 1723389 - RNA, 19 nt, Human
agccguuuguuccccaaga

SEQ ID NO: 1723390 - RNA, 23 nt, Human
agccguggcuucccgcucagccc

SEQ ID NO: 1723391 - RNA, 22 nt, Human
agccguggcuucccgcucagcc

SEQ ID NO: 1723392 - RNA, 20 nt, Human
agccucauguccacugguuc

SEQ ID NO: 1723393 - RNA, 20 nt, Human
agccuccaugcugccuccag

SEQ ID NO: 1723394 - RNA, 18 nt, Human
agccuccaugcugccucc

SEQ ID NO: 1723395 - RNA, 16 nt, Human
agccucccaaagugcu

SEQ ID NO: 1723396 - RNA, 15 nt, Human
agccucauguccacu

SEQ ID NO: 1723397 - RNA, 12 nt, Human
agccucaucucu

SEQ ID NO: 1723398 - RNA, 23 nt, Human
agccucagcauccuggcacccgg

SEQ ID NO: 1723399 - RNA, 22 nt, Human
agccucagcauccuggcacccg

SEQ ID NO: 1723400 - RNA, 21 nt, Human
agccucagcauccuggcaccc

SEQ ID NO: 1723401 - RNA, 20 nt, Human
agccucagcauccuggcacc

SEQ ID NO: 1723402 - RNA, 19 nt, Human
agccucagcauccuggcac

SEQ ID NO: 1723403 - RNA, 17 nt, Human
agccucagcauccuggc

SEQ ID NO: 1723404 - RNA, 22 nt, Human
agccugaaagaggaaugaagua

SEQ ID NO: 1723405 - RNA, 17 nt, Human
agccucccaaagugcug

SEQ ID NO: 1723406 - RNA, 15 nt, Human
ugcagccucacaguc

SEQ ID NO: 1723407 - RNA, 13 nt, Human
ugcagccucacag

SEQ ID NO: 1723408 - RNA, 16 nt, Human
ugcagccucacagucc

SEQ ID NO: 1723409 - RNA, 17 nt, Human
ugcagccucacaguccu

SEQ ID NO: 1723410 - RNA, 17 nt, Human
ugcauaaguuaacuucc

SEQ ID NO: 1723411 - RNA, 14 nt, Human
ugcauaaguuaacu

SEQ ID NO: 1723412 - RNA, 22 nt, Human
ugcauaacguauaaaagccugu

SEQ ID NO: 1723413 - RNA, 23 nt, Human
ugcauaacguauaaaagccuguu

SEQ ID NO: 1723414 - RNA, 16 nt, Human
ugcaggucccuaauaa

SEQ ID NO: 1723415 - RNA, 15 nt, Human
ugcaggucccuaaua

SEQ ID NO: 1723416 - RNA, 14 nt, Human
ugcaggucccuaau

SEQ ID NO: 1723417 - RNA, 12 nt, Human
ugcaggucccua

SEQ ID NO: 1723418 - RNA, 18 nt, Human
ugcaguacuuuaccuccu

SEQ ID NO: 1723419 - RNA, 18 nt, Human
agccccuggaugcagccu

SEQ ID NO: 1723420 - RNA, 17 nt, Human
agccccuggaugcagcc

SEQ ID NO: 1723421 - RNA, 19 nt, Human
agccccuggaugcagccuc

SEQ ID NO: 1723422 - RNA, 22 nt, Human
agccccuggaugcagccucaca

SEQ ID NO: 1723423 - RNA, 16 nt, Human
agccccgaggccuucu

SEQ ID NO: 1723424 - RNA, 22 nt, Human
agccccgaggccuucucugaag

SEQ ID NO: 1723425 - RNA, 17 nt, Human
agccccgaggccuucuc

SEQ ID NO: 1723426 - RNA, 24 nt, Human
agccccaaaacucuccucugcugc

SEQ ID NO: 1723427 - RNA, 18 nt, Human
agcccauggcacucuaug

SEQ ID NO: 1723428 - RNA, 20 nt, Human
agccccaaaacucuccucug

SEQ ID NO: 1723429 - RNA, 22 nt, Human
agccccaaaacucuccucugcu

SEQ ID NO: 1723430 - RNA, 21 nt, Human
agccccaaaacucuccucugc

SEQ ID NO: 1723431 - RNA, 20 nt, Human
ugauucuccugccucagccu

SEQ ID NO: 1723432 - RNA, 19 nt, Human
ugauucuccugccucagcc

SEQ ID NO: 1723433 - RNA, 15 nt, Human
ugauucuccugccuc

SEQ ID NO: 1723434 - RNA, 21 nt, Human
ugcacaagcugcacccucagg

SEQ ID NO: 1723435 - RNA, 18 nt, Human
ugcacaagcugcacccuc

SEQ ID NO: 1723436 - RNA, 24 nt, Human
ugcacacagcacgggggccaagga

SEQ ID NO: 1723437 - RNA, 12 nt, Human
ugcacacagcac

SEQ ID NO: 1723438 - RNA, 23 nt, Human
agcccugguggcagugggagcug

SEQ ID NO: 1723439 - RNA, 22 nt, Human
agcccugguggcagugggagcu

SEQ ID NO: 1723440 - RNA, 15 nt, Human
ugcacaagcugcacc

SEQ ID NO: 1723441 - RNA, 24 nt, Human
agccccuucugacccaugcugccc

SEQ ID NO: 1723442 - RNA, 20 nt, Human
agccccuucugacccaugcu

SEQ ID NO: 1723443 - RNA, 21 nt, Human
agcccugcuuugggcugcccu

SEQ ID NO: 1723444 - RNA, 23 nt, Human
agcccugcuuugggcugcccugg

SEQ ID NO: 1723445 - RNA, 22 nt, Human
agcccugcuuugggcugcccug

SEQ ID NO: 1723446 - RNA, 21 nt, Human
agcccugguggcagugggagc

SEQ ID NO: 1723447 - RNA, 17 nt, Human
ugcacccucaggcaggu

SEQ ID NO: 1723448 - RNA, 16 nt, Human
ugcacccucaggcagg

SEQ ID NO: 1723449 - RNA, 15 nt, Human
ugcacgugugugcac

SEQ ID NO: 1723450 - RNA, 14 nt, Human
ugcacgugugugca

SEQ ID NO: 1723451 - RNA, 10 nt, Human
ugcacacauu

SEQ ID NO: 1723452 - RNA, 20 nt, Human
ugcacacauuuuuuaaaugc

SEQ ID NO: 1723453 - RNA, 20 nt, Human
agcucauucuccuuguguua

SEQ ID NO: 1723454 - RNA, 21 nt, Human
agcucauucuccuuguguuac

SEQ ID NO: 1723455 - RNA, 21 nt, Human
ugcccaagaauagaugcugac

SEQ ID NO: 1723456 - RNA, 23 nt, Human
ugcccaagaauagaugcugacug

SEQ ID NO: 1723457 - RNA, 22 nt, Human
ugcccaagaauagaugcugacu

SEQ ID NO: 1723458 - RNA, 19 nt, Human
ugcccacaggaucagucug

SEQ ID NO: 1723459 - RNA, 20 nt, Human
ugcccacaggaucagucuga

SEQ ID NO: 1723460 - RNA, 20 nt, Human
ugcccagccccuucugaccc

SEQ ID NO: 1723461 - RNA, 21 nt, Human
ugcccagccccuucugaccca

SEQ ID NO: 1723462 - RNA, 21 nt, Human
agcucaggugucccugcacuu

SEQ ID NO: 1723463 - RNA, 20 nt, Human
agcucaggugucccugcacu

SEQ ID NO: 1723464 - RNA, 22 nt, Human
agcucaggugucccugcacuug

SEQ ID NO: 1723465 - RNA, 18 nt, Human
agcucaggugucccugca

SEQ ID NO: 1723466 - RNA, 15 nt, Human
agcuaggccuggcca

SEQ ID NO: 1723467 - RNA, 14 nt, Human
agcuaggccuggcc

SEQ ID NO: 1723468 - RNA, 16 nt, Human
agcuaggccuggccag

SEQ ID NO: 1723469 - RNA, 12 nt, Human
agcuaggccugg

SEQ ID NO: 1723470 - RNA, 18 nt, Human
agcuaggaauuguguuua

SEQ ID NO: 1723471 - RNA, 19 nt, Human
agcuacuaauuuuaaaaug

SEQ ID NO: 1723472 - RNA, 15 nt, Human
agcgugcauaaguua

SEQ ID NO: 1723473 - RNA, 22 nt, Human
agcgugagccacugcaccgggc

SEQ ID NO: 1723474 - RNA, 19 nt, Human
agcgugagccacugcaccg

SEQ ID NO: 1723475 - RNA, 23 nt, Human
ugccacacuucaggcucuucucc

SEQ ID NO: 1723476 - RNA, 22 nt, Human
ugccacacuucaggcucuucuc

SEQ ID NO: 1723477 - RNA, 18 nt, Human
agcuagacgagcaggcuu

SEQ ID NO: 1723478 - RNA, 17 nt, Human
agcuacuugggaggcug

SEQ ID NO: 1723479 - RNA, 18 nt, Human
agcuacuugggaggcuga

SEQ ID NO: 1723480 - RNA, 11 nt, Human
agcuagaaaug

SEQ ID NO: 1723481 - RNA, 12 nt, Human
agcuagaaauga

SEQ ID NO: 1723482 - RNA, 12 nt, Human
ugcauaccacuu

SEQ ID NO: 1723483 - RNA, 17 nt, Human
agccugcuccagcuguu

SEQ ID NO: 1723484 - RNA, 16 nt, Human
agccugcuccagcugu

SEQ ID NO: 1723485 - RNA, 15 nt, Human
agccugcuccagcug

SEQ ID NO: 1723486 - RNA, 14 nt, Human
ugcauaccacuuuu

SEQ ID NO: 1723487 - RNA, 22 nt, Human
agccugcuccagcuguucagcu

SEQ ID NO: 1723488 - RNA, 19 nt, Human
agccugcuccagcuguuca

SEQ ID NO: 1723489 - RNA, 22 nt, Human
agccugggugacagagcaagug

SEQ ID NO: 1723490 - RNA, 21 nt, Human
agccugugccucugggacugg

SEQ ID NO: 1723491 - RNA, 13 nt, Human
agccuguuuaaga

SEQ ID NO: 1723492 - RNA, 22 nt, Human
ugccaauaauaauaccucccuu

SEQ ID NO: 1723493 - RNA, 21 nt, Human
ugccaauaauaauaccucccu

SEQ ID NO: 1723494 - RNA, 16 nt, Human
ugccacacuucaggcu

SEQ ID NO: 1723495 - RNA, 15 nt, Human
ugccacacuucaggc

SEQ ID NO: 1723496 - RNA, 14 nt, Human
ugccacacuucagg

SEQ ID NO: 1723497 - RNA, 13 nt, Human
ugccacacuucag

SEQ ID NO: 1723498 - RNA, 21 nt, Human
ugcauuaucuagauacuguau

SEQ ID NO: 1723499 - RNA, 22 nt, Human
ugcauuaucuagauacuguauc

SEQ ID NO: 1723500 - RNA, 17 nt, Human
agccuuccagggguggg

SEQ ID NO: 1723501 - RNA, 16 nt, Human
agccuuccaggggugg

SEQ ID NO: 1723502 - RNA, 14 nt, Human
agccuuccaggggu

SEQ ID NO: 1723503 - RNA, 11 nt, Human
agccuuccagg

SEQ ID NO: 1723504 - RNA, 18 nt, Human
agcggagacggaguccca

SEQ ID NO: 1723505 - RNA, 20 nt, Human
agcggagaaaggaagggcug

SEQ ID NO: 1723506 - RNA, 20 nt, Human
ugcauuaucuagauacugua

SEQ ID NO: 1723507 - RNA, 16 nt, Human
agcggagaaaggaagg

SEQ ID NO: 1723508 - RNA, 23 nt, Human
agccaguaaaugggggugcauuu

SEQ ID NO: 1723509 - RNA, 22 nt, Human
agccaggccacaagacccuugu

SEQ ID NO: 1723510 - RNA, 21 nt, Human
agccaggccacaagacccuug

SEQ ID NO: 1723511 - RNA, 12 nt, Human
agccagggucuc

SEQ ID NO: 1723512 - RNA, 14 nt, Human
agccaggccacaag

SEQ ID NO: 1723513 - RNA, 12 nt, Human
agccaggccaca

SEQ ID NO: 1723514 - RNA, 21 nt, Human
agcccaggaaaggcuccagga

SEQ ID NO: 1723515 - RNA, 20 nt, Human
agcccaggaaaggcuccagg

SEQ ID NO: 1723516 - RNA, 19 nt, Human
agcccaggaaaggcuccag

SEQ ID NO: 1723517 - RNA, 23 nt, Human
agcccaggaaaggcuccaggagc

SEQ ID NO: 1723518 - RNA, 22 nt, Human
agcccaggaaaggcuccaggag

SEQ ID NO: 1723519 - RNA, 24 nt, Human
agcccaggaaaggcuccaggagca

SEQ ID NO: 1723520 - RNA, 14 nt, Human
ugauucagcucugc

SEQ ID NO: 1723521 - RNA, 13 nt, Human
ugauucagcucug

SEQ ID NO: 1723522 - RNA, 15 nt, Human
ugauucauaaugacu

SEQ ID NO: 1723523 - RNA, 18 nt, Human
ugauucccaagcucugcu

SEQ ID NO: 1723524 - RNA, 16 nt, Human
ugauucccaagcucug

SEQ ID NO: 1723525 - RNA, 15 nt, Human
ugauucccaagcucu

SEQ ID NO: 1723526 - RNA, 21 nt, Human
ugauucccaagcucugcuccu

SEQ ID NO: 1723527 - RNA, 19 nt, Human
ugauucccaagcucugcuc

SEQ ID NO: 1723528 - RNA, 17 nt, Human
ugauguuuuaaggaugc

SEQ ID NO: 1723529 - RNA, 18 nt, Human
ugauguuuuaaggaugcu

SEQ ID NO: 1723530 - RNA, 16 nt, Human
ugauggugcaaugacc

SEQ ID NO: 1723531 - RNA, 23 nt, Human
ugauggugcaaugaccuuucaau

SEQ ID NO: 1723532 - RNA, 17 nt, Human
ugauggugcaaugaccu

SEQ ID NO: 1723533 - RNA, 20 nt, Human
ugaugauccuaggcauuugc

SEQ ID NO: 1723534 - RNA, 14 nt, Human
ugaugauccuaggc

SEQ ID NO: 1723535 - RNA, 22 nt, Human
agccacugcaccgggccacaga

SEQ ID NO: 1723536 - RNA, 21 nt, Human
agccacugcaccgggccacag

SEQ ID NO: 1723537 - RNA, 13 nt, Human
agccacugcaccg

SEQ ID NO: 1723538 - RNA, 12 nt, Human
ugauuaaaccaa

SEQ ID NO: 1723539 - RNA, 15 nt, Human
ugauuaauuaaaaca

SEQ ID NO: 1723540 - RNA, 15 nt, Human
ugauuaaagaugagc

SEQ ID NO: 1723541 - RNA, 22 nt, Human
ugauuaaagaugagcuuugucu

SEQ ID NO: 1723542 - RNA, 14 nt, Human
ugauuaccagggac

SEQ ID NO: 1723543 - RNA, 15 nt, Human
agccacggccaggcc

SEQ ID NO: 1723544 - RNA, 18 nt, Human
ugauccuuuuggagucag

SEQ ID NO: 1723545 - RNA, 14 nt, Human
ugaugaagaggagu

SEQ ID NO: 1723546 - RNA, 13 nt, Human
ugaugaagaggag

SEQ ID NO: 1723547 - RNA, 18 nt, Human
agccacauuccugaugcu

SEQ ID NO: 1723548 - RNA, 14 nt, Human
agccacauuccuga

SEQ ID NO: 1723549 - RNA, 23 nt, Human
agccaccaacauacucccaucug

SEQ ID NO: 1723550 - RNA, 20 nt, Human
agccaccaacauacucccau

SEQ ID NO: 1723551 - RNA, 19 nt, Human
agccaccaacauacuccca

SEQ ID NO: 1723552 - RNA, 14 nt, Human
agccacggccaggc

SEQ ID NO: 1723553 - RNA, 18 nt, Human
agccaccgugccuggcca

SEQ ID NO: 1723554 - RNA, 22 nt, Human
ugaguaacugauuuguaacaag

SEQ ID NO: 1723555 - RNA, 15 nt, Human
ugaguacuacagucc

SEQ ID NO: 1723556 - RNA, 16 nt, Human
agcauauucaggaagc

SEQ ID NO: 1723557 - RNA, 14 nt, Human
agcauauucaggaa

SEQ ID NO: 1723558 - RNA, 13 nt, Human
ugaguagcuggga

SEQ ID NO: 1723559 - RNA, 13 nt, Human
ugaguagcuggau

SEQ ID NO: 1723560 - RNA, 23 nt, Human
ugaguacuacaguccucccaucu

SEQ ID NO: 1723561 - RNA, 22 nt, Human
ugaguacuacaguccucccauc

SEQ ID NO: 1723562 - RNA, 21 nt, Human
ugaguacuacaguccucccau

SEQ ID NO: 1723563 - RNA, 17 nt, Human
ugaguacuacaguccuc

SEQ ID NO: 1723564 - RNA, 15 nt, Human
agcauacguacacau

SEQ ID NO: 1723565 - RNA, 21 nt, Human
agcauaauacuugcuuuggaa

SEQ ID NO: 1723566 - RNA, 12 nt, Human
ugagaauuaccc

SEQ ID NO: 1723567 - RNA, 16 nt, Human
agcauacguacacauu

SEQ ID NO: 1723568 - RNA, 17 nt, Human
agcauacguacacauuu

SEQ ID NO: 1723569 - RNA, 18 nt, Human
agcauacguacacauuuu

SEQ ID NO: 1723570 - RNA, 19 nt, Human
agcauacguacacauuuua

SEQ ID NO: 1723571 - RNA, 20 nt, Human
agcauacguacacauuuuau

SEQ ID NO: 1723572 - RNA, 21 nt, Human
agcauacguacacauuuuauu

SEQ ID NO: 1723573 - RNA, 20 nt, Human
ugauaagaaccuuuugagug

SEQ ID NO: 1723574 - RNA, 17 nt, Human
ugaguucauacccuguu

SEQ ID NO: 1723575 - RNA, 18 nt, Human
ugaguucauacccuguua

SEQ ID NO: 1723576 - RNA, 14 nt, Human
ugauacuacaguuu

SEQ ID NO: 1723577 - RNA, 17 nt, Human
ugauacuacaguuuguu

SEQ ID NO: 1723578 - RNA, 20 nt, Human
ugauacaaugcugugcccua

SEQ ID NO: 1723579 - RNA, 21 nt, Human
ugauacaaugcugugcccuaa

SEQ ID NO: 1723580 - RNA, 21 nt, Human
ugagugggugaauaauacagu

SEQ ID NO: 1723581 - RNA, 20 nt, Human
ugagugccuuacacaauggu

SEQ ID NO: 1723582 - RNA, 17 nt, Human
ugagugccuuacacaau

SEQ ID NO: 1723583 - RNA, 17 nt, Human
ugagucaccaagcccag

SEQ ID NO: 1723584 - RNA, 16 nt, Human
ugagucaccaagccca

SEQ ID NO: 1723585 - RNA, 14 nt, Human
ugagucaccaagcc

SEQ ID NO: 1723586 - RNA, 17 nt, Human
agcaugucgucaaagcu

SEQ ID NO: 1723587 - RNA, 20 nt, Human
agcaugucgucaaagcugaa

SEQ ID NO: 1723588 - RNA, 12 nt, Human
agcauggcugcc

SEQ ID NO: 1723589 - RNA, 20 nt, Human
agcaucaggccaggcccucu

SEQ ID NO: 1723590 - RNA, 19 nt, Human
agcaucaggccaggcccuc

SEQ ID NO: 1723591 - RNA, 18 nt, Human
agcaucaggccaggcccu

SEQ ID NO: 1723592 - RNA, 17 nt, Human
agcaucaggccaggccc

SEQ ID NO: 1723593 - RNA, 16 nt, Human
agcaucaggccaggcc

SEQ ID NO: 1723594 - RNA, 14 nt, Human
agcaucaggccagg

SEQ ID NO: 1723595 - RNA, 17 nt, Human
agcauuguaaaagcauu

SEQ ID NO: 1723596 - RNA, 19 nt, Human
ugaucacggcucacugcag

SEQ ID NO: 1723597 - RNA, 20 nt, Human
agcaucacaugaacuuguaa

SEQ ID NO: 1723598 - RNA, 13 nt, Human
agcaucaggccag

SEQ ID NO: 1723599 - RNA, 21 nt, Human
ugaucacggcucacugcagcc

SEQ ID NO: 1723600 - RNA, 20 nt, Human
ugaucacggcucacugcagc

SEQ ID NO: 1723601 - RNA, 22 nt, Human
agcauauucaggaagcucaggg

SEQ ID NO: 1723602 - RNA, 19 nt, Human
ugauauguugguagauucu

SEQ ID NO: 1723603 - RNA, 23 nt, Human
ugauauuuucaacgcagcccugc

SEQ ID NO: 1723604 - RNA, 22 nt, Human
ugauauuuucaacgcagcccug

SEQ ID NO: 1723605 - RNA, 21 nt, Human
ugauauuuucaacgcagcccu

SEQ ID NO: 1723606 - RNA, 19 nt, Human
ugauauuuucaacgcagcc

SEQ ID NO: 1723607 - RNA, 13 nt, Human
ugacuuacuguac

SEQ ID NO: 1723608 - RNA, 15 nt, Human
ugacuuacuguacau

SEQ ID NO: 1723609 - RNA, 16 nt, Human
ugacuuacuguacaug

SEQ ID NO: 1723610 - RNA, 19 nt, Human
ugaccugaggcccuucucu

SEQ ID NO: 1723611 - RNA, 18 nt, Human
ugaccugaggcccuucuc

SEQ ID NO: 1723612 - RNA, 14 nt, Human
ugaccuuaaaugca

SEQ ID NO: 1723613 - RNA, 16 nt, Human
ugaccuuaaaugcaac

SEQ ID NO: 1723614 - RNA, 15 nt, Human
ugacccaugcugccc

SEQ ID NO: 1723615 - RNA, 14 nt, Human
ugacccaugcugcc

SEQ ID NO: 1723616 - RNA, 21 nt, Human
ugacccaugcugcccugugag

SEQ ID NO: 1723617 - RNA, 16 nt, Human
ugacccaugcugcccu

SEQ ID NO: 1723618 - RNA, 13 nt, Human
agauuaagaaaua

SEQ ID NO: 1723619 - RNA, 16 nt, Human
agaugccgcauuugga

SEQ ID NO: 1723620 - RNA, 23 nt, Human
agaugcugacuguacuccuccca

SEQ ID NO: 1723621 - RNA, 20 nt, Human
agaugcugacuguacuccuc

SEQ ID NO: 1723622 - RNA, 17 nt, Human
ugacacuuaaaaauggu

SEQ ID NO: 1723623 - RNA, 16 nt, Human
ugacacuuaaaaaugg

SEQ ID NO: 1723624 - RNA, 21 nt, Human
agauuuugaaauuuuuauuaa

SEQ ID NO: 1723625 - RNA, 20 nt, Human
agauuucucauuugccaaua

SEQ ID NO: 1723626 - RNA, 17 nt, Human
agauuugaacucuucaa

SEQ ID NO: 1723627 - RNA, 22 nt, Human
agauucauauuuacuucuuaua

SEQ ID NO: 1723628 - RNA, 18 nt, Human
agauuccagagaguggcu

SEQ ID NO: 1723629 - RNA, 19 nt, Human
ugacuuacuguacaugaaa

SEQ ID NO: 1723630 - RNA, 19 nt, Human
agauuccagagaguggcuc

SEQ ID NO: 1723631 - RNA, 13 nt, Human
agauuggaaggaa

SEQ ID NO: 1723632 - RNA, 16 nt, Human
agcaagacgcugugcu

SEQ ID NO: 1723633 - RNA, 13 nt, Human
agcaagacgcugu

SEQ ID NO: 1723634 - RNA, 20 nt, Human
ugagaagcagaggaaggaga

SEQ ID NO: 1723635 - RNA, 14 nt, Human
agcaagauuucaga

SEQ ID NO: 1723636 - RNA, 22 nt, Human
agcaagacgcugugcugcccug

SEQ ID NO: 1723637 - RNA, 21 nt, Human
agcaagacgcugugcugcccu

SEQ ID NO: 1723638 - RNA, 20 nt, Human
agcaagacgcugugcugccc

SEQ ID NO: 1723639 - RNA, 17 nt, Human
agcaagacgcugugcug

SEQ ID NO: 1723640 - RNA, 23 nt, Human
agcaagacgcugugcugcccugc

SEQ ID NO: 1723641 - RNA, 23 nt, Human
ugaauuugugaagguggaaauaa

SEQ ID NO: 1723642 - RNA, 23 nt, Human
ugaauuucuuuugccguuauuaa

SEQ ID NO: 1723643 - RNA, 21 nt, Human
ugaauuugugaagguggaaau

SEQ ID NO: 1723644 - RNA, 13 nt, Human
ugaauuugugaag

SEQ ID NO: 1723645 - RNA, 12 nt, Human
ugacacaugcaa

SEQ ID NO: 1723646 - RNA, 20 nt, Human
ugacacaugcaaggucauuu

SEQ ID NO: 1723647 - RNA, 18 nt, Human
ugacacacagcucugucc

SEQ ID NO: 1723648 - RNA, 16 nt, Human
ugacacacagcucugu

SEQ ID NO: 1723649 - RNA, 19 nt, Human
ugacaaagacugaguacgu

SEQ ID NO: 1723650 - RNA, 20 nt, Human
ugacacacagcucuguccug

SEQ ID NO: 1723651 - RNA, 19 nt, Human
ugacacacagcucuguccu

SEQ ID NO: 1723652 - RNA, 22 nt, Human
ugacacagucuuggcucacugc

SEQ ID NO: 1723653 - RNA, 23 nt, Human
ugacacagucuuggcucacugca

SEQ ID NO: 1723654 - RNA, 17 nt, Human
agauaaggguaucuggu

SEQ ID NO: 1723655 - RNA, 15 nt, Human
agagucacuggaaca

SEQ ID NO: 1723656 - RNA, 22 nt, Human
agagucagaaguuucugccgca

SEQ ID NO: 1723657 - RNA, 17 nt, Human
agaguuguuacauuuuu

SEQ ID NO: 1723658 - RNA, 21 nt, Human
agaguuguuacauuuuuaagu

SEQ ID NO: 1723659 - RNA, 19 nt, Human
agaguuguuacauuuuuaa

SEQ ID NO: 1723660 - RNA, 20 nt, Human
agaguuguuacauuuuuaag

SEQ ID NO: 1723661 - RNA, 11 nt, Human
agauacuguau

SEQ ID NO: 1723662 - RNA, 22 nt, Human
agauacaguuacucagaauucu

SEQ ID NO: 1723663 - RNA, 22 nt, Human
agauaauauuaaggaagacaau

SEQ ID NO: 1723664 - RNA, 18 nt, Human
agauaauauuaaggaaga

SEQ ID NO: 1723665 - RNA, 20 nt, Human
agauacaggaaaagcugcug

SEQ ID NO: 1723666 - RNA, 13 nt, Human
agauacaguuacu

SEQ ID NO: 1723667 - RNA, 20 nt, Human
agauauuuugcuuugugauu

SEQ ID NO: 1723668 - RNA, 21 nt, Human
agauauuuugcuuugugauuu

SEQ ID NO: 1723669 - RNA, 18 nt, Human
agaucaaaagguuaauaa

SEQ ID NO: 1723670 - RNA, 15 nt, Human
agauacuguaucaug

SEQ ID NO: 1723671 - RNA, 16 nt, Human
agauacuguaucauga

SEQ ID NO: 1723672 - RNA, 14 nt, Human
ugaagucacugcac

SEQ ID NO: 1723673 - RNA, 14 nt, Human
ugaagucacacagu

SEQ ID NO: 1723674 - RNA, 16 nt, Human
ugaauaaagacaccua

SEQ ID NO: 1723675 - RNA, 21 nt, Human
ugaagucacugcacagugcau

SEQ ID NO: 1723676 - RNA, 16 nt, Human
ugaagucacugcacag

SEQ ID NO: 1723677 - RNA, 15 nt, Human
ugaagucacugcaca

SEQ ID NO: 1723678 - RNA, 15 nt, Human
ugaauacuuuauaaa

SEQ ID NO: 1723679 - RNA, 18 nt, Human
ugaauauuuaguguucau

SEQ ID NO: 1723680 - RNA, 16 nt, Human
ugaauauugccauuau

SEQ ID NO: 1723681 - RNA, 18 nt, Human
ugaauauugccauuaugc

SEQ ID NO: 1723682 - RNA, 16 nt, Human
agagguggggagcaga

SEQ ID NO: 1723683 - RNA, 15 nt, Human
agagguuaagguggg

SEQ ID NO: 1723684 - RNA, 12 nt, Human
ugaagccuuugu

SEQ ID NO: 1723685 - RNA, 20 nt, Human
ugaagcuaucguaaaauuaa

SEQ ID NO: 1723686 - RNA, 16 nt, Human
agagggagggagggcu

SEQ ID NO: 1723687 - RNA, 20 nt, Human
agagggagggagggcuccag

SEQ ID NO: 1723688 - RNA, 14 nt, Human
agaggcugucuguu

SEQ ID NO: 1723689 - RNA, 21 nt, Human
ucuuccaggcugggagagccu

SEQ ID NO: 1723690 - RNA, 20 nt, Human
ucuuccaggcugggagagcc

SEQ ID NO: 1723691 - RNA, 17 nt, Human
ucuuccaggcugggaga

SEQ ID NO: 1723692 - RNA, 15 nt, Human
ucuuccaggcuggga

SEQ ID NO: 1723693 - RNA, 20 nt, Human
ucuucagagacuccugcagg

SEQ ID NO: 1723694 - RNA, 14 nt, Human
agaaucacuugaac

SEQ ID NO: 1723695 - RNA, 15 nt, Human
ucuucaacucccugc

SEQ ID NO: 1723696 - RNA, 19 nt, Human
ucuucaacugaccagccuc

SEQ ID NO: 1723697 - RNA, 16 nt, Human
ucuucaacugaccagc

SEQ ID NO: 1723698 - RNA, 12 nt, Human
ucuucagagacu

SEQ ID NO: 1723699 - RNA, 18 nt, Human
ucuucagagacuccugca

SEQ ID NO: 1723700 - RNA, 17 nt, Human
ucuucagagacuccugc

SEQ ID NO: 1723701 - RNA, 22 nt, Human
ucuucccuacaguugaaaaaca

SEQ ID NO: 1723702 - RNA, 19 nt, Human
ucuucccuacaguugaaaa

SEQ ID NO: 1723703 - RNA, 14 nt, Human
ucuuccucccuccc

SEQ ID NO: 1723704 - RNA, 15 nt, Human
ucuuccucccucccu

SEQ ID NO: 1723705 - RNA, 14 nt, Human
ucuuccucugcuga

SEQ ID NO: 1723706 - RNA, 12 nt, Human
ucuuccucugcu

SEQ ID NO: 1723707 - RNA, 11 nt, Human
ucuuccucugc

SEQ ID NO: 1723708 - RNA, 21 nt, Human
agacauagaauuaacacauga

SEQ ID NO: 1723709 - RNA, 19 nt, Human
agacauacuaaccagcaga

SEQ ID NO: 1723710 - RNA, 17 nt, Human
agacaucaacagauaaa

SEQ ID NO: 1723711 - RNA, 18 nt, Human
agacaucaacagauaaau

SEQ ID NO: 1723712 - RNA, 20 nt, Human
ucuucuguacgucugacagg

SEQ ID NO: 1723713 - RNA, 15 nt, Human
ucuucuguacgucug

SEQ ID NO: 1723714 - RNA, 18 nt, Human
ucuucuggguuccuuccu

SEQ ID NO: 1723715 - RNA, 20 nt, Human
ucuucuguggguuucuaaag

SEQ ID NO: 1723716 - RNA, 19 nt, Human
ucuucugcuucagccuccc

SEQ ID NO: 1723717 - RNA, 12 nt, Human
ucuucugcuuca

SEQ ID NO: 1723718 - RNA, 21 nt, Human
ucuucugaacuuggcgcugcc

SEQ ID NO: 1723719 - RNA, 19 nt, Human
ucuugguccugcugcaguu

SEQ ID NO: 1723720 - RNA, 17 nt, Human
ucuugguccugcugcag

SEQ ID NO: 1723721 - RNA, 15 nt, Human
ucuugguccugcugc

SEQ ID NO: 1723722 - RNA, 17 nt, Human
ucuuuccugaggcuggg

SEQ ID NO: 1723723 - RNA, 19 nt, Human
ucuuucuaaugugugaauc

SEQ ID NO: 1723724 - RNA, 13 nt, Human
ucuuucucugagg

SEQ ID NO: 1723725 - RNA, 15 nt, Human
ucuuucucugaggac

SEQ ID NO: 1723726 - RNA, 18 nt, Human
ucuuucuaaugugugaau

SEQ ID NO: 1723727 - RNA, 16 nt, Human
ucuuuaugauuuuuaa

SEQ ID NO: 1723728 - RNA, 17 nt, Human
ucuuuauuaaauguaga

SEQ ID NO: 1723729 - RNA, 21 nt, Human
ucuuuauuaaauguagaaagu

SEQ ID NO: 1723730 - RNA, 23 nt, Human
ucuugcaauggcagccuuggcaa

SEQ ID NO: 1723731 - RNA, 22 nt, Human
ucuugcaauggcagccuuggca

SEQ ID NO: 1723732 - RNA, 18 nt, Human
ucuugcaauggcagccuu

SEQ ID NO: 1723733 - RNA, 19 nt, Human
ucuugcaauggcagccuug

SEQ ID NO: 1723734 - RNA, 14 nt, Human
ucuugguccugcug

SEQ ID NO: 1723735 - RNA, 17 nt, Human
ucuuggucagauuugaa

SEQ ID NO: 1723736 - RNA, 23 nt, Human
agaccuucuccuucaccuuuguc

SEQ ID NO: 1723737 - RNA, 21 nt, Human
agaccuucuccuucaccuuug

SEQ ID NO: 1723738 - RNA, 18 nt, Human
agaccuucuccuucaccu

SEQ ID NO: 1723739 - RNA, 15 nt, Human
agaccuucuccuuca

SEQ ID NO: 1723740 - RNA, 11 nt, Human
agaccuucucc

SEQ ID NO: 1723741 - RNA, 14 nt, Human
agaccccuggcuuu

SEQ ID NO: 1723742 - RNA, 16 nt, Human
ucuugagccugggagg

SEQ ID NO: 1723743 - RNA, 13 nt, Human
ucuugagccuggg

SEQ ID NO: 1723744 - RNA, 16 nt, Human
ucuugagccuugaacu

SEQ ID NO: 1723745 - RNA, 13 nt, Human
ucuugauucauaa

SEQ ID NO: 1723746 - RNA, 21 nt, Human
ucuugaugccuggcggggugg

SEQ ID NO: 1723747 - RNA, 17 nt, Human
ugaaacuccagaugcca

SEQ ID NO: 1723748 - RNA, 18 nt, Human
ugaaacuccagaugccac

SEQ ID NO: 1723749 - RNA, 19 nt, Human
ugaaacuccagaugccaca

SEQ ID NO: 1723750 - RNA, 20 nt, Human
ugaaaaucuuauaauuuaaa

SEQ ID NO: 1723751 - RNA, 19 nt, Human
ugaaaaucgugacaacacu

SEQ ID NO: 1723752 - RNA, 17 nt, Human
ugaaaauguauguguaa

SEQ ID NO: 1723753 - RNA, 16 nt, Human
ugaaacgcaaccacca

SEQ ID NO: 1723754 - RNA, 22 nt, Human
ugaaaaaguucugcagauaaac

SEQ ID NO: 1723755 - RNA, 22 nt, Human
ugaaaaaguauccugcuucuga

SEQ ID NO: 1723756 - RNA, 22 nt, Human
ugaaaaaggaggaagagaaaaa

SEQ ID NO: 1723757 - RNA, 20 nt, Human
ugaaaaaggaggaagagaaa

SEQ ID NO: 1723758 - RNA, 16 nt, Human
ugaaaaucgugacaac

SEQ ID NO: 1723759 - RNA, 16 nt, Human
ugaaaaaggaggaaga

SEQ ID NO: 1723760 - RNA, 23 nt, Human
ugaaaaaauauauaucaaauaua

SEQ ID NO: 1723761 - RNA, 21 nt, Human
ucuuucuggcuaugcauuuga

SEQ ID NO: 1723762 - RNA, 21 nt, Human
ucuuucugcagaaacagaaag

SEQ ID NO: 1723763 - RNA, 20 nt, Human
ucuuucuggcuaugcauuug

SEQ ID NO: 1723764 - RNA, 22 nt, Human
ucuuuggucuacacugugcuga

SEQ ID NO: 1723765 - RNA, 16 nt, Human
ucuuuggugaacauug

SEQ ID NO: 1723766 - RNA, 22 nt, Human
ucuuuggugaacauugcaauag

SEQ ID NO: 1723767 - RNA, 23 nt, Human
agagacuccugcaggcagccagg

SEQ ID NO: 1723768 - RNA, 22 nt, Human
agagaucaaccccuucgcuccu

SEQ ID NO: 1723769 - RNA, 23 nt, Human
agagcaagacgcugugcugcccu

SEQ ID NO: 1723770 - RNA, 19 nt, Human
agagcaagacgcugugcug

SEQ ID NO: 1723771 - RNA, 22 nt, Human
agagacuccugcaggcagccag

SEQ ID NO: 1723772 - RNA, 21 nt, Human
agagacuccugcaggcagcca

SEQ ID NO: 1723773 - RNA, 20 nt, Human
agagacuccugcaggcagcc

SEQ ID NO: 1723774 - RNA, 19 nt, Human
agagacuccugcaggcagc

SEQ ID NO: 1723775 - RNA, 18 nt, Human
agagacuccugcaggcag

SEQ ID NO: 1723776 - RNA, 17 nt, Human
agagacuccugcaggca

SEQ ID NO: 1723777 - RNA, 11 nt, Human
agagacuccug

SEQ ID NO: 1723778 - RNA, 16 nt, Human
agagacuccagcuggg

SEQ ID NO: 1723779 - RNA, 15 nt, Human
ugaaagacuguacaa

SEQ ID NO: 1723780 - RNA, 13 nt, Human
ugaaagacuguac

SEQ ID NO: 1723781 - RNA, 23 nt, Human
agagcaccuuagacagucccugc

SEQ ID NO: 1723782 - RNA, 22 nt, Human
agagcaccuuagacagucccug

SEQ ID NO: 1723783 - RNA, 22 nt, Human
agagccuuccaggggugggaca

SEQ ID NO: 1723784 - RNA, 17 nt, Human
agagccuuccaggggug

SEQ ID NO: 1723785 - RNA, 15 nt, Human
agagccuuccagggg

SEQ ID NO: 1723786 - RNA, 13 nt, Human
agagccuuccagg

SEQ ID NO: 1723787 - RNA, 20 nt, Human
agagcuagcagcagggaggg

SEQ ID NO: 1723788 - RNA, 14 nt, Human
agagcugccaccug

SEQ ID NO: 1723789 - RNA, 16 nt, Human
agaacgcugauuuaaa

SEQ ID NO: 1723790 - RNA, 23 nt, Human
agaaccuuuugagugccuuacac

SEQ ID NO: 1723791 - RNA, 19 nt, Human
agaaccuuuugagugccuu

SEQ ID NO: 1723792 - RNA, 17 nt, Human
agaacucccuuucaaca

SEQ ID NO: 1723793 - RNA, 16 nt, Human
agaacucccuuucaac

SEQ ID NO: 1723794 - RNA, 21 nt, Human
agaacugaauuuugucuuuau

SEQ ID NO: 1723795 - RNA, 12 nt, Human
agaaauuaugug

SEQ ID NO: 1723796 - RNA, 23 nt, Human
ucugcaggucccuaauaaagcug

SEQ ID NO: 1723797 - RNA, 22 nt, Human
ucugcaggucccuaauaaagcu

SEQ ID NO: 1723798 - RNA, 19 nt, Human
ucugcaggucccuaauaaa

SEQ ID NO: 1723799 - RNA, 21 nt, Human
ucugcaggucccuaauaaagc

SEQ ID NO: 1723800 - RNA, 23 nt, Human
agaagcccaggaaaggcuccagg

SEQ ID NO: 1723801 - RNA, 20 nt, Human
ucugcccauccugccccuga

SEQ ID NO: 1723802 - RNA, 23 nt, Human
ucugcccacucccugcaaccuga

SEQ ID NO: 1723803 - RNA, 23 nt, Human
ucugcccuugguuaggcauugug

SEQ ID NO: 1723804 - RNA, 12 nt, Human
ucugcccuuggu

SEQ ID NO: 1723805 - RNA, 22 nt, Human
ucugcccugcgggucacaggag

SEQ ID NO: 1723806 - RNA, 16 nt, Human
agaagcagaggaagga

SEQ ID NO: 1723807 - RNA, 19 nt, Human
agaagcaacccaaauguuc

SEQ ID NO: 1723808 - RNA, 13 nt, Human
agaagcagcucuu

SEQ ID NO: 1723809 - RNA, 12 nt, Human
agaagcagcucu

SEQ ID NO: 1723810 - RNA, 10 nt, Human
ucuggccuuc

SEQ ID NO: 1723811 - RNA, 21 nt, Human
ucuggcagcucagagagggug

SEQ ID NO: 1723812 - RNA, 18 nt, Human
ucuggcagcucagagagg

SEQ ID NO: 1723813 - RNA, 23 nt, Human
ucuggcagaguugaagacagagc

SEQ ID NO: 1723814 - RNA, 20 nt, Human
ucuggcagaguugaagacag

SEQ ID NO: 1723815 - RNA, 17 nt, Human
ucuggcagcucagagag

SEQ ID NO: 1723816 - RNA, 23 nt, Human
ucugcuuuuuaaagaaugcucuu

SEQ ID NO: 1723817 - RNA, 22 nt, Human
ucugcuuugggguuuaucagaa

SEQ ID NO: 1723818 - RNA, 14 nt, Human
ucugccugucuccc

SEQ ID NO: 1723819 - RNA, 12 nt, Human
ucugccugucuc

SEQ ID NO: 1723820 - RNA, 22 nt, Human
agaaguuugagaucagccuggg

SEQ ID NO: 1723821 - RNA, 13 nt, Human
agaaguuucuguc

SEQ ID NO: 1723822 - RNA, 23 nt, Human
agaagcucccugaaguaagcaaa

SEQ ID NO: 1723823 - RNA, 18 nt, Human
agaaaaaugagccuggca

SEQ ID NO: 1723824 - RNA, 23 nt, Human
agaaaaaauauuuuccugccagg

SEQ ID NO: 1723825 - RNA, 17 nt, Human
agaaaaaauauuuuccu

SEQ ID NO: 1723826 - RNA, 19 nt, Human
agaaaaaauauuuucccua

SEQ ID NO: 1723827 - RNA, 18 nt, Human
ucucuugguccugcugca

SEQ ID NO: 1723828 - RNA, 17 nt, Human
ucucuugguccugcugc

SEQ ID NO: 1723829 - RNA, 16 nt, Human
ucucuugguccugcug

SEQ ID NO: 1723830 - RNA, 22 nt, Human
ucucugcaggucccuaauaaag

SEQ ID NO: 1723831 - RNA, 21 nt, Human
ucucugcaggucccuaauaaa

SEQ ID NO: 1723832 - RNA, 20 nt, Human
ucucugcaggucccuaauaa

SEQ ID NO: 1723833 - RNA, 19 nt, Human
ucucugcaggucccuaaua

SEQ ID NO: 1723834 - RNA, 16 nt, Human
agaaaugaaaaaauau

SEQ ID NO: 1723835 - RNA, 13 nt, Human
agaaaugaaaaaa

SEQ ID NO: 1723836 - RNA, 12 nt, Human
agaaaugaaaaa

SEQ ID NO: 1723837 - RNA, 15 nt, Human
agaaaugccuuaccc

SEQ ID NO: 1723838 - RNA, 20 nt, Human
agaaaugcugguuuuucagu

SEQ ID NO: 1723839 - RNA, 21 nt, Human
agaaaugcugguuuuucaguu

SEQ ID NO: 1723840 - RNA, 18 nt, Human
ucugaaggcuggguucug

SEQ ID NO: 1723841 - RNA, 20 nt, Human
agaaagcagaacagugauua

SEQ ID NO: 1723842 - RNA, 17 nt, Human
agaaagcagaacaguga

SEQ ID NO: 1723843 - RNA, 18 nt, Human
agaaagcagaacagugau

SEQ ID NO: 1723844 - RNA, 22 nt, Human
agaaagacuaucuaaauguuga

SEQ ID NO: 1723845 - RNA, 20 nt, Human
agaaagacuaucuaaauguu

SEQ ID NO: 1723846 - RNA, 18 nt, Human
acuugucuuuggacccug

SEQ ID NO: 1723847 - RNA, 14 nt, Human
acuuguggacacag

SEQ ID NO: 1723848 - RNA, 16 nt, Human
acuuuaaaaggagcca

SEQ ID NO: 1723849 - RNA, 15 nt, Human
acuuguggacacagc

SEQ ID NO: 1723850 - RNA, 16 nt, Human
acuuguuuucugggaa

SEQ ID NO: 1723851 - RNA, 13 nt, Human
acuuuagggaagu

SEQ ID NO: 1723852 - RNA, 23 nt, Human
acuuuggaaagaguaggaagacu

SEQ ID NO: 1723853 - RNA, 19 nt, Human
acuuuguauaaaagggacu

SEQ ID NO: 1723854 - RNA, 14 nt, Human
acuuuggaaagagu

SEQ ID NO: 1723855 - RNA, 13 nt, Human
acuuuggaaagag

SEQ ID NO: 1723856 - RNA, 12 nt, Human
acuuuggaaaga

SEQ ID NO: 1723857 - RNA, 23 nt, Human
acuuugaggguguauauuuucug

SEQ ID NO: 1723858 - RNA, 22 nt, Human
acuuugcagcacagcugagagg

SEQ ID NO: 1723859 - RNA, 16 nt, Human
acuuuguguucaccuu

SEQ ID NO: 1723860 - RNA, 18 nt, Human
acuuuguguucaccuugu

SEQ ID NO: 1723861 - RNA, 23 nt, Human
ucuccuuggugucgggcaugaca

SEQ ID NO: 1723862 - RNA, 21 nt, Human
ucuccuuggugucgggcauga

SEQ ID NO: 1723863 - RNA, 15 nt, Human
ucuccuuagaagugg

SEQ ID NO: 1723864 - RNA, 21 nt, Human
ucuccuuagaaguggaaguag

SEQ ID NO: 1723865 - RNA, 21 nt, Human
ucucucaggccaaacucaccu

SEQ ID NO: 1723866 - RNA, 14 nt, Human
ucucuccauucccg

SEQ ID NO: 1723867 - RNA, 12 nt, Human
ucucucaggcca

SEQ ID NO: 1723868 - RNA, 15 nt, Human
ucucggcucacugca

SEQ ID NO: 1723869 - RNA, 17 nt, Human
ucucgaacuccugaccu

SEQ ID NO: 1723870 - RNA, 20 nt, Human
ucucgcuauugucaccaggg

SEQ ID NO: 1723871 - RNA, 17 nt, Human
ucucgcucuguugccca

SEQ ID NO: 1723872 - RNA, 23 nt, Human
ucgucacugcuuaacuucacaua

SEQ ID NO: 1723873 - RNA, 13 nt, Human
ucguucucugccu

SEQ ID NO: 1723874 - RNA, 19 nt, Human
ucggggagaggcugaggac

SEQ ID NO: 1723875 - RNA, 21 nt, Human
acuguuaauaguucagguaac

SEQ ID NO: 1723876 - RNA, 17 nt, Human
acuguuaauaguucagg

SEQ ID NO: 1723877 - RNA, 21 nt, Human
ucuacccucuuagaaaaacca

SEQ ID NO: 1723878 - RNA, 13 nt, Human
ucuaaaggcuacc

SEQ ID NO: 1723879 - RNA, 16 nt, Human
ucuaaaggcuaccuuu

SEQ ID NO: 1723880 - RNA, 17 nt, Human
ucuaaagcugccagccg

SEQ ID NO: 1723881 - RNA, 23 nt, Human
ucuaaacugcccccucugcccug

SEQ ID NO: 1723882 - RNA, 22 nt, Human
ucuaaacugcccccucugcccu

SEQ ID NO: 1723883 - RNA, 16 nt, Human
ucuaaacugcccccuc

SEQ ID NO: 1723884 - RNA, 13 nt, Human
ucuaaacugcccc

SEQ ID NO: 1723885 - RNA, 16 nt, Human
acuguaucaugacaaa

SEQ ID NO: 1723886 - RNA, 20 nt, Human
acuguaucaugacaaagacu

SEQ ID NO: 1723887 - RNA, 20 nt, Human
acuguacaugaaaacacauu

SEQ ID NO: 1723888 - RNA, 21 nt, Human
acuguacaugaaaacacauuu

SEQ ID NO: 1723889 - RNA, 15 nt, Human
acuguacuugcucuu

SEQ ID NO: 1723890 - RNA, 20 nt, Human
acuguacuccucccaggcgc

SEQ ID NO: 1723891 - RNA, 14 nt, Human
acuguaucaugaca

SEQ ID NO: 1723892 - RNA, 23 nt, Human
acuguacuugcucuugaugccug

SEQ ID NO: 1723893 - RNA, 22 nt, Human
acuguacaaaguagaagucuua

SEQ ID NO: 1723894 - RNA, 16 nt, Human
acuguacaaaguagaa

SEQ ID NO: 1723895 - RNA, 18 nt, Human
acuggguacuuguggaca

SEQ ID NO: 1723896 - RNA, 17 nt, Human
acuggguacuuguggac

SEQ ID NO: 1723897 - RNA, 19 nt, Human
acuguacaugaaaacacau

SEQ ID NO: 1723898 - RNA, 16 nt, Human
acuguacaugaaaaca

SEQ ID NO: 1723899 - RNA, 18 nt, Human
acuguacagacagaaaaa

SEQ ID NO: 1723900 - RNA, 23 nt, Human
ucgcugugucagcauagaaguaa

SEQ ID NO: 1723901 - RNA, 21 nt, Human
ucgcucuguugcccaggcugg

SEQ ID NO: 1723902 - RNA, 21 nt, Human
acugggcuuggggaccagagc

SEQ ID NO: 1723903 - RNA, 22 nt, Human
acugggcuuggggaccagagcu

SEQ ID NO: 1723904 - RNA, 15 nt, Human
acuggguacuugugg

SEQ ID NO: 1723905 - RNA, 18 nt, Human
ucgcccuggacugugugc

SEQ ID NO: 1723906 - RNA, 16 nt, Human
acuuacuguacaugaa

SEQ ID NO: 1723907 - RNA, 13 nt, Human
acuuacuguacau

SEQ ID NO: 1723908 - RNA, 14 nt, Human
acuuacuguacaug

SEQ ID NO: 1723909 - RNA, 20 nt, Human
acuuagagguggggagcaga

SEQ ID NO: 1723910 - RNA, 15 nt, Human
acuuacuguacauga

SEQ ID NO: 1723911 - RNA, 19 nt, Human
ucuaccugaggggccucuu

SEQ ID NO: 1723912 - RNA, 12 nt, Human
ucuaccugaggg

SEQ ID NO: 1723913 - RNA, 20 nt, Human
acuucaggcucuucuccuuu

SEQ ID NO: 1723914 - RNA, 18 nt, Human
acuucaggcucuucuccu

SEQ ID NO: 1723915 - RNA, 17 nt, Human
acuucaggcucuucucc

SEQ ID NO: 1723916 - RNA, 17 nt, Human
acuuccauaaucuggac

SEQ ID NO: 1723917 - RNA, 17 nt, Human
acuuccacugccauccu

SEQ ID NO: 1723918 - RNA, 18 nt, Human
acuuccaauuuacauacu

SEQ ID NO: 1723919 - RNA, 13 nt, Human
ucuauaauuuaaa

SEQ ID NO: 1723920 - RNA, 23 nt, Human
ucuaguuugauuaaauucuugca

SEQ ID NO: 1723921 - RNA, 24 nt, Human
ucuagauacuguaucaugacaaag

SEQ ID NO: 1723922 - RNA, 23 nt, Human
acuugaacccgggaggcagaggu

SEQ ID NO: 1723923 - RNA, 18 nt, Human
acuugaaaauuaacauga

SEQ ID NO: 1723924 - RNA, 17 nt, Human
acuugaaaauuaacaug

SEQ ID NO: 1723925 - RNA, 19 nt, Human
acuugagaauuacccuuuu

SEQ ID NO: 1723926 - RNA, 14 nt, Human
acuuggaagcuccg

SEQ ID NO: 1723927 - RNA, 14 nt, Human
acuugucuuuggac

SEQ ID NO: 1723928 - RNA, 15 nt, Human
acuuguauuaugugu

SEQ ID NO: 1723929 - RNA, 14 nt, Human
acuuguaugaaaga

SEQ ID NO: 1723930 - RNA, 14 nt, Human
acuuguauuaugug

SEQ ID NO: 1723931 - RNA, 13 nt, Human
acuuguauuaugu

SEQ ID NO: 1723932 - RNA, 18 nt, Human
ucucacuccuaccuggua

SEQ ID NO: 1723933 - RNA, 17 nt, Human
ucucacuccuaccuggu

SEQ ID NO: 1723934 - RNA, 16 nt, Human
ucucacuccuaccugg

SEQ ID NO: 1723935 - RNA, 20 nt, Human
acuucgggaggucgaggcag

SEQ ID NO: 1723936 - RNA, 17 nt, Human
acuucgggaggucgagg

SEQ ID NO: 1723937 - RNA, 22 nt, Human
acuucgggaggucgaggcagga

SEQ ID NO: 1723938 - RNA, 13 nt, Human
ucucacuccuacc

SEQ ID NO: 1723939 - RNA, 16 nt, Human
ucucaaaaaaagaaaa

SEQ ID NO: 1723940 - RNA, 16 nt, Human
ucuauuguuucuuuca

SEQ ID NO: 1723941 - RNA, 23 nt, Human
ucacugagacagcccgggcucug

SEQ ID NO: 1723942 - RNA, 21 nt, Human
ucacuauguugcccaggcagg

SEQ ID NO: 1723943 - RNA, 22 nt, Human
ucaccagccccagugcccacag

SEQ ID NO: 1723944 - RNA, 18 nt, Human
ucacugcaaccuccgccu

SEQ ID NO: 1723945 - RNA, 21 nt, Human
ucacugcaaccuucgccaccu

SEQ ID NO: 1723946 - RNA, 14 nt, Human
ucacuguugcccag

SEQ ID NO: 1723947 - RNA, 15 nt, Human
ucacugcacagugca

SEQ ID NO: 1723948 - RNA, 17 nt, Human
ucacugcaacuucugcc

SEQ ID NO: 1723949 - RNA, 18 nt, Human
ucacugcaacuucugccu

SEQ ID NO: 1723950 - RNA, 15 nt, Human
ucacuguugcccagg

SEQ ID NO: 1723951 - RNA, 22 nt, Human
ucacuuaaguuaguuccacuga

SEQ ID NO: 1723952 - RNA, 16 nt, Human
acccaaauguucauca

SEQ ID NO: 1723953 - RNA, 20 nt, Human
acccaaauguucaucaauga

SEQ ID NO: 1723954 - RNA, 22 nt, Human
accauuuugggguacccacugc

SEQ ID NO: 1723955 - RNA, 20 nt, Human
acccacugcuuuuggucugu

SEQ ID NO: 1723956 - RNA, 17 nt, Human
acccacuggacucaccu

SEQ ID NO: 1723957 - RNA, 14 nt, Human
acccacuggacuca

SEQ ID NO: 1723958 - RNA, 21 nt, Human
acccacuggacucaccucccc

SEQ ID NO: 1723959 - RNA, 21 nt, Human
accauuuugggguacccacug

SEQ ID NO: 1723960 - RNA, 23 nt, Human
accauuuugcugucccuuuuccu

SEQ ID NO: 1723961 - RNA, 22 nt, Human
accauuuugcugucccuuuucc

SEQ ID NO: 1723962 - RNA, 21 nt, Human
accauucuccaccugccaggg

SEQ ID NO: 1723963 - RNA, 20 nt, Human
accauucuccaccugccagg

SEQ ID NO: 1723964 - RNA, 19 nt, Human
accauucuccaccugccag

SEQ ID NO: 1723965 - RNA, 18 nt, Human
accauguuggccaggcug

SEQ ID NO: 1723966 - RNA, 17 nt, Human
acccagcgagcccuggu

SEQ ID NO: 1723967 - RNA, 16 nt, Human
acccagcgagcccugg

SEQ ID NO: 1723968 - RNA, 13 nt, Human
acccagcgagccc

SEQ ID NO: 1723969 - RNA, 15 nt, Human
acccaggagccccga

SEQ ID NO: 1723970 - RNA, 13 nt, Human
acccaggagcccc

SEQ ID NO: 1723971 - RNA, 22 nt, Human
accccagcuggggccaggcugg

SEQ ID NO: 1723972 - RNA, 19 nt, Human
accccagcuggggccaggc

SEQ ID NO: 1723973 - RNA, 23 nt, Human
acccaggugcuaggaacacuccu

SEQ ID NO: 1723974 - RNA, 11 nt, Human
acccaggugcu

SEQ ID NO: 1723975 - RNA, 13 nt, Human
accccagguuucu

SEQ ID NO: 1723976 - RNA, 16 nt, Human
ucagaucucuaacuuc

SEQ ID NO: 1723977 - RNA, 21 nt, Human
ucagaugcugugcaaauguua

SEQ ID NO: 1723978 - RNA, 21 nt, Human
ucagagccaccccuaaagaga

SEQ ID NO: 1723979 - RNA, 23 nt, Human
ucagagacuccugcaggcagcca

SEQ ID NO: 1723980 - RNA, 16 nt, Human
ucagagacuccugcag

SEQ ID NO: 1723981 - RNA, 12 nt, Human
ucagaauucuca

SEQ ID NO: 1723982 - RNA, 10 nt, Human
ucagaauucu

SEQ ID NO: 1723983 - RNA, 20 nt, Human
ucagaauucucagaaucuca

SEQ ID NO: 1723984 - RNA, 16 nt, Human
ucagaauucucuaguu

SEQ ID NO: 1723985 - RNA, 22 nt, Human
ucagagacuccugcaggcagcc

SEQ ID NO: 1723986 - RNA, 15 nt, Human
acccagcccacuucu

SEQ ID NO: 1723987 - RNA, 23 nt, Human
ucagaaguuucugccgcagcccu

SEQ ID NO: 1723988 - RNA, 16 nt, Human
ucagaauagaaauuag

SEQ ID NO: 1723989 - RNA, 23 nt, Human
ucagugccuuauggaacacucug

SEQ ID NO: 1723990 - RNA, 22 nt, Human
ucagugccuuauggaacacucu

SEQ ID NO: 1723991 - RNA, 20 nt, Human
ucagugccuuauggaacacu

SEQ ID NO: 1723992 - RNA, 19 nt, Human
ucagugccuuauggaacac

SEQ ID NO: 1723993 - RNA, 15 nt, Human
ucagugcuucgcaga

SEQ ID NO: 1723994 - RNA, 16 nt, Human
ucaguggcagcugcuu

SEQ ID NO: 1723995 - RNA, 15 nt, Human
ucaguggcagcugcu

SEQ ID NO: 1723996 - RNA, 14 nt, Human
ucaguggcagcugc

SEQ ID NO: 1723997 - RNA, 19 nt, Human
ucaguuguuagugugucuu

SEQ ID NO: 1723998 - RNA, 18 nt, Human
ucauaaauaaaguuuguu

SEQ ID NO: 1723999 - RNA, 13 nt, Human
ucauaacuagaac

SEQ ID NO: 1724000 - RNA, 24 nt, Human
ucauaaagcaggcagaacucaucu

SEQ ID NO: 1724001 - RNA, 15 nt, Human
ucauaacuagaacug

SEQ ID NO: 1724002 - RNA, 22 nt, Human
ucaggugucccugcacuugcag

SEQ ID NO: 1724003 - RNA, 22 nt, Human
ucagguugucugaagucacugc

SEQ ID NO: 1724004 - RNA, 13 nt, Human
ucaguaagccgug

SEQ ID NO: 1724005 - RNA, 13 nt, Human
ucaguaauaacuc

SEQ ID NO: 1724006 - RNA, 15 nt, Human
acccuugugguccca

SEQ ID NO: 1724007 - RNA, 20 nt, Human
accgaaaacguggcugcuuc

SEQ ID NO: 1724008 - RNA, 20 nt, Human
acccuugccgucuaccugag

SEQ ID NO: 1724009 - RNA, 18 nt, Human
ucaggugucccugcacuu

SEQ ID NO: 1724010 - RNA, 17 nt, Human
ucaggugucccugcacu

SEQ ID NO: 1724011 - RNA, 15 nt, Human
ucaggugucccugca

SEQ ID NO: 1724012 - RNA, 23 nt, Human
ucagguggggucacucuggcagc

SEQ ID NO: 1724013 - RNA, 22 nt, Human
accgaaaacguggcugcuucaa

SEQ ID NO: 1724014 - RNA, 21 nt, Human
accgaaaacguggcugcuuca

SEQ ID NO: 1724015 - RNA, 22 nt, Human
ucagguggggucacucuggcag

SEQ ID NO: 1724016 - RNA, 15 nt, Human
acccgggaggcagag

SEQ ID NO: 1724017 - RNA, 21 nt, Human
acccuccuuucaccacaugug

SEQ ID NO: 1724018 - RNA, 20 nt, Human
acccgggaagggggcuggga

SEQ ID NO: 1724019 - RNA, 19 nt, Human
acccgggaagggggcuggg

SEQ ID NO: 1724020 - RNA, 15 nt, Human
acccggaggggccug

SEQ ID NO: 1724021 - RNA, 22 nt, Human
acccgggaagggggcugggaca

SEQ ID NO: 1724022 - RNA, 14 nt, Human
acccucauguucuu

SEQ ID NO: 1724023 - RNA, 15 nt, Human
acccucauguucuua

SEQ ID NO: 1724024 - RNA, 17 nt, Human
acccucauguucuuaau

SEQ ID NO: 1724025 - RNA, 21 nt, Human
acccugaggcccagagggccu

SEQ ID NO: 1724026 - RNA, 19 nt, Human
acccugaggcccagagggc

SEQ ID NO: 1724027 - RNA, 13 nt, Human
acccugaggccca

SEQ ID NO: 1724028 - RNA, 11 nt, Human
acccugaggcc

SEQ ID NO: 1724029 - RNA, 18 nt, Human
acccucgaggcggaucuu

SEQ ID NO: 1724030 - RNA, 14 nt, Human
acccucgaggcgga

SEQ ID NO: 1724031 - RNA, 23 nt, Human
acccugaggcccagagggccugc

SEQ ID NO: 1724032 - RNA, 18 nt, Human
ucaggcaggugggaugga

SEQ ID NO: 1724033 - RNA, 17 nt, Human
ucaggcaggugggaugg

SEQ ID NO: 1724034 - RNA, 13 nt, Human
acccccagccugc

SEQ ID NO: 1724035 - RNA, 12 nt, Human
acccccagccug

SEQ ID NO: 1724036 - RNA, 16 nt, Human
ucaggccaggcccucu

SEQ ID NO: 1724037 - RNA, 15 nt, Human
ucaggccaggcccuc

SEQ ID NO: 1724038 - RNA, 14 nt, Human
ucaggccaggcccu

SEQ ID NO: 1724039 - RNA, 13 nt, Human
ucaggccaggccc

SEQ ID NO: 1724040 - RNA, 14 nt, Human
ucaggccagcugcu

SEQ ID NO: 1724041 - RNA, 13 nt, Human
ucaggccagcugc

SEQ ID NO: 1724042 - RNA, 13 nt, Human
ucaggccacuuga

SEQ ID NO: 1724043 - RNA, 23 nt, Human
ucaggggugugcggccuuuggcu

SEQ ID NO: 1724044 - RNA, 19 nt, Human
ucaggggugugcggccuuu

SEQ ID NO: 1724045 - RNA, 12 nt, Human
ucaggggugugc

SEQ ID NO: 1724046 - RNA, 18 nt, Human
ucaggccaggcccucugc

SEQ ID NO: 1724047 - RNA, 17 nt, Human
ucaggccaggcccucug

SEQ ID NO: 1724048 - RNA, 19 nt, Human
ucaggccaggcccucugcc

SEQ ID NO: 1724049 - RNA, 20 nt, Human
ucaggccaggcccucugccc

SEQ ID NO: 1724050 - RNA, 19 nt, Human
ucaggguuggccccugccc

SEQ ID NO: 1724051 - RNA, 18 nt, Human
ucaggguuggccccugcc

SEQ ID NO: 1724052 - RNA, 23 nt, Human
ucaggguuggccccugcccggcu

SEQ ID NO: 1724053 - RNA, 18 nt, Human
ucagguaaucgaccugcc

SEQ ID NO: 1724054 - RNA, 20 nt, Human
ucagguaaucgaccugccuc

SEQ ID NO: 1724055 - RNA, 19 nt, Human
ucagguaaucgaccugccu

SEQ ID NO: 1724056 - RNA, 19 nt, Human
acccgcuaagagggaggga

SEQ ID NO: 1724057 - RNA, 21 nt, Human
ucagguaaucgaccugccucg

SEQ ID NO: 1724058 - RNA, 17 nt, Human
ucaagagggucugagga

SEQ ID NO: 1724059 - RNA, 21 nt, Human
ucaagagggcacugguggccc

SEQ ID NO: 1724060 - RNA, 20 nt, Human
ucaagagggcacugguggcc

SEQ ID NO: 1724061 - RNA, 11 nt, Human
ucaaggcucag

SEQ ID NO: 1724062 - RNA, 17 nt, Human
ucaagcaagauuucaga

SEQ ID NO: 1724063 - RNA, 22 nt, Human
ucaauaggaaaaacugauuuuu

SEQ ID NO: 1724064 - RNA, 19 nt, Human
ucaauaggaaaaacugauu

SEQ ID NO: 1724065 - RNA, 18 nt, Human
ucaauaggaaaaacugau

SEQ ID NO: 1724066 - RNA, 17 nt, Human
ucaagugauucuccugc

SEQ ID NO: 1724067 - RNA, 16 nt, Human
ucaagugauucuccug

SEQ ID NO: 1724068 - RNA, 22 nt, Human
ucaagugauucucaugccucag

SEQ ID NO: 1724069 - RNA, 21 nt, Human
ucaagugauucucaugccuca

SEQ ID NO: 1724070 - RNA, 19 nt, Human
ucaaguaauccaccugccu

SEQ ID NO: 1724071 - RNA, 18 nt, Human
acauuuuacuuuuuccug

SEQ ID NO: 1724072 - RNA, 22 nt, Human
acauuuaaaacauuaaaauaua

SEQ ID NO: 1724073 - RNA, 13 nt, Human
acauuuuucuuag

SEQ ID NO: 1724074 - RNA, 23 nt, Human
acauuuuucuuagggaaggauac

SEQ ID NO: 1724075 - RNA, 15 nt, Human
acauuuuuaagugcu

SEQ ID NO: 1724076 - RNA, 18 nt, Human
acauuuuuaagugcugca

SEQ ID NO: 1724077 - RNA, 19 nt, Human
acauuuuuaagugcugcau

SEQ ID NO: 1724078 - RNA, 21 nt, Human
acauuuuucagauauaaaaga

SEQ ID NO: 1724079 - RNA, 22 nt, Human
acauugguucuuucauuugcuu

SEQ ID NO: 1724080 - RNA, 14 nt, Human
acauuuaaaacauu

SEQ ID NO: 1724081 - RNA, 18 nt, Human
acauuuaaaacauuaaaa

SEQ ID NO: 1724082 - RNA, 22 nt, Human
acauugcggacagccacggcca

SEQ ID NO: 1724083 - RNA, 21 nt, Human
acauugcggacagccacggcc

SEQ ID NO: 1724084 - RNA, 19 nt, Human
accaaaucagcugcuacua

SEQ ID NO: 1724085 - RNA, 16 nt, Human
accaaaucagcugcua

SEQ ID NO: 1724086 - RNA, 16 nt, Human
accaacauacucccau

SEQ ID NO: 1724087 - RNA, 17 nt, Human
accaacauacucccauc

SEQ ID NO: 1724088 - RNA, 20 nt, Human
accaaccacugcgaccacaa

SEQ ID NO: 1724089 - RNA, 15 nt, Human
accaacccucagagc

SEQ ID NO: 1724090 - RNA, 23 nt, Human
accacacccagcccacuucugcc

SEQ ID NO: 1724091 - RNA, 21 nt, Human
accacacccagcccacuucug

SEQ ID NO: 1724092 - RNA, 20 nt, Human
accacacccagcccacuucu

SEQ ID NO: 1724093 - RNA, 16 nt, Human
accacacccagcccac

SEQ ID NO: 1724094 - RNA, 15 nt, Human
accacacccagccca

SEQ ID NO: 1724095 - RNA, 17 nt, Human
accacacagaggcugcc

SEQ ID NO: 1724096 - RNA, 12 nt, Human
ucaauuuaaaaa

SEQ ID NO: 1724097 - RNA, 13 nt, Human
ucaauuuaaaaaa

SEQ ID NO: 1724098 - RNA, 21 nt, Human
ucacagaacccuuggagccaa

SEQ ID NO: 1724099 - RNA, 16 nt, Human
ucacagccacuuggga

SEQ ID NO: 1724100 - RNA, 14 nt, Human
ucacagaugggugc

SEQ ID NO: 1724101 - RNA, 15 nt, Human
ucacagaugggugcu

SEQ ID NO: 1724102 - RNA, 14 nt, Human
ucacaggaaguaga

SEQ ID NO: 1724103 - RNA, 16 nt, Human
ucacauauugauuucc

SEQ ID NO: 1724104 - RNA, 18 nt, Human
ucacauauugauuuccgu

SEQ ID NO: 1724105 - RNA, 20 nt, Human
ucacauauugauuuccguua

SEQ ID NO: 1724106 - RNA, 17 nt, Human
ucaccagccccagugcc

SEQ ID NO: 1724107 - RNA, 13 nt, Human
acaugagcaucag

SEQ ID NO: 1724108 - RNA, 23 nt, Human
acaugaaaacacauuuuucuuag

SEQ ID NO: 1724109 - RNA, 22 nt, Human
acaugaaaacacauuuuucuua

SEQ ID NO: 1724110 - RNA, 13 nt, Human
ucaaauauauuca

SEQ ID NO: 1724111 - RNA, 16 nt, Human
ucaaaagcugggcagg

SEQ ID NO: 1724112 - RNA, 13 nt, Human
ucaaagauauuuu

SEQ ID NO: 1724113 - RNA, 20 nt, Human
ucaaagauauuuugcuuugu

SEQ ID NO: 1724114 - RNA, 22 nt, Human
ucaaagauauuuugcuuuguga

SEQ ID NO: 1724115 - RNA, 23 nt, Human
ucaaagcaaaugucuuccuggau

SEQ ID NO: 1724116 - RNA, 15 nt, Human
ucaaagcaaaugucu

SEQ ID NO: 1724117 - RNA, 21 nt, Human
acaugucuuuucuugcaugag

SEQ ID NO: 1724118 - RNA, 16 nt, Human
acaugagguacugaga

SEQ ID NO: 1724119 - RNA, 18 nt, Human
acauggaauaacauguaa

SEQ ID NO: 1724120 - RNA, 20 nt, Human
acauggaauaacauguaauu

SEQ ID NO: 1724121 - RNA, 23 nt, Human
acaugagcaucaggccaggcccu

SEQ ID NO: 1724122 - RNA, 19 nt, Human
acauggaguauaugucaag

SEQ ID NO: 1724123 - RNA, 15 nt, Human
acauggaguauaugu

SEQ ID NO: 1724124 - RNA, 14 nt, Human
acauggccuuugcu

SEQ ID NO: 1724125 - RNA, 22 nt, Human
uauuuuaagacgaaacauuugu

SEQ ID NO: 1724126 - RNA, 14 nt, Human
uauuuuaagacgaa

SEQ ID NO: 1724127 - RNA, 15 nt, Human
acaugaaaacacauu

SEQ ID NO: 1724128 - RNA, 16 nt, Human
acaugaaaacacauuu

SEQ ID NO: 1724129 - RNA, 16 nt, Human
acaucuugcucugcug

SEQ ID NO: 1724130 - RNA, 15 nt, Human
acaucuugcucugcu

SEQ ID NO: 1724131 - RNA, 19 nt, Human
uaugugccagauuuaugca

SEQ ID NO: 1724132 - RNA, 14 nt, Human
uaugugccagauuu

SEQ ID NO: 1724133 - RNA, 17 nt, Human
acaucuugcucugcuga

SEQ ID NO: 1724134 - RNA, 22 nt, Human
acaucuugcucugcugacagac

SEQ ID NO: 1724135 - RNA, 19 nt, Human
acaucuuggucagauuuga

SEQ ID NO: 1724136 - RNA, 17 nt, Human
uauuuuaauaaacacuc

SEQ ID NO: 1724137 - RNA, 14 nt, Human
uauuuuaauaaaca

SEQ ID NO: 1724138 - RNA, 20 nt, Human
uauuuugcuuugugauuuuu

SEQ ID NO: 1724139 - RNA, 13 nt, Human
uauuuugcuuugu

SEQ ID NO: 1724140 - RNA, 15 nt, Human
uauuuugcuuuguga

SEQ ID NO: 1724141 - RNA, 17 nt, Human
uauuuugauguaaagau

SEQ ID NO: 1724142 - RNA, 20 nt, Human
uauuuuguguuuaggaacua

SEQ ID NO: 1724143 - RNA, 17 nt, Human
uauuuuguguuuaggaa

SEQ ID NO: 1724144 - RNA, 17 nt, Human
uauuuuuguagagccag

SEQ ID NO: 1724145 - RNA, 15 nt, Human
ucccaaagugcuggg

SEQ ID NO: 1724146 - RNA, 16 nt, Human
ucccaaagugcuggga

SEQ ID NO: 1724147 - RNA, 20 nt, Human
ucccaaagugcugggauuac

SEQ ID NO: 1724148 - RNA, 21 nt, Human
ucccaaagugcugggauuaca

SEQ ID NO: 1724149 - RNA, 14 nt, Human
ucccacaaaggaga

SEQ ID NO: 1724150 - RNA, 22 nt, Human
ucccacaggcccuuccucucca

SEQ ID NO: 1724151 - RNA, 21 nt, Human
ucccacaggcccuuccucucc

SEQ ID NO: 1724152 - RNA, 17 nt, Human
ucccacaggcccuuccu

SEQ ID NO: 1724153 - RNA, 15 nt, Human
ucccacaggcccuuc

SEQ ID NO: 1724154 - RNA, 14 nt, Human
ucccaccccacaca

SEQ ID NO: 1724155 - RNA, 11 nt, Human
ucccaccccac

SEQ ID NO: 1724156 - RNA, 19 nt, Human
ucccaccaacccucagagc

SEQ ID NO: 1724157 - RNA, 17 nt, Human
uccaugaguccccuguu

SEQ ID NO: 1724158 - RNA, 16 nt, Human
uccaugaguccccugu

SEQ ID NO: 1724159 - RNA, 15 nt, Human
uccaugaguccccug

SEQ ID NO: 1724160 - RNA, 11 nt, Human
uccauccugag

SEQ ID NO: 1724161 - RNA, 20 nt, Human
uccaucucuuguuuaaauuc

SEQ ID NO: 1724162 - RNA, 22 nt, Human
uccaugaagauguagaggagaa

SEQ ID NO: 1724163 - RNA, 14 nt, Human
uccagugagacagc

SEQ ID NO: 1724164 - RNA, 17 nt, Human
uccagugaggcucugcc

SEQ ID NO: 1724165 - RNA, 19 nt, Human
uccagugaggcucugcccu

SEQ ID NO: 1724166 - RNA, 18 nt, Human
uccagugaggcucugccc

SEQ ID NO: 1724167 - RNA, 20 nt, Human
uccagugaggcucugcccuu

SEQ ID NO: 1724168 - RNA, 14 nt, Human
acggcucacugcag

SEQ ID NO: 1724169 - RNA, 15 nt, Human
acggcucacugcagc

SEQ ID NO: 1724170 - RNA, 17 nt, Human
acgcuacccgggaaggg

SEQ ID NO: 1724171 - RNA, 13 nt, Human
acgcuacccggga

SEQ ID NO: 1724172 - RNA, 15 nt, Human
acgcucucuggccuu

SEQ ID NO: 1724173 - RNA, 16 nt, Human
acgcucucuggccuuc

SEQ ID NO: 1724174 - RNA, 18 nt, Human
acgcuacccgggaagggg

SEQ ID NO: 1724175 - RNA, 23 nt, Human
acgcgugcacacaccagagccca

SEQ ID NO: 1724176 - RNA, 14 nt, Human
acgcccccacuggu

SEQ ID NO: 1724177 - RNA, 21 nt, Human
acggagucccaccuuggcugc

SEQ ID NO: 1724178 - RNA, 16 nt, Human
acggccaggccagagg

SEQ ID NO: 1724179 - RNA, 17 nt, Human
acgcucucuggccuucg

SEQ ID NO: 1724180 - RNA, 19 nt, Human
acggagucccaccuuggcu

SEQ ID NO: 1724181 - RNA, 14 nt, Human
acgaauauugcuga

SEQ ID NO: 1724182 - RNA, 17 nt, Human
uccaggcugggagagcc

SEQ ID NO: 1724183 - RNA, 14 nt, Human
uccaggcugggaga

SEQ ID NO: 1724184 - RNA, 18 nt, Human
uccaggcugggagagccu

SEQ ID NO: 1724185 - RNA, 18 nt, Human
acgccaggggaaaaucag

SEQ ID NO: 1724186 - RNA, 15 nt, Human
acgacugcccggcag

SEQ ID NO: 1724187 - RNA, 18 nt, Human
acgccaucccagccccaa

SEQ ID NO: 1724188 - RNA, 17 nt, Human
acgccaucccagcccca

SEQ ID NO: 1724189 - RNA, 16 nt, Human
acgccaucccagcccc

SEQ ID NO: 1724190 - RNA, 15 nt, Human
acgccaucccagccc

SEQ ID NO: 1724191 - RNA, 14 nt, Human
acgccaucccagcc

SEQ ID NO: 1724192 - RNA, 11 nt, Human
acgccauccca

SEQ ID NO: 1724193 - RNA, 23 nt, Human
acgccaggggaaaaucagccugc

SEQ ID NO: 1724194 - RNA, 16 nt, Human
ucauaauaaguugcau

SEQ ID NO: 1724195 - RNA, 12 nt, Human
ucauaaugacuu

SEQ ID NO: 1724196 - RNA, 18 nt, Human
accugaagacucauucuu

SEQ ID NO: 1724197 - RNA, 19 nt, Human
accugaauuuuggcugugu

SEQ ID NO: 1724198 - RNA, 12 nt, Human
accugagcccca

SEQ ID NO: 1724199 - RNA, 17 nt, Human
accugagccccaaaagg

SEQ ID NO: 1724200 - RNA, 23 nt, Human
accugaggcccuucucuccagcc

SEQ ID NO: 1724201 - RNA, 22 nt, Human
accugaagcuaucguaaaauua

SEQ ID NO: 1724202 - RNA, 17 nt, Human
accugaccccugacccc

SEQ ID NO: 1724203 - RNA, 14 nt, Human
accugaggggccuc

SEQ ID NO: 1724204 - RNA, 16 nt, Human
accugaggggccucuu

SEQ ID NO: 1724205 - RNA, 14 nt, Human
accugauugugucu

SEQ ID NO: 1724206 - RNA, 17 nt, Human
accugccaggaagccag

SEQ ID NO: 1724207 - RNA, 16 nt, Human
accugccaggaagcca

SEQ ID NO: 1724208 - RNA, 19 nt, Human
accugccaggaagccagca

SEQ ID NO: 1724209 - RNA, 18 nt, Human
accugccaggaagccagc

SEQ ID NO: 1724210 - RNA, 17 nt, Human
accugccucggccuccc

SEQ ID NO: 1724211 - RNA, 18 nt, Human
ucauuuuuuuuaagaaaa

SEQ ID NO: 1724212 - RNA, 14 nt, Human
ucauuuuugaauac

SEQ ID NO: 1724213 - RNA, 19 nt, Human
ucauuuuuaguagagacag

SEQ ID NO: 1724214 - RNA, 14 nt, Human
ucauuugucacaca

SEQ ID NO: 1724215 - RNA, 16 nt, Human
ucauuugcuuuggaag

SEQ ID NO: 1724216 - RNA, 15 nt, Human
ucauuugcuuuggaa

SEQ ID NO: 1724217 - RNA, 16 nt, Human
ucauuugucacacacu

SEQ ID NO: 1724218 - RNA, 20 nt, Human
accuggaauauauaaccagu

SEQ ID NO: 1724219 - RNA, 12 nt, Human
accugcucuccu

SEQ ID NO: 1724220 - RNA, 23 nt, Human
accugccuguugggccaggagcc

SEQ ID NO: 1724221 - RNA, 21 nt, Human
accugcgucucauacucaccu

SEQ ID NO: 1724222 - RNA, 16 nt, Human
accugcggugcuaucu

SEQ ID NO: 1724223 - RNA, 18 nt, Human
uccaaggguacuaaggaa

SEQ ID NO: 1724224 - RNA, 19 nt, Human
uccaaaugcagcuuuaaaa

SEQ ID NO: 1724225 - RNA, 13 nt, Human
accuggccucugc

SEQ ID NO: 1724226 - RNA, 12 nt, Human
accuggccucug

SEQ ID NO: 1724227 - RNA, 20 nt, Human
uccacccaggagccccgagg

SEQ ID NO: 1724228 - RNA, 17 nt, Human
uccacccaccucagccu

SEQ ID NO: 1724229 - RNA, 13 nt, Human
uccacccaccuca

SEQ ID NO: 1724230 - RNA, 12 nt, Human
uccacccaccuc

SEQ ID NO: 1724231 - RNA, 18 nt, Human
uccaccaucaagccacca

SEQ ID NO: 1724232 - RNA, 14 nt, Human
accuuuuuuauaca

SEQ ID NO: 1724233 - RNA, 16 nt, Human
accuuuguccccaccg

SEQ ID NO: 1724234 - RNA, 15 nt, Human
accuuuguccccacc

SEQ ID NO: 1724235 - RNA, 14 nt, Human
accuuuguccccac

SEQ ID NO: 1724236 - RNA, 18 nt, Human
accuuuuuuauacauaaa

SEQ ID NO: 1724237 - RNA, 16 nt, Human
accuuuuuuauacaua

SEQ ID NO: 1724238 - RNA, 17 nt, Human
accuuuuuuauacauaa

SEQ ID NO: 1724239 - RNA, 13 nt, Human
accuuugucccca

SEQ ID NO: 1724240 - RNA, 22 nt, Human
accuucuccuucaccuuugucc

SEQ ID NO: 1724241 - RNA, 21 nt, Human
accuggguaacuagggaagau

SEQ ID NO: 1724242 - RNA, 17 nt, Human
accuucccaugcccugg

SEQ ID NO: 1724243 - RNA, 17 nt, Human
accuucgccaccugggu

SEQ ID NO: 1724244 - RNA, 15 nt, Human
accuucgccaccugg

SEQ ID NO: 1724245 - RNA, 13 nt, Human
uccguuaaaauac

SEQ ID NO: 1724246 - RNA, 15 nt, Human
uccguuaaaauacca

SEQ ID NO: 1724247 - RNA, 21 nt, Human
uccuagccugugccucuggga

SEQ ID NO: 1724248 - RNA, 12 nt, Human
uccuacucugug

SEQ ID NO: 1724249 - RNA, 16 nt, Human
acucgaguuacagaca

SEQ ID NO: 1724250 - RNA, 17 nt, Human
acucuggcagcucagag

SEQ ID NO: 1724251 - RNA, 16 nt, Human
acucuggcagcucaga

SEQ ID NO: 1724252 - RNA, 20 nt, Human
acucuggcagcucagagagg

SEQ ID NO: 1724253 - RNA, 19 nt, Human
acucuggcagcucagagag

SEQ ID NO: 1724254 - RNA, 21 nt, Human
acucuuauugcccacgcugga

SEQ ID NO: 1724255 - RNA, 13 nt, Human
acucuugaaaaau

SEQ ID NO: 1724256 - RNA, 21 nt, Human
acucuucaguuaagccuuugg

SEQ ID NO: 1724257 - RNA, 20 nt, Human
acucuucaguuaagccuuug

SEQ ID NO: 1724258 - RNA, 16 nt, Human
acucgcgacaaugcaa

SEQ ID NO: 1724259 - RNA, 15 nt, Human
acucgcgacaaugca

SEQ ID NO: 1724260 - RNA, 17 nt, Human
acucgcgacaaugcaaa

SEQ ID NO: 1724261 - RNA, 14 nt, Human
acucguauaugucu

SEQ ID NO: 1724262 - RNA, 23 nt, Human
acucugacaacagacuucugaaa

SEQ ID NO: 1724263 - RNA, 22 nt, Human
acucugacaacagacuucugaa

SEQ ID NO: 1724264 - RNA, 20 nt, Human
acucugacaacagacuucug

SEQ ID NO: 1724265 - RNA, 18 nt, Human
acucugacaacagacuuc

SEQ ID NO: 1724266 - RNA, 17 nt, Human
acucugacaacagacuu

SEQ ID NO: 1724267 - RNA, 13 nt, Human
acucugacaacag

SEQ ID NO: 1724268 - RNA, 18 nt, Human
uccucuccacugccuucg

SEQ ID NO: 1724269 - RNA, 17 nt, Human
uccucuccacugccuuc

SEQ ID NO: 1724270 - RNA, 15 nt, Human
uccucucugcccuaa

SEQ ID NO: 1724271 - RNA, 14 nt, Human
uccucucugcccua

SEQ ID NO: 1724272 - RNA, 13 nt, Human
uccucucugcccu

SEQ ID NO: 1724273 - RNA, 12 nt, Human
uccucucugccc

SEQ ID NO: 1724274 - RNA, 12 nt, Human
uccucugagccu

SEQ ID NO: 1724275 - RNA, 17 nt, Human
uccucugagccuuggga

SEQ ID NO: 1724276 - RNA, 13 nt, Human
uccucugagccuu

SEQ ID NO: 1724277 - RNA, 21 nt, Human
uccucccaccucagccucccg

SEQ ID NO: 1724278 - RNA, 20 nt, Human
uccucccaccucagccuccc

SEQ ID NO: 1724279 - RNA, 18 nt, Human
uccucccaccucagccuc

SEQ ID NO: 1724280 - RNA, 16 nt, Human
uccucccaccucagcc

SEQ ID NO: 1724281 - RNA, 15 nt, Human
uccucccaccucagc

SEQ ID NO: 1724282 - RNA, 14 nt, Human
uccucccaccucag

SEQ ID NO: 1724283 - RNA, 21 nt, Human
acucuugaaaaaugcauguug

SEQ ID NO: 1724284 - RNA, 19 nt, Human
acucuugaaaaaugcaugu

SEQ ID NO: 1724285 - RNA, 14 nt, Human
acucuugaaaaaug

SEQ ID NO: 1724286 - RNA, 12 nt, Human
uccucugcugcu

SEQ ID NO: 1724287 - RNA, 19 nt, Human
uccucuugccacugccucu

SEQ ID NO: 1724288 - RNA, 14 nt, Human
uccucugaggcuga

SEQ ID NO: 1724289 - RNA, 15 nt, Human
uccugaagaauugaa

SEQ ID NO: 1724290 - RNA, 17 nt, Human
acuagaacugaauuuug

SEQ ID NO: 1724291 - RNA, 18 nt, Human
acuagaacugaauuuugu

SEQ ID NO: 1724292 - RNA, 19 nt, Human
acuagaacugaauuuuguc

SEQ ID NO: 1724293 - RNA, 23 nt, Human
acuagaacugaauuuugucuuua

SEQ ID NO: 1724294 - RNA, 18 nt, Human
acuacggaauaguuggcu

SEQ ID NO: 1724295 - RNA, 22 nt, Human
acuaccuguaaugacaggccug

SEQ ID NO: 1724296 - RNA, 14 nt, Human
acuacuagggaaau

SEQ ID NO: 1724297 - RNA, 16 nt, Human
acuagaacugaauuuu

SEQ ID NO: 1724298 - RNA, 13 nt, Human
acguacacacaca

SEQ ID NO: 1724299 - RNA, 12 nt, Human
acguacacauuu

SEQ ID NO: 1724300 - RNA, 13 nt, Human
acguacacauuuu

SEQ ID NO: 1724301 - RNA, 14 nt, Human
acguacacauuuua

SEQ ID NO: 1724302 - RNA, 22 nt, Human
uccccacuugagaauuacccuu

SEQ ID NO: 1724303 - RNA, 22 nt, Human
uccccuaaagccucaaaacaaa

SEQ ID NO: 1724304 - RNA, 15 nt, Human
uccccuaaagccuca

SEQ ID NO: 1724305 - RNA, 14 nt, Human
acucaaugcacuga

SEQ ID NO: 1724306 - RNA, 20 nt, Human
acucacauuuauucugcuca

SEQ ID NO: 1724307 - RNA, 19 nt, Human
acucacauuuauucugcuc

SEQ ID NO: 1724308 - RNA, 21 nt, Human
acucacauuuauucugcucac

SEQ ID NO: 1724309 - RNA, 21 nt, Human
acuauaauguaagcucuacug

SEQ ID NO: 1724310 - RNA, 15 nt, Human
acuaugauuuggaaa

SEQ ID NO: 1724311 - RNA, 19 nt, Human
acuaugauuuaauuugaaa

SEQ ID NO: 1724312 - RNA, 16 nt, Human
acuaugauuuggaaaa

SEQ ID NO: 1724313 - RNA, 14 nt, Human
acuauaauguaagc

SEQ ID NO: 1724314 - RNA, 13 nt, Human
acuauaauguaag

SEQ ID NO: 1724315 - RNA, 12 nt, Human
acuauaauguaa

SEQ ID NO: 1724316 - RNA, 12 nt, Human
acuauguaucaa

SEQ ID NO: 1724317 - RNA, 13 nt, Human
acuauguugauaa

SEQ ID NO: 1724318 - RNA, 22 nt, Human
acucauugaccugaggcccuuc

SEQ ID NO: 1724319 - RNA, 18 nt, Human
acucauugaccugaggcc

SEQ ID NO: 1724320 - RNA, 17 nt, Human
acucauugaccugaggc

SEQ ID NO: 1724321 - RNA, 16 nt, Human
acucauugaccugagg

SEQ ID NO: 1724322 - RNA, 12 nt, Human
acucaucuuagg

SEQ ID NO: 1724323 - RNA, 23 nt, Human
acucaucuagguaaauuacaguu

SEQ ID NO: 1724324 - RNA, 14 nt, Human
acucagaauucucu

SEQ ID NO: 1724325 - RNA, 21 nt, Human
acucagaauucucuaguuuga

SEQ ID NO: 1724326 - RNA, 22 nt, Human
acucagaauucucuaguuugau

SEQ ID NO: 1724327 - RNA, 18 nt, Human
acucagaagacacugaug

SEQ ID NO: 1724328 - RNA, 17 nt, Human
acucagaagacacugau

SEQ ID NO: 1724329 - RNA, 16 nt, Human
acucagaagacacuga

SEQ ID NO: 1724330 - RNA, 15 nt, Human
acucagaagacacug

SEQ ID NO: 1724331 - RNA, 14 nt, Human
acucagaagacacu

SEQ ID NO: 1724332 - RNA, 19 nt, Human
acucaccugccccucaacu

SEQ ID NO: 1724333 - RNA, 14 nt, Human
acucaccugccccu

SEQ ID NO: 1724334 - RNA, 21 nt, Human
acucaccugccccucaacucu

SEQ ID NO: 1724335 - RNA, 20 nt, Human
ucccucagucuggcccuucc

SEQ ID NO: 1724336 - RNA, 18 nt, Human
ucccucagucuggcccuu

SEQ ID NO: 1724337 - RNA, 13 nt, Human
ucccucuuucccu

SEQ ID NO: 1724338 - RNA, 11 nt, Human
ucccucuuucc

SEQ ID NO: 1724339 - RNA, 22 nt, Human
ucccugaaggccccgcccaggc

SEQ ID NO: 1724340 - RNA, 21 nt, Human
ucccugaaggccccgcccagg

SEQ ID NO: 1724341 - RNA, 18 nt, Human
ucccugaaggccccgccc

SEQ ID NO: 1724342 - RNA, 23 nt, Human
ucccugaaggccccgcccaggcu

SEQ ID NO: 1724343 - RNA, 17 nt, Human
acucaccccagccccaa

SEQ ID NO: 1724344 - RNA, 20 nt, Human
acucaccucccccaucucuu

SEQ ID NO: 1724345 - RNA, 19 nt, Human
acucaccucccccaucucu

SEQ ID NO: 1724346 - RNA, 17 nt, Human
uagcgcccaguugggug

SEQ ID NO: 1724347 - RNA, 14 nt, Human
uagcgcccaguugg

SEQ ID NO: 1724348 - RNA, 21 nt, Human
uagccuuagaagucacacagu

SEQ ID NO: 1724349 - RNA, 20 nt, Human
uagccuuagaagucacacag

SEQ ID NO: 1724350 - RNA, 14 nt, Human
uaggaaaaacugau

SEQ ID NO: 1724351 - RNA, 13 nt, Human
uaggaaaaacuga

SEQ ID NO: 1724352 - RNA, 13 nt, Human
uagcuuuucccuu

SEQ ID NO: 1724353 - RNA, 23 nt, Human
uagcuuuaaugauaugcuuguaa

SEQ ID NO: 1724354 - RNA, 13 nt, Human
uaggauguugaaa

SEQ ID NO: 1724355 - RNA, 14 nt, Human
uaggcaggaccugu

SEQ ID NO: 1724356 - RNA, 15 nt, Human
uaggcaggaccugug

SEQ ID NO: 1724357 - RNA, 17 nt, Human
uaggaaaaacugauuuu

SEQ ID NO: 1724358 - RNA, 16 nt, Human
uaggaaaaacugauuu

SEQ ID NO: 1724359 - RNA, 13 nt, Human
uagggaagauaau

SEQ ID NO: 1724360 - RNA, 21 nt, Human
uagggaaggauacaaaagcau

SEQ ID NO: 1724361 - RNA, 19 nt, Human
uagggauggggcugugggg

SEQ ID NO: 1724362 - RNA, 21 nt, Human
acaaugcaaaccaucauugaa

SEQ ID NO: 1724363 - RNA, 19 nt, Human
acaaugcaaaccaucauug

SEQ ID NO: 1724364 - RNA, 23 nt, Human
acaaugcaaaccaucauugaaau

SEQ ID NO: 1724365 - RNA, 15 nt, Human
uaggguuauaauaau

SEQ ID NO: 1724366 - RNA, 15 nt, Human
uagggugggccuuca

SEQ ID NO: 1724367 - RNA, 17 nt, Human
uaggguuauaauaaugu

SEQ ID NO: 1724368 - RNA, 19 nt, Human
uaggguaagugagagaggg

SEQ ID NO: 1724369 - RNA, 13 nt, Human
uaggguccugggg

SEQ ID NO: 1724370 - RNA, 18 nt, Human
acaaugcaaaccaucauu

SEQ ID NO: 1724371 - RNA, 17 nt, Human
acaaugcaaaccaucau

SEQ ID NO: 1724372 - RNA, 16 nt, Human
acaaugcaaaccauca

SEQ ID NO: 1724373 - RNA, 11 nt, Human
acaaugcaaac

SEQ ID NO: 1724374 - RNA, 20 nt, Human
acaaugacuuacuguacaug

SEQ ID NO: 1724375 - RNA, 22 nt, Human
acaaugacuuacuguacaugaa

SEQ ID NO: 1724376 - RNA, 22 nt, Human
acacaggcccggcuccaggcuc

SEQ ID NO: 1724377 - RNA, 21 nt, Human
acacaggcccggcuccaggcu

SEQ ID NO: 1724378 - RNA, 20 nt, Human
acacaggcccggcuccaggc

SEQ ID NO: 1724379 - RNA, 19 nt, Human
acacaggcccggcuccagg

SEQ ID NO: 1724380 - RNA, 24 nt, Human
acacaggcccggcuccaggcuccu

SEQ ID NO: 1724381 - RNA, 23 nt, Human
acacaggcccggcuccaggcucc

SEQ ID NO: 1724382 - RNA, 18 nt, Human
acacaggcccggcuccag

SEQ ID NO: 1724383 - RNA, 17 nt, Human
acacaggcccggcucca

SEQ ID NO: 1724384 - RNA, 16 nt, Human
acacaggcccggcucc

SEQ ID NO: 1724385 - RNA, 23 nt, Human
acacacagauuugagcucagccc

SEQ ID NO: 1724386 - RNA, 16 nt, Human
acacaguauuacuucu

SEQ ID NO: 1724387 - RNA, 19 nt, Human
acacaguaccauuuaaugg

SEQ ID NO: 1724388 - RNA, 16 nt, Human
uaguaaaaauaaaauu

SEQ ID NO: 1724389 - RNA, 13 nt, Human
uaguaaaaauaaa

SEQ ID NO: 1724390 - RNA, 22 nt, Human
uaguagagacaggguuuugcca

SEQ ID NO: 1724391 - RNA, 15 nt, Human
uaguagagacagggu

SEQ ID NO: 1724392 - RNA, 14 nt, Human
uagucacugagaca

SEQ ID NO: 1724393 - RNA, 13 nt, Human
uaguagagacggg

SEQ ID NO: 1724394 - RNA, 12 nt, Human
uaguaaucauau

SEQ ID NO: 1724395 - RNA, 21 nt, Human
uagacagucccugccaaugga

SEQ ID NO: 1724396 - RNA, 17 nt, Human
uagacagucccugccaa

SEQ ID NO: 1724397 - RNA, 21 nt, Human
uagacagagucucacuguugc

SEQ ID NO: 1724398 - RNA, 18 nt, Human
aauuugggggaaaauuua

SEQ ID NO: 1724399 - RNA, 14 nt, Human
aauuugugauacaa

SEQ ID NO: 1724400 - RNA, 20 nt, Human
aauuugugauacaaugcugu

SEQ ID NO: 1724401 - RNA, 17 nt, Human
aauuugugauacaaugc

SEQ ID NO: 1724402 - RNA, 18 nt, Human
aauuugugauacaaugcu

SEQ ID NO: 1724403 - RNA, 18 nt, Human
uagacaauuuauuauggc

SEQ ID NO: 1724404 - RNA, 10 nt, Human
uagacagagu

SEQ ID NO: 1724405 - RNA, 16 nt, Human
uagacagucccugcca

SEQ ID NO: 1724406 - RNA, 17 nt, Human
uagaacucccuuucaac

SEQ ID NO: 1724407 - RNA, 18 nt, Human
uagaacucccuuucaaca

SEQ ID NO: 1724408 - RNA, 16 nt, Human
uagaacucccuuucaa

SEQ ID NO: 1724409 - RNA, 14 nt, Human
aauuccacagcugc

SEQ ID NO: 1724410 - RNA, 13 nt, Human
aauuccacagcug

SEQ ID NO: 1724411 - RNA, 12 nt, Human
aauuccacagcu

SEQ ID NO: 1724412 - RNA, 13 nt, Human
uacuuuuuccugg

SEQ ID NO: 1724413 - RNA, 15 nt, Human
uagcacagacccugc

SEQ ID NO: 1724414 - RNA, 21 nt, Human
uagcacagacccugcccugug

SEQ ID NO: 1724415 - RNA, 20 nt, Human
uagcacagacccugcccugu

SEQ ID NO: 1724416 - RNA, 14 nt, Human
uagcacagacccug

SEQ ID NO: 1724417 - RNA, 24 nt, Human
uagcacagacccugcccugugggc

SEQ ID NO: 1724418 - RNA, 22 nt, Human
uagcacagacccugcccugugg

SEQ ID NO: 1724419 - RNA, 12 nt, Human
uagccaaggcca

SEQ ID NO: 1724420 - RNA, 13 nt, Human
uagccaaggccaa

SEQ ID NO: 1724421 - RNA, 14 nt, Human
uagccaaggccaaa

SEQ ID NO: 1724422 - RNA, 14 nt, Human
uagagccagggucu

SEQ ID NO: 1724423 - RNA, 22 nt, Human
uagagcggagaaaggaagggcu

SEQ ID NO: 1724424 - RNA, 12 nt, Human
aauuuuacauuu

SEQ ID NO: 1724425 - RNA, 22 nt, Human
acagcuaaucagcauucucacu

SEQ ID NO: 1724426 - RNA, 10 nt, Human
uaugggagag

SEQ ID NO: 1724427 - RNA, 23 nt, Human
uaugggacucaaugcacugacau

SEQ ID NO: 1724428 - RNA, 16 nt, Human
uaugggacucaaugca

SEQ ID NO: 1724429 - RNA, 20 nt, Human
uauggcccuggccuagcaua

SEQ ID NO: 1724430 - RNA, 21 nt, Human
uauggcccuggccuagcauac

SEQ ID NO: 1724431 - RNA, 22 nt, Human
uauggcccuggccuagcauacg

SEQ ID NO: 1724432 - RNA, 14 nt, Human
uaugaucacggcuc

SEQ ID NO: 1724433 - RNA, 17 nt, Human
uaugauacuugaaaauu

SEQ ID NO: 1724434 - RNA, 24 nt, Human
uaugauagguuauuuugauguaaa

SEQ ID NO: 1724435 - RNA, 22 nt, Human
uaugcaugaaguaauaugcaca

SEQ ID NO: 1724436 - RNA, 14 nt, Human
uaugcucugcaugu

SEQ ID NO: 1724437 - RNA, 14 nt, Human
uaugaggcauuugu

SEQ ID NO: 1724438 - RNA, 15 nt, Human
uaugaggcauuuguu

SEQ ID NO: 1724439 - RNA, 21 nt, Human
uaugaggcauuuguuugaacu

SEQ ID NO: 1724440 - RNA, 23 nt, Human
uaugaggcauuuguuugaacuga

SEQ ID NO: 1724441 - RNA, 23 nt, Human
uaugaagcuuuuaugugaaacau

SEQ ID NO: 1724442 - RNA, 22 nt, Human
uaugaagcuuuuaugugaaaca

SEQ ID NO: 1724443 - RNA, 20 nt, Human
uaugaagcuuuuaugugaaa

SEQ ID NO: 1724444 - RNA, 16 nt, Human
acagcccgggcucugc

SEQ ID NO: 1724445 - RNA, 23 nt, Human
acagcccuccaucuaaacugccc

SEQ ID NO: 1724446 - RNA, 15 nt, Human
acagcccgggcucug

SEQ ID NO: 1724447 - RNA, 16 nt, Human
acagccccuccuccau

SEQ ID NO: 1724448 - RNA, 14 nt, Human
acagccccuccucc

SEQ ID NO: 1724449 - RNA, 17 nt, Human
acagcagccccugcaca

SEQ ID NO: 1724450 - RNA, 19 nt, Human
acagcacgggggccaagga

SEQ ID NO: 1724451 - RNA, 22 nt, Human
acagauuugagcucagcccugg

SEQ ID NO: 1724452 - RNA, 14 nt, Human
acagauuuggaaag

SEQ ID NO: 1724453 - RNA, 15 nt, Human
acagauuuggaaaga

SEQ ID NO: 1724454 - RNA, 21 nt, Human
acagauuuggaaagacuggac

SEQ ID NO: 1724455 - RNA, 19 nt, Human
acagcuaaugggacacuaa

SEQ ID NO: 1724456 - RNA, 17 nt, Human
acagcuaaugggacacu

SEQ ID NO: 1724457 - RNA, 16 nt, Human
acagcuaaugggacac

SEQ ID NO: 1724458 - RNA, 15 nt, Human
acagcuaaugggaca

SEQ ID NO: 1724459 - RNA, 21 nt, Human
acagcuucauuuccugugucu

SEQ ID NO: 1724460 - RNA, 19 nt, Human
acagcuucauuuccugugu

SEQ ID NO: 1724461 - RNA, 17 nt, Human
acagcuucauuuccugu

SEQ ID NO: 1724462 - RNA, 21 nt, Human
acagcuugaccgugaggccag

SEQ ID NO: 1724463 - RNA, 20 nt, Human
acagcuugaccgugaggcca

SEQ ID NO: 1724464 - RNA, 17 nt, Human
acagcuugaccgugagg

SEQ ID NO: 1724465 - RNA, 21 nt, Human
acaggaaaagcugcugacagu

SEQ ID NO: 1724466 - RNA, 20 nt, Human
acaggaaaagcugcugacag

SEQ ID NO: 1724467 - RNA, 19 nt, Human
acaggaaaagcugcugaca

SEQ ID NO: 1724468 - RNA, 23 nt, Human
acagcuugaccgugaggccagag

SEQ ID NO: 1724469 - RNA, 22 nt, Human
acagcuugaccgugaggccaga

SEQ ID NO: 1724470 - RNA, 20 nt, Human
acaggaaaauuuuaaaaaua

SEQ ID NO: 1724471 - RNA, 15 nt, Human
acaggcagauacagg

SEQ ID NO: 1724472 - RNA, 15 nt, Human
acaggacucugccuc

SEQ ID NO: 1724473 - RNA, 16 nt, Human
acaggacucugccucc

SEQ ID NO: 1724474 - RNA, 17 nt, Human
acaggcccggcuccagg

SEQ ID NO: 1724475 - RNA, 16 nt, Human
acaggcccggcuccag

SEQ ID NO: 1724476 - RNA, 13 nt, Human
acaggcaggucca

SEQ ID NO: 1724477 - RNA, 22 nt, Human
acaggcccggcuccaggcuccu

SEQ ID NO: 1724478 - RNA, 21 nt, Human
acaggcccggcuccaggcucc

SEQ ID NO: 1724479 - RNA, 20 nt, Human
acaggcccggcuccaggcuc

SEQ ID NO: 1724480 - RNA, 18 nt, Human
acaggcccggcuccaggc

SEQ ID NO: 1724481 - RNA, 22 nt, Human
acaggcccuuccucuccacugc

SEQ ID NO: 1724482 - RNA, 15 nt, Human
acaggcccuuccucu

SEQ ID NO: 1724483 - RNA, 13 nt, Human
acaggcccuuccu

SEQ ID NO: 1724484 - RNA, 21 nt, Human
uaugucucgugguaggacugu

SEQ ID NO: 1724485 - RNA, 16 nt, Human
acacucauugaccuga

SEQ ID NO: 1724486 - RNA, 18 nt, Human
uauagccuaggugacaga

SEQ ID NO: 1724487 - RNA, 12 nt, Human
uauaggaauuga

SEQ ID NO: 1724488 - RNA, 23 nt, Human
uauaggaacuuaaauaaugugaa

SEQ ID NO: 1724489 - RNA, 15 nt, Human
uauaggcaccuacca

SEQ ID NO: 1724490 - RNA, 22 nt, Human
uauacacuuacacuuuaugcac

SEQ ID NO: 1724491 - RNA, 21 nt, Human
uauaauuuaccugaagucuuu

SEQ ID NO: 1724492 - RNA, 18 nt, Human
uauaauuuaccugaaguc

SEQ ID NO: 1724493 - RNA, 19 nt, Human
uauaagugauugcugguuu

SEQ ID NO: 1724494 - RNA, 21 nt, Human
acacucaaaagcugggcaggu

SEQ ID NO: 1724495 - RNA, 22 nt, Human
acacuaaugaggaaacugcacu

SEQ ID NO: 1724496 - RNA, 15 nt, Human
acacuaaugaggaaa

SEQ ID NO: 1724497 - RNA, 20 nt, Human
uagucacugagacagcccgg

SEQ ID NO: 1724498 - RNA, 17 nt, Human
uagucacugagacagcc

SEQ ID NO: 1724499 - RNA, 18 nt, Human
acagacauacuaaccagc

SEQ ID NO: 1724500 - RNA, 19 nt, Human
acagacauacuaaccagca

SEQ ID NO: 1724501 - RNA, 13 nt, Human
acagaaauguaca

SEQ ID NO: 1724502 - RNA, 16 nt, Human
acagaaagguuuucuu

SEQ ID NO: 1724503 - RNA, 16 nt, Human
acacuuacacuuuaug

SEQ ID NO: 1724504 - RNA, 20 nt, Human
acacuguuucaaacuuuacu

SEQ ID NO: 1724505 - RNA, 23 nt, Human
acacuguuucaaacuuuacuaug

SEQ ID NO: 1724506 - RNA, 19 nt, Human
acacucauugaccugaggc

SEQ ID NO: 1724507 - RNA, 17 nt, Human
acacucauugaccugag

SEQ ID NO: 1724508 - RNA, 17 nt, Human
acacuguuucaaacuuu

SEQ ID NO: 1724509 - RNA, 18 nt, Human
acacuguuucaaacuuua

SEQ ID NO: 1724510 - RNA, 21 nt, Human
acacuuacacuuuaugcacaa

SEQ ID NO: 1724511 - RNA, 18 nt, Human
acacuuacacuuuaugca

SEQ ID NO: 1724512 - RNA, 14 nt, Human
acacuuccauaauc

SEQ ID NO: 1724513 - RNA, 22 nt, Human
acacuucaggcucuucuccuuu

SEQ ID NO: 1724514 - RNA, 19 nt, Human
acacuucaggcucuucucc

SEQ ID NO: 1724515 - RNA, 15 nt, Human
acacuucaggcucuu

SEQ ID NO: 1724516 - RNA, 23 nt, Human
uaucaaauacauuuaaaacauua

SEQ ID NO: 1724517 - RNA, 19 nt, Human
uaucacccagaagaaaaua

SEQ ID NO: 1724518 - RNA, 22 nt, Human
uaucacccagaagaaaauagug

SEQ ID NO: 1724519 - RNA, 17 nt, Human
uaucagaauucucagaa

SEQ ID NO: 1724520 - RNA, 19 nt, Human
uauccaacaucaacaucuu

SEQ ID NO: 1724521 - RNA, 15 nt, Human
uaucccggcugcccu

SEQ ID NO: 1724522 - RNA, 22 nt, Human
aauuaugugccagauuuaugca

SEQ ID NO: 1724523 - RNA, 21 nt, Human
aauuauuuauuaaaugcccag

SEQ ID NO: 1724524 - RNA, 22 nt, Human
aauuauuuauuaaaugcccagc

SEQ ID NO: 1724525 - RNA, 11 nt, Human
aauucaguugu

SEQ ID NO: 1724526 - RNA, 22 nt, Human
aauucaguuguuagugugucuu

SEQ ID NO: 1724527 - RNA, 17 nt, Human
aauucaguuguuagugu

SEQ ID NO: 1724528 - RNA, 16 nt, Human
uaccugaagucuuugu

SEQ ID NO: 1724529 - RNA, 15 nt, Human
uaccugaggggccuc

SEQ ID NO: 1724530 - RNA, 13 nt, Human
uaccugaggggcc

SEQ ID NO: 1724531 - RNA, 14 nt, Human
uaccugaagucuuu

SEQ ID NO: 1724532 - RNA, 13 nt, Human
uaccugaagucuu

SEQ ID NO: 1724533 - RNA, 23 nt, Human
uaccugaagcuaucguaaaauua

SEQ ID NO: 1724534 - RNA, 15 nt, Human
uacccucauguucuu

SEQ ID NO: 1724535 - RNA, 22 nt, Human
uaccucuugagccuugaacuuu

SEQ ID NO: 1724536 - RNA, 23 nt, Human
uaccucuugagccuugaacuuug

SEQ ID NO: 1724537 - RNA, 23 nt, Human
uacccgggaagggggcugggaca

SEQ ID NO: 1724538 - RNA, 20 nt, Human
aauuacaggaaguacuggag

SEQ ID NO: 1724539 - RNA, 19 nt, Human
aauuacaggaaguacugga

SEQ ID NO: 1724540 - RNA, 17 nt, Human
aauuacaggaaguacug

SEQ ID NO: 1724541 - RNA, 16 nt, Human
uaccugaggggccucu

SEQ ID NO: 1724542 - RNA, 16 nt, Human
uaccugccaggaagcc

SEQ ID NO: 1724543 - RNA, 13 nt, Human
aauguucaucaau

SEQ ID NO: 1724544 - RNA, 23 nt, Human
uacagagcccacgcccccacugg

SEQ ID NO: 1724545 - RNA, 21 nt, Human
aaugugcugaaugguuuucaa

SEQ ID NO: 1724546 - RNA, 16 nt, Human
aauguucaucaaugaa

SEQ ID NO: 1724547 - RNA, 20 nt, Human
aauguucaucaaugaaugaa

SEQ ID NO: 1724548 - RNA, 21 nt, Human
aauguucucucuucuccaccu

SEQ ID NO: 1724549 - RNA, 12 nt, Human
aauuaacuuuua

SEQ ID NO: 1724550 - RNA, 13 nt, Human
aauuaacuuuuau

SEQ ID NO: 1724551 - RNA, 17 nt, Human
aauuaaguacuauguau

SEQ ID NO: 1724552 - RNA, 16 nt, Human
aauuaaguacuaugua

SEQ ID NO: 1724553 - RNA, 15 nt, Human
aauuaacuuuuauaa

SEQ ID NO: 1724554 - RNA, 16 nt, Human
aauuaacuuuuauaaa

SEQ ID NO: 1724555 - RNA, 12 nt, Human
uacauucuguua

SEQ ID NO: 1724556 - RNA, 13 nt, Human
uacauuuccuaaa

SEQ ID NO: 1724557 - RNA, 12 nt, Human
uaccagcagagc

SEQ ID NO: 1724558 - RNA, 14 nt, Human
uaccagcagagcac

SEQ ID NO: 1724559 - RNA, 13 nt, Human
uaccagcagagca

SEQ ID NO: 1724560 - RNA, 22 nt, Human
uaccagcagagcaccuuagaca

SEQ ID NO: 1724561 - RNA, 18 nt, Human
uaccagccaguaaauggg

SEQ ID NO: 1724562 - RNA, 19 nt, Human
uaccagggacugaggggag

SEQ ID NO: 1724563 - RNA, 23 nt, Human
uacccccugcaaagcccagcuug

SEQ ID NO: 1724564 - RNA, 19 nt, Human
uacccccugcaaagcccag

SEQ ID NO: 1724565 - RNA, 15 nt, Human
uacccccugcaaagc

SEQ ID NO: 1724566 - RNA, 22 nt, Human
uaauuccguagguuauuuucag

SEQ ID NO: 1724567 - RNA, 13 nt, Human
aaugcaccuggaa

SEQ ID NO: 1724568 - RNA, 16 nt, Human
aaugauuucauucaau

SEQ ID NO: 1724569 - RNA, 11 nt, Human
aaugcaaacca

SEQ ID NO: 1724570 - RNA, 12 nt, Human
aaugcaaaccau

SEQ ID NO: 1724571 - RNA, 14 nt, Human
aaugcaaaccauca

SEQ ID NO: 1724572 - RNA, 22 nt, Human
aaugagaaaucuaaaaaacgaa

SEQ ID NO: 1724573 - RNA, 12 nt, Human
aaugagaaaucu

SEQ ID NO: 1724574 - RNA, 11 nt, Human
aaugagccugg

SEQ ID NO: 1724575 - RNA, 21 nt, Human
aaugaccuuucaauaggaaaa

SEQ ID NO: 1724576 - RNA, 20 nt, Human
aaugagaaaaugucuuuauu

SEQ ID NO: 1724577 - RNA, 13 nt, Human
aaugagccuggca

SEQ ID NO: 1724578 - RNA, 12 nt, Human
aaugagccuggc

SEQ ID NO: 1724579 - RNA, 14 nt, Human
aaugagccuggcaa

SEQ ID NO: 1724580 - RNA, 18 nt, Human
aaugaggucagagccugc

SEQ ID NO: 1724581 - RNA, 16 nt, Human
aaugaggucagagccu

SEQ ID NO: 1724582 - RNA, 24 nt, Human
aaugauuucagcucacugcaaccu

SEQ ID NO: 1724583 - RNA, 15 nt, Human
uacagacaaagcgug

SEQ ID NO: 1724584 - RNA, 14 nt, Human
uacagacaaagcgu

SEQ ID NO: 1724585 - RNA, 13 nt, Human
uacagacaaagcg

SEQ ID NO: 1724586 - RNA, 17 nt, Human
uacaccgggccuggaga

SEQ ID NO: 1724587 - RNA, 15 nt, Human
uacaccgggccugga

SEQ ID NO: 1724588 - RNA, 17 nt, Human
uacagagacagaaagca

SEQ ID NO: 1724589 - RNA, 19 nt, Human
uacagacaaagcguggugg

SEQ ID NO: 1724590 - RNA, 22 nt, Human
uacagagcccacgcccccacug

SEQ ID NO: 1724591 - RNA, 19 nt, Human
uacagagcccacgccccca

SEQ ID NO: 1724592 - RNA, 23 nt, Human
uacagagcagacaguuaagagaa

SEQ ID NO: 1724593 - RNA, 12 nt, Human
aauguaaauaaa

SEQ ID NO: 1724594 - RNA, 16 nt, Human
aaugguuuucuugugu

SEQ ID NO: 1724595 - RNA, 16 nt, Human
aaugguuuucaaaaua

SEQ ID NO: 1724596 - RNA, 14 nt, Human
aaugguuuucaaaa

SEQ ID NO: 1724597 - RNA, 16 nt, Human
aauggaagacagcucu

SEQ ID NO: 1724598 - RNA, 18 nt, Human
aauggaagacagcucuua

SEQ ID NO: 1724599 - RNA, 18 nt, Human
aaugcugguuuuucaguu

SEQ ID NO: 1724600 - RNA, 13 nt, Human
aauggaagacagc

SEQ ID NO: 1724601 - RNA, 22 nt, Human
aaugcuggcuguuggcuggggg

SEQ ID NO: 1724602 - RNA, 21 nt, Human
aaugcuggcuguuggcugggg

SEQ ID NO: 1724603 - RNA, 21 nt, Human
uacaaaaaaaaaaaaaaauua

SEQ ID NO: 1724604 - RNA, 22 nt, Human
uaauuuuuuuuuuccuuuuaaa

SEQ ID NO: 1724605 - RNA, 18 nt, Human
uaauuuuuuugagacaga

SEQ ID NO: 1724606 - RNA, 15 nt, Human
uaauuuuuguauuuu

SEQ ID NO: 1724607 - RNA, 13 nt, Human
uacaaugcugugc

SEQ ID NO: 1724608 - RNA, 14 nt, Human
uacaaugcugugcc

SEQ ID NO: 1724609 - RNA, 16 nt, Human
uacaaugcugugcccu

SEQ ID NO: 1724610 - RNA, 17 nt, Human
aaucccauuuaaaaaaa

SEQ ID NO: 1724611 - RNA, 12 nt, Human
aaucccaggaug

SEQ ID NO: 1724612 - RNA, 20 nt, Human
aauccucaguuuuugugaaa

SEQ ID NO: 1724613 - RNA, 18 nt, Human
aaucugggccagaauuuc

SEQ ID NO: 1724614 - RNA, 13 nt, Human
aaucucaaauaac

SEQ ID NO: 1724615 - RNA, 18 nt, Human
uaaggaugcuuguacaua

SEQ ID NO: 1724616 - RNA, 17 nt, Human
uaaguguguguuuuuca

SEQ ID NO: 1724617 - RNA, 17 nt, Human
uaaguuaguuccacuga

SEQ ID NO: 1724618 - RNA, 19 nt, Human
uaaguuaguuccacugaga

SEQ ID NO: 1724619 - RNA, 21 nt, Human
uaaguuacacauuuuucagau

SEQ ID NO: 1724620 - RNA, 20 nt, Human
uaaguuaguuccacugagac

SEQ ID NO: 1724621 - RNA, 21 nt, Human
uaagcuauucaguaauaacuc

SEQ ID NO: 1724622 - RNA, 15 nt, Human
uaagcaaaaugugau

SEQ ID NO: 1724623 - RNA, 21 nt, Human
uaagcaaaaugugauauguac

SEQ ID NO: 1724624 - RNA, 14 nt, Human
uaagcaaaauguga

SEQ ID NO: 1724625 - RNA, 14 nt, Human
uaagauucauauuu

SEQ ID NO: 1724626 - RNA, 9 nt, Human
uaaggaaua

SEQ ID NO: 1724627 - RNA, 13 nt, Human
uaaggaagacaau

SEQ ID NO: 1724628 - RNA, 18 nt, Human
uaaggaauaccugucccc

SEQ ID NO: 1724629 - RNA, 17 nt, Human
uaaggaauaccuguccc

SEQ ID NO: 1724630 - RNA, 22 nt, Human
uaaggaauuuuauuuuuuucug

SEQ ID NO: 1724631 - RNA, 21 nt, Human
aaucacguaaagcuagaaaug

SEQ ID NO: 1724632 - RNA, 20 nt, Human
aaucacguaaagcuagaaau

SEQ ID NO: 1724633 - RNA, 15 nt, Human
aauauuuauagguca

SEQ ID NO: 1724634 - RNA, 11 nt, Human
aaucagccugc

SEQ ID NO: 1724635 - RNA, 19 nt, Human
aaucagcauucucacuccu

SEQ ID NO: 1724636 - RNA, 18 nt, Human
aaucagcauucucacucc

SEQ ID NO: 1724637 - RNA, 18 nt, Human
aaucagccugcuccagcu

SEQ ID NO: 1724638 - RNA, 13 nt, Human
aaucagccugcuc

SEQ ID NO: 1724639 - RNA, 19 nt, Human
aaucagccugcuccagcug

SEQ ID NO: 1724640 - RNA, 21 nt, Human
aauaccugucccccugacaac

SEQ ID NO: 1724641 - RNA, 19 nt, Human
aauaccugucccccugaca

SEQ ID NO: 1724642 - RNA, 18 nt, Human
aauaccugucccccugac

SEQ ID NO: 1724643 - RNA, 15 nt, Human
aauaccugucccccu

SEQ ID NO: 1724644 - RNA, 18 nt, Human
aauagcgucauaacuaga

SEQ ID NO: 1724645 - RNA, 12 nt, Human
aauaccaaggaa

SEQ ID NO: 1724646 - RNA, 14 nt, Human
aauacauuuaaaac

SEQ ID NO: 1724647 - RNA, 17 nt, Human
aauacauuuaaaacauu

SEQ ID NO: 1724648 - RNA, 20 nt, Human
aauacauuuaaaacauuaaa

SEQ ID NO: 1724649 - RNA, 21 nt, Human
aauacauuuaaaacauuaaaa

SEQ ID NO: 1724650 - RNA, 22 nt, Human
aauacauuuaaaacauuaaaau

SEQ ID NO: 1724651 - RNA, 23 nt, Human
aauacauuuaaaacauuaaaaua

SEQ ID NO: 1724652 - RNA, 19 nt, Human
aauaccagccaguaaaugg

SEQ ID NO: 1724653 - RNA, 17 nt, Human
aauaccagccaguaaau

SEQ ID NO: 1724654 - RNA, 15 nt, Human
aauacagacuggaug

SEQ ID NO: 1724655 - RNA, 13 nt, Human
aauacagaggcaa

SEQ ID NO: 1724656 - RNA, 21 nt, Human
uaaauuaacuuuuauaaacuu

SEQ ID NO: 1724657 - RNA, 22 nt, Human
uaaauuaacuuuuauaaacuuu

SEQ ID NO: 1724658 - RNA, 18 nt, Human
aaguguauuuuuuuacua

SEQ ID NO: 1724659 - RNA, 21 nt, Human
aaguguauuuuuuuacuaaua

SEQ ID NO: 1724660 - RNA, 18 nt, Human
uaaaugaaaaucgugaca

SEQ ID NO: 1724661 - RNA, 19 nt, Human
uaaauuaacuuuuauaaac

SEQ ID NO: 1724662 - RNA, 20 nt, Human
uaaauuaacuuuuauaaacu

SEQ ID NO: 1724663 - RNA, 13 nt, Human
uaaaugugguaaa

SEQ ID NO: 1724664 - RNA, 17 nt, Human
uaacguauaaaagccug

SEQ ID NO: 1724665 - RNA, 13 nt, Human
uaacguauaaaag

SEQ ID NO: 1724666 - RNA, 13 nt, Human
uaacuucacauau

SEQ ID NO: 1724667 - RNA, 13 nt, Human
uaagaagugaaaa

SEQ ID NO: 1724668 - RNA, 20 nt, Human
uaacuugucuuuggacccug

SEQ ID NO: 1724669 - RNA, 16 nt, Human
uaacuugucuuuggac

SEQ ID NO: 1724670 - RNA, 21 nt, Human
aauauauuuuaagacgaaaca

SEQ ID NO: 1724671 - RNA, 21 nt, Human
aauaguucagguaacaggcag

SEQ ID NO: 1724672 - RNA, 21 nt, Human
aauauauucagccuggcuuca

SEQ ID NO: 1724673 - RNA, 19 nt, Human
uaacaugugaaaagaauag

SEQ ID NO: 1724674 - RNA, 19 nt, Human
uaacauguaauuaaguacu

SEQ ID NO: 1724675 - RNA, 14 nt, Human
uaacaugaauauuu

SEQ ID NO: 1724676 - RNA, 21 nt, Human
uaacaugaauauuuaguguuc

SEQ ID NO: 1724677 - RNA, 20 nt, Human
uaacaugaauauuuaguguu

SEQ ID NO: 1724678 - RNA, 19 nt, Human
uaacaugaauauuuagugu

SEQ ID NO: 1724679 - RNA, 11 nt, Human
gugccuuaugg

SEQ ID NO: 1724680 - RNA, 19 nt, Human
aagaccuucuccuucaccu

SEQ ID NO: 1724681 - RNA, 18 nt, Human
aagaccuucuccuucacc

SEQ ID NO: 1724682 - RNA, 15 nt, Human
aagaccuucuccuuc

SEQ ID NO: 1724683 - RNA, 13 nt, Human
aagacgcugugcu

SEQ ID NO: 1724684 - RNA, 19 nt, Human
aagacgcugugcugcccug

SEQ ID NO: 1724685 - RNA, 18 nt, Human
aagacgcugugcugcccu

SEQ ID NO: 1724686 - RNA, 17 nt, Human
aagacgcugugcugccc

SEQ ID NO: 1724687 - RNA, 15 nt, Human
aagacgcugugcugc

SEQ ID NO: 1724688 - RNA, 23 nt, Human
aagacugaguacguugugcauuu

SEQ ID NO: 1724689 - RNA, 20 nt, Human
aagacgcugugcugcccugc

SEQ ID NO: 1724690 - RNA, 16 nt, Human
aagacgugauuuugcu

SEQ ID NO: 1724691 - RNA, 22 nt, Human
aagacgugauuuugcuguagaa

SEQ ID NO: 1724692 - RNA, 23 nt, Human
aagacgugauuuugcuguagaag

SEQ ID NO: 1724693 - RNA, 16 nt, Human
aagacuuuggaaagac

SEQ ID NO: 1724694 - RNA, 16 nt, Human
aagacuuccagagccu

SEQ ID NO: 1724695 - RNA, 18 nt, Human
aagacuuccagagccuca

SEQ ID NO: 1724696 - RNA, 23 nt, Human
aagaggaaugaaguacucauaca

SEQ ID NO: 1724697 - RNA, 22 nt, Human
guggccucccaacucaccccag

SEQ ID NO: 1724698 - RNA, 21 nt, Human
guggccucccaacucacccca

SEQ ID NO: 1724699 - RNA, 23 nt, Human
gugggaggaucucuugagccugg

SEQ ID NO: 1724700 - RNA, 17 nt, Human
gugggaagggcuacacc

SEQ ID NO: 1724701 - RNA, 18 nt, Human
gugggagcugccuguuca

SEQ ID NO: 1724702 - RNA, 15 nt, Human
gugggagcugccugu

SEQ ID NO: 1724703 - RNA, 15 nt, Human
guggggucacucugg

SEQ ID NO: 1724704 - RNA, 22 nt, Human
guggcgcagcauauucaggaag

SEQ ID NO: 1724705 - RNA, 15 nt, Human
gugggacacccugug

SEQ ID NO: 1724706 - RNA, 14 nt, Human
gugggagcugccug

SEQ ID NO: 1724707 - RNA, 13 nt, Human
gugggacacccug

SEQ ID NO: 1724708 - RNA, 21 nt, Human
gugugaccacugcagaagaca

SEQ ID NO: 1724709 - RNA, 22 nt, Human
gugugacaaggauugcuacugu

SEQ ID NO: 1724710 - RNA, 16 nt, Human
gugugguagagugugc

SEQ ID NO: 1724711 - RNA, 20 nt, Human
gugugugaaaaugugugugu

SEQ ID NO: 1724712 - RNA, 13 nt, Human
aagauguagagga

SEQ ID NO: 1724713 - RNA, 20 nt, Human
gugucaagagggucugagga

SEQ ID NO: 1724714 - RNA, 17 nt, Human
guguauuuuuuuacuaa

SEQ ID NO: 1724715 - RNA, 23 nt, Human
guguauuuuuuuacuaauagaca

SEQ ID NO: 1724716 - RNA, 16 nt, Human
gugucagcauagaagu

SEQ ID NO: 1724717 - RNA, 14 nt, Human
aagaguaggaagac

SEQ ID NO: 1724718 - RNA, 13 nt, Human
aagaguaggaaga

SEQ ID NO: 1724719 - RNA, 16 nt, Human
aagaucguucucugcc

SEQ ID NO: 1724720 - RNA, 17 nt, Human
aagaucguucucugccu

SEQ ID NO: 1724721 - RNA, 16 nt, Human
aagaugcuucucacug

SEQ ID NO: 1724722 - RNA, 17 nt, Human
aagaugcuucucacugc

SEQ ID NO: 1724723 - RNA, 18 nt, Human
aagauggcugugccucug

SEQ ID NO: 1724724 - RNA, 19 nt, Human
aagaugcuucucacugcca

SEQ ID NO: 1724725 - RNA, 23 nt, Human
aagauggcugugccucugccugu

SEQ ID NO: 1724726 - RNA, 21 nt, Human
aagauggcugugccucugccu

SEQ ID NO: 1724727 - RNA, 20 nt, Human
aagauggcugugccucugcc

SEQ ID NO: 1724728 - RNA, 22 nt, Human
guggggucacucuggcagcuca

SEQ ID NO: 1724729 - RNA, 21 nt, Human
guggggucacucuggcagcuc

SEQ ID NO: 1724730 - RNA, 20 nt, Human
guggggucacucuggcagcu

SEQ ID NO: 1724731 - RNA, 17 nt, Human
guggggucacucuggca

SEQ ID NO: 1724732 - RNA, 23 nt, Human
aagagggagggagggcuccagac

SEQ ID NO: 1724733 - RNA, 22 nt, Human
aagagggucugaggaauccaga

SEQ ID NO: 1724734 - RNA, 12 nt, Human
aagaguaggaag

SEQ ID NO: 1724735 - RNA, 23 nt, Human
guuauuuuuauuuauuuaaauuu

SEQ ID NO: 1724736 - RNA, 20 nt, Human
guuauuuugauguaaagaug

SEQ ID NO: 1724737 - RNA, 20 nt, Human
guucaaagauauuuugcuuu

SEQ ID NO: 1724738 - RNA, 21 nt, Human
guucaaagauauuuugcuuug

SEQ ID NO: 1724739 - RNA, 22 nt, Human
guucaaagauauuuugcuuugu

SEQ ID NO: 1724740 - RNA, 18 nt, Human
guucaagcgauucuucug

SEQ ID NO: 1724741 - RNA, 12 nt, Human
guuaagagaaau

SEQ ID NO: 1724742 - RNA, 11 nt, Human
guuaagagaaa

SEQ ID NO: 1724743 - RNA, 18 nt, Human
guuaagagaaaugagcuu

SEQ ID NO: 1724744 - RNA, 20 nt, Human
guuaggcauugugggaaggg

SEQ ID NO: 1724745 - RNA, 19 nt, Human
guuaggcauugugggaagg

SEQ ID NO: 1724746 - RNA, 18 nt, Human
aagcuccaagcucccagg

SEQ ID NO: 1724747 - RNA, 17 nt, Human
aagcuccaagcucccag

SEQ ID NO: 1724748 - RNA, 19 nt, Human
aagcucagggccuggcuca

SEQ ID NO: 1724749 - RNA, 18 nt, Human
aagcucagggccuggcuc

SEQ ID NO: 1724750 - RNA, 20 nt, Human
aagcucagggccuggcucag

SEQ ID NO: 1724751 - RNA, 17 nt, Human
aagcucagggccuggcu

SEQ ID NO: 1724752 - RNA, 16 nt, Human
aagcucagggccuggc

SEQ ID NO: 1724753 - RNA, 13 nt, Human
aagcucagggccu

SEQ ID NO: 1724754 - RNA, 12 nt, Human
aagcucagggcc

SEQ ID NO: 1724755 - RNA, 20 nt, Human
aagccugaguuugcuuucaa

SEQ ID NO: 1724756 - RNA, 16 nt, Human
aagcuaggccuggcca

SEQ ID NO: 1724757 - RNA, 12 nt, Human
aagcuaggccug

SEQ ID NO: 1724758 - RNA, 13 nt, Human
guucagcuccagc

SEQ ID NO: 1724759 - RNA, 15 nt, Human
guucagcuccagcuc

SEQ ID NO: 1724760 - RNA, 15 nt, Human
aagccucaaaacaaa

SEQ ID NO: 1724761 - RNA, 16 nt, Human
aagccucaaaacaaag

SEQ ID NO: 1724762 - RNA, 18 nt, Human
aagccucaaaacaaaggc

SEQ ID NO: 1724763 - RNA, 21 nt, Human
gugugugcgccuacaggagug

SEQ ID NO: 1724764 - RNA, 12 nt, Human
aagcagugcaug

SEQ ID NO: 1724765 - RNA, 20 nt, Human
aagcagugcaugcugucccu

SEQ ID NO: 1724766 - RNA, 15 nt, Human
aagcagugcaugcug

SEQ ID NO: 1724767 - RNA, 14 nt, Human
aagcagugcaugcu

SEQ ID NO: 1724768 - RNA, 16 nt, Human
aagcauuuacuuugug

SEQ ID NO: 1724769 - RNA, 17 nt, Human
aagcauuuuguaauaau

SEQ ID NO: 1724770 - RNA, 14 nt, Human
aagcauuuuguaau

SEQ ID NO: 1724771 - RNA, 22 nt, Human
aagccaaagcuaggccuggcca

SEQ ID NO: 1724772 - RNA, 17 nt, Human
aagcccaggaaaggcuc

SEQ ID NO: 1724773 - RNA, 14 nt, Human
aagcccaggaaagg

SEQ ID NO: 1724774 - RNA, 22 nt, Human
aagcccaggaaaggcuccagga

SEQ ID NO: 1724775 - RNA, 19 nt, Human
aagcccaggaaaggcucca

SEQ ID NO: 1724776 - RNA, 20 nt, Human
aagccgcuggggccaguugg

SEQ ID NO: 1724777 - RNA, 23 nt, Human
aagcccuuccaugucgccucugc

SEQ ID NO: 1724778 - RNA, 20 nt, Human
aagcccuuccaugucgccuc

SEQ ID NO: 1724779 - RNA, 15 nt, Human
aagcccuuccauguc

SEQ ID NO: 1724780 - RNA, 19 nt, Human
aagcccugagcuuucugcu

SEQ ID NO: 1724781 - RNA, 20 nt, Human
uaaaagacagugaaagaaaa

SEQ ID NO: 1724782 - RNA, 13 nt, Human
uaaaagacuuuuu

SEQ ID NO: 1724783 - RNA, 13 nt, Human
uaaaauaauuuug

SEQ ID NO: 1724784 - RNA, 14 nt, Human
uaaaauaauuuugu

SEQ ID NO: 1724785 - RNA, 22 nt, Human
uaaaauaccagccaguaaaugg

SEQ ID NO: 1724786 - RNA, 15 nt, Human
uaaaauaauuuugua

SEQ ID NO: 1724787 - RNA, 16 nt, Human
uaaaauaauuuuguaa

SEQ ID NO: 1724788 - RNA, 21 nt, Human
uaaaauaauuuuguaauguau

SEQ ID NO: 1724789 - RNA, 18 nt, Human
aagugauucuccugccuc

SEQ ID NO: 1724790 - RNA, 17 nt, Human
aagugauucuccugccu

SEQ ID NO: 1724791 - RNA, 16 nt, Human
aagugauucuccugcc

SEQ ID NO: 1724792 - RNA, 15 nt, Human
aagugauucuccugc

SEQ ID NO: 1724793 - RNA, 19 nt, Human
aagugauucuccugccuca

SEQ ID NO: 1724794 - RNA, 20 nt, Human
aagugauucuccugccucag

SEQ ID NO: 1724795 - RNA, 21 nt, Human
aagugauucucaugccucagc

SEQ ID NO: 1724796 - RNA, 16 nt, Human
aagugaggaugaaaaa

SEQ ID NO: 1724797 - RNA, 20 nt, Human
aagugauucucaugccucag

SEQ ID NO: 1724798 - RNA, 22 nt, Human
uaaaauauuccugcauuuguga

SEQ ID NO: 1724799 - RNA, 13 nt, Human
uaaaauauuccug

SEQ ID NO: 1724800 - RNA, 19 nt, Human
uaaaaaucucaaauuucua

SEQ ID NO: 1724801 - RNA, 20 nt, Human
uaaaaaucucaaauuucuaa

SEQ ID NO: 1724802 - RNA, 21 nt, Human
uaaaaaucucaaauuucuaaa

SEQ ID NO: 1724803 - RNA, 22 nt, Human
uaaaacuugauguguuaucucu

SEQ ID NO: 1724804 - RNA, 20 nt, Human
uaaaacuugauguguuaucu

SEQ ID NO: 1724805 - RNA, 15 nt, Human
guuuuucuucucccu

SEQ ID NO: 1724806 - RNA, 15 nt, Human
uaaaaaguggaaaaa

SEQ ID NO: 1724807 - RNA, 19 nt, Human
uaaaaauaaaaaacacugg

SEQ ID NO: 1724808 - RNA, 18 nt, Human
uaaaaauaaaaaacacug

SEQ ID NO: 1724809 - RNA, 15 nt, Human
uaaaaaucucaaauu

SEQ ID NO: 1724810 - RNA, 16 nt, Human
uaaaaaucucaaauuu

SEQ ID NO: 1724811 - RNA, 17 nt, Human
uaaaaaucucaaauuuc

SEQ ID NO: 1724812 - RNA, 21 nt, Human
uaaaaauaaaaaacacuggga

SEQ ID NO: 1724813 - RNA, 16 nt, Human
aagucuuucacauuua

SEQ ID NO: 1724814 - RNA, 21 nt, Human
aagucaugcguuuaaucacau

SEQ ID NO: 1724815 - RNA, 19 nt, Human
guuuuuccuguucuuaaga

SEQ ID NO: 1724816 - RNA, 14 nt, Human
aagugagagcuggg

SEQ ID NO: 1724817 - RNA, 12 nt, Human
aagugagagagg

SEQ ID NO: 1724818 - RNA, 15 nt, Human
aagugagagcugggu

SEQ ID NO: 1724819 - RNA, 15 nt, Human
guuuuucauaaagca

SEQ ID NO: 1724820 - RNA, 21 nt, Human
aagugaaaaaggaggaagaga

SEQ ID NO: 1724821 - RNA, 12 nt, Human
aagugaaaacuu

SEQ ID NO: 1724822 - RNA, 12 nt, Human
aagugaaaauau

SEQ ID NO: 1724823 - RNA, 14 nt, Human
aagugaaaauauag

SEQ ID NO: 1724824 - RNA, 17 nt, Human
aagugaagacaaugacu

SEQ ID NO: 1724825 - RNA, 19 nt, Human
aagugaagacaaugacuua

SEQ ID NO: 1724826 - RNA, 18 nt, Human
aagugagacuuugagggu

SEQ ID NO: 1724827 - RNA, 23 nt, Human
aaguacacuguuucaaacuuuac

SEQ ID NO: 1724828 - RNA, 19 nt, Human
aaguacacuguuucaaacu

SEQ ID NO: 1724829 - RNA, 20 nt, Human
aaguacacuguuucaaacuu

SEQ ID NO: 1724830 - RNA, 13 nt, Human
aaguacacuguuu

SEQ ID NO: 1724831 - RNA, 18 nt, Human
aaguacacuguuucaaac

SEQ ID NO: 1724832 - RNA, 21 nt, Human
aaguaauccaccugccucggc

SEQ ID NO: 1724833 - RNA, 22 nt, Human
guuuugccauguuggccaggcu

SEQ ID NO: 1724834 - RNA, 21 nt, Human
guuuugccauguuggccaggc

SEQ ID NO: 1724835 - RNA, 20 nt, Human
guuuugccauguuggccagg

SEQ ID NO: 1724836 - RNA, 16 nt, Human
guuuugccauguuggc

SEQ ID NO: 1724837 - RNA, 15 nt, Human
guuucugccgcagcc

SEQ ID NO: 1724838 - RNA, 18 nt, Human
guuucugccgcagcccug

SEQ ID NO: 1724839 - RNA, 14 nt, Human
guuucugccgcagc

SEQ ID NO: 1724840 - RNA, 23 nt, Human
aaggcucugagcaaauguggcuc

SEQ ID NO: 1724841 - RNA, 22 nt, Human
aaggggcccaaauucuuucagu

SEQ ID NO: 1724842 - RNA, 18 nt, Human
aagguacuuucauauuuu

SEQ ID NO: 1724843 - RNA, 19 nt, Human
aagguacuuucauauuuua

SEQ ID NO: 1724844 - RNA, 22 nt, Human
aagguacuuucauauuuuaaac

SEQ ID NO: 1724845 - RNA, 20 nt, Human
aagguagaaauaucugaaaa

SEQ ID NO: 1724846 - RNA, 18 nt, Human
guuucugaaagggacgcu

SEQ ID NO: 1724847 - RNA, 19 nt, Human
guuucuauguguagggcgg

SEQ ID NO: 1724848 - RNA, 14 nt, Human
guuucucaaagaaa

SEQ ID NO: 1724849 - RNA, 17 nt, Human
guuucucaaagaaauuu

SEQ ID NO: 1724850 - RNA, 18 nt, Human
guuucucaaagaaauuuc

SEQ ID NO: 1724851 - RNA, 12 nt, Human
aaggucauuuuu

SEQ ID NO: 1724852 - RNA, 16 nt, Human
aaguaaggaauuuuau

SEQ ID NO: 1724853 - RNA, 13 nt, Human
aaguaagcaaaga

SEQ ID NO: 1724854 - RNA, 13 nt, Human
guuuauugucaaa

SEQ ID NO: 1724855 - RNA, 15 nt, Human
guugggcugguguca

SEQ ID NO: 1724856 - RNA, 17 nt, Human
guugggccaggagccuc

SEQ ID NO: 1724857 - RNA, 15 nt, Human
guugggccaggagcc

SEQ ID NO: 1724858 - RNA, 13 nt, Human
guugggcuggugu

SEQ ID NO: 1724859 - RNA, 17 nt, Human
guuucaaacuuuacuau

SEQ ID NO: 1724860 - RNA, 15 nt, Human
aaggcuccaggagca

SEQ ID NO: 1724861 - RNA, 18 nt, Human
aaggcuccaggagcagcc

SEQ ID NO: 1724862 - RNA, 16 nt, Human
aaggcuccaggagcag

SEQ ID NO: 1724863 - RNA, 14 nt, Human
guuucaaacuuuac

SEQ ID NO: 1724864 - RNA, 16 nt, Human
guuucaaacuuuacua

SEQ ID NO: 1724865 - RNA, 13 nt, Human
guuucaaacuuua

SEQ ID NO: 1724866 - RNA, 18 nt, Human
aaggcucgagcaugccug

SEQ ID NO: 1724867 - RNA, 16 nt, Human
aaggcucgagcaugcc

SEQ ID NO: 1724868 - RNA, 22 nt, Human
aaggcuccaggagcagccacau

SEQ ID NO: 1724869 - RNA, 19 nt, Human
aaggcuccaggagcagcca

SEQ ID NO: 1724870 - RNA, 20 nt, Human
aaggcucgagcaugccugga

SEQ ID NO: 1724871 - RNA, 19 nt, Human
aaggcucgagcaugccugg

SEQ ID NO: 1724872 - RNA, 22 nt, Human
aaggcucgagcaugccuggaug

SEQ ID NO: 1724873 - RNA, 13 nt, Human
guugcccaggcug

SEQ ID NO: 1724874 - RNA, 12 nt, Human
guugcccaggcu

SEQ ID NO: 1724875 - RNA, 23 nt, Human
guugcccaggcaggucuugaacu

SEQ ID NO: 1724876 - RNA, 22 nt, Human
aaggccuaauucuaugccuguc

SEQ ID NO: 1724877 - RNA, 16 nt, Human
aaggccaaaggaagca

SEQ ID NO: 1724878 - RNA, 13 nt, Human
aaggauacaaaag

SEQ ID NO: 1724879 - RNA, 21 nt, Human
aaggauacaaaagcaugugag

SEQ ID NO: 1724880 - RNA, 17 nt, Human
aaggagauuuacaacug

SEQ ID NO: 1724881 - RNA, 14 nt, Human
aaggagauuuacaa

SEQ ID NO: 1724882 - RNA, 18 nt, Human
aaggaauaccuguccccc

SEQ ID NO: 1724883 - RNA, 11 nt, Human
aaggagagcua

SEQ ID NO: 1724884 - RNA, 18 nt, Human
aaggaggaagagaaaaaa

SEQ ID NO: 1724885 - RNA, 20 nt, Human
aaggaggggauagagagaga

SEQ ID NO: 1724886 - RNA, 13 nt, Human
aaggaagcacaug

SEQ ID NO: 1724887 - RNA, 15 nt, Human
aaggaagacuucauc

SEQ ID NO: 1724888 - RNA, 14 nt, Human
aaggaagacuucau

SEQ ID NO: 1724889 - RNA, 16 nt, Human
aaggaagcacaugccu

SEQ ID NO: 1724890 - RNA, 17 nt, Human
aaggaauaccugucccc

SEQ ID NO: 1724891 - RNA, 21 nt, Human
aaggaauaaauugcuccuuga

SEQ ID NO: 1724892 - RNA, 15 nt, Human
aaggaaagagggagg

SEQ ID NO: 1724893 - RNA, 20 nt, Human
aagcuccaucuccacuccag

SEQ ID NO: 1724894 - RNA, 14 nt, Human
aagcuccaucucca

SEQ ID NO: 1724895 - RNA, 16 nt, Human
aacaaggcaaggcugu

SEQ ID NO: 1724896 - RNA, 18 nt, Human
aaauuuugauguuuuaag

SEQ ID NO: 1724897 - RNA, 23 nt, Human
aaauuuugauguuuuaaggaugc

SEQ ID NO: 1724898 - RNA, 12 nt, Human
aacaauaaaaga

SEQ ID NO: 1724899 - RNA, 21 nt, Human
aacaaggcaaggcugucaauu

SEQ ID NO: 1724900 - RNA, 18 nt, Human
aacaaggcaaggcuguca

SEQ ID NO: 1724901 - RNA, 22 nt, Human
gucacacaguauuacuucugcu

SEQ ID NO: 1724902 - RNA, 21 nt, Human
gucacacaguauuacuucugc

SEQ ID NO: 1724903 - RNA, 17 nt, Human
gucagaauagaaauuag

SEQ ID NO: 1724904 - RNA, 13 nt, Human
gucagaauagaaa

SEQ ID NO: 1724905 - RNA, 18 nt, Human
aaauuuguuauaaugaau

SEQ ID NO: 1724906 - RNA, 13 nt, Human
gucauaacuagaa

SEQ ID NO: 1724907 - RNA, 19 nt, Human
gucauuuuuuuuaagaaaa

SEQ ID NO: 1724908 - RNA, 21 nt, Human
gucauuuuuuuuaagaaaaag

SEQ ID NO: 1724909 - RNA, 18 nt, Human
guccaagaagcccaggaa

SEQ ID NO: 1724910 - RNA, 17 nt, Human
guccaagaagcccagga

SEQ ID NO: 1724911 - RNA, 20 nt, Human
guccaagaagcccaggaaag

SEQ ID NO: 1724912 - RNA, 16 nt, Human
guccaagaagcccagg

SEQ ID NO: 1724913 - RNA, 15 nt, Human
guccaagaagcccag

SEQ ID NO: 1724914 - RNA, 13 nt, Human
guccaagaagccc

SEQ ID NO: 1724915 - RNA, 16 nt, Human
gucccaccuuggcugc

SEQ ID NO: 1724916 - RNA, 15 nt, Human
gucccaccuuggcug

SEQ ID NO: 1724917 - RNA, 14 nt, Human
gucccaccuuggcu

SEQ ID NO: 1724918 - RNA, 21 nt, Human
gucccaccccacacacgccag

SEQ ID NO: 1724919 - RNA, 14 nt, Human
guccauagagagca

SEQ ID NO: 1724920 - RNA, 13 nt, Human
guccauagagagc

SEQ ID NO: 1724921 - RNA, 15 nt, Human
aacagugauuaccag

SEQ ID NO: 1724922 - RNA, 22 nt, Human
aacagugauuaccagggacuga

SEQ ID NO: 1724923 - RNA, 16 nt, Human
aacagauaaauaguuu

SEQ ID NO: 1724924 - RNA, 13 nt, Human
guccuacucugug

SEQ ID NO: 1724925 - RNA, 18 nt, Human
gucccccuuccauggacu

SEQ ID NO: 1724926 - RNA, 16 nt, Human
gucccccuuccaugga

SEQ ID NO: 1724927 - RNA, 14 nt, Human
gucccccuuccaug

SEQ ID NO: 1724928 - RNA, 12 nt, Human
guccuacucugu

SEQ ID NO: 1724929 - RNA, 16 nt, Human
guccuacccacccucc

SEQ ID NO: 1724930 - RNA, 12 nt, Human
aacagaaaugua

SEQ ID NO: 1724931 - RNA, 13 nt, Human
aacagaaauguac

SEQ ID NO: 1724932 - RNA, 14 nt, Human
aacagaaauguaca

SEQ ID NO: 1724933 - RNA, 15 nt, Human
aacagaaauguacag

SEQ ID NO: 1724934 - RNA, 13 nt, Human
guaucaaauacau

SEQ ID NO: 1724935 - RNA, 14 nt, Human
guaucaaauacauu

SEQ ID NO: 1724936 - RNA, 18 nt, Human
guaucaggugcugccauc

SEQ ID NO: 1724937 - RNA, 16 nt, Human
guaucaggugcugcca

SEQ ID NO: 1724938 - RNA, 16 nt, Human
guauauuuuauaucaa

SEQ ID NO: 1724939 - RNA, 22 nt, Human
guauauuuguauuuaaaugaaa

SEQ ID NO: 1724940 - RNA, 15 nt, Human
guauaaguggugugu

SEQ ID NO: 1724941 - RNA, 14 nt, Human
guaugguggcuggg

SEQ ID NO: 1724942 - RNA, 16 nt, Human
guaugguggcuggguu

SEQ ID NO: 1724943 - RNA, 15 nt, Human
guaugguggcugggu

SEQ ID NO: 1724944 - RNA, 21 nt, Human
guaucccaugagccucagcau

SEQ ID NO: 1724945 - RNA, 15 nt, Human
guaugcgugugugug

SEQ ID NO: 1724946 - RNA, 22 nt, Human
guaucaggugcugccauccagg

SEQ ID NO: 1724947 - RNA, 19 nt, Human
guaucaaauacauuuaaaa

SEQ ID NO: 1724948 - RNA, 19 nt, Human
guaucccaugagccucagc

SEQ ID NO: 1724949 - RNA, 12 nt, Human
guaacaggcaga

SEQ ID NO: 1724950 - RNA, 22 nt, Human
guaacaggaaaauuuuaaaaau

SEQ ID NO: 1724951 - RNA, 19 nt, Human
guauaaaagggacugagaa

SEQ ID NO: 1724952 - RNA, 14 nt, Human
aaauguaagaucgu

SEQ ID NO: 1724953 - RNA, 22 nt, Human
aaauguaagaucguucucugcc

SEQ ID NO: 1724954 - RNA, 20 nt, Human
aaauuguaagcaugcacaaa

SEQ ID NO: 1724955 - RNA, 18 nt, Human
aaauucugucucuggauu

SEQ ID NO: 1724956 - RNA, 19 nt, Human
aaauuguaagcaugcacaa

SEQ ID NO: 1724957 - RNA, 16 nt, Human
aaauucugucucugga

SEQ ID NO: 1724958 - RNA, 22 nt, Human
guauuuuguuuuugucuuaaaa

SEQ ID NO: 1724959 - RNA, 17 nt, Human
gucaacacuaacaugau

SEQ ID NO: 1724960 - RNA, 21 nt, Human
gucaacaaguaugaauaaaga

SEQ ID NO: 1724961 - RNA, 14 nt, Human
gucaaacgugaaaa

SEQ ID NO: 1724962 - RNA, 17 nt, Human
gucaaacgugaaaaugc

SEQ ID NO: 1724963 - RNA, 15 nt, Human
gucaaacgugaaaau

SEQ ID NO: 1724964 - RNA, 24 nt, Human
aaaugucuaguuguaacaccauga

SEQ ID NO: 1724965 - RNA, 19 nt, Human
aaaugucuaguuguaacac

SEQ ID NO: 1724966 - RNA, 14 nt, Human
aaauuaagaaagga

SEQ ID NO: 1724967 - RNA, 12 nt, Human
aaaugugugugu

SEQ ID NO: 1724968 - RNA, 20 nt, Human
aacuacuaccuguaaugaca

SEQ ID NO: 1724969 - RNA, 18 nt, Human
aaccuugaaaacuuuaug

SEQ ID NO: 1724970 - RNA, 12 nt, Human
aaccugugucuc

SEQ ID NO: 1724971 - RNA, 20 nt, Human
aacuagacucccaagcugga

SEQ ID NO: 1724972 - RNA, 23 nt, Human
aacuagacucccaagcuggacua

SEQ ID NO: 1724973 - RNA, 21 nt, Human
aacuaugauuuggaaaauaaa

SEQ ID NO: 1724974 - RNA, 16 nt, Human
aacuaugauuuggaaa

SEQ ID NO: 1724975 - RNA, 22 nt, Human
aacucaucuagguaaauuacag

SEQ ID NO: 1724976 - RNA, 12 nt, Human
aacuccuggccu

SEQ ID NO: 1724977 - RNA, 23 nt, Human
gugaaccaccacacccagcccac

SEQ ID NO: 1724978 - RNA, 22 nt, Human
gugaaccaccacacccagccca

SEQ ID NO: 1724979 - RNA, 18 nt, Human
aacucuccuccagaguca

SEQ ID NO: 1724980 - RNA, 15 nt, Human
aacucuccuccagag

SEQ ID NO: 1724981 - RNA, 16 nt, Human
aacucuccucugcugc

SEQ ID NO: 1724982 - RNA, 17 nt, Human
aacucuccucugcugcu

SEQ ID NO: 1724983 - RNA, 16 nt, Human
gucuuucacauuuaaa

SEQ ID NO: 1724984 - RNA, 16 nt, Human
gucuuuggugaacauu

SEQ ID NO: 1724985 - RNA, 16 nt, Human
gucuuuugguuaugaa

SEQ ID NO: 1724986 - RNA, 20 nt, Human
aaccugagccccaaaaggua

SEQ ID NO: 1724987 - RNA, 14 nt, Human
gucuggcccuuccu

SEQ ID NO: 1724988 - RNA, 15 nt, Human
aaccaagucaaguga

SEQ ID NO: 1724989 - RNA, 20 nt, Human
aaccacauuggagauguuua

SEQ ID NO: 1724990 - RNA, 19 nt, Human
aaccaccacacccagccca

SEQ ID NO: 1724991 - RNA, 18 nt, Human
aaccaagccguggcuucc

SEQ ID NO: 1724992 - RNA, 16 nt, Human
aaccaagccguggcuu

SEQ ID NO: 1724993 - RNA, 19 nt, Human
gucucgaacuccugaccuu

SEQ ID NO: 1724994 - RNA, 18 nt, Human
gucucgaacuccugaccu

SEQ ID NO: 1724995 - RNA, 13 nt, Human
gucucgaacuccu

SEQ ID NO: 1724996 - RNA, 19 nt, Human
aaccauuugaaaccccugu

SEQ ID NO: 1724997 - RNA, 23 nt, Human
aacccaaauguucaucaaugaau

SEQ ID NO: 1724998 - RNA, 23 nt, Human
aaccauuuugcugucccuuuucc

SEQ ID NO: 1724999 - RNA, 13 nt, Human
aacccaauaguug

SEQ ID NO: 1725000 - RNA, 21 nt, Human
aaccaccacacccagcccacu

SEQ ID NO: 1725001 - RNA, 12 nt, Human
aaccaucauuga

SEQ ID NO: 1725002 - RNA, 18 nt, Human
aaccaucauugaaaucuu

SEQ ID NO: 1725003 - RNA, 17 nt, Human
aaccaucauugaaaucu

SEQ ID NO: 1725004 - RNA, 21 nt, Human
aaccucgagguuucucaaaga

SEQ ID NO: 1725005 - RNA, 22 nt, Human
aaccucgagguuucucaaagaa

SEQ ID NO: 1725006 - RNA, 18 nt, Human
aaccugagccccaaaagg

SEQ ID NO: 1725007 - RNA, 11 nt, Human
aaccugacccc

SEQ ID NO: 1725008 - RNA, 16 nt, Human
aacccgggaggcagag

SEQ ID NO: 1725009 - RNA, 17 nt, Human
aaccccuguaggccuca

SEQ ID NO: 1725010 - RNA, 10 nt, Human
aacccagcuc

SEQ ID NO: 1725011 - RNA, 14 nt, Human
aacccagauaaagg

SEQ ID NO: 1725012 - RNA, 15 nt, Human
aacugcugacuguuu

SEQ ID NO: 1725013 - RNA, 21 nt, Human
aacugcugacuguuuucucuu

SEQ ID NO: 1725014 - RNA, 20 nt, Human
aacugcugacuguuuucucu

SEQ ID NO: 1725015 - RNA, 23 nt, Human
aacugcugacuguuuucucuuga

SEQ ID NO: 1725016 - RNA, 21 nt, Human
aacuggguacuuguggacaca

SEQ ID NO: 1725017 - RNA, 16 nt, Human
aacuggguacuugugg

SEQ ID NO: 1725018 - RNA, 21 nt, Human
aacugggggagggugaaguga

SEQ ID NO: 1725019 - RNA, 22 nt, Human
aacugggggagggugaagugaa

SEQ ID NO: 1725020 - RNA, 15 nt, Human
aacuggauuaaacuu

SEQ ID NO: 1725021 - RNA, 16 nt, Human
aacuggauuaaacuua

SEQ ID NO: 1725022 - RNA, 11 nt, Human
aacuggcugca

SEQ ID NO: 1725023 - RNA, 21 nt, Human
gugagaugcuagaacucccuu

SEQ ID NO: 1725024 - RNA, 19 nt, Human
gugaacuugggccacugug

SEQ ID NO: 1725025 - RNA, 17 nt, Human
gugaacuugggccacug

SEQ ID NO: 1725026 - RNA, 22 nt, Human
gugaggccagagacacaagccu

SEQ ID NO: 1725027 - RNA, 17 nt, Human
gugaggccagagacaca

SEQ ID NO: 1725028 - RNA, 15 nt, Human
gugagcaauccugca

SEQ ID NO: 1725029 - RNA, 18 nt, Human
gugaggguaaguauuuuc

SEQ ID NO: 1725030 - RNA, 21 nt, Human
aacucuucaaucucuugcacu

SEQ ID NO: 1725031 - RNA, 22 nt, Human
aacucuguuacacuuuuuggaa

SEQ ID NO: 1725032 - RNA, 23 nt, Human
aacucuguuacacuuuuuggaag

SEQ ID NO: 1725033 - RNA, 22 nt, Human
gugagucgaggacagggaggug

SEQ ID NO: 1725034 - RNA, 20 nt, Human
aacucugacaacagacuucu

SEQ ID NO: 1725035 - RNA, 23 nt, Human
aacucugacaacagacuucugaa

SEQ ID NO: 1725036 - RNA, 22 nt, Human
aacucugacaacagacuucuga

SEQ ID NO: 1725037 - RNA, 22 nt, Human
gugcaugcugucccuuacguga

SEQ ID NO: 1725038 - RNA, 21 nt, Human
gugcacacaccagagcccacc

SEQ ID NO: 1725039 - RNA, 19 nt, Human
gugauggggcccugccucc

SEQ ID NO: 1725040 - RNA, 16 nt, Human
gugaugguuccccugu

SEQ ID NO: 1725041 - RNA, 14 nt, Human
gugaugguuccccu

SEQ ID NO: 1725042 - RNA, 22 nt, Human
gugaugguuccccuguucacuc

SEQ ID NO: 1725043 - RNA, 23 nt, Human
gugcauuaucuagauacuguauc

SEQ ID NO: 1725044 - RNA, 19 nt, Human
gugcauguguguucaugca

SEQ ID NO: 1725045 - RNA, 15 nt, Human
gugcauuaucuagau

SEQ ID NO: 1725046 - RNA, 19 nt, Human
gugcauuaucuagauacug

SEQ ID NO: 1725047 - RNA, 12 nt, Human
gugccucugccu

SEQ ID NO: 1725048 - RNA, 13 nt, Human
aacuuccaauuua

SEQ ID NO: 1725049 - RNA, 22 nt, Human
gugaugcgcaugucacggaggg

SEQ ID NO: 1725050 - RNA, 18 nt, Human
gugauggggcccugccuc

SEQ ID NO: 1725051 - RNA, 17 nt, Human
gugauggggcccugccu

SEQ ID NO: 1725052 - RNA, 16 nt, Human
gugauggggcccugcc

SEQ ID NO: 1725053 - RNA, 14 nt, Human
gugauggggcccug

SEQ ID NO: 1725054 - RNA, 16 nt, Human
gugaugagaggaaauc

SEQ ID NO: 1725055 - RNA, 14 nt, Human
gugaugagaggaaa

SEQ ID NO: 1725056 - RNA, 11 nt, Human
acguggcugcu

SEQ ID NO: 1725057 - RNA, 15 nt, Human
acuaauagacaauuu

SEQ ID NO: 1725058 - RNA, 23 nt, Human
acgucugacaggcaaugcuggcu

SEQ ID NO: 1725059 - RNA, 19 nt, Human
acggacgaaccuugaaaac

SEQ ID NO: 1725060 - RNA, 15 nt, Human
acggaauaguuggcu

SEQ ID NO: 1725061 - RNA, 16 nt, Human
acggaagagccuugcg

SEQ ID NO: 1725062 - RNA, 15 nt, Human
acggaagagccuugc

SEQ ID NO: 1725063 - RNA, 19 nt, Human
acgcuggagugcagugagc

SEQ ID NO: 1725064 - RNA, 11 nt, Human
accugugucuc

SEQ ID NO: 1725065 - RNA, 19 nt, Human
accuguggccaaguucuua

SEQ ID NO: 1725066 - RNA, 16 nt, Human
acuauuguuagucucu

SEQ ID NO: 1725067 - RNA, 17 nt, Human
acuauugcuugcacaaa

SEQ ID NO: 1725068 - RNA, 17 nt, Human
acuagggaagauaauau

SEQ ID NO: 1725069 - RNA, 14 nt, Human
acuaaucuuucugc

SEQ ID NO: 1725070 - RNA, 17 nt, Human
acccuguuaccauuuug

SEQ ID NO: 1725071 - RNA, 16 nt, Human
accccacacacgccag

SEQ ID NO: 1725072 - RNA, 22 nt, Human
acccugugauggggcccugccu

SEQ ID NO: 1725073 - RNA, 15 nt, Human
acccaugcugcccug

SEQ ID NO: 1725074 - RNA, 14 nt, Human
acccaugcugcccu

SEQ ID NO: 1725075 - RNA, 16 nt, Human
acccaugcugcccugu

SEQ ID NO: 1725076 - RNA, 14 nt, Human
accgugaggccaga

SEQ ID NO: 1725077 - RNA, 19 nt, Human
accgggccacagagaaagu

SEQ ID NO: 1725078 - RNA, 15 nt, Human
accgggccacagaga

SEQ ID NO: 1725079 - RNA, 20 nt, Human
accgggccacagagaaagua

SEQ ID NO: 1725080 - RNA, 19 nt, Human
accggcuggccuggccccu

SEQ ID NO: 1725081 - RNA, 20 nt, Human
accgggcacucagaagacac

SEQ ID NO: 1725082 - RNA, 18 nt, Human
accggcuggccuggcccc

SEQ ID NO: 1725083 - RNA, 17 nt, Human
accggcuggccuggccc

SEQ ID NO: 1725084 - RNA, 15 nt, Human
accggcuggccuggc

SEQ ID NO: 1725085 - RNA, 14 nt, Human
accggcuggccugg

SEQ ID NO: 1725086 - RNA, 13 nt, Human
accucaggccugg

SEQ ID NO: 1725087 - RNA, 12 nt, Human
accucaggccug

SEQ ID NO: 1725088 - RNA, 17 nt, Human
accgugaggccagagac

SEQ ID NO: 1725089 - RNA, 16 nt, Human
accgugaggccagaga

SEQ ID NO: 1725090 - RNA, 22 nt, Human
accucaggccugggggcugggc

SEQ ID NO: 1725091 - RNA, 14 nt, Human
accucaggccuggg

SEQ ID NO: 1725092 - RNA, 22 nt, Human
accucagguaaucgaccugccu

SEQ ID NO: 1725093 - RNA, 18 nt, Human
accucaggugagaagcag

SEQ ID NO: 1725094 - RNA, 23 nt, Human
accucagguaaucgaccugccuc

SEQ ID NO: 1725095 - RNA, 23 nt, Human
accugccccuccucucugcccua

SEQ ID NO: 1725096 - RNA, 13 nt, Human
accugcccaaccu

SEQ ID NO: 1725097 - RNA, 11 nt, Human
accugccaggg

SEQ ID NO: 1725098 - RNA, 13 nt, Human
accugccagggac

SEQ ID NO: 1725099 - RNA, 12 nt, Human
accugccaggga

SEQ ID NO: 1725100 - RNA, 18 nt, Human
accugccagggacagagg

SEQ ID NO: 1725101 - RNA, 16 nt, Human
accugccagggacaga

SEQ ID NO: 1725102 - RNA, 15 nt, Human
accugccagggacag

SEQ ID NO: 1725103 - RNA, 17 nt, Human
accucuugagccuugaa

SEQ ID NO: 1725104 - RNA, 19 nt, Human
accucuugagccuugaacu

SEQ ID NO: 1725105 - RNA, 20 nt, Human
accucuugagccuugaacuu

SEQ ID NO: 1725106 - RNA, 21 nt, Human
accucuugagccuugaacuuu

SEQ ID NO: 1725107 - RNA, 22 nt, Human
acuuucaggccacauggcuaaa

SEQ ID NO: 1725108 - RNA, 12 nt, Human
acuuuaugcuaa

SEQ ID NO: 1725109 - RNA, 17 nt, Human
acuuuaugcuaagugaa

SEQ ID NO: 1725110 - RNA, 15 nt, Human
acuuuauuuuguguu

SEQ ID NO: 1725111 - RNA, 22 nt, Human
acuugggaggcugagaugggag

SEQ ID NO: 1725112 - RNA, 20 nt, Human
acuucugccauauucuguug

SEQ ID NO: 1725113 - RNA, 13 nt, Human
acuucagcucugu

SEQ ID NO: 1725114 - RNA, 18 nt, Human
acuucuuauacauuugau

SEQ ID NO: 1725115 - RNA, 17 nt, Human
acuucuuauacauuuga

SEQ ID NO: 1725116 - RNA, 13 nt, Human
acuucugccucuu

SEQ ID NO: 1725117 - RNA, 14 nt, Human
acuuaaauaaugug

SEQ ID NO: 1725118 - RNA, 22 nt, Human
acuuaaaauauuccugcauuug

SEQ ID NO: 1725119 - RNA, 21 nt, Human
acuuaaaaaugguuuaaaugg

SEQ ID NO: 1725120 - RNA, 13 nt, Human
acuuaaaaauggu

SEQ ID NO: 1725121 - RNA, 14 nt, Human
acuuaaaaaugguu

SEQ ID NO: 1725122 - RNA, 23 nt, Human
acugaugggcaacccccagccug

SEQ ID NO: 1725123 - RNA, 22 nt, Human
acugauuuuuuuuuccuucagu

SEQ ID NO: 1725124 - RNA, 21 nt, Human
acugauuuuuuuuuccuucag

SEQ ID NO: 1725125 - RNA, 23 nt, Human
acugauuuuuuuuuccuucagug

SEQ ID NO: 1725126 - RNA, 22 nt, Human
acugaugggcaacccccagccu

SEQ ID NO: 1725127 - RNA, 12 nt, Human
acugaugggcaa

SEQ ID NO: 1725128 - RNA, 22 nt, Human
acugauggcuaauguacugcau

SEQ ID NO: 1725129 - RNA, 13 nt, Human
acugaucucucgu

SEQ ID NO: 1725130 - RNA, 23 nt, Human
acugaccagccuccaugcugccu

SEQ ID NO: 1725131 - RNA, 23 nt, Human
acugacauuguuggccaaagcca

SEQ ID NO: 1725132 - RNA, 13 nt, Human
acugaccagccuc

SEQ ID NO: 1725133 - RNA, 20 nt, Human
acugaccagccuccaugcug

SEQ ID NO: 1725134 - RNA, 15 nt, Human
acugaccagccucca

SEQ ID NO: 1725135 - RNA, 22 nt, Human
acugaccaauauuguacaguuu

SEQ ID NO: 1725136 - RNA, 20 nt, Human
acugaccaauauuguacagu

SEQ ID NO: 1725137 - RNA, 21 nt, Human
acugaccaauauuguacaguu

SEQ ID NO: 1725138 - RNA, 15 nt, Human
acucugucucagucc

SEQ ID NO: 1725139 - RNA, 17 nt, Human
acucugucucaguccau

SEQ ID NO: 1725140 - RNA, 19 nt, Human
acucugugucagguggggc

SEQ ID NO: 1725141 - RNA, 21 nt, Human
acucugugucagguggggcag

SEQ ID NO: 1725142 - RNA, 19 nt, Human
acucugucucaaaaaaaca

SEQ ID NO: 1725143 - RNA, 20 nt, Human
acucuacuuagcaugucccu

SEQ ID NO: 1725144 - RNA, 21 nt, Human
acucuacuuagcaugucccua

SEQ ID NO: 1725145 - RNA, 14 nt, Human
acucuaaagucugu

SEQ ID NO: 1725146 - RNA, 14 nt, Human
acuauuuuucagaa

SEQ ID NO: 1725147 - RNA, 15 nt, Human
acugcuuuuggucug

SEQ ID NO: 1725148 - RNA, 22 nt, Human
acugcccggcaggguccuagaa

SEQ ID NO: 1725149 - RNA, 20 nt, Human
acugcuuuuggucuguguga

SEQ ID NO: 1725150 - RNA, 16 nt, Human
acugcuuuuggucugu

SEQ ID NO: 1725151 - RNA, 15 nt, Human
acugcccggcagggu

SEQ ID NO: 1725152 - RNA, 18 nt, Human
acugccagucccccugcc

SEQ ID NO: 1725153 - RNA, 19 nt, Human
acugccagucccccugccc

SEQ ID NO: 1725154 - RNA, 18 nt, Human
aauuuucaucuaggauuu

SEQ ID NO: 1725155 - RNA, 14 nt, Human
aauuuugauguuuu

SEQ ID NO: 1725156 - RNA, 16 nt, Human
aauuuugugcccccau

SEQ ID NO: 1725157 - RNA, 22 nt, Human
acaagaaaugaaagcagggacu

SEQ ID NO: 1725158 - RNA, 15 nt, Human
acaagaaaugaaagc

SEQ ID NO: 1725159 - RNA, 16 nt, Human
acaagaaaugaaagca

SEQ ID NO: 1725160 - RNA, 18 nt, Human
acaaccuucuguggcuca

SEQ ID NO: 1725161 - RNA, 22 nt, Human
acaaaaugaaacgcaaccacca

SEQ ID NO: 1725162 - RNA, 13 nt, Human
acaaaaugaaacg

SEQ ID NO: 1725163 - RNA, 16 nt, Human
acaaagaaauuaugug

SEQ ID NO: 1725164 - RNA, 14 nt, Human
acaaagaaauuaug

SEQ ID NO: 1725165 - RNA, 12 nt, Human
acaaagaaauua

SEQ ID NO: 1725166 - RNA, 20 nt, Human
aauuuauuuaugggauccug

SEQ ID NO: 1725167 - RNA, 19 nt, Human
aaugucacaggcaggucca

SEQ ID NO: 1725168 - RNA, 16 nt, Human
aaugucacaggcaggu

SEQ ID NO: 1725169 - RNA, 16 nt, Human
aauuguaaggaaugau

SEQ ID NO: 1725170 - RNA, 12 nt, Human
aauuguaaggaa

SEQ ID NO: 1725171 - RNA, 14 nt, Human
acaauuuauuaugg

SEQ ID NO: 1725172 - RNA, 13 nt, Human
acaauuuauuaug

SEQ ID NO: 1725173 - RNA, 16 nt, Human
acaaggauugcuacug

SEQ ID NO: 1725174 - RNA, 20 nt, Human
acaaggaugaucuaggaaga

SEQ ID NO: 1725175 - RNA, 21 nt, Human
acacgaauauugcugauggug

SEQ ID NO: 1725176 - RNA, 15 nt, Human
acacgaauauugcug

SEQ ID NO: 1725177 - RNA, 21 nt, Human
acaccacuacauucuguuaau

SEQ ID NO: 1725178 - RNA, 16 nt, Human
acacauuuuuuaaaug

SEQ ID NO: 1725179 - RNA, 18 nt, Human
acacauuuuuuaaaugca

SEQ ID NO: 1725180 - RNA, 19 nt, Human
acacauuuuuuaaaugcac

SEQ ID NO: 1725181 - RNA, 15 nt, Human
acaccacuacauucu

SEQ ID NO: 1725182 - RNA, 14 nt, Human
acacgaauauugcu

SEQ ID NO: 1725183 - RNA, 12 nt, Human
acacgaauauug

SEQ ID NO: 1725184 - RNA, 17 nt, Human
acaccacuacauucugu

SEQ ID NO: 1725185 - RNA, 20 nt, Human
acaccacuacauucuguuaa

SEQ ID NO: 1725186 - RNA, 21 nt, Human
acacagcucuucuccaggcug

SEQ ID NO: 1725187 - RNA, 20 nt, Human
acacagcucuucuccaggcu

SEQ ID NO: 1725188 - RNA, 22 nt, Human
acacagcucuucuccaggcugu

SEQ ID NO: 1725189 - RNA, 14 nt, Human
acacauuuuuuaaa

SEQ ID NO: 1725190 - RNA, 19 nt, Human
acacaaaaguuucucuuuu

SEQ ID NO: 1725191 - RNA, 14 nt, Human
acagacaaagcgug

SEQ ID NO: 1725192 - RNA, 23 nt, Human
acagaggccaugggccuccugug

SEQ ID NO: 1725193 - RNA, 21 nt, Human
acagaggccaugggccuccug

SEQ ID NO: 1725194 - RNA, 17 nt, Human
acagaggccaugggccu

SEQ ID NO: 1725195 - RNA, 13 nt, Human
acagaggcagccc

SEQ ID NO: 1725196 - RNA, 16 nt, Human
acagaggacacagaga

SEQ ID NO: 1725197 - RNA, 17 nt, Human
acacugugcugagucug

SEQ ID NO: 1725198 - RNA, 22 nt, Human
acacugugcugagucugaaggc

SEQ ID NO: 1725199 - RNA, 20 nt, Human
acacugggagaaaugaaaaa

SEQ ID NO: 1725200 - RNA, 16 nt, Human
acaugcaaggucauuu

SEQ ID NO: 1725201 - RNA, 15 nt, Human
acauccuacaagaca

SEQ ID NO: 1725202 - RNA, 18 nt, Human
acaugccucucucaggcc

SEQ ID NO: 1725203 - RNA, 17 nt, Human
acaugccucucucaggc

SEQ ID NO: 1725204 - RNA, 16 nt, Human
acaugccucucucagg

SEQ ID NO: 1725205 - RNA, 15 nt, Human
acaugccucucucag

SEQ ID NO: 1725206 - RNA, 18 nt, Human
acaugcaaggucauuuuu

SEQ ID NO: 1725207 - RNA, 17 nt, Human
acaugcaaggucauuuu

SEQ ID NO: 1725208 - RNA, 20 nt, Human
acauaauucaggaagcagcu

SEQ ID NO: 1725209 - RNA, 16 nt, Human
acauaagauaaaugug

SEQ ID NO: 1725210 - RNA, 21 nt, Human
acagugauuaccagggacuga

SEQ ID NO: 1725211 - RNA, 23 nt, Human
acagugagucgaggacagggagg

SEQ ID NO: 1725212 - RNA, 20 nt, Human
acagugauuaccagggacug

SEQ ID NO: 1725213 - RNA, 12 nt, Human
acaguguacagu

SEQ ID NO: 1725214 - RNA, 13 nt, Human
acaguguacaguc

SEQ ID NO: 1725215 - RNA, 15 nt, Human
acaguguacagucuu

SEQ ID NO: 1725216 - RNA, 17 nt, Human
acaguguacagucuugu

SEQ ID NO: 1725217 - RNA, 18 nt, Human
acaguguacagucuugua

SEQ ID NO: 1725218 - RNA, 14 nt, Human
acaggcaaugcugg

SEQ ID NO: 1725219 - RNA, 23 nt, Human
acaggugugagucaccaagccca

SEQ ID NO: 1725220 - RNA, 22 nt, Human
acaggugugagucaccaagccc

SEQ ID NO: 1725221 - RNA, 19 nt, Human
acaggugugaaccaccaca

SEQ ID NO: 1725222 - RNA, 22 nt, Human
acagugagucgaggacagggag

SEQ ID NO: 1725223 - RNA, 14 nt, Human
acagcucuguccug

SEQ ID NO: 1725224 - RNA, 23 nt, Human
acagcuccuucuguccuacucug

SEQ ID NO: 1725225 - RNA, 18 nt, Human
acagcuccuucuguccua

SEQ ID NO: 1725226 - RNA, 16 nt, Human
acagcuccuucugucc

SEQ ID NO: 1725227 - RNA, 21 nt, Human
acagaggggguggccucccaa

SEQ ID NO: 1725228 - RNA, 19 nt, Human
acagaggggguggccuccc

SEQ ID NO: 1725229 - RNA, 18 nt, Human
acagaggggguggccucc

SEQ ID NO: 1725230 - RNA, 17 nt, Human
acagaggggguggccuc

SEQ ID NO: 1725231 - RNA, 17 nt, Human
acagcucuguccuggga

SEQ ID NO: 1725232 - RNA, 16 nt, Human
acagcucuguccuggg

SEQ ID NO: 1725233 - RNA, 23 nt, Human
acaggcaagcaccuccugccucg

SEQ ID NO: 1725234 - RNA, 20 nt, Human
acaggcaagcaccuccugcc

SEQ ID NO: 1725235 - RNA, 13 nt, Human
acagcugccuggg

SEQ ID NO: 1725236 - RNA, 16 nt, Human
acagcugccugcagua

SEQ ID NO: 1725237 - RNA, 12 nt, Human
acagcugccugc

SEQ ID NO: 1725238 - RNA, 12 nt, Human
accaccugccca

SEQ ID NO: 1725239 - RNA, 20 nt, Human
accaaggcugauuaaaccaa

SEQ ID NO: 1725240 - RNA, 19 nt, Human
accaaggcugauuaaacca

SEQ ID NO: 1725241 - RNA, 20 nt, Human
accagccccagugcccacag

SEQ ID NO: 1725242 - RNA, 19 nt, Human
accagccccagugcccaca

SEQ ID NO: 1725243 - RNA, 18 nt, Human
accagccccagugcccac

SEQ ID NO: 1725244 - RNA, 17 nt, Human
accagccccagugccca

SEQ ID NO: 1725245 - RNA, 16 nt, Human
accagccccagugccc

SEQ ID NO: 1725246 - RNA, 13 nt, Human
accagcagccugg

SEQ ID NO: 1725247 - RNA, 13 nt, Human
accagcagagcac

SEQ ID NO: 1725248 - RNA, 12 nt, Human
accagcagagca

SEQ ID NO: 1725249 - RNA, 14 nt, Human
accagcagaaaugc

SEQ ID NO: 1725250 - RNA, 20 nt, Human
acaugccucucucaggccaa

SEQ ID NO: 1725251 - RNA, 19 nt, Human
acaugccucucucaggcca

SEQ ID NO: 1725252 - RNA, 23 nt, Human
acaugucuuuucuugcaugaggc

SEQ ID NO: 1725253 - RNA, 14 nt, Human
acaugugaaaagaa

SEQ ID NO: 1725254 - RNA, 17 nt, Human
acaugugaaaagaauag

SEQ ID NO: 1725255 - RNA, 18 nt, Human
acaugugaaaagaauaga

SEQ ID NO: 1725256 - RNA, 14 nt, Human
acauuuauucugcu

SEQ ID NO: 1725257 - RNA, 17 nt, Human
acauuuccuaaauauau

SEQ ID NO: 1725258 - RNA, 16 nt, Human
acauuuccuaaauaua

SEQ ID NO: 1725259 - RNA, 23 nt, Human
accaucauugaaaucuuuuugcu

SEQ ID NO: 1725260 - RNA, 16 nt, Human
accaucccugaaggcc

SEQ ID NO: 1725261 - RNA, 15 nt, Human
accaucaagccacca

SEQ ID NO: 1725262 - RNA, 15 nt, Human
accaucauugaaauc

SEQ ID NO: 1725263 - RNA, 14 nt, Human
accaucaagccacc

SEQ ID NO: 1725264 - RNA, 17 nt, Human
accauaggucaccuuua

SEQ ID NO: 1725265 - RNA, 21 nt, Human
accauacuaauuauacccccu

SEQ ID NO: 1725266 - RNA, 16 nt, Human
accauacuaauuauac

SEQ ID NO: 1725267 - RNA, 13 nt, Human
accauacuaauua

SEQ ID NO: 1725268 - RNA, 15 nt, Human
acccacccuccuuuc

SEQ ID NO: 1725269 - RNA, 13 nt, Human
acccaugcugccc

SEQ ID NO: 1725270 - RNA, 15 nt, Human
acccacccccaccca

SEQ ID NO: 1725271 - RNA, 17 nt, Human
acccacccccacccaag

SEQ ID NO: 1725272 - RNA, 20 nt, Human
aagauucauauuuacuucuu

SEQ ID NO: 1725273 - RNA, 17 nt, Human
aagauucaaucccagga

SEQ ID NO: 1725274 - RNA, 15 nt, Human
aagcagggacuugaa

SEQ ID NO: 1725275 - RNA, 19 nt, Human
aagccaccaacauacuccc

SEQ ID NO: 1725276 - RNA, 19 nt, Human
aagauuuugaaauuuuuau

SEQ ID NO: 1725277 - RNA, 23 nt, Human
aagacagugaaagaaaauaacaa

SEQ ID NO: 1725278 - RNA, 16 nt, Human
aagacuuuggaaagag

SEQ ID NO: 1725279 - RNA, 14 nt, Human
aacuuacuuagugu

SEQ ID NO: 1725280 - RNA, 17 nt, Human
aagacuuuuccaacccu

SEQ ID NO: 1725281 - RNA, 15 nt, Human
aagacuuuuaugaua

SEQ ID NO: 1725282 - RNA, 20 nt, Human
aagggacuuggaagcuccgc

SEQ ID NO: 1725283 - RNA, 17 nt, Human
aagggacugagaaauuu

SEQ ID NO: 1725284 - RNA, 15 nt, Human
aagggacugagaaau

SEQ ID NO: 1725285 - RNA, 12 nt, Human
aaguagaggagg

SEQ ID NO: 1725286 - RNA, 13 nt, Human
aaggacuaggguc

SEQ ID NO: 1725287 - RNA, 12 nt, Human
aaggaauuuuau

SEQ ID NO: 1725288 - RNA, 22 nt, Human
aaggacccggaggggccuggca

SEQ ID NO: 1725289 - RNA, 22 nt, Human
aagcugccagccgagauagcca

SEQ ID NO: 1725290 - RNA, 14 nt, Human
aagcugcugacagu

SEQ ID NO: 1725291 - RNA, 12 nt, Human
aagcugccagcc

SEQ ID NO: 1725292 - RNA, 11 nt, Human
aagcugccagc

SEQ ID NO: 1725293 - RNA, 20 nt, Human
aagcgugagccacugcaccg

SEQ ID NO: 1725294 - RNA, 17 nt, Human
aagcgugagccacugca

SEQ ID NO: 1725295 - RNA, 21 nt, Human
aagcgugagccacugcaccgg

SEQ ID NO: 1725296 - RNA, 23 nt, Human
aaggaaugauuaauuaaaacaca

SEQ ID NO: 1725297 - RNA, 16 nt, Human
aagcugcugacagugu

SEQ ID NO: 1725298 - RNA, 21 nt, Human
aagccaccaacauacucccau

SEQ ID NO: 1725299 - RNA, 18 nt, Human
aagccagcaggcucucag

SEQ ID NO: 1725300 - RNA, 19 nt, Human
aagccagcaggcucucagg

SEQ ID NO: 1725301 - RNA, 15 nt, Human
aagccagcaggcucu

SEQ ID NO: 1725302 - RNA, 17 nt, Human
aagcgauucuucugcuu

SEQ ID NO: 1725303 - RNA, 16 nt, Human
aagcgauucuucugcu

SEQ ID NO: 1725304 - RNA, 14 nt, Human
aagcgauucuucug

SEQ ID NO: 1725305 - RNA, 15 nt, Human
aagcgauucuucugc

SEQ ID NO: 1725306 - RNA, 17 nt, Human
aauccagacccggcugc

SEQ ID NO: 1725307 - RNA, 18 nt, Human
aauccaccugccucggcc

SEQ ID NO: 1725308 - RNA, 19 nt, Human
aauccaccugccucggccu

SEQ ID NO: 1725309 - RNA, 23 nt, Human
aaucucgcucugucgcccaggcu

SEQ ID NO: 1725310 - RNA, 18 nt, Human
aaucucggcucacugcau

SEQ ID NO: 1725311 - RNA, 20 nt, Human
aaucuggacuccucugucca

SEQ ID NO: 1725312 - RNA, 18 nt, Human
aaucuggacuccucuguc

SEQ ID NO: 1725313 - RNA, 17 nt, Human
aaucuggacuccucugu

SEQ ID NO: 1725314 - RNA, 16 nt, Human
aaucuggacuccucug

SEQ ID NO: 1725315 - RNA, 15 nt, Human
aaucuggacuccucu

SEQ ID NO: 1725316 - RNA, 13 nt, Human
aaugauuaauuaa

SEQ ID NO: 1725317 - RNA, 12 nt, Human
aaugauuaauua

SEQ ID NO: 1725318 - RNA, 16 nt, Human
aaugauuaauuaaaac

SEQ ID NO: 1725319 - RNA, 15 nt, Human
aaugauagcuacugu

SEQ ID NO: 1725320 - RNA, 15 nt, Human
aaugauaugcuugua

SEQ ID NO: 1725321 - RNA, 17 nt, Human
aaugauaugcuuguaac

SEQ ID NO: 1725322 - RNA, 23 nt, Human
aaugauguauguugaagccuuug

SEQ ID NO: 1725323 - RNA, 19 nt, Human
aaugauaugcuuguaacua

SEQ ID NO: 1725324 - RNA, 18 nt, Human
aaugauaugcuuguaacu

SEQ ID NO: 1725325 - RNA, 23 nt, Human
aaugcucuuuacuucauggacuu

SEQ ID NO: 1725326 - RNA, 14 nt, Human
aaugggagcucaug

SEQ ID NO: 1725327 - RNA, 13 nt, Human
aaugggacacuaa

SEQ ID NO: 1725328 - RNA, 15 nt, Human
aaugggggugcauuu

SEQ ID NO: 1725329 - RNA, 17 nt, Human
aaugggggugcauuuga

SEQ ID NO: 1725330 - RNA, 21 nt, Human
aaugcgugcauaccacuuuug

SEQ ID NO: 1725331 - RNA, 23 nt, Human
aaugcgugcauaccacuuuuguu

SEQ ID NO: 1725332 - RNA, 21 nt, Human
aaugcgcaggcuggcccugcc

SEQ ID NO: 1725333 - RNA, 14 nt, Human
aaugcgcaggcugg

SEQ ID NO: 1725334 - RNA, 15 nt, Human
aaugcgcaggcuggc

SEQ ID NO: 1725335 - RNA, 20 nt, Human
aaugcgcaggcuggcccugc

SEQ ID NO: 1725336 - RNA, 19 nt, Human
aaugcgcaggcuggcccug

SEQ ID NO: 1725337 - RNA, 18 nt, Human
aaugcgcaggcuggcccu

SEQ ID NO: 1725338 - RNA, 17 nt, Human
aaugcgcaggcuggccc

SEQ ID NO: 1725339 - RNA, 22 nt, Human
aauagaagcuaagguuuagaua

SEQ ID NO: 1725340 - RNA, 17 nt, Human
aauagaaauggggaacu

SEQ ID NO: 1725341 - RNA, 16 nt, Human
aauagaaauccaauug

SEQ ID NO: 1725342 - RNA, 16 nt, Human
aauauaggaacuuaaa

SEQ ID NO: 1725343 - RNA, 14 nt, Human
aagugcugcauuua

SEQ ID NO: 1725344 - RNA, 13 nt, Human
aagugcugcauuu

SEQ ID NO: 1725345 - RNA, 15 nt, Human
aaguggggacagagc

SEQ ID NO: 1725346 - RNA, 22 nt, Human
aaguucuuaguugcuguauguc

SEQ ID NO: 1725347 - RNA, 15 nt, Human
aaguucuuaguugcu

SEQ ID NO: 1725348 - RNA, 19 nt, Human
aauaaagcuguguggcagu

SEQ ID NO: 1725349 - RNA, 11 nt, Human
aauaaagcugu

SEQ ID NO: 1725350 - RNA, 10 nt, Human
aauaaaccau

SEQ ID NO: 1725351 - RNA, 12 nt, Human
aauaaaauuuuu

SEQ ID NO: 1725352 - RNA, 18 nt, Human
aaguugauggugaugaaa

SEQ ID NO: 1725353 - RNA, 14 nt, Human
aaauggacguguua

SEQ ID NO: 1725354 - RNA, 17 nt, Human
aaauggacguguuauga

SEQ ID NO: 1725355 - RNA, 15 nt, Human
aaauggacguguuau

SEQ ID NO: 1725356 - RNA, 18 nt, Human
aaaucugcuuuuuaaaga

SEQ ID NO: 1725357 - RNA, 22 nt, Human
aaaucuccaaaauaaaacuuuu

SEQ ID NO: 1725358 - RNA, 21 nt, Human
aacacauacaggaagguagaa

SEQ ID NO: 1725359 - RNA, 22 nt, Human
aacaaaccuguuucugcagcca

SEQ ID NO: 1725360 - RNA, 22 nt, Human
aacaaaggccuaauucuaugcc

SEQ ID NO: 1725361 - RNA, 19 nt, Human
aacaccucugcacaagcug

SEQ ID NO: 1725362 - RNA, 17 nt, Human
aacacuaacaugauuug

SEQ ID NO: 1725363 - RNA, 18 nt, Human
aaauugaugggauuuggu

SEQ ID NO: 1725364 - RNA, 13 nt, Human
aaauuaacuuuua

SEQ ID NO: 1725365 - RNA, 14 nt, Human
aaauuaacuuuuau

SEQ ID NO: 1725366 - RNA, 19 nt, Human
aaauuaacuuuuauaaacu

SEQ ID NO: 1725367 - RNA, 12 nt, Human
aaauuaacuuuu

SEQ ID NO: 1725368 - RNA, 22 nt, Human
aaauguuuuuuuuuaaagacuu

SEQ ID NO: 1725369 - RNA, 20 nt, Human
aaauguucaucaaugaauga

SEQ ID NO: 1725370 - RNA, 21 nt, Human
aaauguuuuuuuuuaaagacu

SEQ ID NO: 1725371 - RNA, 18 nt, Human
aaauguuuuuuuuuaaag

SEQ ID NO: 1725372 - RNA, 13 nt, Human
aacccuucagugc

SEQ ID NO: 1725373 - RNA, 19 nt, Human
aaccaguguuguggauuua

SEQ ID NO: 1725374 - RNA, 22 nt, Human
aacaugcuacacacugcauguu

SEQ ID NO: 1725375 - RNA, 15 nt, Human
aacauggaaguacua

SEQ ID NO: 1725376 - RNA, 16 nt, Human
aacagcuaaugggaca

SEQ ID NO: 1725377 - RNA, 13 nt, Human
aacagauuuggaa

SEQ ID NO: 1725378 - RNA, 14 nt, Human
aacagauuuggaaa

SEQ ID NO: 1725379 - RNA, 15 nt, Human
aacagauuuggaaag

SEQ ID NO: 1725380 - RNA, 22 nt, Human
aacauccuacaagacacaguga

SEQ ID NO: 1725381 - RNA, 15 nt, Human
aacauccuacaagac

SEQ ID NO: 1725382 - RNA, 14 nt, Human
aacugaauuuuguc

SEQ ID NO: 1725383 - RNA, 13 nt, Human
aacgucugugcca

SEQ ID NO: 1725384 - RNA, 15 nt, Human
aacguauaaaagccu

SEQ ID NO: 1725385 - RNA, 18 nt, Human
aacucaccccagccccaa

SEQ ID NO: 1725386 - RNA, 17 nt, Human
aacucaccccagcccca

SEQ ID NO: 1725387 - RNA, 16 nt, Human
aacucaccccagcccc

SEQ ID NO: 1725388 - RNA, 17 nt, Human
aacucaaacucuuaaaa

SEQ ID NO: 1725389 - RNA, 11 nt, Human
aaauaaauuau

SEQ ID NO: 1725390 - RNA, 19 nt, Human
aaaggcagaagcaacccaa

SEQ ID NO: 1725391 - RNA, 18 nt, Human
aaagcccaaagugguaua

SEQ ID NO: 1725392 - RNA, 17 nt, Human
aaaggcuaccuuuguau

SEQ ID NO: 1725393 - RNA, 14 nt, Human
aaaggcuaccuuug

SEQ ID NO: 1725394 - RNA, 14 nt, Human
aaaggcuccaggag

SEQ ID NO: 1725395 - RNA, 22 nt, Human
aaaggcuccaggagcagccaca

SEQ ID NO: 1725396 - RNA, 21 nt, Human
aaaggcuccaggagcagccac

SEQ ID NO: 1725397 - RNA, 15 nt, Human
aaagccaaagcuagg

SEQ ID NO: 1725398 - RNA, 21 nt, Human
aaagcauuuuguaauaauaaa

SEQ ID NO: 1725399 - RNA, 13 nt, Human
aaagcauuuugua

SEQ ID NO: 1725400 - RNA, 14 nt, Human
aaagcauuuuguaa

SEQ ID NO: 1725401 - RNA, 15 nt, Human
aaagcauuuuguaau

SEQ ID NO: 1725402 - RNA, 17 nt, Human
aaaccccaucucuacaa

SEQ ID NO: 1725403 - RNA, 21 nt, Human
aaacccugucucuacuaaaaa

SEQ ID NO: 1725404 - RNA, 14 nt, Human
aaacccuucagugc

SEQ ID NO: 1725405 - RNA, 17 nt, Human
aaacucuugaccucagg

SEQ ID NO: 1725406 - RNA, 20 nt, Human
aaagaacgcugauuuaaaga

SEQ ID NO: 1725407 - RNA, 15 nt, Human
aaagaacgcugauuu

SEQ ID NO: 1725408 - RNA, 18 nt, Human
aaagaacgcugauuuaaa

SEQ ID NO: 1725409 - RNA, 19 nt, Human
aaacugauuuuuuuuuccu

SEQ ID NO: 1725410 - RNA, 13 nt, Human
aaacugauuuuuu

SEQ ID NO: 1725411 - RNA, 20 nt, Human
aaacugauuuuuuuuuccuu

SEQ ID NO: 1725412 - RNA, 11 nt, Human
aaagagguuuu

SEQ ID NO: 1725413 - RNA, 18 nt, Human
aaagaggucgcuugggaa

SEQ ID NO: 1725414 - RNA, 15 nt, Human
aaagauacaguuacu

SEQ ID NO: 1725415 - RNA, 19 nt, Human
aaaauuaggauuucaugau

SEQ ID NO: 1725416 - RNA, 15 nt, Human
aaaauuagccaagug

SEQ ID NO: 1725417 - RNA, 12 nt, Human
aaaauuaagaaa

SEQ ID NO: 1725418 - RNA, 22 nt, Human
aaaauuaacaugaauauuuagu

SEQ ID NO: 1725419 - RNA, 22 nt, Human
aaaaucccuuaccucggugccu

SEQ ID NO: 1725420 - RNA, 23 nt, Human
aaaauuaaucugggccagaauuu

SEQ ID NO: 1725421 - RNA, 20 nt, Human
aaaauuaagaaaggauaaag

SEQ ID NO: 1725422 - RNA, 13 nt, Human
aaaauuaagaaag

SEQ ID NO: 1725423 - RNA, 15 nt, Human
aaaauaaaaaacacu

SEQ ID NO: 1725424 - RNA, 21 nt, Human
aaaauccacuuuaucuugaau

SEQ ID NO: 1725425 - RNA, 17 nt, Human
aaacagcuaaugggaca

SEQ ID NO: 1725426 - RNA, 22 nt, Human
aggacccggaggggccuggcag

SEQ ID NO: 1725427 - RNA, 21 nt, Human
aggacccggaggggccuggca

SEQ ID NO: 1725428 - RNA, 20 nt, Human
aggacccggaggggccuggc

SEQ ID NO: 1725429 - RNA, 18 nt, Human
aggacccggaggggccug

SEQ ID NO: 1725430 - RNA, 21 nt, Human
aggaccuguggccaaguucuu

SEQ ID NO: 1725431 - RNA, 16 nt, Human
aggaccuguggccaag

SEQ ID NO: 1725432 - RNA, 18 nt, Human
agcuucacuguaaaauaa

SEQ ID NO: 1725433 - RNA, 18 nt, Human
agcuucauuuccuguguc

SEQ ID NO: 1725434 - RNA, 19 nt, Human
agcuucauuuccugugucu

SEQ ID NO: 1725435 - RNA, 23 nt, Human
agcuuuguuuguugucagcugaa

SEQ ID NO: 1725436 - RNA, 16 nt, Human
agcuuuuaaacccuau

SEQ ID NO: 1725437 - RNA, 23 nt, Human
aggaacuuaaauaaugugaaacu

SEQ ID NO: 1725438 - RNA, 22 nt, Human
aggaaggcugagaggagagaga

SEQ ID NO: 1725439 - RNA, 18 nt, Human
aggaauaccugucccccu

SEQ ID NO: 1725440 - RNA, 15 nt, Human
aggaauaccuguccc

SEQ ID NO: 1725441 - RNA, 22 nt, Human
aggaauaccugucccccugaca

SEQ ID NO: 1725442 - RNA, 20 nt, Human
aggaauaaauugcuccuuga

SEQ ID NO: 1725443 - RNA, 19 nt, Human
aggaauaaauugcuccuug

SEQ ID NO: 1725444 - RNA, 23 nt, Human
aggaacaaggcaaggcugucaau

SEQ ID NO: 1725445 - RNA, 20 nt, Human
aggaacaaggcaaggcuguc

SEQ ID NO: 1725446 - RNA, 21 nt, Human
aggaacuuaaauaaugugaaa

SEQ ID NO: 1725447 - RNA, 19 nt, Human
aggaacaaggcaaggcugu

SEQ ID NO: 1725448 - RNA, 17 nt, Human
aggaacaaggcaaggcu

SEQ ID NO: 1725449 - RNA, 16 nt, Human
aggaacaaggcaaggc

SEQ ID NO: 1725450 - RNA, 13 nt, Human
aggaacaaggcaa

SEQ ID NO: 1725451 - RNA, 12 nt, Human
aggaacaaggca

SEQ ID NO: 1725452 - RNA, 21 nt, Human
agcuuuuaugugaaacauguu

SEQ ID NO: 1725453 - RNA, 15 nt, Human
agcuuuuaugugaaa

SEQ ID NO: 1725454 - RNA, 16 nt, Human
agcucaccagccccag

SEQ ID NO: 1725455 - RNA, 16 nt, Human
agcuaaucagcauucu

SEQ ID NO: 1725456 - RNA, 21 nt, Human
agcuaaucagcauucucacuc

SEQ ID NO: 1725457 - RNA, 18 nt, Human
agcuaauaacaugugaaa

SEQ ID NO: 1725458 - RNA, 19 nt, Human
agcucaccucucccuugga

SEQ ID NO: 1725459 - RNA, 18 nt, Human
agcucaccucucccuugg

SEQ ID NO: 1725460 - RNA, 15 nt, Human
agcucaccucucccu

SEQ ID NO: 1725461 - RNA, 20 nt, Human
agcucaccagccccagugcc

SEQ ID NO: 1725462 - RNA, 19 nt, Human
agcucaccagccccagugc

SEQ ID NO: 1725463 - RNA, 12 nt, Human
agcucaccucuc

SEQ ID NO: 1725464 - RNA, 14 nt, Human
agcucagagagggu

SEQ ID NO: 1725465 - RNA, 18 nt, Human
agcucagagaggguggga

SEQ ID NO: 1725466 - RNA, 12 nt, Human
agcucagagagg

SEQ ID NO: 1725467 - RNA, 19 nt, Human
agcgagcccugguggcagu

SEQ ID NO: 1725468 - RNA, 13 nt, Human
agcgagcccuggu

SEQ ID NO: 1725469 - RNA, 15 nt, Human
agccuuuggaaacag

SEQ ID NO: 1725470 - RNA, 20 nt, Human
agccugggaggucaaggcug

SEQ ID NO: 1725471 - RNA, 12 nt, Human
agccugggaggu

SEQ ID NO: 1725472 - RNA, 18 nt, Human
agccuggcuucaaauugu

SEQ ID NO: 1725473 - RNA, 17 nt, Human
agccuggcuucaaauug

SEQ ID NO: 1725474 - RNA, 22 nt, Human
agccuggcuccaaacccucgag

SEQ ID NO: 1725475 - RNA, 23 nt, Human
agcccucccugccccucccuuca

SEQ ID NO: 1725476 - RNA, 22 nt, Human
agcccucccugccccucccuuc

SEQ ID NO: 1725477 - RNA, 20 nt, Human
agccuggcuccaaacccucg

SEQ ID NO: 1725478 - RNA, 13 nt, Human
agccuggcuccaa

SEQ ID NO: 1725479 - RNA, 19 nt, Human
agcccucccugccccuccc

SEQ ID NO: 1725480 - RNA, 17 nt, Human
agcccucccugccccuc

SEQ ID NO: 1725481 - RNA, 16 nt, Human
agcccucccugccccu

SEQ ID NO: 1725482 - RNA, 15 nt, Human
agcccucccugcccc

SEQ ID NO: 1725483 - RNA, 15 nt, Human
agcugaaccugggua

SEQ ID NO: 1725484 - RNA, 18 nt, Human
agcugcgguccacccagg

SEQ ID NO: 1725485 - RNA, 17 nt, Human
agcugcgguccacccag

SEQ ID NO: 1725486 - RNA, 16 nt, Human
agcugcgguccaccca

SEQ ID NO: 1725487 - RNA, 13 nt, Human
agcugcgguccac

SEQ ID NO: 1725488 - RNA, 20 nt, Human
agcugcgguccacccaggag

SEQ ID NO: 1725489 - RNA, 19 nt, Human
agcugcgguccacccagga

SEQ ID NO: 1725490 - RNA, 12 nt, Human
agcugcugacag

SEQ ID NO: 1725491 - RNA, 21 nt, Human
agcugcgguccacccaggagc

SEQ ID NO: 1725492 - RNA, 17 nt, Human
agcuggucccacucagu

SEQ ID NO: 1725493 - RNA, 16 nt, Human
agcuggucccacucag

SEQ ID NO: 1725494 - RNA, 14 nt, Human
agcugcugacagug

SEQ ID NO: 1725495 - RNA, 13 nt, Human
agcugcugacagu

SEQ ID NO: 1725496 - RNA, 19 nt, Human
agcuggucccacucagucc

SEQ ID NO: 1725497 - RNA, 18 nt, Human
agcuggucccacucaguc

SEQ ID NO: 1725498 - RNA, 22 nt, Human
agcugguuuuuagcggagacgg

SEQ ID NO: 1725499 - RNA, 23 nt, Human
aggucccuaauaaagcugugugg

SEQ ID NO: 1725500 - RNA, 14 nt, Human
agguacucuccugg

SEQ ID NO: 1725501 - RNA, 13 nt, Human
agguacucuccug

SEQ ID NO: 1725502 - RNA, 14 nt, Human
agguaacaggcaga

SEQ ID NO: 1725503 - RNA, 13 nt, Human
agguaacaggcag

SEQ ID NO: 1725504 - RNA, 16 nt, Human
agguaacaggcagaua

SEQ ID NO: 1725505 - RNA, 23 nt, Human
aggguuuugccauguuggccagg

SEQ ID NO: 1725506 - RNA, 22 nt, Human
aggguuuugccauguuggccag

SEQ ID NO: 1725507 - RNA, 20 nt, Human
agggucucacuauguugccc

SEQ ID NO: 1725508 - RNA, 14 nt, Human
agggccugcaaggg

SEQ ID NO: 1725509 - RNA, 13 nt, Human
agggccuggccug

SEQ ID NO: 1725510 - RNA, 12 nt, Human
agggccuggccu

SEQ ID NO: 1725511 - RNA, 15 nt, Human
agggccugcaaggga

SEQ ID NO: 1725512 - RNA, 22 nt, Human
agggucccugguggcagcucac

SEQ ID NO: 1725513 - RNA, 20 nt, Human
agggucccugguggcagcuc

SEQ ID NO: 1725514 - RNA, 17 nt, Human
agggucccugguggcag

SEQ ID NO: 1725515 - RNA, 16 nt, Human
agggucccugguggca

SEQ ID NO: 1725516 - RNA, 13 nt, Human
aggguauuccaga

SEQ ID NO: 1725517 - RNA, 21 nt, Human
aggguaucuggugacuuuccu

SEQ ID NO: 1725518 - RNA, 12 nt, Human
aggggccuggca

SEQ ID NO: 1725519 - RNA, 13 nt, Human
aggggccuggcag

SEQ ID NO: 1725520 - RNA, 14 nt, Human
agggucccuggugg

SEQ ID NO: 1725521 - RNA, 12 nt, Human
agggucccuggu

SEQ ID NO: 1725522 - RNA, 22 nt, Human
aggggcccaaauucuuucagug

SEQ ID NO: 1725523 - RNA, 14 nt, Human
agggccuggccuga

SEQ ID NO: 1725524 - RNA, 23 nt, Human
aggcccucugcccacucccugca

SEQ ID NO: 1725525 - RNA, 22 nt, Human
aggcccucugcccacucccugc

SEQ ID NO: 1725526 - RNA, 19 nt, Human
aggcccuucucuccagccc

SEQ ID NO: 1725527 - RNA, 15 nt, Human
aggcccuucucucca

SEQ ID NO: 1725528 - RNA, 12 nt, Human
aggcccuucucu

SEQ ID NO: 1725529 - RNA, 22 nt, Human
aggcccuuccucuccacugccu

SEQ ID NO: 1725530 - RNA, 15 nt, Human
aggccaggcccucug

SEQ ID NO: 1725531 - RNA, 14 nt, Human
aggccaggcccucu

SEQ ID NO: 1725532 - RNA, 13 nt, Human
aggccaggcccuc

SEQ ID NO: 1725533 - RNA, 20 nt, Human
aggcauuccccaggaggcca

SEQ ID NO: 1725534 - RNA, 19 nt, Human
aggcauuccccaggaggcc

SEQ ID NO: 1725535 - RNA, 18 nt, Human
aggcauuccccaggaggc

SEQ ID NO: 1725536 - RNA, 19 nt, Human
aggcauguucucugaggac

SEQ ID NO: 1725537 - RNA, 18 nt, Human
aggcauguucucugagga

SEQ ID NO: 1725538 - RNA, 17 nt, Human
aggcauguucucugagg

SEQ ID NO: 1725539 - RNA, 21 nt, Human
aggcaugugaugagaggaaau

SEQ ID NO: 1725540 - RNA, 20 nt, Human
aggcaugugaugagaggaaa

SEQ ID NO: 1725541 - RNA, 19 nt, Human
aggcaugugaugagaggaa

SEQ ID NO: 1725542 - RNA, 15 nt, Human
aggcaugguggccca

SEQ ID NO: 1725543 - RNA, 17 nt, Human
aggcaugugaugagagg

SEQ ID NO: 1725544 - RNA, 14 nt, Human
aggagaggggcaca

SEQ ID NO: 1725545 - RNA, 15 nt, Human
agggacugaggggag

SEQ ID NO: 1725546 - RNA, 23 nt, Human
agggacugccagucccccugccc

SEQ ID NO: 1725547 - RNA, 15 nt, Human
agggacccuccacca

SEQ ID NO: 1725548 - RNA, 21 nt, Human
aggcuuagucacugagacagc

SEQ ID NO: 1725549 - RNA, 18 nt, Human
aggcuuagucacugagac

SEQ ID NO: 1725550 - RNA, 17 nt, Human
aggcuuagucacugaga

SEQ ID NO: 1725551 - RNA, 22 nt, Human
aggcuguaucccaugagccuca

SEQ ID NO: 1725552 - RNA, 21 nt, Human
aggcuguaucccaugagccuc

SEQ ID NO: 1725553 - RNA, 20 nt, Human
aggcuguaucccaugagccu

SEQ ID NO: 1725554 - RNA, 23 nt, Human
aggcuggucucgaacuccugacc

SEQ ID NO: 1725555 - RNA, 22 nt, Human
aggcuggucucaaacuccugac

SEQ ID NO: 1725556 - RNA, 18 nt, Human
aggcuggguucugauccu

SEQ ID NO: 1725557 - RNA, 15 nt, Human
aggcuaccuuuguau

SEQ ID NO: 1725558 - RNA, 13 nt, Human
aggcuaccuuugu

SEQ ID NO: 1725559 - RNA, 14 nt, Human
aggcuaccuuugua

SEQ ID NO: 1725560 - RNA, 16 nt, Human
agcacagacccugccc

SEQ ID NO: 1725561 - RNA, 17 nt, Human
agcacgauuucuguuua

SEQ ID NO: 1725562 - RNA, 19 nt, Human
agcacgauuucuguuuaga

SEQ ID NO: 1725563 - RNA, 21 nt, Human
agcacgauuucuguuuagaua

SEQ ID NO: 1725564 - RNA, 12 nt, Human
agcacagacccu

SEQ ID NO: 1725565 - RNA, 15 nt, Human
agcacagacccugcc

SEQ ID NO: 1725566 - RNA, 14 nt, Human
agcacagacccugc

SEQ ID NO: 1725567 - RNA, 16 nt, Human
agauguagaggagaaa

SEQ ID NO: 1725568 - RNA, 19 nt, Human
agauguagaggagaaacug

SEQ ID NO: 1725569 - RNA, 14 nt, Human
agaugagugagcau

SEQ ID NO: 1725570 - RNA, 23 nt, Human
agaggggguggccucccaacuca

SEQ ID NO: 1725571 - RNA, 18 nt, Human
agcaaaagaugcuucuca

SEQ ID NO: 1725572 - RNA, 21 nt, Human
agauugcaacaggcugggcuu

SEQ ID NO: 1725573 - RNA, 20 nt, Human
agauugcaacaggcugggcu

SEQ ID NO: 1725574 - RNA, 23 nt, Human
agauugcaacaggcugggcuuca

SEQ ID NO: 1725575 - RNA, 21 nt, Human
agauucuuuccugaggcuggg

SEQ ID NO: 1725576 - RNA, 19 nt, Human
agauucuuuccugaggcug

SEQ ID NO: 1725577 - RNA, 20 nt, Human
agauugaaccugaauauugc

SEQ ID NO: 1725578 - RNA, 20 nt, Human
agcaaaggagauuggaagga

SEQ ID NO: 1725579 - RNA, 15 nt, Human
agcaaauggccucau

SEQ ID NO: 1725580 - RNA, 20 nt, Human
agcaaauggccucaugucaa

SEQ ID NO: 1725581 - RNA, 16 nt, Human
agcaaauguggcuccu

SEQ ID NO: 1725582 - RNA, 20 nt, Human
agcaaaugucuuccuggauu

SEQ ID NO: 1725583 - RNA, 17 nt, Human
agcaaaugucuuccugg

SEQ ID NO: 1725584 - RNA, 18 nt, Human
agcauccuggcacccggc

SEQ ID NO: 1725585 - RNA, 17 nt, Human
agcauccuggcacccgg

SEQ ID NO: 1725586 - RNA, 14 nt, Human
agcauccuggcacc

SEQ ID NO: 1725587 - RNA, 18 nt, Human
agccaaagcuaggccugg

SEQ ID NO: 1725588 - RNA, 16 nt, Human
agccaaagcuaggccu

SEQ ID NO: 1725589 - RNA, 15 nt, Human
agccagaggagagag

SEQ ID NO: 1725590 - RNA, 13 nt, Human
agccagaggagag

SEQ ID NO: 1725591 - RNA, 20 nt, Human
agccaaggccaaaggaagca

SEQ ID NO: 1725592 - RNA, 18 nt, Human
agccagaggagagaggac

SEQ ID NO: 1725593 - RNA, 17 nt, Human
agccagaggagagagga

SEQ ID NO: 1725594 - RNA, 14 nt, Human
agccagcaggcucu

SEQ ID NO: 1725595 - RNA, 15 nt, Human
agcccacgcccccac

SEQ ID NO: 1725596 - RNA, 14 nt, Human
agcccacgccccca

SEQ ID NO: 1725597 - RNA, 23 nt, Human
agcccacgcccccacuggugaca

SEQ ID NO: 1725598 - RNA, 17 nt, Human
agccagcaggcucucag

SEQ ID NO: 1725599 - RNA, 16 nt, Human
agccagcaggcucuca

SEQ ID NO: 1725600 - RNA, 14 nt, Human
agcccaccuuggcu

SEQ ID NO: 1725601 - RNA, 16 nt, Human
agcccaccuuggcuca

SEQ ID NO: 1725602 - RNA, 15 nt, Human
agcccaccccucaac

SEQ ID NO: 1725603 - RNA, 13 nt, Human
agcauccuggcac

SEQ ID NO: 1725604 - RNA, 21 nt, Human
agcccgggcucugccucccau

SEQ ID NO: 1725605 - RNA, 20 nt, Human
agcccgggcucugccuccca

SEQ ID NO: 1725606 - RNA, 18 nt, Human
agcccgggcucugccucc

SEQ ID NO: 1725607 - RNA, 17 nt, Human
agcccgggcucugccuc

SEQ ID NO: 1725608 - RNA, 20 nt, Human
agccccauucugccugccca

SEQ ID NO: 1725609 - RNA, 21 nt, Human
agcccuccaucuaaacugccc

SEQ ID NO: 1725610 - RNA, 23 nt, Human
agcccuccaucuaaacugccccc

SEQ ID NO: 1725611 - RNA, 13 nt, Human
agcccucccugcc

SEQ ID NO: 1725612 - RNA, 12 nt, Human
agcccucccugc

SEQ ID NO: 1725613 - RNA, 23 nt, Human
agccccauccucuguacagagcc

SEQ ID NO: 1725614 - RNA, 17 nt, Human
agccccauccucuguac

SEQ ID NO: 1725615 - RNA, 15 nt, Human
agccccauccucugu

SEQ ID NO: 1725616 - RNA, 19 nt, Human
agccccauucugccugccc

SEQ ID NO: 1725617 - RNA, 18 nt, Human
agccccauucugccugcc

SEQ ID NO: 1725618 - RNA, 17 nt, Human
agccccauucugccugc

SEQ ID NO: 1725619 - RNA, 19 nt, Human
agacccaaaaggcagaagc

SEQ ID NO: 1725620 - RNA, 21 nt, Human
agacagagucucacuguugcc

SEQ ID NO: 1725621 - RNA, 23 nt, Human
agacagagucucacuguugccca

SEQ ID NO: 1725622 - RNA, 22 nt, Human
agacagauacuccuccaagguu

SEQ ID NO: 1725623 - RNA, 22 nt, Human
agacagccaacuauggccugug

SEQ ID NO: 1725624 - RNA, 15 nt, Human
agaccacguuucuaa

SEQ ID NO: 1725625 - RNA, 20 nt, Human
agacagagucucacuguugc

SEQ ID NO: 1725626 - RNA, 19 nt, Human
agacagagucucacuguug

SEQ ID NO: 1725627 - RNA, 11 nt, Human
agacagagucu

SEQ ID NO: 1725628 - RNA, 21 nt, Human
agacaaugacuuacuguacau

SEQ ID NO: 1725629 - RNA, 22 nt, Human
agacaaugacuuacuguacaug

SEQ ID NO: 1725630 - RNA, 15 nt, Human
agacagagcuacaca

SEQ ID NO: 1725631 - RNA, 23 nt, Human
agacaaugacuuacuguacauga

SEQ ID NO: 1725632 - RNA, 20 nt, Human
agacaaugacuuacuguaca

SEQ ID NO: 1725633 - RNA, 18 nt, Human
agaaugaaagggcccaga

SEQ ID NO: 1725634 - RNA, 21 nt, Human
agaagugaaaaucuacacucc

SEQ ID NO: 1725635 - RNA, 22 nt, Human
agaaugcacaaacagaggccgc

SEQ ID NO: 1725636 - RNA, 19 nt, Human
agaaugcacaaacagaggc

SEQ ID NO: 1725637 - RNA, 21 nt, Human
agaagagauugugguuucauu

SEQ ID NO: 1725638 - RNA, 21 nt, Human
acuuuccucuuuggucuacac

SEQ ID NO: 1725639 - RNA, 21 nt, Human
acuuuccucuuagucgagcca

SEQ ID NO: 1725640 - RNA, 21 nt, Human
agaagacacugaugggcaacc

SEQ ID NO: 1725641 - RNA, 13 nt, Human
agaagacacugau

SEQ ID NO: 1725642 - RNA, 14 nt, Human
agaaguaacuuacu

SEQ ID NO: 1725643 - RNA, 18 nt, Human
agaagguuucagaaagaa

SEQ ID NO: 1725644 - RNA, 13 nt, Human
agaggaaugaagu

SEQ ID NO: 1725645 - RNA, 19 nt, Human
agaggggguggccucccaa

SEQ ID NO: 1725646 - RNA, 17 nt, Human
agaggggguggccuccc

SEQ ID NO: 1725647 - RNA, 16 nt, Human
agagggccugcaaggg

SEQ ID NO: 1725648 - RNA, 13 nt, Human
agagggccugcaa

SEQ ID NO: 1725649 - RNA, 23 nt, Human
agaggacuuuucuuuguggcuuc

SEQ ID NO: 1725650 - RNA, 23 nt, Human
agaggagggagcaucagugcccu

SEQ ID NO: 1725651 - RNA, 22 nt, Human
agaggacuuuucuuuguggcuu

SEQ ID NO: 1725652 - RNA, 21 nt, Human
agaggacuuuucuuuguggcu

SEQ ID NO: 1725653 - RNA, 18 nt, Human
agacucugucucagucca

SEQ ID NO: 1725654 - RNA, 20 nt, Human
agacugaguacguugugcau

SEQ ID NO: 1725655 - RNA, 22 nt, Human
agacugaccaauauuguacagu

SEQ ID NO: 1725656 - RNA, 22 nt, Human
agacugaguacguugugcauuu

SEQ ID NO: 1725657 - RNA, 18 nt, Human
agacucugucucaaaaaa

SEQ ID NO: 1725658 - RNA, 16 nt, Human
agacgcugugcugccc

SEQ ID NO: 1725659 - RNA, 16 nt, Human
agagagaccacuuuuc

SEQ ID NO: 1725660 - RNA, 16 nt, Human
agacuggaagcacagc

SEQ ID NO: 1725661 - RNA, 13 nt, Human
agagccagggucu

SEQ ID NO: 1725662 - RNA, 13 nt, Human
agagcccaccuug

SEQ ID NO: 1725663 - RNA, 15 nt, Human
agagcccuucauuug

SEQ ID NO: 1725664 - RNA, 14 nt, Human
agagccucaaauga

SEQ ID NO: 1725665 - RNA, 17 nt, Human
agagccucaaaugagaa

SEQ ID NO: 1725666 - RNA, 15 nt, Human
aguaucucagggccu

SEQ ID NO: 1725667 - RNA, 20 nt, Human
aguaugaggcauuuguuuga

SEQ ID NO: 1725668 - RNA, 21 nt, Human
aguaugaggcauuuguuugaa

SEQ ID NO: 1725669 - RNA, 23 nt, Human
aguaugaggcauuuguuugaacu

SEQ ID NO: 1725670 - RNA, 17 nt, Human
aguaugaggcauuuguu

SEQ ID NO: 1725671 - RNA, 22 nt, Human
agucacacaguauuacuucugc

SEQ ID NO: 1725672 - RNA, 13 nt, Human
aguacucauacau

SEQ ID NO: 1725673 - RNA, 14 nt, Human
aguacuauguauca

SEQ ID NO: 1725674 - RNA, 12 nt, Human
aguacuauguau

SEQ ID NO: 1725675 - RNA, 12 nt, Human
aguacuucuuuu

SEQ ID NO: 1725676 - RNA, 19 nt, Human
aguacuucuccacccugcu

SEQ ID NO: 1725677 - RNA, 17 nt, Human
aguacuucuccacccug

SEQ ID NO: 1725678 - RNA, 16 nt, Human
aguacguugugcauuu

SEQ ID NO: 1725679 - RNA, 17 nt, Human
aguacguugugcauuug

SEQ ID NO: 1725680 - RNA, 18 nt, Human
aguacguugugcauuugg

SEQ ID NO: 1725681 - RNA, 22 nt, Human
aguacuacaguccucccaucuc

SEQ ID NO: 1725682 - RNA, 19 nt, Human
aguacuacaguccucccau

SEQ ID NO: 1725683 - RNA, 14 nt, Human
aguacuauaauuua

SEQ ID NO: 1725684 - RNA, 20 nt, Human
aguaagccgugauuuucauu

SEQ ID NO: 1725685 - RNA, 18 nt, Human
aguaaaugggggugcauu

SEQ ID NO: 1725686 - RNA, 13 nt, Human
aggucuguucuuu

SEQ ID NO: 1725687 - RNA, 15 nt, Human
aggucuguucuuucc

SEQ ID NO: 1725688 - RNA, 16 nt, Human
aggucuguucuuucca

SEQ ID NO: 1725689 - RNA, 15 nt, Human
aguacguugugcauu

SEQ ID NO: 1725690 - RNA, 14 nt, Human
aguacguugugcau

SEQ ID NO: 1725691 - RNA, 18 nt, Human
agugaccucagcuuugau

SEQ ID NO: 1725692 - RNA, 16 nt, Human
agucuguugauuaaag

SEQ ID NO: 1725693 - RNA, 17 nt, Human
agugaccucagcuuuga

SEQ ID NO: 1725694 - RNA, 19 nt, Human
aguccucuuuucugagagg

SEQ ID NO: 1725695 - RNA, 20 nt, Human
aguccuuaccagcagagcac

SEQ ID NO: 1725696 - RNA, 22 nt, Human
aguccucuuuucugagaggacu

SEQ ID NO: 1725697 - RNA, 19 nt, Human
agucaugcguuuaaucaca

SEQ ID NO: 1725698 - RNA, 19 nt, Human
agugucaaugcagccccca

SEQ ID NO: 1725699 - RNA, 21 nt, Human
agugggacagggcauggccag

SEQ ID NO: 1725700 - RNA, 19 nt, Human
agugggacagggcauggcc

SEQ ID NO: 1725701 - RNA, 24 nt, Human
agugauccucccaccucagccucc

SEQ ID NO: 1725702 - RNA, 19 nt, Human
agugauccucccaccucag

SEQ ID NO: 1725703 - RNA, 18 nt, Human
agugauccucccaccuca

SEQ ID NO: 1725704 - RNA, 15 nt, Human
agugauccucccacc

SEQ ID NO: 1725705 - RNA, 14 nt, Human
agugauccucccac

SEQ ID NO: 1725706 - RNA, 18 nt, Human
agugccuuacacaauggu

SEQ ID NO: 1725707 - RNA, 17 nt, Human
agugauucuccugccuc

SEQ ID NO: 1725708 - RNA, 15 nt, Human
agugauucuccugcc

SEQ ID NO: 1725709 - RNA, 14 nt, Human
agugauucuccugc

SEQ ID NO: 1725710 - RNA, 21 nt, Human
agugauucucaugccucagcc

SEQ ID NO: 1725711 - RNA, 20 nt, Human
agugauggguuaguggaugg

SEQ ID NO: 1725712 - RNA, 15 nt, Human
agugccuuauggaac

SEQ ID NO: 1725713 - RNA, 14 nt, Human
agugccuuauggaa

SEQ ID NO: 1725714 - RNA, 13 nt, Human
agugccuuaugga

SEQ ID NO: 1725715 - RNA, 10 nt, Human
agugccuuau

SEQ ID NO: 1725716 - RNA, 18 nt, Human
agugccuuauggaacacu

SEQ ID NO: 1725717 - RNA, 16 nt, Human
agugccuuauggaaca

SEQ ID NO: 1725718 - RNA, 15 nt, Human
agugcuaauuuugaa

SEQ ID NO: 1725719 - RNA, 20 nt, Human
agugcuaauuuugaaaaacu

SEQ ID NO: 1725720 - RNA, 18 nt, Human
agugcuaauuuugaaaaa

SEQ ID NO: 1725721 - RNA, 22 nt, Human
aguucaucuugaauuguaagga

SEQ ID NO: 1725722 - RNA, 16 nt, Human
aguugauacuacaguu

SEQ ID NO: 1725723 - RNA, 14 nt, Human
aguugauagcacag

SEQ ID NO: 1725724 - RNA, 19 nt, Human
aguucaucuugaauuguaa

SEQ ID NO: 1725725 - RNA, 15 nt, Human
aguucaucuugaauu

SEQ ID NO: 1725726 - RNA, 13 nt, Human
aguucaucuugaa

SEQ ID NO: 1725727 - RNA, 18 nt, Human
aguucagguaacaggcag

SEQ ID NO: 1725728 - RNA, 21 nt, Human
auaagccagacaucaacagau

SEQ ID NO: 1725729 - RNA, 22 nt, Human
auaagccagacaucaacagaua

SEQ ID NO: 1725730 - RNA, 18 nt, Human
auaaggguaucuggugac

SEQ ID NO: 1725731 - RNA, 13 nt, Human
auaauggucagag

SEQ ID NO: 1725732 - RNA, 14 nt, Human
auaauguaagcucu

SEQ ID NO: 1725733 - RNA, 15 nt, Human
auaauguaaauaaag

SEQ ID NO: 1725734 - RNA, 22 nt, Human
auacacuuacacuuuaugcaca

SEQ ID NO: 1725735 - RNA, 13 nt, Human
auacacuuacacu

SEQ ID NO: 1725736 - RNA, 14 nt, Human
auacaaugcugugc

SEQ ID NO: 1725737 - RNA, 17 nt, Human
auacaaugcugugcccu

SEQ ID NO: 1725738 - RNA, 17 nt, Human
auacccacccccaccca

SEQ ID NO: 1725739 - RNA, 19 nt, Human
auacccccugcaaagccca

SEQ ID NO: 1725740 - RNA, 17 nt, Human
auacccccugcaaagcc

SEQ ID NO: 1725741 - RNA, 16 nt, Human
auacccacccccaccc

SEQ ID NO: 1725742 - RNA, 14 nt, Human
auacccacccccac

SEQ ID NO: 1725743 - RNA, 13 nt, Human
auacccaccccca

SEQ ID NO: 1725744 - RNA, 17 nt, Human
auaccugucccccugac

SEQ ID NO: 1725745 - RNA, 20 nt, Human
auacccccugcaaagcccag

SEQ ID NO: 1725746 - RNA, 16 nt, Human
auaccugucccccuga

SEQ ID NO: 1725747 - RNA, 15 nt, Human
auaccugucccccug

SEQ ID NO: 1725748 - RNA, 14 nt, Human
auaccugucccccu

SEQ ID NO: 1725749 - RNA, 21 nt, Human
auacccccugcaaagcccagc

SEQ ID NO: 1725750 - RNA, 14 nt, Human
auaacaaugaaagu

SEQ ID NO: 1725751 - RNA, 20 nt, Human
auaacauguaauuaaguacu

SEQ ID NO: 1725752 - RNA, 18 nt, Human
auaacauguaauuaagua

SEQ ID NO: 1725753 - RNA, 13 nt, Human
auaacauguaauu

SEQ ID NO: 1725754 - RNA, 12 nt, Human
auaacauguaau

SEQ ID NO: 1725755 - RNA, 23 nt, Human
aguuugauuaaauucuugcaaag

SEQ ID NO: 1725756 - RNA, 19 nt, Human
aguuugagaucagccuggg

SEQ ID NO: 1725757 - RNA, 18 nt, Human
aguuugagaucagccugg

SEQ ID NO: 1725758 - RNA, 20 nt, Human
aguuugagaucagccugggc

SEQ ID NO: 1725759 - RNA, 16 nt, Human
aguuugauuaaauucu

SEQ ID NO: 1725760 - RNA, 17 nt, Human
aguuugauuaaauucuu

SEQ ID NO: 1725761 - RNA, 18 nt, Human
aguuugauuaaauucuug

SEQ ID NO: 1725762 - RNA, 20 nt, Human
aguuugauuaaauucuugca

SEQ ID NO: 1725763 - RNA, 22 nt, Human
aguuugauuaaauucuugcaaa

SEQ ID NO: 1725764 - RNA, 19 nt, Human
aguuguuacauuuuuaagu

SEQ ID NO: 1725765 - RNA, 20 nt, Human
aguuguuacauuuuuaagug

SEQ ID NO: 1725766 - RNA, 22 nt, Human
aguuguuacauuuuuaagugcu

SEQ ID NO: 1725767 - RNA, 15 nt, Human
aguuguuagauuaag

SEQ ID NO: 1725768 - RNA, 22 nt, Human
auacuuugcagcacagcugaga

SEQ ID NO: 1725769 - RNA, 18 nt, Human
auagcagcuuauucacaa

SEQ ID NO: 1725770 - RNA, 15 nt, Human
auagcagcuuauuca

SEQ ID NO: 1725771 - RNA, 15 nt, Human
auagcauuguaaaag

SEQ ID NO: 1725772 - RNA, 18 nt, Human
auagcacagacccugccc

SEQ ID NO: 1725773 - RNA, 17 nt, Human
auagcacagacccugcc

SEQ ID NO: 1725774 - RNA, 17 nt, Human
auagccuaggugacaga

SEQ ID NO: 1725775 - RNA, 15 nt, Human
auagccuaggugaca

SEQ ID NO: 1725776 - RNA, 14 nt, Human
auaguaaaaauaaa

SEQ ID NO: 1725777 - RNA, 13 nt, Human
auaguaaaaauaa

SEQ ID NO: 1725778 - RNA, 22 nt, Human
auauuauuuuauguugcauaga

SEQ ID NO: 1725779 - RNA, 15 nt, Human
auauuauuuuauguu

SEQ ID NO: 1725780 - RNA, 19 nt, Human
auauucaggaagcucaggg

SEQ ID NO: 1725781 - RNA, 17 nt, Human
auaugcucugcauguua

SEQ ID NO: 1725782 - RNA, 16 nt, Human
auaugcucugcauguu

SEQ ID NO: 1725783 - RNA, 20 nt, Human
auaugcucugcauguuacau

SEQ ID NO: 1725784 - RNA, 16 nt, Human
auaugcaguuuuccuu

SEQ ID NO: 1725785 - RNA, 17 nt, Human
auccucauacccacccc

SEQ ID NO: 1725786 - RNA, 19 nt, Human
auccucaguuuuugugaaa

SEQ ID NO: 1725787 - RNA, 15 nt, Human
aucccggcugcccuu

SEQ ID NO: 1725788 - RNA, 18 nt, Human
auccccaagccuggcaag

SEQ ID NO: 1725789 - RNA, 19 nt, Human
aucccaugagccucagcau

SEQ ID NO: 1725790 - RNA, 19 nt, Human
auccagacccggcugcgug

SEQ ID NO: 1725791 - RNA, 13 nt, Human
auccacucgccuu

SEQ ID NO: 1725792 - RNA, 14 nt, Human
aucaugucuggcua

SEQ ID NO: 1725793 - RNA, 12 nt, Human
aucaugugaaau

SEQ ID NO: 1725794 - RNA, 23 nt, Human
aucaaagagguuuuaaaaaaauc

SEQ ID NO: 1725795 - RNA, 20 nt, Human
aucaaagagguuuuaaaaaa

SEQ ID NO: 1725796 - RNA, 14 nt, Human
aucaaauauauuca

SEQ ID NO: 1725797 - RNA, 13 nt, Human
aucaccagacagg

SEQ ID NO: 1725798 - RNA, 23 nt, Human
aucacccgcuaagagggagggag

SEQ ID NO: 1725799 - RNA, 22 nt, Human
aucaaauauauucagccuggcu

SEQ ID NO: 1725800 - RNA, 13 nt, Human
aucacagccucug

SEQ ID NO: 1725801 - RNA, 21 nt, Human
aucucccuuuuccaugacugu

SEQ ID NO: 1725802 - RNA, 21 nt, Human
aucuauaggaagauugaaccu

SEQ ID NO: 1725803 - RNA, 18 nt, Human
aucugggggccucuucug

SEQ ID NO: 1725804 - RNA, 16 nt, Human
aucucugcuuuggaaa

SEQ ID NO: 1725805 - RNA, 22 nt, Human
aucuggacuccucuguccaggc

SEQ ID NO: 1725806 - RNA, 21 nt, Human
augaaguacucauacauguua

SEQ ID NO: 1725807 - RNA, 15 nt, Human
augaccacacuccag

SEQ ID NO: 1725808 - RNA, 18 nt, Human
augaccacacuccagcug

SEQ ID NO: 1725809 - RNA, 13 nt, Human
augaggcauuugu

SEQ ID NO: 1725810 - RNA, 14 nt, Human
augaggcauuuguu

SEQ ID NO: 1725811 - RNA, 21 nt, Human
augaggcauuuguuugaacug

SEQ ID NO: 1725812 - RNA, 22 nt, Human
augaggcauuuguuugaacuga

SEQ ID NO: 1725813 - RNA, 16 nt, Human
augaaaacacauuuuu

SEQ ID NO: 1725814 - RNA, 14 nt, Human
augaaaacacauuu

SEQ ID NO: 1725815 - RNA, 15 nt, Human
augaaaacacauuuu

SEQ ID NO: 1725816 - RNA, 23 nt, Human
augcacaaauucugucucuggau

SEQ ID NO: 1725817 - RNA, 22 nt, Human
augcacaaauucugucucugga

SEQ ID NO: 1725818 - RNA, 15 nt, Human
augcacaaauucugu

SEQ ID NO: 1725819 - RNA, 18 nt, Human
augcacaaacagaggccg

SEQ ID NO: 1725820 - RNA, 15 nt, Human
augaugauccuaggc

SEQ ID NO: 1725821 - RNA, 18 nt, Human
augaugaaaugaggucag

SEQ ID NO: 1725822 - RNA, 23 nt, Human
augaugaaaugaggucagagccu

SEQ ID NO: 1725823 - RNA, 17 nt, Human
augaucuuugcagacag

SEQ ID NO: 1725824 - RNA, 21 nt, Human
augaucuuugcagacaggcaa

SEQ ID NO: 1725825 - RNA, 19 nt, Human
augaucuuugcagacaggc

SEQ ID NO: 1725826 - RNA, 18 nt, Human
augaucuuugcagacagg

SEQ ID NO: 1725827 - RNA, 13 nt, Human
augcacacauuuu

SEQ ID NO: 1725828 - RNA, 14 nt, Human
augcacacauuuuu

SEQ ID NO: 1725829 - RNA, 15 nt, Human
augcacacauuuuuu

SEQ ID NO: 1725830 - RNA, 19 nt, Human
augcacagaguuguuacau

SEQ ID NO: 1725831 - RNA, 21 nt, Human
augcacagaguuguuacauuu

SEQ ID NO: 1725832 - RNA, 22 nt, Human
augcacagaguuguuacauuuu

SEQ ID NO: 1725833 - RNA, 23 nt, Human
augcacagaguuguuacauuuuu

SEQ ID NO: 1725834 - RNA, 20 nt, Human
augccuggauggggcugcac

SEQ ID NO: 1725835 - RNA, 19 nt, Human
augccuggauggggcugca

SEQ ID NO: 1725836 - RNA, 19 nt, Human
augccugucuuaauuuucu

SEQ ID NO: 1725837 - RNA, 18 nt, Human
auggauaggcacaggaaa

SEQ ID NO: 1725838 - RNA, 17 nt, Human
auggauaggcacaggaa

SEQ ID NO: 1725839 - RNA, 18 nt, Human
auggcugugccucugccu

SEQ ID NO: 1725840 - RNA, 17 nt, Human
auggcugugccucugcc

SEQ ID NO: 1725841 - RNA, 16 nt, Human
auggcugugccucugc

SEQ ID NO: 1725842 - RNA, 15 nt, Human
auggcugugccucug

SEQ ID NO: 1725843 - RNA, 18 nt, Human
augcuuuaggauguacag

SEQ ID NO: 1725844 - RNA, 16 nt, Human
augcuuguacauaaug

SEQ ID NO: 1725845 - RNA, 15 nt, Human
augcuuguacauaau

SEQ ID NO: 1725846 - RNA, 21 nt, Human
augcuuuaggauguacaguua

SEQ ID NO: 1725847 - RNA, 18 nt, Human
auggcuuuugugcauuau

SEQ ID NO: 1725848 - RNA, 16 nt, Human
auggcuuuugugcauu

SEQ ID NO: 1725849 - RNA, 17 nt, Human
auggcuuuugugcauua

SEQ ID NO: 1725850 - RNA, 19 nt, Human
augcugacuguacuccucc

SEQ ID NO: 1725851 - RNA, 21 nt, Human
augcugacuguacuccuccca

SEQ ID NO: 1725852 - RNA, 20 nt, Human
augcugacuguacuccuccc

SEQ ID NO: 1725853 - RNA, 15 nt, Human
augcugcccugugag

SEQ ID NO: 1725854 - RNA, 14 nt, Human
augcugcccuguga

SEQ ID NO: 1725855 - RNA, 13 nt, Human
augcugcccugug

SEQ ID NO: 1725856 - RNA, 16 nt, Human
augcugcccugugagu

SEQ ID NO: 1725857 - RNA, 15 nt, Human
augcugccuccagaa

SEQ ID NO: 1725858 - RNA, 12 nt, Human
augcugccucca

SEQ ID NO: 1725859 - RNA, 12 nt, Human
auguaauuuugu

SEQ ID NO: 1725860 - RNA, 13 nt, Human
augucacaggcag

SEQ ID NO: 1725861 - RNA, 15 nt, Human
auguaauuuugugua

SEQ ID NO: 1725862 - RNA, 16 nt, Human
auguaauuuuguguaa

SEQ ID NO: 1725863 - RNA, 17 nt, Human
auguaauuuuguguaag

SEQ ID NO: 1725864 - RNA, 22 nt, Human
auguaauuuuguguaagaaaua

SEQ ID NO: 1725865 - RNA, 23 nt, Human
auguaauuuuguguaagaaauac

SEQ ID NO: 1725866 - RNA, 18 nt, Human
augugaaaucauucauuu

SEQ ID NO: 1725867 - RNA, 17 nt, Human
augugaaaucauucauu

SEQ ID NO: 1725868 - RNA, 19 nt, Human
augucacaggcagguccag

SEQ ID NO: 1725869 - RNA, 14 nt, Human
augucacaggcagg

SEQ ID NO: 1725870 - RNA, 14 nt, Human
augugaaacauguu

SEQ ID NO: 1725871 - RNA, 23 nt, Human
augggugcuuggaggaaggaaac

SEQ ID NO: 1725872 - RNA, 21 nt, Human
augggugcuuggaggaaggaa

SEQ ID NO: 1725873 - RNA, 20 nt, Human
augggugcuuggaggaagga

SEQ ID NO: 1725874 - RNA, 13 nt, Human
auguguaaguauu

SEQ ID NO: 1725875 - RNA, 13 nt, Human
auguucucugagg

SEQ ID NO: 1725876 - RNA, 17 nt, Human
auguucucucuucucca

SEQ ID NO: 1725877 - RNA, 14 nt, Human
auguucugggacac

SEQ ID NO: 1725878 - RNA, 17 nt, Human
auguucucugaggacac

SEQ ID NO: 1725879 - RNA, 15 nt, Human
auguucugggacaca

SEQ ID NO: 1725880 - RNA, 14 nt, Human
auguuugccucugc

SEQ ID NO: 1725881 - RNA, 17 nt, Human
auguuugccucugccuc

SEQ ID NO: 1725882 - RNA, 15 nt, Human
auguuugccucugcc

SEQ ID NO: 1725883 - RNA, 14 nt, Human
auguucuuaauucu

SEQ ID NO: 1725884 - RNA, 19 nt, Human
caauagauauuuaccuuuu

SEQ ID NO: 1725885 - RNA, 18 nt, Human
caauaauaauaccucccu

SEQ ID NO: 1725886 - RNA, 17 nt, Human
caauaggaaaaacugau

SEQ ID NO: 1725887 - RNA, 16 nt, Human
caauaggaaaaacuga

SEQ ID NO: 1725888 - RNA, 15 nt, Human
caauaggaaaaacug

SEQ ID NO: 1725889 - RNA, 19 nt, Human
caaggguagggugggccuu

SEQ ID NO: 1725890 - RNA, 18 nt, Human
caaggcugggggaagaag

SEQ ID NO: 1725891 - RNA, 18 nt, Human
caaggaaaaaauaacaau

SEQ ID NO: 1725892 - RNA, 23 nt, Human
caagcuggucccacucaguccau

SEQ ID NO: 1725893 - RNA, 22 nt, Human
caagcuggucccacucagucca

SEQ ID NO: 1725894 - RNA, 20 nt, Human
caaggaaaaaauaacaauga

SEQ ID NO: 1725895 - RNA, 22 nt, Human
caaggcugcagugagccgagau

SEQ ID NO: 1725896 - RNA, 17 nt, Human
caaggcugcagugagcc

SEQ ID NO: 1725897 - RNA, 20 nt, Human
caaggauccugagccagauu

SEQ ID NO: 1725898 - RNA, 22 nt, Human
caaggauccugagccagauuuc

SEQ ID NO: 1725899 - RNA, 19 nt, Human
caaggauccugagccagau

SEQ ID NO: 1725900 - RNA, 18 nt, Human
caaggauccugagccaga

SEQ ID NO: 1725901 - RNA, 16 nt, Human
caaggagauuuacaac

SEQ ID NO: 1725902 - RNA, 21 nt, Human
caagcugcacccucaggcagg

SEQ ID NO: 1725903 - RNA, 18 nt, Human
caagcgauucuucugcuu

SEQ ID NO: 1725904 - RNA, 17 nt, Human
caagcgauucuucugcu

SEQ ID NO: 1725905 - RNA, 15 nt, Human
caagcgauucuucug

SEQ ID NO: 1725906 - RNA, 21 nt, Human
caagcuggucccacucagucc

SEQ ID NO: 1725907 - RNA, 22 nt, Human
caagcugcacccucaggcaggu

SEQ ID NO: 1725908 - RNA, 18 nt, Human
caauaggaaaaacugauu

SEQ ID NO: 1725909 - RNA, 18 nt, Human
caauuacaggaaguacug

SEQ ID NO: 1725910 - RNA, 20 nt, Human
caauuuuuuaagugaaaaua

SEQ ID NO: 1725911 - RNA, 21 nt, Human
caauuuuuuaagugaaaauau

SEQ ID NO: 1725912 - RNA, 14 nt, Human
cacaaacagaggcc

SEQ ID NO: 1725913 - RNA, 15 nt, Human
cacaaacagaggccg

SEQ ID NO: 1725914 - RNA, 18 nt, Human
cacaaagcccuuccaugu

SEQ ID NO: 1725915 - RNA, 13 nt, Human
cacaaacagaggc

SEQ ID NO: 1725916 - RNA, 22 nt, Human
caaugugacuuaaugccacuaa

SEQ ID NO: 1725917 - RNA, 22 nt, Human
caaugugaaaagaaaaaugagc

SEQ ID NO: 1725918 - RNA, 21 nt, Human
caauaucuuuuuuuuaauaaa

SEQ ID NO: 1725919 - RNA, 17 nt, Human
caauuacaggaaguacu

SEQ ID NO: 1725920 - RNA, 20 nt, Human
cacaagaaaugaaagcaggg

SEQ ID NO: 1725921 - RNA, 21 nt, Human
cacaagaaaugaaagcaggga

SEQ ID NO: 1725922 - RNA, 18 nt, Human
cacaagaaaugaaagcag

SEQ ID NO: 1725923 - RNA, 13 nt, Human
cacaaaggagagc

SEQ ID NO: 1725924 - RNA, 17 nt, Human
cacacacgcgugcacac

SEQ ID NO: 1725925 - RNA, 14 nt, Human
cacacuccagcugg

SEQ ID NO: 1725926 - RNA, 21 nt, Human
cacagagaaaguacuucucca

SEQ ID NO: 1725927 - RNA, 20 nt, Human
cacagagaaaguacuucucc

SEQ ID NO: 1725928 - RNA, 19 nt, Human
cacagagaaaguacuucuc

SEQ ID NO: 1725929 - RNA, 13 nt, Human
cacagaggcugcc

SEQ ID NO: 1725930 - RNA, 15 nt, Human
cacagaggacacaga

SEQ ID NO: 1725931 - RNA, 19 nt, Human
cacagaggacacagagaag

SEQ ID NO: 1725932 - RNA, 22 nt, Human
cacagaguuguuacauuuuuaa

SEQ ID NO: 1725933 - RNA, 23 nt, Human
cacagaugggugcuuggaggaag

SEQ ID NO: 1725934 - RNA, 22 nt, Human
cacagauuugagcucagcccug

SEQ ID NO: 1725935 - RNA, 18 nt, Human
cacagauuugagcucagc

SEQ ID NO: 1725936 - RNA, 17 nt, Human
cacagauuugagcucag

SEQ ID NO: 1725937 - RNA, 16 nt, Human
cacagauuugagcuca

SEQ ID NO: 1725938 - RNA, 14 nt, Human
cacagcugagaggc

SEQ ID NO: 1725939 - RNA, 21 nt, Human
caaaaucgaugcagugcuucc

SEQ ID NO: 1725940 - RNA, 16 nt, Human
caaaauaaaacuuuuu

SEQ ID NO: 1725941 - RNA, 20 nt, Human
caaaauaaaacuuuuuaaaa

SEQ ID NO: 1725942 - RNA, 19 nt, Human
caaaacucuccucugcugc

SEQ ID NO: 1725943 - RNA, 14 nt, Human
caaaaguuucucuu

SEQ ID NO: 1725944 - RNA, 18 nt, Human
caaaaguuuguuugcuua

SEQ ID NO: 1725945 - RNA, 16 nt, Human
caaaacucuccucugc

SEQ ID NO: 1725946 - RNA, 15 nt, Human
caaaacucuccucug

SEQ ID NO: 1725947 - RNA, 21 nt, Human
caaaacgguuuuacugcagcu

SEQ ID NO: 1725948 - RNA, 15 nt, Human
caaaacgguuuuacu

SEQ ID NO: 1725949 - RNA, 18 nt, Human
auuuuauuuuauuaugca

SEQ ID NO: 1725950 - RNA, 15 nt, Human
caaacagaggccgcc

SEQ ID NO: 1725951 - RNA, 13 nt, Human
caaacagaggccg

SEQ ID NO: 1725952 - RNA, 22 nt, Human
caaaaugaaacgcaaccaccac

SEQ ID NO: 1725953 - RNA, 11 nt, Human
caaaaugaaac

SEQ ID NO: 1725954 - RNA, 21 nt, Human
caaaaugagcccuguccugcc

SEQ ID NO: 1725955 - RNA, 12 nt, Human
caaagaaauuuc

SEQ ID NO: 1725956 - RNA, 18 nt, Human
caaagaaauuuccacuca

SEQ ID NO: 1725957 - RNA, 19 nt, Human
caaagaaauuuccacucag

SEQ ID NO: 1725958 - RNA, 21 nt, Human
caaacucuugaccucagguga

SEQ ID NO: 1725959 - RNA, 20 nt, Human
caaacucuugaccucaggug

SEQ ID NO: 1725960 - RNA, 19 nt, Human
caaacucuugaccucaggu

SEQ ID NO: 1725961 - RNA, 17 nt, Human
caaacucuugaccucag

SEQ ID NO: 1725962 - RNA, 13 nt, Human
caacaggcugggc

SEQ ID NO: 1725963 - RNA, 15 nt, Human
caaauuucuaaaucu

SEQ ID NO: 1725964 - RNA, 22 nt, Human
caaauuucuaaaucuccaaaau

SEQ ID NO: 1725965 - RNA, 19 nt, Human
caacauacucccaucugug

SEQ ID NO: 1725966 - RNA, 17 nt, Human
caacauacucccaucug

SEQ ID NO: 1725967 - RNA, 12 nt, Human
caacaggcuggg

SEQ ID NO: 1725968 - RNA, 16 nt, Human
caaccuucuguggcuc

SEQ ID NO: 1725969 - RNA, 16 nt, Human
caaccuggucacagga

SEQ ID NO: 1725970 - RNA, 20 nt, Human
caaccuucuguggcucacag

SEQ ID NO: 1725971 - RNA, 19 nt, Human
caaccuucuguggcucaca

SEQ ID NO: 1725972 - RNA, 17 nt, Human
caaccuucuguggcuca

SEQ ID NO: 1725973 - RNA, 20 nt, Human
caacauacucccaucuguga

SEQ ID NO: 1725974 - RNA, 18 nt, Human
caaccugcucuccucuug

SEQ ID NO: 1725975 - RNA, 23 nt, Human
caaccugcucuccucuugccacu

SEQ ID NO: 1725976 - RNA, 21 nt, Human
caaccugcucuccucuugcca

SEQ ID NO: 1725977 - RNA, 18 nt, Human
caaauguucaucaaugaa

SEQ ID NO: 1725978 - RNA, 14 nt, Human
caaauguucaucaa

SEQ ID NO: 1725979 - RNA, 23 nt, Human
caaauggaaaugggcagagcaga

SEQ ID NO: 1725980 - RNA, 23 nt, Human
caaauauauucagccuggcuuca

SEQ ID NO: 1725981 - RNA, 19 nt, Human
caaagugcugggauuacaa

SEQ ID NO: 1725982 - RNA, 13 nt, Human
caaagugcuggga

SEQ ID NO: 1725983 - RNA, 20 nt, Human
caaaguucccuacuuccugu

SEQ ID NO: 1725984 - RNA, 23 nt, Human
caaagugcugggauuacaagcgu

SEQ ID NO: 1725985 - RNA, 18 nt, Human
caaagugcugggauuaca

SEQ ID NO: 1725986 - RNA, 17 nt, Human
caagaaaugaaagcagg

SEQ ID NO: 1725987 - RNA, 19 nt, Human
caagaaaugaaagcaggga

SEQ ID NO: 1725988 - RNA, 13 nt, Human
caagaagcccagg

SEQ ID NO: 1725989 - RNA, 14 nt, Human
caagaagcccagga

SEQ ID NO: 1725990 - RNA, 16 nt, Human
caacuuguaaaugugg

SEQ ID NO: 1725991 - RNA, 12 nt, Human
caacuugggaac

SEQ ID NO: 1725992 - RNA, 13 nt, Human
caagagcccaggc

SEQ ID NO: 1725993 - RNA, 17 nt, Human
caagagcuuaacagugu

SEQ ID NO: 1725994 - RNA, 15 nt, Human
caagacgcugugcug

SEQ ID NO: 1725995 - RNA, 13 nt, Human
caagacgcugugc

SEQ ID NO: 1725996 - RNA, 23 nt, Human
caagaccuucuccuucaccuuug

SEQ ID NO: 1725997 - RNA, 21 nt, Human
caagaccuucuccuucaccuu

SEQ ID NO: 1725998 - RNA, 17 nt, Human
cacaguucaauucucau

SEQ ID NO: 1725999 - RNA, 13 nt, Human
cacaguggaacca

SEQ ID NO: 1726000 - RNA, 19 nt, Human
cacaguggaaccagcccag

SEQ ID NO: 1726001 - RNA, 19 nt, Human
cacagugcaucucagccca

SEQ ID NO: 1726002 - RNA, 18 nt, Human
cacagugcaucucagccc

SEQ ID NO: 1726003 - RNA, 22 nt, Human
cacaggcccuuccucuccacug

SEQ ID NO: 1726004 - RNA, 21 nt, Human
cacaggcccuuccucuccacu

SEQ ID NO: 1726005 - RNA, 12 nt, Human
cacagcugcuca

SEQ ID NO: 1726006 - RNA, 22 nt, Human
cacagcugcucaauaaaguaca

SEQ ID NO: 1726007 - RNA, 13 nt, Human
cacaggaaaccag

SEQ ID NO: 1726008 - RNA, 19 nt, Human
cacaggcccuuccucucca

SEQ ID NO: 1726009 - RNA, 18 nt, Human
cacaggcccuuccucucc

SEQ ID NO: 1726010 - RNA, 17 nt, Human
cacaggcccuuccucuc

SEQ ID NO: 1726011 - RNA, 16 nt, Human
cacaggcccuuccucu

SEQ ID NO: 1726012 - RNA, 17 nt, Human
uguuaguaugaggcauu

SEQ ID NO: 1726013 - RNA, 19 nt, Human
uguuaguaugaggcauuug

SEQ ID NO: 1726014 - RNA, 20 nt, Human
uguuaguaugaggcauuugu

SEQ ID NO: 1726015 - RNA, 17 nt, Human
uguucauaaauaaaguu

SEQ ID NO: 1726016 - RNA, 22 nt, Human
uguucagcuccagcucaccagc

SEQ ID NO: 1726017 - RNA, 21 nt, Human
uguucagcuccagcucaccag

SEQ ID NO: 1726018 - RNA, 20 nt, Human
uguucagcuccagcucacca

SEQ ID NO: 1726019 - RNA, 14 nt, Human
uguuacuaaguuuu

SEQ ID NO: 1726020 - RNA, 17 nt, Human
uguuagccccauaauuu

SEQ ID NO: 1726021 - RNA, 18 nt, Human
uguguaugcgugugugug

SEQ ID NO: 1726022 - RNA, 19 nt, Human
ugugugcacguacacacac

SEQ ID NO: 1726023 - RNA, 15 nt, Human
ugugugcuuauguau

SEQ ID NO: 1726024 - RNA, 18 nt, Human
uguguuuuucauaaagca

SEQ ID NO: 1726025 - RNA, 20 nt, Human
uguguuuuuaauaaagacag

SEQ ID NO: 1726026 - RNA, 15 nt, Human
uguguuuuucauaaa

SEQ ID NO: 1726027 - RNA, 15 nt, Human
uguguuuuuaauaaa

SEQ ID NO: 1726028 - RNA, 16 nt, Human
uguguuuauugucaaa

SEQ ID NO: 1726029 - RNA, 19 nt, Human
ugugugugcuuauguauga

SEQ ID NO: 1726030 - RNA, 20 nt, Human
ugugugugcuuauguaugag

SEQ ID NO: 1726031 - RNA, 17 nt, Human
ugugugugaaaaugugu

SEQ ID NO: 1726032 - RNA, 19 nt, Human
uguucaucauccuaagcua

SEQ ID NO: 1726033 - RNA, 16 nt, Human
uguucucucuucucca

SEQ ID NO: 1726034 - RNA, 15 nt, Human
uguucucucuucucc

SEQ ID NO: 1726035 - RNA, 16 nt, Human
uguucuggcucuucca

SEQ ID NO: 1726036 - RNA, 13 nt, Human
uguucuggcucuu

SEQ ID NO: 1726037 - RNA, 12 nt, Human
uguucuggcucu

SEQ ID NO: 1726038 - RNA, 13 nt, Human
uguucucugagga

SEQ ID NO: 1726039 - RNA, 16 nt, Human
uguucucugcccucca

SEQ ID NO: 1726040 - RNA, 15 nt, Human
uguucucugcccucc

SEQ ID NO: 1726041 - RNA, 14 nt, Human
uguucucugcccuc

SEQ ID NO: 1726042 - RNA, 13 nt, Human
uguucucugcccu

SEQ ID NO: 1726043 - RNA, 15 nt, Human
uguugaagccuuugu

SEQ ID NO: 1726044 - RNA, 20 nt, Human
uguucuggcucuuccaggcu

SEQ ID NO: 1726045 - RNA, 17 nt, Human
uguucuggcucuuccag

SEQ ID NO: 1726046 - RNA, 21 nt, Human
uguucuggcucuuccaggcug

SEQ ID NO: 1726047 - RNA, 12 nt, Human
uguucugggaca

SEQ ID NO: 1726048 - RNA, 15 nt, Human
uguucugcuuuccuc

SEQ ID NO: 1726049 - RNA, 23 nt, Human
uguucuuucuggcuaugcauuug

SEQ ID NO: 1726050 - RNA, 15 nt, Human
uguugauuaaagaug

SEQ ID NO: 1726051 - RNA, 16 nt, Human
uguugauuaaagauga

SEQ ID NO: 1726052 - RNA, 16 nt, Human
uguuggccaggcuggu

SEQ ID NO: 1726053 - RNA, 15 nt, Human
uguuggccaggcugg

SEQ ID NO: 1726054 - RNA, 15 nt, Human
uguuggccaaagcca

SEQ ID NO: 1726055 - RNA, 14 nt, Human
uguuggcagccucu

SEQ ID NO: 1726056 - RNA, 19 nt, Human
uguuggcugggggccucag

SEQ ID NO: 1726057 - RNA, 17 nt, Human
uguuggcugggggccuc

SEQ ID NO: 1726058 - RNA, 12 nt, Human
uguuuaagagac

SEQ ID NO: 1726059 - RNA, 22 nt, Human
uuaauuaaaacacaacaucuuu

SEQ ID NO: 1726060 - RNA, 15 nt, Human
uuacacauuuuucag

SEQ ID NO: 1726061 - RNA, 16 nt, Human
uuacacuuuuuggaag

SEQ ID NO: 1726062 - RNA, 20 nt, Human
uuacacuuuaugcacaaaau

SEQ ID NO: 1726063 - RNA, 13 nt, Human
uuacacuuuaugc

SEQ ID NO: 1726064 - RNA, 17 nt, Human
uuacacauuuuucagau

SEQ ID NO: 1726065 - RNA, 23 nt, Human
uuacacauuuuucagauauaaaa

SEQ ID NO: 1726066 - RNA, 12 nt, Human
uuacauuuuuaa

SEQ ID NO: 1726067 - RNA, 17 nt, Human
uuacauuuuuaagugcu

SEQ ID NO: 1726068 - RNA, 20 nt, Human
uuaauagcgucauaacuaga

SEQ ID NO: 1726069 - RNA, 14 nt, Human
uuaacuuuuauaaa

SEQ ID NO: 1726070 - RNA, 12 nt, Human
uuaagaguaaaa

SEQ ID NO: 1726071 - RNA, 17 nt, Human
uuaaaugcccagccccu

SEQ ID NO: 1726072 - RNA, 20 nt, Human
uuaaaugcaaccauuugaaa

SEQ ID NO: 1726073 - RNA, 12 nt, Human
uuaacuuuuaua

SEQ ID NO: 1726074 - RNA, 13 nt, Human
uuaacuuuuauaa

SEQ ID NO: 1726075 - RNA, 15 nt, Human
uguuuccuggcacug

SEQ ID NO: 1726076 - RNA, 16 nt, Human
uguuuuaagaggcagg

SEQ ID NO: 1726077 - RNA, 16 nt, Human
uguuuguugucagcug

SEQ ID NO: 1726078 - RNA, 22 nt, Human
uuaaaaaaaaaccugagcccca

SEQ ID NO: 1726079 - RNA, 17 nt, Human
uguuuuaagaggcaggg

SEQ ID NO: 1726080 - RNA, 22 nt, Human
uguuuuaaggaugcuuguacau

SEQ ID NO: 1726081 - RNA, 23 nt, Human
uguuuuaaggaugcuuguacaua

SEQ ID NO: 1726082 - RNA, 18 nt, Human
uuaaagaaaaguuuugua

SEQ ID NO: 1726083 - RNA, 16 nt, Human
uuaaaugcccagcccc

SEQ ID NO: 1726084 - RNA, 15 nt, Human
uuaaaugcccagccc

SEQ ID NO: 1726085 - RNA, 14 nt, Human
uuaaaugcccagcc

SEQ ID NO: 1726086 - RNA, 11 nt, Human
uuaaaugcacc

SEQ ID NO: 1726087 - RNA, 14 nt, Human
uuaaaacccaagug

SEQ ID NO: 1726088 - RNA, 16 nt, Human
ugucccaacuuguaaa

SEQ ID NO: 1726089 - RNA, 16 nt, Human
ugucauuugagcaggg

SEQ ID NO: 1726090 - RNA, 19 nt, Human
ugucauuugagcagggcuc

SEQ ID NO: 1726091 - RNA, 13 nt, Human
ugucaccugaaga

SEQ ID NO: 1726092 - RNA, 22 nt, Human
uguccccaccgcagacaggacc

SEQ ID NO: 1726093 - RNA, 19 nt, Human
uguccccaccgcagacagg

SEQ ID NO: 1726094 - RNA, 18 nt, Human
uguccccaccgcagacag

SEQ ID NO: 1726095 - RNA, 20 nt, Human
uguccuacccacccuccuuu

SEQ ID NO: 1726096 - RNA, 17 nt, Human
uguccccgacccuugcc

SEQ ID NO: 1726097 - RNA, 16 nt, Human
uguccccgacccuugc

SEQ ID NO: 1726098 - RNA, 17 nt, Human
uguccuacucuguguca

SEQ ID NO: 1726099 - RNA, 12 nt, Human
uguccuacucug

SEQ ID NO: 1726100 - RNA, 22 nt, Human
uguauaaaagggacugagaaau

SEQ ID NO: 1726101 - RNA, 22 nt, Human
uguauucucuccuguaccucuu

SEQ ID NO: 1726102 - RNA, 17 nt, Human
ugucacacacuuuggcu

SEQ ID NO: 1726103 - RNA, 12 nt, Human
ugucacaggcag

SEQ ID NO: 1726104 - RNA, 13 nt, Human
ugucacaggcagg

SEQ ID NO: 1726105 - RNA, 20 nt, Human
uguauuuauuuaguauuuau

SEQ ID NO: 1726106 - RNA, 15 nt, Human
uguauuuaaaugaaa

SEQ ID NO: 1726107 - RNA, 14 nt, Human
uguaaucacagcua

SEQ ID NO: 1726108 - RNA, 17 nt, Human
uggucacaggaaguaga

SEQ ID NO: 1726109 - RNA, 16 nt, Human
uguaccgcaaugugac

SEQ ID NO: 1726110 - RNA, 12 nt, Human
uguacaguuuuu

SEQ ID NO: 1726111 - RNA, 21 nt, Human
uguacagucuuguauuaaguu

SEQ ID NO: 1726112 - RNA, 18 nt, Human
uguacagagcccacgccc

SEQ ID NO: 1726113 - RNA, 17 nt, Human
uguacagagcccacgcc

SEQ ID NO: 1726114 - RNA, 16 nt, Human
uguacagagcccacgc

SEQ ID NO: 1726115 - RNA, 17 nt, Human
uguaauuaaguacuaug

SEQ ID NO: 1726116 - RNA, 23 nt, Human
uguacaaggacagccccuccucc

SEQ ID NO: 1726117 - RNA, 20 nt, Human
uguacaaggacagccccucc

SEQ ID NO: 1726118 - RNA, 16 nt, Human
uguacaaggacagccc

SEQ ID NO: 1726119 - RNA, 18 nt, Human
uguagccccucuccugga

SEQ ID NO: 1726120 - RNA, 23 nt, Human
uguagccucaaucgagugagaca

SEQ ID NO: 1726121 - RNA, 15 nt, Human
uguacgucugacagg

SEQ ID NO: 1726122 - RNA, 19 nt, Human
uguacugcauaugaaagga

SEQ ID NO: 1726123 - RNA, 19 nt, Human
ugugcgccuacaggaguga

SEQ ID NO: 1726124 - RNA, 14 nt, Human
ugugcgccuacagg

SEQ ID NO: 1726125 - RNA, 16 nt, Human
ugugcucaggagcccu

SEQ ID NO: 1726126 - RNA, 15 nt, Human
ugugcucaggagccc

SEQ ID NO: 1726127 - RNA, 17 nt, Human
ugugcucaggagcccug

SEQ ID NO: 1726128 - RNA, 20 nt, Human
ugugcucaggagcccuggga

SEQ ID NO: 1726129 - RNA, 14 nt, Human
ugugcuuguuaacu

SEQ ID NO: 1726130 - RNA, 14 nt, Human
ugugcauuaucuag

SEQ ID NO: 1726131 - RNA, 16 nt, Human
ugugcauuaucuagau

SEQ ID NO: 1726132 - RNA, 19 nt, Human
ugugcauuaucuagauacu

SEQ ID NO: 1726133 - RNA, 14 nt, Human
ugugcacguacaca

SEQ ID NO: 1726134 - RNA, 16 nt, Human
ugugcacaugcacgug

SEQ ID NO: 1726135 - RNA, 20 nt, Human
ugugcauuaucuagauacug

SEQ ID NO: 1726136 - RNA, 21 nt, Human
ugugcauuaucuagauacugu

SEQ ID NO: 1726137 - RNA, 23 nt, Human
ugugcauuaucuagauacuguau

SEQ ID NO: 1726138 - RNA, 23 nt, Human
ugugcauuuggugguuucagaaa

SEQ ID NO: 1726139 - RNA, 12 nt, Human
uguguagggcgg

SEQ ID NO: 1726140 - RNA, 16 nt, Human
uguguagggcgggagg

SEQ ID NO: 1726141 - RNA, 22 nt, Human
ugugggcuaguugggcuuccuc

SEQ ID NO: 1726142 - RNA, 22 nt, Human
ugugggcgugagaccugccccu

SEQ ID NO: 1726143 - RNA, 21 nt, Human
ugugggcgugagaccugcccc

SEQ ID NO: 1726144 - RNA, 20 nt, Human
ugugggcgugagaccugccc

SEQ ID NO: 1726145 - RNA, 23 nt, Human
uguggcgcagcauauucaggaag

SEQ ID NO: 1726146 - RNA, 10 nt, Human
uguggcucac

SEQ ID NO: 1726147 - RNA, 19 nt, Human
uguggacacagcucuucuc

SEQ ID NO: 1726148 - RNA, 13 nt, Human
uguggacacagcu

SEQ ID NO: 1726149 - RNA, 18 nt, Human
uguggacacagcucuucu

SEQ ID NO: 1726150 - RNA, 20 nt, Human
ugugaggaagccgcuggggc

SEQ ID NO: 1726151 - RNA, 18 nt, Human
ugugaggaagccgcuggg

SEQ ID NO: 1726152 - RNA, 13 nt, Human
ugugaggaagccg

SEQ ID NO: 1726153 - RNA, 21 nt, Human
ugugagucaccaagcccaguu

SEQ ID NO: 1726154 - RNA, 19 nt, Human
ugugagucaccaagcccag

SEQ ID NO: 1726155 - RNA, 17 nt, Human
ugugagucaccaagccc

SEQ ID NO: 1726156 - RNA, 15 nt, Human
ugugagucaccaagc

SEQ ID NO: 1726157 - RNA, 16 nt, Human
ugugauauaagugugu

SEQ ID NO: 1726158 - RNA, 16 nt, Human
ugucugaagucacugc

SEQ ID NO: 1726159 - RNA, 18 nt, Human
ugucugaagucacugcac

SEQ ID NO: 1726160 - RNA, 17 nt, Human
ugucugaagucacugca

SEQ ID NO: 1726161 - RNA, 20 nt, Human
ugucugaagucacugcacag

SEQ ID NO: 1726162 - RNA, 19 nt, Human
ugucugaagucacugcaca

SEQ ID NO: 1726163 - RNA, 21 nt, Human
ugucuuuucuugcaugaggcu

SEQ ID NO: 1726164 - RNA, 16 nt, Human
ugucuuuggacccuga

SEQ ID NO: 1726165 - RNA, 14 nt, Human
ugucuuuggacccu

SEQ ID NO: 1726166 - RNA, 23 nt, Human
ugucuuuucuugcaugaggcuag

SEQ ID NO: 1726167 - RNA, 23 nt, Human
ugugaaaagaaaaaugagccugg

SEQ ID NO: 1726168 - RNA, 16 nt, Human
ugugaaaaugugugug

SEQ ID NO: 1726169 - RNA, 17 nt, Human
ugugaaaaugugugugu

SEQ ID NO: 1726170 - RNA, 22 nt, Human
ugcucuccucuugccacugccu

SEQ ID NO: 1726171 - RNA, 21 nt, Human
ugcucuccucuugccacugcc

SEQ ID NO: 1726172 - RNA, 18 nt, Human
ugcucuccucuugccacu

SEQ ID NO: 1726173 - RNA, 16 nt, Human
ugcucuccucuugcca

SEQ ID NO: 1726174 - RNA, 18 nt, Human
ugcuccucuccccagcaa

SEQ ID NO: 1726175 - RNA, 17 nt, Human
ugcuccucuccccagca

SEQ ID NO: 1726176 - RNA, 18 nt, Human
ugcuccuuucuuguuuua

SEQ ID NO: 1726177 - RNA, 16 nt, Human
ugcucacauaucuguc

SEQ ID NO: 1726178 - RNA, 15 nt, Human
ugcucacauaucugu

SEQ ID NO: 1726179 - RNA, 17 nt, Human
ugcucagagcaguguuu

SEQ ID NO: 1726180 - RNA, 14 nt, Human
ugcuccucucccca

SEQ ID NO: 1726181 - RNA, 23 nt, Human
ugcugacagacacaggcccggcu

SEQ ID NO: 1726182 - RNA, 22 nt, Human
ugcugacagacacaggcccggc

SEQ ID NO: 1726183 - RNA, 21 nt, Human
ugcugaaggcucgagcaugcc

SEQ ID NO: 1726184 - RNA, 13 nt, Human
ugcugaaggcucg

SEQ ID NO: 1726185 - RNA, 12 nt, Human
ugcugaaggcuc

SEQ ID NO: 1726186 - RNA, 23 nt, Human
ugcugaaggaauaaauugcuccu

SEQ ID NO: 1726187 - RNA, 17 nt, Human
ugcugauggugcaauga

SEQ ID NO: 1726188 - RNA, 15 nt, Human
ugcugauggugcaau

SEQ ID NO: 1726189 - RNA, 13 nt, Human
ugcugauggugca

SEQ ID NO: 1726190 - RNA, 18 nt, Human
ugcugauggugcaaugac

SEQ ID NO: 1726191 - RNA, 14 nt, Human
ugcugcauuuaaaa

SEQ ID NO: 1726192 - RNA, 18 nt, Human
ugcugcaguugccaguca

SEQ ID NO: 1726193 - RNA, 23 nt, Human
ugcugcaguugccagucaccccg

SEQ ID NO: 1726194 - RNA, 13 nt, Human
ugcugcuggcugg

SEQ ID NO: 1726195 - RNA, 18 nt, Human
ugccuguaaucacagcua

SEQ ID NO: 1726196 - RNA, 16 nt, Human
ugccugguggcagcug

SEQ ID NO: 1726197 - RNA, 15 nt, Human
ugccugguggcagcu

SEQ ID NO: 1726198 - RNA, 14 nt, Human
ugccugguggcagc

SEQ ID NO: 1726199 - RNA, 14 nt, Human
ugccugugaacuga

SEQ ID NO: 1726200 - RNA, 18 nt, Human
ugccugggcagaaggaag

SEQ ID NO: 1726201 - RNA, 21 nt, Human
ugccugggaucccucauccuc

SEQ ID NO: 1726202 - RNA, 19 nt, Human
ugccucgaacuggcugcaa

SEQ ID NO: 1726203 - RNA, 18 nt, Human
ugccucgaacuggcugca

SEQ ID NO: 1726204 - RNA, 20 nt, Human
ugccucgaacuggcugcaaa

SEQ ID NO: 1726205 - RNA, 18 nt, Human
ugccccuggcagccccug

SEQ ID NO: 1726206 - RNA, 17 nt, Human
ugccugaagucacacag

SEQ ID NO: 1726207 - RNA, 9 nt, Human
ugccucucu

SEQ ID NO: 1726208 - RNA, 21 nt, Human
ugccugugaacugaacucuga

SEQ ID NO: 1726209 - RNA, 18 nt, Human
ugccugugaacugaacuc

SEQ ID NO: 1726210 - RNA, 17 nt, Human
ugccugugaacugaacu

SEQ ID NO: 1726211 - RNA, 21 nt, Human
ugcgaucuggguucacugcaa

SEQ ID NO: 1726212 - RNA, 20 nt, Human
ugcgaucuggguucacugca

SEQ ID NO: 1726213 - RNA, 19 nt, Human
ugcgaucuggguucacugc

SEQ ID NO: 1726214 - RNA, 15 nt, Human
ugcgaucuggguuca

SEQ ID NO: 1726215 - RNA, 14 nt, Human
ugcgaucuggguuc

SEQ ID NO: 1726216 - RNA, 15 nt, Human
ugcuaaaugugaaug

SEQ ID NO: 1726217 - RNA, 22 nt, Human
ugcgccuacaggagugagcacu

SEQ ID NO: 1726218 - RNA, 16 nt, Human
ugcgccuacaggagug

SEQ ID NO: 1726219 - RNA, 14 nt, Human
ugcgccuacaggag

SEQ ID NO: 1726220 - RNA, 19 nt, Human
ugccaaauauaaauaaaaa

SEQ ID NO: 1726221 - RNA, 22 nt, Human
ugccaaauauaaauaaaaauaa

SEQ ID NO: 1726222 - RNA, 14 nt, Human
ugcaucaagaugug

SEQ ID NO: 1726223 - RNA, 19 nt, Human
ugcaucaagaugugacaug

SEQ ID NO: 1726224 - RNA, 17 nt, Human
ugccaaauauaaauaaa

SEQ ID NO: 1726225 - RNA, 18 nt, Human
ugccaaauauaaauaaaa

SEQ ID NO: 1726226 - RNA, 21 nt, Human
ugcauauuuauaaaaauaaaa

SEQ ID NO: 1726227 - RNA, 20 nt, Human
ugcauauuuauaaaaauaaa

SEQ ID NO: 1726228 - RNA, 20 nt, Human
ugccacccuggggagaaagu

SEQ ID NO: 1726229 - RNA, 22 nt, Human
ugccacuacggaauaguuggcu

SEQ ID NO: 1726230 - RNA, 20 nt, Human
ugccacuaaauugacacuua

SEQ ID NO: 1726231 - RNA, 19 nt, Human
ugccacccuggggagaaag

SEQ ID NO: 1726232 - RNA, 22 nt, Human
ugccagguuuuuggucugaccc

SEQ ID NO: 1726233 - RNA, 19 nt, Human
ugccagguuuuuggucuga

SEQ ID NO: 1726234 - RNA, 18 nt, Human
ugccagguuuuuggucug

SEQ ID NO: 1726235 - RNA, 10 nt, Human
ugccaggcau

SEQ ID NO: 1726236 - RNA, 21 nt, Human
ugccauccagguucagcuugu

SEQ ID NO: 1726237 - RNA, 24 nt, Human
ugccagguuuuuggucugacccac

SEQ ID NO: 1726238 - RNA, 14 nt, Human
ugcccaccuggccu

SEQ ID NO: 1726239 - RNA, 13 nt, Human
ugcccaccuggcc

SEQ ID NO: 1726240 - RNA, 13 nt, Human
ugcccaggcuggc

SEQ ID NO: 1726241 - RNA, 21 nt, Human
ugcccacucccugcaaccuga

SEQ ID NO: 1726242 - RNA, 13 nt, Human
ugcccaggcugga

SEQ ID NO: 1726243 - RNA, 18 nt, Human
ugcccaggcuggagugca

SEQ ID NO: 1726244 - RNA, 20 nt, Human
ugcccaggcuggagugcaau

SEQ ID NO: 1726245 - RNA, 11 nt, Human
ugcccaggcug

SEQ ID NO: 1726246 - RNA, 16 nt, Human
ugcccacucccugcaa

SEQ ID NO: 1726247 - RNA, 15 nt, Human
ugcccacucccugca

SEQ ID NO: 1726248 - RNA, 14 nt, Human
ugcccacucccugc

SEQ ID NO: 1726249 - RNA, 23 nt, Human
ugccccucaacucuccuccagag

SEQ ID NO: 1726250 - RNA, 15 nt, Human
ugccccagggcuccc

SEQ ID NO: 1726251 - RNA, 17 nt, Human
ugccccuggcagccccu

SEQ ID NO: 1726252 - RNA, 13 nt, Human
ugccccucccuuc

SEQ ID NO: 1726253 - RNA, 15 nt, Human
ugcaguugccaguca

SEQ ID NO: 1726254 - RNA, 14 nt, Human
ugcaguugccaguc

SEQ ID NO: 1726255 - RNA, 13 nt, Human
ugcaguugccagu

SEQ ID NO: 1726256 - RNA, 20 nt, Human
ugcaguggugcgaucugggu

SEQ ID NO: 1726257 - RNA, 22 nt, Human
ugcagugguaugaucacggcuc

SEQ ID NO: 1726258 - RNA, 16 nt, Human
ugcagugcuuccaagg

SEQ ID NO: 1726259 - RNA, 14 nt, Human
ugcaggcagccagg

SEQ ID NO: 1726260 - RNA, 13 nt, Human
ugcaggcagccag

SEQ ID NO: 1726261 - RNA, 15 nt, Human
ugcaggcagccaggc

SEQ ID NO: 1726262 - RNA, 15 nt, Human
ugcaccgggccacag

SEQ ID NO: 1726263 - RNA, 14 nt, Human
ugcaccgggccaca

SEQ ID NO: 1726264 - RNA, 23 nt, Human
ugcaccggcuggccuggccccuc

SEQ ID NO: 1726265 - RNA, 19 nt, Human
ugaguccccuguuuguuuc

SEQ ID NO: 1726266 - RNA, 22 nt, Human
ugcaccgggccacagagaaagu

SEQ ID NO: 1726267 - RNA, 17 nt, Human
ugcaccgggccacagag

SEQ ID NO: 1726268 - RNA, 20 nt, Human
ugaguccccuguuuguuucu

SEQ ID NO: 1726269 - RNA, 14 nt, Human
ugcacuuuguucug

SEQ ID NO: 1726270 - RNA, 12 nt, Human
ugcacuuuguuc

SEQ ID NO: 1726271 - RNA, 20 nt, Human
ugcagcaauaaagcagcguu

SEQ ID NO: 1726272 - RNA, 23 nt, Human
ugcagcaauaaagcagcguuucu

SEQ ID NO: 1726273 - RNA, 23 nt, Human
ugcagcacagcugagaggcuguc

SEQ ID NO: 1726274 - RNA, 21 nt, Human
ugcagagcaggaaacaugacu

SEQ ID NO: 1726275 - RNA, 12 nt, Human
ugggacacccug

SEQ ID NO: 1726276 - RNA, 15 nt, Human
uggcuuuugugcauu

SEQ ID NO: 1726277 - RNA, 13 nt, Human
ugggacacccugu

SEQ ID NO: 1726278 - RNA, 14 nt, Human
ugggagcugccugu

SEQ ID NO: 1726279 - RNA, 13 nt, Human
ugggagcugccug

SEQ ID NO: 1726280 - RNA, 12 nt, Human
ugggagcugccu

SEQ ID NO: 1726281 - RNA, 13 nt, Human
ugggagcaaaaga

SEQ ID NO: 1726282 - RNA, 16 nt, Human
ugggauuacaggugug

SEQ ID NO: 1726283 - RNA, 18 nt, Human
ugggauuacaggcuccug

SEQ ID NO: 1726284 - RNA, 13 nt, Human
ugggauccuggag

SEQ ID NO: 1726285 - RNA, 18 nt, Human
ugggauccuccaggugca

SEQ ID NO: 1726286 - RNA, 15 nt, Human
ugggcagaggaaagc

SEQ ID NO: 1726287 - RNA, 17 nt, Human
ugggauuacagguguga

SEQ ID NO: 1726288 - RNA, 21 nt, Human
ugggauuacagggaugagcca

SEQ ID NO: 1726289 - RNA, 22 nt, Human
ugggagcugccuguucagcucc

SEQ ID NO: 1726290 - RNA, 21 nt, Human
ugggagcugccuguucagcuc

SEQ ID NO: 1726291 - RNA, 17 nt, Human
ugggagcugccuguuca

SEQ ID NO: 1726292 - RNA, 15 nt, Human
ugggauccuccaggu

SEQ ID NO: 1726293 - RNA, 15 nt, Human
ugggagugagcuggu

SEQ ID NO: 1726294 - RNA, 21 nt, Human
uggcugggggccucagugcca

SEQ ID NO: 1726295 - RNA, 21 nt, Human
uggcugcuucaaggauccuga

SEQ ID NO: 1726296 - RNA, 21 nt, Human
uggcuugaguuuaaauuguaa

SEQ ID NO: 1726297 - RNA, 14 nt, Human
uggcuuuugugcau

SEQ ID NO: 1726298 - RNA, 20 nt, Human
ugggggaucacagccucuga

SEQ ID NO: 1726299 - RNA, 21 nt, Human
ugggggaucacagccucugaa

SEQ ID NO: 1726300 - RNA, 18 nt, Human
ugggggcugggcagagga

SEQ ID NO: 1726301 - RNA, 17 nt, Human
ugggggcugggcagagg

SEQ ID NO: 1726302 - RNA, 19 nt, Human
ugggggcugggcagaggaa

SEQ ID NO: 1726303 - RNA, 12 nt, Human
ugggggugcauu

SEQ ID NO: 1726304 - RNA, 15 nt, Human
ugggggugcauuuga

SEQ ID NO: 1726305 - RNA, 17 nt, Human
ugggcuucaguggcagc

SEQ ID NO: 1726306 - RNA, 15 nt, Human
ugggcuucaguggca

SEQ ID NO: 1726307 - RNA, 17 nt, Human
ugggcuggugucaccug

SEQ ID NO: 1726308 - RNA, 23 nt, Human
ugggcuggguucuacccaggugc

SEQ ID NO: 1726309 - RNA, 16 nt, Human
ugggcuaguugggcuu

SEQ ID NO: 1726310 - RNA, 22 nt, Human
ugggcuaagugauccucccacc

SEQ ID NO: 1726311 - RNA, 20 nt, Human
ugggcgugagaccugccccu

SEQ ID NO: 1726312 - RNA, 16 nt, Human
ugggcagaggaaagca

SEQ ID NO: 1726313 - RNA, 18 nt, Human
uggguuucuaaagcugcc

SEQ ID NO: 1726314 - RNA, 17 nt, Human
uggguuucuaaagcugc

SEQ ID NO: 1726315 - RNA, 21 nt, Human
uggguuucuaaagcugccagc

SEQ ID NO: 1726316 - RNA, 22 nt, Human
ugguauagaaaugcugguuuuu

SEQ ID NO: 1726317 - RNA, 14 nt, Human
ugguauagaaaugc

SEQ ID NO: 1726318 - RNA, 16 nt, Human
ugguauagaaaugcug

SEQ ID NO: 1726319 - RNA, 13 nt, Human
ugguauagaaaug

SEQ ID NO: 1726320 - RNA, 18 nt, Human
ugguaugaucacggcuca

SEQ ID NO: 1726321 - RNA, 23 nt, Human
ugguauuggcuagagguucaaag

SEQ ID NO: 1726322 - RNA, 16 nt, Human
uggguaacuagggaag

SEQ ID NO: 1726323 - RNA, 19 nt, Human
ugggguuuaucagaauucu

SEQ ID NO: 1726324 - RNA, 16 nt, Human
uggguucuacccaggu

SEQ ID NO: 1726325 - RNA, 15 nt, Human
uggguucuacccagg

SEQ ID NO: 1726326 - RNA, 22 nt, Human
uggguucuacccaggugcuagg

SEQ ID NO: 1726327 - RNA, 14 nt, Human
uggguuaguggaug

SEQ ID NO: 1726328 - RNA, 20 nt, Human
uggauuuaacagaaauguac

SEQ ID NO: 1726329 - RNA, 24 nt, Human
uggauuuaacagaaauguacagca

SEQ ID NO: 1726330 - RNA, 18 nt, Human
uggaggaaggaaacccag

SEQ ID NO: 1726331 - RNA, 12 nt, Human
uggaggaaggaa

SEQ ID NO: 1726332 - RNA, 20 nt, Human
uggaggaaggaaacccagcu

SEQ ID NO: 1726333 - RNA, 15 nt, Human
uggacuccugcacac

SEQ ID NO: 1726334 - RNA, 15 nt, Human
uggacuccucugucc

SEQ ID NO: 1726335 - RNA, 14 nt, Human
uggacucuaaaguc

SEQ ID NO: 1726336 - RNA, 21 nt, Human
uggccagaugcaccagcccuu

SEQ ID NO: 1726337 - RNA, 20 nt, Human
uggccagaugcaccagcccu

SEQ ID NO: 1726338 - RNA, 20 nt, Human
uggccacuccagaccccugg

SEQ ID NO: 1726339 - RNA, 17 nt, Human
uggccacuccagacccc

SEQ ID NO: 1726340 - RNA, 21 nt, Human
uggcacccggccccugcuggu

SEQ ID NO: 1726341 - RNA, 13 nt, Human
uggcagcugcuuu

SEQ ID NO: 1726342 - RNA, 19 nt, Human
uggcaggaguuggaagugu

SEQ ID NO: 1726343 - RNA, 13 nt, Human
uggcagugggagc

SEQ ID NO: 1726344 - RNA, 17 nt, Human
uggaaacagcucgacuu

SEQ ID NO: 1726345 - RNA, 22 nt, Human
uggaaacagcucgacuuuaaaa

SEQ ID NO: 1726346 - RNA, 21 nt, Human
uggaaagacuuuuccaacccu

SEQ ID NO: 1726347 - RNA, 20 nt, Human
uggaaagaguaggaagacuu

SEQ ID NO: 1726348 - RNA, 14 nt, Human
uggaaagaguacuc

SEQ ID NO: 1726349 - RNA, 20 nt, Human
uggaaaaauagccugccucu

SEQ ID NO: 1726350 - RNA, 17 nt, Human
uggaaaaauagccugcc

SEQ ID NO: 1726351 - RNA, 22 nt, Human
uggaauaauccuaaacauauga

SEQ ID NO: 1726352 - RNA, 17 nt, Human
uggaauaaggagaauga

SEQ ID NO: 1726353 - RNA, 15 nt, Human
uggaauauauaacca

SEQ ID NO: 1726354 - RNA, 16 nt, Human
uggaauauauaaccag

SEQ ID NO: 1726355 - RNA, 21 nt, Human
uggaacguuuuuccuguucuu

SEQ ID NO: 1726356 - RNA, 19 nt, Human
uggaauaacauguaauuaa

SEQ ID NO: 1726357 - RNA, 15 nt, Human
uggaauaacauguaa

SEQ ID NO: 1726358 - RNA, 14 nt, Human
uggaauaacaugua

SEQ ID NO: 1726359 - RNA, 19 nt, Human
uggacaugcacagcuaaca

SEQ ID NO: 1726360 - RNA, 13 nt, Human
uggacaugcacag

SEQ ID NO: 1726361 - RNA, 20 nt, Human
uggacucaccucccccaucu

SEQ ID NO: 1726362 - RNA, 18 nt, Human
uggacucaccucccccau

SEQ ID NO: 1726363 - RNA, 16 nt, Human
uggacagaagcagcuc

SEQ ID NO: 1726364 - RNA, 15 nt, Human
uggacagaagcagcu

SEQ ID NO: 1726365 - RNA, 18 nt, Human
uggacagaagcagcucuu

SEQ ID NO: 1726366 - RNA, 17 nt, Human
uggacagaagcagcucu

SEQ ID NO: 1726367 - RNA, 23 nt, Human
ucccuaccgagucucuucuccac

SEQ ID NO: 1726368 - RNA, 22 nt, Human
ucccuaccgagucucuucucca

SEQ ID NO: 1726369 - RNA, 21 nt, Human
ucccuaccgagucucuucucc

SEQ ID NO: 1726370 - RNA, 19 nt, Human
ucccuaccgagucucuucu

SEQ ID NO: 1726371 - RNA, 22 nt, Human
ucccaugagccucagcauccug

SEQ ID NO: 1726372 - RNA, 17 nt, Human
ucccaugagccucagca

SEQ ID NO: 1726373 - RNA, 18 nt, Human
ucccucccuuccucuuuc

SEQ ID NO: 1726374 - RNA, 17 nt, Human
ucccuacuuccugugac

SEQ ID NO: 1726375 - RNA, 14 nt, Human
ucccucccuugggg

SEQ ID NO: 1726376 - RNA, 13 nt, Human
ucccucccuuggg

SEQ ID NO: 1726377 - RNA, 13 nt, Human
ucccucuggggcu

SEQ ID NO: 1726378 - RNA, 17 nt, Human
ucccucuggggcuguuc

SEQ ID NO: 1726379 - RNA, 20 nt, Human
ucccugcacuugcagacucu

SEQ ID NO: 1726380 - RNA, 16 nt, Human
ucccugccaauggacu

SEQ ID NO: 1726381 - RNA, 14 nt, Human
ucccugccaaugga

SEQ ID NO: 1726382 - RNA, 18 nt, Human
ucccugccccucccuuca

SEQ ID NO: 1726383 - RNA, 14 nt, Human
ucccugccccuccc

SEQ ID NO: 1726384 - RNA, 16 nt, Human
ucccugccccccagcc

SEQ ID NO: 1726385 - RNA, 21 nt, Human
ucccuucccacuggaggcaug

SEQ ID NO: 1726386 - RNA, 17 nt, Human
ucccuucccaccucucu

SEQ ID NO: 1726387 - RNA, 16 nt, Human
ucccuucccaccucuc

SEQ ID NO: 1726388 - RNA, 21 nt, Human
uccgcuuucuacccagcgagc

SEQ ID NO: 1726389 - RNA, 21 nt, Human
uccgaaagggacuuggaagcu

SEQ ID NO: 1726390 - RNA, 17 nt, Human
ucccuucuuuuucuucu

SEQ ID NO: 1726391 - RNA, 22 nt, Human
uccgaaagggacuuggaagcuc

SEQ ID NO: 1726392 - RNA, 21 nt, Human
uccuaguuccaccaucaagcc

SEQ ID NO: 1726393 - RNA, 22 nt, Human
uccuaguuccaccaucaagcca

SEQ ID NO: 1726394 - RNA, 17 nt, Human
uccuaguuccaccauca

SEQ ID NO: 1726395 - RNA, 14 nt, Human
uccuaguuccacca

SEQ ID NO: 1726396 - RNA, 18 nt, Human
uccuaagcuauucaguaa

SEQ ID NO: 1726397 - RNA, 16 nt, Human
uccuaagcuauucagu

SEQ ID NO: 1726398 - RNA, 20 nt, Human
uccucaaaacuucagacaua

SEQ ID NO: 1726399 - RNA, 13 nt, Human
uccuccaggugca

SEQ ID NO: 1726400 - RNA, 12 nt, Human
uccuccaggugc

SEQ ID NO: 1726401 - RNA, 22 nt, Human
uccuccaggugcacaagcucca

SEQ ID NO: 1726402 - RNA, 20 nt, Human
uccuccaggugcacaagcuc

SEQ ID NO: 1726403 - RNA, 18 nt, Human
uccuccaggugcacaagc

SEQ ID NO: 1726404 - RNA, 14 nt, Human
uccuccaggugcac

SEQ ID NO: 1726405 - RNA, 12 nt, Human
uccuccucagau

SEQ ID NO: 1726406 - RNA, 15 nt, Human
uccucuggccugugu

SEQ ID NO: 1726407 - RNA, 13 nt, Human
uccucuguacaga

SEQ ID NO: 1726408 - RNA, 15 nt, Human
uccucuguacagagc

SEQ ID NO: 1726409 - RNA, 21 nt, Human
uccuccuuuucacaguucucu

SEQ ID NO: 1726410 - RNA, 13 nt, Human
uccuccuggacuc

SEQ ID NO: 1726411 - RNA, 21 nt, Human
uccucuaggaggucucuaaga

SEQ ID NO: 1726412 - RNA, 15 nt, Human
uccugaggcuccacu

SEQ ID NO: 1726413 - RNA, 21 nt, Human
uccugagccagauuucacucu

SEQ ID NO: 1726414 - RNA, 22 nt, Human
uccucuguccaggcacugcugc

SEQ ID NO: 1726415 - RNA, 19 nt, Human
uccugagccagauuucacu

SEQ ID NO: 1726416 - RNA, 18 nt, Human
uccugagccagauuucac

SEQ ID NO: 1726417 - RNA, 23 nt, Human
uccucuguacagagcccacgccc

SEQ ID NO: 1726418 - RNA, 17 nt, Human
uccugagccagauuuca

SEQ ID NO: 1726419 - RNA, 17 nt, Human
uccucuguccaggcacu

SEQ ID NO: 1726420 - RNA, 16 nt, Human
uccugaggcuccacuu

SEQ ID NO: 1726421 - RNA, 17 nt, Human
uccugaggcuccacuug

SEQ ID NO: 1726422 - RNA, 12 nt, Human
uccugaggcugg

SEQ ID NO: 1726423 - RNA, 19 nt, Human
uccugaggcugggcucccu

SEQ ID NO: 1726424 - RNA, 17 nt, Human
uccugaggcugggcucc

SEQ ID NO: 1726425 - RNA, 16 nt, Human
uccugaggcugggcuc

SEQ ID NO: 1726426 - RNA, 15 nt, Human
uccugaggcugggcu

SEQ ID NO: 1726427 - RNA, 21 nt, Human
uccuuggugucgggcaugaca

SEQ ID NO: 1726428 - RNA, 18 nt, Human
uccuuggugucgggcaug

SEQ ID NO: 1726429 - RNA, 22 nt, Human
uccuuugugaggaagccgcugg

SEQ ID NO: 1726430 - RNA, 18 nt, Human
uccuuugugaggaagccg

SEQ ID NO: 1726431 - RNA, 17 nt, Human
uccuuugugaggaagcc

SEQ ID NO: 1726432 - RNA, 22 nt, Human
uccuuggugucgggcaugacac

SEQ ID NO: 1726433 - RNA, 21 nt, Human
uccuuaccagcagagcaccuu

SEQ ID NO: 1726434 - RNA, 23 nt, Human
uccuugaaaacacuguucucugc

SEQ ID NO: 1726435 - RNA, 22 nt, Human
uccuugaaaacacuguucucug

SEQ ID NO: 1726436 - RNA, 17 nt, Human
uccuuaucaaaggacac

SEQ ID NO: 1726437 - RNA, 15 nt, Human
uccuuaucaaaggac

SEQ ID NO: 1726438 - RNA, 14 nt, Human
uccuuaucaaagga

SEQ ID NO: 1726439 - RNA, 22 nt, Human
uccuuuucgcaggauucuuccu

SEQ ID NO: 1726440 - RNA, 23 nt, Human
ucgcaggauucuuccucccuccc

SEQ ID NO: 1726441 - RNA, 21 nt, Human
ucgcaggauucuuccucccuc

SEQ ID NO: 1726442 - RNA, 17 nt, Human
ucgcaggauucuuccuc

SEQ ID NO: 1726443 - RNA, 15 nt, Human
ucggccuccauccug

SEQ ID NO: 1726444 - RNA, 16 nt, Human
ucggccuccauccuga

SEQ ID NO: 1726445 - RNA, 17 nt, Human
ucggccuccauccugag

SEQ ID NO: 1726446 - RNA, 15 nt, Human
ucggaaaacaugcua

SEQ ID NO: 1726447 - RNA, 18 nt, Human
ucggaaaacaugcuacac

SEQ ID NO: 1726448 - RNA, 23 nt, Human
ucgcccagucuggaaugcagugg

SEQ ID NO: 1726449 - RNA, 19 nt, Human
ucgcccagucuggaaugca

SEQ ID NO: 1726450 - RNA, 14 nt, Human
ucgcccagucugga

SEQ ID NO: 1726451 - RNA, 23 nt, Human
ucucacacaugagcaucaggcca

SEQ ID NO: 1726452 - RNA, 20 nt, Human
ucucacugccaugccagcuu

SEQ ID NO: 1726453 - RNA, 23 nt, Human
ucucacucugucgcccagucugg

SEQ ID NO: 1726454 - RNA, 21 nt, Human
ucucacacaugagcaucaggc

SEQ ID NO: 1726455 - RNA, 16 nt, Human
ucucacacaugagcau

SEQ ID NO: 1726456 - RNA, 18 nt, Human
ucucaaauuucuaaaucu

SEQ ID NO: 1726457 - RNA, 13 nt, Human
ucucaaauuucua

SEQ ID NO: 1726458 - RNA, 22 nt, Human
ucuaucuuugagcgcccacuag

SEQ ID NO: 1726459 - RNA, 14 nt, Human
ucucaaauuucuaa

SEQ ID NO: 1726460 - RNA, 16 nt, Human
ucucaaauuucuaaau

SEQ ID NO: 1726461 - RNA, 15 nt, Human
ucucacuguugccca

SEQ ID NO: 1726462 - RNA, 14 nt, Human
ucucacuguugccc

SEQ ID NO: 1726463 - RNA, 17 nt, Human
ucucacuguugcccagg

SEQ ID NO: 1726464 - RNA, 19 nt, Human
ucuagggaaaaaccagcgu

SEQ ID NO: 1726465 - RNA, 12 nt, Human
ucuagggaaaaa

SEQ ID NO: 1726466 - RNA, 15 nt, Human
ucuagguaaauuaca

SEQ ID NO: 1726467 - RNA, 21 nt, Human
ucuacucgaguuacagacaaa

SEQ ID NO: 1726468 - RNA, 20 nt, Human
ucuacucgaguuacagacaa

SEQ ID NO: 1726469 - RNA, 18 nt, Human
ucuacucuagggaaaaac

SEQ ID NO: 1726470 - RNA, 12 nt, Human
ucuacuaaaaau

SEQ ID NO: 1726471 - RNA, 15 nt, Human
ucuacuaaaaauaca

SEQ ID NO: 1726472 - RNA, 19 nt, Human
ucuacuaaaaauacaaaaa

SEQ ID NO: 1726473 - RNA, 14 nt, Human
ucuacuauuuaugu

SEQ ID NO: 1726474 - RNA, 16 nt, Human
uccaagaagcccagga

SEQ ID NO: 1726475 - RNA, 15 nt, Human
uccaagaagcccagg

SEQ ID NO: 1726476 - RNA, 14 nt, Human
uccaagaagcccag

SEQ ID NO: 1726477 - RNA, 23 nt, Human
ucaugucaaauauuuagauguaa

SEQ ID NO: 1726478 - RNA, 20 nt, Human
uccaagaccuucuccuucac

SEQ ID NO: 1726479 - RNA, 19 nt, Human
uccaagaagcccaggaaag

SEQ ID NO: 1726480 - RNA, 22 nt, Human
uccaagcaggacauggacaagg

SEQ ID NO: 1726481 - RNA, 14 nt, Human
uccaagcaggacau

SEQ ID NO: 1726482 - RNA, 17 nt, Human
uccaagcaaaugugaau

SEQ ID NO: 1726483 - RNA, 15 nt, Human
uccaagcaaauguga

SEQ ID NO: 1726484 - RNA, 20 nt, Human
uccacaagagcccaggccuc

SEQ ID NO: 1726485 - RNA, 21 nt, Human
uccacaagagcccaggccucc

SEQ ID NO: 1726486 - RNA, 18 nt, Human
uccagcaauucuccugcc

SEQ ID NO: 1726487 - RNA, 21 nt, Human
uccagcaauucuccugccuca

SEQ ID NO: 1726488 - RNA, 20 nt, Human
uccagcaauucuccugccuc

SEQ ID NO: 1726489 - RNA, 19 nt, Human
uccagcaauucuccugccu

SEQ ID NO: 1726490 - RNA, 22 nt, Human
uccagauuuuuuacagcugccu

SEQ ID NO: 1726491 - RNA, 15 nt, Human
uccagaugccacaau

SEQ ID NO: 1726492 - RNA, 19 nt, Human
uccagcuggguuggaaaac

SEQ ID NO: 1726493 - RNA, 22 nt, Human
uccagcuggccgggagccugau

SEQ ID NO: 1726494 - RNA, 21 nt, Human
uccagcuggccgggagccuga

SEQ ID NO: 1726495 - RNA, 15 nt, Human
uccagcuggccggga

SEQ ID NO: 1726496 - RNA, 14 nt, Human
uccacccugcucuc

SEQ ID NO: 1726497 - RNA, 13 nt, Human
uccacccugcucu

SEQ ID NO: 1726498 - RNA, 21 nt, Human
uccacccugcucuccgaccag

SEQ ID NO: 1726499 - RNA, 22 nt, Human
uccacugugccaugugccaggu

SEQ ID NO: 1726500 - RNA, 15 nt, Human
uccacuuuaucuuga

SEQ ID NO: 1726501 - RNA, 23 nt, Human
uccacuuagaaauugcauuuccu

SEQ ID NO: 1726502 - RNA, 21 nt, Human
uccacuuagaaauugcauuuc

SEQ ID NO: 1726503 - RNA, 14 nt, Human
uccacuuucuagcc

SEQ ID NO: 1726504 - RNA, 17 nt, Human
uccacuuuaucuugaau

SEQ ID NO: 1726505 - RNA, 19 nt, Human
uccacuuucuagccagagg

SEQ ID NO: 1726506 - RNA, 19 nt, Human
uccagagaguggcuccucc

SEQ ID NO: 1726507 - RNA, 22 nt, Human
uccagagaguggcuccucccgg

SEQ ID NO: 1726508 - RNA, 16 nt, Human
uccaugucgccucugc

SEQ ID NO: 1726509 - RNA, 19 nt, Human
uccaugucgccucugcauu

SEQ ID NO: 1726510 - RNA, 18 nt, Human
uccaugucgccucugcau

SEQ ID NO: 1726511 - RNA, 17 nt, Human
uccaugucgccucugca

SEQ ID NO: 1726512 - RNA, 21 nt, Human
ucccaacucaccccagcccca

SEQ ID NO: 1726513 - RNA, 19 nt, Human
ucccaacucaccccagccc

SEQ ID NO: 1726514 - RNA, 14 nt, Human
ucccaacuuguaaa

SEQ ID NO: 1726515 - RNA, 18 nt, Human
ucccaacucaccccagcc

SEQ ID NO: 1726516 - RNA, 17 nt, Human
ucccaacucaccccagc

SEQ ID NO: 1726517 - RNA, 20 nt, Human
uccauagagagcaagacgcu

SEQ ID NO: 1726518 - RNA, 17 nt, Human
uccauagagagcaagac

SEQ ID NO: 1726519 - RNA, 23 nt, Human
uccauaaucuggacuccucuguc

SEQ ID NO: 1726520 - RNA, 14 nt, Human
ucccacucagucca

SEQ ID NO: 1726521 - RNA, 21 nt, Human
ucccaccuuggcugcagggag

SEQ ID NO: 1726522 - RNA, 19 nt, Human
ucccaccuuggcugcaggg

SEQ ID NO: 1726523 - RNA, 20 nt, Human
ucccaccucucucacuccuu

SEQ ID NO: 1726524 - RNA, 18 nt, Human
ucccaccucagccucccg

SEQ ID NO: 1726525 - RNA, 16 nt, Human
ucccaccucagccucc

SEQ ID NO: 1726526 - RNA, 18 nt, Human
ucccaccucucucacucc

SEQ ID NO: 1726527 - RNA, 17 nt, Human
ucccaccucucucacuc

SEQ ID NO: 1726528 - RNA, 14 nt, Human
ucccaccucucuca

SEQ ID NO: 1726529 - RNA, 16 nt, Human
ucccaugagccucagc

SEQ ID NO: 1726530 - RNA, 15 nt, Human
ucccaugagccucag

SEQ ID NO: 1726531 - RNA, 19 nt, Human
ucccaggcauuccccagga

SEQ ID NO: 1726532 - RNA, 19 nt, Human
ucccaggcugagccucagu

SEQ ID NO: 1726533 - RNA, 16 nt, Human
ucccaggauguacaag

SEQ ID NO: 1726534 - RNA, 18 nt, Human
ucccaggcauuccccagg

SEQ ID NO: 1726535 - RNA, 17 nt, Human
ucccaggcauuccccag

SEQ ID NO: 1726536 - RNA, 14 nt, Human
ucagauauaaaaga

SEQ ID NO: 1726537 - RNA, 15 nt, Human
ucagaucucuaacuu

SEQ ID NO: 1726538 - RNA, 18 nt, Human
ucagcauccuggcacccg

SEQ ID NO: 1726539 - RNA, 17 nt, Human
ucagcauccuggcaccc

SEQ ID NO: 1726540 - RNA, 16 nt, Human
ucagcauccuggcacc

SEQ ID NO: 1726541 - RNA, 15 nt, Human
ucagcauccuggcac

SEQ ID NO: 1726542 - RNA, 13 nt, Human
ucagccucccaaa

SEQ ID NO: 1726543 - RNA, 12 nt, Human
ucagccucccaa

SEQ ID NO: 1726544 - RNA, 15 nt, Human
ucagcacgauuucug

SEQ ID NO: 1726545 - RNA, 16 nt, Human
ucagcacgauuucugu

SEQ ID NO: 1726546 - RNA, 20 nt, Human
ucagcaccuacaguguacag

SEQ ID NO: 1726547 - RNA, 21 nt, Human
ucagcaccuacaguguacagu

SEQ ID NO: 1726548 - RNA, 22 nt, Human
ucagcaccuacaguguacaguc

SEQ ID NO: 1726549 - RNA, 17 nt, Human
ucagcacgauuucuguu

SEQ ID NO: 1726550 - RNA, 18 nt, Human
ucagcacgauuucuguuu

SEQ ID NO: 1726551 - RNA, 15 nt, Human
ucagcugcuacuacu

SEQ ID NO: 1726552 - RNA, 22 nt, Human
ucagcuccagcucaccagcccc

SEQ ID NO: 1726553 - RNA, 21 nt, Human
ucagcuccagcucaccagccc

SEQ ID NO: 1726554 - RNA, 18 nt, Human
ucagcuccagcucaccag

SEQ ID NO: 1726555 - RNA, 16 nt, Human
ucagccugcuccagcu

SEQ ID NO: 1726556 - RNA, 20 nt, Human
ucagccucccgaauagcugg

SEQ ID NO: 1726557 - RNA, 12 nt, Human
ucagccucccga

SEQ ID NO: 1726558 - RNA, 22 nt, Human
ucagccucccaaagugcuggga

SEQ ID NO: 1726559 - RNA, 14 nt, Human
ucaucauccuaagc

SEQ ID NO: 1726560 - RNA, 24 nt, Human
ucauggacuucugccagcauaaua

SEQ ID NO: 1726561 - RNA, 18 nt, Human
ucaguccaugaagaugua

SEQ ID NO: 1726562 - RNA, 15 nt, Human
ucaguccauagcaga

SEQ ID NO: 1726563 - RNA, 18 nt, Human
ucaguccccgugaaggag

SEQ ID NO: 1726564 - RNA, 20 nt, Human
ucagguggggucacucuggc

SEQ ID NO: 1726565 - RNA, 17 nt, Human
ucagguggggucacucu

SEQ ID NO: 1726566 - RNA, 21 nt, Human
ucagguggggucacucuggca

SEQ ID NO: 1726567 - RNA, 17 nt, Human
ucagguggggcagcuug

SEQ ID NO: 1726568 - RNA, 21 nt, Human
ucagguggggcagcuugaggg

SEQ ID NO: 1726569 - RNA, 16 nt, Human
ucagguggggcagcuu

SEQ ID NO: 1726570 - RNA, 15 nt, Human
ucagguggggcagcu

SEQ ID NO: 1726571 - RNA, 20 nt, Human
ucaggugcugccauccaggu

SEQ ID NO: 1726572 - RNA, 18 nt, Human
ucaggugcugccauccag

SEQ ID NO: 1726573 - RNA, 14 nt, Human
ucagguggggcagc

SEQ ID NO: 1726574 - RNA, 18 nt, Human
ucagugugacugaucucu

SEQ ID NO: 1726575 - RNA, 19 nt, Human
ucagucugauucccaagcu

SEQ ID NO: 1726576 - RNA, 17 nt, Human
ucagucugauucccaag

SEQ ID NO: 1726577 - RNA, 17 nt, Human
ucaguuaagccuuugga

SEQ ID NO: 1726578 - RNA, 16 nt, Human
ucaguuaagccuuugg

SEQ ID NO: 1726579 - RNA, 15 nt, Human
ucugccuccucuuca

SEQ ID NO: 1726580 - RNA, 20 nt, Human
ucugccucacauagcuuaca

SEQ ID NO: 1726581 - RNA, 18 nt, Human
ucugccucugacacacag

SEQ ID NO: 1726582 - RNA, 15 nt, Human
ucugccucugacaca

SEQ ID NO: 1726583 - RNA, 21 nt, Human
ucugccucccaucacccgcua

SEQ ID NO: 1726584 - RNA, 20 nt, Human
ucugccucccaucacccgcu

SEQ ID NO: 1726585 - RNA, 17 nt, Human
ucugccucccaucaccc

SEQ ID NO: 1726586 - RNA, 16 nt, Human
ucugccucccaucacc

SEQ ID NO: 1726587 - RNA, 20 nt, Human
ucugccugaagucacacagu

SEQ ID NO: 1726588 - RNA, 19 nt, Human
ucugccugaagucacacag

SEQ ID NO: 1726589 - RNA, 22 nt, Human
ucugccucugacacacagcucu

SEQ ID NO: 1726590 - RNA, 21 nt, Human
ucugccucugacacacagcuc

SEQ ID NO: 1726591 - RNA, 23 nt, Human
ucugccucugacacacagcucug

SEQ ID NO: 1726592 - RNA, 23 nt, Human
ucugccauauucuguuggccagu

SEQ ID NO: 1726593 - RNA, 22 nt, Human
ucugccauauucuguuggccag

SEQ ID NO: 1726594 - RNA, 12 nt, Human
ucugcccacucc

SEQ ID NO: 1726595 - RNA, 16 nt, Human
ucugcccacucccugc

SEQ ID NO: 1726596 - RNA, 14 nt, Human
ucugcccacucccu

SEQ ID NO: 1726597 - RNA, 13 nt, Human
ucugcccacuccc

SEQ ID NO: 1726598 - RNA, 12 nt, Human
ucugccucccau

SEQ ID NO: 1726599 - RNA, 15 nt, Human
ucugccucccaucac

SEQ ID NO: 1726600 - RNA, 13 nt, Human
ucugccucccauc

SEQ ID NO: 1726601 - RNA, 13 nt, Human
ucugcacuccccu

SEQ ID NO: 1726602 - RNA, 21 nt, Human
ucugaggaauccagacccggc

SEQ ID NO: 1726603 - RNA, 18 nt, Human
ucugaggaauccagaccc

SEQ ID NO: 1726604 - RNA, 22 nt, Human
ucugaggaauccagacccggcu

SEQ ID NO: 1726605 - RNA, 23 nt, Human
ucugacccaugcugcccugugag

SEQ ID NO: 1726606 - RNA, 22 nt, Human
ucugacccaugcugcccuguga

SEQ ID NO: 1726607 - RNA, 20 nt, Human
ucugacccaugcugcccugu

SEQ ID NO: 1726608 - RNA, 19 nt, Human
ucugacccaugcugcccug

SEQ ID NO: 1726609 - RNA, 24 nt, Human
ucugagaucaaaacgguuuuacug

SEQ ID NO: 1726610 - RNA, 18 nt, Human
ucugagaggacuuuucuu

SEQ ID NO: 1726611 - RNA, 14 nt, Human
ucugucucagucca

SEQ ID NO: 1726612 - RNA, 13 nt, Human
ucugucuaggaau

SEQ ID NO: 1726613 - RNA, 17 nt, Human
ucugucgcccagucugg

SEQ ID NO: 1726614 - RNA, 12 nt, Human
ucuguccuggga

SEQ ID NO: 1726615 - RNA, 15 nt, Human
ucuguacagagccca

SEQ ID NO: 1726616 - RNA, 14 nt, Human
ucuguacagagccc

SEQ ID NO: 1726617 - RNA, 16 nt, Human
ucuggugacuuuccuc

SEQ ID NO: 1726618 - RNA, 22 nt, Human
ucuggagcccacuguacuugcu

SEQ ID NO: 1726619 - RNA, 16 nt, Human
ucuggagcccacugua

SEQ ID NO: 1726620 - RNA, 12 nt, Human
ucuggagcccac

SEQ ID NO: 1726621 - RNA, 20 nt, Human
ucugccugcccaggccccug

SEQ ID NO: 1726622 - RNA, 18 nt, Human
ucugccugcccaggcccc

SEQ ID NO: 1726623 - RNA, 17 nt, Human
ucugccugcccaggccc

SEQ ID NO: 1726624 - RNA, 13 nt, Human
ucugccugcccag

SEQ ID NO: 1726625 - RNA, 13 nt, Human
ucugcugcuggcu

SEQ ID NO: 1726626 - RNA, 11 nt, Human
ucugcugcugg

SEQ ID NO: 1726627 - RNA, 17 nt, Human
ucugcugacagacacag

SEQ ID NO: 1726628 - RNA, 13 nt, Human
ucugcugaaggaa

SEQ ID NO: 1726629 - RNA, 15 nt, Human
ucugcugcuggcugg

SEQ ID NO: 1726630 - RNA, 14 nt, Human
ucugcugcuggcug

SEQ ID NO: 1726631 - RNA, 17 nt, Human
ucugcugcuggcugguu

SEQ ID NO: 1726632 - RNA, 14 nt, Human
ucuggaauuugaaa

SEQ ID NO: 1726633 - RNA, 18 nt, Human
ucuggacuccucugucca

SEQ ID NO: 1726634 - RNA, 16 nt, Human
ucuggacuccucuguc

SEQ ID NO: 1726635 - RNA, 15 nt, Human
ucuggacuccucugu

SEQ ID NO: 1726636 - RNA, 22 nt, Human
ucuggacuccucuguccaggca

SEQ ID NO: 1726637 - RNA, 21 nt, Human
ugaaaacacauuuuucuuagg

SEQ ID NO: 1726638 - RNA, 23 nt, Human
ugaaaacacuguucucugcccuc

SEQ ID NO: 1726639 - RNA, 22 nt, Human
ugaaaacacuguucucugcccu

SEQ ID NO: 1726640 - RNA, 21 nt, Human
ugaaaacacuguucucugccc

SEQ ID NO: 1726641 - RNA, 20 nt, Human
ugaaaacacuguucucugcc

SEQ ID NO: 1726642 - RNA, 17 nt, Human
ugaaaacacuguucucu

SEQ ID NO: 1726643 - RNA, 16 nt, Human
ucuuuuuauacuauua

SEQ ID NO: 1726644 - RNA, 15 nt, Human
ugaaacacuuugcau

SEQ ID NO: 1726645 - RNA, 12 nt, Human
ugaaaauuuuga

SEQ ID NO: 1726646 - RNA, 14 nt, Human
ugaaaauucagugg

SEQ ID NO: 1726647 - RNA, 20 nt, Human
ugaaaauuaggauuucauga

SEQ ID NO: 1726648 - RNA, 22 nt, Human
ugaaaagaaaaaugagccuggc

SEQ ID NO: 1726649 - RNA, 20 nt, Human
ugaaaagaaaaaugagccug

SEQ ID NO: 1726650 - RNA, 19 nt, Human
ugaaaagaaaaaugagccu

SEQ ID NO: 1726651 - RNA, 18 nt, Human
ugaaaaccacauuggaga

SEQ ID NO: 1726652 - RNA, 13 nt, Human
ucuuguguguuua

SEQ ID NO: 1726653 - RNA, 23 nt, Human
ucuuuccaaaguacacuguuuca

SEQ ID NO: 1726654 - RNA, 12 nt, Human
ucuuucccuccc

SEQ ID NO: 1726655 - RNA, 23 nt, Human
ucuuucccucccuuccucuuucc

SEQ ID NO: 1726656 - RNA, 13 nt, Human
ucuuucccucccu

SEQ ID NO: 1726657 - RNA, 13 nt, Human
ucuuuggacccug

SEQ ID NO: 1726658 - RNA, 15 nt, Human
ucuuuggacccugag

SEQ ID NO: 1726659 - RNA, 14 nt, Human
ucuuuggacccuga

SEQ ID NO: 1726660 - RNA, 16 nt, Human
ucuuuggacccugagg

SEQ ID NO: 1726661 - RNA, 13 nt, Human
ucuuugcagacag

SEQ ID NO: 1726662 - RNA, 23 nt, Human
ucuuugagugaagcugggagaac

SEQ ID NO: 1726663 - RNA, 17 nt, Human
ucuuugcagacaggcaa

SEQ ID NO: 1726664 - RNA, 14 nt, Human
ucuuugcagacagg

SEQ ID NO: 1726665 - RNA, 15 nt, Human
ucuucagaucucuaa

SEQ ID NO: 1726666 - RNA, 20 nt, Human
ucuucaguuaagccuuugga

SEQ ID NO: 1726667 - RNA, 19 nt, Human
ucuucaguuaagccuuugg

SEQ ID NO: 1726668 - RNA, 22 nt, Human
ucuucaguuaagccuuuggaaa

SEQ ID NO: 1726669 - RNA, 22 nt, Human
ucuuauccaacaucaacaucuu

SEQ ID NO: 1726670 - RNA, 14 nt, Human
ucuuauacauuuga

SEQ ID NO: 1726671 - RNA, 21 nt, Human
ucuucagagacuccugcaggc

SEQ ID NO: 1726672 - RNA, 14 nt, Human
ucuucagaucucua

SEQ ID NO: 1726673 - RNA, 13 nt, Human
ucuuauaauuuaa

SEQ ID NO: 1726674 - RNA, 14 nt, Human
ucuuauaauuuaaa

SEQ ID NO: 1726675 - RNA, 23 nt, Human
ucuuagguuggcaaaaaggcagg

SEQ ID NO: 1726676 - RNA, 20 nt, Human
ucuuagguuggcaaaaaggc

SEQ ID NO: 1726677 - RNA, 15 nt, Human
ucuuagauguauaua

SEQ ID NO: 1726678 - RNA, 20 nt, Human
ucugugucagguggggcagc

SEQ ID NO: 1726679 - RNA, 17 nt, Human
ucugugucagguggggc

SEQ ID NO: 1726680 - RNA, 22 nt, Human
ucugugucagguggggcagcuu

SEQ ID NO: 1726681 - RNA, 16 nt, Human
ucuucuuggucucagu

SEQ ID NO: 1726682 - RNA, 20 nt, Human
ucuugaaauauaggaacuua

SEQ ID NO: 1726683 - RNA, 21 nt, Human
ucuugaaauauaggaacuuaa

SEQ ID NO: 1726684 - RNA, 22 nt, Human
ucuugaagacuuuucuuucagc

SEQ ID NO: 1726685 - RNA, 13 nt, Human
ucuugaagacuuu

SEQ ID NO: 1726686 - RNA, 19 nt, Human
ucuugccaaauauaaauaa

SEQ ID NO: 1726687 - RNA, 23 nt, Human
ucuugcauggcaaggacugcagg

SEQ ID NO: 1726688 - RNA, 14 nt, Human
ucuugcucugcuga

SEQ ID NO: 1726689 - RNA, 17 nt, Human
ucuugccacugccucuu

SEQ ID NO: 1726690 - RNA, 16 nt, Human
ucuugccacugccucu

SEQ ID NO: 1726691 - RNA, 23 nt, Human
ucuugcucugcugacagacacag

SEQ ID NO: 1726692 - RNA, 15 nt, Human
ucuugcucugcugac

SEQ ID NO: 1726693 - RNA, 15 nt, Human
ugagaaauaaaguuu

SEQ ID NO: 1726694 - RNA, 22 nt, Human
ugacuuuucuguccgagcuuug

SEQ ID NO: 1726695 - RNA, 14 nt, Human
ugagaggggaacag

SEQ ID NO: 1726696 - RNA, 19 nt, Human
ugagaggcugucuguugua

SEQ ID NO: 1726697 - RNA, 18 nt, Human
ugagaggggaacagacug

SEQ ID NO: 1726698 - RNA, 19 nt, Human
ugagaggggaacagacugg

SEQ ID NO: 1726699 - RNA, 14 nt, Human
ugagaccaaccugg

SEQ ID NO: 1726700 - RNA, 12 nt, Human
ugagaccugccc

SEQ ID NO: 1726701 - RNA, 22 nt, Human
ugagaccugccccuccucucug

SEQ ID NO: 1726702 - RNA, 15 nt, Human
ugagaccugccccuc

SEQ ID NO: 1726703 - RNA, 14 nt, Human
ugagaccugccccu

SEQ ID NO: 1726704 - RNA, 13 nt, Human
ugagaccugcccc

SEQ ID NO: 1726705 - RNA, 13 nt, Human
ugaccauucucca

SEQ ID NO: 1726706 - RNA, 14 nt, Human
ugaccauucuccac

SEQ ID NO: 1726707 - RNA, 16 nt, Human
ugacuuuccucuuugg

SEQ ID NO: 1726708 - RNA, 21 nt, Human
ugacucuuucuauuguuucuu

SEQ ID NO: 1726709 - RNA, 19 nt, Human
ugacucuuggcacagcaug

SEQ ID NO: 1726710 - RNA, 14 nt, Human
ugacucuuggcaca

SEQ ID NO: 1726711 - RNA, 19 nt, Human
ugagcucaggaguuugaga

SEQ ID NO: 1726712 - RNA, 11 nt, Human
ugagcucagga

SEQ ID NO: 1726713 - RNA, 12 nt, Human
ugagcucagccc

SEQ ID NO: 1726714 - RNA, 11 nt, Human
ugagcucagcc

SEQ ID NO: 1726715 - RNA, 20 nt, Human
ugagcucagcccuggugggc

SEQ ID NO: 1726716 - RNA, 22 nt, Human
ugagccgagaucacgccacugc

SEQ ID NO: 1726717 - RNA, 23 nt, Human
ugagcagggcucagcggggacag

SEQ ID NO: 1726718 - RNA, 22 nt, Human
ugagcagggcucagcggggaca

SEQ ID NO: 1726719 - RNA, 20 nt, Human
ugagcagggcucagcgggga

SEQ ID NO: 1726720 - RNA, 23 nt, Human
ugagccgagaucacgccacugca

SEQ ID NO: 1726721 - RNA, 22 nt, Human
ugaggaugaaaaaauaacacug

SEQ ID NO: 1726722 - RNA, 19 nt, Human
ugaggaucagaguaaucca

SEQ ID NO: 1726723 - RNA, 17 nt, Human
ugaggaucagaguaauc

SEQ ID NO: 1726724 - RNA, 13 nt, Human
ugaggaucagagu

SEQ ID NO: 1726725 - RNA, 23 nt, Human
ugagcuuaagaauuuugagcagg

SEQ ID NO: 1726726 - RNA, 19 nt, Human
ugaggucagagccugcagu

SEQ ID NO: 1726727 - RNA, 18 nt, Human
ugaggucagagccugcag

SEQ ID NO: 1726728 - RNA, 21 nt, Human
ugaggcugggcucccuuccca

SEQ ID NO: 1726729 - RNA, 21 nt, Human
ugagucccaggcugagccuca

SEQ ID NO: 1726730 - RNA, 20 nt, Human
ugagucccaggcugagccuc

SEQ ID NO: 1726731 - RNA, 16 nt, Human
ugaggcugggcucccu

SEQ ID NO: 1726732 - RNA, 15 nt, Human
ugaggcugggcuccc

SEQ ID NO: 1726733 - RNA, 18 nt, Human
ugaggcucugcccuuggu

SEQ ID NO: 1726734 - RNA, 16 nt, Human
ugaggcucugcccuug

SEQ ID NO: 1726735 - RNA, 20 nt, Human
ugaagacucauucuucugua

SEQ ID NO: 1726736 - RNA, 19 nt, Human
ugaagacucauucuucugu

SEQ ID NO: 1726737 - RNA, 13 nt, Human
ugaaacauguuuc

SEQ ID NO: 1726738 - RNA, 16 nt, Human
ugaaacacuuugcaua

SEQ ID NO: 1726739 - RNA, 18 nt, Human
ugaaggccccgcccaggc

SEQ ID NO: 1726740 - RNA, 16 nt, Human
ugaagcuuuuauguga

SEQ ID NO: 1726741 - RNA, 21 nt, Human
ugaagcuuuuaugugaaacau

SEQ ID NO: 1726742 - RNA, 20 nt, Human
ugaaggccccgcccaggcuu

SEQ ID NO: 1726743 - RNA, 19 nt, Human
ugaaggccccgcccaggcu

SEQ ID NO: 1726744 - RNA, 15 nt, Human
ugaaugaauggcuaa

SEQ ID NO: 1726745 - RNA, 20 nt, Human
ugaaugaauggcuaagcaaa

SEQ ID NO: 1726746 - RNA, 14 nt, Human
ugaaugcauaaaau

SEQ ID NO: 1726747 - RNA, 16 nt, Human
ugaaucuuggugucua

SEQ ID NO: 1726748 - RNA, 21 nt, Human
ugaaggcuggguucugauccu

SEQ ID NO: 1726749 - RNA, 20 nt, Human
ugaaggcuggguucugaucc

SEQ ID NO: 1726750 - RNA, 23 nt, Human
ugaaucacguaaagcuagaaaug

SEQ ID NO: 1726751 - RNA, 17 nt, Human
ugaaucacguaaagcua

SEQ ID NO: 1726752 - RNA, 15 nt, Human
ugacauauuuuugcu

SEQ ID NO: 1726753 - RNA, 18 nt, Human
ugacagacacaggcccgg

SEQ ID NO: 1726754 - RNA, 17 nt, Human
ugacagacacaggcccg

SEQ ID NO: 1726755 - RNA, 23 nt, Human
ugacaucaacugcaucaagaugu

SEQ ID NO: 1726756 - RNA, 22 nt, Human
ugacagagcaagugagacccug

SEQ ID NO: 1726757 - RNA, 16 nt, Human
ugaccacugcagaaga

SEQ ID NO: 1726758 - RNA, 17 nt, Human
ugaccacugcagaagac

SEQ ID NO: 1726759 - RNA, 18 nt, Human
ugaccacugcagaagaca

SEQ ID NO: 1726760 - RNA, 13 nt, Human
ugacauguuuuau

SEQ ID NO: 1726761 - RNA, 23 nt, Human
ugaccagccuccaugcugccucc

SEQ ID NO: 1726762 - RNA, 22 nt, Human
ugaccagccuccaugcugccuc

SEQ ID NO: 1726763 - RNA, 21 nt, Human
ugaccagccuccaugcugccu

SEQ ID NO: 1726764 - RNA, 19 nt, Human
ugacauguguuggcagccu

SEQ ID NO: 1726765 - RNA, 13 nt, Human
ugaauuguaagga

SEQ ID NO: 1726766 - RNA, 21 nt, Human
ugaauuguaaggaaugauuaa

SEQ ID NO: 1726767 - RNA, 23 nt, Human
ugacaacacucauugaccugagg

SEQ ID NO: 1726768 - RNA, 15 nt, Human
ugacaacagacuucu

SEQ ID NO: 1726769 - RNA, 19 nt, Human
ugacaacagacuucugaaa

SEQ ID NO: 1726770 - RNA, 18 nt, Human
ugacaacagacuucugaa

SEQ ID NO: 1726771 - RNA, 13 nt, Human
ugacaacacucau

SEQ ID NO: 1726772 - RNA, 20 nt, Human
ugacaaagguaaaucagacu

SEQ ID NO: 1726773 - RNA, 23 nt, Human
ugacaaggauugcuacuguccua

SEQ ID NO: 1726774 - RNA, 13 nt, Human
ugacagacacagg

SEQ ID NO: 1726775 - RNA, 16 nt, Human
ugacagacacaggccc

SEQ ID NO: 1726776 - RNA, 14 nt, Human
ugacagacacaggc

SEQ ID NO: 1726777 - RNA, 15 nt, Human
ugacacacagcucug

SEQ ID NO: 1726778 - RNA, 14 nt, Human
ugacacacagcucu

SEQ ID NO: 1726779 - RNA, 13 nt, Human
uacagcugccugc

SEQ ID NO: 1726780 - RNA, 14 nt, Human
uacagcugccugca

SEQ ID NO: 1726781 - RNA, 13 nt, Human
uacaggaaguacu

SEQ ID NO: 1726782 - RNA, 18 nt, Human
uacaggaagguagaaaua

SEQ ID NO: 1726783 - RNA, 20 nt, Human
uacagcuugaccgugaggcc

SEQ ID NO: 1726784 - RNA, 23 nt, Human
uacacugugcugagucugaaggc

SEQ ID NO: 1726785 - RNA, 22 nt, Human
uacacugugcugagucugaagg

SEQ ID NO: 1726786 - RNA, 20 nt, Human
uacacuguuucaaacuuuac

SEQ ID NO: 1726787 - RNA, 16 nt, Human
uacacuuacacuuuau

SEQ ID NO: 1726788 - RNA, 22 nt, Human
uacacuguuucaaacuuuacua

SEQ ID NO: 1726789 - RNA, 18 nt, Human
uacagcuaaucagcauuc

SEQ ID NO: 1726790 - RNA, 16 nt, Human
uacagcuaaucagcau

SEQ ID NO: 1726791 - RNA, 23 nt, Human
uacaguucggugagcuacaaaug

SEQ ID NO: 1726792 - RNA, 20 nt, Human
uacaggaugaugacuaugga

SEQ ID NO: 1726793 - RNA, 15 nt, Human
uacaggagugagcac

SEQ ID NO: 1726794 - RNA, 22 nt, Human
uacaggaaguacuggagaaaau

SEQ ID NO: 1726795 - RNA, 15 nt, Human
uacaggaaguacugg

SEQ ID NO: 1726796 - RNA, 14 nt, Human
uacaggaaguacug

SEQ ID NO: 1726797 - RNA, 19 nt, Human
uacaguugaaaaacagcug

SEQ ID NO: 1726798 - RNA, 17 nt, Human
uacaguugaaaaacagc

SEQ ID NO: 1726799 - RNA, 21 nt, Human
uacagcuugaccgugaggcca

SEQ ID NO: 1726800 - RNA, 20 nt, Human
uacaguugaaaaacagcuga

SEQ ID NO: 1726801 - RNA, 18 nt, Human
uacaguuuguuaguauga

SEQ ID NO: 1726802 - RNA, 17 nt, Human
uacauaagauaaaugug

SEQ ID NO: 1726803 - RNA, 16 nt, Human
uacauaagauaaaugu

SEQ ID NO: 1726804 - RNA, 16 nt, Human
uacaugaaaacacauu

SEQ ID NO: 1726805 - RNA, 17 nt, Human
uacaugaaaacacauuu

SEQ ID NO: 1726806 - RNA, 18 nt, Human
uacaugaaaacacauuuu

SEQ ID NO: 1726807 - RNA, 19 nt, Human
uacaugaaaacacauuuuu

SEQ ID NO: 1726808 - RNA, 23 nt, Human
uacaugaaaacacauuuuucuua

SEQ ID NO: 1726809 - RNA, 19 nt, Human
uacaguuuguuaguaugag

SEQ ID NO: 1726810 - RNA, 21 nt, Human
uacaguuuguuaguaugaggc

SEQ ID NO: 1726811 - RNA, 16 nt, Human
uacauaaacaaguccu

SEQ ID NO: 1726812 - RNA, 22 nt, Human
uacauggaauaacauguaauua

SEQ ID NO: 1726813 - RNA, 19 nt, Human
uacauggaauaacauguaa

SEQ ID NO: 1726814 - RNA, 18 nt, Human
uacauggaauaacaugua

SEQ ID NO: 1726815 - RNA, 14 nt, Human
uacauggaauaaca

SEQ ID NO: 1726816 - RNA, 19 nt, Human
uacauuuuuaagugcugca

SEQ ID NO: 1726817 - RNA, 22 nt, Human
uacauuuuuaagugcugcauuu

SEQ ID NO: 1726818 - RNA, 14 nt, Human
uacauuuuuaagug

SEQ ID NO: 1726819 - RNA, 18 nt, Human
uacaaaguagaagucuua

SEQ ID NO: 1726820 - RNA, 14 nt, Human
uacaaaguagaagu

SEQ ID NO: 1726821 - RNA, 13 nt, Human
uaauuuuguguaa

SEQ ID NO: 1726822 - RNA, 19 nt, Human
uaauuuuguguaagaaaua

SEQ ID NO: 1726823 - RNA, 20 nt, Human
uaauuuuguguaagaaauac

SEQ ID NO: 1726824 - RNA, 15 nt, Human
uaauucuaugccugu

SEQ ID NO: 1726825 - RNA, 11 nt, Human
uacacacacac

SEQ ID NO: 1726826 - RNA, 15 nt, Human
uacacacugcauguu

SEQ ID NO: 1726827 - RNA, 21 nt, Human
uacacugugcugagucugaag

SEQ ID NO: 1726828 - RNA, 16 nt, Human
uacucuacccucuuag

SEQ ID NO: 1726829 - RNA, 21 nt, Human
uacugccuauuuuaauaaaca

SEQ ID NO: 1726830 - RNA, 14 nt, Human
uacugccuauuuua

SEQ ID NO: 1726831 - RNA, 22 nt, Human
uacugcccaggccugccuguuc

SEQ ID NO: 1726832 - RNA, 21 nt, Human
uacugcccaggccugccuguu

SEQ ID NO: 1726833 - RNA, 20 nt, Human
uacugcccaggccugccugu

SEQ ID NO: 1726834 - RNA, 19 nt, Human
uacugcccaggccugccug

SEQ ID NO: 1726835 - RNA, 15 nt, Human
uacuccccuccuuga

SEQ ID NO: 1726836 - RNA, 18 nt, Human
uacucgaguuacagacaa

SEQ ID NO: 1726837 - RNA, 22 nt, Human
uacucgaguuacagacaaagcg

SEQ ID NO: 1726838 - RNA, 12 nt, Human
uacuccucccag

SEQ ID NO: 1726839 - RNA, 22 nt, Human
uacuacaguccucccaucucac

SEQ ID NO: 1726840 - RNA, 13 nt, Human
uacuacaguuugu

SEQ ID NO: 1726841 - RNA, 14 nt, Human
uacuacaguuuguu

SEQ ID NO: 1726842 - RNA, 13 nt, Human
uacuuguggacac

SEQ ID NO: 1726843 - RNA, 20 nt, Human
uacuugcucuugaugccugg

SEQ ID NO: 1726844 - RNA, 19 nt, Human
uacuugcucuugaugccug

SEQ ID NO: 1726845 - RNA, 18 nt, Human
uacuugcucuugaugccu

SEQ ID NO: 1726846 - RNA, 14 nt, Human
uacuugcucuugau

SEQ ID NO: 1726847 - RNA, 13 nt, Human
uacuugcucuuga

SEQ ID NO: 1726848 - RNA, 16 nt, Human
uacuguccuacccacc

SEQ ID NO: 1726849 - RNA, 21 nt, Human
uacugucuucaguaagccgug

SEQ ID NO: 1726850 - RNA, 18 nt, Human
uaccucggugccuuccuc

SEQ ID NO: 1726851 - RNA, 21 nt, Human
uaccucuugagccuugaacuu

SEQ ID NO: 1726852 - RNA, 13 nt, Human
uaccuuuuuuaga

SEQ ID NO: 1726853 - RNA, 19 nt, Human
uaccuuuuuuagaguugau

SEQ ID NO: 1726854 - RNA, 22 nt, Human
uaccuuuuuuagaguugauacu

SEQ ID NO: 1726855 - RNA, 17 nt, Human
uacuaaccagcagaaau

SEQ ID NO: 1726856 - RNA, 20 nt, Human
uacuaauagacaauuuauua

SEQ ID NO: 1726857 - RNA, 21 nt, Human
uacuaauagacaauuuauuau

SEQ ID NO: 1726858 - RNA, 14 nt, Human
uacuaaggaaucuu

SEQ ID NO: 1726859 - RNA, 21 nt, Human
uacgaaaagaggggaagagac

SEQ ID NO: 1726860 - RNA, 18 nt, Human
uacgaaaagaggggaaga

SEQ ID NO: 1726861 - RNA, 13 nt, Human
uaccuuuuuuaua

SEQ ID NO: 1726862 - RNA, 16 nt, Human
uaccuuuuuuauacau

SEQ ID NO: 1726863 - RNA, 17 nt, Human
uaccuuuuuuauacaua

SEQ ID NO: 1726864 - RNA, 15 nt, Human
uaccuacauacaauu

SEQ ID NO: 1726865 - RNA, 22 nt, Human
uaccuaacgaaguauccuucag

SEQ ID NO: 1726866 - RNA, 22 nt, Human
uaccgagucucuucuccacugg

SEQ ID NO: 1726867 - RNA, 16 nt, Human
uacccagcgagcccug

SEQ ID NO: 1726868 - RNA, 17 nt, Human
uaccgagucucuucucc

SEQ ID NO: 1726869 - RNA, 21 nt, Human
uaccgagucucuucuccacug

SEQ ID NO: 1726870 - RNA, 18 nt, Human
uaccgagucucuucucca

SEQ ID NO: 1726871 - RNA, 15 nt, Human
uacccacugcucugg

SEQ ID NO: 1726872 - RNA, 23 nt, Human
uacauuuuuaagugcugcauuua

SEQ ID NO: 1726873 - RNA, 15 nt, Human
uagaauuaacacaug

SEQ ID NO: 1726874 - RNA, 16 nt, Human
uagaauuaacacauga

SEQ ID NO: 1726875 - RNA, 18 nt, Human
uagaauuaacacaugauc

SEQ ID NO: 1726876 - RNA, 23 nt, Human
uagaauuaguggcacuugcuuuu

SEQ ID NO: 1726877 - RNA, 14 nt, Human
uacuuguggacaca

SEQ ID NO: 1726878 - RNA, 20 nt, Human
uagacccacuggacucaccu

SEQ ID NO: 1726879 - RNA, 14 nt, Human
uagaguugauacua

SEQ ID NO: 1726880 - RNA, 17 nt, Human
uagaguugauacuacag

SEQ ID NO: 1726881 - RNA, 12 nt, Human
uagagugggagc

SEQ ID NO: 1726882 - RNA, 14 nt, Human
uagagguucaaaga

SEQ ID NO: 1726883 - RNA, 15 nt, Human
uagagguucaaagau

SEQ ID NO: 1726884 - RNA, 11 nt, Human
uagagacaggg

SEQ ID NO: 1726885 - RNA, 22 nt, Human
uagagaaggacccggaggggcc

SEQ ID NO: 1726886 - RNA, 13 nt, Human
uagagaaggaccc

SEQ ID NO: 1726887 - RNA, 19 nt, Human
uagcugggacuacaggcac

SEQ ID NO: 1726888 - RNA, 17 nt, Human
uagcugggacuacaggc

SEQ ID NO: 1726889 - RNA, 15 nt, Human
uagcugggacuacag

SEQ ID NO: 1726890 - RNA, 21 nt, Human
uagcucaggugucccugcacu

SEQ ID NO: 1726891 - RNA, 20 nt, Human
uagcucaggugucccugcac

SEQ ID NO: 1726892 - RNA, 12 nt, Human
uagcucauucuc

SEQ ID NO: 1726893 - RNA, 20 nt, Human
uagccugugccucugggacu

SEQ ID NO: 1726894 - RNA, 18 nt, Human
uagccugugccucuggga

SEQ ID NO: 1726895 - RNA, 16 nt, Human
uagccuaggugacaga

SEQ ID NO: 1726896 - RNA, 16 nt, Human
uagccccucuccugga

SEQ ID NO: 1726897 - RNA, 16 nt, Human
uagauacuguaucaug

SEQ ID NO: 1726898 - RNA, 11 nt, Human
uagcagggaaa

SEQ ID NO: 1726899 - RNA, 16 nt, Human
uagcauacguacacau

SEQ ID NO: 1726900 - RNA, 17 nt, Human
uagcauacguacacauu

SEQ ID NO: 1726901 - RNA, 18 nt, Human
uagcauacguacacauuu

SEQ ID NO: 1726902 - RNA, 19 nt, Human
uagcauacguacacauuuu

SEQ ID NO: 1726903 - RNA, 17 nt, Human
uaguaugaggcauuugu

SEQ ID NO: 1726904 - RNA, 18 nt, Human
uaguaugaggcauuuguu

SEQ ID NO: 1726905 - RNA, 22 nt, Human
uagguuauuuugauguaaagau

SEQ ID NO: 1726906 - RNA, 17 nt, Human
uaggugugggggaagca

SEQ ID NO: 1726907 - RNA, 13 nt, Human
uagguguggggga

SEQ ID NO: 1726908 - RNA, 19 nt, Human
uaggugugacugaauuucu

SEQ ID NO: 1726909 - RNA, 21 nt, Human
uaggugugacugaauuucuuu

SEQ ID NO: 1726910 - RNA, 23 nt, Human
uaggugugacugaauuucuuuug

SEQ ID NO: 1726911 - RNA, 16 nt, Human
uaggugacagagugag

SEQ ID NO: 1726912 - RNA, 11 nt, Human
uaggugacaga

SEQ ID NO: 1726913 - RNA, 11 nt, Human
uagggaaaaac

SEQ ID NO: 1726914 - RNA, 22 nt, Human
uagcuggucuuauuuguaaagc

SEQ ID NO: 1726915 - RNA, 20 nt, Human
uaguuguuugauucagacag

SEQ ID NO: 1726916 - RNA, 22 nt, Human
uaguuguuugauucagacagcu

SEQ ID NO: 1726917 - RNA, 21 nt, Human
uaguuguuugauucagacagc

SEQ ID NO: 1726918 - RNA, 20 nt, Human
uaguggcuuaaaacaacacu

SEQ ID NO: 1726919 - RNA, 16 nt, Human
uaguaugguggcuggg

SEQ ID NO: 1726920 - RNA, 15 nt, Human
uaguaugaggcauuu

SEQ ID NO: 1726921 - RNA, 16 nt, Human
uaguuugauuaaauuc

SEQ ID NO: 1726922 - RNA, 21 nt, Human
uaguuugauuaaauucuugca

SEQ ID NO: 1726923 - RNA, 15 nt, Human
uaguuugauuaaauu

SEQ ID NO: 1726924 - RNA, 15 nt, Human
uauaaacuuuaccuu

SEQ ID NO: 1726925 - RNA, 16 nt, Human
uauaaacuuuaccuuu

SEQ ID NO: 1726926 - RNA, 17 nt, Human
uauaaacuuuaccuuuu

SEQ ID NO: 1726927 - RNA, 18 nt, Human
uauaaacuuuaccuuuuu

SEQ ID NO: 1726928 - RNA, 13 nt, Human
uauaaacuuuacc

SEQ ID NO: 1726929 - RNA, 14 nt, Human
uauaaacuuuaccu

SEQ ID NO: 1726930 - RNA, 11 nt, Human
uauaaacuuua

SEQ ID NO: 1726931 - RNA, 21 nt, Human
uauauuuuuuguuaaaugauu

SEQ ID NO: 1726932 - RNA, 14 nt, Human
uaucaaaagaaaga

SEQ ID NO: 1726933 - RNA, 19 nt, Human
uaucaggugcugccaucca

SEQ ID NO: 1726934 - RNA, 20 nt, Human
uaucaggugcugccauccag

SEQ ID NO: 1726935 - RNA, 11 nt, Human
uauagaaaugc

SEQ ID NO: 1726936 - RNA, 11 nt, Human
uaauguuuccu

SEQ ID NO: 1726937 - RNA, 20 nt, Human
uaauuaaguacuauguauca

SEQ ID NO: 1726938 - RNA, 17 nt, Human
uaauuaaguacuaugua

SEQ ID NO: 1726939 - RNA, 14 nt, Human
uaauuaaguacuau

SEQ ID NO: 1726940 - RNA, 15 nt, Human
uaaugcgugcauacc

SEQ ID NO: 1726941 - RNA, 19 nt, Human
uaaugcgugcauaccacuu

SEQ ID NO: 1726942 - RNA, 22 nt, Human
uaaugcgugcauaccacuuuug

SEQ ID NO: 1726943 - RNA, 23 nt, Human
uaaugcgugcauaccacuuuugu

SEQ ID NO: 1726944 - RNA, 15 nt, Human
uaauggggcggugag

SEQ ID NO: 1726945 - RNA, 19 nt, Human
uaauaugcacacauuuuuu

SEQ ID NO: 1726946 - RNA, 15 nt, Human
uaauaugcacacauu

SEQ ID NO: 1726947 - RNA, 16 nt, Human
uaauaugcacacauuu

SEQ ID NO: 1726948 - RNA, 17 nt, Human
uaauaugcacacauuuu

SEQ ID NO: 1726949 - RNA, 18 nt, Human
uaauaugcacacauuuuu

SEQ ID NO: 1726950 - RNA, 20 nt, Human
uaauauuaaggaagacaaug

SEQ ID NO: 1726951 - RNA, 20 nt, Human
uaauccucuaggaggucucu

SEQ ID NO: 1726952 - RNA, 12 nt, Human
uaaucuaaaugg

SEQ ID NO: 1726953 - RNA, 13 nt, Human
uaaucuaaaugga

SEQ ID NO: 1726954 - RNA, 23 nt, Human
uaaucugggccagaauuucaaac

SEQ ID NO: 1726955 - RNA, 18 nt, Human
uaaucugggccagaauuu

SEQ ID NO: 1726956 - RNA, 22 nt, Human
uaaucuggacuccucuguccag

SEQ ID NO: 1726957 - RNA, 21 nt, Human
uaaucuggacuccucugucca

SEQ ID NO: 1726958 - RNA, 20 nt, Human
uaaucuggacuccucugucc

SEQ ID NO: 1726959 - RNA, 19 nt, Human
uaaucuggacuccucuguc

SEQ ID NO: 1726960 - RNA, 15 nt, Human
uaaucuggacuccuc

SEQ ID NO: 1726961 - RNA, 18 nt, Human
uaaucuggacuccucugu

SEQ ID NO: 1726962 - RNA, 17 nt, Human
uaaucuggacuccucug

SEQ ID NO: 1726963 - RNA, 17 nt, Human
uaaggguaucuggugac

SEQ ID NO: 1726964 - RNA, 20 nt, Human
uaaguauuuuccuguuguca

SEQ ID NO: 1726965 - RNA, 21 nt, Human
uaaguauuuuccuguugucaa

SEQ ID NO: 1726966 - RNA, 20 nt, Human
uaagguggguacgggagggu

SEQ ID NO: 1726967 - RNA, 15 nt, Human
uaaggugugcucuga

SEQ ID NO: 1726968 - RNA, 14 nt, Human
uaagcuauucagua

SEQ ID NO: 1726969 - RNA, 16 nt, Human
uaaggauguucuagca

SEQ ID NO: 1726970 - RNA, 14 nt, Human
uaaggcaaucaugg

SEQ ID NO: 1726971 - RNA, 15 nt, Human
uaagaggcagggucu

SEQ ID NO: 1726972 - RNA, 12 nt, Human
uaagaggcaggg

SEQ ID NO: 1726973 - RNA, 15 nt, Human
uaagccaugggagac

SEQ ID NO: 1726974 - RNA, 12 nt, Human
uaauaaagcugu

SEQ ID NO: 1726975 - RNA, 16 nt, Human
uaagugguguguguau

SEQ ID NO: 1726976 - RNA, 15 nt, Human
uaaguggugugugua

SEQ ID NO: 1726977 - RNA, 15 nt, Human
uaagugcugcauuua

SEQ ID NO: 1726978 - RNA, 16 nt, Human
uaagugcugcauuuaa

SEQ ID NO: 1726979 - RNA, 18 nt, Human
uaagugcugcauuuaaaa

SEQ ID NO: 1726980 - RNA, 22 nt, Human
uaagugcugcauuuaaaagaua

SEQ ID NO: 1726981 - RNA, 13 nt, Human
uaagugaaauaag

SEQ ID NO: 1726982 - RNA, 15 nt, Human
uaagugaaaauauag

SEQ ID NO: 1726983 - RNA, 14 nt, Human
uaagugcugcauuu

SEQ ID NO: 1726984 - RNA, 23 nt, Human
uaagugaggaugaaaaaauaaca

SEQ ID NO: 1726985 - RNA, 12 nt, Human
uaagugagagag

SEQ ID NO: 1726986 - RNA, 22 nt, Human
uaagugauugcugguuuuaguu

SEQ ID NO: 1726987 - RNA, 16 nt, Human
uaacuauguugauaaa

SEQ ID NO: 1726988 - RNA, 23 nt, Human
uaaccaguguuguggauuuaaca

SEQ ID NO: 1726989 - RNA, 16 nt, Human
uaaccacuucagcuga

SEQ ID NO: 1726990 - RNA, 13 nt, Human
uaaccagaucauu

SEQ ID NO: 1726991 - RNA, 11 nt, Human
uaacagaaaug

SEQ ID NO: 1726992 - RNA, 12 nt, Human
uaacagaaaugu

SEQ ID NO: 1726993 - RNA, 19 nt, Human
uaagaaaaaggaugcacag

SEQ ID NO: 1726994 - RNA, 23 nt, Human
uaagaaaaaggaugcacagaguu

SEQ ID NO: 1726995 - RNA, 16 nt, Human
uaagaaaaaggaugca

SEQ ID NO: 1726996 - RNA, 18 nt, Human
uaagaaaaaggaugcaca

SEQ ID NO: 1726997 - RNA, 19 nt, Human
uaagaaccuuuugagugcc

SEQ ID NO: 1726998 - RNA, 24 nt, Human
uaagaaagacuaucuaaauguuga

SEQ ID NO: 1726999 - RNA, 11 nt, Human
uaaauuauuuu

SEQ ID NO: 1727000 - RNA, 17 nt, Human
uaaauucuugcaaagua

SEQ ID NO: 1727001 - RNA, 18 nt, Human
uaaauucuugcaaaguau

SEQ ID NO: 1727002 - RNA, 22 nt, Human
uaaauucuugcaaaguaucccu

SEQ ID NO: 1727003 - RNA, 16 nt, Human
uaaauucuugcaaagu

SEQ ID NO: 1727004 - RNA, 20 nt, Human
uaaauugacacuuaaaaaug

SEQ ID NO: 1727005 - RNA, 23 nt, Human
uaaauugacacuuaaaaaugguu

SEQ ID NO: 1727006 - RNA, 18 nt, Human
uaacaccaugauuaacca

SEQ ID NO: 1727007 - RNA, 18 nt, Human
uaaaugggggugcauuug

SEQ ID NO: 1727008 - RNA, 19 nt, Human
uaaaugggggugcauuuga

SEQ ID NO: 1727009 - RNA, 14 nt, Human
uaaaugggggugca

SEQ ID NO: 1727010 - RNA, 17 nt, Human
uaaaugggggugcauuu

SEQ ID NO: 1727011 - RNA, 22 nt, Human
uaaaugucucuuuaaugucaca

SEQ ID NO: 1727012 - RNA, 20 nt, Human
uaaaugucuaguuguaacac

SEQ ID NO: 1727013 - RNA, 15 nt, Human
uaaauguagaaagug

SEQ ID NO: 1727014 - RNA, 13 nt, Human
uaaaugcccagcc

SEQ ID NO: 1727015 - RNA, 17 nt, Human
uaaaguugguaaaccuu

SEQ ID NO: 1727016 - RNA, 16 nt, Human
uaaaguugguaaaccu

SEQ ID NO: 1727017 - RNA, 17 nt, Human
uaaaugcccagccccuu

SEQ ID NO: 1727018 - RNA, 16 nt, Human
uaaaugcccagccccu

SEQ ID NO: 1727019 - RNA, 15 nt, Human
uaaaugcccagcccc

SEQ ID NO: 1727020 - RNA, 14 nt, Human
uaaaugcccagccc

SEQ ID NO: 1727021 - RNA, 16 nt, Human
uaaauggaaccacucu

SEQ ID NO: 1727022 - RNA, 18 nt, Human
uaaacacucuugaaaaau

SEQ ID NO: 1727023 - RNA, 17 nt, Human
uaaacacucuugaaaaa

SEQ ID NO: 1727024 - RNA, 15 nt, Human
uaaacacucuugaaa

SEQ ID NO: 1727025 - RNA, 21 nt, Human
uaaacaagaccacguuucuaa

SEQ ID NO: 1727026 - RNA, 22 nt, Human
uaaacaagaccacguuucuaaa

SEQ ID NO: 1727027 - RNA, 20 nt, Human
uaaacaagaccacguuucua

SEQ ID NO: 1727028 - RNA, 16 nt, Human
uaaaaucuugaaaaug

SEQ ID NO: 1727029 - RNA, 22 nt, Human
uaaacuugguuuuuaaaaaacu

SEQ ID NO: 1727030 - RNA, 14 nt, Human
uaaaguguuugaaa

SEQ ID NO: 1727031 - RNA, 17 nt, Human
uaaaggcuaccuuugua

SEQ ID NO: 1727032 - RNA, 15 nt, Human
uaaaggcuaccuuug

SEQ ID NO: 1727033 - RNA, 20 nt, Human
uaaagccugaguuugcuuuc

SEQ ID NO: 1727034 - RNA, 14 nt, Human
uaaagcugaaaacu

SEQ ID NO: 1727035 - RNA, 11 nt, Human
uaaagccucaa

SEQ ID NO: 1727036 - RNA, 16 nt, Human
uaaagcagcguuucua

SEQ ID NO: 1727037 - RNA, 17 nt, Human
uaaagcagcguuucuau

SEQ ID NO: 1727038 - RNA, 19 nt, Human
uaaagcagcguuucuauga

SEQ ID NO: 1727039 - RNA, 18 nt, Human
uaaagcaggcagaacuca

SEQ ID NO: 1727040 - RNA, 12 nt, Human
uaaagaaaacug

SEQ ID NO: 1727041 - RNA, 16 nt, Human
uaaagaaaaguuuugu

SEQ ID NO: 1727042 - RNA, 22 nt, Human
uaaagaaaaguuuuguaaauuu

SEQ ID NO: 1727043 - RNA, 15 nt, Human
uaaaacaacacucac

SEQ ID NO: 1727044 - RNA, 22 nt, Human
uaaaacaagcacuaaacaaaga

SEQ ID NO: 1727045 - RNA, 23 nt, Human
uaaaacacaacaucuuuuucuac

SEQ ID NO: 1727046 - RNA, 22 nt, Human
uaaaacacaacaucuuuuucua

SEQ ID NO: 1727047 - RNA, 17 nt, Human
uaaaacacaacaucuuu

SEQ ID NO: 1727048 - RNA, 19 nt, Human
uaaaacacuuccauaaucu

SEQ ID NO: 1727049 - RNA, 19 nt, Human
uaaaaaugguuuaaauggu

SEQ ID NO: 1727050 - RNA, 18 nt, Human
uaaaaaugguuuaaaugg

SEQ ID NO: 1727051 - RNA, 20 nt, Human
uaaaaacagauuuggaaaga

SEQ ID NO: 1727052 - RNA, 22 nt, Human
uaaaaacagauuuggaaagacu

SEQ ID NO: 1727053 - RNA, 17 nt, Human
uaaaaacaaagaaauua

SEQ ID NO: 1727054 - RNA, 21 nt, Human
uaaaaacaaagaaauuaugug

SEQ ID NO: 1727055 - RNA, 21 nt, Human
guuuuuaaggguuuguggaaa

SEQ ID NO: 1727056 - RNA, 17 nt, Human
guuuuuaauaaagacag

SEQ ID NO: 1727057 - RNA, 12 nt, Human
uaaaacauuaaa

SEQ ID NO: 1727058 - RNA, 15 nt, Human
uaaaacauuaaaaua

SEQ ID NO: 1727059 - RNA, 16 nt, Human
uaaaacauuaaaauau

SEQ ID NO: 1727060 - RNA, 19 nt, Human
uaaaacauuaaaauauaau

SEQ ID NO: 1727061 - RNA, 14 nt, Human
uaaaagauacaguu

SEQ ID NO: 1727062 - RNA, 17 nt, Human
uaaaagauacaguuacu

SEQ ID NO: 1727063 - RNA, 20 nt, Human
uaaaagauacaguuacucag

SEQ ID NO: 1727064 - RNA, 21 nt, Human
uaaaagauacaguuacucaga

SEQ ID NO: 1727065 - RNA, 12 nt, Human
uaaaaggugacc

SEQ ID NO: 1727066 - RNA, 19 nt, Human
uaaaaggugaccaaugaug

SEQ ID NO: 1727067 - RNA, 21 nt, Human
uaaaagguaugcaaucaaauc

SEQ ID NO: 1727068 - RNA, 12 nt, Human
uaaaaggagcca

SEQ ID NO: 1727069 - RNA, 16 nt, Human
guuuuaaaaugagaaa

SEQ ID NO: 1727070 - RNA, 15 nt, Human
guuuuaaaaugagaa

SEQ ID NO: 1727071 - RNA, 20 nt, Human
guuuguuucugaaagggacg

SEQ ID NO: 1727072 - RNA, 12 nt, Human
guuuucacucuu

SEQ ID NO: 1727073 - RNA, 11 nt, Human
guuuucacucu

SEQ ID NO: 1727074 - RNA, 24 nt, Human
guuuucaggaguggguugauuuca

SEQ ID NO: 1727075 - RNA, 17 nt, Human
guuuucaaaauaaaaau

SEQ ID NO: 1727076 - RNA, 20 nt, Human
guuuucaaaauuguuacaaa

SEQ ID NO: 1727077 - RNA, 17 nt, Human
guuuuaaaaugagaaau

SEQ ID NO: 1727078 - RNA, 12 nt, Human
guuuuguaaauu

SEQ ID NO: 1727079 - RNA, 14 nt, Human
guuuuguaaauuuc

SEQ ID NO: 1727080 - RNA, 20 nt, Human
guuuuccaugaguccccugu

SEQ ID NO: 1727081 - RNA, 19 nt, Human
guuuuccaugaguccccug

SEQ ID NO: 1727082 - RNA, 20 nt, Human
guuuuccagguuuaagcugu

SEQ ID NO: 1727083 - RNA, 13 nt, Human
guuuuccugaaga

SEQ ID NO: 1727084 - RNA, 18 nt, Human
guuuguuucugaaaggga

SEQ ID NO: 1727085 - RNA, 21 nt, Human
guuugauucagacagcugccu

SEQ ID NO: 1727086 - RNA, 20 nt, Human
guuugauucagacagcugcc

SEQ ID NO: 1727087 - RNA, 16 nt, Human
guuugauucagacagc

SEQ ID NO: 1727088 - RNA, 18 nt, Human
guuugagaucagccuggg

SEQ ID NO: 1727089 - RNA, 23 nt, Human
guuugauuaaauucuugcaaagu

SEQ ID NO: 1727090 - RNA, 17 nt, Human
guuugagaucagccugg

SEQ ID NO: 1727091 - RNA, 19 nt, Human
guuucuuuguaaugaaaac

SEQ ID NO: 1727092 - RNA, 18 nt, Human
guuucuuuguaaugaaaa

SEQ ID NO: 1727093 - RNA, 16 nt, Human
guuucuuuaguuuuug

SEQ ID NO: 1727094 - RNA, 12 nt, Human
guuggcuggggg

SEQ ID NO: 1727095 - RNA, 14 nt, Human
guuggccccugccc

SEQ ID NO: 1727096 - RNA, 13 nt, Human
guuggccccugcc

SEQ ID NO: 1727097 - RNA, 20 nt, Human
guuggccccugcccggcugc

SEQ ID NO: 1727098 - RNA, 19 nt, Human
guuggcugggggccucagu

SEQ ID NO: 1727099 - RNA, 23 nt, Human
guuggcugggggccucagugcca

SEQ ID NO: 1727100 - RNA, 14 nt, Human
guugucaagaauag

SEQ ID NO: 1727101 - RNA, 18 nt, Human
guugucaagaauagcauu

SEQ ID NO: 1727102 - RNA, 22 nt, Human
guugucaagaauagcauuguaa

SEQ ID NO: 1727103 - RNA, 12 nt, Human
guugucagcuga

SEQ ID NO: 1727104 - RNA, 22 nt, Human
guugucugaagucacugcacag

SEQ ID NO: 1727105 - RNA, 19 nt, Human
guugucugaagucacugca

SEQ ID NO: 1727106 - RNA, 14 nt, Human
guugugguuaaucu

SEQ ID NO: 1727107 - RNA, 22 nt, Human
guuguggauuuaacagaaaugu

SEQ ID NO: 1727108 - RNA, 15 nt, Human
guuguuaauaaaagu

SEQ ID NO: 1727109 - RNA, 14 nt, Human
guuguuacauuuuu

SEQ ID NO: 1727110 - RNA, 15 nt, Human
guuguuacauuuuua

SEQ ID NO: 1727111 - RNA, 20 nt, Human
guuguuugauucagacagcu

SEQ ID NO: 1727112 - RNA, 14 nt, Human
guuuagauaauaca

SEQ ID NO: 1727113 - RNA, 15 nt, Human
guuuagauaauacac

SEQ ID NO: 1727114 - RNA, 20 nt, Human
guuuaggauguugaaaaagu

SEQ ID NO: 1727115 - RNA, 19 nt, Human
guuuaggaacuacugagga

SEQ ID NO: 1727116 - RNA, 16 nt, Human
guugcaacuuuguaua

SEQ ID NO: 1727117 - RNA, 14 nt, Human
guugcaacuuugua

SEQ ID NO: 1727118 - RNA, 23 nt, Human
guugauuucagcaccuacagugu

SEQ ID NO: 1727119 - RNA, 15 nt, Human
guugcaggaccucag

SEQ ID NO: 1727120 - RNA, 14 nt, Human
guugauuaaagaug

SEQ ID NO: 1727121 - RNA, 14 nt, Human
guugaagccuuugu

SEQ ID NO: 1727122 - RNA, 13 nt, Human
guugaagccuuug

SEQ ID NO: 1727123 - RNA, 16 nt, Human
guugaagacagagcua

SEQ ID NO: 1727124 - RNA, 18 nt, Human
guuggcaaaaaggcagga

SEQ ID NO: 1727125 - RNA, 20 nt, Human
guuggauuuuugucuugugu

SEQ ID NO: 1727126 - RNA, 14 nt, Human
guuggcaaaaaggc

SEQ ID NO: 1727127 - RNA, 14 nt, Human
guuggauuuuuguc

SEQ ID NO: 1727128 - RNA, 23 nt, Human
guuggccaaagccaaagcuaggc

SEQ ID NO: 1727129 - RNA, 14 nt, Human
guuggccaguguga

SEQ ID NO: 1727130 - RNA, 19 nt, Human
guuggccaggcuggucuca

SEQ ID NO: 1727131 - RNA, 17 nt, Human
guuggccaggcuggucu

SEQ ID NO: 1727132 - RNA, 18 nt, Human
guuggccaggcuggucuc

SEQ ID NO: 1727133 - RNA, 19 nt, Human
guuggccaggcugcucuug

SEQ ID NO: 1727134 - RNA, 14 nt, Human
guuggccaggcugg

SEQ ID NO: 1727135 - RNA, 15 nt, Human
guuggccaggcuggu

SEQ ID NO: 1727136 - RNA, 13 nt, Human
guuggccaggcug

SEQ ID NO: 1727137 - RNA, 14 nt, Human
guuggccaggcugc

SEQ ID NO: 1727138 - RNA, 23 nt, Human
guugccagucaccccggccaccu

SEQ ID NO: 1727139 - RNA, 18 nt, Human
guugccagucaccccggc

SEQ ID NO: 1727140 - RNA, 17 nt, Human
guugccagucaccccgg

SEQ ID NO: 1727141 - RNA, 16 nt, Human
guugccagucaccccg

SEQ ID NO: 1727142 - RNA, 14 nt, Human
guugccagucaccc

SEQ ID NO: 1727143 - RNA, 13 nt, Human
guugccagucacc

SEQ ID NO: 1727144 - RNA, 14 nt, Human
guugcccaggcagg

SEQ ID NO: 1727145 - RNA, 15 nt, Human
guugcccaggcaggu

SEQ ID NO: 1727146 - RNA, 12 nt, Human
guugcccaggca

SEQ ID NO: 1727147 - RNA, 19 nt, Human
guucugauccuaguuccac

SEQ ID NO: 1727148 - RNA, 16 nt, Human
guucugcacacagcac

SEQ ID NO: 1727149 - RNA, 15 nt, Human
guucugcacacagca

SEQ ID NO: 1727150 - RNA, 17 nt, Human
guuccuuccucugagcc

SEQ ID NO: 1727151 - RNA, 19 nt, Human
guuccuuccucugagccuu

SEQ ID NO: 1727152 - RNA, 18 nt, Human
guuccuuccucugagccu

SEQ ID NO: 1727153 - RNA, 14 nt, Human
guucuaaagaugga

SEQ ID NO: 1727154 - RNA, 17 nt, Human
guucuaaagauggaaaa

SEQ ID NO: 1727155 - RNA, 20 nt, Human
guucuaaagauggaaaaacc

SEQ ID NO: 1727156 - RNA, 23 nt, Human
guucuaaagauggaaaaaccacc

SEQ ID NO: 1727157 - RNA, 17 nt, Human
guugaaaaacagcugag

SEQ ID NO: 1727158 - RNA, 13 nt, Human
guucuuuccaaag

SEQ ID NO: 1727159 - RNA, 14 nt, Human
guucuuuccaaagu

SEQ ID NO: 1727160 - RNA, 18 nt, Human
guucuuuccaaaguacac

SEQ ID NO: 1727161 - RNA, 20 nt, Human
guucuuuccaaaguacacug

SEQ ID NO: 1727162 - RNA, 15 nt, Human
guucuuucuuccucu

SEQ ID NO: 1727163 - RNA, 14 nt, Human
guucuuucuuccuc

SEQ ID NO: 1727164 - RNA, 20 nt, Human
guucuuucauuugcuuugga

SEQ ID NO: 1727165 - RNA, 22 nt, Human
guucuuucauuugcuuuggaag

SEQ ID NO: 1727166 - RNA, 19 nt, Human
guucuuucuuccucugcug

SEQ ID NO: 1727167 - RNA, 18 nt, Human
guucuuucuuccucugcu

SEQ ID NO: 1727168 - RNA, 17 nt, Human
guucuuucuuccucugc

SEQ ID NO: 1727169 - RNA, 16 nt, Human
guucuuucuuccucug

SEQ ID NO: 1727170 - RNA, 18 nt, Human
guucuuucacccuuuucu

SEQ ID NO: 1727171 - RNA, 23 nt, Human
guucugggacacaguucaauucu

SEQ ID NO: 1727172 - RNA, 16 nt, Human
guucugggacacaguu

SEQ ID NO: 1727173 - RNA, 15 nt, Human
guucugggacacagu

SEQ ID NO: 1727174 - RNA, 14 nt, Human
guucugggacacag

SEQ ID NO: 1727175 - RNA, 12 nt, Human
guucugggacac

SEQ ID NO: 1727176 - RNA, 11 nt, Human
guucugggaca

SEQ ID NO: 1727177 - RNA, 20 nt, Human
guucuggcucuuccaggcug

SEQ ID NO: 1727178 - RNA, 16 nt, Human
guucuggcucuuccag

SEQ ID NO: 1727179 - RNA, 12 nt, Human
guucuggcucuu

SEQ ID NO: 1727180 - RNA, 23 nt, Human
guucuggcagaguugaagacaga

SEQ ID NO: 1727181 - RNA, 23 nt, Human
guuccuccccuccuccuggacuc

SEQ ID NO: 1727182 - RNA, 14 nt, Human
guuccuaauccucu

SEQ ID NO: 1727183 - RNA, 22 nt, Human
guuccucauuagcauuuugcua

SEQ ID NO: 1727184 - RNA, 23 nt, Human
guuccuagugauggcuuaugaua

SEQ ID NO: 1727185 - RNA, 20 nt, Human
guuccaccaucaagccacca

SEQ ID NO: 1727186 - RNA, 17 nt, Human
guuccaccaucaagcca

SEQ ID NO: 1727187 - RNA, 14 nt, Human
guuccacagaggac

SEQ ID NO: 1727188 - RNA, 12 nt, Human
guuccacugaga

SEQ ID NO: 1727189 - RNA, 13 nt, Human
guuccacugagac

SEQ ID NO: 1727190 - RNA, 21 nt, Human
guuccagcaauucuccugccu

SEQ ID NO: 1727191 - RNA, 20 nt, Human
guuccagcaauucuccugcc

SEQ ID NO: 1727192 - RNA, 14 nt, Human
guuccacugagacc

SEQ ID NO: 1727193 - RNA, 23 nt, Human
guuccagcaauucuccugccuca

SEQ ID NO: 1727194 - RNA, 16 nt, Human
guucaucaaugaauga

SEQ ID NO: 1727195 - RNA, 17 nt, Human
guucaucauccuaagcu

SEQ ID NO: 1727196 - RNA, 13 nt, Human
guucaucuugaau

SEQ ID NO: 1727197 - RNA, 12 nt, Human
guucaucuugaa

SEQ ID NO: 1727198 - RNA, 18 nt, Human
guucaucuugaauuguaa

SEQ ID NO: 1727199 - RNA, 19 nt, Human
guucacugcaaccuccgcc

SEQ ID NO: 1727200 - RNA, 24 nt, Human
guucacucuacuuagcaugucccu

SEQ ID NO: 1727201 - RNA, 15 nt, Human
guuacucagaauucu

SEQ ID NO: 1727202 - RNA, 22 nt, Human
guuacuaaguuuuuauggcuuu

SEQ ID NO: 1727203 - RNA, 19 nt, Human
guuaguuucuccaagcagg

SEQ ID NO: 1727204 - RNA, 16 nt, Human
guuaguuucuccaagc

SEQ ID NO: 1727205 - RNA, 22 nt, Human
guuaguuucuccaagcaggaca

SEQ ID NO: 1727206 - RNA, 16 nt, Human
guuaguuccacugaga

SEQ ID NO: 1727207 - RNA, 21 nt, Human
guuacauuuuuaagugcugca

SEQ ID NO: 1727208 - RNA, 23 nt, Human
guuaccauuuugggguacccacu

SEQ ID NO: 1727209 - RNA, 19 nt, Human
guuacauaagauaaaugug

SEQ ID NO: 1727210 - RNA, 18 nt, Human
guuacauaagauaaaugu

SEQ ID NO: 1727211 - RNA, 17 nt, Human
guuacagacaaagcgug

SEQ ID NO: 1727212 - RNA, 15 nt, Human
guuacagacaaagcg

SEQ ID NO: 1727213 - RNA, 17 nt, Human
guuauuauauuuacaaa

SEQ ID NO: 1727214 - RNA, 19 nt, Human
guucaagcgauucuucugc

SEQ ID NO: 1727215 - RNA, 19 nt, Human
guuauuaaaaaucucaaau

SEQ ID NO: 1727216 - RNA, 23 nt, Human
guucaagugauucucaugccuca

SEQ ID NO: 1727217 - RNA, 20 nt, Human
guucaagcgauucuucugcu

SEQ ID NO: 1727218 - RNA, 16 nt, Human
guucaauucucauuug

SEQ ID NO: 1727219 - RNA, 23 nt, Human
guucaauucucauuugucacaca

SEQ ID NO: 1727220 - RNA, 21 nt, Human
guuaugacuccagaauuuccc

SEQ ID NO: 1727221 - RNA, 23 nt, Human
guggguuucuaaagcugccagcc

SEQ ID NO: 1727222 - RNA, 17 nt, Human
guggggcagcuugaggg

SEQ ID NO: 1727223 - RNA, 13 nt, Human
guggggcagcuug

SEQ ID NO: 1727224 - RNA, 18 nt, Human
guggggaccucaggccug

SEQ ID NO: 1727225 - RNA, 15 nt, Human
guggggaccucaggc

SEQ ID NO: 1727226 - RNA, 13 nt, Human
guggggaggggcu

SEQ ID NO: 1727227 - RNA, 15 nt, Human
gugggcuaguugggc

SEQ ID NO: 1727228 - RNA, 12 nt, Human
gugggcuaagca

SEQ ID NO: 1727229 - RNA, 19 nt, Human
gugggccuucagggaguga

SEQ ID NO: 1727230 - RNA, 22 nt, Human
gugggcgugagaccugccccuc

SEQ ID NO: 1727231 - RNA, 21 nt, Human
gugggcgugagaccugccccu

SEQ ID NO: 1727232 - RNA, 18 nt, Human
gugggcgugagaccugcc

SEQ ID NO: 1727233 - RNA, 17 nt, Human
gugggcccaaugcacuu

SEQ ID NO: 1727234 - RNA, 14 nt, Human
guggcucacgccug

SEQ ID NO: 1727235 - RNA, 15 nt, Human
gugcuaauuuugaaa

SEQ ID NO: 1727236 - RNA, 13 nt, Human
gugcuaauuuuga

SEQ ID NO: 1727237 - RNA, 14 nt, Human
guggcugcuucaag

SEQ ID NO: 1727238 - RNA, 12 nt, Human
guggcugcuuca

SEQ ID NO: 1727239 - RNA, 20 nt, Human
guggcuccucccggugccca

SEQ ID NO: 1727240 - RNA, 13 nt, Human
guggcuccucccg

SEQ ID NO: 1727241 - RNA, 22 nt, Human
guggcuuaaaacaacacucaca

SEQ ID NO: 1727242 - RNA, 20 nt, Human
guggcuucccgcucagcccu

SEQ ID NO: 1727243 - RNA, 19 nt, Human
guggcuucccgcucagccc

SEQ ID NO: 1727244 - RNA, 18 nt, Human
guggcuucccgcucagcc

SEQ ID NO: 1727245 - RNA, 22 nt, Human
guggcugcuucaaggauccuga

SEQ ID NO: 1727246 - RNA, 19 nt, Human
guggcugcuucaaggaucc

SEQ ID NO: 1727247 - RNA, 16 nt, Human
guggcugcuucaagga

SEQ ID NO: 1727248 - RNA, 15 nt, Human
guggcugcuucaagg

SEQ ID NO: 1727249 - RNA, 23 nt, Human
guggcugcuucaaggauccugag

SEQ ID NO: 1727250 - RNA, 19 nt, Human
guggcuggguuggagggug

SEQ ID NO: 1727251 - RNA, 18 nt, Human
gugucccugcacuugcag

SEQ ID NO: 1727252 - RNA, 16 nt, Human
gugucccugcacuugc

SEQ ID NO: 1727253 - RNA, 13 nt, Human
gugucccugcacu

SEQ ID NO: 1727254 - RNA, 17 nt, Human
guguacauggaauaaca

SEQ ID NO: 1727255 - RNA, 22 nt, Human
guguacagucuuguauuaaguu

SEQ ID NO: 1727256 - RNA, 13 nt, Human
guguacagucuug

SEQ ID NO: 1727257 - RNA, 16 nt, Human
guguacagucuuguau

SEQ ID NO: 1727258 - RNA, 22 nt, Human
guguacauggaauaacauguaa

SEQ ID NO: 1727259 - RNA, 14 nt, Human
gugguauagaaaug

SEQ ID NO: 1727260 - RNA, 19 nt, Human
gugguaugaucacggcuca

SEQ ID NO: 1727261 - RNA, 17 nt, Human
gugguagagugugccug

SEQ ID NO: 1727262 - RNA, 18 nt, Human
gugguccuaaucuucuga

SEQ ID NO: 1727263 - RNA, 17 nt, Human
guggucccaccccacac

SEQ ID NO: 1727264 - RNA, 16 nt, Human
guggucccaccccaca

SEQ ID NO: 1727265 - RNA, 15 nt, Human
guggucccaccccac

SEQ ID NO: 1727266 - RNA, 14 nt, Human
guggucccacccca

SEQ ID NO: 1727267 - RNA, 21 nt, Human
guggugagaggcauccaguau

SEQ ID NO: 1727268 - RNA, 17 nt, Human
guggugaccucugccug

SEQ ID NO: 1727269 - RNA, 14 nt, Human
guggugaccucugc

SEQ ID NO: 1727270 - RNA, 19 nt, Human
guggugcgaucuggguuca

SEQ ID NO: 1727271 - RNA, 21 nt, Human
guguaaguauucuuauuuaau

SEQ ID NO: 1727272 - RNA, 20 nt, Human
guuaaaaacagauuuggaaa

SEQ ID NO: 1727273 - RNA, 22 nt, Human
guuaaaauaccagccaguaaau

SEQ ID NO: 1727274 - RNA, 19 nt, Human
guuaaacuuacuuaguguu

SEQ ID NO: 1727275 - RNA, 18 nt, Human
guuaaaggugaacauugg

SEQ ID NO: 1727276 - RNA, 13 nt, Human
guuacagacaaag

SEQ ID NO: 1727277 - RNA, 17 nt, Human
guuacacuuuuuggaag

SEQ ID NO: 1727278 - RNA, 18 nt, Human
guuacacuuuuuggaagu

SEQ ID NO: 1727279 - RNA, 22 nt, Human
guuacacuuuuuggaagugaaa

SEQ ID NO: 1727280 - RNA, 17 nt, Human
guuacacauuuuucaga

SEQ ID NO: 1727281 - RNA, 16 nt, Human
guuacacuaaaaggug

SEQ ID NO: 1727282 - RNA, 15 nt, Human
guuacacuaaaaggu

SEQ ID NO: 1727283 - RNA, 18 nt, Human
guuaacugagugccuuuu

SEQ ID NO: 1727284 - RNA, 14 nt, Human
guguuacuaaguuu

SEQ ID NO: 1727285 - RNA, 12 nt, Human
guguuacuaagu

SEQ ID NO: 1727286 - RNA, 18 nt, Human
guguuaugacuccagaau

SEQ ID NO: 1727287 - RNA, 14 nt, Human
guguguuuuucaua

SEQ ID NO: 1727288 - RNA, 19 nt, Human
guguguuuuaaaaugagaa

SEQ ID NO: 1727289 - RNA, 16 nt, Human
guguguuuuaaaauga

SEQ ID NO: 1727290 - RNA, 13 nt, Human
guguguuuuaaaa

SEQ ID NO: 1727291 - RNA, 18 nt, Human
guguuuuucauaaagcag

SEQ ID NO: 1727292 - RNA, 13 nt, Human
guguucugugaua

SEQ ID NO: 1727293 - RNA, 14 nt, Human
guguccggucccug

SEQ ID NO: 1727294 - RNA, 23 nt, Human
gugucccugcacuugcagacucu

SEQ ID NO: 1727295 - RNA, 20 nt, Human
guguccuccugggguucuuu

SEQ ID NO: 1727296 - RNA, 15 nt, Human
gugucgggcaugaca

SEQ ID NO: 1727297 - RNA, 14 nt, Human
gugucucuuggucc

SEQ ID NO: 1727298 - RNA, 17 nt, Human
gugucucccuucauccu

SEQ ID NO: 1727299 - RNA, 19 nt, Human
gugucuaggcaggaccugu

SEQ ID NO: 1727300 - RNA, 21 nt, Human
gugucucuugguccugcugca

SEQ ID NO: 1727301 - RNA, 20 nt, Human
gugucucuugguccugcugc

SEQ ID NO: 1727302 - RNA, 19 nt, Human
gugucucuugguccugcug

SEQ ID NO: 1727303 - RNA, 18 nt, Human
gugucucuugguccugcu

SEQ ID NO: 1727304 - RNA, 22 nt, Human
gugucucuugguccugcugcag

SEQ ID NO: 1727305 - RNA, 20 nt, Human
gugugagucaccaagcccag

SEQ ID NO: 1727306 - RNA, 13 nt, Human
guguggagaagcg

SEQ ID NO: 1727307 - RNA, 21 nt, Human
guguggagaagcggcuggcag

SEQ ID NO: 1727308 - RNA, 12 nt, Human
guguguuuuaaa

SEQ ID NO: 1727309 - RNA, 15 nt, Human
guguguuucugaucu

SEQ ID NO: 1727310 - RNA, 22 nt, Human
gugugcucugaucauccacugu

SEQ ID NO: 1727311 - RNA, 15 nt, Human
gugugcucugaucau

SEQ ID NO: 1727312 - RNA, 12 nt, Human
gugugcucugau

SEQ ID NO: 1727313 - RNA, 19 nt, Human
gugugcucaggagcccugg

SEQ ID NO: 1727314 - RNA, 18 nt, Human
gugugcucaggagcccug

SEQ ID NO: 1727315 - RNA, 17 nt, Human
gugugcucaggagcccu

SEQ ID NO: 1727316 - RNA, 16 nt, Human
gugugcucaggagccc

SEQ ID NO: 1727317 - RNA, 12 nt, Human
gugauuuucauu

SEQ ID NO: 1727318 - RNA, 13 nt, Human
gugauuuuuguaa

SEQ ID NO: 1727319 - RNA, 18 nt, Human
gugauuuuuguaauuuuu

SEQ ID NO: 1727320 - RNA, 24 nt, Human
gugauccacccaccucagccuccc

SEQ ID NO: 1727321 - RNA, 23 nt, Human
gugauccacccaccucagccucc

SEQ ID NO: 1727322 - RNA, 22 nt, Human
gugcauaccacuuuuguucuug

SEQ ID NO: 1727323 - RNA, 14 nt, Human
gugcaucucagccc

SEQ ID NO: 1727324 - RNA, 13 nt, Human
gugcaucucagcc

SEQ ID NO: 1727325 - RNA, 23 nt, Human
gugcaguggugcgaucuggguuc

SEQ ID NO: 1727326 - RNA, 20 nt, Human
gugcaguggugcgaucuggg

SEQ ID NO: 1727327 - RNA, 14 nt, Human
gugcgccuacagga

SEQ ID NO: 1727328 - RNA, 14 nt, Human
gugcggccuuuggc

SEQ ID NO: 1727329 - RNA, 21 nt, Human
gugcgaucuggguucacugca

SEQ ID NO: 1727330 - RNA, 15 nt, Human
gugccuucagcucua

SEQ ID NO: 1727331 - RNA, 16 nt, Human
gugccaugugccaggu

SEQ ID NO: 1727332 - RNA, 14 nt, Human
gugccaugugccag

SEQ ID NO: 1727333 - RNA, 20 nt, Human
gugcccaagaauagaugcug

SEQ ID NO: 1727334 - RNA, 19 nt, Human
gugagccgagaucacgcca

SEQ ID NO: 1727335 - RNA, 17 nt, Human
gugaggaugaaaaaaua

SEQ ID NO: 1727336 - RNA, 18 nt, Human
gugaggagcuugaaaccc

SEQ ID NO: 1727337 - RNA, 20 nt, Human
gugagccacugcaccgggcc

SEQ ID NO: 1727338 - RNA, 15 nt, Human
gugagccacugcacc

SEQ ID NO: 1727339 - RNA, 19 nt, Human
gugauauaaguguguguuu

SEQ ID NO: 1727340 - RNA, 17 nt, Human
gugaguugauagcacag

SEQ ID NO: 1727341 - RNA, 15 nt, Human
gugauacaaugcugu

SEQ ID NO: 1727342 - RNA, 17 nt, Human
gugauacaaugcugugc

SEQ ID NO: 1727343 - RNA, 21 nt, Human
gugaacaaauuuacagagaca

SEQ ID NO: 1727344 - RNA, 20 nt, Human
gugacaaggauugcuacugu

SEQ ID NO: 1727345 - RNA, 21 nt, Human
gugaaugaugauccuaggcau

SEQ ID NO: 1727346 - RNA, 15 nt, Human
gugaccucugccuga

SEQ ID NO: 1727347 - RNA, 14 nt, Human
gugaccucugccug

SEQ ID NO: 1727348 - RNA, 13 nt, Human
gugaccucugccu

SEQ ID NO: 1727349 - RNA, 15 nt, Human
gugacagaggcagcc

SEQ ID NO: 1727350 - RNA, 12 nt, Human
gugaccucugcc

SEQ ID NO: 1727351 - RNA, 14 nt, Human
gugacagaggcagc

SEQ ID NO: 1727352 - RNA, 13 nt, Human
gugacagaggcag

SEQ ID NO: 1727353 - RNA, 12 nt, Human
gugacagaggca

SEQ ID NO: 1727354 - RNA, 14 nt, Human
gucuguucuuucca

SEQ ID NO: 1727355 - RNA, 17 nt, Human
gucuguucuuuccaaag

SEQ ID NO: 1727356 - RNA, 13 nt, Human
gucuguugauuaa

SEQ ID NO: 1727357 - RNA, 16 nt, Human
gucuguugauuaaaga

SEQ ID NO: 1727358 - RNA, 19 nt, Human
gucuguugauuaaagauga

SEQ ID NO: 1727359 - RNA, 22 nt, Human
gucugugagaugcuagaacucc

SEQ ID NO: 1727360 - RNA, 23 nt, Human
gucugugagaugcuagaacuccc

SEQ ID NO: 1727361 - RNA, 18 nt, Human
gucugugccauuuuguau

SEQ ID NO: 1727362 - RNA, 15 nt, Human
gucugugagaugcua

SEQ ID NO: 1727363 - RNA, 16 nt, Human
gucugugagaugcuag

SEQ ID NO: 1727364 - RNA, 17 nt, Human
gucugugagaugcuaga

SEQ ID NO: 1727365 - RNA, 21 nt, Human
gucugugagaugcuagaacuc

SEQ ID NO: 1727366 - RNA, 21 nt, Human
gucuugcaauggcagccuugg

SEQ ID NO: 1727367 - RNA, 20 nt, Human
gucuugcaauggcagccuug

SEQ ID NO: 1727368 - RNA, 23 nt, Human
gucuugcaauggcagccuuggca

SEQ ID NO: 1727369 - RNA, 16 nt, Human
gucuuuuuucacuaca

SEQ ID NO: 1727370 - RNA, 17 nt, Human
gucuugaacuccuggcc

SEQ ID NO: 1727371 - RNA, 16 nt, Human
gucuugaacuccuggc

SEQ ID NO: 1727372 - RNA, 21 nt, Human
gucuuaaaaaguggaaaaaua

SEQ ID NO: 1727373 - RNA, 19 nt, Human
gucuugcaauggcagccuu

SEQ ID NO: 1727374 - RNA, 18 nt, Human
gucuugcaauggcagccu

SEQ ID NO: 1727375 - RNA, 17 nt, Human
gucuugcaauggcagcc

SEQ ID NO: 1727376 - RNA, 16 nt, Human
gucuugcaauggcagc

SEQ ID NO: 1727377 - RNA, 20 nt, Human
gucuugaacuccuggccuca

SEQ ID NO: 1727378 - RNA, 18 nt, Human
gucuugaacuccuggccu

SEQ ID NO: 1727379 - RNA, 21 nt, Human
gucuugaacuccuggccucaa

SEQ ID NO: 1727380 - RNA, 18 nt, Human
gucgucaaagcugaaaug

SEQ ID NO: 1727381 - RNA, 19 nt, Human
gucucacuauguugcccag

SEQ ID NO: 1727382 - RNA, 11 nt, Human
gucucacucug

SEQ ID NO: 1727383 - RNA, 18 nt, Human
gucucacuauguugccca

SEQ ID NO: 1727384 - RNA, 16 nt, Human
gucgggcaugacacga

SEQ ID NO: 1727385 - RNA, 21 nt, Human
gucggaaaacaugcuacacac

SEQ ID NO: 1727386 - RNA, 19 nt, Human
guccuuaccagcagagcac

SEQ ID NO: 1727387 - RNA, 18 nt, Human
guccuuaccagcagagca

SEQ ID NO: 1727388 - RNA, 21 nt, Human
guccuuaccagcagagcaccu

SEQ ID NO: 1727389 - RNA, 14 nt, Human
gucccugccaaugg

SEQ ID NO: 1727390 - RNA, 11 nt, Human
gucccugccaa

SEQ ID NO: 1727391 - RNA, 15 nt, Human
gucccugccaaugga

SEQ ID NO: 1727392 - RNA, 22 nt, Human
gucucacucugucgcccagucu

SEQ ID NO: 1727393 - RNA, 19 nt, Human
gucucacucugucgcccag

SEQ ID NO: 1727394 - RNA, 18 nt, Human
gucucacucugucgccca

SEQ ID NO: 1727395 - RNA, 16 nt, Human
gucucacucugucgcc

SEQ ID NO: 1727396 - RNA, 15 nt, Human
gucucacucugucgc

SEQ ID NO: 1727397 - RNA, 19 nt, Human
gucucgugguaggacugua

SEQ ID NO: 1727398 - RNA, 13 nt, Human
gucucugagcauu

SEQ ID NO: 1727399 - RNA, 17 nt, Human
gucucuggaauuugaaa

SEQ ID NO: 1727400 - RNA, 13 nt, Human
gucucuugguccu

SEQ ID NO: 1727401 - RNA, 21 nt, Human
gucucuggauuauauuaugaa

SEQ ID NO: 1727402 - RNA, 18 nt, Human
gucucuucuccacuggau

SEQ ID NO: 1727403 - RNA, 17 nt, Human
gucucugguuccucccc

SEQ ID NO: 1727404 - RNA, 16 nt, Human
gucucugguuccuccc

SEQ ID NO: 1727405 - RNA, 22 nt, Human
gucagaugcugugcaaauguua

SEQ ID NO: 1727406 - RNA, 14 nt, Human
gucagagccugcag

SEQ ID NO: 1727407 - RNA, 16 nt, Human
gucagagccugcaguu

SEQ ID NO: 1727408 - RNA, 15 nt, Human
gucagagccugcagu

SEQ ID NO: 1727409 - RNA, 16 nt, Human
gucacucuggcagcuc

SEQ ID NO: 1727410 - RNA, 14 nt, Human
gucacucuggcagc

SEQ ID NO: 1727411 - RNA, 13 nt, Human
gucacucuggcag

SEQ ID NO: 1727412 - RNA, 12 nt, Human
gucacucuggca

SEQ ID NO: 1727413 - RNA, 19 nt, Human
gucacucuggcagcucaga

SEQ ID NO: 1727414 - RNA, 17 nt, Human
gucacucuggcagcuca

SEQ ID NO: 1727415 - RNA, 22 nt, Human
gucacucuggcagcucagagag

SEQ ID NO: 1727416 - RNA, 18 nt, Human
gucaccccggccaccugc

SEQ ID NO: 1727417 - RNA, 17 nt, Human
gucaccccggccaccug

SEQ ID NO: 1727418 - RNA, 22 nt, Human
gucaccccggccaccugcggug

SEQ ID NO: 1727419 - RNA, 19 nt, Human
guauuuuguuuuugucuua

SEQ ID NO: 1727420 - RNA, 15 nt, Human
gucaagugaaaaagg

SEQ ID NO: 1727421 - RNA, 15 nt, Human
gucaaugcagccccc

SEQ ID NO: 1727422 - RNA, 22 nt, Human
guauuaaguuguuaauaaaagu

SEQ ID NO: 1727423 - RNA, 13 nt, Human
guauuuuaaucac

SEQ ID NO: 1727424 - RNA, 14 nt, Human
guauuuuacuaaua

SEQ ID NO: 1727425 - RNA, 21 nt, Human
gucauucgcuacuaugauuua

SEQ ID NO: 1727426 - RNA, 16 nt, Human
guccacaguggaacca

SEQ ID NO: 1727427 - RNA, 19 nt, Human
guccacaguggaaccagcc

SEQ ID NO: 1727428 - RNA, 21 nt, Human
guccacaguggaaccagccca

SEQ ID NO: 1727429 - RNA, 21 nt, Human
gucccaccuuggcugcaggga

SEQ ID NO: 1727430 - RNA, 23 nt, Human
guccacccaggagccccgaggcc

SEQ ID NO: 1727431 - RNA, 12 nt, Human
guccacccagga

SEQ ID NO: 1727432 - RNA, 13 nt, Human
guccacccaggag

SEQ ID NO: 1727433 - RNA, 23 nt, Human
gucccaccuuggcugcagggagu

SEQ ID NO: 1727434 - RNA, 17 nt, Human
gucccaggcugagccuc

SEQ ID NO: 1727435 - RNA, 16 nt, Human
gucccaggcugagccu

SEQ ID NO: 1727436 - RNA, 15 nt, Human
gucccaggcugagcc

SEQ ID NO: 1727437 - RNA, 21 nt, Human
gucccaggcugagccucaguc

SEQ ID NO: 1727438 - RNA, 19 nt, Human
gucccaggcugagccucag

SEQ ID NO: 1727439 - RNA, 18 nt, Human
gucccaggcugagccuca

SEQ ID NO: 1727440 - RNA, 17 nt, Human
guccccaccgcagacag

SEQ ID NO: 1727441 - RNA, 17 nt, Human
gucccuaauaaagcugu

SEQ ID NO: 1727442 - RNA, 16 nt, Human
gucccuaauaaagcug

SEQ ID NO: 1727443 - RNA, 21 nt, Human
gucccugcacuugcagacucu

SEQ ID NO: 1727444 - RNA, 19 nt, Human
gucccugcacuugcagacu

SEQ ID NO: 1727445 - RNA, 16 nt, Human
gucccugcacuugcag

SEQ ID NO: 1727446 - RNA, 20 nt, Human
gucccuaauaaagcugugug

SEQ ID NO: 1727447 - RNA, 18 nt, Human
gucccuaauaaagcugug

SEQ ID NO: 1727448 - RNA, 23 nt, Human
gucccuaccgagucucuucucca

SEQ ID NO: 1727449 - RNA, 22 nt, Human
gucccuaccgagucucuucucc

SEQ ID NO: 1727450 - RNA, 21 nt, Human
gucccuaccgagucucuucuc

SEQ ID NO: 1727451 - RNA, 22 nt, Human
guauaugucaagccauaauugu

SEQ ID NO: 1727452 - RNA, 16 nt, Human
guauauguugggugca

SEQ ID NO: 1727453 - RNA, 21 nt, Human
guauaugucucaggucccugc

SEQ ID NO: 1727454 - RNA, 15 nt, Human
guauaugucucaggu

SEQ ID NO: 1727455 - RNA, 13 nt, Human
guauaugucucag

SEQ ID NO: 1727456 - RNA, 23 nt, Human
guauagaaaugcugguuuuucag

SEQ ID NO: 1727457 - RNA, 14 nt, Human
guauagaaaugcug

SEQ ID NO: 1727458 - RNA, 15 nt, Human
guauagaaaugcugg

SEQ ID NO: 1727459 - RNA, 22 nt, Human
guauagaaaugcugguuuuuca

SEQ ID NO: 1727460 - RNA, 23 nt, Human
guaugaaagauggcugugccucu

SEQ ID NO: 1727461 - RNA, 22 nt, Human
guaugaaagauggcugugccuc

SEQ ID NO: 1727462 - RNA, 19 nt, Human
guaucuggugacuuuccuc

SEQ ID NO: 1727463 - RNA, 12 nt, Human
guaucuggugac

SEQ ID NO: 1727464 - RNA, 12 nt, Human
guaucugagcag

SEQ ID NO: 1727465 - RNA, 19 nt, Human
guaugaauaaagacaccua

SEQ ID NO: 1727466 - RNA, 18 nt, Human
guaugaauaaagacaccu

SEQ ID NO: 1727467 - RNA, 13 nt, Human
guaugaggcauuu

SEQ ID NO: 1727468 - RNA, 15 nt, Human
guaugaggcauuugu

SEQ ID NO: 1727469 - RNA, 24 nt, Human
guaugauagguuauuuugauguaa

SEQ ID NO: 1727470 - RNA, 20 nt, Human
guaugaucacggcucacugc

SEQ ID NO: 1727471 - RNA, 17 nt, Human
guaugaggcauuuguuu

SEQ ID NO: 1727472 - RNA, 20 nt, Human
guaugaggcauuuguuugaa

SEQ ID NO: 1727473 - RNA, 22 nt, Human
guaugaucacggcucacugcag

SEQ ID NO: 1727474 - RNA, 21 nt, Human
guaugaucacggcucacugca

SEQ ID NO: 1727475 - RNA, 17 nt, Human
guauguugaagccuuug

SEQ ID NO: 1727476 - RNA, 16 nt, Human
guaggguuauaauaau

SEQ ID NO: 1727477 - RNA, 22 nt, Human
guagggugggccuucagggagu

SEQ ID NO: 1727478 - RNA, 17 nt, Human
guagggugggccuucag

SEQ ID NO: 1727479 - RNA, 14 nt, Human
guagggugggccuu

SEQ ID NO: 1727480 - RNA, 14 nt, Human
guagucaggugccu

SEQ ID NO: 1727481 - RNA, 22 nt, Human
guaguaugauagguuauuuuga

SEQ ID NO: 1727482 - RNA, 17 nt, Human
guauaauucacauugua

SEQ ID NO: 1727483 - RNA, 15 nt, Human
guagagugugccuga

SEQ ID NO: 1727484 - RNA, 16 nt, Human
guagggcgggaggaug

SEQ ID NO: 1727485 - RNA, 22 nt, Human
guagggcgggaggauguucugg

SEQ ID NO: 1727486 - RNA, 21 nt, Human
guagggcgggaggauguucug

SEQ ID NO: 1727487 - RNA, 23 nt, Human
guagggcgggaggauguucuggg

SEQ ID NO: 1727488 - RNA, 14 nt, Human
uuaccacagacaua

SEQ ID NO: 1727489 - RNA, 17 nt, Human
uuaccacagacauacua

SEQ ID NO: 1727490 - RNA, 16 nt, Human
uuuccugaggcugggc

SEQ ID NO: 1727491 - RNA, 13 nt, Human
uuuccugcccugg

SEQ ID NO: 1727492 - RNA, 12 nt, Human
uuuccugcccug

SEQ ID NO: 1727493 - RNA, 20 nt, Human
uuucuguucuuucuggcuau

SEQ ID NO: 1727494 - RNA, 20 nt, Human
uuucuaaaggcuaccuuugu

SEQ ID NO: 1727495 - RNA, 21 nt, Human
uuucuaaaggcuaccuuugua

SEQ ID NO: 1727496 - RNA, 14 nt, Human
uuucuaaaguaaaa

SEQ ID NO: 1727497 - RNA, 12 nt, Human
uuucuaaaguaa

SEQ ID NO: 1727498 - RNA, 23 nt, Human
uuucuacucgaguuacagacaaa

SEQ ID NO: 1727499 - RNA, 18 nt, Human
uuugaaucaucaagucuu

SEQ ID NO: 1727500 - RNA, 22 nt, Human
uuugaagaugccgcauuuggau

SEQ ID NO: 1727501 - RNA, 14 nt, Human
uuugaacucuucaa

SEQ ID NO: 1727502 - RNA, 15 nt, Human
uuugaacugauaaag

SEQ ID NO: 1727503 - RNA, 17 nt, Human
uuugaacugauaaagau

SEQ ID NO: 1727504 - RNA, 19 nt, Human
uuugaacugauaaagauga

SEQ ID NO: 1727505 - RNA, 18 nt, Human
uuucuuagggaaggauac

SEQ ID NO: 1727506 - RNA, 23 nt, Human
uuucuuagggaaggauacaaaag

SEQ ID NO: 1727507 - RNA, 12 nt, Human
uuucuucucccu

SEQ ID NO: 1727508 - RNA, 16 nt, Human
uuucuuccucugcuga

SEQ ID NO: 1727509 - RNA, 14 nt, Human
uuucuuccucugcu

SEQ ID NO: 1727510 - RNA, 13 nt, Human
uuucuucucccuc

SEQ ID NO: 1727511 - RNA, 13 nt, Human
uuucuuccucugc

SEQ ID NO: 1727512 - RNA, 11 nt, Human
uuucuuccucu

SEQ ID NO: 1727513 - RNA, 20 nt, Human
uuuggagucagacagaugug

SEQ ID NO: 1727514 - RNA, 21 nt, Human
uuuggaauuuugugcccccau

SEQ ID NO: 1727515 - RNA, 23 nt, Human
uuuggugaacauugcaauagaaa

SEQ ID NO: 1727516 - RNA, 22 nt, Human
uuuggugaacauugcaauagaa

SEQ ID NO: 1727517 - RNA, 19 nt, Human
uuuggugguuucagaaaug

SEQ ID NO: 1727518 - RNA, 14 nt, Human
uuuggaauuuugug

SEQ ID NO: 1727519 - RNA, 15 nt, Human
uuugcuuugugauuu

SEQ ID NO: 1727520 - RNA, 16 nt, Human
uuugcuuugugauuuu

SEQ ID NO: 1727521 - RNA, 15 nt, Human
uuugcaucugaaaau

SEQ ID NO: 1727522 - RNA, 17 nt, Human
uuuuaaagaaugcucuu

SEQ ID NO: 1727523 - RNA, 14 nt, Human
uuuuaaagaaaagu

SEQ ID NO: 1727524 - RNA, 18 nt, Human
uuuuaaagacuuuuauga

SEQ ID NO: 1727525 - RNA, 15 nt, Human
uuuuaaagaaaaguu

SEQ ID NO: 1727526 - RNA, 21 nt, Human
uuuguucuggcucuuccaggc

SEQ ID NO: 1727527 - RNA, 21 nt, Human
uuuuaaucucuaacaguggac

SEQ ID NO: 1727528 - RNA, 11 nt, Human
uuuuaaaugca

SEQ ID NO: 1727529 - RNA, 12 nt, Human
uuuuaaaugcac

SEQ ID NO: 1727530 - RNA, 21 nt, Human
uuuuaaaugcaccuggaauau

SEQ ID NO: 1727531 - RNA, 13 nt, Human
uuuuuaagugaaa

SEQ ID NO: 1727532 - RNA, 20 nt, Human
uuuuuaagugaaaauauagc

SEQ ID NO: 1727533 - RNA, 11 nt, Human
uuuuuccuuca

SEQ ID NO: 1727534 - RNA, 11 nt, Human
uuuuuaaaugc

SEQ ID NO: 1727535 - RNA, 19 nt, Human
uuuuuccuucagugccuua

SEQ ID NO: 1727536 - RNA, 11 nt, Human
uuuuuccuuuu

SEQ ID NO: 1727537 - RNA, 12 nt, Human
uuuuuuguuuca

SEQ ID NO: 1727538 - RNA, 13 nt, Human
uuuuuuguuucau

SEQ ID NO: 1727539 - RNA, 20 nt, Human
uuuugacaaggggcaguggu

SEQ ID NO: 1727540 - RNA, 15 nt, Human
uuuuggucuguguga

SEQ ID NO: 1727541 - RNA, 14 nt, Human
uuuuggcugcugaa

SEQ ID NO: 1727542 - RNA, 18 nt, Human
uuuucuaaaguaaaaaca

SEQ ID NO: 1727543 - RNA, 17 nt, Human
uuuuguaauaauaaaga

SEQ ID NO: 1727544 - RNA, 19 nt, Human
uuuuguaauaauaaagaau

SEQ ID NO: 1727545 - RNA, 19 nt, Human
uuuuguagagccagggucu

SEQ ID NO: 1727546 - RNA, 16 nt, Human
uuuugucauauaagau

SEQ ID NO: 1727547 - RNA, 13 nt, Human
uuuugucuugugu

SEQ ID NO: 1727548 - RNA, 18 nt, Human
uuuuuaaagacuuuuaug

SEQ ID NO: 1727549 - RNA, 13 nt, Human
uuuuuaaagacuu

SEQ ID NO: 1727550 - RNA, 12 nt, Human
uuuuuaaagacu

SEQ ID NO: 1727551 - RNA, 12 nt, Human
uuuuuaaagaaa

SEQ ID NO: 1727552 - RNA, 20 nt, Human
uuuuuaaagaaaaguuuugu

SEQ ID NO: 1727553 - RNA, 17 nt, Human
uuuuuaaagacagaguc

SEQ ID NO: 1727554 - RNA, 23 nt, Human
gccaguaaaugggggugcauuug

SEQ ID NO: 1727555 - RNA, 15 nt, Human
gccaggcuggucuca

SEQ ID NO: 1727556 - RNA, 13 nt, Human
gccaggcuggucu

SEQ ID NO: 1727557 - RNA, 23 nt, Human
gccaggcugggucgcccuggacu

SEQ ID NO: 1727558 - RNA, 17 nt, Human
gccaggcugggucgccc

SEQ ID NO: 1727559 - RNA, 14 nt, Human
gccauccagguuca

SEQ ID NO: 1727560 - RNA, 14 nt, Human
gccaugcuccuggc

SEQ ID NO: 1727561 - RNA, 24 nt, Human
gccaugcuccuggcccacugcauc

SEQ ID NO: 1727562 - RNA, 16 nt, Human
gccaugggccuccugu

SEQ ID NO: 1727563 - RNA, 15 nt, Human
gccaugggccuccug

SEQ ID NO: 1727564 - RNA, 24 nt, Human
gcccaaccugcucuccucuugcca

SEQ ID NO: 1727565 - RNA, 22 nt, Human
gcccaagaauagaugcugacug

SEQ ID NO: 1727566 - RNA, 21 nt, Human
gcccaagaauagaugcugacu

SEQ ID NO: 1727567 - RNA, 20 nt, Human
gcccacauagugaugguucc

SEQ ID NO: 1727568 - RNA, 17 nt, Human
gcccaccuuggcucaag

SEQ ID NO: 1727569 - RNA, 16 nt, Human
gcccaccuuggcucaa

SEQ ID NO: 1727570 - RNA, 15 nt, Human
gcccaccuuggcuca

SEQ ID NO: 1727571 - RNA, 13 nt, Human
gcccaccuuggcu

SEQ ID NO: 1727572 - RNA, 14 nt, Human
gcccacuucugcca

SEQ ID NO: 1727573 - RNA, 24 nt, Human
gcccaccuggccucugcacucccc

SEQ ID NO: 1727574 - RNA, 21 nt, Human
gcccaccuggccucugcacuc

SEQ ID NO: 1727575 - RNA, 20 nt, Human
gcccaccuggccucugcacu

SEQ ID NO: 1727576 - RNA, 17 nt, Human
gcccaccuggccucugc

SEQ ID NO: 1727577 - RNA, 16 nt, Human
gcccaccuggccucug

SEQ ID NO: 1727578 - RNA, 15 nt, Human
gcccaccuggccucu

SEQ ID NO: 1727579 - RNA, 21 nt, Human
gccagagacacaagccuucgg

SEQ ID NO: 1727580 - RNA, 22 nt, Human
gccacugcaccgggccacagag

SEQ ID NO: 1727581 - RNA, 22 nt, Human
gccagagacacaagccuucggc

SEQ ID NO: 1727582 - RNA, 21 nt, Human
gccacugcaccgggccacaga

SEQ ID NO: 1727583 - RNA, 20 nt, Human
gccacugcaccgggccacag

SEQ ID NO: 1727584 - RNA, 22 nt, Human
gccacuccagaccccuggcuuu

SEQ ID NO: 1727585 - RNA, 24 nt, Human
gccaaggccaaaggaagcacaugc

SEQ ID NO: 1727586 - RNA, 20 nt, Human
gccacuccagaccccuggcu

SEQ ID NO: 1727587 - RNA, 21 nt, Human
gccacuccagaccccuggcuu

SEQ ID NO: 1727588 - RNA, 20 nt, Human
gccaaggccaaaggaagcac

SEQ ID NO: 1727589 - RNA, 13 nt, Human
gccagauuucacu

SEQ ID NO: 1727590 - RNA, 24 nt, Human
gccagauucuuuccugaggcuggg

SEQ ID NO: 1727591 - RNA, 20 nt, Human
gccagauucuuuccugaggc

SEQ ID NO: 1727592 - RNA, 15 nt, Human
gccagaugcaccagc

SEQ ID NO: 1727593 - RNA, 22 nt, Human
gccagccgagauagccaaggcc

SEQ ID NO: 1727594 - RNA, 17 nt, Human
gccagagggagugacag

SEQ ID NO: 1727595 - RNA, 14 nt, Human
gccagaugcaccag

SEQ ID NO: 1727596 - RNA, 14 nt, Human
gccaggaagccagc

SEQ ID NO: 1727597 - RNA, 13 nt, Human
gccaggaagccag

SEQ ID NO: 1727598 - RNA, 12 nt, Human
gccaggaagcca

SEQ ID NO: 1727599 - RNA, 20 nt, Human
gccagcugcuugggcuucau

SEQ ID NO: 1727600 - RNA, 18 nt, Human
gccagcugcuugggcuuc

SEQ ID NO: 1727601 - RNA, 17 nt, Human
gccagcugcuugggcuu

SEQ ID NO: 1727602 - RNA, 15 nt, Human
gccaggaagccagca

SEQ ID NO: 1727603 - RNA, 13 nt, Human
gccagcuggagaa

SEQ ID NO: 1727604 - RNA, 16 nt, Human
gccaggagccuccugc

SEQ ID NO: 1727605 - RNA, 14 nt, Human
gccaggagccuccu

SEQ ID NO: 1727606 - RNA, 20 nt, Human
gccaggagccuccugcccuu

SEQ ID NO: 1727607 - RNA, 19 nt, Human
gccaggagccuccugcccu

SEQ ID NO: 1727608 - RNA, 12 nt, Human
gcccaggcuggc

SEQ ID NO: 1727609 - RNA, 23 nt, Human
gcccaggccccugccacccuggg

SEQ ID NO: 1727610 - RNA, 21 nt, Human
gcccagagaggguggugaccu

SEQ ID NO: 1727611 - RNA, 13 nt, Human
gcccaggccuccu

SEQ ID NO: 1727612 - RNA, 20 nt, Human
gcccaggcuggagugcaaug

SEQ ID NO: 1727613 - RNA, 15 nt, Human
gcccaggcuggagug

SEQ ID NO: 1727614 - RNA, 12 nt, Human
gccccagugccc

SEQ ID NO: 1727615 - RNA, 18 nt, Human
gccccaucccaaacccuu

SEQ ID NO: 1727616 - RNA, 21 nt, Human
gccccauaauuuuuuuuuucc

SEQ ID NO: 1727617 - RNA, 19 nt, Human
gccccaguuguauuuauuu

SEQ ID NO: 1727618 - RNA, 14 nt, Human
gccccagugcccac

SEQ ID NO: 1727619 - RNA, 13 nt, Human
gccccagugccca

SEQ ID NO: 1727620 - RNA, 15 nt, Human
gccccagugcccaca

SEQ ID NO: 1727621 - RNA, 22 nt, Human
gccccauccucuguacagagcc

SEQ ID NO: 1727622 - RNA, 14 nt, Human
gccccauccucugu

SEQ ID NO: 1727623 - RNA, 13 nt, Human
gccccauccucug

SEQ ID NO: 1727624 - RNA, 14 nt, Human
gccccauucugccu

SEQ ID NO: 1727625 - RNA, 15 nt, Human
gccccauucugccug

SEQ ID NO: 1727626 - RNA, 14 nt, Human
gcccugcagagggc

SEQ ID NO: 1727627 - RNA, 13 nt, Human
gcccugcagaggg

SEQ ID NO: 1727628 - RNA, 15 nt, Human
gcccugcagagggca

SEQ ID NO: 1727629 - RNA, 16 nt, Human
gcccugcagagggcac

SEQ ID NO: 1727630 - RNA, 14 nt, Human
gcccugagcuuucu

SEQ ID NO: 1727631 - RNA, 19 nt, Human
gcccucugcccacucccug

SEQ ID NO: 1727632 - RNA, 18 nt, Human
gcccucugcccacucccu

SEQ ID NO: 1727633 - RNA, 16 nt, Human
gcccucugcccacucc

SEQ ID NO: 1727634 - RNA, 13 nt, Human
gcccucugcccac

SEQ ID NO: 1727635 - RNA, 21 nt, Human
gcccucccugccccucccuuc

SEQ ID NO: 1727636 - RNA, 23 nt, Human
gcccuccaagaccuucuccuuca

SEQ ID NO: 1727637 - RNA, 22 nt, Human
gcccuccaagaccuucuccuuc

SEQ ID NO: 1727638 - RNA, 21 nt, Human
gcccuccaucuaaacugcccc

SEQ ID NO: 1727639 - RNA, 20 nt, Human
gcccuccaucuaaacugccc

SEQ ID NO: 1727640 - RNA, 21 nt, Human
gcccuccaagaccuucuccuu

SEQ ID NO: 1727641 - RNA, 19 nt, Human
gcccuccaagaccuucucc

SEQ ID NO: 1727642 - RNA, 22 nt, Human
gccccgaggccuucucugaagg

SEQ ID NO: 1727643 - RNA, 18 nt, Human
gccccgaggccuucucug

SEQ ID NO: 1727644 - RNA, 14 nt, Human
gccccucagggucc

SEQ ID NO: 1727645 - RNA, 15 nt, Human
gccccgaggccuucu

SEQ ID NO: 1727646 - RNA, 18 nt, Human
gccccucagggucccugg

SEQ ID NO: 1727647 - RNA, 16 nt, Human
gccccucagggucccu

SEQ ID NO: 1727648 - RNA, 17 nt, Human
gccccuguucuggcaga

SEQ ID NO: 1727649 - RNA, 15 nt, Human
gcccgacagccuggc

SEQ ID NO: 1727650 - RNA, 14 nt, Human
gcccgacagccugg

SEQ ID NO: 1727651 - RNA, 12 nt, Human
gcccgacagccu

SEQ ID NO: 1727652 - RNA, 13 nt, Human
gccuuuggcuuca

SEQ ID NO: 1727653 - RNA, 23 nt, Human
gcgacaaugcaaaccaucauuga

SEQ ID NO: 1727654 - RNA, 22 nt, Human
gccuuuggaaacagcucgacuu

SEQ ID NO: 1727655 - RNA, 20 nt, Human
gccuuauggaacacucugag

SEQ ID NO: 1727656 - RNA, 19 nt, Human
gccuuauggaacacucuga

SEQ ID NO: 1727657 - RNA, 18 nt, Human
gccuuauggaacacucug

SEQ ID NO: 1727658 - RNA, 16 nt, Human
gccuuauggaacacuc

SEQ ID NO: 1727659 - RNA, 12 nt, Human
gccuuccagggg

SEQ ID NO: 1727660 - RNA, 13 nt, Human
gccuucaucuccc

SEQ ID NO: 1727661 - RNA, 21 nt, Human
gccuucagggagugagggauu

SEQ ID NO: 1727662 - RNA, 13 nt, Human
gccuucagggagu

SEQ ID NO: 1727663 - RNA, 21 nt, Human
gccuuccaggggugggacacc

SEQ ID NO: 1727664 - RNA, 16 nt, Human
gccuuccagggguggg

SEQ ID NO: 1727665 - RNA, 15 nt, Human
gccuuccaggggugg

SEQ ID NO: 1727666 - RNA, 22 nt, Human
gccuucgauacaccgggccugg

SEQ ID NO: 1727667 - RNA, 18 nt, Human
gccuucgauacaccgggc

SEQ ID NO: 1727668 - RNA, 23 nt, Human
gccuucgauacaccgggccugga

SEQ ID NO: 1727669 - RNA, 22 nt, Human
gccugggggcugggcagaggaa

SEQ ID NO: 1727670 - RNA, 21 nt, Human
gccugguggcagcugcggucc

SEQ ID NO: 1727671 - RNA, 19 nt, Human
gccugguggcagcugcggu

SEQ ID NO: 1727672 - RNA, 18 nt, Human
gccugguggcagcugcgg

SEQ ID NO: 1727673 - RNA, 14 nt, Human
gccugguggcagcu

SEQ ID NO: 1727674 - RNA, 13 nt, Human
gccugguggcagc

SEQ ID NO: 1727675 - RNA, 14 nt, Human
gccuuauggaacac

SEQ ID NO: 1727676 - RNA, 10 nt, Human
gccuuaugga

SEQ ID NO: 1727677 - RNA, 18 nt, Human
gccuuagaagucacacag

SEQ ID NO: 1727678 - RNA, 17 nt, Human
gccuuagaagucacaca

SEQ ID NO: 1727679 - RNA, 19 nt, Human
gccuuagaagucacacagu

SEQ ID NO: 1727680 - RNA, 20 nt, Human
gccuuacacaaugguuuucu

SEQ ID NO: 1727681 - RNA, 21 nt, Human
gccuuacacaaugguuuucuu

SEQ ID NO: 1727682 - RNA, 18 nt, Human
gccuuacccucauguucu

SEQ ID NO: 1727683 - RNA, 13 nt, Human
gccuguuuaagag

SEQ ID NO: 1727684 - RNA, 12 nt, Human
gccuguuuaaga

SEQ ID NO: 1727685 - RNA, 13 nt, Human
gcuaagagggagg

SEQ ID NO: 1727686 - RNA, 14 nt, Human
gcuacacaggggaa

SEQ ID NO: 1727687 - RNA, 13 nt, Human
gcuacacacugca

SEQ ID NO: 1727688 - RNA, 20 nt, Human
gcuacacacugcauguuugu

SEQ ID NO: 1727689 - RNA, 20 nt, Human
gcuaagagggagggagggcu

SEQ ID NO: 1727690 - RNA, 21 nt, Human
gcuaagagggagggagggcuc

SEQ ID NO: 1727691 - RNA, 19 nt, Human
gcuagaacucccuuucaac

SEQ ID NO: 1727692 - RNA, 16 nt, Human
gcuaccuuuguauucu

SEQ ID NO: 1727693 - RNA, 20 nt, Human
gcuaccuuuguauucucucc

SEQ ID NO: 1727694 - RNA, 16 nt, Human
gcuaggaacacuccuu

SEQ ID NO: 1727695 - RNA, 22 nt, Human
gcuaggaaauccaggguggugg

SEQ ID NO: 1727696 - RNA, 15 nt, Human
gcuaggaacacuccu

SEQ ID NO: 1727697 - RNA, 19 nt, Human
gcuaggaaauccagggugg

SEQ ID NO: 1727698 - RNA, 22 nt, Human
gcgacagugagacucugucuca

SEQ ID NO: 1727699 - RNA, 12 nt, Human
gcgacagugaga

SEQ ID NO: 1727700 - RNA, 15 nt, Human
gcgccuacaggagug

SEQ ID NO: 1727701 - RNA, 18 nt, Human
gcgccuacaggagugagc

SEQ ID NO: 1727702 - RNA, 13 nt, Human
gcggacagccacg

SEQ ID NO: 1727703 - RNA, 11 nt, Human
gcggacagcca

SEQ ID NO: 1727704 - RNA, 19 nt, Human
gcgucucauacucaccuca

SEQ ID NO: 1727705 - RNA, 20 nt, Human
gcgggucacaggagggaggg

SEQ ID NO: 1727706 - RNA, 19 nt, Human
gcgggucacaggagggagg

SEQ ID NO: 1727707 - RNA, 15 nt, Human
gcggacagccacggc

SEQ ID NO: 1727708 - RNA, 16 nt, Human
gcggacagccacggcc

SEQ ID NO: 1727709 - RNA, 15 nt, Human
gcgggucacaggagg

SEQ ID NO: 1727710 - RNA, 13 nt, Human
gcgggucacagga

SEQ ID NO: 1727711 - RNA, 18 nt, Human
gcccugcuuugggcugcc

SEQ ID NO: 1727712 - RNA, 16 nt, Human
gcccugcuuugggcug

SEQ ID NO: 1727713 - RNA, 18 nt, Human
gcccuucucuccagcccc

SEQ ID NO: 1727714 - RNA, 17 nt, Human
gcccuucucuccagccc

SEQ ID NO: 1727715 - RNA, 16 nt, Human
gcccuucucuccagcc

SEQ ID NO: 1727716 - RNA, 14 nt, Human
gcccuucucuccag

SEQ ID NO: 1727717 - RNA, 20 nt, Human
gccgggcgugguggugagug

SEQ ID NO: 1727718 - RNA, 21 nt, Human
gccgggcgcgguggcucacgc

SEQ ID NO: 1727719 - RNA, 18 nt, Human
gccgggaccccgagccug

SEQ ID NO: 1727720 - RNA, 23 nt, Human
gccgggaccccgagccuggcucc

SEQ ID NO: 1727721 - RNA, 19 nt, Human
gccgggaccccgagccugg

SEQ ID NO: 1727722 - RNA, 13 nt, Human
gccgcagcccugc

SEQ ID NO: 1727723 - RNA, 12 nt, Human
gccgcagcccug

SEQ ID NO: 1727724 - RNA, 11 nt, Human
gccgcagcccu

SEQ ID NO: 1727725 - RNA, 21 nt, Human
gccgagaucacgccacugcac

SEQ ID NO: 1727726 - RNA, 20 nt, Human
gccgagaucacgccacugca

SEQ ID NO: 1727727 - RNA, 22 nt, Human
gccgagaucacgccacugcacu

SEQ ID NO: 1727728 - RNA, 17 nt, Human
gccucacaguccuuacc

SEQ ID NO: 1727729 - RNA, 13 nt, Human
gccucacaguccu

SEQ ID NO: 1727730 - RNA, 19 nt, Human
gccucaaccuccugggcua

SEQ ID NO: 1727731 - RNA, 18 nt, Human
gccucaaccuccugggcu

SEQ ID NO: 1727732 - RNA, 22 nt, Human
gccuaugugcaugcagcaucua

SEQ ID NO: 1727733 - RNA, 20 nt, Human
gccguguaaccauggaccca

SEQ ID NO: 1727734 - RNA, 22 nt, Human
gccguggcuucccgcucagccc

SEQ ID NO: 1727735 - RNA, 21 nt, Human
gccguggcuucccgcucagcc

SEQ ID NO: 1727736 - RNA, 19 nt, Human
gccguggcuucccgcucag

SEQ ID NO: 1727737 - RNA, 19 nt, Human
gccgugccuucagcucuac

SEQ ID NO: 1727738 - RNA, 17 nt, Human
gccgugccuucagcucu

SEQ ID NO: 1727739 - RNA, 15 nt, Human
gccgugccuucagcu

SEQ ID NO: 1727740 - RNA, 14 nt, Human
gccgugccuucagc

SEQ ID NO: 1727741 - RNA, 17 nt, Human
gccgucuaccugagggg

SEQ ID NO: 1727742 - RNA, 16 nt, Human
gccgucuaccugaggg

SEQ ID NO: 1727743 - RNA, 15 nt, Human
gccgucuaccugagg

SEQ ID NO: 1727744 - RNA, 17 nt, Human
gccucccaucacccgcu

SEQ ID NO: 1727745 - RNA, 19 nt, Human
gccucccgaguagcuggga

SEQ ID NO: 1727746 - RNA, 18 nt, Human
gccucccgaguagcuggg

SEQ ID NO: 1727747 - RNA, 20 nt, Human
gccucccgaguagcugggac

SEQ ID NO: 1727748 - RNA, 19 nt, Human
gccucccaacucaccccag

SEQ ID NO: 1727749 - RNA, 18 nt, Human
gccucccaacucacccca

SEQ ID NO: 1727750 - RNA, 17 nt, Human
gccucccaacucacccc

SEQ ID NO: 1727751 - RNA, 16 nt, Human
gccucccaacucaccc

SEQ ID NO: 1727752 - RNA, 16 nt, Human
gccucccaucacccgc

SEQ ID NO: 1727753 - RNA, 14 nt, Human
gccucccaucaccc

SEQ ID NO: 1727754 - RNA, 13 nt, Human
gccucccaacuca

SEQ ID NO: 1727755 - RNA, 19 nt, Human
gccucccaaagugcuggga

SEQ ID NO: 1727756 - RNA, 18 nt, Human
gccucccaaagugcuggg

SEQ ID NO: 1727757 - RNA, 17 nt, Human
gccucagcauccuggca

SEQ ID NO: 1727758 - RNA, 16 nt, Human
gccucagcauccuggc

SEQ ID NO: 1727759 - RNA, 15 nt, Human
gccucagcauccugg

SEQ ID NO: 1727760 - RNA, 18 nt, Human
gccucacaguccuuacca

SEQ ID NO: 1727761 - RNA, 21 nt, Human
gccucacaguccuuaccagca

SEQ ID NO: 1727762 - RNA, 15 nt, Human
gccugcaagggagug

SEQ ID NO: 1727763 - RNA, 13 nt, Human
gccugcaagggag

SEQ ID NO: 1727764 - RNA, 13 nt, Human
gccucugccucug

SEQ ID NO: 1727765 - RNA, 12 nt, Human
gccucugccucu

SEQ ID NO: 1727766 - RNA, 15 nt, Human
gccucugcacucccc

SEQ ID NO: 1727767 - RNA, 18 nt, Human
gccucugccucugacaca

SEQ ID NO: 1727768 - RNA, 21 nt, Human
gccucugacacacagcucugu

SEQ ID NO: 1727769 - RNA, 20 nt, Human
gccucugacacacagcucug

SEQ ID NO: 1727770 - RNA, 19 nt, Human
gccucugacacacagcucu

SEQ ID NO: 1727771 - RNA, 14 nt, Human
gccucugcacuccc

SEQ ID NO: 1727772 - RNA, 18 nt, Human
gccucugacacacagcuc

SEQ ID NO: 1727773 - RNA, 17 nt, Human
gccucugacacacagcu

SEQ ID NO: 1727774 - RNA, 16 nt, Human
gccucucucaggccaa

SEQ ID NO: 1727775 - RNA, 14 nt, Human
gccucucucaggcc

SEQ ID NO: 1727776 - RNA, 13 nt, Human
gccucucucaggc

SEQ ID NO: 1727777 - RNA, 17 nt, Human
gcaagaauugaagcagg

SEQ ID NO: 1727778 - RNA, 22 nt, Human
gcaagacgcugugcugcccugc

SEQ ID NO: 1727779 - RNA, 21 nt, Human
gcaagacgcugugcugcccug

SEQ ID NO: 1727780 - RNA, 20 nt, Human
gcaagacgcugugcugcccu

SEQ ID NO: 1727781 - RNA, 14 nt, Human
gcaagacgcugugc

SEQ ID NO: 1727782 - RNA, 23 nt, Human
gcaagacgcugugcugcccugcc

SEQ ID NO: 1727783 - RNA, 13 nt, Human
gcaaagcccagcu

SEQ ID NO: 1727784 - RNA, 21 nt, Human
gcaaagcccagcuugaaaccu

SEQ ID NO: 1727785 - RNA, 15 nt, Human
gauuuuugucuugug

SEQ ID NO: 1727786 - RNA, 16 nt, Human
gcaaaguaucccuacu

SEQ ID NO: 1727787 - RNA, 18 nt, Human
gcaaggagauuuacaacu

SEQ ID NO: 1727788 - RNA, 13 nt, Human
gcaaggcugucaa

SEQ ID NO: 1727789 - RNA, 11 nt, Human
gcaaggcuguc

SEQ ID NO: 1727790 - RNA, 23 nt, Human
gcaaugcuggcuguuggcugggg

SEQ ID NO: 1727791 - RNA, 22 nt, Human
gcaaugcuggcuguuggcuggg

SEQ ID NO: 1727792 - RNA, 14 nt, Human
gcaaugcuggcugu

SEQ ID NO: 1727793 - RNA, 13 nt, Human
gcaaugcuggcug

SEQ ID NO: 1727794 - RNA, 23 nt, Human
gcaaugaccuuucaauaggaaaa

SEQ ID NO: 1727795 - RNA, 22 nt, Human
gcaaugaccuuucaauaggaaa

SEQ ID NO: 1727796 - RNA, 20 nt, Human
gcaaugaccuuucaauagga

SEQ ID NO: 1727797 - RNA, 17 nt, Human
gcaaugaccuuucaaua

SEQ ID NO: 1727798 - RNA, 15 nt, Human
gcaaugaccuuucaa

SEQ ID NO: 1727799 - RNA, 17 nt, Human
gcaaucaaaucugcuuu

SEQ ID NO: 1727800 - RNA, 15 nt, Human
gcaaucaaaucugcu

SEQ ID NO: 1727801 - RNA, 14 nt, Human
gcaaggucauuuuu

SEQ ID NO: 1727802 - RNA, 19 nt, Human
gauuuguuaaugauagcua

SEQ ID NO: 1727803 - RNA, 20 nt, Human
gauuugucuuuggugaacau

SEQ ID NO: 1727804 - RNA, 22 nt, Human
gauuugucuuuggugaacauug

SEQ ID NO: 1727805 - RNA, 11 nt, Human
gauuucuguuu

SEQ ID NO: 1727806 - RNA, 19 nt, Human
gauuucuguuuagauaaua

SEQ ID NO: 1727807 - RNA, 22 nt, Human
gauuuggucaacacuaacauga

SEQ ID NO: 1727808 - RNA, 15 nt, Human
gauuuccguuaaaau

SEQ ID NO: 1727809 - RNA, 18 nt, Human
gauuuccguuaaaauacc

SEQ ID NO: 1727810 - RNA, 20 nt, Human
gauugcaacaggcugggcuu

SEQ ID NO: 1727811 - RNA, 18 nt, Human
gauucuuuccugaggcug

SEQ ID NO: 1727812 - RNA, 17 nt, Human
gauucuuuccugaggcu

SEQ ID NO: 1727813 - RNA, 16 nt, Human
gauucuuuccugaggc

SEQ ID NO: 1727814 - RNA, 23 nt, Human
gauugcaccacugcacuccagcc

SEQ ID NO: 1727815 - RNA, 16 nt, Human
gauugcaccacugcac

SEQ ID NO: 1727816 - RNA, 21 nt, Human
gauugcaacaggcugggcuuc

SEQ ID NO: 1727817 - RNA, 12 nt, Human
gauucuuuccug

SEQ ID NO: 1727818 - RNA, 20 nt, Human
gauucccaagcucugcuccu

SEQ ID NO: 1727819 - RNA, 19 nt, Human
gauucccaagcucugcucc

SEQ ID NO: 1727820 - RNA, 21 nt, Human
gauucccaagcucugcuccuc

SEQ ID NO: 1727821 - RNA, 23 nt, Human
gauggggcugcaccggcuggccu

SEQ ID NO: 1727822 - RNA, 15 nt, Human
gauucagcucugcaa

SEQ ID NO: 1727823 - RNA, 13 nt, Human
gauucagcucugc

SEQ ID NO: 1727824 - RNA, 19 nt, Human
gauucagacagcugccugg

SEQ ID NO: 1727825 - RNA, 19 nt, Human
gauucauauuuacuucuua

SEQ ID NO: 1727826 - RNA, 18 nt, Human
gauucauauuuacuucuu

SEQ ID NO: 1727827 - RNA, 17 nt, Human
gauucauauuuacuucu

SEQ ID NO: 1727828 - RNA, 22 nt, Human
gauuccagagaguggcuccucc

SEQ ID NO: 1727829 - RNA, 20 nt, Human
gauuccagagaguggcuccu

SEQ ID NO: 1727830 - RNA, 19 nt, Human
gauuccagagaguggcucc

SEQ ID NO: 1727831 - RNA, 23 nt, Human
gauagauaggucagugcaaauac

SEQ ID NO: 1727832 - RNA, 19 nt, Human
gauacaccgggccuggaga

SEQ ID NO: 1727833 - RNA, 14 nt, Human
gauaauacaccacu

SEQ ID NO: 1727834 - RNA, 18 nt, Human
gauaauacaccacuacau

SEQ ID NO: 1727835 - RNA, 21 nt, Human
gauaauacaccacuacauucu

SEQ ID NO: 1727836 - RNA, 22 nt, Human
gauaauacaccacuacauucug

SEQ ID NO: 1727837 - RNA, 22 nt, Human
gauagcacagacccugcccugu

SEQ ID NO: 1727838 - RNA, 21 nt, Human
gauagcacagacccugcccug

SEQ ID NO: 1727839 - RNA, 19 nt, Human
gauacaggaaaagcugcug

SEQ ID NO: 1727840 - RNA, 18 nt, Human
gauacaggaaaagcugcu

SEQ ID NO: 1727841 - RNA, 22 nt, Human
gauaaauaguuuaugauuccac

SEQ ID NO: 1727842 - RNA, 16 nt, Human
gauaaauaacuuuuuu

SEQ ID NO: 1727843 - RNA, 21 nt, Human
gauaaauaacuuuuuuuuaag

SEQ ID NO: 1727844 - RNA, 21 nt, Human
gauaaauauugagcagaucua

SEQ ID NO: 1727845 - RNA, 21 nt, Human
gaggaaggaaacccagcucug

SEQ ID NO: 1727846 - RNA, 20 nt, Human
gaggaaggaaacccagcucu

SEQ ID NO: 1727847 - RNA, 19 nt, Human
gaggaaggaaacccagcuc

SEQ ID NO: 1727848 - RNA, 13 nt, Human
gaggaaggaaacc

SEQ ID NO: 1727849 - RNA, 19 nt, Human
gauaaaguugguaaaccuu

SEQ ID NO: 1727850 - RNA, 18 nt, Human
gaucacgccacugcacua

SEQ ID NO: 1727851 - RNA, 16 nt, Human
gaucacgccacugcac

SEQ ID NO: 1727852 - RNA, 15 nt, Human
gaucagccugggcaa

SEQ ID NO: 1727853 - RNA, 12 nt, Human
gaucagccuggg

SEQ ID NO: 1727854 - RNA, 22 nt, Human
gaucagucugauucccaagcuc

SEQ ID NO: 1727855 - RNA, 12 nt, Human
gaucacggcuca

SEQ ID NO: 1727856 - RNA, 21 nt, Human
gaucauccacugugccaugug

SEQ ID NO: 1727857 - RNA, 19 nt, Human
gaucauccacugugccaug

SEQ ID NO: 1727858 - RNA, 17 nt, Human
gaucauccacugugcca

SEQ ID NO: 1727859 - RNA, 20 nt, Human
gauccccaagccuggcaagg

SEQ ID NO: 1727860 - RNA, 20 nt, Human
gaucauugugaaauuauuca

SEQ ID NO: 1727861 - RNA, 14 nt, Human
gaucauugugaaau

SEQ ID NO: 1727862 - RNA, 21 nt, Human
gaugcacagaguuguuacauu

SEQ ID NO: 1727863 - RNA, 22 nt, Human
gaugcacagaguuguuacauuu

SEQ ID NO: 1727864 - RNA, 13 nt, Human
gaugcaccagccc

SEQ ID NO: 1727865 - RNA, 14 nt, Human
gaugcaccagcccu

SEQ ID NO: 1727866 - RNA, 12 nt, Human
gaugcagccuca

SEQ ID NO: 1727867 - RNA, 14 nt, Human
gaugcagccucaca

SEQ ID NO: 1727868 - RNA, 19 nt, Human
gaugcagccucacaguccu

SEQ ID NO: 1727869 - RNA, 21 nt, Human
gauggcuaguaucaaaagaaa

SEQ ID NO: 1727870 - RNA, 19 nt, Human
gauggcugugccucugccu

SEQ ID NO: 1727871 - RNA, 18 nt, Human
gauggcugugccucugcc

SEQ ID NO: 1727872 - RNA, 17 nt, Human
gauggcugugccucugc

SEQ ID NO: 1727873 - RNA, 13 nt, Human
gauggcugugccu

SEQ ID NO: 1727874 - RNA, 22 nt, Human
gauggggcccugccuccuuugu

SEQ ID NO: 1727875 - RNA, 14 nt, Human
gauggggcccugcc

SEQ ID NO: 1727876 - RNA, 13 nt, Human
gauggggcccugc

SEQ ID NO: 1727877 - RNA, 20 nt, Human
gauggcugugccucugccug

SEQ ID NO: 1727878 - RNA, 19 nt, Human
gaugccugguggcagcugc

SEQ ID NO: 1727879 - RNA, 18 nt, Human
gaugccugguggcagcug

SEQ ID NO: 1727880 - RNA, 20 nt, Human
gaugccugguggcagcugcg

SEQ ID NO: 1727881 - RNA, 22 nt, Human
gauggauuuccagccaaagccu

SEQ ID NO: 1727882 - RNA, 22 nt, Human
gauccugagccagauuucacuc

SEQ ID NO: 1727883 - RNA, 21 nt, Human
gauccugagccagauuucacu

SEQ ID NO: 1727884 - RNA, 16 nt, Human
gaucccucauccucau

SEQ ID NO: 1727885 - RNA, 15 nt, Human
gaucccucauccuca

SEQ ID NO: 1727886 - RNA, 14 nt, Human
gauccccagcuguu

SEQ ID NO: 1727887 - RNA, 18 nt, Human
gaucuuugcagacaggca

SEQ ID NO: 1727888 - RNA, 13 nt, Human
gaucuuuggacag

SEQ ID NO: 1727889 - RNA, 21 nt, Human
gaucuuuggacagaagcagcu

SEQ ID NO: 1727890 - RNA, 19 nt, Human
gcauuaucuagauacugua

SEQ ID NO: 1727891 - RNA, 17 nt, Human
gcauuaucuagauacug

SEQ ID NO: 1727892 - RNA, 13 nt, Human
gcauuugcugaau

SEQ ID NO: 1727893 - RNA, 17 nt, Human
gcauuugcugaauacag

SEQ ID NO: 1727894 - RNA, 14 nt, Human
gcauuugcugaaua

SEQ ID NO: 1727895 - RNA, 16 nt, Human
gcauuuguuugaacug

SEQ ID NO: 1727896 - RNA, 12 nt, Human
gccaaaggaagc

SEQ ID NO: 1727897 - RNA, 22 nt, Human
gccaaagcuaggccuggccaga

SEQ ID NO: 1727898 - RNA, 16 nt, Human
gccaaagcuaggccug

SEQ ID NO: 1727899 - RNA, 19 nt, Human
gccaaagccuccuccagcc

SEQ ID NO: 1727900 - RNA, 16 nt, Human
gccaaagccuccucca

SEQ ID NO: 1727901 - RNA, 20 nt, Human
gccaaagccaaagcuaggcc

SEQ ID NO: 1727902 - RNA, 13 nt, Human
gccaaagccaaag

SEQ ID NO: 1727903 - RNA, 16 nt, Human
gccaaacucaccugcc

SEQ ID NO: 1727904 - RNA, 14 nt, Human
gccaaacucaccug

SEQ ID NO: 1727905 - RNA, 18 nt, Human
gcauuuguuugaacugau

SEQ ID NO: 1727906 - RNA, 22 nt, Human
gcauuuguuucuuucucugagg

SEQ ID NO: 1727907 - RNA, 22 nt, Human
gcauguucucugaggacacuaa

SEQ ID NO: 1727908 - RNA, 21 nt, Human
gcauguucucugaggacacua

SEQ ID NO: 1727909 - RNA, 15 nt, Human
gcauguucucugagg

SEQ ID NO: 1727910 - RNA, 20 nt, Human
gcauggcaaggacugcaggg

SEQ ID NO: 1727911 - RNA, 18 nt, Human
gcaugcgggcuuccuccu

SEQ ID NO: 1727912 - RNA, 16 nt, Human
gcaucugaaaauugau

SEQ ID NO: 1727913 - RNA, 18 nt, Human
gcaugaaguaauaugcac

SEQ ID NO: 1727914 - RNA, 17 nt, Human
gcaguuauuaacacuaa

SEQ ID NO: 1727915 - RNA, 13 nt, Human
gcauagaaguaaa

SEQ ID NO: 1727916 - RNA, 15 nt, Human
gcagugggagcugcc

SEQ ID NO: 1727917 - RNA, 14 nt, Human
gcagugggagcugc

SEQ ID NO: 1727918 - RNA, 13 nt, Human
gcagugggagcug

SEQ ID NO: 1727919 - RNA, 23 nt, Human
gcaguggugguuuucuguucuuu

SEQ ID NO: 1727920 - RNA, 17 nt, Human
gcauagguuuaauaauu

SEQ ID NO: 1727921 - RNA, 21 nt, Human
gcagggcucagcggggacagc

SEQ ID NO: 1727922 - RNA, 19 nt, Human
gcagggcucagcggggaca

SEQ ID NO: 1727923 - RNA, 16 nt, Human
gcaggcagccaggcca

SEQ ID NO: 1727924 - RNA, 15 nt, Human
gcaggcagccaggcc

SEQ ID NO: 1727925 - RNA, 18 nt, Human
gcagggucucacucuguc

SEQ ID NO: 1727926 - RNA, 17 nt, Human
gcagggucucacucugu

SEQ ID NO: 1727927 - RNA, 22 nt, Human
gcagggcucagcggggacagcu

SEQ ID NO: 1727928 - RNA, 20 nt, Human
gcaggucuugaacuccuggc

SEQ ID NO: 1727929 - RNA, 19 nt, Human
gcaggucuugaacuccugg

SEQ ID NO: 1727930 - RNA, 22 nt, Human
gcagguccaggguuugaguuca

SEQ ID NO: 1727931 - RNA, 16 nt, Human
gcagugcaugcugucc

SEQ ID NO: 1727932 - RNA, 15 nt, Human
gcagugcaugcuguc

SEQ ID NO: 1727933 - RNA, 15 nt, Human
gcagacaggaccagg

SEQ ID NO: 1727934 - RNA, 13 nt, Human
gcagacaggacca

SEQ ID NO: 1727935 - RNA, 12 nt, Human
gcagacaggacc

SEQ ID NO: 1727936 - RNA, 19 nt, Human
gcagacaggcaagcaccuc

SEQ ID NO: 1727937 - RNA, 18 nt, Human
gcagacaggaccagggau

SEQ ID NO: 1727938 - RNA, 23 nt, Human
gcagacaggcaagcaccuccugc

SEQ ID NO: 1727939 - RNA, 14 nt, Human
gcacguauuuuaau

SEQ ID NO: 1727940 - RNA, 15 nt, Human
gcacguauuuuaaua

SEQ ID NO: 1727941 - RNA, 20 nt, Human
gcacugcuuccagugaggcu

SEQ ID NO: 1727942 - RNA, 22 nt, Human
gcacugcuuccagugaggcucu

SEQ ID NO: 1727943 - RNA, 12 nt, Human
gcacugcugccc

SEQ ID NO: 1727944 - RNA, 24 nt, Human
gcacugguggcccgacagccuggc

SEQ ID NO: 1727945 - RNA, 23 nt, Human
gcacugguggcccgacagccugg

SEQ ID NO: 1727946 - RNA, 22 nt, Human
gcacugguggcccgacagccug

SEQ ID NO: 1727947 - RNA, 18 nt, Human
gcacugcuuccagugagg

SEQ ID NO: 1727948 - RNA, 16 nt, Human
gcacugcuuccaguga

SEQ ID NO: 1727949 - RNA, 12 nt, Human
gcacgauuucug

SEQ ID NO: 1727950 - RNA, 18 nt, Human
gcaccuuagacagucccu

SEQ ID NO: 1727951 - RNA, 19 nt, Human
gcaccuuagacagucccug

SEQ ID NO: 1727952 - RNA, 17 nt, Human
gcaccuuagacaguccc

SEQ ID NO: 1727953 - RNA, 14 nt, Human
gcaccuuagacagu

SEQ ID NO: 1727954 - RNA, 22 nt, Human
gcaccuggaauauauaaccagu

SEQ ID NO: 1727955 - RNA, 15 nt, Human
gcacccucaggcagg

SEQ ID NO: 1727956 - RNA, 18 nt, Human
gcaccuggaauauauaac

SEQ ID NO: 1727957 - RNA, 21 nt, Human
gcaccuggaauauauaaccag

SEQ ID NO: 1727958 - RNA, 14 nt, Human
gcaauggcagccuu

SEQ ID NO: 1727959 - RNA, 20 nt, Human
gcaccacugcacuccagccu

SEQ ID NO: 1727960 - RNA, 13 nt, Human
gcaauggcagccu

SEQ ID NO: 1727961 - RNA, 12 nt, Human
gcaauggcagcc

SEQ ID NO: 1727962 - RNA, 22 nt, Human
gcaccacugcacuccagccugg

SEQ ID NO: 1727963 - RNA, 21 nt, Human
gcaccacugcacuccagccug

SEQ ID NO: 1727964 - RNA, 15 nt, Human
gcaccagcagccugg

SEQ ID NO: 1727965 - RNA, 19 nt, Human
gcacccggccccugcuggu

SEQ ID NO: 1727966 - RNA, 22 nt, Human
gcacccaccaucaugucuggcu

SEQ ID NO: 1727967 - RNA, 16 nt, Human
gcaccagcagccugga

SEQ ID NO: 1727968 - RNA, 23 nt, Human
gcaggaggaucacuugaguccag

SEQ ID NO: 1727969 - RNA, 20 nt, Human
gcaggaaggcugagaggaga

SEQ ID NO: 1727970 - RNA, 14 nt, Human
gcaggcagccaggc

SEQ ID NO: 1727971 - RNA, 13 nt, Human
gcaggcagccagg

SEQ ID NO: 1727972 - RNA, 12 nt, Human
gcaggcagccag

SEQ ID NO: 1727973 - RNA, 14 nt, Human
gcagcucaccucuc

SEQ ID NO: 1727974 - RNA, 15 nt, Human
gcagccuuggcaaac

SEQ ID NO: 1727975 - RNA, 15 nt, Human
gcagcucaccucucc

SEQ ID NO: 1727976 - RNA, 17 nt, Human
gcagcccugcagagggc

SEQ ID NO: 1727977 - RNA, 16 nt, Human
gcagcccugcagaggg

SEQ ID NO: 1727978 - RNA, 15 nt, Human
gcagcccugcagagg

SEQ ID NO: 1727979 - RNA, 14 nt, Human
gcagcccugcagag

SEQ ID NO: 1727980 - RNA, 13 nt, Human
gcagcccugcuuu

SEQ ID NO: 1727981 - RNA, 20 nt, Human
gcagccccgugggguuccuc

SEQ ID NO: 1727982 - RNA, 21 nt, Human
gcagccccuguucuggcagag

SEQ ID NO: 1727983 - RNA, 20 nt, Human
gcagccccuguucuggcaga

SEQ ID NO: 1727984 - RNA, 13 nt, Human
gcagcccugcaga

SEQ ID NO: 1727985 - RNA, 24 nt, Human
gcagccccauucugccugcccagg

SEQ ID NO: 1727986 - RNA, 21 nt, Human
gcagccccauucugccugccc

SEQ ID NO: 1727987 - RNA, 19 nt, Human
gcagccccauucugccugc

SEQ ID NO: 1727988 - RNA, 18 nt, Human
gcagccccauucugccug

SEQ ID NO: 1727989 - RNA, 16 nt, Human
gcagcaauaaagcagc

SEQ ID NO: 1727990 - RNA, 23 nt, Human
gcagcaauaaagcagcguuucua

SEQ ID NO: 1727991 - RNA, 17 nt, Human
gcagccccauucugccu

SEQ ID NO: 1727992 - RNA, 22 nt, Human
gcagauacaggaaaagcugcug

SEQ ID NO: 1727993 - RNA, 18 nt, Human
gcagauaaacaguaguga

SEQ ID NO: 1727994 - RNA, 21 nt, Human
gcagaguugaagacagagcua

SEQ ID NO: 1727995 - RNA, 17 nt, Human
gcagacaguuaagagaa

SEQ ID NO: 1727996 - RNA, 21 nt, Human
gaccuuucaauaggaaaaacu

SEQ ID NO: 1727997 - RNA, 23 nt, Human
gaccuugaacuggguacuugugg

SEQ ID NO: 1727998 - RNA, 19 nt, Human
gaccugccucggccuccca

SEQ ID NO: 1727999 - RNA, 20 nt, Human
gacguguuaugacuccagaa

SEQ ID NO: 1728000 - RNA, 17 nt, Human
gacguguuaugacucca

SEQ ID NO: 1728001 - RNA, 18 nt, Human
gacggagucccaccuugg

SEQ ID NO: 1728002 - RNA, 14 nt, Human
gacggagucccacc

SEQ ID NO: 1728003 - RNA, 21 nt, Human
gacggagucccaccuuggcug

SEQ ID NO: 1728004 - RNA, 23 nt, Human
gacggagucccaccuuggcugca

SEQ ID NO: 1728005 - RNA, 17 nt, Human
gacgggguuucaccaug

SEQ ID NO: 1728006 - RNA, 16 nt, Human
gacuccugcaggcagc

SEQ ID NO: 1728007 - RNA, 15 nt, Human
gacuccugcaggcag

SEQ ID NO: 1728008 - RNA, 14 nt, Human
gacuccugcaggca

SEQ ID NO: 1728009 - RNA, 15 nt, Human
gacucagguugucug

SEQ ID NO: 1728010 - RNA, 15 nt, Human
gacucaguggggagg

SEQ ID NO: 1728011 - RNA, 22 nt, Human
gacguguuaugacuccagaauu

SEQ ID NO: 1728012 - RNA, 17 nt, Human
gacuacucccccaggug

SEQ ID NO: 1728013 - RNA, 12 nt, Human
gacuacaggcac

SEQ ID NO: 1728014 - RNA, 23 nt, Human
gaccugauuucugagcauuuaau

SEQ ID NO: 1728015 - RNA, 15 nt, Human
gaccugccucggccu

SEQ ID NO: 1728016 - RNA, 21 nt, Human
gaccugccccuccucucugcc

SEQ ID NO: 1728017 - RNA, 15 nt, Human
gaccugaggcccuuc

SEQ ID NO: 1728018 - RNA, 13 nt, Human
gaccucaggccug

SEQ ID NO: 1728019 - RNA, 12 nt, Human
gaccucaggccu

SEQ ID NO: 1728020 - RNA, 11 nt, Human
gaccucaggcc

SEQ ID NO: 1728021 - RNA, 21 nt, Human
gaccugaggcccuucucucca

SEQ ID NO: 1728022 - RNA, 18 nt, Human
gaccugaggcccuucucu

SEQ ID NO: 1728023 - RNA, 17 nt, Human
gacccugcccugugggc

SEQ ID NO: 1728024 - RNA, 15 nt, Human
gaccgugaggccaga

SEQ ID NO: 1728025 - RNA, 14 nt, Human
gaccgugaggccag

SEQ ID NO: 1728026 - RNA, 17 nt, Human
gacccaugcugcccugu

SEQ ID NO: 1728027 - RNA, 16 nt, Human
gacccaugcugcccug

SEQ ID NO: 1728028 - RNA, 15 nt, Human
gacccaugcugcccu

SEQ ID NO: 1728029 - RNA, 14 nt, Human
gacccaugcugccc

SEQ ID NO: 1728030 - RNA, 12 nt, Human
gacccacugcuu

SEQ ID NO: 1728031 - RNA, 11 nt, Human
gacccacugcu

SEQ ID NO: 1728032 - RNA, 13 nt, Human
gaccccuccaugu

SEQ ID NO: 1728033 - RNA, 23 nt, Human
gaccccucauagcccucacccug

SEQ ID NO: 1728034 - RNA, 22 nt, Human
gaccccucauagcccucacccu

SEQ ID NO: 1728035 - RNA, 20 nt, Human
gaccccgagccuggcuccaa

SEQ ID NO: 1728036 - RNA, 23 nt, Human
gacccugucucaaaaaaagaaaa

SEQ ID NO: 1728037 - RNA, 16 nt, Human
gacccugcccuguggg

SEQ ID NO: 1728038 - RNA, 15 nt, Human
gacccugcccugugg

SEQ ID NO: 1728039 - RNA, 13 nt, Human
gacccugcccugu

SEQ ID NO: 1728040 - RNA, 21 nt, Human
gacccugaggcccagagggcc

SEQ ID NO: 1728041 - RNA, 20 nt, Human
gacccugaggcccagagggc

SEQ ID NO: 1728042 - RNA, 19 nt, Human
gacccugaggcccagaggg

SEQ ID NO: 1728043 - RNA, 17 nt, Human
gacaugucuuuucuugc

SEQ ID NO: 1728044 - RNA, 21 nt, Human
gacaugucuuuucuugcauga

SEQ ID NO: 1728045 - RNA, 23 nt, Human
gacauacuaaccagcagaaaugc

SEQ ID NO: 1728046 - RNA, 14 nt, Human
gacaucaacagaua

SEQ ID NO: 1728047 - RNA, 15 nt, Human
gacauacuaaccagc

SEQ ID NO: 1728048 - RNA, 16 nt, Human
gacauacuaaccagca

SEQ ID NO: 1728049 - RNA, 16 nt, Human
gacagacacaggcccg

SEQ ID NO: 1728050 - RNA, 15 nt, Human
gacagacacaggccc

SEQ ID NO: 1728051 - RNA, 23 nt, Human
gacagaucucugcuuuggaaauc

SEQ ID NO: 1728052 - RNA, 21 nt, Human
gacagaucucugcuuuggaaa

SEQ ID NO: 1728053 - RNA, 19 nt, Human
gacagaucucugcuuugga

SEQ ID NO: 1728054 - RNA, 21 nt, Human
gacacuaaccacgcuggaccu

SEQ ID NO: 1728055 - RNA, 20 nt, Human
gacacuaaccacgcuggacc

SEQ ID NO: 1728056 - RNA, 14 nt, Human
gacagacacaggcc

SEQ ID NO: 1728057 - RNA, 13 nt, Human
gacagcugccugg

SEQ ID NO: 1728058 - RNA, 12 nt, Human
gacagcugccug

SEQ ID NO: 1728059 - RNA, 13 nt, Human
gacagccacggcc

SEQ ID NO: 1728060 - RNA, 22 nt, Human
gacagccaacuauggccugugg

SEQ ID NO: 1728061 - RNA, 19 nt, Human
gacagccaacuauggccug

SEQ ID NO: 1728062 - RNA, 12 nt, Human
gacagcaugaga

SEQ ID NO: 1728063 - RNA, 15 nt, Human
gacagcugccuggga

SEQ ID NO: 1728064 - RNA, 14 nt, Human
gacagcugccuggg

SEQ ID NO: 1728065 - RNA, 19 nt, Human
gacaggcauguucucugag

SEQ ID NO: 1728066 - RNA, 18 nt, Human
gacaggcauguucucuga

SEQ ID NO: 1728067 - RNA, 17 nt, Human
gacaggcaaugcuggcu

SEQ ID NO: 1728068 - RNA, 16 nt, Human
gacaggcaaugcuggc

SEQ ID NO: 1728069 - RNA, 14 nt, Human
gacaggcaaugcug

SEQ ID NO: 1728070 - RNA, 22 nt, Human
gacaaggauugcuacuguccua

SEQ ID NO: 1728071 - RNA, 16 nt, Human
gaagucuuuguacaga

SEQ ID NO: 1728072 - RNA, 14 nt, Human
gaagucuuuguaca

SEQ ID NO: 1728073 - RNA, 16 nt, Human
gacaaugacccagugg

SEQ ID NO: 1728074 - RNA, 17 nt, Human
gacacaggcccggcucc

SEQ ID NO: 1728075 - RNA, 15 nt, Human
gacacaggcccggcu

SEQ ID NO: 1728076 - RNA, 13 nt, Human
gacacacagcucu

SEQ ID NO: 1728077 - RNA, 13 nt, Human
gacaauuuauuau

SEQ ID NO: 1728078 - RNA, 19 nt, Human
gacaauuuauuauggcaca

SEQ ID NO: 1728079 - RNA, 17 nt, Human
gacaaugacuuacugua

SEQ ID NO: 1728080 - RNA, 20 nt, Human
gacaaugacuuacuguacau

SEQ ID NO: 1728081 - RNA, 12 nt, Human
gacaaugcaaac

SEQ ID NO: 1728082 - RNA, 21 nt, Human
gacaaugacuuacuguacaug

SEQ ID NO: 1728083 - RNA, 18 nt, Human
gacaaugcaaaccaucau

SEQ ID NO: 1728084 - RNA, 16 nt, Human
gacaaugcaaaccauc

SEQ ID NO: 1728085 - RNA, 12 nt, Human
gacaauuuauua

SEQ ID NO: 1728086 - RNA, 18 nt, Human
gacacuaaccacgcugga

SEQ ID NO: 1728087 - RNA, 17 nt, Human
gacacuaaccacgcugg

SEQ ID NO: 1728088 - RNA, 16 nt, Human
gacacuaaccacgcug

SEQ ID NO: 1728089 - RNA, 15 nt, Human
gacacuaaccacgcu

SEQ ID NO: 1728090 - RNA, 18 nt, Human
gacacgaauauugcugau

SEQ ID NO: 1728091 - RNA, 17 nt, Human
gacacgaauauugcuga

SEQ ID NO: 1728092 - RNA, 19 nt, Human
gacacgaauauugcugaug

SEQ ID NO: 1728093 - RNA, 17 nt, Human
gacaccuugacagggca

SEQ ID NO: 1728094 - RNA, 15 nt, Human
gacaccuugacaggg

SEQ ID NO: 1728095 - RNA, 20 nt, Human
gacaccuugacagggcacac

SEQ ID NO: 1728096 - RNA, 18 nt, Human
gacaccuugacagggcac

SEQ ID NO: 1728097 - RNA, 15 nt, Human
gacacgaauauugcu

SEQ ID NO: 1728098 - RNA, 18 nt, Human
gacacaggcccggcucca

SEQ ID NO: 1728099 - RNA, 17 nt, Human
gacacagugaccauacu

SEQ ID NO: 1728100 - RNA, 13 nt, Human
gacacccugugau

SEQ ID NO: 1728101 - RNA, 12 nt, Human
gacacccuguga

SEQ ID NO: 1728102 - RNA, 23 nt, Human
gacacccugugauggggcccugc

SEQ ID NO: 1728103 - RNA, 22 nt, Human
gacacccugugauggggcccug

SEQ ID NO: 1728104 - RNA, 17 nt, Human
gacaccuacugaguggc

SEQ ID NO: 1728105 - RNA, 17 nt, Human
gagauacagaauuuuau

SEQ ID NO: 1728106 - RNA, 19 nt, Human
gagagugaacaaauuuaca

SEQ ID NO: 1728107 - RNA, 15 nt, Human
gagagugaacaaauu

SEQ ID NO: 1728108 - RNA, 14 nt, Human
gagagccuuccagg

SEQ ID NO: 1728109 - RNA, 13 nt, Human
gagagccuuccag

SEQ ID NO: 1728110 - RNA, 18 nt, Human
gagaggggaacagacugg

SEQ ID NO: 1728111 - RNA, 13 nt, Human
gagaggggaacag

SEQ ID NO: 1728112 - RNA, 21 nt, Human
gagagggugggagugggccca

SEQ ID NO: 1728113 - RNA, 17 nt, Human
gagagaagagaaugcac

SEQ ID NO: 1728114 - RNA, 15 nt, Human
gagacagcucugcau

SEQ ID NO: 1728115 - RNA, 18 nt, Human
gagacagcucugcauacu

SEQ ID NO: 1728116 - RNA, 13 nt, Human
gagacagcucugc

SEQ ID NO: 1728117 - RNA, 24 nt, Human
gagacagcccgggcucugccuccc

SEQ ID NO: 1728118 - RNA, 23 nt, Human
gagacagcccgggcucugccucc

SEQ ID NO: 1728119 - RNA, 22 nt, Human
gagacagcccgggcucugccuc

SEQ ID NO: 1728120 - RNA, 21 nt, Human
gagacagcccgggcucugccu

SEQ ID NO: 1728121 - RNA, 20 nt, Human
gagacagcccgggcucugcc

SEQ ID NO: 1728122 - RNA, 19 nt, Human
gagacagcccgggcucugc

SEQ ID NO: 1728123 - RNA, 18 nt, Human
gagacagcccgggcucug

SEQ ID NO: 1728124 - RNA, 17 nt, Human
gagacagcccgggcucu

SEQ ID NO: 1728125 - RNA, 14 nt, Human
gagacagcccgggc

SEQ ID NO: 1728126 - RNA, 14 nt, Human
gagacucugucuca

SEQ ID NO: 1728127 - RNA, 22 nt, Human
gagacugucucaagagggcacu

SEQ ID NO: 1728128 - RNA, 13 nt, Human
gagacuuguauga

SEQ ID NO: 1728129 - RNA, 23 nt, Human
gagacugucucaagagggcacug

SEQ ID NO: 1728130 - RNA, 18 nt, Human
gagacucgcgacaaugca

SEQ ID NO: 1728131 - RNA, 16 nt, Human
gagacucgcgacaaug

SEQ ID NO: 1728132 - RNA, 12 nt, Human
gagaccaucccu

SEQ ID NO: 1728133 - RNA, 21 nt, Human
gagaaaauggacguguuauga

SEQ ID NO: 1728134 - RNA, 18 nt, Human
gacucgcgacaaugcaaa

SEQ ID NO: 1728135 - RNA, 17 nt, Human
gacuccugcaggcagcc

SEQ ID NO: 1728136 - RNA, 19 nt, Human
gacucgcgacaaugcaaac

SEQ ID NO: 1728137 - RNA, 16 nt, Human
gacuuggaagcuccgc

SEQ ID NO: 1728138 - RNA, 15 nt, Human
gacuuggaagcuccg

SEQ ID NO: 1728139 - RNA, 14 nt, Human
gacuuggaagcucc

SEQ ID NO: 1728140 - RNA, 23 nt, Human
gagaaaguacuucuccacccugc

SEQ ID NO: 1728141 - RNA, 14 nt, Human
gagaaauuuauaaa

SEQ ID NO: 1728142 - RNA, 12 nt, Human
gagaaaugaaaa

SEQ ID NO: 1728143 - RNA, 21 nt, Human
gagaaugcacaaacagaggcc

SEQ ID NO: 1728144 - RNA, 20 nt, Human
gagaaugcacaaacagaggc

SEQ ID NO: 1728145 - RNA, 22 nt, Human
gagaaugcacaaacagaggccg

SEQ ID NO: 1728146 - RNA, 17 nt, Human
gagacacaagccuucgg

SEQ ID NO: 1728147 - RNA, 15 nt, Human
gagacacaagccuuc

SEQ ID NO: 1728148 - RNA, 19 nt, Human
gagacagaguuuucacucu

SEQ ID NO: 1728149 - RNA, 17 nt, Human
gagacagacuagaaguu

SEQ ID NO: 1728150 - RNA, 12 nt, Human
gagacagcccgg

SEQ ID NO: 1728151 - RNA, 16 nt, Human
gagacagccaacuaug

SEQ ID NO: 1728152 - RNA, 15 nt, Human
gagacagacuagaag

SEQ ID NO: 1728153 - RNA, 18 nt, Human
gaggaagccgcuggggcc

SEQ ID NO: 1728154 - RNA, 17 nt, Human
gaggaagccgcuggggc

SEQ ID NO: 1728155 - RNA, 14 nt, Human
gaggaagccgcugg

SEQ ID NO: 1728156 - RNA, 13 nt, Human
gaggaagccgcug

SEQ ID NO: 1728157 - RNA, 17 nt, Human
gaggaagagaaaaaaua

SEQ ID NO: 1728158 - RNA, 16 nt, Human
gaggaacaaggcaagg

SEQ ID NO: 1728159 - RNA, 14 nt, Human
gaggaacaaggcaa

SEQ ID NO: 1728160 - RNA, 22 nt, Human
gagcuugaaacccguggcgcuu

SEQ ID NO: 1728161 - RNA, 22 nt, Human
gagcuuucugcuaucaaagagg

SEQ ID NO: 1728162 - RNA, 20 nt, Human
gagcuuugaaaauucagugg

SEQ ID NO: 1728163 - RNA, 17 nt, Human
gaggaaagcaaaggaga

SEQ ID NO: 1728164 - RNA, 16 nt, Human
gaggaaagcaaaggag

SEQ ID NO: 1728165 - RNA, 23 nt, Human
gagcuuugucuacuucaaaaguu

SEQ ID NO: 1728166 - RNA, 23 nt, Human
gaggaaaaccaagccguggcuuc

SEQ ID NO: 1728167 - RNA, 21 nt, Human
gaggaaaaccaagccguggcu

SEQ ID NO: 1728168 - RNA, 20 nt, Human
gaggaaaaccaagccguggc

SEQ ID NO: 1728169 - RNA, 15 nt, Human
gagcugaguggggga

SEQ ID NO: 1728170 - RNA, 17 nt, Human
gagcuagcagcagggag

SEQ ID NO: 1728171 - RNA, 15 nt, Human
gagcuagcagcaggg

SEQ ID NO: 1728172 - RNA, 15 nt, Human
gagccugcaguuauu

SEQ ID NO: 1728173 - RNA, 20 nt, Human
gagccgagaucacgccacug

SEQ ID NO: 1728174 - RNA, 19 nt, Human
gagccgagaucacgccacu

SEQ ID NO: 1728175 - RNA, 18 nt, Human
gagcccacgcccccacug

SEQ ID NO: 1728176 - RNA, 21 nt, Human
gagcccacuguacuugcucuu

SEQ ID NO: 1728177 - RNA, 18 nt, Human
gagcccacuguacuugcu

SEQ ID NO: 1728178 - RNA, 22 nt, Human
gagccgagaucacgccacugca

SEQ ID NO: 1728179 - RNA, 21 nt, Human
gagccgagaucacgccacugc

SEQ ID NO: 1728180 - RNA, 15 nt, Human
gagccucagcauccu

SEQ ID NO: 1728181 - RNA, 14 nt, Human
gagccucagcaucc

SEQ ID NO: 1728182 - RNA, 17 nt, Human
gagccucagcauccugg

SEQ ID NO: 1728183 - RNA, 19 nt, Human
gagccucagucucccuccc

SEQ ID NO: 1728184 - RNA, 13 nt, Human
gagccucagcauc

SEQ ID NO: 1728185 - RNA, 13 nt, Human
gagccuccugccc

SEQ ID NO: 1728186 - RNA, 12 nt, Human
gagccugcaguu

SEQ ID NO: 1728187 - RNA, 16 nt, Human
gagcagagaccauccc

SEQ ID NO: 1728188 - RNA, 18 nt, Human
gagcagagaccaucccug

SEQ ID NO: 1728189 - RNA, 17 nt, Human
gagcagagaccaucccu

SEQ ID NO: 1728190 - RNA, 21 nt, Human
gagauagccaaggccaaagga

SEQ ID NO: 1728191 - RNA, 20 nt, Human
gagauagccaaggccaaagg

SEQ ID NO: 1728192 - RNA, 21 nt, Human
gagcagagaccaucccugaag

SEQ ID NO: 1728193 - RNA, 19 nt, Human
gagcagagaccaucccuga

SEQ ID NO: 1728194 - RNA, 23 nt, Human
gagcagagaccaucccugaaggc

SEQ ID NO: 1728195 - RNA, 22 nt, Human
gagcagccacauuccugaugcu

SEQ ID NO: 1728196 - RNA, 21 nt, Human
gagcagccacauuccugaugc

SEQ ID NO: 1728197 - RNA, 19 nt, Human
gagccagauuucacucucc

SEQ ID NO: 1728198 - RNA, 18 nt, Human
gagccagauuucacucuc

SEQ ID NO: 1728199 - RNA, 15 nt, Human
gagccagauuucacu

SEQ ID NO: 1728200 - RNA, 20 nt, Human
gagccacugcaccgggccac

SEQ ID NO: 1728201 - RNA, 19 nt, Human
gagccacugcaccgggcca

SEQ ID NO: 1728202 - RNA, 18 nt, Human
gagccacugcaccgggcc

SEQ ID NO: 1728203 - RNA, 17 nt, Human
gagcccaccuuggcuca

SEQ ID NO: 1728204 - RNA, 15 nt, Human
gagcccaccuuggcu

SEQ ID NO: 1728205 - RNA, 13 nt, Human
gagcccaccuugg

SEQ ID NO: 1728206 - RNA, 16 nt, Human
gaaaggaaagaggcuc

SEQ ID NO: 1728207 - RNA, 11 nt, Human
gaaaggaaaga

SEQ ID NO: 1728208 - RNA, 16 nt, Human
gaaaguuuacaggaaa

SEQ ID NO: 1728209 - RNA, 14 nt, Human
gaaaguuuacagga

SEQ ID NO: 1728210 - RNA, 20 nt, Human
gaaacuaggugcauauuuau

SEQ ID NO: 1728211 - RNA, 16 nt, Human
gaaaaaugagccuggc

SEQ ID NO: 1728212 - RNA, 13 nt, Human
gaaagcagaacag

SEQ ID NO: 1728213 - RNA, 14 nt, Human
gaaagcagaacagu

SEQ ID NO: 1728214 - RNA, 23 nt, Human
gaaagauggcugugccucugccu

SEQ ID NO: 1728215 - RNA, 16 nt, Human
gaaagaucaaaagguu

SEQ ID NO: 1728216 - RNA, 22 nt, Human
gaaagauggcugugccucugcc

SEQ ID NO: 1728217 - RNA, 17 nt, Human
gaaagacuguacaaagu

SEQ ID NO: 1728218 - RNA, 16 nt, Human
gaacacuccuucacag

SEQ ID NO: 1728219 - RNA, 15 nt, Human
gaacacuccuucaca

SEQ ID NO: 1728220 - RNA, 17 nt, Human
gaacacuccuucacaga

SEQ ID NO: 1728221 - RNA, 20 nt, Human
gaacagacuggaagcacagc

SEQ ID NO: 1728222 - RNA, 23 nt, Human
gaaauuaguacuccccuccuuga

SEQ ID NO: 1728223 - RNA, 20 nt, Human
gaaauuuccacucaggucug

SEQ ID NO: 1728224 - RNA, 19 nt, Human
gaaauuuccacucaggucu

SEQ ID NO: 1728225 - RNA, 22 nt, Human
gaacagacuggaagcacagcuu

SEQ ID NO: 1728226 - RNA, 20 nt, Human
gaaauaucugaaaauguaug

SEQ ID NO: 1728227 - RNA, 19 nt, Human
gaaauaucugaaaauguau

SEQ ID NO: 1728228 - RNA, 18 nt, Human
gaaauaucugaaaaugua

SEQ ID NO: 1728229 - RNA, 17 nt, Human
gaaauauaggaacuuaa

SEQ ID NO: 1728230 - RNA, 19 nt, Human
gaaaugggcagagcagaga

SEQ ID NO: 1728231 - RNA, 17 nt, Human
gaaaugggcagagcaga

SEQ ID NO: 1728232 - RNA, 17 nt, Human
gaaauguacagcaagga

SEQ ID NO: 1728233 - RNA, 15 nt, Human
gaaaugggcagagca

SEQ ID NO: 1728234 - RNA, 16 nt, Human
gaaaugggcagagcag

SEQ ID NO: 1728235 - RNA, 18 nt, Human
gaaaugaggucagagccu

SEQ ID NO: 1728236 - RNA, 11 nt, Human
gaaaugagcug

SEQ ID NO: 1728237 - RNA, 15 nt, Human
gaagggggcugggac

SEQ ID NO: 1728238 - RNA, 13 nt, Human
gaagggggcuggg

SEQ ID NO: 1728239 - RNA, 18 nt, Human
gaaggcagggagggccug

SEQ ID NO: 1728240 - RNA, 23 nt, Human
gaaggcagggagggccugggccc

SEQ ID NO: 1728241 - RNA, 22 nt, Human
gaaggcagggagggccugggcc

SEQ ID NO: 1728242 - RNA, 20 nt, Human
gaaggcagggagggccuggg

SEQ ID NO: 1728243 - RNA, 15 nt, Human
gaagucacugcacag

SEQ ID NO: 1728244 - RNA, 21 nt, Human
gaaggugaggagcuugaaacc

SEQ ID NO: 1728245 - RNA, 19 nt, Human
gaaguaauaugcacacauu

SEQ ID NO: 1728246 - RNA, 20 nt, Human
gaaguaauaugcacacauuu

SEQ ID NO: 1728247 - RNA, 13 nt, Human
gaagucacacagu

SEQ ID NO: 1728248 - RNA, 21 nt, Human
gaaguaauaugcacacauuuu

SEQ ID NO: 1728249 - RNA, 14 nt, Human
gaagccgcuggggc

SEQ ID NO: 1728250 - RNA, 21 nt, Human
gaagccgcuggggccaguugg

SEQ ID NO: 1728251 - RNA, 20 nt, Human
gaagccgcuggggccaguug

SEQ ID NO: 1728252 - RNA, 18 nt, Human
gaagccgcuggggccagu

SEQ ID NO: 1728253 - RNA, 20 nt, Human
gaaggaaacccagcucuggu

SEQ ID NO: 1728254 - RNA, 19 nt, Human
gaaggaaacccagcucugg

SEQ ID NO: 1728255 - RNA, 21 nt, Human
gaaggacauugcggacagcca

SEQ ID NO: 1728256 - RNA, 20 nt, Human
gaaggacauugcggacagcc

SEQ ID NO: 1728257 - RNA, 19 nt, Human
gaaggacauugcggacagc

SEQ ID NO: 1728258 - RNA, 22 nt, Human
gaaggaauaaauugcuccuuga

SEQ ID NO: 1728259 - RNA, 22 nt, Human
gaaggacccggaggggccuggc

SEQ ID NO: 1728260 - RNA, 15 nt, Human
gaaggaacguccccu

SEQ ID NO: 1728261 - RNA, 22 nt, Human
gaaggaaacccagcucuggucc

SEQ ID NO: 1728262 - RNA, 21 nt, Human
gaaggaaacccagcucugguc

SEQ ID NO: 1728263 - RNA, 19 nt, Human
gaaggaagacuucaucccu

SEQ ID NO: 1728264 - RNA, 17 nt, Human
gaagauguagaggagaa

SEQ ID NO: 1728265 - RNA, 23 nt, Human
gaagauuuugaaauuuuuauuaa

SEQ ID NO: 1728266 - RNA, 22 nt, Human
gaagauugagauguguucacaa

SEQ ID NO: 1728267 - RNA, 17 nt, Human
gaagauugagauguguu

SEQ ID NO: 1728268 - RNA, 19 nt, Human
gaagacuucaucccucugg

SEQ ID NO: 1728269 - RNA, 17 nt, Human
gaagacuucaucccucu

SEQ ID NO: 1728270 - RNA, 12 nt, Human
gaagagccuugc

SEQ ID NO: 1728271 - RNA, 16 nt, Human
gaagacuucaucccuc

SEQ ID NO: 1728272 - RNA, 15 nt, Human
gaagacuucaucccu

SEQ ID NO: 1728273 - RNA, 22 nt, Human
gaacuuguaaaggaauuuaaaa

SEQ ID NO: 1728274 - RNA, 17 nt, Human
gaacuugggccacugug

SEQ ID NO: 1728275 - RNA, 18 nt, Human
gaacuuggcgcugccccu

SEQ ID NO: 1728276 - RNA, 15 nt, Human
gaacuuguuuucugg

SEQ ID NO: 1728277 - RNA, 12 nt, Human
gaacuugguucc

SEQ ID NO: 1728278 - RNA, 17 nt, Human
gaacuuuccaggaaggc

SEQ ID NO: 1728279 - RNA, 16 nt, Human
gaacuuugaccucugc

SEQ ID NO: 1728280 - RNA, 22 nt, Human
gaacuuugaccucugcagcaau

SEQ ID NO: 1728281 - RNA, 17 nt, Human
gaacuuggcgcugcccc

SEQ ID NO: 1728282 - RNA, 14 nt, Human
gaacuuaaauaaug

SEQ ID NO: 1728283 - RNA, 17 nt, Human
gaacuuaaauaauguga

SEQ ID NO: 1728284 - RNA, 18 nt, Human
gaaccacaucuugcucug

SEQ ID NO: 1728285 - RNA, 20 nt, Human
gaaccacaucuugcucugcu

SEQ ID NO: 1728286 - RNA, 16 nt, Human
gaacucccuuucaaca

SEQ ID NO: 1728287 - RNA, 15 nt, Human
gaacuccuaaaucaa

SEQ ID NO: 1728288 - RNA, 13 nt, Human
gaacuccugaccu

SEQ ID NO: 1728289 - RNA, 16 nt, Human
gaacuccuaaaucaag

SEQ ID NO: 1728290 - RNA, 17 nt, Human
cuugccaaauauaaaua

SEQ ID NO: 1728291 - RNA, 13 nt, Human
cuugcuugcuuuu

SEQ ID NO: 1728292 - RNA, 15 nt, Human
cuugcuuuuaaaauc

SEQ ID NO: 1728293 - RNA, 13 nt, Human
cuuggcugcaggg

SEQ ID NO: 1728294 - RNA, 12 nt, Human
cuuggcugcagg

SEQ ID NO: 1728295 - RNA, 14 nt, Human
cuuggauugucccc

SEQ ID NO: 1728296 - RNA, 13 nt, Human
cuuggauuguccc

SEQ ID NO: 1728297 - RNA, 23 nt, Human
cuuggcucaaguccucuuuucug

SEQ ID NO: 1728298 - RNA, 24 nt, Human
cuuggcucacugcaacuucugccu

SEQ ID NO: 1728299 - RNA, 18 nt, Human
cuuguaaaggaauuuaaa

SEQ ID NO: 1728300 - RNA, 18 nt, Human
cuuguaaaaauuaaaagu

SEQ ID NO: 1728301 - RNA, 19 nt, Human
cuuggggaccagagcugcc

SEQ ID NO: 1728302 - RNA, 18 nt, Human
cuuggggaccagagcugc

SEQ ID NO: 1728303 - RNA, 17 nt, Human
cuuggggaccagagcug

SEQ ID NO: 1728304 - RNA, 14 nt, Human
cuuggcugcaggga

SEQ ID NO: 1728305 - RNA, 18 nt, Human
cuuguauuauguguguuu

SEQ ID NO: 1728306 - RNA, 18 nt, Human
cuuguggacacagcucuu

SEQ ID NO: 1728307 - RNA, 17 nt, Human
cuuguggacacagcucu

SEQ ID NO: 1728308 - RNA, 13 nt, Human
cuuguauuaaguu

SEQ ID NO: 1728309 - RNA, 17 nt, Human
cuuguauuaaguuguua

SEQ ID NO: 1728310 - RNA, 13 nt, Human
cuuguauuaugug

SEQ ID NO: 1728311 - RNA, 22 nt, Human
cuuguauuaaguuguuaauaaa

SEQ ID NO: 1728312 - RNA, 23 nt, Human
cuuguauuaaguuguuaauaaaa

SEQ ID NO: 1728313 - RNA, 21 nt, Human
cuuguaugaaagauggcugug

SEQ ID NO: 1728314 - RNA, 14 nt, Human
cuuguaacuaaaau

SEQ ID NO: 1728315 - RNA, 16 nt, Human
cuuguaacuaaaauaa

SEQ ID NO: 1728316 - RNA, 17 nt, Human
cuuguaacuaaaauaau

SEQ ID NO: 1728317 - RNA, 22 nt, Human
cuuguaacuaaaauaauuuugu

SEQ ID NO: 1728318 - RNA, 18 nt, Human
cuugcagacucuacagag

SEQ ID NO: 1728319 - RNA, 20 nt, Human
cuugcagacucuacagaggc

SEQ ID NO: 1728320 - RNA, 21 nt, Human
cuugcaugguuuagaaagcuu

SEQ ID NO: 1728321 - RNA, 21 nt, Human
cuugcaugaggcuaguguggu

SEQ ID NO: 1728322 - RNA, 14 nt, Human
cuugcaauggcagc

SEQ ID NO: 1728323 - RNA, 19 nt, Human
cuugcacguauuuuaauag

SEQ ID NO: 1728324 - RNA, 22 nt, Human
cuugcaaaguaucccuacugua

SEQ ID NO: 1728325 - RNA, 21 nt, Human
cuugaccauucuccaccugcc

SEQ ID NO: 1728326 - RNA, 14 nt, Human
cuugagagggugga

SEQ ID NO: 1728327 - RNA, 20 nt, Human
cuugaccauucuccaccugc

SEQ ID NO: 1728328 - RNA, 17 nt, Human
cuugaccauucuccacc

SEQ ID NO: 1728329 - RNA, 19 nt, Human
cuugagccuugaacuuuga

SEQ ID NO: 1728330 - RNA, 20 nt, Human
cuugagccuugaacuuugac

SEQ ID NO: 1728331 - RNA, 22 nt, Human
cuugagccuugaacuuugaccu

SEQ ID NO: 1728332 - RNA, 13 nt, Human
cuugagcucagga

SEQ ID NO: 1728333 - RNA, 14 nt, Human
cuugaacccgggag

SEQ ID NO: 1728334 - RNA, 19 nt, Human
cuugaacccgggaggcaga

SEQ ID NO: 1728335 - RNA, 20 nt, Human
cuugaacccgggaggcagag

SEQ ID NO: 1728336 - RNA, 18 nt, Human
cuugaacuccuggccuca

SEQ ID NO: 1728337 - RNA, 17 nt, Human
cuugaacuccuggccuc

SEQ ID NO: 1728338 - RNA, 15 nt, Human
cuugaacuccuggcc

SEQ ID NO: 1728339 - RNA, 14 nt, Human
cuugaacuccuggc

SEQ ID NO: 1728340 - RNA, 20 nt, Human
cuugaacuggguacuugugg

SEQ ID NO: 1728341 - RNA, 18 nt, Human
cuugaacuggguacuugu

SEQ ID NO: 1728342 - RNA, 15 nt, Human
cuugaacuuugaccu

SEQ ID NO: 1728343 - RNA, 16 nt, Human
cuugaacuggguacuu

SEQ ID NO: 1728344 - RNA, 19 nt, Human
cuugaacuccuggccucaa

SEQ ID NO: 1728345 - RNA, 19 nt, Human
cuugaaauauaggaacuua

SEQ ID NO: 1728346 - RNA, 17 nt, Human
cuucuuuuuuugugaug

SEQ ID NO: 1728347 - RNA, 16 nt, Human
cuuuucacugcuggcu

SEQ ID NO: 1728348 - RNA, 14 nt, Human
cuuuucccuucuuu

SEQ ID NO: 1728349 - RNA, 21 nt, Human
cuuuucgcaggauucuuccuc

SEQ ID NO: 1728350 - RNA, 20 nt, Human
cuuuucgcaggauucuuccu

SEQ ID NO: 1728351 - RNA, 23 nt, Human
cuuuuccaacccucaucaccaac

SEQ ID NO: 1728352 - RNA, 13 nt, Human
cuuuuccaacccu

SEQ ID NO: 1728353 - RNA, 22 nt, Human
cuuuucauuuaggugaggaagc

SEQ ID NO: 1728354 - RNA, 12 nt, Human
cuuuucacugcu

SEQ ID NO: 1728355 - RNA, 18 nt, Human
cuuuuaaaacacuuccau

SEQ ID NO: 1728356 - RNA, 22 nt, Human
cuuuuuaauauugauaugcuua

SEQ ID NO: 1728357 - RNA, 13 nt, Human
cuuuucuuuucuu

SEQ ID NO: 1728358 - RNA, 17 nt, Human
cuuuucuuucagccaag

SEQ ID NO: 1728359 - RNA, 16 nt, Human
cuuuuuuauacauaaa

SEQ ID NO: 1728360 - RNA, 17 nt, Human
cuuuuuuauacauaaac

SEQ ID NO: 1728361 - RNA, 15 nt, Human
cuuuuuuauacauaa

SEQ ID NO: 1728362 - RNA, 18 nt, Human
cuuuuuuauacauaaaca

SEQ ID NO: 1728363 - RNA, 19 nt, Human
cuuuuuuaucaugugaaau

SEQ ID NO: 1728364 - RNA, 16 nt, Human
gaaaaagaaaaaauau

SEQ ID NO: 1728365 - RNA, 11 nt, Human
gaaaaagaaaa

SEQ ID NO: 1728366 - RNA, 21 nt, Human
cuuuccgguguuuaagacauu

SEQ ID NO: 1728367 - RNA, 15 nt, Human
cuuuccaggaaggcu

SEQ ID NO: 1728368 - RNA, 21 nt, Human
cuuuccccaugucucgacuca

SEQ ID NO: 1728369 - RNA, 20 nt, Human
cuuuccccaugucucgacuc

SEQ ID NO: 1728370 - RNA, 15 nt, Human
cuuuccccaugucuc

SEQ ID NO: 1728371 - RNA, 14 nt, Human
cuuuccaggaaggc

SEQ ID NO: 1728372 - RNA, 16 nt, Human
cuuuccaaaguacacu

SEQ ID NO: 1728373 - RNA, 16 nt, Human
cuuuccaaaugcccag

SEQ ID NO: 1728374 - RNA, 22 nt, Human
cuuuccaaaguacacuguuuca

SEQ ID NO: 1728375 - RNA, 21 nt, Human
cuuguggacacagcucuucuc

SEQ ID NO: 1728376 - RNA, 20 nt, Human
cuuguguguuuauugucaaa

SEQ ID NO: 1728377 - RNA, 19 nt, Human
cuuuauuuuguguuuagga

SEQ ID NO: 1728378 - RNA, 15 nt, Human
cuuugcagacaggca

SEQ ID NO: 1728379 - RNA, 14 nt, Human
cuuugcagacaggc

SEQ ID NO: 1728380 - RNA, 23 nt, Human
cuuuggaaagaguaggaagacuu

SEQ ID NO: 1728381 - RNA, 19 nt, Human
cuuuggaaagaguaggaag

SEQ ID NO: 1728382 - RNA, 16 nt, Human
cuuugcagacaggcaa

SEQ ID NO: 1728383 - RNA, 21 nt, Human
cuuuccugaggcugggcuccc

SEQ ID NO: 1728384 - RNA, 20 nt, Human
cuuuccugaggcugggcucc

SEQ ID NO: 1728385 - RNA, 16 nt, Human
cuuuccugaggcuggg

SEQ ID NO: 1728386 - RNA, 17 nt, Human
cuuuccugaggcugggc

SEQ ID NO: 1728387 - RNA, 14 nt, Human
cugcaccggcuggc

SEQ ID NO: 1728388 - RNA, 23 nt, Human
cugaggcccuucucuccagcccc

SEQ ID NO: 1728389 - RNA, 22 nt, Human
cugaggcccuucucuccagccc

SEQ ID NO: 1728390 - RNA, 15 nt, Human
cugcaccgggccaca

SEQ ID NO: 1728391 - RNA, 14 nt, Human
cugcaccgggccac

SEQ ID NO: 1728392 - RNA, 16 nt, Human
cugcaccggcuggccu

SEQ ID NO: 1728393 - RNA, 15 nt, Human
cugcaccggcuggcc

SEQ ID NO: 1728394 - RNA, 20 nt, Human
cugcacuccccugcugggug

SEQ ID NO: 1728395 - RNA, 19 nt, Human
cugcacuccccugcugggu

SEQ ID NO: 1728396 - RNA, 13 nt, Human
cugcacuccccug

SEQ ID NO: 1728397 - RNA, 14 nt, Human
cugcacuccccugc

SEQ ID NO: 1728398 - RNA, 20 nt, Human
cugcaccgggccacagagaa

SEQ ID NO: 1728399 - RNA, 18 nt, Human
cugcaccgggccacagag

SEQ ID NO: 1728400 - RNA, 20 nt, Human
cugcacuccagccuggguga

SEQ ID NO: 1728401 - RNA, 21 nt, Human
cugcacuccccugcugggugu

SEQ ID NO: 1728402 - RNA, 13 nt, Human
cugcagagggcac

SEQ ID NO: 1728403 - RNA, 15 nt, Human
cugcagcaauaaagc

SEQ ID NO: 1728404 - RNA, 16 nt, Human
cugcagcaauaaagca

SEQ ID NO: 1728405 - RNA, 10 nt, Human
cugcagaggg

SEQ ID NO: 1728406 - RNA, 17 nt, Human
cugcagcaauaaagcag

SEQ ID NO: 1728407 - RNA, 18 nt, Human
cugcaggucccuaauaaa

SEQ ID NO: 1728408 - RNA, 17 nt, Human
cugcaggucccuaauaa

SEQ ID NO: 1728409 - RNA, 16 nt, Human
cugcaggucccuaaua

SEQ ID NO: 1728410 - RNA, 15 nt, Human
cugcaggucccuaau

SEQ ID NO: 1728411 - RNA, 14 nt, Human
cugcaggucccuaa

SEQ ID NO: 1728412 - RNA, 13 nt, Human
cugcaggucccua

SEQ ID NO: 1728413 - RNA, 12 nt, Human
cugcaggucccu

SEQ ID NO: 1728414 - RNA, 11 nt, Human
cugcagguccc

SEQ ID NO: 1728415 - RNA, 16 nt, Human
cugcaguugccaguca

SEQ ID NO: 1728416 - RNA, 13 nt, Human
cugcaguugccag

SEQ ID NO: 1728417 - RNA, 17 nt, Human
cugcaguugccagucac

SEQ ID NO: 1728418 - RNA, 23 nt, Human
cugcaggucccuaauaaagcugu

SEQ ID NO: 1728419 - RNA, 22 nt, Human
cugcaggucccuaauaaagcug

SEQ ID NO: 1728420 - RNA, 21 nt, Human
cugcaggucccuaauaaagcu

SEQ ID NO: 1728421 - RNA, 20 nt, Human
cugcaggucccuaauaaagc

SEQ ID NO: 1728422 - RNA, 19 nt, Human
cugcaggucccuaauaaag

SEQ ID NO: 1728423 - RNA, 20 nt, Human
cugcaucaagaugugacaug

SEQ ID NO: 1728424 - RNA, 15 nt, Human
cugcauaugaaagga

SEQ ID NO: 1728425 - RNA, 14 nt, Human
cugccacccugggg

SEQ ID NO: 1728426 - RNA, 12 nt, Human
cugccacccugg

SEQ ID NO: 1728427 - RNA, 21 nt, Human
cugccacccuggggagaaagu

SEQ ID NO: 1728428 - RNA, 21 nt, Human
cugccaggaagccagcaggcu

SEQ ID NO: 1728429 - RNA, 20 nt, Human
cugccaggaagccagcaggc

SEQ ID NO: 1728430 - RNA, 14 nt, Human
cugccaggaagcca

SEQ ID NO: 1728431 - RNA, 13 nt, Human
cugccaggaagcc

SEQ ID NO: 1728432 - RNA, 15 nt, Human
cugccauccucccaa

SEQ ID NO: 1728433 - RNA, 21 nt, Human
cugccauccagguucagcuug

SEQ ID NO: 1728434 - RNA, 22 nt, Human
cugccaggaagccagcaggcuc

SEQ ID NO: 1728435 - RNA, 20 nt, Human
cugcccaggccccugccacc

SEQ ID NO: 1728436 - RNA, 19 nt, Human
cugcccaggccccugccac

SEQ ID NO: 1728437 - RNA, 18 nt, Human
cugcccaggccccugcca

SEQ ID NO: 1728438 - RNA, 16 nt, Human
cugcccaggccccugc

SEQ ID NO: 1728439 - RNA, 17 nt, Human
cugcccaggccugccug

SEQ ID NO: 1728440 - RNA, 15 nt, Human
cugcccaggccccug

SEQ ID NO: 1728441 - RNA, 14 nt, Human
cugcccaggccccu

SEQ ID NO: 1728442 - RNA, 12 nt, Human
cugcccaccugg

SEQ ID NO: 1728443 - RNA, 15 nt, Human
cugccauuucugaga

SEQ ID NO: 1728444 - RNA, 20 nt, Human
cugcccggcaggguccuaga

SEQ ID NO: 1728445 - RNA, 13 nt, Human
cugcccggcaggg

SEQ ID NO: 1728446 - RNA, 18 nt, Human
cugccccuggcagccccu

SEQ ID NO: 1728447 - RNA, 19 nt, Human
cugccccuggcagccccug

SEQ ID NO: 1728448 - RNA, 22 nt, Human
cugcccuaaugcgcaggcuggc

SEQ ID NO: 1728449 - RNA, 21 nt, Human
cugcccuaaugcgcaggcugg

SEQ ID NO: 1728450 - RNA, 20 nt, Human
cugcccuaaugcgcaggcug

SEQ ID NO: 1728451 - RNA, 21 nt, Human
cugcuugaggcaacucaucuu

SEQ ID NO: 1728452 - RNA, 20 nt, Human
cugcuugaggcaacucaucu

SEQ ID NO: 1728453 - RNA, 13 nt, Human
cugcuugaggcaa

SEQ ID NO: 1728454 - RNA, 17 nt, Human
cugcuggguguggcgca

SEQ ID NO: 1728455 - RNA, 15 nt, Human
cugcuggguguggcg

SEQ ID NO: 1728456 - RNA, 14 nt, Human
cugcuggguguggc

SEQ ID NO: 1728457 - RNA, 14 nt, Human
cugcugcuggcugg

SEQ ID NO: 1728458 - RNA, 13 nt, Human
cugcuggcugccu

SEQ ID NO: 1728459 - RNA, 15 nt, Human
cugcuggcugccuua

SEQ ID NO: 1728460 - RNA, 14 nt, Human
cugcuggcugccuu

SEQ ID NO: 1728461 - RNA, 13 nt, Human
cugcugcuggcug

SEQ ID NO: 1728462 - RNA, 12 nt, Human
cugcugcuggcu

SEQ ID NO: 1728463 - RNA, 15 nt, Human
cugcuuuuggucugu

SEQ ID NO: 1728464 - RNA, 17 nt, Human
cugcuuugggcugcccu

SEQ ID NO: 1728465 - RNA, 13 nt, Human
cugcuuuggaaau

SEQ ID NO: 1728466 - RNA, 16 nt, Human
cugcuuugggcugccc

SEQ ID NO: 1728467 - RNA, 17 nt, Human
cugcuuuuggucugugu

SEQ ID NO: 1728468 - RNA, 19 nt, Human
cugcuuuugucuaugggac

SEQ ID NO: 1728469 - RNA, 20 nt, Human
cugcuugcuugcuuuuuaau

SEQ ID NO: 1728470 - RNA, 22 nt, Human
cugcuugaggcaacucaucuua

SEQ ID NO: 1728471 - RNA, 18 nt, Human
cugcuugggcuucauccu

SEQ ID NO: 1728472 - RNA, 17 nt, Human
cugcuugggcuucaucc

SEQ ID NO: 1728473 - RNA, 15 nt, Human
cugcuugggcuucau

SEQ ID NO: 1728474 - RNA, 13 nt, Human
cugcuugggcuuc

SEQ ID NO: 1728475 - RNA, 19 nt, Human
cugcuugugaaaggaaaga

SEQ ID NO: 1728476 - RNA, 19 nt, Human
cugcuugggcuucauccuc

SEQ ID NO: 1728477 - RNA, 17 nt, Human
cugcccugcccaccugg

SEQ ID NO: 1728478 - RNA, 20 nt, Human
cugcccugcccaccuggccu

SEQ ID NO: 1728479 - RNA, 21 nt, Human
cugcccugcccaccuggccuc

SEQ ID NO: 1728480 - RNA, 16 nt, Human
cugccugaagucacac

SEQ ID NO: 1728481 - RNA, 18 nt, Human
cugccugaagucacacag

SEQ ID NO: 1728482 - RNA, 19 nt, Human
cugccugaagucacacagu

SEQ ID NO: 1728483 - RNA, 23 nt, Human
cugccugaagucacacagugagu

SEQ ID NO: 1728484 - RNA, 21 nt, Human
cugccugcaguacuuuaccuc

SEQ ID NO: 1728485 - RNA, 20 nt, Human
cugccugcaguacuuuaccu

SEQ ID NO: 1728486 - RNA, 19 nt, Human
cugcggugcuaucuccccc

SEQ ID NO: 1728487 - RNA, 18 nt, Human
cugcggugcuaucucccc

SEQ ID NO: 1728488 - RNA, 23 nt, Human
cugcgguccacccaggagccccg

SEQ ID NO: 1728489 - RNA, 23 nt, Human
cugcgggucacaggagggagggg

SEQ ID NO: 1728490 - RNA, 22 nt, Human
cugcgggucacaggagggaggg

SEQ ID NO: 1728491 - RNA, 21 nt, Human
cugcgggucacaggagggagg

SEQ ID NO: 1728492 - RNA, 15 nt, Human
cugcgggucacagga

SEQ ID NO: 1728493 - RNA, 22 nt, Human
cugccugcuuuuuauggccugu

SEQ ID NO: 1728494 - RNA, 19 nt, Human
cugcucuccgaccagacac

SEQ ID NO: 1728495 - RNA, 15 nt, Human
cugcucuccgaccag

SEQ ID NO: 1728496 - RNA, 20 nt, Human
cugcuccucuccccagcaag

SEQ ID NO: 1728497 - RNA, 19 nt, Human
cugcuccucuccccagcaa

SEQ ID NO: 1728498 - RNA, 23 nt, Human
cugcuccucuccccagcaaguga

SEQ ID NO: 1728499 - RNA, 23 nt, Human
cugcggugcuaucucccccagcc

SEQ ID NO: 1728500 - RNA, 22 nt, Human
cugcggugcuaucucccccagc

SEQ ID NO: 1728501 - RNA, 21 nt, Human
cugcggugcuaucucccccag

SEQ ID NO: 1728502 - RNA, 20 nt, Human
cugcggugcuaucuccccca

SEQ ID NO: 1728503 - RNA, 20 nt, Human
cugcucugaugaagaggagu

SEQ ID NO: 1728504 - RNA, 12 nt, Human
cugcucugguua

SEQ ID NO: 1728505 - RNA, 19 nt, Human
cugcucuugaacuccugac

SEQ ID NO: 1728506 - RNA, 18 nt, Human
cugcucuugaacuccuga

SEQ ID NO: 1728507 - RNA, 16 nt, Human
cugcucuugaacuccu

SEQ ID NO: 1728508 - RNA, 13 nt, Human
cugcugcaguugc

SEQ ID NO: 1728509 - RNA, 10 nt, Human
cugcugcagu

SEQ ID NO: 1728510 - RNA, 14 nt, Human
cugcugcaguugcc

SEQ ID NO: 1728511 - RNA, 15 nt, Human
cugcugcaguugcca

SEQ ID NO: 1728512 - RNA, 23 nt, Human
cugcugccugcuuuuuauggccu

SEQ ID NO: 1728513 - RNA, 14 nt, Human
cugcugccugcuuu

SEQ ID NO: 1728514 - RNA, 18 nt, Human
cuguaucccaugagccuc

SEQ ID NO: 1728515 - RNA, 19 nt, Human
cuguaucccaugagccuca

SEQ ID NO: 1728516 - RNA, 20 nt, Human
cuguaugucucgugguagga

SEQ ID NO: 1728517 - RNA, 22 nt, Human
cuguaccucuugagccuugaac

SEQ ID NO: 1728518 - RNA, 15 nt, Human
cuguaucccaugagc

SEQ ID NO: 1728519 - RNA, 14 nt, Human
cuguaucccaugag

SEQ ID NO: 1728520 - RNA, 22 nt, Human
cugucccagugccgagaaggaa

SEQ ID NO: 1728521 - RNA, 19 nt, Human
cuguccaggcacugcugcc

SEQ ID NO: 1728522 - RNA, 18 nt, Human
cuguccaggcacugcugc

SEQ ID NO: 1728523 - RNA, 22 nt, Human
cuguccaggcacugcugcccag

SEQ ID NO: 1728524 - RNA, 21 nt, Human
cuguccaggcacugcugccca

SEQ ID NO: 1728525 - RNA, 20 nt, Human
cuguccaggcacugcugccc

SEQ ID NO: 1728526 - RNA, 18 nt, Human
cugucucuacuaaaaaua

SEQ ID NO: 1728527 - RNA, 22 nt, Human
cugucucaaaaaaagaaaaaga

SEQ ID NO: 1728528 - RNA, 21 nt, Human
cuguccuacucugugucaggu

SEQ ID NO: 1728529 - RNA, 14 nt, Human
cuguccgagcuuug

SEQ ID NO: 1728530 - RNA, 21 nt, Human
cugucucaagagggcacuggu

SEQ ID NO: 1728531 - RNA, 20 nt, Human
cugucucaagagggcacugg

SEQ ID NO: 1728532 - RNA, 19 nt, Human
cugucucaagagggcacug

SEQ ID NO: 1728533 - RNA, 18 nt, Human
cugucucaagagggcacu

SEQ ID NO: 1728534 - RNA, 20 nt, Human
cuguccuacucugugucagg

SEQ ID NO: 1728535 - RNA, 18 nt, Human
cuguccuacucuguguca

SEQ ID NO: 1728536 - RNA, 17 nt, Human
cuguccuacucuguguc

SEQ ID NO: 1728537 - RNA, 16 nt, Human
cuguccuacucugugu

SEQ ID NO: 1728538 - RNA, 14 nt, Human
cugucccccugaca

SEQ ID NO: 1728539 - RNA, 13 nt, Human
cugucccccugac

SEQ ID NO: 1728540 - RNA, 13 nt, Human
cuggucccacuca

SEQ ID NO: 1728541 - RNA, 14 nt, Human
cuggucccacucag

SEQ ID NO: 1728542 - RNA, 23 nt, Human
cuggucucaaacucuugaccuca

SEQ ID NO: 1728543 - RNA, 23 nt, Human
cuggucacaggacucugccuccu

SEQ ID NO: 1728544 - RNA, 22 nt, Human
cuggucacaggacucugccucc

SEQ ID NO: 1728545 - RNA, 21 nt, Human
cuggucacaggacucugccuc

SEQ ID NO: 1728546 - RNA, 20 nt, Human
cuggucacaggacucugccu

SEQ ID NO: 1728547 - RNA, 19 nt, Human
cuggucacaggacucugcc

SEQ ID NO: 1728548 - RNA, 16 nt, Human
cuggguacuuguggac

SEQ ID NO: 1728549 - RNA, 18 nt, Human
cuggguacuuguggacac

SEQ ID NO: 1728550 - RNA, 19 nt, Human
cuggguacuuguggacaca

SEQ ID NO: 1728551 - RNA, 22 nt, Human
cugggcucccuucccaccucuc

SEQ ID NO: 1728552 - RNA, 21 nt, Human
cugggcucccuucccaccucu

SEQ ID NO: 1728553 - RNA, 20 nt, Human
cugggcucccuucccaccuc

SEQ ID NO: 1728554 - RNA, 15 nt, Human
cuggguuggagggug

SEQ ID NO: 1728555 - RNA, 22 nt, Human
cugggucgcccuggacugugug

SEQ ID NO: 1728556 - RNA, 18 nt, Human
cugggucgcccuggacug

SEQ ID NO: 1728557 - RNA, 17 nt, Human
cugggucgcccuggacu

SEQ ID NO: 1728558 - RNA, 21 nt, Human
cuguaccucuugagccuugaa

SEQ ID NO: 1728559 - RNA, 22 nt, Human
cuguacaugaaaacacauuuuu

SEQ ID NO: 1728560 - RNA, 23 nt, Human
cuguacaugaaaacacauuuuuc

SEQ ID NO: 1728561 - RNA, 23 nt, Human
cuguacagagcccacgcccccac

SEQ ID NO: 1728562 - RNA, 21 nt, Human
cuguaauuugugauacaaugc

SEQ ID NO: 1728563 - RNA, 22 nt, Human
cuguaauuugugauacaaugcu

SEQ ID NO: 1728564 - RNA, 18 nt, Human
cuguaauuugugauacaa

SEQ ID NO: 1728565 - RNA, 17 nt, Human
cuguaauuugugauaca

SEQ ID NO: 1728566 - RNA, 14 nt, Human
cugguggcagcuca

SEQ ID NO: 1728567 - RNA, 13 nt, Human
cugguggcagcuc

SEQ ID NO: 1728568 - RNA, 16 nt, Human
cugguggcagcucacc

SEQ ID NO: 1728569 - RNA, 12 nt, Human
cugguggcagcu

SEQ ID NO: 1728570 - RNA, 16 nt, Human
cuggucucgaacuccu

SEQ ID NO: 1728571 - RNA, 20 nt, Human
cugguucaggguuggccccu

SEQ ID NO: 1728572 - RNA, 23 nt, Human
cugguuaauauuuauaggucacu

SEQ ID NO: 1728573 - RNA, 16 nt, Human
cugguuccauggccuc

SEQ ID NO: 1728574 - RNA, 18 nt, Human
cuguaaggcaaucauggu

SEQ ID NO: 1728575 - RNA, 20 nt, Human
cuggcugguuagagguuccc

SEQ ID NO: 1728576 - RNA, 17 nt, Human
cuggcuguuggcugggg

SEQ ID NO: 1728577 - RNA, 16 nt, Human
cuggcuguuggcuggg

SEQ ID NO: 1728578 - RNA, 20 nt, Human
cugggagagccuuccagggg

SEQ ID NO: 1728579 - RNA, 19 nt, Human
cugggagagccuuccaggg

SEQ ID NO: 1728580 - RNA, 21 nt, Human
cugggagagccuuccaggggu

SEQ ID NO: 1728581 - RNA, 18 nt, Human
cugggagagccuuccagg

SEQ ID NO: 1728582 - RNA, 17 nt, Human
cugggagagccuuccag

SEQ ID NO: 1728583 - RNA, 18 nt, Human
cuggcuguuggcuggggg

SEQ ID NO: 1728584 - RNA, 23 nt, Human
cuggcuuuucacugcuggcugcc

SEQ ID NO: 1728585 - RNA, 17 nt, Human
cugggauuacaggugug

SEQ ID NO: 1728586 - RNA, 20 nt, Human
cugggauuacaggugugaac

SEQ ID NO: 1728587 - RNA, 18 nt, Human
cugggauuacagguguga

SEQ ID NO: 1728588 - RNA, 16 nt, Human
cugggauuacaggugu

SEQ ID NO: 1728589 - RNA, 18 nt, Human
cugggaugauuggagggg

SEQ ID NO: 1728590 - RNA, 20 nt, Human
cugggaucacauguggacuu

SEQ ID NO: 1728591 - RNA, 20 nt, Human
cugggaucccucauccucau

SEQ ID NO: 1728592 - RNA, 12 nt, Human
cugggagugagc

SEQ ID NO: 1728593 - RNA, 19 nt, Human
cugggccccaguuguauuu

SEQ ID NO: 1728594 - RNA, 15 nt, Human
cugggccccaguugu

SEQ ID NO: 1728595 - RNA, 21 nt, Human
cugggaggucaaggcugcagu

SEQ ID NO: 1728596 - RNA, 19 nt, Human
cugggaggucaaggcugca

SEQ ID NO: 1728597 - RNA, 22 nt, Human
cugggaggcucuggagcccacu

SEQ ID NO: 1728598 - RNA, 17 nt, Human
cugggaggcucuggagc

SEQ ID NO: 1728599 - RNA, 21 nt, Human
cugggaggcucuggagcccac

SEQ ID NO: 1728600 - RNA, 20 nt, Human
cugggaggcucuggagccca

SEQ ID NO: 1728601 - RNA, 18 nt, Human
cugggaggcucuggagcc

SEQ ID NO: 1728602 - RNA, 16 nt, Human
cuggccuucggccucc

SEQ ID NO: 1728603 - RNA, 17 nt, Human
cuggccuucggccucca

SEQ ID NO: 1728604 - RNA, 18 nt, Human
cuggccuucggccuccau

SEQ ID NO: 1728605 - RNA, 21 nt, Human
cuggccuucggccuccauccu

SEQ ID NO: 1728606 - RNA, 15 nt, Human
cuggccuucggccuc

SEQ ID NO: 1728607 - RNA, 19 nt, Human
cuggccuggccccucaggg

SEQ ID NO: 1728608 - RNA, 17 nt, Human
cuggccuggccccucag

SEQ ID NO: 1728609 - RNA, 16 nt, Human
cuggccuggccccuca

SEQ ID NO: 1728610 - RNA, 16 nt, Human
cuggccugagcuggga

SEQ ID NO: 1728611 - RNA, 16 nt, Human
cuggccucugcacucc

SEQ ID NO: 1728612 - RNA, 14 nt, Human
cuggccucugcacu

SEQ ID NO: 1728613 - RNA, 13 nt, Human
cuggccucugcac

SEQ ID NO: 1728614 - RNA, 18 nt, Human
cuggccugagcugggaug

SEQ ID NO: 1728615 - RNA, 14 nt, Human
cuggccuggccccu

SEQ ID NO: 1728616 - RNA, 23 nt, Human
cuggccucaagugauucuccugc

SEQ ID NO: 1728617 - RNA, 12 nt, Human
cuggccucugca

SEQ ID NO: 1728618 - RNA, 22 nt, Human
cuggcaugggaaugaaugucag

SEQ ID NO: 1728619 - RNA, 19 nt, Human
cuggcaugggaaugaaugu

SEQ ID NO: 1728620 - RNA, 18 nt, Human
cuggcaugggaaugaaug

SEQ ID NO: 1728621 - RNA, 16 nt, Human
cuggcaugggaaugaa

SEQ ID NO: 1728622 - RNA, 22 nt, Human
cuggcacuauaauguaagcucu

SEQ ID NO: 1728623 - RNA, 16 nt, Human
cuggcacuauaaugua

SEQ ID NO: 1728624 - RNA, 15 nt, Human
cuggcacuauaaugu

SEQ ID NO: 1728625 - RNA, 24 nt, Human
cuggcaugggaaugaaugucagug

SEQ ID NO: 1728626 - RNA, 19 nt, Human
cuggcacccggccccugcu

SEQ ID NO: 1728627 - RNA, 18 nt, Human
cuggcacccggccccugc

SEQ ID NO: 1728628 - RNA, 17 nt, Human
cuggcacccggccccug

SEQ ID NO: 1728629 - RNA, 16 nt, Human
cuggcacccggccccu

SEQ ID NO: 1728630 - RNA, 16 nt, Human
cuggcacagggcagug

SEQ ID NO: 1728631 - RNA, 15 nt, Human
cuggcacagggcagu

SEQ ID NO: 1728632 - RNA, 14 nt, Human
cuggcaagaaugug

SEQ ID NO: 1728633 - RNA, 18 nt, Human
cuggaauauauaaccagu

SEQ ID NO: 1728634 - RNA, 20 nt, Human
cuggaagugcuaauuuugaa

SEQ ID NO: 1728635 - RNA, 22 nt, Human
cucuugaaauauaggaacuuaa

SEQ ID NO: 1728636 - RNA, 19 nt, Human
cucuuggguucaagcgauu

SEQ ID NO: 1728637 - RNA, 15 nt, Human
cucuugaacuccuga

SEQ ID NO: 1728638 - RNA, 21 nt, Human
cucuuggguucaagcgauucu

SEQ ID NO: 1728639 - RNA, 19 nt, Human
cucuuggguucaagugauu

SEQ ID NO: 1728640 - RNA, 23 nt, Human
cucuuuaaugucacaggcagguc

SEQ ID NO: 1728641 - RNA, 22 nt, Human
cucuuuaaugucacaggcaggu

SEQ ID NO: 1728642 - RNA, 21 nt, Human
cucuuuaaugucacaggcagg

SEQ ID NO: 1728643 - RNA, 20 nt, Human
cucuuuaaugucacaggcag

SEQ ID NO: 1728644 - RNA, 17 nt, Human
cucuuucccucccuucc

SEQ ID NO: 1728645 - RNA, 17 nt, Human
cucuugguccugcugca

SEQ ID NO: 1728646 - RNA, 16 nt, Human
cucuugguccugcugc

SEQ ID NO: 1728647 - RNA, 15 nt, Human
cucuugguccugcug

SEQ ID NO: 1728648 - RNA, 13 nt, Human
cucuugguccugc

SEQ ID NO: 1728649 - RNA, 18 nt, Human
cucuuuaaugucacaggc

SEQ ID NO: 1728650 - RNA, 19 nt, Human
cugaagaauugaaaaacca

SEQ ID NO: 1728651 - RNA, 17 nt, Human
cugaacucugacaacag

SEQ ID NO: 1728652 - RNA, 16 nt, Human
cugaacucugacaaca

SEQ ID NO: 1728653 - RNA, 15 nt, Human
cugaaagcccugagc

SEQ ID NO: 1728654 - RNA, 17 nt, Human
cucuuucuauuguuucu

SEQ ID NO: 1728655 - RNA, 19 nt, Human
cugaaagcccugagcuuuc

SEQ ID NO: 1728656 - RNA, 18 nt, Human
cugaaagcccugagcuuu

SEQ ID NO: 1728657 - RNA, 17 nt, Human
cugaaagcccugagcuu

SEQ ID NO: 1728658 - RNA, 16 nt, Human
cugaaagcccugagcu

SEQ ID NO: 1728659 - RNA, 23 nt, Human
cugaaagcccugagcuuucugcu

SEQ ID NO: 1728660 - RNA, 22 nt, Human
cugaaauagacccacaagaggc

SEQ ID NO: 1728661 - RNA, 22 nt, Human
cucuggcuccagcuggccggga

SEQ ID NO: 1728662 - RNA, 15 nt, Human
cucuuccaggcuggg

SEQ ID NO: 1728663 - RNA, 14 nt, Human
cucuuccaggcugg

SEQ ID NO: 1728664 - RNA, 13 nt, Human
cucuuccaggcug

SEQ ID NO: 1728665 - RNA, 15 nt, Human
cucuuagaaaaacca

SEQ ID NO: 1728666 - RNA, 13 nt, Human
cucuuagaaaaac

SEQ ID NO: 1728667 - RNA, 15 nt, Human
cucugugucaggugg

SEQ ID NO: 1728668 - RNA, 19 nt, Human
cucugugucagguggggca

SEQ ID NO: 1728669 - RNA, 22 nt, Human
cucuguuacacuuuuuggaagu

SEQ ID NO: 1728670 - RNA, 12 nt, Human
cucuggccuucg

SEQ ID NO: 1728671 - RNA, 16 nt, Human
cucuggcagcucagag

SEQ ID NO: 1728672 - RNA, 15 nt, Human
cucuggcagcucaga

SEQ ID NO: 1728673 - RNA, 19 nt, Human
cucuggccuucggccucca

SEQ ID NO: 1728674 - RNA, 16 nt, Human
cucuggcuccagcugg

SEQ ID NO: 1728675 - RNA, 15 nt, Human
cucuggcuccagcug

SEQ ID NO: 1728676 - RNA, 14 nt, Human
cucuggcagcucag

SEQ ID NO: 1728677 - RNA, 12 nt, Human
cucuggcagcuc

SEQ ID NO: 1728678 - RNA, 22 nt, Human
cucuggacaggcauguucucug

SEQ ID NO: 1728679 - RNA, 16 nt, Human
cucuggacaggcaugu

SEQ ID NO: 1728680 - RNA, 19 nt, Human
cucuggagcccacuguacu

SEQ ID NO: 1728681 - RNA, 15 nt, Human
cucuggacaggcaug

SEQ ID NO: 1728682 - RNA, 22 nt, Human
cucugccugaagucacacagug

SEQ ID NO: 1728683 - RNA, 21 nt, Human
cucugccugaagucacacagu

SEQ ID NO: 1728684 - RNA, 13 nt, Human
cucucuccucccu

SEQ ID NO: 1728685 - RNA, 16 nt, Human
cugagcgacagugaga

SEQ ID NO: 1728686 - RNA, 20 nt, Human
cugagcgacagugagacucu

SEQ ID NO: 1728687 - RNA, 22 nt, Human
cugagccucagucucccucccu

SEQ ID NO: 1728688 - RNA, 21 nt, Human
cugagccagauuucacucucc

SEQ ID NO: 1728689 - RNA, 20 nt, Human
cugagccagauuucacucuc

SEQ ID NO: 1728690 - RNA, 19 nt, Human
cugagccagauuucacucu

SEQ ID NO: 1728691 - RNA, 18 nt, Human
cugagccagauuucacuc

SEQ ID NO: 1728692 - RNA, 17 nt, Human
cugagccagauuucacu

SEQ ID NO: 1728693 - RNA, 18 nt, Human
cugagacagcccgggcuc

SEQ ID NO: 1728694 - RNA, 17 nt, Human
cugagacagcccgggcu

SEQ ID NO: 1728695 - RNA, 16 nt, Human
cugagacagcccgggc

SEQ ID NO: 1728696 - RNA, 21 nt, Human
cugagccucagucucccuccc

SEQ ID NO: 1728697 - RNA, 16 nt, Human
cugagccucagucucc

SEQ ID NO: 1728698 - RNA, 20 nt, Human
cugaggcccuucucuccagc

SEQ ID NO: 1728699 - RNA, 19 nt, Human
cugaggcccuucucuccag

SEQ ID NO: 1728700 - RNA, 18 nt, Human
cugaggcccuucucucca

SEQ ID NO: 1728701 - RNA, 15 nt, Human
cugaggcccuucucu

SEQ ID NO: 1728702 - RNA, 14 nt, Human
cugaggcccuucuc

SEQ ID NO: 1728703 - RNA, 23 nt, Human
cugaggcccagagggccugcaag

SEQ ID NO: 1728704 - RNA, 21 nt, Human
cugaggcccagagggccugca

SEQ ID NO: 1728705 - RNA, 19 nt, Human
cugaggcccagagggccug

SEQ ID NO: 1728706 - RNA, 18 nt, Human
cugaggcccagagggccu

SEQ ID NO: 1728707 - RNA, 17 nt, Human
cugaggcccagagggcc

SEQ ID NO: 1728708 - RNA, 16 nt, Human
cugaggcccagagggc

SEQ ID NO: 1728709 - RNA, 15 nt, Human
cugaggcccagaggg

SEQ ID NO: 1728710 - RNA, 14 nt, Human
cugaggcccagagg

SEQ ID NO: 1728711 - RNA, 13 nt, Human
cugaggcccagag

SEQ ID NO: 1728712 - RNA, 12 nt, Human
cugaggcccaga

SEQ ID NO: 1728713 - RNA, 19 nt, Human
cugaggaucagaguaaucc

SEQ ID NO: 1728714 - RNA, 17 nt, Human
cugaggaucagaguaau

SEQ ID NO: 1728715 - RNA, 19 nt, Human
cugaagacucauucuucug

SEQ ID NO: 1728716 - RNA, 22 nt, Human
cugacauuguuggccaaagcca

SEQ ID NO: 1728717 - RNA, 15 nt, Human
cugaccaauauugua

SEQ ID NO: 1728718 - RNA, 18 nt, Human
cugaccaauauuguacag

SEQ ID NO: 1728719 - RNA, 19 nt, Human
cugaccaauauuguacagu

SEQ ID NO: 1728720 - RNA, 20 nt, Human
cugaccaauauuguacaguu

SEQ ID NO: 1728721 - RNA, 21 nt, Human
cugaccaauauuguacaguuu

SEQ ID NO: 1728722 - RNA, 14 nt, Human
cugacccacugcuu

SEQ ID NO: 1728723 - RNA, 13 nt, Human
cugacccacugcu

SEQ ID NO: 1728724 - RNA, 13 nt, Human
cugacccaugcug

SEQ ID NO: 1728725 - RNA, 15 nt, Human
cugacccaugcugcc

SEQ ID NO: 1728726 - RNA, 14 nt, Human
cugacccaugcugc

SEQ ID NO: 1728727 - RNA, 16 nt, Human
cugacccaugcugccc

SEQ ID NO: 1728728 - RNA, 16 nt, Human
cugacuguuuucucuu

SEQ ID NO: 1728729 - RNA, 18 nt, Human
cugacuguuuucucuuga

SEQ ID NO: 1728730 - RNA, 14 nt, Human
cugagaaauuuaua

SEQ ID NO: 1728731 - RNA, 11 nt, Human
cugagaaauuu

SEQ ID NO: 1728732 - RNA, 15 nt, Human
cugagacagcccggg

SEQ ID NO: 1728733 - RNA, 14 nt, Human
cugagacagcccgg

SEQ ID NO: 1728734 - RNA, 20 nt, Human
cucccggcuaugggggcacu

SEQ ID NO: 1728735 - RNA, 18 nt, Human
cucccgaguagcugggac

SEQ ID NO: 1728736 - RNA, 19 nt, Human
cucccgaauagcugggacu

SEQ ID NO: 1728737 - RNA, 17 nt, Human
cucccgaguagcuggga

SEQ ID NO: 1728738 - RNA, 16 nt, Human
cucccgaguagcuggg

SEQ ID NO: 1728739 - RNA, 18 nt, Human
cucccgaauagcugggac

SEQ ID NO: 1728740 - RNA, 15 nt, Human
cucccgaguagcugg

SEQ ID NO: 1728741 - RNA, 16 nt, Human
cucccgaauagcuggg

SEQ ID NO: 1728742 - RNA, 17 nt, Human
cucccgaauagcuggga

SEQ ID NO: 1728743 - RNA, 14 nt, Human
cuccccugcugggu

SEQ ID NO: 1728744 - RNA, 13 nt, Human
cuccccugcuggg

SEQ ID NO: 1728745 - RNA, 12 nt, Human
cuccccugcugg

SEQ ID NO: 1728746 - RNA, 21 nt, Human
cuccccagcaagugagagcug

SEQ ID NO: 1728747 - RNA, 20 nt, Human
cuccccagcaagugagagcu

SEQ ID NO: 1728748 - RNA, 12 nt, Human
cuccccagcaag

SEQ ID NO: 1728749 - RNA, 11 nt, Human
cuccauccuga

SEQ ID NO: 1728750 - RNA, 16 nt, Human
cuccauccugaggcuc

SEQ ID NO: 1728751 - RNA, 18 nt, Human
cuccauccugaggcucca

SEQ ID NO: 1728752 - RNA, 20 nt, Human
cuccauccugaggcuccacu

SEQ ID NO: 1728753 - RNA, 14 nt, Human
cuccaucuccacuc

SEQ ID NO: 1728754 - RNA, 18 nt, Human
cucacuauguugcccagg

SEQ ID NO: 1728755 - RNA, 13 nt, Human
cuccaugugggcu

SEQ ID NO: 1728756 - RNA, 17 nt, Human
cucccaaagugcuggga

SEQ ID NO: 1728757 - RNA, 22 nt, Human
cuccaugucucugagcauuaga

SEQ ID NO: 1728758 - RNA, 13 nt, Human
cuccaugucucug

SEQ ID NO: 1728759 - RNA, 16 nt, Human
cuccaucuccacucca

SEQ ID NO: 1728760 - RNA, 23 nt, Human
cucccaucugugaaaggaaagag

SEQ ID NO: 1728761 - RNA, 18 nt, Human
cucccaucugugaaagga

SEQ ID NO: 1728762 - RNA, 15 nt, Human
cucccaucugugaaa

SEQ ID NO: 1728763 - RNA, 14 nt, Human
cucccaucugugaa

SEQ ID NO: 1728764 - RNA, 11 nt, Human
cucccaucugu

SEQ ID NO: 1728765 - RNA, 17 nt, Human
cucccaacucaccccag

SEQ ID NO: 1728766 - RNA, 18 nt, Human
cucccaaagugcugggau

SEQ ID NO: 1728767 - RNA, 22 nt, Human
cucccaaagugcugggauuaca

SEQ ID NO: 1728768 - RNA, 22 nt, Human
cucccaacucaccccagcccca

SEQ ID NO: 1728769 - RNA, 13 nt, Human
cucccucauucca

SEQ ID NO: 1728770 - RNA, 15 nt, Human
cuccgaccagacacc

SEQ ID NO: 1728771 - RNA, 15 nt, Human
cuccgccucccgggu

SEQ ID NO: 1728772 - RNA, 22 nt, Human
cuccucuccccagcaagugaga

SEQ ID NO: 1728773 - RNA, 14 nt, Human
cuccucccggugcc

SEQ ID NO: 1728774 - RNA, 17 nt, Human
cuccucccggugcccaa

SEQ ID NO: 1728775 - RNA, 15 nt, Human
cuccucccggugccc

SEQ ID NO: 1728776 - RNA, 11 nt, Human
cuccugcccuu

SEQ ID NO: 1728777 - RNA, 14 nt, Human
cuccugccucagcc

SEQ ID NO: 1728778 - RNA, 13 nt, Human
cuccugccucagc

SEQ ID NO: 1728779 - RNA, 20 nt, Human
cuccugcaggcagccaggcc

SEQ ID NO: 1728780 - RNA, 18 nt, Human
cuccugcaggcagccagg

SEQ ID NO: 1728781 - RNA, 17 nt, Human
cuccugcaggcagccag

SEQ ID NO: 1728782 - RNA, 12 nt, Human
cuccugcaggca

SEQ ID NO: 1728783 - RNA, 11 nt, Human
cuccugcaggc

SEQ ID NO: 1728784 - RNA, 19 nt, Human
cuccugugugugcgccuac

SEQ ID NO: 1728785 - RNA, 16 nt, Human
cuccugugugugcgcc

SEQ ID NO: 1728786 - RNA, 15 nt, Human
cuccugccucagccu

SEQ ID NO: 1728787 - RNA, 16 nt, Human
cuccugccucagccuc

SEQ ID NO: 1728788 - RNA, 23 nt, Human
cucuagggaaaaaccagcgugug

SEQ ID NO: 1728789 - RNA, 13 nt, Human
cucuacccuggca

SEQ ID NO: 1728790 - RNA, 20 nt, Human
cucuaccauccccuguagag

SEQ ID NO: 1728791 - RNA, 16 nt, Human
cucuacuuagcauguc

SEQ ID NO: 1728792 - RNA, 20 nt, Human
cucuacuuagcaugucccua

SEQ ID NO: 1728793 - RNA, 19 nt, Human
cucuacuuagcaugucccu

SEQ ID NO: 1728794 - RNA, 17 nt, Human
cucuacuuagcaugucc

SEQ ID NO: 1728795 - RNA, 17 nt, Human
cuccuucacagaugggu

SEQ ID NO: 1728796 - RNA, 16 nt, Human
cuccuucacagauggg

SEQ ID NO: 1728797 - RNA, 20 nt, Human
cuccugugugugcgccuaca

SEQ ID NO: 1728798 - RNA, 19 nt, Human
cuccuucacagaugggugc

SEQ ID NO: 1728799 - RNA, 13 nt, Human
cuccuucaccuuu

SEQ ID NO: 1728800 - RNA, 18 nt, Human
cucggcucacugcauccu

SEQ ID NO: 1728801 - RNA, 17 nt, Human
cucggcucacugcaucc

SEQ ID NO: 1728802 - RNA, 14 nt, Human
cucggcucacugca

SEQ ID NO: 1728803 - RNA, 16 nt, Human
cucuacagaggccaug

SEQ ID NO: 1728804 - RNA, 14 nt, Human
cucuacagaggcca

SEQ ID NO: 1728805 - RNA, 19 nt, Human
cucuacagaggccaugggc

SEQ ID NO: 1728806 - RNA, 21 nt, Human
cucuacagcuaaucagcauuc

SEQ ID NO: 1728807 - RNA, 13 nt, Human
cucuacagaggcc

SEQ ID NO: 1728808 - RNA, 13 nt, Human
cucuacaaaaagc

SEQ ID NO: 1728809 - RNA, 22 nt, Human
cucuccucuugccacugccucu

SEQ ID NO: 1728810 - RNA, 19 nt, Human
cucuccucuugccacugcc

SEQ ID NO: 1728811 - RNA, 17 nt, Human
cucuccucuugccacug

SEQ ID NO: 1728812 - RNA, 16 nt, Human
cucuccucuugccacu

SEQ ID NO: 1728813 - RNA, 15 nt, Human
cucuccucuugccac

SEQ ID NO: 1728814 - RNA, 14 nt, Human
cucuccucuugcca

SEQ ID NO: 1728815 - RNA, 18 nt, Human
cucuccucugcugcuggc

SEQ ID NO: 1728816 - RNA, 15 nt, Human
cucuccucugcugcu

SEQ ID NO: 1728817 - RNA, 14 nt, Human
cucuccucugcugc

SEQ ID NO: 1728818 - RNA, 13 nt, Human
cucuccucugcug

SEQ ID NO: 1728819 - RNA, 24 nt, Human
cucuccccagcaagugagagcugg

SEQ ID NO: 1728820 - RNA, 12 nt, Human
cucuccucugcu

SEQ ID NO: 1728821 - RNA, 22 nt, Human
cucuccccagcaagugagagcu

SEQ ID NO: 1728822 - RNA, 14 nt, Human
cucuccccagcaag

SEQ ID NO: 1728823 - RNA, 19 nt, Human
cucuccagccccuggaugc

SEQ ID NO: 1728824 - RNA, 15 nt, Human
cucuccacugccuuc

SEQ ID NO: 1728825 - RNA, 12 nt, Human
cucucucacucc

SEQ ID NO: 1728826 - RNA, 14 nt, Human
cucucucacuccuu

SEQ ID NO: 1728827 - RNA, 21 nt, Human
cucuaguuugauuaaauucuu

SEQ ID NO: 1728828 - RNA, 19 nt, Human
cucuaguuugauuaaauuc

SEQ ID NO: 1728829 - RNA, 20 nt, Human
cucuaguuugauuaaauucu

SEQ ID NO: 1728830 - RNA, 15 nt, Human
cucuaguuugauuaa

SEQ ID NO: 1728831 - RNA, 15 nt, Human
cucucaggccagcug

SEQ ID NO: 1728832 - RNA, 13 nt, Human
cucucaggccagc

SEQ ID NO: 1728833 - RNA, 23 nt, Human
cucucaggccaaacucaccugcc

SEQ ID NO: 1728834 - RNA, 22 nt, Human
cucucaggccaaacucaccugc

SEQ ID NO: 1728835 - RNA, 21 nt, Human
cucucaggccaaacucaccug

SEQ ID NO: 1728836 - RNA, 20 nt, Human
cucucaggccaaacucaccu

SEQ ID NO: 1728837 - RNA, 12 nt, Human
cucucaggccaa

SEQ ID NO: 1728838 - RNA, 18 nt, Human
cucuccagccccuggaug

SEQ ID NO: 1728839 - RNA, 17 nt, Human
cucuccagccccuggau

SEQ ID NO: 1728840 - RNA, 16 nt, Human
cucuccagccccugga

SEQ ID NO: 1728841 - RNA, 15 nt, Human
cucuccagccccugg

SEQ ID NO: 1728842 - RNA, 14 nt, Human
cucuccagccccug

SEQ ID NO: 1728843 - RNA, 14 nt, Human
cucuccacugccuu

SEQ ID NO: 1728844 - RNA, 12 nt, Human
cucuccacugcc

SEQ ID NO: 1728845 - RNA, 11 nt, Human
cucuccacugc

SEQ ID NO: 1728846 - RNA, 21 nt, Human
cucucaggccagcugcuuggg

SEQ ID NO: 1728847 - RNA, 19 nt, Human
cucucaggccagcugcuug

SEQ ID NO: 1728848 - RNA, 18 nt, Human
cucucaggccagcugcuu

SEQ ID NO: 1728849 - RNA, 17 nt, Human
cucucaggccagcugcu

SEQ ID NO: 1728850 - RNA, 22 nt, Human
cucucaggccagcugcuugggc

SEQ ID NO: 1728851 - RNA, 17 nt, Human
cggugagcuacaaaugc

SEQ ID NO: 1728852 - RNA, 21 nt, Human
cggugagaggggaacagacug

SEQ ID NO: 1728853 - RNA, 20 nt, Human
cggugagaggggaacagacu

SEQ ID NO: 1728854 - RNA, 20 nt, Human
cgguccacccaggagccccg

SEQ ID NO: 1728855 - RNA, 16 nt, Human
cgguccacccaggagc

SEQ ID NO: 1728856 - RNA, 15 nt, Human
cgguccacccaggag

SEQ ID NO: 1728857 - RNA, 14 nt, Human
cgguccacccagga

SEQ ID NO: 1728858 - RNA, 11 nt, Human
cgggucacagg

SEQ ID NO: 1728859 - RNA, 19 nt, Human
cgggucacaggagggaggg

SEQ ID NO: 1728860 - RNA, 22 nt, Human
cgggcacucagaagacacugau

SEQ ID NO: 1728861 - RNA, 14 nt, Human
cgggcacucagaag

SEQ ID NO: 1728862 - RNA, 22 nt, Human
cggggacagcuccuucuguccu

SEQ ID NO: 1728863 - RNA, 20 nt, Human
cgggaggucgaggcaggagg

SEQ ID NO: 1728864 - RNA, 18 nt, Human
cgggaggucgaggcagga

SEQ ID NO: 1728865 - RNA, 17 nt, Human
cgggauuaguacacacu

SEQ ID NO: 1728866 - RNA, 22 nt, Human
cggcuggccuggccccucaggg

SEQ ID NO: 1728867 - RNA, 23 nt, Human
cggcuggccuggccccucagggu

SEQ ID NO: 1728868 - RNA, 15 nt, Human
cgggggcagagaggg

SEQ ID NO: 1728869 - RNA, 16 nt, Human
cgggguggauuggauu

SEQ ID NO: 1728870 - RNA, 23 nt, Human
cggggacagcuccuucuguccua

SEQ ID NO: 1728871 - RNA, 12 nt, Human
cggccuccaucc

SEQ ID NO: 1728872 - RNA, 14 nt, Human
cggccuccauccug

SEQ ID NO: 1728873 - RNA, 12 nt, Human
cggcugcccuuu

SEQ ID NO: 1728874 - RNA, 11 nt, Human
cggcugcccuu

SEQ ID NO: 1728875 - RNA, 24 nt, Human
cggccaggccagagggagugacag

SEQ ID NO: 1728876 - RNA, 19 nt, Human
cggccccugcugguucagg

SEQ ID NO: 1728877 - RNA, 18 nt, Human
cggccccugcugguucag

SEQ ID NO: 1728878 - RNA, 13 nt, Human
cggccccugcugg

SEQ ID NO: 1728879 - RNA, 17 nt, Human
cggccaccugcggugcu

SEQ ID NO: 1728880 - RNA, 16 nt, Human
cggccaccugcggugc

SEQ ID NO: 1728881 - RNA, 15 nt, Human
cggccaccugcggug

SEQ ID NO: 1728882 - RNA, 11 nt, Human
cggccaccugc

SEQ ID NO: 1728883 - RNA, 13 nt, Human
cggcauuuguuuc

SEQ ID NO: 1728884 - RNA, 14 nt, Human
cggaauaguuggcu

SEQ ID NO: 1728885 - RNA, 13 nt, Human
cggaagagccuug

SEQ ID NO: 1728886 - RNA, 14 nt, Human
cgcucucuggccuu

SEQ ID NO: 1728887 - RNA, 15 nt, Human
cgcucucuggccuuc

SEQ ID NO: 1728888 - RNA, 17 nt, Human
cgcuacccgggaagggg

SEQ ID NO: 1728889 - RNA, 12 nt, Human
cgcucagcccuc

SEQ ID NO: 1728890 - RNA, 21 nt, Human
cgcucagcccucccugccccu

SEQ ID NO: 1728891 - RNA, 16 nt, Human
cgcucagcccucccug

SEQ ID NO: 1728892 - RNA, 16 nt, Human
cgcuacccgggaaggg

SEQ ID NO: 1728893 - RNA, 22 nt, Human
cgcuaagagggagggagggcuc

SEQ ID NO: 1728894 - RNA, 18 nt, Human
cgcucucuggccuucggc

SEQ ID NO: 1728895 - RNA, 22 nt, Human
cgcugucagccauuccuguucc

SEQ ID NO: 1728896 - RNA, 17 nt, Human
cgcugugcugcccugcc

SEQ ID NO: 1728897 - RNA, 16 nt, Human
cgcugugcugcccugc

SEQ ID NO: 1728898 - RNA, 15 nt, Human
cgcugugcugcccug

SEQ ID NO: 1728899 - RNA, 15 nt, Human
cggaaaacaugcuac

SEQ ID NO: 1728900 - RNA, 20 nt, Human
cggaaaacaugcuacacacu

SEQ ID NO: 1728901 - RNA, 18 nt, Human
cgcugugcugcccugccc

SEQ ID NO: 1728902 - RNA, 17 nt, Human
cgccaucccagccccaa

SEQ ID NO: 1728903 - RNA, 16 nt, Human
cgccaucccagcccca

SEQ ID NO: 1728904 - RNA, 14 nt, Human
cgccaucccagccc

SEQ ID NO: 1728905 - RNA, 23 nt, Human
cgccaggggaaaaucagccugcu

SEQ ID NO: 1728906 - RNA, 20 nt, Human
ccucugcccacucccugcaa

SEQ ID NO: 1728907 - RNA, 19 nt, Human
ccucugcccacucccugca

SEQ ID NO: 1728908 - RNA, 17 nt, Human
ccucugcccacucccug

SEQ ID NO: 1728909 - RNA, 22 nt, Human
cgccagauucuuuccugaggcu

SEQ ID NO: 1728910 - RNA, 22 nt, Human
cgcccaggcuuagucacugaga

SEQ ID NO: 1728911 - RNA, 12 nt, Human
cgcccagucugg

SEQ ID NO: 1728912 - RNA, 21 nt, Human
cgccccucccacagcgcuggc

SEQ ID NO: 1728913 - RNA, 19 nt, Human
cgccccucccacagcgcug

SEQ ID NO: 1728914 - RNA, 16 nt, Human
cgcccuggacugugug

SEQ ID NO: 1728915 - RNA, 13 nt, Human
cgccccuuccccc

SEQ ID NO: 1728916 - RNA, 15 nt, Human
cuaacaugauuuggg

SEQ ID NO: 1728917 - RNA, 17 nt, Human
cuaacauggaaguacua

SEQ ID NO: 1728918 - RNA, 15 nt, Human
cuaacauggaaguac

SEQ ID NO: 1728919 - RNA, 23 nt, Human
cuaaauugacacuuaaaaauggu

SEQ ID NO: 1728920 - RNA, 16 nt, Human
cuaaauguugaaagau

SEQ ID NO: 1728921 - RNA, 20 nt, Human
cuaaauauauuuuaagacga

SEQ ID NO: 1728922 - RNA, 18 nt, Human
cuaaauauauuuuaagac

SEQ ID NO: 1728923 - RNA, 18 nt, Human
cuaaauggaaccacucua

SEQ ID NO: 1728924 - RNA, 16 nt, Human
cuaaauggaaccacuc

SEQ ID NO: 1728925 - RNA, 17 nt, Human
cuaaauggaaccacucu

SEQ ID NO: 1728926 - RNA, 15 nt, Human
cuaaauggaaccacu

SEQ ID NO: 1728927 - RNA, 20 nt, Human
cuaaaucuccaaaauaaaac

SEQ ID NO: 1728928 - RNA, 15 nt, Human
cguggaacguuuuuc

SEQ ID NO: 1728929 - RNA, 20 nt, Human
cguggaacguuuuuccuguu

SEQ ID NO: 1728930 - RNA, 21 nt, Human
cguggcuucccgcucagcccu

SEQ ID NO: 1728931 - RNA, 20 nt, Human
cguggcuucccgcucagccc

SEQ ID NO: 1728932 - RNA, 19 nt, Human
cguggcuucccgcucagcc

SEQ ID NO: 1728933 - RNA, 18 nt, Human
cguggcuucccgcucagc

SEQ ID NO: 1728934 - RNA, 19 nt, Human
cgugcacacaccagagccc

SEQ ID NO: 1728935 - RNA, 18 nt, Human
cgugcacacaccagagcc

SEQ ID NO: 1728936 - RNA, 22 nt, Human
cgugcaguggugcgaucugggu

SEQ ID NO: 1728937 - RNA, 21 nt, Human
cgugcaguggugcgaucuggg

SEQ ID NO: 1728938 - RNA, 23 nt, Human
cgugcauaccacuuuuguucuug

SEQ ID NO: 1728939 - RNA, 22 nt, Human
cgucugacaggcaaugcuggcu

SEQ ID NO: 1728940 - RNA, 21 nt, Human
cgucugacaggcaaugcuggc

SEQ ID NO: 1728941 - RNA, 20 nt, Human
cgucugacaggcaaugcugg

SEQ ID NO: 1728942 - RNA, 16 nt, Human
cgugcacacaccagag

SEQ ID NO: 1728943 - RNA, 22 nt, Human
cggugcuaucucccccagcccc

SEQ ID NO: 1728944 - RNA, 21 nt, Human
cggugcuaucucccccagccc

SEQ ID NO: 1728945 - RNA, 20 nt, Human
cggugcuaucucccccagcc

SEQ ID NO: 1728946 - RNA, 18 nt, Human
cggugcuaucucccccag

SEQ ID NO: 1728947 - RNA, 16 nt, Human
cgucuaccugaggggc

SEQ ID NO: 1728948 - RNA, 16 nt, Human
cgucucauacucaccu

SEQ ID NO: 1728949 - RNA, 16 nt, Human
cgucgacguagaaccu

SEQ ID NO: 1728950 - RNA, 13 nt, Human
cucacauuuauau

SEQ ID NO: 1728951 - RNA, 19 nt, Human
cucaccagccccagugccc

SEQ ID NO: 1728952 - RNA, 20 nt, Human
cucacauagcuuacaagcca

SEQ ID NO: 1728953 - RNA, 21 nt, Human
cucaccagccccagugcccac

SEQ ID NO: 1728954 - RNA, 20 nt, Human
cucaccagccccagugccca

SEQ ID NO: 1728955 - RNA, 21 nt, Human
cucaagugauucuccugccuc

SEQ ID NO: 1728956 - RNA, 20 nt, Human
cucaagugauucuccugccu

SEQ ID NO: 1728957 - RNA, 19 nt, Human
cucaagugauucuccugcc

SEQ ID NO: 1728958 - RNA, 18 nt, Human
cucaagugauucuccugc

SEQ ID NO: 1728959 - RNA, 17 nt, Human
cucaccccuugccauaa

SEQ ID NO: 1728960 - RNA, 16 nt, Human
cucacuaggcuucugg

SEQ ID NO: 1728961 - RNA, 13 nt, Human
cucacuaggcuuc

SEQ ID NO: 1728962 - RNA, 17 nt, Human
cucacuauguugcccag

SEQ ID NO: 1728963 - RNA, 16 nt, Human
cucacuauguugccca

SEQ ID NO: 1728964 - RNA, 20 nt, Human
cucacuaggcuucugguuga

SEQ ID NO: 1728965 - RNA, 21 nt, Human
cucacuaucccggcugcccuu

SEQ ID NO: 1728966 - RNA, 20 nt, Human
cucacuaucccggcugcccu

SEQ ID NO: 1728967 - RNA, 13 nt, Human
cucaccccagccc

SEQ ID NO: 1728968 - RNA, 12 nt, Human
cucaccccagcc

SEQ ID NO: 1728969 - RNA, 14 nt, Human
cucaccccagcccc

SEQ ID NO: 1728970 - RNA, 21 nt, Human
cucaacucuccuccagaguca

SEQ ID NO: 1728971 - RNA, 20 nt, Human
cucaacucuccuccagaguc

SEQ ID NO: 1728972 - RNA, 13 nt, Human
cucaaauuucuaa

SEQ ID NO: 1728973 - RNA, 17 nt, Human
cucaagagggcacuggu

SEQ ID NO: 1728974 - RNA, 21 nt, Human
cucaagagggcacugguggcc

SEQ ID NO: 1728975 - RNA, 19 nt, Human
cucaagagggcacuggugg

SEQ ID NO: 1728976 - RNA, 14 nt, Human
cuaugcauuugaaa

SEQ ID NO: 1728977 - RNA, 22 nt, Human
cuauuuuaauaaacacucuuga

SEQ ID NO: 1728978 - RNA, 18 nt, Human
cuauuuuaauaaacacuc

SEQ ID NO: 1728979 - RNA, 11 nt, Human
cuaugcauuug

SEQ ID NO: 1728980 - RNA, 12 nt, Human
cuaugcauuuga

SEQ ID NO: 1728981 - RNA, 21 nt, Human
cuaugcauuugaaaauuuuga

SEQ ID NO: 1728982 - RNA, 23 nt, Human
cuagugugguguuuccuggcacu

SEQ ID NO: 1728983 - RNA, 22 nt, Human
cuagugugguguuuccuggcac

SEQ ID NO: 1728984 - RNA, 21 nt, Human
cuagugugguguuuccuggca

SEQ ID NO: 1728985 - RNA, 19 nt, Human
cuagugugguguuuccugg

SEQ ID NO: 1728986 - RNA, 15 nt, Human
cuaguaucaaaagaa

SEQ ID NO: 1728987 - RNA, 17 nt, Human
cuaguaucaaaagaaag

SEQ ID NO: 1728988 - RNA, 23 nt, Human
cuaguaucaaaagaaagaaaauc

SEQ ID NO: 1728989 - RNA, 21 nt, Human
cuaggcauuugcugaauacag

SEQ ID NO: 1728990 - RNA, 15 nt, Human
cuaggcaggaccugu

SEQ ID NO: 1728991 - RNA, 16 nt, Human
cuaggcaggaccugug

SEQ ID NO: 1728992 - RNA, 12 nt, Human
cuagcagcaggg

SEQ ID NO: 1728993 - RNA, 15 nt, Human
cuaggaacacuccuu

SEQ ID NO: 1728994 - RNA, 13 nt, Human
cuaggaacacucc

SEQ ID NO: 1728995 - RNA, 21 nt, Human
cuaggaagacuuuggaaagag

SEQ ID NO: 1728996 - RNA, 17 nt, Human
cuaggaaauccagggug

SEQ ID NO: 1728997 - RNA, 16 nt, Human
cuaggaaauccagggu

SEQ ID NO: 1728998 - RNA, 17 nt, Human
cuaggaggucucuaaga

SEQ ID NO: 1728999 - RNA, 22 nt, Human
cuaggaccccuccaugugggcu

SEQ ID NO: 1729000 - RNA, 22 nt, Human
cuauauuguuuucaguguacau

SEQ ID NO: 1729001 - RNA, 20 nt, Human
cuauauuuuuuguuaaauga

SEQ ID NO: 1729002 - RNA, 23 nt, Human
cuauauuguuuucaguguacaug

SEQ ID NO: 1729003 - RNA, 22 nt, Human
cuauauuuuuuguuaaaugauu

SEQ ID NO: 1729004 - RNA, 20 nt, Human
cuaucaaguauuauaccuuu

SEQ ID NO: 1729005 - RNA, 14 nt, Human
cuaugacacaugca

SEQ ID NO: 1729006 - RNA, 14 nt, Human
cuaguuccaccauc

SEQ ID NO: 1729007 - RNA, 14 nt, Human
cuaauguacugcau

SEQ ID NO: 1729008 - RNA, 16 nt, Human
cuaauguacugcauau

SEQ ID NO: 1729009 - RNA, 22 nt, Human
cuaaugaaugcauaaaauguua

SEQ ID NO: 1729010 - RNA, 19 nt, Human
cuaaugaaugcauaaaaug

SEQ ID NO: 1729011 - RNA, 16 nt, Human
cuaaggugugcucuga

SEQ ID NO: 1729012 - RNA, 21 nt, Human
cuaauaaaauuuaaaagucuu

SEQ ID NO: 1729013 - RNA, 12 nt, Human
cuaauaaagcug

SEQ ID NO: 1729014 - RNA, 13 nt, Human
cuaauaaagcugu

SEQ ID NO: 1729015 - RNA, 16 nt, Human
cuaauccucuuuuucu

SEQ ID NO: 1729016 - RNA, 19 nt, Human
cuaaucagcauucucacuc

SEQ ID NO: 1729017 - RNA, 17 nt, Human
cuaaucagcauucucac

SEQ ID NO: 1729018 - RNA, 16 nt, Human
cuacacuccagugaga

SEQ ID NO: 1729019 - RNA, 21 nt, Human
cuacacacugcauguuuguga

SEQ ID NO: 1729020 - RNA, 17 nt, Human
cuacacuccagugagac

SEQ ID NO: 1729021 - RNA, 18 nt, Human
cuacacugugcugagucu

SEQ ID NO: 1729022 - RNA, 13 nt, Human
cuacacacugcau

SEQ ID NO: 1729023 - RNA, 15 nt, Human
cuacacacugcaugu

SEQ ID NO: 1729024 - RNA, 15 nt, Human
cuacagaggccaugg

SEQ ID NO: 1729025 - RNA, 19 nt, Human
cuacccagcgagcccuggu

SEQ ID NO: 1729026 - RNA, 20 nt, Human
cuacccagcgagcccuggug

SEQ ID NO: 1729027 - RNA, 12 nt, Human
cuacccaggugc

SEQ ID NO: 1729028 - RNA, 22 nt, Human
cuacccacccuccuuucaccac

SEQ ID NO: 1729029 - RNA, 17 nt, Human
cuacccacccuccuuuc

SEQ ID NO: 1729030 - RNA, 18 nt, Human
cuaccauccccuguagag

SEQ ID NO: 1729031 - RNA, 17 nt, Human
cuacagaggccaugggc

SEQ ID NO: 1729032 - RNA, 17 nt, Human
cuaaccacgcuggaccu

SEQ ID NO: 1729033 - RNA, 16 nt, Human
cuaaccagcagaaaug

SEQ ID NO: 1729034 - RNA, 14 nt, Human
cuaagcaaaaugug

SEQ ID NO: 1729035 - RNA, 17 nt, Human
cuaaccagcagaaaugc

SEQ ID NO: 1729036 - RNA, 15 nt, Human
cuaagcaaaauguga

SEQ ID NO: 1729037 - RNA, 18 nt, Human
cuaagcaaaaugugauau

SEQ ID NO: 1729038 - RNA, 20 nt, Human
cuaagcacgggccauaugaa

SEQ ID NO: 1729039 - RNA, 23 nt, Human
cuaagcacgggccauaugaauaa

SEQ ID NO: 1729040 - RNA, 21 nt, Human
cuaagcuauucaguaauaacu

SEQ ID NO: 1729041 - RNA, 19 nt, Human
cuaagcuauucaguaauaa

SEQ ID NO: 1729042 - RNA, 15 nt, Human
cuaaggugugcucug

SEQ ID NO: 1729043 - RNA, 14 nt, Human
cuaaggcugaacuu

SEQ ID NO: 1729044 - RNA, 15 nt, Human
cuacuugggaggcug

SEQ ID NO: 1729045 - RNA, 18 nt, Human
cuacuugggaggcugaga

SEQ ID NO: 1729046 - RNA, 19 nt, Human
cuacuugggaggcugagau

SEQ ID NO: 1729047 - RNA, 20 nt, Human
cuacuuccccuuccuaauuc

SEQ ID NO: 1729048 - RNA, 15 nt, Human
cuacuuccccuuccu

SEQ ID NO: 1729049 - RNA, 14 nt, Human
cuacuuccccuucc

SEQ ID NO: 1729050 - RNA, 20 nt, Human
cuacuuccugugacuucagc

SEQ ID NO: 1729051 - RNA, 21 nt, Human
cuacccgggaagggggcuggg

SEQ ID NO: 1729052 - RNA, 20 nt, Human
cuacccgggaagggggcugg

SEQ ID NO: 1729053 - RNA, 15 nt, Human
cuacccgggaagggg

SEQ ID NO: 1729054 - RNA, 14 nt, Human
cuacccgggaaggg

SEQ ID NO: 1729055 - RNA, 21 nt, Human
cuacucugugucagguggggc

SEQ ID NO: 1729056 - RNA, 16 nt, Human
cuacucugugucaggu

SEQ ID NO: 1729057 - RNA, 14 nt, Human
cuacugaggugcua

SEQ ID NO: 1729058 - RNA, 17 nt, Human
cuacuguaauuugugau

SEQ ID NO: 1729059 - RNA, 16 nt, Human
cuacuguaauuuguga

SEQ ID NO: 1729060 - RNA, 21 nt, Human
cuacuguaaggcaaucauggu

SEQ ID NO: 1729061 - RNA, 21 nt, Human
cuagacgagcaggcuucuucc

SEQ ID NO: 1729062 - RNA, 20 nt, Human
cuagacgagcaggcuucuuc

SEQ ID NO: 1729063 - RNA, 18 nt, Human
cuagacucccaagcugga

SEQ ID NO: 1729064 - RNA, 15 nt, Human
cuagagguucaaaga

SEQ ID NO: 1729065 - RNA, 21 nt, Human
cuagagugaacuugggccacu

SEQ ID NO: 1729066 - RNA, 17 nt, Human
cuagagugaacuugggc

SEQ ID NO: 1729067 - RNA, 17 nt, Human
cuagcacuuugggaggc

SEQ ID NO: 1729068 - RNA, 21 nt, Human
cuacuguaauuugugauacaa

SEQ ID NO: 1729069 - RNA, 16 nt, Human
ccuaaaauucagugga

SEQ ID NO: 1729070 - RNA, 13 nt, Human
ccuaaacauauga

SEQ ID NO: 1729071 - RNA, 21 nt, Human
ccuaacaacauuguagccuca

SEQ ID NO: 1729072 - RNA, 22 nt, Human
ccuaacaacauuguagccucaa

SEQ ID NO: 1729073 - RNA, 19 nt, Human
ccuacagcuugaccgugag

SEQ ID NO: 1729074 - RNA, 22 nt, Human
ccuacaguugaaaaacagcuga

SEQ ID NO: 1729075 - RNA, 13 nt, Human
ccuacccacccuc

SEQ ID NO: 1729076 - RNA, 18 nt, Human
ccuacaggagugagcacu

SEQ ID NO: 1729077 - RNA, 18 nt, Human
ccuacccacccuccuuuc

SEQ ID NO: 1729078 - RNA, 19 nt, Human
ccuacuguaauuugugaua

SEQ ID NO: 1729079 - RNA, 21 nt, Human
ccuagaaauuccccacccuga

SEQ ID NO: 1729080 - RNA, 13 nt, Human
ccuacuuccccuu

SEQ ID NO: 1729081 - RNA, 16 nt, Human
ccuacuuccccuuccu

SEQ ID NO: 1729082 - RNA, 13 nt, Human
ccuaggugacaga

SEQ ID NO: 1729083 - RNA, 22 nt, Human
ccuagguauaauucacauugua

SEQ ID NO: 1729084 - RNA, 12 nt, Human
ccguuauuaaaa

SEQ ID NO: 1729085 - RNA, 23 nt, Human
ccgggagccugaucaccugcccu

SEQ ID NO: 1729086 - RNA, 16 nt, Human
ccgggagccugaucac

SEQ ID NO: 1729087 - RNA, 17 nt, Human
ccgggaagggggcuggg

SEQ ID NO: 1729088 - RNA, 21 nt, Human
ccggaggggccuggcagccgu

SEQ ID NO: 1729089 - RNA, 17 nt, Human
ccggaggggccuggcag

SEQ ID NO: 1729090 - RNA, 17 nt, Human
cccuuggauuguccccg

SEQ ID NO: 1729091 - RNA, 19 nt, Human
cccuucuuuuucuucuuuu

SEQ ID NO: 1729092 - RNA, 11 nt, Human
cccuucuuuuu

SEQ ID NO: 1729093 - RNA, 21 nt, Human
cccuuccuaauuccacagcug

SEQ ID NO: 1729094 - RNA, 23 nt, Human
cccuugguuaggcauugugggaa

SEQ ID NO: 1729095 - RNA, 22 nt, Human
cccuugguuaggcauuguggga

SEQ ID NO: 1729096 - RNA, 22 nt, Human
cccuuguggucccaccccacac

SEQ ID NO: 1729097 - RNA, 13 nt, Human
cccuucccaccuc

SEQ ID NO: 1729098 - RNA, 12 nt, Human
cccuucccaccu

SEQ ID NO: 1729099 - RNA, 11 nt, Human
cccuucauuug

SEQ ID NO: 1729100 - RNA, 20 nt, Human
cccuuccuaauuccacagcu

SEQ ID NO: 1729101 - RNA, 19 nt, Human
cccuuccuaauuccacagc

SEQ ID NO: 1729102 - RNA, 14 nt, Human
cccuuccuaauucc

SEQ ID NO: 1729103 - RNA, 13 nt, Human
cccuuccuaauuc

SEQ ID NO: 1729104 - RNA, 13 nt, Human
cccuguucacucu

SEQ ID NO: 1729105 - RNA, 22 nt, Human
cccuguucacucuacuuagcau

SEQ ID NO: 1729106 - RNA, 14 nt, Human
cccuguucacucua

SEQ ID NO: 1729107 - RNA, 22 nt, Human
ccucaggugagaagcagaggaa

SEQ ID NO: 1729108 - RNA, 15 nt, Human
ccuaggugacagagu

SEQ ID NO: 1729109 - RNA, 23 nt, Human
ccucacaguccuuaccagcagag

SEQ ID NO: 1729110 - RNA, 24 nt, Human
ccucacaguccuuaccagcagagc

SEQ ID NO: 1729111 - RNA, 16 nt, Human
ccuauuagagaagaga

SEQ ID NO: 1729112 - RNA, 17 nt, Human
ccuauuagagaagagau

SEQ ID NO: 1729113 - RNA, 22 nt, Human
ccucagggucccugguggcagc

SEQ ID NO: 1729114 - RNA, 20 nt, Human
ccucagggucccugguggca

SEQ ID NO: 1729115 - RNA, 17 nt, Human
ccucagggucccuggug

SEQ ID NO: 1729116 - RNA, 16 nt, Human
ccucagggucccuggu

SEQ ID NO: 1729117 - RNA, 16 nt, Human
ccucagaucuucugug

SEQ ID NO: 1729118 - RNA, 14 nt, Human
ccucagcauccugg

SEQ ID NO: 1729119 - RNA, 14 nt, Human
ccucacccuggggc

SEQ ID NO: 1729120 - RNA, 16 nt, Human
ccucagagccaccccu

SEQ ID NO: 1729121 - RNA, 14 nt, Human
ccuccauccugagg

SEQ ID NO: 1729122 - RNA, 16 nt, Human
ccuccaugcugccucc

SEQ ID NO: 1729123 - RNA, 19 nt, Human
ccuccaugcugccuccaga

SEQ ID NO: 1729124 - RNA, 12 nt, Human
ccuccauccuga

SEQ ID NO: 1729125 - RNA, 13 nt, Human
ccuccauccugag

SEQ ID NO: 1729126 - RNA, 14 nt, Human
ccucccaacucacc

SEQ ID NO: 1729127 - RNA, 17 nt, Human
ccucccaaagugcuggg

SEQ ID NO: 1729128 - RNA, 15 nt, Human
ccuccaugugggcua

SEQ ID NO: 1729129 - RNA, 12 nt, Human
ccuccauguggg

SEQ ID NO: 1729130 - RNA, 12 nt, Human
ccuccaggugca

SEQ ID NO: 1729131 - RNA, 11 nt, Human
ccuccaggugc

SEQ ID NO: 1729132 - RNA, 17 nt, Human
ccuccaggugcacaagc

SEQ ID NO: 1729133 - RNA, 20 nt, Human
ccucaggugagaagcagagg

SEQ ID NO: 1729134 - RNA, 18 nt, Human
ccucaggugagaagcaga

SEQ ID NO: 1729135 - RNA, 17 nt, Human
ccucaggugagaagcag

SEQ ID NO: 1729136 - RNA, 12 nt, Human
ccucauacccac

SEQ ID NO: 1729137 - RNA, 15 nt, Human
ccuccccuccuccug

SEQ ID NO: 1729138 - RNA, 18 nt, Human
ccucccgaauagcuggga

SEQ ID NO: 1729139 - RNA, 15 nt, Human
ccucccaacucaccc

SEQ ID NO: 1729140 - RNA, 23 nt, Human
ccucccaaagugcugggauuaca

SEQ ID NO: 1729141 - RNA, 12 nt, Human
ccuccuccagcc

SEQ ID NO: 1729142 - RNA, 11 nt, Human
ccuccucagau

SEQ ID NO: 1729143 - RNA, 13 nt, Human
ccucccucuuucc

SEQ ID NO: 1729144 - RNA, 20 nt, Human
ccucccgaauagcugggacu

SEQ ID NO: 1729145 - RNA, 19 nt, Human
ccucccgaauagcugggac

SEQ ID NO: 1729146 - RNA, 18 nt, Human
ccucccgaguagcuggga

SEQ ID NO: 1729147 - RNA, 17 nt, Human
ccucccgaguagcuggg

SEQ ID NO: 1729148 - RNA, 19 nt, Human
ccucccgaguagcugggac

SEQ ID NO: 1729149 - RNA, 21 nt, Human
ccucccgaauagcugggacua

SEQ ID NO: 1729150 - RNA, 17 nt, Human
ccucugcacuccccugc

SEQ ID NO: 1729151 - RNA, 16 nt, Human
ccucugcacuccccug

SEQ ID NO: 1729152 - RNA, 12 nt, Human
ccucugagccuu

SEQ ID NO: 1729153 - RNA, 11 nt, Human
ccucugagccu

SEQ ID NO: 1729154 - RNA, 13 nt, Human
ccucugaggcuga

SEQ ID NO: 1729155 - RNA, 18 nt, Human
ccucugcacuccccugcu

SEQ ID NO: 1729156 - RNA, 23 nt, Human
ccucugcacuccccugcugggug

SEQ ID NO: 1729157 - RNA, 14 nt, Human
ccucugcagcaaua

SEQ ID NO: 1729158 - RNA, 18 nt, Human
ccucugcagcaauaaagc

SEQ ID NO: 1729159 - RNA, 16 nt, Human
ccucugcccacucccu

SEQ ID NO: 1729160 - RNA, 13 nt, Human
ccucugcccacuc

SEQ ID NO: 1729161 - RNA, 19 nt, Human
ccucugcacuccccugcug

SEQ ID NO: 1729162 - RNA, 19 nt, Human
ccucugcagcaauaaagca

SEQ ID NO: 1729163 - RNA, 20 nt, Human
ccucugacacacagcucugu

SEQ ID NO: 1729164 - RNA, 19 nt, Human
ccucugacacacagcucug

SEQ ID NO: 1729165 - RNA, 14 nt, Human
ccucugacacacag

SEQ ID NO: 1729166 - RNA, 15 nt, Human
ccucugacacacagc

SEQ ID NO: 1729167 - RNA, 13 nt, Human
ccucugacacaca

SEQ ID NO: 1729168 - RNA, 21 nt, Human
ccucugacacacagcucuguc

SEQ ID NO: 1729169 - RNA, 15 nt, Human
ccucuccccagcaag

SEQ ID NO: 1729170 - RNA, 22 nt, Human
ccucucccuuggauuguccccg

SEQ ID NO: 1729171 - RNA, 13 nt, Human
ccucucccuugga

SEQ ID NO: 1729172 - RNA, 20 nt, Human
ccucuccccagcaagugaga

SEQ ID NO: 1729173 - RNA, 21 nt, Human
ccuccuccagccgccaugcuc

SEQ ID NO: 1729174 - RNA, 15 nt, Human
ccuccucucugcccu

SEQ ID NO: 1729175 - RNA, 13 nt, Human
ccuccucucugcc

SEQ ID NO: 1729176 - RNA, 16 nt, Human
ccuccucucugcccua

SEQ ID NO: 1729177 - RNA, 14 nt, Human
ccccuuaccacugc

SEQ ID NO: 1729178 - RNA, 20 nt, Human
ccccuguucuggcagaguug

SEQ ID NO: 1729179 - RNA, 12 nt, Human
ccccuucccccu

SEQ ID NO: 1729180 - RNA, 22 nt, Human
ccccuuccuaauuccacagcug

SEQ ID NO: 1729181 - RNA, 21 nt, Human
ccccuuccuaauuccacagcu

SEQ ID NO: 1729182 - RNA, 20 nt, Human
ccccuuccuaauuccacagc

SEQ ID NO: 1729183 - RNA, 22 nt, Human
ccccuguccccgcacugggcuu

SEQ ID NO: 1729184 - RNA, 15 nt, Human
ccccuguaggccuca

SEQ ID NO: 1729185 - RNA, 23 nt, Human
ccccuggcuuuucacugcuggcu

SEQ ID NO: 1729186 - RNA, 23 nt, Human
cccgcucagcccucccugccccu

SEQ ID NO: 1729187 - RNA, 22 nt, Human
cccgcuaagagggagggagggc

SEQ ID NO: 1729188 - RNA, 19 nt, Human
cccgcucagcccucccugc

SEQ ID NO: 1729189 - RNA, 15 nt, Human
cccgaggccuucucu

SEQ ID NO: 1729190 - RNA, 20 nt, Human
cccgaggccuucucugaagg

SEQ ID NO: 1729191 - RNA, 21 nt, Human
cccgaggccuucucugaagga

SEQ ID NO: 1729192 - RNA, 22 nt, Human
ccccaggugguuauggagaggg

SEQ ID NO: 1729193 - RNA, 14 nt, Human
ccccuggcagcccc

SEQ ID NO: 1729194 - RNA, 12 nt, Human
ccccuggcagcc

SEQ ID NO: 1729195 - RNA, 15 nt, Human
ccccuggcagccccu

SEQ ID NO: 1729196 - RNA, 12 nt, Human
ccccaggaggcc

SEQ ID NO: 1729197 - RNA, 15 nt, Human
ccccagccccauccu

SEQ ID NO: 1729198 - RNA, 19 nt, Human
ccccagcccuccuuaucaa

SEQ ID NO: 1729199 - RNA, 16 nt, Human
ccccagccccauccca

SEQ ID NO: 1729200 - RNA, 13 nt, Human
ccccagccugcua

SEQ ID NO: 1729201 - RNA, 22 nt, Human
ccccagcuggggccaggcuggg

SEQ ID NO: 1729202 - RNA, 21 nt, Human
ccccagcuggggccaggcugg

SEQ ID NO: 1729203 - RNA, 13 nt, Human
cccucccucuuuc

SEQ ID NO: 1729204 - RNA, 14 nt, Human
cccucccuucaacc

SEQ ID NO: 1729205 - RNA, 17 nt, Human
cccuccaugugggcuag

SEQ ID NO: 1729206 - RNA, 19 nt, Human
cccuccaucuaaacugccc

SEQ ID NO: 1729207 - RNA, 20 nt, Human
cccucauccucauacccacc

SEQ ID NO: 1729208 - RNA, 17 nt, Human
cccucauccucauaccc

SEQ ID NO: 1729209 - RNA, 22 nt, Human
cccucaucaccaacgucugugc

SEQ ID NO: 1729210 - RNA, 19 nt, Human
cccucauagcccucacccu

SEQ ID NO: 1729211 - RNA, 20 nt, Human
cccucagucuggcccuuccu

SEQ ID NO: 1729212 - RNA, 21 nt, Human
cccucagggucccugguggca

SEQ ID NO: 1729213 - RNA, 15 nt, Human
cccucauagcccuca

SEQ ID NO: 1729214 - RNA, 13 nt, Human
cccucauagcccu

SEQ ID NO: 1729215 - RNA, 21 nt, Human
cccuccaagaccuucuccuuc

SEQ ID NO: 1729216 - RNA, 22 nt, Human
cccucauuccaccuucccaugc

SEQ ID NO: 1729217 - RNA, 22 nt, Human
cccucauccucauacccacccc

SEQ ID NO: 1729218 - RNA, 16 nt, Human
cccggcaggguccuag

SEQ ID NO: 1729219 - RNA, 18 nt, Human
cccggaggggccuggcag

SEQ ID NO: 1729220 - RNA, 17 nt, Human
cccggaggggccuggca

SEQ ID NO: 1729221 - RNA, 17 nt, Human
cccuaaaguguauuuuu

SEQ ID NO: 1729222 - RNA, 22 nt, Human
cccuaaaguguauuuuuuuacu

SEQ ID NO: 1729223 - RNA, 13 nt, Human
cccuaaagccuca

SEQ ID NO: 1729224 - RNA, 19 nt, Human
cccucagggucccuggugg

SEQ ID NO: 1729225 - RNA, 18 nt, Human
cccucagggucccuggug

SEQ ID NO: 1729226 - RNA, 17 nt, Human
cccucagggucccuggu

SEQ ID NO: 1729227 - RNA, 16 nt, Human
cccucagggucccugg

SEQ ID NO: 1729228 - RNA, 15 nt, Human
cccucagggucccug

SEQ ID NO: 1729229 - RNA, 18 nt, Human
cccuaauaaagcugugug

SEQ ID NO: 1729230 - RNA, 15 nt, Human
cccuaauaaagcugu

SEQ ID NO: 1729231 - RNA, 14 nt, Human
cccuaauaaagcug

SEQ ID NO: 1729232 - RNA, 13 nt, Human
cccuaauaaagcu

SEQ ID NO: 1729233 - RNA, 12 nt, Human
cccuaauaaagc

SEQ ID NO: 1729234 - RNA, 16 nt, Human
cccugcaaccugauug

SEQ ID NO: 1729235 - RNA, 22 nt, Human
cccugcaaccugauugugucuc

SEQ ID NO: 1729236 - RNA, 18 nt, Human
cccugcagagggcacaga

SEQ ID NO: 1729237 - RNA, 20 nt, Human
cccugcagagggcacagaaa

SEQ ID NO: 1729238 - RNA, 12 nt, Human
cccugcagaggg

SEQ ID NO: 1729239 - RNA, 15 nt, Human
cccugccacccuggg

SEQ ID NO: 1729240 - RNA, 14 nt, Human
cccugccacccugg

SEQ ID NO: 1729241 - RNA, 12 nt, Human
cccugccacccu

SEQ ID NO: 1729242 - RNA, 18 nt, Human
cccugccacccuggggag

SEQ ID NO: 1729243 - RNA, 17 nt, Human
cccugccacccugggga

SEQ ID NO: 1729244 - RNA, 14 nt, Human
cccugccuccuuug

SEQ ID NO: 1729245 - RNA, 23 nt, Human
cccugccuccuuugugaggaagc

SEQ ID NO: 1729246 - RNA, 16 nt, Human
cccugccuccuuugug

SEQ ID NO: 1729247 - RNA, 18 nt, Human
cccugccucucugcaggu

SEQ ID NO: 1729248 - RNA, 11 nt, Human
cccugccucuc

SEQ ID NO: 1729249 - RNA, 22 nt, Human
cccugguggcagugggagcugc

SEQ ID NO: 1729250 - RNA, 21 nt, Human
cccuggugcugccacacuuca

SEQ ID NO: 1729251 - RNA, 17 nt, Human
cccuggugcugccacac

SEQ ID NO: 1729252 - RNA, 18 nt, Human
cccugggaggcucuggag

SEQ ID NO: 1729253 - RNA, 17 nt, Human
cccugggaggcucugga

SEQ ID NO: 1729254 - RNA, 16 nt, Human
cccugggaggcucugg

SEQ ID NO: 1729255 - RNA, 20 nt, Human
cccugcugguucaggguugg

SEQ ID NO: 1729256 - RNA, 19 nt, Human
cccugcugguucaggguug

SEQ ID NO: 1729257 - RNA, 23 nt, Human
cccugcuuugggcugcccuggug

SEQ ID NO: 1729258 - RNA, 13 nt, Human
cccugcugguuca

SEQ ID NO: 1729259 - RNA, 22 nt, Human
cccugccucucugcaggucccu

SEQ ID NO: 1729260 - RNA, 21 nt, Human
cccugccucucugcagguccc

SEQ ID NO: 1729261 - RNA, 16 nt, Human
cccugccucucugcag

SEQ ID NO: 1729262 - RNA, 14 nt, Human
cccugguggcagcu

SEQ ID NO: 1729263 - RNA, 23 nt, Human
ccauggcacucuauguucuaaga

SEQ ID NO: 1729264 - RNA, 13 nt, Human
ccaugugccaggu

SEQ ID NO: 1729265 - RNA, 14 nt, Human
ccauguuggccagg

SEQ ID NO: 1729266 - RNA, 13 nt, Human
ccauguuggccag

SEQ ID NO: 1729267 - RNA, 18 nt, Human
ccaugcuccuggcccacu

SEQ ID NO: 1729268 - RNA, 15 nt, Human
ccaugcuccuggccc

SEQ ID NO: 1729269 - RNA, 15 nt, Human
ccaugcugcccugug

SEQ ID NO: 1729270 - RNA, 17 nt, Human
ccaugcugcccugugag

SEQ ID NO: 1729271 - RNA, 16 nt, Human
ccaugcugcccuguga

SEQ ID NO: 1729272 - RNA, 14 nt, Human
ccaugcugccucca

SEQ ID NO: 1729273 - RNA, 14 nt, Human
cccacgcccccacu

SEQ ID NO: 1729274 - RNA, 13 nt, Human
cccacgcccccac

SEQ ID NO: 1729275 - RNA, 15 nt, Human
cccacgcccccacug

SEQ ID NO: 1729276 - RNA, 20 nt, Human
cccaccuuggcugcagggag

SEQ ID NO: 1729277 - RNA, 19 nt, Human
cccaccuuggcugcaggga

SEQ ID NO: 1729278 - RNA, 17 nt, Human
cccaccuuggcugcagg

SEQ ID NO: 1729279 - RNA, 16 nt, Human
cccaccuggccucugc

SEQ ID NO: 1729280 - RNA, 15 nt, Human
cccaccuggccucug

SEQ ID NO: 1729281 - RNA, 12 nt, Human
cccaccuggccu

SEQ ID NO: 1729282 - RNA, 21 nt, Human
ccauguuggccaggcuggucu

SEQ ID NO: 1729283 - RNA, 19 nt, Human
ccauguuggccaggcuggu

SEQ ID NO: 1729284 - RNA, 15 nt, Human
ccauguuggccaggc

SEQ ID NO: 1729285 - RNA, 18 nt, Human
ccauguuggccaggcugg

SEQ ID NO: 1729286 - RNA, 18 nt, Human
cccagcucugguccauag

SEQ ID NO: 1729287 - RNA, 16 nt, Human
cccagcucugguccau

SEQ ID NO: 1729288 - RNA, 15 nt, Human
cccagcucuggucca

SEQ ID NO: 1729289 - RNA, 12 nt, Human
cccagcucuggu

SEQ ID NO: 1729290 - RNA, 14 nt, Human
cccagcucuggucc

SEQ ID NO: 1729291 - RNA, 13 nt, Human
cccagcucugguc

SEQ ID NO: 1729292 - RNA, 14 nt, Human
cccagcgagcccug

SEQ ID NO: 1729293 - RNA, 15 nt, Human
cccagcgagcccugg

SEQ ID NO: 1729294 - RNA, 14 nt, Human
cccaggaggccagc

SEQ ID NO: 1729295 - RNA, 18 nt, Human
cccaggagccccgaggcc

SEQ ID NO: 1729296 - RNA, 14 nt, Human
cccaggagccccga

SEQ ID NO: 1729297 - RNA, 13 nt, Human
cccaggagccccg

SEQ ID NO: 1729298 - RNA, 15 nt, Human
cccagccccauccuc

SEQ ID NO: 1729299 - RNA, 14 nt, Human
cccagccccauccu

SEQ ID NO: 1729300 - RNA, 14 nt, Human
cccagccccauccc

SEQ ID NO: 1729301 - RNA, 13 nt, Human
cccagccccaucc

SEQ ID NO: 1729302 - RNA, 19 nt, Human
cccagccccauccucugua

SEQ ID NO: 1729303 - RNA, 18 nt, Human
cccagccccauccucugu

SEQ ID NO: 1729304 - RNA, 23 nt, Human
cccagcccuccuuaucaaaggac

SEQ ID NO: 1729305 - RNA, 20 nt, Human
cccagccuccaagcuccauc

SEQ ID NO: 1729306 - RNA, 18 nt, Human
cccagccuccaagcucca

SEQ ID NO: 1729307 - RNA, 12 nt, Human
cccagccccauc

SEQ ID NO: 1729308 - RNA, 11 nt, Human
cccagccccau

SEQ ID NO: 1729309 - RNA, 17 nt, Human
cccagccccaaugaaca

SEQ ID NO: 1729310 - RNA, 13 nt, Human
cccagccccaaug

SEQ ID NO: 1729311 - RNA, 16 nt, Human
cccagaggcuggguga

SEQ ID NO: 1729312 - RNA, 18 nt, Human
cccaggaggccagccuug

SEQ ID NO: 1729313 - RNA, 17 nt, Human
cccaugucucgacucau

SEQ ID NO: 1729314 - RNA, 16 nt, Human
cccaugucucgacuca

SEQ ID NO: 1729315 - RNA, 21 nt, Human
ccccaaauggaaaugggcaga

SEQ ID NO: 1729316 - RNA, 20 nt, Human
cccaugagccucagcauccu

SEQ ID NO: 1729317 - RNA, 16 nt, Human
cccaugagccucagca

SEQ ID NO: 1729318 - RNA, 15 nt, Human
cccaugagccucagc

SEQ ID NO: 1729319 - RNA, 13 nt, Human
cccaugcugcccu

SEQ ID NO: 1729320 - RNA, 12 nt, Human
cccaugcugccc

SEQ ID NO: 1729321 - RNA, 14 nt, Human
cccaugcugcccug

SEQ ID NO: 1729322 - RNA, 20 nt, Human
cccaucugugaaaggaaaga

SEQ ID NO: 1729323 - RNA, 13 nt, Human
cccaucucacaca

SEQ ID NO: 1729324 - RNA, 18 nt, Human
cccaucucacacaugagc

SEQ ID NO: 1729325 - RNA, 14 nt, Human
cccaguuagcucuc

SEQ ID NO: 1729326 - RNA, 20 nt, Human
cccagugguuccuaauccuc

SEQ ID NO: 1729327 - RNA, 17 nt, Human
cccagugccgagaagga

SEQ ID NO: 1729328 - RNA, 19 nt, Human
cccagucuggaaugcagug

SEQ ID NO: 1729329 - RNA, 18 nt, Human
cccagucuggaaugcagu

SEQ ID NO: 1729330 - RNA, 10 nt, Human
cccagucugg

SEQ ID NO: 1729331 - RNA, 21 nt, Human
cccagugcccacaggaucagu

SEQ ID NO: 1729332 - RNA, 15 nt, Human
cccagugccgagaag

SEQ ID NO: 1729333 - RNA, 15 nt, Human
cccaggcauucccca

SEQ ID NO: 1729334 - RNA, 23 nt, Human
cccaggcaggucuugaacuccug

SEQ ID NO: 1729335 - RNA, 16 nt, Human
cccaggaggccagccu

SEQ ID NO: 1729336 - RNA, 15 nt, Human
cccaggaggccagcc

SEQ ID NO: 1729337 - RNA, 18 nt, Human
cccaggcauuccccagga

SEQ ID NO: 1729338 - RNA, 17 nt, Human
cccaggcauuccccagg

SEQ ID NO: 1729339 - RNA, 19 nt, Human
cccagggugggaagggcua

SEQ ID NO: 1729340 - RNA, 13 nt, Human
cccagguuucuau

SEQ ID NO: 1729341 - RNA, 22 nt, Human
cccaugagccucagcauccugg

SEQ ID NO: 1729342 - RNA, 16 nt, Human
ccauccugaggcucca

SEQ ID NO: 1729343 - RNA, 15 nt, Human
ccauccugaggcucc

SEQ ID NO: 1729344 - RNA, 21 nt, Human
ccauccucuguacagagccca

SEQ ID NO: 1729345 - RNA, 16 nt, Human
ccaucaugucuggcua

SEQ ID NO: 1729346 - RNA, 14 nt, Human
ccaucaugucuggc

SEQ ID NO: 1729347 - RNA, 16 nt, Human
ccaucgcugucaucuc

SEQ ID NO: 1729348 - RNA, 19 nt, Human
ccauauucuguuggccagu

SEQ ID NO: 1729349 - RNA, 18 nt, Human
ccauauucuguuggccag

SEQ ID NO: 1729350 - RNA, 15 nt, Human
ccauauucuguuggc

SEQ ID NO: 1729351 - RNA, 23 nt, Human
ccauagagagcaagacgcugugc

SEQ ID NO: 1729352 - RNA, 12 nt, Human
ccaucacccgcu

SEQ ID NO: 1729353 - RNA, 23 nt, Human
ccagggacagaggggguggccuc

SEQ ID NO: 1729354 - RNA, 12 nt, Human
ccaggccugccu

SEQ ID NO: 1729355 - RNA, 23 nt, Human
ccauguuggccaggcuggucuca

SEQ ID NO: 1729356 - RNA, 21 nt, Human
ccagcugugcucuggacaggc

SEQ ID NO: 1729357 - RNA, 20 nt, Human
ccagcugugcucuggacagg

SEQ ID NO: 1729358 - RNA, 18 nt, Human
ccagcugugcucuggaca

SEQ ID NO: 1729359 - RNA, 17 nt, Human
ccagcuggguuggaaaa

SEQ ID NO: 1729360 - RNA, 16 nt, Human
ccagcuggguuggaaa

SEQ ID NO: 1729361 - RNA, 15 nt, Human
ccagcugcuugggcu

SEQ ID NO: 1729362 - RNA, 13 nt, Human
ccagcugcuuggg

SEQ ID NO: 1729363 - RNA, 18 nt, Human
ccagcugcuugggcuuca

SEQ ID NO: 1729364 - RNA, 16 nt, Human
ccagcugcuugggcuu

SEQ ID NO: 1729365 - RNA, 12 nt, Human
ccagcuggccgg

SEQ ID NO: 1729366 - RNA, 20 nt, Human
ccagcuggccgggagccuga

SEQ ID NO: 1729367 - RNA, 14 nt, Human
ccagcuggccggga

SEQ ID NO: 1729368 - RNA, 19 nt, Human
ccaggccuccuacagcuug

SEQ ID NO: 1729369 - RNA, 18 nt, Human
ccaggccuccuacagcuu

SEQ ID NO: 1729370 - RNA, 13 nt, Human
ccaggccuccuac

SEQ ID NO: 1729371 - RNA, 19 nt, Human
ccaggcccucugcccacuc

SEQ ID NO: 1729372 - RNA, 18 nt, Human
ccaggcccucugcccacu

SEQ ID NO: 1729373 - RNA, 17 nt, Human
ccaggcccucugcccac

SEQ ID NO: 1729374 - RNA, 23 nt, Human
ccaggccccugccacccugggga

SEQ ID NO: 1729375 - RNA, 21 nt, Human
ccaggccccugccacccuggg

SEQ ID NO: 1729376 - RNA, 21 nt, Human
ccaggccagagggagugacag

SEQ ID NO: 1729377 - RNA, 14 nt, Human
ccaggccagaggga

SEQ ID NO: 1729378 - RNA, 14 nt, Human
ccaggagcagccac

SEQ ID NO: 1729379 - RNA, 13 nt, Human
ccaggagcagcca

SEQ ID NO: 1729380 - RNA, 12 nt, Human
ccaggagcagcc

SEQ ID NO: 1729381 - RNA, 19 nt, Human
ccaggaagccagcaggcuc

SEQ ID NO: 1729382 - RNA, 17 nt, Human
ccaggaagccagcaggc

SEQ ID NO: 1729383 - RNA, 15 nt, Human
ccaggaagccagcag

SEQ ID NO: 1729384 - RNA, 23 nt, Human
ccagcugugcucuggacaggcau

SEQ ID NO: 1729385 - RNA, 22 nt, Human
ccagcugugcucuggacaggca

SEQ ID NO: 1729386 - RNA, 20 nt, Human
ccaggaagccagcaggcucu

SEQ ID NO: 1729387 - RNA, 15 nt, Human
ccaagaccuucuccu

SEQ ID NO: 1729388 - RNA, 15 nt, Human
ccaacccucaucacc

SEQ ID NO: 1729389 - RNA, 13 nt, Human
ccaacccucauca

SEQ ID NO: 1729390 - RNA, 18 nt, Human
ccaacccuggcacccagg

SEQ ID NO: 1729391 - RNA, 22 nt, Human
ccaaauucuuucaguggcuacc

SEQ ID NO: 1729392 - RNA, 15 nt, Human
ccaaauucuuucagu

SEQ ID NO: 1729393 - RNA, 14 nt, Human
ccaacauacuccca

SEQ ID NO: 1729394 - RNA, 16 nt, Human
ccaacaucaacaucuu

SEQ ID NO: 1729395 - RNA, 14 nt, Human
ccaaagaugcagcc

SEQ ID NO: 1729396 - RNA, 13 nt, Human
ccaaagaugcagc

SEQ ID NO: 1729397 - RNA, 18 nt, Human
ccaaggcuagaaccaccu

SEQ ID NO: 1729398 - RNA, 14 nt, Human
ccaagcuccaucuc

SEQ ID NO: 1729399 - RNA, 13 nt, Human
ccaagcucccagg

SEQ ID NO: 1729400 - RNA, 12 nt, Human
ccaagcucccag

SEQ ID NO: 1729401 - RNA, 23 nt, Human
ccaagccguggcuucccgcucag

SEQ ID NO: 1729402 - RNA, 14 nt, Human
ccaagccguggcuu

SEQ ID NO: 1729403 - RNA, 14 nt, Human
ccaagcaggacaug

SEQ ID NO: 1729404 - RNA, 21 nt, Human
ccaagccguggcuucccgcuc

SEQ ID NO: 1729405 - RNA, 17 nt, Human
ccaagccguggcuuccc

SEQ ID NO: 1729406 - RNA, 16 nt, Human
ccaagccguggcuucc

SEQ ID NO: 1729407 - RNA, 15 nt, Human
ccaagccguggcuuc

SEQ ID NO: 1729408 - RNA, 16 nt, Human
ccacaagaaaugaaag

SEQ ID NO: 1729409 - RNA, 22 nt, Human
ccacaagaaaugaaagcaggga

SEQ ID NO: 1729410 - RNA, 13 nt, Human
ccacaagagccca

SEQ ID NO: 1729411 - RNA, 16 nt, Human
ccacaagacccuugug

SEQ ID NO: 1729412 - RNA, 18 nt, Human
ccacaaaggagagcuagc

SEQ ID NO: 1729413 - RNA, 13 nt, Human
ccacaacacacag

SEQ ID NO: 1729414 - RNA, 14 nt, Human
ccaauauuguacag

SEQ ID NO: 1729415 - RNA, 15 nt, Human
ccaauauuguacagu

SEQ ID NO: 1729416 - RNA, 16 nt, Human
ccaauauuguacaguu

SEQ ID NO: 1729417 - RNA, 18 nt, Human
ccaauauuguacaguuuu

SEQ ID NO: 1729418 - RNA, 23 nt, Human
ccaauuuuuuaagugaaaauaua

SEQ ID NO: 1729419 - RNA, 19 nt, Human
ccaaggcugauuaaaccaa

SEQ ID NO: 1729420 - RNA, 16 nt, Human
ccaaggcucugagcaa

SEQ ID NO: 1729421 - RNA, 14 nt, Human
ccaaggcuggggga

SEQ ID NO: 1729422 - RNA, 20 nt, Human
ccaauauucauagcagcuua

SEQ ID NO: 1729423 - RNA, 16 nt, Human
ccaaguggcucccaca

SEQ ID NO: 1729424 - RNA, 13 nt, Human
ccaaguggcuccc

SEQ ID NO: 1729425 - RNA, 20 nt, Human
ccacaaguuaaauaaaucau

SEQ ID NO: 1729426 - RNA, 15 nt, Human
ccacaaguuaaauaa

SEQ ID NO: 1729427 - RNA, 19 nt, Human
ccacaagagcccaggccuc

SEQ ID NO: 1729428 - RNA, 18 nt, Human
ccacaagagcccaggccu

SEQ ID NO: 1729429 - RNA, 17 nt, Human
ccacaagagcccaggcc

SEQ ID NO: 1729430 - RNA, 16 nt, Human
ccacaagagcccaggc

SEQ ID NO: 1729431 - RNA, 21 nt, Human
ccacaagagcccaggccuccu

SEQ ID NO: 1729432 - RNA, 20 nt, Human
ccacaagagcccaggccucc

SEQ ID NO: 1729433 - RNA, 14 nt, Human
cauugcaauagaaa

SEQ ID NO: 1729434 - RNA, 13 nt, Human
cauugcaauagaa

SEQ ID NO: 1729435 - RNA, 15 nt, Human
cauugcaauagaaau

SEQ ID NO: 1729436 - RNA, 21 nt, Human
cauuuacuuuguguucaccuu

SEQ ID NO: 1729437 - RNA, 17 nt, Human
cauuuacuuuguguuca

SEQ ID NO: 1729438 - RNA, 18 nt, Human
cauuucccaacacaaaga

SEQ ID NO: 1729439 - RNA, 21 nt, Human
cauuucuuccacaagagccca

SEQ ID NO: 1729440 - RNA, 19 nt, Human
cauugaaaucuuuuugcuu

SEQ ID NO: 1729441 - RNA, 22 nt, Human
cauugaccugaggcccuucucu

SEQ ID NO: 1729442 - RNA, 13 nt, Human
cauugaccugagg

SEQ ID NO: 1729443 - RNA, 19 nt, Human
cauuuuauuuuauuaugca

SEQ ID NO: 1729444 - RNA, 22 nt, Human
cauuuuauuuuauuaugcauga

SEQ ID NO: 1729445 - RNA, 21 nt, Human
cauuuuauuuuauuaugcaug

SEQ ID NO: 1729446 - RNA, 22 nt, Human
cauuugaggucuguucuuucca

SEQ ID NO: 1729447 - RNA, 24 nt, Human
cauuuugcuaaaugugaaugauga

SEQ ID NO: 1729448 - RNA, 21 nt, Human
cauuuugcuaaaugugaauga

SEQ ID NO: 1729449 - RNA, 18 nt, Human
cauuuugcuaaaugugaa

SEQ ID NO: 1729450 - RNA, 22 nt, Human
cauuuugggguacccacugcuc

SEQ ID NO: 1729451 - RNA, 21 nt, Human
cauuuugggguacccacugcu

SEQ ID NO: 1729452 - RNA, 20 nt, Human
cauuuugggguacccacugc

SEQ ID NO: 1729453 - RNA, 15 nt, Human
cauuuuuaagugcug

SEQ ID NO: 1729454 - RNA, 20 nt, Human
cauuuuuaagugcugcauuu

SEQ ID NO: 1729455 - RNA, 19 nt, Human
cauuuuuaguagagacagg

SEQ ID NO: 1729456 - RNA, 23 nt, Human
cauuuugggguacccacugcucu

SEQ ID NO: 1729457 - RNA, 18 nt, Human
ccaaaauaaaacuuuuua

SEQ ID NO: 1729458 - RNA, 21 nt, Human
ccaaaauaaaacuuuuuaaaa

SEQ ID NO: 1729459 - RNA, 20 nt, Human
cauuuuuaguagagacaggg

SEQ ID NO: 1729460 - RNA, 23 nt, Human
cauuucuuccacaagagcccagg

SEQ ID NO: 1729461 - RNA, 14 nt, Human
cauuugagcagggc

SEQ ID NO: 1729462 - RNA, 16 nt, Human
cauuugagcagggcuc

SEQ ID NO: 1729463 - RNA, 17 nt, Human
cauuugaggucuguucu

SEQ ID NO: 1729464 - RNA, 18 nt, Human
cauuugaggucuguucuu

SEQ ID NO: 1729465 - RNA, 19 nt, Human
cauuugaggucuguucuuu

SEQ ID NO: 1729466 - RNA, 18 nt, Human
cauuagcaguuugcuuug

SEQ ID NO: 1729467 - RNA, 17 nt, Human
cauuagcaguuugcuuu

SEQ ID NO: 1729468 - RNA, 15 nt, Human
cauguuuuguuuacg

SEQ ID NO: 1729469 - RNA, 21 nt, Human
cauuaaagccugaguuugcuu

SEQ ID NO: 1729470 - RNA, 18 nt, Human
cauguuuuucuucucccu

SEQ ID NO: 1729471 - RNA, 21 nt, Human
cauguuucuuuguaaugaaaa

SEQ ID NO: 1729472 - RNA, 23 nt, Human
cauguuugauguaucugagcagg

SEQ ID NO: 1729473 - RNA, 22 nt, Human
cauguuucuuuguaaugaaaac

SEQ ID NO: 1729474 - RNA, 22 nt, Human
caugugccagguuuuuggucug

SEQ ID NO: 1729475 - RNA, 21 nt, Human
caugugccagguuuuuggucu

SEQ ID NO: 1729476 - RNA, 15 nt, Human
caugugcacaugcac

SEQ ID NO: 1729477 - RNA, 16 nt, Human
cauggucggaaaacau

SEQ ID NO: 1729478 - RNA, 21 nt, Human
cauguaauuaaguacuaugua

SEQ ID NO: 1729479 - RNA, 18 nt, Human
cauguaauuaaguacuau

SEQ ID NO: 1729480 - RNA, 15 nt, Human
caugucgccucugca

SEQ ID NO: 1729481 - RNA, 14 nt, Human
caugucgccucugc

SEQ ID NO: 1729482 - RNA, 20 nt, Human
caugucgccucugcauucag

SEQ ID NO: 1729483 - RNA, 18 nt, Human
caugucgccucugcauuc

SEQ ID NO: 1729484 - RNA, 23 nt, Human
caugucuuuucuugcaugaggcu

SEQ ID NO: 1729485 - RNA, 21 nt, Human
caugucuuuucuugcaugagg

SEQ ID NO: 1729486 - RNA, 19 nt, Human
caugucuuuucuugcauga

SEQ ID NO: 1729487 - RNA, 14 nt, Human
caugucuuuucuug

SEQ ID NO: 1729488 - RNA, 17 nt, Human
caugugaaaucauucau

SEQ ID NO: 1729489 - RNA, 16 nt, Human
caugugaaaucauuca

SEQ ID NO: 1729490 - RNA, 15 nt, Human
caugugaaaucauuc

SEQ ID NO: 1729491 - RNA, 22 nt, Human
cauggaaguacuauaauuuacc

SEQ ID NO: 1729492 - RNA, 20 nt, Human
cauggaaguacuauaauuua

SEQ ID NO: 1729493 - RNA, 18 nt, Human
cauggacaugaucuucuu

SEQ ID NO: 1729494 - RNA, 16 nt, Human
cauggaauaacaugua

SEQ ID NO: 1729495 - RNA, 22 nt, Human
caugcugucccuuacgugaguc

SEQ ID NO: 1729496 - RNA, 23 nt, Human
caugccuggauggggcugcaccg

SEQ ID NO: 1729497 - RNA, 21 nt, Human
caugccuggauggggcugcac

SEQ ID NO: 1729498 - RNA, 18 nt, Human
caugccuggauggggcug

SEQ ID NO: 1729499 - RNA, 17 nt, Human
caugggacagggaggac

SEQ ID NO: 1729500 - RNA, 22 nt, Human
caugggaaugaaugucagugug

SEQ ID NO: 1729501 - RNA, 15 nt, Human
caugggccuccugug

SEQ ID NO: 1729502 - RNA, 17 nt, Human
caugggccuccugugug

SEQ ID NO: 1729503 - RNA, 16 nt, Human
caugggccuccugugu

SEQ ID NO: 1729504 - RNA, 17 nt, Human
cauggagguuugaagau

SEQ ID NO: 1729505 - RNA, 13 nt, Human
cauggacuuuguu

SEQ ID NO: 1729506 - RNA, 11 nt, Human
cauggacuuug

SEQ ID NO: 1729507 - RNA, 18 nt, Human
caugggaaugaaugucag

SEQ ID NO: 1729508 - RNA, 16 nt, Human
cauggaguauauguca

SEQ ID NO: 1729509 - RNA, 13 nt, Human
caugccuggaugg

SEQ ID NO: 1729510 - RNA, 19 nt, Human
caugccucucucaggccaa

SEQ ID NO: 1729511 - RNA, 18 nt, Human
caugccucucucaggcca

SEQ ID NO: 1729512 - RNA, 17 nt, Human
caugccucucucaggcc

SEQ ID NO: 1729513 - RNA, 16 nt, Human
caugccucucucaggc

SEQ ID NO: 1729514 - RNA, 15 nt, Human
caugccucucucagg

SEQ ID NO: 1729515 - RNA, 14 nt, Human
caugccucucucag

SEQ ID NO: 1729516 - RNA, 13 nt, Human
caugccccugaac

SEQ ID NO: 1729517 - RNA, 20 nt, Human
caugccagcuuaucucaggg

SEQ ID NO: 1729518 - RNA, 19 nt, Human
caugccagcuuaucucagg

SEQ ID NO: 1729519 - RNA, 19 nt, Human
caguugaaaaacagcugag

SEQ ID NO: 1729520 - RNA, 18 nt, Human
caguugaaaaacagcuga

SEQ ID NO: 1729521 - RNA, 12 nt, Human
caguugaaaaac

SEQ ID NO: 1729522 - RNA, 22 nt, Human
caguucggugagcuacaaaugc

SEQ ID NO: 1729523 - RNA, 15 nt, Human
caguucucuccuucu

SEQ ID NO: 1729524 - RNA, 14 nt, Human
caguucucuccuuc

SEQ ID NO: 1729525 - RNA, 13 nt, Human
caguucucuccuu

SEQ ID NO: 1729526 - RNA, 22 nt, Human
caguucucuccuucuucccccc

SEQ ID NO: 1729527 - RNA, 19 nt, Human
caguguuguggauuuaaca

SEQ ID NO: 1729528 - RNA, 20 nt, Human
caguguuguggauuuaacag

SEQ ID NO: 1729529 - RNA, 22 nt, Human
caguguuguggauuuaacagaa

SEQ ID NO: 1729530 - RNA, 20 nt, Human
caguuaagccuuuggaaaca

SEQ ID NO: 1729531 - RNA, 14 nt, Human
caguuaagagaaau

SEQ ID NO: 1729532 - RNA, 13 nt, Human
caguuaagagaaa

SEQ ID NO: 1729533 - RNA, 17 nt, Human
caguuaagccuuuggaa

SEQ ID NO: 1729534 - RNA, 15 nt, Human
caguuaagccuuugg

SEQ ID NO: 1729535 - RNA, 14 nt, Human
caguuaagccuuug

SEQ ID NO: 1729536 - RNA, 14 nt, Human
caguuacucagaau

SEQ ID NO: 1729537 - RNA, 14 nt, Human
cagugucaaugcag

SEQ ID NO: 1729538 - RNA, 23 nt, Human
caguguacauggaauaacaugua

SEQ ID NO: 1729539 - RNA, 20 nt, Human
caguguacauggaauaacau

SEQ ID NO: 1729540 - RNA, 16 nt, Human
caguguacauggaaua

SEQ ID NO: 1729541 - RNA, 17 nt, Human
caguguacagucuugua

SEQ ID NO: 1729542 - RNA, 18 nt, Human
caguguacagucuuguau

SEQ ID NO: 1729543 - RNA, 12 nt, Human
caguguacaguc

SEQ ID NO: 1729544 - RNA, 15 nt, Human
caguguacagucuug

SEQ ID NO: 1729545 - RNA, 12 nt, Human
cagugugacuga

SEQ ID NO: 1729546 - RNA, 14 nt, Human
cagugugacaagga

SEQ ID NO: 1729547 - RNA, 22 nt, Human
cagugguuccuaauccucuagg

SEQ ID NO: 1729548 - RNA, 16 nt, Human
cagugggacagggcau

SEQ ID NO: 1729549 - RNA, 11 nt, Human
cagugggaacu

SEQ ID NO: 1729550 - RNA, 16 nt, Human
caguggcagcugcuuu

SEQ ID NO: 1729551 - RNA, 15 nt, Human
caguggcagcugcuu

SEQ ID NO: 1729552 - RNA, 14 nt, Human
caguggcagcugcu

SEQ ID NO: 1729553 - RNA, 13 nt, Human
caguggcagcugc

SEQ ID NO: 1729554 - RNA, 12 nt, Human
caguggcagcug

SEQ ID NO: 1729555 - RNA, 16 nt, Human
caguggaaccagccca

SEQ ID NO: 1729556 - RNA, 23 nt, Human
caguugccagucaccccggccac

SEQ ID NO: 1729557 - RNA, 16 nt, Human
caguuggguggaugcc

SEQ ID NO: 1729558 - RNA, 22 nt, Human
caguuggucccccuuccaugga

SEQ ID NO: 1729559 - RNA, 21 nt, Human
caguuggucccccuuccaugg

SEQ ID NO: 1729560 - RNA, 20 nt, Human
caguuggucccccuuccaug

SEQ ID NO: 1729561 - RNA, 19 nt, Human
caguuggucccccuuccau

SEQ ID NO: 1729562 - RNA, 18 nt, Human
caguuggucccccuucca

SEQ ID NO: 1729563 - RNA, 19 nt, Human
caguuggguggaugccugg

SEQ ID NO: 1729564 - RNA, 18 nt, Human
caguuggguggaugccug

SEQ ID NO: 1729565 - RNA, 15 nt, Human
caguuuuuauugcuu

SEQ ID NO: 1729566 - RNA, 17 nt, Human
caguuguuagugugucu

SEQ ID NO: 1729567 - RNA, 19 nt, Human
cauaccacuuuuguucuug

SEQ ID NO: 1729568 - RNA, 12 nt, Human
cauacccacccc

SEQ ID NO: 1729569 - RNA, 11 nt, Human
cauacccaccc

SEQ ID NO: 1729570 - RNA, 13 nt, Human
cauaccacuuuug

SEQ ID NO: 1729571 - RNA, 14 nt, Human
cauaccacuuuugu

SEQ ID NO: 1729572 - RNA, 15 nt, Human
cauaccacuuuuguu

SEQ ID NO: 1729573 - RNA, 18 nt, Human
cauaccacuuuuguucuu

SEQ ID NO: 1729574 - RNA, 15 nt, Human
cauaauacuugcuuu

SEQ ID NO: 1729575 - RNA, 13 nt, Human
cauaacuagaacu

SEQ ID NO: 1729576 - RNA, 14 nt, Human
cauaagauaaaugu

SEQ ID NO: 1729577 - RNA, 16 nt, Human
cauaaccuagccuuag

SEQ ID NO: 1729578 - RNA, 21 nt, Human
cauaaaaauuagccaagugug

SEQ ID NO: 1729579 - RNA, 22 nt, Human
cauaaacaagaccacguuucua

SEQ ID NO: 1729580 - RNA, 20 nt, Human
cauaaacaagaccacguuuc

SEQ ID NO: 1729581 - RNA, 21 nt, Human
cauaaacaagaccacguuucu

SEQ ID NO: 1729582 - RNA, 16 nt, Human
cauaaagcaggcagaa

SEQ ID NO: 1729583 - RNA, 14 nt, Human
cauaaagcaggcag

SEQ ID NO: 1729584 - RNA, 21 nt, Human
cauacccacccccacccaagg

SEQ ID NO: 1729585 - RNA, 18 nt, Human
cauacccacccccaccca

SEQ ID NO: 1729586 - RNA, 17 nt, Human
cauacccacccccaccc

SEQ ID NO: 1729587 - RNA, 14 nt, Human
cauacccaccccca

SEQ ID NO: 1729588 - RNA, 13 nt, Human
cauacguacacau

SEQ ID NO: 1729589 - RNA, 15 nt, Human
cauacguacacauuu

SEQ ID NO: 1729590 - RNA, 16 nt, Human
cauacguacacauuuu

SEQ ID NO: 1729591 - RNA, 17 nt, Human
cauacguacacauuuua

SEQ ID NO: 1729592 - RNA, 18 nt, Human
cauacguacacauuuuau

SEQ ID NO: 1729593 - RNA, 14 nt, Human
cauacuaaccagca

SEQ ID NO: 1729594 - RNA, 21 nt, Human
cauacuaaccagcagaaaugc

SEQ ID NO: 1729595 - RNA, 20 nt, Human
cauacuaauuauacccccug

SEQ ID NO: 1729596 - RNA, 13 nt, Human
caucucagcccac

SEQ ID NO: 1729597 - RNA, 20 nt, Human
caucucacacaugagcauca

SEQ ID NO: 1729598 - RNA, 17 nt, Human
caucucacacaugagca

SEQ ID NO: 1729599 - RNA, 16 nt, Human
caucucacacaugagc

SEQ ID NO: 1729600 - RNA, 18 nt, Human
caucuagguaaauuacag

SEQ ID NO: 1729601 - RNA, 17 nt, Human
caucuagguaaauuaca

SEQ ID NO: 1729602 - RNA, 15 nt, Human
caucuacccuccgau

SEQ ID NO: 1729603 - RNA, 12 nt, Human
caucuaggauuu

SEQ ID NO: 1729604 - RNA, 18 nt, Human
cauccucuguacagagcc

SEQ ID NO: 1729605 - RNA, 15 nt, Human
cauccucuguacaga

SEQ ID NO: 1729606 - RNA, 19 nt, Human
cauccucuguacagagccc

SEQ ID NO: 1729607 - RNA, 21 nt, Human
cauccucuguacagagcccac

SEQ ID NO: 1729608 - RNA, 19 nt, Human
cauccuccucagaucuucu

SEQ ID NO: 1729609 - RNA, 18 nt, Human
cauccuccucagaucuuc

SEQ ID NO: 1729610 - RNA, 16 nt, Human
cauccuccucagaucu

SEQ ID NO: 1729611 - RNA, 15 nt, Human
cauccuccucagauc

SEQ ID NO: 1729612 - RNA, 12 nt, Human
cauccuccucag

SEQ ID NO: 1729613 - RNA, 11 nt, Human
cauccuccuca

SEQ ID NO: 1729614 - RNA, 20 nt, Human
cauccuccgccucccggguu

SEQ ID NO: 1729615 - RNA, 22 nt, Human
cauccucauacccacccccacc

SEQ ID NO: 1729616 - RNA, 21 nt, Human
cauccucauacccacccccac

SEQ ID NO: 1729617 - RNA, 18 nt, Human
cauccucauacccacccc

SEQ ID NO: 1729618 - RNA, 17 nt, Human
cauccucauacccaccc

SEQ ID NO: 1729619 - RNA, 13 nt, Human
cauccucccaagg

SEQ ID NO: 1729620 - RNA, 16 nt, Human
cauccucauacccacc

SEQ ID NO: 1729621 - RNA, 15 nt, Human
cauccucauacccac

SEQ ID NO: 1729622 - RNA, 16 nt, Human
cauccuacaagacaca

SEQ ID NO: 1729623 - RNA, 20 nt, Human
caucuugcucugcugacaga

SEQ ID NO: 1729624 - RNA, 14 nt, Human
caucuugcucugcu

SEQ ID NO: 1729625 - RNA, 15 nt, Human
caucuugcucugcug

SEQ ID NO: 1729626 - RNA, 13 nt, Human
caucuugcucugc

SEQ ID NO: 1729627 - RNA, 22 nt, Human
caucucuucuggguuccuuccu

SEQ ID NO: 1729628 - RNA, 14 nt, Human
caucuccacuccag

SEQ ID NO: 1729629 - RNA, 22 nt, Human
caucuuccaaggguacuaagga

SEQ ID NO: 1729630 - RNA, 16 nt, Human
caucucuuguuuaaau

SEQ ID NO: 1729631 - RNA, 19 nt, Human
caucccucuggggcuguuc

SEQ ID NO: 1729632 - RNA, 13 nt, Human
caucccugaaggc

SEQ ID NO: 1729633 - RNA, 11 nt, Human
caucccugaag

SEQ ID NO: 1729634 - RNA, 17 nt, Human
cauccagguucagcuug

SEQ ID NO: 1729635 - RNA, 15 nt, Human
cauccagguucagcu

SEQ ID NO: 1729636 - RNA, 15 nt, Human
caucaccaacgucug

SEQ ID NO: 1729637 - RNA, 13 nt, Human
caucauugaaauc

SEQ ID NO: 1729638 - RNA, 21 nt, Human
caucauugaaaucuuuuugcu

SEQ ID NO: 1729639 - RNA, 20 nt, Human
caucauugaaaucuuuuugc

SEQ ID NO: 1729640 - RNA, 15 nt, Human
caucauugaaaucuu

SEQ ID NO: 1729641 - RNA, 14 nt, Human
caucauugaaaucu

SEQ ID NO: 1729642 - RNA, 17 nt, Human
cauccuacaagacacag

SEQ ID NO: 1729643 - RNA, 21 nt, Human
caucccugaaggccccgccca

SEQ ID NO: 1729644 - RNA, 19 nt, Human
caucccugaaggccccgcc

SEQ ID NO: 1729645 - RNA, 18 nt, Human
caucccugaaggccccgc

SEQ ID NO: 1729646 - RNA, 17 nt, Human
caucccugaaggccccg

SEQ ID NO: 1729647 - RNA, 22 nt, Human
caucccugaaggccccgcccag

SEQ ID NO: 1729648 - RNA, 14 nt, Human
cauccuaacuccau

SEQ ID NO: 1729649 - RNA, 21 nt, Human
cauccuaacuccaugucucug

SEQ ID NO: 1729650 - RNA, 23 nt, Human
cauagagagcaagacgcugugcu

SEQ ID NO: 1729651 - RNA, 21 nt, Human
cauagagagcaagacgcugug

SEQ ID NO: 1729652 - RNA, 19 nt, Human
cauagagagcaagacgcug

SEQ ID NO: 1729653 - RNA, 20 nt, Human
cauagaauaaaauuuuuaau

SEQ ID NO: 1729654 - RNA, 14 nt, Human
cauagaauaaaauu

SEQ ID NO: 1729655 - RNA, 20 nt, Human
cauacucccaucugugaaag

SEQ ID NO: 1729656 - RNA, 18 nt, Human
cauacucccaucugugaa

SEQ ID NO: 1729657 - RNA, 15 nt, Human
cauacucccaucugu

SEQ ID NO: 1729658 - RNA, 16 nt, Human
cauacucccaucugug

SEQ ID NO: 1729659 - RNA, 11 nt, Human
cauacucugcu

SEQ ID NO: 1729660 - RNA, 22 nt, Human
cauaguggcuuaaaacaacacu

SEQ ID NO: 1729661 - RNA, 22 nt, Human
cauagugaugguuccccuguuc

SEQ ID NO: 1729662 - RNA, 20 nt, Human
cauaguaugguggcuggguu

SEQ ID NO: 1729663 - RNA, 19 nt, Human
cauaguaugguggcugggu

SEQ ID NO: 1729664 - RNA, 18 nt, Human
cauaguaugguggcuggg

SEQ ID NO: 1729665 - RNA, 22 nt, Human
cauauauauguuuuaagaggca

SEQ ID NO: 1729666 - RNA, 23 nt, Human
cauauauauguuuuaagaggcag

SEQ ID NO: 1729667 - RNA, 21 nt, Human
cauaugauguacauguacuga

SEQ ID NO: 1729668 - RNA, 17 nt, Human
cauaugauguacaugua

SEQ ID NO: 1729669 - RNA, 15 nt, Human
cauaugauguacaug

SEQ ID NO: 1729670 - RNA, 22 nt, Human
caucaagucuuucacauuuaaa

SEQ ID NO: 1729671 - RNA, 14 nt, Human
caucaagaugugac

SEQ ID NO: 1729672 - RNA, 18 nt, Human
caucaaugaaugaaugaa

SEQ ID NO: 1729673 - RNA, 13 nt, Human
cauaugccugggc

SEQ ID NO: 1729674 - RNA, 14 nt, Human
cauauuuacuucuu

SEQ ID NO: 1729675 - RNA, 17 nt, Human
cauauuuacuucuuaua

SEQ ID NO: 1729676 - RNA, 16 nt, Human
cauauuuacuucuuau

SEQ ID NO: 1729677 - RNA, 20 nt, Human
cauauuuacuucuuauacau

SEQ ID NO: 1729678 - RNA, 12 nt, Human
cauauuuauaaa

SEQ ID NO: 1729679 - RNA, 17 nt, Human
cauauuuauaaaaauaa

SEQ ID NO: 1729680 - RNA, 15 nt, Human
ccuggauggggcugc

SEQ ID NO: 1729681 - RNA, 18 nt, Human
ccuggauggggcugcacc

SEQ ID NO: 1729682 - RNA, 17 nt, Human
ccuggauggggcugcac

SEQ ID NO: 1729683 - RNA, 18 nt, Human
ccuggccccucagggucc

SEQ ID NO: 1729684 - RNA, 21 nt, Human
ccuggccccucagggucccug

SEQ ID NO: 1729685 - RNA, 20 nt, Human
ccuggccccucagggucccu

SEQ ID NO: 1729686 - RNA, 15 nt, Human
ccuggggagaaagua

SEQ ID NO: 1729687 - RNA, 18 nt, Human
ccuggggaaccugacccc

SEQ ID NO: 1729688 - RNA, 13 nt, Human
ccugguguggaag

SEQ ID NO: 1729689 - RNA, 21 nt, Human
ccugguuuccugcccugggag

SEQ ID NO: 1729690 - RNA, 20 nt, Human
ccugguuuccugcccuggga

SEQ ID NO: 1729691 - RNA, 19 nt, Human
ccugguuuccugcccuggg

SEQ ID NO: 1729692 - RNA, 18 nt, Human
ccugguuuccugcccugg

SEQ ID NO: 1729693 - RNA, 19 nt, Human
ccugguggcagugggagcu

SEQ ID NO: 1729694 - RNA, 18 nt, Human
ccugguggcagugggagc

SEQ ID NO: 1729695 - RNA, 20 nt, Human
ccugguggcagugggagcug

SEQ ID NO: 1729696 - RNA, 17 nt, Human
ccugucucuacuaaaaa

SEQ ID NO: 1729697 - RNA, 22 nt, Human
ccugguuuccugcccugggagg

SEQ ID NO: 1729698 - RNA, 13 nt, Human
ccugcaggcagcc

SEQ ID NO: 1729699 - RNA, 12 nt, Human
ccugcaggcagc

SEQ ID NO: 1729700 - RNA, 14 nt, Human
ccugcaggcagcca

SEQ ID NO: 1729701 - RNA, 18 nt, Human
ccugaccccucauagccc

SEQ ID NO: 1729702 - RNA, 19 nt, Human
ccucuuucccucccuuccu

SEQ ID NO: 1729703 - RNA, 15 nt, Human
ccucuuugagugaag

SEQ ID NO: 1729704 - RNA, 22 nt, Human
ccucuugccacugccucuuccu

SEQ ID NO: 1729705 - RNA, 23 nt, Human
ccucuugccacugccucuuccuc

SEQ ID NO: 1729706 - RNA, 17 nt, Human
ccugcccaccuggccuc

SEQ ID NO: 1729707 - RNA, 15 nt, Human
ccugcccaccuggcc

SEQ ID NO: 1729708 - RNA, 19 nt, Human
ccugcccaggccccugcca

SEQ ID NO: 1729709 - RNA, 19 nt, Human
ccugcccaccuggccucug

SEQ ID NO: 1729710 - RNA, 18 nt, Human
ccugcccaccuggccucu

SEQ ID NO: 1729711 - RNA, 22 nt, Human
ccugcccaggccccugccaccc

SEQ ID NO: 1729712 - RNA, 21 nt, Human
ccugcccaggccccugccacc

SEQ ID NO: 1729713 - RNA, 15 nt, Human
ccugccucagccucc

SEQ ID NO: 1729714 - RNA, 16 nt, Human
ccugccucagccuccc

SEQ ID NO: 1729715 - RNA, 15 nt, Human
ccugccucucugcag

SEQ ID NO: 1729716 - RNA, 14 nt, Human
ccugccucucugca

SEQ ID NO: 1729717 - RNA, 20 nt, Human
ccugcugagucccaggcuga

SEQ ID NO: 1729718 - RNA, 19 nt, Human
ccugcugagucccaggcug

SEQ ID NO: 1729719 - RNA, 18 nt, Human
ccugcugagucccaggcu

SEQ ID NO: 1729720 - RNA, 13 nt, Human
ccugccucucugc

SEQ ID NO: 1729721 - RNA, 17 nt, Human
ccugccucagccucccg

SEQ ID NO: 1729722 - RNA, 16 nt, Human
ccucccuucucuucac

SEQ ID NO: 1729723 - RNA, 20 nt, Human
ccucccuuggggccuaugca

SEQ ID NO: 1729724 - RNA, 14 nt, Human
ccuccgccucuugg

SEQ ID NO: 1729725 - RNA, 13 nt, Human
ccuccgccucuug

SEQ ID NO: 1729726 - RNA, 20 nt, Human
ccucggacuuagcugggaga

SEQ ID NO: 1729727 - RNA, 19 nt, Human
ccucggacuuagcugggag

SEQ ID NO: 1729728 - RNA, 18 nt, Human
ccuccuuuucacaguucu

SEQ ID NO: 1729729 - RNA, 21 nt, Human
ccucgagguuucucaaagaaa

SEQ ID NO: 1729730 - RNA, 23 nt, Human
ccuccuuugugaggaagccgcug

SEQ ID NO: 1729731 - RNA, 19 nt, Human
ccuccuaucagaaguuucu

SEQ ID NO: 1729732 - RNA, 19 nt, Human
ccuccaagaccuucuccuu

SEQ ID NO: 1729733 - RNA, 17 nt, Human
ccuccaagaccuucucc

SEQ ID NO: 1729734 - RNA, 16 nt, Human
ccuccaagaccuucuc

SEQ ID NO: 1729735 - RNA, 12 nt, Human
ccucccaucacc

SEQ ID NO: 1729736 - RNA, 20 nt, Human
ccuccaagaccuucuccuuc

SEQ ID NO: 1729737 - RNA, 17 nt, Human
ccucccaucacccgcua

SEQ ID NO: 1729738 - RNA, 18 nt, Human
ccucaggcaggugggaug

SEQ ID NO: 1729739 - RNA, 12 nt, Human
ccucaggcaggu

SEQ ID NO: 1729740 - RNA, 10 nt, Human
ccucaggccu

SEQ ID NO: 1729741 - RNA, 21 nt, Human
ccucauuccaccuucccaugc

SEQ ID NO: 1729742 - RNA, 20 nt, Human
ccucaagugauucuccugcc

SEQ ID NO: 1729743 - RNA, 16 nt, Human
ccucaaccuccugggc

SEQ ID NO: 1729744 - RNA, 23 nt, Human
ccucaagugauucuccugccuca

SEQ ID NO: 1729745 - RNA, 23 nt, Human
ccucaacucuccuccagagucag

SEQ ID NO: 1729746 - RNA, 21 nt, Human
ccucaacucuccuccagaguc

SEQ ID NO: 1729747 - RNA, 15 nt, Human
ccucaaccuccuggg

SEQ ID NO: 1729748 - RNA, 19 nt, Human
ccucaacucuccuccagag

SEQ ID NO: 1729749 - RNA, 16 nt, Human
ccucaacaccucugca

SEQ ID NO: 1729750 - RNA, 14 nt, Human
ccucaaaugagaaa

SEQ ID NO: 1729751 - RNA, 12 nt, Human
ccgacagccugg

SEQ ID NO: 1729752 - RNA, 14 nt, Human
ccgacagccuggca

SEQ ID NO: 1729753 - RNA, 13 nt, Human
ccgacagccuggc

SEQ ID NO: 1729754 - RNA, 22 nt, Human
ccgacagccuggcacagggcag

SEQ ID NO: 1729755 - RNA, 15 nt, Human
ccgacagccuggcac

SEQ ID NO: 1729756 - RNA, 23 nt, Human
cccuuuuuuggcugcugaaggcu

SEQ ID NO: 1729757 - RNA, 22 nt, Human
cccuuuuuuggcugcugaaggc

SEQ ID NO: 1729758 - RNA, 21 nt, Human
cccuuuuuuggcugcugaagg

SEQ ID NO: 1729759 - RNA, 19 nt, Human
cccuucucuccagccccug

SEQ ID NO: 1729760 - RNA, 14 nt, Human
cccuucucuccagc

SEQ ID NO: 1729761 - RNA, 15 nt, Human
cccugugauggggcc

SEQ ID NO: 1729762 - RNA, 23 nt, Human
cccugugaguacuacaguccucc

SEQ ID NO: 1729763 - RNA, 21 nt, Human
cccugugaguacuacaguccu

SEQ ID NO: 1729764 - RNA, 14 nt, Human
cccuccuuucacca

SEQ ID NO: 1729765 - RNA, 15 nt, Human
cccugugggccccca

SEQ ID NO: 1729766 - RNA, 23 nt, Human
ccgcagcccugcagagggcacag

SEQ ID NO: 1729767 - RNA, 18 nt, Human
ccgcagcccugcagaggg

SEQ ID NO: 1729768 - RNA, 14 nt, Human
ccgcagcccugcag

SEQ ID NO: 1729769 - RNA, 18 nt, Human
ccggccaccugcggugcu

SEQ ID NO: 1729770 - RNA, 17 nt, Human
ccggccaccugcggugc

SEQ ID NO: 1729771 - RNA, 14 nt, Human
ccgucccccucugg

SEQ ID NO: 1729772 - RNA, 19 nt, Human
ccuagccuuagaagucaca

SEQ ID NO: 1729773 - RNA, 23 nt, Human
ccuagccugugccucugggacug

SEQ ID NO: 1729774 - RNA, 22 nt, Human
ccuagccuuagaagucacacag

SEQ ID NO: 1729775 - RNA, 13 nt, Human
ccuaauaaagcug

SEQ ID NO: 1729776 - RNA, 12 nt, Human
ccuaauaaagcu

SEQ ID NO: 1729777 - RNA, 13 nt, Human
ccuaauuccacag

SEQ ID NO: 1729778 - RNA, 21 nt, Human
ccuaaugcgcaggcuggcccu

SEQ ID NO: 1729779 - RNA, 13 nt, Human
ccaguuggucccc

SEQ ID NO: 1729780 - RNA, 21 nt, Human
ccaucccauaugccugggcag

SEQ ID NO: 1729781 - RNA, 20 nt, Human
ccaucccauaugccugggca

SEQ ID NO: 1729782 - RNA, 19 nt, Human
ccaucccauaugccugggc

SEQ ID NO: 1729783 - RNA, 20 nt, Human
ccaucccaaacccuucagug

SEQ ID NO: 1729784 - RNA, 19 nt, Human
ccauccagguucagcuugu

SEQ ID NO: 1729785 - RNA, 18 nt, Human
ccauccagguucagcuug

SEQ ID NO: 1729786 - RNA, 21 nt, Human
ccauaaucuggacuccucugu

SEQ ID NO: 1729787 - RNA, 14 nt, Human
ccauaaucuggacu

SEQ ID NO: 1729788 - RNA, 20 nt, Human
ccaguuggucccccuuccau

SEQ ID NO: 1729789 - RNA, 18 nt, Human
ccaguuggucccccuucc

SEQ ID NO: 1729790 - RNA, 20 nt, Human
ccaugaggaacaaggcaagg

SEQ ID NO: 1729791 - RNA, 23 nt, Human
ccaugaggaacaaggcaaggcug

SEQ ID NO: 1729792 - RNA, 18 nt, Human
ccaugaguccccuguuug

SEQ ID NO: 1729793 - RNA, 12 nt, Human
ccaugucgccuc

SEQ ID NO: 1729794 - RNA, 19 nt, Human
ccaugucgccucugcauuc

SEQ ID NO: 1729795 - RNA, 17 nt, Human
ccaugucgccucugcau

SEQ ID NO: 1729796 - RNA, 16 nt, Human
ccaugucgccucugca

SEQ ID NO: 1729797 - RNA, 15 nt, Human
ccaugucgccucugc

SEQ ID NO: 1729798 - RNA, 20 nt, Human
cccaacuaauuuuuguauuu

SEQ ID NO: 1729799 - RNA, 20 nt, Human
cccaacucaccccagcccca

SEQ ID NO: 1729800 - RNA, 17 nt, Human
cccaacucaccccagcc

SEQ ID NO: 1729801 - RNA, 15 nt, Human
cccaagcucugcucc

SEQ ID NO: 1729802 - RNA, 12 nt, Human
cccaagcucugc

SEQ ID NO: 1729803 - RNA, 14 nt, Human
cccaagcucugcuc

SEQ ID NO: 1729804 - RNA, 13 nt, Human
cccaagcucugcu

SEQ ID NO: 1729805 - RNA, 23 nt, Human
cccacugcuuuuggucuguguga

SEQ ID NO: 1729806 - RNA, 13 nt, Human
cccacucccugca

SEQ ID NO: 1729807 - RNA, 12 nt, Human
cccacccccacc

SEQ ID NO: 1729808 - RNA, 16 nt, Human
cccaacucaccccagc

SEQ ID NO: 1729809 - RNA, 15 nt, Human
cccaacucaccccag

SEQ ID NO: 1729810 - RNA, 22 nt, Human
ccauuucauuugugccagaaug

SEQ ID NO: 1729811 - RNA, 21 nt, Human
ccauuucauuugugccagaau

SEQ ID NO: 1729812 - RNA, 17 nt, Human
ccagccccagugcccac

SEQ ID NO: 1729813 - RNA, 14 nt, Human
ccagcagagcaccu

SEQ ID NO: 1729814 - RNA, 13 nt, Human
ccagcagagcacc

SEQ ID NO: 1729815 - RNA, 12 nt, Human
ccagcagagcac

SEQ ID NO: 1729816 - RNA, 17 nt, Human
ccagccccauccucugu

SEQ ID NO: 1729817 - RNA, 15 nt, Human
ccagccccauccucu

SEQ ID NO: 1729818 - RNA, 18 nt, Human
ccagccccauccucugua

SEQ ID NO: 1729819 - RNA, 12 nt, Human
ccagcagaaaug

SEQ ID NO: 1729820 - RNA, 24 nt, Human
ccagccccuucugacccaugcugc

SEQ ID NO: 1729821 - RNA, 23 nt, Human
ccagccccuucugacccaugcug

SEQ ID NO: 1729822 - RNA, 16 nt, Human
ccaggcuggcgugcag

SEQ ID NO: 1729823 - RNA, 12 nt, Human
ccaggcuggcgu

SEQ ID NO: 1729824 - RNA, 21 nt, Human
ccaggggaaaaucagccugcu

SEQ ID NO: 1729825 - RNA, 14 nt, Human
ccaggcaggucuug

SEQ ID NO: 1729826 - RNA, 12 nt, Human
ccaggcaggucu

SEQ ID NO: 1729827 - RNA, 23 nt, Human
ccaggcaggucuugaacuccugg

SEQ ID NO: 1729828 - RNA, 21 nt, Human
ccaggcugcucuugaacuccu

SEQ ID NO: 1729829 - RNA, 18 nt, Human
ccagucccccugccccag

SEQ ID NO: 1729830 - RNA, 13 nt, Human
ccccugcacucca

SEQ ID NO: 1729831 - RNA, 21 nt, Human
ccccugcaaagcccagcuuga

SEQ ID NO: 1729832 - RNA, 20 nt, Human
ccccugcaaagcccagcuug

SEQ ID NO: 1729833 - RNA, 18 nt, Human
ccccugcaaagcccagcu

SEQ ID NO: 1729834 - RNA, 15 nt, Human
ccccugacaacacuc

SEQ ID NO: 1729835 - RNA, 18 nt, Human
ccccucuggcuccagcug

SEQ ID NO: 1729836 - RNA, 16 nt, Human
ccccucuggcuccagc

SEQ ID NO: 1729837 - RNA, 16 nt, Human
ccccugccacccuggg

SEQ ID NO: 1729838 - RNA, 14 nt, Human
ccccugccacccug

SEQ ID NO: 1729839 - RNA, 23 nt, Human
ccccucugcccugcgggucacag

SEQ ID NO: 1729840 - RNA, 20 nt, Human
ccccucugcccugcggguca

SEQ ID NO: 1729841 - RNA, 15 nt, Human
ccccucugcccugcg

SEQ ID NO: 1729842 - RNA, 16 nt, Human
cccggccccugcuggu

SEQ ID NO: 1729843 - RNA, 15 nt, Human
cccggccccugcugg

SEQ ID NO: 1729844 - RNA, 15 nt, Human
cccgggaagggggcu

SEQ ID NO: 1729845 - RNA, 11 nt, Human
cccggcuccag

SEQ ID NO: 1729846 - RNA, 20 nt, Human
cccggcuaauuuuuguauuu

SEQ ID NO: 1729847 - RNA, 22 nt, Human
cccgaauagcugggacuacagg

SEQ ID NO: 1729848 - RNA, 18 nt, Human
cccgaauagcugggacua

SEQ ID NO: 1729849 - RNA, 17 nt, Human
cccgaauagcugggacu

SEQ ID NO: 1729850 - RNA, 16 nt, Human
cccgaauagcugggac

SEQ ID NO: 1729851 - RNA, 16 nt, Human
ccccuucugacccaug

SEQ ID NO: 1729852 - RNA, 14 nt, Human
ccccuucugaccca

SEQ ID NO: 1729853 - RNA, 13 nt, Human
ccccuucugaccc

SEQ ID NO: 1729854 - RNA, 21 nt, Human
cccgggaagggggcugggaca

SEQ ID NO: 1729855 - RNA, 18 nt, Human
cccgggaagggggcuggg

SEQ ID NO: 1729856 - RNA, 16 nt, Human
cccucaacaccucugc

SEQ ID NO: 1729857 - RNA, 22 nt, Human
cccgggaagggggcugggacau

SEQ ID NO: 1729858 - RNA, 20 nt, Human
cccucaacucuccuccagag

SEQ ID NO: 1729859 - RNA, 16 nt, Human
cccucacccuggggcu

SEQ ID NO: 1729860 - RNA, 16 nt, Human
cccucaacucuccucc

SEQ ID NO: 1729861 - RNA, 15 nt, Human
cccuccucucugccc

SEQ ID NO: 1729862 - RNA, 16 nt, Human
cccuccucucugcccu

SEQ ID NO: 1729863 - RNA, 14 nt, Human
ccccgcacugggcu

SEQ ID NO: 1729864 - RNA, 15 nt, Human
cccauucugccugcc

SEQ ID NO: 1729865 - RNA, 14 nt, Human
cccauucugccugc

SEQ ID NO: 1729866 - RNA, 19 nt, Human
cccauucugccugcccagg

SEQ ID NO: 1729867 - RNA, 15 nt, Human
cccauuugcuccuuu

SEQ ID NO: 1729868 - RNA, 20 nt, Human
ccccagauugcaacaggcug

SEQ ID NO: 1729869 - RNA, 15 nt, Human
ccccagauugcaaca

SEQ ID NO: 1729870 - RNA, 17 nt, Human
ccccagaggcuggguga

SEQ ID NO: 1729871 - RNA, 22 nt, Human
cccauccucuguacagagccca

SEQ ID NO: 1729872 - RNA, 21 nt, Human
cccauccucuguacagagccc

SEQ ID NO: 1729873 - RNA, 18 nt, Human
cccaggaaaggcuccagg

SEQ ID NO: 1729874 - RNA, 17 nt, Human
cccaggaaaggcuccag

SEQ ID NO: 1729875 - RNA, 17 nt, Human
cccaggcugagccucag

SEQ ID NO: 1729876 - RNA, 16 nt, Human
cccaggcugagccuca

SEQ ID NO: 1729877 - RNA, 15 nt, Human
cccaggcugagccuc

SEQ ID NO: 1729878 - RNA, 22 nt, Human
cccaggcuuagucacugagaca

SEQ ID NO: 1729879 - RNA, 20 nt, Human
cccaggcuggagugcaauga

SEQ ID NO: 1729880 - RNA, 18 nt, Human
cccaggcugagccucagu

SEQ ID NO: 1729881 - RNA, 13 nt, Human
cccaggcuggagu

SEQ ID NO: 1729882 - RNA, 16 nt, Human
cccacuggacucaccu

SEQ ID NO: 1729883 - RNA, 16 nt, Human
cccaggaaaggcucca

SEQ ID NO: 1729884 - RNA, 20 nt, Human
cccagcuggggccaggcugg

SEQ ID NO: 1729885 - RNA, 15 nt, Human
cccaggaaaggcucc

SEQ ID NO: 1729886 - RNA, 17 nt, Human
cucccaccucagccucc

SEQ ID NO: 1729887 - RNA, 16 nt, Human
cucccaccucagccuc

SEQ ID NO: 1729888 - RNA, 14 nt, Human
cucccaccucagcc

SEQ ID NO: 1729889 - RNA, 22 nt, Human
cuccaggugcacaagcuccaag

SEQ ID NO: 1729890 - RNA, 20 nt, Human
cuccaggugcacaagcucca

SEQ ID NO: 1729891 - RNA, 19 nt, Human
cuccaggugcacaagcucc

SEQ ID NO: 1729892 - RNA, 18 nt, Human
cuccaggugcacaagcuc

SEQ ID NO: 1729893 - RNA, 23 nt, Human
cuccaggcuguaucccaugagcc

SEQ ID NO: 1729894 - RNA, 17 nt, Human
cucagaaucucaaauaa

SEQ ID NO: 1729895 - RNA, 16 nt, Human
cucagaaucucaaaua

SEQ ID NO: 1729896 - RNA, 11 nt, Human
cuccagacaca

SEQ ID NO: 1729897 - RNA, 22 nt, Human
cuccagaauuucccaaagcagu

SEQ ID NO: 1729898 - RNA, 16 nt, Human
cuccagacacaugucc

SEQ ID NO: 1729899 - RNA, 16 nt, Human
cucccucccucuuucc

SEQ ID NO: 1729900 - RNA, 15 nt, Human
cucccucuuucccuc

SEQ ID NO: 1729901 - RNA, 19 nt, Human
cucccucuuucccucccuu

SEQ ID NO: 1729902 - RNA, 20 nt, Human
cuccgcuuucuacccagcga

SEQ ID NO: 1729903 - RNA, 21 nt, Human
cuccgcuuucuacccagcgag

SEQ ID NO: 1729904 - RNA, 22 nt, Human
cuccgcuuucuacccagcgagc

SEQ ID NO: 1729905 - RNA, 23 nt, Human
cuccgcuuucuacccagcgagcc

SEQ ID NO: 1729906 - RNA, 18 nt, Human
cucguauaugucucaggu

SEQ ID NO: 1729907 - RNA, 11 nt, Human
cucggugccuu

SEQ ID NO: 1729908 - RNA, 20 nt, Human
cucguauaugucucaggucc

SEQ ID NO: 1729909 - RNA, 22 nt, Human
cuccuuuagcgcccaguugggu

SEQ ID NO: 1729910 - RNA, 17 nt, Human
cuccuuuagcgcccagu

SEQ ID NO: 1729911 - RNA, 16 nt, Human
cuccuuuagcgcccag

SEQ ID NO: 1729912 - RNA, 22 nt, Human
cuccuagccugugccucuggga

SEQ ID NO: 1729913 - RNA, 24 nt, Human
cuccuuuucacaguucucuccuuc

SEQ ID NO: 1729914 - RNA, 13 nt, Human
cucgaacuccuga

SEQ ID NO: 1729915 - RNA, 17 nt, Human
cucgaacuccugaccuu

SEQ ID NO: 1729916 - RNA, 16 nt, Human
cucgaacuccugaccu

SEQ ID NO: 1729917 - RNA, 19 nt, Human
cucucuggccuucggccuc

SEQ ID NO: 1729918 - RNA, 22 nt, Human
cucucuggccuucggccuccau

SEQ ID NO: 1729919 - RNA, 17 nt, Human
cucucuggccuucggcc

SEQ ID NO: 1729920 - RNA, 10 nt, Human
cucuccucug

SEQ ID NO: 1729921 - RNA, 20 nt, Human
cucuccuccuuuucacaguu

SEQ ID NO: 1729922 - RNA, 13 nt, Human
cucuccuccuuuu

SEQ ID NO: 1729923 - RNA, 16 nt, Human
cucuccgaccagacac

SEQ ID NO: 1729924 - RNA, 21 nt, Human
cucuccgaccagacaccuuga

SEQ ID NO: 1729925 - RNA, 13 nt, Human
cucucccuuggau

SEQ ID NO: 1729926 - RNA, 15 nt, Human
cucgugguaggacug

SEQ ID NO: 1729927 - RNA, 16 nt, Human
cucgugguaggacugu

SEQ ID NO: 1729928 - RNA, 17 nt, Human
cucgugguaggacugua

SEQ ID NO: 1729929 - RNA, 16 nt, Human
cucugcacaagcugca

SEQ ID NO: 1729930 - RNA, 23 nt, Human
cugaggaauccagacccggcugc

SEQ ID NO: 1729931 - RNA, 14 nt, Human
cugaggggccucuu

SEQ ID NO: 1729932 - RNA, 22 nt, Human
cugaggugggaggaucucuuga

SEQ ID NO: 1729933 - RNA, 13 nt, Human
cugaggugggagg

SEQ ID NO: 1729934 - RNA, 14 nt, Human
cugaggaauccaga

SEQ ID NO: 1729935 - RNA, 22 nt, Human
cugagcuugcagagaugaggcc

SEQ ID NO: 1729936 - RNA, 22 nt, Human
cugagcugggaugauuggaggg

SEQ ID NO: 1729937 - RNA, 12 nt, Human
cugagcugggau

SEQ ID NO: 1729938 - RNA, 19 nt, Human
cugacccugcuucaaauau

SEQ ID NO: 1729939 - RNA, 18 nt, Human
cugaucucucgugauuga

SEQ ID NO: 1729940 - RNA, 17 nt, Human
cugaucucucgugauug

SEQ ID NO: 1729941 - RNA, 13 nt, Human
cugaaagaggaau

SEQ ID NO: 1729942 - RNA, 17 nt, Human
cugaaagaggaaugaag

SEQ ID NO: 1729943 - RNA, 22 nt, Human
cucuugccacugccucuuccuc

SEQ ID NO: 1729944 - RNA, 24 nt, Human
cucuugauucauaaugacuuaagc

SEQ ID NO: 1729945 - RNA, 14 nt, Human
cucuugagccuggg

SEQ ID NO: 1729946 - RNA, 13 nt, Human
cucuugagccugg

SEQ ID NO: 1729947 - RNA, 16 nt, Human
cucuugagccugggag

SEQ ID NO: 1729948 - RNA, 15 nt, Human
cucuugagccuggga

SEQ ID NO: 1729949 - RNA, 22 nt, Human
cucuugauucauaaugacuuaa

SEQ ID NO: 1729950 - RNA, 19 nt, Human
cucugcacaagcugcaccc

SEQ ID NO: 1729951 - RNA, 18 nt, Human
cucugcacaagcugcacc

SEQ ID NO: 1729952 - RNA, 17 nt, Human
cucugcacaagcugcac

SEQ ID NO: 1729953 - RNA, 17 nt, Human
cugaccccucauagccc

SEQ ID NO: 1729954 - RNA, 21 nt, Human
cugaccccucauagcccucac

SEQ ID NO: 1729955 - RNA, 20 nt, Human
cugaccccucauagcccuca

SEQ ID NO: 1729956 - RNA, 23 nt, Human
cugacacacagcucuguccuggg

SEQ ID NO: 1729957 - RNA, 22 nt, Human
cugacacacagcucuguccugg

SEQ ID NO: 1729958 - RNA, 21 nt, Human
cugacacacagcucuguccug

SEQ ID NO: 1729959 - RNA, 20 nt, Human
cugacacacagcucuguccu

SEQ ID NO: 1729960 - RNA, 19 nt, Human
cugacacacagcucugucc

SEQ ID NO: 1729961 - RNA, 18 nt, Human
cugacacacagcucuguc

SEQ ID NO: 1729962 - RNA, 17 nt, Human
cugacacacagcucugu

SEQ ID NO: 1729963 - RNA, 16 nt, Human
cugacacacagcucug

SEQ ID NO: 1729964 - RNA, 15 nt, Human
cugacacacagcucu

SEQ ID NO: 1729965 - RNA, 13 nt, Human
cugacacacagcu

SEQ ID NO: 1729966 - RNA, 14 nt, Human
cugaaaauguaugu

SEQ ID NO: 1729967 - RNA, 21 nt, Human
cgagguuucucaaagaaauuu

SEQ ID NO: 1729968 - RNA, 19 nt, Human
cgaguagcugagauuauag

SEQ ID NO: 1729969 - RNA, 21 nt, Human
cgauacaccgggccuggagaa

SEQ ID NO: 1729970 - RNA, 20 nt, Human
cgauacaccgggccuggaga

SEQ ID NO: 1729971 - RNA, 18 nt, Human
cgauacaccgggccugga

SEQ ID NO: 1729972 - RNA, 16 nt, Human
cgccuuaaggauguuc

SEQ ID NO: 1729973 - RNA, 13 nt, Human
cgcugccccuggc

SEQ ID NO: 1729974 - RNA, 17 nt, Human
cgcugccccuggcagcc

SEQ ID NO: 1729975 - RNA, 16 nt, Human
cgcugccccuggcagc

SEQ ID NO: 1729976 - RNA, 23 nt, Human
cgcuggaccuugaacuggguacu

SEQ ID NO: 1729977 - RNA, 19 nt, Human
cgcuggaccuugaacuggg

SEQ ID NO: 1729978 - RNA, 18 nt, Human
cgcugccccuggcagccc

SEQ ID NO: 1729979 - RNA, 20 nt, Human
cgcuggggccaguugguccc

SEQ ID NO: 1729980 - RNA, 17 nt, Human
cgcuggggccaguuggu

SEQ ID NO: 1729981 - RNA, 23 nt, Human
cgcuggccgggaccccgagccug

SEQ ID NO: 1729982 - RNA, 18 nt, Human
cgcuggccgggaccccga

SEQ ID NO: 1729983 - RNA, 14 nt, Human
cguuaccaggcagg

SEQ ID NO: 1729984 - RNA, 13 nt, Human
cguuaaaauacca

SEQ ID NO: 1729985 - RNA, 14 nt, Human
cguuaaaaacagau

SEQ ID NO: 1729986 - RNA, 21 nt, Human
cguuaaaaacagauuuggaaa

SEQ ID NO: 1729987 - RNA, 22 nt, Human
cguguccccuauccuacuuccc

SEQ ID NO: 1729988 - RNA, 22 nt, Human
cuaaaguguauuuuuuuacuaa

SEQ ID NO: 1729989 - RNA, 17 nt, Human
cuaaaggcuaccuuugu

SEQ ID NO: 1729990 - RNA, 19 nt, Human
cuaaaggcuaccuuuguau

SEQ ID NO: 1729991 - RNA, 14 nt, Human
cuaaagcugccagc

SEQ ID NO: 1729992 - RNA, 21 nt, Human
cuaaagaagguuucagaaaga

SEQ ID NO: 1729993 - RNA, 15 nt, Human
cuaaaggcuaccuuu

SEQ ID NO: 1729994 - RNA, 16 nt, Human
cuaaaggcuaccuuug

SEQ ID NO: 1729995 - RNA, 15 nt, Human
cuaaagcugccagcc

SEQ ID NO: 1729996 - RNA, 13 nt, Human
cgguguggagaag

SEQ ID NO: 1729997 - RNA, 13 nt, Human
cguacacauuuua

SEQ ID NO: 1729998 - RNA, 16 nt, Human
cguacacauuuuauuu

SEQ ID NO: 1729999 - RNA, 15 nt, Human
cggagacggaguccc

SEQ ID NO: 1730000 - RNA, 15 nt, Human
cuaggguccugggga

SEQ ID NO: 1730001 - RNA, 14 nt, Human
cuaggguccugggg

SEQ ID NO: 1730002 - RNA, 13 nt, Human
cuaggguccuggg

SEQ ID NO: 1730003 - RNA, 17 nt, Human
cuaguuugauuaaauuc

SEQ ID NO: 1730004 - RNA, 19 nt, Human
cuaguuugauuaaauucuu

SEQ ID NO: 1730005 - RNA, 14 nt, Human
cuagggaagauaau

SEQ ID NO: 1730006 - RNA, 20 nt, Human
cuaguuugauuaaauucuug

SEQ ID NO: 1730007 - RNA, 16 nt, Human
cuagcauacguacaca

SEQ ID NO: 1730008 - RNA, 18 nt, Human
cuagcauacguacacauu

SEQ ID NO: 1730009 - RNA, 19 nt, Human
cuagcauacguacacauuu

SEQ ID NO: 1730010 - RNA, 20 nt, Human
cuagcauacguacacauuuu

SEQ ID NO: 1730011 - RNA, 21 nt, Human
cuagacccacuggacucaccu

SEQ ID NO: 1730012 - RNA, 13 nt, Human
cuaggccuggcca

SEQ ID NO: 1730013 - RNA, 17 nt, Human
cuagccagaggagagag

SEQ ID NO: 1730014 - RNA, 19 nt, Human
cuagccagaggagagagga

SEQ ID NO: 1730015 - RNA, 19 nt, Human
cuaggccuggccagaugca

SEQ ID NO: 1730016 - RNA, 18 nt, Human
cuaggccuggccagaugc

SEQ ID NO: 1730017 - RNA, 15 nt, Human
cuaggccuggccaga

SEQ ID NO: 1730018 - RNA, 14 nt, Human
cuaggccuggccag

SEQ ID NO: 1730019 - RNA, 13 nt, Human
cuaggccugggga

SEQ ID NO: 1730020 - RNA, 12 nt, Human
cuaggccugggg

SEQ ID NO: 1730021 - RNA, 20 nt, Human
cuacuagggaaaugccuuug

SEQ ID NO: 1730022 - RNA, 23 nt, Human
cuaccugaggggccucuuauggg

SEQ ID NO: 1730023 - RNA, 19 nt, Human
cuaccugaggggccucuua

SEQ ID NO: 1730024 - RNA, 16 nt, Human
cuaccugaggggccuc

SEQ ID NO: 1730025 - RNA, 18 nt, Human
cuaccuuccaguuccuca

SEQ ID NO: 1730026 - RNA, 17 nt, Human
cuacuaccuguaaugac

SEQ ID NO: 1730027 - RNA, 17 nt, Human
cucaccucucccuugga

SEQ ID NO: 1730028 - RNA, 16 nt, Human
cucaccucucccuugg

SEQ ID NO: 1730029 - RNA, 15 nt, Human
cucaccucucccuug

SEQ ID NO: 1730030 - RNA, 14 nt, Human
cucaccucucccuu

SEQ ID NO: 1730031 - RNA, 13 nt, Human
cucaccucucccu

SEQ ID NO: 1730032 - RNA, 16 nt, Human
cucaccucccccaucu

SEQ ID NO: 1730033 - RNA, 16 nt, Human
cucaccugccccucaa

SEQ ID NO: 1730034 - RNA, 14 nt, Human
cucaccugccccuc

SEQ ID NO: 1730035 - RNA, 18 nt, Human
cucaccugccccucaacu

SEQ ID NO: 1730036 - RNA, 13 nt, Human
cucaccugccccu

SEQ ID NO: 1730037 - RNA, 14 nt, Human
cucacccuggggcu

SEQ ID NO: 1730038 - RNA, 23 nt, Human
cuaugucauuugcuggagcucug

SEQ ID NO: 1730039 - RNA, 15 nt, Human
cuauguugcccaggc

SEQ ID NO: 1730040 - RNA, 22 nt, Human
cuauguguagggcgggaggaug

SEQ ID NO: 1730041 - RNA, 20 nt, Human
cuaucucccccagccccauc

SEQ ID NO: 1730042 - RNA, 19 nt, Human
cuauguaucaaugaguaac

SEQ ID NO: 1730043 - RNA, 14 nt, Human
cucaaaacaaaggc

SEQ ID NO: 1730044 - RNA, 22 nt, Human
cucaaagaaauuuccacucagg

SEQ ID NO: 1730045 - RNA, 17 nt, Human
cuauguugcccaggcag

SEQ ID NO: 1730046 - RNA, 16 nt, Human
cuauguugcccaggca

SEQ ID NO: 1730047 - RNA, 14 nt, Human
cuauuuuucagaau

SEQ ID NO: 1730048 - RNA, 18 nt, Human
cucaaaaaaagaaaaaga

SEQ ID NO: 1730049 - RNA, 13 nt, Human
cucaaaacaaagg

SEQ ID NO: 1730050 - RNA, 21 nt, Human
cucacacaugagcaucaggcc

SEQ ID NO: 1730051 - RNA, 14 nt, Human
cucacacaugagca

SEQ ID NO: 1730052 - RNA, 12 nt, Human
cucaaauaacua

SEQ ID NO: 1730053 - RNA, 14 nt, Human
cucacaaaggaugc

SEQ ID NO: 1730054 - RNA, 20 nt, Human
caauaaaaucuugaaaaugc

SEQ ID NO: 1730055 - RNA, 15 nt, Human
caaggcucugagcaa

SEQ ID NO: 1730056 - RNA, 20 nt, Human
caaggccaaaggaagcacau

SEQ ID NO: 1730057 - RNA, 19 nt, Human
caaggccaaaggaagcaca

SEQ ID NO: 1730058 - RNA, 21 nt, Human
caaggccaaaggaagcacaug

SEQ ID NO: 1730059 - RNA, 18 nt, Human
caaggcaaggcugucaau

SEQ ID NO: 1730060 - RNA, 17 nt, Human
caaggcaaggcugucaa

SEQ ID NO: 1730061 - RNA, 12 nt, Human
caagauuucaga

SEQ ID NO: 1730062 - RNA, 21 nt, Human
cacaagcuccaagcucccagg

SEQ ID NO: 1730063 - RNA, 20 nt, Human
cacaagcuccaagcucccag

SEQ ID NO: 1730064 - RNA, 21 nt, Human
caaugcuggcuguuggcuggg

SEQ ID NO: 1730065 - RNA, 20 nt, Human
caaugcuggcuguuggcugg

SEQ ID NO: 1730066 - RNA, 13 nt, Human
caaugcuggcugu

SEQ ID NO: 1730067 - RNA, 23 nt, Human
caaucccaccaacccucagagcc

SEQ ID NO: 1730068 - RNA, 22 nt, Human
caaucccaccaacccucagagc

SEQ ID NO: 1730069 - RNA, 17 nt, Human
caaucccaccaacccuc

SEQ ID NO: 1730070 - RNA, 16 nt, Human
caaucccaccaacccu

SEQ ID NO: 1730071 - RNA, 19 nt, Human
cacaagcuccaagcuccca

SEQ ID NO: 1730072 - RNA, 18 nt, Human
cacaagcuccaagcuccc

SEQ ID NO: 1730073 - RNA, 20 nt, Human
cacaagagcccaggccuccu

SEQ ID NO: 1730074 - RNA, 19 nt, Human
cacaagagcccaggccucc

SEQ ID NO: 1730075 - RNA, 18 nt, Human
cacaagagcccaggccuc

SEQ ID NO: 1730076 - RNA, 15 nt, Human
caaugggagcucaug

SEQ ID NO: 1730077 - RNA, 17 nt, Human
cacagacccugcccugu

SEQ ID NO: 1730078 - RNA, 16 nt, Human
cacagacccugcccug

SEQ ID NO: 1730079 - RNA, 14 nt, Human
cacagacccugccc

SEQ ID NO: 1730080 - RNA, 14 nt, Human
cacagcucuguccu

SEQ ID NO: 1730081 - RNA, 11 nt, Human
cacagcucugu

SEQ ID NO: 1730082 - RNA, 18 nt, Human
cacagacccugcccugug

SEQ ID NO: 1730083 - RNA, 19 nt, Human
cacagcucuguccugggag

SEQ ID NO: 1730084 - RNA, 18 nt, Human
cacagcucuguccuggga

SEQ ID NO: 1730085 - RNA, 16 nt, Human
cacagcucuguccugg

SEQ ID NO: 1730086 - RNA, 15 nt, Human
cacagcucuguccug

SEQ ID NO: 1730087 - RNA, 15 nt, Human
cacagcucuucucca

SEQ ID NO: 1730088 - RNA, 14 nt, Human
cacagcucuucucc

SEQ ID NO: 1730089 - RNA, 17 nt, Human
cacagcucuucuccagg

SEQ ID NO: 1730090 - RNA, 12 nt, Human
cacacauuuuuu

SEQ ID NO: 1730091 - RNA, 16 nt, Human
cacacauuuuuuaaau

SEQ ID NO: 1730092 - RNA, 19 nt, Human
cacacauuuuuuaaaugca

SEQ ID NO: 1730093 - RNA, 20 nt, Human
cacacauuuuuuaaaugcac

SEQ ID NO: 1730094 - RNA, 10 nt, Human
cacacauuuu

SEQ ID NO: 1730095 - RNA, 11 nt, Human
cacacauuuuu

SEQ ID NO: 1730096 - RNA, 13 nt, Human
cacagaacccuug

SEQ ID NO: 1730097 - RNA, 16 nt, Human
cacccaggagccccga

SEQ ID NO: 1730098 - RNA, 18 nt, Human
cacccaccucagccuccc

SEQ ID NO: 1730099 - RNA, 16 nt, Human
caccagccccagugcc

SEQ ID NO: 1730100 - RNA, 13 nt, Human
caccagccccagu

SEQ ID NO: 1730101 - RNA, 17 nt, Human
cacccaccucagccucc

SEQ ID NO: 1730102 - RNA, 13 nt, Human
caccagggaaggg

SEQ ID NO: 1730103 - RNA, 21 nt, Human
caccagggaaggggacaagga

SEQ ID NO: 1730104 - RNA, 18 nt, Human
caccagggaaggggacaa

SEQ ID NO: 1730105 - RNA, 14 nt, Human
caccaacgucugug

SEQ ID NO: 1730106 - RNA, 13 nt, Human
caccaacccucag

SEQ ID NO: 1730107 - RNA, 16 nt, Human
caccaacgucugugcc

SEQ ID NO: 1730108 - RNA, 17 nt, Human
caccaacauacucccau

SEQ ID NO: 1730109 - RNA, 17 nt, Human
cacauuuuauuuuauua

SEQ ID NO: 1730110 - RNA, 19 nt, Human
cacauuuuauuuuauuaug

SEQ ID NO: 1730111 - RNA, 20 nt, Human
cacauuuuauuuuauuaugc

SEQ ID NO: 1730112 - RNA, 21 nt, Human
cacauuuuauuuuauuaugca

SEQ ID NO: 1730113 - RNA, 15 nt, Human
cacuuaaaaaugguu

SEQ ID NO: 1730114 - RNA, 23 nt, Human
cacuguugcccaggcuggcgugc

SEQ ID NO: 1730115 - RNA, 19 nt, Human
cacuguugcccaggcuggc

SEQ ID NO: 1730116 - RNA, 18 nt, Human
cacuguugcccaggcugg

SEQ ID NO: 1730117 - RNA, 20 nt, Human
cacugggcuuggggaccaga

SEQ ID NO: 1730118 - RNA, 13 nt, Human
cacugggcuucua

SEQ ID NO: 1730119 - RNA, 19 nt, Human
cacugggagaaaugaaaaa

SEQ ID NO: 1730120 - RNA, 14 nt, Human
cacugcagccucaa

SEQ ID NO: 1730121 - RNA, 19 nt, Human
cacugcagccucaaccucc

SEQ ID NO: 1730122 - RNA, 23 nt, Human
cacugcagccucaaccuccuggg

SEQ ID NO: 1730123 - RNA, 22 nt, Human
cacugcagccucaaccuccugg

SEQ ID NO: 1730124 - RNA, 21 nt, Human
cacugcagccucaaccuccug

SEQ ID NO: 1730125 - RNA, 20 nt, Human
cacugcagccucaaccuccu

SEQ ID NO: 1730126 - RNA, 17 nt, Human
cacugccaugccagcuu

SEQ ID NO: 1730127 - RNA, 18 nt, Human
cacuuguguuaugaagca

SEQ ID NO: 1730128 - RNA, 19 nt, Human
cacuuguugauuaauggaa

SEQ ID NO: 1730129 - RNA, 20 nt, Human
cacuuaaguuaguuccacug

SEQ ID NO: 1730130 - RNA, 22 nt, Human
cacuuaaguuaguuccacugag

SEQ ID NO: 1730131 - RNA, 17 nt, Human
cacuuucuagccagagg

SEQ ID NO: 1730132 - RNA, 16 nt, Human
cacuuucuagccagag

SEQ ID NO: 1730133 - RNA, 18 nt, Human
cacuuucuagccagagga

SEQ ID NO: 1730134 - RNA, 13 nt, Human
cacuuucuagcca

SEQ ID NO: 1730135 - RNA, 11 nt, Human
cagaacaguga

SEQ ID NO: 1730136 - RNA, 12 nt, Human
cagaacagugau

SEQ ID NO: 1730137 - RNA, 17 nt, Human
cagaacagugauuacca

SEQ ID NO: 1730138 - RNA, 18 nt, Human
cagaacagugauuaccag

SEQ ID NO: 1730139 - RNA, 19 nt, Human
cagaaguuucucagcuccc

SEQ ID NO: 1730140 - RNA, 15 nt, Human
cagaaguuucucagc

SEQ ID NO: 1730141 - RNA, 16 nt, Human
cagaaguuucugccgc

SEQ ID NO: 1730142 - RNA, 14 nt, Human
cagaaguuucugcc

SEQ ID NO: 1730143 - RNA, 16 nt, Human
cagaaauguacagcaa

SEQ ID NO: 1730144 - RNA, 20 nt, Human
cagaaagguuuucuucuuuu

SEQ ID NO: 1730145 - RNA, 22 nt, Human
cacucuuauugcccacgcugga

SEQ ID NO: 1730146 - RNA, 21 nt, Human
cacucuuauugcccacgcugg

SEQ ID NO: 1730147 - RNA, 20 nt, Human
cacucuuauugcccacgcug

SEQ ID NO: 1730148 - RNA, 23 nt, Human
cacuccagccugagcgacaguga

SEQ ID NO: 1730149 - RNA, 14 nt, Human
cacuccagccuggg

SEQ ID NO: 1730150 - RNA, 13 nt, Human
cacuccagccugg

SEQ ID NO: 1730151 - RNA, 13 nt, Human
cacuccagccuga

SEQ ID NO: 1730152 - RNA, 12 nt, Human
cacuccagccug

SEQ ID NO: 1730153 - RNA, 21 nt, Human
cacuacauucuguuaaucauu

SEQ ID NO: 1730154 - RNA, 21 nt, Human
cacuacauuauaaaugucucu

SEQ ID NO: 1730155 - RNA, 16 nt, Human
cacuacauucuguuaa

SEQ ID NO: 1730156 - RNA, 17 nt, Human
cacuacauucuguuaau

SEQ ID NO: 1730157 - RNA, 13 nt, Human
cacggccaggcca

SEQ ID NO: 1730158 - RNA, 12 nt, Human
cacggccaggcc

SEQ ID NO: 1730159 - RNA, 14 nt, Human
cacggcucacugca

SEQ ID NO: 1730160 - RNA, 15 nt, Human
cacggcucacugcag

SEQ ID NO: 1730161 - RNA, 14 nt, Human
caccuuucccaucu

SEQ ID NO: 1730162 - RNA, 14 nt, Human
caccuuugaagaag

SEQ ID NO: 1730163 - RNA, 16 nt, Human
caccuuggcugcaggg

SEQ ID NO: 1730164 - RNA, 15 nt, Human
caccuuggcugcagg

SEQ ID NO: 1730165 - RNA, 18 nt, Human
caccuuggcugcagggag

SEQ ID NO: 1730166 - RNA, 23 nt, Human
caccuuuauucuggcagaggagg

SEQ ID NO: 1730167 - RNA, 13 nt, Human
caccugcccaacc

SEQ ID NO: 1730168 - RNA, 19 nt, Human
caccugcccaaccugcucu

SEQ ID NO: 1730169 - RNA, 18 nt, Human
caccugcccaaccugcuc

SEQ ID NO: 1730170 - RNA, 12 nt, Human
caccucagccuc

SEQ ID NO: 1730171 - RNA, 12 nt, Human
caccuacugagu

SEQ ID NO: 1730172 - RNA, 23 nt, Human
caaaugcuguaacuuucugaaau

SEQ ID NO: 1730173 - RNA, 22 nt, Human
caaaugagaaaaugucuuuauu

SEQ ID NO: 1730174 - RNA, 19 nt, Human
caaaguaucccuacuguaa

SEQ ID NO: 1730175 - RNA, 21 nt, Human
caaaguaucccuacuguaauu

SEQ ID NO: 1730176 - RNA, 22 nt, Human
caaaguagaagucuuagaugua

SEQ ID NO: 1730177 - RNA, 22 nt, Human
caaagguaaaucagacuaugaa

SEQ ID NO: 1730178 - RNA, 14 nt, Human
caaagguaaaucag

SEQ ID NO: 1730179 - RNA, 22 nt, Human
caaagcagugcaugcugucccu

SEQ ID NO: 1730180 - RNA, 18 nt, Human
caaagauauuuugcuuug

SEQ ID NO: 1730181 - RNA, 21 nt, Human
caaagcagugcaugcuguccc

SEQ ID NO: 1730182 - RNA, 18 nt, Human
caaagcagugcaugcugu

SEQ ID NO: 1730183 - RNA, 14 nt, Human
caaagauauuuugc

SEQ ID NO: 1730184 - RNA, 16 nt, Human
caaagauauuuugcuu

SEQ ID NO: 1730185 - RNA, 22 nt, Human
caacacacagauuugagcucag

SEQ ID NO: 1730186 - RNA, 21 nt, Human
caacacacagauuugagcuca

SEQ ID NO: 1730187 - RNA, 18 nt, Human
caacucaccccagcccca

SEQ ID NO: 1730188 - RNA, 18 nt, Human
caacuaauuuuuguauuu

SEQ ID NO: 1730189 - RNA, 19 nt, Human
caacuacuaccuguaauga

SEQ ID NO: 1730190 - RNA, 19 nt, Human
caagacccaaaaggcagaa

SEQ ID NO: 1730191 - RNA, 17 nt, Human
caagaccacguuucuaa

SEQ ID NO: 1730192 - RNA, 18 nt, Human
caagaccacguuucuaaa

SEQ ID NO: 1730193 - RNA, 14 nt, Human
caacucuccuccag

SEQ ID NO: 1730194 - RNA, 22 nt, Human
caagaauugaagcaggacuaaa

SEQ ID NO: 1730195 - RNA, 21 nt, Human
caaaaggauaaugaauacuuu

SEQ ID NO: 1730196 - RNA, 14 nt, Human
caaacccuucagug

SEQ ID NO: 1730197 - RNA, 21 nt, Human
caaaccccgaccaccugccca

SEQ ID NO: 1730198 - RNA, 18 nt, Human
caaaccccgaccaccugc

SEQ ID NO: 1730199 - RNA, 18 nt, Human
auuuuuuuuuccuucagu

SEQ ID NO: 1730200 - RNA, 16 nt, Human
auuuuuuugagacaga

SEQ ID NO: 1730201 - RNA, 23 nt, Human
auuuuuuuuuccuucagugccuu

SEQ ID NO: 1730202 - RNA, 22 nt, Human
auuuuuuuuuccuucagugccu

SEQ ID NO: 1730203 - RNA, 20 nt, Human
auuuuuuuuuccuucagugc

SEQ ID NO: 1730204 - RNA, 21 nt, Human
auuuuauaucaauuuaaaaaa

SEQ ID NO: 1730205 - RNA, 16 nt, Human
auuuuuaagugcugca

SEQ ID NO: 1730206 - RNA, 18 nt, Human
auuuuuaagugcugcauu

SEQ ID NO: 1730207 - RNA, 19 nt, Human
auuuuuaagugcugcauuu

SEQ ID NO: 1730208 - RNA, 14 nt, Human
auuuuuagacagag

SEQ ID NO: 1730209 - RNA, 18 nt, Human
auucaacagguuuuccug

SEQ ID NO: 1730210 - RNA, 20 nt, Human
auuaguacuccccuccuuga

SEQ ID NO: 1730211 - RNA, 19 nt, Human
auuaaaugcccagccccuu

SEQ ID NO: 1730212 - RNA, 17 nt, Human
auuaaaugcccagcccc

SEQ ID NO: 1730213 - RNA, 11 nt, Human
auuaaauuaug

SEQ ID NO: 1730214 - RNA, 16 nt, Human
auuaggauuucaugau

SEQ ID NO: 1730215 - RNA, 14 nt, Human
auuaggauuucaug

SEQ ID NO: 1730216 - RNA, 15 nt, Human
auucuugcaaaguau

SEQ ID NO: 1730217 - RNA, 16 nt, Human
auucuugcaaaguauc

SEQ ID NO: 1730218 - RNA, 14 nt, Human
auucuugcaaagua

SEQ ID NO: 1730219 - RNA, 22 nt, Human
auucuucuguacgucugacagg

SEQ ID NO: 1730220 - RNA, 20 nt, Human
auucuucugcuucagccucc

SEQ ID NO: 1730221 - RNA, 19 nt, Human
auucuucugcuucagccuc

SEQ ID NO: 1730222 - RNA, 19 nt, Human
auucucuaguuugauuaaa

SEQ ID NO: 1730223 - RNA, 18 nt, Human
auucuccuuguguuacua

SEQ ID NO: 1730224 - RNA, 19 nt, Human
auucuccuuguguuacuaa

SEQ ID NO: 1730225 - RNA, 21 nt, Human
auucuccuuguguuacuaagu

SEQ ID NO: 1730226 - RNA, 22 nt, Human
auucuccuuguguuacuaaguu

SEQ ID NO: 1730227 - RNA, 17 nt, Human
auucucuaguuugauua

SEQ ID NO: 1730228 - RNA, 18 nt, Human
auucucuaguuugauuaa

SEQ ID NO: 1730229 - RNA, 15 nt, Human
auuccugcauuugug

SEQ ID NO: 1730230 - RNA, 18 nt, Human
auuccugcauuugugaaa

SEQ ID NO: 1730231 - RNA, 14 nt, Human
auugcuugcacaaa

SEQ ID NO: 1730232 - RNA, 16 nt, Human
auugcuuguuggauuu

SEQ ID NO: 1730233 - RNA, 21 nt, Human
auuuaaugaaagacuguacaa

SEQ ID NO: 1730234 - RNA, 20 nt, Human
auuuaaugaaagacuguaca

SEQ ID NO: 1730235 - RNA, 16 nt, Human
auuuaaugaaagacug

SEQ ID NO: 1730236 - RNA, 22 nt, Human
auuuaugcauauuauuuuaugu

SEQ ID NO: 1730237 - RNA, 16 nt, Human
auuuaugcauauuauu

SEQ ID NO: 1730238 - RNA, 15 nt, Human
cagugccaaaaacaa

SEQ ID NO: 1730239 - RNA, 12 nt, Human
cagugcccacag

SEQ ID NO: 1730240 - RNA, 19 nt, Human
cagugggacagggcauggc

SEQ ID NO: 1730241 - RNA, 11 nt, Human
cagugggagcu

SEQ ID NO: 1730242 - RNA, 23 nt, Human
cagugcaugcugucccuuacgug

SEQ ID NO: 1730243 - RNA, 22 nt, Human
cagugcaugcugucccuuacgu

SEQ ID NO: 1730244 - RNA, 19 nt, Human
cagugcaugcugucccuua

SEQ ID NO: 1730245 - RNA, 20 nt, Human
cagucugauucccaagcucu

SEQ ID NO: 1730246 - RNA, 19 nt, Human
cagucugauucccaagcuc

SEQ ID NO: 1730247 - RNA, 14 nt, Human
cagucucccucccu

SEQ ID NO: 1730248 - RNA, 22 nt, Human
cagucaccccggccaccugcgg

SEQ ID NO: 1730249 - RNA, 19 nt, Human
cagucaccccggccaccug

SEQ ID NO: 1730250 - RNA, 20 nt, Human
cagucaccccggccaccugc

SEQ ID NO: 1730251 - RNA, 16 nt, Human
cagguuuaagcuguua

SEQ ID NO: 1730252 - RNA, 21 nt, Human
cagguuggugggggccucggu

SEQ ID NO: 1730253 - RNA, 18 nt, Human
cagguuuaagcuguuacu

SEQ ID NO: 1730254 - RNA, 18 nt, Human
cagggucucacucugucg

SEQ ID NO: 1730255 - RNA, 21 nt, Human
cagggucucacucugucgccc

SEQ ID NO: 1730256 - RNA, 22 nt, Human
cagggucucacucugucgccca

SEQ ID NO: 1730257 - RNA, 17 nt, Human
caggugauccacccacc

SEQ ID NO: 1730258 - RNA, 16 nt, Human
caggugauccacccac

SEQ ID NO: 1730259 - RNA, 12 nt, Human
caggguuggccc

SEQ ID NO: 1730260 - RNA, 14 nt, Human
caggguuggccccu

SEQ ID NO: 1730261 - RNA, 20 nt, Human
caggugauccacccaccuca

SEQ ID NO: 1730262 - RNA, 14 nt, Human
cagguugguggggg

SEQ ID NO: 1730263 - RNA, 20 nt, Human
caggugcuaggaacacuccu

SEQ ID NO: 1730264 - RNA, 18 nt, Human
caggugcuaggaacacuc

SEQ ID NO: 1730265 - RNA, 14 nt, Human
caggugcgaaagga

SEQ ID NO: 1730266 - RNA, 19 nt, Human
cagggaggacgcucucugg

SEQ ID NO: 1730267 - RNA, 13 nt, Human
cagggagggccug

SEQ ID NO: 1730268 - RNA, 12 nt, Human
cagggagggccu

SEQ ID NO: 1730269 - RNA, 17 nt, Human
cagggaggacgcucucu

SEQ ID NO: 1730270 - RNA, 18 nt, Human
cagggaggacgcucucug

SEQ ID NO: 1730271 - RNA, 19 nt, Human
caggcugggcuucaguggc

SEQ ID NO: 1730272 - RNA, 17 nt, Human
caggcugggcuucagug

SEQ ID NO: 1730273 - RNA, 16 nt, Human
caggcugggcuucagu

SEQ ID NO: 1730274 - RNA, 15 nt, Human
caggcuggcgugcag

SEQ ID NO: 1730275 - RNA, 20 nt, Human
caggcuggcccugcccuggu

SEQ ID NO: 1730276 - RNA, 17 nt, Human
caggcgccccuuccccc

SEQ ID NO: 1730277 - RNA, 19 nt, Human
caggcuggcccugcccugg

SEQ ID NO: 1730278 - RNA, 18 nt, Human
caggcuggcccugcccug

SEQ ID NO: 1730279 - RNA, 17 nt, Human
caggcuggcccugcccu

SEQ ID NO: 1730280 - RNA, 15 nt, Human
caggcgccccuuccc

SEQ ID NO: 1730281 - RNA, 20 nt, Human
caggccugccuguucccauu

SEQ ID NO: 1730282 - RNA, 18 nt, Human
cagggaggugaccccagg

SEQ ID NO: 1730283 - RNA, 16 nt, Human
cagggagggccugggc

SEQ ID NO: 1730284 - RNA, 14 nt, Human
cagggagggccugg

SEQ ID NO: 1730285 - RNA, 22 nt, Human
cagggaguccgaaagggacuug

SEQ ID NO: 1730286 - RNA, 15 nt, Human
caggagggaggggga

SEQ ID NO: 1730287 - RNA, 17 nt, Human
caggaggccagccuuga

SEQ ID NO: 1730288 - RNA, 23 nt, Human
caggagggagggggaaggcaggg

SEQ ID NO: 1730289 - RNA, 23 nt, Human
caggcacccaccaucaugucugg

SEQ ID NO: 1730290 - RNA, 22 nt, Human
caggcacccaccaucaugucug

SEQ ID NO: 1730291 - RNA, 18 nt, Human
caggcacccaccaucaug

SEQ ID NO: 1730292 - RNA, 16 nt, Human
caggaggccagccuug

SEQ ID NO: 1730293 - RNA, 15 nt, Human
caggaggccagccuu

SEQ ID NO: 1730294 - RNA, 14 nt, Human
caggaggccagccu

SEQ ID NO: 1730295 - RNA, 21 nt, Human
caggccagagggagugacaga

SEQ ID NO: 1730296 - RNA, 19 nt, Human
caggccagagggagugaca

SEQ ID NO: 1730297 - RNA, 23 nt, Human
caggccagagggagugacagagg

SEQ ID NO: 1730298 - RNA, 21 nt, Human
cagccgagauagccaaggcca

SEQ ID NO: 1730299 - RNA, 21 nt, Human
cagccccuggaugcagccuca

SEQ ID NO: 1730300 - RNA, 19 nt, Human
cagccccuggaugcagccu

SEQ ID NO: 1730301 - RNA, 18 nt, Human
cagccccuggaugcagcc

SEQ ID NO: 1730302 - RNA, 17 nt, Human
cagccccuggaugcagc

SEQ ID NO: 1730303 - RNA, 21 nt, Human
cagcccuuagcagggaaacag

SEQ ID NO: 1730304 - RNA, 16 nt, Human
cagcccuuagcaggga

SEQ ID NO: 1730305 - RNA, 22 nt, Human
cagccccuggaugcagccucac

SEQ ID NO: 1730306 - RNA, 14 nt, Human
cagccccuggaugc

SEQ ID NO: 1730307 - RNA, 13 nt, Human
cagccccuggaug

SEQ ID NO: 1730308 - RNA, 12 nt, Human
cagccccuggau

SEQ ID NO: 1730309 - RNA, 18 nt, Human
cagccugagcgacaguga

SEQ ID NO: 1730310 - RNA, 19 nt, Human
cagccugagcgacagugag

SEQ ID NO: 1730311 - RNA, 22 nt, Human
cagccugagcgacagugagacu

SEQ ID NO: 1730312 - RNA, 17 nt, Human
cagcggggacagcuccu

SEQ ID NO: 1730313 - RNA, 16 nt, Human
cagcggggacagcucc

SEQ ID NO: 1730314 - RNA, 15 nt, Human
cagcggggacagcuc

SEQ ID NO: 1730315 - RNA, 15 nt, Human
caggaaaggcuccag

SEQ ID NO: 1730316 - RNA, 14 nt, Human
caggaaaggcucca

SEQ ID NO: 1730317 - RNA, 19 nt, Human
cagcuucauuuccuguguc

SEQ ID NO: 1730318 - RNA, 18 nt, Human
cagcuucauuuccugugu

SEQ ID NO: 1730319 - RNA, 15 nt, Human
cagcuucauuuccug

SEQ ID NO: 1730320 - RNA, 18 nt, Human
cagcugugcucuggacag

SEQ ID NO: 1730321 - RNA, 19 nt, Human
cagcugugcucuggacagg

SEQ ID NO: 1730322 - RNA, 20 nt, Human
cagcuccagcucaccagccc

SEQ ID NO: 1730323 - RNA, 18 nt, Human
cagcuccagcucaccagc

SEQ ID NO: 1730324 - RNA, 17 nt, Human
cagcuccagcucaccag

SEQ ID NO: 1730325 - RNA, 16 nt, Human
cagcuccagcucacca

SEQ ID NO: 1730326 - RNA, 22 nt, Human
cagcuccagcucaccagcccca

SEQ ID NO: 1730327 - RNA, 21 nt, Human
cagcucccaaggcucugagca

SEQ ID NO: 1730328 - RNA, 15 nt, Human
cagcuccagcucacc

SEQ ID NO: 1730329 - RNA, 14 nt, Human
cagcuccagcucac

SEQ ID NO: 1730330 - RNA, 13 nt, Human
cagcuccagcuca

SEQ ID NO: 1730331 - RNA, 20 nt, Human
cagcaccuacaguguacagu

SEQ ID NO: 1730332 - RNA, 15 nt, Human
cagcaccuacagugu

SEQ ID NO: 1730333 - RNA, 23 nt, Human
cagcauauucaggaagcucaggg

SEQ ID NO: 1730334 - RNA, 22 nt, Human
cagcauauucaggaagcucagg

SEQ ID NO: 1730335 - RNA, 19 nt, Human
cagcauauucaggaagcuc

SEQ ID NO: 1730336 - RNA, 13 nt, Human
cagccaggccaca

SEQ ID NO: 1730337 - RNA, 12 nt, Human
cagccaggccac

SEQ ID NO: 1730338 - RNA, 22 nt, Human
cagccaggccacaagacccuug

SEQ ID NO: 1730339 - RNA, 18 nt, Human
cagagcugccaccugccu

SEQ ID NO: 1730340 - RNA, 16 nt, Human
cagagcugccaccugc

SEQ ID NO: 1730341 - RNA, 23 nt, Human
cagaaguuugagaucagccuggg

SEQ ID NO: 1730342 - RNA, 22 nt, Human
cagaaguuugagaucagccugg

SEQ ID NO: 1730343 - RNA, 20 nt, Human
cagaaguuugagaucagccu

SEQ ID NO: 1730344 - RNA, 19 nt, Human
cagaaguuucugccgcagc

SEQ ID NO: 1730345 - RNA, 22 nt, Human
cagagggccugcaagggaguga

SEQ ID NO: 1730346 - RNA, 20 nt, Human
cagaggggguggccucccaa

SEQ ID NO: 1730347 - RNA, 19 nt, Human
cagaggggguggccuccca

SEQ ID NO: 1730348 - RNA, 18 nt, Human
cagaggggguggccuccc

SEQ ID NO: 1730349 - RNA, 20 nt, Human
cagagucagaaguuucugcc

SEQ ID NO: 1730350 - RNA, 22 nt, Human
cauucgcuacuaugauuuaauu

SEQ ID NO: 1730351 - RNA, 12 nt, Human
cauuccuguucc

SEQ ID NO: 1730352 - RNA, 18 nt, Human
cauucuagguuugcaaga

SEQ ID NO: 1730353 - RNA, 13 nt, Human
cauucucacuccu

SEQ ID NO: 1730354 - RNA, 14 nt, Human
cauucucacuccua

SEQ ID NO: 1730355 - RNA, 23 nt, Human
cauuaucuagauacuguaucaug

SEQ ID NO: 1730356 - RNA, 22 nt, Human
cauuaggugugacugaauuucu

SEQ ID NO: 1730357 - RNA, 13 nt, Human
cauguuggccagg

SEQ ID NO: 1730358 - RNA, 12 nt, Human
cauguuggccag

SEQ ID NO: 1730359 - RNA, 20 nt, Human
cauguccaagaagcccagga

SEQ ID NO: 1730360 - RNA, 19 nt, Human
cauguccaagaagcccagg

SEQ ID NO: 1730361 - RNA, 18 nt, Human
cauguccaagaagcccag

SEQ ID NO: 1730362 - RNA, 16 nt, Human
caugcacgugugugca

SEQ ID NO: 1730363 - RNA, 13 nt, Human
caugcugcccugu

SEQ ID NO: 1730364 - RNA, 12 nt, Human
caugcugcccug

SEQ ID NO: 1730365 - RNA, 13 nt, Human
caugcuccuggcc

SEQ ID NO: 1730366 - RNA, 23 nt, Human
caugauuaaccacuucagcugac

SEQ ID NO: 1730367 - RNA, 22 nt, Human
caugauuaaccacuucagcuga

SEQ ID NO: 1730368 - RNA, 24 nt, Human
caugauuaaccacuucagcugacu

SEQ ID NO: 1730369 - RNA, 12 nt, Human
caugcacaaauu

SEQ ID NO: 1730370 - RNA, 15 nt, Human
caugaaguaauaugc

SEQ ID NO: 1730371 - RNA, 19 nt, Human
caugaaguaauaugcacac

SEQ ID NO: 1730372 - RNA, 22 nt, Human
caugaaguaauaugcacacauu

SEQ ID NO: 1730373 - RNA, 23 nt, Human
caugaaguaauaugcacacauuu

SEQ ID NO: 1730374 - RNA, 23 nt, Human
caugacacgaauauugcugaugg

SEQ ID NO: 1730375 - RNA, 21 nt, Human
caugacacgaauauugcugau

SEQ ID NO: 1730376 - RNA, 15 nt, Human
caugcugcccuguga

SEQ ID NO: 1730377 - RNA, 14 nt, Human
caugcugcccugug

SEQ ID NO: 1730378 - RNA, 13 nt, Human
cauggccaggugg

SEQ ID NO: 1730379 - RNA, 14 nt, Human
cauggccagguggc

SEQ ID NO: 1730380 - RNA, 15 nt, Human
cagugggagcugccu

SEQ ID NO: 1730381 - RNA, 22 nt, Human
cauagcagagaaugaaagggcc

SEQ ID NO: 1730382 - RNA, 19 nt, Human
cauagcagagaaugaaagg

SEQ ID NO: 1730383 - RNA, 22 nt, Human
cauagcaccuaacaacauugua

SEQ ID NO: 1730384 - RNA, 22 nt, Human
cauagcuuacaagccagcugga

SEQ ID NO: 1730385 - RNA, 15 nt, Human
cauauucaggaagcu

SEQ ID NO: 1730386 - RNA, 14 nt, Human
cauauucaggaagc

SEQ ID NO: 1730387 - RNA, 20 nt, Human
cauauucaggaagcucaggg

SEQ ID NO: 1730388 - RNA, 22 nt, Human
cauauucaggaagcucagggcc

SEQ ID NO: 1730389 - RNA, 20 nt, Human
cauaugccugggcagaagga

SEQ ID NO: 1730390 - RNA, 15 nt, Human
cauaugccugggcag

SEQ ID NO: 1730391 - RNA, 22 nt, Human
cauaugccugggcagaaggaag

SEQ ID NO: 1730392 - RNA, 15 nt, Human
caucaggccaggccc

SEQ ID NO: 1730393 - RNA, 19 nt, Human
caucaggccaggcccucug

SEQ ID NO: 1730394 - RNA, 16 nt, Human
caucaggccaggcccu

SEQ ID NO: 1730395 - RNA, 20 nt, Human
caucaggccaggcccucugc

SEQ ID NO: 1730396 - RNA, 19 nt, Human
caucccauaugccugggca

SEQ ID NO: 1730397 - RNA, 14 nt, Human
cauccccuguagag

SEQ ID NO: 1730398 - RNA, 21 nt, Human
cauccccuguagagugggagc

SEQ ID NO: 1730399 - RNA, 15 nt, Human
cauuuggauuggaug

SEQ ID NO: 1730400 - RNA, 17 nt, Human
cauuugucacacacuuu

SEQ ID NO: 1730401 - RNA, 16 nt, Human
cauuugugaaaugaug

SEQ ID NO: 1730402 - RNA, 14 nt, Human
cauuugugaaauga

SEQ ID NO: 1730403 - RNA, 15 nt, Human
cauuuauucugcuca

SEQ ID NO: 1730404 - RNA, 14 nt, Human
cauuuauucugcuc

SEQ ID NO: 1730405 - RNA, 15 nt, Human
cauuguaaaagcauu

SEQ ID NO: 1730406 - RNA, 20 nt, Human
cauuguaaaagcauuuugua

SEQ ID NO: 1730407 - RNA, 21 nt, Human
cauuguaaaagcauuuuguaa

SEQ ID NO: 1730408 - RNA, 22 nt, Human
cauuguaaaagcauuuuguaau

SEQ ID NO: 1730409 - RNA, 23 nt, Human
cauuguaaaagcauuuuguaaua

SEQ ID NO: 1730410 - RNA, 19 nt, Human
cauuuuuuaaaugcaccug

SEQ ID NO: 1730411 - RNA, 15 nt, Human
cauuuuuuaaaugca

SEQ ID NO: 1730412 - RNA, 16 nt, Human
cauuuuuuaaaugcac

SEQ ID NO: 1730413 - RNA, 16 nt, Human
ccaaggccaaaggaag

SEQ ID NO: 1730414 - RNA, 18 nt, Human
ccaaaugcagcuuuaaaa

SEQ ID NO: 1730415 - RNA, 15 nt, Human
ccaaaugcagcuuua

SEQ ID NO: 1730416 - RNA, 13 nt, Human
ccaaaugcagcuu

SEQ ID NO: 1730417 - RNA, 13 nt, Human
ccaagaagcccag

SEQ ID NO: 1730418 - RNA, 16 nt, Human
ccaacgucugugccau

SEQ ID NO: 1730419 - RNA, 15 nt, Human
ccaacgucugugcca

SEQ ID NO: 1730420 - RNA, 13 nt, Human
ccaacgucugugc

SEQ ID NO: 1730421 - RNA, 22 nt, Human
ccaaauggaaaugggcagagca

SEQ ID NO: 1730422 - RNA, 19 nt, Human
ccaagcuggucccacucag

SEQ ID NO: 1730423 - RNA, 12 nt, Human
ccaagcuggucc

SEQ ID NO: 1730424 - RNA, 14 nt, Human
ccaagaagcccagg

SEQ ID NO: 1730425 - RNA, 20 nt, Human
ccaagcuggucccacucagu

SEQ ID NO: 1730426 - RNA, 18 nt, Human
ccaaggaugccccguccc

SEQ ID NO: 1730427 - RNA, 15 nt, Human
ccaaggccaaaggaa

SEQ ID NO: 1730428 - RNA, 21 nt, Human
ccacacuucaggcucuucucc

SEQ ID NO: 1730429 - RNA, 20 nt, Human
ccacacuucaggcucuucuc

SEQ ID NO: 1730430 - RNA, 16 nt, Human
ccacacuucaggcucu

SEQ ID NO: 1730431 - RNA, 15 nt, Human
ccaccacgcccggcu

SEQ ID NO: 1730432 - RNA, 22 nt, Human
ccacagagaaaguacuucucca

SEQ ID NO: 1730433 - RNA, 13 nt, Human
ccacagaggacac

SEQ ID NO: 1730434 - RNA, 13 nt, Human
ccacgcccccacu

SEQ ID NO: 1730435 - RNA, 19 nt, Human
ccaccuuggcugcagggag

SEQ ID NO: 1730436 - RNA, 18 nt, Human
ccaccuuggcugcaggga

SEQ ID NO: 1730437 - RNA, 18 nt, Human
ccacgcuggaccuugaac

SEQ ID NO: 1730438 - RNA, 13 nt, Human
ccacgcuggagug

SEQ ID NO: 1730439 - RNA, 16 nt, Human
ccaccuuggcugcagg

SEQ ID NO: 1730440 - RNA, 15 nt, Human
ccaccuuggcugcag

SEQ ID NO: 1730441 - RNA, 14 nt, Human
ccaccuuggcugca

SEQ ID NO: 1730442 - RNA, 12 nt, Human
ccaccuuggcug

SEQ ID NO: 1730443 - RNA, 22 nt, Human
ccaccgggcugggagcucugca

SEQ ID NO: 1730444 - RNA, 19 nt, Human
ccaccaucaugucuggcua

SEQ ID NO: 1730445 - RNA, 18 nt, Human
ccaccaucaugucuggcu

SEQ ID NO: 1730446 - RNA, 19 nt, Human
ccaccgggcugggagcucu

SEQ ID NO: 1730447 - RNA, 13 nt, Human
cuguagaguggga

SEQ ID NO: 1730448 - RNA, 19 nt, Human
cuguagaaaagggaacuga

SEQ ID NO: 1730449 - RNA, 22 nt, Human
cuggugacaugucuuuucuugc

SEQ ID NO: 1730450 - RNA, 16 nt, Human
cugguuuccugcccug

SEQ ID NO: 1730451 - RNA, 14 nt, Human
cugguuuccugccc

SEQ ID NO: 1730452 - RNA, 13 nt, Human
cugguuuccugcc

SEQ ID NO: 1730453 - RNA, 16 nt, Human
cugucgcccagucugg

SEQ ID NO: 1730454 - RNA, 15 nt, Human
cugucgcccagucug

SEQ ID NO: 1730455 - RNA, 23 nt, Human
cugucaauuacaggaaguacugg

SEQ ID NO: 1730456 - RNA, 20 nt, Human
cugucaauuacaggaaguac

SEQ ID NO: 1730457 - RNA, 19 nt, Human
cugucaauuacaggaagua

SEQ ID NO: 1730458 - RNA, 19 nt, Human
cugugcugcccugcccacc

SEQ ID NO: 1730459 - RNA, 18 nt, Human
cugugcugcccugcccac

SEQ ID NO: 1730460 - RNA, 17 nt, Human
cugugcugcccugccca

SEQ ID NO: 1730461 - RNA, 15 nt, Human
cugugcugcccugcc

SEQ ID NO: 1730462 - RNA, 19 nt, Human
cugugucagcauagaagua

SEQ ID NO: 1730463 - RNA, 17 nt, Human
cugugucagcauagaag

SEQ ID NO: 1730464 - RNA, 21 nt, Human
cugugcugcccugcccaccug

SEQ ID NO: 1730465 - RNA, 14 nt, Human
cugugcugcccugc

SEQ ID NO: 1730466 - RNA, 13 nt, Human
cugugcugcccug

SEQ ID NO: 1730467 - RNA, 12 nt, Human
cugugcugcccu

SEQ ID NO: 1730468 - RNA, 22 nt, Human
cuuagcucauucuccuuguguu

SEQ ID NO: 1730469 - RNA, 16 nt, Human
cuuaccagcagagcac

SEQ ID NO: 1730470 - RNA, 23 nt, Human
cuuagcucauucuccuuguguua

SEQ ID NO: 1730471 - RNA, 13 nt, Human
cuuagcugggaga

SEQ ID NO: 1730472 - RNA, 21 nt, Human
cuuagggaaggauacaaaagc

SEQ ID NO: 1730473 - RNA, 19 nt, Human
cuuagggaaggauacaaaa

SEQ ID NO: 1730474 - RNA, 15 nt, Human
cuuaggaagaauuuu

SEQ ID NO: 1730475 - RNA, 14 nt, Human
cuuaaaacaacacu

SEQ ID NO: 1730476 - RNA, 13 nt, Human
cuuaaauaaugug

SEQ ID NO: 1730477 - RNA, 15 nt, Human
cuuaccagcagagca

SEQ ID NO: 1730478 - RNA, 20 nt, Human
cuuacauuuuacuuuuuccu

SEQ ID NO: 1730479 - RNA, 22 nt, Human
cuuacauuagcaguuugcuuug

SEQ ID NO: 1730480 - RNA, 21 nt, Human
cuuacauuagcaguuugcuuu

SEQ ID NO: 1730481 - RNA, 16 nt, Human
cuuacaagccagcugg

SEQ ID NO: 1730482 - RNA, 17 nt, Human
cuuacaagccagcugga

SEQ ID NO: 1730483 - RNA, 21 nt, Human
cuuaaaaaugguuuaaauggu

SEQ ID NO: 1730484 - RNA, 14 nt, Human
cuguuuaagagaca

SEQ ID NO: 1730485 - RNA, 12 nt, Human
cuguuuaagaga

SEQ ID NO: 1730486 - RNA, 22 nt, Human
cuguuggcugggggccucagug

SEQ ID NO: 1730487 - RNA, 19 nt, Human
cuguuggcugggggccuca

SEQ ID NO: 1730488 - RNA, 14 nt, Human
cuguuggcuggggg

SEQ ID NO: 1730489 - RNA, 11 nt, Human
cugggacacag

SEQ ID NO: 1730490 - RNA, 22 nt, Human
cuggccccucagggucccuggu

SEQ ID NO: 1730491 - RNA, 14 nt, Human
cuggcccugcccug

SEQ ID NO: 1730492 - RNA, 13 nt, Human
cuggcccugcccu

SEQ ID NO: 1730493 - RNA, 11 nt, Human
cuggcccugcc

SEQ ID NO: 1730494 - RNA, 14 nt, Human
cuggccuagcauac

SEQ ID NO: 1730495 - RNA, 16 nt, Human
cuggccgggagccuga

SEQ ID NO: 1730496 - RNA, 15 nt, Human
cuggcccugcccugg

SEQ ID NO: 1730497 - RNA, 18 nt, Human
cuggcagaguugaagaca

SEQ ID NO: 1730498 - RNA, 17 nt, Human
cuggcagaguugaagac

SEQ ID NO: 1730499 - RNA, 13 nt, Human
cuggcagccccug

SEQ ID NO: 1730500 - RNA, 20 nt, Human
cuggcagccgugccuucagc

SEQ ID NO: 1730501 - RNA, 19 nt, Human
cuggcagccgugccuucag

SEQ ID NO: 1730502 - RNA, 22 nt, Human
cuggcagccgugccuucagcuc

SEQ ID NO: 1730503 - RNA, 21 nt, Human
cuggcagccgugccuucagcu

SEQ ID NO: 1730504 - RNA, 12 nt, Human
cuggcagccccu

SEQ ID NO: 1730505 - RNA, 11 nt, Human
cuggcagccca

SEQ ID NO: 1730506 - RNA, 19 nt, Human
cuggcagaguugaagacag

SEQ ID NO: 1730507 - RNA, 14 nt, Human
cuggcagaggaggg

SEQ ID NO: 1730508 - RNA, 20 nt, Human
cugggcaccggggccucgga

SEQ ID NO: 1730509 - RNA, 16 nt, Human
cugggcagaaggaaga

SEQ ID NO: 1730510 - RNA, 15 nt, Human
cugggcagaaggaag

SEQ ID NO: 1730511 - RNA, 12 nt, Human
cugggcagaagg

SEQ ID NO: 1730512 - RNA, 14 nt, Human
cugggccagaauuu

SEQ ID NO: 1730513 - RNA, 12 nt, Human
cugggccagaau

SEQ ID NO: 1730514 - RNA, 20 nt, Human
cuggguucacugcaaccucc

SEQ ID NO: 1730515 - RNA, 18 nt, Human
cuggguucacugcaaccu

SEQ ID NO: 1730516 - RNA, 15 nt, Human
cuggguucacugcaa

SEQ ID NO: 1730517 - RNA, 15 nt, Human
cuggggccaggcugg

SEQ ID NO: 1730518 - RNA, 19 nt, Human
cugcuuuuuaaagaaugcu

SEQ ID NO: 1730519 - RNA, 21 nt, Human
cugcuuuugucuaugggacuc

SEQ ID NO: 1730520 - RNA, 14 nt, Human
cuggaagcacagcu

SEQ ID NO: 1730521 - RNA, 14 nt, Human
cuggagaaaaugga

SEQ ID NO: 1730522 - RNA, 14 nt, Human
cugcuucaaauauu

SEQ ID NO: 1730523 - RNA, 20 nt, Human
cugcuuuugucuaugggacu

SEQ ID NO: 1730524 - RNA, 23 nt, Human
cugcuucaaggauccugagccag

SEQ ID NO: 1730525 - RNA, 22 nt, Human
cugcuucaaggauccugagcca

SEQ ID NO: 1730526 - RNA, 21 nt, Human
cugcuucaaggauccugagcc

SEQ ID NO: 1730527 - RNA, 13 nt, Human
cugcuucaaggau

SEQ ID NO: 1730528 - RNA, 12 nt, Human
cugcuucaagga

SEQ ID NO: 1730529 - RNA, 19 nt, Human
cugcuucaaauauuucccu

SEQ ID NO: 1730530 - RNA, 20 nt, Human
cugaucugaugcaagcaaga

SEQ ID NO: 1730531 - RNA, 19 nt, Human
cugccuguucagcuccagc

SEQ ID NO: 1730532 - RNA, 20 nt, Human
cugccuguugggccaggagc

SEQ ID NO: 1730533 - RNA, 18 nt, Human
cugccuguucagcuccag

SEQ ID NO: 1730534 - RNA, 17 nt, Human
cugccuguucagcucca

SEQ ID NO: 1730535 - RNA, 22 nt, Human
cugccucucccaucacuucccu

SEQ ID NO: 1730536 - RNA, 15 nt, Human
cugccucucccauca

SEQ ID NO: 1730537 - RNA, 23 nt, Human
cugccucucccaucacuucccua

SEQ ID NO: 1730538 - RNA, 24 nt, Human
cugccuccucuucaacugaccagc

SEQ ID NO: 1730539 - RNA, 15 nt, Human
cugccuccucuucaa

SEQ ID NO: 1730540 - RNA, 14 nt, Human
cugccuccucuuca

SEQ ID NO: 1730541 - RNA, 13 nt, Human
cugccuccucuuc

SEQ ID NO: 1730542 - RNA, 21 nt, Human
cugcugacuguuuucucuuga

SEQ ID NO: 1730543 - RNA, 18 nt, Human
cugcugacuguuuucucu

SEQ ID NO: 1730544 - RNA, 22 nt, Human
cugccuguugggccaggagccu

SEQ ID NO: 1730545 - RNA, 21 nt, Human
cugccuguugggccaggagcc

SEQ ID NO: 1730546 - RNA, 23 nt, Human
cugccuguugggccaggagccuc

SEQ ID NO: 1730547 - RNA, 16 nt, Human
gaagacucauucuucu

SEQ ID NO: 1730548 - RNA, 18 nt, Human
gaagacucauucuucugu

SEQ ID NO: 1730549 - RNA, 17 nt, Human
gaagacucauucuucug

SEQ ID NO: 1730550 - RNA, 14 nt, Human
gaagcacagcuuca

SEQ ID NO: 1730551 - RNA, 13 nt, Human
gaagcacagcuuc

SEQ ID NO: 1730552 - RNA, 22 nt, Human
gaagcacaugccucucucaggc

SEQ ID NO: 1730553 - RNA, 14 nt, Human
gaagcacaugccuc

SEQ ID NO: 1730554 - RNA, 16 nt, Human
gaagcaccauaacuuu

SEQ ID NO: 1730555 - RNA, 12 nt, Human
gaagcagcucuu

SEQ ID NO: 1730556 - RNA, 15 nt, Human
gaagacagcucuuau

SEQ ID NO: 1730557 - RNA, 14 nt, Human
gaagacagcucuua

SEQ ID NO: 1730558 - RNA, 13 nt, Human
gaagacagcucuu

SEQ ID NO: 1730559 - RNA, 12 nt, Human
gaagacagcucu

SEQ ID NO: 1730560 - RNA, 15 nt, Human
gaagacagagcuaca

SEQ ID NO: 1730561 - RNA, 13 nt, Human
gaagacagagcua

SEQ ID NO: 1730562 - RNA, 16 nt, Human
gaagacacugaugggc

SEQ ID NO: 1730563 - RNA, 21 nt, Human
gaagacacugaugggcaaccc

SEQ ID NO: 1730564 - RNA, 17 nt, Human
gaacccgggaggcagag

SEQ ID NO: 1730565 - RNA, 19 nt, Human
gaacccgggaggcagaggu

SEQ ID NO: 1730566 - RNA, 13 nt, Human
gaacuccuggccu

SEQ ID NO: 1730567 - RNA, 14 nt, Human
gaacuccugaccuc

SEQ ID NO: 1730568 - RNA, 14 nt, Human
gaacuccuggccuc

SEQ ID NO: 1730569 - RNA, 15 nt, Human
gaacuccuggccuca

SEQ ID NO: 1730570 - RNA, 23 nt, Human
gaaccaccacacccagcccacuu

SEQ ID NO: 1730571 - RNA, 22 nt, Human
gaaccauggucggaaaacaugc

SEQ ID NO: 1730572 - RNA, 22 nt, Human
gaaccaccacacccagcccacu

SEQ ID NO: 1730573 - RNA, 21 nt, Human
gaaccaccacacccagcccac

SEQ ID NO: 1730574 - RNA, 20 nt, Human
gaaccaccacacccagccca

SEQ ID NO: 1730575 - RNA, 18 nt, Human
gaaccaccacacccagcc

SEQ ID NO: 1730576 - RNA, 20 nt, Human
gaacacauaauucaggaagc

SEQ ID NO: 1730577 - RNA, 17 nt, Human
gaacacauaauucagga

SEQ ID NO: 1730578 - RNA, 11 nt, Human
gaaaugaaaaa

SEQ ID NO: 1730579 - RNA, 17 nt, Human
gaaaugaaagcagggac

SEQ ID NO: 1730580 - RNA, 16 nt, Human
gaaagggcccagagag

SEQ ID NO: 1730581 - RNA, 15 nt, Human
gaaagggcccagaga

SEQ ID NO: 1730582 - RNA, 18 nt, Human
gaaagaaaaucaggcugg

SEQ ID NO: 1730583 - RNA, 13 nt, Human
gaaacuggauuaa

SEQ ID NO: 1730584 - RNA, 17 nt, Human
gaaacuggauuaaacuu

SEQ ID NO: 1730585 - RNA, 15 nt, Human
gaaaggcuccaggag

SEQ ID NO: 1730586 - RNA, 14 nt, Human
gaaaggcuccagga

SEQ ID NO: 1730587 - RNA, 13 nt, Human
gaaaggcuccagg

SEQ ID NO: 1730588 - RNA, 16 nt, Human
gaaaggcuccaggagc

SEQ ID NO: 1730589 - RNA, 20 nt, Human
gaaagaacgcugauuuaaag

SEQ ID NO: 1730590 - RNA, 13 nt, Human
gaaagggcccaga

SEQ ID NO: 1730591 - RNA, 21 nt, Human
gaaaacuuuaugcuaagugaa

SEQ ID NO: 1730592 - RNA, 23 nt, Human
gaaaagaaaaaugagccuggcaa

SEQ ID NO: 1730593 - RNA, 22 nt, Human
gaaaacuuguauuauguguguu

SEQ ID NO: 1730594 - RNA, 19 nt, Human
gaaaacuuguauuaugugu

SEQ ID NO: 1730595 - RNA, 15 nt, Human
gaaaaugugugugug

SEQ ID NO: 1730596 - RNA, 12 nt, Human
gaaaaugugugu

SEQ ID NO: 1730597 - RNA, 14 nt, Human
gaaaagaauagaag

SEQ ID NO: 1730598 - RNA, 16 nt, Human
cuugacaucaacugca

SEQ ID NO: 1730599 - RNA, 18 nt, Human
cuugaauuguaaggaaug

SEQ ID NO: 1730600 - RNA, 18 nt, Human
cuugauguguuaucucuu

SEQ ID NO: 1730601 - RNA, 17 nt, Human
cuugauauccucuuuga

SEQ ID NO: 1730602 - RNA, 22 nt, Human
cuugauauccucuuugagugaa

SEQ ID NO: 1730603 - RNA, 12 nt, Human
cuugauucauaa

SEQ ID NO: 1730604 - RNA, 12 nt, Human
cuugcaaaguau

SEQ ID NO: 1730605 - RNA, 24 nt, Human
cuuggauuguccccgacccuugcc

SEQ ID NO: 1730606 - RNA, 23 nt, Human
cuuggauuguccccgacccuugc

SEQ ID NO: 1730607 - RNA, 14 nt, Human
cuucuucagagacu

SEQ ID NO: 1730608 - RNA, 13 nt, Human
cuucuucagagac

SEQ ID NO: 1730609 - RNA, 18 nt, Human
cuucuucagagacuccug

SEQ ID NO: 1730610 - RNA, 13 nt, Human
cuucucacauuua

SEQ ID NO: 1730611 - RNA, 20 nt, Human
cuucucacauuuauauuuuu

SEQ ID NO: 1730612 - RNA, 13 nt, Human
cuuccuccuggug

SEQ ID NO: 1730613 - RNA, 22 nt, Human
cuuccucuuuccaucuacccuc

SEQ ID NO: 1730614 - RNA, 22 nt, Human
cuuccucugaggcugaaauuca

SEQ ID NO: 1730615 - RNA, 21 nt, Human
cuuccucuuuccaucuacccu

SEQ ID NO: 1730616 - RNA, 16 nt, Human
cuuccucugaggcuga

SEQ ID NO: 1730617 - RNA, 15 nt, Human
cuuccucugagccuu

SEQ ID NO: 1730618 - RNA, 14 nt, Human
cuuccucugagccu

SEQ ID NO: 1730619 - RNA, 15 nt, Human
cuuccucuccacugc

SEQ ID NO: 1730620 - RNA, 14 nt, Human
cuuccucuccacug

SEQ ID NO: 1730621 - RNA, 13 nt, Human
cuuccucuccacu

SEQ ID NO: 1730622 - RNA, 19 nt, Human
cuuggucugugagaugcua

SEQ ID NO: 1730623 - RNA, 16 nt, Human
cuuggucugugagaug

SEQ ID NO: 1730624 - RNA, 14 nt, Human
cuugguccugcugc

SEQ ID NO: 1730625 - RNA, 22 nt, Human
cuugguagaagcccuucuaccu

SEQ ID NO: 1730626 - RNA, 23 nt, Human
cuuggguucaagugauucuccug

SEQ ID NO: 1730627 - RNA, 19 nt, Human
cuugucuuuggacccugag

SEQ ID NO: 1730628 - RNA, 18 nt, Human
cuugucuuuggacccuga

SEQ ID NO: 1730629 - RNA, 15 nt, Human
cuugucuuuggaccc

SEQ ID NO: 1730630 - RNA, 13 nt, Human
cuugucuuuggac

SEQ ID NO: 1730631 - RNA, 20 nt, Human
cuuggugucgggcaugacac

SEQ ID NO: 1730632 - RNA, 19 nt, Human
cuuggugucgggcaugaca

SEQ ID NO: 1730633 - RNA, 20 nt, Human
cuuucacccuuuucuguuug

SEQ ID NO: 1730634 - RNA, 15 nt, Human
cuuucacccuuuucu

SEQ ID NO: 1730635 - RNA, 14 nt, Human
cuuucacccuuuuc

SEQ ID NO: 1730636 - RNA, 23 nt, Human
cuuuaaugucacaggcaggucca

SEQ ID NO: 1730637 - RNA, 20 nt, Human
cuuuuauaaacuuuaccuuu

SEQ ID NO: 1730638 - RNA, 21 nt, Human
cuuuuauaaacuuuaccuuuu

SEQ ID NO: 1730639 - RNA, 22 nt, Human
cuuuguauucucuccuguaccu

SEQ ID NO: 1730640 - RNA, 17 nt, Human
cuuuguauucucuccug

SEQ ID NO: 1730641 - RNA, 12 nt, Human
cuuuguaugcac

SEQ ID NO: 1730642 - RNA, 16 nt, Human
cuuuguaaugaaaacc

SEQ ID NO: 1730643 - RNA, 15 nt, Human
cuuuguaaugaaaac

SEQ ID NO: 1730644 - RNA, 14 nt, Human
cuuuguaaugaaaa

SEQ ID NO: 1730645 - RNA, 16 nt, Human
cuuucuacccagcgag

SEQ ID NO: 1730646 - RNA, 15 nt, Human
cuuucuacccagcga

SEQ ID NO: 1730647 - RNA, 17 nt, Human
cuuucuacccagcgagc

SEQ ID NO: 1730648 - RNA, 17 nt, Human
cuuugacgccaucccag

SEQ ID NO: 1730649 - RNA, 16 nt, Human
cuuugacgccauccca

SEQ ID NO: 1730650 - RNA, 18 nt, Human
cuuugacgccaucccagc

SEQ ID NO: 1730651 - RNA, 16 nt, Human
gcacuuuguucuggcu

SEQ ID NO: 1730652 - RNA, 15 nt, Human
gcagcuuauucacaa

SEQ ID NO: 1730653 - RNA, 16 nt, Human
gcagcuugaggguugg

SEQ ID NO: 1730654 - RNA, 20 nt, Human
gcagcugcuuuugucuaugg

SEQ ID NO: 1730655 - RNA, 13 nt, Human
gcagcugcuuuug

SEQ ID NO: 1730656 - RNA, 23 nt, Human
gcagcugcgguccacccaggagc

SEQ ID NO: 1730657 - RNA, 22 nt, Human
gcagcugcgguccacccaggag

SEQ ID NO: 1730658 - RNA, 16 nt, Human
gcaggcucucaggcca

SEQ ID NO: 1730659 - RNA, 15 nt, Human
gcaggcucucaggcc

SEQ ID NO: 1730660 - RNA, 14 nt, Human
gcaggcucucaggc

SEQ ID NO: 1730661 - RNA, 13 nt, Human
gcaggcucucagg

SEQ ID NO: 1730662 - RNA, 12 nt, Human
gcaggcucucag

SEQ ID NO: 1730663 - RNA, 22 nt, Human
gcaggcucgggcuccccagccc

SEQ ID NO: 1730664 - RNA, 21 nt, Human
gcagcuugaggguugggcugg

SEQ ID NO: 1730665 - RNA, 19 nt, Human
gcagcuugaggguugggcu

SEQ ID NO: 1730666 - RNA, 22 nt, Human
gcagggaaacagcuaaugggac

SEQ ID NO: 1730667 - RNA, 13 nt, Human
gcaggcuggcccu

SEQ ID NO: 1730668 - RNA, 17 nt, Human
gcaggcucucaggccag

SEQ ID NO: 1730669 - RNA, 18 nt, Human
gcaggcucucaggccagc

SEQ ID NO: 1730670 - RNA, 23 nt, Human
gcaguugccagucaccccggcca

SEQ ID NO: 1730671 - RNA, 14 nt, Human
gcaguugccaguca

SEQ ID NO: 1730672 - RNA, 15 nt, Human
gcauaaaaauuagcc

SEQ ID NO: 1730673 - RNA, 15 nt, Human
gcauaccacuuuugu

SEQ ID NO: 1730674 - RNA, 16 nt, Human
gcauaccacuuuuguu

SEQ ID NO: 1730675 - RNA, 11 nt, Human
gccaaggccaa

SEQ ID NO: 1730676 - RNA, 17 nt, Human
gccaaggccaaaggaag

SEQ ID NO: 1730677 - RNA, 19 nt, Human
gccaaggccaaaggaagca

SEQ ID NO: 1730678 - RNA, 22 nt, Human
gccaagcaccuagccucgcucu

SEQ ID NO: 1730679 - RNA, 13 nt, Human
gcauggccaggug

SEQ ID NO: 1730680 - RNA, 17 nt, Human
gcauggccagguggcca

SEQ ID NO: 1730681 - RNA, 14 nt, Human
gcauggccaggugg

SEQ ID NO: 1730682 - RNA, 23 nt, Human
gcauccuggcacccggccccugc

SEQ ID NO: 1730683 - RNA, 22 nt, Human
gcauccuggcacccggccccug

SEQ ID NO: 1730684 - RNA, 13 nt, Human
gcaucgcaaugua

SEQ ID NO: 1730685 - RNA, 21 nt, Human
gcauccuggcacccggccccu

SEQ ID NO: 1730686 - RNA, 17 nt, Human
gcauccuggcacccggc

SEQ ID NO: 1730687 - RNA, 18 nt, Human
gcaugugaugagaggaaa

SEQ ID NO: 1730688 - RNA, 20 nt, Human
gcauuguaaaagcauuuugu

SEQ ID NO: 1730689 - RNA, 17 nt, Human
gcaugugaugagaggaa

SEQ ID NO: 1730690 - RNA, 23 nt, Human
gcaugucccuaccgagucucuuc

SEQ ID NO: 1730691 - RNA, 16 nt, Human
gcaugggaaugaaugu

SEQ ID NO: 1730692 - RNA, 13 nt, Human
gcaugggaaugaa

SEQ ID NO: 1730693 - RNA, 19 nt, Human
gcaugggaaugaaugucag

SEQ ID NO: 1730694 - RNA, 14 nt, Human
gcauuugaaaauuu

SEQ ID NO: 1730695 - RNA, 16 nt, Human
gcauuugaaaauuuug

SEQ ID NO: 1730696 - RNA, 12 nt, Human
gcauuuaaaaga

SEQ ID NO: 1730697 - RNA, 15 nt, Human
gcauuuaaaagauac

SEQ ID NO: 1730698 - RNA, 18 nt, Human
gccaagaauucuuaaaua

SEQ ID NO: 1730699 - RNA, 14 nt, Human
gccaagaauucuua

SEQ ID NO: 1730700 - RNA, 21 nt, Human
gccaacuuuccccacguuaaa

SEQ ID NO: 1730701 - RNA, 19 nt, Human
gccaacuauggccugugga

SEQ ID NO: 1730702 - RNA, 15 nt, Human
gccaacuauggccug

SEQ ID NO: 1730703 - RNA, 14 nt, Human
gccaacuauggccu

SEQ ID NO: 1730704 - RNA, 12 nt, Human
gcacuccccugc

SEQ ID NO: 1730705 - RNA, 17 nt, Human
gcacuccagccugggug

SEQ ID NO: 1730706 - RNA, 22 nt, Human
gcacuauagccuaggugacaga

SEQ ID NO: 1730707 - RNA, 23 nt, Human
gcacacagcacgggggccaagga

SEQ ID NO: 1730708 - RNA, 11 nt, Human
gcacacagcac

SEQ ID NO: 1730709 - RNA, 20 nt, Human
gcacacaccagagcccaccu

SEQ ID NO: 1730710 - RNA, 12 nt, Human
gcacacauuuuu

SEQ ID NO: 1730711 - RNA, 11 nt, Human
gcacacauuuu

SEQ ID NO: 1730712 - RNA, 16 nt, Human
gcaccggcuggccugg

SEQ ID NO: 1730713 - RNA, 15 nt, Human
gcaccggcuggccug

SEQ ID NO: 1730714 - RNA, 17 nt, Human
gcaccggcuggccuggc

SEQ ID NO: 1730715 - RNA, 18 nt, Human
gcaccggcuggccuggcc

SEQ ID NO: 1730716 - RNA, 18 nt, Human
gcaccuaccaccacgccc

SEQ ID NO: 1730717 - RNA, 17 nt, Human
gcaccuaccaccacgcc

SEQ ID NO: 1730718 - RNA, 18 nt, Human
gcaccuacaguguacagu

SEQ ID NO: 1730719 - RNA, 19 nt, Human
gcaccuacaguguacaguc

SEQ ID NO: 1730720 - RNA, 21 nt, Human
gcaccuacaguguacagucuu

SEQ ID NO: 1730721 - RNA, 12 nt, Human
gcaccuccugcc

SEQ ID NO: 1730722 - RNA, 21 nt, Human
gcaauaaagcagcguuucuau

SEQ ID NO: 1730723 - RNA, 11 nt, Human
gcaauaaagca

SEQ ID NO: 1730724 - RNA, 19 nt, Human
gcacacaccagagcccacc

SEQ ID NO: 1730725 - RNA, 18 nt, Human
gcacacaccagagcccac

SEQ ID NO: 1730726 - RNA, 17 nt, Human
gcacacaccagagccca

SEQ ID NO: 1730727 - RNA, 16 nt, Human
gcacacaccagagccc

SEQ ID NO: 1730728 - RNA, 15 nt, Human
gcacacaccagagcc

SEQ ID NO: 1730729 - RNA, 14 nt, Human
gcacacaccagagc

SEQ ID NO: 1730730 - RNA, 12 nt, Human
gcacacaccaga

SEQ ID NO: 1730731 - RNA, 19 nt, Human
gcaaccuccgccucuuggg

SEQ ID NO: 1730732 - RNA, 18 nt, Human
gcaaccuccgccucuugg

SEQ ID NO: 1730733 - RNA, 22 nt, Human
gcaacccuggugaccagcacca

SEQ ID NO: 1730734 - RNA, 16 nt, Human
gcaaaagaugcuucuc

SEQ ID NO: 1730735 - RNA, 18 nt, Human
gcaacccccagccugcua

SEQ ID NO: 1730736 - RNA, 15 nt, Human
gcaaaagaugcuucu

SEQ ID NO: 1730737 - RNA, 23 nt, Human
gauuuuuuuuuccuucagugccu

SEQ ID NO: 1730738 - RNA, 22 nt, Human
gauuuuuuuuuccuucagugcc

SEQ ID NO: 1730739 - RNA, 18 nt, Human
gauuucacucuccuuggu

SEQ ID NO: 1730740 - RNA, 17 nt, Human
gauuucacucuccuugg

SEQ ID NO: 1730741 - RNA, 20 nt, Human
gauuucagcucacugcaacc

SEQ ID NO: 1730742 - RNA, 17 nt, Human
gauuucagcucacugca

SEQ ID NO: 1730743 - RNA, 15 nt, Human
gauuucagcucacug

SEQ ID NO: 1730744 - RNA, 16 nt, Human
gauuucacucuccuug

SEQ ID NO: 1730745 - RNA, 13 nt, Human
gauuucacucucc

SEQ ID NO: 1730746 - RNA, 21 nt, Human
gauucuccugccucagccucc

SEQ ID NO: 1730747 - RNA, 20 nt, Human
gauucuccugccucagccuc

SEQ ID NO: 1730748 - RNA, 19 nt, Human
gauucuccugccucagccu

SEQ ID NO: 1730749 - RNA, 23 nt, Human
gauucuuauggacaaugacccag

SEQ ID NO: 1730750 - RNA, 21 nt, Human
gauucuucugcuucagccucc

SEQ ID NO: 1730751 - RNA, 20 nt, Human
gauuuaacagaaauguacag

SEQ ID NO: 1730752 - RNA, 23 nt, Human
gauuuaacagaaauguacagcaa

SEQ ID NO: 1730753 - RNA, 18 nt, Human
gaucuggguucacugcaa

SEQ ID NO: 1730754 - RNA, 22 nt, Human
gaguugauagcacagacccugc

SEQ ID NO: 1730755 - RNA, 20 nt, Human
gaucuggguucacugcaacc

SEQ ID NO: 1730756 - RNA, 19 nt, Human
gauguaauuuuguguaaga

SEQ ID NO: 1730757 - RNA, 13 nt, Human
gauguaauuuugu

SEQ ID NO: 1730758 - RNA, 17 nt, Human
gaugucccaacuuguaa

SEQ ID NO: 1730759 - RNA, 18 nt, Human
gaugucccaacuuguaaa

SEQ ID NO: 1730760 - RNA, 14 nt, Human
gaugcuuguacaua

SEQ ID NO: 1730761 - RNA, 16 nt, Human
gaugcuuguacauaau

SEQ ID NO: 1730762 - RNA, 23 nt, Human
gauggaggaaaaccaagccgugg

SEQ ID NO: 1730763 - RNA, 22 nt, Human
gauggaaaaaccacccccaaau

SEQ ID NO: 1730764 - RNA, 14 nt, Human
gauguaaagauguu

SEQ ID NO: 1730765 - RNA, 13 nt, Human
gauguaaagaugu

SEQ ID NO: 1730766 - RNA, 23 nt, Human
gaugcuucucacugccaugccag

SEQ ID NO: 1730767 - RNA, 14 nt, Human
gaugaugacuaugg

SEQ ID NO: 1730768 - RNA, 13 nt, Human
gaugaggcaaccc

SEQ ID NO: 1730769 - RNA, 22 nt, Human
gagcaucaggccaggcccucug

SEQ ID NO: 1730770 - RNA, 20 nt, Human
gagcaucaggccaggcccuc

SEQ ID NO: 1730771 - RNA, 13 nt, Human
gagcgacagugag

SEQ ID NO: 1730772 - RNA, 15 nt, Human
gagcgacagugagac

SEQ ID NO: 1730773 - RNA, 13 nt, Human
gagccuuccaggg

SEQ ID NO: 1730774 - RNA, 12 nt, Human
gagccuuccagg

SEQ ID NO: 1730775 - RNA, 19 nt, Human
gagcugccuguucagcucc

SEQ ID NO: 1730776 - RNA, 16 nt, Human
gagcugccuguucagc

SEQ ID NO: 1730777 - RNA, 15 nt, Human
gagcugccuguucag

SEQ ID NO: 1730778 - RNA, 17 nt, Human
gagcggagaaaggaagg

SEQ ID NO: 1730779 - RNA, 20 nt, Human
gagcugccuguucagcucca

SEQ ID NO: 1730780 - RNA, 13 nt, Human
gaggugggauccu

SEQ ID NO: 1730781 - RNA, 16 nt, Human
gaggugggauccucca

SEQ ID NO: 1730782 - RNA, 15 nt, Human
gaggugggauccucc

SEQ ID NO: 1730783 - RNA, 21 nt, Human
gagucacuggaacacuaauga

SEQ ID NO: 1730784 - RNA, 14 nt, Human
gagucacuggaaca

SEQ ID NO: 1730785 - RNA, 17 nt, Human
gaggugggauccuccag

SEQ ID NO: 1730786 - RNA, 18 nt, Human
gagugccuuacacaaugg

SEQ ID NO: 1730787 - RNA, 19 nt, Human
gaguugauacuacaguuug

SEQ ID NO: 1730788 - RNA, 21 nt, Human
gaguugauagcacagacccug

SEQ ID NO: 1730789 - RNA, 22 nt, Human
gaguugauacuacaguuuguua

SEQ ID NO: 1730790 - RNA, 18 nt, Human
gagugcagugagccgaga

SEQ ID NO: 1730791 - RNA, 18 nt, Human
gagugagacucugucuca

SEQ ID NO: 1730792 - RNA, 14 nt, Human
gagugagacucugu

SEQ ID NO: 1730793 - RNA, 14 nt, Human
gagugagacagacu

SEQ ID NO: 1730794 - RNA, 18 nt, Human
gagucagaaguuucugcc

SEQ ID NO: 1730795 - RNA, 20 nt, Human
gaggccagagacacaagccu

SEQ ID NO: 1730796 - RNA, 14 nt, Human
gaggcucugcccuu

SEQ ID NO: 1730797 - RNA, 13 nt, Human
gaggcucugcccu

SEQ ID NO: 1730798 - RNA, 12 nt, Human
gaggcucugccc

SEQ ID NO: 1730799 - RNA, 17 nt, Human
gaggcucugcccuuggu

SEQ ID NO: 1730800 - RNA, 15 nt, Human
gaggcucugcccuug

SEQ ID NO: 1730801 - RNA, 19 nt, Human
gaggcucuggagcccacug

SEQ ID NO: 1730802 - RNA, 14 nt, Human
gaggcucuggagcc

SEQ ID NO: 1730803 - RNA, 14 nt, Human
gaggcugccucucc

SEQ ID NO: 1730804 - RNA, 15 nt, Human
gagggcuccagacac

SEQ ID NO: 1730805 - RNA, 14 nt, Human
gagggcuccagaca

SEQ ID NO: 1730806 - RNA, 13 nt, Human
gagggcuccagac

SEQ ID NO: 1730807 - RNA, 12 nt, Human
gagggcuccaga

SEQ ID NO: 1730808 - RNA, 12 nt, Human
gaggggaacaga

SEQ ID NO: 1730809 - RNA, 14 nt, Human
gacagaaagcagaa

SEQ ID NO: 1730810 - RNA, 20 nt, Human
gacagaaagcagaacaguga

SEQ ID NO: 1730811 - RNA, 15 nt, Human
gacagcuccuucugu

SEQ ID NO: 1730812 - RNA, 14 nt, Human
gacagcuccuucug

SEQ ID NO: 1730813 - RNA, 13 nt, Human
gacagcuccuucu

SEQ ID NO: 1730814 - RNA, 12 nt, Human
gacagccuggca

SEQ ID NO: 1730815 - RNA, 11 nt, Human
gacagccuggc

SEQ ID NO: 1730816 - RNA, 16 nt, Human
gacagcuccuucuguc

SEQ ID NO: 1730817 - RNA, 17 nt, Human
gacaggguuucaccaug

SEQ ID NO: 1730818 - RNA, 20 nt, Human
gacaguauggcagcuuuccu

SEQ ID NO: 1730819 - RNA, 15 nt, Human
gaccaucccugaagg

SEQ ID NO: 1730820 - RNA, 14 nt, Human
gaccaucccugaag

SEQ ID NO: 1730821 - RNA, 13 nt, Human
gacccggcugcgu

SEQ ID NO: 1730822 - RNA, 12 nt, Human
gacccggcugcg

SEQ ID NO: 1730823 - RNA, 22 nt, Human
gaccccuggcuuuucacugcug

SEQ ID NO: 1730824 - RNA, 21 nt, Human
gaccccuggcuuuucacugcu

SEQ ID NO: 1730825 - RNA, 16 nt, Human
gacccuauugcugcuu

SEQ ID NO: 1730826 - RNA, 17 nt, Human
gaccauucuccaccugc

SEQ ID NO: 1730827 - RNA, 13 nt, Human
gaccccuggcuuu

SEQ ID NO: 1730828 - RNA, 16 nt, Human
gaccauucuccaccug

SEQ ID NO: 1730829 - RNA, 17 nt, Human
gaccaucccugaaggcc

SEQ ID NO: 1730830 - RNA, 16 nt, Human
gaccaucccugaaggc

SEQ ID NO: 1730831 - RNA, 22 nt, Human
gacuuuguuaguuucuccaagc

SEQ ID NO: 1730832 - RNA, 23 nt, Human
gacuuuucuguccgagcuuugaa

SEQ ID NO: 1730833 - RNA, 21 nt, Human
gacuuuucuguccgagcuuug

SEQ ID NO: 1730834 - RNA, 14 nt, Human
gacuuuggaaagag

SEQ ID NO: 1730835 - RNA, 14 nt, Human
gacuuuggaaagac

SEQ ID NO: 1730836 - RNA, 18 nt, Human
gacuguuuucucuugaga

SEQ ID NO: 1730837 - RNA, 16 nt, Human
gacuguuuucucuuga

SEQ ID NO: 1730838 - RNA, 23 nt, Human
gacugucucaagagggcacuggu

SEQ ID NO: 1730839 - RNA, 22 nt, Human
gacugucucaagagggcacugg

SEQ ID NO: 1730840 - RNA, 21 nt, Human
gacugucucaagagggcacug

SEQ ID NO: 1730841 - RNA, 20 nt, Human
gacugugugcucaggagccc

SEQ ID NO: 1730842 - RNA, 17 nt, Human
gacugugugcucaggag

SEQ ID NO: 1730843 - RNA, 16 nt, Human
gacugugugcucagga

SEQ ID NO: 1730844 - RNA, 14 nt, Human
gacugugugcucag

SEQ ID NO: 1730845 - RNA, 22 nt, Human
gacuguacaaaguagaagucuu

SEQ ID NO: 1730846 - RNA, 17 nt, Human
gacuguacuccucccag

SEQ ID NO: 1730847 - RNA, 16 nt, Human
gacuguacuccuccca

SEQ ID NO: 1730848 - RNA, 17 nt, Human
gacucaaugcacugaca

SEQ ID NO: 1730849 - RNA, 14 nt, Human
gacucaaugcacug

SEQ ID NO: 1730850 - RNA, 17 nt, Human
gagaagcggcuggcagc

SEQ ID NO: 1730851 - RNA, 15 nt, Human
gacgcugugcugccc

SEQ ID NO: 1730852 - RNA, 13 nt, Human
gacgcugugcugc

SEQ ID NO: 1730853 - RNA, 12 nt, Human
gacgcugugcug

SEQ ID NO: 1730854 - RNA, 16 nt, Human
guacuggagaaaaugg

SEQ ID NO: 1730855 - RNA, 19 nt, Human
guacuacaguccucccauc

SEQ ID NO: 1730856 - RNA, 18 nt, Human
guacuacaguccucccau

SEQ ID NO: 1730857 - RNA, 14 nt, Human
guacccacugcucu

SEQ ID NO: 1730858 - RNA, 13 nt, Human
guacccacugcuc

SEQ ID NO: 1730859 - RNA, 13 nt, Human
guacuauguauca

SEQ ID NO: 1730860 - RNA, 17 nt, Human
guacuauguaucaauga

SEQ ID NO: 1730861 - RNA, 15 nt, Human
guacuauguaucaau

SEQ ID NO: 1730862 - RNA, 14 nt, Human
guacucauuaaaaa

SEQ ID NO: 1730863 - RNA, 14 nt, Human
guacuccucccagg

SEQ ID NO: 1730864 - RNA, 19 nt, Human
guacuccacauauuucagu

SEQ ID NO: 1730865 - RNA, 23 nt, Human
guagaaauaucugaaaauguaug

SEQ ID NO: 1730866 - RNA, 21 nt, Human
guagaaauaucugaaaaugua

SEQ ID NO: 1730867 - RNA, 20 nt, Human
guagaaauaucugaaaaugu

SEQ ID NO: 1730868 - RNA, 18 nt, Human
guagaagcccuucuaccu

SEQ ID NO: 1730869 - RNA, 12 nt, Human
guagaagauggc

SEQ ID NO: 1730870 - RNA, 21 nt, Human
guagaagucuuagauguauau

SEQ ID NO: 1730871 - RNA, 11 nt, Human
guagagccagg

SEQ ID NO: 1730872 - RNA, 10 nt, Human
guagagccag

SEQ ID NO: 1730873 - RNA, 13 nt, Human
guagagacagggu

SEQ ID NO: 1730874 - RNA, 18 nt, Human
guagagccagggucucac

SEQ ID NO: 1730875 - RNA, 15 nt, Human
guagagccagggucu

SEQ ID NO: 1730876 - RNA, 21 nt, Human
guagccucaaucgagugagac

SEQ ID NO: 1730877 - RNA, 12 nt, Human
guagagacaggg

SEQ ID NO: 1730878 - RNA, 11 nt, Human
guagagacagg

SEQ ID NO: 1730879 - RNA, 23 nt, Human
guaccaagacuacuagggaaaug

SEQ ID NO: 1730880 - RNA, 20 nt, Human
guaccaagacuacuagggaa

SEQ ID NO: 1730881 - RNA, 12 nt, Human
guacccacugcu

SEQ ID NO: 1730882 - RNA, 23 nt, Human
guaccauuuaauggggaggacaa

SEQ ID NO: 1730883 - RNA, 22 nt, Human
guaccauuuaauggggaggaca

SEQ ID NO: 1730884 - RNA, 14 nt, Human
guacaugaaaacac

SEQ ID NO: 1730885 - RNA, 15 nt, Human
guacaugaaaacaca

SEQ ID NO: 1730886 - RNA, 16 nt, Human
guacaugaaaacacau

SEQ ID NO: 1730887 - RNA, 19 nt, Human
guacauggaauaacaugua

SEQ ID NO: 1730888 - RNA, 17 nt, Human
guacaugaaaacacauu

SEQ ID NO: 1730889 - RNA, 18 nt, Human
guacaugaaaacacauuu

SEQ ID NO: 1730890 - RNA, 19 nt, Human
guacaugaaaacacauuuu

SEQ ID NO: 1730891 - RNA, 20 nt, Human
guacaugaaaacacauuuuu

SEQ ID NO: 1730892 - RNA, 15 nt, Human
aaauccacuuuaucu

SEQ ID NO: 1730893 - RNA, 18 nt, Human
aaaucagccugcuccagc

SEQ ID NO: 1730894 - RNA, 16 nt, Human
aaaucagcugcuacua

SEQ ID NO: 1730895 - RNA, 12 nt, Human
aaaucagccugc

SEQ ID NO: 1730896 - RNA, 19 nt, Human
aaaucagccguguaaccau

SEQ ID NO: 1730897 - RNA, 15 nt, Human
aaauauuccugcauu

SEQ ID NO: 1730898 - RNA, 21 nt, Human
aaaucagacuaugaaguuuuu

SEQ ID NO: 1730899 - RNA, 14 nt, Human
aaaucagacuauga

SEQ ID NO: 1730900 - RNA, 14 nt, Human
guaauaugcacaca

SEQ ID NO: 1730901 - RNA, 16 nt, Human
guaauaugcacacauu

SEQ ID NO: 1730902 - RNA, 17 nt, Human
guaauaugcacacauuu

SEQ ID NO: 1730903 - RNA, 18 nt, Human
guaauaugcacacauuuu

SEQ ID NO: 1730904 - RNA, 21 nt, Human
guaauccaagcaaaugugaau

SEQ ID NO: 1730905 - RNA, 15 nt, Human
guaauccaccugccu

SEQ ID NO: 1730906 - RNA, 20 nt, Human
guaauaggcguaacuaauuu

SEQ ID NO: 1730907 - RNA, 14 nt, Human
guaauuuuguguaa

SEQ ID NO: 1730908 - RNA, 16 nt, Human
guaauuuuguguaaga

SEQ ID NO: 1730909 - RNA, 20 nt, Human
guaauuuuguguaagaaaua

SEQ ID NO: 1730910 - RNA, 17 nt, Human
aaauacagauagauaua

SEQ ID NO: 1730911 - RNA, 15 nt, Human
aaauacagacuggau

SEQ ID NO: 1730912 - RNA, 18 nt, Human
aaauaccagccaguaaau

SEQ ID NO: 1730913 - RNA, 17 nt, Human
aaauacauuuaaaacau

SEQ ID NO: 1730914 - RNA, 17 nt, Human
aaaguugguaaaccuuu

SEQ ID NO: 1730915 - RNA, 16 nt, Human
aaaguugguaaaccuu

SEQ ID NO: 1730916 - RNA, 12 nt, Human
aaauaauuuugu

SEQ ID NO: 1730917 - RNA, 13 nt, Human
aaauaauuuugua

SEQ ID NO: 1730918 - RNA, 14 nt, Human
aaauaauuuuguaa

SEQ ID NO: 1730919 - RNA, 23 nt, Human
aaaguucugcagauaaacaguag

SEQ ID NO: 1730920 - RNA, 16 nt, Human
aaaguuaccagugccu

SEQ ID NO: 1730921 - RNA, 22 nt, Human
aaaguuaccagugccuuaaacu

SEQ ID NO: 1730922 - RNA, 18 nt, Human
aaaguaucccuacuguaa

SEQ ID NO: 1730923 - RNA, 21 nt, Human
aaaguacuucuccacccugcu

SEQ ID NO: 1730924 - RNA, 20 nt, Human
aaaguacuucuccacccugc

SEQ ID NO: 1730925 - RNA, 23 nt, Human
aaaguacuucuccacccugcucu

SEQ ID NO: 1730926 - RNA, 20 nt, Human
aaagguauuuuaaucaccaa

SEQ ID NO: 1730927 - RNA, 20 nt, Human
aaaguacacuguuucaaacu

SEQ ID NO: 1730928 - RNA, 19 nt, Human
aaaguacuucuccacccug

SEQ ID NO: 1730929 - RNA, 16 nt, Human
aaaguacauguuaaac

SEQ ID NO: 1730930 - RNA, 13 nt, Human
gggaugagaaagg

SEQ ID NO: 1730931 - RNA, 19 nt, Human
aaaauuuagaaauauaauu

SEQ ID NO: 1730932 - RNA, 20 nt, Human
aaaauuuugauguuuuaagg

SEQ ID NO: 1730933 - RNA, 15 nt, Human
aaaauuuuuaaucuu

SEQ ID NO: 1730934 - RNA, 20 nt, Human
aaacaaaggccuaauucuau

SEQ ID NO: 1730935 - RNA, 19 nt, Human
aaacacaaacgggcucagc

SEQ ID NO: 1730936 - RNA, 12 nt, Human
aaacacauuuuu

SEQ ID NO: 1730937 - RNA, 11 nt, Human
aaacacauuuu

SEQ ID NO: 1730938 - RNA, 16 nt, Human
ggggaccagagcugcc

SEQ ID NO: 1730939 - RNA, 22 nt, Human
ggggaauguuugccucugccuc

SEQ ID NO: 1730940 - RNA, 18 nt, Human
ggggaauguuugccucug

SEQ ID NO: 1730941 - RNA, 13 nt, Human
ggggaaggcaggg

SEQ ID NO: 1730942 - RNA, 14 nt, Human
aaacaguagugaua

SEQ ID NO: 1730943 - RNA, 16 nt, Human
aaacauggccuuugcu

SEQ ID NO: 1730944 - RNA, 17 nt, Human
aaacauggccuuugcuu

SEQ ID NO: 1730945 - RNA, 11 nt, Human
ggggagaaagu

SEQ ID NO: 1730946 - RNA, 18 nt, Human
gggggccucagugccacu

SEQ ID NO: 1730947 - RNA, 17 nt, Human
gggggccucagugccac

SEQ ID NO: 1730948 - RNA, 15 nt, Human
gggggccucagugcc

SEQ ID NO: 1730949 - RNA, 12 nt, Human
gggggccucagu

SEQ ID NO: 1730950 - RNA, 15 nt, Human
ggggccucagugcca

SEQ ID NO: 1730951 - RNA, 13 nt, Human
aaacucuccucug

SEQ ID NO: 1730952 - RNA, 22 nt, Human
aaacugcccccucugcccugcg

SEQ ID NO: 1730953 - RNA, 19 nt, Human
aaacuguuaauaguucagg

SEQ ID NO: 1730954 - RNA, 16 nt, Human
aaacuuaaucuaaaug

SEQ ID NO: 1730955 - RNA, 17 nt, Human
aaacuuaaucuaaaugg

SEQ ID NO: 1730956 - RNA, 18 nt, Human
aaacuuaaucuaaaugga

SEQ ID NO: 1730957 - RNA, 19 nt, Human
aaacuuaaucuaaauggaa

SEQ ID NO: 1730958 - RNA, 18 nt, Human
aaacuaggugcauauuua

SEQ ID NO: 1730959 - RNA, 22 nt, Human
aaacuaggugcauauuuauaaa

SEQ ID NO: 1730960 - RNA, 15 nt, Human
aaacgggcucagcaa

SEQ ID NO: 1730961 - RNA, 18 nt, Human
aaaccuuuuauauuuagu

SEQ ID NO: 1730962 - RNA, 18 nt, Human
aaaccuuuguuugcaucu

SEQ ID NO: 1730963 - RNA, 23 nt, Human
aaaccaagucaagugaaaaagga

SEQ ID NO: 1730964 - RNA, 15 nt, Human
aaacauuaugaugug

SEQ ID NO: 1730965 - RNA, 15 nt, Human
gggucgcccuggacu

SEQ ID NO: 1730966 - RNA, 13 nt, Human
gggucgcccugga

SEQ ID NO: 1730967 - RNA, 19 nt, Human
gggggugcugggccccugc

SEQ ID NO: 1730968 - RNA, 13 nt, Human
aaagacagugaaa

SEQ ID NO: 1730969 - RNA, 9 nt, Human
aaagacaga

SEQ ID NO: 1730970 - RNA, 19 nt, Human
aaagacugaccaauauugu

SEQ ID NO: 1730971 - RNA, 19 nt, Human
aaacuucagacauagaauu

SEQ ID NO: 1730972 - RNA, 15 nt, Human
ggguggggggggugc

SEQ ID NO: 1730973 - RNA, 14 nt, Human
ggguggccucccaa

SEQ ID NO: 1730974 - RNA, 12 nt, Human
aaacuuuguagu

SEQ ID NO: 1730975 - RNA, 16 nt, Human
aaacuuguauuaugug

SEQ ID NO: 1730976 - RNA, 15 nt, Human
aaagaggaaugaagu

SEQ ID NO: 1730977 - RNA, 14 nt, Human
aaagaugcuucuca

SEQ ID NO: 1730978 - RNA, 17 nt, Human
aaagaugcuucucacug

SEQ ID NO: 1730979 - RNA, 19 nt, Human
aaagaugcuucucacugcc

SEQ ID NO: 1730980 - RNA, 13 nt, Human
aaagacuguacaa

SEQ ID NO: 1730981 - RNA, 23 nt, Human
aaagacugaguacguugugcauu

SEQ ID NO: 1730982 - RNA, 14 nt, Human
aaagacuguacaaa

SEQ ID NO: 1730983 - RNA, 14 nt, Human
gguccugcugcagu

SEQ ID NO: 1730984 - RNA, 12 nt, Human
gguccugcugca

SEQ ID NO: 1730985 - RNA, 11 nt, Human
gguccugcugc

SEQ ID NO: 1730986 - RNA, 23 nt, Human
aaagauggcugugccucugccug

SEQ ID NO: 1730987 - RNA, 22 nt, Human
aaagauggcugugccucugccu

SEQ ID NO: 1730988 - RNA, 21 nt, Human
aaagauggcugugccucugcc

SEQ ID NO: 1730989 - RNA, 14 nt, Human
aaagguaaaucaga

SEQ ID NO: 1730990 - RNA, 22 nt, Human
aaagggacuuggaagcuccgcu

SEQ ID NO: 1730991 - RNA, 20 nt, Human
aaagggacugagaaauuuau

SEQ ID NO: 1730992 - RNA, 21 nt, Human
aaaggagagcuagcagcaggg

SEQ ID NO: 1730993 - RNA, 17 nt, Human
aaaggagauuggaagga

SEQ ID NO: 1730994 - RNA, 22 nt, Human
aaaggaaagagggagguaagga

SEQ ID NO: 1730995 - RNA, 15 nt, Human
aaagcucacuuuacu

SEQ ID NO: 1730996 - RNA, 15 nt, Human
aaagcugaaaacugc

SEQ ID NO: 1730997 - RNA, 15 nt, Human
aaagcuuguuaagau

SEQ ID NO: 1730998 - RNA, 13 nt, Human
aaagcugcugaca

SEQ ID NO: 1730999 - RNA, 12 nt, Human
aaagcugaaaac

SEQ ID NO: 1731000 - RNA, 20 nt, Human
ggucgcccuggacugugugc

SEQ ID NO: 1731001 - RNA, 13 nt, Human
ggugaacagaaca

SEQ ID NO: 1731002 - RNA, 13 nt, Human
ggucgaggcagga

SEQ ID NO: 1731003 - RNA, 14 nt, Human
ggucgcccuggacu

SEQ ID NO: 1731004 - RNA, 16 nt, Human
ggugcaaugaccuuuc

SEQ ID NO: 1731005 - RNA, 13 nt, Human
ggugcaaugaccu

SEQ ID NO: 1731006 - RNA, 12 nt, Human
ggugcaaugacc

SEQ ID NO: 1731007 - RNA, 24 nt, Human
ggugauccacccaccucagccucc

SEQ ID NO: 1731008 - RNA, 23 nt, Human
ggugauccacccaccucagccuc

SEQ ID NO: 1731009 - RNA, 18 nt, Human
ggugauccacccaccuca

SEQ ID NO: 1731010 - RNA, 21 nt, Human
ggugcauuugaggucuguucu

SEQ ID NO: 1731011 - RNA, 21 nt, Human
ggugcauauuuauaaaaauaa

SEQ ID NO: 1731012 - RNA, 16 nt, Human
ggugcugggccccugc

SEQ ID NO: 1731013 - RNA, 15 nt, Human
ggugcugggccccug

SEQ ID NO: 1731014 - RNA, 13 nt, Human
ggugcugggcccc

SEQ ID NO: 1731015 - RNA, 11 nt, Human
ggugcugggcc

SEQ ID NO: 1731016 - RNA, 13 nt, Human
gguggaugccugg

SEQ ID NO: 1731017 - RNA, 19 nt, Human
ggugcugggccccugccuc

SEQ ID NO: 1731018 - RNA, 14 nt, Human
aaaaauaacaauga

SEQ ID NO: 1731019 - RNA, 19 nt, Human
ggcugggggccucagugcc

SEQ ID NO: 1731020 - RNA, 17 nt, Human
ggcugggggccucagug

SEQ ID NO: 1731021 - RNA, 16 nt, Human
ggcugggggccucagu

SEQ ID NO: 1731022 - RNA, 15 nt, Human
ggcugggggccucag

SEQ ID NO: 1731023 - RNA, 21 nt, Human
ggcuggguucuacccaggugc

SEQ ID NO: 1731024 - RNA, 19 nt, Human
ggcuggguucuacccaggu

SEQ ID NO: 1731025 - RNA, 19 nt, Human
ggcuggguggcaccagcag

SEQ ID NO: 1731026 - RNA, 20 nt, Human
ggcugggucgcccuggacug

SEQ ID NO: 1731027 - RNA, 17 nt, Human
ggcugggucgcccugga

SEQ ID NO: 1731028 - RNA, 14 nt, Human
ggcugggucgcccu

SEQ ID NO: 1731029 - RNA, 18 nt, Human
ggcuguaucccaugagcc

SEQ ID NO: 1731030 - RNA, 20 nt, Human
ggcuucaguggcagcugcuu

SEQ ID NO: 1731031 - RNA, 19 nt, Human
ggcuucaguggcagcugcu

SEQ ID NO: 1731032 - RNA, 17 nt, Human
ggcuucaguggcagcug

SEQ ID NO: 1731033 - RNA, 18 nt, Human
ggcuucaguggcagcugc

SEQ ID NO: 1731034 - RNA, 16 nt, Human
ggcuuccucauaguau

SEQ ID NO: 1731035 - RNA, 21 nt, Human
ggcuucccgcucagcccuccc

SEQ ID NO: 1731036 - RNA, 19 nt, Human
ggcuucccgcucagcccuc

SEQ ID NO: 1731037 - RNA, 18 nt, Human
ggcuucccgcucagcccu

SEQ ID NO: 1731038 - RNA, 17 nt, Human
ggcuucccgcucagccc

SEQ ID NO: 1731039 - RNA, 16 nt, Human
ggcuucccgcucagcc

SEQ ID NO: 1731040 - RNA, 15 nt, Human
ggcuucccgcucagc

SEQ ID NO: 1731041 - RNA, 18 nt, Human
ggcuucauccuccucaga

SEQ ID NO: 1731042 - RNA, 22 nt, Human
ggcuucauccuccucagaucuu

SEQ ID NO: 1731043 - RNA, 14 nt, Human
ggcuucccgcucag

SEQ ID NO: 1731044 - RNA, 16 nt, Human
gggacagcuccuucug

SEQ ID NO: 1731045 - RNA, 15 nt, Human
gggacagcuccuucu

SEQ ID NO: 1731046 - RNA, 13 nt, Human
gggacagcuccuu

SEQ ID NO: 1731047 - RNA, 12 nt, Human
gggacagcuccu

SEQ ID NO: 1731048 - RNA, 13 nt, Human
gggacagagcaga

SEQ ID NO: 1731049 - RNA, 13 nt, Human
gggaagagacuug

SEQ ID NO: 1731050 - RNA, 13 nt, Human
gggaaccugaccc

SEQ ID NO: 1731051 - RNA, 18 nt, Human
gggaagaagcucucuccu

SEQ ID NO: 1731052 - RNA, 21 nt, Human
ggcuuccuccugguguggaag

SEQ ID NO: 1731053 - RNA, 22 nt, Human
ggcuucccgcucagcccucccu

SEQ ID NO: 1731054 - RNA, 18 nt, Human
aaaacucuccucugcugc

SEQ ID NO: 1731055 - RNA, 22 nt, Human
aaaacuugauguguuaucucuu

SEQ ID NO: 1731056 - RNA, 15 nt, Human
aaaacuucagacaua

SEQ ID NO: 1731057 - RNA, 12 nt, Human
aaaacccaagug

SEQ ID NO: 1731058 - RNA, 13 nt, Human
aaaacaugcuaca

SEQ ID NO: 1731059 - RNA, 14 nt, Human
aaaacaugcuacac

SEQ ID NO: 1731060 - RNA, 17 nt, Human
aaaaaugguuuaaaugg

SEQ ID NO: 1731061 - RNA, 20 nt, Human
gggaccagagcugccaccug

SEQ ID NO: 1731062 - RNA, 14 nt, Human
gggaccagagcugc

SEQ ID NO: 1731063 - RNA, 19 nt, Human
gggagagccuuccaggggu

SEQ ID NO: 1731064 - RNA, 15 nt, Human
gggagagccuuccag

SEQ ID NO: 1731065 - RNA, 23 nt, Human
gggagcaggcucgggcuccccag

SEQ ID NO: 1731066 - RNA, 16 nt, Human
gggagggagggcucca

SEQ ID NO: 1731067 - RNA, 15 nt, Human
gggagggagggcucc

SEQ ID NO: 1731068 - RNA, 18 nt, Human
gggaggucaaggcugcag

SEQ ID NO: 1731069 - RNA, 15 nt, Human
gggaggucgaggcag

SEQ ID NO: 1731070 - RNA, 23 nt, Human
gggacuuggaagcuccgcuuucu

SEQ ID NO: 1731071 - RNA, 18 nt, Human
gggacuuggaagcuccgc

SEQ ID NO: 1731072 - RNA, 17 nt, Human
gggacuuggaagcuccg

SEQ ID NO: 1731073 - RNA, 15 nt, Human
gggacuuggaagcuc

SEQ ID NO: 1731074 - RNA, 21 nt, Human
gggagaaccaaaaagaggcua

SEQ ID NO: 1731075 - RNA, 23 nt, Human
aaaagccagguuccacagaggac

SEQ ID NO: 1731076 - RNA, 16 nt, Human
aaaagcauuuuguaau

SEQ ID NO: 1731077 - RNA, 14 nt, Human
aaaagcauuuugua

SEQ ID NO: 1731078 - RNA, 15 nt, Human
aaaagcauuuuguaa

SEQ ID NO: 1731079 - RNA, 14 nt, Human
ggcuccacuugguc

SEQ ID NO: 1731080 - RNA, 17 nt, Human
ggcuccaaacccucgag

SEQ ID NO: 1731081 - RNA, 18 nt, Human
ggcucagcggggacagcu

SEQ ID NO: 1731082 - RNA, 19 nt, Human
ggcucagcaaaagaugcuu

SEQ ID NO: 1731083 - RNA, 20 nt, Human
ggcucagguggggucacucu

SEQ ID NO: 1731084 - RNA, 19 nt, Human
ggcucagguggggucacuc

SEQ ID NO: 1731085 - RNA, 20 nt, Human
ggcucagcggggacagcucc

SEQ ID NO: 1731086 - RNA, 19 nt, Human
ggcucagcggggacagcuc

SEQ ID NO: 1731087 - RNA, 16 nt, Human
ggcucagauuguaaua

SEQ ID NO: 1731088 - RNA, 18 nt, Human
ggcugggagagccuucca

SEQ ID NO: 1731089 - RNA, 16 nt, Human
ggcugggagagccuuc

SEQ ID NO: 1731090 - RNA, 15 nt, Human
ggcugggagagccuu

SEQ ID NO: 1731091 - RNA, 14 nt, Human
ggcugggagagccu

SEQ ID NO: 1731092 - RNA, 13 nt, Human
ggcugcugaaggc

SEQ ID NO: 1731093 - RNA, 11 nt, Human
ggcucucaggc

SEQ ID NO: 1731094 - RNA, 13 nt, Human
ggcucucaggcca

SEQ ID NO: 1731095 - RNA, 14 nt, Human
ggcucucaggccag

SEQ ID NO: 1731096 - RNA, 12 nt, Human
ggcucuuccagg

SEQ ID NO: 1731097 - RNA, 14 nt, Human
ggcucuuccaggcu

SEQ ID NO: 1731098 - RNA, 13 nt, Human
ggcucuucuccuu

SEQ ID NO: 1731099 - RNA, 12 nt, Human
ggcucuucuccu

SEQ ID NO: 1731100 - RNA, 20 nt, Human
ggcugccaaugggagcucau

SEQ ID NO: 1731101 - RNA, 19 nt, Human
ggcugccaaugggagcuca

SEQ ID NO: 1731102 - RNA, 16 nt, Human
ggcucuucuccuuuca

SEQ ID NO: 1731103 - RNA, 22 nt, Human
ggcugacagacagcccuccauc

SEQ ID NO: 1731104 - RNA, 23 nt, Human
ggcucuucuccuuucacaaccuu

SEQ ID NO: 1731105 - RNA, 15 nt, Human
ggcucuucuccuuuc

SEQ ID NO: 1731106 - RNA, 14 nt, Human
ggcucuucuccuuu

SEQ ID NO: 1731107 - RNA, 21 nt, Human
ggcugccaaugggagcucaug

SEQ ID NO: 1731108 - RNA, 13 nt, Human
ggcugcccuggug

SEQ ID NO: 1731109 - RNA, 19 nt, Human
ggcugcccuggugcugcca

SEQ ID NO: 1731110 - RNA, 16 nt, Human
ggcugcccuggugcug

SEQ ID NO: 1731111 - RNA, 15 nt, Human
ggcugcccuggugcu

SEQ ID NO: 1731112 - RNA, 14 nt, Human
ggcugcccuggugc

SEQ ID NO: 1731113 - RNA, 22 nt, Human
ggcugcggaaugaaccacaucu

SEQ ID NO: 1731114 - RNA, 16 nt, Human
ggcugccuuagaaccu

SEQ ID NO: 1731115 - RNA, 22 nt, Human
ggcugcccuggugcugccacac

SEQ ID NO: 1731116 - RNA, 15 nt, Human
ggcacugguggcccg

SEQ ID NO: 1731117 - RNA, 11 nt, Human
ggcagccccug

SEQ ID NO: 1731118 - RNA, 23 nt, Human
ggcacagaaaauggaagacagcu

SEQ ID NO: 1731119 - RNA, 23 nt, Human
ggcacucagaagacacugauggg

SEQ ID NO: 1731120 - RNA, 13 nt, Human
ggcacaucagcac

SEQ ID NO: 1731121 - RNA, 19 nt, Human
ggcacagaaaauggaagac

SEQ ID NO: 1731122 - RNA, 21 nt, Human
ggcacagaaaauggaagacag

SEQ ID NO: 1731123 - RNA, 20 nt, Human
ggcacagaaaauggaagaca

SEQ ID NO: 1731124 - RNA, 16 nt, Human
ggagagaagagaaugc

SEQ ID NO: 1731125 - RNA, 22 nt, Human
ggagacugcugagucaacccaa

SEQ ID NO: 1731126 - RNA, 20 nt, Human
ggcaguggugguuuucuguu

SEQ ID NO: 1731127 - RNA, 21 nt, Human
ggcaguggugguuuucuguuc

SEQ ID NO: 1731128 - RNA, 22 nt, Human
ggcagccccuguucuggcagag

SEQ ID NO: 1731129 - RNA, 20 nt, Human
ggccagugugacaaggauug

SEQ ID NO: 1731130 - RNA, 17 nt, Human
ggccaguuggucccccu

SEQ ID NO: 1731131 - RNA, 14 nt, Human
ggccaguugguccc

SEQ ID NO: 1731132 - RNA, 14 nt, Human
ggccuccauccuga

SEQ ID NO: 1731133 - RNA, 15 nt, Human
ggccuccauccugag

SEQ ID NO: 1731134 - RNA, 16 nt, Human
ggccuccauccugagg

SEQ ID NO: 1731135 - RNA, 23 nt, Human
ggcccuucucuccagccccugga

SEQ ID NO: 1731136 - RNA, 22 nt, Human
ggcccuucucuccagccccugg

SEQ ID NO: 1731137 - RNA, 19 nt, Human
ggccucacuaggcuucugg

SEQ ID NO: 1731138 - RNA, 23 nt, Human
ggccccugcugguucaggguugg

SEQ ID NO: 1731139 - RNA, 13 nt, Human
ggcccggcuccag

SEQ ID NO: 1731140 - RNA, 14 nt, Human
ggccccugcugguu

SEQ ID NO: 1731141 - RNA, 13 nt, Human
ggccccugcuggu

SEQ ID NO: 1731142 - RNA, 21 nt, Human
ggcccuucucuccagccccug

SEQ ID NO: 1731143 - RNA, 20 nt, Human
ggcccuucucuccagccccu

SEQ ID NO: 1731144 - RNA, 15 nt, Human
ggcccggcuccaggc

SEQ ID NO: 1731145 - RNA, 15 nt, Human
gcuucacggaagagc

SEQ ID NO: 1731146 - RNA, 17 nt, Human
gcuucacggaagagccu

SEQ ID NO: 1731147 - RNA, 21 nt, Human
gcuucaaggauccugagccag

SEQ ID NO: 1731148 - RNA, 20 nt, Human
gcuucaaggauccugagcca

SEQ ID NO: 1731149 - RNA, 19 nt, Human
gcuucaaggauccugagcc

SEQ ID NO: 1731150 - RNA, 12 nt, Human
gcuucagccucc

SEQ ID NO: 1731151 - RNA, 18 nt, Human
gcuucacggaagagccuu

SEQ ID NO: 1731152 - RNA, 19 nt, Human
gcuucacggaagagccuug

SEQ ID NO: 1731153 - RNA, 22 nt, Human
gcuuccucauaguaugguggcu

SEQ ID NO: 1731154 - RNA, 20 nt, Human
gcuuguaaauagcucaggug

SEQ ID NO: 1731155 - RNA, 14 nt, Human
gcuugagcucagga

SEQ ID NO: 1731156 - RNA, 17 nt, Human
gcuuguaacuaaaauaa

SEQ ID NO: 1731157 - RNA, 22 nt, Human
gcuuguaacuaaaauaauuuug

SEQ ID NO: 1731158 - RNA, 23 nt, Human
gcuuguaacuaaaauaauuuugu

SEQ ID NO: 1731159 - RNA, 12 nt, Human
gcuuguacauaa

SEQ ID NO: 1731160 - RNA, 12 nt, Human
gcugggucgccc

SEQ ID NO: 1731161 - RNA, 23 nt, Human
gcugggccccugccucucugcag

SEQ ID NO: 1731162 - RNA, 22 nt, Human
gcugggccccugccucucugca

SEQ ID NO: 1731163 - RNA, 21 nt, Human
gcugggccccugccucucugc

SEQ ID NO: 1731164 - RNA, 17 nt, Human
gcuggcuguuggcuggg

SEQ ID NO: 1731165 - RNA, 16 nt, Human
gcuggcuguuggcugg

SEQ ID NO: 1731166 - RNA, 15 nt, Human
gcuggcuguuggcug

SEQ ID NO: 1731167 - RNA, 23 nt, Human
gcuggguggcaccagcagccugg

SEQ ID NO: 1731168 - RNA, 22 nt, Human
gcuggguggcaccagcagccug

SEQ ID NO: 1731169 - RNA, 21 nt, Human
gcuggguggcaccagcagccu

SEQ ID NO: 1731170 - RNA, 20 nt, Human
gcuggccuggccccucaggg

SEQ ID NO: 1731171 - RNA, 22 nt, Human
gcuggagugcagugagccgaga

SEQ ID NO: 1731172 - RNA, 17 nt, Human
gcuggagugcagugagc

SEQ ID NO: 1731173 - RNA, 18 nt, Human
gcuggagugcagugagcc

SEQ ID NO: 1731174 - RNA, 20 nt, Human
gcuggcgugcaguggugcga

SEQ ID NO: 1731175 - RNA, 13 nt, Human
gcugcuggcuggu

SEQ ID NO: 1731176 - RNA, 18 nt, Human
gcugcugaaggcucgagc

SEQ ID NO: 1731177 - RNA, 15 nt, Human
gcugcugaaggcucg

SEQ ID NO: 1731178 - RNA, 14 nt, Human
gcugcugaaggcuc

SEQ ID NO: 1731179 - RNA, 13 nt, Human
gcugcugaaggcu

SEQ ID NO: 1731180 - RNA, 23 nt, Human
gcucugguccauagagagcaaga

SEQ ID NO: 1731181 - RNA, 16 nt, Human
gcucugguccauagag

SEQ ID NO: 1731182 - RNA, 15 nt, Human
gcucugguccauaga

SEQ ID NO: 1731183 - RNA, 13 nt, Human
gcucugcccuugg

SEQ ID NO: 1731184 - RNA, 14 nt, Human
ggacuuggaagcuc

SEQ ID NO: 1731185 - RNA, 13 nt, Human
ggagaaacuggaa

SEQ ID NO: 1731186 - RNA, 16 nt, Human
ggagaaaggaagggcu

SEQ ID NO: 1731187 - RNA, 9 nt, Human
ggacuuugu

SEQ ID NO: 1731188 - RNA, 18 nt, Human
ggacucaaugcacugaca

SEQ ID NO: 1731189 - RNA, 16 nt, Human
ggacucaaugcacuga

SEQ ID NO: 1731190 - RNA, 20 nt, Human
ggacuaacuugucuuuggac

SEQ ID NO: 1731191 - RNA, 14 nt, Human
ggacuacaggugug

SEQ ID NO: 1731192 - RNA, 24 nt, Human
ggacuaacuugucuuuggacccug

SEQ ID NO: 1731193 - RNA, 15 nt, Human
ggacucaaugcacug

SEQ ID NO: 1731194 - RNA, 12 nt, Human
ggacccccugaa

SEQ ID NO: 1731195 - RNA, 15 nt, Human
ggaccccgagccugg

SEQ ID NO: 1731196 - RNA, 11 nt, Human
ggacccugagg

SEQ ID NO: 1731197 - RNA, 18 nt, Human
ggaccccgagccuggcuc

SEQ ID NO: 1731198 - RNA, 20 nt, Human
ggacguguuaugacuccaga

SEQ ID NO: 1731199 - RNA, 15 nt, Human
ggaccucaggccugg

SEQ ID NO: 1731200 - RNA, 14 nt, Human
ggaccucaggccug

SEQ ID NO: 1731201 - RNA, 20 nt, Human
ggaccucaggccugggggcu

SEQ ID NO: 1731202 - RNA, 13 nt, Human
ggaccucaggccu

SEQ ID NO: 1731203 - RNA, 13 nt, Human
ggacccugaggcc

SEQ ID NO: 1731204 - RNA, 12 nt, Human
ggacccugaggc

SEQ ID NO: 1731205 - RNA, 23 nt, Human
ggacaggcauguucucugaggac

SEQ ID NO: 1731206 - RNA, 14 nt, Human
ggaacacucugaga

SEQ ID NO: 1731207 - RNA, 12 nt, Human
ggaacacucuga

SEQ ID NO: 1731208 - RNA, 16 nt, Human
ggaacacucugagacu

SEQ ID NO: 1731209 - RNA, 15 nt, Human
ggaacacucugagac

SEQ ID NO: 1731210 - RNA, 13 nt, Human
ggaagagaaaaaa

SEQ ID NO: 1731211 - RNA, 18 nt, Human
ggaagacuuuggaaagag

SEQ ID NO: 1731212 - RNA, 15 nt, Human
ggaagagaaaaaaua

SEQ ID NO: 1731213 - RNA, 14 nt, Human
ggaagacagcucuu

SEQ ID NO: 1731214 - RNA, 13 nt, Human
ggaagacagcucu

SEQ ID NO: 1731215 - RNA, 17 nt, Human
ggaagacuuuggaaaga

SEQ ID NO: 1731216 - RNA, 13 nt, Human
ggaagacuuugga

SEQ ID NO: 1731217 - RNA, 15 nt, Human
ggaagccgcuggggc

SEQ ID NO: 1731218 - RNA, 23 nt, Human
ggaagcucagggccuggcucagg

SEQ ID NO: 1731219 - RNA, 15 nt, Human
ggaagcucagggccu

SEQ ID NO: 1731220 - RNA, 11 nt, Human
ggaagcuccgc

SEQ ID NO: 1731221 - RNA, 16 nt, Human
ggaaggaaacccagcu

SEQ ID NO: 1731222 - RNA, 20 nt, Human
ggaaggaaacccagcucugg

SEQ ID NO: 1731223 - RNA, 19 nt, Human
ggaaggaaacccagcucug

SEQ ID NO: 1731224 - RNA, 20 nt, Human
ggacagcuccuucuguccua

SEQ ID NO: 1731225 - RNA, 19 nt, Human
ggacagcuccuucuguccu

SEQ ID NO: 1731226 - RNA, 22 nt, Human
ggacacuaaccacgcuggaccu

SEQ ID NO: 1731227 - RNA, 17 nt, Human
ggacacuaaccacgcug

SEQ ID NO: 1731228 - RNA, 18 nt, Human
ggacacagcucuucucca

SEQ ID NO: 1731229 - RNA, 15 nt, Human
ggacacagcucuucu

SEQ ID NO: 1731230 - RNA, 21 nt, Human
ggacacagcucuucuccaggc

SEQ ID NO: 1731231 - RNA, 19 nt, Human
ggacaaggacuaggguccu

SEQ ID NO: 1731232 - RNA, 18 nt, Human
ggaauaacauguaauuaa

SEQ ID NO: 1731233 - RNA, 16 nt, Human
ggaauccagacccggc

SEQ ID NO: 1731234 - RNA, 23 nt, Human
ggacaaggaugaucuaggaagac

SEQ ID NO: 1731235 - RNA, 22 nt, Human
ggacaaggaugaucuaggaaga

SEQ ID NO: 1731236 - RNA, 13 nt, Human
ggacaagagcagg

SEQ ID NO: 1731237 - RNA, 18 nt, Human
ggaaugaagcaaugcuuc

SEQ ID NO: 1731238 - RNA, 20 nt, Human
gccuaggugacagagugaga

SEQ ID NO: 1731239 - RNA, 15 nt, Human
gccuaggugacagag

SEQ ID NO: 1731240 - RNA, 14 nt, Human
gccuaggugacaga

SEQ ID NO: 1731241 - RNA, 13 nt, Human
gccuaggugacag

SEQ ID NO: 1731242 - RNA, 20 nt, Human
gccuagcauacguacacauu

SEQ ID NO: 1731243 - RNA, 21 nt, Human
gccuagcauacguacacauuu

SEQ ID NO: 1731244 - RNA, 22 nt, Human
gccuagcauacguacacauuuu

SEQ ID NO: 1731245 - RNA, 23 nt, Human
gccuagcauacguacacauuuua

SEQ ID NO: 1731246 - RNA, 18 nt, Human
gcccugcagagggcacag

SEQ ID NO: 1731247 - RNA, 22 nt, Human
gcccugcccaccuggccucugc

SEQ ID NO: 1731248 - RNA, 21 nt, Human
gcccugcccaccuggccucug

SEQ ID NO: 1731249 - RNA, 20 nt, Human
gcccugcccaccuggccucu

SEQ ID NO: 1731250 - RNA, 17 nt, Human
gcccugcccaccuggcc

SEQ ID NO: 1731251 - RNA, 11 nt, Human
gcccugccucc

SEQ ID NO: 1731252 - RNA, 16 nt, Human
gcccugcccugguuuc

SEQ ID NO: 1731253 - RNA, 12 nt, Human
gcccugcccugg

SEQ ID NO: 1731254 - RNA, 11 nt, Human
gcccugcccug

SEQ ID NO: 1731255 - RNA, 13 nt, Human
gcccugccuccuu

SEQ ID NO: 1731256 - RNA, 12 nt, Human
gcccugccuccu

SEQ ID NO: 1731257 - RNA, 14 nt, Human
gcccugccuccuuu

SEQ ID NO: 1731258 - RNA, 18 nt, Human
gcccugcccugguuuccu

SEQ ID NO: 1731259 - RNA, 20 nt, Human
gcccuuagcagggaaacagc

SEQ ID NO: 1731260 - RNA, 22 nt, Human
gcccuguccugccuaaggcuga

SEQ ID NO: 1731261 - RNA, 20 nt, Human
gccgcagcccugcagagggc

SEQ ID NO: 1731262 - RNA, 22 nt, Human
gcccuuagcagggaaacagcua

SEQ ID NO: 1731263 - RNA, 12 nt, Human
gcccccacuggu

SEQ ID NO: 1731264 - RNA, 16 nt, Human
gccccugccacccugg

SEQ ID NO: 1731265 - RNA, 17 nt, Human
gccccugccacccuggg

SEQ ID NO: 1731266 - RNA, 15 nt, Human
gcccucacccugggg

SEQ ID NO: 1731267 - RNA, 23 nt, Human
gcccuaaugcgcaggcuggcccu

SEQ ID NO: 1731268 - RNA, 20 nt, Human
gcccuaaugcgcaggcuggc

SEQ ID NO: 1731269 - RNA, 19 nt, Human
gcccuaaugcgcaggcugg

SEQ ID NO: 1731270 - RNA, 17 nt, Human
gcccuaaugcgcaggcu

SEQ ID NO: 1731271 - RNA, 16 nt, Human
gcccuaaugcgcaggc

SEQ ID NO: 1731272 - RNA, 23 nt, Human
gcccgggcucugccucccaucac

SEQ ID NO: 1731273 - RNA, 23 nt, Human
gccccugccucucugcagguccc

SEQ ID NO: 1731274 - RNA, 20 nt, Human
gccccugccucucugcaggu

SEQ ID NO: 1731275 - RNA, 15 nt, Human
gccccugcucuggug

SEQ ID NO: 1731276 - RNA, 21 nt, Human
gccuucggccuccauccugag

SEQ ID NO: 1731277 - RNA, 23 nt, Human
gccuucggccuccauccugaggc

SEQ ID NO: 1731278 - RNA, 20 nt, Human
gccuucggccuccauccuga

SEQ ID NO: 1731279 - RNA, 21 nt, Human
gccuguugggccaggagccuc

SEQ ID NO: 1731280 - RNA, 21 nt, Human
gccuugaccauucuccaccug

SEQ ID NO: 1731281 - RNA, 20 nt, Human
gccuugaccauucuccaccu

SEQ ID NO: 1731282 - RNA, 19 nt, Human
gccuugaccauucuccacc

SEQ ID NO: 1731283 - RNA, 17 nt, Human
gccuugaccauucucca

SEQ ID NO: 1731284 - RNA, 15 nt, Human
gcgagcccugguggc

SEQ ID NO: 1731285 - RNA, 17 nt, Human
gcgagcccugguggcag

SEQ ID NO: 1731286 - RNA, 20 nt, Human
gcgcagcauauucaggaagc

SEQ ID NO: 1731287 - RNA, 22 nt, Human
gcgaucuggguucacugcaacc

SEQ ID NO: 1731288 - RNA, 13 nt, Human
gccuggccugagc

SEQ ID NO: 1731289 - RNA, 18 nt, Human
gccuggccugagcuggga

SEQ ID NO: 1731290 - RNA, 14 nt, Human
gccuggccugagcu

SEQ ID NO: 1731291 - RNA, 20 nt, Human
gccuggccugagcugggaug

SEQ ID NO: 1731292 - RNA, 20 nt, Human
gccuguugggccaggagccu

SEQ ID NO: 1731293 - RNA, 18 nt, Human
gccuguugggccaggagc

SEQ ID NO: 1731294 - RNA, 16 nt, Human
gccuguugggccagga

SEQ ID NO: 1731295 - RNA, 15 nt, Human
gccuguugggccagg

SEQ ID NO: 1731296 - RNA, 14 nt, Human
gccuguugggccag

SEQ ID NO: 1731297 - RNA, 23 nt, Human
gccuguucccauucuugcauggc

SEQ ID NO: 1731298 - RNA, 19 nt, Human
gccuguucccauucuugca

SEQ ID NO: 1731299 - RNA, 17 nt, Human
gccugugccucugggac

SEQ ID NO: 1731300 - RNA, 16 nt, Human
gccugugccucuggga

SEQ ID NO: 1731301 - RNA, 13 nt, Human
gccuggcucaggu

SEQ ID NO: 1731302 - RNA, 23 nt, Human
gccuggcuccaaacccucgaggc

SEQ ID NO: 1731303 - RNA, 18 nt, Human
gccugugccucugggacu

SEQ ID NO: 1731304 - RNA, 16 nt, Human
gccucuuaugggcugg

SEQ ID NO: 1731305 - RNA, 18 nt, Human
gccucuuaugggcugggu

SEQ ID NO: 1731306 - RNA, 17 nt, Human
gccucuuaugggcuggg

SEQ ID NO: 1731307 - RNA, 22 nt, Human
gccucgaacuggcugcaaaggg

SEQ ID NO: 1731308 - RNA, 20 nt, Human
gccucgaacuggcugcaaag

SEQ ID NO: 1731309 - RNA, 14 nt, Human
gccugcccaggccc

SEQ ID NO: 1731310 - RNA, 13 nt, Human
gccugcccaggcc

SEQ ID NO: 1731311 - RNA, 21 nt, Human
gccucuuaugggcuggguucu

SEQ ID NO: 1731312 - RNA, 14 nt, Human
gccucuuggguuca

SEQ ID NO: 1731313 - RNA, 12 nt, Human
gccuccauccug

SEQ ID NO: 1731314 - RNA, 17 nt, Human
gccucccaaagugcugg

SEQ ID NO: 1731315 - RNA, 16 nt, Human
gccucccaaagugcug

SEQ ID NO: 1731316 - RNA, 23 nt, Human
gccuccugugugugcgccuacag

SEQ ID NO: 1731317 - RNA, 19 nt, Human
gccuccugugugugcgccu

SEQ ID NO: 1731318 - RNA, 17 nt, Human
gccucgaacuggcugca

SEQ ID NO: 1731319 - RNA, 17 nt, Human
gccugcccaggccccug

SEQ ID NO: 1731320 - RNA, 15 nt, Human
gccugcccaggcccc

SEQ ID NO: 1731321 - RNA, 22 nt, Human
gccugcccaggccccugccacc

SEQ ID NO: 1731322 - RNA, 20 nt, Human
gcuauucaguaauaacucua

SEQ ID NO: 1731323 - RNA, 14 nt, Human
gcucacugcagccu

SEQ ID NO: 1731324 - RNA, 13 nt, Human
gcucacugcagcc

SEQ ID NO: 1731325 - RNA, 12 nt, Human
gcucacugcagc

SEQ ID NO: 1731326 - RNA, 11 nt, Human
gcucacugcag

SEQ ID NO: 1731327 - RNA, 16 nt, Human
gcucacugcagccuca

SEQ ID NO: 1731328 - RNA, 15 nt, Human
gcucacugcagccuc

SEQ ID NO: 1731329 - RNA, 17 nt, Human
gcucacugcagccucaa

SEQ ID NO: 1731330 - RNA, 16 nt, Human
gcucacugcauccucc

SEQ ID NO: 1731331 - RNA, 17 nt, Human
gcucaggugucccugca

SEQ ID NO: 1731332 - RNA, 16 nt, Human
gcucaggugucccugc

SEQ ID NO: 1731333 - RNA, 14 nt, Human
gcucaggugucccu

SEQ ID NO: 1731334 - RNA, 23 nt, Human
gcucagguggggucacucuggca

SEQ ID NO: 1731335 - RNA, 13 nt, Human
gcucagagagggu

SEQ ID NO: 1731336 - RNA, 20 nt, Human
gcucacugcauccuccgccu

SEQ ID NO: 1731337 - RNA, 14 nt, Human
gcucagagagggug

SEQ ID NO: 1731338 - RNA, 16 nt, Human
gcuaggccuggccaga

SEQ ID NO: 1731339 - RNA, 23 nt, Human
gcuaggccuggccagaugcacca

SEQ ID NO: 1731340 - RNA, 17 nt, Human
gcuaggccuggccagau

SEQ ID NO: 1731341 - RNA, 22 nt, Human
gcuagugugguguuuccuggca

SEQ ID NO: 1731342 - RNA, 21 nt, Human
gcuagugugguguuuccuggc

SEQ ID NO: 1731343 - RNA, 12 nt, Human
gcuaugcauuug

SEQ ID NO: 1731344 - RNA, 19 nt, Human
gcuauucaguaauaacucu

SEQ ID NO: 1731345 - RNA, 13 nt, Human
gcuaugcauuuga

SEQ ID NO: 1731346 - RNA, 16 nt, Human
gcuagaacucccuuuc

SEQ ID NO: 1731347 - RNA, 18 nt, Human
gcuagaacucccuuucaa

SEQ ID NO: 1731348 - RNA, 12 nt, Human
gcuagaacuccc

SEQ ID NO: 1731349 - RNA, 13 nt, Human
gcuagaacucccu

SEQ ID NO: 1731350 - RNA, 14 nt, Human
gcuagaacucccuu

SEQ ID NO: 1731351 - RNA, 15 nt, Human
gcuagaacucccuuu

SEQ ID NO: 1731352 - RNA, 20 nt, Human
gcgggaggauguucugggac

SEQ ID NO: 1731353 - RNA, 20 nt, Human
gcgugcacacaccagagccc

SEQ ID NO: 1731354 - RNA, 22 nt, Human
gcgggaggauguucugggacac

SEQ ID NO: 1731355 - RNA, 21 nt, Human
gcgggaggauguucugggaca

SEQ ID NO: 1731356 - RNA, 23 nt, Human
gcgugcacacaccagagcccacc

SEQ ID NO: 1731357 - RNA, 18 nt, Human
gcguuucuaugacacaug

SEQ ID NO: 1731358 - RNA, 13 nt, Human
gcuaaugggacac

SEQ ID NO: 1731359 - RNA, 15 nt, Human
gcuaaugggacacua

SEQ ID NO: 1731360 - RNA, 23 nt, Human
gcuaagugauccucccaccucag

SEQ ID NO: 1731361 - RNA, 14 nt, Human
gcuaaucagcauuc

SEQ ID NO: 1731362 - RNA, 22 nt, Human
gcuaaucagcauucucacuccu

SEQ ID NO: 1731363 - RNA, 17 nt, Human
gcuaaucagcauucuca

SEQ ID NO: 1731364 - RNA, 16 nt, Human
gcuaaucagcauucuc

SEQ ID NO: 1731365 - RNA, 18 nt, Human
gcuccacuuggucuguga

SEQ ID NO: 1731366 - RNA, 19 nt, Human
gcuccacuuggucugugag

SEQ ID NO: 1731367 - RNA, 18 nt, Human
gcuccagcucaccagccc

SEQ ID NO: 1731368 - RNA, 21 nt, Human
gcuccagcucaccagccccag

SEQ ID NO: 1731369 - RNA, 20 nt, Human
gcuccagcucaccagcccca

SEQ ID NO: 1731370 - RNA, 21 nt, Human
gcucccacaggcccuuccucu

SEQ ID NO: 1731371 - RNA, 20 nt, Human
gcucccacaggcccuuccuc

SEQ ID NO: 1731372 - RNA, 17 nt, Human
gcucccacaggcccuuc

SEQ ID NO: 1731373 - RNA, 16 nt, Human
gcucccacaggcccuu

SEQ ID NO: 1731374 - RNA, 17 nt, Human
gcucccaggcauucccc

SEQ ID NO: 1731375 - RNA, 22 nt, Human
gcucccacaggcccuuccucuc

SEQ ID NO: 1731376 - RNA, 18 nt, Human
gcuccugccaccacgccc

SEQ ID NO: 1731377 - RNA, 12 nt, Human
gcuccugccacc

SEQ ID NO: 1731378 - RNA, 19 nt, Human
gcuccuggcccacugcauc

SEQ ID NO: 1731379 - RNA, 18 nt, Human
gcuccuggcccacugcau

SEQ ID NO: 1731380 - RNA, 20 nt, Human
gcuccuggcccacugcaucg

SEQ ID NO: 1731381 - RNA, 15 nt, Human
gcuccuggcccacug

SEQ ID NO: 1731382 - RNA, 14 nt, Human
gcuccuggcccacu

SEQ ID NO: 1731383 - RNA, 21 nt, Human
gcuccugccaccacgcccggc

SEQ ID NO: 1731384 - RNA, 15 nt, Human
gcuccacuuggucug

SEQ ID NO: 1731385 - RNA, 11 nt, Human
gcucugcccuu

SEQ ID NO: 1731386 - RNA, 17 nt, Human
gcucugaucauccacug

SEQ ID NO: 1731387 - RNA, 23 nt, Human
gcucugaucauccacugugccau

SEQ ID NO: 1731388 - RNA, 23 nt, Human
gcucugcaagaauugaagcagga

SEQ ID NO: 1731389 - RNA, 23 nt, Human
auuucuuccacaagagcccaggc

SEQ ID NO: 1731390 - RNA, 20 nt, Human
auuucuuccacaagagccca

SEQ ID NO: 1731391 - RNA, 20 nt, Human
auuucuugagguaaaagcau

SEQ ID NO: 1731392 - RNA, 16 nt, Human
auuugaaaauuuugau

SEQ ID NO: 1731393 - RNA, 18 nt, Human
auuugaaacacuuugcau

SEQ ID NO: 1731394 - RNA, 14 nt, Human
auuuauuuaaauuu

SEQ ID NO: 1731395 - RNA, 12 nt, Human
auuuauuuaaau

SEQ ID NO: 1731396 - RNA, 19 nt, Human
auuucccaaagcagugcau

SEQ ID NO: 1731397 - RNA, 16 nt, Human
auuuccacucaggucu

SEQ ID NO: 1731398 - RNA, 18 nt, Human
auuucccaacacaaagau

SEQ ID NO: 1731399 - RNA, 22 nt, Human
auuuccacucaggucuguuuuc

SEQ ID NO: 1731400 - RNA, 19 nt, Human
auuucccaacacaaagauu

SEQ ID NO: 1731401 - RNA, 15 nt, Human
auuugucaacaaagu

SEQ ID NO: 1731402 - RNA, 13 nt, Human
auuugucaacaaa

SEQ ID NO: 1731403 - RNA, 22 nt, Human
auuuuaaaaauacagauagaua

SEQ ID NO: 1731404 - RNA, 23 nt, Human
auuugugaaaugauggugaaagu

SEQ ID NO: 1731405 - RNA, 21 nt, Human
auuugugaagguggaaauaaa

SEQ ID NO: 1731406 - RNA, 18 nt, Human
auuugugaagguggaaau

SEQ ID NO: 1731407 - RNA, 19 nt, Human
auuggacaguaaaauccac

SEQ ID NO: 1731408 - RNA, 21 nt, Human
auugauuuccguuaaaauacc

SEQ ID NO: 1731409 - RNA, 18 nt, Human
auugguaaagaauggaag

SEQ ID NO: 1731410 - RNA, 16 nt, Human
auuggauuugucuuug

SEQ ID NO: 1731411 - RNA, 13 nt, Human
auugugggaaggg

SEQ ID NO: 1731412 - RNA, 14 nt, Human
auugugggaagggg

SEQ ID NO: 1731413 - RNA, 16 nt, Human
auugucaaagugguga

SEQ ID NO: 1731414 - RNA, 23 nt, Human
auugucaaaguggugagaggcau

SEQ ID NO: 1731415 - RNA, 14 nt, Human
auuguacaguuuuu

SEQ ID NO: 1731416 - RNA, 15 nt, Human
auuguacaguuuuua

SEQ ID NO: 1731417 - RNA, 21 nt, Human
auuguacaguuuuuauugcuu

SEQ ID NO: 1731418 - RNA, 14 nt, Human
auuuaaaagauaca

SEQ ID NO: 1731419 - RNA, 16 nt, Human
auuuaaaagauacagu

SEQ ID NO: 1731420 - RNA, 17 nt, Human
auuuaaaagauacaguu

SEQ ID NO: 1731421 - RNA, 21 nt, Human
auuguuuggggaugagaaagg

SEQ ID NO: 1731422 - RNA, 14 nt, Human
auuuucuauaauuu

SEQ ID NO: 1731423 - RNA, 15 nt, Human
auuuucuauaauuua

SEQ ID NO: 1731424 - RNA, 19 nt, Human
auuuucccuauuagagaag

SEQ ID NO: 1731425 - RNA, 16 nt, Human
auuuuccugccaggca

SEQ ID NO: 1731426 - RNA, 17 nt, Human
auuuuaauaaacacucu

SEQ ID NO: 1731427 - RNA, 16 nt, Human
auuuuaauaaacacuc

SEQ ID NO: 1731428 - RNA, 15 nt, Human
auuuuaauaaacacu

SEQ ID NO: 1731429 - RNA, 15 nt, Human
auuuugauguuuuaa

SEQ ID NO: 1731430 - RNA, 17 nt, Human
auuuugauguaaagaug

SEQ ID NO: 1731431 - RNA, 18 nt, Human
auuuugauguaaagaugu

SEQ ID NO: 1731432 - RNA, 17 nt, Human
auuuugauguuuuaagg

SEQ ID NO: 1731433 - RNA, 19 nt, Human
auuuugauccaagcugguc

SEQ ID NO: 1731434 - RNA, 19 nt, Human
auuuuccuguugucaagaa

SEQ ID NO: 1731435 - RNA, 20 nt, Human
auuuugcuaaaugugaauga

SEQ ID NO: 1731436 - RNA, 21 nt, Human
auuuugcugucccuuuuccuu

SEQ ID NO: 1731437 - RNA, 18 nt, Human
auuuugccagugggaacu

SEQ ID NO: 1731438 - RNA, 17 nt, Human
auuuuguguuuaggaac

SEQ ID NO: 1731439 - RNA, 23 nt, Human
auuuugucauauaagauucauau

SEQ ID NO: 1731440 - RNA, 12 nt, Human
auuuugucuuua

SEQ ID NO: 1731441 - RNA, 19 nt, Human
auuuugugcccccauguaa

SEQ ID NO: 1731442 - RNA, 16 nt, Human
auuuuguguaagaaau

SEQ ID NO: 1731443 - RNA, 17 nt, Human
auuuuguguaagaaaua

SEQ ID NO: 1731444 - RNA, 18 nt, Human
auuuuguguaagaaauac

SEQ ID NO: 1731445 - RNA, 20 nt, Human
auuuuguguaagaaauacag

SEQ ID NO: 1731446 - RNA, 20 nt, Human
auuuuggaaaauaaauuauu

SEQ ID NO: 1731447 - RNA, 19 nt, Human
auuuuggaaaauaaauuau

SEQ ID NO: 1731448 - RNA, 14 nt, Human
auuuuggaaaauaa

SEQ ID NO: 1731449 - RNA, 12 nt, Human
auuuugcuuugu

SEQ ID NO: 1731450 - RNA, 20 nt, Human
auuuugcuguagaagauggc

SEQ ID NO: 1731451 - RNA, 18 nt, Human
auuuugcuuugugauuuu

SEQ ID NO: 1731452 - RNA, 20 nt, Human
auuuugcuuugugauuuuug

SEQ ID NO: 1731453 - RNA, 14 nt, Human
auuuuguaauaaua

SEQ ID NO: 1731454 - RNA, 19 nt, Human
auuuuguaauaauaaagaa

SEQ ID NO: 1731455 - RNA, 22 nt, Human
auuuuguaauaauaaagaauag

SEQ ID NO: 1731456 - RNA, 20 nt, Human
auuuuguaauguaucaaaua

SEQ ID NO: 1731457 - RNA, 23 nt, Human
auuuuguaauguaucaaauacau

SEQ ID NO: 1731458 - RNA, 18 nt, Human
auuuuguauauuuguauu

SEQ ID NO: 1731459 - RNA, 22 nt, Human
auuuuugugauuuugugauuga

SEQ ID NO: 1731460 - RNA, 14 nt, Human
auuuuugucuugug

SEQ ID NO: 1731461 - RNA, 19 nt, Human
auuuuuguagagccagggu

SEQ ID NO: 1731462 - RNA, 12 nt, Human
auuuuuguaauu

SEQ ID NO: 1731463 - RNA, 13 nt, Human
auuuuuuaaaugc

SEQ ID NO: 1731464 - RNA, 14 nt, Human
auuuuuuaaaugca

SEQ ID NO: 1731465 - RNA, 18 nt, Human
auuuuuuaaauugaauuc

SEQ ID NO: 1731466 - RNA, 19 nt, Human
auuuuuuacagcugccugc

SEQ ID NO: 1731467 - RNA, 21 nt, Human
auuuuuuaagugaaaauauag

SEQ ID NO: 1731468 - RNA, 18 nt, Human
auuuuuuguuaaaugauu

SEQ ID NO: 1731469 - RNA, 21 nt, Human
auuuuguuuuugucuuaaaaa

SEQ ID NO: 1731470 - RNA, 21 nt, Human
auuuuucuuagggaaggauac

SEQ ID NO: 1731471 - RNA, 16 nt, Human
auuuuucagauauaaa

SEQ ID NO: 1731472 - RNA, 22 nt, Human
auuuuucuuagggaaggauaca

SEQ ID NO: 1731473 - RNA, 15 nt, Human
auuauauuuacaaau

SEQ ID NO: 1731474 - RNA, 14 nt, Human
auuauauuaugaag

SEQ ID NO: 1731475 - RNA, 19 nt, Human
auuauacccccugcaaagc

SEQ ID NO: 1731476 - RNA, 11 nt, Human
uuuguggaaaa

SEQ ID NO: 1731477 - RNA, 19 nt, Human
auucagacagcugccuggg

SEQ ID NO: 1731478 - RNA, 19 nt, Human
auuaucuaaaaucugcuag

SEQ ID NO: 1731479 - RNA, 14 nt, Human
auuaucuagauacu

SEQ ID NO: 1731480 - RNA, 18 nt, Human
auuaucuagauacuguau

SEQ ID NO: 1731481 - RNA, 15 nt, Human
auuauuauuuggccc

SEQ ID NO: 1731482 - RNA, 20 nt, Human
auucacauuguauucagagu

SEQ ID NO: 1731483 - RNA, 13 nt, Human
auucacauuguau

SEQ ID NO: 1731484 - RNA, 11 nt, Human
auucagacagc

SEQ ID NO: 1731485 - RNA, 13 nt, Human
auucagacagcug

SEQ ID NO: 1731486 - RNA, 12 nt, Human
auucagacagcu

SEQ ID NO: 1731487 - RNA, 17 nt, Human
auucagacagcugccug

SEQ ID NO: 1731488 - RNA, 16 nt, Human
auucagacagcugccu

SEQ ID NO: 1731489 - RNA, 15 nt, Human
auucagacagcugcc

SEQ ID NO: 1731490 - RNA, 14 nt, Human
auucagacagcugc

SEQ ID NO: 1731491 - RNA, 12 nt, Human
auucaggaagcu

SEQ ID NO: 1731492 - RNA, 22 nt, Human
auucaggaagcagcuuucccca

SEQ ID NO: 1731493 - RNA, 18 nt, Human
auucagacagcugccugg

SEQ ID NO: 1731494 - RNA, 22 nt, Human
auuccccacccugaaagcccug

SEQ ID NO: 1731495 - RNA, 23 nt, Human
auuccccgucucugguuccuccc

SEQ ID NO: 1731496 - RNA, 13 nt, Human
auucaggaagcuc

SEQ ID NO: 1731497 - RNA, 19 nt, Human
auuccagagaguggcuccu

SEQ ID NO: 1731498 - RNA, 21 nt, Human
auuccagagaguggcuccucc

SEQ ID NO: 1731499 - RNA, 19 nt, Human
auuccagagcguguaguga

SEQ ID NO: 1731500 - RNA, 14 nt, Human
auucuguuggccag

SEQ ID NO: 1731501 - RNA, 21 nt, Human
auucuguuggccagugugaca

SEQ ID NO: 1731502 - RNA, 19 nt, Human
auucuguuggccaguguga

SEQ ID NO: 1731503 - RNA, 22 nt, Human
auucugcucacauaucugucau

SEQ ID NO: 1731504 - RNA, 21 nt, Human
auucugcucacauaucuguca

SEQ ID NO: 1731505 - RNA, 20 nt, Human
auucugcucacauaucuguc

SEQ ID NO: 1731506 - RNA, 19 nt, Human
auucugcucacauaucugu

SEQ ID NO: 1731507 - RNA, 21 nt, Human
auucugccugcccaggccccu

SEQ ID NO: 1731508 - RNA, 20 nt, Human
auucugccugcccaggcccc

SEQ ID NO: 1731509 - RNA, 18 nt, Human
auucugcucacauaucug

SEQ ID NO: 1731510 - RNA, 15 nt, Human
auucuagcuuugagc

SEQ ID NO: 1731511 - RNA, 21 nt, Human
auucucaugccucagccuccu

SEQ ID NO: 1731512 - RNA, 17 nt, Human
auucucauuugucacac

SEQ ID NO: 1731513 - RNA, 22 nt, Human
auucucaugccucagccuccug

SEQ ID NO: 1731514 - RNA, 19 nt, Human
auucugccugcccaggccc

SEQ ID NO: 1731515 - RNA, 18 nt, Human
auucugccugcccaggcc

SEQ ID NO: 1731516 - RNA, 17 nt, Human
auucugccugcccaggc

SEQ ID NO: 1731517 - RNA, 16 nt, Human
auucugccugcccagg

SEQ ID NO: 1731518 - RNA, 15 nt, Human
auucugccugcccag

SEQ ID NO: 1731519 - RNA, 14 nt, Human
auucugccugccca

SEQ ID NO: 1731520 - RNA, 13 nt, Human
auucugccugccc

SEQ ID NO: 1731521 - RNA, 11 nt, Human
auucugccugc

SEQ ID NO: 1731522 - RNA, 15 nt, Human
auugacacuuaaaaa

SEQ ID NO: 1731523 - RNA, 17 nt, Human
auugacacuuaaaaaug

SEQ ID NO: 1731524 - RNA, 19 nt, Human
auugacacuuaaaaauggu

SEQ ID NO: 1731525 - RNA, 18 nt, Human
auugacacaguaccauuu

SEQ ID NO: 1731526 - RNA, 11 nt, Human
auugacuucuu

SEQ ID NO: 1731527 - RNA, 14 nt, Human
auucuuaaauaugu

SEQ ID NO: 1731528 - RNA, 13 nt, Human
auucuuccucccu

SEQ ID NO: 1731529 - RNA, 18 nt, Human
auugaaaucuuuuugcuu

SEQ ID NO: 1731530 - RNA, 17 nt, Human
auugaaaucuuuuugcu

SEQ ID NO: 1731531 - RNA, 20 nt, Human
auugaaaucuuuuugcuuug

SEQ ID NO: 1731532 - RNA, 15 nt, Human
auugaaaaaccauuu

SEQ ID NO: 1731533 - RNA, 20 nt, Human
augggcuggguucuacccag

SEQ ID NO: 1731534 - RNA, 18 nt, Human
augggccuccugugugug

SEQ ID NO: 1731535 - RNA, 24 nt, Human
auggggcugcaccggcuggccugg

SEQ ID NO: 1731536 - RNA, 14 nt, Human
augggggugcauuu

SEQ ID NO: 1731537 - RNA, 17 nt, Human
augggggcacugaggac

SEQ ID NO: 1731538 - RNA, 15 nt, Human
augggggugcauuug

SEQ ID NO: 1731539 - RNA, 14 nt, Human
uuucugcagaaaca

SEQ ID NO: 1731540 - RNA, 19 nt, Human
uuucugcagccacuauugu

SEQ ID NO: 1731541 - RNA, 15 nt, Human
uuucuggcuaugcau

SEQ ID NO: 1731542 - RNA, 16 nt, Human
uuucuggcuaugcauu

SEQ ID NO: 1731543 - RNA, 18 nt, Human
uuucuggcuaugcauuug

SEQ ID NO: 1731544 - RNA, 19 nt, Human
uuucuggcuaugcauuuga

SEQ ID NO: 1731545 - RNA, 15 nt, Human
augggauccuggagu

SEQ ID NO: 1731546 - RNA, 18 nt, Human
augggcaacccccagccu

SEQ ID NO: 1731547 - RNA, 21 nt, Human
uuucugcagccacuauuguua

SEQ ID NO: 1731548 - RNA, 23 nt, Human
uuucugggcaccggggccucgga

SEQ ID NO: 1731549 - RNA, 17 nt, Human
auggugcaaugaccuuu

SEQ ID NO: 1731550 - RNA, 16 nt, Human
auggugcaaugaccuu

SEQ ID NO: 1731551 - RNA, 19 nt, Human
auggugcaaugaccuuuca

SEQ ID NO: 1731552 - RNA, 15 nt, Human
auggugcaaugaccu

SEQ ID NO: 1731553 - RNA, 13 nt, Human
auggugcaaugac

SEQ ID NO: 1731554 - RNA, 12 nt, Human
auggugcaauga

SEQ ID NO: 1731555 - RNA, 20 nt, Human
auggugagggauacccaucc

SEQ ID NO: 1731556 - RNA, 15 nt, Human
augggugcuuggagg

SEQ ID NO: 1731557 - RNA, 14 nt, Human
auggugaugaaaug

SEQ ID NO: 1731558 - RNA, 17 nt, Human
auggugaugaaauguaa

SEQ ID NO: 1731559 - RNA, 16 nt, Human
auggugaugaaaugua

SEQ ID NO: 1731560 - RNA, 17 nt, Human
augguggcuggguugga

SEQ ID NO: 1731561 - RNA, 15 nt, Human
augguggcuggguug

SEQ ID NO: 1731562 - RNA, 13 nt, Human
augguggcugggu

SEQ ID NO: 1731563 - RNA, 12 nt, Human
augguggcuggg

SEQ ID NO: 1731564 - RNA, 17 nt, Human
auguaaaagacuuuuuu

SEQ ID NO: 1731565 - RNA, 20 nt, Human
augguuccccuguucacucu

SEQ ID NO: 1731566 - RNA, 19 nt, Human
augguuccccuguucacuc

SEQ ID NO: 1731567 - RNA, 13 nt, Human
augguuguacaua

SEQ ID NO: 1731568 - RNA, 15 nt, Human
augguuuucaaaaua

SEQ ID NO: 1731569 - RNA, 14 nt, Human
augguuuucaaaau

SEQ ID NO: 1731570 - RNA, 14 nt, Human
augguuuucuugug

SEQ ID NO: 1731571 - RNA, 16 nt, Human
augguuuucaaaauaa

SEQ ID NO: 1731572 - RNA, 17 nt, Human
auguagaggagaaacug

SEQ ID NO: 1731573 - RNA, 19 nt, Human
auguagaggagaaacugga

SEQ ID NO: 1731574 - RNA, 12 nt, Human
auguagaggaga

SEQ ID NO: 1731575 - RNA, 13 nt, Human
auguagaggagaa

SEQ ID NO: 1731576 - RNA, 12 nt, Human
uuugaccucugc

SEQ ID NO: 1731577 - RNA, 19 nt, Human
auguagccccucuccugga

SEQ ID NO: 1731578 - RNA, 15 nt, Human
uuugccguuauuaaa

SEQ ID NO: 1731579 - RNA, 22 nt, Human
uuugauucagacagcugccugg

SEQ ID NO: 1731580 - RNA, 13 nt, Human
uuugccucugccu

SEQ ID NO: 1731581 - RNA, 22 nt, Human
uuugauguucuuucacccuuuu

SEQ ID NO: 1731582 - RNA, 13 nt, Human
uuugauuaaauuc

SEQ ID NO: 1731583 - RNA, 18 nt, Human
uuugauuaaauucuugca

SEQ ID NO: 1731584 - RNA, 21 nt, Human
uuugauuaaauucuugcaaag

SEQ ID NO: 1731585 - RNA, 21 nt, Human
uuugauucagacagcugccug

SEQ ID NO: 1731586 - RNA, 23 nt, Human
uuugauuaaauucuugcaaagua

SEQ ID NO: 1731587 - RNA, 19 nt, Human
uuugacgccaucccagccc

SEQ ID NO: 1731588 - RNA, 16 nt, Human
uuugacgccaucccag

SEQ ID NO: 1731589 - RNA, 14 nt, Human
uuugacgccauccc

SEQ ID NO: 1731590 - RNA, 13 nt, Human
uuugacgccaucc

SEQ ID NO: 1731591 - RNA, 20 nt, Human
uuugacgccaucccagcccc

SEQ ID NO: 1731592 - RNA, 20 nt, Human
uuugauguaaagauguucug

SEQ ID NO: 1731593 - RNA, 15 nt, Human
augucgccucugcau

SEQ ID NO: 1731594 - RNA, 22 nt, Human
augucucaggucccugcagggc

SEQ ID NO: 1731595 - RNA, 17 nt, Human
augucucaggucccugc

SEQ ID NO: 1731596 - RNA, 14 nt, Human
augucgccucugca

SEQ ID NO: 1731597 - RNA, 13 nt, Human
augucgccucugc

SEQ ID NO: 1731598 - RNA, 15 nt, Human
augucucgugguagg

SEQ ID NO: 1731599 - RNA, 16 nt, Human
augucucgugguagga

SEQ ID NO: 1731600 - RNA, 17 nt, Human
augucucugagcauuag

SEQ ID NO: 1731601 - RNA, 19 nt, Human
augucucgugguaggacug

SEQ ID NO: 1731602 - RNA, 17 nt, Human
auguccacugguucuuc

SEQ ID NO: 1731603 - RNA, 13 nt, Human
augucagugugac

SEQ ID NO: 1731604 - RNA, 12 nt, Human
augucaguguga

SEQ ID NO: 1731605 - RNA, 18 nt, Human
auguaugagguacaaccu

SEQ ID NO: 1731606 - RNA, 19 nt, Human
auguaugaggaauuucugu

SEQ ID NO: 1731607 - RNA, 15 nt, Human
auguauguguaagua

SEQ ID NO: 1731608 - RNA, 16 nt, Human
auguauguguaaguau

SEQ ID NO: 1731609 - RNA, 20 nt, Human
uuugugaagguggaaauaaa

SEQ ID NO: 1731610 - RNA, 22 nt, Human
uuugugaaaugauggugaaagu

SEQ ID NO: 1731611 - RNA, 21 nt, Human
uuugucuuguguuucuuuagu

SEQ ID NO: 1731612 - RNA, 19 nt, Human
uuugucuuuggugaacauu

SEQ ID NO: 1731613 - RNA, 12 nt, Human
uuuguauaaaag

SEQ ID NO: 1731614 - RNA, 14 nt, Human
uuuguaaugaaaac

SEQ ID NO: 1731615 - RNA, 13 nt, Human
uuuguaaugaaaa

SEQ ID NO: 1731616 - RNA, 21 nt, Human
uuuguaauaauaaagaauagc

SEQ ID NO: 1731617 - RNA, 23 nt, Human
augugcacaugcacgugugugca

SEQ ID NO: 1731618 - RNA, 19 nt, Human
uuuguaauaauaaagaaua

SEQ ID NO: 1731619 - RNA, 19 nt, Human
augugaugagaggaaauca

SEQ ID NO: 1731620 - RNA, 17 nt, Human
augugaugagaggaaau

SEQ ID NO: 1731621 - RNA, 16 nt, Human
augugaugagaggaaa

SEQ ID NO: 1731622 - RNA, 23 nt, Human
augucucuuuaaugucacaggca

SEQ ID NO: 1731623 - RNA, 18 nt, Human
uuuaaauauaugcuaagu

SEQ ID NO: 1731624 - RNA, 12 nt, Human
uuuaauucaguu

SEQ ID NO: 1731625 - RNA, 18 nt, Human
augcagccucacaguccu

SEQ ID NO: 1731626 - RNA, 17 nt, Human
augcagcaucuaaguaa

SEQ ID NO: 1731627 - RNA, 16 nt, Human
uuuaauuugaaauaug

SEQ ID NO: 1731628 - RNA, 19 nt, Human
uuuaauuuuuuugagacag

SEQ ID NO: 1731629 - RNA, 23 nt, Human
augcagugguaugaucacggcuc

SEQ ID NO: 1731630 - RNA, 13 nt, Human
augcagugcuucc

SEQ ID NO: 1731631 - RNA, 20 nt, Human
augcgugcauaccacuuuug

SEQ ID NO: 1731632 - RNA, 15 nt, Human
augcccagccccuuc

SEQ ID NO: 1731633 - RNA, 14 nt, Human
augcccagccccuu

SEQ ID NO: 1731634 - RNA, 13 nt, Human
augcccagccccu

SEQ ID NO: 1731635 - RNA, 12 nt, Human
augcccagcccc

SEQ ID NO: 1731636 - RNA, 16 nt, Human
augccucagccuccug

SEQ ID NO: 1731637 - RNA, 14 nt, Human
augcccuggaucca

SEQ ID NO: 1731638 - RNA, 13 nt, Human
uuguguucaccuu

SEQ ID NO: 1731639 - RNA, 21 nt, Human
uuguuccacaaguuaaauaaa

SEQ ID NO: 1731640 - RNA, 13 nt, Human
uuguguuacuaag

SEQ ID NO: 1731641 - RNA, 15 nt, Human
uuguguuacuaaguu

SEQ ID NO: 1731642 - RNA, 20 nt, Human
uuguguuacuaaguuuuuau

SEQ ID NO: 1731643 - RNA, 20 nt, Human
augaucuaggaagacuuugg

SEQ ID NO: 1731644 - RNA, 17 nt, Human
augaucuaggaagacuu

SEQ ID NO: 1731645 - RNA, 17 nt, Human
augauaugcuuguaacu

SEQ ID NO: 1731646 - RNA, 23 nt, Human
augauaugcuuguaacuaaaaua

SEQ ID NO: 1731647 - RNA, 21 nt, Human
augauacuugaaaauuaacau

SEQ ID NO: 1731648 - RNA, 17 nt, Human
augauacuugaaaauua

SEQ ID NO: 1731649 - RNA, 13 nt, Human
uuuaaagaaugcu

SEQ ID NO: 1731650 - RNA, 22 nt, Human
augcaccagcccuuagcaggga

SEQ ID NO: 1731651 - RNA, 13 nt, Human
augcaccuggaau

SEQ ID NO: 1731652 - RNA, 20 nt, Human
augcacuuuguucuggcucu

SEQ ID NO: 1731653 - RNA, 19 nt, Human
augcacuuuguucuggcuc

SEQ ID NO: 1731654 - RNA, 17 nt, Human
augcacuuuguucuggc

SEQ ID NO: 1731655 - RNA, 15 nt, Human
augcaaccauuugaa

SEQ ID NO: 1731656 - RNA, 16 nt, Human
augcuaagacucagug

SEQ ID NO: 1731657 - RNA, 18 nt, Human
uuuaucaugugaaaucau

SEQ ID NO: 1731658 - RNA, 17 nt, Human
uuuaucaugugaaauca

SEQ ID NO: 1731659 - RNA, 20 nt, Human
augcuagaacucccuuucaa

SEQ ID NO: 1731660 - RNA, 21 nt, Human
augcuagaacucccuuucaac

SEQ ID NO: 1731661 - RNA, 22 nt, Human
augcuagaacucccuuucaaca

SEQ ID NO: 1731662 - RNA, 20 nt, Human
uuuauuuuguguuuaggaac

SEQ ID NO: 1731663 - RNA, 16 nt, Human
uuuauuuuguguuuag

SEQ ID NO: 1731664 - RNA, 22 nt, Human
uuucaaaauuguuacaaauugu

SEQ ID NO: 1731665 - RNA, 16 nt, Human
uuucaaacuuuacuau

SEQ ID NO: 1731666 - RNA, 22 nt, Human
uuucaaacuuuacuauggcccu

SEQ ID NO: 1731667 - RNA, 13 nt, Human
augcuucucacug

SEQ ID NO: 1731668 - RNA, 22 nt, Human
augcugugcccuaaaguguauu

SEQ ID NO: 1731669 - RNA, 18 nt, Human
uuuccaugaguccccugu

SEQ ID NO: 1731670 - RNA, 17 nt, Human
uuuccaugaguccccug

SEQ ID NO: 1731671 - RNA, 12 nt, Human
auggacuuuguu

SEQ ID NO: 1731672 - RNA, 11 nt, Human
auggacuuugu

SEQ ID NO: 1731673 - RNA, 19 nt, Human
auggacuaacuugucuuug

SEQ ID NO: 1731674 - RNA, 19 nt, Human
augggagagaagagaaugc

SEQ ID NO: 1731675 - RNA, 15 nt, Human
augggagagaagaga

SEQ ID NO: 1731676 - RNA, 19 nt, Human
auggcuaagcaaaauguga

SEQ ID NO: 1731677 - RNA, 18 nt, Human
auggcuaauguacugcau

SEQ ID NO: 1731678 - RNA, 18 nt, Human
auggagacugucucaaga

SEQ ID NO: 1731679 - RNA, 20 nt, Human
aucauuuuaccuuugacaaa

SEQ ID NO: 1731680 - RNA, 16 nt, Human
auccaguaucuugaag

SEQ ID NO: 1731681 - RNA, 16 nt, Human
auccacccaccucagc

SEQ ID NO: 1731682 - RNA, 15 nt, Human
auccacccaccucag

SEQ ID NO: 1731683 - RNA, 13 nt, Human
auccacccaccuc

SEQ ID NO: 1731684 - RNA, 21 nt, Human
auccaagcuggucccacucag

SEQ ID NO: 1731685 - RNA, 18 nt, Human
auccaagcuggucccacu

SEQ ID NO: 1731686 - RNA, 13 nt, Human
auccaucaggcca

SEQ ID NO: 1731687 - RNA, 21 nt, Human
auccaguaucuugaagacuuu

SEQ ID NO: 1731688 - RNA, 20 nt, Human
aucccaaacccuucagugcc

SEQ ID NO: 1731689 - RNA, 19 nt, Human
aucccaaacccuucagugc

SEQ ID NO: 1731690 - RNA, 18 nt, Human
aucccauaugccugggca

SEQ ID NO: 1731691 - RNA, 17 nt, Human
uucuccuuucacaaccu

SEQ ID NO: 1731692 - RNA, 15 nt, Human
uucucuaguuugauu

SEQ ID NO: 1731693 - RNA, 17 nt, Human
uucucuaguuugauuaa

SEQ ID NO: 1731694 - RNA, 20 nt, Human
uucucuaguuugauuaaauu

SEQ ID NO: 1731695 - RNA, 21 nt, Human
uucuccuuguguuacuaaguu

SEQ ID NO: 1731696 - RNA, 14 nt, Human
aucaggugcugcca

SEQ ID NO: 1731697 - RNA, 18 nt, Human
aucaguagccagcaucug

SEQ ID NO: 1731698 - RNA, 17 nt, Human
uucuggcucuuccaggc

SEQ ID NO: 1731699 - RNA, 16 nt, Human
uucuggcucuuccagg

SEQ ID NO: 1731700 - RNA, 18 nt, Human
uucugccugcccaggccc

SEQ ID NO: 1731701 - RNA, 17 nt, Human
uucugccugcccaggcc

SEQ ID NO: 1731702 - RNA, 21 nt, Human
uucugccugcccaggccccug

SEQ ID NO: 1731703 - RNA, 22 nt, Human
uucugaacuuggcgcugccccu

SEQ ID NO: 1731704 - RNA, 19 nt, Human
uucugaacuuggcgcugcc

SEQ ID NO: 1731705 - RNA, 15 nt, Human
uucugccauauucug

SEQ ID NO: 1731706 - RNA, 23 nt, Human
uucugaacuuggcgcugccccug

SEQ ID NO: 1731707 - RNA, 17 nt, Human
uugaaauuguauuacaa

SEQ ID NO: 1731708 - RNA, 19 nt, Human
uugaacccgggaggcagag

SEQ ID NO: 1731709 - RNA, 12 nt, Human
auccuaagcuau

SEQ ID NO: 1731710 - RNA, 21 nt, Human
auccuaagcuauucaguaaua

SEQ ID NO: 1731711 - RNA, 19 nt, Human
auccuacaagacacaguga

SEQ ID NO: 1731712 - RNA, 18 nt, Human
auccuacaagacacagug

SEQ ID NO: 1731713 - RNA, 16 nt, Human
auccuaggcauuugcu

SEQ ID NO: 1731714 - RNA, 16 nt, Human
auccuccucagaucuu

SEQ ID NO: 1731715 - RNA, 23 nt, Human
aucccucauccucauacccaccc

SEQ ID NO: 1731716 - RNA, 21 nt, Human
aucccucauccucauacccac

SEQ ID NO: 1731717 - RNA, 14 nt, Human
aucccucauccuca

SEQ ID NO: 1731718 - RNA, 13 nt, Human
aucccaugagccu

SEQ ID NO: 1731719 - RNA, 24 nt, Human
aucccauaugccugggcagaagga

SEQ ID NO: 1731720 - RNA, 13 nt, Human
uucuucucccuca

SEQ ID NO: 1731721 - RNA, 21 nt, Human
uucuuaagacgugauuuugcu

SEQ ID NO: 1731722 - RNA, 23 nt, Human
uucuuaagacgugauuuugcugu

SEQ ID NO: 1731723 - RNA, 15 nt, Human
uucuucugcuucagc

SEQ ID NO: 1731724 - RNA, 13 nt, Human
uucuucugcuuca

SEQ ID NO: 1731725 - RNA, 14 nt, Human
uucuucucccucag

SEQ ID NO: 1731726 - RNA, 20 nt, Human
uucuucugcuucagccuccc

SEQ ID NO: 1731727 - RNA, 17 nt, Human
uucuucuuuuugcuuca

SEQ ID NO: 1731728 - RNA, 21 nt, Human
uucuucuuuuugcuucaaaaa

SEQ ID NO: 1731729 - RNA, 16 nt, Human
uucuuuguaaugaaaa

SEQ ID NO: 1731730 - RNA, 15 nt, Human
uucuuuguaaugaaa

SEQ ID NO: 1731731 - RNA, 14 nt, Human
uucuuuuuuuguga

SEQ ID NO: 1731732 - RNA, 19 nt, Human
uuccguagguuauuuucag

SEQ ID NO: 1731733 - RNA, 14 nt, Human
uuccguuaaaauac

SEQ ID NO: 1731734 - RNA, 16 nt, Human
uuccguuaaaauacca

SEQ ID NO: 1731735 - RNA, 20 nt, Human
uucccucaccuuucccaucu

SEQ ID NO: 1731736 - RNA, 23 nt, Human
uucccguggaacguuuuuccugu

SEQ ID NO: 1731737 - RNA, 15 nt, Human
uucccuauuagagaa

SEQ ID NO: 1731738 - RNA, 22 nt, Human
uucccgcucagcccucccugcc

SEQ ID NO: 1731739 - RNA, 21 nt, Human
uucccgcucagcccucccugc

SEQ ID NO: 1731740 - RNA, 18 nt, Human
uucccgcucagcccuccc

SEQ ID NO: 1731741 - RNA, 16 nt, Human
uucccgcucagcccuc

SEQ ID NO: 1731742 - RNA, 22 nt, Human
uuccucuuuccaucuacccucc

SEQ ID NO: 1731743 - RNA, 17 nt, Human
uuccucuuuccaucuac

SEQ ID NO: 1731744 - RNA, 13 nt, Human
uuccucuuuccau

SEQ ID NO: 1731745 - RNA, 18 nt, Human
uuccugaagaauugaaaa

SEQ ID NO: 1731746 - RNA, 14 nt, Human
uuccugaaccgaug

SEQ ID NO: 1731747 - RNA, 20 nt, Human
uuccuaaauauauuuuaaga

SEQ ID NO: 1731748 - RNA, 18 nt, Human
uuccuaauuccacagcug

SEQ ID NO: 1731749 - RNA, 17 nt, Human
uuccuaauuccacagcu

SEQ ID NO: 1731750 - RNA, 16 nt, Human
uuccuaauuccacagc

SEQ ID NO: 1731751 - RNA, 21 nt, Human
uuccucugaggcugaaauuca

SEQ ID NO: 1731752 - RNA, 17 nt, Human
uuccucugagccuuggg

SEQ ID NO: 1731753 - RNA, 14 nt, Human
uuccucugagccuu

SEQ ID NO: 1731754 - RNA, 11 nt, Human
uuccugugucu

SEQ ID NO: 1731755 - RNA, 20 nt, Human
auauuuuuuguuaaaugauu

SEQ ID NO: 1731756 - RNA, 18 nt, Human
auauuuuuuguuaaauga

SEQ ID NO: 1731757 - RNA, 14 nt, Human
aucaacagauaaau

SEQ ID NO: 1731758 - RNA, 14 nt, Human
aucaaugaguaaca

SEQ ID NO: 1731759 - RNA, 15 nt, Human
aucacggcucacugc

SEQ ID NO: 1731760 - RNA, 14 nt, Human
aucacgccacugca

SEQ ID NO: 1731761 - RNA, 13 nt, Human
aucacgccacugc

SEQ ID NO: 1731762 - RNA, 19 nt, Human
aucacggcucacugcagcc

SEQ ID NO: 1731763 - RNA, 18 nt, Human
aucacggcucacugcagc

SEQ ID NO: 1731764 - RNA, 20 nt, Human
aucaggccaggcccucugcc

SEQ ID NO: 1731765 - RNA, 12 nt, Human
aucagaauucuc

SEQ ID NO: 1731766 - RNA, 18 nt, Human
aucaggccaggcccucug

SEQ ID NO: 1731767 - RNA, 16 nt, Human
aucaggccaggcccuc

SEQ ID NO: 1731768 - RNA, 15 nt, Human
aucaggccaggcccu

SEQ ID NO: 1731769 - RNA, 13 nt, Human
aucagcacgauuu

SEQ ID NO: 1731770 - RNA, 11 nt, Human
aucagaauucu

SEQ ID NO: 1731771 - RNA, 18 nt, Human
aucagaaguuucucagcu

SEQ ID NO: 1731772 - RNA, 16 nt, Human
uucucacuccuaccug

SEQ ID NO: 1731773 - RNA, 18 nt, Human
uucucacuccuaccuggu

SEQ ID NO: 1731774 - RNA, 15 nt, Human
uucggccuccauccu

SEQ ID NO: 1731775 - RNA, 19 nt, Human
uucuaaaggcuaccuuugu

SEQ ID NO: 1731776 - RNA, 20 nt, Human
uucuaaaggcuaccuuugua

SEQ ID NO: 1731777 - RNA, 21 nt, Human
uucuaaaggcuaccuuuguau

SEQ ID NO: 1731778 - RNA, 21 nt, Human
uucuaaaucuccaaaauaaaa

SEQ ID NO: 1731779 - RNA, 13 nt, Human
uucuaaaguaaaa

SEQ ID NO: 1731780 - RNA, 14 nt, Human
uucggccuccaucc

SEQ ID NO: 1731781 - RNA, 19 nt, Human
uucgcuccugugucuugca

SEQ ID NO: 1731782 - RNA, 15 nt, Human
uucgcuccugugucu

SEQ ID NO: 1731783 - RNA, 23 nt, Human
uucuaagaagugaaaaucuacac

SEQ ID NO: 1731784 - RNA, 13 nt, Human
uucuaagaaguga

SEQ ID NO: 1731785 - RNA, 16 nt, Human
uucuagcauggcugcc

SEQ ID NO: 1731786 - RNA, 15 nt, Human
aucucuugagccugg

SEQ ID NO: 1731787 - RNA, 14 nt, Human
aucugaaaauguau

SEQ ID NO: 1731788 - RNA, 18 nt, Human
aucucuugagccugggag

SEQ ID NO: 1731789 - RNA, 22 nt, Human
aucugaaaauguauguguaagu

SEQ ID NO: 1731790 - RNA, 20 nt, Human
aucugaaaauguauguguaa

SEQ ID NO: 1731791 - RNA, 19 nt, Human
aucugaaaauguaugugua

SEQ ID NO: 1731792 - RNA, 16 nt, Human
aucugaaaauguaugu

SEQ ID NO: 1731793 - RNA, 21 nt, Human
aucucuucuggguuccuuccu

SEQ ID NO: 1731794 - RNA, 21 nt, Human
aucucccccagccccauccuc

SEQ ID NO: 1731795 - RNA, 17 nt, Human
aucucccccagccccau

SEQ ID NO: 1731796 - RNA, 16 nt, Human
aucucccccagcccca

SEQ ID NO: 1731797 - RNA, 15 nt, Human
aucucccccagcccc

SEQ ID NO: 1731798 - RNA, 14 nt, Human
aucuccaaaauaaa

SEQ ID NO: 1731799 - RNA, 17 nt, Human
aucuccaaaauaaaacu

SEQ ID NO: 1731800 - RNA, 20 nt, Human
aucuccaaaauaaaacuuuu

SEQ ID NO: 1731801 - RNA, 21 nt, Human
aucuccaaaauaaaacuuuuu

SEQ ID NO: 1731802 - RNA, 16 nt, Human
aucucagggccugguc

SEQ ID NO: 1731803 - RNA, 18 nt, Human
uugcaccacugcacucca

SEQ ID NO: 1731804 - RNA, 16 nt, Human
uugcaccacugcacuc

SEQ ID NO: 1731805 - RNA, 15 nt, Human
uugcaccacugcacu

SEQ ID NO: 1731806 - RNA, 19 nt, Human
uugcaauggcagccuuggc

SEQ ID NO: 1731807 - RNA, 17 nt, Human
uugcaauggcagccuug

SEQ ID NO: 1731808 - RNA, 16 nt, Human
uugcaauggcagccuu

SEQ ID NO: 1731809 - RNA, 23 nt, Human
aucugaaaauguauguguaagua

SEQ ID NO: 1731810 - RNA, 13 nt, Human
uugauuaaauucu

SEQ ID NO: 1731811 - RNA, 13 nt, Human
uugauuaaagaug

SEQ ID NO: 1731812 - RNA, 23 nt, Human
uugauguuuuaaggaugcuugua

SEQ ID NO: 1731813 - RNA, 14 nt, Human
uugauuaaauucuu

SEQ ID NO: 1731814 - RNA, 14 nt, Human
uugauuaaagauga

SEQ ID NO: 1731815 - RNA, 17 nt, Human
uugaagggaaauuucag

SEQ ID NO: 1731816 - RNA, 13 nt, Human
uugaagccuuugu

SEQ ID NO: 1731817 - RNA, 13 nt, Human
uugaaucacagua

SEQ ID NO: 1731818 - RNA, 19 nt, Human
aucuaaauggaaccacucu

SEQ ID NO: 1731819 - RNA, 17 nt, Human
aucuaaauggaaccacu

SEQ ID NO: 1731820 - RNA, 18 nt, Human
aucuaaauggaaccacuc

SEQ ID NO: 1731821 - RNA, 13 nt, Human
aucuaaauggaac

SEQ ID NO: 1731822 - RNA, 14 nt, Human
aucguucucugccu

SEQ ID NO: 1731823 - RNA, 17 nt, Human
auccucuguacagagcc

SEQ ID NO: 1731824 - RNA, 16 nt, Human
auccucuguacagagc

SEQ ID NO: 1731825 - RNA, 18 nt, Human
aucuacacuccagugaga

SEQ ID NO: 1731826 - RNA, 20 nt, Human
aucuaauauguaacaagcca

SEQ ID NO: 1731827 - RNA, 19 nt, Human
aucuacacuccagugagac

SEQ ID NO: 1731828 - RNA, 18 nt, Human
aucuaauauguaacaagc

SEQ ID NO: 1731829 - RNA, 15 nt, Human
uugauacuacaguuu

SEQ ID NO: 1731830 - RNA, 20 nt, Human
uugagugaagcugggagaac

SEQ ID NO: 1731831 - RNA, 20 nt, Human
uugaguugauucagcucugc

SEQ ID NO: 1731832 - RNA, 16 nt, Human
uugagaucagccuggg

SEQ ID NO: 1731833 - RNA, 15 nt, Human
uugagaucagccugg

SEQ ID NO: 1731834 - RNA, 16 nt, Human
uugagauguguucaca

SEQ ID NO: 1731835 - RNA, 12 nt, Human
uugagacagagu

SEQ ID NO: 1731836 - RNA, 19 nt, Human
augaaagggcccagagagg

SEQ ID NO: 1731837 - RNA, 11 nt, Human
augaagaggag

SEQ ID NO: 1731838 - RNA, 16 nt, Human
augaauauuuaguguu

SEQ ID NO: 1731839 - RNA, 18 nt, Human
augaacuuguaaaggaau

SEQ ID NO: 1731840 - RNA, 23 nt, Human
augaauggcuaagcaaaauguga

SEQ ID NO: 1731841 - RNA, 21 nt, Human
augaauauuuaguguucauaa

SEQ ID NO: 1731842 - RNA, 18 nt, Human
uuggggaccagagcugcc

SEQ ID NO: 1731843 - RNA, 11 nt, Human
uuggagacaga

SEQ ID NO: 1731844 - RNA, 14 nt, Human
uugcuugaaagaaa

SEQ ID NO: 1731845 - RNA, 18 nt, Human
uuggccccugcccggcug

SEQ ID NO: 1731846 - RNA, 16 nt, Human
uuggagggugucccaa

SEQ ID NO: 1731847 - RNA, 18 nt, Human
augaaagggcccagagag

SEQ ID NO: 1731848 - RNA, 17 nt, Human
aucuuugcagacaggca

SEQ ID NO: 1731849 - RNA, 22 nt, Human
aucuuuucauuuaggugaggaa

SEQ ID NO: 1731850 - RNA, 18 nt, Human
aucuuugcagacaggcaa

SEQ ID NO: 1731851 - RNA, 12 nt, Human
uugcuccuugac

SEQ ID NO: 1731852 - RNA, 18 nt, Human
aucugugaaaggaaagag

SEQ ID NO: 1731853 - RNA, 23 nt, Human
aucugugaaaggaaagagggagg

SEQ ID NO: 1731854 - RNA, 14 nt, Human
aucuuauaauuuaa

SEQ ID NO: 1731855 - RNA, 20 nt, Human
aucuuggucagauuugaacu

SEQ ID NO: 1731856 - RNA, 13 nt, Human
aucuugcucugcu

SEQ ID NO: 1731857 - RNA, 20 nt, Human
aucugcuagggaauaucaau

SEQ ID NO: 1731858 - RNA, 17 nt, Human
aucugugaaaggaaaga

SEQ ID NO: 1731859 - RNA, 17 nt, Human
aucuggugacuuuccuc

SEQ ID NO: 1731860 - RNA, 16 nt, Human
aucuggugacuuuccu

SEQ ID NO: 1731861 - RNA, 10 nt, Human
aucuggugac

SEQ ID NO: 1731862 - RNA, 19 nt, Human
uuaguacuccccuccuuga

SEQ ID NO: 1731863 - RNA, 13 nt, Human
uuaguagagacag

SEQ ID NO: 1731864 - RNA, 14 nt, Human
uuaguagagacagg

SEQ ID NO: 1731865 - RNA, 17 nt, Human
uuaguagagacaggguu

SEQ ID NO: 1731866 - RNA, 18 nt, Human
uuaguuuuugugaaguuu

SEQ ID NO: 1731867 - RNA, 15 nt, Human
uuauaaaaauaaaaa

SEQ ID NO: 1731868 - RNA, 21 nt, Human
uuaguuuuugugaaguuuaau

SEQ ID NO: 1731869 - RNA, 13 nt, Human
uuauaaacuuuac

SEQ ID NO: 1731870 - RNA, 22 nt, Human
uuauaaaaauaaaaaacacugg

SEQ ID NO: 1731871 - RNA, 21 nt, Human
uuauaaaaauaaaaaacacug

SEQ ID NO: 1731872 - RNA, 15 nt, Human
uuagauuaagaaaua

SEQ ID NO: 1731873 - RNA, 19 nt, Human
uuagauuaagaaauagaca

SEQ ID NO: 1731874 - RNA, 15 nt, Human
uuaggugaggaagca

SEQ ID NO: 1731875 - RNA, 19 nt, Human
uuaggugugggggaagcac

SEQ ID NO: 1731876 - RNA, 18 nt, Human
uuagguuggcaaaaaggc

SEQ ID NO: 1731877 - RNA, 13 nt, Human
uuaguaaucauau

SEQ ID NO: 1731878 - RNA, 14 nt, Human
uuaguaaucauauu

SEQ ID NO: 1731879 - RNA, 14 nt, Human
auaagccagacauc

SEQ ID NO: 1731880 - RNA, 22 nt, Human
auaagccaaaaaaugcuugcuu

SEQ ID NO: 1731881 - RNA, 21 nt, Human
auaagauucauauuuacuucu

SEQ ID NO: 1731882 - RNA, 23 nt, Human
auaauucacauuguauucagagu

SEQ ID NO: 1731883 - RNA, 20 nt, Human
auaauucaggaagcagcuuu

SEQ ID NO: 1731884 - RNA, 14 nt, Human
auaauuuuaaaugu

SEQ ID NO: 1731885 - RNA, 13 nt, Human
auaauuuuaaaug

SEQ ID NO: 1731886 - RNA, 12 nt, Human
auaauuuuaaau

SEQ ID NO: 1731887 - RNA, 18 nt, Human
uuaccagugccuuaaacu

SEQ ID NO: 1731888 - RNA, 15 nt, Human
uuacugcagcuuugu

SEQ ID NO: 1731889 - RNA, 13 nt, Human
uuacuguacauga

SEQ ID NO: 1731890 - RNA, 14 nt, Human
uuacuguacaugaa

SEQ ID NO: 1731891 - RNA, 22 nt, Human
uuacuguacaugaaaacacauu

SEQ ID NO: 1731892 - RNA, 23 nt, Human
uuacuguacaugaaaacacauuu

SEQ ID NO: 1731893 - RNA, 12 nt, Human
uuacuguacaug

SEQ ID NO: 1731894 - RNA, 23 nt, Human
uuacuguacagacagaaaaaacu

SEQ ID NO: 1731895 - RNA, 18 nt, Human
auaacuuuuuuuuaaguu

SEQ ID NO: 1731896 - RNA, 14 nt, Human
auaagauucauauu

SEQ ID NO: 1731897 - RNA, 16 nt, Human
uuagaagucacacagu

SEQ ID NO: 1731898 - RNA, 16 nt, Human
auaaauugcuccuuga

SEQ ID NO: 1731899 - RNA, 13 nt, Human
auaaauugcuccu

SEQ ID NO: 1731900 - RNA, 18 nt, Human
auaaauugcuccuugaca

SEQ ID NO: 1731901 - RNA, 15 nt, Human
auaacuauguugaua

SEQ ID NO: 1731902 - RNA, 14 nt, Human
uuacaggugugaac

SEQ ID NO: 1731903 - RNA, 20 nt, Human
uuacagggaugagccaccgc

SEQ ID NO: 1731904 - RNA, 19 nt, Human
uuaccagcagagcaccuua

SEQ ID NO: 1731905 - RNA, 15 nt, Human
uuaaucuaaauggaa

SEQ ID NO: 1731906 - RNA, 22 nt, Human
uuaagacgaaacauuuguucua

SEQ ID NO: 1731907 - RNA, 16 nt, Human
uuaauaaaaguacaug

SEQ ID NO: 1731908 - RNA, 17 nt, Human
uuaaucuuuaauuuuac

SEQ ID NO: 1731909 - RNA, 13 nt, Human
uuaaucuuuaauu

SEQ ID NO: 1731910 - RNA, 13 nt, Human
uuaauuugaaaua

SEQ ID NO: 1731911 - RNA, 15 nt, Human
uuaauuugaaauaug

SEQ ID NO: 1731912 - RNA, 18 nt, Human
uuaagacauuuuuggaag

SEQ ID NO: 1731913 - RNA, 23 nt, Human
uuaagacauuuuuggaaggggac

SEQ ID NO: 1731914 - RNA, 19 nt, Human
uuaagacgaaacauuuguu

SEQ ID NO: 1731915 - RNA, 19 nt, Human
uuaagaaaaaggaugcaca

SEQ ID NO: 1731916 - RNA, 23 nt, Human
uuaacuuuuauaaacuuuaccuu

SEQ ID NO: 1731917 - RNA, 22 nt, Human
uuaacuuuuauaaacuuuaccu

SEQ ID NO: 1731918 - RNA, 22 nt, Human
auaaaagggacugagaaauuua

SEQ ID NO: 1731919 - RNA, 20 nt, Human
auaaaagccuguuuaagaga

SEQ ID NO: 1731920 - RNA, 19 nt, Human
auaaaagccuguuuaagag

SEQ ID NO: 1731921 - RNA, 15 nt, Human
aguuuuuuuuauaca

SEQ ID NO: 1731922 - RNA, 17 nt, Human
aguuuaaauuguaauag

SEQ ID NO: 1731923 - RNA, 20 nt, Human
aguuuaaauuguaauaggcg

SEQ ID NO: 1731924 - RNA, 19 nt, Human
uuaaaaugagaaaucuaaa

SEQ ID NO: 1731925 - RNA, 12 nt, Human
uuaaaaugagaa

SEQ ID NO: 1731926 - RNA, 19 nt, Human
uuaaaaaucucaaauuucu

SEQ ID NO: 1731927 - RNA, 20 nt, Human
uuaaaaaucucaaauuucua

SEQ ID NO: 1731928 - RNA, 19 nt, Human
aguuucugccgcagcccug

SEQ ID NO: 1731929 - RNA, 22 nt, Human
aguuuguuaguaugaggcauuu

SEQ ID NO: 1731930 - RNA, 15 nt, Human
aguuuguugaaacac

SEQ ID NO: 1731931 - RNA, 14 nt, Human
aguuucucuuuuca

SEQ ID NO: 1731932 - RNA, 15 nt, Human
aguuucucagcuccc

SEQ ID NO: 1731933 - RNA, 13 nt, Human
aguuucucagcuc

SEQ ID NO: 1731934 - RNA, 15 nt, Human
aguuucugccgcagc

SEQ ID NO: 1731935 - RNA, 12 nt, Human
uuaacagaaaug

SEQ ID NO: 1731936 - RNA, 13 nt, Human
uuaacagaaaugu

SEQ ID NO: 1731937 - RNA, 14 nt, Human
uuaacagaaaugua

SEQ ID NO: 1731938 - RNA, 16 nt, Human
uuaacagaaauguaca

SEQ ID NO: 1731939 - RNA, 17 nt, Human
auacagaggcaacugca

SEQ ID NO: 1731940 - RNA, 16 nt, Human
auacagaggcaacugc

SEQ ID NO: 1731941 - RNA, 17 nt, Human
uuauaaacuuuaccuuu

SEQ ID NO: 1731942 - RNA, 18 nt, Human
uuauaaacuuuaccuuuu

SEQ ID NO: 1731943 - RNA, 16 nt, Human
uuauaaacuuuuuucu

SEQ ID NO: 1731944 - RNA, 12 nt, Human
uuauaaacuuuu

SEQ ID NO: 1731945 - RNA, 22 nt, Human
uuauaaacuuuuuucuuacugu

SEQ ID NO: 1731946 - RNA, 20 nt, Human
auacaguuacucagaauucu

SEQ ID NO: 1731947 - RNA, 23 nt, Human
auacaggaaaagcugcugacagu

SEQ ID NO: 1731948 - RNA, 23 nt, Human
auacagauagauauaugcucugc

SEQ ID NO: 1731949 - RNA, 18 nt, Human
auacaguuacucagaauu

SEQ ID NO: 1731950 - RNA, 21 nt, Human
auacaggaugaugacuaugga

SEQ ID NO: 1731951 - RNA, 13 nt, Human
auacuaaccagca

SEQ ID NO: 1731952 - RNA, 19 nt, Human
auacuaaccagcagaaaug

SEQ ID NO: 1731953 - RNA, 20 nt, Human
auacuaaccagcagaaaugc

SEQ ID NO: 1731954 - RNA, 13 nt, Human
auacguacacauu

SEQ ID NO: 1731955 - RNA, 13 nt, Human
auacgauaaauaa

SEQ ID NO: 1731956 - RNA, 14 nt, Human
auacguacacauuu

SEQ ID NO: 1731957 - RNA, 15 nt, Human
auacguacacauuuu

SEQ ID NO: 1731958 - RNA, 16 nt, Human
auacguacacauuuua

SEQ ID NO: 1731959 - RNA, 17 nt, Human
auaccacuuuuguucuu

SEQ ID NO: 1731960 - RNA, 18 nt, Human
auaccacuuuuguucuug

SEQ ID NO: 1731961 - RNA, 17 nt, Human
auaccagccaguaaaug

SEQ ID NO: 1731962 - RNA, 14 nt, Human
auaccuuuuuuaga

SEQ ID NO: 1731963 - RNA, 19 nt, Human
uuauggcuuuugugcauua

SEQ ID NO: 1731964 - RNA, 13 nt, Human
uuaugggcugggu

SEQ ID NO: 1731965 - RNA, 22 nt, Human
uuaugggcuggguucuacccag

SEQ ID NO: 1731966 - RNA, 22 nt, Human
uuaugugccagauuuaugcaua

SEQ ID NO: 1731967 - RNA, 15 nt, Human
uuaugugaaacaugu

SEQ ID NO: 1731968 - RNA, 13 nt, Human
uuaugugaaacau

SEQ ID NO: 1731969 - RNA, 11 nt, Human
uuaugacucca

SEQ ID NO: 1731970 - RNA, 22 nt, Human
uuaugauagcaaauggccucau

SEQ ID NO: 1731971 - RNA, 20 nt, Human
uuaugauacuugaaaauuaa

SEQ ID NO: 1731972 - RNA, 20 nt, Human
uuaugaagcuuuuaugugaa

SEQ ID NO: 1731973 - RNA, 17 nt, Human
uuaucacccagaagaaa

SEQ ID NO: 1731974 - RNA, 18 nt, Human
uuaucacccagaagaaaa

SEQ ID NO: 1731975 - RNA, 19 nt, Human
uuaucacccagaagaaaau

SEQ ID NO: 1731976 - RNA, 21 nt, Human
uuaucacccagaagaaaauag

SEQ ID NO: 1731977 - RNA, 16 nt, Human
auacucauuaggaugg

SEQ ID NO: 1731978 - RNA, 11 nt, Human
auacucccauc

SEQ ID NO: 1731979 - RNA, 14 nt, Human
auacucccaucugu

SEQ ID NO: 1731980 - RNA, 17 nt, Human
auacuccuccaagguua

SEQ ID NO: 1731981 - RNA, 16 nt, Human
auacucugcuuagaau

SEQ ID NO: 1731982 - RNA, 18 nt, Human
auacucuuauagacaaca

SEQ ID NO: 1731983 - RNA, 12 nt, Human
uuauucauaauu

SEQ ID NO: 1731984 - RNA, 20 nt, Human
uuauucacuuuuauuuagca

SEQ ID NO: 1731985 - RNA, 13 nt, Human
uuauuaugcauga

SEQ ID NO: 1731986 - RNA, 14 nt, Human
uuauuauauuuaca

SEQ ID NO: 1731987 - RNA, 15 nt, Human
uuauuauauuuacaa

SEQ ID NO: 1731988 - RNA, 12 nt, Human
uuauuaugcaug

SEQ ID NO: 1731989 - RNA, 16 nt, Human
auagacaauuuauuau

SEQ ID NO: 1731990 - RNA, 22 nt, Human
auagacaauuuauuauggcaca

SEQ ID NO: 1731991 - RNA, 23 nt, Human
auagacaauuuauuauggcacau

SEQ ID NO: 1731992 - RNA, 15 nt, Human
auagacagcaugaga

SEQ ID NO: 1731993 - RNA, 17 nt, Human
auagaauuaacacauga

SEQ ID NO: 1731994 - RNA, 22 nt, Human
auagaauaaaauuuuuaaucuu

SEQ ID NO: 1731995 - RNA, 19 nt, Human
auagaauaaaauuuuuaau

SEQ ID NO: 1731996 - RNA, 14 nt, Human
auagaauaaaauuu

SEQ ID NO: 1731997 - RNA, 13 nt, Human
auagaaguaaaaa

SEQ ID NO: 1731998 - RNA, 22 nt, Human
auagaaaugcugguuuuucagu

SEQ ID NO: 1731999 - RNA, 19 nt, Human
auagaaaugcugguuuuuc

SEQ ID NO: 1732000 - RNA, 13 nt, Human
auagaaaugcugg

SEQ ID NO: 1732001 - RNA, 18 nt, Human
auagacccacaagaggca

SEQ ID NO: 1732002 - RNA, 14 nt, Human
auagagagagacca

SEQ ID NO: 1732003 - RNA, 18 nt, Human
auagauaggucagugcaa

SEQ ID NO: 1732004 - RNA, 17 nt, Human
agugcagugagccgaga

SEQ ID NO: 1732005 - RNA, 16 nt, Human
agugcaugcugucccu

SEQ ID NO: 1732006 - RNA, 14 nt, Human
agugccaaaaacaa

SEQ ID NO: 1732007 - RNA, 13 nt, Human
agugaggcucugc

SEQ ID NO: 1732008 - RNA, 12 nt, Human
agugaggcucug

SEQ ID NO: 1732009 - RNA, 16 nt, Human
agugaggaugaaaaaa

SEQ ID NO: 1732010 - RNA, 21 nt, Human
ugugcugcccugcccaccugg

SEQ ID NO: 1732011 - RNA, 20 nt, Human
ugugcugcccugcccaccug

SEQ ID NO: 1732012 - RNA, 19 nt, Human
ugugcugcccugcccaccu

SEQ ID NO: 1732013 - RNA, 18 nt, Human
ugugcugcccugcccacc

SEQ ID NO: 1732014 - RNA, 19 nt, Human
uguggauuuaacagaaaug

SEQ ID NO: 1732015 - RNA, 20 nt, Human
uguggauuuaacagaaaugu

SEQ ID NO: 1732016 - RNA, 23 nt, Human
agugagcugguuuuuagcggaga

SEQ ID NO: 1732017 - RNA, 22 nt, Human
uguggauuuaacagaaauguac

SEQ ID NO: 1732018 - RNA, 14 nt, Human
uguggaugauaaaa

SEQ ID NO: 1732019 - RNA, 21 nt, Human
uguggaucaaauccagccugc

SEQ ID NO: 1732020 - RNA, 12 nt, Human
ugugcugcccug

SEQ ID NO: 1732021 - RNA, 19 nt, Human
ugugcugagucugaaggcu

SEQ ID NO: 1732022 - RNA, 18 nt, Human
ugugcugagucugaaggc

SEQ ID NO: 1732023 - RNA, 12 nt, Human
ugugcucugauc

SEQ ID NO: 1732024 - RNA, 21 nt, Human
ugugcucaggagcccugggag

SEQ ID NO: 1732025 - RNA, 18 nt, Human
agucuuucacauuuaaau

SEQ ID NO: 1732026 - RNA, 21 nt, Human
agugaacaaauuuacagagac

SEQ ID NO: 1732027 - RNA, 16 nt, Human
agucuuucacauuuaa

SEQ ID NO: 1732028 - RNA, 22 nt, Human
agugaacaaauuuacagagaca

SEQ ID NO: 1732029 - RNA, 23 nt, Human
agugaacaaauuuacagagacag

SEQ ID NO: 1732030 - RNA, 16 nt, Human
agugaacuugggccac

SEQ ID NO: 1732031 - RNA, 21 nt, Human
agugacugauggcuaauguac

SEQ ID NO: 1732032 - RNA, 12 nt, Human
agugagcugguu

SEQ ID NO: 1732033 - RNA, 19 nt, Human
ugugaugagaggaaaucac

SEQ ID NO: 1732034 - RNA, 22 nt, Human
ugugaugaugaaaugaggucag

SEQ ID NO: 1732035 - RNA, 22 nt, Human
agugagcacuaaggugugcucu

SEQ ID NO: 1732036 - RNA, 14 nt, Human
agugagcacuaagg

SEQ ID NO: 1732037 - RNA, 23 nt, Human
agucuuagauguauauauuuccu

SEQ ID NO: 1732038 - RNA, 16 nt, Human
agucuuagauguauau

SEQ ID NO: 1732039 - RNA, 14 nt, Human
agucuuagauguau

SEQ ID NO: 1732040 - RNA, 13 nt, Human
agucuuagaugua

SEQ ID NO: 1732041 - RNA, 12 nt, Human
agucugaaggcu

SEQ ID NO: 1732042 - RNA, 17 nt, Human
agucucuugauucauaa

SEQ ID NO: 1732043 - RNA, 16 nt, Human
agucucuugauucaua

SEQ ID NO: 1732044 - RNA, 21 nt, Human
agucucuucuccacuggaugg

SEQ ID NO: 1732045 - RNA, 19 nt, Human
agucucuucuccacuggau

SEQ ID NO: 1732046 - RNA, 19 nt, Human
agucucgcucuguugccca

SEQ ID NO: 1732047 - RNA, 12 nt, Human
ugugaggaagcc

SEQ ID NO: 1732048 - RNA, 11 nt, Human
ugugaggaagc

SEQ ID NO: 1732049 - RNA, 16 nt, Human
ugugacugaucucucg

SEQ ID NO: 1732050 - RNA, 19 nt, Human
ugugacuucagcucuguuu

SEQ ID NO: 1732051 - RNA, 18 nt, Human
ugugacuucagcucuguu

SEQ ID NO: 1732052 - RNA, 18 nt, Human
agugguauagaaaugcug

SEQ ID NO: 1732053 - RNA, 14 nt, Human
agugguauagaaau

SEQ ID NO: 1732054 - RNA, 15 nt, Human
agugguauagaaaug

SEQ ID NO: 1732055 - RNA, 16 nt, Human
agugguauagaaaugc

SEQ ID NO: 1732056 - RNA, 20 nt, Human
agugugacugaucucucgug

SEQ ID NO: 1732057 - RNA, 21 nt, Human
agugugccugaagucccagau

SEQ ID NO: 1732058 - RNA, 19 nt, Human
uguuccacaaguuaaauaa

SEQ ID NO: 1732059 - RNA, 22 nt, Human
agugugguguuuccuggcacug

SEQ ID NO: 1732060 - RNA, 17 nt, Human
uguuaugacuccagaau

SEQ ID NO: 1732061 - RNA, 13 nt, Human
uguuaugacucca

SEQ ID NO: 1732062 - RNA, 15 nt, Human
uguucuaagaaguga

SEQ ID NO: 1732063 - RNA, 15 nt, Human
uguugcauagaauaa

SEQ ID NO: 1732064 - RNA, 20 nt, Human
uguugcccaggcuggcgugc

SEQ ID NO: 1732065 - RNA, 23 nt, Human
uguugcccaggcuggcgugcagu

SEQ ID NO: 1732066 - RNA, 19 nt, Human
aguguuguggauuuaacag

SEQ ID NO: 1732067 - RNA, 20 nt, Human
aguguuguggauuuaacaga

SEQ ID NO: 1732068 - RNA, 13 nt, Human
aguuacucagaau

SEQ ID NO: 1732069 - RNA, 23 nt, Human
aguuacuaucaugucaaacguga

SEQ ID NO: 1732070 - RNA, 16 nt, Human
aguguuguggauuuaa

SEQ ID NO: 1732071 - RNA, 19 nt, Human
aguguguguuuuucauaaa

SEQ ID NO: 1732072 - RNA, 18 nt, Human
aguguguguuuuucauaa

SEQ ID NO: 1732073 - RNA, 16 nt, Human
agugcccuccaggaua

SEQ ID NO: 1732074 - RNA, 11 nt, Human
uguguguuuau

SEQ ID NO: 1732075 - RNA, 20 nt, Human
ugugucuugcaauggcagcc

SEQ ID NO: 1732076 - RNA, 23 nt, Human
uguguuaucacccagaagaaaau

SEQ ID NO: 1732077 - RNA, 22 nt, Human
uguguuaucacccagaagaaaa

SEQ ID NO: 1732078 - RNA, 22 nt, Human
uguuaacugagugccuuuuggu

SEQ ID NO: 1732079 - RNA, 16 nt, Human
uguuaacugagugccu

SEQ ID NO: 1732080 - RNA, 19 nt, Human
uguuacauaagauaaaugu

SEQ ID NO: 1732081 - RNA, 18 nt, Human
uguuacacuuuuuggaag

SEQ ID NO: 1732082 - RNA, 18 nt, Human
uguuacaaauuguagaag

SEQ ID NO: 1732083 - RNA, 17 nt, Human
uguuacaaauuguagaa

SEQ ID NO: 1732084 - RNA, 22 nt, Human
uguuaaguugauggugaugaaa

SEQ ID NO: 1732085 - RNA, 13 nt, Human
uguuaauaaaagu

SEQ ID NO: 1732086 - RNA, 18 nt, Human
uguuaauaaaaguacaug

SEQ ID NO: 1732087 - RNA, 19 nt, Human
uguuaauaaaaguacaugu

SEQ ID NO: 1732088 - RNA, 11 nt, Human
aguggcagcug

SEQ ID NO: 1732089 - RNA, 22 nt, Human
agugggcccaaugcacuuuguu

SEQ ID NO: 1732090 - RNA, 14 nt, Human
aguggggaggggcu

SEQ ID NO: 1732091 - RNA, 15 nt, Human
aguggggacagagca

SEQ ID NO: 1732092 - RNA, 17 nt, Human
aguggauggaaggggcu

SEQ ID NO: 1732093 - RNA, 21 nt, Human
uguacauggaauaacauguaa

SEQ ID NO: 1732094 - RNA, 23 nt, Human
aguaaaaacaaagaaauuaugug

SEQ ID NO: 1732095 - RNA, 16 nt, Human
aguaaaaacaaagaaa

SEQ ID NO: 1732096 - RNA, 21 nt, Human
aguacacuguuucaaacuuua

SEQ ID NO: 1732097 - RNA, 23 nt, Human
aguacacuguuucaaacuuuacu

SEQ ID NO: 1732098 - RNA, 22 nt, Human
uguauauauuuccuauauuguu

SEQ ID NO: 1732099 - RNA, 18 nt, Human
uguauauauuuccuauau

SEQ ID NO: 1732100 - RNA, 22 nt, Human
uguagugaaucacguaaagcua

SEQ ID NO: 1732101 - RNA, 17 nt, Human
uguaggguuauaauaau

SEQ ID NO: 1732102 - RNA, 16 nt, Human
uguaggguuauaauaa

SEQ ID NO: 1732103 - RNA, 14 nt, Human
uguacauauaagug

SEQ ID NO: 1732104 - RNA, 16 nt, Human
uguacaugaaaacaca

SEQ ID NO: 1732105 - RNA, 14 nt, Human
uguacaugaaaaca

SEQ ID NO: 1732106 - RNA, 20 nt, Human
uguaauuuuuuuaucgucac

SEQ ID NO: 1732107 - RNA, 15 nt, Human
uguaauuuuguguaa

SEQ ID NO: 1732108 - RNA, 16 nt, Human
uguaauuuuguguaag

SEQ ID NO: 1732109 - RNA, 20 nt, Human
uguaauuuuguguaagaaau

SEQ ID NO: 1732110 - RNA, 19 nt, Human
uguacauaaugcgugcaua

SEQ ID NO: 1732111 - RNA, 20 nt, Human
uguacauaaugcgugcauac

SEQ ID NO: 1732112 - RNA, 20 nt, Human
agguuggcaaaaaggcagga

SEQ ID NO: 1732113 - RNA, 19 nt, Human
agguuucucaaagaaauuu

SEQ ID NO: 1732114 - RNA, 16 nt, Human
agguuucucaaagaaa

SEQ ID NO: 1732115 - RNA, 18 nt, Human
uguaauuaaguacuaugu

SEQ ID NO: 1732116 - RNA, 21 nt, Human
uguaauuaaguacuauguauc

SEQ ID NO: 1732117 - RNA, 19 nt, Human
uguaauuaaguacuaugua

SEQ ID NO: 1732118 - RNA, 23 nt, Human
uguaauuaaguacuauguaucaa

SEQ ID NO: 1732119 - RNA, 14 nt, Human
agguugcagugagc

SEQ ID NO: 1732120 - RNA, 14 nt, Human
agguugaagcacca

SEQ ID NO: 1732121 - RNA, 12 nt, Human
aggugugcucug

SEQ ID NO: 1732122 - RNA, 22 nt, Human
aggugugagucaccaagcccag

SEQ ID NO: 1732123 - RNA, 21 nt, Human
aggugugagucaccaagccca

SEQ ID NO: 1732124 - RNA, 20 nt, Human
aggugucccugcacuugcag

SEQ ID NO: 1732125 - RNA, 16 nt, Human
aggugucccugcacuu

SEQ ID NO: 1732126 - RNA, 12 nt, Human
aggugggaggau

SEQ ID NO: 1732127 - RNA, 16 nt, Human
ugggcugcccuggugc

SEQ ID NO: 1732128 - RNA, 15 nt, Human
ugggcugcccuggug

SEQ ID NO: 1732129 - RNA, 14 nt, Human
ugggcugcccuggu

SEQ ID NO: 1732130 - RNA, 13 nt, Human
ugggcugcccugg

SEQ ID NO: 1732131 - RNA, 23 nt, Human
agucucacuguugcccaggcugg

SEQ ID NO: 1732132 - RNA, 16 nt, Human
aguccucccaucucac

SEQ ID NO: 1732133 - RNA, 14 nt, Human
aguccucccaucuc

SEQ ID NO: 1732134 - RNA, 16 nt, Human
agucccccugccccag

SEQ ID NO: 1732135 - RNA, 22 nt, Human
agucagaaguuucugccgcagc

SEQ ID NO: 1732136 - RNA, 23 nt, Human
ugucccuuacgugaguccuggca

SEQ ID NO: 1732137 - RNA, 19 nt, Human
ugucccuuacgugaguccu

SEQ ID NO: 1732138 - RNA, 14 nt, Human
ugucgccucugcau

SEQ ID NO: 1732139 - RNA, 16 nt, Human
agucccaccuuggcug

SEQ ID NO: 1732140 - RNA, 15 nt, Human
agucccaccuuggcu

SEQ ID NO: 1732141 - RNA, 20 nt, Human
agucccaccuuggcugcagg

SEQ ID NO: 1732142 - RNA, 19 nt, Human
agucccaccuuggcugcag

SEQ ID NO: 1732143 - RNA, 18 nt, Human
agucccaccuuggcugca

SEQ ID NO: 1732144 - RNA, 19 nt, Human
agucccaggcugagccuca

SEQ ID NO: 1732145 - RNA, 18 nt, Human
agucccaggcugagccuc

SEQ ID NO: 1732146 - RNA, 17 nt, Human
agucccaggcugagccu

SEQ ID NO: 1732147 - RNA, 19 nt, Human
aguauucuuauuuaaugaa

SEQ ID NO: 1732148 - RNA, 15 nt, Human
agucaccaagcccag

SEQ ID NO: 1732149 - RNA, 21 nt, Human
aguauuuuccuguugucaaga

SEQ ID NO: 1732150 - RNA, 17 nt, Human
agucaccccggccaccu

SEQ ID NO: 1732151 - RNA, 23 nt, Human
ugucccugcacuugcagacucua

SEQ ID NO: 1732152 - RNA, 22 nt, Human
ugucccugcacuugcagacucu

SEQ ID NO: 1732153 - RNA, 20 nt, Human
ugucccugcacuugcagacu

SEQ ID NO: 1732154 - RNA, 22 nt, Human
uguccaagaagcccaggaaagg

SEQ ID NO: 1732155 - RNA, 18 nt, Human
uguccaagaagcccagga

SEQ ID NO: 1732156 - RNA, 17 nt, Human
uguccaagaagcccagg

SEQ ID NO: 1732157 - RNA, 16 nt, Human
uguccaagaagcccag

SEQ ID NO: 1732158 - RNA, 22 nt, Human
ugucauuugagcagggcucagc

SEQ ID NO: 1732159 - RNA, 21 nt, Human
ugucauuugagcagggcucag

SEQ ID NO: 1732160 - RNA, 20 nt, Human
ugucauuugagcagggcuca

SEQ ID NO: 1732161 - RNA, 20 nt, Human
ugucagguggggcagcuuga

SEQ ID NO: 1732162 - RNA, 18 nt, Human
ugucagguggggcagcuu

SEQ ID NO: 1732163 - RNA, 17 nt, Human
ugucagguggggcagcu

SEQ ID NO: 1732164 - RNA, 15 nt, Human
uguccaagaagccca

SEQ ID NO: 1732165 - RNA, 14 nt, Human
uguccaagaagccc

SEQ ID NO: 1732166 - RNA, 13 nt, Human
agggaaauuucag

SEQ ID NO: 1732167 - RNA, 15 nt, Human
agggacuuggaagcu

SEQ ID NO: 1732168 - RNA, 19 nt, Human
agggacuuggaagcuccgc

SEQ ID NO: 1732169 - RNA, 18 nt, Human
agggacuuggaagcuccg

SEQ ID NO: 1732170 - RNA, 20 nt, Human
agggacuuggaagcuccgcu

SEQ ID NO: 1732171 - RNA, 16 nt, Human
ugggacuacaggugug

SEQ ID NO: 1732172 - RNA, 18 nt, Human
ugggacucaaugcacuga

SEQ ID NO: 1732173 - RNA, 13 nt, Human
ugggacuggccuc

SEQ ID NO: 1732174 - RNA, 15 nt, Human
ugggagaaaugaaaa

SEQ ID NO: 1732175 - RNA, 16 nt, Human
ugggacuggccucugc

SEQ ID NO: 1732176 - RNA, 14 nt, Human
ugggacuggccucu

SEQ ID NO: 1732177 - RNA, 18 nt, Human
ugggacuacaggcaccca

SEQ ID NO: 1732178 - RNA, 18 nt, Human
agggagcaucagugcccu

SEQ ID NO: 1732179 - RNA, 19 nt, Human
ugggaggcugagaugggag

SEQ ID NO: 1732180 - RNA, 23 nt, Human
ugggaggcucuggagcccacugu

SEQ ID NO: 1732181 - RNA, 17 nt, Human
ugggaggcucuggagcc

SEQ ID NO: 1732182 - RNA, 14 nt, Human
ugggaggcucugga

SEQ ID NO: 1732183 - RNA, 21 nt, Human
ugggaggauugcuugagcuca

SEQ ID NO: 1732184 - RNA, 18 nt, Human
ugggaggauugcuugagc

SEQ ID NO: 1732185 - RNA, 22 nt, Human
ugggaggauugcuugagcucag

SEQ ID NO: 1732186 - RNA, 22 nt, Human
ugggagaaccaaaaagaggcua

SEQ ID NO: 1732187 - RNA, 21 nt, Human
ugggagaaccaaaaagaggcu

SEQ ID NO: 1732188 - RNA, 16 nt, Human
ugggagaaaugaaaaa

SEQ ID NO: 1732189 - RNA, 16 nt, Human
ugggauuuggucaaca

SEQ ID NO: 1732190 - RNA, 17 nt, Human
ugggaggucaaggcugc

SEQ ID NO: 1732191 - RNA, 13 nt, Human
ugggcagaaggaa

SEQ ID NO: 1732192 - RNA, 20 nt, Human
ugggcagaaggaagacuuca

SEQ ID NO: 1732193 - RNA, 16 nt, Human
ugggcagaaggaagac

SEQ ID NO: 1732194 - RNA, 23 nt, Human
ugggcagaaggaagacuucaucc

SEQ ID NO: 1732195 - RNA, 15 nt, Human
ugggcucccuuccca

SEQ ID NO: 1732196 - RNA, 14 nt, Human
ugggcucccuuccc

SEQ ID NO: 1732197 - RNA, 18 nt, Human
agggcccagagagggugg

SEQ ID NO: 1732198 - RNA, 14 nt, Human
agggcccagagagg

SEQ ID NO: 1732199 - RNA, 20 nt, Human
agggcuccagacacaugucc

SEQ ID NO: 1732200 - RNA, 16 nt, Human
agggauacccauccca

SEQ ID NO: 1732201 - RNA, 17 nt, Human
agggcacugguggcccg

SEQ ID NO: 1732202 - RNA, 13 nt, Human
agggcccagagag

SEQ ID NO: 1732203 - RNA, 12 nt, Human
agggcccagaga

SEQ ID NO: 1732204 - RNA, 20 nt, Human
agggagugacagaggcagcc

SEQ ID NO: 1732205 - RNA, 20 nt, Human
agggagugaguugauagcac

SEQ ID NO: 1732206 - RNA, 23 nt, Human
agggaguccgaaagggacuugga

SEQ ID NO: 1732207 - RNA, 20 nt, Human
agggaguccgaaagggacuu

SEQ ID NO: 1732208 - RNA, 22 nt, Human
agggagggcuccagacacaugu

SEQ ID NO: 1732209 - RNA, 19 nt, Human
agggagggcuccagacaca

SEQ ID NO: 1732210 - RNA, 13 nt, Human
agggagggcucca

SEQ ID NO: 1732211 - RNA, 12 nt, Human
agggagggcucc

SEQ ID NO: 1732212 - RNA, 15 nt, Human
agggagggccugggc

SEQ ID NO: 1732213 - RNA, 13 nt, Human
agggagggccugg

SEQ ID NO: 1732214 - RNA, 18 nt, Human
ugggaaacaaaaggauaa

SEQ ID NO: 1732215 - RNA, 21 nt, Human
uggcuuuugugcauuaucuag

SEQ ID NO: 1732216 - RNA, 20 nt, Human
uggcuucacggaagagccuu

SEQ ID NO: 1732217 - RNA, 17 nt, Human
uggcuucacggaagagc

SEQ ID NO: 1732218 - RNA, 22 nt, Human
uggcuucacggaagagccuugc

SEQ ID NO: 1732219 - RNA, 16 nt, Human
uggcuuuugugcauua

SEQ ID NO: 1732220 - RNA, 20 nt, Human
ugggaacaccauaggucacc

SEQ ID NO: 1732221 - RNA, 23 nt, Human
uggcugcaaaggguaucaggugc

SEQ ID NO: 1732222 - RNA, 17 nt, Human
uggcugugccucugccu

SEQ ID NO: 1732223 - RNA, 16 nt, Human
uggcugugccucugcc

SEQ ID NO: 1732224 - RNA, 15 nt, Human
uggcugugccucugc

SEQ ID NO: 1732225 - RNA, 14 nt, Human
uggcugugccucug

SEQ ID NO: 1732226 - RNA, 14 nt, Human
uggcuucacggaag

SEQ ID NO: 1732227 - RNA, 23 nt, Human
uggcuguuggcugggggccucag

SEQ ID NO: 1732228 - RNA, 18 nt, Human
uggcuguuggcugggggc

SEQ ID NO: 1732229 - RNA, 16 nt, Human
uggcuguuggcugggg

SEQ ID NO: 1732230 - RNA, 19 nt, Human
uggcugugccucugccugu

SEQ ID NO: 1732231 - RNA, 18 nt, Human
uggcugugccucugccug

SEQ ID NO: 1732232 - RNA, 22 nt, Human
uggcugugccucugccugucuc

SEQ ID NO: 1732233 - RNA, 18 nt, Human
uggcuaagcaaaauguga

SEQ ID NO: 1732234 - RNA, 13 nt, Human
aggcuccugccac

SEQ ID NO: 1732235 - RNA, 23 nt, Human
aggcuccaggagcagccacauuc

SEQ ID NO: 1732236 - RNA, 19 nt, Human
aggcuccaggagcagccac

SEQ ID NO: 1732237 - RNA, 18 nt, Human
aggcuccaggagcagcca

SEQ ID NO: 1732238 - RNA, 17 nt, Human
aggcuccaggagcagcc

SEQ ID NO: 1732239 - RNA, 19 nt, Human
uggcuaauguacugcauau

SEQ ID NO: 1732240 - RNA, 17 nt, Human
uggcuaauguacugcau

SEQ ID NO: 1732241 - RNA, 13 nt, Human
uggcucacgccug

SEQ ID NO: 1732242 - RNA, 21 nt, Human
uggcucacugcaacuucugcc

SEQ ID NO: 1732243 - RNA, 21 nt, Human
aggcuuuuuuaucaugugaaa

SEQ ID NO: 1732244 - RNA, 18 nt, Human
aggcuuuuuuaucaugug

SEQ ID NO: 1732245 - RNA, 15 nt, Human
aggcuuuuuuaucau

SEQ ID NO: 1732246 - RNA, 22 nt, Human
aggcuuagucacugagacagcc

SEQ ID NO: 1732247 - RNA, 23 nt, Human
aggcuuagucacugagacagccc

SEQ ID NO: 1732248 - RNA, 23 nt, Human
aggcuucugguugaugccuguga

SEQ ID NO: 1732249 - RNA, 16 nt, Human
aggcugggagagccuu

SEQ ID NO: 1732250 - RNA, 19 nt, Human
aggcugggagagccuucca

SEQ ID NO: 1732251 - RNA, 21 nt, Human
aggcugggagagccuuccagg

SEQ ID NO: 1732252 - RNA, 20 nt, Human
aggcugggagagccuuccag

SEQ ID NO: 1732253 - RNA, 22 nt, Human
aggcugggagagccuuccaggg

SEQ ID NO: 1732254 - RNA, 23 nt, Human
aggcugggcucccuucccaccuc

SEQ ID NO: 1732255 - RNA, 21 nt, Human
aggcugggcucccuucccacc

SEQ ID NO: 1732256 - RNA, 14 nt, Human
aggcugggcuucag

SEQ ID NO: 1732257 - RNA, 18 nt, Human
aggcugggcucccuuccc

SEQ ID NO: 1732258 - RNA, 14 nt, Human
aggcugggcucccu

SEQ ID NO: 1732259 - RNA, 13 nt, Human
aggcugggcuccc

SEQ ID NO: 1732260 - RNA, 17 nt, Human
aggcugggggaagaagc

SEQ ID NO: 1732261 - RNA, 23 nt, Human
aggcugggcuucaguggcagcug

SEQ ID NO: 1732262 - RNA, 22 nt, Human
aggcugggcuucaguggcagcu

SEQ ID NO: 1732263 - RNA, 21 nt, Human
aggcugggcuucaguggcagc

SEQ ID NO: 1732264 - RNA, 20 nt, Human
aggcugggcuucaguggcag

SEQ ID NO: 1732265 - RNA, 19 nt, Human
aggcugggcuucaguggca

SEQ ID NO: 1732266 - RNA, 18 nt, Human
aggcugggcuucaguggc

SEQ ID NO: 1732267 - RNA, 22 nt, Human
aggcugggggaagaagcucucu

SEQ ID NO: 1732268 - RNA, 10 nt, Human
aggcuggguc

SEQ ID NO: 1732269 - RNA, 18 nt, Human
aggcugggucgcccugga

SEQ ID NO: 1732270 - RNA, 15 nt, Human
aggcugggucgcccu

SEQ ID NO: 1732271 - RNA, 17 nt, Human
aggcuggguucugaucc

SEQ ID NO: 1732272 - RNA, 14 nt, Human
aggcuggguucuga

SEQ ID NO: 1732273 - RNA, 21 nt, Human
aggcugggucgcccuggacug

SEQ ID NO: 1732274 - RNA, 20 nt, Human
aggcugggucgcccuggacu

SEQ ID NO: 1732275 - RNA, 15 nt, Human
uggacaccggaaaca

SEQ ID NO: 1732276 - RNA, 16 nt, Human
aggcaacuugggaacu

SEQ ID NO: 1732277 - RNA, 14 nt, Human
aggcaagcaccucc

SEQ ID NO: 1732278 - RNA, 14 nt, Human
uggaauuugaaaca

SEQ ID NO: 1732279 - RNA, 22 nt, Human
aggauugcuacuguccuaccca

SEQ ID NO: 1732280 - RNA, 18 nt, Human
aggaugcuuguacauaau

SEQ ID NO: 1732281 - RNA, 12 nt, Human
aggaucucuuga

SEQ ID NO: 1732282 - RNA, 15 nt, Human
aggaugcuuguacau

SEQ ID NO: 1732283 - RNA, 16 nt, Human
aggaugcuuguacaua

SEQ ID NO: 1732284 - RNA, 21 nt, Human
aggauccugagccagauuuca

SEQ ID NO: 1732285 - RNA, 12 nt, Human
aggaucagucug

SEQ ID NO: 1732286 - RNA, 12 nt, Human
ugcugcccugcc

SEQ ID NO: 1732287 - RNA, 10 nt, Human
ugcugcccug

SEQ ID NO: 1732288 - RNA, 12 nt, Human
uggaacacucug

SEQ ID NO: 1732289 - RNA, 14 nt, Human
uggaacacucugag

SEQ ID NO: 1732290 - RNA, 13 nt, Human
uggaagcuccgcu

SEQ ID NO: 1732291 - RNA, 20 nt, Human
uggaaguacuauaauuuacc

SEQ ID NO: 1732292 - RNA, 17 nt, Human
uggaaguaguggagccc

SEQ ID NO: 1732293 - RNA, 14 nt, Human
uggaaguaguggag

SEQ ID NO: 1732294 - RNA, 21 nt, Human
aggaguuugagaccaaccugg

SEQ ID NO: 1732295 - RNA, 19 nt, Human
aggaguuucguuuucaaaa

SEQ ID NO: 1732296 - RNA, 15 nt, Human
aggaggccagccuug

SEQ ID NO: 1732297 - RNA, 14 nt, Human
uggaagugcuaauu

SEQ ID NO: 1732298 - RNA, 18 nt, Human
uggaagugaaaacuuugu

SEQ ID NO: 1732299 - RNA, 19 nt, Human
uggaagugaaaacuuugua

SEQ ID NO: 1732300 - RNA, 16 nt, Human
aggcaaugcuggcugu

SEQ ID NO: 1732301 - RNA, 15 nt, Human
aggcaaugcuggcug

SEQ ID NO: 1732302 - RNA, 23 nt, Human
uggaggaaaaccaagccguggcu

SEQ ID NO: 1732303 - RNA, 21 nt, Human
uggaggaaaaccaagccgugg

SEQ ID NO: 1732304 - RNA, 24 nt, Human
uggacuuuguuaguuucuccaagc

SEQ ID NO: 1732305 - RNA, 16 nt, Human
uggagcccacuguacu

SEQ ID NO: 1732306 - RNA, 23 nt, Human
uggagcccacuguacuugcucuu

SEQ ID NO: 1732307 - RNA, 19 nt, Human
uggagcccacuguacuugc

SEQ ID NO: 1732308 - RNA, 11 nt, Human
uggacuuuguu

SEQ ID NO: 1732309 - RNA, 22 nt, Human
uggacuuuguuaguuucuccaa

SEQ ID NO: 1732310 - RNA, 22 nt, Human
aggcagccccauucugccugcc

SEQ ID NO: 1732311 - RNA, 21 nt, Human
aggcagccccauucugccugc

SEQ ID NO: 1732312 - RNA, 20 nt, Human
aggcagccccauucugccug

SEQ ID NO: 1732313 - RNA, 19 nt, Human
aggcagccccauucugccu

SEQ ID NO: 1732314 - RNA, 15 nt, Human
aggcacccaccauca

SEQ ID NO: 1732315 - RNA, 12 nt, Human
aggcaggauggc

SEQ ID NO: 1732316 - RNA, 20 nt, Human
aggcaggaguuucguuuuca

SEQ ID NO: 1732317 - RNA, 16 nt, Human
aggcagggagggccug

SEQ ID NO: 1732318 - RNA, 21 nt, Human
aggcagggucucacucugucg

SEQ ID NO: 1732319 - RNA, 20 nt, Human
aggcagggucucacucuguc

SEQ ID NO: 1732320 - RNA, 18 nt, Human
aggcagggucucacucug

SEQ ID NO: 1732321 - RNA, 19 nt, Human
aggcagggucucacucugu

SEQ ID NO: 1732322 - RNA, 14 nt, Human
aggcagguccaggg

SEQ ID NO: 1732323 - RNA, 22 nt, Human
aggcagggucucacucugucgc

SEQ ID NO: 1732324 - RNA, 21 nt, Human
aggcaggucuugaacuccugg

SEQ ID NO: 1732325 - RNA, 11 nt, Human
aggcuccacuu

SEQ ID NO: 1732326 - RNA, 17 nt, Human
aggcuccacuuggucug

SEQ ID NO: 1732327 - RNA, 21 nt, Human
aggcuccacuuggucugugag

SEQ ID NO: 1732328 - RNA, 22 nt, Human
aggcuccacuuggucugugaga

SEQ ID NO: 1732329 - RNA, 16 nt, Human
aggcuccaggagcagc

SEQ ID NO: 1732330 - RNA, 14 nt, Human
aggcuccaggagca

SEQ ID NO: 1732331 - RNA, 13 nt, Human
aggcuccaggagc

SEQ ID NO: 1732332 - RNA, 18 nt, Human
aggccuucucugaaggac

SEQ ID NO: 1732333 - RNA, 17 nt, Human
aggccuucucugaagga

SEQ ID NO: 1732334 - RNA, 14 nt, Human
aggcgccccuuccc

SEQ ID NO: 1732335 - RNA, 14 nt, Human
uggcccacugcauc

SEQ ID NO: 1732336 - RNA, 13 nt, Human
uggcccacugcau

SEQ ID NO: 1732337 - RNA, 19 nt, Human
uggcccacgcacuucggga

SEQ ID NO: 1732338 - RNA, 22 nt, Human
uggcaugggaaugaaugucagu

SEQ ID NO: 1732339 - RNA, 12 nt, Human
uggcccugcccu

SEQ ID NO: 1732340 - RNA, 19 nt, Human
uggccucugcacuccccug

SEQ ID NO: 1732341 - RNA, 20 nt, Human
uggccucugcacuccccugc

SEQ ID NO: 1732342 - RNA, 21 nt, Human
uggccucugcugauccuccca

SEQ ID NO: 1732343 - RNA, 13 nt, Human
uggcccugcccug

SEQ ID NO: 1732344 - RNA, 18 nt, Human
aggccagagacacaagcc

SEQ ID NO: 1732345 - RNA, 13 nt, Human
aggccagagacac

SEQ ID NO: 1732346 - RNA, 18 nt, Human
uggcagcucagagagggu

SEQ ID NO: 1732347 - RNA, 16 nt, Human
uggcagcucagagagg

SEQ ID NO: 1732348 - RNA, 15 nt, Human
uggcagcucagagag

SEQ ID NO: 1732349 - RNA, 14 nt, Human
uggcagcucagaga

SEQ ID NO: 1732350 - RNA, 21 nt, Human
uggcagccgugccuucagcuc

SEQ ID NO: 1732351 - RNA, 20 nt, Human
uggcagccgugccuucagcu

SEQ ID NO: 1732352 - RNA, 19 nt, Human
uggcagccgugccuucagc

SEQ ID NO: 1732353 - RNA, 18 nt, Human
uggcagccgugccuucag

SEQ ID NO: 1732354 - RNA, 18 nt, Human
aggccaugggccuccugu

SEQ ID NO: 1732355 - RNA, 23 nt, Human
aggccagagacacaagccuucgg

SEQ ID NO: 1732356 - RNA, 22 nt, Human
uggcagccgugccuucagcucu

SEQ ID NO: 1732357 - RNA, 16 nt, Human
aggcccagagggccug

SEQ ID NO: 1732358 - RNA, 15 nt, Human
aggcccagagggccu

SEQ ID NO: 1732359 - RNA, 20 nt, Human
aggccauuccccgucucugg

SEQ ID NO: 1732360 - RNA, 15 nt, Human
uggcacagggcagug

SEQ ID NO: 1732361 - RNA, 16 nt, Human
uggcacagggcagugg

SEQ ID NO: 1732362 - RNA, 17 nt, Human
uggcaccagcagccugg

SEQ ID NO: 1732363 - RNA, 16 nt, Human
uggcaccagcagccug

SEQ ID NO: 1732364 - RNA, 18 nt, Human
uggcaccagcagccugga

SEQ ID NO: 1732365 - RNA, 17 nt, Human
uggcagccgugccuuca

SEQ ID NO: 1732366 - RNA, 21 nt, Human
aggccccugccacccugggga

SEQ ID NO: 1732367 - RNA, 18 nt, Human
aggccccugccacccugg

SEQ ID NO: 1732368 - RNA, 17 nt, Human
aggccccugccacccug

SEQ ID NO: 1732369 - RNA, 15 nt, Human
aggccccugccaccc

SEQ ID NO: 1732370 - RNA, 13 nt, Human
aggccccugccac

SEQ ID NO: 1732371 - RNA, 20 nt, Human
aggcccagagggccugcaag

SEQ ID NO: 1732372 - RNA, 19 nt, Human
aggcccagagggccugcaa

SEQ ID NO: 1732373 - RNA, 16 nt, Human
aggcccggcuccaggc

SEQ ID NO: 1732374 - RNA, 15 nt, Human
aggcccggcuccagg

SEQ ID NO: 1732375 - RNA, 14 nt, Human
aggcccggcuccag

SEQ ID NO: 1732376 - RNA, 17 nt, Human
aggcccggcuccaggcu

SEQ ID NO: 1732377 - RNA, 12 nt, Human
aggccuggccag

SEQ ID NO: 1732378 - RNA, 13 nt, Human
aggccuggccaga

SEQ ID NO: 1732379 - RNA, 19 nt, Human
aggccuaauucuaugccug

SEQ ID NO: 1732380 - RNA, 22 nt, Human
aggccuaauucuaugccugucu

SEQ ID NO: 1732381 - RNA, 17 nt, Human
ugcugacuguuuucucu

SEQ ID NO: 1732382 - RNA, 18 nt, Human
ugcucugcauguuacaua

SEQ ID NO: 1732383 - RNA, 15 nt, Human
ugcucugcauguuac

SEQ ID NO: 1732384 - RNA, 22 nt, Human
ugcucugaucauccacugugcc

SEQ ID NO: 1732385 - RNA, 19 nt, Human
ugcucugaugaagaggagu

SEQ ID NO: 1732386 - RNA, 18 nt, Human
ugcucugaugaagaggag

SEQ ID NO: 1732387 - RNA, 23 nt, Human
aggaaaggcuccaggagcagcca

SEQ ID NO: 1732388 - RNA, 22 nt, Human
aggaaaggcuccaggagcagcc

SEQ ID NO: 1732389 - RNA, 20 nt, Human
aggaaaggcuccaggagcag

SEQ ID NO: 1732390 - RNA, 18 nt, Human
aggaaaggcuccaggagc

SEQ ID NO: 1732391 - RNA, 22 nt, Human
ugcugagucccaggcugagccu

SEQ ID NO: 1732392 - RNA, 18 nt, Human
ugcugagucccaggcuga

SEQ ID NO: 1732393 - RNA, 15 nt, Human
ugcugagucccaggc

SEQ ID NO: 1732394 - RNA, 24 nt, Human
ugcugacuguuuucucuugagagg

SEQ ID NO: 1732395 - RNA, 21 nt, Human
ugcugacuguuuucucuugag

SEQ ID NO: 1732396 - RNA, 19 nt, Human
aggaauugacccacaagaa

SEQ ID NO: 1732397 - RNA, 23 nt, Human
aggaauccagacccggcugcgug

SEQ ID NO: 1732398 - RNA, 15 nt, Human
aggaagacuuuggaa

SEQ ID NO: 1732399 - RNA, 14 nt, Human
aggaagagaaaaaa

SEQ ID NO: 1732400 - RNA, 22 nt, Human
aggaagcucagggccuggcuca

SEQ ID NO: 1732401 - RNA, 18 nt, Human
aggaagcucagggccugg

SEQ ID NO: 1732402 - RNA, 17 nt, Human
aggaagcucagggccug

SEQ ID NO: 1732403 - RNA, 15 nt, Human
ugcugccauccaggu

SEQ ID NO: 1732404 - RNA, 14 nt, Human
ugcugccauccagg

SEQ ID NO: 1732405 - RNA, 13 nt, Human
ugcugccauccag

SEQ ID NO: 1732406 - RNA, 12 nt, Human
ugcugccaucca

SEQ ID NO: 1732407 - RNA, 22 nt, Human
ugcugccauccagguucagcuu

SEQ ID NO: 1732408 - RNA, 21 nt, Human
ugcugccauccagguucagcu

SEQ ID NO: 1732409 - RNA, 16 nt, Human
ugcugcccagccucca

SEQ ID NO: 1732410 - RNA, 14 nt, Human
ugcugcccagccuc

SEQ ID NO: 1732411 - RNA, 11 nt, Human
ugcugccaucc

SEQ ID NO: 1732412 - RNA, 22 nt, Human
ugcugccacacuucaggcucuu

SEQ ID NO: 1732413 - RNA, 19 nt, Human
ugcugccacacuucaggcu

SEQ ID NO: 1732414 - RNA, 16 nt, Human
ugcugccacacuucag

SEQ ID NO: 1732415 - RNA, 15 nt, Human
ugcugccacacuuca

SEQ ID NO: 1732416 - RNA, 22 nt, Human
aggaauuuuauuuuuuucugaa

SEQ ID NO: 1732417 - RNA, 21 nt, Human
agcuuguaaauagcucaggug

SEQ ID NO: 1732418 - RNA, 20 nt, Human
agcuuguaaauagcucaggu

SEQ ID NO: 1732419 - RNA, 19 nt, Human
agcuuguaaauagcucagg

SEQ ID NO: 1732420 - RNA, 21 nt, Human
ugcggacagccacggccaggc

SEQ ID NO: 1732421 - RNA, 20 nt, Human
ugcggacagccacggccagg

SEQ ID NO: 1732422 - RNA, 15 nt, Human
agcuuaucucagggg

SEQ ID NO: 1732423 - RNA, 14 nt, Human
agcuuaucucaggg

SEQ ID NO: 1732424 - RNA, 12 nt, Human
agcuuaucucag

SEQ ID NO: 1732425 - RNA, 20 nt, Human
agcuuaaaggggcuagagug

SEQ ID NO: 1732426 - RNA, 13 nt, Human
aggaaagaggcuc

SEQ ID NO: 1732427 - RNA, 12 nt, Human
aggaaagaggcu

SEQ ID NO: 1732428 - RNA, 21 nt, Human
ugcuauaacuauguugauaaa

SEQ ID NO: 1732429 - RNA, 19 nt, Human
aggaaagcaaaggagauug

SEQ ID NO: 1732430 - RNA, 17 nt, Human
aggaaagcaaaggagau

SEQ ID NO: 1732431 - RNA, 16 nt, Human
aggaaagaggcucugg

SEQ ID NO: 1732432 - RNA, 19 nt, Human
agcuuugaaaauucagugg

SEQ ID NO: 1732433 - RNA, 18 nt, Human
agcuuugaaaauucagug

SEQ ID NO: 1732434 - RNA, 16 nt, Human
agcuuugaaaauucag

SEQ ID NO: 1732435 - RNA, 12 nt, Human
agcuuugaaaau

SEQ ID NO: 1732436 - RNA, 17 nt, Human
aggaaacccagcucugg

SEQ ID NO: 1732437 - RNA, 16 nt, Human
aggaaacccagcucug

SEQ ID NO: 1732438 - RNA, 15 nt, Human
aggaaacccagcucu

SEQ ID NO: 1732439 - RNA, 20 nt, Human
aggaaacccagcucuggucc

SEQ ID NO: 1732440 - RNA, 18 nt, Human
aggaaacccagcucuggu

SEQ ID NO: 1732441 - RNA, 21 nt, Human
aggaaacccagcucuggucca

SEQ ID NO: 1732442 - RNA, 13 nt, Human
ugcgaaaggauga

SEQ ID NO: 1732443 - RNA, 18 nt, Human
ugcggacagccacggcca

SEQ ID NO: 1732444 - RNA, 19 nt, Human
ugcgaaaggaugaaaguga

SEQ ID NO: 1732445 - RNA, 17 nt, Human
ugccuguucagcuccag

SEQ ID NO: 1732446 - RNA, 16 nt, Human
ugccuguucagcucca

SEQ ID NO: 1732447 - RNA, 15 nt, Human
ugccuguucagcucc

SEQ ID NO: 1732448 - RNA, 17 nt, Human
ugccuuagaaccuuucu

SEQ ID NO: 1732449 - RNA, 14 nt, Human
ugccuuagaaccuu

SEQ ID NO: 1732450 - RNA, 21 nt, Human
ugccuuagaaccuuucuuaca

SEQ ID NO: 1732451 - RNA, 20 nt, Human
agcuggggccaggcuggguc

SEQ ID NO: 1732452 - RNA, 10 nt, Human
agcugccugu

SEQ ID NO: 1732453 - RNA, 17 nt, Human
agcuggagaaauauggu

SEQ ID NO: 1732454 - RNA, 19 nt, Human
agcugccugggaucccuca

SEQ ID NO: 1732455 - RNA, 13 nt, Human
agcugccugggau

SEQ ID NO: 1732456 - RNA, 21 nt, Human
agcugccugggaucccucauc

SEQ ID NO: 1732457 - RNA, 22 nt, Human
ugccucugacacacagcucugu

SEQ ID NO: 1732458 - RNA, 21 nt, Human
ugccucucugcaggucccuaa

SEQ ID NO: 1732459 - RNA, 23 nt, Human
agcugggaugauuggagggggga

SEQ ID NO: 1732460 - RNA, 21 nt, Human
agcugggauuacaggcuccug

SEQ ID NO: 1732461 - RNA, 18 nt, Human
agcugggauuacaggcuc

SEQ ID NO: 1732462 - RNA, 22 nt, Human
agcugggaucacauguggacuu

SEQ ID NO: 1732463 - RNA, 19 nt, Human
agcugggacuacaggugug

SEQ ID NO: 1732464 - RNA, 17 nt, Human
agcugggacuacaggug

SEQ ID NO: 1732465 - RNA, 14 nt, Human
agcugggcagguug

SEQ ID NO: 1732466 - RNA, 23 nt, Human
agcugggauuacaggcuccugcc

SEQ ID NO: 1732467 - RNA, 22 nt, Human
agcugggauuacaggcuccugc

SEQ ID NO: 1732468 - RNA, 17 nt, Human
agcuggggccaggcugg

SEQ ID NO: 1732469 - RNA, 14 nt, Human
agcucuguccuggg

SEQ ID NO: 1732470 - RNA, 12 nt, Human
agcucuguccug

SEQ ID NO: 1732471 - RNA, 18 nt, Human
agcucuucuccaggcugu

SEQ ID NO: 1732472 - RNA, 22 nt, Human
agcugcacccucaggcaggugg

SEQ ID NO: 1732473 - RNA, 20 nt, Human
agcugcacccucaggcaggu

SEQ ID NO: 1732474 - RNA, 19 nt, Human
agcugcacccucaggcagg

SEQ ID NO: 1732475 - RNA, 18 nt, Human
agcugcacccucaggcag

SEQ ID NO: 1732476 - RNA, 17 nt, Human
agcugcacccucaggca

SEQ ID NO: 1732477 - RNA, 13 nt, Human
agcugcacccuca

SEQ ID NO: 1732478 - RNA, 12 nt, Human
agcucugcuccu

SEQ ID NO: 1732479 - RNA, 20 nt, Human
agcucugguccauagagagc

SEQ ID NO: 1732480 - RNA, 22 nt, Human
agcucugcuccucuccccagca

SEQ ID NO: 1732481 - RNA, 16 nt, Human
agcucucuccucccuu

SEQ ID NO: 1732482 - RNA, 20 nt, Human
ugcccuccaagaccuucucc

SEQ ID NO: 1732483 - RNA, 19 nt, Human
ugcccuccaagaccuucuc

SEQ ID NO: 1732484 - RNA, 22 nt, Human
ugcccuccaagaccuucuccuu

SEQ ID NO: 1732485 - RNA, 17 nt, Human
agcucuaucaccaagga

SEQ ID NO: 1732486 - RNA, 22 nt, Human
agcucuaucaccaaggagccaa

SEQ ID NO: 1732487 - RNA, 13 nt, Human
agcugccaccugc

SEQ ID NO: 1732488 - RNA, 14 nt, Human
agcugccagccgag

SEQ ID NO: 1732489 - RNA, 18 nt, Human
agcugcauacaguuugca

SEQ ID NO: 1732490 - RNA, 15 nt, Human
ugcccuuucugggca

SEQ ID NO: 1732491 - RNA, 14 nt, Human
ugccucucucaggc

SEQ ID NO: 1732492 - RNA, 13 nt, Human
ugccucucucagg

SEQ ID NO: 1732493 - RNA, 19 nt, Human
ugccucccaucacccgcua

SEQ ID NO: 1732494 - RNA, 14 nt, Human
ugccucccaucacc

SEQ ID NO: 1732495 - RNA, 13 nt, Human
ugccucccaucac

SEQ ID NO: 1732496 - RNA, 15 nt, Human
ugccucucucaggcc

SEQ ID NO: 1732497 - RNA, 16 nt, Human
ugccucucucaggcca

SEQ ID NO: 1732498 - RNA, 18 nt, Human
ugccucucugcagguccc

SEQ ID NO: 1732499 - RNA, 16 nt, Human
ugccucucugcagguc

SEQ ID NO: 1732500 - RNA, 21 nt, Human
ugccucugacacacagcucug

SEQ ID NO: 1732501 - RNA, 20 nt, Human
ugccucugacacacagcucu

SEQ ID NO: 1732502 - RNA, 20 nt, Human
ugccucucugcaggucccua

SEQ ID NO: 1732503 - RNA, 19 nt, Human
ugccucucugcaggucccu

SEQ ID NO: 1732504 - RNA, 19 nt, Human
ugcauuugaaaauuuugau

SEQ ID NO: 1732505 - RNA, 23 nt, Human
ugcauuugaaaauuuugauguuu

SEQ ID NO: 1732506 - RNA, 13 nt, Human
ugcauuuccugac

SEQ ID NO: 1732507 - RNA, 14 nt, Human
ugcauuuccugaca

SEQ ID NO: 1732508 - RNA, 22 nt, Human
agcgcccaguuggguggaugcc

SEQ ID NO: 1732509 - RNA, 14 nt, Human
agcgcccaguuggg

SEQ ID NO: 1732510 - RNA, 14 nt, Human
agccugcuccagcu

SEQ ID NO: 1732511 - RNA, 20 nt, Human
agcgcccacuagacccacug

SEQ ID NO: 1732512 - RNA, 23 nt, Human
agcgugguggacaugcacagcua

SEQ ID NO: 1732513 - RNA, 17 nt, Human
agcgugagccacugcac

SEQ ID NO: 1732514 - RNA, 16 nt, Human
agcgugagccacugca

SEQ ID NO: 1732515 - RNA, 20 nt, Human
agcgugguggacaugcacag

SEQ ID NO: 1732516 - RNA, 21 nt, Human
ugccauauucuguuggccagu

SEQ ID NO: 1732517 - RNA, 20 nt, Human
ugccauauucuguuggccag

SEQ ID NO: 1732518 - RNA, 15 nt, Human
agcggggacagcucc

SEQ ID NO: 1732519 - RNA, 17 nt, Human
agcggggacagcuccuu

SEQ ID NO: 1732520 - RNA, 16 nt, Human
agcggggacagcuccu

SEQ ID NO: 1732521 - RNA, 15 nt, Human
agcgugagccacugc

SEQ ID NO: 1732522 - RNA, 17 nt, Human
ugccauauucuguuggc

SEQ ID NO: 1732523 - RNA, 16 nt, Human
ugccauauucuguugg

SEQ ID NO: 1732524 - RNA, 15 nt, Human
ugccauauucuguug

SEQ ID NO: 1732525 - RNA, 23 nt, Human
ugccagucaccccggccaccugc

SEQ ID NO: 1732526 - RNA, 22 nt, Human
ugccagucaccccggccaccug

SEQ ID NO: 1732527 - RNA, 17 nt, Human
ugccagucccccugccc

SEQ ID NO: 1732528 - RNA, 20 nt, Human
ugccagucccccugccccag

SEQ ID NO: 1732529 - RNA, 19 nt, Human
ugccagucccccugcccca

SEQ ID NO: 1732530 - RNA, 20 nt, Human
ugccagucaccccggccacc

SEQ ID NO: 1732531 - RNA, 18 nt, Human
ugccagucaccccggcca

SEQ ID NO: 1732532 - RNA, 16 nt, Human
ugccagucaccccggc

SEQ ID NO: 1732533 - RNA, 15 nt, Human
ugccagucaccccgg

SEQ ID NO: 1732534 - RNA, 12 nt, Human
ugccacacuuca

SEQ ID NO: 1732535 - RNA, 23 nt, Human
ugccacugccucuuccucccuca

SEQ ID NO: 1732536 - RNA, 19 nt, Human
agcuauggugucauaggcu

SEQ ID NO: 1732537 - RNA, 19 nt, Human
ugccauguuggccaggcug

SEQ ID NO: 1732538 - RNA, 18 nt, Human
ugccauguuggccaggcu

SEQ ID NO: 1732539 - RNA, 17 nt, Human
ugccauguuggccaggc

SEQ ID NO: 1732540 - RNA, 17 nt, Human
agcucagggccuggcuc

SEQ ID NO: 1732541 - RNA, 16 nt, Human
agcucagggccuggcu

SEQ ID NO: 1732542 - RNA, 15 nt, Human
agcucagggccuggc

SEQ ID NO: 1732543 - RNA, 21 nt, Human
ugccauguuggccaggcuggu

SEQ ID NO: 1732544 - RNA, 20 nt, Human
ugccauguuggccaggcugg

SEQ ID NO: 1732545 - RNA, 18 nt, Human
agcucagggccuggcuca

SEQ ID NO: 1732546 - RNA, 22 nt, Human
ugcccaaccugcucuccucuug

SEQ ID NO: 1732547 - RNA, 18 nt, Human
ugcccaaccugcucuccu

SEQ ID NO: 1732548 - RNA, 24 nt, Human
ugcccaaccugcucuccucuugcc

SEQ ID NO: 1732549 - RNA, 23 nt, Human
ugcccaaccugcucuccucuugc

SEQ ID NO: 1732550 - RNA, 11 nt, Human
ugcccaggccc

SEQ ID NO: 1732551 - RNA, 20 nt, Human
ugcccaggcaggucuugaac

SEQ ID NO: 1732552 - RNA, 17 nt, Human
ugcccaggcaggucuug

SEQ ID NO: 1732553 - RNA, 16 nt, Human
ugcccaggcaggucuu

SEQ ID NO: 1732554 - RNA, 15 nt, Human
ugcccaggcaggucu

SEQ ID NO: 1732555 - RNA, 14 nt, Human
ugcccacaggauca

SEQ ID NO: 1732556 - RNA, 22 nt, Human
ugcccaggccccugccacccug

SEQ ID NO: 1732557 - RNA, 20 nt, Human
ugcccaggccccugccaccc

SEQ ID NO: 1732558 - RNA, 14 nt, Human
ugcccaggccccug

SEQ ID NO: 1732559 - RNA, 16 nt, Human
ugcccacaggaucagu

SEQ ID NO: 1732560 - RNA, 12 nt, Human
ugcccaggcccc

SEQ ID NO: 1732561 - RNA, 17 nt, Human
ugcccaggccugccugu

SEQ ID NO: 1732562 - RNA, 15 nt, Human
ugcccaggccugccu

SEQ ID NO: 1732563 - RNA, 12 nt, Human
ugccccccagcc

SEQ ID NO: 1732564 - RNA, 19 nt, Human
ugccccucaacucuccucc

SEQ ID NO: 1732565 - RNA, 18 nt, Human
ugccccgucccccucugg

SEQ ID NO: 1732566 - RNA, 16 nt, Human
ugccccgucccccucu

SEQ ID NO: 1732567 - RNA, 20 nt, Human
ugcagacucuacagaggcca

SEQ ID NO: 1732568 - RNA, 19 nt, Human
ugcagacucuacagaggcc

SEQ ID NO: 1732569 - RNA, 15 nt, Human
ugcacuccccugcug

SEQ ID NO: 1732570 - RNA, 22 nt, Human
ugcagacucuacagaggccaug

SEQ ID NO: 1732571 - RNA, 14 nt, Human
agcccuucauuugg

SEQ ID NO: 1732572 - RNA, 13 nt, Human
agcccuucauuug

SEQ ID NO: 1732573 - RNA, 23 nt, Human
agcccuuccaugucgccucugca

SEQ ID NO: 1732574 - RNA, 22 nt, Human
agcccuuccaugucgccucugc

SEQ ID NO: 1732575 - RNA, 19 nt, Human
agcccuuccaugucgccuc

SEQ ID NO: 1732576 - RNA, 23 nt, Human
agccguuuguuccccaagacauu

SEQ ID NO: 1732577 - RNA, 15 nt, Human
agccucaaccuccug

SEQ ID NO: 1732578 - RNA, 20 nt, Human
agccucaaaacaaaggccua

SEQ ID NO: 1732579 - RNA, 18 nt, Human
agccucaaaacaaaggcc

SEQ ID NO: 1732580 - RNA, 17 nt, Human
agccuaggugacagagu

SEQ ID NO: 1732581 - RNA, 15 nt, Human
agccuaggugacaga

SEQ ID NO: 1732582 - RNA, 13 nt, Human
ugcacuccccugc

SEQ ID NO: 1732583 - RNA, 12 nt, Human
ugcacuccccug

SEQ ID NO: 1732584 - RNA, 22 nt, Human
ugcacuauagccuaggugacag

SEQ ID NO: 1732585 - RNA, 15 nt, Human
ugcaccacugcacuc

SEQ ID NO: 1732586 - RNA, 17 nt, Human
ugcacguauuuuaauag

SEQ ID NO: 1732587 - RNA, 14 nt, Human
ugcaccacugcacu

SEQ ID NO: 1732588 - RNA, 23 nt, Human
ugcacaagcuccaagcucccagg

SEQ ID NO: 1732589 - RNA, 22 nt, Human
ugcacaagcuccaagcucccag

SEQ ID NO: 1732590 - RNA, 20 nt, Human
ugcacaagcuccaagcuccc

SEQ ID NO: 1732591 - RNA, 18 nt, Human
ugcacaagcuccaagcuc

SEQ ID NO: 1732592 - RNA, 16 nt, Human
ugcacaagcuccaagc

SEQ ID NO: 1732593 - RNA, 15 nt, Human
ugcacaagcuccaag

SEQ ID NO: 1732594 - RNA, 15 nt, Human
ugcacacaccagagc

SEQ ID NO: 1732595 - RNA, 14 nt, Human
ugcacaagcugcac

SEQ ID NO: 1732596 - RNA, 22 nt, Human
ugcauaccacuuuuguucuugg

SEQ ID NO: 1732597 - RNA, 15 nt, Human
ugcaugcugucccuu

SEQ ID NO: 1732598 - RNA, 14 nt, Human
ugcaugcugucccu

SEQ ID NO: 1732599 - RNA, 13 nt, Human
ugcaugcuguccc

SEQ ID NO: 1732600 - RNA, 21 nt, Human
ugcaugaggcuaguguggugu

SEQ ID NO: 1732601 - RNA, 22 nt, Human
ugcaugaaguaauaugcacaca

SEQ ID NO: 1732602 - RNA, 20 nt, Human
ugcaugaaguaauaugcaca

SEQ ID NO: 1732603 - RNA, 19 nt, Human
agccugaucaccugcccug

SEQ ID NO: 1732604 - RNA, 16 nt, Human
ugcaugcugucccuua

SEQ ID NO: 1732605 - RNA, 18 nt, Human
agccugaucaccugcccu

SEQ ID NO: 1732606 - RNA, 23 nt, Human
agccugcaguuauuaacacuaac

SEQ ID NO: 1732607 - RNA, 19 nt, Human
agccugccucuucucuacu

SEQ ID NO: 1732608 - RNA, 16 nt, Human
agccugccucuucucu

SEQ ID NO: 1732609 - RNA, 12 nt, Human
agccugcccucc

SEQ ID NO: 1732610 - RNA, 19 nt, Human
agccugagcgacagugaga

SEQ ID NO: 1732611 - RNA, 19 nt, Human
ugcagccucaaccuccugg

SEQ ID NO: 1732612 - RNA, 18 nt, Human
ugcagccucaaccuccug

SEQ ID NO: 1732613 - RNA, 20 nt, Human
ugcagccucaaccuccuggg

SEQ ID NO: 1732614 - RNA, 18 nt, Human
agccugagcgacagugag

SEQ ID NO: 1732615 - RNA, 19 nt, Human
agccucaaccuccugggcu

SEQ ID NO: 1732616 - RNA, 15 nt, Human
agccucagcauccug

SEQ ID NO: 1732617 - RNA, 16 nt, Human
agccucagcauccugg

SEQ ID NO: 1732618 - RNA, 14 nt, Human
agccucagcauccu

SEQ ID NO: 1732619 - RNA, 13 nt, Human
agccucagcaucc

SEQ ID NO: 1732620 - RNA, 18 nt, Human
agccucaaccuccugggc

SEQ ID NO: 1732621 - RNA, 17 nt, Human
agccucaaccuccuggg

SEQ ID NO: 1732622 - RNA, 14 nt, Human
ugcagugagccgag

SEQ ID NO: 1732623 - RNA, 17 nt, Human
ugcaggucccuaauaaa

SEQ ID NO: 1732624 - RNA, 21 nt, Human
ugcaggucccuaauaaagcug

SEQ ID NO: 1732625 - RNA, 20 nt, Human
ugcaggucccuaauaaagcu

SEQ ID NO: 1732626 - RNA, 19 nt, Human
ugcaggucccuaauaaagc

SEQ ID NO: 1732627 - RNA, 18 nt, Human
ugcaggucccuaauaaag

SEQ ID NO: 1732628 - RNA, 19 nt, Human
ugcagugagccgagauugu

SEQ ID NO: 1732629 - RNA, 12 nt, Human
ugcaguuuuccu

SEQ ID NO: 1732630 - RNA, 11 nt, Human
ugcauaaaaug

SEQ ID NO: 1732631 - RNA, 15 nt, Human
ugcauaauggucaga

SEQ ID NO: 1732632 - RNA, 16 nt, Human
agaagcggcuggcagc

SEQ ID NO: 1732633 - RNA, 15 nt, Human
agaagcggcuggcag

SEQ ID NO: 1732634 - RNA, 18 nt, Human
agaagcuaagguuuagau

SEQ ID NO: 1732635 - RNA, 16 nt, Human
ucuggcagcucagaga

SEQ ID NO: 1732636 - RNA, 15 nt, Human
ucuggcagcucagag

SEQ ID NO: 1732637 - RNA, 14 nt, Human
ucuggcagcucaga

SEQ ID NO: 1732638 - RNA, 18 nt, Human
ucuggauuauauuaugaa

SEQ ID NO: 1732639 - RNA, 12 nt, Human
ucuggauuauau

SEQ ID NO: 1732640 - RNA, 18 nt, Human
ucugcccuccaagaccuu

SEQ ID NO: 1732641 - RNA, 14 nt, Human
ucugcccuccaaga

SEQ ID NO: 1732642 - RNA, 16 nt, Human
ucugcucacauaucug

SEQ ID NO: 1732643 - RNA, 17 nt, Human
ucugcucacauaucugu

SEQ ID NO: 1732644 - RNA, 21 nt, Human
agaacucaugacggaagaguu

SEQ ID NO: 1732645 - RNA, 14 nt, Human
agaacucccuuuca

SEQ ID NO: 1732646 - RNA, 15 nt, Human
agaacucccuuucaa

SEQ ID NO: 1732647 - RNA, 12 nt, Human
ucugcagagcag

SEQ ID NO: 1732648 - RNA, 11 nt, Human
agaaauguguu

SEQ ID NO: 1732649 - RNA, 17 nt, Human
agaaauguacagcaagg

SEQ ID NO: 1732650 - RNA, 16 nt, Human
agaaauguacagcaag

SEQ ID NO: 1732651 - RNA, 15 nt, Human
ucugcagaaacagaa

SEQ ID NO: 1732652 - RNA, 19 nt, Human
ucugacccugcuucaaaua

SEQ ID NO: 1732653 - RNA, 21 nt, Human
ucugauucccaagcucugcuc

SEQ ID NO: 1732654 - RNA, 20 nt, Human
ucugauucccaagcucugcu

SEQ ID NO: 1732655 - RNA, 19 nt, Human
ucugauucccaagcucugc

SEQ ID NO: 1732656 - RNA, 22 nt, Human
ucucuuuaaugucacaggcagg

SEQ ID NO: 1732657 - RNA, 17 nt, Human
ucucuugagccugggag

SEQ ID NO: 1732658 - RNA, 15 nt, Human
ucucuugagccuggg

SEQ ID NO: 1732659 - RNA, 14 nt, Human
ucucuugagccugg

SEQ ID NO: 1732660 - RNA, 13 nt, Human
ucucuugagccug

SEQ ID NO: 1732661 - RNA, 17 nt, Human
agaaaaaugagccuggc

SEQ ID NO: 1732662 - RNA, 19 nt, Human
agaaaaauaugaccacacu

SEQ ID NO: 1732663 - RNA, 13 nt, Human
agaaacuggaacu

SEQ ID NO: 1732664 - RNA, 15 nt, Human
agaaacuggaacucu

SEQ ID NO: 1732665 - RNA, 15 nt, Human
agaaagaagaugaau

SEQ ID NO: 1732666 - RNA, 13 nt, Human
ucucuggccuucg

SEQ ID NO: 1732667 - RNA, 16 nt, Human
ucucuggccuucggcc

SEQ ID NO: 1732668 - RNA, 17 nt, Human
ucucuggccuucggccu

SEQ ID NO: 1732669 - RNA, 22 nt, Human
ucucugcccuaaugcgcaggcu

SEQ ID NO: 1732670 - RNA, 11 nt, Human
ucucugcccua

SEQ ID NO: 1732671 - RNA, 14 nt, Human
ucucuugagagggu

SEQ ID NO: 1732672 - RNA, 21 nt, Human
ucucuucuggguuccuuccuc

SEQ ID NO: 1732673 - RNA, 20 nt, Human
ucucuucuggguuccuuccu

SEQ ID NO: 1732674 - RNA, 19 nt, Human
ucucuucuggguuccuucc

SEQ ID NO: 1732675 - RNA, 18 nt, Human
ucucuucuggguuccuuc

SEQ ID NO: 1732676 - RNA, 20 nt, Human
ucuccuucaccuuugucccc

SEQ ID NO: 1732677 - RNA, 14 nt, Human
ucucuccagccccu

SEQ ID NO: 1732678 - RNA, 13 nt, Human
ucucuccagcccc

SEQ ID NO: 1732679 - RNA, 15 nt, Human
ucucuccagccccug

SEQ ID NO: 1732680 - RNA, 16 nt, Human
ucucuccagccccugg

SEQ ID NO: 1732681 - RNA, 20 nt, Human
ucucuccuguaccucuugag

SEQ ID NO: 1732682 - RNA, 22 nt, Human
ucucuccuguaccucuugagcc

SEQ ID NO: 1732683 - RNA, 18 nt, Human
ucucccuuggauuguccc

SEQ ID NO: 1732684 - RNA, 11 nt, Human
ucucccuugga

SEQ ID NO: 1732685 - RNA, 18 nt, Human
ucucccaaagugcuggga

SEQ ID NO: 1732686 - RNA, 14 nt, Human
ucuccucugcugcu

SEQ ID NO: 1732687 - RNA, 13 nt, Human
ucuccucugcugc

SEQ ID NO: 1732688 - RNA, 21 nt, Human
acuuguugauuaauggaaaug

SEQ ID NO: 1732689 - RNA, 19 nt, Human
acuuguugauuaauggaaa

SEQ ID NO: 1732690 - RNA, 21 nt, Human
ucucccuuggauuguccccga

SEQ ID NO: 1732691 - RNA, 19 nt, Human
ucucccuuggauugucccc

SEQ ID NO: 1732692 - RNA, 12 nt, Human
ucuccucugcug

SEQ ID NO: 1732693 - RNA, 22 nt, Human
acuuuuuuuuuuuaagaguaaa

SEQ ID NO: 1732694 - RNA, 15 nt, Human
acuuuuuuuuaaguu

SEQ ID NO: 1732695 - RNA, 14 nt, Human
acuuuuggcauuuu

SEQ ID NO: 1732696 - RNA, 18 nt, Human
acuuuaccuuuuuuauac

SEQ ID NO: 1732697 - RNA, 19 nt, Human
acuuuaccuuuuuuauaca

SEQ ID NO: 1732698 - RNA, 22 nt, Human
acuuuaccuuuuuuauacauaa

SEQ ID NO: 1732699 - RNA, 23 nt, Human
acuuuaccuuuuuuauacauaaa

SEQ ID NO: 1732700 - RNA, 19 nt, Human
acuuugaccucugcagcaa

SEQ ID NO: 1732701 - RNA, 23 nt, Human
acuuugaccucugcagcaauaaa

SEQ ID NO: 1732702 - RNA, 14 nt, Human
acuuuggaaagacu

SEQ ID NO: 1732703 - RNA, 13 nt, Human
acuuuggaaagac

SEQ ID NO: 1732704 - RNA, 19 nt, Human
acuuugaggguguauauuu

SEQ ID NO: 1732705 - RNA, 17 nt, Human
acuuuggaaagacuuuu

SEQ ID NO: 1732706 - RNA, 23 nt, Human
acuuuggaaagacuuuuccaacc

SEQ ID NO: 1732707 - RNA, 22 nt, Human
ucuuccaggcugggagagccuu

SEQ ID NO: 1732708 - RNA, 17 nt, Human
ucuucaaaaugagcccu

SEQ ID NO: 1732709 - RNA, 14 nt, Human
ucuuaugggcuggg

SEQ ID NO: 1732710 - RNA, 16 nt, Human
ucuuaugggcuggguu

SEQ ID NO: 1732711 - RNA, 15 nt, Human
ucuuaugggcugggu

SEQ ID NO: 1732712 - RNA, 22 nt, Human
ucuuauugcccacgcuggagug

SEQ ID NO: 1732713 - RNA, 18 nt, Human
ucuuauugcccacgcugg

SEQ ID NO: 1732714 - RNA, 18 nt, Human
ucuuaugggcuggguucu

SEQ ID NO: 1732715 - RNA, 14 nt, Human
ucuuauugcccacg

SEQ ID NO: 1732716 - RNA, 23 nt, Human
agacaggcaagcaccuccugccu

SEQ ID NO: 1732717 - RNA, 16 nt, Human
agacaggaccagggau

SEQ ID NO: 1732718 - RNA, 15 nt, Human
agacaggaccaggga

SEQ ID NO: 1732719 - RNA, 21 nt, Human
agacaggguuuugccauguug

SEQ ID NO: 1732720 - RNA, 19 nt, Human
agacaggguuucaccaugu

SEQ ID NO: 1732721 - RNA, 17 nt, Human
agacagucccugccaau

SEQ ID NO: 1732722 - RNA, 16 nt, Human
agacagucccugccaa

SEQ ID NO: 1732723 - RNA, 15 nt, Human
agacagucccugcca

SEQ ID NO: 1732724 - RNA, 19 nt, Human
agacagucccugccaaugg

SEQ ID NO: 1732725 - RNA, 22 nt, Human
agacagaaucucgcucugucgc

SEQ ID NO: 1732726 - RNA, 18 nt, Human
agacagaaucucgcucug

SEQ ID NO: 1732727 - RNA, 14 nt, Human
agacagacuagaag

SEQ ID NO: 1732728 - RNA, 20 nt, Human
ucuguuggccagugugacaa

SEQ ID NO: 1732729 - RNA, 19 nt, Human
ucuguuggccagugugaca

SEQ ID NO: 1732730 - RNA, 18 nt, Human
ucuguuggccagugugac

SEQ ID NO: 1732731 - RNA, 21 nt, Human
ucugugaaaggaaagagggag

SEQ ID NO: 1732732 - RNA, 15 nt, Human
ucugugaaaggaaag

SEQ ID NO: 1732733 - RNA, 24 nt, Human
ucuguccaggcacugcugcccagc

SEQ ID NO: 1732734 - RNA, 22 nt, Human
ucugugaaaggaaagagggagg

SEQ ID NO: 1732735 - RNA, 18 nt, Human
agaauuucccaaagcagu

SEQ ID NO: 1732736 - RNA, 17 nt, Human
agaauuucccaaagcag

SEQ ID NO: 1732737 - RNA, 23 nt, Human
agaauuucccaaagcagugcaug

SEQ ID NO: 1732738 - RNA, 15 nt, Human
ucugucauuugagca

SEQ ID NO: 1732739 - RNA, 23 nt, Human
ucugucauuugagcagggcucag

SEQ ID NO: 1732740 - RNA, 20 nt, Human
ucugucauuugagcagggcu

SEQ ID NO: 1732741 - RNA, 16 nt, Human
ucuggguucacugcaa

SEQ ID NO: 1732742 - RNA, 14 nt, Human
ucuggguucacugc

SEQ ID NO: 1732743 - RNA, 11 nt, Human
ucuggggcugu

SEQ ID NO: 1732744 - RNA, 18 nt, Human
ucugguccauagagagca

SEQ ID NO: 1732745 - RNA, 16 nt, Human
ucuggguuccuuccuc

SEQ ID NO: 1732746 - RNA, 15 nt, Human
ucuuuacuucaugga

SEQ ID NO: 1732747 - RNA, 17 nt, Human
agacuccugcaggcagc

SEQ ID NO: 1732748 - RNA, 16 nt, Human
agacuccugcaggcag

SEQ ID NO: 1732749 - RNA, 15 nt, Human
agacuccugcaggca

SEQ ID NO: 1732750 - RNA, 14 nt, Human
agacuccugcaggc

SEQ ID NO: 1732751 - RNA, 16 nt, Human
ucuuuccugaggcugg

SEQ ID NO: 1732752 - RNA, 15 nt, Human
ucuuuccugaggcug

SEQ ID NO: 1732753 - RNA, 14 nt, Human
ucuuuccugaggcu

SEQ ID NO: 1732754 - RNA, 13 nt, Human
ucuuuccugaggc

SEQ ID NO: 1732755 - RNA, 23 nt, Human
agacuccugcaggcagccaggcc

SEQ ID NO: 1732756 - RNA, 20 nt, Human
agacuccugcaggcagccag

SEQ ID NO: 1732757 - RNA, 19 nt, Human
agacuccugcaggcagcca

SEQ ID NO: 1732758 - RNA, 18 nt, Human
agacuccugcaggcagcc

SEQ ID NO: 1732759 - RNA, 17 nt, Human
agacucuacagaggcca

SEQ ID NO: 1732760 - RNA, 21 nt, Human
agacucgcgacaaugcaaacc

SEQ ID NO: 1732761 - RNA, 19 nt, Human
agacucuacagaggccaug

SEQ ID NO: 1732762 - RNA, 14 nt, Human
agagaccaucccug

SEQ ID NO: 1732763 - RNA, 13 nt, Human
agagaccaucccu

SEQ ID NO: 1732764 - RNA, 15 nt, Human
agagaccaucccuga

SEQ ID NO: 1732765 - RNA, 18 nt, Human
agagaccaucccugaagg

SEQ ID NO: 1732766 - RNA, 15 nt, Human
agacuuuggaaagac

SEQ ID NO: 1732767 - RNA, 18 nt, Human
agagaaugaaagggccca

SEQ ID NO: 1732768 - RNA, 14 nt, Human
agacuuuggaaaga

SEQ ID NO: 1732769 - RNA, 12 nt, Human
agacuuuggaaa

SEQ ID NO: 1732770 - RNA, 17 nt, Human
agacuucaucccucugg

SEQ ID NO: 1732771 - RNA, 14 nt, Human
agacuucaucccuc

SEQ ID NO: 1732772 - RNA, 18 nt, Human
agacucauucuucuguac

SEQ ID NO: 1732773 - RNA, 17 nt, Human
agacucauucuucugua

SEQ ID NO: 1732774 - RNA, 18 nt, Human
agacuaucuaaauguuga

SEQ ID NO: 1732775 - RNA, 17 nt, Human
agacuaucuaaauguug

SEQ ID NO: 1732776 - RNA, 19 nt, Human
agacuaucuaaauguugaa

SEQ ID NO: 1732777 - RNA, 12 nt, Human
agaccugccccu

SEQ ID NO: 1732778 - RNA, 13 nt, Human
agaccugccccuc

SEQ ID NO: 1732779 - RNA, 20 nt, Human
ucuugaugccuggcggggug

SEQ ID NO: 1732780 - RNA, 14 nt, Human
ucuugaugccuggc

SEQ ID NO: 1732781 - RNA, 16 nt, Human
ucuugcaauggcagcc

SEQ ID NO: 1732782 - RNA, 13 nt, Human
ucuugcaauggca

SEQ ID NO: 1732783 - RNA, 17 nt, Human
ucuugcaauggcagccu

SEQ ID NO: 1732784 - RNA, 14 nt, Human
agacccugcccugu

SEQ ID NO: 1732785 - RNA, 13 nt, Human
agacccugcccug

SEQ ID NO: 1732786 - RNA, 12 nt, Human
agacccugcccu

SEQ ID NO: 1732787 - RNA, 23 nt, Human
agacccugcccugugggccccca

SEQ ID NO: 1732788 - RNA, 21 nt, Human
agacccugcccugugggcccc

SEQ ID NO: 1732789 - RNA, 19 nt, Human
agacccugcccugugggcc

SEQ ID NO: 1732790 - RNA, 16 nt, Human
agacccugcccugugg

SEQ ID NO: 1732791 - RNA, 15 nt, Human
agacccuuguggucc

SEQ ID NO: 1732792 - RNA, 13 nt, Human
agacccuuguggu

SEQ ID NO: 1732793 - RNA, 23 nt, Human
agacccuuguggucccaccccac

SEQ ID NO: 1732794 - RNA, 22 nt, Human
agacccuuguggucccacccca

SEQ ID NO: 1732795 - RNA, 20 nt, Human
agacccuuguggucccaccc

SEQ ID NO: 1732796 - RNA, 19 nt, Human
agacccuuguggucccacc

SEQ ID NO: 1732797 - RNA, 19 nt, Human
agaccuaacgagaaauaga

SEQ ID NO: 1732798 - RNA, 19 nt, Human
agauaaggguaucugguga

SEQ ID NO: 1732799 - RNA, 19 nt, Human
agagugagacucugucuca

SEQ ID NO: 1732800 - RNA, 18 nt, Human
agauaauacaccacuaca

SEQ ID NO: 1732801 - RNA, 18 nt, Human
agauaauucuagcuuuga

SEQ ID NO: 1732802 - RNA, 19 nt, Human
agauacaggaaaagcugcu

SEQ ID NO: 1732803 - RNA, 22 nt, Human
agauauuuugcuuugugauuuu

SEQ ID NO: 1732804 - RNA, 19 nt, Human
agaucaaccccuucgcucc

SEQ ID NO: 1732805 - RNA, 14 nt, Human
agaucaaccccuuc

SEQ ID NO: 1732806 - RNA, 21 nt, Human
agaucaaccccuucgcuccug

SEQ ID NO: 1732807 - RNA, 14 nt, Human
agagugaacaaauu

SEQ ID NO: 1732808 - RNA, 22 nt, Human
agagucucacuguugcccaggc

SEQ ID NO: 1732809 - RNA, 20 nt, Human
agagucucacuguugcccag

SEQ ID NO: 1732810 - RNA, 22 nt, Human
agagugaacaaauuuacagaga

SEQ ID NO: 1732811 - RNA, 16 nt, Human
agagugagacucuguc

SEQ ID NO: 1732812 - RNA, 15 nt, Human
agagugagacucugu

SEQ ID NO: 1732813 - RNA, 18 nt, Human
ugaaugucagugugacug

SEQ ID NO: 1732814 - RNA, 15 nt, Human
ugaaugucaguguga

SEQ ID NO: 1732815 - RNA, 14 nt, Human
ugaaugucagugug

SEQ ID NO: 1732816 - RNA, 18 nt, Human
ugaagguggaaauaaacu

SEQ ID NO: 1732817 - RNA, 16 nt, Human
ugaaugcauaaaaugu

SEQ ID NO: 1732818 - RNA, 15 nt, Human
ugaaugcauaaaaug

SEQ ID NO: 1732819 - RNA, 17 nt, Human
ugaagauguagaggaga

SEQ ID NO: 1732820 - RNA, 18 nt, Human
ugaagauguagaggagaa

SEQ ID NO: 1732821 - RNA, 22 nt, Human
agagggagggagggcuccagac

SEQ ID NO: 1732822 - RNA, 15 nt, Human
agagggagguaagga

SEQ ID NO: 1732823 - RNA, 21 nt, Human
agagggagggagggcuccaga

SEQ ID NO: 1732824 - RNA, 17 nt, Human
agaggcuaugugagcac

SEQ ID NO: 1732825 - RNA, 21 nt, Human
agaggcgcaugaauuugugaa

SEQ ID NO: 1732826 - RNA, 11 nt, Human
ugaagacaaug

SEQ ID NO: 1732827 - RNA, 13 nt, Human
ugaagacaaugac

SEQ ID NO: 1732828 - RNA, 17 nt, Human
ugaagacaaugacuuac

SEQ ID NO: 1732829 - RNA, 16 nt, Human
ugaacuuugaccucug

SEQ ID NO: 1732830 - RNA, 17 nt, Human
ugaacuuugaccucugc

SEQ ID NO: 1732831 - RNA, 21 nt, Human
ucuuuggucuacacugugcug

SEQ ID NO: 1732832 - RNA, 14 nt, Human
ucuuuggucuacac

SEQ ID NO: 1732833 - RNA, 12 nt, Human
ucuuuguaauga

SEQ ID NO: 1732834 - RNA, 11 nt, Human
ugaacuuugac

SEQ ID NO: 1732835 - RNA, 15 nt, Human
ucuuuguaaugaaaa

SEQ ID NO: 1732836 - RNA, 13 nt, Human
ucuuuguaaugaa

SEQ ID NO: 1732837 - RNA, 18 nt, Human
agaggcaacugcauuggc

SEQ ID NO: 1732838 - RNA, 21 nt, Human
agaggaaaucaccgaaaacgu

SEQ ID NO: 1732839 - RNA, 12 nt, Human
agaggaaaucac

SEQ ID NO: 1732840 - RNA, 11 nt, Human
agaggaaauca

SEQ ID NO: 1732841 - RNA, 19 nt, Human
agaggaaagcaaaggagau

SEQ ID NO: 1732842 - RNA, 18 nt, Human
agaggaaagcaaaggaga

SEQ ID NO: 1732843 - RNA, 16 nt, Human
agaggaaagcaaagga

SEQ ID NO: 1732844 - RNA, 12 nt, Human
agaggaaagcaa

SEQ ID NO: 1732845 - RNA, 19 nt, Human
agagcugggugucaagagg

SEQ ID NO: 1732846 - RNA, 21 nt, Human
ugaagacaaugacuuacugua

SEQ ID NO: 1732847 - RNA, 15 nt, Human
agagcuucuggcacu

SEQ ID NO: 1732848 - RNA, 21 nt, Human
agagcuucuguugcugccuca

SEQ ID NO: 1732849 - RNA, 20 nt, Human
agagcuucuguugcugccuc

SEQ ID NO: 1732850 - RNA, 19 nt, Human
agagcuucuguugcugccu

SEQ ID NO: 1732851 - RNA, 23 nt, Human
agaugcuagaacucccuuucaac

SEQ ID NO: 1732852 - RNA, 16 nt, Human
agaugcuucucacugc

SEQ ID NO: 1732853 - RNA, 18 nt, Human
agaugcuucucacugcca

SEQ ID NO: 1732854 - RNA, 12 nt, Human
ugaccugaggcc

SEQ ID NO: 1732855 - RNA, 14 nt, Human
ugaccucugccuga

SEQ ID NO: 1732856 - RNA, 23 nt, Human
ugaccccucauagcccucacccu

SEQ ID NO: 1732857 - RNA, 13 nt, Human
ugaccucugccug

SEQ ID NO: 1732858 - RNA, 20 nt, Human
ugaccccucauagcccucac

SEQ ID NO: 1732859 - RNA, 19 nt, Human
ugaccccucauagcccuca

SEQ ID NO: 1732860 - RNA, 22 nt, Human
ugacccccaaccaaguggcucc

SEQ ID NO: 1732861 - RNA, 17 nt, Human
ugaccccucauagcccu

SEQ ID NO: 1732862 - RNA, 12 nt, Human
ugacccaugcug

SEQ ID NO: 1732863 - RNA, 18 nt, Human
agauguguucacaaugga

SEQ ID NO: 1732864 - RNA, 15 nt, Human
agauguguucacaau

SEQ ID NO: 1732865 - RNA, 18 nt, Human
ugacauuguagagcuucu

SEQ ID NO: 1732866 - RNA, 21 nt, Human
agaucauugugaaauuauuca

SEQ ID NO: 1732867 - RNA, 20 nt, Human
ugaccacacuccagcuggga

SEQ ID NO: 1732868 - RNA, 19 nt, Human
ugaccacacuccagcuggg

SEQ ID NO: 1732869 - RNA, 17 nt, Human
ugaccacacuccagcug

SEQ ID NO: 1732870 - RNA, 12 nt, Human
ugaccacacucc

SEQ ID NO: 1732871 - RNA, 16 nt, Human
agauucaaucccagga

SEQ ID NO: 1732872 - RNA, 20 nt, Human
agauuauaggcaccuaccac

SEQ ID NO: 1732873 - RNA, 21 nt, Human
ugacugugguagccagcaucg

SEQ ID NO: 1732874 - RNA, 20 nt, Human
ugacuuauuuauauaaauuu

SEQ ID NO: 1732875 - RNA, 21 nt, Human
ugacuuauuuauauaaauuuu

SEQ ID NO: 1732876 - RNA, 23 nt, Human
ugacuccagaauuucccaaagca

SEQ ID NO: 1732877 - RNA, 20 nt, Human
ugacuccagaauuucccaaa

SEQ ID NO: 1732878 - RNA, 19 nt, Human
ugacuccagaauuucccaa

SEQ ID NO: 1732879 - RNA, 17 nt, Human
ugacuccagaauuuccc

SEQ ID NO: 1732880 - RNA, 15 nt, Human
ugaccugaggcccuu

SEQ ID NO: 1732881 - RNA, 14 nt, Human
ugaccugaggcccu

SEQ ID NO: 1732882 - RNA, 17 nt, Human
ugaccugaggcccuucu

SEQ ID NO: 1732883 - RNA, 21 nt, Human
agcaaaaccaaauauuccaga

SEQ ID NO: 1732884 - RNA, 14 nt, Human
agauuuaugcauau

SEQ ID NO: 1732885 - RNA, 16 nt, Human
agauugugccccugca

SEQ ID NO: 1732886 - RNA, 21 nt, Human
agauugugccccugcacucca

SEQ ID NO: 1732887 - RNA, 17 nt, Human
agauuucacucuccuug

SEQ ID NO: 1732888 - RNA, 14 nt, Human
agauuucacucucc

SEQ ID NO: 1732889 - RNA, 13 nt, Human
agauuucacucuc

SEQ ID NO: 1732890 - RNA, 21 nt, Human
ugagcaucaggccaggcccuc

SEQ ID NO: 1732891 - RNA, 24 nt, Human
ugagcaucaggccaggcccucugc

SEQ ID NO: 1732892 - RNA, 22 nt, Human
ugagcaucaggccaggcccucu

SEQ ID NO: 1732893 - RNA, 14 nt, Human
ugagccaccgugcc

SEQ ID NO: 1732894 - RNA, 15 nt, Human
ugagccaccacgccc

SEQ ID NO: 1732895 - RNA, 16 nt, Human
ugagccagauuucacu

SEQ ID NO: 1732896 - RNA, 14 nt, Human
ugagccagauuuca

SEQ ID NO: 1732897 - RNA, 13 nt, Human
ugagccagauuuc

SEQ ID NO: 1732898 - RNA, 23 nt, Human
ugagccacugcaccgggccacag

SEQ ID NO: 1732899 - RNA, 18 nt, Human
ugagccacugcaccgggc

SEQ ID NO: 1732900 - RNA, 21 nt, Human
ugagccacugcaccgggccac

SEQ ID NO: 1732901 - RNA, 21 nt, Human
ugagccaccgugccuggccac

SEQ ID NO: 1732902 - RNA, 20 nt, Human
ugagccaccgugccuggcca

SEQ ID NO: 1732903 - RNA, 19 nt, Human
ugagccaccgugccuggcc

SEQ ID NO: 1732904 - RNA, 18 nt, Human
ugagccaccgugccuggc

SEQ ID NO: 1732905 - RNA, 15 nt, Human
ugagcaauccugcaa

SEQ ID NO: 1732906 - RNA, 19 nt, Human
ugagcaaauguggcuccug

SEQ ID NO: 1732907 - RNA, 18 nt, Human
ugagcaaauguggcuccu

SEQ ID NO: 1732908 - RNA, 16 nt, Human
ugagcaaauguggcuc

SEQ ID NO: 1732909 - RNA, 23 nt, Human
ugagcacuaaggugugcucugau

SEQ ID NO: 1732910 - RNA, 22 nt, Human
ugagcacuaaggugugcucuga

SEQ ID NO: 1732911 - RNA, 21 nt, Human
ugagcacuaaggugugcucug

SEQ ID NO: 1732912 - RNA, 20 nt, Human
ugagcacuaaggugugcucu

SEQ ID NO: 1732913 - RNA, 16 nt, Human
agcacagcuucauuuc

SEQ ID NO: 1732914 - RNA, 16 nt, Human
agcacaugccucucuc

SEQ ID NO: 1732915 - RNA, 14 nt, Human
agcacaugccucuc

SEQ ID NO: 1732916 - RNA, 13 nt, Human
agcacaugccucu

SEQ ID NO: 1732917 - RNA, 13 nt, Human
agcaagugagagc

SEQ ID NO: 1732918 - RNA, 20 nt, Human
agcaagugagacccugucuc

SEQ ID NO: 1732919 - RNA, 22 nt, Human
ugagccagauuucacucuccuu

SEQ ID NO: 1732920 - RNA, 17 nt, Human
ugagccagauuucacuc

SEQ ID NO: 1732921 - RNA, 14 nt, Human
agcaagugagagcu

SEQ ID NO: 1732922 - RNA, 22 nt, Human
agcaagugagagcuggguguca

SEQ ID NO: 1732923 - RNA, 21 nt, Human
agcacagcagccccugcacaa

SEQ ID NO: 1732924 - RNA, 14 nt, Human
agcagaacagugau

SEQ ID NO: 1732925 - RNA, 19 nt, Human
agcagaaaugccuuacccu

SEQ ID NO: 1732926 - RNA, 12 nt, Human
agcagaaaugcc

SEQ ID NO: 1732927 - RNA, 13 nt, Human
agcagaaaugccu

SEQ ID NO: 1732928 - RNA, 23 nt, Human
agcacuuugggaggccaaggugg

SEQ ID NO: 1732929 - RNA, 22 nt, Human
agcacuuugggaggccaaggug

SEQ ID NO: 1732930 - RNA, 16 nt, Human
agcacgauuucuguuu

SEQ ID NO: 1732931 - RNA, 14 nt, Human
agcacgauuucugu

SEQ ID NO: 1732932 - RNA, 15 nt, Human
agcacgauuucuguu

SEQ ID NO: 1732933 - RNA, 13 nt, Human
agcacgauuucug

SEQ ID NO: 1732934 - RNA, 23 nt, Human
agcaccuuagacagucccugcca

SEQ ID NO: 1732935 - RNA, 22 nt, Human
agcaccuuagacagucccugcc

SEQ ID NO: 1732936 - RNA, 21 nt, Human
agcaccuuagacagucccugc

SEQ ID NO: 1732937 - RNA, 20 nt, Human
agcaccuuagacagucccug

SEQ ID NO: 1732938 - RNA, 19 nt, Human
agcaccuuagacagucccu

SEQ ID NO: 1732939 - RNA, 13 nt, Human
agcaccagggaag

SEQ ID NO: 1732940 - RNA, 12 nt, Human
agcaccagggaa

SEQ ID NO: 1732941 - RNA, 10 nt, Human
agcaccaggg

SEQ ID NO: 1732942 - RNA, 13 nt, Human
ugagcgacaguga

SEQ ID NO: 1732943 - RNA, 14 nt, Human
ugagcgacagugag

SEQ ID NO: 1732944 - RNA, 16 nt, Human
ugagcgacagugagac

SEQ ID NO: 1732945 - RNA, 20 nt, Human
ugagcgacagugagacucug

SEQ ID NO: 1732946 - RNA, 15 nt, Human
ugagccuugaacuuu

SEQ ID NO: 1732947 - RNA, 17 nt, Human
ugagccuugaacuuuga

SEQ ID NO: 1732948 - RNA, 18 nt, Human
ugagccuugaacuuugac

SEQ ID NO: 1732949 - RNA, 19 nt, Human
ugagccuugaacuuugacc

SEQ ID NO: 1732950 - RNA, 14 nt, Human
ugagccuugaacuu

SEQ ID NO: 1732951 - RNA, 22 nt, Human
ugagccugggaggucaaggcug

SEQ ID NO: 1732952 - RNA, 19 nt, Human
ugagccugggaggucaagg

SEQ ID NO: 1732953 - RNA, 14 nt, Human
ugagccugggaggu

SEQ ID NO: 1732954 - RNA, 16 nt, Human
ugagccuggcaagaau

SEQ ID NO: 1732955 - RNA, 11 nt, Human
ugagccuggca

SEQ ID NO: 1732956 - RNA, 10 nt, Human
ugagccuggc

SEQ ID NO: 1732957 - RNA, 16 nt, Human
agcagagaccaucccu

SEQ ID NO: 1732958 - RNA, 15 nt, Human
agcagagaccauccc

SEQ ID NO: 1732959 - RNA, 21 nt, Human
agcagagaauucucuuaucca

SEQ ID NO: 1732960 - RNA, 14 nt, Human
agcagagaauucuc

SEQ ID NO: 1732961 - RNA, 23 nt, Human
agcagagaaugaaagggcccaga

SEQ ID NO: 1732962 - RNA, 22 nt, Human
agcagagaaugaaagggcccag

SEQ ID NO: 1732963 - RNA, 21 nt, Human
agcagagaaugaaagggccca

SEQ ID NO: 1732964 - RNA, 15 nt, Human
ugaggaagcaaaagc

SEQ ID NO: 1732965 - RNA, 21 nt, Human
ugaggaagccgcuggggccag

SEQ ID NO: 1732966 - RNA, 19 nt, Human
ugaggaagccgcuggggcc

SEQ ID NO: 1732967 - RNA, 18 nt, Human
ugaggaagccgcuggggc

SEQ ID NO: 1732968 - RNA, 17 nt, Human
ugaggaagccgcugggg

SEQ ID NO: 1732969 - RNA, 14 nt, Human
ugaggaagccgcug

SEQ ID NO: 1732970 - RNA, 22 nt, Human
ugaggaagcaaaagcaucuaug

SEQ ID NO: 1732971 - RNA, 13 nt, Human
ugagcuacaaaug

SEQ ID NO: 1732972 - RNA, 14 nt, Human
ugagcuacaaaugc

SEQ ID NO: 1732973 - RNA, 16 nt, Human
ugagcuacaaaugcau

SEQ ID NO: 1732974 - RNA, 14 nt, Human
ugagcuaggaauug

SEQ ID NO: 1732975 - RNA, 22 nt, Human
ugaggaauccagacccggcugc

SEQ ID NO: 1732976 - RNA, 21 nt, Human
ugaggaauccagacccggcug

SEQ ID NO: 1732977 - RNA, 13 nt, Human
ugaggacaagaga

SEQ ID NO: 1732978 - RNA, 22 nt, Human
ugaggacaagagaaaaaagcca

SEQ ID NO: 1732979 - RNA, 21 nt, Human
ugaggacacuaaccacgcugg

SEQ ID NO: 1732980 - RNA, 12 nt, Human
ugaggccagaga

SEQ ID NO: 1732981 - RNA, 20 nt, Human
ugaggcccagagggccugca

SEQ ID NO: 1732982 - RNA, 18 nt, Human
ugaggcccagagggccug

SEQ ID NO: 1732983 - RNA, 17 nt, Human
ugaggcccagagggccu

SEQ ID NO: 1732984 - RNA, 15 nt, Human
ugaggcccagagggc

SEQ ID NO: 1732985 - RNA, 22 nt, Human
ugaggcccagagggccugcaag

SEQ ID NO: 1732986 - RNA, 21 nt, Human
ugaggcccagagggccugcaa

SEQ ID NO: 1732987 - RNA, 23 nt, Human
ugaggcccagagggccugcaagg

SEQ ID NO: 1732988 - RNA, 13 nt, Human
ugaggcccagagg

SEQ ID NO: 1732989 - RNA, 12 nt, Human
ugaggcccagag

SEQ ID NO: 1732990 - RNA, 16 nt, Human
ugaggccagagacaca

SEQ ID NO: 1732991 - RNA, 14 nt, Human
ugaggccagagaca

SEQ ID NO: 1732992 - RNA, 20 nt, Human
ugaggccagagacacaagcc

SEQ ID NO: 1732993 - RNA, 19 nt, Human
agcagauggagaccccuug

SEQ ID NO: 1732994 - RNA, 17 nt, Human
agcagaggaaggagagg

SEQ ID NO: 1732995 - RNA, 17 nt, Human
ugagguacugagaguga

SEQ ID NO: 1732996 - RNA, 20 nt, Human
ugaggguugggcugguguca

SEQ ID NO: 1732997 - RNA, 22 nt, Human
ugagguacugagagugaacaaa

SEQ ID NO: 1732998 - RNA, 13 nt, Human
ugaggucagagcc

SEQ ID NO: 1732999 - RNA, 16 nt, Human
ugaggucagagccugc

SEQ ID NO: 1733000 - RNA, 14 nt, Human
ugaggucagagccu

SEQ ID NO: 1733001 - RNA, 19 nt, Human
agcagagaccaucccugaa

SEQ ID NO: 1733002 - RNA, 18 nt, Human
agcagagaccaucccuga

SEQ ID NO: 1733003 - RNA, 17 nt, Human
ugaggucagagccugca

SEQ ID NO: 1733004 - RNA, 17 nt, Human
agcagagaccaucccug

SEQ ID NO: 1733005 - RNA, 20 nt, Human
agcagagcaccuuagacagu

SEQ ID NO: 1733006 - RNA, 20 nt, Human
agcagagaccaucccugaag

SEQ ID NO: 1733007 - RNA, 19 nt, Human
ugagguacaaccuguucug

SEQ ID NO: 1733008 - RNA, 13 nt, Human
ugaggggccucuu

SEQ ID NO: 1733009 - RNA, 14 nt, Human
ugaggguaaguauu

SEQ ID NO: 1733010 - RNA, 12 nt, Human
ugaggggccucu

SEQ ID NO: 1733011 - RNA, 24 nt, Human
ugaggcccuucucuccagccccug

SEQ ID NO: 1733012 - RNA, 23 nt, Human
ugaggcccuucucuccagccccu

SEQ ID NO: 1733013 - RNA, 22 nt, Human
ugaggcccuucucuccagcccc

SEQ ID NO: 1733014 - RNA, 20 nt, Human
ugaggcccuucucuccagcc

SEQ ID NO: 1733015 - RNA, 19 nt, Human
ugaggcccuucucuccagc

SEQ ID NO: 1733016 - RNA, 18 nt, Human
ugaggcccuucucuccag

SEQ ID NO: 1733017 - RNA, 16 nt, Human
ugaggcccuucucucc

SEQ ID NO: 1733018 - RNA, 19 nt, Human
ugagggauacccaucccau

SEQ ID NO: 1733019 - RNA, 15 nt, Human
ugagggauuaucuuu

SEQ ID NO: 1733020 - RNA, 14 nt, Human
accacaucuugcuc

SEQ ID NO: 1733021 - RNA, 21 nt, Human
accacagacauacuaaccagc

SEQ ID NO: 1733022 - RNA, 22 nt, Human
accacagacauacuaaccagca

SEQ ID NO: 1733023 - RNA, 13 nt, Human
accacugcagaag

SEQ ID NO: 1733024 - RNA, 14 nt, Human
accacugcagaaga

SEQ ID NO: 1733025 - RNA, 19 nt, Human
accacugcagaagacagua

SEQ ID NO: 1733026 - RNA, 14 nt, Human
accacuucagcuga

SEQ ID NO: 1733027 - RNA, 13 nt, Human
accacuucagcug

SEQ ID NO: 1733028 - RNA, 15 nt, Human
accacuucagcugac

SEQ ID NO: 1733029 - RNA, 24 nt, Human
accacaucuugcucugcugacaga

SEQ ID NO: 1733030 - RNA, 21 nt, Human
accacaucuugcucugcugac

SEQ ID NO: 1733031 - RNA, 20 nt, Human
accacaucuugcucugcuga

SEQ ID NO: 1733032 - RNA, 16 nt, Human
accacaucuugcucug

SEQ ID NO: 1733033 - RNA, 20 nt, Human
accacucuaucaaguauuau

SEQ ID NO: 1733034 - RNA, 12 nt, Human
accacuuuuguu

SEQ ID NO: 1733035 - RNA, 23 nt, Human
accagacaccuugacagggcaca

SEQ ID NO: 1733036 - RNA, 22 nt, Human
accagacaccuugacagggcac

SEQ ID NO: 1733037 - RNA, 11 nt, Human
accagacaggu

SEQ ID NO: 1733038 - RNA, 22 nt, Human
accagagcccaccuuggcucaa

SEQ ID NO: 1733039 - RNA, 19 nt, Human
accagagcccaccuuggcu

SEQ ID NO: 1733040 - RNA, 12 nt, Human
accagagcugcc

SEQ ID NO: 1733041 - RNA, 23 nt, Human
ucaccugaagacucauucuucug

SEQ ID NO: 1733042 - RNA, 19 nt, Human
ucaccugaagacucauucu

SEQ ID NO: 1733043 - RNA, 15 nt, Human
ucaccucccccaucu

SEQ ID NO: 1733044 - RNA, 13 nt, Human
ucaccucccccau

SEQ ID NO: 1733045 - RNA, 19 nt, Human
accaggcaacuugggaacu

SEQ ID NO: 1733046 - RNA, 21 nt, Human
accaguguuguggauuuaaca

SEQ ID NO: 1733047 - RNA, 12 nt, Human
accagugccuua

SEQ ID NO: 1733048 - RNA, 18 nt, Human
ucacuguugcccaggcug

SEQ ID NO: 1733049 - RNA, 17 nt, Human
ucacuguugcccaggcu

SEQ ID NO: 1733050 - RNA, 19 nt, Human
ucacuguugcccaggcugg

SEQ ID NO: 1733051 - RNA, 12 nt, Human
ucacugcagccu

SEQ ID NO: 1733052 - RNA, 13 nt, Human
ucacugcagccuc

SEQ ID NO: 1733053 - RNA, 24 nt, Human
ucacugcacagugcaucucagccc

SEQ ID NO: 1733054 - RNA, 22 nt, Human
ucacugcacagugcaucucagc

SEQ ID NO: 1733055 - RNA, 20 nt, Human
ucacugcacagugcaucuca

SEQ ID NO: 1733056 - RNA, 16 nt, Human
ucacuguugcccaggc

SEQ ID NO: 1733057 - RNA, 15 nt, Human
ucacugagacagccc

SEQ ID NO: 1733058 - RNA, 14 nt, Human
ucacugagacagcc

SEQ ID NO: 1733059 - RNA, 13 nt, Human
ucacugagacagc

SEQ ID NO: 1733060 - RNA, 16 nt, Human
ucaccugccccucaac

SEQ ID NO: 1733061 - RNA, 18 nt, Human
accauucuccaccugcca

SEQ ID NO: 1733062 - RNA, 16 nt, Human
accauucuccaccugc

SEQ ID NO: 1733063 - RNA, 13 nt, Human
accauucuccacc

SEQ ID NO: 1733064 - RNA, 22 nt, Human
accaugauuaaccacuucagcu

SEQ ID NO: 1733065 - RNA, 23 nt, Human
accaugauuaaccacuucagcug

SEQ ID NO: 1733066 - RNA, 12 nt, Human
accauuccccau

SEQ ID NO: 1733067 - RNA, 15 nt, Human
accauuccccauggg

SEQ ID NO: 1733068 - RNA, 13 nt, Human
acccaaaaggcag

SEQ ID NO: 1733069 - RNA, 15 nt, Human
acccaaaaggcagaa

SEQ ID NO: 1733070 - RNA, 23 nt, Human
accauuuugggguacccacugcu

SEQ ID NO: 1733071 - RNA, 21 nt, Human
acccaaauguucaucaaugaa

SEQ ID NO: 1733072 - RNA, 18 nt, Human
acccaaaaggcagaagca

SEQ ID NO: 1733073 - RNA, 16 nt, Human
acccagaagaaaauag

SEQ ID NO: 1733074 - RNA, 19 nt, Human
acccacuugcuuuuaaaau

SEQ ID NO: 1733075 - RNA, 18 nt, Human
acccagcccacuucugcc

SEQ ID NO: 1733076 - RNA, 17 nt, Human
acccagcccacuucugc

SEQ ID NO: 1733077 - RNA, 16 nt, Human
acccagcccacuucug

SEQ ID NO: 1733078 - RNA, 18 nt, Human
ucagcggggacagcuccu

SEQ ID NO: 1733079 - RNA, 17 nt, Human
ucagcggggacagcucc

SEQ ID NO: 1733080 - RNA, 16 nt, Human
ucagcggggacagcuc

SEQ ID NO: 1733081 - RNA, 15 nt, Human
ucagcggggacagcu

SEQ ID NO: 1733082 - RNA, 20 nt, Human
ucaggaagcucagggccugg

SEQ ID NO: 1733083 - RNA, 19 nt, Human
ucaggaagcucagggccug

SEQ ID NO: 1733084 - RNA, 17 nt, Human
ucaggaagcucagggcc

SEQ ID NO: 1733085 - RNA, 12 nt, Human
ucaggaagcuca

SEQ ID NO: 1733086 - RNA, 16 nt, Human
ucaggaagcucagggc

SEQ ID NO: 1733087 - RNA, 23 nt, Human
ucaggccaaacucaccugccccu

SEQ ID NO: 1733088 - RNA, 20 nt, Human
ucaggccaaacucaccugcc

SEQ ID NO: 1733089 - RNA, 19 nt, Human
accccuucgcuccuguguc

SEQ ID NO: 1733090 - RNA, 16 nt, Human
ucagguaacaggcaga

SEQ ID NO: 1733091 - RNA, 15 nt, Human
ucagguaacaggcag

SEQ ID NO: 1733092 - RNA, 13 nt, Human
ucagguaacaggc

SEQ ID NO: 1733093 - RNA, 18 nt, Human
ucagggucccugguggca

SEQ ID NO: 1733094 - RNA, 14 nt, Human
ucagggucccuggu

SEQ ID NO: 1733095 - RNA, 13 nt, Human
ucagggucccugg

SEQ ID NO: 1733096 - RNA, 12 nt, Human
ucaggccaggcc

SEQ ID NO: 1733097 - RNA, 11 nt, Human
ucaggccaggc

SEQ ID NO: 1733098 - RNA, 20 nt, Human
ucaggccagcugcuugggcu

SEQ ID NO: 1733099 - RNA, 15 nt, Human
ucaggccagcugcuu

SEQ ID NO: 1733100 - RNA, 14 nt, Human
acccucuuagaaaa

SEQ ID NO: 1733101 - RNA, 12 nt, Human
acccugcccugu

SEQ ID NO: 1733102 - RNA, 11 nt, Human
acccugcccug

SEQ ID NO: 1733103 - RNA, 13 nt, Human
acccugcccugug

SEQ ID NO: 1733104 - RNA, 14 nt, Human
acccugcccugugg

SEQ ID NO: 1733105 - RNA, 19 nt, Human
acccuuguggucccacccc

SEQ ID NO: 1733106 - RNA, 17 nt, Human
acccuuguggucccacc

SEQ ID NO: 1733107 - RNA, 16 nt, Human
acccuuguggucccac

SEQ ID NO: 1733108 - RNA, 20 nt, Human
accccuucgcuccugugucu

SEQ ID NO: 1733109 - RNA, 13 nt, Human
ucagaagacacug

SEQ ID NO: 1733110 - RNA, 13 nt, Human
ucagaucuucugu

SEQ ID NO: 1733111 - RNA, 19 nt, Human
ucagcccucccugccccuc

SEQ ID NO: 1733112 - RNA, 18 nt, Human
ucagcccucccugccccu

SEQ ID NO: 1733113 - RNA, 15 nt, Human
acccagcucuggucc

SEQ ID NO: 1733114 - RNA, 13 nt, Human
acccagcucuggu

SEQ ID NO: 1733115 - RNA, 15 nt, Human
acccccagccugcua

SEQ ID NO: 1733116 - RNA, 16 nt, Human
acccccaaauuuucuu

SEQ ID NO: 1733117 - RNA, 14 nt, Human
acccccagccugcu

SEQ ID NO: 1733118 - RNA, 12 nt, Human
accccuggcuuu

SEQ ID NO: 1733119 - RNA, 12 nt, Human
ucagccugggca

SEQ ID NO: 1733120 - RNA, 10 nt, Human
ucagccuggg

SEQ ID NO: 1733121 - RNA, 19 nt, Human
ucagccuggcuucaaauug

SEQ ID NO: 1733122 - RNA, 17 nt, Human
accccuggcuuuucacu

SEQ ID NO: 1733123 - RNA, 15 nt, Human
accccuggcuuuuca

SEQ ID NO: 1733124 - RNA, 13 nt, Human
accuagccuuaga

SEQ ID NO: 1733125 - RNA, 20 nt, Human
accuccgccucuuggguuca

SEQ ID NO: 1733126 - RNA, 10 nt, Human
acccuuuucu

SEQ ID NO: 1733127 - RNA, 18 nt, Human
accgagucucuucuccac

SEQ ID NO: 1733128 - RNA, 22 nt, Human
ucauauuuacuucuuauacauu

SEQ ID NO: 1733129 - RNA, 21 nt, Human
ucauauuuacuucuuauacau

SEQ ID NO: 1733130 - RNA, 20 nt, Human
ucauauuuacuucuuauaca

SEQ ID NO: 1733131 - RNA, 20 nt, Human
accgcagacaggaccaggga

SEQ ID NO: 1733132 - RNA, 24 nt, Human
accgagucucuucuccacuggaug

SEQ ID NO: 1733133 - RNA, 21 nt, Human
accgagucucuucuccacugg

SEQ ID NO: 1733134 - RNA, 20 nt, Human
accgagucucuucuccacug

SEQ ID NO: 1733135 - RNA, 17 nt, Human
accgccaaggcuggggg

SEQ ID NO: 1733136 - RNA, 15 nt, Human
accucucccuuggau

SEQ ID NO: 1733137 - RNA, 14 nt, Human
accucucccuugga

SEQ ID NO: 1733138 - RNA, 13 nt, Human
accucucccuugg

SEQ ID NO: 1733139 - RNA, 19 nt, Human
accucucucacuccuugaa

SEQ ID NO: 1733140 - RNA, 14 nt, Human
accucucucacucc

SEQ ID NO: 1733141 - RNA, 23 nt, Human
accucucccuuggauuguccccg

SEQ ID NO: 1733142 - RNA, 12 nt, Human
accucugcacaa

SEQ ID NO: 1733143 - RNA, 22 nt, Human
ucauugaccugaggcccuucuc

SEQ ID NO: 1733144 - RNA, 21 nt, Human
ucauucuccuuguguuacuaa

SEQ ID NO: 1733145 - RNA, 23 nt, Human
ucauucgcuacuaugauuuaauu

SEQ ID NO: 1733146 - RNA, 17 nt, Human
accucggugccuuccuc

SEQ ID NO: 1733147 - RNA, 13 nt, Human
ucaugucuggcua

SEQ ID NO: 1733148 - RNA, 14 nt, Human
ucaugugaaaucau

SEQ ID NO: 1733149 - RNA, 11 nt, Human
ucauguucuua

SEQ ID NO: 1733150 - RNA, 17 nt, Human
ucauguucuuaauucuu

SEQ ID NO: 1733151 - RNA, 23 nt, Human
ucauccacugugccaugugccag

SEQ ID NO: 1733152 - RNA, 21 nt, Human
ucauccacugugccaugugcc

SEQ ID NO: 1733153 - RNA, 19 nt, Human
ucauccacugugccaugug

SEQ ID NO: 1733154 - RNA, 19 nt, Human
ucaugacaaagacugagua

SEQ ID NO: 1733155 - RNA, 12 nt, Human
accuucuccuuc

SEQ ID NO: 1733156 - RNA, 13 nt, Human
accuucuccuuca

SEQ ID NO: 1733157 - RNA, 14 nt, Human
accuucuccuucac

SEQ ID NO: 1733158 - RNA, 12 nt, Human
accuucuguggc

SEQ ID NO: 1733159 - RNA, 16 nt, Human
accuucuguggcucac

SEQ ID NO: 1733160 - RNA, 15 nt, Human
accuucuguggcuca

SEQ ID NO: 1733161 - RNA, 13 nt, Human
accuucuguggcu

SEQ ID NO: 1733162 - RNA, 14 nt, Human
accuugacagggca

SEQ ID NO: 1733163 - RNA, 15 nt, Human
accuugaaugaugcc

SEQ ID NO: 1733164 - RNA, 15 nt, Human
accuugacagggcac

SEQ ID NO: 1733165 - RNA, 16 nt, Human
accuugacagggcaca

SEQ ID NO: 1733166 - RNA, 17 nt, Human
accuuagacagucccug

SEQ ID NO: 1733167 - RNA, 14 nt, Human
accuuagccugccc

SEQ ID NO: 1733168 - RNA, 15 nt, Human
uccaccaucaagcca

SEQ ID NO: 1733169 - RNA, 23 nt, Human
accuggucacaggacucugccuc

SEQ ID NO: 1733170 - RNA, 22 nt, Human
accuggucacaggacucugccu

SEQ ID NO: 1733171 - RNA, 21 nt, Human
uccagccugagcgacagugag

SEQ ID NO: 1733172 - RNA, 20 nt, Human
uccagccugagcgacaguga

SEQ ID NO: 1733173 - RNA, 22 nt, Human
uccagccccuggaugcagccuc

SEQ ID NO: 1733174 - RNA, 23 nt, Human
uccagaccccuggcuuuucacug

SEQ ID NO: 1733175 - RNA, 21 nt, Human
uccagccccuggaugcagccu

SEQ ID NO: 1733176 - RNA, 19 nt, Human
uccagccccuggaugcagc

SEQ ID NO: 1733177 - RNA, 17 nt, Human
uccagccccuggaugca

SEQ ID NO: 1733178 - RNA, 16 nt, Human
uccagccccuggaugc

SEQ ID NO: 1733179 - RNA, 15 nt, Human
uccagccccuggaug

SEQ ID NO: 1733180 - RNA, 14 nt, Human
uccagacccggcug

SEQ ID NO: 1733181 - RNA, 18 nt, Human
uccagaccccuggcuuuu

SEQ ID NO: 1733182 - RNA, 17 nt, Human
uccagaccccuggcuuu

SEQ ID NO: 1733183 - RNA, 16 nt, Human
uccagaccccuggcuu

SEQ ID NO: 1733184 - RNA, 15 nt, Human
uccagaccccuggcu

SEQ ID NO: 1733185 - RNA, 23 nt, Human
accuuuguauucucuccuguacc

SEQ ID NO: 1733186 - RNA, 15 nt, Human
accuuuguauucucu

SEQ ID NO: 1733187 - RNA, 19 nt, Human
accuuuguauucucuccug

SEQ ID NO: 1733188 - RNA, 22 nt, Human
uccagaaguuugagaucagccu

SEQ ID NO: 1733189 - RNA, 18 nt, Human
accugcggugcuaucucc

SEQ ID NO: 1733190 - RNA, 22 nt, Human
accugaagucuuuguacagaca

SEQ ID NO: 1733191 - RNA, 15 nt, Human
accugaagucuuugu

SEQ ID NO: 1733192 - RNA, 22 nt, Human
accugcggugcuaucuccccca

SEQ ID NO: 1733193 - RNA, 19 nt, Human
accugcggugcuaucuccc

SEQ ID NO: 1733194 - RNA, 23 nt, Human
accugcggugcuaucucccccag

SEQ ID NO: 1733195 - RNA, 17 nt, Human
accugcucuccucuugc

SEQ ID NO: 1733196 - RNA, 18 nt, Human
accugcucuccucuugcc

SEQ ID NO: 1733197 - RNA, 14 nt, Human
accuggaauauaua

SEQ ID NO: 1733198 - RNA, 17 nt, Human
accuggaauauauaacc

SEQ ID NO: 1733199 - RNA, 19 nt, Human
ucauuugagcagggcucag

SEQ ID NO: 1733200 - RNA, 19 nt, Human
accugcucuccucuugcca

SEQ ID NO: 1733201 - RNA, 13 nt, Human
ucauuuuuuuuaa

SEQ ID NO: 1733202 - RNA, 17 nt, Human
ucauuuuuuuuaagaaa

SEQ ID NO: 1733203 - RNA, 23 nt, Human
uccaaagucucuggaauuugaaa

SEQ ID NO: 1733204 - RNA, 14 nt, Human
ucauuugcuuugga

SEQ ID NO: 1733205 - RNA, 18 nt, Human
ucauuugugccagaaugc

SEQ ID NO: 1733206 - RNA, 21 nt, Human
ucauuugagcagggcucagcg

SEQ ID NO: 1733207 - RNA, 16 nt, Human
uccacaguggaaccag

SEQ ID NO: 1733208 - RNA, 20 nt, Human
uccacaguggaaccagccca

SEQ ID NO: 1733209 - RNA, 11 nt, Human
uccaagcuggu

SEQ ID NO: 1733210 - RNA, 14 nt, Human
uccacagugacucc

SEQ ID NO: 1733211 - RNA, 13 nt, Human
uccaagcucccag

SEQ ID NO: 1733212 - RNA, 12 nt, Human
uccaagcuccca

SEQ ID NO: 1733213 - RNA, 15 nt, Human
uccaagcucccaggc

SEQ ID NO: 1733214 - RNA, 14 nt, Human
uccaagcucccagg

SEQ ID NO: 1733215 - RNA, 16 nt, Human
uccaagcucccaggca

SEQ ID NO: 1733216 - RNA, 18 nt, Human
uccaagcuccaucuccac

SEQ ID NO: 1733217 - RNA, 15 nt, Human
uccaaaugcagcuuu

SEQ ID NO: 1733218 - RNA, 14 nt, Human
uccaaaugcagcuu

SEQ ID NO: 1733219 - RNA, 18 nt, Human
uccugugacuucagcucu

SEQ ID NO: 1733220 - RNA, 21 nt, Human
uccugcugcaguugccaguca

SEQ ID NO: 1733221 - RNA, 13 nt, Human
uccugcugcaguu

SEQ ID NO: 1733222 - RNA, 19 nt, Human
uccuggggaaccugacccc

SEQ ID NO: 1733223 - RNA, 18 nt, Human
uccuggggaaccugaccc

SEQ ID NO: 1733224 - RNA, 23 nt, Human
uccuggggguucuuucuuccucu

SEQ ID NO: 1733225 - RNA, 22 nt, Human
uccuggggguucuuucuuccuc

SEQ ID NO: 1733226 - RNA, 21 nt, Human
uccuggggguucuuucuuccu

SEQ ID NO: 1733227 - RNA, 22 nt, Human
acugcagccucaaccuccuggg

SEQ ID NO: 1733228 - RNA, 21 nt, Human
acugcagccucaaccuccugg

SEQ ID NO: 1733229 - RNA, 19 nt, Human
acugcagccucaaccuccu

SEQ ID NO: 1733230 - RNA, 13 nt, Human
acugcacuguuuu

SEQ ID NO: 1733231 - RNA, 23 nt, Human
acugcagccucaaccuccugggc

SEQ ID NO: 1733232 - RNA, 16 nt, Human
acugcagggacugcca

SEQ ID NO: 1733233 - RNA, 18 nt, Human
acugcagggacugccagu

SEQ ID NO: 1733234 - RNA, 17 nt, Human
acugcagggacugccag

SEQ ID NO: 1733235 - RNA, 24 nt, Human
uccugugucuugcaauggcagccu

SEQ ID NO: 1733236 - RNA, 23 nt, Human
uccugugucuugcaauggcagcc

SEQ ID NO: 1733237 - RNA, 14 nt, Human
uccugugugugcgc

SEQ ID NO: 1733238 - RNA, 13 nt, Human
uccugugugugcg

SEQ ID NO: 1733239 - RNA, 18 nt, Human
uccugugugugcgccuac

SEQ ID NO: 1733240 - RNA, 19 nt, Human
uccuguucccaugagauga

SEQ ID NO: 1733241 - RNA, 19 nt, Human
uccuguucuuaagacguga

SEQ ID NO: 1733242 - RNA, 17 nt, Human
uccuguugucaagaaua

SEQ ID NO: 1733243 - RNA, 22 nt, Human
acugcacagugcaucucagccc

SEQ ID NO: 1733244 - RNA, 18 nt, Human
acugcacagugcaucuca

SEQ ID NO: 1733245 - RNA, 16 nt, Human
acugcacagugcaucu

SEQ ID NO: 1733246 - RNA, 20 nt, Human
uccugaguagcugggauuac

SEQ ID NO: 1733247 - RNA, 19 nt, Human
uccugaguagcuggauuac

SEQ ID NO: 1733248 - RNA, 20 nt, Human
uccugccucgaacuggcugc

SEQ ID NO: 1733249 - RNA, 21 nt, Human
uccugccucgaacuggcugca

SEQ ID NO: 1733250 - RNA, 20 nt, Human
uccugcaggcagccaggcca

SEQ ID NO: 1733251 - RNA, 19 nt, Human
uccugcaggcagccaggcc

SEQ ID NO: 1733252 - RNA, 17 nt, Human
uccugcaggcagccagg

SEQ ID NO: 1733253 - RNA, 16 nt, Human
uccugcaggcagccag

SEQ ID NO: 1733254 - RNA, 19 nt, Human
uccugccucagccucccaa

SEQ ID NO: 1733255 - RNA, 22 nt, Human
uccugcaggcagccaggccaca

SEQ ID NO: 1733256 - RNA, 17 nt, Human
acugaggggaggggagc

SEQ ID NO: 1733257 - RNA, 22 nt, Human
acugaggggaggggagcauggg

SEQ ID NO: 1733258 - RNA, 14 nt, Human
acugaggaucagag

SEQ ID NO: 1733259 - RNA, 15 nt, Human
acugaggaccagcca

SEQ ID NO: 1733260 - RNA, 15 nt, Human
uccucuccccagcaa

SEQ ID NO: 1733261 - RNA, 18 nt, Human
acugaguacguugugcau

SEQ ID NO: 1733262 - RNA, 19 nt, Human
acugaguacguugugcauu

SEQ ID NO: 1733263 - RNA, 21 nt, Human
acugaguacguugugcauuug

SEQ ID NO: 1733264 - RNA, 22 nt, Human
acugaguacguugugcauuugg

SEQ ID NO: 1733265 - RNA, 23 nt, Human
acugaguacguugugcauuuggu

SEQ ID NO: 1733266 - RNA, 16 nt, Human
acugagugccuuuugg

SEQ ID NO: 1733267 - RNA, 14 nt, Human
acugcaaccuccgc

SEQ ID NO: 1733268 - RNA, 13 nt, Human
acugcaaccuccg

SEQ ID NO: 1733269 - RNA, 22 nt, Human
acugcaaccuccgccucuuggg

SEQ ID NO: 1733270 - RNA, 16 nt, Human
acugcaaccuccgccu

SEQ ID NO: 1733271 - RNA, 23 nt, Human
acugcaaccuucgccaccugggu

SEQ ID NO: 1733272 - RNA, 20 nt, Human
acugcaaccuucgccaccug

SEQ ID NO: 1733273 - RNA, 20 nt, Human
acuguacagacagaaaaaac

SEQ ID NO: 1733274 - RNA, 15 nt, Human
acuguacaaaguaga

SEQ ID NO: 1733275 - RNA, 14 nt, Human
acuguacaaaguag

SEQ ID NO: 1733276 - RNA, 13 nt, Human
acuguacaaagua

SEQ ID NO: 1733277 - RNA, 19 nt, Human
acuguaauuugugauacaa

SEQ ID NO: 1733278 - RNA, 23 nt, Human
acuguacaugaaaacacauuuuu

SEQ ID NO: 1733279 - RNA, 13 nt, Human
acuguacaugaaa

SEQ ID NO: 1733280 - RNA, 14 nt, Human
acuguacaugaaaa

SEQ ID NO: 1733281 - RNA, 15 nt, Human
acuguacuccuccca

SEQ ID NO: 1733282 - RNA, 23 nt, Human
acuguagaaaagggaacugaaca

SEQ ID NO: 1733283 - RNA, 14 nt, Human
acuguacuccuccc

SEQ ID NO: 1733284 - RNA, 13 nt, Human
acuguacuccucc

SEQ ID NO: 1733285 - RNA, 14 nt, Human
ucgcuccugugucu

SEQ ID NO: 1733286 - RNA, 17 nt, Human
acugggagaaaugaaaa

SEQ ID NO: 1733287 - RNA, 13 nt, Human
ucgcuccuguguc

SEQ ID NO: 1733288 - RNA, 12 nt, Human
ucgcuccugugu

SEQ ID NO: 1733289 - RNA, 19 nt, Human
acuggguacuuguggacac

SEQ ID NO: 1733290 - RNA, 23 nt, Human
acuggguacuuguggacacagcu

SEQ ID NO: 1733291 - RNA, 20 nt, Human
acuggguacuuguggacaca

SEQ ID NO: 1733292 - RNA, 16 nt, Human
acuguaaggcaaucau

SEQ ID NO: 1733293 - RNA, 15 nt, Human
ucgaacuggcugcaa

SEQ ID NO: 1733294 - RNA, 14 nt, Human
ucgaacuggcugca

SEQ ID NO: 1733295 - RNA, 15 nt, Human
uccuuucaccacaug

SEQ ID NO: 1733296 - RNA, 20 nt, Human
uccuuucacaaccuucugug

SEQ ID NO: 1733297 - RNA, 19 nt, Human
uccuuucacaaccuucugu

SEQ ID NO: 1733298 - RNA, 18 nt, Human
uccuuucacaaccuucug

SEQ ID NO: 1733299 - RNA, 16 nt, Human
uccuuucacaaccuuc

SEQ ID NO: 1733300 - RNA, 13 nt, Human
ucgcgacaaugca

SEQ ID NO: 1733301 - RNA, 14 nt, Human
ucgcgacaaugcaa

SEQ ID NO: 1733302 - RNA, 17 nt, Human
ucgaggacagggaggug

SEQ ID NO: 1733303 - RNA, 14 nt, Human
ucgaggacagggag

SEQ ID NO: 1733304 - RNA, 15 nt, Human
ucgagcaugccugga

SEQ ID NO: 1733305 - RNA, 14 nt, Human
ucgagcaugccugg

SEQ ID NO: 1733306 - RNA, 13 nt, Human
ucgaccugccucg

SEQ ID NO: 1733307 - RNA, 21 nt, Human
acugcuugugaaaggaaagag

SEQ ID NO: 1733308 - RNA, 22 nt, Human
acuggauuaaacuuaaucuaaa

SEQ ID NO: 1733309 - RNA, 13 nt, Human
acugcuggcugcc

SEQ ID NO: 1733310 - RNA, 23 nt, Human
acugcuuccagugaggcucugcc

SEQ ID NO: 1733311 - RNA, 22 nt, Human
acugcuuccagugaggcucugc

SEQ ID NO: 1733312 - RNA, 21 nt, Human
acugcuuccagugaggcucug

SEQ ID NO: 1733313 - RNA, 18 nt, Human
acugcuuccagugaggcu

SEQ ID NO: 1733314 - RNA, 21 nt, Human
acugcugcccagccuccaagc

SEQ ID NO: 1733315 - RNA, 18 nt, Human
acugcugcccagccucca

SEQ ID NO: 1733316 - RNA, 16 nt, Human
acugcugcccagccuc

SEQ ID NO: 1733317 - RNA, 12 nt, Human
acugcuggcugc

SEQ ID NO: 1733318 - RNA, 12 nt, Human
acugcucugaug

SEQ ID NO: 1733319 - RNA, 13 nt, Human
uccuucagccuga

SEQ ID NO: 1733320 - RNA, 11 nt, Human
uccuucagugc

SEQ ID NO: 1733321 - RNA, 12 nt, Human
uccuucagugcc

SEQ ID NO: 1733322 - RNA, 20 nt, Human
uccuucagugccuuauggaa

SEQ ID NO: 1733323 - RNA, 13 nt, Human
uccuucagugccu

SEQ ID NO: 1733324 - RNA, 22 nt, Human
uccuucagugccuuauggaaca

SEQ ID NO: 1733325 - RNA, 14 nt, Human
uccuucagugccuu

SEQ ID NO: 1733326 - RNA, 16 nt, Human
uccuuccucugaggcu

SEQ ID NO: 1733327 - RNA, 17 nt, Human
uccuuccucugagccuu

SEQ ID NO: 1733328 - RNA, 16 nt, Human
uccuuccucugagccu

SEQ ID NO: 1733329 - RNA, 23 nt, Human
acuggccucugcugauccuccca

SEQ ID NO: 1733330 - RNA, 22 nt, Human
acuggcugcaaaggguaucagg

SEQ ID NO: 1733331 - RNA, 14 nt, Human
acuaaaauaauuuu

SEQ ID NO: 1733332 - RNA, 20 nt, Human
acuaaaauaauuuuguaaug

SEQ ID NO: 1733333 - RNA, 15 nt, Human
acuaaaauaauuuug

SEQ ID NO: 1733334 - RNA, 16 nt, Human
acuaaaauaauuuugu

SEQ ID NO: 1733335 - RNA, 17 nt, Human
acuaaaauaauuuugua

SEQ ID NO: 1733336 - RNA, 19 nt, Human
acuaaaauaauuuuguaau

SEQ ID NO: 1733337 - RNA, 15 nt, Human
acuacaguccuccca

SEQ ID NO: 1733338 - RNA, 17 nt, Human
acuaaccagcagaaaug

SEQ ID NO: 1733339 - RNA, 23 nt, Human
acuacaggugugagucaccaagc

SEQ ID NO: 1733340 - RNA, 13 nt, Human
acuaaccacgcug

SEQ ID NO: 1733341 - RNA, 16 nt, Human
acuaaccagcagaaau

SEQ ID NO: 1733342 - RNA, 12 nt, Human
acguuucuaaag

SEQ ID NO: 1733343 - RNA, 14 nt, Human
uccagcucaccagc

SEQ ID NO: 1733344 - RNA, 15 nt, Human
uccagcucaccagcc

SEQ ID NO: 1733345 - RNA, 24 nt, Human
uccagccugggugacagagcaagu

SEQ ID NO: 1733346 - RNA, 13 nt, Human
uccagccugggug

SEQ ID NO: 1733347 - RNA, 15 nt, Human
acguuucuaaaggcu

SEQ ID NO: 1733348 - RNA, 14 nt, Human
acguuucuaaaggc

SEQ ID NO: 1733349 - RNA, 13 nt, Human
acuaaaaauacaa

SEQ ID NO: 1733350 - RNA, 22 nt, Human
ucccagugccgagaaggaagcc

SEQ ID NO: 1733351 - RNA, 19 nt, Human
ucccagugccgagaaggaa

SEQ ID NO: 1733352 - RNA, 16 nt, Human
acuacaguccucccau

SEQ ID NO: 1733353 - RNA, 17 nt, Human
acuacaguccucccauc

SEQ ID NO: 1733354 - RNA, 19 nt, Human
ucccaucucacacaugagc

SEQ ID NO: 1733355 - RNA, 14 nt, Human
ucccaucucacaca

SEQ ID NO: 1733356 - RNA, 13 nt, Human
ucccaucucacac

SEQ ID NO: 1733357 - RNA, 16 nt, Human
ucccauaugccugggc

SEQ ID NO: 1733358 - RNA, 15 nt, Human
ucccauaugccuggg

SEQ ID NO: 1733359 - RNA, 15 nt, Human
uccccaagccuggca

SEQ ID NO: 1733360 - RNA, 18 nt, Human
acuauagccuaggugaca

SEQ ID NO: 1733361 - RNA, 17 nt, Human
acuauagccuaggugac

SEQ ID NO: 1733362 - RNA, 23 nt, Human
acuauaauuuaccugaagucuuu

SEQ ID NO: 1733363 - RNA, 24 nt, Human
uccccaccgcagacaggaccaggg

SEQ ID NO: 1733364 - RNA, 23 nt, Human
uccccaggaggccagccuugacc

SEQ ID NO: 1733365 - RNA, 18 nt, Human
acuauguugcccaggcag

SEQ ID NO: 1733366 - RNA, 22 nt, Human
acuaugaaguuuuuuuuauaca

SEQ ID NO: 1733367 - RNA, 18 nt, Human
acuaucccggcugcccuu

SEQ ID NO: 1733368 - RNA, 17 nt, Human
acuaucccggcugcccu

SEQ ID NO: 1733369 - RNA, 16 nt, Human
acuaucccggcugccc

SEQ ID NO: 1733370 - RNA, 22 nt, Human
acuaucaugucaaacgugaaaa

SEQ ID NO: 1733371 - RNA, 23 nt, Human
acuauguugcccaggcaggucuu

SEQ ID NO: 1733372 - RNA, 20 nt, Human
acuauguugcccaggcaggu

SEQ ID NO: 1733373 - RNA, 19 nt, Human
acuauguugcccaggcagg

SEQ ID NO: 1733374 - RNA, 18 nt, Human
ucccuauuagagaagaga

SEQ ID NO: 1733375 - RNA, 18 nt, Human
ucccgaauagcugggacu

SEQ ID NO: 1733376 - RNA, 20 nt, Human
ucccgcucagcccucccugc

SEQ ID NO: 1733377 - RNA, 16 nt, Human
ucccgcucagcccucc

SEQ ID NO: 1733378 - RNA, 15 nt, Human
ucccgcucagcccuc

SEQ ID NO: 1733379 - RNA, 14 nt, Human
ucccgcucagcccu

SEQ ID NO: 1733380 - RNA, 13 nt, Human
ucccgcucagccc

SEQ ID NO: 1733381 - RNA, 16 nt, Human
ucccgaauagcuggga

SEQ ID NO: 1733382 - RNA, 15 nt, Human
ucccgaauagcuggg

SEQ ID NO: 1733383 - RNA, 17 nt, Human
acucaagacuuccagag

SEQ ID NO: 1733384 - RNA, 20 nt, Human
acucaagacuuccagagccu

SEQ ID NO: 1733385 - RNA, 20 nt, Human
acuccagcuggguuggaaaa

SEQ ID NO: 1733386 - RNA, 14 nt, Human
acuccuaccuggua

SEQ ID NO: 1733387 - RNA, 21 nt, Human
ucccucagucuggcccuuccu

SEQ ID NO: 1733388 - RNA, 22 nt, Human
ucccucauccucauacccaccc

SEQ ID NO: 1733389 - RNA, 18 nt, Human
acucaucuagguaaauua

SEQ ID NO: 1733390 - RNA, 16 nt, Human
acucaucuagguaaau

SEQ ID NO: 1733391 - RNA, 23 nt, Human
ucccucauuccaccuucccaugc

SEQ ID NO: 1733392 - RNA, 21 nt, Human
acucaucuagguaaauuacag

SEQ ID NO: 1733393 - RNA, 23 nt, Human
ucccuuugacgccaucccagccc

SEQ ID NO: 1733394 - RNA, 22 nt, Human
ucccuuugacgccaucccagcc

SEQ ID NO: 1733395 - RNA, 14 nt, Human
uccuaggcauuugc

SEQ ID NO: 1733396 - RNA, 20 nt, Human
uccuagcacuuugggaggcc

SEQ ID NO: 1733397 - RNA, 22 nt, Human
ucccuuacgugaguccuggcau

SEQ ID NO: 1733398 - RNA, 18 nt, Human
ucccuuacgugaguccug

SEQ ID NO: 1733399 - RNA, 21 nt, Human
ucccuucaaccauuccccaug

SEQ ID NO: 1733400 - RNA, 11 nt, Human
ucccuucaacc

SEQ ID NO: 1733401 - RNA, 22 nt, Human
ucccuuuccaaaugcccagcuu

SEQ ID NO: 1733402 - RNA, 23 nt, Human
acuccugcacacgcuccuuccuc

SEQ ID NO: 1733403 - RNA, 17 nt, Human
acucuccucugcugcug

SEQ ID NO: 1733404 - RNA, 23 nt, Human
acucgcgacaaugcaaaccauca

SEQ ID NO: 1733405 - RNA, 20 nt, Human
acucgcgacaaugcaaacca

SEQ ID NO: 1733406 - RNA, 19 nt, Human
uccuaggcauuugcugaau

SEQ ID NO: 1733407 - RNA, 18 nt, Human
acucgcgacaaugcaaac

SEQ ID NO: 1733408 - RNA, 19 nt, Human
acucuccucugcugcuggc

SEQ ID NO: 1733409 - RNA, 18 nt, Human
acucuccucugcugcugg

SEQ ID NO: 1733410 - RNA, 21 nt, Human
acucuccucugcugcuggcug

SEQ ID NO: 1733411 - RNA, 19 nt, Human
uccucccucccucuuuccc

SEQ ID NO: 1733412 - RNA, 15 nt, Human
uccucccucccucuu

SEQ ID NO: 1733413 - RNA, 17 nt, Human
uccucccucccucuuuc

SEQ ID NO: 1733414 - RNA, 12 nt, Human
uccucuccccag

SEQ ID NO: 1733415 - RNA, 16 nt, Human
uccucuccacugccuu

SEQ ID NO: 1733416 - RNA, 15 nt, Human
uccucuccacugccu

SEQ ID NO: 1733417 - RNA, 14 nt, Human
uccucuccacugcc

SEQ ID NO: 1733418 - RNA, 13 nt, Human
uccucuccacugc

SEQ ID NO: 1733419 - RNA, 12 nt, Human
uccucuccacug

SEQ ID NO: 1733420 - RNA, 18 nt, Human
uccucauacccaccccca

SEQ ID NO: 1733421 - RNA, 14 nt, Human
uccucauacccacc

SEQ ID NO: 1733422 - RNA, 22 nt, Human
uccucauacccacccccaccca

SEQ ID NO: 1733423 - RNA, 16 nt, Human
uccuccccuccuccug

SEQ ID NO: 1733424 - RNA, 20 nt, Human
uccuccccuccuccuggacu

SEQ ID NO: 1733425 - RNA, 18 nt, Human
uccuccccuccuccugga

SEQ ID NO: 1733426 - RNA, 22 nt, Human
uccuccccuccuccuggacucc

SEQ ID NO: 1733427 - RNA, 19 nt, Human
acucuuauugcccacgcug

SEQ ID NO: 1733428 - RNA, 16 nt, Human
acucuuauugcccacg

SEQ ID NO: 1733429 - RNA, 20 nt, Human
uccucagaucuucugugggu

SEQ ID NO: 1733430 - RNA, 18 nt, Human
uaugcucugcauguuaca

SEQ ID NO: 1733431 - RNA, 19 nt, Human
uaugcucugcauguuacau

SEQ ID NO: 1733432 - RNA, 14 nt, Human
uauggccuguggau

SEQ ID NO: 1733433 - RNA, 22 nt, Human
uauggccugugagcuaggaauu

SEQ ID NO: 1733434 - RNA, 16 nt, Human
uauggcuuuugugcau

SEQ ID NO: 1733435 - RNA, 15 nt, Human
acagccuggcacagg

SEQ ID NO: 1733436 - RNA, 14 nt, Human
acagccuggcacag

SEQ ID NO: 1733437 - RNA, 15 nt, Human
acagcuaacauggaa

SEQ ID NO: 1733438 - RNA, 14 nt, Human
acagcuaacaugga

SEQ ID NO: 1733439 - RNA, 17 nt, Human
acagcuaacauggaagu

SEQ ID NO: 1733440 - RNA, 20 nt, Human
acagcuaaucagcauucuca

SEQ ID NO: 1733441 - RNA, 15 nt, Human
uaucuugaagacuuu

SEQ ID NO: 1733442 - RNA, 15 nt, Human
uaucuugaauaaugu

SEQ ID NO: 1733443 - RNA, 13 nt, Human
uaugaggcauuug

SEQ ID NO: 1733444 - RNA, 23 nt, Human
uaugaucacggcucacugcagcc

SEQ ID NO: 1733445 - RNA, 21 nt, Human
uaugaucacggcucacugcag

SEQ ID NO: 1733446 - RNA, 18 nt, Human
acagaguuuucacucuua

SEQ ID NO: 1733447 - RNA, 15 nt, Human
acagaguuguuacau

SEQ ID NO: 1733448 - RNA, 20 nt, Human
acagaguuuucacucuuauu

SEQ ID NO: 1733449 - RNA, 18 nt, Human
acagcagccccugcacaa

SEQ ID NO: 1733450 - RNA, 17 nt, Human
uaucucccccagcccca

SEQ ID NO: 1733451 - RNA, 18 nt, Human
uaucucccccagccccau

SEQ ID NO: 1733452 - RNA, 19 nt, Human
uaucuagauacuguaucau

SEQ ID NO: 1733453 - RNA, 10 nt, Human
uaucagaauu

SEQ ID NO: 1733454 - RNA, 15 nt, Human
uaucuagauacugua

SEQ ID NO: 1733455 - RNA, 16 nt, Human
uaucuagauacuguau

SEQ ID NO: 1733456 - RNA, 20 nt, Human
acagagcccacgcccccacu

SEQ ID NO: 1733457 - RNA, 16 nt, Human
acagagcuacacaggg

SEQ ID NO: 1733458 - RNA, 18 nt, Human
acagagcuacacagggga

SEQ ID NO: 1733459 - RNA, 21 nt, Human
acagagugagacucugucuca

SEQ ID NO: 1733460 - RNA, 14 nt, Human
acagacuucugaaa

SEQ ID NO: 1733461 - RNA, 13 nt, Human
acagacuucugaa

SEQ ID NO: 1733462 - RNA, 20 nt, Human
acagacuggauguaccacca

SEQ ID NO: 1733463 - RNA, 15 nt, Human
uauauuuacaaaugg

SEQ ID NO: 1733464 - RNA, 21 nt, Human
uaucaaguauuauaccuuuuu

SEQ ID NO: 1733465 - RNA, 14 nt, Human
uauauuuacaaaug

SEQ ID NO: 1733466 - RNA, 18 nt, Human
uaucacccagaagaaaau

SEQ ID NO: 1733467 - RNA, 23 nt, Human
acagacacaggcccggcuccagg

SEQ ID NO: 1733468 - RNA, 13 nt, Human
acacuccuucaca

SEQ ID NO: 1733469 - RNA, 11 nt, Human
acacuccuuca

SEQ ID NO: 1733470 - RNA, 16 nt, Human
acagacccugcccugu

SEQ ID NO: 1733471 - RNA, 17 nt, Human
acagacccugcccugug

SEQ ID NO: 1733472 - RNA, 15 nt, Human
acagacagcccucca

SEQ ID NO: 1733473 - RNA, 13 nt, Human
acagacagcccuc

SEQ ID NO: 1733474 - RNA, 20 nt, Human
acagacccugcccugugggc

SEQ ID NO: 1733475 - RNA, 18 nt, Human
acagacccugcccugugg

SEQ ID NO: 1733476 - RNA, 14 nt, Human
acagacuggaagca

SEQ ID NO: 1733477 - RNA, 16 nt, Human
uauauugauccagaaa

SEQ ID NO: 1733478 - RNA, 23 nt, Human
acaagcugcacccucaggcaggu

SEQ ID NO: 1733479 - RNA, 22 nt, Human
acaagcugcacccucaggcagg

SEQ ID NO: 1733480 - RNA, 21 nt, Human
acaagcugcacccucaggcag

SEQ ID NO: 1733481 - RNA, 19 nt, Human
acaagcugcacccucaggc

SEQ ID NO: 1733482 - RNA, 21 nt, Human
uagucaggugccucaagagaa

SEQ ID NO: 1733483 - RNA, 20 nt, Human
uaguuccucauuagcauuuu

SEQ ID NO: 1733484 - RNA, 17 nt, Human
uauaaaagccuguuuaa

SEQ ID NO: 1733485 - RNA, 14 nt, Human
uauaaaagccuguu

SEQ ID NO: 1733486 - RNA, 12 nt, Human
uauaaaagccug

SEQ ID NO: 1733487 - RNA, 19 nt, Human
acacaugcaaggucauuuu

SEQ ID NO: 1733488 - RNA, 20 nt, Human
acacaugcaaggucauuuuu

SEQ ID NO: 1733489 - RNA, 18 nt, Human
acacaugcaaggucauuu

SEQ ID NO: 1733490 - RNA, 21 nt, Human
acacaugcaaggucauuuuuu

SEQ ID NO: 1733491 - RNA, 21 nt, Human
acacccagcccacuucugcca

SEQ ID NO: 1733492 - RNA, 20 nt, Human
acacccagcccacuucugcc

SEQ ID NO: 1733493 - RNA, 19 nt, Human
acacccagcccacuucugc

SEQ ID NO: 1733494 - RNA, 18 nt, Human
acacccugugauggggcc

SEQ ID NO: 1733495 - RNA, 12 nt, Human
acacccugugau

SEQ ID NO: 1733496 - RNA, 11 nt, Human
acacccuguga

SEQ ID NO: 1733497 - RNA, 19 nt, Human
acacccugugauggggccc

SEQ ID NO: 1733498 - RNA, 16 nt, Human
acaccgggccuggaga

SEQ ID NO: 1733499 - RNA, 13 nt, Human
uauaggaauugac

SEQ ID NO: 1733500 - RNA, 14 nt, Human
uauaggaauugacc

SEQ ID NO: 1733501 - RNA, 19 nt, Human
uauaggaauugacccacaa

SEQ ID NO: 1733502 - RNA, 20 nt, Human
uauagccuaggugacagagu

SEQ ID NO: 1733503 - RNA, 23 nt, Human
acacucauugaccugaggcccuu

SEQ ID NO: 1733504 - RNA, 21 nt, Human
acacucauugaccugaggccc

SEQ ID NO: 1733505 - RNA, 13 nt, Human
uauauaucaaaua

SEQ ID NO: 1733506 - RNA, 14 nt, Human
uauacauuugauaa

SEQ ID NO: 1733507 - RNA, 21 nt, Human
uauacacuuacacuuuaugca

SEQ ID NO: 1733508 - RNA, 13 nt, Human
uauacauaaacaa

SEQ ID NO: 1733509 - RNA, 14 nt, Human
uauacauaaacaag

SEQ ID NO: 1733510 - RNA, 20 nt, Human
uauaaccaguguuguggauu

SEQ ID NO: 1733511 - RNA, 23 nt, Human
acaguucggugagcuacaaaugc

SEQ ID NO: 1733512 - RNA, 16 nt, Human
acaguucucuccuucu

SEQ ID NO: 1733513 - RNA, 19 nt, Human
acaguucggugagcuacaa

SEQ ID NO: 1733514 - RNA, 22 nt, Human
acaguucggugagcuacaaaug

SEQ ID NO: 1733515 - RNA, 13 nt, Human
acaguuacucaga

SEQ ID NO: 1733516 - RNA, 20 nt, Human
acaguuacucagaauucucu

SEQ ID NO: 1733517 - RNA, 20 nt, Human
acaguucaauucucauuugu

SEQ ID NO: 1733518 - RNA, 16 nt, Human
uauucuguuggccagu

SEQ ID NO: 1733519 - RNA, 15 nt, Human
uauucuuauuuaaug

SEQ ID NO: 1733520 - RNA, 20 nt, Human
uauucucuccuguaccucuu

SEQ ID NO: 1733521 - RNA, 24 nt, Human
uauucucuccuguaccucuugagc

SEQ ID NO: 1733522 - RNA, 17 nt, Human
acaguucucuccuucuu

SEQ ID NO: 1733523 - RNA, 17 nt, Human
uauugguguaagguacu

SEQ ID NO: 1733524 - RNA, 18 nt, Human
uauuuacuucuuauacau

SEQ ID NO: 1733525 - RNA, 20 nt, Human
uauuuagcaccagggaaggg

SEQ ID NO: 1733526 - RNA, 23 nt, Human
uauuuaauuuuuuugagacagag

SEQ ID NO: 1733527 - RNA, 14 nt, Human
uauuuaauucaugu

SEQ ID NO: 1733528 - RNA, 14 nt, Human
uauuuauuuaaauu

SEQ ID NO: 1733529 - RNA, 14 nt, Human
uauuuauuuaguau

SEQ ID NO: 1733530 - RNA, 13 nt, Human
uauuuauuuaaau

SEQ ID NO: 1733531 - RNA, 19 nt, Human
uauuuaguguucauaaaua

SEQ ID NO: 1733532 - RNA, 11 nt, Human
uauuguacagu

SEQ ID NO: 1733533 - RNA, 12 nt, Human
uauuguacaguu

SEQ ID NO: 1733534 - RNA, 13 nt, Human
uauuguacaguuu

SEQ ID NO: 1733535 - RNA, 14 nt, Human
uauuguacaguuuu

SEQ ID NO: 1733536 - RNA, 15 nt, Human
uauuguacaguuuuu

SEQ ID NO: 1733537 - RNA, 17 nt, Human
uauuguacaguuuuuau

SEQ ID NO: 1733538 - RNA, 17 nt, Human
uauugucaaagugguga

SEQ ID NO: 1733539 - RNA, 13 nt, Human
uauugucaaagug

SEQ ID NO: 1733540 - RNA, 21 nt, Human
uauuuaaugaaagacuguaca

SEQ ID NO: 1733541 - RNA, 15 nt, Human
uauuuaaugaaagac

SEQ ID NO: 1733542 - RNA, 20 nt, Human
acagugaaagaaaauaacaa

SEQ ID NO: 1733543 - RNA, 15 nt, Human
acagucuuguauuaa

SEQ ID NO: 1733544 - RNA, 18 nt, Human
acagucuuguauuaaguu

SEQ ID NO: 1733545 - RNA, 22 nt, Human
acagucuuguauuaaguuguua

SEQ ID NO: 1733546 - RNA, 14 nt, Human
acagucuuguauua

SEQ ID NO: 1733547 - RNA, 22 nt, Human
acaguccuuaccagcagagcac

SEQ ID NO: 1733548 - RNA, 21 nt, Human
acaguccuuaccagcagagca

SEQ ID NO: 1733549 - RNA, 15 nt, Human
acaguuaagagaaau

SEQ ID NO: 1733550 - RNA, 14 nt, Human
acagugagacucug

SEQ ID NO: 1733551 - RNA, 18 nt, Human
acagugagacucugucuc

SEQ ID NO: 1733552 - RNA, 21 nt, Human
acaguauggcagcuuuccuca

SEQ ID NO: 1733553 - RNA, 22 nt, Human
acagggcacaccgggcacucag

SEQ ID NO: 1733554 - RNA, 22 nt, Human
acagguuuuccugaagaauuga

SEQ ID NO: 1733555 - RNA, 17 nt, Human
acaggcugggcuucagu

SEQ ID NO: 1733556 - RNA, 14 nt, Human
acaggcugggcuuc

SEQ ID NO: 1733557 - RNA, 21 nt, Human
acaggcugggcuucaguggca

SEQ ID NO: 1733558 - RNA, 19 nt, Human
acaguauuacuucugcuac

SEQ ID NO: 1733559 - RNA, 17 nt, Human
acaguauuacuucugcu

SEQ ID NO: 1733560 - RNA, 16 nt, Human
acaguauuacuucugc

SEQ ID NO: 1733561 - RNA, 15 nt, Human
acaguauuacuucug

SEQ ID NO: 1733562 - RNA, 13 nt, Human
acagucccugcca

SEQ ID NO: 1733563 - RNA, 15 nt, Human
acaguccucccaucu

SEQ ID NO: 1733564 - RNA, 14 nt, Human
acaguccucccauc

SEQ ID NO: 1733565 - RNA, 13 nt, Human
acaguccucccau

SEQ ID NO: 1733566 - RNA, 15 nt, Human
acagucccugccaau

SEQ ID NO: 1733567 - RNA, 20 nt, Human
acaguccuuaccagcagagc

SEQ ID NO: 1733568 - RNA, 18 nt, Human
acaguccuuaccagcaga

SEQ ID NO: 1733569 - RNA, 17 nt, Human
acaguccucccaucuca

SEQ ID NO: 1733570 - RNA, 23 nt, Human
uauucauagcagcuuauucacaa

SEQ ID NO: 1733571 - RNA, 22 nt, Human
uauucaggaagcucagggccug

SEQ ID NO: 1733572 - RNA, 18 nt, Human
uauucaggaagcucaggg

SEQ ID NO: 1733573 - RNA, 15 nt, Human
uauucagcucaugga

SEQ ID NO: 1733574 - RNA, 16 nt, Human
uauuaccacagacaua

SEQ ID NO: 1733575 - RNA, 12 nt, Human
uauuagagaaga

SEQ ID NO: 1733576 - RNA, 23 nt, Human
uauuaaaaaucucaaauuucuaa

SEQ ID NO: 1733577 - RNA, 19 nt, Human
uauguuuuaagaggcaggg

SEQ ID NO: 1733578 - RNA, 17 nt, Human
uauguuuuaagaggcag

SEQ ID NO: 1733579 - RNA, 16 nt, Human
uauuaaaaaucucaaa

SEQ ID NO: 1733580 - RNA, 18 nt, Human
uauuaaaaaucucaaauu

SEQ ID NO: 1733581 - RNA, 20 nt, Human
uauuaaaaaucucaaauuuc

SEQ ID NO: 1733582 - RNA, 22 nt, Human
uauuaaaaaucucaaauuucua

SEQ ID NO: 1733583 - RNA, 20 nt, Human
aauuguguuuauaauuuuaa

SEQ ID NO: 1733584 - RNA, 22 nt, Human
aauuguuuggggaugagaaagg

SEQ ID NO: 1733585 - RNA, 12 nt, Human
aauugcuccuug

SEQ ID NO: 1733586 - RNA, 19 nt, Human
aauuuacauacucugcuua

SEQ ID NO: 1733587 - RNA, 13 nt, Human
aauuuaaaagucu

SEQ ID NO: 1733588 - RNA, 20 nt, Human
aauuugaaacacuuugcaua

SEQ ID NO: 1733589 - RNA, 16 nt, Human
aauuucucuacugucu

SEQ ID NO: 1733590 - RNA, 13 nt, Human
aauuucuaaaucu

SEQ ID NO: 1733591 - RNA, 21 nt, Human
aauuucuaaaucuccaaaaua

SEQ ID NO: 1733592 - RNA, 15 nt, Human
aauuuaccugaaguc

SEQ ID NO: 1733593 - RNA, 17 nt, Human
aauuuagaaauauaauu

SEQ ID NO: 1733594 - RNA, 21 nt, Human
aauucuugccaaauauaaaua

SEQ ID NO: 1733595 - RNA, 14 nt, Human
aauucuugcaaagu

SEQ ID NO: 1733596 - RNA, 20 nt, Human
aauucuugcaaaguaucccu

SEQ ID NO: 1733597 - RNA, 22 nt, Human
aauucuucuccacuuucuagcc

SEQ ID NO: 1733598 - RNA, 16 nt, Human
aauugacccacaagaa

SEQ ID NO: 1733599 - RNA, 19 nt, Human
aauugacccacaagaaaug

SEQ ID NO: 1733600 - RNA, 15 nt, Human
uacguacacauuuua

SEQ ID NO: 1733601 - RNA, 16 nt, Human
uacuauguaucaauga

SEQ ID NO: 1733602 - RNA, 16 nt, Human
uacuauaauuuaccug

SEQ ID NO: 1733603 - RNA, 14 nt, Human
uacgucugacaggc

SEQ ID NO: 1733604 - RNA, 14 nt, Human
uacguuaccaggca

SEQ ID NO: 1733605 - RNA, 13 nt, Human
uacguugugcauu

SEQ ID NO: 1733606 - RNA, 14 nt, Human
uacguugugcauuu

SEQ ID NO: 1733607 - RNA, 22 nt, Human
uacucuucaguuaagccuuugg

SEQ ID NO: 1733608 - RNA, 18 nt, Human
uacucuuauagacaacau

SEQ ID NO: 1733609 - RNA, 18 nt, Human
acaagcacuaaacaaaga

SEQ ID NO: 1733610 - RNA, 18 nt, Human
acaagagcccaggccucc

SEQ ID NO: 1733611 - RNA, 17 nt, Human
acaagagcccaggccuc

SEQ ID NO: 1733612 - RNA, 21 nt, Human
acaagcgugagccacugcacc

SEQ ID NO: 1733613 - RNA, 20 nt, Human
acaagcgugagccacugcac

SEQ ID NO: 1733614 - RNA, 13 nt, Human
acaagcugcaccc

SEQ ID NO: 1733615 - RNA, 12 nt, Human
acaagccacccc

SEQ ID NO: 1733616 - RNA, 13 nt, Human
acaagccagcugg

SEQ ID NO: 1733617 - RNA, 15 nt, Human
acaagccagcuggag

SEQ ID NO: 1733618 - RNA, 12 nt, Human
acaacacucaca

SEQ ID NO: 1733619 - RNA, 15 nt, Human
acaacaacaaaauga

SEQ ID NO: 1733620 - RNA, 18 nt, Human
acaaauucugucucugga

SEQ ID NO: 1733621 - RNA, 15 nt, Human
acaacaaccugguca

SEQ ID NO: 1733622 - RNA, 18 nt, Human
uagcauuguaaaagcauu

SEQ ID NO: 1733623 - RNA, 19 nt, Human
uagcauuguaaaagcauuu

SEQ ID NO: 1733624 - RNA, 21 nt, Human
uagcaugucgucaaagcugaa

SEQ ID NO: 1733625 - RNA, 16 nt, Human
uagcaccagggaaggg

SEQ ID NO: 1733626 - RNA, 14 nt, Human
uagcaccagggaag

SEQ ID NO: 1733627 - RNA, 13 nt, Human
uagcaccagggaa

SEQ ID NO: 1733628 - RNA, 19 nt, Human
uagcacagacccugcccug

SEQ ID NO: 1733629 - RNA, 18 nt, Human
uagcacagacccugcccu

SEQ ID NO: 1733630 - RNA, 17 nt, Human
uagcacagacccugccc

SEQ ID NO: 1733631 - RNA, 16 nt, Human
uagcacagacccugcc

SEQ ID NO: 1733632 - RNA, 22 nt, Human
uagauuuuagacccuauugcug

SEQ ID NO: 1733633 - RNA, 16 nt, Human
acaaaaagcauaaaaa

SEQ ID NO: 1733634 - RNA, 15 nt, Human
uagagcuucuggcac

SEQ ID NO: 1733635 - RNA, 13 nt, Human
acaaaaacauggc

SEQ ID NO: 1733636 - RNA, 17 nt, Human
aauuuuuuugagacaga

SEQ ID NO: 1733637 - RNA, 21 nt, Human
aauuuuuuaagugaaaauaua

SEQ ID NO: 1733638 - RNA, 14 nt, Human
aauuuuuguauuuu

SEQ ID NO: 1733639 - RNA, 18 nt, Human
aauuuuuauuaaauuaug

SEQ ID NO: 1733640 - RNA, 17 nt, Human
aauuuuuauuaaauuau

SEQ ID NO: 1733641 - RNA, 14 nt, Human
uagacagucccugc

SEQ ID NO: 1733642 - RNA, 12 nt, Human
uagacagucccu

SEQ ID NO: 1733643 - RNA, 15 nt, Human
uagaacucccuuuca

SEQ ID NO: 1733644 - RNA, 17 nt, Human
uacuucaaaaguuuguu

SEQ ID NO: 1733645 - RNA, 22 nt, Human
uacuucaaaaguuuguuugcuu

SEQ ID NO: 1733646 - RNA, 15 nt, Human
uagaagucacacagu

SEQ ID NO: 1733647 - RNA, 18 nt, Human
uagaagauggcacuuaua

SEQ ID NO: 1733648 - RNA, 13 nt, Human
uagaacugaauuu

SEQ ID NO: 1733649 - RNA, 17 nt, Human
uagaacugaauuuuguc

SEQ ID NO: 1733650 - RNA, 22 nt, Human
uagaacugaauuuugucuuuau

SEQ ID NO: 1733651 - RNA, 16 nt, Human
uagacaauuuauuaug

SEQ ID NO: 1733652 - RNA, 14 nt, Human
uagacagcaugaga

SEQ ID NO: 1733653 - RNA, 19 nt, Human
uagaagucuuagauguaua

SEQ ID NO: 1733654 - RNA, 18 nt, Human
uagaagucuuagauguau

SEQ ID NO: 1733655 - RNA, 20 nt, Human
uagaagucuuagauguauau

SEQ ID NO: 1733656 - RNA, 17 nt, Human
uagaagucuuagaugua

SEQ ID NO: 1733657 - RNA, 16 nt, Human
uagaagucuuagaugu

SEQ ID NO: 1733658 - RNA, 16 nt, Human
uagaagucacacagua

SEQ ID NO: 1733659 - RNA, 13 nt, Human
uaauaccucccuu

SEQ ID NO: 1733660 - RNA, 18 nt, Human
uaauacuugcuuuggaaa

SEQ ID NO: 1733661 - RNA, 20 nt, Human
aauacaguaucucagggccu

SEQ ID NO: 1733662 - RNA, 22 nt, Human
uaauacaccacuacauucuguu

SEQ ID NO: 1733663 - RNA, 21 nt, Human
uaauacaccacuacauucugu

SEQ ID NO: 1733664 - RNA, 23 nt, Human
uaauacaccacuacauucuguua

SEQ ID NO: 1733665 - RNA, 17 nt, Human
uaaucuuuaauuuuaca

SEQ ID NO: 1733666 - RNA, 22 nt, Human
uaauccaagcaaaugugaauca

SEQ ID NO: 1733667 - RNA, 21 nt, Human
uaauauugauaugcuuauaca

SEQ ID NO: 1733668 - RNA, 15 nt, Human
aaugaaugaaugaau

SEQ ID NO: 1733669 - RNA, 14 nt, Human
aaugaaugaaacau

SEQ ID NO: 1733670 - RNA, 14 nt, Human
aaugaaugucagug

SEQ ID NO: 1733671 - RNA, 15 nt, Human
aaugaaugucagugu

SEQ ID NO: 1733672 - RNA, 23 nt, Human
aaucuucugaacuuggcgcugcc

SEQ ID NO: 1733673 - RNA, 13 nt, Human
aaucuugaaaaug

SEQ ID NO: 1733674 - RNA, 15 nt, Human
uaaugucacaggcag

SEQ ID NO: 1733675 - RNA, 17 nt, Human
uaaugucacaggcaggu

SEQ ID NO: 1733676 - RNA, 16 nt, Human
uaaugucacaggcagg

SEQ ID NO: 1733677 - RNA, 12 nt, Human
uaaugugaaacu

SEQ ID NO: 1733678 - RNA, 20 nt, Human
uaaugugaaacuggauuaaa

SEQ ID NO: 1733679 - RNA, 22 nt, Human
uaaugugaaacuggauuaaacu

SEQ ID NO: 1733680 - RNA, 23 nt, Human
uaaugugaaacuggauuaaacuu

SEQ ID NO: 1733681 - RNA, 17 nt, Human
uaauguaagcucuacug

SEQ ID NO: 1733682 - RNA, 16 nt, Human
uaauguaagcucuacu

SEQ ID NO: 1733683 - RNA, 15 nt, Human
uaauguaagacaaau

SEQ ID NO: 1733684 - RNA, 20 nt, Human
uacaauaaaaucuugaaaau

SEQ ID NO: 1733685 - RNA, 21 nt, Human
uacaagcgugagccacugcac

SEQ ID NO: 1733686 - RNA, 20 nt, Human
uacaagcgugagccacugca

SEQ ID NO: 1733687 - RNA, 19 nt, Human
uacaagcgugagccacugc

SEQ ID NO: 1733688 - RNA, 18 nt, Human
uacaagcgugagccacug

SEQ ID NO: 1733689 - RNA, 16 nt, Human
uacaagcgugagccac

SEQ ID NO: 1733690 - RNA, 16 nt, Human
uacaaaaacauggccu

SEQ ID NO: 1733691 - RNA, 15 nt, Human
uacaaaaagcauaaa

SEQ ID NO: 1733692 - RNA, 18 nt, Human
uacaagccagcuggagaa

SEQ ID NO: 1733693 - RNA, 21 nt, Human
uaauuuuuguauuuuuaguag

SEQ ID NO: 1733694 - RNA, 22 nt, Human
uaauuuuuguguuuuuaauaaa

SEQ ID NO: 1733695 - RNA, 13 nt, Human
uaauuuuuuacua

SEQ ID NO: 1733696 - RNA, 18 nt, Human
uaauuuaccugaagucuu

SEQ ID NO: 1733697 - RNA, 17 nt, Human
uaauuuaccugaagucu

SEQ ID NO: 1733698 - RNA, 13 nt, Human
uaauucauguugc

SEQ ID NO: 1733699 - RNA, 16 nt, Human
aaugcacuuuguucug

SEQ ID NO: 1733700 - RNA, 13 nt, Human
aaugcacuuuguu

SEQ ID NO: 1733701 - RNA, 20 nt, Human
aaugcacaaacagaggccgc

SEQ ID NO: 1733702 - RNA, 19 nt, Human
aaugcacaaacagaggccg

SEQ ID NO: 1733703 - RNA, 20 nt, Human
aaugcacuuuguucuggcuc

SEQ ID NO: 1733704 - RNA, 19 nt, Human
aaugcacuuuguucuggcu

SEQ ID NO: 1733705 - RNA, 23 nt, Human
uaauuaguuccucauuagcauuu

SEQ ID NO: 1733706 - RNA, 20 nt, Human
uaauuauacccccugcaaag

SEQ ID NO: 1733707 - RNA, 16 nt, Human
aaugcaaaccaucauu

SEQ ID NO: 1733708 - RNA, 15 nt, Human
aaugaccuuucaaua

SEQ ID NO: 1733709 - RNA, 14 nt, Human
aaugaccuuucaau

SEQ ID NO: 1733710 - RNA, 13 nt, Human
aaugaccuuucaa

SEQ ID NO: 1733711 - RNA, 21 nt, Human
aaugaaugucagugugacuga

SEQ ID NO: 1733712 - RNA, 20 nt, Human
aaugaaugucagugugacug

SEQ ID NO: 1733713 - RNA, 18 nt, Human
aaugcacaaacagaggcc

SEQ ID NO: 1733714 - RNA, 13 nt, Human
aaugcaaccauuu

SEQ ID NO: 1733715 - RNA, 17 nt, Human
aaugcaaccauuugaaa

SEQ ID NO: 1733716 - RNA, 18 nt, Human
aaugcaaccauuugaaac

SEQ ID NO: 1733717 - RNA, 23 nt, Human
aaugcaaaccaucauugaaaucu

SEQ ID NO: 1733718 - RNA, 22 nt, Human
aaugcaaaccaucauugaaauc

SEQ ID NO: 1733719 - RNA, 18 nt, Human
uacaguccucccaucuca

SEQ ID NO: 1733720 - RNA, 17 nt, Human
uacaguccucccaucuc

SEQ ID NO: 1733721 - RNA, 15 nt, Human
uacaguccucccauc

SEQ ID NO: 1733722 - RNA, 12 nt, Human
uacaguccuccc

SEQ ID NO: 1733723 - RNA, 18 nt, Human
uacaguaucucagggccu

SEQ ID NO: 1733724 - RNA, 15 nt, Human
uacauaaugcgugca

SEQ ID NO: 1733725 - RNA, 12 nt, Human
uacagucuugua

SEQ ID NO: 1733726 - RNA, 13 nt, Human
uacagucuuguau

SEQ ID NO: 1733727 - RNA, 13 nt, Human
aaugucacaggca

SEQ ID NO: 1733728 - RNA, 14 nt, Human
aaugucacaggcag

SEQ ID NO: 1733729 - RNA, 22 nt, Human
aaugugaaacuggauuaaacuu

SEQ ID NO: 1733730 - RNA, 21 nt, Human
aauguacagcaaggagauuua

SEQ ID NO: 1733731 - RNA, 23 nt, Human
aauguacagcaaggagauuuaca

SEQ ID NO: 1733732 - RNA, 22 nt, Human
uacagcaaggagauuuacaacu

SEQ ID NO: 1733733 - RNA, 19 nt, Human
uacagacuggauguaccac

SEQ ID NO: 1733734 - RNA, 16 nt, Human
aaugguuuaaaugguc

SEQ ID NO: 1733735 - RNA, 22 nt, Human
aaugguuuucuuguguguuuau

SEQ ID NO: 1733736 - RNA, 18 nt, Human
aaugguuuucuugugugu

SEQ ID NO: 1733737 - RNA, 17 nt, Human
aaugguuuucuugugug

SEQ ID NO: 1733738 - RNA, 15 nt, Human
aauguaagcucuacu

SEQ ID NO: 1733739 - RNA, 13 nt, Human
aauguaagcucua

SEQ ID NO: 1733740 - RNA, 13 nt, Human
aauguaagacaaa

SEQ ID NO: 1733741 - RNA, 20 nt, Human
uacauuagcaguuugcuuug

SEQ ID NO: 1733742 - RNA, 19 nt, Human
uacauuagcaguuugcuuu

SEQ ID NO: 1733743 - RNA, 13 nt, Human
aauuaaguacuau

SEQ ID NO: 1733744 - RNA, 17 nt, Human
uacauguacugauuacu

SEQ ID NO: 1733745 - RNA, 19 nt, Human
aauuaacaugaauauuuag

SEQ ID NO: 1733746 - RNA, 18 nt, Human
aauuaacuuuuauaaacu

SEQ ID NO: 1733747 - RNA, 20 nt, Human
aauuaacuuuuauaaacuuu

SEQ ID NO: 1733748 - RNA, 22 nt, Human
aauuaacuuuuauaaacuuuac

SEQ ID NO: 1733749 - RNA, 20 nt, Human
aauuaagaaaggauaaaguu

SEQ ID NO: 1733750 - RNA, 15 nt, Human
aaugucacaggcagg

SEQ ID NO: 1733751 - RNA, 17 nt, Human
uaccauccccuguagag

SEQ ID NO: 1733752 - RNA, 17 nt, Human
uaccacuuuuguucuug

SEQ ID NO: 1733753 - RNA, 15 nt, Human
uacauuuaaaacauu

SEQ ID NO: 1733754 - RNA, 16 nt, Human
uacauuuaaaacauua

SEQ ID NO: 1733755 - RNA, 19 nt, Human
uacauuuaaaacauuaaaa

SEQ ID NO: 1733756 - RNA, 20 nt, Human
uacauuuaaaacauuaaaau

SEQ ID NO: 1733757 - RNA, 22 nt, Human
uacccuggcacuauaauguaag

SEQ ID NO: 1733758 - RNA, 20 nt, Human
uacccuggcacuauaaugua

SEQ ID NO: 1733759 - RNA, 16 nt, Human
uacccucauguucuua

SEQ ID NO: 1733760 - RNA, 20 nt, Human
uacccgggaagggggcuggg

SEQ ID NO: 1733761 - RNA, 18 nt, Human
guuccccuguucacucua

SEQ ID NO: 1733762 - RNA, 12 nt, Human
guucucugcccu

SEQ ID NO: 1733763 - RNA, 13 nt, Human
guucucugcccuc

SEQ ID NO: 1733764 - RNA, 11 nt, Human
guucucugccc

SEQ ID NO: 1733765 - RNA, 16 nt, Human
guucucugaggacacu

SEQ ID NO: 1733766 - RNA, 23 nt, Human
guugauagcacagacccugcccu

SEQ ID NO: 1733767 - RNA, 22 nt, Human
guguuuaagacauuuuuggaag

SEQ ID NO: 1733768 - RNA, 13 nt, Human
guguuuauuguca

SEQ ID NO: 1733769 - RNA, 11 nt, Human
aagcucccagg

SEQ ID NO: 1733770 - RNA, 22 nt, Human
aagcucccaggcauuccccagg

SEQ ID NO: 1733771 - RNA, 12 nt, Human
aagcucccaggc

SEQ ID NO: 1733772 - RNA, 23 nt, Human
aagcucccaggcauuccccagga

SEQ ID NO: 1733773 - RNA, 16 nt, Human
aaggaaaaaauaacaa

SEQ ID NO: 1733774 - RNA, 19 nt, Human
aaggaaaaaauaacaauga

SEQ ID NO: 1733775 - RNA, 17 nt, Human
guuccccuguucacucu

SEQ ID NO: 1733776 - RNA, 15 nt, Human
guuccccuguucacu

SEQ ID NO: 1733777 - RNA, 16 nt, Human
aagcuuuuaugugaaa

SEQ ID NO: 1733778 - RNA, 18 nt, Human
aagcuguuacugucuuca

SEQ ID NO: 1733779 - RNA, 13 nt, Human
aagcucugcuccu

SEQ ID NO: 1733780 - RNA, 13 nt, Human
aaggauaaugaau

SEQ ID NO: 1733781 - RNA, 23 nt, Human
aaggauaaaguugguaaaccuuu

SEQ ID NO: 1733782 - RNA, 21 nt, Human
aaggauaaaguugguaaaccu

SEQ ID NO: 1733783 - RNA, 20 nt, Human
aaggaggaagagaaaaaaua

SEQ ID NO: 1733784 - RNA, 22 nt, Human
aaggauccugagccagauuuca

SEQ ID NO: 1733785 - RNA, 13 nt, Human
aaggauccugagc

SEQ ID NO: 1733786 - RNA, 12 nt, Human
aaggauccugag

SEQ ID NO: 1733787 - RNA, 11 nt, Human
aaggauccuga

SEQ ID NO: 1733788 - RNA, 11 nt, Human
aaggauaaagu

SEQ ID NO: 1733789 - RNA, 18 nt, Human
aaggagauuuacaacugg

SEQ ID NO: 1733790 - RNA, 22 nt, Human
aaggagcaagucagaauagaaa

SEQ ID NO: 1733791 - RNA, 15 nt, Human
aaggaaacccagcuc

SEQ ID NO: 1733792 - RNA, 16 nt, Human
aaggaaacccagcucu

SEQ ID NO: 1733793 - RNA, 17 nt, Human
guugggcuggugucacc

SEQ ID NO: 1733794 - RNA, 17 nt, Human
guugcccaggcuggcgu

SEQ ID NO: 1733795 - RNA, 16 nt, Human
guugcccaggcuggcg

SEQ ID NO: 1733796 - RNA, 15 nt, Human
guugcccaggcuggc

SEQ ID NO: 1733797 - RNA, 12 nt, Human
guugcugccuca

SEQ ID NO: 1733798 - RNA, 19 nt, Human
aaggaugcccaaagaugca

SEQ ID NO: 1733799 - RNA, 14 nt, Human
aaggaugcccaaag

SEQ ID NO: 1733800 - RNA, 24 nt, Human
aaggaugcacagaguuguuacauu

SEQ ID NO: 1733801 - RNA, 16 nt, Human
aaggccccgcccaggc

SEQ ID NO: 1733802 - RNA, 14 nt, Human
aaggccccgcccag

SEQ ID NO: 1733803 - RNA, 19 nt, Human
aaggccccgcccaggcuua

SEQ ID NO: 1733804 - RNA, 13 nt, Human
aaggcuaccuuug

SEQ ID NO: 1733805 - RNA, 14 nt, Human
guugcccaggcugg

SEQ ID NO: 1733806 - RNA, 15 nt, Human
aaggcuaccuuugua

SEQ ID NO: 1733807 - RNA, 22 nt, Human
aagucuuauauauuguagauaa

SEQ ID NO: 1733808 - RNA, 19 nt, Human
aagucuuagauguauauau

SEQ ID NO: 1733809 - RNA, 18 nt, Human
aagucuuagauguauaua

SEQ ID NO: 1733810 - RNA, 18 nt, Human
guuuuucuaggccugggg

SEQ ID NO: 1733811 - RNA, 15 nt, Human
guuuuuuuuuaaaga

SEQ ID NO: 1733812 - RNA, 16 nt, Human
guuuuugucuuaaaaa

SEQ ID NO: 1733813 - RNA, 19 nt, Human
aaguauucuuauuuaauga

SEQ ID NO: 1733814 - RNA, 18 nt, Human
aaguauucuuauuuaaug

SEQ ID NO: 1733815 - RNA, 21 nt, Human
aagucaagugaaaaaggagga

SEQ ID NO: 1733816 - RNA, 24 nt, Human
aagucacacaguauuacuucugcu

SEQ ID NO: 1733817 - RNA, 19 nt, Human
aagucaaggguaggguggg

SEQ ID NO: 1733818 - RNA, 13 nt, Human
aagucacacagug

SEQ ID NO: 1733819 - RNA, 12 nt, Human
aagucacugcac

SEQ ID NO: 1733820 - RNA, 14 nt, Human
aagucacugcacag

SEQ ID NO: 1733821 - RNA, 23 nt, Human
aaguacuucuccacccugcucuc

SEQ ID NO: 1733822 - RNA, 22 nt, Human
aaguacuucuccacccugcucu

SEQ ID NO: 1733823 - RNA, 21 nt, Human
aaguacuucuccacccugcuc

SEQ ID NO: 1733824 - RNA, 15 nt, Human
aaguacuggagaaaa

SEQ ID NO: 1733825 - RNA, 16 nt, Human
aaguacuauguaucaa

SEQ ID NO: 1733826 - RNA, 13 nt, Human
guuugcuaaguga

SEQ ID NO: 1733827 - RNA, 17 nt, Human
guuugccucugccucug

SEQ ID NO: 1733828 - RNA, 19 nt, Human
guuugcaucugaaaauuga

SEQ ID NO: 1733829 - RNA, 22 nt, Human
guuucugccgcagcccugcaga

SEQ ID NO: 1733830 - RNA, 22 nt, Human
guuucuaugacacaugcaaggu

SEQ ID NO: 1733831 - RNA, 14 nt, Human
guuucucagcuccc

SEQ ID NO: 1733832 - RNA, 18 nt, Human
guuuuacugcagcuuugu

SEQ ID NO: 1733833 - RNA, 16 nt, Human
guuuuacugcagcuuu

SEQ ID NO: 1733834 - RNA, 16 nt, Human
guuuuaagaggcaggg

SEQ ID NO: 1733835 - RNA, 18 nt, Human
guuuuaaggaugcuugua

SEQ ID NO: 1733836 - RNA, 14 nt, Human
guuuuaagaggcag

SEQ ID NO: 1733837 - RNA, 13 nt, Human
aagggcccagaga

SEQ ID NO: 1733838 - RNA, 15 nt, Human
aagggcccagagagg

SEQ ID NO: 1733839 - RNA, 19 nt, Human
aaggcugagaggagagaga

SEQ ID NO: 1733840 - RNA, 13 nt, Human
aagggccuggccu

SEQ ID NO: 1733841 - RNA, 14 nt, Human
aaggcugggggaag

SEQ ID NO: 1733842 - RNA, 16 nt, Human
aaggguaucuggugac

SEQ ID NO: 1733843 - RNA, 19 nt, Human
aaggguaucaggugcugcc

SEQ ID NO: 1733844 - RNA, 14 nt, Human
aaggggcaguggug

SEQ ID NO: 1733845 - RNA, 17 nt, Human
aaggggcaguggugguu

SEQ ID NO: 1733846 - RNA, 19 nt, Human
uaaaauuaaagcugaaaac

SEQ ID NO: 1733847 - RNA, 18 nt, Human
uaaaauuaaagcugaaaa

SEQ ID NO: 1733848 - RNA, 16 nt, Human
uaaaauuaaagcugaa

SEQ ID NO: 1733849 - RNA, 17 nt, Human
uaaaauuuuuaaucuuu

SEQ ID NO: 1733850 - RNA, 19 nt, Human
uaaaccaaggcuagaacca

SEQ ID NO: 1733851 - RNA, 19 nt, Human
uaaaauuuuuaaucuuuaa

SEQ ID NO: 1733852 - RNA, 14 nt, Human
aaguuuaauugacu

SEQ ID NO: 1733853 - RNA, 17 nt, Human
aaguucugcagauaaac

SEQ ID NO: 1733854 - RNA, 14 nt, Human
aaguuaaauaaauc

SEQ ID NO: 1733855 - RNA, 12 nt, Human
aaguuaaauaaa

SEQ ID NO: 1733856 - RNA, 17 nt, Human
aaguuacacauuuuuca

SEQ ID NO: 1733857 - RNA, 17 nt, Human
guuuuuuuuuaaagacu

SEQ ID NO: 1733858 - RNA, 14 nt, Human
uaaagaagguuuca

SEQ ID NO: 1733859 - RNA, 16 nt, Human
uaaagacuuuuaugau

SEQ ID NO: 1733860 - RNA, 15 nt, Human
uaaagacaccuacug

SEQ ID NO: 1733861 - RNA, 9 nt, Human
uaaagacag

SEQ ID NO: 1733862 - RNA, 10 nt, Human
uaaagacaga

SEQ ID NO: 1733863 - RNA, 21 nt, Human
uaaaggcuaccuuuguauucu

SEQ ID NO: 1733864 - RNA, 19 nt, Human
uaaaggcuaccuuuguauu

SEQ ID NO: 1733865 - RNA, 18 nt, Human
uaaagaguuaguuugagu

SEQ ID NO: 1733866 - RNA, 19 nt, Human
uaaagaugagcuuugucua

SEQ ID NO: 1733867 - RNA, 13 nt, Human
uaaagauggaaaa

SEQ ID NO: 1733868 - RNA, 19 nt, Human
uaaacccaguaguggugac

SEQ ID NO: 1733869 - RNA, 18 nt, Human
uaaaccgccaaggcuggg

SEQ ID NO: 1733870 - RNA, 16 nt, Human
uaaaccgccaaggcug

SEQ ID NO: 1733871 - RNA, 12 nt, Human
uaaacugccccc

SEQ ID NO: 1733872 - RNA, 15 nt, Human
aauacaccacuacau

SEQ ID NO: 1733873 - RNA, 16 nt, Human
aauacaccacuacauu

SEQ ID NO: 1733874 - RNA, 18 nt, Human
aauacaccacuacauucu

SEQ ID NO: 1733875 - RNA, 20 nt, Human
aauacaccacuacauucugu

SEQ ID NO: 1733876 - RNA, 21 nt, Human
aauacaccacuacauucuguu

SEQ ID NO: 1733877 - RNA, 13 nt, Human
uaaauaacuuuuu

SEQ ID NO: 1733878 - RNA, 19 nt, Human
uaaaucuccaaaauaaaac

SEQ ID NO: 1733879 - RNA, 20 nt, Human
uaaauaguaaaaauaaaauu

SEQ ID NO: 1733880 - RNA, 19 nt, Human
uaaauaguaaaaauaaaau

SEQ ID NO: 1733881 - RNA, 19 nt, Human
uaaauuuuuuuuguuucau

SEQ ID NO: 1733882 - RNA, 13 nt, Human
uaacaagccaccc

SEQ ID NO: 1733883 - RNA, 22 nt, Human
uaacaacuaugauuuggaaaau

SEQ ID NO: 1733884 - RNA, 21 nt, Human
uaacaacuaugauuuggaaaa

SEQ ID NO: 1733885 - RNA, 16 nt, Human
uaacaacuaugauuug

SEQ ID NO: 1733886 - RNA, 17 nt, Human
uaaaugauuucauucaa

SEQ ID NO: 1733887 - RNA, 22 nt, Human
uaaaucuccaaaauaaaacuuu

SEQ ID NO: 1733888 - RNA, 20 nt, Human
uaaaucuccaaaauaaaacu

SEQ ID NO: 1733889 - RNA, 21 nt, Human
uaaaucuccaaaauaaaacuu

SEQ ID NO: 1733890 - RNA, 23 nt, Human
uaaauguuuuuuuuuaaagacuu

SEQ ID NO: 1733891 - RNA, 20 nt, Human
uaaauguuuuuuuuuaaaga

SEQ ID NO: 1733892 - RNA, 15 nt, Human
aauaacaauaaaaga

SEQ ID NO: 1733893 - RNA, 22 nt, Human
aauaacauguaauuaaguacua

SEQ ID NO: 1733894 - RNA, 19 nt, Human
aauaacauguaauuaagua

SEQ ID NO: 1733895 - RNA, 12 nt, Human
aauaacauguaa

SEQ ID NO: 1733896 - RNA, 12 nt, Human
aauaaauuauuu

SEQ ID NO: 1733897 - RNA, 15 nt, Human
aauaacuaaaaggua

SEQ ID NO: 1733898 - RNA, 12 nt, Human
aauaaaaauaau

SEQ ID NO: 1733899 - RNA, 16 nt, Human
aauaaaaucuugaaaa

SEQ ID NO: 1733900 - RNA, 14 nt, Human
aauaaaguaauuau

SEQ ID NO: 1733901 - RNA, 16 nt, Human
aauaaaguacaagagc

SEQ ID NO: 1733902 - RNA, 20 nt, Human
uaaaguguauuuuuuuacua

SEQ ID NO: 1733903 - RNA, 14 nt, Human
uaaaguguauuuuu

SEQ ID NO: 1733904 - RNA, 15 nt, Human
uaaaguguauuuuuu

SEQ ID NO: 1733905 - RNA, 19 nt, Human
uaaaguguauuuuuuuacu

SEQ ID NO: 1733906 - RNA, 13 nt, Human
uaaagucaggggu

SEQ ID NO: 1733907 - RNA, 21 nt, Human
uaaagucuguugauuaaagau

SEQ ID NO: 1733908 - RNA, 22 nt, Human
uaaagucuguugauuaaagaug

SEQ ID NO: 1733909 - RNA, 13 nt, Human
aagacccaaaagg

SEQ ID NO: 1733910 - RNA, 17 nt, Human
guggcagcugcggucca

SEQ ID NO: 1733911 - RNA, 19 nt, Human
guggcagcugcgguccacc

SEQ ID NO: 1733912 - RNA, 21 nt, Human
guggauuuaacagaaauguac

SEQ ID NO: 1733913 - RNA, 23 nt, Human
guggauuuaacagaaauguacag

SEQ ID NO: 1733914 - RNA, 14 nt, Human
guggcagcugcggu

SEQ ID NO: 1733915 - RNA, 22 nt, Human
guggcagcucaccucucccuug

SEQ ID NO: 1733916 - RNA, 14 nt, Human
guggcaccagcagc

SEQ ID NO: 1733917 - RNA, 13 nt, Human
guggcaccagcag

SEQ ID NO: 1733918 - RNA, 18 nt, Human
guggcaccagcagccugg

SEQ ID NO: 1733919 - RNA, 19 nt, Human
gugcugggccccugccucu

SEQ ID NO: 1733920 - RNA, 16 nt, Human
gugcugggccccugcc

SEQ ID NO: 1733921 - RNA, 20 nt, Human
gugcugcccugcccaccugg

SEQ ID NO: 1733922 - RNA, 19 nt, Human
gugcugcccugcccaccug

SEQ ID NO: 1733923 - RNA, 21 nt, Human
gugcugcccugcccaccuggc

SEQ ID NO: 1733924 - RNA, 18 nt, Human
gugcugcccugcccaccu

SEQ ID NO: 1733925 - RNA, 23 nt, Human
aagaagguuucagaaagaagugg

SEQ ID NO: 1733926 - RNA, 24 nt, Human
guggacacagcucuucuccaggcu

SEQ ID NO: 1733927 - RNA, 17 nt, Human
guggacacagcucuucu

SEQ ID NO: 1733928 - RNA, 15 nt, Human
guggacacagcucuu

SEQ ID NO: 1733929 - RNA, 14 nt, Human
guggacacagcucu

SEQ ID NO: 1733930 - RNA, 16 nt, Human
aagaaaauaccaagga

SEQ ID NO: 1733931 - RNA, 17 nt, Human
aagaagcccaggaaagg

SEQ ID NO: 1733932 - RNA, 16 nt, Human
aagaagcccaggaaag

SEQ ID NO: 1733933 - RNA, 14 nt, Human
aagaagcucucucc

SEQ ID NO: 1733934 - RNA, 15 nt, Human
aagaagcucucuccu

SEQ ID NO: 1733935 - RNA, 13 nt, Human
aacuuguuuucug

SEQ ID NO: 1733936 - RNA, 22 nt, Human
aagaaaaaggaugcacagaguu

SEQ ID NO: 1733937 - RNA, 19 nt, Human
aagaaaaaggaugcacaga

SEQ ID NO: 1733938 - RNA, 20 nt, Human
aagaaaaaggaugcacagag

SEQ ID NO: 1733939 - RNA, 15 nt, Human
aagaaaaguuuugua

SEQ ID NO: 1733940 - RNA, 16 nt, Human
aagaaaaguuuuguaa

SEQ ID NO: 1733941 - RNA, 21 nt, Human
aagaaaaguuuuguaaauuuc

SEQ ID NO: 1733942 - RNA, 22 nt, Human
aagaaaaguuuuguaaauuucu

SEQ ID NO: 1733943 - RNA, 15 nt, Human
gugccucugggacug

SEQ ID NO: 1733944 - RNA, 16 nt, Human
gugccuggccacgccc

SEQ ID NO: 1733945 - RNA, 23 nt, Human
aacuugguucccauuugcuccuu

SEQ ID NO: 1733946 - RNA, 17 nt, Human
aacuuggcgcugccccu

SEQ ID NO: 1733947 - RNA, 15 nt, Human
aacuuguaaaugugg

SEQ ID NO: 1733948 - RNA, 14 nt, Human
aacuuggcgcugcc

SEQ ID NO: 1733949 - RNA, 14 nt, Human
aacuuggaaauagu

SEQ ID NO: 1733950 - RNA, 17 nt, Human
gugcacacaccagagcc

SEQ ID NO: 1733951 - RNA, 18 nt, Human
gugcacguacacacacau

SEQ ID NO: 1733952 - RNA, 14 nt, Human
gugcacacaccaga

SEQ ID NO: 1733953 - RNA, 12 nt, Human
gugcacacacca

SEQ ID NO: 1733954 - RNA, 14 nt, Human
gugccaagcagagg

SEQ ID NO: 1733955 - RNA, 15 nt, Human
gugcauuuggugguu

SEQ ID NO: 1733956 - RNA, 21 nt, Human
gugcauuugaggucuguucuu

SEQ ID NO: 1733957 - RNA, 22 nt, Human
gugcauuugaggucuguucuuu

SEQ ID NO: 1733958 - RNA, 20 nt, Human
gugcauuugaggucuguucu

SEQ ID NO: 1733959 - RNA, 17 nt, Human
aagauauuuugcuuugu

SEQ ID NO: 1733960 - RNA, 20 nt, Human
aagauauuuugcuuugugau

SEQ ID NO: 1733961 - RNA, 20 nt, Human
aagaguaggaagacuuugga

SEQ ID NO: 1733962 - RNA, 22 nt, Human
aagauauuuugcuuugugauuu

SEQ ID NO: 1733963 - RNA, 18 nt, Human
gugguuauggagagggug

SEQ ID NO: 1733964 - RNA, 19 nt, Human
gugguguuuccuggcacug

SEQ ID NO: 1733965 - RNA, 15 nt, Human
aagauauuuugcuuu

SEQ ID NO: 1733966 - RNA, 19 nt, Human
aagaguaggaagacuuugg

SEQ ID NO: 1733967 - RNA, 18 nt, Human
aagaguaggaagacuuug

SEQ ID NO: 1733968 - RNA, 16 nt, Human
aagaguaggaagacuu

SEQ ID NO: 1733969 - RNA, 19 nt, Human
aagauguagaggagaaacu

SEQ ID NO: 1733970 - RNA, 22 nt, Human
aagauguagaggagaaacugga

SEQ ID NO: 1733971 - RNA, 16 nt, Human
aagcaagauuucagau

SEQ ID NO: 1733972 - RNA, 14 nt, Human
aagcaaaugugaau

SEQ ID NO: 1733973 - RNA, 13 nt, Human
aagcaaaugugaa

SEQ ID NO: 1733974 - RNA, 12 nt, Human
aagcaaaugucu

SEQ ID NO: 1733975 - RNA, 14 nt, Human
guguuuaagacauu

SEQ ID NO: 1733976 - RNA, 13 nt, Human
guguuuaagacau

SEQ ID NO: 1733977 - RNA, 19 nt, Human
gugugguguuuccuggcac

SEQ ID NO: 1733978 - RNA, 19 nt, Human
guguguguaugcgugugug

SEQ ID NO: 1733979 - RNA, 20 nt, Human
gugucccaaaaagaaaggag

SEQ ID NO: 1733980 - RNA, 19 nt, Human
gugucuugcaauggcagcc

SEQ ID NO: 1733981 - RNA, 21 nt, Human
gugucuugcaauggcagccuu

SEQ ID NO: 1733982 - RNA, 18 nt, Human
gugugagucaccaagccc

SEQ ID NO: 1733983 - RNA, 13 nt, Human
gugugagucacca

SEQ ID NO: 1733984 - RNA, 15 nt, Human
gugugguguuuccug

SEQ ID NO: 1733985 - RNA, 23 nt, Human
aagacgcugugcugcccugccca

SEQ ID NO: 1733986 - RNA, 22 nt, Human
aagacgcugugcugcccugccc

SEQ ID NO: 1733987 - RNA, 21 nt, Human
aagacgcugugcugcccugcc

SEQ ID NO: 1733988 - RNA, 12 nt, Human
aagaccagucca

SEQ ID NO: 1733989 - RNA, 23 nt, Human
aagaccccuuaccacugcucuga

SEQ ID NO: 1733990 - RNA, 17 nt, Human
aagacucauucuucugu

SEQ ID NO: 1733991 - RNA, 16 nt, Human
guggcccgacagccug

SEQ ID NO: 1733992 - RNA, 19 nt, Human
aagagauugugguuucauu

SEQ ID NO: 1733993 - RNA, 16 nt, Human
aagagauugugguuuc

SEQ ID NO: 1733994 - RNA, 16 nt, Human
aagacuguacaaagua

SEQ ID NO: 1733995 - RNA, 14 nt, Human
aagagcccaggccu

SEQ ID NO: 1733996 - RNA, 12 nt, Human
aagagcccaggc

SEQ ID NO: 1733997 - RNA, 16 nt, Human
aagagcccaggccucc

SEQ ID NO: 1733998 - RNA, 14 nt, Human
guggccucccaacu

SEQ ID NO: 1733999 - RNA, 13 nt, Human
guggccucccaac

SEQ ID NO: 1734000 - RNA, 17 nt, Human
guggcccgacagccugg

SEQ ID NO: 1734001 - RNA, 15 nt, Human
guggccucccaacuc

SEQ ID NO: 1734002 - RNA, 21 nt, Human
guggcuucccgcucagcccuc

SEQ ID NO: 1734003 - RNA, 18 nt, Human
gugggauccuccaggugc

SEQ ID NO: 1734004 - RNA, 15 nt, Human
gugggauccuccagg

SEQ ID NO: 1734005 - RNA, 12 nt, Human
gugggagcugag

SEQ ID NO: 1734006 - RNA, 16 nt, Human
gugguguuuccuggca

SEQ ID NO: 1734007 - RNA, 15 nt, Human
gugguguuuccuggc

SEQ ID NO: 1734008 - RNA, 18 nt, Human
guggggggggugcugggc

SEQ ID NO: 1734009 - RNA, 19 nt, Human
aacagguuuuccugaagaa

SEQ ID NO: 1734010 - RNA, 12 nt, Human
aacagaggauau

SEQ ID NO: 1734011 - RNA, 15 nt, Human
guccuacccacccuc

SEQ ID NO: 1734012 - RNA, 20 nt, Human
aacagacuggaagcacagcu

SEQ ID NO: 1734013 - RNA, 13 nt, Human
guccuacccaccc

SEQ ID NO: 1734014 - RNA, 20 nt, Human
aacauacucccaucugugaa

SEQ ID NO: 1734015 - RNA, 16 nt, Human
aacauacucccaucug

SEQ ID NO: 1734016 - RNA, 18 nt, Human
aacauacucccaucugug

SEQ ID NO: 1734017 - RNA, 22 nt, Human
aacauguuuuucuucucccuca

SEQ ID NO: 1734018 - RNA, 14 nt, Human
aacaucaacaucuu

SEQ ID NO: 1734019 - RNA, 23 nt, Human
guccccuguuuguuucugaaagg

SEQ ID NO: 1734020 - RNA, 16 nt, Human
guccccgcacugggcu

SEQ ID NO: 1734021 - RNA, 15 nt, Human
guccccgcacugggc

SEQ ID NO: 1734022 - RNA, 13 nt, Human
gucccccugacaa

SEQ ID NO: 1734023 - RNA, 18 nt, Human
gucccccugacaacacuc

SEQ ID NO: 1734024 - RNA, 21 nt, Human
guccgaaagggacuuggaagc

SEQ ID NO: 1734025 - RNA, 13 nt, Human
gucccuuuuccuu

SEQ ID NO: 1734026 - RNA, 22 nt, Human
guccgaaagggacuuggaagcu

SEQ ID NO: 1734027 - RNA, 18 nt, Human
gucccaccuuggcugcag

SEQ ID NO: 1734028 - RNA, 17 nt, Human
gucccaccuuggcugca

SEQ ID NO: 1734029 - RNA, 20 nt, Human
gucccaccuuggcugcaggg

SEQ ID NO: 1734030 - RNA, 19 nt, Human
gucccaccuuggcugcagg

SEQ ID NO: 1734031 - RNA, 14 nt, Human
gucccccucuggcu

SEQ ID NO: 1734032 - RNA, 12 nt, Human
gucccccucugg

SEQ ID NO: 1734033 - RNA, 22 nt, Human
guagcucuaggagggcuggcaa

SEQ ID NO: 1734034 - RNA, 22 nt, Human
guagccucaaucgagugagaca

SEQ ID NO: 1734035 - RNA, 23 nt, Human
gucucaguccaugaagauguaga

SEQ ID NO: 1734036 - RNA, 16 nt, Human
gucucaggucccugca

SEQ ID NO: 1734037 - RNA, 15 nt, Human
gucucaggucccugc

SEQ ID NO: 1734038 - RNA, 15 nt, Human
gucuaugggacucaa

SEQ ID NO: 1734039 - RNA, 14 nt, Human
gucuaugggacuca

SEQ ID NO: 1734040 - RNA, 22 nt, Human
gucucaaacucuugaccucagg

SEQ ID NO: 1734041 - RNA, 16 nt, Human
gucucaaacuccugac

SEQ ID NO: 1734042 - RNA, 17 nt, Human
gucucaagagggcacug

SEQ ID NO: 1734043 - RNA, 15 nt, Human
gucucaagagggcac

SEQ ID NO: 1734044 - RNA, 22 nt, Human
gucucaagagggcacugguggc

SEQ ID NO: 1734045 - RNA, 20 nt, Human
gucucaagagggcacuggug

SEQ ID NO: 1734046 - RNA, 16 nt, Human
aacauuuugucauaua

SEQ ID NO: 1734047 - RNA, 13 nt, Human
gucuccauguuug

SEQ ID NO: 1734048 - RNA, 18 nt, Human
aaccacaucuugcucugc

SEQ ID NO: 1734049 - RNA, 13 nt, Human
aaccacaucuugc

SEQ ID NO: 1734050 - RNA, 16 nt, Human
aaccaaauauuccaga

SEQ ID NO: 1734051 - RNA, 16 nt, Human
guccugcugcaguugc

SEQ ID NO: 1734052 - RNA, 13 nt, Human
guccugcugcagu

SEQ ID NO: 1734053 - RNA, 17 nt, Human
guccugcugcaguugcc

SEQ ID NO: 1734054 - RNA, 13 nt, Human
aacauuaaaauau

SEQ ID NO: 1734055 - RNA, 14 nt, Human
gucgaggacaggga

SEQ ID NO: 1734056 - RNA, 14 nt, Human
gucgcccagucugg

SEQ ID NO: 1734057 - RNA, 13 nt, Human
gucgcccagucug

SEQ ID NO: 1734058 - RNA, 14 nt, Human
gucgcccaggcugg

SEQ ID NO: 1734059 - RNA, 20 nt, Human
gucgcccaggcuggagugca

SEQ ID NO: 1734060 - RNA, 15 nt, Human
gucgcccaggcugga

SEQ ID NO: 1734061 - RNA, 23 nt, Human
gucgcccagucuggaaugcagug

SEQ ID NO: 1734062 - RNA, 14 nt, Human
gucgcccuggacug

SEQ ID NO: 1734063 - RNA, 20 nt, Human
gucuaccugaggggccucuu

SEQ ID NO: 1734064 - RNA, 18 nt, Human
gucgcccuggacugugug

SEQ ID NO: 1734065 - RNA, 17 nt, Human
aacuagaacugaauuuu

SEQ ID NO: 1734066 - RNA, 23 nt, Human
aacguggcugcuucaaggauccu

SEQ ID NO: 1734067 - RNA, 16 nt, Human
gucuucaguaagccgu

SEQ ID NO: 1734068 - RNA, 16 nt, Human
gucuuuguacagacaa

SEQ ID NO: 1734069 - RNA, 15 nt, Human
gucuuuguacagaca

SEQ ID NO: 1734070 - RNA, 18 nt, Human
aaccugauugugucucuu

SEQ ID NO: 1734071 - RNA, 19 nt, Human
aaccugauugugucucuug

SEQ ID NO: 1734072 - RNA, 17 nt, Human
aaccuguucugcuuucc

SEQ ID NO: 1734073 - RNA, 13 nt, Human
aaccuguucugcu

SEQ ID NO: 1734074 - RNA, 23 nt, Human
gucugacaggcaaugcuggcugu

SEQ ID NO: 1734075 - RNA, 22 nt, Human
gucugacaggcaaugcuggcug

SEQ ID NO: 1734076 - RNA, 21 nt, Human
gucugacaggcaaugcuggcu

SEQ ID NO: 1734077 - RNA, 19 nt, Human
gucugaagucacugcacag

SEQ ID NO: 1734078 - RNA, 17 nt, Human
gucugaagucacugcac

SEQ ID NO: 1734079 - RNA, 19 nt, Human
gucucuugguccugcugca

SEQ ID NO: 1734080 - RNA, 18 nt, Human
gucucuugguccugcugc

SEQ ID NO: 1734081 - RNA, 20 nt, Human
gucucuugguccugcugcag

SEQ ID NO: 1734082 - RNA, 17 nt, Human
gucucuugguccugcug

SEQ ID NO: 1734083 - RNA, 23 nt, Human
gucucuuuaaugucacaggcagg

SEQ ID NO: 1734084 - RNA, 22 nt, Human
gucucuuuaaugucacaggcag

SEQ ID NO: 1734085 - RNA, 19 nt, Human
gucugaaggcuggguucug

SEQ ID NO: 1734086 - RNA, 16 nt, Human
gucugaagucacugca

SEQ ID NO: 1734087 - RNA, 20 nt, Human
gucucuuuaaugucacaggc

SEQ ID NO: 1734088 - RNA, 19 nt, Human
gucucuuuaaugucacagg

SEQ ID NO: 1734089 - RNA, 18 nt, Human
gucucuuuaaugucacag

SEQ ID NO: 1734090 - RNA, 14 nt, Human
aacugaacucugac

SEQ ID NO: 1734091 - RNA, 15 nt, Human
aacugaacauuccag

SEQ ID NO: 1734092 - RNA, 16 nt, Human
aacucuguuacacuuu

SEQ ID NO: 1734093 - RNA, 21 nt, Human
gugaguacuacaguccuccca

SEQ ID NO: 1734094 - RNA, 19 nt, Human
gugaguacuacaguccucc

SEQ ID NO: 1734095 - RNA, 17 nt, Human
gugaguccuggcauggg

SEQ ID NO: 1734096 - RNA, 15 nt, Human
gugagucgaggacag

SEQ ID NO: 1734097 - RNA, 20 nt, Human
gugaguccuggcaugggaau

SEQ ID NO: 1734098 - RNA, 16 nt, Human
gugagaggggaacaga

SEQ ID NO: 1734099 - RNA, 13 nt, Human
gugagagcugggu

SEQ ID NO: 1734100 - RNA, 12 nt, Human
gugagacagacu

SEQ ID NO: 1734101 - RNA, 17 nt, Human
gugaguacuacaguccu

SEQ ID NO: 1734102 - RNA, 15 nt, Human
gugagcaggcuguga

SEQ ID NO: 1734103 - RNA, 21 nt, Human
gugagcacuaaggugugcucu

SEQ ID NO: 1734104 - RNA, 12 nt, Human
gugaccccaggu

SEQ ID NO: 1734105 - RNA, 12 nt, Human
gugagagcuggg

SEQ ID NO: 1734106 - RNA, 23 nt, Human
gugaagacaaugacuuacuguac

SEQ ID NO: 1734107 - RNA, 14 nt, Human
gugaagugaagaca

SEQ ID NO: 1734108 - RNA, 19 nt, Human
gugacagaggcagccccau

SEQ ID NO: 1734109 - RNA, 18 nt, Human
gugacagaggcagcccca

SEQ ID NO: 1734110 - RNA, 16 nt, Human
gugacagaggcagccc

SEQ ID NO: 1734111 - RNA, 14 nt, Human
gugacaugucuuuu

SEQ ID NO: 1734112 - RNA, 23 nt, Human
gugacagaggcagccccauucug

SEQ ID NO: 1734113 - RNA, 21 nt, Human
gugaccagcaccaucucuccu

SEQ ID NO: 1734114 - RNA, 18 nt, Human
gugaccagcaccaucucu

SEQ ID NO: 1734115 - RNA, 18 nt, Human
gugaccauguuuuguuua

SEQ ID NO: 1734116 - RNA, 17 nt, Human
gugaccaaugaugguca

SEQ ID NO: 1734117 - RNA, 12 nt, Human
aguccuguaaug

SEQ ID NO: 1734118 - RNA, 15 nt, Human
agucugaaggcuggg

SEQ ID NO: 1734119 - RNA, 13 nt, Human
agucugaaggcug

SEQ ID NO: 1734120 - RNA, 16 nt, Human
agucugaaggcugggu

SEQ ID NO: 1734121 - RNA, 17 nt, Human
agucugaaggcuggguu

SEQ ID NO: 1734122 - RNA, 21 nt, Human
aguccuggcaugggaaugaau

SEQ ID NO: 1734123 - RNA, 20 nt, Human
aguccuggcaugggaaugaa

SEQ ID NO: 1734124 - RNA, 22 nt, Human
aguccuggcaugggaaugaaug

SEQ ID NO: 1734125 - RNA, 18 nt, Human
agucuggaaugcaguggu

SEQ ID NO: 1734126 - RNA, 20 nt, Human
agugaacuugggccacugug

SEQ ID NO: 1734127 - RNA, 17 nt, Human
agucuggaaugcagugg

SEQ ID NO: 1734128 - RNA, 18 nt, Human
agucugauucccaagcuc

SEQ ID NO: 1734129 - RNA, 16 nt, Human
agucugauucccaagc

SEQ ID NO: 1734130 - RNA, 20 nt, Human
agucugauucccaagcucug

SEQ ID NO: 1734131 - RNA, 14 nt, Human
agugaagacaauga

SEQ ID NO: 1734132 - RNA, 16 nt, Human
agugaagacaaugacu

SEQ ID NO: 1734133 - RNA, 18 nt, Human
agugaccauacuaauuau

SEQ ID NO: 1734134 - RNA, 14 nt, Human
aguaugguggcugg

SEQ ID NO: 1734135 - RNA, 20 nt, Human
aguaugggacuggccucugc

SEQ ID NO: 1734136 - RNA, 17 nt, Human
aguaugggacuggccuc

SEQ ID NO: 1734137 - RNA, 16 nt, Human
aguaucuuuuuauuca

SEQ ID NO: 1734138 - RNA, 16 nt, Human
aguaugaauaaagaca

SEQ ID NO: 1734139 - RNA, 15 nt, Human
aguaugaggcauuug

SEQ ID NO: 1734140 - RNA, 16 nt, Human
aguaugaggcauuugu

SEQ ID NO: 1734141 - RNA, 15 nt, Human
aguaucuugaagacu

SEQ ID NO: 1734142 - RNA, 12 nt, Human
aguaucuugaag

SEQ ID NO: 1734143 - RNA, 11 nt, Human
aguaucuugaa

SEQ ID NO: 1734144 - RNA, 14 nt, Human
agugggagcugccu

SEQ ID NO: 1734145 - RNA, 15 nt, Human
agugggagcugccug

SEQ ID NO: 1734146 - RNA, 16 nt, Human
agugggagcugccugu

SEQ ID NO: 1734147 - RNA, 17 nt, Human
aguguauuuuuuuacua

SEQ ID NO: 1734148 - RNA, 18 nt, Human
aguguauuuuuuuacuaa

SEQ ID NO: 1734149 - RNA, 23 nt, Human
aguggcuuaaaacaacacucaca

SEQ ID NO: 1734150 - RNA, 21 nt, Human
aguggcuccucccggugccca

SEQ ID NO: 1734151 - RNA, 17 nt, Human
aguggcuccucccggug

SEQ ID NO: 1734152 - RNA, 13 nt, Human
aguggcuccuccc

SEQ ID NO: 1734153 - RNA, 22 nt, Human
aguugaaaaucuuauaauuuaa

SEQ ID NO: 1734154 - RNA, 19 nt, Human
aguucagguaacaggcaga

SEQ ID NO: 1734155 - RNA, 17 nt, Human
aguuacagacaaagcgu

SEQ ID NO: 1734156 - RNA, 20 nt, Human
aguucagguaacaggcagau

SEQ ID NO: 1734157 - RNA, 12 nt, Human
aguuaaauaaau

SEQ ID NO: 1734158 - RNA, 13 nt, Human
aguuaagccuuug

SEQ ID NO: 1734159 - RNA, 14 nt, Human
aguuaagccuuugg

SEQ ID NO: 1734160 - RNA, 16 nt, Human
aguuacagacaaagcg

SEQ ID NO: 1734161 - RNA, 14 nt, Human
aguuacagacaaag

SEQ ID NO: 1734162 - RNA, 16 nt, Human
aguuguuaauaaaagu

SEQ ID NO: 1734163 - RNA, 20 nt, Human
aguuguuugauucagacagc

SEQ ID NO: 1734164 - RNA, 23 nt, Human
aguugaaaaucuuauaauuuaaa

SEQ ID NO: 1734165 - RNA, 14 nt, Human
aguugaagacagag

SEQ ID NO: 1734166 - RNA, 18 nt, Human
auaaaggauuaaugucaa

SEQ ID NO: 1734167 - RNA, 19 nt, Human
auaaauuuuuuuuguuuca

SEQ ID NO: 1734168 - RNA, 22 nt, Human
auaaauuuuuuuuguuucauau

SEQ ID NO: 1734169 - RNA, 17 nt, Human
auaaaacuuuuuaaaau

SEQ ID NO: 1734170 - RNA, 21 nt, Human
auaaacuuuaccuuuuuuaua

SEQ ID NO: 1734171 - RNA, 24 nt, Human
auaaacuuuaccuuuuuuauacau

SEQ ID NO: 1734172 - RNA, 20 nt, Human
auaaacuuuuuucuuacugu

SEQ ID NO: 1734173 - RNA, 15 nt, Human
auaaaacuuuuuaaa

SEQ ID NO: 1734174 - RNA, 11 nt, Human
auaaaacuuuu

SEQ ID NO: 1734175 - RNA, 14 nt, Human
auaaagcagcguuu

SEQ ID NO: 1734176 - RNA, 18 nt, Human
auaaagcagcguuucuau

SEQ ID NO: 1734177 - RNA, 19 nt, Human
auaaagcagcguuucuaug

SEQ ID NO: 1734178 - RNA, 20 nt, Human
auaaagcagcguuucuauga

SEQ ID NO: 1734179 - RNA, 13 nt, Human
auaaagcagcguu

SEQ ID NO: 1734180 - RNA, 11 nt, Human
auaaagacagg

SEQ ID NO: 1734181 - RNA, 12 nt, Human
auaaagacaccu

SEQ ID NO: 1734182 - RNA, 18 nt, Human
auaaagcuguguggcagu

SEQ ID NO: 1734183 - RNA, 15 nt, Human
auaaagcaggcagaa

SEQ ID NO: 1734184 - RNA, 18 nt, Human
auaccugucccccugaca

SEQ ID NO: 1734185 - RNA, 12 nt, Human
auacccaccccc

SEQ ID NO: 1734186 - RNA, 11 nt, Human
auacccacccc

SEQ ID NO: 1734187 - RNA, 15 nt, Human
auaauguaagcucua

SEQ ID NO: 1734188 - RNA, 18 nt, Human
auacaccacuacauucug

SEQ ID NO: 1734189 - RNA, 21 nt, Human
auacaccacuacauucuguua

SEQ ID NO: 1734190 - RNA, 23 nt, Human
auaccauuauauguucccccugu

SEQ ID NO: 1734191 - RNA, 19 nt, Human
auacaccacuacauucugu

SEQ ID NO: 1734192 - RNA, 20 nt, Human
auacaccacuacauucuguu

SEQ ID NO: 1734193 - RNA, 21 nt, Human
auaaugcgugcauaccacuuu

SEQ ID NO: 1734194 - RNA, 15 nt, Human
auagguuuaauaauu

SEQ ID NO: 1734195 - RNA, 12 nt, Human
auagguuauuuu

SEQ ID NO: 1734196 - RNA, 18 nt, Human
auaguaugguggcugggu

SEQ ID NO: 1734197 - RNA, 17 nt, Human
auaguaugguggcuggg

SEQ ID NO: 1734198 - RNA, 21 nt, Human
auagguauaaguggugugugu

SEQ ID NO: 1734199 - RNA, 21 nt, Human
auagccaaggccaaaggaagc

SEQ ID NO: 1734200 - RNA, 15 nt, Human
auagccaaggccaaa

SEQ ID NO: 1734201 - RNA, 14 nt, Human
auauuauuuuaugu

SEQ ID NO: 1734202 - RNA, 19 nt, Human
auauuuacuucuuauacau

SEQ ID NO: 1734203 - RNA, 23 nt, Human
auauuaugaagcuuuuaugugaa

SEQ ID NO: 1734204 - RNA, 22 nt, Human
auauuaccacagacauacuaac

SEQ ID NO: 1734205 - RNA, 15 nt, Human
auaucaauuuaaaaa

SEQ ID NO: 1734206 - RNA, 16 nt, Human
auaucaaauauauuca

SEQ ID NO: 1734207 - RNA, 16 nt, Human
aucaugugaaaucauu

SEQ ID NO: 1734208 - RNA, 14 nt, Human
aucaugugaaauca

SEQ ID NO: 1734209 - RNA, 15 nt, Human
aucaugugaaaucau

SEQ ID NO: 1734210 - RNA, 20 nt, Human
aucaccaacgucugugccau

SEQ ID NO: 1734211 - RNA, 19 nt, Human
aucaccaacgucugugcca

SEQ ID NO: 1734212 - RNA, 18 nt, Human
aucaccaacgucugugcc

SEQ ID NO: 1734213 - RNA, 15 nt, Human
aucacauguggacuu

SEQ ID NO: 1734214 - RNA, 21 nt, Human
aucacagccucugaaaaccaa

SEQ ID NO: 1734215 - RNA, 18 nt, Human
aucagccugcuccagcug

SEQ ID NO: 1734216 - RNA, 17 nt, Human
aucagccugcuccagcu

SEQ ID NO: 1734217 - RNA, 19 nt, Human
aucagccugcuccagcugu

SEQ ID NO: 1734218 - RNA, 20 nt, Human
aucagccugcuccagcuguu

SEQ ID NO: 1734219 - RNA, 21 nt, Human
aucaccgaaaacguggcugcu

SEQ ID NO: 1734220 - RNA, 19 nt, Human
aucaccgaaaacguggcug

SEQ ID NO: 1734221 - RNA, 14 nt, Human
aucaccgaaaacgu

SEQ ID NO: 1734222 - RNA, 19 nt, Human
aucagcacgauuucuguuu

SEQ ID NO: 1734223 - RNA, 20 nt, Human
aucagcacgauuucuguuua

SEQ ID NO: 1734224 - RNA, 23 nt, Human
aucagcacgauuucuguuuagau

SEQ ID NO: 1734225 - RNA, 19 nt, Human
auccucccaccucagccuc

SEQ ID NO: 1734226 - RNA, 18 nt, Human
auccucccaccucagccu

SEQ ID NO: 1734227 - RNA, 20 nt, Human
auccucccaccucagccucc

SEQ ID NO: 1734228 - RNA, 12 nt, Human
auccucccaggc

SEQ ID NO: 1734229 - RNA, 15 nt, Human
aucggcauuuguuuc

SEQ ID NO: 1734230 - RNA, 15 nt, Human
auccucccaccucag

SEQ ID NO: 1734231 - RNA, 23 nt, Human
auccuccaggugcacaagcucca

SEQ ID NO: 1734232 - RNA, 11 nt, Human
auccuccaggu

SEQ ID NO: 1734233 - RNA, 15 nt, Human
auccccuguagagug

SEQ ID NO: 1734234 - RNA, 16 nt, Human
auccccaagccuggca

SEQ ID NO: 1734235 - RNA, 15 nt, Human
aucccauuuaaaaaa

SEQ ID NO: 1734236 - RNA, 13 nt, Human
auccccaagccug

SEQ ID NO: 1734237 - RNA, 14 nt, Human
aucccauuuaaaaa

SEQ ID NO: 1734238 - RNA, 15 nt, Human
auccagacccggcug

SEQ ID NO: 1734239 - RNA, 18 nt, Human
auccagaaagaaaacuug

SEQ ID NO: 1734240 - RNA, 16 nt, Human
auccagaaagaaaacu

SEQ ID NO: 1734241 - RNA, 14 nt, Human
aucuucuuuauaau

SEQ ID NO: 1734242 - RNA, 18 nt, Human
aucuugaagacuuuucuu

SEQ ID NO: 1734243 - RNA, 17 nt, Human
aucuugaauuguaagga

SEQ ID NO: 1734244 - RNA, 18 nt, Human
aucuugaauaauguaaga

SEQ ID NO: 1734245 - RNA, 22 nt, Human
aucugcuuuuuaaagaaugcuc

SEQ ID NO: 1734246 - RNA, 19 nt, Human
aucuggacuccucugucca

SEQ ID NO: 1734247 - RNA, 18 nt, Human
aucuggacuccucugucc

SEQ ID NO: 1734248 - RNA, 17 nt, Human
aucuggacuccucuguc

SEQ ID NO: 1734249 - RNA, 16 nt, Human
aucuggacuccucugu

SEQ ID NO: 1734250 - RNA, 15 nt, Human
aucuggacuccucug

SEQ ID NO: 1734251 - RNA, 17 nt, Human
aucucugcuuuggaaau

SEQ ID NO: 1734252 - RNA, 16 nt, Human
aucucggcucacugca

SEQ ID NO: 1734253 - RNA, 15 nt, Human
aucucggcucacugc

SEQ ID NO: 1734254 - RNA, 14 nt, Human
aucucggcucacug

SEQ ID NO: 1734255 - RNA, 19 nt, Human
augaaagacuguacaaagu

SEQ ID NO: 1734256 - RNA, 17 nt, Human
augaaagacuguacaaa

SEQ ID NO: 1734257 - RNA, 16 nt, Human
augaaagacuguacaa

SEQ ID NO: 1734258 - RNA, 13 nt, Human
augaaagacugua

SEQ ID NO: 1734259 - RNA, 22 nt, Human
augaagcuuuuaugugaaacau

SEQ ID NO: 1734260 - RNA, 19 nt, Human
augaaguuuuuuuuauaca

SEQ ID NO: 1734261 - RNA, 23 nt, Human
augaccuuucaauaggaaaaacu

SEQ ID NO: 1734262 - RNA, 22 nt, Human
augaccuuucaauaggaaaaac

SEQ ID NO: 1734263 - RNA, 21 nt, Human
augaccuuucaauaggaaaaa

SEQ ID NO: 1734264 - RNA, 23 nt, Human
augaaguuuuuuuuauacaggau

SEQ ID NO: 1734265 - RNA, 12 nt, Human
augcugcccugu

SEQ ID NO: 1734266 - RNA, 12 nt, Human
augcuuguacau

SEQ ID NO: 1734267 - RNA, 13 nt, Human
augcuuguacaua

SEQ ID NO: 1734268 - RNA, 14 nt, Human
augcuuguacauaa

SEQ ID NO: 1734269 - RNA, 15 nt, Human
auggauuuccagcca

SEQ ID NO: 1734270 - RNA, 16 nt, Human
auggaggaaaaccaag

SEQ ID NO: 1734271 - RNA, 22 nt, Human
auggaggaaaaccaagccgugg

SEQ ID NO: 1734272 - RNA, 11 nt, Human
augcugcccug

SEQ ID NO: 1734273 - RNA, 16 nt, Human
augcucuuuacuucau

SEQ ID NO: 1734274 - RNA, 20 nt, Human
auggcugugccucugccugu

SEQ ID NO: 1734275 - RNA, 19 nt, Human
auggcugugccucugccug

SEQ ID NO: 1734276 - RNA, 17 nt, Human
augcacagaguuguuac

SEQ ID NO: 1734277 - RNA, 18 nt, Human
augcacagaguuguuaca

SEQ ID NO: 1734278 - RNA, 17 nt, Human
augcacaaacagaggcc

SEQ ID NO: 1734279 - RNA, 16 nt, Human
augcacaaacagaggc

SEQ ID NO: 1734280 - RNA, 16 nt, Human
augcacagaguuguua

SEQ ID NO: 1734281 - RNA, 19 nt, Human
augccucucucaggccaaa

SEQ ID NO: 1734282 - RNA, 16 nt, Human
augcaugaaguaauau

SEQ ID NO: 1734283 - RNA, 20 nt, Human
augcauauuauuuuauguug

SEQ ID NO: 1734284 - RNA, 16 nt, Human
augcauauuauuuuau

SEQ ID NO: 1734285 - RNA, 17 nt, Human
augaugccaugaggaac

SEQ ID NO: 1734286 - RNA, 16 nt, Human
augaugccaugaggaa

SEQ ID NO: 1734287 - RNA, 24 nt, Human
augauguuuuccaugaguccccug

SEQ ID NO: 1734288 - RNA, 15 nt, Human
augcacaaacagagg

SEQ ID NO: 1734289 - RNA, 23 nt, Human
auguaauuaaguacuauguauca

SEQ ID NO: 1734290 - RNA, 17 nt, Human
auguaauuaaguacuau

SEQ ID NO: 1734291 - RNA, 15 nt, Human
auguaauuaaguacu

SEQ ID NO: 1734292 - RNA, 15 nt, Human
auggucggaaaacau

SEQ ID NO: 1734293 - RNA, 19 nt, Human
auggucaccaaaucagcug

SEQ ID NO: 1734294 - RNA, 13 nt, Human
augucuuccugga

SEQ ID NO: 1734295 - RNA, 14 nt, Human
augucuuuucuugc

SEQ ID NO: 1734296 - RNA, 22 nt, Human
augugaaacuggauuaaacuua

SEQ ID NO: 1734297 - RNA, 14 nt, Human
augugaaaucauuc

SEQ ID NO: 1734298 - RNA, 15 nt, Human
augugaaacauguuu

SEQ ID NO: 1734299 - RNA, 20 nt, Human
augugggcuaguugggcuuc

SEQ ID NO: 1734300 - RNA, 17 nt, Human
auguucuaagaagugaa

SEQ ID NO: 1734301 - RNA, 12 nt, Human
auguucugggac

SEQ ID NO: 1734302 - RNA, 11 nt, Human
auguucuggga

SEQ ID NO: 1734303 - RNA, 16 nt, Human
auguucucucuucucc

SEQ ID NO: 1734304 - RNA, 13 nt, Human
auguucugggaca

SEQ ID NO: 1734305 - RNA, 19 nt, Human
auguuugccucugccucug

SEQ ID NO: 1734306 - RNA, 22 nt, Human
auguuugccucugccucugaca

SEQ ID NO: 1734307 - RNA, 13 nt, Human
agguucccuuuga

SEQ ID NO: 1734308 - RNA, 22 nt, Human
agguucccuuugacgccauccc

SEQ ID NO: 1734309 - RNA, 14 nt, Human
agguucaaagauau

SEQ ID NO: 1734310 - RNA, 15 nt, Human
agguucaaagauauu

SEQ ID NO: 1734311 - RNA, 23 nt, Human
agguucccuuugacgccauccca

SEQ ID NO: 1734312 - RNA, 22 nt, Human
aggugcuaggaacacuccuuca

SEQ ID NO: 1734313 - RNA, 19 nt, Human
aggugcuaggaacacuccu

SEQ ID NO: 1734314 - RNA, 23 nt, Human
aggugcuaggaacacuccuucac

SEQ ID NO: 1734315 - RNA, 20 nt, Human
agguaaaagcaucacaugaa

SEQ ID NO: 1734316 - RNA, 18 nt, Human
agguaaaucagacuauga

SEQ ID NO: 1734317 - RNA, 11 nt, Human
aggucccuaau

SEQ ID NO: 1734318 - RNA, 12 nt, Human
aggucccuaaua

SEQ ID NO: 1734319 - RNA, 17 nt, Human
agguacaaccuguucug

SEQ ID NO: 1734320 - RNA, 23 nt, Human
agguaaaucagacuaugaaguuu

SEQ ID NO: 1734321 - RNA, 21 nt, Human
agguaaucgaccugccucggc

SEQ ID NO: 1734322 - RNA, 19 nt, Human
agguaaucgaccugccucg

SEQ ID NO: 1734323 - RNA, 22 nt, Human
aggucuguucuuuccaaaguac

SEQ ID NO: 1734324 - RNA, 23 nt, Human
aggucuguucuuuccaaaguaca

SEQ ID NO: 1734325 - RNA, 18 nt, Human
aggucuguucuuuccaaa

SEQ ID NO: 1734326 - RNA, 16 nt, Human
aggucccuaauaaagc

SEQ ID NO: 1734327 - RNA, 15 nt, Human
aggucccuaauaaag

SEQ ID NO: 1734328 - RNA, 13 nt, Human
aggucccuaauaa

SEQ ID NO: 1734329 - RNA, 11 nt, Human
agggucccugg

SEQ ID NO: 1734330 - RNA, 23 nt, Human
aggguccuggggaaccugacccc

SEQ ID NO: 1734331 - RNA, 21 nt, Human
aggguccuggggaaccugacc

SEQ ID NO: 1734332 - RNA, 15 nt, Human
aggguccuggggaac

SEQ ID NO: 1734333 - RNA, 12 nt, Human
aggguccugggg

SEQ ID NO: 1734334 - RNA, 21 nt, Human
aggggccucuuaugggcuggg

SEQ ID NO: 1734335 - RNA, 20 nt, Human
aggggccucuuaugggcugg

SEQ ID NO: 1734336 - RNA, 19 nt, Human
aggggccucuuaugggcug

SEQ ID NO: 1734337 - RNA, 15 nt, Human
aggguaucuggugac

SEQ ID NO: 1734338 - RNA, 21 nt, Human
aggguaucaggugcugccauc

SEQ ID NO: 1734339 - RNA, 19 nt, Human
aggguaucaggugcugcca

SEQ ID NO: 1734340 - RNA, 21 nt, Human
aggcuagaaccaccugccuau

SEQ ID NO: 1734341 - RNA, 23 nt, Human
aggcuacuguaaggcaaucaugg

SEQ ID NO: 1734342 - RNA, 21 nt, Human
aggcgugagccaccgugccug

SEQ ID NO: 1734343 - RNA, 23 nt, Human
aggcccuucucuccagccccugg

SEQ ID NO: 1734344 - RNA, 22 nt, Human
aggcccuucucuccagccccug

SEQ ID NO: 1734345 - RNA, 19 nt, Human
aggcccuuccucuccacug

SEQ ID NO: 1734346 - RNA, 21 nt, Human
aggcccuucucuccagccccu

SEQ ID NO: 1734347 - RNA, 20 nt, Human
aggcccuucucuccagcccc

SEQ ID NO: 1734348 - RNA, 18 nt, Human
aggcccuuccucuccacu

SEQ ID NO: 1734349 - RNA, 17 nt, Human
aggcccuuccucuccac

SEQ ID NO: 1734350 - RNA, 15 nt, Human
aggcccuuccucucc

SEQ ID NO: 1734351 - RNA, 13 nt, Human
aggcccuuccucu

SEQ ID NO: 1734352 - RNA, 18 nt, Human
aggcuguaucccaugagc

SEQ ID NO: 1734353 - RNA, 13 nt, Human
aggcuguauccca

SEQ ID NO: 1734354 - RNA, 20 nt, Human
aggcugucaauuacaggaag

SEQ ID NO: 1734355 - RNA, 23 nt, Human
agggacagaggggguggccuccc

SEQ ID NO: 1734356 - RNA, 22 nt, Human
agggacagaggggguggccucc

SEQ ID NO: 1734357 - RNA, 21 nt, Human
aggcugucaauuacaggaagu

SEQ ID NO: 1734358 - RNA, 17 nt, Human
agggacgcuacccggga

SEQ ID NO: 1734359 - RNA, 23 nt, Human
agcugcgguccacccaggagccc

SEQ ID NO: 1734360 - RNA, 19 nt, Human
agcuucuguugcugccuca

SEQ ID NO: 1734361 - RNA, 23 nt, Human
agcuccgcuuucuacccagcgag

SEQ ID NO: 1734362 - RNA, 21 nt, Human
agcuccgcuuucuacccagcg

SEQ ID NO: 1734363 - RNA, 20 nt, Human
agcuccgcuuucuacccagc

SEQ ID NO: 1734364 - RNA, 13 nt, Human
agcuccuucuguc

SEQ ID NO: 1734365 - RNA, 12 nt, Human
agcuccuucugu

SEQ ID NO: 1734366 - RNA, 23 nt, Human
agcugagauuauaggcaccuacc

SEQ ID NO: 1734367 - RNA, 16 nt, Human
aggauguucugggaca

SEQ ID NO: 1734368 - RNA, 15 nt, Human
aggauguucugggac

SEQ ID NO: 1734369 - RNA, 22 nt, Human
aggauguucuagcauggcugcc

SEQ ID NO: 1734370 - RNA, 22 nt, Human
aggauguacaaggacagccccu

SEQ ID NO: 1734371 - RNA, 18 nt, Human
aggauguucugggacaca

SEQ ID NO: 1734372 - RNA, 14 nt, Human
aggauuaaauaaug

SEQ ID NO: 1734373 - RNA, 14 nt, Human
aggauuauuggaaa

SEQ ID NO: 1734374 - RNA, 20 nt, Human
aggauuaaauaauguaaaua

SEQ ID NO: 1734375 - RNA, 13 nt, Human
aggaccucaggug

SEQ ID NO: 1734376 - RNA, 21 nt, Human
aggaugcuuguacauaaugcg

SEQ ID NO: 1734377 - RNA, 23 nt, Human
aggaugcuuguacauaaugcgug

SEQ ID NO: 1734378 - RNA, 18 nt, Human
aggaguggguugauuuca

SEQ ID NO: 1734379 - RNA, 17 nt, Human
aggaauccagacccggc

SEQ ID NO: 1734380 - RNA, 21 nt, Human
aggaaucaugugccaagcaga

SEQ ID NO: 1734381 - RNA, 20 nt, Human
aggaauccagacccggcugc

SEQ ID NO: 1734382 - RNA, 21 nt, Human
agcuuuucccuuuuuuuaagu

SEQ ID NO: 1734383 - RNA, 23 nt, Human
agcauccuggcacccggccccug

SEQ ID NO: 1734384 - RNA, 22 nt, Human
agcauccuggcacccggccccu

SEQ ID NO: 1734385 - RNA, 23 nt, Human
agcaugccuggauggggcugcac

SEQ ID NO: 1734386 - RNA, 23 nt, Human
agccaagugugguagagugugcc

SEQ ID NO: 1734387 - RNA, 13 nt, Human
agcagcguuucua

SEQ ID NO: 1734388 - RNA, 18 nt, Human
agcagcguuucuaugaca

SEQ ID NO: 1734389 - RNA, 20 nt, Human
agcagugcaugcugucccuu

SEQ ID NO: 1734390 - RNA, 19 nt, Human
agcagugcaugcugucccu

SEQ ID NO: 1734391 - RNA, 19 nt, Human
agcacagacccugcccugu

SEQ ID NO: 1734392 - RNA, 18 nt, Human
agcacagacccugcccug

SEQ ID NO: 1734393 - RNA, 20 nt, Human
agcacagacccugcccugug

SEQ ID NO: 1734394 - RNA, 17 nt, Human
agcacagacccugcccu

SEQ ID NO: 1734395 - RNA, 23 nt, Human
agcacacuugacaucaacugcau

SEQ ID NO: 1734396 - RNA, 21 nt, Human
agccgggcgugguggugagug

SEQ ID NO: 1734397 - RNA, 16 nt, Human
agccgugccuucagcu

SEQ ID NO: 1734398 - RNA, 15 nt, Human
agccgugccuucagc

SEQ ID NO: 1734399 - RNA, 21 nt, Human
agccucccaaagugcugggau

SEQ ID NO: 1734400 - RNA, 17 nt, Human
agccgugccuucagcuc

SEQ ID NO: 1734401 - RNA, 22 nt, Human
agccucccacgacugcccggca

SEQ ID NO: 1734402 - RNA, 14 nt, Human
agccuccuccagcc

SEQ ID NO: 1734403 - RNA, 19 nt, Human
agccucccgaguagcuggg

SEQ ID NO: 1734404 - RNA, 18 nt, Human
agccucccgaguagcugg

SEQ ID NO: 1734405 - RNA, 20 nt, Human
agccucccgaguagcuggga

SEQ ID NO: 1734406 - RNA, 22 nt, Human
agccucccgaguagcugggacu

SEQ ID NO: 1734407 - RNA, 21 nt, Human
agccgccaugcuccuggccca

SEQ ID NO: 1734408 - RNA, 13 nt, Human
agccgcuggggcc

SEQ ID NO: 1734409 - RNA, 20 nt, Human
agccagcaggcucucaggcc

SEQ ID NO: 1734410 - RNA, 19 nt, Human
agccagcaggcucucaggc

SEQ ID NO: 1734411 - RNA, 18 nt, Human
agccagcaggcucucagg

SEQ ID NO: 1734412 - RNA, 16 nt, Human
agccccauucugccug

SEQ ID NO: 1734413 - RNA, 13 nt, Human
agccccauucugc

SEQ ID NO: 1734414 - RNA, 17 nt, Human
agcccucacccuggggc

SEQ ID NO: 1734415 - RNA, 15 nt, Human
agccccagugcccac

SEQ ID NO: 1734416 - RNA, 14 nt, Human
agccccagugccca

SEQ ID NO: 1734417 - RNA, 13 nt, Human
agccccagugccc

SEQ ID NO: 1734418 - RNA, 17 nt, Human
agacuggaagcacagcu

SEQ ID NO: 1734419 - RNA, 19 nt, Human
agacuggaagcacagcuuc

SEQ ID NO: 1734420 - RNA, 21 nt, Human
agagaggguggugaccucugc

SEQ ID NO: 1734421 - RNA, 20 nt, Human
agagaggguggugaccucug

SEQ ID NO: 1734422 - RNA, 22 nt, Human
agagaggguggugaccucugcc

SEQ ID NO: 1734423 - RNA, 13 nt, Human
agagcccacgccc

SEQ ID NO: 1734424 - RNA, 19 nt, Human
agagcccaccuuggcucaa

SEQ ID NO: 1734425 - RNA, 16 nt, Human
agagcccacgccccca

SEQ ID NO: 1734426 - RNA, 17 nt, Human
agagcccacgcccccac

SEQ ID NO: 1734427 - RNA, 21 nt, Human
agacgcugugcugcccugccc

SEQ ID NO: 1734428 - RNA, 12 nt, Human
agacagcucuua

SEQ ID NO: 1734429 - RNA, 11 nt, Human
agacagcucuu

SEQ ID NO: 1734430 - RNA, 12 nt, Human
agacagcugccu

SEQ ID NO: 1734431 - RNA, 18 nt, Human
agacggagucccaccuug

SEQ ID NO: 1734432 - RNA, 22 nt, Human
agacgcugugcugcccugccca

SEQ ID NO: 1734433 - RNA, 17 nt, Human
agacgugauuuugcugu

SEQ ID NO: 1734434 - RNA, 15 nt, Human
agacagcccgggcuc

SEQ ID NO: 1734435 - RNA, 14 nt, Human
agacagcccgggcu

SEQ ID NO: 1734436 - RNA, 16 nt, Human
agacagcccgggcucu

SEQ ID NO: 1734437 - RNA, 21 nt, Human
agacagauacuccuccaaggu

SEQ ID NO: 1734438 - RNA, 15 nt, Human
agacagauacuccuc

SEQ ID NO: 1734439 - RNA, 14 nt, Human
agauggcugugccu

SEQ ID NO: 1734440 - RNA, 19 nt, Human
agauauaugcucugcaugu

SEQ ID NO: 1734441 - RNA, 14 nt, Human
agagugugccugaa

SEQ ID NO: 1734442 - RNA, 11 nt, Human
agagugggagc

SEQ ID NO: 1734443 - RNA, 23 nt, Human
agaggguggugaccucugccuga

SEQ ID NO: 1734444 - RNA, 19 nt, Human
agaguggcuccucccggug

SEQ ID NO: 1734445 - RNA, 19 nt, Human
agaguggggauaugauuua

SEQ ID NO: 1734446 - RNA, 23 nt, Human
agaguggcuccucccggugccca

SEQ ID NO: 1734447 - RNA, 19 nt, Human
agaggguggugaccucugc

SEQ ID NO: 1734448 - RNA, 22 nt, Human
agaggguggugaccucugccug

SEQ ID NO: 1734449 - RNA, 20 nt, Human
agaggguggugaccucugcc

SEQ ID NO: 1734450 - RNA, 12 nt, Human
agagggcacaga

SEQ ID NO: 1734451 - RNA, 16 nt, Human
agaggaaggagaggag

SEQ ID NO: 1734452 - RNA, 16 nt, Human
agaggagagaggaccc

SEQ ID NO: 1734453 - RNA, 15 nt, Human
agaggagagaggacc

SEQ ID NO: 1734454 - RNA, 14 nt, Human
agaggacuuuucuu

SEQ ID NO: 1734455 - RNA, 14 nt, Human
agagcccaggccuc

SEQ ID NO: 1734456 - RNA, 13 nt, Human
agagcccaggccu

SEQ ID NO: 1734457 - RNA, 15 nt, Human
agagcccaggccucc

SEQ ID NO: 1734458 - RNA, 15 nt, Human
aauccaaugaaauga

SEQ ID NO: 1734459 - RNA, 19 nt, Human
aauccagacccggcugcgu

SEQ ID NO: 1734460 - RNA, 16 nt, Human
aaucucaaauuucuaa

SEQ ID NO: 1734461 - RNA, 15 nt, Human
aaucucaaauuucua

SEQ ID NO: 1734462 - RNA, 13 nt, Human
aauccagccugcu

SEQ ID NO: 1734463 - RNA, 17 nt, Human
aaucucaaauuucuaaa

SEQ ID NO: 1734464 - RNA, 18 nt, Human
aaucucaaauuucuaaau

SEQ ID NO: 1734465 - RNA, 16 nt, Human
aaucucuccauucccg

SEQ ID NO: 1734466 - RNA, 16 nt, Human
aaugauccccagcugu

SEQ ID NO: 1734467 - RNA, 22 nt, Human
aaugauccccagcuguuuaugc

SEQ ID NO: 1734468 - RNA, 19 nt, Human
aaugauccccagcuguuua

SEQ ID NO: 1734469 - RNA, 20 nt, Human
aaugauccccagcuguuuau

SEQ ID NO: 1734470 - RNA, 18 nt, Human
aauccaagcaaaugugaa

SEQ ID NO: 1734471 - RNA, 17 nt, Human
aauccaagcaaauguga

SEQ ID NO: 1734472 - RNA, 13 nt, Human
aauagacaauuua

SEQ ID NO: 1734473 - RNA, 21 nt, Human
aauauuagugaccucagcuuu

SEQ ID NO: 1734474 - RNA, 14 nt, Human
aaucaccgaaaacg

SEQ ID NO: 1734475 - RNA, 19 nt, Human
aaucacauucgaguguuuc

SEQ ID NO: 1734476 - RNA, 15 nt, Human
aaucaccgaaaacgu

SEQ ID NO: 1734477 - RNA, 23 nt, Human
aauacuuugcagcacagcugaga

SEQ ID NO: 1734478 - RNA, 22 nt, Human
aauacucuacccucuuagaaaa

SEQ ID NO: 1734479 - RNA, 20 nt, Human
aauacucuacccucuuagaa

SEQ ID NO: 1734480 - RNA, 22 nt, Human
aauguuuuuuuuuaaagacuuu

SEQ ID NO: 1734481 - RNA, 20 nt, Human
aauguuuuuuuuuaaagacu

SEQ ID NO: 1734482 - RNA, 15 nt, Human
aauguuuuuuuuuaa

SEQ ID NO: 1734483 - RNA, 15 nt, Human
aaugugaaaagaaaa

SEQ ID NO: 1734484 - RNA, 17 nt, Human
aaugugaaaagaaaaau

SEQ ID NO: 1734485 - RNA, 12 nt, Human
aauguuuccuuu

SEQ ID NO: 1734486 - RNA, 22 nt, Human
aauguuuacagauccccaagcc

SEQ ID NO: 1734487 - RNA, 16 nt, Human
aauguuugccucugcc

SEQ ID NO: 1734488 - RNA, 15 nt, Human
aauguuugccucugc

SEQ ID NO: 1734489 - RNA, 13 nt, Human
aauguuuccuuua

SEQ ID NO: 1734490 - RNA, 23 nt, Human
aaugcuauaacuauguugauaaa

SEQ ID NO: 1734491 - RNA, 19 nt, Human
aaugcgugcauaccacuuu

SEQ ID NO: 1734492 - RNA, 18 nt, Human
aaugcgugcauaccacuu

SEQ ID NO: 1734493 - RNA, 22 nt, Human
aaugcgcaggcuggcccugccc

SEQ ID NO: 1734494 - RNA, 23 nt, Human
aaugccuuacccucauguucuua

SEQ ID NO: 1734495 - RNA, 18 nt, Human
aagggacgcuacccggga

SEQ ID NO: 1734496 - RNA, 18 nt, Human
aaggucauuuuuuuuaag

SEQ ID NO: 1734497 - RNA, 19 nt, Human
aaggucauuuuuuuuaaga

SEQ ID NO: 1734498 - RNA, 14 nt, Human
aagucuccaaaguc

SEQ ID NO: 1734499 - RNA, 22 nt, Human
aaguccucuuuucugagaggac

SEQ ID NO: 1734500 - RNA, 18 nt, Human
aaguauccugcuucugau

SEQ ID NO: 1734501 - RNA, 18 nt, Human
aaguccucuuuucugaga

SEQ ID NO: 1734502 - RNA, 14 nt, Human
aaguccacagugga

SEQ ID NO: 1734503 - RNA, 19 nt, Human
aaguccacaguggaaccag

SEQ ID NO: 1734504 - RNA, 21 nt, Human
aaguagaagucuuagauguau

SEQ ID NO: 1734505 - RNA, 18 nt, Human
aaguaucccuacuguaau

SEQ ID NO: 1734506 - RNA, 23 nt, Human
aaguaucccuacuguaauuugug

SEQ ID NO: 1734507 - RNA, 17 nt, Human
aaguaucccuacuguaa

SEQ ID NO: 1734508 - RNA, 15 nt, Human
aaguaguggagcccc

SEQ ID NO: 1734509 - RNA, 20 nt, Human
aaguagaagucuuagaugua

SEQ ID NO: 1734510 - RNA, 19 nt, Human
aaguagaagucuuagaugu

SEQ ID NO: 1734511 - RNA, 20 nt, Human
aaggugaggagcuugaaacc

SEQ ID NO: 1734512 - RNA, 19 nt, Human
aaguggaaaaauagccugc

SEQ ID NO: 1734513 - RNA, 21 nt, Human
aaguggaaaaauagccugccu

SEQ ID NO: 1734514 - RNA, 20 nt, Human
aagucuguugauuaaagaug

SEQ ID NO: 1734515 - RNA, 15 nt, Human
aagucuccaaagucu

SEQ ID NO: 1734516 - RNA, 14 nt, Human
aagauaaaugugcu

SEQ ID NO: 1734517 - RNA, 13 nt, Human
aagauaaaugugc

SEQ ID NO: 1734518 - RNA, 12 nt, Human
aagauaaaugug

SEQ ID NO: 1734519 - RNA, 15 nt, Human
aagauguucuggaua

SEQ ID NO: 1734520 - RNA, 20 nt, Human
aagauguucuggauaccauu

SEQ ID NO: 1734521 - RNA, 14 nt, Human
aagcagcguuucua

SEQ ID NO: 1734522 - RNA, 17 nt, Human
aagcagcguuucuauga

SEQ ID NO: 1734523 - RNA, 20 nt, Human
aagcagcguuucuaugacac

SEQ ID NO: 1734524 - RNA, 21 nt, Human
aagcagcguuucuaugacaca

SEQ ID NO: 1734525 - RNA, 22 nt, Human
aagcagcguuucuaugacacau

SEQ ID NO: 1734526 - RNA, 23 nt, Human
aagccagcaggcucucaggccag

SEQ ID NO: 1734527 - RNA, 20 nt, Human
aagccagcaggcucucaggc

SEQ ID NO: 1734528 - RNA, 19 nt, Human
aaggacagccccuccucca

SEQ ID NO: 1734529 - RNA, 13 nt, Human
aaggacagccccu

SEQ ID NO: 1734530 - RNA, 13 nt, Human
aaggacacuagaa

SEQ ID NO: 1734531 - RNA, 21 nt, Human
aagcuggucccacucagucca

SEQ ID NO: 1734532 - RNA, 18 nt, Human
aagcuggucccacucagu

SEQ ID NO: 1734533 - RNA, 18 nt, Human
aagcuguguggcagucug

SEQ ID NO: 1734534 - RNA, 12 nt, Human
aaggcagggagg

SEQ ID NO: 1734535 - RNA, 15 nt, Human
aaggauugcuacugu

SEQ ID NO: 1734536 - RNA, 15 nt, Human
aaggauguucuagca

SEQ ID NO: 1734537 - RNA, 21 nt, Human
aagcgauucuucugcuucagc

SEQ ID NO: 1734538 - RNA, 17 nt, Human
aaaucuuauaauuuaaa

SEQ ID NO: 1734539 - RNA, 15 nt, Human
aaaugccuuuguacu

SEQ ID NO: 1734540 - RNA, 22 nt, Human
aaauugacacuuaaaaaugguu

SEQ ID NO: 1734541 - RNA, 19 nt, Human
aaauugacacuuaaaaaug

SEQ ID NO: 1734542 - RNA, 14 nt, Human
aaauugcuccuuga

SEQ ID NO: 1734543 - RNA, 13 nt, Human
aaauugcuccuug

SEQ ID NO: 1734544 - RNA, 21 nt, Human
aaauucuugcaaaguaucccu

SEQ ID NO: 1734545 - RNA, 17 nt, Human
aaauuaaagcugaaaac

SEQ ID NO: 1734546 - RNA, 13 nt, Human
aaauuaaagcuga

SEQ ID NO: 1734547 - RNA, 18 nt, Human
aacaaauuuacagagaca

SEQ ID NO: 1734548 - RNA, 17 nt, Human
aaauuuuuuuuguuuca

SEQ ID NO: 1734549 - RNA, 18 nt, Human
aaauuuuuuuuguuucau

SEQ ID NO: 1734550 - RNA, 22 nt, Human
aaccacuggaaaguuuaugguu

SEQ ID NO: 1734551 - RNA, 15 nt, Human
aaccacuucagcuga

SEQ ID NO: 1734552 - RNA, 13 nt, Human
aaccacgcuggac

SEQ ID NO: 1734553 - RNA, 15 nt, Human
aacaucccuccuggg

SEQ ID NO: 1734554 - RNA, 21 nt, Human
aacccuuggagccaauggaga

SEQ ID NO: 1734555 - RNA, 15 nt, Human
aacccuauugguaaa

SEQ ID NO: 1734556 - RNA, 12 nt, Human
aaccagaucauu

SEQ ID NO: 1734557 - RNA, 11 nt, Human
aacgcagcccu

SEQ ID NO: 1734558 - RNA, 15 nt, Human
aacgcugauuuaaag

SEQ ID NO: 1734559 - RNA, 16 nt, Human
aacugagugccuuuug

SEQ ID NO: 1734560 - RNA, 14 nt, Human
aacugauaaagaug

SEQ ID NO: 1734561 - RNA, 18 nt, Human
aacuuaaucuaaauggaa

SEQ ID NO: 1734562 - RNA, 15 nt, Human
aacuuaaucuaaaug

SEQ ID NO: 1734563 - RNA, 16 nt, Human
aacuuaaucuaaaugg

SEQ ID NO: 1734564 - RNA, 21 nt, Human
aacuuuaugcuaagugaaaua

SEQ ID NO: 1734565 - RNA, 20 nt, Human
aacuuuaugcuaagugaaau

SEQ ID NO: 1734566 - RNA, 19 nt, Human
aaauaguggugugauuugg

SEQ ID NO: 1734567 - RNA, 24 nt, Human
aaauagcucaggugucccugcacu

SEQ ID NO: 1734568 - RNA, 19 nt, Human
aaaucaaugcuauaacuau

SEQ ID NO: 1734569 - RNA, 19 nt, Human
aaauaaaacuuuuuaaaau

SEQ ID NO: 1734570 - RNA, 13 nt, Human
aaauaaaacuuuu

SEQ ID NO: 1734571 - RNA, 16 nt, Human
aaauaaaacuuuuuaa

SEQ ID NO: 1734572 - RNA, 13 nt, Human
aaaguggaaaaau

SEQ ID NO: 1734573 - RNA, 20 nt, Human
aaaggcuccaggagcagcca

SEQ ID NO: 1734574 - RNA, 19 nt, Human
aaaggcuccaggagcagcc

SEQ ID NO: 1734575 - RNA, 14 nt, Human
aaaggcagaagcaa

SEQ ID NO: 1734576 - RNA, 16 nt, Human
aaaggcuccaggagca

SEQ ID NO: 1734577 - RNA, 15 nt, Human
aaaggcuccaggagc

SEQ ID NO: 1734578 - RNA, 21 nt, Human
aaaggccuaauucuaugccug

SEQ ID NO: 1734579 - RNA, 16 nt, Human
aaagccuccuccagcc

SEQ ID NO: 1734580 - RNA, 23 nt, Human
aaagcccuuccaugucgccucug

SEQ ID NO: 1734581 - RNA, 22 nt, Human
aaagcccuuccaugucgccucu

SEQ ID NO: 1734582 - RNA, 19 nt, Human
aaagcccuuaggaagaauu

SEQ ID NO: 1734583 - RNA, 18 nt, Human
aaaccaucauugaaaucu

SEQ ID NO: 1734584 - RNA, 18 nt, Human
aaaccccuguaggccuca

SEQ ID NO: 1734585 - RNA, 16 nt, Human
aaacccuauugguaaa

SEQ ID NO: 1734586 - RNA, 18 nt, Human
aaacucuccucugcugcu

SEQ ID NO: 1734587 - RNA, 24 nt, Human
aaacccucgaggcggaucuuugga

SEQ ID NO: 1734588 - RNA, 13 nt, Human
aaacccucgaggc

SEQ ID NO: 1734589 - RNA, 14 nt, Human
aaagaguaggaaga

SEQ ID NO: 1734590 - RNA, 20 nt, Human
aaagaagguuucagaaagaa

SEQ ID NO: 1734591 - RNA, 17 nt, Human
aaagaaauauaccuaaa

SEQ ID NO: 1734592 - RNA, 15 nt, Human
aaagaaauauaccua

SEQ ID NO: 1734593 - RNA, 17 nt, Human
aaagauauuuugcuuug

SEQ ID NO: 1734594 - RNA, 20 nt, Human
aaagauauuuugcuuuguga

SEQ ID NO: 1734595 - RNA, 12 nt, Human
aaagauauuuug

SEQ ID NO: 1734596 - RNA, 16 nt, Human
aaagauauuuugcuuu

SEQ ID NO: 1734597 - RNA, 19 nt, Human
aaaaucucaaauuucuaaa

SEQ ID NO: 1734598 - RNA, 22 nt, Human
aaaaucucaaauuucuaaaucu

SEQ ID NO: 1734599 - RNA, 21 nt, Human
aaaauugaugggauuugguca

SEQ ID NO: 1734600 - RNA, 21 nt, Human
aaacacugggagaaaugaaaa

SEQ ID NO: 1734601 - RNA, 16 nt, Human
aaacacuguucucugc

SEQ ID NO: 1734602 - RNA, 22 nt, Human
aaacacugggagaaaugaaaaa

SEQ ID NO: 1734603 - RNA, 15 nt, Human
aaaaagaaaggaggg

SEQ ID NO: 1734604 - RNA, 18 nt, Human
aaaaguucugcagauaaa

SEQ ID NO: 1734605 - RNA, 17 nt, Human
aaaauaaaacuuuuuaa

SEQ ID NO: 1734606 - RNA, 19 nt, Human
aaaauaaaauuaaagcuga

SEQ ID NO: 1734607 - RNA, 21 nt, Human
aaaaucuacacuccagugaga

SEQ ID NO: 1734608 - RNA, 22 nt, Human
acccccugcaaagcccagcuug

SEQ ID NO: 1734609 - RNA, 20 nt, Human
acccccugcaaagcccagcu

SEQ ID NO: 1734610 - RNA, 18 nt, Human
acccccugcaaagcccag

SEQ ID NO: 1734611 - RNA, 11 nt, Human
acccccugaau

SEQ ID NO: 1734612 - RNA, 17 nt, Human
acccccugcaaagccca

SEQ ID NO: 1734613 - RNA, 14 nt, Human
acccccugcaaagc

SEQ ID NO: 1734614 - RNA, 16 nt, Human
acccaccucagccucc

SEQ ID NO: 1734615 - RNA, 21 nt, Human
acccacaagaaaugaaagcag

SEQ ID NO: 1734616 - RNA, 17 nt, Human
acccacaagaaaugaaa

SEQ ID NO: 1734617 - RNA, 23 nt, Human
acccaagggccuggccugagcug

SEQ ID NO: 1734618 - RNA, 15 nt, Human
acccaccucagccuc

SEQ ID NO: 1734619 - RNA, 14 nt, Human
acccaccucagccu

SEQ ID NO: 1734620 - RNA, 13 nt, Human
acccaccucagcc

SEQ ID NO: 1734621 - RNA, 20 nt, Human
accauauuaccacagacaua

SEQ ID NO: 1734622 - RNA, 22 nt, Human
acccaagggccuggccugagcu

SEQ ID NO: 1734623 - RNA, 19 nt, Human
acccaagggccuggccuga

SEQ ID NO: 1734624 - RNA, 18 nt, Human
acccaagggccuggccug

SEQ ID NO: 1734625 - RNA, 14 nt, Human
accauauuaccaca

SEQ ID NO: 1734626 - RNA, 16 nt, Human
accauauuaccacaga

SEQ ID NO: 1734627 - RNA, 19 nt, Human
accccuccaugugggcuag

SEQ ID NO: 1734628 - RNA, 16 nt, Human
accccuccaugugggc

SEQ ID NO: 1734629 - RNA, 17 nt, Human
accccucauagcccuca

SEQ ID NO: 1734630 - RNA, 18 nt, Human
acaugugcacaugcacgu

SEQ ID NO: 1734631 - RNA, 16 nt, Human
acaugugcacaugcac

SEQ ID NO: 1734632 - RNA, 15 nt, Human
acaucagcacgauuu

SEQ ID NO: 1734633 - RNA, 17 nt, Human
acaucagcacgauuucu

SEQ ID NO: 1734634 - RNA, 18 nt, Human
acaucagcacgauuucug

SEQ ID NO: 1734635 - RNA, 19 nt, Human
acaucagcacgauuucugu

SEQ ID NO: 1734636 - RNA, 19 nt, Human
acaugaucuucuuuauaau

SEQ ID NO: 1734637 - RNA, 22 nt, Human
acauguuucuuuguaaugaaaa

SEQ ID NO: 1734638 - RNA, 19 nt, Human
acauguuucuuuguaauga

SEQ ID NO: 1734639 - RNA, 23 nt, Human
acauguuucuuuguaaugaaaac

SEQ ID NO: 1734640 - RNA, 23 nt, Human
acauaaugcgugcauaccacuuu

SEQ ID NO: 1734641 - RNA, 22 nt, Human
acauaaugcgugcauaccacuu

SEQ ID NO: 1734642 - RNA, 21 nt, Human
acauaaugcgugcauaccacu

SEQ ID NO: 1734643 - RNA, 19 nt, Human
acaggguuuugccauguug

SEQ ID NO: 1734644 - RNA, 23 nt, Human
acaggcaaugcuggcuguuggcu

SEQ ID NO: 1734645 - RNA, 19 nt, Human
acaggcaaugcuggcuguu

SEQ ID NO: 1734646 - RNA, 15 nt, Human
acauuuauucugcuc

SEQ ID NO: 1734647 - RNA, 19 nt, Human
acauuuguucuauagcuuu

SEQ ID NO: 1734648 - RNA, 12 nt, Human
accaagcccagu

SEQ ID NO: 1734649 - RNA, 14 nt, Human
accaauauuguaca

SEQ ID NO: 1734650 - RNA, 17 nt, Human
accagccaguaaauggg

SEQ ID NO: 1734651 - RNA, 15 nt, Human
accagcccagacccu

SEQ ID NO: 1734652 - RNA, 13 nt, Human
accagcagaaaug

SEQ ID NO: 1734653 - RNA, 13 nt, Human
accagaucauugu

SEQ ID NO: 1734654 - RNA, 19 nt, Human
accagagcugccaccugcc

SEQ ID NO: 1734655 - RNA, 13 nt, Human
acaagaaaugaaa

SEQ ID NO: 1734656 - RNA, 17 nt, Human
acaaggauugcuacugu

SEQ ID NO: 1734657 - RNA, 14 nt, Human
acaaggcaaggcug

SEQ ID NO: 1734658 - RNA, 12 nt, Human
acaaggcaaggc

SEQ ID NO: 1734659 - RNA, 22 nt, Human
acaaaauguaggguuauaauaa

SEQ ID NO: 1734660 - RNA, 15 nt, Human
acaaggcaaggcugu

SEQ ID NO: 1734661 - RNA, 18 nt, Human
aauuuuguguaagaaaua

SEQ ID NO: 1734662 - RNA, 22 nt, Human
aauuuuguguaagaaauacaga

SEQ ID NO: 1734663 - RNA, 14 nt, Human
aauuuuguguaaga

SEQ ID NO: 1734664 - RNA, 15 nt, Human
aauuuuguguaagaa

SEQ ID NO: 1734665 - RNA, 17 nt, Human
aauuuuguguaagaaau

SEQ ID NO: 1734666 - RNA, 18 nt, Human
aauuuuguaauguaucaa

SEQ ID NO: 1734667 - RNA, 17 nt, Human
acacgcgugcacacacc

SEQ ID NO: 1734668 - RNA, 15 nt, Human
acacgcgugcacaca

SEQ ID NO: 1734669 - RNA, 14 nt, Human
acacgcuccuuccu

SEQ ID NO: 1734670 - RNA, 16 nt, Human
acacgcuccuuccucu

SEQ ID NO: 1734671 - RNA, 13 nt, Human
acacagcucuucu

SEQ ID NO: 1734672 - RNA, 11 nt, Human
acacagcucuu

SEQ ID NO: 1734673 - RNA, 22 nt, Human
acacauuuuauuuuauuaugca

SEQ ID NO: 1734674 - RNA, 12 nt, Human
acacauuuuucu

SEQ ID NO: 1734675 - RNA, 14 nt, Human
acacauuuuucaga

SEQ ID NO: 1734676 - RNA, 20 nt, Human
acacauuuuuuaaaugcacc

SEQ ID NO: 1734677 - RNA, 22 nt, Human
acacauuuuuuaaaugcaccug

SEQ ID NO: 1734678 - RNA, 19 nt, Human
acacagaggcugccucucc

SEQ ID NO: 1734679 - RNA, 20 nt, Human
acacagcucuguccugggag

SEQ ID NO: 1734680 - RNA, 17 nt, Human
acacagauuugagcuca

SEQ ID NO: 1734681 - RNA, 19 nt, Human
acagagugagacucugucu

SEQ ID NO: 1734682 - RNA, 15 nt, Human
acagagugagacucu

SEQ ID NO: 1734683 - RNA, 14 nt, Human
acagaggggguggc

SEQ ID NO: 1734684 - RNA, 17 nt, Human
acagccaacuauggccu

SEQ ID NO: 1734685 - RNA, 19 nt, Human
acagccaacuauggccugu

SEQ ID NO: 1734686 - RNA, 15 nt, Human
acagaggcagcccca

SEQ ID NO: 1734687 - RNA, 14 nt, Human
acagaggcagcccc

SEQ ID NO: 1734688 - RNA, 14 nt, Human
acagacacaggccc

SEQ ID NO: 1734689 - RNA, 13 nt, Human
acagacacaggcc

SEQ ID NO: 1734690 - RNA, 23 nt, Human
acagaggcagccccauucugccu

SEQ ID NO: 1734691 - RNA, 19 nt, Human
acagaggcagccccauucu

SEQ ID NO: 1734692 - RNA, 15 nt, Human
acagacacaggcccg

SEQ ID NO: 1734693 - RNA, 15 nt, Human
acacuguacugcaau

SEQ ID NO: 1734694 - RNA, 13 nt, Human
acagacaaagcgu

SEQ ID NO: 1734695 - RNA, 11 nt, Human
acagacacagg

SEQ ID NO: 1734696 - RNA, 14 nt, Human
acacugcauguuug

SEQ ID NO: 1734697 - RNA, 15 nt, Human
acacugcauguuugu

SEQ ID NO: 1734698 - RNA, 17 nt, Human
acagccacggccaggcc

SEQ ID NO: 1734699 - RNA, 16 nt, Human
acagccacggccaggc

SEQ ID NO: 1734700 - RNA, 15 nt, Human
acagccacggccagg

SEQ ID NO: 1734701 - RNA, 18 nt, Human
acagccacggccaggcca

SEQ ID NO: 1734702 - RNA, 19 nt, Human
acagccacggccaggccag

SEQ ID NO: 1734703 - RNA, 18 nt, Human
acagcucuucuccaggcu

SEQ ID NO: 1734704 - RNA, 17 nt, Human
acagcucuucuccaggc

SEQ ID NO: 1734705 - RNA, 16 nt, Human
acagcucuucuccagg

SEQ ID NO: 1734706 - RNA, 12 nt, Human
acaggcaagcac

SEQ ID NO: 1734707 - RNA, 18 nt, Human
acaggcaaugcuggcugu

SEQ ID NO: 1734708 - RNA, 21 nt, Human
acaggaugaugacuauggaaa

SEQ ID NO: 1734709 - RNA, 19 nt, Human
acucaguccauagcagaga

SEQ ID NO: 1734710 - RNA, 18 nt, Human
acucaaaagcugggcagg

SEQ ID NO: 1734711 - RNA, 13 nt, Human
acucaaaagcugg

SEQ ID NO: 1734712 - RNA, 18 nt, Human
acuauuuuucagaaucuc

SEQ ID NO: 1734713 - RNA, 17 nt, Human
acucuauguucuaagaa

SEQ ID NO: 1734714 - RNA, 23 nt, Human
acucuaucaaguauuauaccuuu

SEQ ID NO: 1734715 - RNA, 19 nt, Human
acucugucgcccagucugg

SEQ ID NO: 1734716 - RNA, 17 nt, Human
acucuagggaaaaacca

SEQ ID NO: 1734717 - RNA, 15 nt, Human
acucuagggaaaaac

SEQ ID NO: 1734718 - RNA, 14 nt, Human
acgcugugcugccc

SEQ ID NO: 1734719 - RNA, 12 nt, Human
acgcugugcugc

SEQ ID NO: 1734720 - RNA, 11 nt, Human
acgcugugcug

SEQ ID NO: 1734721 - RNA, 15 nt, Human
acgucugacaggcaa

SEQ ID NO: 1734722 - RNA, 14 nt, Human
acgucugacaggca

SEQ ID NO: 1734723 - RNA, 13 nt, Human
acgucugacaggc

SEQ ID NO: 1734724 - RNA, 11 nt, Human
acgugaguccu

SEQ ID NO: 1734725 - RNA, 21 nt, Human
accucugcagcaauaaagcag

SEQ ID NO: 1734726 - RNA, 18 nt, Human
accucugcagcaauaaag

SEQ ID NO: 1734727 - RNA, 20 nt, Human
accucugcagcaauaaagca

SEQ ID NO: 1734728 - RNA, 15 nt, Human
accucugcagcaaua

SEQ ID NO: 1734729 - RNA, 15 nt, Human
accuuuaagagaaau

SEQ ID NO: 1734730 - RNA, 18 nt, Human
accuuucccaucuuccaa

SEQ ID NO: 1734731 - RNA, 13 nt, Human
accuuucccaucu

SEQ ID NO: 1734732 - RNA, 18 nt, Human
accuuggcugcagggagu

SEQ ID NO: 1734733 - RNA, 17 nt, Human
accuuggcugcagggag

SEQ ID NO: 1734734 - RNA, 15 nt, Human
accugucccccugac

SEQ ID NO: 1734735 - RNA, 12 nt, Human
accugucccccu

SEQ ID NO: 1734736 - RNA, 16 nt, Human
accugucccccugaca

SEQ ID NO: 1734737 - RNA, 20 nt, Human
accugcccugcugaguccca

SEQ ID NO: 1734738 - RNA, 22 nt, Human
agaaaguacuucuccacccugc

SEQ ID NO: 1734739 - RNA, 23 nt, Human
agaaaguacuucuccacccugcu

SEQ ID NO: 1734740 - RNA, 22 nt, Human
acuuuauuuucuauaauuuaaa

SEQ ID NO: 1734741 - RNA, 17 nt, Human
acuuuguucuggcucuu

SEQ ID NO: 1734742 - RNA, 16 nt, Human
acuuuguucuggcucu

SEQ ID NO: 1734743 - RNA, 22 nt, Human
acuuuaucuugaauaauguaag

SEQ ID NO: 1734744 - RNA, 19 nt, Human
acuuuguucuggcucuucc

SEQ ID NO: 1734745 - RNA, 20 nt, Human
acuuuguucuggcucuucca

SEQ ID NO: 1734746 - RNA, 13 nt, Human
acuuuuauaaacu

SEQ ID NO: 1734747 - RNA, 16 nt, Human
acuuuuaugauacuug

SEQ ID NO: 1734748 - RNA, 12 nt, Human
acuuuuaugaua

SEQ ID NO: 1734749 - RNA, 16 nt, Human
agaaaaucaggcuggc

SEQ ID NO: 1734750 - RNA, 15 nt, Human
agaaaauaccaagga

SEQ ID NO: 1734751 - RNA, 19 nt, Human
agaaaauaguggugugauu

SEQ ID NO: 1734752 - RNA, 14 nt, Human
acuuuucuuugugg

SEQ ID NO: 1734753 - RNA, 16 nt, Human
acuuuucuuucagcca

SEQ ID NO: 1734754 - RNA, 20 nt, Human
acuuuucauaaccuagccuu

SEQ ID NO: 1734755 - RNA, 23 nt, Human
acuuuuauuuccagugaaaucag

SEQ ID NO: 1734756 - RNA, 23 nt, Human
acuuuuaugauacuugaaaauua

SEQ ID NO: 1734757 - RNA, 18 nt, Human
acuuguaaaggaauuuaa

SEQ ID NO: 1734758 - RNA, 16 nt, Human
acuugguuuuuaaaaa

SEQ ID NO: 1734759 - RNA, 15 nt, Human
acuugggccacugug

SEQ ID NO: 1734760 - RNA, 14 nt, Human
acuugggccacugu

SEQ ID NO: 1734761 - RNA, 12 nt, Human
acuucagacaua

SEQ ID NO: 1734762 - RNA, 20 nt, Human
acugugcugagucugaaggc

SEQ ID NO: 1734763 - RNA, 22 nt, Human
acugugcugagucugaaggcug

SEQ ID NO: 1734764 - RNA, 18 nt, Human
acugguuccauggccucu

SEQ ID NO: 1734765 - RNA, 23 nt, Human
acugucucaagagggcacuggug

SEQ ID NO: 1734766 - RNA, 21 nt, Human
acugucucaagagggcacugg

SEQ ID NO: 1734767 - RNA, 20 nt, Human
acugucucaagagggcacug

SEQ ID NO: 1734768 - RNA, 17 nt, Human
acuggaagcacagcuuc

SEQ ID NO: 1734769 - RNA, 17 nt, Human
acugcccccucugcccu

SEQ ID NO: 1734770 - RNA, 16 nt, Human
acugcccccucugccc

SEQ ID NO: 1734771 - RNA, 19 nt, Human
acuggaagcacagcuucau

SEQ ID NO: 1734772 - RNA, 15 nt, Human
acugcccccucugcc

SEQ ID NO: 1734773 - RNA, 14 nt, Human
acugcccccucugc

SEQ ID NO: 1734774 - RNA, 15 nt, Human
acuggagaaaaugga

SEQ ID NO: 1734775 - RNA, 18 nt, Human
acugguaggaaacuaggu

SEQ ID NO: 1734776 - RNA, 20 nt, Human
acucugucucaguccaugaa

SEQ ID NO: 1734777 - RNA, 18 nt, Human
acucugucucaguccaug

SEQ ID NO: 1734778 - RNA, 18 nt, Human
aaaaacagauuuggaaag

SEQ ID NO: 1734779 - RNA, 15 nt, Human
aaaaaauauuuuccu

SEQ ID NO: 1734780 - RNA, 17 nt, Human
caagugauucuccugcc

SEQ ID NO: 1734781 - RNA, 16 nt, Human
caagugauucuccugc

SEQ ID NO: 1734782 - RNA, 19 nt, Human
caagugaaaaaggaggaag

SEQ ID NO: 1734783 - RNA, 22 nt, Human
caagugauucucaugccucagc

SEQ ID NO: 1734784 - RNA, 22 nt, Human
caagugugguagagugugccug

SEQ ID NO: 1734785 - RNA, 22 nt, Human
caagugauucuccugccucagc

SEQ ID NO: 1734786 - RNA, 14 nt, Human
caagugauucuccu

SEQ ID NO: 1734787 - RNA, 23 nt, Human
caaggugggaggauugcuugagc

SEQ ID NO: 1734788 - RNA, 12 nt, Human
caaggugggagg

SEQ ID NO: 1734789 - RNA, 19 nt, Human
caagggccuggccugagcu

SEQ ID NO: 1734790 - RNA, 19 nt, Human
caaggauugcuacuguccu

SEQ ID NO: 1734791 - RNA, 15 nt, Human
caaggauugcuacug

SEQ ID NO: 1734792 - RNA, 17 nt, Human
caagcacuaaacaaaga

SEQ ID NO: 1734793 - RNA, 18 nt, Human
caagcaccuccugccucg

SEQ ID NO: 1734794 - RNA, 16 nt, Human
caagcgugagccacug

SEQ ID NO: 1734795 - RNA, 17 nt, Human
caagccguggcuucccg

SEQ ID NO: 1734796 - RNA, 16 nt, Human
caagccguggcuuccc

SEQ ID NO: 1734797 - RNA, 15 nt, Human
caagccguggcuucc

SEQ ID NO: 1734798 - RNA, 14 nt, Human
caagccguggcuuc

SEQ ID NO: 1734799 - RNA, 21 nt, Human
caagccaccaacauacuccca

SEQ ID NO: 1734800 - RNA, 18 nt, Human
caagcgugagccacugca

SEQ ID NO: 1734801 - RNA, 17 nt, Human
caagcgugagccacugc

SEQ ID NO: 1734802 - RNA, 21 nt, Human
caaggaugaucuaggaagacu

SEQ ID NO: 1734803 - RNA, 19 nt, Human
caaggaugccccguccccc

SEQ ID NO: 1734804 - RNA, 13 nt, Human
caaggauccugag

SEQ ID NO: 1734805 - RNA, 14 nt, Human
caaggacuaggguc

SEQ ID NO: 1734806 - RNA, 14 nt, Human
caaauuuacagaga

SEQ ID NO: 1734807 - RNA, 18 nt, Human
caaauucugucucuggau

SEQ ID NO: 1734808 - RNA, 15 nt, Human
caaauucugucucug

SEQ ID NO: 1734809 - RNA, 16 nt, Human
caaauuuacagagaca

SEQ ID NO: 1734810 - RNA, 24 nt, Human
caacaggcugggcuucaguggcag

SEQ ID NO: 1734811 - RNA, 15 nt, Human
caaauuuacagagac

SEQ ID NO: 1734812 - RNA, 23 nt, Human
caacaggcugggcuucaguggca

SEQ ID NO: 1734813 - RNA, 15 nt, Human
caacagguuuuccug

SEQ ID NO: 1734814 - RNA, 18 nt, Human
caacaggguuuuuuucca

SEQ ID NO: 1734815 - RNA, 19 nt, Human
caacagguuuuccugaaga

SEQ ID NO: 1734816 - RNA, 22 nt, Human
caacaucuuggucagauuugaa

SEQ ID NO: 1734817 - RNA, 19 nt, Human
caaccccuucgcuccugug

SEQ ID NO: 1734818 - RNA, 18 nt, Human
caaccccuucgcuccugu

SEQ ID NO: 1734819 - RNA, 21 nt, Human
caaccccuucgcuccuguguc

SEQ ID NO: 1734820 - RNA, 21 nt, Human
caacccucagagccaccccua

SEQ ID NO: 1734821 - RNA, 16 nt, Human
caacauuguagccuca

SEQ ID NO: 1734822 - RNA, 12 nt, Human
caacuuuguaua

SEQ ID NO: 1734823 - RNA, 11 nt, Human
caacuuuguau

SEQ ID NO: 1734824 - RNA, 20 nt, Human
caacucuccuccagagucag

SEQ ID NO: 1734825 - RNA, 15 nt, Human
caacccucaucacca

SEQ ID NO: 1734826 - RNA, 12 nt, Human
caacccucauca

SEQ ID NO: 1734827 - RNA, 16 nt, Human
caaccugauugugucu

SEQ ID NO: 1734828 - RNA, 19 nt, Human
caacucuccuccagaguca

SEQ ID NO: 1734829 - RNA, 18 nt, Human
caacgcagcccugcuuug

SEQ ID NO: 1734830 - RNA, 15 nt, Human
caacgcagcccugcu

SEQ ID NO: 1734831 - RNA, 13 nt, Human
caacgcagcccug

SEQ ID NO: 1734832 - RNA, 12 nt, Human
caacgcagcccu

SEQ ID NO: 1734833 - RNA, 22 nt, Human
caagccaccaacauacucccau

SEQ ID NO: 1734834 - RNA, 18 nt, Human
auuuuuuuacuaauagac

SEQ ID NO: 1734835 - RNA, 18 nt, Human
caaagcuaggccuggcca

SEQ ID NO: 1734836 - RNA, 17 nt, Human
caaagcuaggccuggcc

SEQ ID NO: 1734837 - RNA, 16 nt, Human
caaagcuaggccuggc

SEQ ID NO: 1734838 - RNA, 22 nt, Human
caaagccaaagcuaggccuggc

SEQ ID NO: 1734839 - RNA, 21 nt, Human
caaagccaaagcuaggccugg

SEQ ID NO: 1734840 - RNA, 20 nt, Human
caaagccaaagcuaggccug

SEQ ID NO: 1734841 - RNA, 16 nt, Human
caaagcuuguuaagau

SEQ ID NO: 1734842 - RNA, 22 nt, Human
caaauucugcuugcuugcuuuu

SEQ ID NO: 1734843 - RNA, 21 nt, Human
caaauguucaucaaugaauga

SEQ ID NO: 1734844 - RNA, 20 nt, Human
caaauguucaucaaugaaug

SEQ ID NO: 1734845 - RNA, 14 nt, Human
caaauguggcuccu

SEQ ID NO: 1734846 - RNA, 16 nt, Human
caaaucagcugcuacu

SEQ ID NO: 1734847 - RNA, 18 nt, Human
caaaugucuuccuggauu

SEQ ID NO: 1734848 - RNA, 15 nt, Human
caaaugucuuccugg

SEQ ID NO: 1734849 - RNA, 13 nt, Human
caaaucagcugcu

SEQ ID NO: 1734850 - RNA, 21 nt, Human
caaaggaugcccaaagaugca

SEQ ID NO: 1734851 - RNA, 12 nt, Human
caaauauauuca

SEQ ID NO: 1734852 - RNA, 19 nt, Human
caaauacauuuaaaacauu

SEQ ID NO: 1734853 - RNA, 17 nt, Human
cacaccgggcacucaga

SEQ ID NO: 1734854 - RNA, 14 nt, Human
cacacccuguuuua

SEQ ID NO: 1734855 - RNA, 13 nt, Human
cacaccagagccc

SEQ ID NO: 1734856 - RNA, 12 nt, Human
cacaccagagcc

SEQ ID NO: 1734857 - RNA, 15 nt, Human
cacaccagagcccac

SEQ ID NO: 1734858 - RNA, 13 nt, Human
cacacccagccca

SEQ ID NO: 1734859 - RNA, 14 nt, Human
cacacaccagagcc

SEQ ID NO: 1734860 - RNA, 12 nt, Human
cacacagcucug

SEQ ID NO: 1734861 - RNA, 21 nt, Human
cacacagaggcugccucuccc

SEQ ID NO: 1734862 - RNA, 19 nt, Human
cacacagaggcugccucuc

SEQ ID NO: 1734863 - RNA, 17 nt, Human
cacacuucaggcucuuc

SEQ ID NO: 1734864 - RNA, 14 nt, Human
cacacuucaggcuc

SEQ ID NO: 1734865 - RNA, 22 nt, Human
cacacuucaggcucuucuccuu

SEQ ID NO: 1734866 - RNA, 21 nt, Human
cacacuucaggcucuucuccu

SEQ ID NO: 1734867 - RNA, 20 nt, Human
cacacuucaggcucuucucc

SEQ ID NO: 1734868 - RNA, 18 nt, Human
cacacuucaggcucuucu

SEQ ID NO: 1734869 - RNA, 16 nt, Human
cacagaguuguuacau

SEQ ID NO: 1734870 - RNA, 17 nt, Human
cacagaguuguuacauu

SEQ ID NO: 1734871 - RNA, 12 nt, Human
cacagagaaagu

SEQ ID NO: 1734872 - RNA, 21 nt, Human
cacacuugacaucaacugcau

SEQ ID NO: 1734873 - RNA, 21 nt, Human
cacaaauucugucucuggauu

SEQ ID NO: 1734874 - RNA, 22 nt, Human
cacaacacacagauuugagcuc

SEQ ID NO: 1734875 - RNA, 23 nt, Human
cacaaccuucuguggcucacaga

SEQ ID NO: 1734876 - RNA, 19 nt, Human
cacaaccuucuguggcuca

SEQ ID NO: 1734877 - RNA, 18 nt, Human
cacaaccuucuguggcuc

SEQ ID NO: 1734878 - RNA, 17 nt, Human
cacaaccuucuguggcu

SEQ ID NO: 1734879 - RNA, 18 nt, Human
cacaaaaguuucucuuuu

SEQ ID NO: 1734880 - RNA, 16 nt, Human
cacaaaaguuucucuu

SEQ ID NO: 1734881 - RNA, 22 nt, Human
caaugaaugaaugaauggcuaa

SEQ ID NO: 1734882 - RNA, 14 nt, Human
caaugacacagucu

SEQ ID NO: 1734883 - RNA, 19 nt, Human
caaugacacagucuuggcu

SEQ ID NO: 1734884 - RNA, 21 nt, Human
caaugacacagucuuggcuca

SEQ ID NO: 1734885 - RNA, 13 nt, Human
caaugaccuuuca

SEQ ID NO: 1734886 - RNA, 18 nt, Human
caaugcaaaccaucauug

SEQ ID NO: 1734887 - RNA, 17 nt, Human
caaugcaaaccaucauu

SEQ ID NO: 1734888 - RNA, 20 nt, Human
caaugcaaaccaucauugaa

SEQ ID NO: 1734889 - RNA, 19 nt, Human
caaugcaaaccaucauuga

SEQ ID NO: 1734890 - RNA, 23 nt, Human
caaugcacuuuguucuggcucuu

SEQ ID NO: 1734891 - RNA, 20 nt, Human
caauaggaaaaacugauuuu

SEQ ID NO: 1734892 - RNA, 21 nt, Human
caauaggaaaaacugauuuuu

SEQ ID NO: 1734893 - RNA, 19 nt, Human
caaugugaaaagaaaaaug

SEQ ID NO: 1734894 - RNA, 18 nt, Human
cacagaugggugcuugga

SEQ ID NO: 1734895 - RNA, 14 nt, Human
cacagaugggugcu

SEQ ID NO: 1734896 - RNA, 20 nt, Human
cacagaguuguuacauuuuu

SEQ ID NO: 1734897 - RNA, 21 nt, Human
cacagaguuguuacauuuuua

SEQ ID NO: 1734898 - RNA, 20 nt, Human
cacagaugggugcuuggagg

SEQ ID NO: 1734899 - RNA, 20 nt, Human
cacagcacgggggccaagga

SEQ ID NO: 1734900 - RNA, 16 nt, Human
cacagcagccccugca

SEQ ID NO: 1734901 - RNA, 15 nt, Human
cacaggaaguagagg

SEQ ID NO: 1734902 - RNA, 16 nt, Human
cacaggaucagucuga

SEQ ID NO: 1734903 - RNA, 15 nt, Human
cacaggaucagucug

SEQ ID NO: 1734904 - RNA, 12 nt, Human
cacaggaucagu

SEQ ID NO: 1734905 - RNA, 19 nt, Human
cacaggcccggcuccaggc

SEQ ID NO: 1734906 - RNA, 18 nt, Human
cacaggcccggcuccagg

SEQ ID NO: 1734907 - RNA, 17 nt, Human
cacaggcccggcuccag

SEQ ID NO: 1734908 - RNA, 16 nt, Human
cacaggcccggcucca

SEQ ID NO: 1734909 - RNA, 10 nt, Human
cacaggcagg

SEQ ID NO: 1734910 - RNA, 17 nt, Human
cacauacacacacacgc

SEQ ID NO: 1734911 - RNA, 22 nt, Human
cacauaauucaggaagcagcuu

SEQ ID NO: 1734912 - RNA, 23 nt, Human
cacaggcccggcuccaggcuccu

SEQ ID NO: 1734913 - RNA, 20 nt, Human
cacaggcccggcuccaggcu

SEQ ID NO: 1734914 - RNA, 18 nt, Human
cacagugagucgaggaca

SEQ ID NO: 1734915 - RNA, 15 nt, Human
cacaggcccuuccuc

SEQ ID NO: 1734916 - RNA, 20 nt, Human
cacagugagucgaggacagg

SEQ ID NO: 1734917 - RNA, 19 nt, Human
cacagugagucgaggacag

SEQ ID NO: 1734918 - RNA, 21 nt, Human
cacagugagucgaggacaggg

SEQ ID NO: 1734919 - RNA, 15 nt, Human
caccaagcccaguua

SEQ ID NO: 1734920 - RNA, 18 nt, Human
cacauuggagauguuuag

SEQ ID NO: 1734921 - RNA, 17 nt, Human
caccacacccagcccac

SEQ ID NO: 1734922 - RNA, 15 nt, Human
caccacacccagccc

SEQ ID NO: 1734923 - RNA, 13 nt, Human
caccacacccagc

SEQ ID NO: 1734924 - RNA, 19 nt, Human
caccacuacauucuguuaa

SEQ ID NO: 1734925 - RNA, 20 nt, Human
caccacuacauucuguuaau

SEQ ID NO: 1734926 - RNA, 14 nt, Human
caccaccucuuugg

SEQ ID NO: 1734927 - RNA, 16 nt, Human
caccacuacauucugu

SEQ ID NO: 1734928 - RNA, 17 nt, Human
caccacuacauucuguu

SEQ ID NO: 1734929 - RNA, 18 nt, Human
caccacuacauucuguua

SEQ ID NO: 1734930 - RNA, 18 nt, Human
caccacaugugcacaugc

SEQ ID NO: 1734931 - RNA, 15 nt, Human
caccacaugugcaca

SEQ ID NO: 1734932 - RNA, 19 nt, Human
caccacaugugcacaugca

SEQ ID NO: 1734933 - RNA, 18 nt, Human
cacaugccucucucaggc

SEQ ID NO: 1734934 - RNA, 17 nt, Human
cacaugccucucucagg

SEQ ID NO: 1734935 - RNA, 13 nt, Human
cacaugccucucu

SEQ ID NO: 1734936 - RNA, 19 nt, Human
cacaucagcacgauuucug

SEQ ID NO: 1734937 - RNA, 14 nt, Human
cacauaucugucau

SEQ ID NO: 1734938 - RNA, 12 nt, Human
cacauaucuguc

SEQ ID NO: 1734939 - RNA, 18 nt, Human
cacaucagcacgauuucu

SEQ ID NO: 1734940 - RNA, 17 nt, Human
cacauauuucagugagg

SEQ ID NO: 1734941 - RNA, 19 nt, Human
cacaugccucucucaggcc

SEQ ID NO: 1734942 - RNA, 15 nt, Human
cacaugugcacaugc

SEQ ID NO: 1734943 - RNA, 14 nt, Human
cacaugugcacaug

SEQ ID NO: 1734944 - RNA, 17 nt, Human
cacaugugcacaugcac

SEQ ID NO: 1734945 - RNA, 13 nt, Human
cacauguggacuu

SEQ ID NO: 1734946 - RNA, 16 nt, Human
cacauuccugaugcuu

SEQ ID NO: 1734947 - RNA, 22 nt, Human
cacccaccaucaugucuggcua

SEQ ID NO: 1734948 - RNA, 20 nt, Human
cacccaccaucaugucuggc

SEQ ID NO: 1734949 - RNA, 16 nt, Human
cacccaccucagccuc

SEQ ID NO: 1734950 - RNA, 14 nt, Human
cacccaccucagcc

SEQ ID NO: 1734951 - RNA, 13 nt, Human
cacccaccucagc

SEQ ID NO: 1734952 - RNA, 12 nt, Human
cacccaccucag

SEQ ID NO: 1734953 - RNA, 13 nt, Human
caccccagcccca

SEQ ID NO: 1734954 - RNA, 12 nt, Human
caccccagcccc

SEQ ID NO: 1734955 - RNA, 18 nt, Human
cacccaagggccuggccu

SEQ ID NO: 1734956 - RNA, 17 nt, Human
cacccaagggccuggcc

SEQ ID NO: 1734957 - RNA, 16 nt, Human
cacccaagggccuggc

SEQ ID NO: 1734958 - RNA, 23 nt, Human
cacccaagggccuggccugagcu

SEQ ID NO: 1734959 - RNA, 21 nt, Human
cacccaagggccuggccugag

SEQ ID NO: 1734960 - RNA, 20 nt, Human
cacccaagggccuggccuga

SEQ ID NO: 1734961 - RNA, 19 nt, Human
cacccaagggccuggccug

SEQ ID NO: 1734962 - RNA, 22 nt, Human
cacccccacccaagggccuggc

SEQ ID NO: 1734963 - RNA, 17 nt, Human
caccccggccaccugcg

SEQ ID NO: 1734964 - RNA, 16 nt, Human
caccccggccaccugc

SEQ ID NO: 1734965 - RNA, 15 nt, Human
caccccggccaccug

SEQ ID NO: 1734966 - RNA, 14 nt, Human
caccccggccaccu

SEQ ID NO: 1734967 - RNA, 14 nt, Human
caccccuaaagaga

SEQ ID NO: 1734968 - RNA, 15 nt, Human
caccccuaaagagau

SEQ ID NO: 1734969 - RNA, 21 nt, Human
uugaaaaucuuauaauuuaaa

SEQ ID NO: 1734970 - RNA, 21 nt, Human
uucuuuccugaggcugggcuc

SEQ ID NO: 1734971 - RNA, 15 nt, Human
uugaacuuugaccuc

SEQ ID NO: 1734972 - RNA, 18 nt, Human
uugaaaauuaacaugaau

SEQ ID NO: 1734973 - RNA, 16 nt, Human
uugaaugaugccauga

SEQ ID NO: 1734974 - RNA, 12 nt, Human
uugaaugaugcc

SEQ ID NO: 1734975 - RNA, 20 nt, Human
uugaacuuugaccucugcag

SEQ ID NO: 1734976 - RNA, 17 nt, Human
uugaacuuugaccucug

SEQ ID NO: 1734977 - RNA, 18 nt, Human
uugaacuuugaccucugc

SEQ ID NO: 1734978 - RNA, 13 nt, Human
uucugugcagcca

SEQ ID NO: 1734979 - RNA, 20 nt, Human
uucuggcagaguugaagaca

SEQ ID NO: 1734980 - RNA, 15 nt, Human
uucuggcagaggagg

SEQ ID NO: 1734981 - RNA, 16 nt, Human
uucuggcuaugcauuu

SEQ ID NO: 1734982 - RNA, 14 nt, Human
uucuuguguguuua

SEQ ID NO: 1734983 - RNA, 17 nt, Human
uucuuagggaaggauac

SEQ ID NO: 1734984 - RNA, 13 nt, Human
uucuucagagacu

SEQ ID NO: 1734985 - RNA, 17 nt, Human
uucuuauguugcccagu

SEQ ID NO: 1734986 - RNA, 16 nt, Human
uugauaugcuuauaca

SEQ ID NO: 1734987 - RNA, 22 nt, Human
uugauauuuucaacgcagcccu

SEQ ID NO: 1734988 - RNA, 16 nt, Human
uugauucagcucugca

SEQ ID NO: 1734989 - RNA, 23 nt, Human
uugauucagacagcugccuggga

SEQ ID NO: 1734990 - RNA, 21 nt, Human
uugauucagacagcugccugg

SEQ ID NO: 1734991 - RNA, 17 nt, Human
uugauucagacagcugc

SEQ ID NO: 1734992 - RNA, 17 nt, Human
uugauccagaaagaaaa

SEQ ID NO: 1734993 - RNA, 19 nt, Human
uugagccuugaacuuugac

SEQ ID NO: 1734994 - RNA, 13 nt, Human
uugagcucagccc

SEQ ID NO: 1734995 - RNA, 14 nt, Human
uugagccuugaacu

SEQ ID NO: 1734996 - RNA, 15 nt, Human
uugagccuugaacuu

SEQ ID NO: 1734997 - RNA, 16 nt, Human
uugagccuugaacuuu

SEQ ID NO: 1734998 - RNA, 19 nt, Human
uugccauguuggccaggcu

SEQ ID NO: 1734999 - RNA, 18 nt, Human
uugccauguuggccaggc

SEQ ID NO: 1735000 - RNA, 17 nt, Human
uugccauguuggccagg

SEQ ID NO: 1735001 - RNA, 16 nt, Human
uugccauguuggccag

SEQ ID NO: 1735002 - RNA, 13 nt, Human
uugccagucaccc

SEQ ID NO: 1735003 - RNA, 16 nt, Human
uugcauaacguauaaa

SEQ ID NO: 1735004 - RNA, 17 nt, Human
uugauucauaaugacuu

SEQ ID NO: 1735005 - RNA, 13 nt, Human
uugauucauaaug

SEQ ID NO: 1735006 - RNA, 23 nt, Human
uugcagacaggcaagcaccuccu

SEQ ID NO: 1735007 - RNA, 17 nt, Human
uugcagcacagcugaga

SEQ ID NO: 1735008 - RNA, 19 nt, Human
uugcagcgauuaauaacag

SEQ ID NO: 1735009 - RNA, 18 nt, Human
uugcagcgauuaauaaca

SEQ ID NO: 1735010 - RNA, 19 nt, Human
uuggacagaagcagcucuu

SEQ ID NO: 1735011 - RNA, 16 nt, Human
uuggacagaagcagcu

SEQ ID NO: 1735012 - RNA, 19 nt, Human
uuggaagcuccgcuuucua

SEQ ID NO: 1735013 - RNA, 21 nt, Human
uuggacccugaggcccagagg

SEQ ID NO: 1735014 - RNA, 19 nt, Human
uuggacccugaggcccaga

SEQ ID NO: 1735015 - RNA, 18 nt, Human
uuggacccugaggcccag

SEQ ID NO: 1735016 - RNA, 15 nt, Human
uuggacccugaggcc

SEQ ID NO: 1735017 - RNA, 15 nt, Human
uuggauuguccccga

SEQ ID NO: 1735018 - RNA, 21 nt, Human
uugccauguuggccaggcugg

SEQ ID NO: 1735019 - RNA, 20 nt, Human
uugccauguuggccaggcug

SEQ ID NO: 1735020 - RNA, 16 nt, Human
uugcugcuugaggcaa

SEQ ID NO: 1735021 - RNA, 14 nt, Human
uugcugcuugaggc

SEQ ID NO: 1735022 - RNA, 18 nt, Human
uugcugucccuuuuccuu

SEQ ID NO: 1735023 - RNA, 16 nt, Human
uugcugucccuuuucc

SEQ ID NO: 1735024 - RNA, 20 nt, Human
uuggucugacccacugcuuu

SEQ ID NO: 1735025 - RNA, 15 nt, Human
uuggucugugagaug

SEQ ID NO: 1735026 - RNA, 12 nt, Human
uuguaaaauggu

SEQ ID NO: 1735027 - RNA, 13 nt, Human
uuguaaaauggug

SEQ ID NO: 1735028 - RNA, 23 nt, Human
uuggcuucacggaagagccuugc

SEQ ID NO: 1735029 - RNA, 14 nt, Human
uugggaauuuuauu

SEQ ID NO: 1735030 - RNA, 20 nt, Human
uuguaaaauggugugaccac

SEQ ID NO: 1735031 - RNA, 16 nt, Human
uuguaccgcaauguga

SEQ ID NO: 1735032 - RNA, 18 nt, Human
uuguacuuuagggaagua

SEQ ID NO: 1735033 - RNA, 14 nt, Human
uugucuaugggacu

SEQ ID NO: 1735034 - RNA, 22 nt, Human
uugucaaaguggugagaggcau

SEQ ID NO: 1735035 - RNA, 20 nt, Human
uuguaugauccuaaugaaug

SEQ ID NO: 1735036 - RNA, 22 nt, Human
uuguaugaaagauggcugugcc

SEQ ID NO: 1735037 - RNA, 20 nt, Human
uugucuaugggacucaaugc

SEQ ID NO: 1735038 - RNA, 22 nt, Human
uugucaagaauagcauuguaaa

SEQ ID NO: 1735039 - RNA, 18 nt, Human
uugucugaagucacugca

SEQ ID NO: 1735040 - RNA, 17 nt, Human
uugucugaagucacugc

SEQ ID NO: 1735041 - RNA, 13 nt, Human
uuuaacagaaaug

SEQ ID NO: 1735042 - RNA, 12 nt, Human
uuuaaaaugucu

SEQ ID NO: 1735043 - RNA, 16 nt, Human
uuuaaaaugagaaauc

SEQ ID NO: 1735044 - RNA, 13 nt, Human
uuuaaaagauaca

SEQ ID NO: 1735045 - RNA, 20 nt, Human
uuguuuggggaugagaaagg

SEQ ID NO: 1735046 - RNA, 20 nt, Human
uuguuucuuucucugaggac

SEQ ID NO: 1735047 - RNA, 16 nt, Human
uuguuucuuucucuga

SEQ ID NO: 1735048 - RNA, 19 nt, Human
uuguuucuuucucugagga

SEQ ID NO: 1735049 - RNA, 15 nt, Human
uugucuuuggacccu

SEQ ID NO: 1735050 - RNA, 24 nt, Human
uugucuuuggacccugaggcccag

SEQ ID NO: 1735051 - RNA, 20 nt, Human
uugucuuuggacccugaggc

SEQ ID NO: 1735052 - RNA, 19 nt, Human
uugucuuuggugaacauug

SEQ ID NO: 1735053 - RNA, 13 nt, Human
uuuacagagacag

SEQ ID NO: 1735054 - RNA, 13 nt, Human
uuuacagcugccu

SEQ ID NO: 1735055 - RNA, 13 nt, Human
uuuaauaaaccau

SEQ ID NO: 1735056 - RNA, 22 nt, Human
uuuaauaaacacucuugaaaaa

SEQ ID NO: 1735057 - RNA, 14 nt, Human
uuuaacagaaaugu

SEQ ID NO: 1735058 - RNA, 15 nt, Human
uuuaacagaaaugua

SEQ ID NO: 1735059 - RNA, 15 nt, Human
uuuaauaaacacucu

SEQ ID NO: 1735060 - RNA, 14 nt, Human
uuuaauaaacacuc

SEQ ID NO: 1735061 - RNA, 22 nt, Human
uuuagacccuauugcugcuuga

SEQ ID NO: 1735062 - RNA, 18 nt, Human
uuuaguugcaacuuugua

SEQ ID NO: 1735063 - RNA, 17 nt, Human
uuuaguugcaacuuugu

SEQ ID NO: 1735064 - RNA, 19 nt, Human
uuuagacccuauugcugcu

SEQ ID NO: 1735065 - RNA, 18 nt, Human
uuuauaaacuuuaccuuu

SEQ ID NO: 1735066 - RNA, 12 nt, Human
uuuauacauaaa

SEQ ID NO: 1735067 - RNA, 20 nt, Human
uuuauacauaaacaagacca

SEQ ID NO: 1735068 - RNA, 17 nt, Human
uuuccacucaggucugu

SEQ ID NO: 1735069 - RNA, 20 nt, Human
uuuccuaaauauauuuuaag

SEQ ID NO: 1735070 - RNA, 22 nt, Human
uuuaugauacuugaaaauuaac

SEQ ID NO: 1735071 - RNA, 17 nt, Human
uuucagccaagaauucu

SEQ ID NO: 1735072 - RNA, 14 nt, Human
uuucugaaauaaca

SEQ ID NO: 1735073 - RNA, 18 nt, Human
uuucuacccagcgagccc

SEQ ID NO: 1735074 - RNA, 15 nt, Human
uuucuacccagcgag

SEQ ID NO: 1735075 - RNA, 22 nt, Human
uuucuacccagcgagcccuggu

SEQ ID NO: 1735076 - RNA, 19 nt, Human
uuucuaaaucuccaaaaua

SEQ ID NO: 1735077 - RNA, 22 nt, Human
uuucuaaaguaaaaacaaagaa

SEQ ID NO: 1735078 - RNA, 17 nt, Human
uuucuaaaguaaaaaca

SEQ ID NO: 1735079 - RNA, 19 nt, Human
uuuccuggcacugcuucca

SEQ ID NO: 1735080 - RNA, 23 nt, Human
uuuccuggcacugcuuccaguga

SEQ ID NO: 1735081 - RNA, 22 nt, Human
uuuccucuuagucgagccaagu

SEQ ID NO: 1735082 - RNA, 19 nt, Human
uuuggacccugaggcccag

SEQ ID NO: 1735083 - RNA, 15 nt, Human
uuuggacccugaggc

SEQ ID NO: 1735084 - RNA, 14 nt, Human
uuugcuugaaagaa

SEQ ID NO: 1735085 - RNA, 16 nt, Human
uuugcuugaaagaaaa

SEQ ID NO: 1735086 - RNA, 14 nt, Human
uuugauccaagcug

SEQ ID NO: 1735087 - RNA, 15 nt, Human
uuuguauucucuccu

SEQ ID NO: 1735088 - RNA, 16 nt, Human
uuuguaugcacuuugu

SEQ ID NO: 1735089 - RNA, 21 nt, Human
uuugaaauuguauuacaaauc

SEQ ID NO: 1735090 - RNA, 18 nt, Human
uuucuuaaccagaucauu

SEQ ID NO: 1735091 - RNA, 23 nt, Human
uuucugaucugaugcaagcaaga

SEQ ID NO: 1735092 - RNA, 19 nt, Human
uuucuuguguguuuauugu

SEQ ID NO: 1735093 - RNA, 21 nt, Human
uuugaggguguauauuuucug

SEQ ID NO: 1735094 - RNA, 17 nt, Human
uuugagaucagccuggg

SEQ ID NO: 1735095 - RNA, 16 nt, Human
uuugagaucagccugg

SEQ ID NO: 1735096 - RNA, 15 nt, Human
uucacgugguccuaa

SEQ ID NO: 1735097 - RNA, 18 nt, Human
uucacggaagagccuugc

SEQ ID NO: 1735098 - RNA, 20 nt, Human
uucaauaggaaaaacugauu

SEQ ID NO: 1735099 - RNA, 18 nt, Human
uucaauaggaaaaacuga

SEQ ID NO: 1735100 - RNA, 15 nt, Human
uucaauaggaaaaac

SEQ ID NO: 1735101 - RNA, 13 nt, Human
uucaauaggaaaa

SEQ ID NO: 1735102 - RNA, 13 nt, Human
uucacucuccuug

SEQ ID NO: 1735103 - RNA, 16 nt, Human
uucagacauagaauua

SEQ ID NO: 1735104 - RNA, 21 nt, Human
uucagacagcugccugggauc

SEQ ID NO: 1735105 - RNA, 20 nt, Human
uucagacauagaauuaacac

SEQ ID NO: 1735106 - RNA, 19 nt, Human
uucagagacuccugcaggc

SEQ ID NO: 1735107 - RNA, 22 nt, Human
uucagaguugaugguuguacau

SEQ ID NO: 1735108 - RNA, 21 nt, Human
uucagaguugaugguuguaca

SEQ ID NO: 1735109 - RNA, 18 nt, Human
uuauugucaaagugguga

SEQ ID NO: 1735110 - RNA, 17 nt, Human
uuauugucaaaguggug

SEQ ID NO: 1735111 - RNA, 20 nt, Human
uuauuuuauguugcauagaa

SEQ ID NO: 1735112 - RNA, 19 nt, Human
uucaacgcagcccugcuuu

SEQ ID NO: 1735113 - RNA, 16 nt, Human
uucaacgcagcccugc

SEQ ID NO: 1735114 - RNA, 20 nt, Human
uucaacgcagcccugcuuug

SEQ ID NO: 1735115 - RNA, 17 nt, Human
uucaacugaccagccuc

SEQ ID NO: 1735116 - RNA, 13 nt, Human
uuaguugcaacuu

SEQ ID NO: 1735117 - RNA, 14 nt, Human
uuaguuccuugagu

SEQ ID NO: 1735118 - RNA, 16 nt, Human
uuaguuccucauuagc

SEQ ID NO: 1735119 - RNA, 16 nt, Human
uuaucuagauacugua

SEQ ID NO: 1735120 - RNA, 20 nt, Human
uuaguugcaacuuuguauaa

SEQ ID NO: 1735121 - RNA, 13 nt, Human
uuaguugcuguau

SEQ ID NO: 1735122 - RNA, 15 nt, Human
uuaguugcuguaugu

SEQ ID NO: 1735123 - RNA, 20 nt, Human
uuaucuugaauaauguaaga

SEQ ID NO: 1735124 - RNA, 17 nt, Human
uuaucuagauacuguau

SEQ ID NO: 1735125 - RNA, 16 nt, Human
uuauggaacacucuga

SEQ ID NO: 1735126 - RNA, 16 nt, Human
uuaugcaugaaguaau

SEQ ID NO: 1735127 - RNA, 14 nt, Human
uuaugcauagauaa

SEQ ID NO: 1735128 - RNA, 22 nt, Human
uuaugcaugaaguaauaugcac

SEQ ID NO: 1735129 - RNA, 15 nt, Human
uuauugcccacgcug

SEQ ID NO: 1735130 - RNA, 19 nt, Human
uuauugcagcgauuaauaa

SEQ ID NO: 1735131 - RNA, 11 nt, Human
uuauucugcuc

SEQ ID NO: 1735132 - RNA, 14 nt, Human
uucccauucuugca

SEQ ID NO: 1735133 - RNA, 16 nt, Human
uuccccaggaggccag

SEQ ID NO: 1735134 - RNA, 15 nt, Human
uuccccaggaggcca

SEQ ID NO: 1735135 - RNA, 16 nt, Human
uucccauuugcuccuu

SEQ ID NO: 1735136 - RNA, 23 nt, Human
uuccagcaauucuccugccucag

SEQ ID NO: 1735137 - RNA, 22 nt, Human
uuccagcaauucuccugccuca

SEQ ID NO: 1735138 - RNA, 21 nt, Human
uuccagcaauucuccugccuc

SEQ ID NO: 1735139 - RNA, 20 nt, Human
uuccagcaauucuccugccu

SEQ ID NO: 1735140 - RNA, 20 nt, Human
uuccccaggaggccagccuu

SEQ ID NO: 1735141 - RNA, 19 nt, Human
uuccccaggaggccagccu

SEQ ID NO: 1735142 - RNA, 18 nt, Human
uuccccaggaggccagcc

SEQ ID NO: 1735143 - RNA, 17 nt, Human
uuccccaggaggccagc

SEQ ID NO: 1735144 - RNA, 21 nt, Human
uuccccaggaggccagccuug

SEQ ID NO: 1735145 - RNA, 11 nt, Human
uuccccauggg

SEQ ID NO: 1735146 - RNA, 19 nt, Human
uuccccaugucucgacuca

SEQ ID NO: 1735147 - RNA, 20 nt, Human
uucccucccuuccucuuucc

SEQ ID NO: 1735148 - RNA, 17 nt, Human
uucccucccuuccucuu

SEQ ID NO: 1735149 - RNA, 11 nt, Human
uucccucccuu

SEQ ID NO: 1735150 - RNA, 21 nt, Human
uuccagagaguggcuccuccc

SEQ ID NO: 1735151 - RNA, 20 nt, Human
uuccagagaguggcuccucc

SEQ ID NO: 1735152 - RNA, 19 nt, Human
uuccagagaguggcuccuc

SEQ ID NO: 1735153 - RNA, 18 nt, Human
uuccagagaguggcuccu

SEQ ID NO: 1735154 - RNA, 17 nt, Human
uuccagagaguggcucc

SEQ ID NO: 1735155 - RNA, 13 nt, Human
uuccacugagacc

SEQ ID NO: 1735156 - RNA, 18 nt, Human
uuccacucaggucuguuu

SEQ ID NO: 1735157 - RNA, 15 nt, Human
uuccaaauucugcuu

SEQ ID NO: 1735158 - RNA, 16 nt, Human
uucauuugcuuuggaa

SEQ ID NO: 1735159 - RNA, 17 nt, Human
uucaugcaaacuuuauu

SEQ ID NO: 1735160 - RNA, 16 nt, Human
uucauuuccugugucu

SEQ ID NO: 1735161 - RNA, 15 nt, Human
uucauuuccuguguc

SEQ ID NO: 1735162 - RNA, 12 nt, Human
uucauuugcuuu

SEQ ID NO: 1735163 - RNA, 15 nt, Human
uucaggaagcucagg

SEQ ID NO: 1735164 - RNA, 13 nt, Human
uucaggaagcuca

SEQ ID NO: 1735165 - RNA, 11 nt, Human
uucaggaagcu

SEQ ID NO: 1735166 - RNA, 21 nt, Human
uucaucuugaauuguaaggaa

SEQ ID NO: 1735167 - RNA, 15 nt, Human
uuccugaugcuucuu

SEQ ID NO: 1735168 - RNA, 19 nt, Human
uuccugaugcuucuucaga

SEQ ID NO: 1735169 - RNA, 18 nt, Human
uuccugaugcuucuucag

SEQ ID NO: 1735170 - RNA, 23 nt, Human
uuccugaugcuucuucagagacu

SEQ ID NO: 1735171 - RNA, 18 nt, Human
uuccugcauuugugaaau

SEQ ID NO: 1735172 - RNA, 16 nt, Human
uuccugcauuugugaa

SEQ ID NO: 1735173 - RNA, 17 nt, Human
uuccugccaggcauggu

SEQ ID NO: 1735174 - RNA, 20 nt, Human
uuccuugaguugauucagcu

SEQ ID NO: 1735175 - RNA, 14 nt, Human
uuccuggcacugcu

SEQ ID NO: 1735176 - RNA, 17 nt, Human
uucuaaagcugccagcc

SEQ ID NO: 1735177 - RNA, 13 nt, Human
uucuaaagcugcc

SEQ ID NO: 1735178 - RNA, 15 nt, Human
uucuaaagauggaaa

SEQ ID NO: 1735179 - RNA, 20 nt, Human
uucgggaggucgaggcagga

SEQ ID NO: 1735180 - RNA, 20 nt, Human
uucccuuugacgccauccca

SEQ ID NO: 1735181 - RNA, 22 nt, Human
uucccuuugacgccaucccagc

SEQ ID NO: 1735182 - RNA, 21 nt, Human
uucccuuugacgccaucccag

SEQ ID NO: 1735183 - RNA, 13 nt, Human
uuccucauuagca

SEQ ID NO: 1735184 - RNA, 19 nt, Human
uucccccuccaaucccacc

SEQ ID NO: 1735185 - RNA, 18 nt, Human
uuacuuagguguggggga

SEQ ID NO: 1735186 - RNA, 23 nt, Human
uuacuucuuauacauuugauaaa

SEQ ID NO: 1735187 - RNA, 12 nt, Human
uuacuucugcua

SEQ ID NO: 1735188 - RNA, 11 nt, Human
uuacuucugcu

SEQ ID NO: 1735189 - RNA, 21 nt, Human
uuacuuaaaccgccaaggcug

SEQ ID NO: 1735190 - RNA, 19 nt, Human
uuacuauggcccuggccua

SEQ ID NO: 1735191 - RNA, 19 nt, Human
uuacugucuuuuuucuaaa

SEQ ID NO: 1735192 - RNA, 17 nt, Human
uuacugucuuuuuucua

SEQ ID NO: 1735193 - RNA, 17 nt, Human
uuacuaguuucccuugc

SEQ ID NO: 1735194 - RNA, 19 nt, Human
uuacuaucaugucaaacgu

SEQ ID NO: 1735195 - RNA, 21 nt, Human
uuacuaucaugucaaacguga

SEQ ID NO: 1735196 - RNA, 13 nt, Human
uuacuaaguuuuu

SEQ ID NO: 1735197 - RNA, 14 nt, Human
uuacuaaguuuuua

SEQ ID NO: 1735198 - RNA, 16 nt, Human
uuacuaauagacaauu

SEQ ID NO: 1735199 - RNA, 18 nt, Human
uuagacagucccugccaa

SEQ ID NO: 1735200 - RNA, 17 nt, Human
uuagacagucccugcca

SEQ ID NO: 1735201 - RNA, 16 nt, Human
uuagacagucccugcc

SEQ ID NO: 1735202 - RNA, 15 nt, Human
uuagacagucccugc

SEQ ID NO: 1735203 - RNA, 14 nt, Human
uuacuuuguguuca

SEQ ID NO: 1735204 - RNA, 18 nt, Human
uuacuuuaaaaggagcca

SEQ ID NO: 1735205 - RNA, 17 nt, Human
uuacuuuaaaaggagcc

SEQ ID NO: 1735206 - RNA, 18 nt, Human
uuaguaugaggcauuugu

SEQ ID NO: 1735207 - RNA, 16 nt, Human
uuaguaugaggcauuu

SEQ ID NO: 1735208 - RNA, 14 nt, Human
uuaguguucauaaa

SEQ ID NO: 1735209 - RNA, 15 nt, Human
uuaguuccacugaga

SEQ ID NO: 1735210 - RNA, 16 nt, Human
uuaguuccacugagac

SEQ ID NO: 1735211 - RNA, 18 nt, Human
uuaggauguugaaaaagu

SEQ ID NO: 1735212 - RNA, 22 nt, Human
uuaggccaaaaaaauguaagau

SEQ ID NO: 1735213 - RNA, 12 nt, Human
uuagcugggaga

SEQ ID NO: 1735214 - RNA, 22 nt, Human
uuagauaauacaccacuacauu

SEQ ID NO: 1735215 - RNA, 15 nt, Human
uuagauaaauauuga

SEQ ID NO: 1735216 - RNA, 14 nt, Human
uuagaguugauacu

SEQ ID NO: 1735217 - RNA, 20 nt, Human
uguuucauauugaugugugu

SEQ ID NO: 1735218 - RNA, 21 nt, Human
uguuucagaggcucagauugu

SEQ ID NO: 1735219 - RNA, 20 nt, Human
uguuuagauaauacaccacu

SEQ ID NO: 1735220 - RNA, 15 nt, Human
uguuucaaacuuuac

SEQ ID NO: 1735221 - RNA, 16 nt, Human
uguuuagauaauacac

SEQ ID NO: 1735222 - RNA, 13 nt, Human
uguuugugauuga

SEQ ID NO: 1735223 - RNA, 20 nt, Human
uguuuuaagaggcagggucu

SEQ ID NO: 1735224 - RNA, 21 nt, Human
uuaaaauaccagccaguaaau

SEQ ID NO: 1735225 - RNA, 14 nt, Human
uuaaaagauacagu

SEQ ID NO: 1735226 - RNA, 17 nt, Human
uuaaaagauacaguuac

SEQ ID NO: 1735227 - RNA, 18 nt, Human
uguuuuuuuuuaaagacu

SEQ ID NO: 1735228 - RNA, 19 nt, Human
uguuuuuuuuuuccacuua

SEQ ID NO: 1735229 - RNA, 18 nt, Human
uguuuuuuuuuuccacuu

SEQ ID NO: 1735230 - RNA, 19 nt, Human
uguuuuaaggaugcuugua

SEQ ID NO: 1735231 - RNA, 22 nt, Human
uguuuuaagaggcagggucuca

SEQ ID NO: 1735232 - RNA, 18 nt, Human
uguuuuaaggaugcuugu

SEQ ID NO: 1735233 - RNA, 17 nt, Human
uguuuuguuuggagaca

SEQ ID NO: 1735234 - RNA, 11 nt, Human
uuaaagacaga

SEQ ID NO: 1735235 - RNA, 12 nt, Human
uuaaagacagag

SEQ ID NO: 1735236 - RNA, 23 nt, Human
uuaaauguuuuuuuuuaaagacu

SEQ ID NO: 1735237 - RNA, 21 nt, Human
uuaaauguuuuuuuuuaaaga

SEQ ID NO: 1735238 - RNA, 17 nt, Human
uuaaccacuucagcuga

SEQ ID NO: 1735239 - RNA, 18 nt, Human
uuaacuuuuauaaacuuu

SEQ ID NO: 1735240 - RNA, 16 nt, Human
uuaacuuuuauaaacu

SEQ ID NO: 1735241 - RNA, 17 nt, Human
uuaacuuuuauaaacuu

SEQ ID NO: 1735242 - RNA, 15 nt, Human
uuaacuuuuauaaac

SEQ ID NO: 1735243 - RNA, 16 nt, Human
uuaacuucacauauug

SEQ ID NO: 1735244 - RNA, 20 nt, Human
uuacaagcgugagccacugc

SEQ ID NO: 1735245 - RNA, 21 nt, Human
uuacaagcgugagccacugca

SEQ ID NO: 1735246 - RNA, 22 nt, Human
uuaauauugauaugcuuauaca

SEQ ID NO: 1735247 - RNA, 18 nt, Human
uuaauauugauaugcuua

SEQ ID NO: 1735248 - RNA, 21 nt, Human
uuaaugauaugcuuguaacua

SEQ ID NO: 1735249 - RNA, 16 nt, Human
uuaagccuuuggaaac

SEQ ID NO: 1735250 - RNA, 15 nt, Human
uuaagccuuuggaaa

SEQ ID NO: 1735251 - RNA, 17 nt, Human
uuaagcuguuacugucu

SEQ ID NO: 1735252 - RNA, 14 nt, Human
uggacuccucuguc

SEQ ID NO: 1735253 - RNA, 13 nt, Human
uggacuccucugu

SEQ ID NO: 1735254 - RNA, 21 nt, Human
uggagaagcucccugaaguaa

SEQ ID NO: 1735255 - RNA, 23 nt, Human
uggaggaaggaaacccagcucug

SEQ ID NO: 1735256 - RNA, 21 nt, Human
uggaggaaggaaacccagcuc

SEQ ID NO: 1735257 - RNA, 17 nt, Human
uggagacugucucaaga

SEQ ID NO: 1735258 - RNA, 14 nt, Human
uggagacugucuca

SEQ ID NO: 1735259 - RNA, 16 nt, Human
uggcacuauaauguaa

SEQ ID NO: 1735260 - RNA, 15 nt, Human
uggcacuauaaugua

SEQ ID NO: 1735261 - RNA, 12 nt, Human
uggcaaaaaggc

SEQ ID NO: 1735262 - RNA, 17 nt, Human
uggauuuuugucuugug

SEQ ID NO: 1735263 - RNA, 16 nt, Human
uggcaaaaaggcagga

SEQ ID NO: 1735264 - RNA, 18 nt, Human
uggccagaugcaccagcc

SEQ ID NO: 1735265 - RNA, 17 nt, Human
uggccagaugcaccagc

SEQ ID NO: 1735266 - RNA, 19 nt, Human
uggcagaguugaagacaga

SEQ ID NO: 1735267 - RNA, 17 nt, Human
uggcagaguugaagaca

SEQ ID NO: 1735268 - RNA, 21 nt, Human
uggcagaguggauucuugaac

SEQ ID NO: 1735269 - RNA, 15 nt, Human
uggcagaguugaaga

SEQ ID NO: 1735270 - RNA, 12 nt, Human
uggcagaggagg

SEQ ID NO: 1735271 - RNA, 19 nt, Human
uggccagaugcaccagccc

SEQ ID NO: 1735272 - RNA, 17 nt, Human
uggccaggcugcucuug

SEQ ID NO: 1735273 - RNA, 16 nt, Human
uggccaggcugcucuu

SEQ ID NO: 1735274 - RNA, 13 nt, Human
uggccaggcuggu

SEQ ID NO: 1735275 - RNA, 20 nt, Human
uggccaggcugcucuugaac

SEQ ID NO: 1735276 - RNA, 16 nt, Human
uggccccugcccggcu

SEQ ID NO: 1735277 - RNA, 15 nt, Human
uggccccugcccggc

SEQ ID NO: 1735278 - RNA, 20 nt, Human
uggccccugcccggcugcgg

SEQ ID NO: 1735279 - RNA, 23 nt, Human
uggcgcugccccuggcagccccu

SEQ ID NO: 1735280 - RNA, 16 nt, Human
uggcgcugccccuggc

SEQ ID NO: 1735281 - RNA, 23 nt, Human
uggcgcagcauauucaggaagcu

SEQ ID NO: 1735282 - RNA, 22 nt, Human
uggcgcagcauauucaggaagc

SEQ ID NO: 1735283 - RNA, 23 nt, Human
uggccucccaacucaccccagcc

SEQ ID NO: 1735284 - RNA, 16 nt, Human
uggcugcuucaaggau

SEQ ID NO: 1735285 - RNA, 15 nt, Human
uggcugcuucaagga

SEQ ID NO: 1735286 - RNA, 11 nt, Human
uggcugcuuca

SEQ ID NO: 1735287 - RNA, 16 nt, Human
uggcuccucccggugc

SEQ ID NO: 1735288 - RNA, 14 nt, Human
uggcuccucccggu

SEQ ID NO: 1735289 - RNA, 19 nt, Human
uggcuccucccggugccca

SEQ ID NO: 1735290 - RNA, 18 nt, Human
uggcuccucccggugccc

SEQ ID NO: 1735291 - RNA, 15 nt, Human
uggcgggguggggug

SEQ ID NO: 1735292 - RNA, 20 nt, Human
uggcucccacaggcccuucc

SEQ ID NO: 1735293 - RNA, 17 nt, Human
uggcucccacaggcccu

SEQ ID NO: 1735294 - RNA, 14 nt, Human
uggcucccacaggc

SEQ ID NO: 1735295 - RNA, 23 nt, Human
uggucccccuuccauggacuuug

SEQ ID NO: 1735296 - RNA, 18 nt, Human
uggucccccuuccaugga

SEQ ID NO: 1735297 - RNA, 16 nt, Human
uggucccccuuccaug

SEQ ID NO: 1735298 - RNA, 15 nt, Human
uggucccccuuccau

SEQ ID NO: 1735299 - RNA, 19 nt, Human
ugguccuaaucuucugaac

SEQ ID NO: 1735300 - RNA, 17 nt, Human
ugguccuaaucuucuga

SEQ ID NO: 1735301 - RNA, 23 nt, Human
ugguccugcugcaguugccaguc

SEQ ID NO: 1735302 - RNA, 15 nt, Human
ugguccugcugcagu

SEQ ID NO: 1735303 - RNA, 13 nt, Human
ugguccugcugca

SEQ ID NO: 1735304 - RNA, 22 nt, Human
uggucacaggaaguagaggagg

SEQ ID NO: 1735305 - RNA, 18 nt, Human
uggucacaggacucugcc

SEQ ID NO: 1735306 - RNA, 19 nt, Human
uggucacaggacucugccu

SEQ ID NO: 1735307 - RNA, 20 nt, Human
uggucacaggacucugccuc

SEQ ID NO: 1735308 - RNA, 14 nt, Human
uggucccccuucca

SEQ ID NO: 1735309 - RNA, 19 nt, Human
uggugacuuuccucuuugg

SEQ ID NO: 1735310 - RNA, 22 nt, Human
uggugaccucugccugaaguca

SEQ ID NO: 1735311 - RNA, 17 nt, Human
uggugaccucugccuga

SEQ ID NO: 1735312 - RNA, 16 nt, Human
uggugaccucugccug

SEQ ID NO: 1735313 - RNA, 15 nt, Human
uggugaccucugccu

SEQ ID NO: 1735314 - RNA, 21 nt, Human
uggugcaaugaccuuucaaua

SEQ ID NO: 1735315 - RNA, 18 nt, Human
uggucuacacugugcuga

SEQ ID NO: 1735316 - RNA, 17 nt, Human
uggucuacacugugcug

SEQ ID NO: 1735317 - RNA, 16 nt, Human
uggucuacacugugcu

SEQ ID NO: 1735318 - RNA, 15 nt, Human
uggucuacacugugc

SEQ ID NO: 1735319 - RNA, 14 nt, Human
uggugaccucugcc

SEQ ID NO: 1735320 - RNA, 13 nt, Human
uggugaccucugc

SEQ ID NO: 1735321 - RNA, 19 nt, Human
uggucuacacugugcugag

SEQ ID NO: 1735322 - RNA, 14 nt, Human
uggucggaaaacau

SEQ ID NO: 1735323 - RNA, 17 nt, Human
uggucggaaaacaugcu

SEQ ID NO: 1735324 - RNA, 23 nt, Human
ugggcagagcagagaccaucccu

SEQ ID NO: 1735325 - RNA, 14 nt, Human
ugggccuggcuccc

SEQ ID NO: 1735326 - RNA, 11 nt, Human
ugggccuucag

SEQ ID NO: 1735327 - RNA, 23 nt, Human
ugggccccugccucucugcaggu

SEQ ID NO: 1735328 - RNA, 21 nt, Human
ugggccccugccucucugcag

SEQ ID NO: 1735329 - RNA, 20 nt, Human
uggcugggggccucagugcc

SEQ ID NO: 1735330 - RNA, 17 nt, Human
uggcugggggccucagu

SEQ ID NO: 1735331 - RNA, 16 nt, Human
uggcugggggccucag

SEQ ID NO: 1735332 - RNA, 16 nt, Human
ugggagugggcccaau

SEQ ID NO: 1735333 - RNA, 14 nt, Human
ugggagugggccca

SEQ ID NO: 1735334 - RNA, 19 nt, Human
ugggaucacauguggacuu

SEQ ID NO: 1735335 - RNA, 13 nt, Human
ugggauccuccag

SEQ ID NO: 1735336 - RNA, 12 nt, Human
ugggauccucca

SEQ ID NO: 1735337 - RNA, 14 nt, Human
ugggauccuccagg

SEQ ID NO: 1735338 - RNA, 22 nt, Human
ugggcagagcagagaccauccc

SEQ ID NO: 1735339 - RNA, 17 nt, Human
ugggauuacaggcguga

SEQ ID NO: 1735340 - RNA, 22 nt, Human
ugggauuacaagcgugagccac

SEQ ID NO: 1735341 - RNA, 18 nt, Human
uggguacuuguggacaca

SEQ ID NO: 1735342 - RNA, 17 nt, Human
uggguacuuguggacac

SEQ ID NO: 1735343 - RNA, 22 nt, Human
uggggguucuuucuuccucugc

SEQ ID NO: 1735344 - RNA, 20 nt, Human
uggggguucuuucuuccucu

SEQ ID NO: 1735345 - RNA, 19 nt, Human
uggggguucuuucuuccuc

SEQ ID NO: 1735346 - RNA, 15 nt, Human
uggggguucuuucuu

SEQ ID NO: 1735347 - RNA, 16 nt, Human
ugggggaguggccaca

SEQ ID NO: 1735348 - RNA, 13 nt, Human
uggggggggugcu

SEQ ID NO: 1735349 - RNA, 20 nt, Human
uggggccaggcugggucgcc

SEQ ID NO: 1735350 - RNA, 23 nt, Human
uggggaugagaaagguugaagca

SEQ ID NO: 1735351 - RNA, 15 nt, Human
uggggaugagaaagg

SEQ ID NO: 1735352 - RNA, 20 nt, Human
uggggccaguuggucccccu

SEQ ID NO: 1735353 - RNA, 22 nt, Human
uggggccaggcugggucgcccu

SEQ ID NO: 1735354 - RNA, 21 nt, Human
uggggccaggcugggucgccc

SEQ ID NO: 1735355 - RNA, 12 nt, Human
ugggccuucagg

SEQ ID NO: 1735356 - RNA, 15 nt, Human
ugggccuucagggag

SEQ ID NO: 1735357 - RNA, 14 nt, Human
ugccucaagagaag

SEQ ID NO: 1735358 - RNA, 15 nt, Human
ugccucaagagaagg

SEQ ID NO: 1735359 - RNA, 16 nt, Human
ugccuccucuucaacu

SEQ ID NO: 1735360 - RNA, 14 nt, Human
ugccuccucuucaa

SEQ ID NO: 1735361 - RNA, 23 nt, Human
ugcccugugaguacuacaguccu

SEQ ID NO: 1735362 - RNA, 23 nt, Human
ugcccugguuuccugcccuggga

SEQ ID NO: 1735363 - RNA, 20 nt, Human
ugcccugguuuccugcccug

SEQ ID NO: 1735364 - RNA, 19 nt, Human
ugcccugguuuccugcccu

SEQ ID NO: 1735365 - RNA, 18 nt, Human
ugcccugguuuccugccc

SEQ ID NO: 1735366 - RNA, 17 nt, Human
ugcccugguuuccugcc

SEQ ID NO: 1735367 - RNA, 17 nt, Human
ugcccuggugcugccac

SEQ ID NO: 1735368 - RNA, 16 nt, Human
ugcccuggugcugcca

SEQ ID NO: 1735369 - RNA, 14 nt, Human
ugcccuggugcugc

SEQ ID NO: 1735370 - RNA, 12 nt, Human
ugcccuggugcu

SEQ ID NO: 1735371 - RNA, 21 nt, Human
ugcccugcccaccuggccucu

SEQ ID NO: 1735372 - RNA, 13 nt, Human
ugcccugggaggc

SEQ ID NO: 1735373 - RNA, 18 nt, Human
ugcccugggaggcaguga

SEQ ID NO: 1735374 - RNA, 17 nt, Human
ugcccugggaggcagug

SEQ ID NO: 1735375 - RNA, 15 nt, Human
ugcccugggaggcag

SEQ ID NO: 1735376 - RNA, 20 nt, Human
ugcccugcccaccuggccuc

SEQ ID NO: 1735377 - RNA, 16 nt, Human
ugcccugcccaccugg

SEQ ID NO: 1735378 - RNA, 15 nt, Human
ugcccugcccaccug

SEQ ID NO: 1735379 - RNA, 16 nt, Human
ugccccuggcagcccc

SEQ ID NO: 1735380 - RNA, 20 nt, Human
ugccccuccucucugcccua

SEQ ID NO: 1735381 - RNA, 19 nt, Human
ugccccuccucucugcccu

SEQ ID NO: 1735382 - RNA, 18 nt, Human
ugccccuccucucugccc

SEQ ID NO: 1735383 - RNA, 17 nt, Human
ugccccuccucucugcc

SEQ ID NO: 1735384 - RNA, 16 nt, Human
ugccccucccuucaac

SEQ ID NO: 1735385 - RNA, 15 nt, Human
ugccccucccuucaa

SEQ ID NO: 1735386 - RNA, 14 nt, Human
ugcccggcugcgga

SEQ ID NO: 1735387 - RNA, 12 nt, Human
ugcccggcugcg

SEQ ID NO: 1735388 - RNA, 20 nt, Human
ugcccaggcuggcgugcagu

SEQ ID NO: 1735389 - RNA, 19 nt, Human
ugcccaggcuggcgugcag

SEQ ID NO: 1735390 - RNA, 18 nt, Human
ugcccaggcuggcgugca

SEQ ID NO: 1735391 - RNA, 21 nt, Human
ugcaguuacacuaaaagguga

SEQ ID NO: 1735392 - RNA, 21 nt, Human
ugcaguggugcgaucuggguu

SEQ ID NO: 1735393 - RNA, 13 nt, Human
ugcagggaguccg

SEQ ID NO: 1735394 - RNA, 15 nt, Human
ugauuuaauuugaaa

SEQ ID NO: 1735395 - RNA, 16 nt, Human
ugcaguugccagucac

SEQ ID NO: 1735396 - RNA, 18 nt, Human
ugcauauuauuuuauguu

SEQ ID NO: 1735397 - RNA, 16 nt, Human
ugccacuaaauugaca

SEQ ID NO: 1735398 - RNA, 22 nt, Human
ugccaggaagccagcaggcucu

SEQ ID NO: 1735399 - RNA, 20 nt, Human
ugccaggaagccagcaggcu

SEQ ID NO: 1735400 - RNA, 14 nt, Human
ugccaggcauggug

SEQ ID NO: 1735401 - RNA, 21 nt, Human
ugcauuuggugguuucagaaa

SEQ ID NO: 1735402 - RNA, 23 nt, Human
ugcauuuggugguuucagaaaug

SEQ ID NO: 1735403 - RNA, 23 nt, Human
ugcucuccgaccagacaccuuga

SEQ ID NO: 1735404 - RNA, 12 nt, Human
ugcucuccucuu

SEQ ID NO: 1735405 - RNA, 14 nt, Human
ugcucuccucuugc

SEQ ID NO: 1735406 - RNA, 21 nt, Human
ugcuaggaacacuccuucaca

SEQ ID NO: 1735407 - RNA, 22 nt, Human
ugcuaggaacacuccuucacag

SEQ ID NO: 1735408 - RNA, 13 nt, Human
ugcuagaacuccc

SEQ ID NO: 1735409 - RNA, 14 nt, Human
ugcuagaacucccu

SEQ ID NO: 1735410 - RNA, 15 nt, Human
ugcuagaacucccuu

SEQ ID NO: 1735411 - RNA, 17 nt, Human
ugcuagaacucccuuuc

SEQ ID NO: 1735412 - RNA, 20 nt, Human
ugcucaggagcccugggagg

SEQ ID NO: 1735413 - RNA, 19 nt, Human
ugcucaggagcccugggag

SEQ ID NO: 1735414 - RNA, 18 nt, Human
ugcucaggagcccuggga

SEQ ID NO: 1735415 - RNA, 15 nt, Human
ugcucaggagcccug

SEQ ID NO: 1735416 - RNA, 17 nt, Human
ugcucacauaucuguca

SEQ ID NO: 1735417 - RNA, 17 nt, Human
ugcggacagccacggcc

SEQ ID NO: 1735418 - RNA, 22 nt, Human
ugcuacuguccuacccacccuc

SEQ ID NO: 1735419 - RNA, 21 nt, Human
ugcuacuguccuacccacccu

SEQ ID NO: 1735420 - RNA, 22 nt, Human
ugcuaagacucaguggggaggg

SEQ ID NO: 1735421 - RNA, 20 nt, Human
ugccuugcauaauggucaga

SEQ ID NO: 1735422 - RNA, 23 nt, Human
ugcgcaggcuggcccugcccugg

SEQ ID NO: 1735423 - RNA, 22 nt, Human
ugcgcaggcuggcccugcccug

SEQ ID NO: 1735424 - RNA, 21 nt, Human
ugcgcaggcuggcccugcccu

SEQ ID NO: 1735425 - RNA, 12 nt, Human
ugcugcuugagg

SEQ ID NO: 1735426 - RNA, 19 nt, Human
ugcugcuugaggcaacuca

SEQ ID NO: 1735427 - RNA, 20 nt, Human
ugcugggauuacagguguga

SEQ ID NO: 1735428 - RNA, 14 nt, Human
ugcugggccccugc

SEQ ID NO: 1735429 - RNA, 24 nt, Human
ugcugggccccugccucucugcag

SEQ ID NO: 1735430 - RNA, 23 nt, Human
ugcugggccccugccucucugca

SEQ ID NO: 1735431 - RNA, 22 nt, Human
ugcugggccccugccucucugc

SEQ ID NO: 1735432 - RNA, 21 nt, Human
ugcugggccccugccucucug

SEQ ID NO: 1735433 - RNA, 19 nt, Human
ugcugggccccugccucuc

SEQ ID NO: 1735434 - RNA, 18 nt, Human
ugcugggccccugccucu

SEQ ID NO: 1735435 - RNA, 17 nt, Human
ugcugggccccugccuc

SEQ ID NO: 1735436 - RNA, 16 nt, Human
ugcugggccccugccu

SEQ ID NO: 1735437 - RNA, 17 nt, Human
ugcugcauuuaaaagau

SEQ ID NO: 1735438 - RNA, 18 nt, Human
ugcugcauuuaaaagaua

SEQ ID NO: 1735439 - RNA, 19 nt, Human
ugcugcauuuaaaagauac

SEQ ID NO: 1735440 - RNA, 23 nt, Human
ugcugcauuuaaaagauacaguu

SEQ ID NO: 1735441 - RNA, 17 nt, Human
ugcugccugcuuuuuau

SEQ ID NO: 1735442 - RNA, 15 nt, Human
ugcugccugcuuuuu

SEQ ID NO: 1735443 - RNA, 13 nt, Human
ugcuggguguggc

SEQ ID NO: 1735444 - RNA, 20 nt, Human
ugcugggggggauuguaaaa

SEQ ID NO: 1735445 - RNA, 17 nt, Human
ugcugggcuugucugua

SEQ ID NO: 1735446 - RNA, 18 nt, Human
ugcuguaacuuucugaaa

SEQ ID NO: 1735447 - RNA, 16 nt, Human
ugcugguuuuucaguu

SEQ ID NO: 1735448 - RNA, 18 nt, Human
ugcugguuuuucaguuuu

SEQ ID NO: 1735449 - RNA, 13 nt, Human
ugcugguuuuagu

SEQ ID NO: 1735450 - RNA, 12 nt, Human
ugcugguuuuuc

SEQ ID NO: 1735451 - RNA, 15 nt, Human
ugcugguuuuucagu

SEQ ID NO: 1735452 - RNA, 12 nt, Human
ugauucacagug

SEQ ID NO: 1735453 - RNA, 16 nt, Human
ugauucagacagcugc

SEQ ID NO: 1735454 - RNA, 15 nt, Human
ugauucagacagcug

SEQ ID NO: 1735455 - RNA, 14 nt, Human
ugauucagacagcu

SEQ ID NO: 1735456 - RNA, 13 nt, Human
ugauucagacagc

SEQ ID NO: 1735457 - RNA, 20 nt, Human
ugauucaacagguuuuccug

SEQ ID NO: 1735458 - RNA, 13 nt, Human
ugauuauauguca

SEQ ID NO: 1735459 - RNA, 16 nt, Human
ugauuaccagggacug

SEQ ID NO: 1735460 - RNA, 20 nt, Human
ugauguucuuucacccuuuu

SEQ ID NO: 1735461 - RNA, 21 nt, Human
ugauucuccugccucagccuc

SEQ ID NO: 1735462 - RNA, 23 nt, Human
ugauucagacagcugccugggau

SEQ ID NO: 1735463 - RNA, 21 nt, Human
ugauucagacagcugccuggg

SEQ ID NO: 1735464 - RNA, 20 nt, Human
ugauucagacagcugccugg

SEQ ID NO: 1735465 - RNA, 19 nt, Human
ugauucagacagcugccug

SEQ ID NO: 1735466 - RNA, 18 nt, Human
ugauucagacagcugccu

SEQ ID NO: 1735467 - RNA, 21 nt, Human
ugauuggaggggggagguggg

SEQ ID NO: 1735468 - RNA, 13 nt, Human
ugauuggaggggg

SEQ ID NO: 1735469 - RNA, 20 nt, Human
ugauuggcaggaguuggaag

SEQ ID NO: 1735470 - RNA, 16 nt, Human
ugauugugucucuugg

SEQ ID NO: 1735471 - RNA, 16 nt, Human
ugauguguuaucucuu

SEQ ID NO: 1735472 - RNA, 19 nt, Human
ugaugucccaacuuguaaa

SEQ ID NO: 1735473 - RNA, 18 nt, Human
ugaugcuucuucagagac

SEQ ID NO: 1735474 - RNA, 17 nt, Human
ugaugcuucuucagaga

SEQ ID NO: 1735475 - RNA, 16 nt, Human
ugaugcuucuucagag

SEQ ID NO: 1735476 - RNA, 21 nt, Human
ugaugguuguacauauaagug

SEQ ID NO: 1735477 - RNA, 14 nt, Human
ugaugguuguacau

SEQ ID NO: 1735478 - RNA, 13 nt, Human
ugaugguuguaca

SEQ ID NO: 1735479 - RNA, 14 nt, Human
ugaugguuccccug

SEQ ID NO: 1735480 - RNA, 23 nt, Human
ugaugcuacaggauuugaaauug

SEQ ID NO: 1735481 - RNA, 21 nt, Human
ugaugccugugaacugaacuc

SEQ ID NO: 1735482 - RNA, 20 nt, Human
ugaugcuacaggauuugaaa

SEQ ID NO: 1735483 - RNA, 11 nt, Human
ugaugccuggc

SEQ ID NO: 1735484 - RNA, 20 nt, Human
ugaugccugugaacugaacu

SEQ ID NO: 1735485 - RNA, 15 nt, Human
ugaugccugugaacu

SEQ ID NO: 1735486 - RNA, 16 nt, Human
ugaucuuugcagacag

SEQ ID NO: 1735487 - RNA, 18 nt, Human
ugaucuuugcagacaggc

SEQ ID NO: 1735488 - RNA, 19 nt, Human
ugauccacccaccucagcc

SEQ ID NO: 1735489 - RNA, 18 nt, Human
ugauccacccaccucagc

SEQ ID NO: 1735490 - RNA, 17 nt, Human
ugauccacccaccucag

SEQ ID NO: 1735491 - RNA, 17 nt, Human
ugaucucucgugauuga

SEQ ID NO: 1735492 - RNA, 20 nt, Human
ugaucuucuuuauaauucua

SEQ ID NO: 1735493 - RNA, 15 nt, Human
ugaucugugggcaca

SEQ ID NO: 1735494 - RNA, 14 nt, Human
ugauagcacagacc

SEQ ID NO: 1735495 - RNA, 13 nt, Human
ugauagcacagac

SEQ ID NO: 1735496 - RNA, 18 nt, Human
ugauagcaaauggccuca

SEQ ID NO: 1735497 - RNA, 17 nt, Human
ugauccaagcugguccc

SEQ ID NO: 1735498 - RNA, 15 nt, Human
ugauccaagcugguc

SEQ ID NO: 1735499 - RNA, 14 nt, Human
ugauccaagcuggu

SEQ ID NO: 1735500 - RNA, 13 nt, Human
ugauccaagcugg

SEQ ID NO: 1735501 - RNA, 17 nt, Human
ugagcagggcucagcgg

SEQ ID NO: 1735502 - RNA, 16 nt, Human
ugagcagggcucagcg

SEQ ID NO: 1735503 - RNA, 19 nt, Human
ugagcagggcucagcgggg

SEQ ID NO: 1735504 - RNA, 20 nt, Human
ugagcaucaggccaggcccu

SEQ ID NO: 1735505 - RNA, 19 nt, Human
ugagcaucaggccaggccc

SEQ ID NO: 1735506 - RNA, 18 nt, Human
ugagcaucaggccaggcc

SEQ ID NO: 1735507 - RNA, 21 nt, Human
ugagccucagcauccuggcac

SEQ ID NO: 1735508 - RNA, 18 nt, Human
ugagccucagcauccugg

SEQ ID NO: 1735509 - RNA, 22 nt, Human
ugagccucagcauccuggcacc

SEQ ID NO: 1735510 - RNA, 14 nt, Human
ugagccucagucuc

SEQ ID NO: 1735511 - RNA, 17 nt, Human
ugagccucagcauccug

SEQ ID NO: 1735512 - RNA, 21 nt, Human
ugagccgagaucacgccacug

SEQ ID NO: 1735513 - RNA, 19 nt, Human
ugagccgagaucacgccac

SEQ ID NO: 1735514 - RNA, 18 nt, Human
ugagcccuguccugccua

SEQ ID NO: 1735515 - RNA, 16 nt, Human
ugagagugaacaaauu

SEQ ID NO: 1735516 - RNA, 23 nt, Human
ugagacucgcgacaaugcaaacc

SEQ ID NO: 1735517 - RNA, 22 nt, Human
ugagacucgcgacaaugcaaac

SEQ ID NO: 1735518 - RNA, 21 nt, Human
ugagacucgcgacaaugcaaa

SEQ ID NO: 1735519 - RNA, 20 nt, Human
ugagacucgcgacaaugcaa

SEQ ID NO: 1735520 - RNA, 15 nt, Human
ugagcagggcucagc

SEQ ID NO: 1735521 - RNA, 14 nt, Human
ugagcagggcucag

SEQ ID NO: 1735522 - RNA, 13 nt, Human
ugagcagggcuca

SEQ ID NO: 1735523 - RNA, 12 nt, Human
ugagcagggcuc

SEQ ID NO: 1735524 - RNA, 15 nt, Human
ugagaucagccuggg

SEQ ID NO: 1735525 - RNA, 14 nt, Human
ugagaucagccugg

SEQ ID NO: 1735526 - RNA, 15 nt, Human
ugagaucaaaacggu

SEQ ID NO: 1735527 - RNA, 19 nt, Human
ugagacucgcgacaaugca

SEQ ID NO: 1735528 - RNA, 21 nt, Human
ugaccucaggugauccaccca

SEQ ID NO: 1735529 - RNA, 20 nt, Human
ugaccucaggugauccaccc

SEQ ID NO: 1735530 - RNA, 22 nt, Human
ugaccucagcuuugauauuuca

SEQ ID NO: 1735531 - RNA, 17 nt, Human
ugagaaauuuauaaacu

SEQ ID NO: 1735532 - RNA, 18 nt, Human
ugaggcuccacuuggucu

SEQ ID NO: 1735533 - RNA, 20 nt, Human
ugaggcuccacuuggucugu

SEQ ID NO: 1735534 - RNA, 14 nt, Human
ugaggcucugcccu

SEQ ID NO: 1735535 - RNA, 13 nt, Human
ugaggcucugccc

SEQ ID NO: 1735536 - RNA, 17 nt, Human
ugagggaacagagaggu

SEQ ID NO: 1735537 - RNA, 15 nt, Human
ugaggcucugcccuu

SEQ ID NO: 1735538 - RNA, 13 nt, Human
ugaggugggagga

SEQ ID NO: 1735539 - RNA, 12 nt, Human
ugaggugggagg

SEQ ID NO: 1735540 - RNA, 12 nt, Human
ugaggcauuugu

SEQ ID NO: 1735541 - RNA, 23 nt, Human
ugaggcaucgcaauguaagacuc

SEQ ID NO: 1735542 - RNA, 19 nt, Human
ugaggcauuuguuugaacu

SEQ ID NO: 1735543 - RNA, 20 nt, Human
ugaggcauuuguuugaacug

SEQ ID NO: 1735544 - RNA, 17 nt, Human
ugaggcuaguguggugu

SEQ ID NO: 1735545 - RNA, 21 nt, Human
ugaggcauuuguuugaacuga

SEQ ID NO: 1735546 - RNA, 23 nt, Human
ugaggcuagugugguguuuccug

SEQ ID NO: 1735547 - RNA, 23 nt, Human
ugaggcauuuguuugaacugaua

SEQ ID NO: 1735548 - RNA, 13 nt, Human
ugagcugggauga

SEQ ID NO: 1735549 - RNA, 16 nt, Human
ugaggagcuugaaacc

SEQ ID NO: 1735550 - RNA, 23 nt, Human
ugaguuugggccccagaggcugg

SEQ ID NO: 1735551 - RNA, 22 nt, Human
ugaguuugggccccagaggcug

SEQ ID NO: 1735552 - RNA, 20 nt, Human
ugaguugauagcacagaccc

SEQ ID NO: 1735553 - RNA, 16 nt, Human
ugaguugauagcacag

SEQ ID NO: 1735554 - RNA, 14 nt, Human
ugagugagcaugcc

SEQ ID NO: 1735555 - RNA, 18 nt, Human
ugagucugaaggcugggu

SEQ ID NO: 1735556 - RNA, 17 nt, Human
ugagucugaaggcuggg

SEQ ID NO: 1735557 - RNA, 15 nt, Human
ugagucugaaggcug

SEQ ID NO: 1735558 - RNA, 13 nt, Human
ugagucugaaggc

SEQ ID NO: 1735559 - RNA, 19 nt, Human
ugaguccagaaguuugaga

SEQ ID NO: 1735560 - RNA, 21 nt, Human
ugaggugggaggaucucuuga

SEQ ID NO: 1735561 - RNA, 15 nt, Human
ugagucccaggcuga

SEQ ID NO: 1735562 - RNA, 19 nt, Human
ugagucgaggacagggagg

SEQ ID NO: 1735563 - RNA, 19 nt, Human
ugagucccaggcugagccu

SEQ ID NO: 1735564 - RNA, 20 nt, Human
ugaaaagcuccauuuuuagu

SEQ ID NO: 1735565 - RNA, 13 nt, Human
ugaaaauuuugau

SEQ ID NO: 1735566 - RNA, 19 nt, Human
ugaaaauuuugauguuuua

SEQ ID NO: 1735567 - RNA, 21 nt, Human
ugaaaauuuugauguuuuaag

SEQ ID NO: 1735568 - RNA, 14 nt, Human
ugaaacauuuuguc

SEQ ID NO: 1735569 - RNA, 15 nt, Human
ugaaagggcccagag

SEQ ID NO: 1735570 - RNA, 13 nt, Human
ugaaagggcccag

SEQ ID NO: 1735571 - RNA, 23 nt, Human
ugaaagggaguauuacaaaaaca

SEQ ID NO: 1735572 - RNA, 20 nt, Human
ugaaaccccuguaggccuca

SEQ ID NO: 1735573 - RNA, 18 nt, Human
ugaaagcccugagcuuuc

SEQ ID NO: 1735574 - RNA, 18 nt, Human
ugaaagauggcugugccu

SEQ ID NO: 1735575 - RNA, 19 nt, Human
ugaaagauggcugugccuc

SEQ ID NO: 1735576 - RNA, 12 nt, Human
ugaaauuauuca

SEQ ID NO: 1735577 - RNA, 17 nt, Human
ugaaaucaguuacucuu

SEQ ID NO: 1735578 - RNA, 16 nt, Human
ugaaaucaguuacucu

SEQ ID NO: 1735579 - RNA, 16 nt, Human
ugaacuccuggccuca

SEQ ID NO: 1735580 - RNA, 20 nt, Human
ugaaccaccacacccagccc

SEQ ID NO: 1735581 - RNA, 17 nt, Human
ugaaccaccacacccag

SEQ ID NO: 1735582 - RNA, 23 nt, Human
ugaaccacaucuugcucugcuga

SEQ ID NO: 1735583 - RNA, 19 nt, Human
ugaaccacaucuugcucug

SEQ ID NO: 1735584 - RNA, 22 nt, Human
ugaaccaagaacuuuccaggaa

SEQ ID NO: 1735585 - RNA, 20 nt, Human
ugaacauugguucuuucauu

SEQ ID NO: 1735586 - RNA, 12 nt, Human
ucuuugccaagu

SEQ ID NO: 1735587 - RNA, 17 nt, Human
ucuuuggacacucacac

SEQ ID NO: 1735588 - RNA, 19 nt, Human
ucuuuggacagaagcagcu

SEQ ID NO: 1735589 - RNA, 22 nt, Human
ucuuuggacagaagcagcucuu

SEQ ID NO: 1735590 - RNA, 21 nt, Human
ucuuuggacagaagcagcucu

SEQ ID NO: 1735591 - RNA, 17 nt, Human
ucuuuccaaaguacacu

SEQ ID NO: 1735592 - RNA, 21 nt, Human
ucuuucauuugcuuuggaagu

SEQ ID NO: 1735593 - RNA, 21 nt, Human
ucuuucagccaagaauucuua

SEQ ID NO: 1735594 - RNA, 20 nt, Human
ucuuucagccaagaauucuu

SEQ ID NO: 1735595 - RNA, 19 nt, Human
ucuuucagccaagaauucu

SEQ ID NO: 1735596 - RNA, 16 nt, Human
ucuuucagccaagaau

SEQ ID NO: 1735597 - RNA, 13 nt, Human
ucuuuccaaagua

SEQ ID NO: 1735598 - RNA, 14 nt, Human
ucuuuccaaaguac

SEQ ID NO: 1735599 - RNA, 17 nt, Human
ucuccucuugccacugc

SEQ ID NO: 1735600 - RNA, 22 nt, Human
ucuccucuugccacugccucuu

SEQ ID NO: 1735601 - RNA, 20 nt, Human
ucuccucugcugcuggcugg

SEQ ID NO: 1735602 - RNA, 16 nt, Human
ucucccuucauccuuc

SEQ ID NO: 1735603 - RNA, 16 nt, Human
ucuccucuugccacug

SEQ ID NO: 1735604 - RNA, 13 nt, Human
ucuccucuugcca

SEQ ID NO: 1735605 - RNA, 15 nt, Human
ucuugcaugaggcua

SEQ ID NO: 1735606 - RNA, 23 nt, Human
ucuuucacccuuuucuguuugcu

SEQ ID NO: 1735607 - RNA, 21 nt, Human
ucuuguguguuuauugucaaa

SEQ ID NO: 1735608 - RNA, 12 nt, Human
ucuuguguuucu

SEQ ID NO: 1735609 - RNA, 16 nt, Human
ucuuguguguuuauug

SEQ ID NO: 1735610 - RNA, 18 nt, Human
ugacaaggauugcuacug

SEQ ID NO: 1735611 - RNA, 22 nt, Human
ugacagagugagacucugucuc

SEQ ID NO: 1735612 - RNA, 19 nt, Human
ugacagagugagacucugu

SEQ ID NO: 1735613 - RNA, 23 nt, Human
ugacauaaguauuuaauucaugu

SEQ ID NO: 1735614 - RNA, 17 nt, Human
ugacagagugagacucu

SEQ ID NO: 1735615 - RNA, 14 nt, Human
ugacagagugagac

SEQ ID NO: 1735616 - RNA, 23 nt, Human
ugacagaggcagccccauucugc

SEQ ID NO: 1735617 - RNA, 18 nt, Human
ugacagaggcagccccau

SEQ ID NO: 1735618 - RNA, 17 nt, Human
ugacagaggcagcccca

SEQ ID NO: 1735619 - RNA, 16 nt, Human
ugacagaggcagcccc

SEQ ID NO: 1735620 - RNA, 15 nt, Human
ugacagaggcagccc

SEQ ID NO: 1735621 - RNA, 14 nt, Human
ugacagaggcagcc

SEQ ID NO: 1735622 - RNA, 23 nt, Human
ugacagacacaggcccggcucca

SEQ ID NO: 1735623 - RNA, 20 nt, Human
ugacagacacaggcccggcu

SEQ ID NO: 1735624 - RNA, 16 nt, Human
ugacagacagcccucc

SEQ ID NO: 1735625 - RNA, 13 nt, Human
ugacagaggcagc

SEQ ID NO: 1735626 - RNA, 13 nt, Human
ugacaugucuuuu

SEQ ID NO: 1735627 - RNA, 20 nt, Human
ugaccacugcagaagacagu

SEQ ID NO: 1735628 - RNA, 19 nt, Human
ugaccagcaccaucucucc

SEQ ID NO: 1735629 - RNA, 15 nt, Human
ugacaugucuuuucu

SEQ ID NO: 1735630 - RNA, 20 nt, Human
ugaccgugaggccagagaca

SEQ ID NO: 1735631 - RNA, 16 nt, Human
ugaccgugaggccaga

SEQ ID NO: 1735632 - RNA, 14 nt, Human
ugaccgugaggcca

SEQ ID NO: 1735633 - RNA, 13 nt, Human
ugaccgugaggcc

SEQ ID NO: 1735634 - RNA, 19 nt, Human
ugaccauucuccaccugcc

SEQ ID NO: 1735635 - RNA, 18 nt, Human
ugaccauucuccaccugc

SEQ ID NO: 1735636 - RNA, 17 nt, Human
ugaccauucuccaccug

SEQ ID NO: 1735637 - RNA, 16 nt, Human
ugaccauucuccaccu

SEQ ID NO: 1735638 - RNA, 20 nt, Human
ugaccagcaccaucucuccu

SEQ ID NO: 1735639 - RNA, 17 nt, Human
ugaaggccccgcccagg

SEQ ID NO: 1735640 - RNA, 20 nt, Human
ugaaggacauugcggacagc

SEQ ID NO: 1735641 - RNA, 19 nt, Human
ugaaggacauugcggacag

SEQ ID NO: 1735642 - RNA, 22 nt, Human
ugaaggacauugcggacagcca

SEQ ID NO: 1735643 - RNA, 16 nt, Human
ugaaggccccgcccag

SEQ ID NO: 1735644 - RNA, 15 nt, Human
ugaaggccccgccca

SEQ ID NO: 1735645 - RNA, 16 nt, Human
ugaaggagagcccuuc

SEQ ID NO: 1735646 - RNA, 20 nt, Human
ugaaggagagcccuucauuu

SEQ ID NO: 1735647 - RNA, 17 nt, Human
ugaacuccuggccucaa

SEQ ID NO: 1735648 - RNA, 16 nt, Human
ugaacucugacaacag

SEQ ID NO: 1735649 - RNA, 20 nt, Human
ugaaggaauaaauugcuccu

SEQ ID NO: 1735650 - RNA, 16 nt, Human
ugaauuauuuucucuc

SEQ ID NO: 1735651 - RNA, 23 nt, Human
ugaaugaugauccuaggcauuug

SEQ ID NO: 1735652 - RNA, 23 nt, Human
ugaaucauuuuaccuuugacaaa

SEQ ID NO: 1735653 - RNA, 22 nt, Human
ugaaucauuuuaccuuugacaa

SEQ ID NO: 1735654 - RNA, 15 nt, Human
ugaauaaagacaccu

SEQ ID NO: 1735655 - RNA, 14 nt, Human
ugaauaaagacacc

SEQ ID NO: 1735656 - RNA, 13 nt, Human
ucgugacaacacu

SEQ ID NO: 1735657 - RNA, 18 nt, Human
ucggacuuagcugggaga

SEQ ID NO: 1735658 - RNA, 14 nt, Human
uccuuagaagugga

SEQ ID NO: 1735659 - RNA, 18 nt, Human
ucuaaaggcuaccuuugu

SEQ ID NO: 1735660 - RNA, 17 nt, Human
ucuaaaggcuaccuuug

SEQ ID NO: 1735661 - RNA, 19 nt, Human
ucuaaaggcuaccuuugua

SEQ ID NO: 1735662 - RNA, 20 nt, Human
ucuaaaggcuaccuuuguau

SEQ ID NO: 1735663 - RNA, 16 nt, Human
ucguguccccuauccu

SEQ ID NO: 1735664 - RNA, 14 nt, Human
ucgugguaggacug

SEQ ID NO: 1735665 - RNA, 15 nt, Human
ucgugguaggacugu

SEQ ID NO: 1735666 - RNA, 20 nt, Human
ucgugguaggacuguagaaa

SEQ ID NO: 1735667 - RNA, 14 nt, Human
ucuaugacacaugc

SEQ ID NO: 1735668 - RNA, 17 nt, Human
ucuaugacacaugcaag

SEQ ID NO: 1735669 - RNA, 14 nt, Human
ucuaucaccaagga

SEQ ID NO: 1735670 - RNA, 21 nt, Human
ucuaggaagacuuuggaaaga

SEQ ID NO: 1735671 - RNA, 19 nt, Human
ucuaggaagacuuuggaaa

SEQ ID NO: 1735672 - RNA, 16 nt, Human
ucuaggaagacuuugg

SEQ ID NO: 1735673 - RNA, 15 nt, Human
ucuaggaagacuuug

SEQ ID NO: 1735674 - RNA, 16 nt, Human
ucuacagaggccaugg

SEQ ID NO: 1735675 - RNA, 15 nt, Human
ucuacagaggccaug

SEQ ID NO: 1735676 - RNA, 14 nt, Human
ucuaccuuccugca

SEQ ID NO: 1735677 - RNA, 23 nt, Human
ucucaguccaugaagauguagag

SEQ ID NO: 1735678 - RNA, 13 nt, Human
ucuaugggacuca

SEQ ID NO: 1735679 - RNA, 12 nt, Human
ucuaugggacuc

SEQ ID NO: 1735680 - RNA, 19 nt, Human
ucuaugggacucaaugcac

SEQ ID NO: 1735681 - RNA, 23 nt, Human
ucuaugggacucaaugcacugac

SEQ ID NO: 1735682 - RNA, 18 nt, Human
ucucauacucaccucacc

SEQ ID NO: 1735683 - RNA, 16 nt, Human
ucucauacucaccuca

SEQ ID NO: 1735684 - RNA, 16 nt, Human
ucuccaccugccaggg

SEQ ID NO: 1735685 - RNA, 15 nt, Human
ucuccaccugccagg

SEQ ID NO: 1735686 - RNA, 14 nt, Human
ucuccaccugccag

SEQ ID NO: 1735687 - RNA, 19 nt, Human
ucuccaccugccagggaca

SEQ ID NO: 1735688 - RNA, 17 nt, Human
ucuccaccugccaggga

SEQ ID NO: 1735689 - RNA, 22 nt, Human
ucuccaccugccagggacagag

SEQ ID NO: 1735690 - RNA, 13 nt, Human
ucuccacuccaga

SEQ ID NO: 1735691 - RNA, 16 nt, Human
ucuccacccugcucuc

SEQ ID NO: 1735692 - RNA, 14 nt, Human
ucuccacccugcuc

SEQ ID NO: 1735693 - RNA, 17 nt, Human
ucuccacccugcucucc

SEQ ID NO: 1735694 - RNA, 13 nt, Human
ucuccacccugcu

SEQ ID NO: 1735695 - RNA, 19 nt, Human
ucucaugccucagccuccu

SEQ ID NO: 1735696 - RNA, 16 nt, Human
ucucaugccucagccu

SEQ ID NO: 1735697 - RNA, 13 nt, Human
ucucaugccucag

SEQ ID NO: 1735698 - RNA, 13 nt, Human
ucucccccagccc

SEQ ID NO: 1735699 - RNA, 12 nt, Human
ucucccccagcc

SEQ ID NO: 1735700 - RNA, 11 nt, Human
ucuccaggcug

SEQ ID NO: 1735701 - RNA, 23 nt, Human
ucucccucagucuggcccuuccu

SEQ ID NO: 1735702 - RNA, 18 nt, Human
ucucccucagucuggccc

SEQ ID NO: 1735703 - RNA, 14 nt, Human
ucucccucccuugg

SEQ ID NO: 1735704 - RNA, 15 nt, Human
ucuccagccccugga

SEQ ID NO: 1735705 - RNA, 14 nt, Human
ucuccagccccugg

SEQ ID NO: 1735706 - RNA, 13 nt, Human
ucuccagccccug

SEQ ID NO: 1735707 - RNA, 12 nt, Human
ucuccagccccu

SEQ ID NO: 1735708 - RNA, 14 nt, Human
ucuccacugccuuc

SEQ ID NO: 1735709 - RNA, 18 nt, Human
ucuccagccccuggaugc

SEQ ID NO: 1735710 - RNA, 16 nt, Human
ucuccagccccuggau

SEQ ID NO: 1735711 - RNA, 22 nt, Human
ucuccagccccuggaugcagcc

SEQ ID NO: 1735712 - RNA, 23 nt, Human
uccuauauuguuuucaguguaca

SEQ ID NO: 1735713 - RNA, 12 nt, Human
uccuaguuccac

SEQ ID NO: 1735714 - RNA, 18 nt, Human
uccucauuagcauuuugc

SEQ ID NO: 1735715 - RNA, 17 nt, Human
uccuaucagaaguuucu

SEQ ID NO: 1735716 - RNA, 10 nt, Human
uccuccaggu

SEQ ID NO: 1735717 - RNA, 13 nt, Human
uccucccaccuca

SEQ ID NO: 1735718 - RNA, 12 nt, Human
uccucccaccuc

SEQ ID NO: 1735719 - RNA, 16 nt, Human
uccgcuuucuacccag

SEQ ID NO: 1735720 - RNA, 21 nt, Human
uccuaagcuauucaguaauaa

SEQ ID NO: 1735721 - RNA, 20 nt, Human
uccuaagcuauucaguaaua

SEQ ID NO: 1735722 - RNA, 20 nt, Human
uccgcuuucuacccagcgag

SEQ ID NO: 1735723 - RNA, 18 nt, Human
uccgcuuucuacccagcg

SEQ ID NO: 1735724 - RNA, 14 nt, Human
uccgccucuugggu

SEQ ID NO: 1735725 - RNA, 15 nt, Human
ucccccuuccaugga

SEQ ID NO: 1735726 - RNA, 21 nt, Human
ucccccuguuucagaggcuca

SEQ ID NO: 1735727 - RNA, 22 nt, Human
ucccuucaaccauuccccaugg

SEQ ID NO: 1735728 - RNA, 16 nt, Human
ucccuuccucuuucca

SEQ ID NO: 1735729 - RNA, 15 nt, Human
ucccuuccucuuucc

SEQ ID NO: 1735730 - RNA, 23 nt, Human
uccuggcacccggccccugcugg

SEQ ID NO: 1735731 - RNA, 16 nt, Human
uccuggcacugcuucc

SEQ ID NO: 1735732 - RNA, 13 nt, Human
uccuggcacugcu

SEQ ID NO: 1735733 - RNA, 12 nt, Human
uccuggccucaa

SEQ ID NO: 1735734 - RNA, 13 nt, Human
uccuguagcccua

SEQ ID NO: 1735735 - RNA, 11 nt, Human
uccuguagccc

SEQ ID NO: 1735736 - RNA, 17 nt, Human
uccugcccuuaccugcc

SEQ ID NO: 1735737 - RNA, 21 nt, Human
uccugcccugggaggcaguga

SEQ ID NO: 1735738 - RNA, 15 nt, Human
uccugcccugggagg

SEQ ID NO: 1735739 - RNA, 14 nt, Human
uccugcccugggag

SEQ ID NO: 1735740 - RNA, 12 nt, Human
uccugcccuggg

SEQ ID NO: 1735741 - RNA, 11 nt, Human
uccugcccugg

SEQ ID NO: 1735742 - RNA, 20 nt, Human
uccugcccuuaccugccagg

SEQ ID NO: 1735743 - RNA, 14 nt, Human
uccuggaguucugg

SEQ ID NO: 1735744 - RNA, 19 nt, Human
uccugccuaaggcugaacu

SEQ ID NO: 1735745 - RNA, 16 nt, Human
uccugccuaaggcuga

SEQ ID NO: 1735746 - RNA, 21 nt, Human
uccugaggcuccacuuggucu

SEQ ID NO: 1735747 - RNA, 16 nt, Human
uccugcauuugugaaa

SEQ ID NO: 1735748 - RNA, 19 nt, Human
uccugaggcuccacuuggu

SEQ ID NO: 1735749 - RNA, 20 nt, Human
uccugaggcuccacuugguc

SEQ ID NO: 1735750 - RNA, 14 nt, Human
uccugccaggcaug

SEQ ID NO: 1735751 - RNA, 13 nt, Human
uccugccaggcau

SEQ ID NO: 1735752 - RNA, 16 nt, Human
uccugccaccacgccc

SEQ ID NO: 1735753 - RNA, 11 nt, Human
uccugccacca

SEQ ID NO: 1735754 - RNA, 17 nt, Human
uccugccccugagccca

SEQ ID NO: 1735755 - RNA, 18 nt, Human
uccugccccugagcccau

SEQ ID NO: 1735756 - RNA, 10 nt, Human
uccugcccug

SEQ ID NO: 1735757 - RNA, 14 nt, Human
uccaucaggccacu

SEQ ID NO: 1735758 - RNA, 21 nt, Human
uccauaaucuggacuccucug

SEQ ID NO: 1735759 - RNA, 15 nt, Human
uccauagagagcaag

SEQ ID NO: 1735760 - RNA, 14 nt, Human
uccauagagagcaa

SEQ ID NO: 1735761 - RNA, 20 nt, Human
uccaugggccauaugaaaag

SEQ ID NO: 1735762 - RNA, 13 nt, Human
uccauggacuuug

SEQ ID NO: 1735763 - RNA, 15 nt, Human
uccaugcugccucca

SEQ ID NO: 1735764 - RNA, 14 nt, Human
uccaugcugccucc

SEQ ID NO: 1735765 - RNA, 22 nt, Human
uccauaaucuggacuccucugu

SEQ ID NO: 1735766 - RNA, 22 nt, Human
uccaggggugggacacccugug

SEQ ID NO: 1735767 - RNA, 20 nt, Human
uccagguuuaagcuguuacu

SEQ ID NO: 1735768 - RNA, 22 nt, Human
uccagcaauucuccugccucag

SEQ ID NO: 1735769 - RNA, 15 nt, Human
uccaggagcagccac

SEQ ID NO: 1735770 - RNA, 14 nt, Human
uccaggagcagcca

SEQ ID NO: 1735771 - RNA, 13 nt, Human
uccaggagcagcc

SEQ ID NO: 1735772 - RNA, 12 nt, Human
uccaggagcagc

SEQ ID NO: 1735773 - RNA, 20 nt, Human
uccaggggugggacacccug

SEQ ID NO: 1735774 - RNA, 19 nt, Human
uccaggggugggacacccu

SEQ ID NO: 1735775 - RNA, 21 nt, Human
uccacuuggucugugagaugc

SEQ ID NO: 1735776 - RNA, 14 nt, Human
uccaaaguacacug

SEQ ID NO: 1735777 - RNA, 16 nt, Human
uccaaaguacacuguu

SEQ ID NO: 1735778 - RNA, 23 nt, Human
uccacuuggucugugagaugcua

SEQ ID NO: 1735779 - RNA, 21 nt, Human
uccacuuucuagccagaggag

SEQ ID NO: 1735780 - RNA, 20 nt, Human
uccacuuucuagccagagga

SEQ ID NO: 1735781 - RNA, 23 nt, Human
uccagaaagaaaacuuguauuau

SEQ ID NO: 1735782 - RNA, 18 nt, Human
uccccagauugcaacagg

SEQ ID NO: 1735783 - RNA, 13 nt, Human
uccccagauugca

SEQ ID NO: 1735784 - RNA, 20 nt, Human
ucccaugagccucagcaucc

SEQ ID NO: 1735785 - RNA, 22 nt, Human
uccccagcaagugagagcuggg

SEQ ID NO: 1735786 - RNA, 21 nt, Human
uccccagcaagugagagcugg

SEQ ID NO: 1735787 - RNA, 20 nt, Human
uccccagcaagugagagcug

SEQ ID NO: 1735788 - RNA, 23 nt, Human
uccccagauugcaacaggcuggg

SEQ ID NO: 1735789 - RNA, 22 nt, Human
uccccagauugcaacaggcugg

SEQ ID NO: 1735790 - RNA, 20 nt, Human
uccccagauugcaacaggcu

SEQ ID NO: 1735791 - RNA, 19 nt, Human
uccccagauugcaacaggc

SEQ ID NO: 1735792 - RNA, 14 nt, Human
uccccaggaggcca

SEQ ID NO: 1735793 - RNA, 17 nt, Human
uccccaggaggccagcc

SEQ ID NO: 1735794 - RNA, 17 nt, Human
ucccccagccccauccu

SEQ ID NO: 1735795 - RNA, 16 nt, Human
uccccaggaggccagc

SEQ ID NO: 1735796 - RNA, 15 nt, Human
uccccaggaggccag

SEQ ID NO: 1735797 - RNA, 21 nt, Human
ucccccagccccauccucugu

SEQ ID NO: 1735798 - RNA, 20 nt, Human
ucccccagccccauccucug

SEQ ID NO: 1735799 - RNA, 22 nt, Human
ucccccagccccauccucugua

SEQ ID NO: 1735800 - RNA, 18 nt, Human
ucccaccuuggcugcagg

SEQ ID NO: 1735801 - RNA, 20 nt, Human
ucccagcugugcucuggaca

SEQ ID NO: 1735802 - RNA, 17 nt, Human
ucccaccuuggcugcag

SEQ ID NO: 1735803 - RNA, 16 nt, Human
ucccaccuuggcugca

SEQ ID NO: 1735804 - RNA, 13 nt, Human
ucccaccuuggcu

SEQ ID NO: 1735805 - RNA, 22 nt, Human
ucccaccucucucacuccuuga

SEQ ID NO: 1735806 - RNA, 20 nt, Human
uccaugugggcuaguugggc

SEQ ID NO: 1735807 - RNA, 19 nt, Human
ucccaugagccucagcauc

SEQ ID NO: 1735808 - RNA, 18 nt, Human
ucccaugagccucagcau

SEQ ID NO: 1735809 - RNA, 15 nt, Human
ucccaucuuccaagg

SEQ ID NO: 1735810 - RNA, 16 nt, Human
ucccaggcgccccuuc

SEQ ID NO: 1735811 - RNA, 24 nt, Human
ucccaggcauuccccaggaggcca

SEQ ID NO: 1735812 - RNA, 22 nt, Human
ucccagcugugcucuggacagg

SEQ ID NO: 1735813 - RNA, 21 nt, Human
ucccagcugugcucuggacag

SEQ ID NO: 1735814 - RNA, 23 nt, Human
ucccagcugugcucuggacaggc

SEQ ID NO: 1735815 - RNA, 15 nt, Human
ucaggagcccuggga

SEQ ID NO: 1735816 - RNA, 14 nt, Human
ucaggagcccuggg

SEQ ID NO: 1735817 - RNA, 12 nt, Human
ucaggagcccug

SEQ ID NO: 1735818 - RNA, 11 nt, Human
ucaggagcccu

SEQ ID NO: 1735819 - RNA, 21 nt, Human
ucaggccugggggcugggcag

SEQ ID NO: 1735820 - RNA, 15 nt, Human
ucaggcucuucuccu

SEQ ID NO: 1735821 - RNA, 20 nt, Human
ucaggaucaaaccccgacca

SEQ ID NO: 1735822 - RNA, 24 nt, Human
ucagcuccagcucaccagccccag

SEQ ID NO: 1735823 - RNA, 23 nt, Human
ucagcuccagcucaccagcccca

SEQ ID NO: 1735824 - RNA, 23 nt, Human
ucaggaagcucagggccuggcuc

SEQ ID NO: 1735825 - RNA, 23 nt, Human
ucagcucugcaagaauugaagca

SEQ ID NO: 1735826 - RNA, 20 nt, Human
ucagguggggcagcuugagg

SEQ ID NO: 1735827 - RNA, 16 nt, Human
ucagucucccucccuu

SEQ ID NO: 1735828 - RNA, 23 nt, Human
ucagucugauucccaagcucugc

SEQ ID NO: 1735829 - RNA, 22 nt, Human
ucagucugauucccaagcucug

SEQ ID NO: 1735830 - RNA, 21 nt, Human
ucagucugauucccaagcucu

SEQ ID NO: 1735831 - RNA, 19 nt, Human
ucagguggggcagcuugag

SEQ ID NO: 1735832 - RNA, 18 nt, Human
ucagguggggcagcuuga

SEQ ID NO: 1735833 - RNA, 23 nt, Human
ucaggugauccacccaccucagc

SEQ ID NO: 1735834 - RNA, 16 nt, Human
ucaggugauccaccca

SEQ ID NO: 1735835 - RNA, 23 nt, Human
ucaggugagaagcagaggaagga

SEQ ID NO: 1735836 - RNA, 12 nt, Human
ucaggucccugc

SEQ ID NO: 1735837 - RNA, 21 nt, Human
ucaggugaaacuccagaugcc

SEQ ID NO: 1735838 - RNA, 21 nt, Human
ucaggcucuucuccuuucaca

SEQ ID NO: 1735839 - RNA, 16 nt, Human
ucaggcucuucuccuu

SEQ ID NO: 1735840 - RNA, 13 nt, Human
uccaaaguacacu

SEQ ID NO: 1735841 - RNA, 16 nt, Human
ucauuaggauggcuag

SEQ ID NO: 1735842 - RNA, 14 nt, Human
ucauggugcucaga

SEQ ID NO: 1735843 - RNA, 17 nt, Human
ucaucaaugaaugaaug

SEQ ID NO: 1735844 - RNA, 12 nt, Human
ucauagcagcuu

SEQ ID NO: 1735845 - RNA, 11 nt, Human
ucauagcagcu

SEQ ID NO: 1735846 - RNA, 20 nt, Human
ucaguguacauggaauaaca

SEQ ID NO: 1735847 - RNA, 17 nt, Human
ucauccacugugccaug

SEQ ID NO: 1735848 - RNA, 14 nt, Human
ucauccacugugcc

SEQ ID NO: 1735849 - RNA, 18 nt, Human
ucauccacugugccaugu

SEQ ID NO: 1735850 - RNA, 16 nt, Human
ucaucuccccaucauu

SEQ ID NO: 1735851 - RNA, 17 nt, Human
uauuauauuuacaaaug

SEQ ID NO: 1735852 - RNA, 14 nt, Human
uauuauaccuuuuu

SEQ ID NO: 1735853 - RNA, 24 nt, Human
uauuaagaaagacuaucuaaaugu

SEQ ID NO: 1735854 - RNA, 14 nt, Human
uauuaaggaagaca

SEQ ID NO: 1735855 - RNA, 15 nt, Human
uauuaaguuguuaau

SEQ ID NO: 1735856 - RNA, 12 nt, Human
uauuauaccuuu

SEQ ID NO: 1735857 - RNA, 13 nt, Human
uauuauaccuuuu

SEQ ID NO: 1735858 - RNA, 20 nt, Human
uauuauggaggcaggaguuu

SEQ ID NO: 1735859 - RNA, 13 nt, Human
uauguguguuuua

SEQ ID NO: 1735860 - RNA, 14 nt, Human
uauggaggcaggag

SEQ ID NO: 1735861 - RNA, 17 nt, Human
uauguucuaagaaguga

SEQ ID NO: 1735862 - RNA, 22 nt, Human
uauguucuuaguggauguucug

SEQ ID NO: 1735863 - RNA, 21 nt, Human
uauguugcccaggcaggucuu

SEQ ID NO: 1735864 - RNA, 17 nt, Human
uauguugaagccuuugu

SEQ ID NO: 1735865 - RNA, 18 nt, Human
uauguugguagauucuaa

SEQ ID NO: 1735866 - RNA, 19 nt, Human
uauuaaaugcccagccccu

SEQ ID NO: 1735867 - RNA, 17 nt, Human
uauuaaaugcccagccc

SEQ ID NO: 1735868 - RNA, 15 nt, Human
uauuaaaugcccagc

SEQ ID NO: 1735869 - RNA, 16 nt, Human
uauuaagaaagacuau

SEQ ID NO: 1735870 - RNA, 22 nt, Human
uauugcagcgauuaauaacagg

SEQ ID NO: 1735871 - RNA, 20 nt, Human
uauugauaugcuuauacacu

SEQ ID NO: 1735872 - RNA, 18 nt, Human
uauucauuguggucauag

SEQ ID NO: 1735873 - RNA, 15 nt, Human
uauugcccacgcugg

SEQ ID NO: 1735874 - RNA, 14 nt, Human
uauugcccacgcug

SEQ ID NO: 1735875 - RNA, 13 nt, Human
uauugcccacgcu

SEQ ID NO: 1735876 - RNA, 23 nt, Human
uauugcugauggugcaaugaccu

SEQ ID NO: 1735877 - RNA, 21 nt, Human
uauugcuugcacaaaccaauu

SEQ ID NO: 1735878 - RNA, 15 nt, Human
uauugcuugcacaaa

SEQ ID NO: 1735879 - RNA, 22 nt, Human
uauuuauuaaaugcccagcccc

SEQ ID NO: 1735880 - RNA, 17 nt, Human
uauuuaugggauccugg

SEQ ID NO: 1735881 - RNA, 12 nt, Human
ucacauuuaaau

SEQ ID NO: 1735882 - RNA, 22 nt, Human
ucacauuguauucagaguugau

SEQ ID NO: 1735883 - RNA, 18 nt, Human
ucaccaacgucugugcca

SEQ ID NO: 1735884 - RNA, 17 nt, Human
ucaccaacgucugugcc

SEQ ID NO: 1735885 - RNA, 14 nt, Human
ucacauuuauucug

SEQ ID NO: 1735886 - RNA, 18 nt, Human
ucacccgcuaagagggag

SEQ ID NO: 1735887 - RNA, 13 nt, Human
ucaccaagcccag

SEQ ID NO: 1735888 - RNA, 14 nt, Human
ucaccgaaaacgug

SEQ ID NO: 1735889 - RNA, 12 nt, Human
ucacccuuuucu

SEQ ID NO: 1735890 - RNA, 20 nt, Human
ucacccuggggcuaggaaau

SEQ ID NO: 1735891 - RNA, 19 nt, Human
ucacccgcuaagagggagg

SEQ ID NO: 1735892 - RNA, 21 nt, Human
ucaccgaaaacguggcugcuu

SEQ ID NO: 1735893 - RNA, 20 nt, Human
ucaccgaaaacguggcugcu

SEQ ID NO: 1735894 - RNA, 19 nt, Human
ucaccgaaaacguggcugc

SEQ ID NO: 1735895 - RNA, 15 nt, Human
ucaccgaaaacgugg

SEQ ID NO: 1735896 - RNA, 23 nt, Human
ucaccgaaaacguggcugcuuca

SEQ ID NO: 1735897 - RNA, 22 nt, Human
ucaccgaaaacguggcugcuuc

SEQ ID NO: 1735898 - RNA, 22 nt, Human
ucacaagacccaaaaggcagaa

SEQ ID NO: 1735899 - RNA, 23 nt, Human
ucacacaugagcaucaggccagg

SEQ ID NO: 1735900 - RNA, 22 nt, Human
ucacacaugagcaucaggccag

SEQ ID NO: 1735901 - RNA, 15 nt, Human
ucacacacuuuggcu

SEQ ID NO: 1735902 - RNA, 16 nt, Human
ucacaggacucugccu

SEQ ID NO: 1735903 - RNA, 18 nt, Human
ucacaggacucugccucc

SEQ ID NO: 1735904 - RNA, 17 nt, Human
ucacaggacucugccuc

SEQ ID NO: 1735905 - RNA, 19 nt, Human
ucacaggagggagggggaa

SEQ ID NO: 1735906 - RNA, 23 nt, Human
ucacaggacucugccuccucuuc

SEQ ID NO: 1735907 - RNA, 19 nt, Human
ucacaggacucugccuccu

SEQ ID NO: 1735908 - RNA, 20 nt, Human
ucaaaccccgaccaccugcc

SEQ ID NO: 1735909 - RNA, 19 nt, Human
ucaaaccccgaccaccugc

SEQ ID NO: 1735910 - RNA, 23 nt, Human
ucaaaccccgaccaccugcccaa

SEQ ID NO: 1735911 - RNA, 23 nt, Human
ucaaagagguuuuaaaaaaaucc

SEQ ID NO: 1735912 - RNA, 12 nt, Human
ucaaagagguuu

SEQ ID NO: 1735913 - RNA, 19 nt, Human
ucaaccccuucgcuccugu

SEQ ID NO: 1735914 - RNA, 18 nt, Human
ucaaccccuucgcuccug

SEQ ID NO: 1735915 - RNA, 15 nt, Human
ucaaccuccugggcu

SEQ ID NO: 1735916 - RNA, 20 nt, Human
ucaaccccuucgcuccugug

SEQ ID NO: 1735917 - RNA, 16 nt, Human
ucaaccuccugggcua

SEQ ID NO: 1735918 - RNA, 18 nt, Human
ucaacugaccagccucca

SEQ ID NO: 1735919 - RNA, 24 nt, Human
ucaacugaccagccuccaugcugc

SEQ ID NO: 1735920 - RNA, 20 nt, Human
ucaacucuccuccagaguca

SEQ ID NO: 1735921 - RNA, 22 nt, Human
ucaacucccugccccccagccc

SEQ ID NO: 1735922 - RNA, 21 nt, Human
ucaacucccugccccccagcc

SEQ ID NO: 1735923 - RNA, 15 nt, Human
ucaacucccugcccc

SEQ ID NO: 1735924 - RNA, 14 nt, Human
ucaacucccugccc

SEQ ID NO: 1735925 - RNA, 17 nt, Human
ucaaggauccugagcca

SEQ ID NO: 1735926 - RNA, 16 nt, Human
ucaaggauccugagcc

SEQ ID NO: 1735927 - RNA, 15 nt, Human
ucaaggauccugagc

SEQ ID NO: 1735928 - RNA, 14 nt, Human
ucaaggauccugag

SEQ ID NO: 1735929 - RNA, 13 nt, Human
ucaaggauccuga

SEQ ID NO: 1735930 - RNA, 20 nt, Human
ucaagccaccaacauacucc

SEQ ID NO: 1735931 - RNA, 12 nt, Human
ucaagccaccaa

SEQ ID NO: 1735932 - RNA, 19 nt, Human
ucaagcgauucuucugcuu

SEQ ID NO: 1735933 - RNA, 18 nt, Human
ucaagcgauucuucugcu

SEQ ID NO: 1735934 - RNA, 21 nt, Human
ucaagcgauucuucugcuuca

SEQ ID NO: 1735935 - RNA, 16 nt, Human
uaggucagugcaaaua

SEQ ID NO: 1735936 - RNA, 15 nt, Human
uaggucucaauaccu

SEQ ID NO: 1735937 - RNA, 16 nt, Human
uagguaaauuacaguu

SEQ ID NO: 1735938 - RNA, 20 nt, Human
uagguauaaguggugugugu

SEQ ID NO: 1735939 - RNA, 21 nt, Human
uagggaaaaaccagcguguga

SEQ ID NO: 1735940 - RNA, 20 nt, Human
uagggaaaaaccagcgugug

SEQ ID NO: 1735941 - RNA, 19 nt, Human
uagggaaaaaccagcgugu

SEQ ID NO: 1735942 - RNA, 12 nt, Human
uaggaauugacc

SEQ ID NO: 1735943 - RNA, 18 nt, Human
uaggccaugggacaggga

SEQ ID NO: 1735944 - RNA, 16 nt, Human
uaggccaugggacagg

SEQ ID NO: 1735945 - RNA, 18 nt, Human
uaggccuggccagaugca

SEQ ID NO: 1735946 - RNA, 15 nt, Human
uaggccuggccagau

SEQ ID NO: 1735947 - RNA, 20 nt, Human
uaguugcaacuuuguauaaa

SEQ ID NO: 1735948 - RNA, 13 nt, Human
uaguguucauaaa

SEQ ID NO: 1735949 - RNA, 23 nt, Human
uaggugacagagugagacucugu

SEQ ID NO: 1735950 - RNA, 21 nt, Human
uaggugauccacucgccuuca

SEQ ID NO: 1735951 - RNA, 13 nt, Human
uaguaucaaaaga

SEQ ID NO: 1735952 - RNA, 21 nt, Human
uauaugcucugcauguuacau

SEQ ID NO: 1735953 - RNA, 23 nt, Human
uauauaaauuuuuuuuguuucau

SEQ ID NO: 1735954 - RNA, 18 nt, Human
uauacgauaaauaacuuu

SEQ ID NO: 1735955 - RNA, 15 nt, Human
uauaauucacauugu

SEQ ID NO: 1735956 - RNA, 18 nt, Human
uaugcaaucaaaucugcu

SEQ ID NO: 1735957 - RNA, 13 nt, Human
uaugcacacauuu

SEQ ID NO: 1735958 - RNA, 14 nt, Human
uaugcacacauuuu

SEQ ID NO: 1735959 - RNA, 23 nt, Human
uaugauuuuuaaagaaaaguuuu

SEQ ID NO: 1735960 - RNA, 18 nt, Human
uaugauuuggaaaauaaa

SEQ ID NO: 1735961 - RNA, 12 nt, Human
uaugauuuuuaa

SEQ ID NO: 1735962 - RNA, 17 nt, Human
uaugauuuggaaaauaa

SEQ ID NO: 1735963 - RNA, 15 nt, Human
uaugauuuggaaaau

SEQ ID NO: 1735964 - RNA, 17 nt, Human
uaugauuuaauuugaaa

SEQ ID NO: 1735965 - RNA, 18 nt, Human
uaugauuuaauuugaaau

SEQ ID NO: 1735966 - RNA, 23 nt, Human
uaugacuccagaauuucccaaag

SEQ ID NO: 1735967 - RNA, 17 nt, Human
uaugacuccagaauuuc

SEQ ID NO: 1735968 - RNA, 16 nt, Human
uaugacuccagaauuu

SEQ ID NO: 1735969 - RNA, 22 nt, Human
uaugcuuauacacuuacacuuu

SEQ ID NO: 1735970 - RNA, 13 nt, Human
uaugcaugaagua

SEQ ID NO: 1735971 - RNA, 18 nt, Human
uaugcaugaaguaauaug

SEQ ID NO: 1735972 - RNA, 20 nt, Human
uaugcauauuauuuuauguu

SEQ ID NO: 1735973 - RNA, 18 nt, Human
uaugcagagguccacaac

SEQ ID NO: 1735974 - RNA, 18 nt, Human
uaugcuuguaacuaaaau

SEQ ID NO: 1735975 - RNA, 20 nt, Human
uaugcuuguaacuaaaauaa

SEQ ID NO: 1735976 - RNA, 18 nt, Human
uauggaacacucugagac

SEQ ID NO: 1735977 - RNA, 17 nt, Human
uauggaacacucugaga

SEQ ID NO: 1735978 - RNA, 16 nt, Human
uauggaacacucugag

SEQ ID NO: 1735979 - RNA, 13 nt, Human
uauggaacacucu

SEQ ID NO: 1735980 - RNA, 17 nt, Human
uauggacaaugacccag

SEQ ID NO: 1735981 - RNA, 19 nt, Human
uauggaacacucugagacu

SEQ ID NO: 1735982 - RNA, 14 nt, Human
uaucuugaagacuu

SEQ ID NO: 1735983 - RNA, 18 nt, Human
uaugaauaaagacaccua

SEQ ID NO: 1735984 - RNA, 20 nt, Human
uaugaaguuuuuuuuauaca

SEQ ID NO: 1735985 - RNA, 23 nt, Human
uaucugucauuugagcagggcuc

SEQ ID NO: 1735986 - RNA, 21 nt, Human
uaucugucauuugagcagggc

SEQ ID NO: 1735987 - RNA, 20 nt, Human
uaucugucauuugagcaggg

SEQ ID NO: 1735988 - RNA, 22 nt, Human
uaugacacaugcaaggucauuu

SEQ ID NO: 1735989 - RNA, 12 nt, Human
uaugacacaugc

SEQ ID NO: 1735990 - RNA, 19 nt, Human
uaugaccacacuccagcug

SEQ ID NO: 1735991 - RNA, 14 nt, Human
uaugaccacacucc

SEQ ID NO: 1735992 - RNA, 12 nt, Human
uaugaauaacau

SEQ ID NO: 1735993 - RNA, 13 nt, Human
uaugaauacuuug

SEQ ID NO: 1735994 - RNA, 15 nt, Human
uaugaauacuuugca

SEQ ID NO: 1735995 - RNA, 16 nt, Human
uaucgucacugcuuaa

SEQ ID NO: 1735996 - RNA, 21 nt, Human
uaucuaauauguaacaagcca

SEQ ID NO: 1735997 - RNA, 15 nt, Human
uauccuucagccuga

SEQ ID NO: 1735998 - RNA, 14 nt, Human
uauccuucagccug

SEQ ID NO: 1735999 - RNA, 16 nt, Human
uaucuaaauguugaaa

SEQ ID NO: 1736000 - RNA, 18 nt, Human
uaucguaaaauuaagaaa

SEQ ID NO: 1736001 - RNA, 15 nt, Human
uaucguaaaauuaag

SEQ ID NO: 1736002 - RNA, 19 nt, Human
uauauguuuuaagaggcag

SEQ ID NO: 1736003 - RNA, 11 nt, Human
gugcugcccug

SEQ ID NO: 1736004 - RNA, 22 nt, Human
gugcugccauccagguucagcu

SEQ ID NO: 1736005 - RNA, 21 nt, Human
gugcugccacacuucaggcuc

SEQ ID NO: 1736006 - RNA, 15 nt, Human
gugcuuggaggaagg

SEQ ID NO: 1736007 - RNA, 13 nt, Human
gugcuuggaggaa

SEQ ID NO: 1736008 - RNA, 12 nt, Human
gugcuuggagga

SEQ ID NO: 1736009 - RNA, 18 nt, Human
gugcuuauguaugaggua

SEQ ID NO: 1736010 - RNA, 18 nt, Human
guggaaaaauagccugcc

SEQ ID NO: 1736011 - RNA, 21 nt, Human
gugccuuggggacaagagcag

SEQ ID NO: 1736012 - RNA, 22 nt, Human
gugccgagaaggaagccuccca

SEQ ID NO: 1736013 - RNA, 16 nt, Human
gugcucuggacaggca

SEQ ID NO: 1736014 - RNA, 15 nt, Human
gugcucuggacaggc

SEQ ID NO: 1736015 - RNA, 20 nt, Human
gugcugaaugguuuucaaaa

SEQ ID NO: 1736016 - RNA, 19 nt, Human
gugcugaaugguuuucaaa

SEQ ID NO: 1736017 - RNA, 23 nt, Human
gugcugaaugguuuucaaaauaa

SEQ ID NO: 1736018 - RNA, 18 nt, Human
gugcucuggacaggcaug

SEQ ID NO: 1736019 - RNA, 17 nt, Human
gugcucuggacaggcau

SEQ ID NO: 1736020 - RNA, 19 nt, Human
gugcugagucugaaggcug

SEQ ID NO: 1736021 - RNA, 18 nt, Human
gugcugagucugaaggcu

SEQ ID NO: 1736022 - RNA, 17 nt, Human
gugcugagucugaaggc

SEQ ID NO: 1736023 - RNA, 16 nt, Human
gugcugagucugaagg

SEQ ID NO: 1736024 - RNA, 12 nt, Human
gugcugagucug

SEQ ID NO: 1736025 - RNA, 19 nt, Human
gugcugccauccagguuca

SEQ ID NO: 1736026 - RNA, 18 nt, Human
gugcugccauccagguuc

SEQ ID NO: 1736027 - RNA, 15 nt, Human
gugcugccauccagg

SEQ ID NO: 1736028 - RNA, 12 nt, Human
gugcugccacac

SEQ ID NO: 1736029 - RNA, 12 nt, Human
gugcugcauuua

SEQ ID NO: 1736030 - RNA, 19 nt, Human
gugcugcauuuaaaagaua

SEQ ID NO: 1736031 - RNA, 20 nt, Human
gugcugcauuuaaaagauac

SEQ ID NO: 1736032 - RNA, 17 nt, Human
guggaguucaucuugaa

SEQ ID NO: 1736033 - RNA, 18 nt, Human
guggaugccugguggcag

SEQ ID NO: 1736034 - RNA, 16 nt, Human
guggaugccugguggc

SEQ ID NO: 1736035 - RNA, 20 nt, Human
guggagaagcggcuggcagc

SEQ ID NO: 1736036 - RNA, 13 nt, Human
guggacuuuuauu

SEQ ID NO: 1736037 - RNA, 22 nt, Human
guggaacguuuuuccuguucuu

SEQ ID NO: 1736038 - RNA, 18 nt, Human
guggagaggcccggccuc

SEQ ID NO: 1736039 - RNA, 19 nt, Human
guggcagcugcuuuugucu

SEQ ID NO: 1736040 - RNA, 13 nt, Human
guggcagcugcuu

SEQ ID NO: 1736041 - RNA, 12 nt, Human
guggcagcugcu

SEQ ID NO: 1736042 - RNA, 23 nt, Human
guggcagcugcgguccacccagg

SEQ ID NO: 1736043 - RNA, 22 nt, Human
guggcagcugcgguccacccag

SEQ ID NO: 1736044 - RNA, 21 nt, Human
guggcagcugcgguccaccca

SEQ ID NO: 1736045 - RNA, 20 nt, Human
guggaugccugguggcagcu

SEQ ID NO: 1736046 - RNA, 17 nt, Human
guggcagugggagcugc

SEQ ID NO: 1736047 - RNA, 16 nt, Human
guggcagugggagcug

SEQ ID NO: 1736048 - RNA, 15 nt, Human
guggcagugggagcu

SEQ ID NO: 1736049 - RNA, 11 nt, Human
guggcagucug

SEQ ID NO: 1736050 - RNA, 21 nt, Human
guggcagugggagcugccugu

SEQ ID NO: 1736051 - RNA, 19 nt, Human
guggcagugggagcugccu

SEQ ID NO: 1736052 - RNA, 14 nt, Human
guggccaaguucuu

SEQ ID NO: 1736053 - RNA, 21 nt, Human
guggccacuccagaccccugg

SEQ ID NO: 1736054 - RNA, 14 nt, Human
gugagcuacaaaug

SEQ ID NO: 1736055 - RNA, 14 nt, Human
gugagccacugcac

SEQ ID NO: 1736056 - RNA, 22 nt, Human
gugagccaccgugccuggccac

SEQ ID NO: 1736057 - RNA, 16 nt, Human
gugagcuccuaagcca

SEQ ID NO: 1736058 - RNA, 19 nt, Human
gugaggaagccgcuggggc

SEQ ID NO: 1736059 - RNA, 16 nt, Human
gugaggaagccgcugg

SEQ ID NO: 1736060 - RNA, 11 nt, Human
gugaggaagcc

SEQ ID NO: 1736061 - RNA, 17 nt, Human
gugagcaggcugugagu

SEQ ID NO: 1736062 - RNA, 17 nt, Human
gugacugaucucucgug

SEQ ID NO: 1736063 - RNA, 13 nt, Human
gugagccacugca

SEQ ID NO: 1736064 - RNA, 21 nt, Human
gugagccaccgugccuggcca

SEQ ID NO: 1736065 - RNA, 17 nt, Human
gugagccaccgugccug

SEQ ID NO: 1736066 - RNA, 15 nt, Human
gugagccaccacgcc

SEQ ID NO: 1736067 - RNA, 15 nt, Human
gugagccaccgugcc

SEQ ID NO: 1736068 - RNA, 16 nt, Human
gugagccaccacgccc

SEQ ID NO: 1736069 - RNA, 16 nt, Human
gugacaacacuugugu

SEQ ID NO: 1736070 - RNA, 16 nt, Human
gugaccucagcuuuga

SEQ ID NO: 1736071 - RNA, 16 nt, Human
gugacugaauuucuuu

SEQ ID NO: 1736072 - RNA, 18 nt, Human
gugacugaauuucuuuug

SEQ ID NO: 1736073 - RNA, 15 nt, Human
gugacugaauuucuu

SEQ ID NO: 1736074 - RNA, 19 nt, Human
gugaaagaaaauaacaaua

SEQ ID NO: 1736075 - RNA, 12 nt, Human
gugaaacuggau

SEQ ID NO: 1736076 - RNA, 16 nt, Human
gugaaaaugugugugu

SEQ ID NO: 1736077 - RNA, 23 nt, Human
gugaaaagaaaaaugagccuggc

SEQ ID NO: 1736078 - RNA, 14 nt, Human
gugaaaagaaaaau

SEQ ID NO: 1736079 - RNA, 12 nt, Human
gugaaaagaaua

SEQ ID NO: 1736080 - RNA, 14 nt, Human
gugaaucagagcac

SEQ ID NO: 1736081 - RNA, 18 nt, Human
gugaaucacguaaagcua

SEQ ID NO: 1736082 - RNA, 16 nt, Human
gugaaucacguaaagc

SEQ ID NO: 1736083 - RNA, 19 nt, Human
gugaaaggaaagagggagg

SEQ ID NO: 1736084 - RNA, 13 nt, Human
gugaaaucauuca

SEQ ID NO: 1736085 - RNA, 20 nt, Human
gugaaauuauucauaauuau

SEQ ID NO: 1736086 - RNA, 18 nt, Human
gugaaauuauucauaauu

SEQ ID NO: 1736087 - RNA, 22 nt, Human
gugcaaaguucccuacuuccug

SEQ ID NO: 1736088 - RNA, 19 nt, Human
gugcauaaguuaacuucca

SEQ ID NO: 1736089 - RNA, 22 nt, Human
gugccagguuuuuggucugacc

SEQ ID NO: 1736090 - RNA, 20 nt, Human
gugccagguuuuuggucuga

SEQ ID NO: 1736091 - RNA, 18 nt, Human
gugcaucucagcccacau

SEQ ID NO: 1736092 - RNA, 18 nt, Human
gugcaugcagcaucuaag

SEQ ID NO: 1736093 - RNA, 13 nt, Human
gugcauaccacuu

SEQ ID NO: 1736094 - RNA, 14 nt, Human
gugcauaccacuuu

SEQ ID NO: 1736095 - RNA, 21 nt, Human
gugcauaccacuuuuguucuu

SEQ ID NO: 1736096 - RNA, 15 nt, Human
gugcaucucagccca

SEQ ID NO: 1736097 - RNA, 20 nt, Human
gugcccacaggaucagucug

SEQ ID NO: 1736098 - RNA, 23 nt, Human
gugcccaagaauagaugcugacu

SEQ ID NO: 1736099 - RNA, 20 nt, Human
gugauccacccaccucagcc

SEQ ID NO: 1736100 - RNA, 18 nt, Human
gugauccacccaccucag

SEQ ID NO: 1736101 - RNA, 15 nt, Human
gugauccacccaccu

SEQ ID NO: 1736102 - RNA, 13 nt, Human
gugaggccagaga

SEQ ID NO: 1736103 - RNA, 11 nt, Human
gugaggccaga

SEQ ID NO: 1736104 - RNA, 23 nt, Human
gugaggauuaaauaauguaaaua

SEQ ID NO: 1736105 - RNA, 18 nt, Human
gugauccucccaccucag

SEQ ID NO: 1736106 - RNA, 15 nt, Human
gugauccucccaccu

SEQ ID NO: 1736107 - RNA, 14 nt, Human
gugauccucccacc

SEQ ID NO: 1736108 - RNA, 22 nt, Human
gugauccacccaccucagccuc

SEQ ID NO: 1736109 - RNA, 14 nt, Human
gugauccacucgcc

SEQ ID NO: 1736110 - RNA, 22 nt, Human
gugauccucccaccucagccuc

SEQ ID NO: 1736111 - RNA, 20 nt, Human
gugauccucccaccucagcc

SEQ ID NO: 1736112 - RNA, 23 nt, Human
gugauccucccaccucagccucc

SEQ ID NO: 1736113 - RNA, 20 nt, Human
gugauucacagugugaaucu

SEQ ID NO: 1736114 - RNA, 23 nt, Human
gugauucuccugccucagccucc

SEQ ID NO: 1736115 - RNA, 13 nt, Human
gugauucuccugc

SEQ ID NO: 1736116 - RNA, 16 nt, Human
gugauuuugcuguaga

SEQ ID NO: 1736117 - RNA, 22 nt, Human
gugauucuccugccucagccuc

SEQ ID NO: 1736118 - RNA, 20 nt, Human
gugauucuccugccucagcc

SEQ ID NO: 1736119 - RNA, 19 nt, Human
gugauucuccugccucagc

SEQ ID NO: 1736120 - RNA, 18 nt, Human
gugauucuccugccucag

SEQ ID NO: 1736121 - RNA, 17 nt, Human
gugauucuccugccuca

SEQ ID NO: 1736122 - RNA, 16 nt, Human
gugauucuccugccuc

SEQ ID NO: 1736123 - RNA, 14 nt, Human
gugauucuccugcc

SEQ ID NO: 1736124 - RNA, 20 nt, Human
gugauucucaugccucagcc

SEQ ID NO: 1736125 - RNA, 15 nt, Human
gucuacacugugcug

SEQ ID NO: 1736126 - RNA, 17 nt, Human
guccuuaccagcagagc

SEQ ID NO: 1736127 - RNA, 16 nt, Human
guccuuaccagcagag

SEQ ID NO: 1736128 - RNA, 15 nt, Human
guccuuaccagcaga

SEQ ID NO: 1736129 - RNA, 23 nt, Human
gucguuaaaaacagauuuggaaa

SEQ ID NO: 1736130 - RNA, 23 nt, Human
gucucacuguugcccaggcuggc

SEQ ID NO: 1736131 - RNA, 22 nt, Human
gucucacuguugcccaggcugg

SEQ ID NO: 1736132 - RNA, 21 nt, Human
gucucacuguugcccaggcug

SEQ ID NO: 1736133 - RNA, 20 nt, Human
gucucacuguugcccaggcu

SEQ ID NO: 1736134 - RNA, 19 nt, Human
gucucacuguugcccaggc

SEQ ID NO: 1736135 - RNA, 18 nt, Human
gucucacuguugcccagg

SEQ ID NO: 1736136 - RNA, 17 nt, Human
gucucacuguugcccag

SEQ ID NO: 1736137 - RNA, 16 nt, Human
gucucacuguugccca

SEQ ID NO: 1736138 - RNA, 23 nt, Human
gucucacuauguugcccaggcag

SEQ ID NO: 1736139 - RNA, 13 nt, Human
gucucacuguugc

SEQ ID NO: 1736140 - RNA, 21 nt, Human
gucucacuauguugcccaggc

SEQ ID NO: 1736141 - RNA, 20 nt, Human
gucucacuauguugcccagg

SEQ ID NO: 1736142 - RNA, 21 nt, Human
gucugaggaauccagacccgg

SEQ ID NO: 1736143 - RNA, 19 nt, Human
gucugauucccaagcucug

SEQ ID NO: 1736144 - RNA, 18 nt, Human
gucugauucccaagcucu

SEQ ID NO: 1736145 - RNA, 17 nt, Human
gucugauucccaagcuc

SEQ ID NO: 1736146 - RNA, 21 nt, Human
gucugauucccaagcucugcu

SEQ ID NO: 1736147 - RNA, 20 nt, Human
gucugauucccaagcucugc

SEQ ID NO: 1736148 - RNA, 19 nt, Human
gucugaggaauccagaccc

SEQ ID NO: 1736149 - RNA, 18 nt, Human
gucugaggaauccagacc

SEQ ID NO: 1736150 - RNA, 15 nt, Human
gucugacccacugcu

SEQ ID NO: 1736151 - RNA, 17 nt, Human
gucucuucuccacugga

SEQ ID NO: 1736152 - RNA, 14 nt, Human
gucugacccacugc

SEQ ID NO: 1736153 - RNA, 13 nt, Human
gucugacccacug

SEQ ID NO: 1736154 - RNA, 14 nt, Human
gucucuucuccacu

SEQ ID NO: 1736155 - RNA, 16 nt, Human
gucucuucuccacugg

SEQ ID NO: 1736156 - RNA, 15 nt, Human
gucucuucuccacug

SEQ ID NO: 1736157 - RNA, 13 nt, Human
gucucgugguagg

SEQ ID NO: 1736158 - RNA, 12 nt, Human
gucccagugccg

SEQ ID NO: 1736159 - RNA, 17 nt, Human
gucccugguggcagcuc

SEQ ID NO: 1736160 - RNA, 16 nt, Human
gucccugguggcagcu

SEQ ID NO: 1736161 - RNA, 23 nt, Human
guccuacucugugucaggugggg

SEQ ID NO: 1736162 - RNA, 15 nt, Human
guccuacucuguguc

SEQ ID NO: 1736163 - RNA, 23 nt, Human
guccuagaaauuccccacccuga

SEQ ID NO: 1736164 - RNA, 20 nt, Human
guccuggggaaccugacccc

SEQ ID NO: 1736165 - RNA, 19 nt, Human
guccuggggaaccugaccc

SEQ ID NO: 1736166 - RNA, 18 nt, Human
guccugggagugagcugg

SEQ ID NO: 1736167 - RNA, 17 nt, Human
guccugggagugagcug

SEQ ID NO: 1736168 - RNA, 19 nt, Human
guccugggagugagcuggu

SEQ ID NO: 1736169 - RNA, 17 nt, Human
guccuggcaugggaaug

SEQ ID NO: 1736170 - RNA, 16 nt, Human
guccugggagugagcu

SEQ ID NO: 1736171 - RNA, 15 nt, Human
guccugggagugagc

SEQ ID NO: 1736172 - RNA, 23 nt, Human
guccucccaucucacacaugagc

SEQ ID NO: 1736173 - RNA, 14 nt, Human
guccucccaucuca

SEQ ID NO: 1736174 - RNA, 13 nt, Human
guccucccaucuc

SEQ ID NO: 1736175 - RNA, 12 nt, Human
guccucccaucu

SEQ ID NO: 1736176 - RNA, 21 nt, Human
gucaagaauagcauuguaaaa

SEQ ID NO: 1736177 - RNA, 18 nt, Human
gucaagugaaaaaggagg

SEQ ID NO: 1736178 - RNA, 16 nt, Human
gucaagugaaaaagga

SEQ ID NO: 1736179 - RNA, 19 nt, Human
gucaagugaaaaaggagga

SEQ ID NO: 1736180 - RNA, 19 nt, Human
gucaagagggucugaggaa

SEQ ID NO: 1736181 - RNA, 18 nt, Human
gucaagagggucugagga

SEQ ID NO: 1736182 - RNA, 20 nt, Human
gucaccugaagacucauucu

SEQ ID NO: 1736183 - RNA, 15 nt, Human
gucaccccggccacc

SEQ ID NO: 1736184 - RNA, 13 nt, Human
gucaccccggcca

SEQ ID NO: 1736185 - RNA, 15 nt, Human
gucaauuacaggaag

SEQ ID NO: 1736186 - RNA, 13 nt, Human
gucaauuacagga

SEQ ID NO: 1736187 - RNA, 16 nt, Human
gucaauuacaggaagu

SEQ ID NO: 1736188 - RNA, 19 nt, Human
guauuuauuuaguauuuau

SEQ ID NO: 1736189 - RNA, 14 nt, Human
guauuauaccuuuu

SEQ ID NO: 1736190 - RNA, 15 nt, Human
guauuauguguguuu

SEQ ID NO: 1736191 - RNA, 15 nt, Human
guauuacuucugcua

SEQ ID NO: 1736192 - RNA, 14 nt, Human
guauuacuucugcu

SEQ ID NO: 1736193 - RNA, 13 nt, Human
guauuacuucugc

SEQ ID NO: 1736194 - RNA, 13 nt, Human
guagagugggagc

SEQ ID NO: 1736195 - RNA, 15 nt, Human
guagagugggagcug

SEQ ID NO: 1736196 - RNA, 17 nt, Human
gucccagauacuugggg

SEQ ID NO: 1736197 - RNA, 15 nt, Human
gucccacucagucca

SEQ ID NO: 1736198 - RNA, 14 nt, Human
gucccacucagucc

SEQ ID NO: 1736199 - RNA, 16 nt, Human
guccacccaggagccc

SEQ ID NO: 1736200 - RNA, 15 nt, Human
guccacccaggagcc

SEQ ID NO: 1736201 - RNA, 14 nt, Human
guccacccaggagc

SEQ ID NO: 1736202 - RNA, 21 nt, Human
gucauauaagauucauauuua

SEQ ID NO: 1736203 - RNA, 16 nt, Human
gucaucucagcuggau

SEQ ID NO: 1736204 - RNA, 22 nt, Human
gucauaacuagaacugaauuuu

SEQ ID NO: 1736205 - RNA, 17 nt, Human
gucauaacuagaacuga

SEQ ID NO: 1736206 - RNA, 17 nt, Human
ggggaucacagccucug

SEQ ID NO: 1736207 - RNA, 21 nt, Human
gggcuuggggaccagagcugc

SEQ ID NO: 1736208 - RNA, 22 nt, Human
gggcuuggggaccagagcugcc

SEQ ID NO: 1736209 - RNA, 13 nt, Human
ggggaguggccac

SEQ ID NO: 1736210 - RNA, 18 nt, Human
gggcuucaguggcagcug

SEQ ID NO: 1736211 - RNA, 17 nt, Human
gggcuucaguggcagcu

SEQ ID NO: 1736212 - RNA, 16 nt, Human
gggcuucaguggcagc

SEQ ID NO: 1736213 - RNA, 15 nt, Human
gggcuucaguggcag

SEQ ID NO: 1736214 - RNA, 20 nt, Human
gggcuucaguggcagcugcu

SEQ ID NO: 1736215 - RNA, 19 nt, Human
gggcuucaguggcagcugc

SEQ ID NO: 1736216 - RNA, 19 nt, Human
gggcuucauccuccucaga

SEQ ID NO: 1736217 - RNA, 20 nt, Human
gggcuuggggaccagagcug

SEQ ID NO: 1736218 - RNA, 20 nt, Human
gggcuucauccuccucagau

SEQ ID NO: 1736219 - RNA, 23 nt, Human
gggguucccuuuuuuggcugcug

SEQ ID NO: 1736220 - RNA, 22 nt, Human
gggguucuuucuuccucugcug

SEQ ID NO: 1736221 - RNA, 20 nt, Human
gggguucuuucuuccucugc

SEQ ID NO: 1736222 - RNA, 23 nt, Human
ggguagagcggagaaaggaaggg

SEQ ID NO: 1736223 - RNA, 23 nt, Human
ggguacuuguggacacagcucuu

SEQ ID NO: 1736224 - RNA, 22 nt, Human
ggguacuuguggacacagcucu

SEQ ID NO: 1736225 - RNA, 19 nt, Human
ggguacuuguggacacagc

SEQ ID NO: 1736226 - RNA, 15 nt, Human
ggguacccacugcuc

SEQ ID NO: 1736227 - RNA, 13 nt, Human
ggguacccacugc

SEQ ID NO: 1736228 - RNA, 18 nt, Human
ggguacccacugcucugg

SEQ ID NO: 1736229 - RNA, 17 nt, Human
ggggcugggcagaggaa

SEQ ID NO: 1736230 - RNA, 16 nt, Human
ggggcugggcagagga

SEQ ID NO: 1736231 - RNA, 13 nt, Human
ggggcugggacau

SEQ ID NO: 1736232 - RNA, 14 nt, Human
ggggcugccagggg

SEQ ID NO: 1736233 - RNA, 21 nt, Human
ggcucccacaggcccuuccuc

SEQ ID NO: 1736234 - RNA, 20 nt, Human
ggcucccacaggcccuuccu

SEQ ID NO: 1736235 - RNA, 12 nt, Human
gggccuggcuca

SEQ ID NO: 1736236 - RNA, 12 nt, Human
gggccuggccug

SEQ ID NO: 1736237 - RNA, 22 nt, Human
gggccuggcagccgugccuuca

SEQ ID NO: 1736238 - RNA, 10 nt, Human
gggccuggca

SEQ ID NO: 1736239 - RNA, 16 nt, Human
gggccuggcucaggug

SEQ ID NO: 1736240 - RNA, 14 nt, Human
gggccuggcucagg

SEQ ID NO: 1736241 - RNA, 18 nt, Human
gggccuggucguuuucaa

SEQ ID NO: 1736242 - RNA, 23 nt, Human
gggcucccuucccaccucucuca

SEQ ID NO: 1736243 - RNA, 18 nt, Human
gggcucccuucccaccuc

SEQ ID NO: 1736244 - RNA, 17 nt, Human
gggcucccuucccaccu

SEQ ID NO: 1736245 - RNA, 14 nt, Human
gggcucccuuccca

SEQ ID NO: 1736246 - RNA, 13 nt, Human
gggcucccuuccc

SEQ ID NO: 1736247 - RNA, 16 nt, Human
gggcgcgguggcucac

SEQ ID NO: 1736248 - RNA, 14 nt, Human
gggcugcaccggcu

SEQ ID NO: 1736249 - RNA, 16 nt, Human
gggcugaggugggagg

SEQ ID NO: 1736250 - RNA, 17 nt, Human
gggcugcaccggcuggc

SEQ ID NO: 1736251 - RNA, 14 nt, Human
gggcuucaguggca

SEQ ID NO: 1736252 - RNA, 20 nt, Human
gggcucugccucccaucacc

SEQ ID NO: 1736253 - RNA, 17 nt, Human
gggcucugccucccauc

SEQ ID NO: 1736254 - RNA, 16 nt, Human
gggcucugccucccau

SEQ ID NO: 1736255 - RNA, 15 nt, Human
gggcucugccuccca

SEQ ID NO: 1736256 - RNA, 13 nt, Human
gggcucugccucc

SEQ ID NO: 1736257 - RNA, 21 nt, Human
gguacuuguggacacagcucu

SEQ ID NO: 1736258 - RNA, 22 nt, Human
gguacuuguggacacagcucuu

SEQ ID NO: 1736259 - RNA, 15 nt, Human
ggguugggcuggugu

SEQ ID NO: 1736260 - RNA, 17 nt, Human
gguacccacugcucugg

SEQ ID NO: 1736261 - RNA, 20 nt, Human
ggguuucaccauguuggcca

SEQ ID NO: 1736262 - RNA, 22 nt, Human
ggguucuacccaggugcuagga

SEQ ID NO: 1736263 - RNA, 23 nt, Human
ggguucccuuuuuuggcugcuga

SEQ ID NO: 1736264 - RNA, 19 nt, Human
ggguuggccccugcccggc

SEQ ID NO: 1736265 - RNA, 14 nt, Human
ggguucuuucuucc

SEQ ID NO: 1736266 - RNA, 16 nt, Human
ggguuggccccugccc

SEQ ID NO: 1736267 - RNA, 19 nt, Human
gggugcugggccccugccu

SEQ ID NO: 1736268 - RNA, 22 nt, Human
ggguuccagcaauucuccugcc

SEQ ID NO: 1736269 - RNA, 16 nt, Human
ggucagagccugcagu

SEQ ID NO: 1736270 - RNA, 15 nt, Human
ggucagagccugcag

SEQ ID NO: 1736271 - RNA, 14 nt, Human
ggucagagccugca

SEQ ID NO: 1736272 - RNA, 13 nt, Human
ggucagagccugc

SEQ ID NO: 1736273 - RNA, 12 nt, Human
ggucagagccug

SEQ ID NO: 1736274 - RNA, 22 nt, Human
ggucacucuggcagcucagaga

SEQ ID NO: 1736275 - RNA, 20 nt, Human
ggucacucuggcagcucaga

SEQ ID NO: 1736276 - RNA, 16 nt, Human
ggucacucuggcagcu

SEQ ID NO: 1736277 - RNA, 23 nt, Human
ggucccccuuccauggacuuugu

SEQ ID NO: 1736278 - RNA, 18 nt, Human
ggucccccuuccauggac

SEQ ID NO: 1736279 - RNA, 13 nt, Human
ggucccccuucca

SEQ ID NO: 1736280 - RNA, 14 nt, Human
ggucccacucaguc

SEQ ID NO: 1736281 - RNA, 12 nt, Human
ggucccacucag

SEQ ID NO: 1736282 - RNA, 22 nt, Human
ggucccacucaguccauagcag

SEQ ID NO: 1736283 - RNA, 22 nt, Human
ggucccaccccacacacgccag

SEQ ID NO: 1736284 - RNA, 22 nt, Human
ggugcuaucucccccagcccca

SEQ ID NO: 1736285 - RNA, 23 nt, Human
ggugcuaucucccccagccccau

SEQ ID NO: 1736286 - RNA, 13 nt, Human
gguggcagcugcg

SEQ ID NO: 1736287 - RNA, 12 nt, Human
gguggcagcugc

SEQ ID NO: 1736288 - RNA, 11 nt, Human
gguggcagcug

SEQ ID NO: 1736289 - RNA, 13 nt, Human
gguggcagcucac

SEQ ID NO: 1736290 - RNA, 23 nt, Human
gguggcagcugcgguccacccag

SEQ ID NO: 1736291 - RNA, 15 nt, Human
gguggcagcugcggu

SEQ ID NO: 1736292 - RNA, 16 nt, Human
gguggcagugggagcu

SEQ ID NO: 1736293 - RNA, 22 nt, Human
ggugauagguauaaguggugug

SEQ ID NO: 1736294 - RNA, 21 nt, Human
ggugaccucugccugaaguca

SEQ ID NO: 1736295 - RNA, 16 nt, Human
ggugaccucugccuga

SEQ ID NO: 1736296 - RNA, 14 nt, Human
ggugaccucugccu

SEQ ID NO: 1736297 - RNA, 21 nt, Human
ggugacagagugagacucugu

SEQ ID NO: 1736298 - RNA, 18 nt, Human
ggugaagugaagacaaug

SEQ ID NO: 1736299 - RNA, 16 nt, Human
ggugaacuugguuccc

SEQ ID NO: 1736300 - RNA, 19 nt, Human
ggucugaggaauccagacc

SEQ ID NO: 1736301 - RNA, 14 nt, Human
ggugaacauugcaa

SEQ ID NO: 1736302 - RNA, 16 nt, Human
ggucugacccacugcu

SEQ ID NO: 1736303 - RNA, 15 nt, Human
ggucugacccacugc

SEQ ID NO: 1736304 - RNA, 20 nt, Human
ggucucgaacuccugaccuu

SEQ ID NO: 1736305 - RNA, 19 nt, Human
ggucucgaacuccugaccu

SEQ ID NO: 1736306 - RNA, 16 nt, Human
ggucucacucugucgc

SEQ ID NO: 1736307 - RNA, 12 nt, Human
ggucucacucug

SEQ ID NO: 1736308 - RNA, 22 nt, Human
ggucucacuauguugcccaggc

SEQ ID NO: 1736309 - RNA, 23 nt, Human
gguccuagaaauuccccacccug

SEQ ID NO: 1736310 - RNA, 22 nt, Human
ggucccugguggcagcucaccu

SEQ ID NO: 1736311 - RNA, 14 nt, Human
ggucccugguggca

SEQ ID NO: 1736312 - RNA, 18 nt, Human
ggucccuaauaaagcugu

SEQ ID NO: 1736313 - RNA, 17 nt, Human
ggucccuaauaaagcug

SEQ ID NO: 1736314 - RNA, 16 nt, Human
ggucccuaauaaagcu

SEQ ID NO: 1736315 - RNA, 13 nt, Human
ggucccuaauaaa

SEQ ID NO: 1736316 - RNA, 12 nt, Human
ggucccuaauaa

SEQ ID NO: 1736317 - RNA, 23 nt, Human
gguuuugccauguuggccaggcu

SEQ ID NO: 1736318 - RNA, 12 nt, Human
gguuuucuguuc

SEQ ID NO: 1736319 - RNA, 13 nt, Human
gguuuucuguucu

SEQ ID NO: 1736320 - RNA, 15 nt, Human
gguuuucuguucuuu

SEQ ID NO: 1736321 - RNA, 15 nt, Human
guaaaagacuuuuuu

SEQ ID NO: 1736322 - RNA, 20 nt, Human
guaaaaacaaagaaauuaug

SEQ ID NO: 1736323 - RNA, 18 nt, Human
guaaaaacaaagaaauua

SEQ ID NO: 1736324 - RNA, 14 nt, Human
guaaaaauaaaauu

SEQ ID NO: 1736325 - RNA, 13 nt, Human
guaaaaauaaaau

SEQ ID NO: 1736326 - RNA, 21 nt, Human
gguucaagcgauucuucugcu

SEQ ID NO: 1736327 - RNA, 17 nt, Human
gguggccucccaacuca

SEQ ID NO: 1736328 - RNA, 13 nt, Human
gguggccucccaa

SEQ ID NO: 1736329 - RNA, 20 nt, Human
gguggcccgacagccuggca

SEQ ID NO: 1736330 - RNA, 19 nt, Human
gguggcccgacagccuggc

SEQ ID NO: 1736331 - RNA, 18 nt, Human
gguggcccgacagccugg

SEQ ID NO: 1736332 - RNA, 17 nt, Human
gguggcccgacagccug

SEQ ID NO: 1736333 - RNA, 16 nt, Human
gguggcccgacagccu

SEQ ID NO: 1736334 - RNA, 14 nt, Human
gguugaagcaccaa

SEQ ID NO: 1736335 - RNA, 18 nt, Human
gguucuuucuuccucugc

SEQ ID NO: 1736336 - RNA, 17 nt, Human
gguucuuucuuccucug

SEQ ID NO: 1736337 - RNA, 12 nt, Human
gguucagcuugu

SEQ ID NO: 1736338 - RNA, 23 nt, Human
gguucaagcgauucuucugcuuc

SEQ ID NO: 1736339 - RNA, 22 nt, Human
gguucaagcgauucuucugcuu

SEQ ID NO: 1736340 - RNA, 20 nt, Human
gguucacugcaaccuccgcc

SEQ ID NO: 1736341 - RNA, 13 nt, Human
gguuuaagcuguu

SEQ ID NO: 1736342 - RNA, 13 nt, Human
gguuggugggggc

SEQ ID NO: 1736343 - RNA, 18 nt, Human
gguuggcaaaaaggcagg

SEQ ID NO: 1736344 - RNA, 14 nt, Human
gguugggcuggugu

SEQ ID NO: 1736345 - RNA, 16 nt, Human
guaaaugguaugucau

SEQ ID NO: 1736346 - RNA, 15 nt, Human
guaaauuaacuuuua

SEQ ID NO: 1736347 - RNA, 16 nt, Human
guaaauuaacuuuuau

SEQ ID NO: 1736348 - RNA, 17 nt, Human
guaaauuaacuuuuaua

SEQ ID NO: 1736349 - RNA, 21 nt, Human
guaaauuaacuuuuauaaacu

SEQ ID NO: 1736350 - RNA, 22 nt, Human
guaaauuaacuuuuauaaacuu

SEQ ID NO: 1736351 - RNA, 18 nt, Human
guaaaugggggugcauuu

SEQ ID NO: 1736352 - RNA, 19 nt, Human
guaaaugggggugcauuug

SEQ ID NO: 1736353 - RNA, 20 nt, Human
guaaaugggggugcauuuga

SEQ ID NO: 1736354 - RNA, 16 nt, Human
guaaaagcauuuugua

SEQ ID NO: 1736355 - RNA, 22 nt, Human
guaaguauucuuauuuaaugaa

SEQ ID NO: 1736356 - RNA, 13 nt, Human
guaaggaaugauu

SEQ ID NO: 1736357 - RNA, 23 nt, Human
guaaggaauaccugucccccuga

SEQ ID NO: 1736358 - RNA, 21 nt, Human
guaaggaauaccugucccccu

SEQ ID NO: 1736359 - RNA, 20 nt, Human
guaaggaauaccuguccccc

SEQ ID NO: 1736360 - RNA, 18 nt, Human
guaaggaauaccuguccc

SEQ ID NO: 1736361 - RNA, 23 nt, Human
guaaauuaacuuuuauaaacuuu

SEQ ID NO: 1736362 - RNA, 19 nt, Human
guaagaucguucucugccu

SEQ ID NO: 1736363 - RNA, 13 nt, Human
guaagaaauacag

SEQ ID NO: 1736364 - RNA, 16 nt, Human
guaagaaauacagacu

SEQ ID NO: 1736365 - RNA, 15 nt, Human
guacccacugcucug

SEQ ID NO: 1736366 - RNA, 20 nt, Human
guacauaaugcgugcauacc

SEQ ID NO: 1736367 - RNA, 12 nt, Human
guacaguuuuua

SEQ ID NO: 1736368 - RNA, 13 nt, Human
guacaguuuuuau

SEQ ID NO: 1736369 - RNA, 16 nt, Human
guacagucuuguauua

SEQ ID NO: 1736370 - RNA, 13 nt, Human
guacagucuugua

SEQ ID NO: 1736371 - RNA, 14 nt, Human
guacagucuuguau

SEQ ID NO: 1736372 - RNA, 20 nt, Human
guacagcaaggagauuuaca

SEQ ID NO: 1736373 - RNA, 22 nt, Human
guacagagcccacgcccccacu

SEQ ID NO: 1736374 - RNA, 18 nt, Human
guacagagcccacgcccc

SEQ ID NO: 1736375 - RNA, 12 nt, Human
guacagagccca

SEQ ID NO: 1736376 - RNA, 19 nt, Human
guacacuguuucaaacuuu

SEQ ID NO: 1736377 - RNA, 20 nt, Human
guacacuguuucaaacuuua

SEQ ID NO: 1736378 - RNA, 21 nt, Human
guacacuguuucaaacuuuac

SEQ ID NO: 1736379 - RNA, 16 nt, Human
guacagacaacaaacc

SEQ ID NO: 1736380 - RNA, 15 nt, Human
guacagacagaaaaa

SEQ ID NO: 1736381 - RNA, 18 nt, Human
guaaugaugucguuugaa

SEQ ID NO: 1736382 - RNA, 19 nt, Human
guaauguaucaaauacauu

SEQ ID NO: 1736383 - RNA, 13 nt, Human
guaaugaaaacca

SEQ ID NO: 1736384 - RNA, 11 nt, Human
guaaugaaaac

SEQ ID NO: 1736385 - RNA, 15 nt, Human
guaaucguguccccu

SEQ ID NO: 1736386 - RNA, 21 nt, Human
guaauuaaguacuauguauca

SEQ ID NO: 1736387 - RNA, 20 nt, Human
guaauuaaguacuauguauc

SEQ ID NO: 1736388 - RNA, 17 nt, Human
guaauuaaguacuaugu

SEQ ID NO: 1736389 - RNA, 14 nt, Human
guaauuaaguacua

SEQ ID NO: 1736390 - RNA, 18 nt, Human
guacacuguuucaaacuu

SEQ ID NO: 1736391 - RNA, 23 nt, Human
guacuuuauuuucuauaauuuaa

SEQ ID NO: 1736392 - RNA, 21 nt, Human
guacuuguggacacagcucuu

SEQ ID NO: 1736393 - RNA, 22 nt, Human
guacuuucauauuuuaaacaga

SEQ ID NO: 1736394 - RNA, 20 nt, Human
guagaaaagggaacugaaca

SEQ ID NO: 1736395 - RNA, 15 nt, Human
guagaggagaaacug

SEQ ID NO: 1736396 - RNA, 16 nt, Human
guagagcggagaaagg

SEQ ID NO: 1736397 - RNA, 19 nt, Human
guacuucuccacccugcuc

SEQ ID NO: 1736398 - RNA, 18 nt, Human
guacuucuccacccugcu

SEQ ID NO: 1736399 - RNA, 17 nt, Human
guacuucuccacccugc

SEQ ID NO: 1736400 - RNA, 16 nt, Human
guacuucuccacccug

SEQ ID NO: 1736401 - RNA, 21 nt, Human
guacuucuccacccugcucuc

SEQ ID NO: 1736402 - RNA, 20 nt, Human
guacuucuccacccugcucu

SEQ ID NO: 1736403 - RNA, 14 nt, Human
guacuugcucuuga

SEQ ID NO: 1736404 - RNA, 20 nt, Human
guacuuguggacacagcucu

SEQ ID NO: 1736405 - RNA, 16 nt, Human
guacuuguggacacag

SEQ ID NO: 1736406 - RNA, 22 nt, Human
guacuugcucuugaugccuggc

SEQ ID NO: 1736407 - RNA, 19 nt, Human
guacuugcucuugaugccu

SEQ ID NO: 1736408 - RNA, 18 nt, Human
guacuugcucuugaugcc

SEQ ID NO: 1736409 - RNA, 16 nt, Human
guacuugcucuugaug

SEQ ID NO: 1736410 - RNA, 15 nt, Human
guacuugcucuugau

SEQ ID NO: 1736411 - RNA, 15 nt, Human
guaccgcaaugugac

SEQ ID NO: 1736412 - RNA, 16 nt, Human
guacccacugcucugg

SEQ ID NO: 1736413 - RNA, 13 nt, Human
guaccucuugagc

SEQ ID NO: 1736414 - RNA, 21 nt, Human
guaccucuugagccuugaacu

SEQ ID NO: 1736415 - RNA, 22 nt, Human
guaccucuugagccuugaacuu

SEQ ID NO: 1736416 - RNA, 15 nt, Human
guacgucugacaggc

SEQ ID NO: 1736417 - RNA, 14 nt, Human
guacgucugacagg

SEQ ID NO: 1736418 - RNA, 17 nt, Human
guacgucugacaggcaa

SEQ ID NO: 1736419 - RNA, 14 nt, Human
guacguugugcauu

SEQ ID NO: 1736420 - RNA, 15 nt, Human
guacguugugcauuu

SEQ ID NO: 1736421 - RNA, 16 nt, Human
guacguugugcauuug

SEQ ID NO: 1736422 - RNA, 23 nt, Human
guacuaaggaaucuuucugcuuu

SEQ ID NO: 1736423 - RNA, 15 nt, Human
guacuaaggaaucuu

SEQ ID NO: 1736424 - RNA, 17 nt, Human
guacguugugcauuugg

SEQ ID NO: 1736425 - RNA, 15 nt, Human
guacuucuccacccu

SEQ ID NO: 1736426 - RNA, 14 nt, Human
guacuucuccaccc

SEQ ID NO: 1736427 - RNA, 17 nt, Human
guacuacaguccuccca

SEQ ID NO: 1736428 - RNA, 17 nt, Human
gcuaagcaaaaugugau

SEQ ID NO: 1736429 - RNA, 23 nt, Human
gcuaagagggagggagggcucca

SEQ ID NO: 1736430 - RNA, 15 nt, Human
gcuacccgggaaggg

SEQ ID NO: 1736431 - RNA, 14 nt, Human
gcuacccgggaagg

SEQ ID NO: 1736432 - RNA, 18 nt, Human
gcuagagguucaaagaua

SEQ ID NO: 1736433 - RNA, 20 nt, Human
gcuacuaugauuuaauuuga

SEQ ID NO: 1736434 - RNA, 22 nt, Human
gcuacuaugauuuaauuugaaa

SEQ ID NO: 1736435 - RNA, 19 nt, Human
gcuagagguucaaagauau

SEQ ID NO: 1736436 - RNA, 21 nt, Human
gcuagagguucaaagauauuu

SEQ ID NO: 1736437 - RNA, 21 nt, Human
gcuacccgggaagggggcugg

SEQ ID NO: 1736438 - RNA, 18 nt, Human
gcuaucucccccagcccc

SEQ ID NO: 1736439 - RNA, 17 nt, Human
gcuaucucccccagccc

SEQ ID NO: 1736440 - RNA, 16 nt, Human
gcuaucucccccagcc

SEQ ID NO: 1736441 - RNA, 22 nt, Human
gcuaucucccccagccccaucc

SEQ ID NO: 1736442 - RNA, 21 nt, Human
gcuaucucccccagccccauc

SEQ ID NO: 1736443 - RNA, 20 nt, Human
gcuaucucccccagccccau

SEQ ID NO: 1736444 - RNA, 19 nt, Human
gcuaucucccccagcccca

SEQ ID NO: 1736445 - RNA, 23 nt, Human
gcuaucucccccagccccauccu

SEQ ID NO: 1736446 - RNA, 22 nt, Human
gcuaagagggagggagggcucc

SEQ ID NO: 1736447 - RNA, 14 nt, Human
gcuaacauggaagu

SEQ ID NO: 1736448 - RNA, 16 nt, Human
gcuaaaugugaaugau

SEQ ID NO: 1736449 - RNA, 13 nt, Human
gcuaaaugugaau

SEQ ID NO: 1736450 - RNA, 23 nt, Human
gcgugagccacugcaccgggcca

SEQ ID NO: 1736451 - RNA, 18 nt, Human
gcgugagccacugcaccg

SEQ ID NO: 1736452 - RNA, 15 nt, Human
gcgugagaccugccc

SEQ ID NO: 1736453 - RNA, 19 nt, Human
gcgguccacccaggagccc

SEQ ID NO: 1736454 - RNA, 18 nt, Human
gcgguccacccaggagcc

SEQ ID NO: 1736455 - RNA, 20 nt, Human
gcgguccacccaggagcccc

SEQ ID NO: 1736456 - RNA, 16 nt, Human
gcgguccacccaggag

SEQ ID NO: 1736457 - RNA, 13 nt, Human
gcggggacagcuc

SEQ ID NO: 1736458 - RNA, 12 nt, Human
gcggggacagcu

SEQ ID NO: 1736459 - RNA, 15 nt, Human
gcgggcuuccuccug

SEQ ID NO: 1736460 - RNA, 23 nt, Human
gccugugagcuaggaauuguguu

SEQ ID NO: 1736461 - RNA, 17 nt, Human
gccugugaacugaacuc

SEQ ID NO: 1736462 - RNA, 14 nt, Human
gcuccaucuccacu

SEQ ID NO: 1736463 - RNA, 24 nt, Human
gcuccaggcuccuuuagcgcccag

SEQ ID NO: 1736464 - RNA, 20 nt, Human
gcuccagcuguucagcuggu

SEQ ID NO: 1736465 - RNA, 23 nt, Human
gcuccaggcuccuuuagcgccca

SEQ ID NO: 1736466 - RNA, 16 nt, Human
gcuccaggcuccuuua

SEQ ID NO: 1736467 - RNA, 13 nt, Human
gcuccaggcuccu

SEQ ID NO: 1736468 - RNA, 11 nt, Human
gcuccagcugu

SEQ ID NO: 1736469 - RNA, 20 nt, Human
gcuccauuuuuagugaaaua

SEQ ID NO: 1736470 - RNA, 19 nt, Human
gcuccaagcucccaggcau

SEQ ID NO: 1736471 - RNA, 18 nt, Human
gcuccaagcucccaggca

SEQ ID NO: 1736472 - RNA, 17 nt, Human
gcuccaagcucccaggc

SEQ ID NO: 1736473 - RNA, 16 nt, Human
gcuccaagcucccagg

SEQ ID NO: 1736474 - RNA, 21 nt, Human
gcuccaagcucccaggcauuc

SEQ ID NO: 1736475 - RNA, 23 nt, Human
gcuccagcuggccgggagccuga

SEQ ID NO: 1736476 - RNA, 17 nt, Human
gcuccagcuggccggga

SEQ ID NO: 1736477 - RNA, 15 nt, Human
gcuccaagcucccag

SEQ ID NO: 1736478 - RNA, 14 nt, Human
gcuccaagcuccca

SEQ ID NO: 1736479 - RNA, 13 nt, Human
gcuccaagcuccc

SEQ ID NO: 1736480 - RNA, 16 nt, Human
gcuccaaaugcagcuu

SEQ ID NO: 1736481 - RNA, 19 nt, Human
gcuccaaacccucgaggcg

SEQ ID NO: 1736482 - RNA, 18 nt, Human
gcucaggugucccugcac

SEQ ID NO: 1736483 - RNA, 22 nt, Human
gcucagcggggacagcuccuuc

SEQ ID NO: 1736484 - RNA, 21 nt, Human
gcucagcggggacagcuccuu

SEQ ID NO: 1736485 - RNA, 20 nt, Human
gcucagcggggacagcuccu

SEQ ID NO: 1736486 - RNA, 16 nt, Human
gcucagcggggacagc

SEQ ID NO: 1736487 - RNA, 15 nt, Human
gcucagcggggacag

SEQ ID NO: 1736488 - RNA, 19 nt, Human
gcucaggugucccugcacu

SEQ ID NO: 1736489 - RNA, 16 nt, Human
gcuccaaacccucgag

SEQ ID NO: 1736490 - RNA, 18 nt, Human
gcuccaaacccucgaggc

SEQ ID NO: 1736491 - RNA, 17 nt, Human
gcuccaaacccucgagg

SEQ ID NO: 1736492 - RNA, 23 nt, Human
gcucagcaaaagaugcuucucac

SEQ ID NO: 1736493 - RNA, 22 nt, Human
gcucagcaaaagaugcuucuca

SEQ ID NO: 1736494 - RNA, 20 nt, Human
gcucagcaaaagaugcuucu

SEQ ID NO: 1736495 - RNA, 17 nt, Human
gcucagcaaaagaugcu

SEQ ID NO: 1736496 - RNA, 19 nt, Human
gcucaccagccccagugcc

SEQ ID NO: 1736497 - RNA, 23 nt, Human
gcucaccagccccagugcccaca

SEQ ID NO: 1736498 - RNA, 20 nt, Human
gcucaccagccccagugccc

SEQ ID NO: 1736499 - RNA, 11 nt, Human
gcucucuggcc

SEQ ID NO: 1736500 - RNA, 12 nt, Human
gcucucuggccu

SEQ ID NO: 1736501 - RNA, 13 nt, Human
gcucucuggccuu

SEQ ID NO: 1736502 - RNA, 17 nt, Human
gcucuccgaccagacac

SEQ ID NO: 1736503 - RNA, 13 nt, Human
gcucuccgaccag

SEQ ID NO: 1736504 - RNA, 19 nt, Human
gcucuccgaccagacaccu

SEQ ID NO: 1736505 - RNA, 15 nt, Human
gcucuccucuugcca

SEQ ID NO: 1736506 - RNA, 22 nt, Human
gcucuccucuugccacugccuc

SEQ ID NO: 1736507 - RNA, 19 nt, Human
gcucuccucuugccacugc

SEQ ID NO: 1736508 - RNA, 17 nt, Human
gcucgagcaugccugga

SEQ ID NO: 1736509 - RNA, 16 nt, Human
gcucgagcaugccugg

SEQ ID NO: 1736510 - RNA, 21 nt, Human
gcuccuucuguccuacucugu

SEQ ID NO: 1736511 - RNA, 19 nt, Human
gcucccuucccaccucucu

SEQ ID NO: 1736512 - RNA, 18 nt, Human
gcucccuucccaccucuc

SEQ ID NO: 1736513 - RNA, 16 nt, Human
gcucccuucccaccuc

SEQ ID NO: 1736514 - RNA, 15 nt, Human
gcucccuucccaccu

SEQ ID NO: 1736515 - RNA, 14 nt, Human
gcucucuggccuuc

SEQ ID NO: 1736516 - RNA, 15 nt, Human
gcucucuggccuucg

SEQ ID NO: 1736517 - RNA, 19 nt, Human
gcucucuggccuucggccu

SEQ ID NO: 1736518 - RNA, 20 nt, Human
gcucucuggccuucggccuc

SEQ ID NO: 1736519 - RNA, 11 nt, Human
gcucugccucc

SEQ ID NO: 1736520 - RNA, 23 nt, Human
gcucugcccuugguuaggcauug

SEQ ID NO: 1736521 - RNA, 14 nt, Human
gcucugcccuuggu

SEQ ID NO: 1736522 - RNA, 14 nt, Human
gcucugcuccucuc

SEQ ID NO: 1736523 - RNA, 13 nt, Human
gcucugcuccucu

SEQ ID NO: 1736524 - RNA, 22 nt, Human
gcucugccucccaucacccgcu

SEQ ID NO: 1736525 - RNA, 15 nt, Human
gcucugccucccauc

SEQ ID NO: 1736526 - RNA, 14 nt, Human
gcucugccucccau

SEQ ID NO: 1736527 - RNA, 13 nt, Human
gcucugccuccca

SEQ ID NO: 1736528 - RNA, 23 nt, Human
gcucugcugacagacacaggccc

SEQ ID NO: 1736529 - RNA, 20 nt, Human
gcucugcugacagacacagg

SEQ ID NO: 1736530 - RNA, 19 nt, Human
gcucugcugacagacacag

SEQ ID NO: 1736531 - RNA, 18 nt, Human
gcucugcugacagacaca

SEQ ID NO: 1736532 - RNA, 14 nt, Human
gcucugcugacaga

SEQ ID NO: 1736533 - RNA, 13 nt, Human
gcucugcugacag

SEQ ID NO: 1736534 - RNA, 21 nt, Human
gcucugcuccucuccccagca

SEQ ID NO: 1736535 - RNA, 19 nt, Human
gcucugcuccucuccccag

SEQ ID NO: 1736536 - RNA, 22 nt, Human
gcucuggacaggcauguucucu

SEQ ID NO: 1736537 - RNA, 21 nt, Human
gcucuggacaggcauguucuc

SEQ ID NO: 1736538 - RNA, 16 nt, Human
gcucuggacaggcaug

SEQ ID NO: 1736539 - RNA, 15 nt, Human
gcucuggacaggcau

SEQ ID NO: 1736540 - RNA, 14 nt, Human
gcucuggacaggca

SEQ ID NO: 1736541 - RNA, 22 nt, Human
gcucugcuccccuaaagccuca

SEQ ID NO: 1736542 - RNA, 12 nt, Human
gcucuucuccag

SEQ ID NO: 1736543 - RNA, 22 nt, Human
gcucuuccaggcugggagagcc

SEQ ID NO: 1736544 - RNA, 18 nt, Human
gcucuuccaggcugggag

SEQ ID NO: 1736545 - RNA, 19 nt, Human
gcucuuccaggcugggaga

SEQ ID NO: 1736546 - RNA, 16 nt, Human
gcucuucuccaggcug

SEQ ID NO: 1736547 - RNA, 14 nt, Human
gcucuucuccaggc

SEQ ID NO: 1736548 - RNA, 13 nt, Human
gcucuucuccuuu

SEQ ID NO: 1736549 - RNA, 21 nt, Human
gcucuucuccuuucacaaccu

SEQ ID NO: 1736550 - RNA, 17 nt, Human
gcucuucuccuuucaca

SEQ ID NO: 1736551 - RNA, 16 nt, Human
gcucuugaugccuggc

SEQ ID NO: 1736552 - RNA, 15 nt, Human
gcucuugaugccugg

SEQ ID NO: 1736553 - RNA, 14 nt, Human
gcucuugaugccug

SEQ ID NO: 1736554 - RNA, 23 nt, Human
gcucuucuccuuucacaaccuuc

SEQ ID NO: 1736555 - RNA, 21 nt, Human
gcugacagacacaggcccggc

SEQ ID NO: 1736556 - RNA, 17 nt, Human
gcugacagacagcccuc

SEQ ID NO: 1736557 - RNA, 17 nt, Human
gcucuugaugccuggcg

SEQ ID NO: 1736558 - RNA, 19 nt, Human
gcugacuguacuccuccca

SEQ ID NO: 1736559 - RNA, 18 nt, Human
gcugacuguacuccuccc

SEQ ID NO: 1736560 - RNA, 21 nt, Human
gcugauggugcaaugaccuuu

SEQ ID NO: 1736561 - RNA, 18 nt, Human
gcugauggugcaaugacc

SEQ ID NO: 1736562 - RNA, 20 nt, Human
gcugcaguugccagucaccc

SEQ ID NO: 1736563 - RNA, 18 nt, Human
gcugcaguugccagucac

SEQ ID NO: 1736564 - RNA, 21 nt, Human
gcugcaguugccagucacccc

SEQ ID NO: 1736565 - RNA, 17 nt, Human
gcugcauuuaaaagaua

SEQ ID NO: 1736566 - RNA, 19 nt, Human
gcugagucugaaggcuggg

SEQ ID NO: 1736567 - RNA, 18 nt, Human
gcugagucugaaggcugg

SEQ ID NO: 1736568 - RNA, 16 nt, Human
gcugagucugaaggcu

SEQ ID NO: 1736569 - RNA, 15 nt, Human
gcugagucugaaggc

SEQ ID NO: 1736570 - RNA, 22 nt, Human
gcugagucccaggcugagccuc

SEQ ID NO: 1736571 - RNA, 21 nt, Human
gcugagucccaggcugagccu

SEQ ID NO: 1736572 - RNA, 17 nt, Human
gcugagucccaggcuga

SEQ ID NO: 1736573 - RNA, 21 nt, Human
gcugacuguacuccucccagg

SEQ ID NO: 1736574 - RNA, 23 nt, Human
gcugagugggggaucacagccuc

SEQ ID NO: 1736575 - RNA, 22 nt, Human
gcugagugggggaucacagccu

SEQ ID NO: 1736576 - RNA, 16 nt, Human
gcugauggugcaauga

SEQ ID NO: 1736577 - RNA, 15 nt, Human
gcugauggugcaaug

SEQ ID NO: 1736578 - RNA, 15 nt, Human
gccugcuccagcugu

SEQ ID NO: 1736579 - RNA, 18 nt, Human
gccugcuccagcuguuca

SEQ ID NO: 1736580 - RNA, 16 nt, Human
gccugcuccagcuguu

SEQ ID NO: 1736581 - RNA, 22 nt, Human
gccugcuuuuuauggccuguga

SEQ ID NO: 1736582 - RNA, 19 nt, Human
gccugcuuuuuauggccug

SEQ ID NO: 1736583 - RNA, 18 nt, Human
gccugcuuuuuauggccu

SEQ ID NO: 1736584 - RNA, 22 nt, Human
gccugaagucacacagugaguc

SEQ ID NO: 1736585 - RNA, 19 nt, Human
gccucugcugauccuccca

SEQ ID NO: 1736586 - RNA, 13 nt, Human
gccucugccuguc

SEQ ID NO: 1736587 - RNA, 18 nt, Human
gccucugcugauccuccc

SEQ ID NO: 1736588 - RNA, 21 nt, Human
gccucucugcaggucccuaau

SEQ ID NO: 1736589 - RNA, 20 nt, Human
gccucucugcaggucccuaa

SEQ ID NO: 1736590 - RNA, 23 nt, Human
gccucucugcaggucccuaauaa

SEQ ID NO: 1736591 - RNA, 12 nt, Human
gccucugccugu

SEQ ID NO: 1736592 - RNA, 15 nt, Human
gccuggccagaugca

SEQ ID NO: 1736593 - RNA, 14 nt, Human
gccuggccagaugc

SEQ ID NO: 1736594 - RNA, 16 nt, Human
gccuggccagaugcac

SEQ ID NO: 1736595 - RNA, 15 nt, Human
gccugggcagaagga

SEQ ID NO: 1736596 - RNA, 15 nt, Human
gccuggauggggcug

SEQ ID NO: 1736597 - RNA, 14 nt, Human
gccuggauggggcu

SEQ ID NO: 1736598 - RNA, 13 nt, Human
gccuggccacgcc

SEQ ID NO: 1736599 - RNA, 17 nt, Human
gccugggcagaaggaag

SEQ ID NO: 1736600 - RNA, 16 nt, Human
gccugggcagaaggaa

SEQ ID NO: 1736601 - RNA, 18 nt, Human
gccugggcagaaggaaga

SEQ ID NO: 1736602 - RNA, 20 nt, Human
gccugggggcugggcagagg

SEQ ID NO: 1736603 - RNA, 21 nt, Human
gccugggggcugggcagagga

SEQ ID NO: 1736604 - RNA, 22 nt, Human
gccuauauuuuuuguuaaauga

SEQ ID NO: 1736605 - RNA, 17 nt, Human
gccuaagugcagccccg

SEQ ID NO: 1736606 - RNA, 16 nt, Human
gccuaaggcugaacuu

SEQ ID NO: 1736607 - RNA, 21 nt, Human
gccucaagugauucuccugcc

SEQ ID NO: 1736608 - RNA, 20 nt, Human
gccucaagugauucuccugc

SEQ ID NO: 1736609 - RNA, 19 nt, Human
gccucaagugauucuccug

SEQ ID NO: 1736610 - RNA, 17 nt, Human
gccucaaccuccugggc

SEQ ID NO: 1736611 - RNA, 16 nt, Human
gccucaaccuccuggg

SEQ ID NO: 1736612 - RNA, 14 nt, Human
gccucaaccuccug

SEQ ID NO: 1736613 - RNA, 14 nt, Human
gccucagugccacu

SEQ ID NO: 1736614 - RNA, 12 nt, Human
gccucagugcca

SEQ ID NO: 1736615 - RNA, 18 nt, Human
gccucagucucccucccu

SEQ ID NO: 1736616 - RNA, 15 nt, Human
gccucagucucccuc

SEQ ID NO: 1736617 - RNA, 23 nt, Human
gccucagccucccaaagugcugg

SEQ ID NO: 1736618 - RNA, 14 nt, Human
gccucagccucccg

SEQ ID NO: 1736619 - RNA, 16 nt, Human
gccucagccuccugag

SEQ ID NO: 1736620 - RNA, 18 nt, Human
gccucagccuccugagua

SEQ ID NO: 1736621 - RNA, 14 nt, Human
gccucccacgacug

SEQ ID NO: 1736622 - RNA, 21 nt, Human
gccucccacgacugcccggca

SEQ ID NO: 1736623 - RNA, 21 nt, Human
gccucccgaauagcugggacu

SEQ ID NO: 1736624 - RNA, 23 nt, Human
gccucccaacucaccccagcccc

SEQ ID NO: 1736625 - RNA, 22 nt, Human
gccucccaacucaccccagccc

SEQ ID NO: 1736626 - RNA, 15 nt, Human
gccucagugccacua

SEQ ID NO: 1736627 - RNA, 21 nt, Human
gccucccaacucaccccagcc

SEQ ID NO: 1736628 - RNA, 15 nt, Human
gccucccgaguagcu

SEQ ID NO: 1736629 - RNA, 23 nt, Human
gccucccgaauagcugggacuac

SEQ ID NO: 1736630 - RNA, 17 nt, Human
gccucccgaguagcugg

SEQ ID NO: 1736631 - RNA, 21 nt, Human
gccucggacuuagcugggaga

SEQ ID NO: 1736632 - RNA, 20 nt, Human
gccucggacuuagcugggag

SEQ ID NO: 1736633 - RNA, 19 nt, Human
gccucucugcaggucccua

SEQ ID NO: 1736634 - RNA, 16 nt, Human
gcccugagcuuucugc

SEQ ID NO: 1736635 - RNA, 12 nt, Human
gcccucugccca

SEQ ID NO: 1736636 - RNA, 18 nt, Human
gcccggcuccaggcuccu

SEQ ID NO: 1736637 - RNA, 17 nt, Human
gcccggcuccaggcucc

SEQ ID NO: 1736638 - RNA, 22 nt, Human
gcccuggacugugugcucagga

SEQ ID NO: 1736639 - RNA, 16 nt, Human
gcccuggacugugugc

SEQ ID NO: 1736640 - RNA, 12 nt, Human
gcccuggacugu

SEQ ID NO: 1736641 - RNA, 23 nt, Human
gcccugcuuugggcugcccuggu

SEQ ID NO: 1736642 - RNA, 22 nt, Human
gcccugcuuugggcugcccugg

SEQ ID NO: 1736643 - RNA, 19 nt, Human
gcccugcuuugggcugccc

SEQ ID NO: 1736644 - RNA, 21 nt, Human
gcccugcuuugggcugcccug

SEQ ID NO: 1736645 - RNA, 20 nt, Human
gcccugcuuugggcugcccu

SEQ ID NO: 1736646 - RNA, 16 nt, Human
gcccggcuccaggcuc

SEQ ID NO: 1736647 - RNA, 12 nt, Human
gcccggcuccag

SEQ ID NO: 1736648 - RNA, 19 nt, Human
gcccgacagccuggcacag

SEQ ID NO: 1736649 - RNA, 17 nt, Human
gcccgacagccuggcac

SEQ ID NO: 1736650 - RNA, 16 nt, Human
gcccgacagccuggca

SEQ ID NO: 1736651 - RNA, 12 nt, Human
gccccuuccccc

SEQ ID NO: 1736652 - RNA, 21 nt, Human
gccccuguucuggcagaguug

SEQ ID NO: 1736653 - RNA, 15 nt, Human
gccccugccacccug

SEQ ID NO: 1736654 - RNA, 14 nt, Human
gccccugccacccu

SEQ ID NO: 1736655 - RNA, 13 nt, Human
gccccugccaccc

SEQ ID NO: 1736656 - RNA, 15 nt, Human
gcagacucuacagag

SEQ ID NO: 1736657 - RNA, 19 nt, Human
gccccuccucucugcccua

SEQ ID NO: 1736658 - RNA, 18 nt, Human
gccccuccucucugcccu

SEQ ID NO: 1736659 - RNA, 15 nt, Human
gccccucccuucaac

SEQ ID NO: 1736660 - RNA, 14 nt, Human
gccccucccuucaa

SEQ ID NO: 1736661 - RNA, 12 nt, Human
gccccucccuuc

SEQ ID NO: 1736662 - RNA, 19 nt, Human
gcccuucucuccagccccu

SEQ ID NO: 1736663 - RNA, 21 nt, Human
gcccuuccucuccacugccuu

SEQ ID NO: 1736664 - RNA, 19 nt, Human
gcccuuccucuccacugcc

SEQ ID NO: 1736665 - RNA, 18 nt, Human
gcccuuccucuccacugc

SEQ ID NO: 1736666 - RNA, 16 nt, Human
gcccuuccucuccacu

SEQ ID NO: 1736667 - RNA, 17 nt, Human
gcccuuccucuccacug

SEQ ID NO: 1736668 - RNA, 22 nt, Human
gcccuucucuccagccccugga

SEQ ID NO: 1736669 - RNA, 21 nt, Human
gcccuucucuccagccccugg

SEQ ID NO: 1736670 - RNA, 23 nt, Human
gcccuucucuccagccccuggau

SEQ ID NO: 1736671 - RNA, 20 nt, Human
gcccuuccucuccacugccu

SEQ ID NO: 1736672 - RNA, 17 nt, Human
gccgagauugcaccacu

SEQ ID NO: 1736673 - RNA, 18 nt, Human
gccgagauugcaccacug

SEQ ID NO: 1736674 - RNA, 19 nt, Human
gccgagaucacgccacugc

SEQ ID NO: 1736675 - RNA, 18 nt, Human
gccgagaucacgccacug

SEQ ID NO: 1736676 - RNA, 16 nt, Human
gccgagaucacgccac

SEQ ID NO: 1736677 - RNA, 23 nt, Human
gcccugguggcagugggagcugc

SEQ ID NO: 1736678 - RNA, 22 nt, Human
gcccugguggcagugggagcug

SEQ ID NO: 1736679 - RNA, 21 nt, Human
gcccugguggcagugggagcu

SEQ ID NO: 1736680 - RNA, 20 nt, Human
gcccugguggcagugggagc

SEQ ID NO: 1736681 - RNA, 19 nt, Human
gcccugguggcagugggag

SEQ ID NO: 1736682 - RNA, 18 nt, Human
gcccugguggcaguggga

SEQ ID NO: 1736683 - RNA, 17 nt, Human
gcccugguggcaguggg

SEQ ID NO: 1736684 - RNA, 14 nt, Human
gcccugguggcagu

SEQ ID NO: 1736685 - RNA, 15 nt, Human
gcccugguuuccugc

SEQ ID NO: 1736686 - RNA, 14 nt, Human
gcccugguuuccug

SEQ ID NO: 1736687 - RNA, 23 nt, Human
gcccugguuuccugcccugggag

SEQ ID NO: 1736688 - RNA, 21 nt, Human
gcccugguuuccugcccuggg

SEQ ID NO: 1736689 - RNA, 20 nt, Human
gcccugguuuccugcccugg

SEQ ID NO: 1736690 - RNA, 19 nt, Human
gcccugguuuccugcccug

SEQ ID NO: 1736691 - RNA, 18 nt, Human
gcccugguuuccugcccu

SEQ ID NO: 1736692 - RNA, 17 nt, Human
gcccugguuuccugccc

SEQ ID NO: 1736693 - RNA, 21 nt, Human
gcccugggaggcucuggagcc

SEQ ID NO: 1736694 - RNA, 19 nt, Human
gcccugggaggcucuggag

SEQ ID NO: 1736695 - RNA, 18 nt, Human
gcccugggaggcucugga

SEQ ID NO: 1736696 - RNA, 17 nt, Human
gcccugggaggcucugg

SEQ ID NO: 1736697 - RNA, 23 nt, Human
gcccugggaggcucuggagccca

SEQ ID NO: 1736698 - RNA, 16 nt, Human
gcccugggaggcagug

SEQ ID NO: 1736699 - RNA, 21 nt, Human
gcccuggugcugccacacuuc

SEQ ID NO: 1736700 - RNA, 17 nt, Human
gcccuggugcugccaca

SEQ ID NO: 1736701 - RNA, 16 nt, Human
gcccuggugcugccac

SEQ ID NO: 1736702 - RNA, 15 nt, Human
gcccuggugcugcca

SEQ ID NO: 1736703 - RNA, 16 nt, Human
gcccugggaggcucug

SEQ ID NO: 1736704 - RNA, 15 nt, Human
gcccugggaggcucu

SEQ ID NO: 1736705 - RNA, 14 nt, Human
gcccugggaggcuc

SEQ ID NO: 1736706 - RNA, 13 nt, Human
gcccugggaggcu

SEQ ID NO: 1736707 - RNA, 14 nt, Human
gcccugggaggcag

SEQ ID NO: 1736708 - RNA, 11 nt, Human
gcccugggagg

SEQ ID NO: 1736709 - RNA, 20 nt, Human
gcccuggcucccacaggccc

SEQ ID NO: 1736710 - RNA, 19 nt, Human
gcccuggcucccacaggcc

SEQ ID NO: 1736711 - RNA, 15 nt, Human
gcccuggcucccaca

SEQ ID NO: 1736712 - RNA, 16 nt, Human
ggaaguacuggagaaa

SEQ ID NO: 1736713 - RNA, 12 nt, Human
ggaaguacugga

SEQ ID NO: 1736714 - RNA, 18 nt, Human
ggaaguacuggagaaaau

SEQ ID NO: 1736715 - RNA, 20 nt, Human
ggaagugacgguuuaauggg

SEQ ID NO: 1736716 - RNA, 18 nt, Human
ggaagugcuaauuuugaa

SEQ ID NO: 1736717 - RNA, 14 nt, Human
ggaaggcagggagg

SEQ ID NO: 1736718 - RNA, 13 nt, Human
ggaaccugacccc

SEQ ID NO: 1736719 - RNA, 23 nt, Human
ggaaggggagauaaggguaucug

SEQ ID NO: 1736720 - RNA, 17 nt, Human
ggaaggcugagaggaga

SEQ ID NO: 1736721 - RNA, 19 nt, Human
ggaauuuucaucuaggauu

SEQ ID NO: 1736722 - RNA, 12 nt, Human
ggaauuguguuu

SEQ ID NO: 1736723 - RNA, 19 nt, Human
ggaauguuugccucugccu

SEQ ID NO: 1736724 - RNA, 12 nt, Human
ggaaugcagugg

SEQ ID NO: 1736725 - RNA, 24 nt, Human
ggaaugauuaauuaaaacacaaca

SEQ ID NO: 1736726 - RNA, 20 nt, Human
ggacauugcggacagccacg

SEQ ID NO: 1736727 - RNA, 22 nt, Human
ggacagccacggccaggccaga

SEQ ID NO: 1736728 - RNA, 21 nt, Human
ggacagccacggccaggccag

SEQ ID NO: 1736729 - RNA, 20 nt, Human
ggacagccacggccaggcca

SEQ ID NO: 1736730 - RNA, 19 nt, Human
ggacagccacggccaggcc

SEQ ID NO: 1736731 - RNA, 15 nt, Human
ggacagccacggcca

SEQ ID NO: 1736732 - RNA, 22 nt, Human
ggacacucaaaagcugggcagg

SEQ ID NO: 1736733 - RNA, 17 nt, Human
ggacacucaaaagcugg

SEQ ID NO: 1736734 - RNA, 17 nt, Human
ggaccuugaacugggua

SEQ ID NO: 1736735 - RNA, 15 nt, Human
ggaccuugaacuggg

SEQ ID NO: 1736736 - RNA, 20 nt, Human
ggacgcuacccgggaagggg

SEQ ID NO: 1736737 - RNA, 19 nt, Human
ggacgcuacccgggaaggg

SEQ ID NO: 1736738 - RNA, 17 nt, Human
ggacgcuacccgggaag

SEQ ID NO: 1736739 - RNA, 23 nt, Human
ggaccucaggugagaagcagagg

SEQ ID NO: 1736740 - RNA, 19 nt, Human
ggaccucaggugagaagca

SEQ ID NO: 1736741 - RNA, 14 nt, Human
ggaccagagcugcc

SEQ ID NO: 1736742 - RNA, 13 nt, Human
ggaccagagcugc

SEQ ID NO: 1736743 - RNA, 18 nt, Human
ggacuggccucugcugau

SEQ ID NO: 1736744 - RNA, 15 nt, Human
ggacgcucucuggcc

SEQ ID NO: 1736745 - RNA, 13 nt, Human
ggacgcucucugg

SEQ ID NO: 1736746 - RNA, 14 nt, Human
ggacgcucucuggc

SEQ ID NO: 1736747 - RNA, 17 nt, Human
ggacugugugcucagga

SEQ ID NO: 1736748 - RNA, 15 nt, Human
ggagaaucacuugaa

SEQ ID NO: 1736749 - RNA, 19 nt, Human
ggagaaucacuugaacccg

SEQ ID NO: 1736750 - RNA, 18 nt, Human
ggagaagcggcuggcagc

SEQ ID NO: 1736751 - RNA, 17 nt, Human
ggagaagcggcuggcag

SEQ ID NO: 1736752 - RNA, 15 nt, Human
gcuuuguaugcacuu

SEQ ID NO: 1736753 - RNA, 15 nt, Human
gcuuugugauuuuug

SEQ ID NO: 1736754 - RNA, 18 nt, Human
gcuuugucuacuucaaaa

SEQ ID NO: 1736755 - RNA, 20 nt, Human
gcuugaggguugggcuggug

SEQ ID NO: 1736756 - RNA, 18 nt, Human
gcuugaggguugggcugg

SEQ ID NO: 1736757 - RNA, 22 nt, Human
gcuugaggguugggcugguguc

SEQ ID NO: 1736758 - RNA, 13 nt, Human
gcuuuucacugcu

SEQ ID NO: 1736759 - RNA, 18 nt, Human
gcuuuucacugcuggcug

SEQ ID NO: 1736760 - RNA, 14 nt, Human
gcuuuucacugcug

SEQ ID NO: 1736761 - RNA, 21 nt, Human
gcuuuguuuguugucagcuga

SEQ ID NO: 1736762 - RNA, 18 nt, Human
ggaaaacaugcuacacac

SEQ ID NO: 1736763 - RNA, 23 nt, Human
gcuuuucacugcuggcugccuua

SEQ ID NO: 1736764 - RNA, 22 nt, Human
gcuuuucacugcuggcugccuu

SEQ ID NO: 1736765 - RNA, 20 nt, Human
ggaaaagcugcugacagugu

SEQ ID NO: 1736766 - RNA, 18 nt, Human
ggaaaagcugcugacagu

SEQ ID NO: 1736767 - RNA, 14 nt, Human
ggaaaagcugcuga

SEQ ID NO: 1736768 - RNA, 21 nt, Human
ggaaaaccaagccguggcuuc

SEQ ID NO: 1736769 - RNA, 19 nt, Human
ggaaaaucagccugcucca

SEQ ID NO: 1736770 - RNA, 23 nt, Human
ggaaaaucagccugcuccagcug

SEQ ID NO: 1736771 - RNA, 14 nt, Human
ggaaaggcuccagg

SEQ ID NO: 1736772 - RNA, 13 nt, Human
ggaaaggcuccag

SEQ ID NO: 1736773 - RNA, 12 nt, Human
ggaaaggcucca

SEQ ID NO: 1736774 - RNA, 21 nt, Human
ggaaaggcuccaggagcagcc

SEQ ID NO: 1736775 - RNA, 20 nt, Human
ggaaaggcuccaggagcagc

SEQ ID NO: 1736776 - RNA, 19 nt, Human
ggaaaggcuccaggagcag

SEQ ID NO: 1736777 - RNA, 17 nt, Human
ggaaaggcuccaggagc

SEQ ID NO: 1736778 - RNA, 22 nt, Human
ggaaaggcuccaggagcagcca

SEQ ID NO: 1736779 - RNA, 14 nt, Human
ggaaaucaccgaaa

SEQ ID NO: 1736780 - RNA, 21 nt, Human
ggaaaucaccgaaaacguggc

SEQ ID NO: 1736781 - RNA, 16 nt, Human
ggaacaggaaacugau

SEQ ID NO: 1736782 - RNA, 20 nt, Human
gcugccaaugggagcucaug

SEQ ID NO: 1736783 - RNA, 19 nt, Human
gcugccaaugggagcucau

SEQ ID NO: 1736784 - RNA, 16 nt, Human
gcugccaaugggagcu

SEQ ID NO: 1736785 - RNA, 15 nt, Human
gcugccaaugggagc

SEQ ID NO: 1736786 - RNA, 20 nt, Human
gcugugggcgugagaccugc

SEQ ID NO: 1736787 - RNA, 22 nt, Human
gcugugggcgugagaccugccc

SEQ ID NO: 1736788 - RNA, 21 nt, Human
gcugugggcgugagaccugcc

SEQ ID NO: 1736789 - RNA, 14 nt, Human
gcuguucagcuggu

SEQ ID NO: 1736790 - RNA, 17 nt, Human
gcuuagucacugagaca

SEQ ID NO: 1736791 - RNA, 15 nt, Human
gcuuagucacugaga

SEQ ID NO: 1736792 - RNA, 20 nt, Human
gcuuagucacugagacagcc

SEQ ID NO: 1736793 - RNA, 19 nt, Human
gcuuagucacugagacagc

SEQ ID NO: 1736794 - RNA, 21 nt, Human
gcuuagucacugagacagccc

SEQ ID NO: 1736795 - RNA, 16 nt, Human
gcuugaggguugggcu

SEQ ID NO: 1736796 - RNA, 15 nt, Human
gcuuccagugaggcu

SEQ ID NO: 1736797 - RNA, 18 nt, Human
gcuucauuuccugugucu

SEQ ID NO: 1736798 - RNA, 21 nt, Human
gcuucauccuccucagaucuu

SEQ ID NO: 1736799 - RNA, 17 nt, Human
gcuucauuuccuguguc

SEQ ID NO: 1736800 - RNA, 18 nt, Human
gcuuccagugaggcucug

SEQ ID NO: 1736801 - RNA, 16 nt, Human
gcuuccagugaggcuc

SEQ ID NO: 1736802 - RNA, 16 nt, Human
gcuucauuuccugugu

SEQ ID NO: 1736803 - RNA, 13 nt, Human
gcuucauuuccug

SEQ ID NO: 1736804 - RNA, 15 nt, Human
gcuucauccuccuca

SEQ ID NO: 1736805 - RNA, 12 nt, Human
gcuucauccucc

SEQ ID NO: 1736806 - RNA, 18 nt, Human
gcuucaguggcagcugcu

SEQ ID NO: 1736807 - RNA, 17 nt, Human
gcuucaguggcagcugc

SEQ ID NO: 1736808 - RNA, 19 nt, Human
gcuuaucucaggggugugc

SEQ ID NO: 1736809 - RNA, 20 nt, Human
gcuuauacacuuacacuuua

SEQ ID NO: 1736810 - RNA, 12 nt, Human
gcuuauacacuu

SEQ ID NO: 1736811 - RNA, 16 nt, Human
gcuucaguggcagcug

SEQ ID NO: 1736812 - RNA, 23 nt, Human
gcuuaugauagcaaauggccuca

SEQ ID NO: 1736813 - RNA, 23 nt, Human
ggauuacaagcgugagccacugc

SEQ ID NO: 1736814 - RNA, 19 nt, Human
ggauuacaggcuccugcca

SEQ ID NO: 1736815 - RNA, 16 nt, Human
ggauucuuauggacaa

SEQ ID NO: 1736816 - RNA, 16 nt, Human
ggauucuuccucccuc

SEQ ID NO: 1736817 - RNA, 15 nt, Human
ggauuguaaaauggu

SEQ ID NO: 1736818 - RNA, 17 nt, Human
ggcaacccccagccugc

SEQ ID NO: 1736819 - RNA, 16 nt, Human
ggcaacccccagccug

SEQ ID NO: 1736820 - RNA, 17 nt, Human
ggauugcuacuguccua

SEQ ID NO: 1736821 - RNA, 23 nt, Human
ggcacccaccaucaugucuggcu

SEQ ID NO: 1736822 - RNA, 22 nt, Human
ggcacccggccccugcugguuc

SEQ ID NO: 1736823 - RNA, 18 nt, Human
ggcaccggggccucggac

SEQ ID NO: 1736824 - RNA, 23 nt, Human
ggcaaugcuggcuguuggcuggg

SEQ ID NO: 1736825 - RNA, 15 nt, Human
ggcaaugcuggcugu

SEQ ID NO: 1736826 - RNA, 14 nt, Human
ggcaaugcuggcug

SEQ ID NO: 1736827 - RNA, 18 nt, Human
ggcaacccccagccugcu

SEQ ID NO: 1736828 - RNA, 19 nt, Human
ggcaaucauggugcucaga

SEQ ID NO: 1736829 - RNA, 19 nt, Human
ggauuacaagcgugagcca

SEQ ID NO: 1736830 - RNA, 15 nt, Human
ggaugcuuguacaua

SEQ ID NO: 1736831 - RNA, 19 nt, Human
ggaugcagccucacagucc

SEQ ID NO: 1736832 - RNA, 13 nt, Human
ggauccuccaggu

SEQ ID NO: 1736833 - RNA, 12 nt, Human
ggauccuccagg

SEQ ID NO: 1736834 - RNA, 17 nt, Human
ggaugcagccucacagu

SEQ ID NO: 1736835 - RNA, 16 nt, Human
ggaugcagccucacag

SEQ ID NO: 1736836 - RNA, 21 nt, Human
ggaugauuggaggggggaggu

SEQ ID NO: 1736837 - RNA, 23 nt, Human
ggaugcacagaguuguuacauuu

SEQ ID NO: 1736838 - RNA, 17 nt, Human
ggaucccucauccucau

SEQ ID NO: 1736839 - RNA, 13 nt, Human
ggaucccucaucc

SEQ ID NO: 1736840 - RNA, 22 nt, Human
ggaucccucauccucauaccca

SEQ ID NO: 1736841 - RNA, 22 nt, Human
ggaucaaaccccgaccaccugc

SEQ ID NO: 1736842 - RNA, 18 nt, Human
ggauacaaaagcauguga

SEQ ID NO: 1736843 - RNA, 20 nt, Human
ggagugcaaugacacagucu

SEQ ID NO: 1736844 - RNA, 14 nt, Human
ggagugcagugagc

SEQ ID NO: 1736845 - RNA, 12 nt, Human
ggagugcaguga

SEQ ID NO: 1736846 - RNA, 18 nt, Human
ggcaugggaaugaauguc

SEQ ID NO: 1736847 - RNA, 17 nt, Human
ggcauuccccaggaggc

SEQ ID NO: 1736848 - RNA, 22 nt, Human
ggcaugggaaugaaugucagug

SEQ ID NO: 1736849 - RNA, 19 nt, Human
ggcauuccccaggaggcca

SEQ ID NO: 1736850 - RNA, 18 nt, Human
ggcauuccccaggaggcc

SEQ ID NO: 1736851 - RNA, 17 nt, Human
ggccacuccagaccccu

SEQ ID NO: 1736852 - RNA, 17 nt, Human
ggccagcugcuugggcu

SEQ ID NO: 1736853 - RNA, 22 nt, Human
ggccagccuugaccauucucca

SEQ ID NO: 1736854 - RNA, 20 nt, Human
ggccagccuugaccauucuc

SEQ ID NO: 1736855 - RNA, 18 nt, Human
ggccaggcccucugccca

SEQ ID NO: 1736856 - RNA, 23 nt, Human
ggccagcugcuugggcuucaucc

SEQ ID NO: 1736857 - RNA, 16 nt, Human
ggccaugggccuccug

SEQ ID NO: 1736858 - RNA, 16 nt, Human
ggccaggcugcucuug

SEQ ID NO: 1736859 - RNA, 11 nt, Human
ggccaggcugc

SEQ ID NO: 1736860 - RNA, 15 nt, Human
ggccaggcugcucuu

SEQ ID NO: 1736861 - RNA, 14 nt, Human
ggccaggcugcucu

SEQ ID NO: 1736862 - RNA, 21 nt, Human
ggcagcucagagaggguggga

SEQ ID NO: 1736863 - RNA, 16 nt, Human
ggcagcucaccucucc

SEQ ID NO: 1736864 - RNA, 17 nt, Human
ggcagcuugaggguugg

SEQ ID NO: 1736865 - RNA, 22 nt, Human
ggcagcugcuuuugucuauggg

SEQ ID NO: 1736866 - RNA, 14 nt, Human
ggcagcucaccucu

SEQ ID NO: 1736867 - RNA, 12 nt, Human
ggcagcucaccu

SEQ ID NO: 1736868 - RNA, 16 nt, Human
ggcagugggagcugcc

SEQ ID NO: 1736869 - RNA, 21 nt, Human
ggcagugggacagggcauggc

SEQ ID NO: 1736870 - RNA, 14 nt, Human
ggcagugggagcug

SEQ ID NO: 1736871 - RNA, 13 nt, Human
ggcagugggagcu

SEQ ID NO: 1736872 - RNA, 20 nt, Human
ggcagggucucacucugucg

SEQ ID NO: 1736873 - RNA, 19 nt, Human
ggcagggucucacucuguc

SEQ ID NO: 1736874 - RNA, 18 nt, Human
ggcaugacacgaauauug

SEQ ID NO: 1736875 - RNA, 15 nt, Human
ggcaugaagacagau

SEQ ID NO: 1736876 - RNA, 18 nt, Human
ggcauggccagguggcca

SEQ ID NO: 1736877 - RNA, 17 nt, Human
ggcauggccagguggcc

SEQ ID NO: 1736878 - RNA, 17 nt, Human
ggcccucugcccacucc

SEQ ID NO: 1736879 - RNA, 16 nt, Human
ggcccucugcccacuc

SEQ ID NO: 1736880 - RNA, 15 nt, Human
ggcccucugcccacu

SEQ ID NO: 1736881 - RNA, 13 nt, Human
ggcccucugccca

SEQ ID NO: 1736882 - RNA, 20 nt, Human
ggcccucugcccacucccug

SEQ ID NO: 1736883 - RNA, 19 nt, Human
ggcccucugcccacucccu

SEQ ID NO: 1736884 - RNA, 21 nt, Human
ggcccucugcccacucccugc

SEQ ID NO: 1736885 - RNA, 12 nt, Human
ggcccagagagg

SEQ ID NO: 1736886 - RNA, 11 nt, Human
ggcccagagag

SEQ ID NO: 1736887 - RNA, 15 nt, Human
ggcccugccuccuuu

SEQ ID NO: 1736888 - RNA, 14 nt, Human
ggcccugccuccuu

SEQ ID NO: 1736889 - RNA, 22 nt, Human
ggcccugcccugguuuccugcc

SEQ ID NO: 1736890 - RNA, 22 nt, Human
ggcccuggcucccacaggcccu

SEQ ID NO: 1736891 - RNA, 13 nt, Human
ggcccuggcuccc

SEQ ID NO: 1736892 - RNA, 13 nt, Human
ggcccugccuccu

SEQ ID NO: 1736893 - RNA, 20 nt, Human
ggcccugcccugguuuccug

SEQ ID NO: 1736894 - RNA, 13 nt, Human
ggcccugcccugg

SEQ ID NO: 1736895 - RNA, 12 nt, Human
ggcccugcccug

SEQ ID NO: 1736896 - RNA, 11 nt, Human
ggcccugcccu

SEQ ID NO: 1736897 - RNA, 16 nt, Human
ggccucugcacucccc

SEQ ID NO: 1736898 - RNA, 15 nt, Human
ggccucugcacuccc

SEQ ID NO: 1736899 - RNA, 14 nt, Human
ggccucugcacucc

SEQ ID NO: 1736900 - RNA, 13 nt, Human
ggccucugcacuc

SEQ ID NO: 1736901 - RNA, 17 nt, Human
ggccucuuaugggcugg

SEQ ID NO: 1736902 - RNA, 20 nt, Human
ggccucgguguggagaagcg

SEQ ID NO: 1736903 - RNA, 18 nt, Human
ggccucuuaugggcuggg

SEQ ID NO: 1736904 - RNA, 20 nt, Human
ggccucggacuuagcuggga

SEQ ID NO: 1736905 - RNA, 22 nt, Human
ggccucggacuuagcugggaga

SEQ ID NO: 1736906 - RNA, 16 nt, Human
ggcuccaggcuccuuu

SEQ ID NO: 1736907 - RNA, 19 nt, Human
ggcucccacaggcccuucc

SEQ ID NO: 1736908 - RNA, 18 nt, Human
ggcucccacaggcccuuc

SEQ ID NO: 1736909 - RNA, 17 nt, Human
ggcucccacaggcccuu

SEQ ID NO: 1736910 - RNA, 11 nt, Human
ggcuccaggcu

SEQ ID NO: 1736911 - RNA, 21 nt, Human
ggcucaaguccucuuuucuga

SEQ ID NO: 1736912 - RNA, 15 nt, Human
ggcucaaguccucuu

SEQ ID NO: 1736913 - RNA, 19 nt, Human
ggcuccaggagcagccaca

SEQ ID NO: 1736914 - RNA, 13 nt, Human
ggcuccaggagca

SEQ ID NO: 1736915 - RNA, 12 nt, Human
ggcuccaggagc

SEQ ID NO: 1736916 - RNA, 12 nt, Human
ggcuccagcugg

SEQ ID NO: 1736917 - RNA, 15 nt, Human
ggcuaugcauuugaa

SEQ ID NO: 1736918 - RNA, 19 nt, Human
ggcuaugggggcacugagg

SEQ ID NO: 1736919 - RNA, 15 nt, Human
ggcuaguugggcuuc

SEQ ID NO: 1736920 - RNA, 23 nt, Human
ggcuagugugguguuuccuggca

SEQ ID NO: 1736921 - RNA, 16 nt, Human
ggcuaguugggcuucc

SEQ ID NO: 1736922 - RNA, 17 nt, Human
ggcuagagguucaaaga

SEQ ID NO: 1736923 - RNA, 22 nt, Human
ggcuagagguucaaagauauuu

SEQ ID NO: 1736924 - RNA, 16 nt, Human
ggcuaggaccccucca

SEQ ID NO: 1736925 - RNA, 22 nt, Human
ggcuaggaccccuccauguggg

SEQ ID NO: 1736926 - RNA, 19 nt, Human
ggccuggccugagcuggga

SEQ ID NO: 1736927 - RNA, 22 nt, Human
ggccugggggcugggcagagga

SEQ ID NO: 1736928 - RNA, 20 nt, Human
ggccugggggcugggcagag

SEQ ID NO: 1736929 - RNA, 14 nt, Human
ggccugggggcugg

SEQ ID NO: 1736930 - RNA, 11 nt, Human
ggccugugagc

SEQ ID NO: 1736931 - RNA, 18 nt, Human
ggccuguccaacacaucu

SEQ ID NO: 1736932 - RNA, 15 nt, Human
ggcgcgguggcucac

SEQ ID NO: 1736933 - RNA, 23 nt, Human
ggcgcugccccuggcagccccug

SEQ ID NO: 1736934 - RNA, 21 nt, Human
ggcgcugccccuggcagcccc

SEQ ID NO: 1736935 - RNA, 19 nt, Human
ggcgcugccccuggcagcc

SEQ ID NO: 1736936 - RNA, 18 nt, Human
ggcgcugccccuggcagc

SEQ ID NO: 1736937 - RNA, 21 nt, Human
gaguugaagacagagcuacac

SEQ ID NO: 1736938 - RNA, 17 nt, Human
gaguugaagacagagcu

SEQ ID NO: 1736939 - RNA, 15 nt, Human
gaguugaagacagag

SEQ ID NO: 1736940 - RNA, 20 nt, Human
gaguucaucuugaauuguaa

SEQ ID NO: 1736941 - RNA, 19 nt, Human
gaguucaucuugaauugua

SEQ ID NO: 1736942 - RNA, 20 nt, Human
gaguucauacccuguuacca

SEQ ID NO: 1736943 - RNA, 14 nt, Human
gaguucaucuugaa

SEQ ID NO: 1736944 - RNA, 15 nt, Human
gaguuacagacaaag

SEQ ID NO: 1736945 - RNA, 13 nt, Human
gaguuacagacaa

SEQ ID NO: 1736946 - RNA, 12 nt, Human
gaguuacagaca

SEQ ID NO: 1736947 - RNA, 20 nt, Human
gagugugccugaagucccag

SEQ ID NO: 1736948 - RNA, 17 nt, Human
gagugacagaggcagcc

SEQ ID NO: 1736949 - RNA, 13 nt, Human
gagugggugaaua

SEQ ID NO: 1736950 - RNA, 15 nt, Human
gaguggguugauuuc

SEQ ID NO: 1736951 - RNA, 20 nt, Human
gauacaggaaaagcugcuga

SEQ ID NO: 1736952 - RNA, 22 nt, Human
gauaagaaccuuuugagugccu

SEQ ID NO: 1736953 - RNA, 23 nt, Human
gauacaggaaaagcugcugacag

SEQ ID NO: 1736954 - RNA, 21 nt, Human
gauacaggaaaagcugcugac

SEQ ID NO: 1736955 - RNA, 22 nt, Human
gauagccaaggccaaaggaagc

SEQ ID NO: 1736956 - RNA, 15 nt, Human
gauagcacagacccu

SEQ ID NO: 1736957 - RNA, 16 nt, Human
gauagcacagacccug

SEQ ID NO: 1736958 - RNA, 16 nt, Human
gaucacggcucacugc

SEQ ID NO: 1736959 - RNA, 15 nt, Human
gaucacggcucacug

SEQ ID NO: 1736960 - RNA, 20 nt, Human
gaucacggcucacugcagcc

SEQ ID NO: 1736961 - RNA, 14 nt, Human
gaucacagccucug

SEQ ID NO: 1736962 - RNA, 18 nt, Human
gaucacggcucacugcag

SEQ ID NO: 1736963 - RNA, 15 nt, Human
gauauaagugugugu

SEQ ID NO: 1736964 - RNA, 16 nt, Human
gagguuucaaaccucc

SEQ ID NO: 1736965 - RNA, 20 nt, Human
gagguuucucaaagaaauuu

SEQ ID NO: 1736966 - RNA, 17 nt, Human
gagguugggaggccauu

SEQ ID NO: 1736967 - RNA, 15 nt, Human
gagguugggaggcca

SEQ ID NO: 1736968 - RNA, 20 nt, Human
gaggucagagccugcaguua

SEQ ID NO: 1736969 - RNA, 17 nt, Human
gaggucagagccugcag

SEQ ID NO: 1736970 - RNA, 17 nt, Human
gaguaggaagacuuugg

SEQ ID NO: 1736971 - RNA, 13 nt, Human
gaguaggaagacu

SEQ ID NO: 1736972 - RNA, 12 nt, Human
gaguaggaagac

SEQ ID NO: 1736973 - RNA, 22 nt, Human
gaguagcugggacuacaggcac

SEQ ID NO: 1736974 - RNA, 19 nt, Human
gaguagcugggacuacagg

SEQ ID NO: 1736975 - RNA, 23 nt, Human
gaguacuacaguccucccaucuc

SEQ ID NO: 1736976 - RNA, 21 nt, Human
gaguacuacaguccucccauc

SEQ ID NO: 1736977 - RNA, 20 nt, Human
gaguacuacaguccucccau

SEQ ID NO: 1736978 - RNA, 22 nt, Human
gaguaauccaagcaaaugugaa

SEQ ID NO: 1736979 - RNA, 14 nt, Human
gagucgaggacagg

SEQ ID NO: 1736980 - RNA, 19 nt, Human
gaguccgaaagggacuugg

SEQ ID NO: 1736981 - RNA, 16 nt, Human
gagucgaggacaggga

SEQ ID NO: 1736982 - RNA, 15 nt, Human
gagucgaggacaggg

SEQ ID NO: 1736983 - RNA, 19 nt, Human
gaguaggaagacuuuggaa

SEQ ID NO: 1736984 - RNA, 18 nt, Human
gaguaggaagacuuugga

SEQ ID NO: 1736985 - RNA, 11 nt, Human
gaguauauguc

SEQ ID NO: 1736986 - RNA, 16 nt, Human
gagugacagaggcagc

SEQ ID NO: 1736987 - RNA, 15 nt, Human
gagugacagaggcag

SEQ ID NO: 1736988 - RNA, 14 nt, Human
gagugacagaggca

SEQ ID NO: 1736989 - RNA, 17 nt, Human
gagugaagcugggagaa

SEQ ID NO: 1736990 - RNA, 14 nt, Human
gagucugaaggcug

SEQ ID NO: 1736991 - RNA, 15 nt, Human
gagucugaaggcugg

SEQ ID NO: 1736992 - RNA, 13 nt, Human
gagucugaaggcu

SEQ ID NO: 1736993 - RNA, 12 nt, Human
gagucugaaggc

SEQ ID NO: 1736994 - RNA, 19 nt, Human
gaggcagagguugcaguga

SEQ ID NO: 1736995 - RNA, 19 nt, Human
gaggcagccccauucugcc

SEQ ID NO: 1736996 - RNA, 9 nt, Human
gaggcaggg

SEQ ID NO: 1736997 - RNA, 20 nt, Human
gaggcagccccauucugccu

SEQ ID NO: 1736998 - RNA, 21 nt, Human
gaggcagccccauucugccug

SEQ ID NO: 1736999 - RNA, 23 nt, Human
gaggccaugggccuccugugugu

SEQ ID NO: 1737000 - RNA, 21 nt, Human
gaggccaugggccuccugugu

SEQ ID NO: 1737001 - RNA, 20 nt, Human
gaggccaugggccuccugug

SEQ ID NO: 1737002 - RNA, 18 nt, Human
gaggccaugggccuccug

SEQ ID NO: 1737003 - RNA, 17 nt, Human
gaggccaugggccuccu

SEQ ID NO: 1737004 - RNA, 14 nt, Human
gaggccaugggccu

SEQ ID NO: 1737005 - RNA, 19 nt, Human
gaggaucucuugagccugg

SEQ ID NO: 1737006 - RNA, 16 nt, Human
gaggaucucuugagcc

SEQ ID NO: 1737007 - RNA, 22 nt, Human
gaggaucucuugagccugggag

SEQ ID NO: 1737008 - RNA, 13 nt, Human
gaggaucucuuga

SEQ ID NO: 1737009 - RNA, 22 nt, Human
gagcccuguccugccuaaggcu

SEQ ID NO: 1737010 - RNA, 20 nt, Human
gaggauugcuugagcucagg

SEQ ID NO: 1737011 - RNA, 20 nt, Human
gaggcccuucucuccagccc

SEQ ID NO: 1737012 - RNA, 15 nt, Human
gaggcccuucucucc

SEQ ID NO: 1737013 - RNA, 21 nt, Human
gaggcccuucucuccagcccc

SEQ ID NO: 1737014 - RNA, 22 nt, Human
gaggcccuucucuccagccccu

SEQ ID NO: 1737015 - RNA, 16 nt, Human
gaggcccagagggccu

SEQ ID NO: 1737016 - RNA, 15 nt, Human
gaggcccagagggcc

SEQ ID NO: 1737017 - RNA, 19 nt, Human
gaggcccagagggccugca

SEQ ID NO: 1737018 - RNA, 14 nt, Human
gaggcccagagggc

SEQ ID NO: 1737019 - RNA, 13 nt, Human
gaggcccagaggg

SEQ ID NO: 1737020 - RNA, 11 nt, Human
gaggcccagag

SEQ ID NO: 1737021 - RNA, 19 nt, Human
gaggccuucucugaaggac

SEQ ID NO: 1737022 - RNA, 18 nt, Human
gaggccuucucugaagga

SEQ ID NO: 1737023 - RNA, 16 nt, Human
gaggccuucucugaag

SEQ ID NO: 1737024 - RNA, 21 nt, Human
gaggcgcaugaauuugugaag

SEQ ID NO: 1737025 - RNA, 14 nt, Human
gagggucugaggaa

SEQ ID NO: 1737026 - RNA, 13 nt, Human
gagggucugagga

SEQ ID NO: 1737027 - RNA, 21 nt, Human
gagggugaagugaagacaaug

SEQ ID NO: 1737028 - RNA, 12 nt, Human
gaggguggaaua

SEQ ID NO: 1737029 - RNA, 22 nt, Human
gagggugucccaaaaagaaagg

SEQ ID NO: 1737030 - RNA, 21 nt, Human
gaggguggugaccucugccug

SEQ ID NO: 1737031 - RNA, 14 nt, Human
gaggguggugaccu

SEQ ID NO: 1737032 - RNA, 15 nt, Human
gagggugggaguggg

SEQ ID NO: 1737033 - RNA, 13 nt, Human
gaggucagagccu

SEQ ID NO: 1737034 - RNA, 12 nt, Human
gaggucagagcc

SEQ ID NO: 1737035 - RNA, 17 nt, Human
gaggucaaggcugcagu

SEQ ID NO: 1737036 - RNA, 15 nt, Human
gaggguugggcuggu

SEQ ID NO: 1737037 - RNA, 14 nt, Human
gaggguugggcugg

SEQ ID NO: 1737038 - RNA, 21 nt, Human
gagguaaggaauaccuguccc

SEQ ID NO: 1737039 - RNA, 24 nt, Human
gagguaaggaauaccugucccccu

SEQ ID NO: 1737040 - RNA, 13 nt, Human
gaggguaaggcug

SEQ ID NO: 1737041 - RNA, 17 nt, Human
gaggggguggccuccca

SEQ ID NO: 1737042 - RNA, 17 nt, Human
gaggggcugugggcgug

SEQ ID NO: 1737043 - RNA, 18 nt, Human
gagggagugacagaggca

SEQ ID NO: 1737044 - RNA, 20 nt, Human
gagggagggcuccagacaca

SEQ ID NO: 1737045 - RNA, 20 nt, Human
gagggagggggaaggcaggg

SEQ ID NO: 1737046 - RNA, 22 nt, Human
gagggagugacagaggcagccc

SEQ ID NO: 1737047 - RNA, 21 nt, Human
gagggagugacagaggcagcc

SEQ ID NO: 1737048 - RNA, 19 nt, Human
gagggagggcuccagacac

SEQ ID NO: 1737049 - RNA, 20 nt, Human
gaggcugggcucccuuccca

SEQ ID NO: 1737050 - RNA, 13 nt, Human
gcacagugcaucu

SEQ ID NO: 1737051 - RNA, 18 nt, Human
gcacagugcaucucagcc

SEQ ID NO: 1737052 - RNA, 15 nt, Human
gcacagugcaucuca

SEQ ID NO: 1737053 - RNA, 22 nt, Human
gcacagaguuguuacauuuuua

SEQ ID NO: 1737054 - RNA, 16 nt, Human
gcacagaguuguuaca

SEQ ID NO: 1737055 - RNA, 18 nt, Human
gcacagaguuguuacauu

SEQ ID NO: 1737056 - RNA, 19 nt, Human
gcacagaguuguuacauuu

SEQ ID NO: 1737057 - RNA, 21 nt, Human
gcacagaguuguuacauuuuu

SEQ ID NO: 1737058 - RNA, 13 nt, Human
gcacgauuucugu

SEQ ID NO: 1737059 - RNA, 15 nt, Human
gcacgauuucuguuu

SEQ ID NO: 1737060 - RNA, 21 nt, Human
gcaccuuagacagucccugcc

SEQ ID NO: 1737061 - RNA, 20 nt, Human
gcaccuuagacagucccugc

SEQ ID NO: 1737062 - RNA, 12 nt, Human
gcaccauaacuu

SEQ ID NO: 1737063 - RNA, 22 nt, Human
gcaccccagcuggggccaggcu

SEQ ID NO: 1737064 - RNA, 14 nt, Human
gcagacaggcaagc

SEQ ID NO: 1737065 - RNA, 13 nt, Human
gcagacaggcaag

SEQ ID NO: 1737066 - RNA, 12 nt, Human
gcagacaggcaa

SEQ ID NO: 1737067 - RNA, 16 nt, Human
gcacgauuucuguuua

SEQ ID NO: 1737068 - RNA, 20 nt, Human
gcacugcugcccagccucca

SEQ ID NO: 1737069 - RNA, 18 nt, Human
gcacugcugcccagccuc

SEQ ID NO: 1737070 - RNA, 15 nt, Human
gcacugcugcccagc

SEQ ID NO: 1737071 - RNA, 14 nt, Human
gcacugcugcccag

SEQ ID NO: 1737072 - RNA, 23 nt, Human
gcacugcuuccagugaggcucug

SEQ ID NO: 1737073 - RNA, 19 nt, Human
gcacugguggcccgacagc

SEQ ID NO: 1737074 - RNA, 14 nt, Human
gcacugguggcccg

SEQ ID NO: 1737075 - RNA, 20 nt, Human
gcaauucuccugccucagcc

SEQ ID NO: 1737076 - RNA, 19 nt, Human
gcaauucuccugccucagc

SEQ ID NO: 1737077 - RNA, 18 nt, Human
gcaauucuccugccucag

SEQ ID NO: 1737078 - RNA, 17 nt, Human
gcaauucuccugccuca

SEQ ID NO: 1737079 - RNA, 16 nt, Human
gcaauucuccugccuc

SEQ ID NO: 1737080 - RNA, 15 nt, Human
gcaauucuccugccu

SEQ ID NO: 1737081 - RNA, 14 nt, Human
gcaauucuccugcc

SEQ ID NO: 1737082 - RNA, 14 nt, Human
gcacaaacagaggc

SEQ ID NO: 1737083 - RNA, 16 nt, Human
gcacaaacagaggccg

SEQ ID NO: 1737084 - RNA, 15 nt, Human
gcacaaacagaggcc

SEQ ID NO: 1737085 - RNA, 14 nt, Human
gcaaugugauaaaa

SEQ ID NO: 1737086 - RNA, 14 nt, Human
gcaacucaucuuag

SEQ ID NO: 1737087 - RNA, 15 nt, Human
gcaauggcagccuug

SEQ ID NO: 1737088 - RNA, 17 nt, Human
gcacagacccugcccug

SEQ ID NO: 1737089 - RNA, 16 nt, Human
gcacagacccugcccu

SEQ ID NO: 1737090 - RNA, 15 nt, Human
gcacagacccugccc

SEQ ID NO: 1737091 - RNA, 14 nt, Human
gcacagacccugcc

SEQ ID NO: 1737092 - RNA, 23 nt, Human
gcacagaaaauggaagacagcuc

SEQ ID NO: 1737093 - RNA, 22 nt, Human
gcacagaaaauggaagacagcu

SEQ ID NO: 1737094 - RNA, 21 nt, Human
gcacagaaaauggaagacagc

SEQ ID NO: 1737095 - RNA, 21 nt, Human
gcacagacccugcccuguggg

SEQ ID NO: 1737096 - RNA, 20 nt, Human
gcacagacccugcccugugg

SEQ ID NO: 1737097 - RNA, 19 nt, Human
gcacagacccugcccugug

SEQ ID NO: 1737098 - RNA, 18 nt, Human
gcacagacccugcccugu

SEQ ID NO: 1737099 - RNA, 22 nt, Human
gcacagacccugcccugugggc

SEQ ID NO: 1737100 - RNA, 15 nt, Human
gcacagaguuguuac

SEQ ID NO: 1737101 - RNA, 20 nt, Human
gcacagaaaauggaagacag

SEQ ID NO: 1737102 - RNA, 17 nt, Human
gcacaagcuccaagcuc

SEQ ID NO: 1737103 - RNA, 15 nt, Human
gcacaagcuccaagc

SEQ ID NO: 1737104 - RNA, 18 nt, Human
gcacaagcuccaagcucc

SEQ ID NO: 1737105 - RNA, 21 nt, Human
gcacaagcuccaagcucccag

SEQ ID NO: 1737106 - RNA, 23 nt, Human
gcacaaauucugucucuggauua

SEQ ID NO: 1737107 - RNA, 21 nt, Human
gaugguuccccuguucacucu

SEQ ID NO: 1737108 - RNA, 18 nt, Human
gaugguuccccuguucac

SEQ ID NO: 1737109 - RNA, 13 nt, Human
gaugguuccccug

SEQ ID NO: 1737110 - RNA, 16 nt, Human
gauggugcaaugaccu

SEQ ID NO: 1737111 - RNA, 15 nt, Human
gauggugcaaugacc

SEQ ID NO: 1737112 - RNA, 17 nt, Human
gauggugcaaugaccuu

SEQ ID NO: 1737113 - RNA, 14 nt, Human
gauggugcaaugac

SEQ ID NO: 1737114 - RNA, 12 nt, Human
gauggugcaaug

SEQ ID NO: 1737115 - RNA, 22 nt, Human
gauuacaagcgugagccacugc

SEQ ID NO: 1737116 - RNA, 20 nt, Human
gauuaaagaugagcuuuguc

SEQ ID NO: 1737117 - RNA, 15 nt, Human
gauuaaacuuaaucu

SEQ ID NO: 1737118 - RNA, 23 nt, Human
gauuacaagcgugagccacugca

SEQ ID NO: 1737119 - RNA, 17 nt, Human
gauuacaggcuccugcc

SEQ ID NO: 1737120 - RNA, 20 nt, Human
gauuacaggcgugagccacc

SEQ ID NO: 1737121 - RNA, 18 nt, Human
gauuacaggcaugugcca

SEQ ID NO: 1737122 - RNA, 16 nt, Human
gauguuuaguaaucau

SEQ ID NO: 1737123 - RNA, 18 nt, Human
gaugcuagaacucccuuu

SEQ ID NO: 1737124 - RNA, 16 nt, Human
gaugccccgucccccu

SEQ ID NO: 1737125 - RNA, 20 nt, Human
gaugcuagaacucccuuuca

SEQ ID NO: 1737126 - RNA, 22 nt, Human
gaugcuagaacucccuuucaac

SEQ ID NO: 1737127 - RNA, 21 nt, Human
gaugccccgucccccucuggc

SEQ ID NO: 1737128 - RNA, 20 nt, Human
gaugcugacuguacuccucc

SEQ ID NO: 1737129 - RNA, 17 nt, Human
gaugcugacuguacucc

SEQ ID NO: 1737130 - RNA, 19 nt, Human
gaugcccaaagaugcagcc

SEQ ID NO: 1737131 - RNA, 20 nt, Human
gaugcccaaagaugcagccg

SEQ ID NO: 1737132 - RNA, 24 nt, Human
gauggggcccugccuccuuuguga

SEQ ID NO: 1737133 - RNA, 21 nt, Human
gaugggcaacccccagccugc

SEQ ID NO: 1737134 - RNA, 20 nt, Human
gaugggcaacccccagccug

SEQ ID NO: 1737135 - RNA, 22 nt, Human
gauggccgggcgcgguggcuca

SEQ ID NO: 1737136 - RNA, 15 nt, Human
gauggggcugcaccg

SEQ ID NO: 1737137 - RNA, 19 nt, Human
gauggggcugcaccggcug

SEQ ID NO: 1737138 - RNA, 13 nt, Human
gauggggcugcac

SEQ ID NO: 1737139 - RNA, 19 nt, Human
gaugggugcuuggaggaag

SEQ ID NO: 1737140 - RNA, 21 nt, Human
gauuacaggcuccugccacca

SEQ ID NO: 1737141 - RNA, 18 nt, Human
gauuacaggcuccugcca

SEQ ID NO: 1737142 - RNA, 18 nt, Human
gauuacagggaugagcca

SEQ ID NO: 1737143 - RNA, 20 nt, Human
gauuacagggaugagccacc

SEQ ID NO: 1737144 - RNA, 15 nt, Human
gauugcaacaggcug

SEQ ID NO: 1737145 - RNA, 14 nt, Human
gauucuccugccuc

SEQ ID NO: 1737146 - RNA, 16 nt, Human
gauucucaugccucag

SEQ ID NO: 1737147 - RNA, 15 nt, Human
gauuuaacagaaaug

SEQ ID NO: 1737148 - RNA, 22 nt, Human
gauuuccguuaaaauaccagcc

SEQ ID NO: 1737149 - RNA, 16 nt, Human
gauuugagcucagccc

SEQ ID NO: 1737150 - RNA, 13 nt, Human
gauuuaacagaaa

SEQ ID NO: 1737151 - RNA, 14 nt, Human
gauuuaacagaaau

SEQ ID NO: 1737152 - RNA, 12 nt, Human
gauuuaaaucag

SEQ ID NO: 1737153 - RNA, 15 nt, Human
gcaaauguggcuccu

SEQ ID NO: 1737154 - RNA, 23 nt, Human
gcaaaugugaaucauuuuaccuu

SEQ ID NO: 1737155 - RNA, 15 nt, Human
gcaaaccaucauuga

SEQ ID NO: 1737156 - RNA, 19 nt, Human
gauuuugauccaagcuggu

SEQ ID NO: 1737157 - RNA, 21 nt, Human
gauuuugaaauuuuuauuaaa

SEQ ID NO: 1737158 - RNA, 12 nt, Human
gcaaaccaucau

SEQ ID NO: 1737159 - RNA, 16 nt, Human
gauuuugcuguagaag

SEQ ID NO: 1737160 - RNA, 20 nt, Human
gacaaugugaaaagaaaaau

SEQ ID NO: 1737161 - RNA, 19 nt, Human
gacaaugugaaaagaaaaa

SEQ ID NO: 1737162 - RNA, 18 nt, Human
gacaaugugaaaagaaaa

SEQ ID NO: 1737163 - RNA, 12 nt, Human
gacaaugugaaa

SEQ ID NO: 1737164 - RNA, 22 nt, Human
gacaaugcaaaccaucauugaa

SEQ ID NO: 1737165 - RNA, 16 nt, Human
gacaaggaaaaaauaa

SEQ ID NO: 1737166 - RNA, 21 nt, Human
gacaaggauugcuacuguccu

SEQ ID NO: 1737167 - RNA, 19 nt, Human
gacaaggauugcuacuguc

SEQ ID NO: 1737168 - RNA, 18 nt, Human
gacaaggauugcuacugu

SEQ ID NO: 1737169 - RNA, 21 nt, Human
gacaaggaugaucuaggaaga

SEQ ID NO: 1737170 - RNA, 22 nt, Human
gacacaagccuucggcgccuua

SEQ ID NO: 1737171 - RNA, 19 nt, Human
gacacaggcccggcuccag

SEQ ID NO: 1737172 - RNA, 16 nt, Human
gacacaagccuucggc

SEQ ID NO: 1737173 - RNA, 21 nt, Human
gacacaggcccggcuccaggc

SEQ ID NO: 1737174 - RNA, 20 nt, Human
gacacaggcccggcuccagg

SEQ ID NO: 1737175 - RNA, 14 nt, Human
gacacaugcaaggu

SEQ ID NO: 1737176 - RNA, 23 nt, Human
gacacauguccaagaagcccagg

SEQ ID NO: 1737177 - RNA, 20 nt, Human
gacacauguccaagaagccc

SEQ ID NO: 1737178 - RNA, 15 nt, Human
gacacauguccaaga

SEQ ID NO: 1737179 - RNA, 19 nt, Human
gacacaugcaaggucauuu

SEQ ID NO: 1737180 - RNA, 23 nt, Human
gacaacacucauugaccugaggc

SEQ ID NO: 1737181 - RNA, 22 nt, Human
gacaacacucauugaccugagg

SEQ ID NO: 1737182 - RNA, 16 nt, Human
gacaacagacuucuga

SEQ ID NO: 1737183 - RNA, 15 nt, Human
gaauuguaaggaaug

SEQ ID NO: 1737184 - RNA, 22 nt, Human
gaauuucuuuugccguuauuaa

SEQ ID NO: 1737185 - RNA, 21 nt, Human
gaauuucuucaacucccugcc

SEQ ID NO: 1737186 - RNA, 20 nt, Human
gaauuugugaagguggaaau

SEQ ID NO: 1737187 - RNA, 15 nt, Human
gaaugcuguauaugu

SEQ ID NO: 1737188 - RNA, 21 nt, Human
gaaugcacaaacagaggccgc

SEQ ID NO: 1737189 - RNA, 18 nt, Human
gaaugaaccacaucuugc

SEQ ID NO: 1737190 - RNA, 20 nt, Human
gaaugcacaaacagaggccg

SEQ ID NO: 1737191 - RNA, 20 nt, Human
gaauccagacccggcugcgu

SEQ ID NO: 1737192 - RNA, 12 nt, Human
gaaaggcuccag

SEQ ID NO: 1737193 - RNA, 15 nt, Human
gaauguuugccucug

SEQ ID NO: 1737194 - RNA, 16 nt, Human
gaauugacccacaaga

SEQ ID NO: 1737195 - RNA, 21 nt, Human
gaauugacccacaagaaauga

SEQ ID NO: 1737196 - RNA, 13 nt, Human
gaaugucagugug

SEQ ID NO: 1737197 - RNA, 18 nt, Human
gacaugggaaaggggaag

SEQ ID NO: 1737198 - RNA, 14 nt, Human
gaccaccugcccaa

SEQ ID NO: 1737199 - RNA, 13 nt, Human
gaccaccugccca

SEQ ID NO: 1737200 - RNA, 21 nt, Human
gaccacugcagaagacaguau

SEQ ID NO: 1737201 - RNA, 16 nt, Human
gaccacguuucuaaag

SEQ ID NO: 1737202 - RNA, 14 nt, Human
gaccacguuucuaa

SEQ ID NO: 1737203 - RNA, 11 nt, Human
gaccagagcug

SEQ ID NO: 1737204 - RNA, 21 nt, Human
gaccagacaccuugacagggc

SEQ ID NO: 1737205 - RNA, 17 nt, Human
gaccagagcugccaccu

SEQ ID NO: 1737206 - RNA, 15 nt, Human
gaccagagcugccac

SEQ ID NO: 1737207 - RNA, 14 nt, Human
gaccagagcugcca

SEQ ID NO: 1737208 - RNA, 13 nt, Human
gaccagagcugcc

SEQ ID NO: 1737209 - RNA, 19 nt, Human
gaccagagcugccaccugc

SEQ ID NO: 1737210 - RNA, 18 nt, Human
gaccagagcugccaccug

SEQ ID NO: 1737211 - RNA, 20 nt, Human
gaccagccuccaugcugccu

SEQ ID NO: 1737212 - RNA, 22 nt, Human
gaccagccuccaugcugccucc

SEQ ID NO: 1737213 - RNA, 21 nt, Human
gaccagccuccaugcugccuc

SEQ ID NO: 1737214 - RNA, 22 nt, Human
gaccauucuccaccugccaggg

SEQ ID NO: 1737215 - RNA, 21 nt, Human
gaccauucuccaccugccagg

SEQ ID NO: 1737216 - RNA, 20 nt, Human
gaccauucuccaccugccag

SEQ ID NO: 1737217 - RNA, 19 nt, Human
gaccauucuccaccugcca

SEQ ID NO: 1737218 - RNA, 16 nt, Human
gacccaaaaggcagaa

SEQ ID NO: 1737219 - RNA, 15 nt, Human
gacccacaagaaaug

SEQ ID NO: 1737220 - RNA, 22 nt, Human
gacccacaagaaaugaaagcag

SEQ ID NO: 1737221 - RNA, 21 nt, Human
gacccccaaccaaguggcucc

SEQ ID NO: 1737222 - RNA, 12 nt, Human
gacccccaacca

SEQ ID NO: 1737223 - RNA, 12 nt, Human
gacccugcccug

SEQ ID NO: 1737224 - RNA, 23 nt, Human
gacccugaggcccagagggccug

SEQ ID NO: 1737225 - RNA, 22 nt, Human
gacccugaggcccagagggccu

SEQ ID NO: 1737226 - RNA, 21 nt, Human
gaccccuccaugugggcuagu

SEQ ID NO: 1737227 - RNA, 18 nt, Human
gaccccuccaugugggcu

SEQ ID NO: 1737228 - RNA, 14 nt, Human
gaccccuccaugug

SEQ ID NO: 1737229 - RNA, 17 nt, Human
gaccgugaggccagaga

SEQ ID NO: 1737230 - RNA, 16 nt, Human
gaccgugaggccagag

SEQ ID NO: 1737231 - RNA, 18 nt, Human
gaccgugaggccagagac

SEQ ID NO: 1737232 - RNA, 19 nt, Human
gaccgugaggccagagaca

SEQ ID NO: 1737233 - RNA, 21 nt, Human
gacccuuguggucccacccca

SEQ ID NO: 1737234 - RNA, 20 nt, Human
gacccuuguggucccacccc

SEQ ID NO: 1737235 - RNA, 19 nt, Human
gacccuuguggucccaccc

SEQ ID NO: 1737236 - RNA, 12 nt, Human
gacccugucuca

SEQ ID NO: 1737237 - RNA, 20 nt, Human
gacauagaauuaacacauga

SEQ ID NO: 1737238 - RNA, 22 nt, Human
gacaguuaagagaaaugagcuu

SEQ ID NO: 1737239 - RNA, 14 nt, Human
gacaugggaaaggg

SEQ ID NO: 1737240 - RNA, 14 nt, Human
gacaugaucuucuu

SEQ ID NO: 1737241 - RNA, 18 nt, Human
gacagggaggacgcucuc

SEQ ID NO: 1737242 - RNA, 16 nt, Human
gacagggaggugaccc

SEQ ID NO: 1737243 - RNA, 23 nt, Human
gacagggcacaccgggcacucag

SEQ ID NO: 1737244 - RNA, 24 nt, Human
gacagggcacaccgggcacucaga

SEQ ID NO: 1737245 - RNA, 14 nt, Human
gacaguuaagagaa

SEQ ID NO: 1737246 - RNA, 17 nt, Human
gacagggaggacgcucu

SEQ ID NO: 1737247 - RNA, 23 nt, Human
gacaggaccagggauuuccauga

SEQ ID NO: 1737248 - RNA, 15 nt, Human
gacaggaccagggau

SEQ ID NO: 1737249 - RNA, 14 nt, Human
gacaggaccaggga

SEQ ID NO: 1737250 - RNA, 14 nt, Human
gacagagucucacu

SEQ ID NO: 1737251 - RNA, 23 nt, Human
gacagaggggguggccucccaac

SEQ ID NO: 1737252 - RNA, 22 nt, Human
gacagaggggguggccucccaa

SEQ ID NO: 1737253 - RNA, 21 nt, Human
gacagaggggguggccuccca

SEQ ID NO: 1737254 - RNA, 19 nt, Human
gacagaggggguggccucc

SEQ ID NO: 1737255 - RNA, 18 nt, Human
gacagaggggguggccuc

SEQ ID NO: 1737256 - RNA, 15 nt, Human
gacagaggggguggc

SEQ ID NO: 1737257 - RNA, 17 nt, Human
gacagaggcagccccau

SEQ ID NO: 1737258 - RNA, 16 nt, Human
gacagaggcagcccca

SEQ ID NO: 1737259 - RNA, 14 nt, Human
gacagaggcagccc

SEQ ID NO: 1737260 - RNA, 21 nt, Human
gacagagcaagugagacccug

SEQ ID NO: 1737261 - RNA, 19 nt, Human
gacagccacggccaggcca

SEQ ID NO: 1737262 - RNA, 18 nt, Human
gacagccacggccaggcc

SEQ ID NO: 1737263 - RNA, 17 nt, Human
gacagccacggccaggc

SEQ ID NO: 1737264 - RNA, 14 nt, Human
gacagccacggcca

SEQ ID NO: 1737265 - RNA, 22 nt, Human
gacagagugagacucugucuca

SEQ ID NO: 1737266 - RNA, 20 nt, Human
gacagagugagacucugucu

SEQ ID NO: 1737267 - RNA, 17 nt, Human
gacagcugccugggauc

SEQ ID NO: 1737268 - RNA, 16 nt, Human
gacagcugccugggau

SEQ ID NO: 1737269 - RNA, 21 nt, Human
gacagccacggccaggccaga

SEQ ID NO: 1737270 - RNA, 20 nt, Human
gacagccacggccaggccag

SEQ ID NO: 1737271 - RNA, 21 nt, Human
gacagcugccugggaucccuc

SEQ ID NO: 1737272 - RNA, 18 nt, Human
gacagcugccugggaucc

SEQ ID NO: 1737273 - RNA, 13 nt, Human
gacuuggaagcuc

SEQ ID NO: 1737274 - RNA, 19 nt, Human
gacuuaagcacacuugaca

SEQ ID NO: 1737275 - RNA, 19 nt, Human
gacuuaaaauauuccugca

SEQ ID NO: 1737276 - RNA, 16 nt, Human
gagaagcagaggaagg

SEQ ID NO: 1737277 - RNA, 16 nt, Human
gagaagagaaugcaca

SEQ ID NO: 1737278 - RNA, 14 nt, Human
gagaagagaaugca

SEQ ID NO: 1737279 - RNA, 14 nt, Human
gagaaaugagcuug

SEQ ID NO: 1737280 - RNA, 21 nt, Human
gagaaaugaaaaaauauauau

SEQ ID NO: 1737281 - RNA, 16 nt, Human
gagaaagguugaagca

SEQ ID NO: 1737282 - RNA, 22 nt, Human
gagaaaguacuucuccacccug

SEQ ID NO: 1737283 - RNA, 23 nt, Human
gacugaguacguugugcauuugg

SEQ ID NO: 1737284 - RNA, 13 nt, Human
gacugcccggcag

SEQ ID NO: 1737285 - RNA, 15 nt, Human
gacugcccggcaggg

SEQ ID NO: 1737286 - RNA, 21 nt, Human
gacugaguacguugugcauuu

SEQ ID NO: 1737287 - RNA, 22 nt, Human
gacugaguacguugugcauuug

SEQ ID NO: 1737288 - RNA, 17 nt, Human
gacucgcgacaaugcaa

SEQ ID NO: 1737289 - RNA, 18 nt, Human
gacuggaagcacagcuuc

SEQ ID NO: 1737290 - RNA, 16 nt, Human
gacuggaagcacagcu

SEQ ID NO: 1737291 - RNA, 15 nt, Human
gacuggaagcacagc

SEQ ID NO: 1737292 - RNA, 14 nt, Human
gacuggaagcacag

SEQ ID NO: 1737293 - RNA, 13 nt, Human
gacucgcgacaau

SEQ ID NO: 1737294 - RNA, 13 nt, Human
gacuccugcaggc

SEQ ID NO: 1737295 - RNA, 23 nt, Human
gacuccugcacacgcuccuuccu

SEQ ID NO: 1737296 - RNA, 12 nt, Human
gacuccugcagg

SEQ ID NO: 1737297 - RNA, 14 nt, Human
gacuccucugucca

SEQ ID NO: 1737298 - RNA, 11 nt, Human
gacuccucugu

SEQ ID NO: 1737299 - RNA, 13 nt, Human
gacuacaggugug

SEQ ID NO: 1737300 - RNA, 21 nt, Human
gacuacaggugugagucacca

SEQ ID NO: 1737301 - RNA, 18 nt, Human
gacuacaggugugaguca

SEQ ID NO: 1737302 - RNA, 15 nt, Human
gacucauucuucugu

SEQ ID NO: 1737303 - RNA, 14 nt, Human
gacucauucuucug

SEQ ID NO: 1737304 - RNA, 21 nt, Human
gagaguggcuccucccggugc

SEQ ID NO: 1737305 - RNA, 16 nt, Human
gagaguggcuccuccc

SEQ ID NO: 1737306 - RNA, 13 nt, Human
gagaguggcuccu

SEQ ID NO: 1737307 - RNA, 16 nt, Human
gagagggugggagugg

SEQ ID NO: 1737308 - RNA, 20 nt, Human
gagagggugggagugggccc

SEQ ID NO: 1737309 - RNA, 14 nt, Human
gagagggugggagu

SEQ ID NO: 1737310 - RNA, 19 nt, Human
gagaggggaacagacugga

SEQ ID NO: 1737311 - RNA, 13 nt, Human
gagaggggcacag

SEQ ID NO: 1737312 - RNA, 16 nt, Human
gagagcccuucauuug

SEQ ID NO: 1737313 - RNA, 22 nt, Human
gagagagcuucuguugcugccu

SEQ ID NO: 1737314 - RNA, 19 nt, Human
gagagagcuucuguugcug

SEQ ID NO: 1737315 - RNA, 23 nt, Human
gagaaugcacaaacagaggccgc

SEQ ID NO: 1737316 - RNA, 20 nt, Human
gagacagcucugcauacuca

SEQ ID NO: 1737317 - RNA, 22 nt, Human
gagacaggguuuugccauguug

SEQ ID NO: 1737318 - RNA, 21 nt, Human
gagaccaucccugaaggcccc

SEQ ID NO: 1737319 - RNA, 18 nt, Human
gagaccaucccugaaggc

SEQ ID NO: 1737320 - RNA, 14 nt, Human
gagaccaucccuga

SEQ ID NO: 1737321 - RNA, 13 nt, Human
gagacucugucuc

SEQ ID NO: 1737322 - RNA, 22 nt, Human
gagacuccugcaggcagccagg

SEQ ID NO: 1737323 - RNA, 21 nt, Human
gagacucgcgacaaugcaaac

SEQ ID NO: 1737324 - RNA, 20 nt, Human
gagacucgcgacaaugcaaa

SEQ ID NO: 1737325 - RNA, 21 nt, Human
gagacuccugcaggcagccag

SEQ ID NO: 1737326 - RNA, 20 nt, Human
gagacuccugcaggcagcca

SEQ ID NO: 1737327 - RNA, 19 nt, Human
gagacuccugcaggcagcc

SEQ ID NO: 1737328 - RNA, 19 nt, Human
gagccagggucucacuaug

SEQ ID NO: 1737329 - RNA, 23 nt, Human
gagcccacuguacuugcucuuga

SEQ ID NO: 1737330 - RNA, 23 nt, Human
gagccagauuucacucuccuugg

SEQ ID NO: 1737331 - RNA, 14 nt, Human
gagccagggucuca

SEQ ID NO: 1737332 - RNA, 21 nt, Human
gagccagcagccuggcucucc

SEQ ID NO: 1737333 - RNA, 16 nt, Human
gagcagagaauucucu

SEQ ID NO: 1737334 - RNA, 12 nt, Human
gagcagagacca

SEQ ID NO: 1737335 - RNA, 19 nt, Human
gagccaauuuaaagaaaac

SEQ ID NO: 1737336 - RNA, 20 nt, Human
gagccagauuucacucuccu

SEQ ID NO: 1737337 - RNA, 21 nt, Human
gagcauuagauuucucauuug

SEQ ID NO: 1737338 - RNA, 15 nt, Human
gagcauuagauuucu

SEQ ID NO: 1737339 - RNA, 22 nt, Human
gagcaccuuagacagucccugc

SEQ ID NO: 1737340 - RNA, 21 nt, Human
gagcaccuuagacagucccug

SEQ ID NO: 1737341 - RNA, 15 nt, Human
gagcacuaaggugug

SEQ ID NO: 1737342 - RNA, 21 nt, Human
gagcacuaaggugugcucuga

SEQ ID NO: 1737343 - RNA, 20 nt, Human
gagcaccuuagacagucccu

SEQ ID NO: 1737344 - RNA, 23 nt, Human
gagaucaaccccuucgcuccugu

SEQ ID NO: 1737345 - RNA, 16 nt, Human
gagauagccaaggcca

SEQ ID NO: 1737346 - RNA, 14 nt, Human
gagauagccaaggc

SEQ ID NO: 1737347 - RNA, 19 nt, Human
gagaucacgccacugcacu

SEQ ID NO: 1737348 - RNA, 18 nt, Human
gagaucacgccacugcac

SEQ ID NO: 1737349 - RNA, 19 nt, Human
gagauagccaaggccaaag

SEQ ID NO: 1737350 - RNA, 17 nt, Human
gagaugaggccgccaug

SEQ ID NO: 1737351 - RNA, 15 nt, Human
cugccucuucucuac

SEQ ID NO: 1737352 - RNA, 17 nt, Human
cugccugcccaggcccc

SEQ ID NO: 1737353 - RNA, 16 nt, Human
cugccugcccaggccc

SEQ ID NO: 1737354 - RNA, 15 nt, Human
cugccugaagucaca

SEQ ID NO: 1737355 - RNA, 20 nt, Human
cugccugcccaggccccugc

SEQ ID NO: 1737356 - RNA, 22 nt, Human
cugccugggaucccucauccuc

SEQ ID NO: 1737357 - RNA, 21 nt, Human
cugccugggaucccucauccu

SEQ ID NO: 1737358 - RNA, 11 nt, Human
cugccucccau

SEQ ID NO: 1737359 - RNA, 19 nt, Human
cugccucccaucacccgcu

SEQ ID NO: 1737360 - RNA, 16 nt, Human
cugccucccaucaccc

SEQ ID NO: 1737361 - RNA, 14 nt, Human
cugccucccaucac

SEQ ID NO: 1737362 - RNA, 12 nt, Human
cugccucccauc

SEQ ID NO: 1737363 - RNA, 21 nt, Human
cugccucucugcaggucccua

SEQ ID NO: 1737364 - RNA, 20 nt, Human
cugccucucugcaggucccu

SEQ ID NO: 1737365 - RNA, 23 nt, Human
cugccucugacacacagcucugu

SEQ ID NO: 1737366 - RNA, 22 nt, Human
cugccucugacacacagcucug

SEQ ID NO: 1737367 - RNA, 15 nt, Human
cugccucugacacac

SEQ ID NO: 1737368 - RNA, 22 nt, Human
cugccucucugcaggucccuaa

SEQ ID NO: 1737369 - RNA, 20 nt, Human
cugcccugcgggucacagga

SEQ ID NO: 1737370 - RNA, 22 nt, Human
cugcccugcugagucccaggcu

SEQ ID NO: 1737371 - RNA, 17 nt, Human
cucccuucccaccucuc

SEQ ID NO: 1737372 - RNA, 16 nt, Human
cucccuucccaccucu

SEQ ID NO: 1737373 - RNA, 15 nt, Human
cucccuucccaccuc

SEQ ID NO: 1737374 - RNA, 14 nt, Human
cucccuucccaccu

SEQ ID NO: 1737375 - RNA, 12 nt, Human
cugcccuccaag

SEQ ID NO: 1737376 - RNA, 18 nt, Human
cugccgcagcccugcaga

SEQ ID NO: 1737377 - RNA, 17 nt, Human
cugccgcagcccugcag

SEQ ID NO: 1737378 - RNA, 15 nt, Human
cugccgcagcccugc

SEQ ID NO: 1737379 - RNA, 21 nt, Human
cugcccuuucugggcaccggg

SEQ ID NO: 1737380 - RNA, 20 nt, Human
cugcuccagcuguucagcug

SEQ ID NO: 1737381 - RNA, 19 nt, Human
cugcuccagcuguucagcu

SEQ ID NO: 1737382 - RNA, 19 nt, Human
cugcgaccacaagaaggau

SEQ ID NO: 1737383 - RNA, 20 nt, Human
cugcucuccucuugccacug

SEQ ID NO: 1737384 - RNA, 14 nt, Human
cugcucuccucuug

SEQ ID NO: 1737385 - RNA, 12 nt, Human
cugcugaaggcu

SEQ ID NO: 1737386 - RNA, 11 nt, Human
cugcugaaggc

SEQ ID NO: 1737387 - RNA, 21 nt, Human
cugcucuccucuugccacugc

SEQ ID NO: 1737388 - RNA, 18 nt, Human
cugcugaaggaauaaauu

SEQ ID NO: 1737389 - RNA, 17 nt, Human
cugcugaaggaauaaau

SEQ ID NO: 1737390 - RNA, 22 nt, Human
cugcugcccagccuccaagcuc

SEQ ID NO: 1737391 - RNA, 15 nt, Human
cugcugcccagccuc

SEQ ID NO: 1737392 - RNA, 12 nt, Human
cugcugcccagc

SEQ ID NO: 1737393 - RNA, 23 nt, Human
cugcuuccagugaggcucugccc

SEQ ID NO: 1737394 - RNA, 21 nt, Human
cugcuuccagugaggcucugc

SEQ ID NO: 1737395 - RNA, 20 nt, Human
cugcuuccagugaggcucug

SEQ ID NO: 1737396 - RNA, 19 nt, Human
cugcuuccagugaggcucu

SEQ ID NO: 1737397 - RNA, 18 nt, Human
cugcuuccagugaggcuc

SEQ ID NO: 1737398 - RNA, 16 nt, Human
cugcuuccagugaggc

SEQ ID NO: 1737399 - RNA, 15 nt, Human
cugcuuccagugagg

SEQ ID NO: 1737400 - RNA, 23 nt, Human
cugcugguucaggguuggccccu

SEQ ID NO: 1737401 - RNA, 15 nt, Human
cugcugguucagggu

SEQ ID NO: 1737402 - RNA, 13 nt, Human
cugcugguucagg

SEQ ID NO: 1737403 - RNA, 12 nt, Human
cugcuggcugcc

SEQ ID NO: 1737404 - RNA, 15 nt, Human
cugcugcuggcuggu

SEQ ID NO: 1737405 - RNA, 22 nt, Human
cuggccuucggccuccauccug

SEQ ID NO: 1737406 - RNA, 24 nt, Human
cuggccuggccccucagggucccu

SEQ ID NO: 1737407 - RNA, 13 nt, Human
cuggccuggcccc

SEQ ID NO: 1737408 - RNA, 20 nt, Human
cuggccucugcacuccccug

SEQ ID NO: 1737409 - RNA, 18 nt, Human
cuggccucugcacucccc

SEQ ID NO: 1737410 - RNA, 21 nt, Human
cuggccucugcacuccccugc

SEQ ID NO: 1737411 - RNA, 23 nt, Human
cuggccuucggccuccauccuga

SEQ ID NO: 1737412 - RNA, 14 nt, Human
cuggccugugucua

SEQ ID NO: 1737413 - RNA, 15 nt, Human
cuggcgugcaguggu

SEQ ID NO: 1737414 - RNA, 14 nt, Human
cuggcgugcagugg

SEQ ID NO: 1737415 - RNA, 24 nt, Human
cuggcucuuccaggcugggagagc

SEQ ID NO: 1737416 - RNA, 22 nt, Human
cuggcucuuccaggcugggaga

SEQ ID NO: 1737417 - RNA, 21 nt, Human
cuggcucuuccaggcugggag

SEQ ID NO: 1737418 - RNA, 20 nt, Human
cuggagugcagugagccgag

SEQ ID NO: 1737419 - RNA, 21 nt, Human
cuggcacccggccccugcugg

SEQ ID NO: 1737420 - RNA, 20 nt, Human
cuggcacccggccccugcug

SEQ ID NO: 1737421 - RNA, 23 nt, Human
cuggcacugcuuccagugaggcu

SEQ ID NO: 1737422 - RNA, 20 nt, Human
cuggcacugcuuccagugag

SEQ ID NO: 1737423 - RNA, 19 nt, Human
cuggcacugcuuccaguga

SEQ ID NO: 1737424 - RNA, 22 nt, Human
cuggcacccggccccugcuggu

SEQ ID NO: 1737425 - RNA, 21 nt, Human
cuggcacuuggagacuuguau

SEQ ID NO: 1737426 - RNA, 14 nt, Human
cuggcacuuggaga

SEQ ID NO: 1737427 - RNA, 15 nt, Human
cuggcccacugcauc

SEQ ID NO: 1737428 - RNA, 19 nt, Human
cuggcaguggaacuaagaa

SEQ ID NO: 1737429 - RNA, 14 nt, Human
cuggccagaugcac

SEQ ID NO: 1737430 - RNA, 16 nt, Human
cuggagcucugcccau

SEQ ID NO: 1737431 - RNA, 12 nt, Human
cuggagcucugc

SEQ ID NO: 1737432 - RNA, 13 nt, Human
cuggagcucugcc

SEQ ID NO: 1737433 - RNA, 17 nt, Human
cuggagugcagugagcc

SEQ ID NO: 1737434 - RNA, 16 nt, Human
cuggagugcagugagc

SEQ ID NO: 1737435 - RNA, 15 nt, Human
cuggagugcagugag

SEQ ID NO: 1737436 - RNA, 14 nt, Human
cuggagugcaguga

SEQ ID NO: 1737437 - RNA, 22 nt, Human
cuggagguacgaaaagagggga

SEQ ID NO: 1737438 - RNA, 17 nt, Human
cuggagguacgaaaaga

SEQ ID NO: 1737439 - RNA, 21 nt, Human
cuggaccuugaacuggguacu

SEQ ID NO: 1737440 - RNA, 20 nt, Human
cuggaccuugaacuggguac

SEQ ID NO: 1737441 - RNA, 17 nt, Human
cuggaccuugaacuggg

SEQ ID NO: 1737442 - RNA, 20 nt, Human
cuggacuccucuguccaggc

SEQ ID NO: 1737443 - RNA, 19 nt, Human
cuggacuccucuguccagg

SEQ ID NO: 1737444 - RNA, 18 nt, Human
cuggacuccucuguccag

SEQ ID NO: 1737445 - RNA, 17 nt, Human
cuggacuccucugucca

SEQ ID NO: 1737446 - RNA, 14 nt, Human
cuggacuccucugu

SEQ ID NO: 1737447 - RNA, 15 nt, Human
cuggacccuguggau

SEQ ID NO: 1737448 - RNA, 16 nt, Human
cuggaccuugaacugg

SEQ ID NO: 1737449 - RNA, 17 nt, Human
cuggacaggcauguucu

SEQ ID NO: 1737450 - RNA, 14 nt, Human
cuggacaggcaugu

SEQ ID NO: 1737451 - RNA, 23 nt, Human
cuggacaggcauguucucugagg

SEQ ID NO: 1737452 - RNA, 13 nt, Human
cuggaauuugaaa

SEQ ID NO: 1737453 - RNA, 18 nt, Human
cugugccucugggacugg

SEQ ID NO: 1737454 - RNA, 17 nt, Human
cugugccucugggacug

SEQ ID NO: 1737455 - RNA, 22 nt, Human
cugugcugcccugcccaccugg

SEQ ID NO: 1737456 - RNA, 16 nt, Human
cugugccucugggacu

SEQ ID NO: 1737457 - RNA, 14 nt, Human
cugugccucuggga

SEQ ID NO: 1737458 - RNA, 11 nt, Human
cugugccucug

SEQ ID NO: 1737459 - RNA, 14 nt, Human
cugugggcccccaa

SEQ ID NO: 1737460 - RNA, 22 nt, Human
cugugggcgugagaccugcccc

SEQ ID NO: 1737461 - RNA, 21 nt, Human
cugugggcgugagaccugccc

SEQ ID NO: 1737462 - RNA, 18 nt, Human
cuguggccaaguucuuag

SEQ ID NO: 1737463 - RNA, 17 nt, Human
cuguggaugauaaaaca

SEQ ID NO: 1737464 - RNA, 16 nt, Human
cuguggccaaguucuu

SEQ ID NO: 1737465 - RNA, 20 nt, Human
cugugauggggcccugccuc

SEQ ID NO: 1737466 - RNA, 19 nt, Human
cugugauggggcccugccu

SEQ ID NO: 1737467 - RNA, 18 nt, Human
cugugccaugugccaggu

SEQ ID NO: 1737468 - RNA, 16 nt, Human
cugugccaugugccag

SEQ ID NO: 1737469 - RNA, 14 nt, Human
cugugccauuuugu

SEQ ID NO: 1737470 - RNA, 22 nt, Human
cugugccauuuuguauuuuacu

SEQ ID NO: 1737471 - RNA, 17 nt, Human
cugugauggggcccugc

SEQ ID NO: 1737472 - RNA, 18 nt, Human
cugugauggggcccugcc

SEQ ID NO: 1737473 - RNA, 21 nt, Human
cugugaguacuacaguccucc

SEQ ID NO: 1737474 - RNA, 20 nt, Human
cugugaguacuacaguccuc

SEQ ID NO: 1737475 - RNA, 23 nt, Human
cugugaguacuacaguccuccca

SEQ ID NO: 1737476 - RNA, 23 nt, Human
cugucucaagagggcacuggugg

SEQ ID NO: 1737477 - RNA, 18 nt, Human
cugucuccauguuugaug

SEQ ID NO: 1737478 - RNA, 20 nt, Human
cugugugugcgccuacagga

SEQ ID NO: 1737479 - RNA, 23 nt, Human
cugugucuugcaauggcagccuu

SEQ ID NO: 1737480 - RNA, 22 nt, Human
cugugucuugcaauggcagccu

SEQ ID NO: 1737481 - RNA, 21 nt, Human
cugugucuugcaauggcagcc

SEQ ID NO: 1737482 - RNA, 23 nt, Human
cugugggcgugagaccugccccu

SEQ ID NO: 1737483 - RNA, 15 nt, Human
cuguguggcagucug

SEQ ID NO: 1737484 - RNA, 23 nt, Human
cugugugcucaggagcccuggga

SEQ ID NO: 1737485 - RNA, 21 nt, Human
cugugugcucaggagcccugg

SEQ ID NO: 1737486 - RNA, 20 nt, Human
cugugugcucaggagcccug

SEQ ID NO: 1737487 - RNA, 16 nt, Human
cugugugcucaggagc

SEQ ID NO: 1737488 - RNA, 19 nt, Human
cugugugcucaggagcccu

SEQ ID NO: 1737489 - RNA, 13 nt, Human
cuguucucugccc

SEQ ID NO: 1737490 - RNA, 17 nt, Human
cuguucucugcccucca

SEQ ID NO: 1737491 - RNA, 16 nt, Human
cuguucucugcccucc

SEQ ID NO: 1737492 - RNA, 15 nt, Human
cuguucucugcccuc

SEQ ID NO: 1737493 - RNA, 14 nt, Human
cuguucucugcccu

SEQ ID NO: 1737494 - RNA, 19 nt, Human
cuguucucugcccuccaag

SEQ ID NO: 1737495 - RNA, 18 nt, Human
cuguucucugcccuccaa

SEQ ID NO: 1737496 - RNA, 20 nt, Human
cuguucucugcccuccaaga

SEQ ID NO: 1737497 - RNA, 21 nt, Human
cuguucagcugguugagguuu

SEQ ID NO: 1737498 - RNA, 19 nt, Human
cuguucagcugguugaggu

SEQ ID NO: 1737499 - RNA, 13 nt, Human
cuguuacugucuu

SEQ ID NO: 1737500 - RNA, 19 nt, Human
cuguuacacuuuuuggaag

SEQ ID NO: 1737501 - RNA, 18 nt, Human
cuguuacacuuuuuggaa

SEQ ID NO: 1737502 - RNA, 18 nt, Human
cuguucccauucuugcau

SEQ ID NO: 1737503 - RNA, 15 nt, Human
cuguacaaaguagaa

SEQ ID NO: 1737504 - RNA, 13 nt, Human
cuguacaaaguag

SEQ ID NO: 1737505 - RNA, 20 nt, Human
cuguaauccuagcacuuugg

SEQ ID NO: 1737506 - RNA, 23 nt, Human
cuguaaucacagcuacuugggag

SEQ ID NO: 1737507 - RNA, 13 nt, Human
cugguuccucccc

SEQ ID NO: 1737508 - RNA, 12 nt, Human
cugguuccuccc

SEQ ID NO: 1737509 - RNA, 18 nt, Human
cuggucacaggacucugc

SEQ ID NO: 1737510 - RNA, 14 nt, Human
cugguggcagcugc

SEQ ID NO: 1737511 - RNA, 13 nt, Human
cugguggcagcug

SEQ ID NO: 1737512 - RNA, 23 nt, Human
cugguggcccgacagccuggcac

SEQ ID NO: 1737513 - RNA, 22 nt, Human
cugguggcccgacagccuggca

SEQ ID NO: 1737514 - RNA, 21 nt, Human
cugguggcccgacagccuggc

SEQ ID NO: 1737515 - RNA, 20 nt, Human
cugguggcccgacagccugg

SEQ ID NO: 1737516 - RNA, 23 nt, Human
cugguggcagcucaccucucccu

SEQ ID NO: 1737517 - RNA, 22 nt, Human
cuggugcugccacacuucaggc

SEQ ID NO: 1737518 - RNA, 20 nt, Human
cuggugcugccacacuucag

SEQ ID NO: 1737519 - RNA, 13 nt, Human
cuggugcugccac

SEQ ID NO: 1737520 - RNA, 12 nt, Human
cuggugcugcca

SEQ ID NO: 1737521 - RNA, 22 nt, Human
cugggggggauuguaaaauggu

SEQ ID NO: 1737522 - RNA, 19 nt, Human
cugggggcugggcagagga

SEQ ID NO: 1737523 - RNA, 15 nt, Human
cugggggaagaagcu

SEQ ID NO: 1737524 - RNA, 13 nt, Human
cugggggaagaag

SEQ ID NO: 1737525 - RNA, 24 nt, Human
cugggcuucaguggcagcugcuuu

SEQ ID NO: 1737526 - RNA, 17 nt, Human
cuggguucuacccaggu

SEQ ID NO: 1737527 - RNA, 16 nt, Human
cuggguucuacccagg

SEQ ID NO: 1737528 - RNA, 15 nt, Human
cuggguucuacccag

SEQ ID NO: 1737529 - RNA, 14 nt, Human
cuggguacuugugg

SEQ ID NO: 1737530 - RNA, 20 nt, Human
cuggguaacuagggaagaua

SEQ ID NO: 1737531 - RNA, 22 nt, Human
cuggguaacuagggaagauaau

SEQ ID NO: 1737532 - RNA, 22 nt, Human
cugucccuuacgugaguccugg

SEQ ID NO: 1737533 - RNA, 15 nt, Human
cuguccgagcuuuga

SEQ ID NO: 1737534 - RNA, 14 nt, Human
cuguccuacccacc

SEQ ID NO: 1737535 - RNA, 16 nt, Human
cugucucaaaaaaaga

SEQ ID NO: 1737536 - RNA, 23 nt, Human
cugucucaaaaaaacacaaaagu

SEQ ID NO: 1737537 - RNA, 18 nt, Human
cugucucaaaaaaagaaa

SEQ ID NO: 1737538 - RNA, 22 nt, Human
cugucucaagagggcacuggug

SEQ ID NO: 1737539 - RNA, 20 nt, Human
cugucccuuacgugaguccu

SEQ ID NO: 1737540 - RNA, 17 nt, Human
cuguccccgcacugggc

SEQ ID NO: 1737541 - RNA, 22 nt, Human
cuguccccgcacugggcuuggg

SEQ ID NO: 1737542 - RNA, 19 nt, Human
cuguccccgcacugggcuu

SEQ ID NO: 1737543 - RNA, 18 nt, Human
cuguccccgcacugggcu

SEQ ID NO: 1737544 - RNA, 23 nt, Human
cuguaucccaugagccucagcau

SEQ ID NO: 1737545 - RNA, 13 nt, Human
cugucaauuacag

SEQ ID NO: 1737546 - RNA, 13 nt, Human
cugucaaggcuca

SEQ ID NO: 1737547 - RNA, 14 nt, Human
cugucaaggcucag

SEQ ID NO: 1737548 - RNA, 17 nt, Human
cuguccaggcacugcug

SEQ ID NO: 1737549 - RNA, 23 nt, Human
cuguccaggcacugcugcccagc

SEQ ID NO: 1737550 - RNA, 13 nt, Human
cuguacagagccc

SEQ ID NO: 1737551 - RNA, 23 nt, Human
cuucacagaugggugcuuggagg

SEQ ID NO: 1737552 - RNA, 16 nt, Human
cuucaaggauccugag

SEQ ID NO: 1737553 - RNA, 15 nt, Human
cuucaaggauccuga

SEQ ID NO: 1737554 - RNA, 13 nt, Human
cuucaaggauccu

SEQ ID NO: 1737555 - RNA, 10 nt, Human
cuucaaggau

SEQ ID NO: 1737556 - RNA, 16 nt, Human
cuucaacucccugccc

SEQ ID NO: 1737557 - RNA, 20 nt, Human
cuucaaccauuccccauggg

SEQ ID NO: 1737558 - RNA, 16 nt, Human
cuucaaccauucccca

SEQ ID NO: 1737559 - RNA, 18 nt, Human
cuuauuuaaugaaagacu

SEQ ID NO: 1737560 - RNA, 17 nt, Human
cuuauuuaaugaaagac

SEQ ID NO: 1737561 - RNA, 21 nt, Human
cuucaaaaguuuguuugcuua

SEQ ID NO: 1737562 - RNA, 17 nt, Human
cuucaaagcaaaugucu

SEQ ID NO: 1737563 - RNA, 19 nt, Human
cuuagucacugagacagcc

SEQ ID NO: 1737564 - RNA, 18 nt, Human
cuuagucacugagacagc

SEQ ID NO: 1737565 - RNA, 16 nt, Human
cuguucuggcagaguu

SEQ ID NO: 1737566 - RNA, 16 nt, Human
cuguucugcacacagc

SEQ ID NO: 1737567 - RNA, 13 nt, Human
cuuagauguauau

SEQ ID NO: 1737568 - RNA, 16 nt, Human
cuuagucacugagaca

SEQ ID NO: 1737569 - RNA, 19 nt, Human
cuuagauguauauauuucc

SEQ ID NO: 1737570 - RNA, 14 nt, Human
cuuauagacaacau

SEQ ID NO: 1737571 - RNA, 13 nt, Human
cuuauauuaugga

SEQ ID NO: 1737572 - RNA, 17 nt, Human
cuucccuacaguugaaa

SEQ ID NO: 1737573 - RNA, 23 nt, Human
cuucccgcucagcccucccugcc

SEQ ID NO: 1737574 - RNA, 19 nt, Human
cuucccgcucagcccuccc

SEQ ID NO: 1737575 - RNA, 19 nt, Human
cuuccuaauuccacagcug

SEQ ID NO: 1737576 - RNA, 18 nt, Human
cuuccuaauuccacagcu

SEQ ID NO: 1737577 - RNA, 17 nt, Human
cuuccuaauuccacagc

SEQ ID NO: 1737578 - RNA, 13 nt, Human
cuuccuaauucca

SEQ ID NO: 1737579 - RNA, 13 nt, Human
cuuccucccucau

SEQ ID NO: 1737580 - RNA, 21 nt, Human
cuuccaggggugggacacccu

SEQ ID NO: 1737581 - RNA, 17 nt, Human
cuuccaggggugggaca

SEQ ID NO: 1737582 - RNA, 15 nt, Human
cuuccagggguggga

SEQ ID NO: 1737583 - RNA, 14 nt, Human
cuuccagggguggg

SEQ ID NO: 1737584 - RNA, 19 nt, Human
cuuccaggcugggagagcc

SEQ ID NO: 1737585 - RNA, 16 nt, Human
cuuccaggcugggaga

SEQ ID NO: 1737586 - RNA, 15 nt, Human
cuuccaggcugggag

SEQ ID NO: 1737587 - RNA, 16 nt, Human
cuucaguggcagcugc

SEQ ID NO: 1737588 - RNA, 15 nt, Human
cuucaguggcagcug

SEQ ID NO: 1737589 - RNA, 14 nt, Human
cuucaguggcagcu

SEQ ID NO: 1737590 - RNA, 13 nt, Human
cuucaguggcagc

SEQ ID NO: 1737591 - RNA, 22 nt, Human
cuucagugccuuauggaacacu

SEQ ID NO: 1737592 - RNA, 18 nt, Human
cuucagugccuuauggaa

SEQ ID NO: 1737593 - RNA, 23 nt, Human
cuucaguaagccgugauuuucau

SEQ ID NO: 1737594 - RNA, 16 nt, Human
cuucaguaagccguga

SEQ ID NO: 1737595 - RNA, 15 nt, Human
cuucagggagugagg

SEQ ID NO: 1737596 - RNA, 22 nt, Human
cuucaggcucuucuccuuucac

SEQ ID NO: 1737597 - RNA, 19 nt, Human
cuucaggcucuucuccuuu

SEQ ID NO: 1737598 - RNA, 21 nt, Human
cuuccacaagagcccaggccu

SEQ ID NO: 1737599 - RNA, 19 nt, Human
cuuccacaagagcccaggc

SEQ ID NO: 1737600 - RNA, 17 nt, Human
cuuccacaagagcccag

SEQ ID NO: 1737601 - RNA, 17 nt, Human
cuucaguggcagcugcu

SEQ ID NO: 1737602 - RNA, 20 nt, Human
cuucauucaacccaccugcg

SEQ ID NO: 1737603 - RNA, 14 nt, Human
cuuccaggcuggga

SEQ ID NO: 1737604 - RNA, 12 nt, Human
cuuccaggcugg

SEQ ID NO: 1737605 - RNA, 15 nt, Human
cuucuguugcugccu

SEQ ID NO: 1737606 - RNA, 13 nt, Human
cuucuguggcuca

SEQ ID NO: 1737607 - RNA, 21 nt, Human
cuucuguggguuucuaaagcu

SEQ ID NO: 1737608 - RNA, 14 nt, Human
cuucuguggguuuc

SEQ ID NO: 1737609 - RNA, 13 nt, Human
cuucuguggguuu

SEQ ID NO: 1737610 - RNA, 22 nt, Human
cuucuguggcucacagaacccu

SEQ ID NO: 1737611 - RNA, 15 nt, Human
cuucuguggcucaca

SEQ ID NO: 1737612 - RNA, 22 nt, Human
cuucuuuauaauucuacuuuga

SEQ ID NO: 1737613 - RNA, 18 nt, Human
cuugaaaaaugcauguug

SEQ ID NO: 1737614 - RNA, 12 nt, Human
cuugaaaaaugc

SEQ ID NO: 1737615 - RNA, 23 nt, Human
cuugaaaacacuguucucugccc

SEQ ID NO: 1737616 - RNA, 14 nt, Human
cuugaaaacacugu

SEQ ID NO: 1737617 - RNA, 18 nt, Human
cuugaaaauuaacaugaa

SEQ ID NO: 1737618 - RNA, 13 nt, Human
cuugaaaauuaac

SEQ ID NO: 1737619 - RNA, 12 nt, Human
cuugaaaauuaa

SEQ ID NO: 1737620 - RNA, 13 nt, Human
cuugaacuccugg

SEQ ID NO: 1737621 - RNA, 16 nt, Human
cuugaacuccugaccu

SEQ ID NO: 1737622 - RNA, 13 nt, Human
cuugaacuccuga

SEQ ID NO: 1737623 - RNA, 17 nt, Human
cuugaacuuugaccucu

SEQ ID NO: 1737624 - RNA, 21 nt, Human
cuugaacuuugaccucugcag

SEQ ID NO: 1737625 - RNA, 18 nt, Human
cuugaacuccugaccuca

SEQ ID NO: 1737626 - RNA, 13 nt, Human
cuugaccucaggu

SEQ ID NO: 1737627 - RNA, 21 nt, Human
cuugaccgugaggccagagac

SEQ ID NO: 1737628 - RNA, 20 nt, Human
cuugaccgugaggccagaga

SEQ ID NO: 1737629 - RNA, 18 nt, Human
cuugaccgugaggccaga

SEQ ID NO: 1737630 - RNA, 23 nt, Human
cuugaccauucuccaccugccag

SEQ ID NO: 1737631 - RNA, 22 nt, Human
cuugaccauucuccaccugcca

SEQ ID NO: 1737632 - RNA, 17 nt, Human
cuugaccgugaggccag

SEQ ID NO: 1737633 - RNA, 16 nt, Human
cuugaagacuuuucuu

SEQ ID NO: 1737634 - RNA, 20 nt, Human
cuugaggguugggcuggugu

SEQ ID NO: 1737635 - RNA, 19 nt, Human
cuugaggguugggcuggug

SEQ ID NO: 1737636 - RNA, 21 nt, Human
cuugaggguugggcugguguc

SEQ ID NO: 1737637 - RNA, 15 nt, Human
cuugagccuugaacu

SEQ ID NO: 1737638 - RNA, 17 nt, Human
cuugagccuugaacuuu

SEQ ID NO: 1737639 - RNA, 18 nt, Human
cuugagccuugaacuuug

SEQ ID NO: 1737640 - RNA, 16 nt, Human
cuugagccugggaggu

SEQ ID NO: 1737641 - RNA, 21 nt, Human
cuucuguccuacucuguguca

SEQ ID NO: 1737642 - RNA, 19 nt, Human
cuucuguccuacucugugu

SEQ ID NO: 1737643 - RNA, 18 nt, Human
cuucuguccuacucugug

SEQ ID NO: 1737644 - RNA, 17 nt, Human
cuucuguccuacucugu

SEQ ID NO: 1737645 - RNA, 16 nt, Human
cuucuguccuacucug

SEQ ID NO: 1737646 - RNA, 20 nt, Human
cuucuguacgucugacaggc

SEQ ID NO: 1737647 - RNA, 18 nt, Human
cuucuguacgucugacag

SEQ ID NO: 1737648 - RNA, 15 nt, Human
cuucuguacgucuga

SEQ ID NO: 1737649 - RNA, 14 nt, Human
cuucuguacgucug

SEQ ID NO: 1737650 - RNA, 21 nt, Human
cuucuguacgucugacaggca

SEQ ID NO: 1737651 - RNA, 13 nt, Human
cuucugcuucagc

SEQ ID NO: 1737652 - RNA, 23 nt, Human
cuucuggguuccuuccucugagc

SEQ ID NO: 1737653 - RNA, 17 nt, Human
cuucuggguuccuuccu

SEQ ID NO: 1737654 - RNA, 16 nt, Human
cuucuggguuccuucc

SEQ ID NO: 1737655 - RNA, 14 nt, Human
cuucugguugaugc

SEQ ID NO: 1737656 - RNA, 20 nt, Human
cuucuccacuuucuagccag

SEQ ID NO: 1737657 - RNA, 11 nt, Human
cuucuccacuu

SEQ ID NO: 1737658 - RNA, 13 nt, Human
cuucuccacugga

SEQ ID NO: 1737659 - RNA, 15 nt, Human
cuucuccacuggaug

SEQ ID NO: 1737660 - RNA, 14 nt, Human
cuucuccacuggau

SEQ ID NO: 1737661 - RNA, 15 nt, Human
cuuccucccucauuc

SEQ ID NO: 1737662 - RNA, 14 nt, Human
cuucuccaggcugu

SEQ ID NO: 1737663 - RNA, 13 nt, Human
cuucuccaggcug

SEQ ID NO: 1737664 - RNA, 12 nt, Human
cuucuccaggcu

SEQ ID NO: 1737665 - RNA, 17 nt, Human
cuucuccacuggaugga

SEQ ID NO: 1737666 - RNA, 19 nt, Human
cuucucuccagccccugga

SEQ ID NO: 1737667 - RNA, 17 nt, Human
cuucucuccagccccug

SEQ ID NO: 1737668 - RNA, 15 nt, Human
cuucucuccagcccc

SEQ ID NO: 1737669 - RNA, 13 nt, Human
cuucucuccagcc

SEQ ID NO: 1737670 - RNA, 12 nt, Human
cuucucuccagc

SEQ ID NO: 1737671 - RNA, 19 nt, Human
cuucuccuucaccuuuguc

SEQ ID NO: 1737672 - RNA, 20 nt, Human
cuucuccuuagaaguggaag

SEQ ID NO: 1737673 - RNA, 13 nt, Human
cuucucugaagga

SEQ ID NO: 1737674 - RNA, 19 nt, Human
cuuuggcuauuagagauca

SEQ ID NO: 1737675 - RNA, 14 nt, Human
cuuuguccccaccg

SEQ ID NO: 1737676 - RNA, 15 nt, Human
cuuuguccccaccgc

SEQ ID NO: 1737677 - RNA, 23 nt, Human
cuuugucuacuucaaaaguuugu

SEQ ID NO: 1737678 - RNA, 15 nt, Human
cuuugugaggaagcc

SEQ ID NO: 1737679 - RNA, 19 nt, Human
cuuugugaggaagccgcug

SEQ ID NO: 1737680 - RNA, 14 nt, Human
cuuugaccucugca

SEQ ID NO: 1737681 - RNA, 15 nt, Human
cuuugaccucugcag

SEQ ID NO: 1737682 - RNA, 15 nt, Human
cuuucuuccucugcu

SEQ ID NO: 1737683 - RNA, 14 nt, Human
cuuucuuccucugc

SEQ ID NO: 1737684 - RNA, 13 nt, Human
cuuucuuccucug

SEQ ID NO: 1737685 - RNA, 12 nt, Human
cuuucuuccucu

SEQ ID NO: 1737686 - RNA, 17 nt, Human
cuuugaccucugcagca

SEQ ID NO: 1737687 - RNA, 18 nt, Human
cuuugaccucugcagcaa

SEQ ID NO: 1737688 - RNA, 20 nt, Human
cuuugaccucugcagcaaua

SEQ ID NO: 1737689 - RNA, 24 nt, Human
cuuugaccucugcagcaauaaagc

SEQ ID NO: 1737690 - RNA, 20 nt, Human
cuuugcagacaggcaagcac

SEQ ID NO: 1737691 - RNA, 13 nt, Human
cuuugaccucugc

SEQ ID NO: 1737692 - RNA, 22 nt, Human
cuuugcauaacguauaaaagcc

SEQ ID NO: 1737693 - RNA, 15 nt, Human
cuuuccaucuacccu

SEQ ID NO: 1737694 - RNA, 16 nt, Human
cuuucccucccuuccu

SEQ ID NO: 1737695 - RNA, 14 nt, Human
cuuucccucccuuc

SEQ ID NO: 1737696 - RNA, 13 nt, Human
cuuucccucccuu

SEQ ID NO: 1737697 - RNA, 11 nt, Human
cuuucccuccc

SEQ ID NO: 1737698 - RNA, 12 nt, Human
cuuuccugaggc

SEQ ID NO: 1737699 - RNA, 14 nt, Human
cuuucucugaggac

SEQ ID NO: 1737700 - RNA, 15 nt, Human
cuuucucugaggaca

SEQ ID NO: 1737701 - RNA, 15 nt, Human
cuuuccugaggcugg

SEQ ID NO: 1737702 - RNA, 13 nt, Human
cuuuccugaggcu

SEQ ID NO: 1737703 - RNA, 12 nt, Human
cuuucucugagg

SEQ ID NO: 1737704 - RNA, 17 nt, Human
cuuucuggcuaugcauu

SEQ ID NO: 1737705 - RNA, 18 nt, Human
cuuucuggcuaugcauuu

SEQ ID NO: 1737706 - RNA, 19 nt, Human
cuuucuggcuaugcauuug

SEQ ID NO: 1737707 - RNA, 20 nt, Human
cuuucuggcuaugcauuuga

SEQ ID NO: 1737708 - RNA, 20 nt, Human
cuuucugggcaccggggccu

SEQ ID NO: 1737709 - RNA, 11 nt, Human
cuuucuuccuc

SEQ ID NO: 1737710 - RNA, 19 nt, Human
cuugaguuuaaauuguaau

SEQ ID NO: 1737711 - RNA, 23 nt, Human
cuuggggggcugaggugggagga

SEQ ID NO: 1737712 - RNA, 16 nt, Human
cuuguaaauagcucag

SEQ ID NO: 1737713 - RNA, 21 nt, Human
cuuguaaauagcucagguguc

SEQ ID NO: 1737714 - RNA, 22 nt, Human
cuuguacauaaugcgugcauac

SEQ ID NO: 1737715 - RNA, 19 nt, Human
cuuguacauaaugcgugca

SEQ ID NO: 1737716 - RNA, 21 nt, Human
cuuguacauaaugcgugcaua

SEQ ID NO: 1737717 - RNA, 18 nt, Human
cuuguaaauagcucaggu

SEQ ID NO: 1737718 - RNA, 17 nt, Human
cuuguaaauagcucagg

SEQ ID NO: 1737719 - RNA, 15 nt, Human
cuuguacauaaugcg

SEQ ID NO: 1737720 - RNA, 12 nt, Human
cuuguacauaau

SEQ ID NO: 1737721 - RNA, 17 nt, Human
cuuguacuuuauuuucu

SEQ ID NO: 1737722 - RNA, 13 nt, Human
cuuuacuauggcc

SEQ ID NO: 1737723 - RNA, 22 nt, Human
cuuuaccuuuuuuauacauaaa

SEQ ID NO: 1737724 - RNA, 19 nt, Human
cuuuauaauucuacuuuga

SEQ ID NO: 1737725 - RNA, 13 nt, Human
cuuuauaauucua

SEQ ID NO: 1737726 - RNA, 15 nt, Human
cuuuagcgcccaguu

SEQ ID NO: 1737727 - RNA, 14 nt, Human
cuuuagcgcccagu

SEQ ID NO: 1737728 - RNA, 15 nt, Human
cuuuaugcacaaaau

SEQ ID NO: 1737729 - RNA, 23 nt, Human
cuuuaucuugaauaauguaagac

SEQ ID NO: 1737730 - RNA, 21 nt, Human
cuuuaucuugaauaauguaag

SEQ ID NO: 1737731 - RNA, 18 nt, Human
cuuuaucuugaauaaugu

SEQ ID NO: 1737732 - RNA, 20 nt, Human
cuuuuguucuugguuuguaa

SEQ ID NO: 1737733 - RNA, 17 nt, Human
cuuuuuauggccuguga

SEQ ID NO: 1737734 - RNA, 11 nt, Human
cuuuuguucuu

SEQ ID NO: 1737735 - RNA, 12 nt, Human
cuuuuguucuug

SEQ ID NO: 1737736 - RNA, 18 nt, Human
cuuuguuaguuucuccaa

SEQ ID NO: 1737737 - RNA, 22 nt, Human
cuuuuuuggcugcugaaggcuc

SEQ ID NO: 1737738 - RNA, 20 nt, Human
cuuuuuuggcugcugaaggc

SEQ ID NO: 1737739 - RNA, 17 nt, Human
cuuuuuuggcugcugaa

SEQ ID NO: 1737740 - RNA, 18 nt, Human
gaaaacacuguucucugc

SEQ ID NO: 1737741 - RNA, 19 nt, Human
gaaaacacauuuuucuuag

SEQ ID NO: 1737742 - RNA, 18 nt, Human
gaaaacacauuuuucuua

SEQ ID NO: 1737743 - RNA, 15 nt, Human
gaaaaaggaggaaga

SEQ ID NO: 1737744 - RNA, 12 nt, Human
gaaaaaggagga

SEQ ID NO: 1737745 - RNA, 18 nt, Human
gaaaaucuuauaauuuaa

SEQ ID NO: 1737746 - RNA, 22 nt, Human
gaaaaucuacacuccagugaga

SEQ ID NO: 1737747 - RNA, 22 nt, Human
gaaaaucagccugcuccagcug

SEQ ID NO: 1737748 - RNA, 20 nt, Human
gaaaaucagccugcuccagc

SEQ ID NO: 1737749 - RNA, 19 nt, Human
gaaaaguuuuguaaauuuc

SEQ ID NO: 1737750 - RNA, 18 nt, Human
gaaaagggaacugaacau

SEQ ID NO: 1737751 - RNA, 22 nt, Human
gaaaacguggcugcuucaagga

SEQ ID NO: 1737752 - RNA, 20 nt, Human
gaaaacguggcugcuucaag

SEQ ID NO: 1737753 - RNA, 19 nt, Human
gaaaagcugcugacagugu

SEQ ID NO: 1737754 - RNA, 24 nt, Human
gaaaacacuguucucugcccucca

SEQ ID NO: 1737755 - RNA, 15 nt, Human
gaaacuccagaugcc

SEQ ID NO: 1737756 - RNA, 19 nt, Human
gaaacuaggugcauauuua

SEQ ID NO: 1737757 - RNA, 14 nt, Human
gaaacccugucucu

SEQ ID NO: 1737758 - RNA, 23 nt, Human
gaaacccagcucugguccauaga

SEQ ID NO: 1737759 - RNA, 19 nt, Human
gaaaccccuguaggccuca

SEQ ID NO: 1737760 - RNA, 19 nt, Human
gaaacccagcucuggucca

SEQ ID NO: 1737761 - RNA, 18 nt, Human
gaaacccagcucuggucc

SEQ ID NO: 1737762 - RNA, 16 nt, Human
gaaacccagcucuggu

SEQ ID NO: 1737763 - RNA, 15 nt, Human
gaaacccagcucugg

SEQ ID NO: 1737764 - RNA, 14 nt, Human
gaaacccagcucug

SEQ ID NO: 1737765 - RNA, 13 nt, Human
gaaacccagcucu

SEQ ID NO: 1737766 - RNA, 21 nt, Human
gaaagcuugcccuggugccuc

SEQ ID NO: 1737767 - RNA, 14 nt, Human
gaaagcagggacuu

SEQ ID NO: 1737768 - RNA, 22 nt, Human
gaaagcccugagcuuucugcua

SEQ ID NO: 1737769 - RNA, 21 nt, Human
gaaagcccugagcuuucugcu

SEQ ID NO: 1737770 - RNA, 17 nt, Human
gaaagcccugagcuuuc

SEQ ID NO: 1737771 - RNA, 22 nt, Human
gaaagcagaacagugauuacca

SEQ ID NO: 1737772 - RNA, 17 nt, Human
gaaagcagaacagugau

SEQ ID NO: 1737773 - RNA, 16 nt, Human
gaaagaguaggaagac

SEQ ID NO: 1737774 - RNA, 15 nt, Human
gaaagaguaggaaga

SEQ ID NO: 1737775 - RNA, 21 nt, Human
gaaagaguacucuuguuuccu

SEQ ID NO: 1737776 - RNA, 21 nt, Human
gaaagaggaaugaaguacuca

SEQ ID NO: 1737777 - RNA, 19 nt, Human
gaaagacuuuuccaacccu

SEQ ID NO: 1737778 - RNA, 13 nt, Human
ccuguagcccuaa

SEQ ID NO: 1737779 - RNA, 16 nt, Human
ccuguagagugggagc

SEQ ID NO: 1737780 - RNA, 15 nt, Human
ccuguagagugggag

SEQ ID NO: 1737781 - RNA, 19 nt, Human
ccuguagagugggagcuga

SEQ ID NO: 1737782 - RNA, 14 nt, Human
ccugguggcagugg

SEQ ID NO: 1737783 - RNA, 13 nt, Human
ccugguggcagug

SEQ ID NO: 1737784 - RNA, 15 nt, Human
ccugguggcaguggg

SEQ ID NO: 1737785 - RNA, 10 nt, Human
ccuguaccuc

SEQ ID NO: 1737786 - RNA, 12 nt, Human
ccuguaccucuu

SEQ ID NO: 1737787 - RNA, 16 nt, Human
ccugucccccugacaa

SEQ ID NO: 1737788 - RNA, 15 nt, Human
ccugucccccugaca

SEQ ID NO: 1737789 - RNA, 14 nt, Human
ccugucccccugac

SEQ ID NO: 1737790 - RNA, 13 nt, Human
ccugucccccuga

SEQ ID NO: 1737791 - RNA, 12 nt, Human
ccugucccccug

SEQ ID NO: 1737792 - RNA, 18 nt, Human
ccugguggcagcugcggu

SEQ ID NO: 1737793 - RNA, 17 nt, Human
ccugguggcagcugcgg

SEQ ID NO: 1737794 - RNA, 16 nt, Human
ccugguggcagcugcg

SEQ ID NO: 1737795 - RNA, 15 nt, Human
ccugguggcagcugc

SEQ ID NO: 1737796 - RNA, 14 nt, Human
ccugguggcagcug

SEQ ID NO: 1737797 - RNA, 22 nt, Human
ccugguggcagcucaccucucc

SEQ ID NO: 1737798 - RNA, 21 nt, Human
ccugguggcagcucaccucuc

SEQ ID NO: 1737799 - RNA, 19 nt, Human
ccugguggcagcucaccuc

SEQ ID NO: 1737800 - RNA, 19 nt, Human
ccugggggcugggcagagg

SEQ ID NO: 1737801 - RNA, 21 nt, Human
ccugggggcugggcagaggaa

SEQ ID NO: 1737802 - RNA, 20 nt, Human
ccugggggcugggcagagga

SEQ ID NO: 1737803 - RNA, 16 nt, Human
ccugggcagaaggaag

SEQ ID NO: 1737804 - RNA, 18 nt, Human
ccugggagugagcugguu

SEQ ID NO: 1737805 - RNA, 16 nt, Human
ccugggagugagcugg

SEQ ID NO: 1737806 - RNA, 22 nt, Human
ccugggaggucaaggcugcagu

SEQ ID NO: 1737807 - RNA, 16 nt, Human
ccuggcccacugcauc

SEQ ID NO: 1737808 - RNA, 16 nt, Human
ccuggcuuuucacugc

SEQ ID NO: 1737809 - RNA, 18 nt, Human
ccuggcuuuucacugcug

SEQ ID NO: 1737810 - RNA, 17 nt, Human
ccuggcuuuucacugcu

SEQ ID NO: 1737811 - RNA, 23 nt, Human
ccuggccagaugcaccagcccuu

SEQ ID NO: 1737812 - RNA, 21 nt, Human
ccuggccagaugcaccagccc

SEQ ID NO: 1737813 - RNA, 14 nt, Human
ccuggcccacugca

SEQ ID NO: 1737814 - RNA, 13 nt, Human
ccuggcccacugc

SEQ ID NO: 1737815 - RNA, 13 nt, Human
ccuggccacgccc

SEQ ID NO: 1737816 - RNA, 13 nt, Human
ccuggcaugggaa

SEQ ID NO: 1737817 - RNA, 16 nt, Human
ccuggcacugcuucca

SEQ ID NO: 1737818 - RNA, 13 nt, Human
ccuggcacugcuu

SEQ ID NO: 1737819 - RNA, 12 nt, Human
ccuggcacugcu

SEQ ID NO: 1737820 - RNA, 21 nt, Human
ccuggcacccggccccugcug

SEQ ID NO: 1737821 - RNA, 20 nt, Human
ccuggcacccggccccugcu

SEQ ID NO: 1737822 - RNA, 19 nt, Human
ccuggcacccggccccugc

SEQ ID NO: 1737823 - RNA, 16 nt, Human
ccuggagaacuagaga

SEQ ID NO: 1737824 - RNA, 13 nt, Human
ccuggagaacuag

SEQ ID NO: 1737825 - RNA, 12 nt, Human
ccuggagaacua

SEQ ID NO: 1737826 - RNA, 21 nt, Human
ccugcuaauuccccagauugc

SEQ ID NO: 1737827 - RNA, 20 nt, Human
ccugccuguugggccaggag

SEQ ID NO: 1737828 - RNA, 19 nt, Human
ccugccuguugggccagga

SEQ ID NO: 1737829 - RNA, 18 nt, Human
ccugccuguugggccagg

SEQ ID NO: 1737830 - RNA, 14 nt, Human
ccuggcaugggaau

SEQ ID NO: 1737831 - RNA, 11 nt, Human
ccucuuccuga

SEQ ID NO: 1737832 - RNA, 13 nt, Human
ccugaaagaggaa

SEQ ID NO: 1737833 - RNA, 14 nt, Human
ccugaaagcccuga

SEQ ID NO: 1737834 - RNA, 13 nt, Human
ccugaaagcccug

SEQ ID NO: 1737835 - RNA, 18 nt, Human
ccugaaagcccugagcuu

SEQ ID NO: 1737836 - RNA, 21 nt, Human
ccugaaggccccgcccaggcu

SEQ ID NO: 1737837 - RNA, 20 nt, Human
ccugaaggccccgcccaggc

SEQ ID NO: 1737838 - RNA, 22 nt, Human
ccugaaggccccgcccaggcuu

SEQ ID NO: 1737839 - RNA, 19 nt, Human
ccugaaggccccgcccagg

SEQ ID NO: 1737840 - RNA, 18 nt, Human
ccugaaggccccgcccag

SEQ ID NO: 1737841 - RNA, 14 nt, Human
ccugaaggccccgc

SEQ ID NO: 1737842 - RNA, 15 nt, Human
ccugagcugggauga

SEQ ID NO: 1737843 - RNA, 17 nt, Human
ccugaggcuccacuugg

SEQ ID NO: 1737844 - RNA, 13 nt, Human
ccugaggcuccac

SEQ ID NO: 1737845 - RNA, 14 nt, Human
ccugaggcuccacu

SEQ ID NO: 1737846 - RNA, 16 nt, Human
ccugaggcugggcucc

SEQ ID NO: 1737847 - RNA, 15 nt, Human
ccugaggcugggcuc

SEQ ID NO: 1737848 - RNA, 14 nt, Human
ccugaggcugggcu

SEQ ID NO: 1737849 - RNA, 13 nt, Human
ccugaggcugggc

SEQ ID NO: 1737850 - RNA, 18 nt, Human
ccugaggcccagagggcc

SEQ ID NO: 1737851 - RNA, 17 nt, Human
ccugaggcccagagggc

SEQ ID NO: 1737852 - RNA, 16 nt, Human
ccugaggcccagaggg

SEQ ID NO: 1737853 - RNA, 15 nt, Human
ccugaggcccagagg

SEQ ID NO: 1737854 - RNA, 12 nt, Human
ccugagcuggga

SEQ ID NO: 1737855 - RNA, 18 nt, Human
ccugagccagauuucacu

SEQ ID NO: 1737856 - RNA, 16 nt, Human
ccugagccagauuuca

SEQ ID NO: 1737857 - RNA, 15 nt, Human
ccugagccagauuuc

SEQ ID NO: 1737858 - RNA, 20 nt, Human
ccugaagucacacagugagu

SEQ ID NO: 1737859 - RNA, 22 nt, Human
ccugaagucuuuguacagacaa

SEQ ID NO: 1737860 - RNA, 19 nt, Human
ccugaaguaagcaaagacu

SEQ ID NO: 1737861 - RNA, 20 nt, Human
ccugagccagauuucacucu

SEQ ID NO: 1737862 - RNA, 19 nt, Human
ccugccaauggacuaacuu

SEQ ID NO: 1737863 - RNA, 19 nt, Human
ccugccaccacgcccggcu

SEQ ID NO: 1737864 - RNA, 15 nt, Human
ccugccaccacgccc

SEQ ID NO: 1737865 - RNA, 23 nt, Human
ccugcauuugugaaaugauggug

SEQ ID NO: 1737866 - RNA, 13 nt, Human
ccugccacccugg

SEQ ID NO: 1737867 - RNA, 12 nt, Human
ccugccacccug

SEQ ID NO: 1737868 - RNA, 14 nt, Human
ccugccacccuggg

SEQ ID NO: 1737869 - RNA, 22 nt, Human
ccugccacccuggggagaaagu

SEQ ID NO: 1737870 - RNA, 16 nt, Human
ccugccacccugggga

SEQ ID NO: 1737871 - RNA, 21 nt, Human
ccugcacacgcuccuuccucu

SEQ ID NO: 1737872 - RNA, 19 nt, Human
ccugcaaagcccagcuuga

SEQ ID NO: 1737873 - RNA, 23 nt, Human
ccugcacaaagcccuuccauguc

SEQ ID NO: 1737874 - RNA, 14 nt, Human
ccugcaaagcccag

SEQ ID NO: 1737875 - RNA, 16 nt, Human
ccugcaaagcccagcu

SEQ ID NO: 1737876 - RNA, 15 nt, Human
ccugcaaagcccagc

SEQ ID NO: 1737877 - RNA, 20 nt, Human
ccugcacaaagcccuuccau

SEQ ID NO: 1737878 - RNA, 22 nt, Human
ccugcacaaagcccuuccaugu

SEQ ID NO: 1737879 - RNA, 18 nt, Human
ccugcaaagcccagcuug

SEQ ID NO: 1737880 - RNA, 17 nt, Human
ccugcaaagcccagcuu

SEQ ID NO: 1737881 - RNA, 17 nt, Human
ccugccccugagcccau

SEQ ID NO: 1737882 - RNA, 22 nt, Human
ccugccccuccucucugcccua

SEQ ID NO: 1737883 - RNA, 21 nt, Human
ccugccccuccucucugcccu

SEQ ID NO: 1737884 - RNA, 20 nt, Human
ccugccccuccucucugccc

SEQ ID NO: 1737885 - RNA, 19 nt, Human
ccugccccuccucucugcc

SEQ ID NO: 1737886 - RNA, 14 nt, Human
ccugccccucccuu

SEQ ID NO: 1737887 - RNA, 18 nt, Human
ccugccccuccucucugc

SEQ ID NO: 1737888 - RNA, 18 nt, Human
ccugccccucccuucaac

SEQ ID NO: 1737889 - RNA, 16 nt, Human
ccugccccucccuuca

SEQ ID NO: 1737890 - RNA, 15 nt, Human
ccugccccucccuuc

SEQ ID NO: 1737891 - RNA, 16 nt, Human
ccugcccggcugcgga

SEQ ID NO: 1737892 - RNA, 14 nt, Human
ccugcccggcugcg

SEQ ID NO: 1737893 - RNA, 14 nt, Human
ccugccccccagcc

SEQ ID NO: 1737894 - RNA, 15 nt, Human
ccugccaggcauggu

SEQ ID NO: 1737895 - RNA, 12 nt, Human
ccugccaggcau

SEQ ID NO: 1737896 - RNA, 14 nt, Human
ccugccuguugggc

SEQ ID NO: 1737897 - RNA, 22 nt, Human
ccugccuguucccauucuugca

SEQ ID NO: 1737898 - RNA, 14 nt, Human
ccugccucagccuc

SEQ ID NO: 1737899 - RNA, 13 nt, Human
ccugccucagccu

SEQ ID NO: 1737900 - RNA, 12 nt, Human
ccugccucagcc

SEQ ID NO: 1737901 - RNA, 22 nt, Human
ccugcccuuaccugccaggaag

SEQ ID NO: 1737902 - RNA, 21 nt, Human
ccugcccuuaccugccaggaa

SEQ ID NO: 1737903 - RNA, 19 nt, Human
ccugcccuuaccugccagg

SEQ ID NO: 1737904 - RNA, 15 nt, Human
ccugcccugugggcc

SEQ ID NO: 1737905 - RNA, 14 nt, Human
ccugcccugugggc

SEQ ID NO: 1737906 - RNA, 12 nt, Human
ccugcccugugg

SEQ ID NO: 1737907 - RNA, 11 nt, Human
ccugcccugug

SEQ ID NO: 1737908 - RNA, 23 nt, Human
ccugcccugguuuccugcccugg

SEQ ID NO: 1737909 - RNA, 22 nt, Human
ccugcccugguuuccugcccug

SEQ ID NO: 1737910 - RNA, 21 nt, Human
ccugcccugguuuccugcccu

SEQ ID NO: 1737911 - RNA, 20 nt, Human
ccugcccugguuuccugccc

SEQ ID NO: 1737912 - RNA, 19 nt, Human
ccugcccugguuuccugcc

SEQ ID NO: 1737913 - RNA, 14 nt, Human
ccugcccugguuuc

SEQ ID NO: 1737914 - RNA, 22 nt, Human
ccugcccugggaggcagugaug

SEQ ID NO: 1737915 - RNA, 20 nt, Human
ccugcccugggaggcaguga

SEQ ID NO: 1737916 - RNA, 15 nt, Human
ccugcccugggaggc

SEQ ID NO: 1737917 - RNA, 14 nt, Human
ccugcccugggagg

SEQ ID NO: 1737918 - RNA, 12 nt, Human
ccugcccuggga

SEQ ID NO: 1737919 - RNA, 10 nt, Human
ccugcccugg

SEQ ID NO: 1737920 - RNA, 22 nt, Human
ccugccuguugggccaggagcc

SEQ ID NO: 1737921 - RNA, 14 nt, Human
ccuuugugaggaag

SEQ ID NO: 1737922 - RNA, 23 nt, Human
ccuuuguccccaccgcagacagg

SEQ ID NO: 1737923 - RNA, 22 nt, Human
ccuuuguccccaccgcagacag

SEQ ID NO: 1737924 - RNA, 23 nt, Human
ccuuugugaggaagccgcugggg

SEQ ID NO: 1737925 - RNA, 17 nt, Human
ccuuugugaggaagccg

SEQ ID NO: 1737926 - RNA, 16 nt, Human
ccuuugugaggaagcc

SEQ ID NO: 1737927 - RNA, 15 nt, Human
ccuuugugaggaagc

SEQ ID NO: 1737928 - RNA, 15 nt, Human
ccuuuuuuggcugcu

SEQ ID NO: 1737929 - RNA, 14 nt, Human
ccuuuguccccacc

SEQ ID NO: 1737930 - RNA, 18 nt, Human
ccuuuguccccaccgcag

SEQ ID NO: 1737931 - RNA, 16 nt, Human
ccuuuguccccaccgc

SEQ ID NO: 1737932 - RNA, 24 nt, Human
ccuuuguauucucuccuguaccuc

SEQ ID NO: 1737933 - RNA, 23 nt, Human
ccuuuguaaauugucagaugcug

SEQ ID NO: 1737934 - RNA, 22 nt, Human
ccuuuguauucucuccuguacc

SEQ ID NO: 1737935 - RNA, 23 nt, Human
ccuuuguauucucuccuguaccu

SEQ ID NO: 1737936 - RNA, 21 nt, Human
ccuuuguaaauugucagaugc

SEQ ID NO: 1737937 - RNA, 23 nt, Human
cgaacauguuuuucuucucccuc

SEQ ID NO: 1737938 - RNA, 21 nt, Human
cgaacauguuuuucuucuccc

SEQ ID NO: 1737939 - RNA, 22 nt, Human
ccuuuuuuggcugcugaaggcu

SEQ ID NO: 1737940 - RNA, 20 nt, Human
ccuuuuuuggcugcugaagg

SEQ ID NO: 1737941 - RNA, 18 nt, Human
ccuuuuuuggcugcugaa

SEQ ID NO: 1737942 - RNA, 17 nt, Human
ccuuuuuuggcugcuga

SEQ ID NO: 1737943 - RNA, 23 nt, Human
cgaaagggacuuggaagcuccgc

SEQ ID NO: 1737944 - RNA, 14 nt, Human
cgaauauugcugau

SEQ ID NO: 1737945 - RNA, 12 nt, Human
cgaauauugcug

SEQ ID NO: 1737946 - RNA, 11 nt, Human
cgaauauugcu

SEQ ID NO: 1737947 - RNA, 16 nt, Human
cgaauagcugggacua

SEQ ID NO: 1737948 - RNA, 17 nt, Human
cgaauauugcugauggu

SEQ ID NO: 1737949 - RNA, 15 nt, Human
cgaauauugcugaug

SEQ ID NO: 1737950 - RNA, 17 nt, Human
ccuucggccuccauccu

SEQ ID NO: 1737951 - RNA, 18 nt, Human
ccuucggccuccauccug

SEQ ID NO: 1737952 - RNA, 13 nt, Human
ccuuccaggggug

SEQ ID NO: 1737953 - RNA, 18 nt, Human
ccuuccaugucgccucug

SEQ ID NO: 1737954 - RNA, 17 nt, Human
ccuuccauggacuuugu

SEQ ID NO: 1737955 - RNA, 16 nt, Human
ccuucucuccagcccc

SEQ ID NO: 1737956 - RNA, 15 nt, Human
ccuucucuccagccc

SEQ ID NO: 1737957 - RNA, 13 nt, Human
ccuucucuccagc

SEQ ID NO: 1737958 - RNA, 12 nt, Human
ccuucucuccag

SEQ ID NO: 1737959 - RNA, 20 nt, Human
ccugugccucugggacugga

SEQ ID NO: 1737960 - RNA, 20 nt, Human
ccugugggcccccaaaugga

SEQ ID NO: 1737961 - RNA, 20 nt, Human
ccuguggaugauaaaacaca

SEQ ID NO: 1737962 - RNA, 18 nt, Human
ccuguggaucaaauccag

SEQ ID NO: 1737963 - RNA, 15 nt, Human
ccuuggauugucccc

SEQ ID NO: 1737964 - RNA, 22 nt, Human
ccuuggcucaaguccucuuuuc

SEQ ID NO: 1737965 - RNA, 19 nt, Human
ccuuggauuguccccgacc

SEQ ID NO: 1737966 - RNA, 21 nt, Human
ccuugacagggcacaccgggc

SEQ ID NO: 1737967 - RNA, 18 nt, Human
ccuugacagggcacaccg

SEQ ID NO: 1737968 - RNA, 18 nt, Human
ccuucucuccagccccug

SEQ ID NO: 1737969 - RNA, 17 nt, Human
ccuucucuccagccccu

SEQ ID NO: 1737970 - RNA, 23 nt, Human
ccuugacauuguagagcuucugg

SEQ ID NO: 1737971 - RNA, 16 nt, Human
ccuuggcugcagggag

SEQ ID NO: 1737972 - RNA, 14 nt, Human
ccuuggggagcagg

SEQ ID NO: 1737973 - RNA, 20 nt, Human
ccuuggugucgggcaugaca

SEQ ID NO: 1737974 - RNA, 19 nt, Human
ccuuggugucgggcaugac

SEQ ID NO: 1737975 - RNA, 21 nt, Human
ccuuggugucgggcaugacac

SEQ ID NO: 1737976 - RNA, 19 nt, Human
ccuucucuccagccccugg

SEQ ID NO: 1737977 - RNA, 24 nt, Human
cgcuacccgggaagggggcuggga

SEQ ID NO: 1737978 - RNA, 21 nt, Human
cgcuacccgggaagggggcug

SEQ ID NO: 1737979 - RNA, 18 nt, Human
cgcuacccgggaaggggg

SEQ ID NO: 1737980 - RNA, 14 nt, Human
cgcgacaaugcaaa

SEQ ID NO: 1737981 - RNA, 15 nt, Human
cgcgacaaugcaaac

SEQ ID NO: 1737982 - RNA, 19 nt, Human
cgcgguggcucacgccugu

SEQ ID NO: 1737983 - RNA, 21 nt, Human
cgcccagucuggaaugcagug

SEQ ID NO: 1737984 - RNA, 18 nt, Human
cgcccggcuaauuuuugu

SEQ ID NO: 1737985 - RNA, 19 nt, Human
cgcccagucuggaaugcag

SEQ ID NO: 1737986 - RNA, 13 nt, Human
cgcccagucugga

SEQ ID NO: 1737987 - RNA, 18 nt, Human
cgcccaacuaauuuuugu

SEQ ID NO: 1737988 - RNA, 19 nt, Human
cgcagcccugcagagggca

SEQ ID NO: 1737989 - RNA, 18 nt, Human
cgcagcccugcagagggc

SEQ ID NO: 1737990 - RNA, 24 nt, Human
cgcagcccugcuuugggcugcccu

SEQ ID NO: 1737991 - RNA, 15 nt, Human
cgcagcccugcuuug

SEQ ID NO: 1737992 - RNA, 13 nt, Human
cgcagcccugcuu

SEQ ID NO: 1737993 - RNA, 19 nt, Human
cgcugugcugcccugccca

SEQ ID NO: 1737994 - RNA, 23 nt, Human
cgcugugcugcccugcccaccug

SEQ ID NO: 1737995 - RNA, 21 nt, Human
cgcugugcugcccugcccacc

SEQ ID NO: 1737996 - RNA, 14 nt, Human
cgcugugcugcccu

SEQ ID NO: 1737997 - RNA, 13 nt, Human
cgcugugcugccc

SEQ ID NO: 1737998 - RNA, 11 nt, Human
cgcugugcugc

SEQ ID NO: 1737999 - RNA, 17 nt, Human
cggaauaguuggcuagg

SEQ ID NO: 1738000 - RNA, 16 nt, Human
cggaauaguuggcuag

SEQ ID NO: 1738001 - RNA, 14 nt, Human
cgcuuucuacccag

SEQ ID NO: 1738002 - RNA, 16 nt, Human
cgcuuucuacccagcg

SEQ ID NO: 1738003 - RNA, 17 nt, Human
cggagaaaggaagggcu

SEQ ID NO: 1738004 - RNA, 15 nt, Human
cggagaaaggaaggg

SEQ ID NO: 1738005 - RNA, 17 nt, Human
cggacuuagcugggaga

SEQ ID NO: 1738006 - RNA, 22 nt, Human
cggacagccacggccaggccag

SEQ ID NO: 1738007 - RNA, 21 nt, Human
cggacagccacggccaggcca

SEQ ID NO: 1738008 - RNA, 16 nt, Human
cggacuuagcugggag

SEQ ID NO: 1738009 - RNA, 20 nt, Human
cggccaggccagagggagug

SEQ ID NO: 1738010 - RNA, 12 nt, Human
cggccaggccag

SEQ ID NO: 1738011 - RNA, 11 nt, Human
cggccaggcca

SEQ ID NO: 1738012 - RNA, 14 nt, Human
cggcuggcagccca

SEQ ID NO: 1738013 - RNA, 13 nt, Human
cggcuggccuggc

SEQ ID NO: 1738014 - RNA, 23 nt, Human
cggcuggcagcccaccccucaac

SEQ ID NO: 1738015 - RNA, 14 nt, Human
cggcuggccuggcc

SEQ ID NO: 1738016 - RNA, 20 nt, Human
cgggaagggggcugggacau

SEQ ID NO: 1738017 - RNA, 19 nt, Human
cgggaagggggcugggaca

SEQ ID NO: 1738018 - RNA, 16 nt, Human
cgggaagggggcuggg

SEQ ID NO: 1738019 - RNA, 18 nt, Human
cgggaauuuucaucuagg

SEQ ID NO: 1738020 - RNA, 20 nt, Human
cgggaauuuucaucuaggau

SEQ ID NO: 1738021 - RNA, 16 nt, Human
cgaggacagggaggug

SEQ ID NO: 1738022 - RNA, 19 nt, Human
cgagcccugguggcagugg

SEQ ID NO: 1738023 - RNA, 13 nt, Human
cgagccuggcucc

SEQ ID NO: 1738024 - RNA, 17 nt, Human
cgcagcccugcagaggg

SEQ ID NO: 1738025 - RNA, 15 nt, Human
cgcagcccugcagag

SEQ ID NO: 1738026 - RNA, 20 nt, Human
cgcagcauauucaggaagcu

SEQ ID NO: 1738027 - RNA, 19 nt, Human
cgcagcauauucaggaagc

SEQ ID NO: 1738028 - RNA, 17 nt, Human
cgcacugggcuugggga

SEQ ID NO: 1738029 - RNA, 23 nt, Human
cgcacuucgggaggucgaggcag

SEQ ID NO: 1738030 - RNA, 13 nt, Human
cgcacugggcuug

SEQ ID NO: 1738031 - RNA, 23 nt, Human
cucagcggggacagcuccuucug

SEQ ID NO: 1738032 - RNA, 15 nt, Human
cucagcucccaaggc

SEQ ID NO: 1738033 - RNA, 19 nt, Human
cucagcucccaaggcucug

SEQ ID NO: 1738034 - RNA, 21 nt, Human
cucagcggggacagcuccuuc

SEQ ID NO: 1738035 - RNA, 20 nt, Human
cucagcggggacagcuccuu

SEQ ID NO: 1738036 - RNA, 19 nt, Human
cucagcggggacagcuccu

SEQ ID NO: 1738037 - RNA, 18 nt, Human
cucagcggggacagcucc

SEQ ID NO: 1738038 - RNA, 16 nt, Human
cucagcggggacagcu

SEQ ID NO: 1738039 - RNA, 15 nt, Human
cucagcggggacagc

SEQ ID NO: 1738040 - RNA, 14 nt, Human
cucagcggggacag

SEQ ID NO: 1738041 - RNA, 21 nt, Human
cucagcaaaagaugcuucuca

SEQ ID NO: 1738042 - RNA, 16 nt, Human
cucagcaggggagggu

SEQ ID NO: 1738043 - RNA, 20 nt, Human
cucagcaaaagaugcuucuc

SEQ ID NO: 1738044 - RNA, 19 nt, Human
cucagcaaaagaugcuucu

SEQ ID NO: 1738045 - RNA, 22 nt, Human
cucagcauccuggcacccggcc

SEQ ID NO: 1738046 - RNA, 21 nt, Human
cucagcauccuggcacccggc

SEQ ID NO: 1738047 - RNA, 13 nt, Human
cucagcauccugg

SEQ ID NO: 1738048 - RNA, 15 nt, Human
cucagcauccuggca

SEQ ID NO: 1738049 - RNA, 21 nt, Human
cucagcccucccugccccucc

SEQ ID NO: 1738050 - RNA, 20 nt, Human
cucagcccucccugccccuc

SEQ ID NO: 1738051 - RNA, 19 nt, Human
cucagcccucccugccccu

SEQ ID NO: 1738052 - RNA, 14 nt, Human
cucagcccucccug

SEQ ID NO: 1738053 - RNA, 16 nt, Human
cucagaucuucugugg

SEQ ID NO: 1738054 - RNA, 19 nt, Human
cucacuguugcccaggcug

SEQ ID NO: 1738055 - RNA, 18 nt, Human
cucacuguugcccaggcu

SEQ ID NO: 1738056 - RNA, 17 nt, Human
cucacuguugcccaggc

SEQ ID NO: 1738057 - RNA, 16 nt, Human
cucacuguugcccagg

SEQ ID NO: 1738058 - RNA, 19 nt, Human
cucagagagggugggagug

SEQ ID NO: 1738059 - RNA, 23 nt, Human
cucagagagggugggagugggcc

SEQ ID NO: 1738060 - RNA, 15 nt, Human
cucagagccaccccu

SEQ ID NO: 1738061 - RNA, 16 nt, Human
cucacugcagccucaa

SEQ ID NO: 1738062 - RNA, 15 nt, Human
cucacugcagccuca

SEQ ID NO: 1738063 - RNA, 20 nt, Human
cucacugcauccuccgccuc

SEQ ID NO: 1738064 - RNA, 15 nt, Human
cucacuguugcccag

SEQ ID NO: 1738065 - RNA, 14 nt, Human
cucacuguugccca

SEQ ID NO: 1738066 - RNA, 18 nt, Human
cucagcugucaaggcuca

SEQ ID NO: 1738067 - RNA, 19 nt, Human
cucagcugucaaggcucag

SEQ ID NO: 1738068 - RNA, 23 nt, Human
cucaggagcccugggaggcucug

SEQ ID NO: 1738069 - RNA, 22 nt, Human
cucaggagcccugggaggcucu

SEQ ID NO: 1738070 - RNA, 21 nt, Human
cucaggagcccugggaggcuc

SEQ ID NO: 1738071 - RNA, 20 nt, Human
cucaggagcccugggaggcu

SEQ ID NO: 1738072 - RNA, 17 nt, Human
cucaggagcccugggag

SEQ ID NO: 1738073 - RNA, 16 nt, Human
cucaggagcccuggga

SEQ ID NO: 1738074 - RNA, 15 nt, Human
cucaggagcccuggg

SEQ ID NO: 1738075 - RNA, 14 nt, Human
cucaggagcccugg

SEQ ID NO: 1738076 - RNA, 13 nt, Human
cucaggagcccug

SEQ ID NO: 1738077 - RNA, 12 nt, Human
cucaggagcccu

SEQ ID NO: 1738078 - RNA, 24 nt, Human
cucaggagcccugggaggcucugg

SEQ ID NO: 1738079 - RNA, 18 nt, Human
cucaggcaggugggaugg

SEQ ID NO: 1738080 - RNA, 15 nt, Human
cucaggcagguggga

SEQ ID NO: 1738081 - RNA, 20 nt, Human
cucagggccuggcucaggug

SEQ ID NO: 1738082 - RNA, 19 nt, Human
cucagggccuggcucaggu

SEQ ID NO: 1738083 - RNA, 18 nt, Human
cucagggccuggcucagg

SEQ ID NO: 1738084 - RNA, 22 nt, Human
cucagggucccugguggcagcu

SEQ ID NO: 1738085 - RNA, 21 nt, Human
cucagggucccugguggcagc

SEQ ID NO: 1738086 - RNA, 20 nt, Human
cucagggucccugguggcag

SEQ ID NO: 1738087 - RNA, 14 nt, Human
cucagggccugguc

SEQ ID NO: 1738088 - RNA, 24 nt, Human
cucagggucccugguggcagcuca

SEQ ID NO: 1738089 - RNA, 24 nt, Human
cucagguaaucgaccugccucggc

SEQ ID NO: 1738090 - RNA, 22 nt, Human
cucagguaaucgaccugccucg

SEQ ID NO: 1738091 - RNA, 20 nt, Human
cucagguaaucgaccugccu

SEQ ID NO: 1738092 - RNA, 21 nt, Human
cucagguggggucacucuggc

SEQ ID NO: 1738093 - RNA, 20 nt, Human
cucagguggggucacucugg

SEQ ID NO: 1738094 - RNA, 19 nt, Human
cucagguggggucacucug

SEQ ID NO: 1738095 - RNA, 23 nt, Human
cucaggugauccacccaccucag

SEQ ID NO: 1738096 - RNA, 16 nt, Human
cucccaucacuucccu

SEQ ID NO: 1738097 - RNA, 22 nt, Human
cucccaggcgccccuucccccu

SEQ ID NO: 1738098 - RNA, 20 nt, Human
cucccaggcgccccuucccc

SEQ ID NO: 1738099 - RNA, 19 nt, Human
cucccaggcgccccuuccc

SEQ ID NO: 1738100 - RNA, 17 nt, Human
cucccaggcgccccuuc

SEQ ID NO: 1738101 - RNA, 23 nt, Human
cucccaaagugcugggauuacag

SEQ ID NO: 1738102 - RNA, 16 nt, Human
cucccaaagugcuggg

SEQ ID NO: 1738103 - RNA, 15 nt, Human
cucccaacucacccc

SEQ ID NO: 1738104 - RNA, 14 nt, Human
cucccaacucaccc

SEQ ID NO: 1738105 - RNA, 15 nt, Human
cucccacaaaggaga

SEQ ID NO: 1738106 - RNA, 16 nt, Human
cucccaacucacccca

SEQ ID NO: 1738107 - RNA, 17 nt, Human
cuccaugcugccuccag

SEQ ID NO: 1738108 - RNA, 16 nt, Human
cuccaugcugccucca

SEQ ID NO: 1738109 - RNA, 15 nt, Human
cuccaugcugccucc

SEQ ID NO: 1738110 - RNA, 14 nt, Human
cuccaugcugccuc

SEQ ID NO: 1738111 - RNA, 13 nt, Human
cuccaugcugccu

SEQ ID NO: 1738112 - RNA, 23 nt, Human
cuccagcuggccgggagccugau

SEQ ID NO: 1738113 - RNA, 22 nt, Human
cuccagcuggccgggagccuga

SEQ ID NO: 1738114 - RNA, 23 nt, Human
cucccgaauagcugggacuacag

SEQ ID NO: 1738115 - RNA, 20 nt, Human
cucccgaauagcugggacua

SEQ ID NO: 1738116 - RNA, 18 nt, Human
cucccucagucuggcccu

SEQ ID NO: 1738117 - RNA, 15 nt, Human
cucccuucauccuuc

SEQ ID NO: 1738118 - RNA, 23 nt, Human
cucccuucaaccauuccccaugg

SEQ ID NO: 1738119 - RNA, 22 nt, Human
cucccuucaaccauuccccaug

SEQ ID NO: 1738120 - RNA, 21 nt, Human
cucccuucaaccauuccccau

SEQ ID NO: 1738121 - RNA, 20 nt, Human
cuccccagccccaucccaaa

SEQ ID NO: 1738122 - RNA, 23 nt, Human
cuccccugcuggguguggcgcag

SEQ ID NO: 1738123 - RNA, 21 nt, Human
cuccccugcuggguguggcgc

SEQ ID NO: 1738124 - RNA, 21 nt, Human
cucauuugucacacacuuugg

SEQ ID NO: 1738125 - RNA, 17 nt, Human
cuccaaacccucgaggc

SEQ ID NO: 1738126 - RNA, 15 nt, Human
cuccaaacccucgag

SEQ ID NO: 1738127 - RNA, 21 nt, Human
cuccaaacccucgaggcggau

SEQ ID NO: 1738128 - RNA, 21 nt, Human
cucauugaccugaggcccuuc

SEQ ID NO: 1738129 - RNA, 19 nt, Human
cucauugaccugaggcccu

SEQ ID NO: 1738130 - RNA, 17 nt, Human
cucauugaccugaggcc

SEQ ID NO: 1738131 - RNA, 12 nt, Human
cucauucuucug

SEQ ID NO: 1738132 - RNA, 18 nt, Human
cucauucuccuuguguua

SEQ ID NO: 1738133 - RNA, 22 nt, Human
cucauucuccuuguguuacuaa

SEQ ID NO: 1738134 - RNA, 16 nt, Human
cuccagagucagaagu

SEQ ID NO: 1738135 - RNA, 14 nt, Human
cuccacuggaugga

SEQ ID NO: 1738136 - RNA, 21 nt, Human
cuccagaccccuggcuuuuca

SEQ ID NO: 1738137 - RNA, 18 nt, Human
cuccagcucaccagcccc

SEQ ID NO: 1738138 - RNA, 16 nt, Human
cuccagcucaccagcc

SEQ ID NO: 1738139 - RNA, 15 nt, Human
cuccagcucaccagc

SEQ ID NO: 1738140 - RNA, 14 nt, Human
cuccagccccugga

SEQ ID NO: 1738141 - RNA, 13 nt, Human
cuccagccccugg

SEQ ID NO: 1738142 - RNA, 11 nt, Human
cuccagccccu

SEQ ID NO: 1738143 - RNA, 13 nt, Human
cuccacugccuuc

SEQ ID NO: 1738144 - RNA, 13 nt, Human
cuccacuggaugg

SEQ ID NO: 1738145 - RNA, 16 nt, Human
cuccacugccuucgau

SEQ ID NO: 1738146 - RNA, 15 nt, Human
cuccacugccuucga

SEQ ID NO: 1738147 - RNA, 14 nt, Human
cuccacugccuucg

SEQ ID NO: 1738148 - RNA, 23 nt, Human
cuccaaguccacaguggaaccag

SEQ ID NO: 1738149 - RNA, 22 nt, Human
cuccaaguccacaguggaacca

SEQ ID NO: 1738150 - RNA, 12 nt, Human
cuauaauuuaaa

SEQ ID NO: 1738151 - RNA, 13 nt, Human
cuauaauuuaaau

SEQ ID NO: 1738152 - RNA, 17 nt, Human
cuaggaagacuuuggaa

SEQ ID NO: 1738153 - RNA, 15 nt, Human
cuaggaagacuuugg

SEQ ID NO: 1738154 - RNA, 20 nt, Human
cuaggaacacuccuucacag

SEQ ID NO: 1738155 - RNA, 21 nt, Human
cuauagccuaggugacagagu

SEQ ID NO: 1738156 - RNA, 20 nt, Human
cuauagccuaggugacagag

SEQ ID NO: 1738157 - RNA, 18 nt, Human
cuauagccuaggugacag

SEQ ID NO: 1738158 - RNA, 19 nt, Human
cuauagccuaggugacaga

SEQ ID NO: 1738159 - RNA, 22 nt, Human
cuaugaaguuuuuuuuauacag

SEQ ID NO: 1738160 - RNA, 15 nt, Human
cuaugauuuggaaaa

SEQ ID NO: 1738161 - RNA, 19 nt, Human
cuaugauuuaauuugaaau

SEQ ID NO: 1738162 - RNA, 20 nt, Human
cuaugauuuaauuugaaaua

SEQ ID NO: 1738163 - RNA, 19 nt, Human
cuaugauuuggaaaauaaa

SEQ ID NO: 1738164 - RNA, 19 nt, Human
cuaugggggcacugaggac

SEQ ID NO: 1738165 - RNA, 17 nt, Human
cuauucaguaauaacuc

SEQ ID NO: 1738166 - RNA, 16 nt, Human
cuauguaucaaugagu

SEQ ID NO: 1738167 - RNA, 13 nt, Human
cuauguaucaaug

SEQ ID NO: 1738168 - RNA, 23 nt, Human
cuauucaguaauaacucuacccu

SEQ ID NO: 1738169 - RNA, 14 nt, Human
cucaacucuccucc

SEQ ID NO: 1738170 - RNA, 15 nt, Human
cucaaauuucuaaau

SEQ ID NO: 1738171 - RNA, 17 nt, Human
cucaaauuucuaaaucu

SEQ ID NO: 1738172 - RNA, 14 nt, Human
cucaaauuucuaaa

SEQ ID NO: 1738173 - RNA, 18 nt, Human
cucaacucuccuccagag

SEQ ID NO: 1738174 - RNA, 16 nt, Human
cucaacucuccuccag

SEQ ID NO: 1738175 - RNA, 19 nt, Human
cucaacucuccuccagagu

SEQ ID NO: 1738176 - RNA, 23 nt, Human
cucacacggacacucaaaagcug

SEQ ID NO: 1738177 - RNA, 14 nt, Human
cucaaguccucuuu

SEQ ID NO: 1738178 - RNA, 17 nt, Human
cucacagaacccuugga

SEQ ID NO: 1738179 - RNA, 16 nt, Human
cuauugcugcuugagg

SEQ ID NO: 1738180 - RNA, 11 nt, Human
cuauugguaaa

SEQ ID NO: 1738181 - RNA, 23 nt, Human
cuagaaaugauccccagcuguuu

SEQ ID NO: 1738182 - RNA, 20 nt, Human
cuacuguccuacccacccuc

SEQ ID NO: 1738183 - RNA, 22 nt, Human
cuacuuagcaugucccuaccga

SEQ ID NO: 1738184 - RNA, 17 nt, Human
cuacuuagcaugucccu

SEQ ID NO: 1738185 - RNA, 17 nt, Human
cuagagguucaaagaua

SEQ ID NO: 1738186 - RNA, 18 nt, Human
cuagagguucaaagauau

SEQ ID NO: 1738187 - RNA, 21 nt, Human
cuagagguucaaagauauuuu

SEQ ID NO: 1738188 - RNA, 19 nt, Human
cuacucgaguuacagacaa

SEQ ID NO: 1738189 - RNA, 16 nt, Human
cuacucgaguuacaga

SEQ ID NO: 1738190 - RNA, 15 nt, Human
cuacucgaguuacag

SEQ ID NO: 1738191 - RNA, 19 nt, Human
cuaccgagucucuucucca

SEQ ID NO: 1738192 - RNA, 17 nt, Human
cuaccgagucucuucuc

SEQ ID NO: 1738193 - RNA, 23 nt, Human
cuaccgagucucuucuccacugg

SEQ ID NO: 1738194 - RNA, 22 nt, Human
cuaccgagucucuucuccacug

SEQ ID NO: 1738195 - RNA, 21 nt, Human
cuaccgagucucuucuccacu

SEQ ID NO: 1738196 - RNA, 19 nt, Human
cuacuguccuacccacccu

SEQ ID NO: 1738197 - RNA, 13 nt, Human
cuacucuguguca

SEQ ID NO: 1738198 - RNA, 12 nt, Human
cuacucuguguc

SEQ ID NO: 1738199 - RNA, 23 nt, Human
cuagccuuagaagucacacagua

SEQ ID NO: 1738200 - RNA, 22 nt, Human
cuagccuuagaagucacacagu

SEQ ID NO: 1738201 - RNA, 21 nt, Human
cuagccuuagaagucacacag

SEQ ID NO: 1738202 - RNA, 22 nt, Human
cuagccugugccucugggacug

SEQ ID NO: 1738203 - RNA, 19 nt, Human
cuagccugugccucuggga

SEQ ID NO: 1738204 - RNA, 21 nt, Human
cuagccugugccucugggacu

SEQ ID NO: 1738205 - RNA, 24 nt, Human
cuagauacuguaucaugacaaaga

SEQ ID NO: 1738206 - RNA, 13 nt, Human
cuagauacuguau

SEQ ID NO: 1738207 - RNA, 16 nt, Human
cuagauacuguaucau

SEQ ID NO: 1738208 - RNA, 13 nt, Human
cuacauucuguua

SEQ ID NO: 1738209 - RNA, 14 nt, Human
cuacauucuguuaa

SEQ ID NO: 1738210 - RNA, 22 nt, Human
cuacauuauaaaugucucuuua

SEQ ID NO: 1738211 - RNA, 17 nt, Human
cuacccagcgagcccug

SEQ ID NO: 1738212 - RNA, 15 nt, Human
cuacccagcgagccc

SEQ ID NO: 1738213 - RNA, 13 nt, Human
cuacccacccucc

SEQ ID NO: 1738214 - RNA, 13 nt, Human
cuacccaggugcu

SEQ ID NO: 1738215 - RNA, 18 nt, Human
cuacccagcgagcccugg

SEQ ID NO: 1738216 - RNA, 17 nt, Human
cuacccucuuagaaaaa

SEQ ID NO: 1738217 - RNA, 17 nt, Human
cuacacugugcugaguc

SEQ ID NO: 1738218 - RNA, 14 nt, Human
cuacacugugcuga

SEQ ID NO: 1738219 - RNA, 13 nt, Human
cuacacugugcug

SEQ ID NO: 1738220 - RNA, 20 nt, Human
cuacagaggccaugggccuc

SEQ ID NO: 1738221 - RNA, 18 nt, Human
cuacagaggccaugggcc

SEQ ID NO: 1738222 - RNA, 22 nt, Human
cuacagaggccaugggccuccu

SEQ ID NO: 1738223 - RNA, 22 nt, Human
cuacagcuugaccgugaggcca

SEQ ID NO: 1738224 - RNA, 19 nt, Human
cuacagcuugaccgugagg

SEQ ID NO: 1738225 - RNA, 23 nt, Human
cuacagcuugaccgugaggccag

SEQ ID NO: 1738226 - RNA, 19 nt, Human
cuacagcuaaucagcauuc

SEQ ID NO: 1738227 - RNA, 18 nt, Human
cuacagcuaaucagcauu

SEQ ID NO: 1738228 - RNA, 22 nt, Human
cuacagcuaaucagcauucuca

SEQ ID NO: 1738229 - RNA, 21 nt, Human
cuacagcuaaucagcauucuc

SEQ ID NO: 1738230 - RNA, 20 nt, Human
cuacauggaguauaugucaa

SEQ ID NO: 1738231 - RNA, 18 nt, Human
cuacauggaguauauguc

SEQ ID NO: 1738232 - RNA, 13 nt, Human
cuacaguccuccc

SEQ ID NO: 1738233 - RNA, 16 nt, Human
cuacaggugugaguca

SEQ ID NO: 1738234 - RNA, 14 nt, Human
cuacaggugugagu

SEQ ID NO: 1738235 - RNA, 16 nt, Human
cuacaggagugagcac

SEQ ID NO: 1738236 - RNA, 15 nt, Human
cuacaggagugagca

SEQ ID NO: 1738237 - RNA, 14 nt, Human
cuacaggagugagc

SEQ ID NO: 1738238 - RNA, 17 nt, Human
cuacaggcacccaccau

SEQ ID NO: 1738239 - RNA, 15 nt, Human
cuacaggcacccacc

SEQ ID NO: 1738240 - RNA, 23 nt, Human
cuacacgagauacagaauuuuau

SEQ ID NO: 1738241 - RNA, 21 nt, Human
cuacacaggggaaaagaggag

SEQ ID NO: 1738242 - RNA, 14 nt, Human
cuaauuccacagcu

SEQ ID NO: 1738243 - RNA, 16 nt, Human
cuaauuccacagcugc

SEQ ID NO: 1738244 - RNA, 15 nt, Human
cuaauuccacagcug

SEQ ID NO: 1738245 - RNA, 18 nt, Human
cuaauauguaacaagcca

SEQ ID NO: 1738246 - RNA, 21 nt, Human
cuaaucagcauucucacuccu

SEQ ID NO: 1738247 - RNA, 20 nt, Human
cuaaucagcauucucacucc

SEQ ID NO: 1738248 - RNA, 20 nt, Human
cuaaugcgcaggcuggcccu

SEQ ID NO: 1738249 - RNA, 19 nt, Human
cuaaugcgcaggcuggccc

SEQ ID NO: 1738250 - RNA, 16 nt, Human
cuaaugcgcaggcugg

SEQ ID NO: 1738251 - RNA, 15 nt, Human
cuaaugcgcaggcug

SEQ ID NO: 1738252 - RNA, 13 nt, Human
cuaaugggacacu

SEQ ID NO: 1738253 - RNA, 12 nt, Human
cuaaugggacac

SEQ ID NO: 1738254 - RNA, 23 nt, Human
cuaaugcgcaggcuggcccugcc

SEQ ID NO: 1738255 - RNA, 22 nt, Human
cuaaugcgcaggcuggcccugc

SEQ ID NO: 1738256 - RNA, 22 nt, Human
cuaauuauacccccugcaaagc

SEQ ID NO: 1738257 - RNA, 17 nt, Human
cuaauagacaauuuauu

SEQ ID NO: 1738258 - RNA, 19 nt, Human
cuaauagacaauuuauuau

SEQ ID NO: 1738259 - RNA, 23 nt, Human
cuaauagacaauuuauuauggca

SEQ ID NO: 1738260 - RNA, 14 nt, Human
cuaauaaagcugug

SEQ ID NO: 1738261 - RNA, 17 nt, Human
cuaauaacaugugaaaa

SEQ ID NO: 1738262 - RNA, 21 nt, Human
cuaagcuucacuguaaaauaa

SEQ ID NO: 1738263 - RNA, 22 nt, Human
cuaagcuauucaguaauaacuc

SEQ ID NO: 1738264 - RNA, 13 nt, Human
cuaaacugccccc

SEQ ID NO: 1738265 - RNA, 12 nt, Human
cuaaacugcccc

SEQ ID NO: 1738266 - RNA, 22 nt, Human
cuaaaugaaaaucgugacaaca

SEQ ID NO: 1738267 - RNA, 21 nt, Human
cuaaaucuccaaaauaaaacu

SEQ ID NO: 1738268 - RNA, 17 nt, Human
cuaaauauauuuuaaga

SEQ ID NO: 1738269 - RNA, 21 nt, Human
cuaaacugcccccucugcccu

SEQ ID NO: 1738270 - RNA, 20 nt, Human
cgggaggcagagguugcagu

SEQ ID NO: 1738271 - RNA, 23 nt, Human
cgggaccccgagccuggcuccaa

SEQ ID NO: 1738272 - RNA, 23 nt, Human
cgggaggauguucugggacacag

SEQ ID NO: 1738273 - RNA, 20 nt, Human
cguuuguuccccaagacauu

SEQ ID NO: 1738274 - RNA, 15 nt, Human
cuaaaauaauuuugu

SEQ ID NO: 1738275 - RNA, 17 nt, Human
cuaaaauaauuuuguaa

SEQ ID NO: 1738276 - RNA, 18 nt, Human
cuaaaauaauuuuguaau

SEQ ID NO: 1738277 - RNA, 19 nt, Human
cuaaauugacacuuaaaaa

SEQ ID NO: 1738278 - RNA, 16 nt, Human
cuaaauucaugcugcu

SEQ ID NO: 1738279 - RNA, 20 nt, Human
cuaacaacauuguagccuca

SEQ ID NO: 1738280 - RNA, 14 nt, Human
cuaaccacgcugga

SEQ ID NO: 1738281 - RNA, 12 nt, Human
cuaaccacgcug

SEQ ID NO: 1738282 - RNA, 23 nt, Human
cuaagagggagggagggcuccag

SEQ ID NO: 1738283 - RNA, 22 nt, Human
cuaagagggagggagggcucca

SEQ ID NO: 1738284 - RNA, 15 nt, Human
cuaagagggagggag

SEQ ID NO: 1738285 - RNA, 13 nt, Human
cuaagagggaggg

SEQ ID NO: 1738286 - RNA, 13 nt, Human
cguuuucaaaauu

SEQ ID NO: 1738287 - RNA, 19 nt, Human
cccuguuuguuucugaaag

SEQ ID NO: 1738288 - RNA, 23 nt, Human
cccuuaccugccaggaagccagc

SEQ ID NO: 1738289 - RNA, 20 nt, Human
cccuuaccugccaggaagcc

SEQ ID NO: 1738290 - RNA, 17 nt, Human
cccuuaccugccaggaa

SEQ ID NO: 1738291 - RNA, 14 nt, Human
cccuguucuggcag

SEQ ID NO: 1738292 - RNA, 13 nt, Human
cccuguucuggca

SEQ ID NO: 1738293 - RNA, 15 nt, Human
cccuggugcugccac

SEQ ID NO: 1738294 - RNA, 14 nt, Human
cccuguaggccuca

SEQ ID NO: 1738295 - RNA, 15 nt, Human
cccuguaggccucag

SEQ ID NO: 1738296 - RNA, 15 nt, Human
cccugguggcagugg

SEQ ID NO: 1738297 - RNA, 14 nt, Human
cccugguggcagug

SEQ ID NO: 1738298 - RNA, 13 nt, Human
cccugguggcagu

SEQ ID NO: 1738299 - RNA, 21 nt, Human
cccugguggcagcucaccucu

SEQ ID NO: 1738300 - RNA, 14 nt, Human
cccuggugcugcca

SEQ ID NO: 1738301 - RNA, 13 nt, Human
cccuggugcugcc

SEQ ID NO: 1738302 - RNA, 21 nt, Human
cccuggugaccagcaccaucu

SEQ ID NO: 1738303 - RNA, 17 nt, Human
cccuuacgugaguccug

SEQ ID NO: 1738304 - RNA, 15 nt, Human
cccuuacgugagucc

SEQ ID NO: 1738305 - RNA, 14 nt, Human
cccuuagcagggaa

SEQ ID NO: 1738306 - RNA, 20 nt, Human
cccuuagaaguuuguuguga

SEQ ID NO: 1738307 - RNA, 23 nt, Human
cccuuagcagggaaacagcuaau

SEQ ID NO: 1738308 - RNA, 12 nt, Human
cccuuccaugga

SEQ ID NO: 1738309 - RNA, 20 nt, Human
cccuuccaugucgccucugc

SEQ ID NO: 1738310 - RNA, 18 nt, Human
cccuucaaccauucccca

SEQ ID NO: 1738311 - RNA, 14 nt, Human
cccuucaaccauuc

SEQ ID NO: 1738312 - RNA, 21 nt, Human
cccugcucuccgaccagacac

SEQ ID NO: 1738313 - RNA, 22 nt, Human
cccugcucuccgaccagacacc

SEQ ID NO: 1738314 - RNA, 21 nt, Human
cccugcugagucccaggcuga

SEQ ID NO: 1738315 - RNA, 23 nt, Human
cccugcugagucccaggcugagc

SEQ ID NO: 1738316 - RNA, 15 nt, Human
cccugccucucugca

SEQ ID NO: 1738317 - RNA, 21 nt, Human
cccugcgggucacaggaggga

SEQ ID NO: 1738318 - RNA, 19 nt, Human
cccugcgggucacaggagg

SEQ ID NO: 1738319 - RNA, 12 nt, Human
cccugaggccca

SEQ ID NO: 1738320 - RNA, 11 nt, Human
cccugccuccu

SEQ ID NO: 1738321 - RNA, 14 nt, Human
cccugccucucugc

SEQ ID NO: 1738322 - RNA, 13 nt, Human
cccugccucucug

SEQ ID NO: 1738323 - RNA, 16 nt, Human
cccuggugcugccaca

SEQ ID NO: 1738324 - RNA, 11 nt, Human
cccucugccca

SEQ ID NO: 1738325 - RNA, 18 nt, Human
cccucugcccacucccug

SEQ ID NO: 1738326 - RNA, 15 nt, Human
cccucugcccacucc

SEQ ID NO: 1738327 - RNA, 19 nt, Human
cccucugcccacucccugc

SEQ ID NO: 1738328 - RNA, 14 nt, Human
cccucugcccugcg

SEQ ID NO: 1738329 - RNA, 13 nt, Human
cccucugcccugc

SEQ ID NO: 1738330 - RNA, 12 nt, Human
cccucugcccug

SEQ ID NO: 1738331 - RNA, 12 nt, Human
cccucuggggcu

SEQ ID NO: 1738332 - RNA, 21 nt, Human
cccucuguucugcacacagca

SEQ ID NO: 1738333 - RNA, 20 nt, Human
cccucuguucugcacacagc

SEQ ID NO: 1738334 - RNA, 22 nt, Human
cccucuggcuccagcuggccgg

SEQ ID NO: 1738335 - RNA, 17 nt, Human
cccucuggcuccagcug

SEQ ID NO: 1738336 - RNA, 16 nt, Human
cccucuggcuccagcu

SEQ ID NO: 1738337 - RNA, 12 nt, Human
cccucuggcucc

SEQ ID NO: 1738338 - RNA, 20 nt, Human
cccucuuucccucccuuccu

SEQ ID NO: 1738339 - RNA, 17 nt, Human
cccucuuucccucccuu

SEQ ID NO: 1738340 - RNA, 12 nt, Human
cccucuuucccu

SEQ ID NO: 1738341 - RNA, 14 nt, Human
cccucccugccccu

SEQ ID NO: 1738342 - RNA, 23 nt, Human
cccucccucuuucccucccuucc

SEQ ID NO: 1738343 - RNA, 14 nt, Human
cccgcucagcccuc

SEQ ID NO: 1738344 - RNA, 12 nt, Human
cccucccacagc

SEQ ID NO: 1738345 - RNA, 13 nt, Human
cccgcucagcccu

SEQ ID NO: 1738346 - RNA, 12 nt, Human
cccgcucagccc

SEQ ID NO: 1738347 - RNA, 14 nt, Human
cccucccacagcgc

SEQ ID NO: 1738348 - RNA, 15 nt, Human
cccgcucagcccucc

SEQ ID NO: 1738349 - RNA, 15 nt, Human
ccuaacgaaguaucc

SEQ ID NO: 1738350 - RNA, 15 nt, Human
ccuacaguguacagu

SEQ ID NO: 1738351 - RNA, 11 nt, Human
ccguggcuucc

SEQ ID NO: 1738352 - RNA, 21 nt, Human
ccuacaguugaaaaacagcug

SEQ ID NO: 1738353 - RNA, 16 nt, Human
ccuacaguguacaguc

SEQ ID NO: 1738354 - RNA, 20 nt, Human
ccuacaguguacagucuugu

SEQ ID NO: 1738355 - RNA, 17 nt, Human
ccuaccgagucucuucu

SEQ ID NO: 1738356 - RNA, 16 nt, Human
ccuaccgagucucuuc

SEQ ID NO: 1738357 - RNA, 21 nt, Human
ccuaccgagucucuucuccac

SEQ ID NO: 1738358 - RNA, 20 nt, Human
ccuaccgagucucuucucca

SEQ ID NO: 1738359 - RNA, 19 nt, Human
ccuaccgagucucuucucc

SEQ ID NO: 1738360 - RNA, 18 nt, Human
ccuaggugacagagugag

SEQ ID NO: 1738361 - RNA, 14 nt, Human
ccguggcuucccgc

SEQ ID NO: 1738362 - RNA, 13 nt, Human
ccgggccacagag

SEQ ID NO: 1738363 - RNA, 22 nt, Human
ccgggcacucagaagacacuga

SEQ ID NO: 1738364 - RNA, 21 nt, Human
ccggcuccaggcuccuuuagc

SEQ ID NO: 1738365 - RNA, 16 nt, Human
ccggcuccaggcuccu

SEQ ID NO: 1738366 - RNA, 15 nt, Human
ccgggcucugccucc

SEQ ID NO: 1738367 - RNA, 14 nt, Human
ccgggcucugccuc

SEQ ID NO: 1738368 - RNA, 18 nt, Human
ccgggcucugccucccau

SEQ ID NO: 1738369 - RNA, 18 nt, Human
ccgugaggccagagacac

SEQ ID NO: 1738370 - RNA, 11 nt, Human
ccgcuggggcc

SEQ ID NO: 1738371 - RNA, 14 nt, Human
ccgcuggggccagu

SEQ ID NO: 1738372 - RNA, 14 nt, Human
ccggaggggccugg

SEQ ID NO: 1738373 - RNA, 16 nt, Human
ccggaggggccuggca

SEQ ID NO: 1738374 - RNA, 15 nt, Human
ccggaggggccuggc

SEQ ID NO: 1738375 - RNA, 16 nt, Human
ccgaguagcugggacu

SEQ ID NO: 1738376 - RNA, 14 nt, Human
ccgaguagcuggga

SEQ ID NO: 1738377 - RNA, 18 nt, Human
ccgagucucuucuccacu

SEQ ID NO: 1738378 - RNA, 16 nt, Human
ccgagucucuucucca

SEQ ID NO: 1738379 - RNA, 14 nt, Human
ccgagucucuucuc

SEQ ID NO: 1738380 - RNA, 20 nt, Human
ccgaguagcugagauuauag

SEQ ID NO: 1738381 - RNA, 19 nt, Human
ccgagcuuugaaaauucag

SEQ ID NO: 1738382 - RNA, 23 nt, Human
ccgcacugggcuuggggaccaga

SEQ ID NO: 1738383 - RNA, 21 nt, Human
ccgagucucuucuccacugga

SEQ ID NO: 1738384 - RNA, 20 nt, Human
ccgagucucuucuccacugg

SEQ ID NO: 1738385 - RNA, 19 nt, Human
ccgagucucuucuccacug

SEQ ID NO: 1738386 - RNA, 15 nt, Human
ccgcagacaggacca

SEQ ID NO: 1738387 - RNA, 19 nt, Human
ccgagauugcaccacugca

SEQ ID NO: 1738388 - RNA, 15 nt, Human
ccgagauugcaccac

SEQ ID NO: 1738389 - RNA, 21 nt, Human
ccgagauugcaccacugcacu

SEQ ID NO: 1738390 - RNA, 18 nt, Human
ccgagauagccaaggcca

SEQ ID NO: 1738391 - RNA, 14 nt, Human
cccaugagccucag

SEQ ID NO: 1738392 - RNA, 12 nt, Human
cccaucugugaa

SEQ ID NO: 1738393 - RNA, 19 nt, Human
cccaucucuacaaaaagca

SEQ ID NO: 1738394 - RNA, 14 nt, Human
cccaguugggugga

SEQ ID NO: 1738395 - RNA, 14 nt, Human
cccaucucuucugg

SEQ ID NO: 1738396 - RNA, 19 nt, Human
ccccaccgcagacaggacc

SEQ ID NO: 1738397 - RNA, 15 nt, Human
ccccaccgcagacag

SEQ ID NO: 1738398 - RNA, 17 nt, Human
ccccuccucucugcccu

SEQ ID NO: 1738399 - RNA, 15 nt, Human
ccccuccucucugcc

SEQ ID NO: 1738400 - RNA, 18 nt, Human
ccccuccuccuggacucc

SEQ ID NO: 1738401 - RNA, 22 nt, Human
ccccuccuccuggacuccugca

SEQ ID NO: 1738402 - RNA, 12 nt, Human
ccccuccaugug

SEQ ID NO: 1738403 - RNA, 15 nt, Human
ccccucccuucaacc

SEQ ID NO: 1738404 - RNA, 16 nt, Human
ccccucagggucccug

SEQ ID NO: 1738405 - RNA, 23 nt, Human
ccccuccaaucccaccaacccuc

SEQ ID NO: 1738406 - RNA, 20 nt, Human
ccccucauagcccucacccu

SEQ ID NO: 1738407 - RNA, 19 nt, Human
cccccugacaacacucauu

SEQ ID NO: 1738408 - RNA, 19 nt, Human
cccccugcaaagcccagcu

SEQ ID NO: 1738409 - RNA, 18 nt, Human
cccccugcaaagcccagc

SEQ ID NO: 1738410 - RNA, 21 nt, Human
cccccugcaaagcccagcuug

SEQ ID NO: 1738411 - RNA, 17 nt, Human
cccccugacaacacuca

SEQ ID NO: 1738412 - RNA, 21 nt, Human
cccccucuggcuccagcuggc

SEQ ID NO: 1738413 - RNA, 19 nt, Human
cccccucuggcuccagcug

SEQ ID NO: 1738414 - RNA, 12 nt, Human
cccccucuggcu

SEQ ID NO: 1738415 - RNA, 12 nt, Human
cccccagccugc

SEQ ID NO: 1738416 - RNA, 23 nt, Human
ccccucaacucuccuccagaguc

SEQ ID NO: 1738417 - RNA, 16 nt, Human
ccccucaacaccucug

SEQ ID NO: 1738418 - RNA, 15 nt, Human
ccccucaacaccucu

SEQ ID NO: 1738419 - RNA, 20 nt, Human
ccccagugcccacaggauca

SEQ ID NO: 1738420 - RNA, 16 nt, Human
ccccagugcccacagg

SEQ ID NO: 1738421 - RNA, 15 nt, Human
ccccagugcccacag

SEQ ID NO: 1738422 - RNA, 14 nt, Human
ccccagugcccaca

SEQ ID NO: 1738423 - RNA, 22 nt, Human
ccccauaauuuuuuuuuuccuu

SEQ ID NO: 1738424 - RNA, 13 nt, Human
cccccacccaagg

SEQ ID NO: 1738425 - RNA, 24 nt, Human
cccccacccaagggccuggccuga

SEQ ID NO: 1738426 - RNA, 14 nt, Human
ccccauccucugua

SEQ ID NO: 1738427 - RNA, 17 nt, Human
ccccaucauugguaccc

SEQ ID NO: 1738428 - RNA, 13 nt, Human
cccccacugguga

SEQ ID NO: 1738429 - RNA, 11 nt, Human
cccccacuggu

SEQ ID NO: 1738430 - RNA, 15 nt, Human
cccccacuggugaca

SEQ ID NO: 1738431 - RNA, 19 nt, Human
ccccuggaugcagccucac

SEQ ID NO: 1738432 - RNA, 18 nt, Human
ccccuggaugcagccuca

SEQ ID NO: 1738433 - RNA, 15 nt, Human
ccccuggaugcagcc

SEQ ID NO: 1738434 - RNA, 20 nt, Human
ccccugcugguucaggguug

SEQ ID NO: 1738435 - RNA, 15 nt, Human
ccccugcugguucag

SEQ ID NO: 1738436 - RNA, 13 nt, Human
ccccugcugguuc

SEQ ID NO: 1738437 - RNA, 11 nt, Human
ccccugcuggu

SEQ ID NO: 1738438 - RNA, 17 nt, Human
ccccugcuggguguggc

SEQ ID NO: 1738439 - RNA, 14 nt, Human
ccccugcugggugu

SEQ ID NO: 1738440 - RNA, 19 nt, Human
ccccugcccggcugcggaa

SEQ ID NO: 1738441 - RNA, 17 nt, Human
ccccugcccggcugcgg

SEQ ID NO: 1738442 - RNA, 12 nt, Human
ccccucugcccu

SEQ ID NO: 1738443 - RNA, 14 nt, Human
ccccucugcccugc

SEQ ID NO: 1738444 - RNA, 13 nt, Human
ccccucugcccug

SEQ ID NO: 1738445 - RNA, 19 nt, Human
ccccugccucucugcaggu

SEQ ID NO: 1738446 - RNA, 17 nt, Human
ccccugccucucugcag

SEQ ID NO: 1738447 - RNA, 16 nt, Human
ccccugccucucugca

SEQ ID NO: 1738448 - RNA, 15 nt, Human
ccccugccucucugc

SEQ ID NO: 1738449 - RNA, 14 nt, Human
ccccugccucucug

SEQ ID NO: 1738450 - RNA, 23 nt, Human
cccgcuaagagggagggagggcu

SEQ ID NO: 1738451 - RNA, 22 nt, Human
cccgcccaggcuuagucacuga

SEQ ID NO: 1738452 - RNA, 20 nt, Human
cccgcccaggcuuagucacu

SEQ ID NO: 1738453 - RNA, 18 nt, Human
cccgacagccuggcacag

SEQ ID NO: 1738454 - RNA, 15 nt, Human
cccgacagccuggca

SEQ ID NO: 1738455 - RNA, 15 nt, Human
cccgagccuggcucc

SEQ ID NO: 1738456 - RNA, 13 nt, Human
cccgagccuggcu

SEQ ID NO: 1738457 - RNA, 20 nt, Human
ccccuuccauggacuuuguu

SEQ ID NO: 1738458 - RNA, 13 nt, Human
ccccuuccaugga

SEQ ID NO: 1738459 - RNA, 14 nt, Human
cccgacagccuggc

SEQ ID NO: 1738460 - RNA, 15 nt, Human
ccccuguucacucua

SEQ ID NO: 1738461 - RNA, 18 nt, Human
ccccuggcuuuucacugc

SEQ ID NO: 1738462 - RNA, 22 nt, Human
ccccuggcuuuucacugcuggc

SEQ ID NO: 1738463 - RNA, 20 nt, Human
ccccuggcuuuucacugcug

SEQ ID NO: 1738464 - RNA, 18 nt, Human
ccagcaccaucucuccuc

SEQ ID NO: 1738465 - RNA, 17 nt, Human
ccagcaccaucucuccu

SEQ ID NO: 1738466 - RNA, 18 nt, Human
ccagcaggcucucaggcc

SEQ ID NO: 1738467 - RNA, 17 nt, Human
ccagcaggcucucaggc

SEQ ID NO: 1738468 - RNA, 16 nt, Human
ccagcaggcucucagg

SEQ ID NO: 1738469 - RNA, 19 nt, Human
ccagcaagugagagcuggg

SEQ ID NO: 1738470 - RNA, 18 nt, Human
ccagcaagugagagcugg

SEQ ID NO: 1738471 - RNA, 17 nt, Human
ccagcaagugagagcug

SEQ ID NO: 1738472 - RNA, 24 nt, Human
ccagauuuuuuacagcugccugca

SEQ ID NO: 1738473 - RNA, 15 nt, Human
ccagauuucacucuc

SEQ ID NO: 1738474 - RNA, 19 nt, Human
ccagauuucacucuccuug

SEQ ID NO: 1738475 - RNA, 18 nt, Human
ccagauuucacucuccuu

SEQ ID NO: 1738476 - RNA, 22 nt, Human
ccagauugcaacaggcugggcu

SEQ ID NO: 1738477 - RNA, 18 nt, Human
ccagauugcaacaggcug

SEQ ID NO: 1738478 - RNA, 23 nt, Human
ccagauugcaacaggcugggcuu

SEQ ID NO: 1738479 - RNA, 16 nt, Human
ccagauugcaacaggc

SEQ ID NO: 1738480 - RNA, 14 nt, Human
ccagauugcaacag

SEQ ID NO: 1738481 - RNA, 14 nt, Human
ccagagcccaccuu

SEQ ID NO: 1738482 - RNA, 20 nt, Human
ccagagccucaaaugagaaa

SEQ ID NO: 1738483 - RNA, 23 nt, Human
ccagagccucaaaugagaaaaug

SEQ ID NO: 1738484 - RNA, 19 nt, Human
ccagccugagcgacaguga

SEQ ID NO: 1738485 - RNA, 13 nt, Human
ccagccuggguga

SEQ ID NO: 1738486 - RNA, 13 nt, Human
ccagcgagcccug

SEQ ID NO: 1738487 - RNA, 23 nt, Human
ccagccuugaccauucuccaccu

SEQ ID NO: 1738488 - RNA, 19 nt, Human
ccagccccaaaacucuccu

SEQ ID NO: 1738489 - RNA, 23 nt, Human
ccagccgagauagccaaggccaa

SEQ ID NO: 1738490 - RNA, 22 nt, Human
ccagccgagauagccaaggcca

SEQ ID NO: 1738491 - RNA, 20 nt, Human
ccagccgagauagccaaggc

SEQ ID NO: 1738492 - RNA, 17 nt, Human
ccagccgagauagccaa

SEQ ID NO: 1738493 - RNA, 17 nt, Human
ccagcccacuucugcca

SEQ ID NO: 1738494 - RNA, 16 nt, Human
ccagcccacuucugcc

SEQ ID NO: 1738495 - RNA, 23 nt, Human
ccagcaggcucucaggccagcug

SEQ ID NO: 1738496 - RNA, 21 nt, Human
ccagcaggcucucaggccagc

SEQ ID NO: 1738497 - RNA, 20 nt, Human
ccagcaggcucucaggccag

SEQ ID NO: 1738498 - RNA, 19 nt, Human
ccagcaggcucucaggcca

SEQ ID NO: 1738499 - RNA, 14 nt, Human
ccagacaucaacag

SEQ ID NO: 1738500 - RNA, 24 nt, Human
ccagaccccuggcuuuucacugcu

SEQ ID NO: 1738501 - RNA, 20 nt, Human
ccagacacauguccaagaag

SEQ ID NO: 1738502 - RNA, 17 nt, Human
ccagacacauguccaag

SEQ ID NO: 1738503 - RNA, 22 nt, Human
ccagacacauguccaagaagcc

SEQ ID NO: 1738504 - RNA, 15 nt, Human
ccagacccggcugcg

SEQ ID NO: 1738505 - RNA, 14 nt, Human
ccagacccggcugc

SEQ ID NO: 1738506 - RNA, 16 nt, Human
ccagacccggcugcgu

SEQ ID NO: 1738507 - RNA, 14 nt, Human
ccagagaguggcuc

SEQ ID NO: 1738508 - RNA, 16 nt, Human
ccagagaguggcuccu

SEQ ID NO: 1738509 - RNA, 15 nt, Human
ccagagaguggcucc

SEQ ID NO: 1738510 - RNA, 22 nt, Human
ccagagaguggcuccucccggu

SEQ ID NO: 1738511 - RNA, 18 nt, Human
ccagagaguggcuccucc

SEQ ID NO: 1738512 - RNA, 15 nt, Human
ccacugguucuucuu

SEQ ID NO: 1738513 - RNA, 23 nt, Human
ccacuggugacaugucuuuucuu

SEQ ID NO: 1738514 - RNA, 15 nt, Human
ccacugugaagagaa

SEQ ID NO: 1738515 - RNA, 14 nt, Human
ccacugugaagaga

SEQ ID NO: 1738516 - RNA, 15 nt, Human
ccacugcucugguua

SEQ ID NO: 1738517 - RNA, 13 nt, Human
ccacugcucuggu

SEQ ID NO: 1738518 - RNA, 12 nt, Human
ccacugcucugg

SEQ ID NO: 1738519 - RNA, 20 nt, Human
ccacugcuuuuggucugugu

SEQ ID NO: 1738520 - RNA, 21 nt, Human
ccacugccuucgauacaccgg

SEQ ID NO: 1738521 - RNA, 22 nt, Human
ccacugcuuuuggucuguguga

SEQ ID NO: 1738522 - RNA, 23 nt, Human
ccacugcaucguuucaucuucca

SEQ ID NO: 1738523 - RNA, 21 nt, Human
ccacugcaucguuucaucuuc

SEQ ID NO: 1738524 - RNA, 14 nt, Human
ccaccuucccaugc

SEQ ID NO: 1738525 - RNA, 16 nt, Human
ccacugccucuuccuc

SEQ ID NO: 1738526 - RNA, 13 nt, Human
ccacugccucuuc

SEQ ID NO: 1738527 - RNA, 16 nt, Human
ccacugugccaugugc

SEQ ID NO: 1738528 - RNA, 15 nt, Human
ccacugugccaugug

SEQ ID NO: 1738529 - RNA, 19 nt, Human
ccacugugccaugugccag

SEQ ID NO: 1738530 - RNA, 22 nt, Human
ccagaagaaaauagugguguga

SEQ ID NO: 1738531 - RNA, 18 nt, Human
ccagaaaccuuuguuugc

SEQ ID NO: 1738532 - RNA, 12 nt, Human
ccacccugcucu

SEQ ID NO: 1738533 - RNA, 11 nt, Human
ccacccugcuc

SEQ ID NO: 1738534 - RNA, 20 nt, Human
ccaccucucucacuccuuga

SEQ ID NO: 1738535 - RNA, 19 nt, Human
ccaccucucucacuccuug

SEQ ID NO: 1738536 - RNA, 16 nt, Human
ccaccucucucacucc

SEQ ID NO: 1738537 - RNA, 14 nt, Human
ccaccucucucacu

SEQ ID NO: 1738538 - RNA, 16 nt, Human
ccaccugccagggaca

SEQ ID NO: 1738539 - RNA, 15 nt, Human
ccaccugccagggac

SEQ ID NO: 1738540 - RNA, 14 nt, Human
ccaccugccaggga

SEQ ID NO: 1738541 - RNA, 13 nt, Human
ccaccugccaggg

SEQ ID NO: 1738542 - RNA, 20 nt, Human
ccaccuggccucugcacucc

SEQ ID NO: 1738543 - RNA, 18 nt, Human
ccaccuggccucugcacu

SEQ ID NO: 1738544 - RNA, 13 nt, Human
ccaccuggccucu

SEQ ID NO: 1738545 - RNA, 14 nt, Human
ccaccuggccucug

SEQ ID NO: 1738546 - RNA, 19 nt, Human
ccacccccacccaagggcc

SEQ ID NO: 1738547 - RNA, 14 nt, Human
ccacccuccuuuca

SEQ ID NO: 1738548 - RNA, 13 nt, Human
ccaccuuggcuca

SEQ ID NO: 1738549 - RNA, 15 nt, Human
ccauaugccugggca

SEQ ID NO: 1738550 - RNA, 12 nt, Human
ccaucaagccac

SEQ ID NO: 1738551 - RNA, 23 nt, Human
ccagugugacaaggauugcuacu

SEQ ID NO: 1738552 - RNA, 14 nt, Human
ccagugugacaagg

SEQ ID NO: 1738553 - RNA, 13 nt, Human
ccauaugccuggg

SEQ ID NO: 1738554 - RNA, 12 nt, Human
ccaucauugaaa

SEQ ID NO: 1738555 - RNA, 13 nt, Human
ccaucaugucugg

SEQ ID NO: 1738556 - RNA, 12 nt, Human
ccaucaugucug

SEQ ID NO: 1738557 - RNA, 14 nt, Human
ccaucaagccacca

SEQ ID NO: 1738558 - RNA, 13 nt, Human
ccaucaagccacc

SEQ ID NO: 1738559 - RNA, 16 nt, Human
ccaucaagccaccaac

SEQ ID NO: 1738560 - RNA, 19 nt, Human
ccauauuaccacagacaua

SEQ ID NO: 1738561 - RNA, 20 nt, Human
ccauccugaggcuccacuug

SEQ ID NO: 1738562 - RNA, 18 nt, Human
ccauccugaggcuccacu

SEQ ID NO: 1738563 - RNA, 17 nt, Human
ccaucauugaaaucuuu

SEQ ID NO: 1738564 - RNA, 16 nt, Human
ccaucauugaaaucuu

SEQ ID NO: 1738565 - RNA, 14 nt, Human
ccaucauugaaauc

SEQ ID NO: 1738566 - RNA, 15 nt, Human
ccaucucuccuccuu

SEQ ID NO: 1738567 - RNA, 21 nt, Human
ccaucucacacaugagcauca

SEQ ID NO: 1738568 - RNA, 20 nt, Human
ccaucucacacaugagcauc

SEQ ID NO: 1738569 - RNA, 18 nt, Human
ccaucucacacaugagca

SEQ ID NO: 1738570 - RNA, 17 nt, Human
ccaucucacacaugagc

SEQ ID NO: 1738571 - RNA, 15 nt, Human
ccaucucacacauga

SEQ ID NO: 1738572 - RNA, 14 nt, Human
ccaucucacacaug

SEQ ID NO: 1738573 - RNA, 23 nt, Human
ccaguaaaugggggugcauuuga

SEQ ID NO: 1738574 - RNA, 13 nt, Human
ccagugaggcucu

SEQ ID NO: 1738575 - RNA, 21 nt, Human
ccagguggccacuccagaccc

SEQ ID NO: 1738576 - RNA, 16 nt, Human
ccagguggccacucca

SEQ ID NO: 1738577 - RNA, 16 nt, Human
ccagguuucuaugugu

SEQ ID NO: 1738578 - RNA, 13 nt, Human
ccagguuuaagcu

SEQ ID NO: 1738579 - RNA, 20 nt, Human
ccaguaaaugggggugcauu

SEQ ID NO: 1738580 - RNA, 21 nt, Human
ccaguaaaugggggugcauuu

SEQ ID NO: 1738581 - RNA, 22 nt, Human
ccaguaaaugggggugcauuug

SEQ ID NO: 1738582 - RNA, 23 nt, Human
ccagugcccacaggaucagucug

SEQ ID NO: 1738583 - RNA, 20 nt, Human
ccaggaggccagccuugacc

SEQ ID NO: 1738584 - RNA, 18 nt, Human
ccaggaggccagccuuga

SEQ ID NO: 1738585 - RNA, 15 nt, Human
ccaggaggccagccu

SEQ ID NO: 1738586 - RNA, 16 nt, Human
ccaggccccugccacc

SEQ ID NO: 1738587 - RNA, 15 nt, Human
ccaggccccugccac

SEQ ID NO: 1738588 - RNA, 14 nt, Human
ccaggccccugcca

SEQ ID NO: 1738589 - RNA, 12 nt, Human
ccaggccagagg

SEQ ID NO: 1738590 - RNA, 14 nt, Human
ccaggcccucugcc

SEQ ID NO: 1738591 - RNA, 13 nt, Human
ccaggcccucugc

SEQ ID NO: 1738592 - RNA, 19 nt, Human
ccaggccccugccacccug

SEQ ID NO: 1738593 - RNA, 23 nt, Human
ccaggcuuagucacugagacagc

SEQ ID NO: 1738594 - RNA, 22 nt, Human
ccaggcuuagucacugagacag

SEQ ID NO: 1738595 - RNA, 21 nt, Human
ccaggcuuagucacugagaca

SEQ ID NO: 1738596 - RNA, 14 nt, Human
ccaggcuggucuca

SEQ ID NO: 1738597 - RNA, 16 nt, Human
ccaggcccucugccca

SEQ ID NO: 1738598 - RNA, 15 nt, Human
ccaggcccucugccc

SEQ ID NO: 1738599 - RNA, 16 nt, Human
ccaggcugggucgccc

SEQ ID NO: 1738600 - RNA, 12 nt, Human
ccaggcuggguc

SEQ ID NO: 1738601 - RNA, 24 nt, Human
ccaggcugggucgcccuggacugu

SEQ ID NO: 1738602 - RNA, 23 nt, Human
ccaggcugggucgcccuggacug

SEQ ID NO: 1738603 - RNA, 22 nt, Human
ccaggcugggucgcccuggacu

SEQ ID NO: 1738604 - RNA, 21 nt, Human
ccaggcugggucgcccuggac

SEQ ID NO: 1738605 - RNA, 18 nt, Human
ccauguuuuguuuacggu

SEQ ID NO: 1738606 - RNA, 15 nt, Human
ccauucugccugccc

SEQ ID NO: 1738607 - RNA, 16 nt, Human
ccauucugccugccca

SEQ ID NO: 1738608 - RNA, 13 nt, Human
ccauuugcuccuu

SEQ ID NO: 1738609 - RNA, 14 nt, Human
ccauucuccaccug

SEQ ID NO: 1738610 - RNA, 13 nt, Human
cccacaggaucag

SEQ ID NO: 1738611 - RNA, 17 nt, Human
cccacaggaucagucug

SEQ ID NO: 1738612 - RNA, 13 nt, Human
cccacagcgcugg

SEQ ID NO: 1738613 - RNA, 18 nt, Human
cccacaggcccuuccucu

SEQ ID NO: 1738614 - RNA, 16 nt, Human
cccacaggcccuuccu

SEQ ID NO: 1738615 - RNA, 19 nt, Human
cccacauagugaugguucc

SEQ ID NO: 1738616 - RNA, 16 nt, Human
cccaagggccuggccu

SEQ ID NO: 1738617 - RNA, 17 nt, Human
cccaagggccuggccug

SEQ ID NO: 1738618 - RNA, 14 nt, Human
cccaagggccuggc

SEQ ID NO: 1738619 - RNA, 12 nt, Human
cccaagggccug

SEQ ID NO: 1738620 - RNA, 21 nt, Human
ccauuuuguauuuuacuaaua

SEQ ID NO: 1738621 - RNA, 20 nt, Human
ccauuuugcugucccuuuuc

SEQ ID NO: 1738622 - RNA, 17 nt, Human
cccaccucucucacucc

SEQ ID NO: 1738623 - RNA, 14 nt, Human
cccaccucucucac

SEQ ID NO: 1738624 - RNA, 13 nt, Human
cccaccucucuca

SEQ ID NO: 1738625 - RNA, 21 nt, Human
cccaccucagccucccaaagu

SEQ ID NO: 1738626 - RNA, 12 nt, Human
cccaccuuggcu

SEQ ID NO: 1738627 - RNA, 19 nt, Human
cccaccucucucacuccuu

SEQ ID NO: 1738628 - RNA, 17 nt, Human
cccaccucagccucccg

SEQ ID NO: 1738629 - RNA, 15 nt, Human
cccaccucagccucc

SEQ ID NO: 1738630 - RNA, 14 nt, Human
cccaccucagccuc

SEQ ID NO: 1738631 - RNA, 12 nt, Human
cccaccucagcc

SEQ ID NO: 1738632 - RNA, 15 nt, Human
cccaccuuggcugca

SEQ ID NO: 1738633 - RNA, 14 nt, Human
cccaccuuggcugc

SEQ ID NO: 1738634 - RNA, 22 nt, Human
cccaccuuggcucaaguccucu

SEQ ID NO: 1738635 - RNA, 15 nt, Human
cccaccuuggcucaa

SEQ ID NO: 1738636 - RNA, 19 nt, Human
cccacgcccccacugguga

SEQ ID NO: 1738637 - RNA, 17 nt, Human
cccacgcccccacuggu

SEQ ID NO: 1738638 - RNA, 16 nt, Human
cccaccuuggcugcag

SEQ ID NO: 1738639 - RNA, 14 nt, Human
cccacgcuggagug

SEQ ID NO: 1738640 - RNA, 12 nt, Human
caaaauaaaacu

SEQ ID NO: 1738641 - RNA, 14 nt, Human
caaaauaaaacuuu

SEQ ID NO: 1738642 - RNA, 15 nt, Human
caaaauguaggguua

SEQ ID NO: 1738643 - RNA, 16 nt, Human
caaaauuguuacaaau

SEQ ID NO: 1738644 - RNA, 15 nt, Human
caaacacauacagga

SEQ ID NO: 1738645 - RNA, 20 nt, Human
caaacccuucagugccaaaa

SEQ ID NO: 1738646 - RNA, 13 nt, Human
caaaggaagcaca

SEQ ID NO: 1738647 - RNA, 12 nt, Human
caaaggaagcac

SEQ ID NO: 1738648 - RNA, 15 nt, Human
caaagcuaggccugg

SEQ ID NO: 1738649 - RNA, 19 nt, Human
caaagcuaggccuggccag

SEQ ID NO: 1738650 - RNA, 14 nt, Human
caaagcuaggccug

SEQ ID NO: 1738651 - RNA, 13 nt, Human
caaagcuaggccu

SEQ ID NO: 1738652 - RNA, 18 nt, Human
caaaggguaucaggugcu

SEQ ID NO: 1738653 - RNA, 16 nt, Human
caaaggguaucaggug

SEQ ID NO: 1738654 - RNA, 23 nt, Human
caaaggccuaauucuaugccugu

SEQ ID NO: 1738655 - RNA, 14 nt, Human
caaaggaagcacau

SEQ ID NO: 1738656 - RNA, 17 nt, Human
caaacucaccugccccu

SEQ ID NO: 1738657 - RNA, 18 nt, Human
caaagccuccuccagccg

SEQ ID NO: 1738658 - RNA, 17 nt, Human
caaagccuccuccagcc

SEQ ID NO: 1738659 - RNA, 21 nt, Human
caaauuguaagcaugcacaaa

SEQ ID NO: 1738660 - RNA, 11 nt, Human
caaauuucuaa

SEQ ID NO: 1738661 - RNA, 12 nt, Human
caaauuucuaaa

SEQ ID NO: 1738662 - RNA, 14 nt, Human
caaauuucuaaauc

SEQ ID NO: 1738663 - RNA, 19 nt, Human
caaaggguaucaggugcug

SEQ ID NO: 1738664 - RNA, 19 nt, Human
caaagugcugggauuacag

SEQ ID NO: 1738665 - RNA, 23 nt, Human
caaagugcugggauuacaggugu

SEQ ID NO: 1738666 - RNA, 20 nt, Human
caaagugcugggauuacagg

SEQ ID NO: 1738667 - RNA, 23 nt, Human
caaaacuucagacauagaauuaa

SEQ ID NO: 1738668 - RNA, 17 nt, Human
caaaauaaaaaugaggu

SEQ ID NO: 1738669 - RNA, 21 nt, Human
caaaacucuccucugcugcug

SEQ ID NO: 1738670 - RNA, 20 nt, Human
caaaacucuccucugcugcu

SEQ ID NO: 1738671 - RNA, 22 nt, Human
caaaacucuccucugcugcugg

SEQ ID NO: 1738672 - RNA, 23 nt, Human
caaaacucuccucugcugcuggc

SEQ ID NO: 1738673 - RNA, 22 nt, Human
caaaacaaaggccuaauucuau

SEQ ID NO: 1738674 - RNA, 12 nt, Human
caaaacaaaggc

SEQ ID NO: 1738675 - RNA, 15 nt, Human
caaaacaaaggccua

SEQ ID NO: 1738676 - RNA, 16 nt, Human
caaaacaaaggccuaa

SEQ ID NO: 1738677 - RNA, 13 nt, Human
caaaaaggcagga

SEQ ID NO: 1738678 - RNA, 20 nt, Human
caaaaacauggccuuugcuu

SEQ ID NO: 1738679 - RNA, 21 nt, Human
auuuugggguacccacugcuc

SEQ ID NO: 1738680 - RNA, 16 nt, Human
caaaaaaugcuugcuu

SEQ ID NO: 1738681 - RNA, 23 nt, Human
auuuugggguacccacugcucug

SEQ ID NO: 1738682 - RNA, 22 nt, Human
auuuugggguacccacugcucu

SEQ ID NO: 1738683 - RNA, 14 nt, Human
caaguuaaauaaau

SEQ ID NO: 1738684 - RNA, 19 nt, Human
caaguggcucccacacccu

SEQ ID NO: 1738685 - RNA, 17 nt, Human
caagugagagcugggug

SEQ ID NO: 1738686 - RNA, 15 nt, Human
caagugagagcuggg

SEQ ID NO: 1738687 - RNA, 14 nt, Human
caagugagagcugg

SEQ ID NO: 1738688 - RNA, 21 nt, Human
caaguccucuuuucugagagg

SEQ ID NO: 1738689 - RNA, 18 nt, Human
caagugagagcugggugu

SEQ ID NO: 1738690 - RNA, 21 nt, Human
caagugauucucaugccucag

SEQ ID NO: 1738691 - RNA, 20 nt, Human
caagugauucucaugccuca

SEQ ID NO: 1738692 - RNA, 18 nt, Human
caagugauucucaugccu

SEQ ID NO: 1738693 - RNA, 17 nt, Human
caagugauucucaugcc

SEQ ID NO: 1738694 - RNA, 23 nt, Human
caaggcugucaauuacaggaagu

SEQ ID NO: 1738695 - RNA, 15 nt, Human
caaggcugcagugag

SEQ ID NO: 1738696 - RNA, 12 nt, Human
caaggcugcagu

SEQ ID NO: 1738697 - RNA, 17 nt, Human
caaggggcccaaauucu

SEQ ID NO: 1738698 - RNA, 18 nt, Human
caaggggcccaaauucuu

SEQ ID NO: 1738699 - RNA, 14 nt, Human
caaggucauuuuuu

SEQ ID NO: 1738700 - RNA, 20 nt, Human
caaggucauuuuuuuuaaga

SEQ ID NO: 1738701 - RNA, 18 nt, Human
caaggguagggugggccu

SEQ ID NO: 1738702 - RNA, 14 nt, Human
caaguccucuuuuc

SEQ ID NO: 1738703 - RNA, 14 nt, Human
caagccagcuggag

SEQ ID NO: 1738704 - RNA, 18 nt, Human
caagcaggacauggacaa

SEQ ID NO: 1738705 - RNA, 14 nt, Human
caagcaggacaugg

SEQ ID NO: 1738706 - RNA, 22 nt, Human
caagcgauucuucugcuucagc

SEQ ID NO: 1738707 - RNA, 20 nt, Human
caagcgauucuucugcuuca

SEQ ID NO: 1738708 - RNA, 14 nt, Human
caagccuggcaagg

SEQ ID NO: 1738709 - RNA, 19 nt, Human
caagcgauucuucugcuuc

SEQ ID NO: 1738710 - RNA, 18 nt, Human
caagccguggcuucccgc

SEQ ID NO: 1738711 - RNA, 17 nt, Human
caaggcugauuaaacca

SEQ ID NO: 1738712 - RNA, 22 nt, Human
caaggacugcagggacugccag

SEQ ID NO: 1738713 - RNA, 14 nt, Human
caaggagccaaaca

SEQ ID NO: 1738714 - RNA, 19 nt, Human
caagcuggucccacucagu

SEQ ID NO: 1738715 - RNA, 17 nt, Human
caagcuggucccacuca

SEQ ID NO: 1738716 - RNA, 15 nt, Human
caaggacugcaggga

SEQ ID NO: 1738717 - RNA, 18 nt, Human
caaggacagccccuccuc

SEQ ID NO: 1738718 - RNA, 18 nt, Human
caagacucuuuggacacu

SEQ ID NO: 1738719 - RNA, 15 nt, Human
caagagcccaggccu

SEQ ID NO: 1738720 - RNA, 14 nt, Human
caagagcccaggcc

SEQ ID NO: 1738721 - RNA, 18 nt, Human
caagacgcugugcugccc

SEQ ID NO: 1738722 - RNA, 19 nt, Human
caagacgcugugcugcccu

SEQ ID NO: 1738723 - RNA, 17 nt, Human
caagcaccuccugccuc

SEQ ID NO: 1738724 - RNA, 16 nt, Human
caagcaccuccugccu

SEQ ID NO: 1738725 - RNA, 15 nt, Human
caagcaccuccugcc

SEQ ID NO: 1738726 - RNA, 15 nt, Human
caagagggcacuggu

SEQ ID NO: 1738727 - RNA, 14 nt, Human
caagagggcacugg

SEQ ID NO: 1738728 - RNA, 17 nt, Human
caagagcccaggccucc

SEQ ID NO: 1738729 - RNA, 16 nt, Human
caagagcccaggccuc

SEQ ID NO: 1738730 - RNA, 13 nt, Human
caagagggcacug

SEQ ID NO: 1738731 - RNA, 19 nt, Human
caacugaccagccuccaug

SEQ ID NO: 1738732 - RNA, 17 nt, Human
caagacgcugugcugcc

SEQ ID NO: 1738733 - RNA, 16 nt, Human
caagacgcugugcugc

SEQ ID NO: 1738734 - RNA, 18 nt, Human
caagaccuucuccuucac

SEQ ID NO: 1738735 - RNA, 17 nt, Human
caagaccuucuccuuca

SEQ ID NO: 1738736 - RNA, 16 nt, Human
caagaccuucuccuuc

SEQ ID NO: 1738737 - RNA, 14 nt, Human
caagaccuucuccu

SEQ ID NO: 1738738 - RNA, 20 nt, Human
caagaacuuuccaggaaggc

SEQ ID NO: 1738739 - RNA, 22 nt, Human
caacacucauugaccugaggcc

SEQ ID NO: 1738740 - RNA, 20 nt, Human
caacacucauugaccugagg

SEQ ID NO: 1738741 - RNA, 18 nt, Human
caacacucauugaccuga

SEQ ID NO: 1738742 - RNA, 22 nt, Human
caaccccuucgcuccugugucu

SEQ ID NO: 1738743 - RNA, 18 nt, Human
caacccucagagccaccc

SEQ ID NO: 1738744 - RNA, 13 nt, Human
caacccucagagc

SEQ ID NO: 1738745 - RNA, 17 nt, Human
caacccuggcacccagg

SEQ ID NO: 1738746 - RNA, 14 nt, Human
caacgucugugcca

SEQ ID NO: 1738747 - RNA, 13 nt, Human
caacgucugugcc

SEQ ID NO: 1738748 - RNA, 17 nt, Human
caacugaccagccucca

SEQ ID NO: 1738749 - RNA, 15 nt, Human
caacugaccagccuc

SEQ ID NO: 1738750 - RNA, 19 nt, Human
caaccuucgccaccugggu

SEQ ID NO: 1738751 - RNA, 20 nt, Human
caaccuguucugcuuuccuc

SEQ ID NO: 1738752 - RNA, 14 nt, Human
caaccuccugggcu

SEQ ID NO: 1738753 - RNA, 15 nt, Human
caaccuccugggcua

SEQ ID NO: 1738754 - RNA, 13 nt, Human
caauaggaaaaac

SEQ ID NO: 1738755 - RNA, 12 nt, Human
caauaggaaaaa

SEQ ID NO: 1738756 - RNA, 17 nt, Human
caauauucgcuguguca

SEQ ID NO: 1738757 - RNA, 14 nt, Human
caauauuguacagu

SEQ ID NO: 1738758 - RNA, 15 nt, Human
caauauuguacaguu

SEQ ID NO: 1738759 - RNA, 15 nt, Human
caaugacuuacugua

SEQ ID NO: 1738760 - RNA, 17 nt, Human
caaugacuuacuguaca

SEQ ID NO: 1738761 - RNA, 18 nt, Human
caaugacuuacuguacau

SEQ ID NO: 1738762 - RNA, 23 nt, Human
caaugaccuuucaauaggaaaaa

SEQ ID NO: 1738763 - RNA, 16 nt, Human
caauucuccugccuca

SEQ ID NO: 1738764 - RNA, 15 nt, Human
caauucuccugccuc

SEQ ID NO: 1738765 - RNA, 14 nt, Human
caauucuccugccu

SEQ ID NO: 1738766 - RNA, 23 nt, Human
caauucucauuugucacacacuu

SEQ ID NO: 1738767 - RNA, 13 nt, Human
caauucuccugcc

SEQ ID NO: 1738768 - RNA, 16 nt, Human
caauuacaggaaguac

SEQ ID NO: 1738769 - RNA, 17 nt, Human
caaugugauaaaacccc

SEQ ID NO: 1738770 - RNA, 15 nt, Human
caaugugauaaaacc

SEQ ID NO: 1738771 - RNA, 21 nt, Human
caaugcacuuuguucuggcuc

SEQ ID NO: 1738772 - RNA, 20 nt, Human
caaugcacuuuguucuggcu

SEQ ID NO: 1738773 - RNA, 22 nt, Human
caaugcacuuuguucuggcucu

SEQ ID NO: 1738774 - RNA, 17 nt, Human
caaugcacuuuguucug

SEQ ID NO: 1738775 - RNA, 14 nt, Human
caauguucucucuu

SEQ ID NO: 1738776 - RNA, 14 nt, Human
caauaggaaaaacu

SEQ ID NO: 1738777 - RNA, 21 nt, Human
cacauagugaugguuccccug

SEQ ID NO: 1738778 - RNA, 23 nt, Human
cacagcugggguggggaccucag

SEQ ID NO: 1738779 - RNA, 22 nt, Human
cacagcugggguggggaccuca

SEQ ID NO: 1738780 - RNA, 22 nt, Human
cacagcuucauuuccugugucu

SEQ ID NO: 1738781 - RNA, 21 nt, Human
cacagcuucauuuccuguguc

SEQ ID NO: 1738782 - RNA, 15 nt, Human
cacaggcagguccag

SEQ ID NO: 1738783 - RNA, 14 nt, Human
cacaggcaggucca

SEQ ID NO: 1738784 - RNA, 11 nt, Human
cacaggcaggu

SEQ ID NO: 1738785 - RNA, 14 nt, Human
cacaggagggaggg

SEQ ID NO: 1738786 - RNA, 21 nt, Human
cacaggagggagggggaaggc

SEQ ID NO: 1738787 - RNA, 19 nt, Human
cacaggagggagggggaag

SEQ ID NO: 1738788 - RNA, 15 nt, Human
cacaguucucuccuu

SEQ ID NO: 1738789 - RNA, 14 nt, Human
cacaguucucuccu

SEQ ID NO: 1738790 - RNA, 17 nt, Human
cacagugcaucucagcc

SEQ ID NO: 1738791 - RNA, 22 nt, Human
cacaguccuuaccagcagagca

SEQ ID NO: 1738792 - RNA, 21 nt, Human
cacaguccuuaccagcagagc

SEQ ID NO: 1738793 - RNA, 15 nt, Human
cacaguccuuaccag

SEQ ID NO: 1738794 - RNA, 13 nt, Human
cacaguccuuacc

SEQ ID NO: 1738795 - RNA, 22 nt, Human
cacagugagucgaggacaggga

SEQ ID NO: 1738796 - RNA, 19 nt, Human
cacaggcagguccaggguu

SEQ ID NO: 1738797 - RNA, 14 nt, Human
cacagugcaucuca

SEQ ID NO: 1738798 - RNA, 22 nt, Human
uuuuuagacagagucucacugu

SEQ ID NO: 1738799 - RNA, 11 nt, Human
uuuuuacuaau

SEQ ID NO: 1738800 - RNA, 23 nt, Human
uuuuuauacauaaacaagaccac

SEQ ID NO: 1738801 - RNA, 12 nt, Human
uuuuuauggcuu

SEQ ID NO: 1738802 - RNA, 20 nt, Human
uuuuuaucgucacugcuuaa

SEQ ID NO: 1738803 - RNA, 12 nt, Human
uuuuuaucaugu

SEQ ID NO: 1738804 - RNA, 21 nt, Human
uuuuguuccacaaguuaaaua

SEQ ID NO: 1738805 - RNA, 15 nt, Human
uuuuguuccacaagu

SEQ ID NO: 1738806 - RNA, 12 nt, Human
uuuuguuucaua

SEQ ID NO: 1738807 - RNA, 19 nt, Human
uuuuguuucauauugaugu

SEQ ID NO: 1738808 - RNA, 23 nt, Human
uuuugugcauuaucuagauacug

SEQ ID NO: 1738809 - RNA, 17 nt, Human
uuuugugcauuaucuag

SEQ ID NO: 1738810 - RNA, 20 nt, Human
uuuugugcauuaucuagaua

SEQ ID NO: 1738811 - RNA, 21 nt, Human
uuuugugaugucccaacuugu

SEQ ID NO: 1738812 - RNA, 13 nt, Human
uuuugcuguagaa

SEQ ID NO: 1738813 - RNA, 14 nt, Human
uuuugcuguagaag

SEQ ID NO: 1738814 - RNA, 17 nt, Human
uuuugauccaagcuggu

SEQ ID NO: 1738815 - RNA, 17 nt, Human
uuuugagugccuuacac

SEQ ID NO: 1738816 - RNA, 23 nt, Human
uuuugccauguuggccaggcugg

SEQ ID NO: 1738817 - RNA, 16 nt, Human
uuuugauguaaagaug

SEQ ID NO: 1738818 - RNA, 18 nt, Human
uuuugauguaaagauguu

SEQ ID NO: 1738819 - RNA, 12 nt, Human
auuacuucugcu

SEQ ID NO: 1738820 - RNA, 19 nt, Human
uuuuugugaaaagcuccau

SEQ ID NO: 1738821 - RNA, 20 nt, Human
uuuuuguagagccagggucu

SEQ ID NO: 1738822 - RNA, 19 nt, Human
uuuuuguagagccaggguc

SEQ ID NO: 1738823 - RNA, 20 nt, Human
uuuuuauggcuuuugugcau

SEQ ID NO: 1738824 - RNA, 21 nt, Human
uuuuuauggcuuuugugcauu

SEQ ID NO: 1738825 - RNA, 22 nt, Human
uuuuuauggcuuuugugcauua

SEQ ID NO: 1738826 - RNA, 16 nt, Human
auuaaguacuauguau

SEQ ID NO: 1738827 - RNA, 14 nt, Human
auuaaguuguuaau

SEQ ID NO: 1738828 - RNA, 14 nt, Human
auuaaguacuaugu

SEQ ID NO: 1738829 - RNA, 19 nt, Human
auuaaguuguuaauaaaag

SEQ ID NO: 1738830 - RNA, 20 nt, Human
auuaaguuguuaauaaaagu

SEQ ID NO: 1738831 - RNA, 15 nt, Human
auuaaaaaucucaaa

SEQ ID NO: 1738832 - RNA, 19 nt, Human
auuaaaaaucucaaauuuc

SEQ ID NO: 1738833 - RNA, 20 nt, Human
auuaaaaaucucaaauuucu

SEQ ID NO: 1738834 - RNA, 22 nt, Human
auuaaaaaucucaaauuucuaa

SEQ ID NO: 1738835 - RNA, 23 nt, Human
auuaaaacacaacaucuuuuucu

SEQ ID NO: 1738836 - RNA, 17 nt, Human
auguuuaguaaucauau

SEQ ID NO: 1738837 - RNA, 11 nt, Human
uuuuauuuuau

SEQ ID NO: 1738838 - RNA, 12 nt, Human
uuuucaguuuuc

SEQ ID NO: 1738839 - RNA, 14 nt, Human
uuuucaguuuucag

SEQ ID NO: 1738840 - RNA, 13 nt, Human
uuuuauuaugcau

SEQ ID NO: 1738841 - RNA, 20 nt, Human
uuuuaggccaaaaaaaugua

SEQ ID NO: 1738842 - RNA, 20 nt, Human
uuuucauuuaggugaggaag

SEQ ID NO: 1738843 - RNA, 21 nt, Human
auguuaaacuuacuuaguguu

SEQ ID NO: 1738844 - RNA, 18 nt, Human
auguucaucaaugaauga

SEQ ID NO: 1738845 - RNA, 18 nt, Human
auguugcauagaauaaaa

SEQ ID NO: 1738846 - RNA, 17 nt, Human
auguugcauagaauaaa

SEQ ID NO: 1738847 - RNA, 12 nt, Human
auguugcccagg

SEQ ID NO: 1738848 - RNA, 17 nt, Human
auguugcccaggcaggu

SEQ ID NO: 1738849 - RNA, 20 nt, Human
auguugcccaggcaggucuu

SEQ ID NO: 1738850 - RNA, 20 nt, Human
auguugcccuguugcugccu

SEQ ID NO: 1738851 - RNA, 22 nt, Human
augugccagguuuuuggucuga

SEQ ID NO: 1738852 - RNA, 12 nt, Human
auggggcugcac

SEQ ID NO: 1738853 - RNA, 20 nt, Human
auggggcccugccuccuuug

SEQ ID NO: 1738854 - RNA, 14 nt, Human
uuuuaauaaacacu

SEQ ID NO: 1738855 - RNA, 20 nt, Human
auguggaguucaucuugaau

SEQ ID NO: 1738856 - RNA, 24 nt, Human
auguggaguucaucuugaauugua

SEQ ID NO: 1738857 - RNA, 23 nt, Human
auguguguuuuaaaaugagaaau

SEQ ID NO: 1738858 - RNA, 12 nt, Human
augugugugugc

SEQ ID NO: 1738859 - RNA, 15 nt, Human
auucccaagcucugc

SEQ ID NO: 1738860 - RNA, 14 nt, Human
auucccaagcucug

SEQ ID NO: 1738861 - RNA, 16 nt, Human
auucccaagcucugcu

SEQ ID NO: 1738862 - RNA, 14 nt, Human
auucaggaagcuca

SEQ ID NO: 1738863 - RNA, 17 nt, Human
auucagaguugaugguu

SEQ ID NO: 1738864 - RNA, 19 nt, Human
auucaguaauaacucuacc

SEQ ID NO: 1738865 - RNA, 15 nt, Human
auucaguaauaacuc

SEQ ID NO: 1738866 - RNA, 19 nt, Human
auucaggaagcucagggcc

SEQ ID NO: 1738867 - RNA, 17 nt, Human
auucaggaagcucaggg

SEQ ID NO: 1738868 - RNA, 20 nt, Human
auucaggaagcucagggccu

SEQ ID NO: 1738869 - RNA, 21 nt, Human
auucuccaccugccagggaca

SEQ ID NO: 1738870 - RNA, 13 nt, Human
auucuccugccuc

SEQ ID NO: 1738871 - RNA, 14 nt, Human
auucuccugccuca

SEQ ID NO: 1738872 - RNA, 11 nt, Human
auucuccugcc

SEQ ID NO: 1738873 - RNA, 12 nt, Human
auucuccugccu

SEQ ID NO: 1738874 - RNA, 16 nt, Human
auucuccuuguguuac

SEQ ID NO: 1738875 - RNA, 18 nt, Human
auucuccugccucagccu

SEQ ID NO: 1738876 - RNA, 17 nt, Human
auucuccugccucagcc

SEQ ID NO: 1738877 - RNA, 15 nt, Human
auucuccugccucag

SEQ ID NO: 1738878 - RNA, 19 nt, Human
auucuccugccucagccuc

SEQ ID NO: 1738879 - RNA, 20 nt, Human
auucuccugccucagccucc

SEQ ID NO: 1738880 - RNA, 20 nt, Human
auucuccaccugccagggac

SEQ ID NO: 1738881 - RNA, 19 nt, Human
auucuccaccugccaggga

SEQ ID NO: 1738882 - RNA, 15 nt, Human
auucucaugccucag

SEQ ID NO: 1738883 - RNA, 14 nt, Human
auucucaugccuca

SEQ ID NO: 1738884 - RNA, 12 nt, Human
auugaaaucuuu

SEQ ID NO: 1738885 - RNA, 17 nt, Human
auuuccagccaaagccu

SEQ ID NO: 1738886 - RNA, 22 nt, Human
auuucauuugugccagaaugcu

SEQ ID NO: 1738887 - RNA, 20 nt, Human
auuuccagugaaaucaguua

SEQ ID NO: 1738888 - RNA, 16 nt, Human
auuucaaacggccuca

SEQ ID NO: 1738889 - RNA, 15 nt, Human
auuugaaaauuuuga

SEQ ID NO: 1738890 - RNA, 14 nt, Human
auuugaaaauuuug

SEQ ID NO: 1738891 - RNA, 15 nt, Human
auuuccguuaaaaua

SEQ ID NO: 1738892 - RNA, 16 nt, Human
auuuccguuaaaauac

SEQ ID NO: 1738893 - RNA, 13 nt, Human
auuuauucugcuc

SEQ ID NO: 1738894 - RNA, 20 nt, Human
auuuaguaucuuuuuauuca

SEQ ID NO: 1738895 - RNA, 13 nt, Human
auuuaguguucau

SEQ ID NO: 1738896 - RNA, 22 nt, Human
auuuauaaaaauaaaaaacacu

SEQ ID NO: 1738897 - RNA, 17 nt, Human
auuuauaaaaauaaaaa

SEQ ID NO: 1738898 - RNA, 15 nt, Human
auuuagaaauauaau

SEQ ID NO: 1738899 - RNA, 16 nt, Human
auuuacuucuuauaca

SEQ ID NO: 1738900 - RNA, 14 nt, Human
auuuacuucuuaua

SEQ ID NO: 1738901 - RNA, 17 nt, Human
auuuacuucuuauacau

SEQ ID NO: 1738902 - RNA, 14 nt, Human
auuuaacagaaaug

SEQ ID NO: 1738903 - RNA, 12 nt, Human
auuuaacagaaa

SEQ ID NO: 1738904 - RNA, 14 nt, Human
auuuauucugcuca

SEQ ID NO: 1738905 - RNA, 14 nt, Human
auugugucucuugg

SEQ ID NO: 1738906 - RNA, 18 nt, Human
auugugucucuugguccu

SEQ ID NO: 1738907 - RNA, 19 nt, Human
auugguguaagguacuuuc

SEQ ID NO: 1738908 - RNA, 13 nt, Human
auuguauucagag

SEQ ID NO: 1738909 - RNA, 20 nt, Human
auuguccccgacccuugccg

SEQ ID NO: 1738910 - RNA, 19 nt, Human
auuguccccgacccuugcc

SEQ ID NO: 1738911 - RNA, 17 nt, Human
auuguccccgacccuug

SEQ ID NO: 1738912 - RNA, 18 nt, Human
auucuuauuuaaugaaag

SEQ ID NO: 1738913 - RNA, 14 nt, Human
auucuuauuuaaug

SEQ ID NO: 1738914 - RNA, 13 nt, Human
auucuuauuuaau

SEQ ID NO: 1738915 - RNA, 13 nt, Human
auucuucuccacu

SEQ ID NO: 1738916 - RNA, 22 nt, Human
auucuuccucccucccucuuuc

SEQ ID NO: 1738917 - RNA, 24 nt, Human
auucugucucuggauuauauuaug

SEQ ID NO: 1738918 - RNA, 17 nt, Human
auucuccuuguguuacu

SEQ ID NO: 1738919 - RNA, 18 nt, Human
auugacccacaagaaaug

SEQ ID NO: 1738920 - RNA, 20 nt, Human
auuuucaacgcagcccugcu

SEQ ID NO: 1738921 - RNA, 18 nt, Human
auuuucaacgcagcccug

SEQ ID NO: 1738922 - RNA, 21 nt, Human
auuuuauuuuuuucugaauua

SEQ ID NO: 1738923 - RNA, 22 nt, Human
auuuucaguuauuauauuuaca

SEQ ID NO: 1738924 - RNA, 15 nt, Human
auuuuaaacagagga

SEQ ID NO: 1738925 - RNA, 15 nt, Human
auuuuaauucaguug

SEQ ID NO: 1738926 - RNA, 17 nt, Human
auuuuaccuuugacaaa

SEQ ID NO: 1738927 - RNA, 17 nt, Human
auuuuacuuuuuccugg

SEQ ID NO: 1738928 - RNA, 16 nt, Human
auuuuacuuuuuccug

SEQ ID NO: 1738929 - RNA, 23 nt, Human
auuugugaagguggaaauaaacu

SEQ ID NO: 1738930 - RNA, 14 nt, Human
auuugugauacaau

SEQ ID NO: 1738931 - RNA, 15 nt, Human
auuugugauacaaug

SEQ ID NO: 1738932 - RNA, 18 nt, Human
uugcugauggugcaauga

SEQ ID NO: 1738933 - RNA, 17 nt, Human
uugcugauggugcaaug

SEQ ID NO: 1738934 - RNA, 19 nt, Human
uugcugauggugcaaugac

SEQ ID NO: 1738935 - RNA, 17 nt, Human
uuggaaagaguaggaag

SEQ ID NO: 1738936 - RNA, 19 nt, Human
uugcugaauacagaggcaa

SEQ ID NO: 1738937 - RNA, 20 nt, Human
uugcuaagugaggaugaaaa

SEQ ID NO: 1738938 - RNA, 14 nt, Human
augaaaugagguca

SEQ ID NO: 1738939 - RNA, 20 nt, Human
augaaagacuguacaaagua

SEQ ID NO: 1738940 - RNA, 23 nt, Human
augaaagauggcugugccucugc

SEQ ID NO: 1738941 - RNA, 20 nt, Human
augaaagauggcugugccuc

SEQ ID NO: 1738942 - RNA, 19 nt, Human
augaaagauggcugugccu

SEQ ID NO: 1738943 - RNA, 16 nt, Human
uuggcugcugaaggcu

SEQ ID NO: 1738944 - RNA, 22 nt, Human
uuggcgcugccccuggcagccc

SEQ ID NO: 1738945 - RNA, 13 nt, Human
aucuuucugcaga

SEQ ID NO: 1738946 - RNA, 15 nt, Human
uuggcugcugaaggc

SEQ ID NO: 1738947 - RNA, 11 nt, Human
uuggcugcuga

SEQ ID NO: 1738948 - RNA, 14 nt, Human
uuggcugcagggag

SEQ ID NO: 1738949 - RNA, 23 nt, Human
uuggcuauuagagaucaaccccu

SEQ ID NO: 1738950 - RNA, 21 nt, Human
uuggcuagagguucaaagaua

SEQ ID NO: 1738951 - RNA, 22 nt, Human
uuggcuaggaccccuccaugug

SEQ ID NO: 1738952 - RNA, 22 nt, Human
uuggcuagagguucaaagauau

SEQ ID NO: 1738953 - RNA, 23 nt, Human
uuggaaagaguaggaagacuuug

SEQ ID NO: 1738954 - RNA, 18 nt, Human
uuggaaagaguaggaaga

SEQ ID NO: 1738955 - RNA, 15 nt, Human
augacaggccugucc

SEQ ID NO: 1738956 - RNA, 19 nt, Human
augacacgaauauugcuga

SEQ ID NO: 1738957 - RNA, 20 nt, Human
augacacgaauauugcugau

SEQ ID NO: 1738958 - RNA, 20 nt, Human
uuguaaggaaugauuaauua

SEQ ID NO: 1738959 - RNA, 13 nt, Human
uuguaaugaaaac

SEQ ID NO: 1738960 - RNA, 22 nt, Human
uugggguacccacugcucuggu

SEQ ID NO: 1738961 - RNA, 19 nt, Human
uugguuaggcauuguggga

SEQ ID NO: 1738962 - RNA, 14 nt, Human
uuguaaggaaugau

SEQ ID NO: 1738963 - RNA, 22 nt, Human
uuguaacuaaaauaauuuugua

SEQ ID NO: 1738964 - RNA, 23 nt, Human
uuguaacuaaaauaauuuuguaa

SEQ ID NO: 1738965 - RNA, 17 nt, Human
uuguaacuaaaauaauu

SEQ ID NO: 1738966 - RNA, 18 nt, Human
uuguaacuaaaauaauuu

SEQ ID NO: 1738967 - RNA, 21 nt, Human
uuguaacuaaaauaauuuugu

SEQ ID NO: 1738968 - RNA, 13 nt, Human
augaaccacaucu

SEQ ID NO: 1738969 - RNA, 22 nt, Human
augaaccacaucuugcucugcu

SEQ ID NO: 1738970 - RNA, 20 nt, Human
augaaccacaucuugcucug

SEQ ID NO: 1738971 - RNA, 17 nt, Human
uugggguacccacugcu

SEQ ID NO: 1738972 - RNA, 19 nt, Human
uuggggaagaacgaagcca

SEQ ID NO: 1738973 - RNA, 15 nt, Human
augaucacggcucac

SEQ ID NO: 1738974 - RNA, 19 nt, Human
augaucacggcucacugca

SEQ ID NO: 1738975 - RNA, 18 nt, Human
augaucacggcucacugc

SEQ ID NO: 1738976 - RNA, 14 nt, Human
augaucuucuuuau

SEQ ID NO: 1738977 - RNA, 15 nt, Human
augauccuaaugaau

SEQ ID NO: 1738978 - RNA, 15 nt, Human
augaucuaggaagac

SEQ ID NO: 1738979 - RNA, 16 nt, Human
augauccuaggcauuu

SEQ ID NO: 1738980 - RNA, 23 nt, Human
augaucacggcucacugcagccu

SEQ ID NO: 1738981 - RNA, 18 nt, Human
uugugaagguggaaauaa

SEQ ID NO: 1738982 - RNA, 17 nt, Human
uugugaagguggaaaua

SEQ ID NO: 1738983 - RNA, 19 nt, Human
uuguuuuuuuuuuccacuu

SEQ ID NO: 1738984 - RNA, 17 nt, Human
uuuaaaaaauuaaucug

SEQ ID NO: 1738985 - RNA, 19 nt, Human
augcaccuggaauauauaa

SEQ ID NO: 1738986 - RNA, 18 nt, Human
uuguuuuuuuuuuccacu

SEQ ID NO: 1738987 - RNA, 22 nt, Human
augcaaaccaucauugaaaucu

SEQ ID NO: 1738988 - RNA, 21 nt, Human
augcaaaccaucauugaaauc

SEQ ID NO: 1738989 - RNA, 20 nt, Human
augcaaaccaucauugaaau

SEQ ID NO: 1738990 - RNA, 19 nt, Human
augcaaaccaucauugaaa

SEQ ID NO: 1738991 - RNA, 18 nt, Human
augcaaaccaucauugaa

SEQ ID NO: 1738992 - RNA, 16 nt, Human
augcaaaccaucauug

SEQ ID NO: 1738993 - RNA, 18 nt, Human
augaucuucuuuauaauu

SEQ ID NO: 1738994 - RNA, 15 nt, Human
augaucuucuuuaua

SEQ ID NO: 1738995 - RNA, 22 nt, Human
augcaaggucauuuuuuuuaag

SEQ ID NO: 1738996 - RNA, 16 nt, Human
augcaccuggaauaua

SEQ ID NO: 1738997 - RNA, 14 nt, Human
augcaccuggaaua

SEQ ID NO: 1738998 - RNA, 14 nt, Human
augcaaggucauuu

SEQ ID NO: 1738999 - RNA, 16 nt, Human
augcaaggucauuuuu

SEQ ID NO: 1739000 - RNA, 22 nt, Human
augcaaacuuuauuuuguguuu

SEQ ID NO: 1739001 - RNA, 18 nt, Human
uugucacacacuuuggcu

SEQ ID NO: 1739002 - RNA, 15 nt, Human
augauaaaacacaaa

SEQ ID NO: 1739003 - RNA, 19 nt, Human
augagccucagcauccugg

SEQ ID NO: 1739004 - RNA, 18 nt, Human
augagccucagcauccug

SEQ ID NO: 1739005 - RNA, 17 nt, Human
augagccucagcauccu

SEQ ID NO: 1739006 - RNA, 13 nt, Human
augagaggaaauc

SEQ ID NO: 1739007 - RNA, 12 nt, Human
augagaggaaau

SEQ ID NO: 1739008 - RNA, 15 nt, Human
augagaggaaaucac

SEQ ID NO: 1739009 - RNA, 14 nt, Human
augagaggaaauca

SEQ ID NO: 1739010 - RNA, 16 nt, Human
augagaggaaaucacc

SEQ ID NO: 1739011 - RNA, 16 nt, Human
augagccucagcaucc

SEQ ID NO: 1739012 - RNA, 15 nt, Human
augagccucagcauc

SEQ ID NO: 1739013 - RNA, 12 nt, Human
augagccucagc

SEQ ID NO: 1739014 - RNA, 22 nt, Human
augagcaucaggccaggcccuc

SEQ ID NO: 1739015 - RNA, 18 nt, Human
augagccaccgcgcccag

SEQ ID NO: 1739016 - RNA, 21 nt, Human
augagccaccgcgcccagccu

SEQ ID NO: 1739017 - RNA, 21 nt, Human
augagcaucaggccaggcccu

SEQ ID NO: 1739018 - RNA, 20 nt, Human
augagcaucaggccaggccc

SEQ ID NO: 1739019 - RNA, 19 nt, Human
augagcaucaggccaggcc

SEQ ID NO: 1739020 - RNA, 18 nt, Human
augagcaucaggccaggc

SEQ ID NO: 1739021 - RNA, 17 nt, Human
augagcaucaggccagg

SEQ ID NO: 1739022 - RNA, 16 nt, Human
augagcaucaggccag

SEQ ID NO: 1739023 - RNA, 15 nt, Human
augagcaucaggcca

SEQ ID NO: 1739024 - RNA, 16 nt, Human
uuucugccgcagcccu

SEQ ID NO: 1739025 - RNA, 14 nt, Human
uuucugccgcagcc

SEQ ID NO: 1739026 - RNA, 22 nt, Human
uuucucauuugccaauaauaau

SEQ ID NO: 1739027 - RNA, 14 nt, Human
uuucucaaagaaau

SEQ ID NO: 1739028 - RNA, 15 nt, Human
uuucucaaagaaauu

SEQ ID NO: 1739029 - RNA, 16 nt, Human
uuucucaaagaaauuu

SEQ ID NO: 1739030 - RNA, 15 nt, Human
uuucuaugacacaug

SEQ ID NO: 1739031 - RNA, 21 nt, Human
uuucuaugacacaugcaaggu

SEQ ID NO: 1739032 - RNA, 23 nt, Human
augggcuggguucuacccaggug

SEQ ID NO: 1739033 - RNA, 16 nt, Human
uuugaaauauggucuu

SEQ ID NO: 1739034 - RNA, 13 nt, Human
auggggcccugcc

SEQ ID NO: 1739035 - RNA, 14 nt, Human
auggggcccugccu

SEQ ID NO: 1739036 - RNA, 13 nt, Human
auggggaggacaa

SEQ ID NO: 1739037 - RNA, 17 nt, Human
auggggaggacaaaaug

SEQ ID NO: 1739038 - RNA, 19 nt, Human
uuugaaacacuuugcauaa

SEQ ID NO: 1739039 - RNA, 17 nt, Human
uuugaaacacuuugcau

SEQ ID NO: 1739040 - RNA, 22 nt, Human
uuugaaaccccuguaggccuca

SEQ ID NO: 1739041 - RNA, 13 nt, Human
uuucuuuguggcu

SEQ ID NO: 1739042 - RNA, 21 nt, Human
uuucuuuaguuuuugugaagu

SEQ ID NO: 1739043 - RNA, 18 nt, Human
auggccucuucagaucuc

SEQ ID NO: 1739044 - RNA, 21 nt, Human
auggacccaauauuuaccaga

SEQ ID NO: 1739045 - RNA, 15 nt, Human
augggccuccugugu

SEQ ID NO: 1739046 - RNA, 14 nt, Human
augggcagagcaga

SEQ ID NO: 1739047 - RNA, 13 nt, Human
augggcagagcag

SEQ ID NO: 1739048 - RNA, 15 nt, Human
augggcagagcagag

SEQ ID NO: 1739049 - RNA, 21 nt, Human
augggcaacccccagccugcu

SEQ ID NO: 1739050 - RNA, 19 nt, Human
augggcaacccccagccug

SEQ ID NO: 1739051 - RNA, 13 nt, Human
augggagcucaug

SEQ ID NO: 1739052 - RNA, 15 nt, Human
augggacuggccucu

SEQ ID NO: 1739053 - RNA, 18 nt, Human
uuucgcaggauucuuccu

SEQ ID NO: 1739054 - RNA, 22 nt, Human
uuucgcaggauucuuccucccu

SEQ ID NO: 1739055 - RNA, 21 nt, Human
uuuccuuuuaaaacacuucca

SEQ ID NO: 1739056 - RNA, 21 nt, Human
uuuccuucauucaacccaccu

SEQ ID NO: 1739057 - RNA, 22 nt, Human
uuuccuucagugccuuauggaa

SEQ ID NO: 1739058 - RNA, 21 nt, Human
uuuccuucagugccuuaugga

SEQ ID NO: 1739059 - RNA, 18 nt, Human
uuuccuucagugccuuau

SEQ ID NO: 1739060 - RNA, 23 nt, Human
uuuccuucauucaacccaccugc

SEQ ID NO: 1739061 - RNA, 12 nt, Human
uuuccugugucu

SEQ ID NO: 1739062 - RNA, 17 nt, Human
augggccuccugugugu

SEQ ID NO: 1739063 - RNA, 19 nt, Human
uuuccuuaaauuaucuaaa

SEQ ID NO: 1739064 - RNA, 15 nt, Human
uuuccuucagugccu

SEQ ID NO: 1739065 - RNA, 12 nt, Human
uuuccuucagug

SEQ ID NO: 1739066 - RNA, 11 nt, Human
uuuccuucagu

SEQ ID NO: 1739067 - RNA, 15 nt, Human
uuuaguagagacagg

SEQ ID NO: 1739068 - RNA, 15 nt, Human
uuuagauaauacacc

SEQ ID NO: 1739069 - RNA, 18 nt, Human
uuuagaguugauacuaca

SEQ ID NO: 1739070 - RNA, 13 nt, Human
uuuagauaauaca

SEQ ID NO: 1739071 - RNA, 19 nt, Human
uuuauuaaaugcccagccc

SEQ ID NO: 1739072 - RNA, 19 nt, Human
uuuauuaaauguagaaagu

SEQ ID NO: 1739073 - RNA, 15 nt, Human
uuuaugugaaacaug

SEQ ID NO: 1739074 - RNA, 14 nt, Human
uuuaugugaaacau

SEQ ID NO: 1739075 - RNA, 21 nt, Human
uuuaccuuuuuuauacauaaa

SEQ ID NO: 1739076 - RNA, 14 nt, Human
uuuacuaauagaca

SEQ ID NO: 1739077 - RNA, 17 nt, Human
uuuacuaauagacaauu

SEQ ID NO: 1739078 - RNA, 18 nt, Human
uuuacuaauagacaauuu

SEQ ID NO: 1739079 - RNA, 14 nt, Human
uuuaccuuuuuuau

SEQ ID NO: 1739080 - RNA, 19 nt, Human
uuuaccuuuuuuauacaua

SEQ ID NO: 1739081 - RNA, 20 nt, Human
uuuaccuuuuuuauacauaa

SEQ ID NO: 1739082 - RNA, 17 nt, Human
augcuacacacugcaug

SEQ ID NO: 1739083 - RNA, 18 nt, Human
augcuacacacugcaugu

SEQ ID NO: 1739084 - RNA, 13 nt, Human
augcuaagugaaa

SEQ ID NO: 1739085 - RNA, 23 nt, Human
augcgcaggcuggcccugcccug

SEQ ID NO: 1739086 - RNA, 21 nt, Human
uuuaaagaaaaguuuuguaaa

SEQ ID NO: 1739087 - RNA, 13 nt, Human
uuuaaagaaaagu

SEQ ID NO: 1739088 - RNA, 15 nt, Human
uuuaaagaaaaguuu

SEQ ID NO: 1739089 - RNA, 17 nt, Human
uuuaaagaaaaguuuug

SEQ ID NO: 1739090 - RNA, 17 nt, Human
auggaacacucugagac

SEQ ID NO: 1739091 - RNA, 18 nt, Human
auggaacacucugagacu

SEQ ID NO: 1739092 - RNA, 21 nt, Human
auggaaguacuauaauuuacc

SEQ ID NO: 1739093 - RNA, 15 nt, Human
auggaauaacaugua

SEQ ID NO: 1739094 - RNA, 14 nt, Human
auggaauaacaugu

SEQ ID NO: 1739095 - RNA, 13 nt, Human
uuuauuuuuuggg

SEQ ID NO: 1739096 - RNA, 22 nt, Human
augcuggcuguuggcugggggc

SEQ ID NO: 1739097 - RNA, 14 nt, Human
augcuguauauguu

SEQ ID NO: 1739098 - RNA, 19 nt, Human
augcugugcccuaaagugu

SEQ ID NO: 1739099 - RNA, 19 nt, Human
uuuccagguuuaagcuguu

SEQ ID NO: 1739100 - RNA, 12 nt, Human
uuucauaaagca

SEQ ID NO: 1739101 - RNA, 15 nt, Human
uuucaguuuucagga

SEQ ID NO: 1739102 - RNA, 24 nt, Human
uuucacucuuauugcccacgcugg

SEQ ID NO: 1739103 - RNA, 15 nt, Human
uuucacucuccuugg

SEQ ID NO: 1739104 - RNA, 24 nt, Human
uuucacugcuggcugccuuagaac

SEQ ID NO: 1739105 - RNA, 14 nt, Human
uuucacucuccuug

SEQ ID NO: 1739106 - RNA, 17 nt, Human
uuuauuuuuuucugaau

SEQ ID NO: 1739107 - RNA, 16 nt, Human
uuuauuuuuugggaaa

SEQ ID NO: 1739108 - RNA, 22 nt, Human
uucauauuuuaaacagaggaua

SEQ ID NO: 1739109 - RNA, 20 nt, Human
uucauaucuauuuauuaaau

SEQ ID NO: 1739110 - RNA, 14 nt, Human
uucaguaagccgug

SEQ ID NO: 1739111 - RNA, 17 nt, Human
uucagguaacaggcaga

SEQ ID NO: 1739112 - RNA, 13 nt, Human
auauaugcuaagu

SEQ ID NO: 1739113 - RNA, 15 nt, Human
uucaucaaugaauga

SEQ ID NO: 1739114 - RNA, 22 nt, Human
auauauguuuuaagaggcaggg

SEQ ID NO: 1739115 - RNA, 21 nt, Human
auauauguuuuaagaggcagg

SEQ ID NO: 1739116 - RNA, 15 nt, Human
auauauuuuaagacg

SEQ ID NO: 1739117 - RNA, 16 nt, Human
uucagaaauguguuau

SEQ ID NO: 1739118 - RNA, 22 nt, Human
uucagauauaaaagacugacca

SEQ ID NO: 1739119 - RNA, 14 nt, Human
uucagccaagaauu

SEQ ID NO: 1739120 - RNA, 16 nt, Human
uucagguaacaggcag

SEQ ID NO: 1739121 - RNA, 15 nt, Human
uucagguaacaggca

SEQ ID NO: 1739122 - RNA, 22 nt, Human
uucaggguuggccccugcccgg

SEQ ID NO: 1739123 - RNA, 19 nt, Human
uucaggguuggccccugcc

SEQ ID NO: 1739124 - RNA, 17 nt, Human
uucaggguuggccccug

SEQ ID NO: 1739125 - RNA, 16 nt, Human
uucaggguuggccccu

SEQ ID NO: 1739126 - RNA, 14 nt, Human
uucaggguuggccc

SEQ ID NO: 1739127 - RNA, 22 nt, Human
uuccaauuuacauacucugcuu

SEQ ID NO: 1739128 - RNA, 21 nt, Human
uuccacaagagcccaggccuc

SEQ ID NO: 1739129 - RNA, 14 nt, Human
uuccacagaggaca

SEQ ID NO: 1739130 - RNA, 22 nt, Human
uuccacagaggacacagagaag

SEQ ID NO: 1739131 - RNA, 18 nt, Human
uuccaccaucaagccacc

SEQ ID NO: 1739132 - RNA, 15 nt, Human
uuccaccuucccaug

SEQ ID NO: 1739133 - RNA, 17 nt, Human
uuccagguuuaagcugu

SEQ ID NO: 1739134 - RNA, 18 nt, Human
uuccagguuuaagcuguu

SEQ ID NO: 1739135 - RNA, 17 nt, Human
uuccaggcugggagagc

SEQ ID NO: 1739136 - RNA, 15 nt, Human
uuccaggcugggaga

SEQ ID NO: 1739137 - RNA, 23 nt, Human
auauguaccuaacgaaguauccu

SEQ ID NO: 1739138 - RNA, 21 nt, Human
auauguggaguucaucuugaa

SEQ ID NO: 1739139 - RNA, 20 nt, Human
auauguggaguucaucuuga

SEQ ID NO: 1739140 - RNA, 13 nt, Human
uucccuacuuccu

SEQ ID NO: 1739141 - RNA, 15 nt, Human
uucccuuuuuuuaag

SEQ ID NO: 1739142 - RNA, 12 nt, Human
uucccgcucagc

SEQ ID NO: 1739143 - RNA, 15 nt, Human
uucccgcucagcccu

SEQ ID NO: 1739144 - RNA, 14 nt, Human
uucccgcucagccc

SEQ ID NO: 1739145 - RNA, 22 nt, Human
uuccuggcacugcuuccaguga

SEQ ID NO: 1739146 - RNA, 20 nt, Human
uuccuggcacugcuuccagu

SEQ ID NO: 1739147 - RNA, 22 nt, Human
uuccucuuuuuauuuaguuccu

SEQ ID NO: 1739148 - RNA, 19 nt, Human
uuccuggcacugcuuccag

SEQ ID NO: 1739149 - RNA, 21 nt, Human
uuccuaaauauauuuuaagac

SEQ ID NO: 1739150 - RNA, 18 nt, Human
uuccucuccacugccuuc

SEQ ID NO: 1739151 - RNA, 19 nt, Human
uuccucuccacugccuucg

SEQ ID NO: 1739152 - RNA, 13 nt, Human
uuccucugagccu

SEQ ID NO: 1739153 - RNA, 21 nt, Human
aucaacugcaucaagauguga

SEQ ID NO: 1739154 - RNA, 13 nt, Human
aucaauuuaaaaa

SEQ ID NO: 1739155 - RNA, 16 nt, Human
aucaauucauaucuau

SEQ ID NO: 1739156 - RNA, 17 nt, Human
aucacgccacugcacua

SEQ ID NO: 1739157 - RNA, 15 nt, Human
aucacgccacugcac

SEQ ID NO: 1739158 - RNA, 13 nt, Human
auauuuacaaaug

SEQ ID NO: 1739159 - RNA, 17 nt, Human
auauuguuuucagugua

SEQ ID NO: 1739160 - RNA, 13 nt, Human
auauuguuuucag

SEQ ID NO: 1739161 - RNA, 13 nt, Human
auauuguacaguu

SEQ ID NO: 1739162 - RNA, 14 nt, Human
auauuguacaguuu

SEQ ID NO: 1739163 - RNA, 22 nt, Human
auauugcugauggugcaaugac

SEQ ID NO: 1739164 - RNA, 12 nt, Human
auauuguacagu

SEQ ID NO: 1739165 - RNA, 15 nt, Human
auauugauaugcuua

SEQ ID NO: 1739166 - RNA, 19 nt, Human
auauuaccacagacauacu

SEQ ID NO: 1739167 - RNA, 21 nt, Human
auauuccugcauuugugaaau

SEQ ID NO: 1739168 - RNA, 17 nt, Human
auauuaccacagacaua

SEQ ID NO: 1739169 - RNA, 22 nt, Human
auauuaagaaagacuaucuaaa

SEQ ID NO: 1739170 - RNA, 17 nt, Human
auauuaagaaagacuau

SEQ ID NO: 1739171 - RNA, 15 nt, Human
auauuaagaaagacu

SEQ ID NO: 1739172 - RNA, 16 nt, Human
auauuaagaaagacua

SEQ ID NO: 1739173 - RNA, 16 nt, Human
auauguucugacauaa

SEQ ID NO: 1739174 - RNA, 16 nt, Human
uuccagugaggcucug

SEQ ID NO: 1739175 - RNA, 15 nt, Human
uuccagugaggcucu

SEQ ID NO: 1739176 - RNA, 22 nt, Human
uuccagugaaaucaguuacucu

SEQ ID NO: 1739177 - RNA, 17 nt, Human
aucguaaaauuaagaaa

SEQ ID NO: 1739178 - RNA, 14 nt, Human
aucguaaaauuaag

SEQ ID NO: 1739179 - RNA, 13 nt, Human
aucguaaaauuaa

SEQ ID NO: 1739180 - RNA, 12 nt, Human
aucguaaaauua

SEQ ID NO: 1739181 - RNA, 23 nt, Human
auccuggcacccggccccugcug

SEQ ID NO: 1739182 - RNA, 22 nt, Human
auccuggcacccggccccugcu

SEQ ID NO: 1739183 - RNA, 21 nt, Human
auccuggcacccggccccugc

SEQ ID NO: 1739184 - RNA, 20 nt, Human
auccuggcacccggccccug

SEQ ID NO: 1739185 - RNA, 19 nt, Human
auccuggcacccggccccu

SEQ ID NO: 1739186 - RNA, 17 nt, Human
auccuggcacccggccc

SEQ ID NO: 1739187 - RNA, 15 nt, Human
auccuggaguucugg

SEQ ID NO: 1739188 - RNA, 19 nt, Human
auccugcuucugauaugca

SEQ ID NO: 1739189 - RNA, 21 nt, Human
auccugcuucugauaugcagu

SEQ ID NO: 1739190 - RNA, 20 nt, Human
auccucuguacagagcccac

SEQ ID NO: 1739191 - RNA, 18 nt, Human
auccucuguacagagccc

SEQ ID NO: 1739192 - RNA, 20 nt, Human
uucuuuugccguuauuaaaa

SEQ ID NO: 1739193 - RNA, 13 nt, Human
auccugagccaga

SEQ ID NO: 1739194 - RNA, 12 nt, Human
auccugagccag

SEQ ID NO: 1739195 - RNA, 11 nt, Human
auccugagcca

SEQ ID NO: 1739196 - RNA, 17 nt, Human
auccucuuugagugaag

SEQ ID NO: 1739197 - RNA, 16 nt, Human
auccugcaauuccacu

SEQ ID NO: 1739198 - RNA, 22 nt, Human
auccugaggcuccacuuggucu

SEQ ID NO: 1739199 - RNA, 13 nt, Human
auccugccccuga

SEQ ID NO: 1739200 - RNA, 11 nt, Human
auccugaggcu

SEQ ID NO: 1739201 - RNA, 13 nt, Human
auccugaggcucc

SEQ ID NO: 1739202 - RNA, 16 nt, Human
auccugaggcuccacu

SEQ ID NO: 1739203 - RNA, 18 nt, Human
auccugaggcuccacuug

SEQ ID NO: 1739204 - RNA, 21 nt, Human
auccugagccagauuucacuc

SEQ ID NO: 1739205 - RNA, 17 nt, Human
auccugagccagauuuc

SEQ ID NO: 1739206 - RNA, 15 nt, Human
auccugagccagauu

SEQ ID NO: 1739207 - RNA, 14 nt, Human
auccugagccagau

SEQ ID NO: 1739208 - RNA, 24 nt, Human
uugaccauucuccaccugccaggg

SEQ ID NO: 1739209 - RNA, 19 nt, Human
uugacacuuaaaaaugguu

SEQ ID NO: 1739210 - RNA, 13 nt, Human
uugacaucaacug

SEQ ID NO: 1739211 - RNA, 19 nt, Human
uugaccauucuccaccugc

SEQ ID NO: 1739212 - RNA, 18 nt, Human
uugaccauucuccaccug

SEQ ID NO: 1739213 - RNA, 16 nt, Human
uugaggucuguucuuu

SEQ ID NO: 1739214 - RNA, 15 nt, Human
uugaggucuguucuu

SEQ ID NO: 1739215 - RNA, 12 nt, Human
uugauaaaguaa

SEQ ID NO: 1739216 - RNA, 17 nt, Human
uugacacuuaaaaaugg

SEQ ID NO: 1739217 - RNA, 15 nt, Human
aucuaaauguugaaa

SEQ ID NO: 1739218 - RNA, 15 nt, Human
aucuaaacugccccc

SEQ ID NO: 1739219 - RNA, 15 nt, Human
aucgugacaacacuu

SEQ ID NO: 1739220 - RNA, 14 nt, Human
aucgugacaacacu

SEQ ID NO: 1739221 - RNA, 18 nt, Human
aucgucacugcuuaacuu

SEQ ID NO: 1739222 - RNA, 14 nt, Human
aucgucacugcuua

SEQ ID NO: 1739223 - RNA, 15 nt, Human
aucauaaaacuugau

SEQ ID NO: 1739224 - RNA, 23 nt, Human
aucauccacugugccaugugcca

SEQ ID NO: 1739225 - RNA, 21 nt, Human
aucauccacugugccaugugc

SEQ ID NO: 1739226 - RNA, 16 nt, Human
aucauuaggugugacu

SEQ ID NO: 1739227 - RNA, 19 nt, Human
aucagucugauucccaagc

SEQ ID NO: 1739228 - RNA, 17 nt, Human
aucagugcccuccagga

SEQ ID NO: 1739229 - RNA, 15 nt, Human
aucagugcccuccag

SEQ ID NO: 1739230 - RNA, 13 nt, Human
aucagugcccucc

SEQ ID NO: 1739231 - RNA, 23 nt, Human
aucacuugaacccgggaggcaga

SEQ ID NO: 1739232 - RNA, 15 nt, Human
aucaggugcugccau

SEQ ID NO: 1739233 - RNA, 19 nt, Human
aucaggugcugccauccag

SEQ ID NO: 1739234 - RNA, 17 nt, Human
aucaggugcugccaucc

SEQ ID NO: 1739235 - RNA, 21 nt, Human
uucucuaguuugauuaaauuc

SEQ ID NO: 1739236 - RNA, 22 nt, Human
uucuccuuucacaaccuucugu

SEQ ID NO: 1739237 - RNA, 18 nt, Human
uucuccuuucacaaccuu

SEQ ID NO: 1739238 - RNA, 12 nt, Human
aucauugaaauc

SEQ ID NO: 1739239 - RNA, 13 nt, Human
aucauugaaaucu

SEQ ID NO: 1739240 - RNA, 19 nt, Human
aucauugugaaauuauuca

SEQ ID NO: 1739241 - RNA, 15 nt, Human
aucauugugaaauua

SEQ ID NO: 1739242 - RNA, 13 nt, Human
aucauugugaaau

SEQ ID NO: 1739243 - RNA, 18 nt, Human
auccaagcaaaugugaau

SEQ ID NO: 1739244 - RNA, 16 nt, Human
auccaagcaaauguga

SEQ ID NO: 1739245 - RNA, 16 nt, Human
uucugccugcccaggc

SEQ ID NO: 1739246 - RNA, 15 nt, Human
uucugccugcccagg

SEQ ID NO: 1739247 - RNA, 13 nt, Human
auccaauuggaua

SEQ ID NO: 1739248 - RNA, 17 nt, Human
auccagguucagcuugu

SEQ ID NO: 1739249 - RNA, 15 nt, Human
auccaguaucuugaa

SEQ ID NO: 1739250 - RNA, 14 nt, Human
auccaguaucuuga

SEQ ID NO: 1739251 - RNA, 18 nt, Human
aucccaugagccucagca

SEQ ID NO: 1739252 - RNA, 17 nt, Human
aucccaugagccucagc

SEQ ID NO: 1739253 - RNA, 17 nt, Human
aucccugaaggccccgc

SEQ ID NO: 1739254 - RNA, 22 nt, Human
aucccugaaggccccgcccagg

SEQ ID NO: 1739255 - RNA, 16 nt, Human
aucccaugagccucag

SEQ ID NO: 1739256 - RNA, 12 nt, Human
aucccagcccca

SEQ ID NO: 1739257 - RNA, 11 nt, Human
aucccagcccc

SEQ ID NO: 1739258 - RNA, 11 nt, Human
uucuucucccu

SEQ ID NO: 1739259 - RNA, 22 nt, Human
uucuucuccacuuucuagccag

SEQ ID NO: 1739260 - RNA, 17 nt, Human
uucuuucuggcuaugca

SEQ ID NO: 1739261 - RNA, 20 nt, Human
uucuuucuggcuaugcauuu

SEQ ID NO: 1739262 - RNA, 12 nt, Human
uucuuucuggcu

SEQ ID NO: 1739263 - RNA, 23 nt, Human
uucuuaaccagaucauugugaaa

SEQ ID NO: 1739264 - RNA, 22 nt, Human
uucuuaaccagaucauugugaa

SEQ ID NO: 1739265 - RNA, 13 nt, Human
uucuguuuagaua

SEQ ID NO: 1739266 - RNA, 18 nt, Human
uucuguuuagauaauaca

SEQ ID NO: 1739267 - RNA, 14 nt, Human
aggcugggagagcc

SEQ ID NO: 1739268 - RNA, 22 nt, Human
uggcuagagguucaaagauauu

SEQ ID NO: 1739269 - RNA, 20 nt, Human
aggcuggcgugcaguggugc

SEQ ID NO: 1739270 - RNA, 18 nt, Human
aggcuggcgugcaguggu

SEQ ID NO: 1739271 - RNA, 15 nt, Human
uggcuaugcauuuga

SEQ ID NO: 1739272 - RNA, 17 nt, Human
uggcuaugcauuugaaa

SEQ ID NO: 1739273 - RNA, 14 nt, Human
uggcuaugcauuug

SEQ ID NO: 1739274 - RNA, 19 nt, Human
uggcuaugcauuugaaaau

SEQ ID NO: 1739275 - RNA, 22 nt, Human
uggcuauuagagaucaaccccu

SEQ ID NO: 1739276 - RNA, 21 nt, Human
uggcucuuccaggcugggaga

SEQ ID NO: 1739277 - RNA, 20 nt, Human
uggcucuuccaggcugggag

SEQ ID NO: 1739278 - RNA, 18 nt, Human
uggcucaaguccucuuuu

SEQ ID NO: 1739279 - RNA, 19 nt, Human
uggcucuuccaggcuggga

SEQ ID NO: 1739280 - RNA, 12 nt, Human
uggcugcaaagg

SEQ ID NO: 1739281 - RNA, 14 nt, Human
uggcugcagggagu

SEQ ID NO: 1739282 - RNA, 13 nt, Human
uggcugcagggag

SEQ ID NO: 1739283 - RNA, 15 nt, Human
uggcugcagggaguc

SEQ ID NO: 1739284 - RNA, 20 nt, Human
uggcugccaaugggagcuca

SEQ ID NO: 1739285 - RNA, 18 nt, Human
uggcugccaaugggagcu

SEQ ID NO: 1739286 - RNA, 11 nt, Human
uggcugcugaa

SEQ ID NO: 1739287 - RNA, 17 nt, Human
uggcuuaaaacaacacu

SEQ ID NO: 1739288 - RNA, 15 nt, Human
uggcuguuggcuggg

SEQ ID NO: 1739289 - RNA, 13 nt, Human
uggcuguuggcug

SEQ ID NO: 1739290 - RNA, 14 nt, Human
uggcugugucuccc

SEQ ID NO: 1739291 - RNA, 23 nt, Human
uggcuucacggaagagccuugcg

SEQ ID NO: 1739292 - RNA, 16 nt, Human
ugggaaaggggaaguu

SEQ ID NO: 1739293 - RNA, 16 nt, Human
uggcuucccgcucagc

SEQ ID NO: 1739294 - RNA, 15 nt, Human
uggcuucccgcucag

SEQ ID NO: 1739295 - RNA, 17 nt, Human
uggcuucccgcucagcc

SEQ ID NO: 1739296 - RNA, 13 nt, Human
ugggaacuagacu

SEQ ID NO: 1739297 - RNA, 23 nt, Human
aggcugcucuugaacuccugacc

SEQ ID NO: 1739298 - RNA, 16 nt, Human
aggcucugcccuuggu

SEQ ID NO: 1739299 - RNA, 13 nt, Human
aggcucuggagcc

SEQ ID NO: 1739300 - RNA, 15 nt, Human
aggcucuggagccca

SEQ ID NO: 1739301 - RNA, 14 nt, Human
aggcucuggagccc

SEQ ID NO: 1739302 - RNA, 19 nt, Human
aggcucuggagcccacugu

SEQ ID NO: 1739303 - RNA, 18 nt, Human
aggcucuggagcccacug

SEQ ID NO: 1739304 - RNA, 17 nt, Human
aggcuggcgugcagugg

SEQ ID NO: 1739305 - RNA, 13 nt, Human
aggcuggcgugca

SEQ ID NO: 1739306 - RNA, 19 nt, Human
aggcuggcccugcccuggu

SEQ ID NO: 1739307 - RNA, 14 nt, Human
aggcuggcccugcc

SEQ ID NO: 1739308 - RNA, 12 nt, Human
aggcuggcccug

SEQ ID NO: 1739309 - RNA, 18 nt, Human
aggcuggcccugcccugg

SEQ ID NO: 1739310 - RNA, 17 nt, Human
aggcuggcccugcccug

SEQ ID NO: 1739311 - RNA, 16 nt, Human
aggcuggcccugcccu

SEQ ID NO: 1739312 - RNA, 15 nt, Human
aggcuggcccugccc

SEQ ID NO: 1739313 - RNA, 20 nt, Human
aggcucucaggccagcugcu

SEQ ID NO: 1739314 - RNA, 19 nt, Human
aggcucucaggccagcugc

SEQ ID NO: 1739315 - RNA, 18 nt, Human
aggcucucaggccagcug

SEQ ID NO: 1739316 - RNA, 16 nt, Human
aggcucucaggccagc

SEQ ID NO: 1739317 - RNA, 15 nt, Human
aggcucucaggccag

SEQ ID NO: 1739318 - RNA, 14 nt, Human
aggcucucaggcca

SEQ ID NO: 1739319 - RNA, 12 nt, Human
aggcucucaggc

SEQ ID NO: 1739320 - RNA, 11 nt, Human
aggcucucagg

SEQ ID NO: 1739321 - RNA, 15 nt, Human
aggcucugcccuugg

SEQ ID NO: 1739322 - RNA, 14 nt, Human
aggcucugcccuug

SEQ ID NO: 1739323 - RNA, 13 nt, Human
aggcucugcccuu

SEQ ID NO: 1739324 - RNA, 12 nt, Human
aggcucugcccu

SEQ ID NO: 1739325 - RNA, 11 nt, Human
aggcucugccc

SEQ ID NO: 1739326 - RNA, 21 nt, Human
aggcucucaggccagcugcuu

SEQ ID NO: 1739327 - RNA, 19 nt, Human
aggcucgagcaugccugga

SEQ ID NO: 1739328 - RNA, 18 nt, Human
aggcucgagcaugccugg

SEQ ID NO: 1739329 - RNA, 17 nt, Human
aggcucgagcaugccug

SEQ ID NO: 1739330 - RNA, 15 nt, Human
aggcucgagcaugcc

SEQ ID NO: 1739331 - RNA, 21 nt, Human
aggcucgagcaugccuggaug

SEQ ID NO: 1739332 - RNA, 12 nt, Human
aggcucgagcau

SEQ ID NO: 1739333 - RNA, 19 nt, Human
aggcuccuuuagcgcccag

SEQ ID NO: 1739334 - RNA, 20 nt, Human
aggcuccugccaccacgccc

SEQ ID NO: 1739335 - RNA, 14 nt, Human
aggcuccugccacc

SEQ ID NO: 1739336 - RNA, 18 nt, Human
uggacgagaaaacaauaa

SEQ ID NO: 1739337 - RNA, 18 nt, Human
aggcauuuguuugaacug

SEQ ID NO: 1739338 - RNA, 16 nt, Human
aggccaaacucaccug

SEQ ID NO: 1739339 - RNA, 13 nt, Human
aggccaaaaaaau

SEQ ID NO: 1739340 - RNA, 15 nt, Human
aggccaaaggaagca

SEQ ID NO: 1739341 - RNA, 14 nt, Human
aggccaaaggaagc

SEQ ID NO: 1739342 - RNA, 20 nt, Human
aggccaaacucaccugcccc

SEQ ID NO: 1739343 - RNA, 18 nt, Human
aggccaaggugggaggau

SEQ ID NO: 1739344 - RNA, 22 nt, Human
aggccaacccaaaauaagcagg

SEQ ID NO: 1739345 - RNA, 23 nt, Human
aggccaaaggaagcacaugccuc

SEQ ID NO: 1739346 - RNA, 20 nt, Human
uggaguucaucuugaauugu

SEQ ID NO: 1739347 - RNA, 17 nt, Human
uggaguucaucuugaau

SEQ ID NO: 1739348 - RNA, 16 nt, Human
uggaguucaucuugaa

SEQ ID NO: 1739349 - RNA, 19 nt, Human
uggaugccugguggcagcu

SEQ ID NO: 1739350 - RNA, 18 nt, Human
uggaugccugguggcagc

SEQ ID NO: 1739351 - RNA, 20 nt, Human
uggaugccugguggcagcug

SEQ ID NO: 1739352 - RNA, 15 nt, Human
aggccacaagacccu

SEQ ID NO: 1739353 - RNA, 19 nt, Human
uggagucagacagaugugg

SEQ ID NO: 1739354 - RNA, 20 nt, Human
uggcacaucagcacgauuuc

SEQ ID NO: 1739355 - RNA, 12 nt, Human
uggauguucuga

SEQ ID NO: 1739356 - RNA, 22 nt, Human
uggauuaaacuuaaucuaaaug

SEQ ID NO: 1739357 - RNA, 22 nt, Human
uggcagaguugaagacagagcu

SEQ ID NO: 1739358 - RNA, 21 nt, Human
uggcagaguugaagacagagc

SEQ ID NO: 1739359 - RNA, 16 nt, Human
uggcacccggccccug

SEQ ID NO: 1739360 - RNA, 15 nt, Human
uggcacccggccccu

SEQ ID NO: 1739361 - RNA, 21 nt, Human
uggcacaucagcacgauuucu

SEQ ID NO: 1739362 - RNA, 12 nt, Human
uggcagccccug

SEQ ID NO: 1739363 - RNA, 16 nt, Human
uggcagccgugccuuc

SEQ ID NO: 1739364 - RNA, 20 nt, Human
aggccacaagacccuugugg

SEQ ID NO: 1739365 - RNA, 16 nt, Human
uggcagccucuucaaa

SEQ ID NO: 1739366 - RNA, 15 nt, Human
uggcagccucuucaa

SEQ ID NO: 1739367 - RNA, 23 nt, Human
uggcagccgugccuucagcucua

SEQ ID NO: 1739368 - RNA, 13 nt, Human
uggcagccuuggc

SEQ ID NO: 1739369 - RNA, 12 nt, Human
aggccagagaca

SEQ ID NO: 1739370 - RNA, 15 nt, Human
uggccgggagccuga

SEQ ID NO: 1739371 - RNA, 23 nt, Human
uggccgggaccccgagccuggcu

SEQ ID NO: 1739372 - RNA, 17 nt, Human
uggccgggaccccgagc

SEQ ID NO: 1739373 - RNA, 15 nt, Human
uggccgggaccccga

SEQ ID NO: 1739374 - RNA, 21 nt, Human
uggccccugcccggcugcgga

SEQ ID NO: 1739375 - RNA, 19 nt, Human
uggcccgacagccuggcac

SEQ ID NO: 1739376 - RNA, 18 nt, Human
uggcccgacagccuggca

SEQ ID NO: 1739377 - RNA, 17 nt, Human
uggcccgacagccuggc

SEQ ID NO: 1739378 - RNA, 16 nt, Human
uggcccgacagccugg

SEQ ID NO: 1739379 - RNA, 15 nt, Human
uggcccgacagccug

SEQ ID NO: 1739380 - RNA, 14 nt, Human
uggcccgacagccu

SEQ ID NO: 1739381 - RNA, 21 nt, Human
aggccuggccagaugcaccag

SEQ ID NO: 1739382 - RNA, 17 nt, Human
aggccuggccagaugca

SEQ ID NO: 1739383 - RNA, 16 nt, Human
aggccuggccagaugc

SEQ ID NO: 1739384 - RNA, 15 nt, Human
aggccuggccagaug

SEQ ID NO: 1739385 - RNA, 23 nt, Human
aggccuggccagaugcaccagcc

SEQ ID NO: 1739386 - RNA, 22 nt, Human
aggccuggccagaugcaccagc

SEQ ID NO: 1739387 - RNA, 23 nt, Human
aggccugggggcugggcagagga

SEQ ID NO: 1739388 - RNA, 12 nt, Human
uggccuggcccc

SEQ ID NO: 1739389 - RNA, 18 nt, Human
uggccucugcacuccccu

SEQ ID NO: 1739390 - RNA, 17 nt, Human
uggccucugcacucccc

SEQ ID NO: 1739391 - RNA, 15 nt, Human
uggccucugcacucc

SEQ ID NO: 1739392 - RNA, 14 nt, Human
uggccucugcacuc

SEQ ID NO: 1739393 - RNA, 15 nt, Human
aggcccucugcccac

SEQ ID NO: 1739394 - RNA, 14 nt, Human
aggcccucugccca

SEQ ID NO: 1739395 - RNA, 13 nt, Human
aggcccucugccc

SEQ ID NO: 1739396 - RNA, 13 nt, Human
aggccugccuguu

SEQ ID NO: 1739397 - RNA, 15 nt, Human
uggcaugggaaugaa

SEQ ID NO: 1739398 - RNA, 12 nt, Human
uggcaugggaau

SEQ ID NO: 1739399 - RNA, 17 nt, Human
uggccaggcuggucuca

SEQ ID NO: 1739400 - RNA, 15 nt, Human
uggccaggcuggucu

SEQ ID NO: 1739401 - RNA, 20 nt, Human
uggccaggcuggucucgaac

SEQ ID NO: 1739402 - RNA, 16 nt, Human
uggccaaguucuuagu

SEQ ID NO: 1739403 - RNA, 13 nt, Human
ugcuuauacacuu

SEQ ID NO: 1739404 - RNA, 14 nt, Human
ugcuucagccuccc

SEQ ID NO: 1739405 - RNA, 13 nt, Human
ugcuucagccucc

SEQ ID NO: 1739406 - RNA, 19 nt, Human
ugcuucaaggauccugagc

SEQ ID NO: 1739407 - RNA, 18 nt, Human
ugcuucaaggauccugag

SEQ ID NO: 1739408 - RNA, 16 nt, Human
ugcuucaaggauccug

SEQ ID NO: 1739409 - RNA, 14 nt, Human
ugcuucaucccuuu

SEQ ID NO: 1739410 - RNA, 23 nt, Human
aggacacuaaccacgcuggaccu

SEQ ID NO: 1739411 - RNA, 22 nt, Human
aggacagggaggugaccccagg

SEQ ID NO: 1739412 - RNA, 13 nt, Human
ugcuggagcucug

SEQ ID NO: 1739413 - RNA, 14 nt, Human
ugcuggagcucugc

SEQ ID NO: 1739414 - RNA, 15 nt, Human
ugcugcccugugagu

SEQ ID NO: 1739415 - RNA, 20 nt, Human
aggaauuuuauuuuuuucug

SEQ ID NO: 1739416 - RNA, 14 nt, Human
ugcugcccugugag

SEQ ID NO: 1739417 - RNA, 13 nt, Human
ugcugcccuguga

SEQ ID NO: 1739418 - RNA, 12 nt, Human
ugcugcccugug

SEQ ID NO: 1739419 - RNA, 18 nt, Human
ugcuggcuguuggcuggg

SEQ ID NO: 1739420 - RNA, 16 nt, Human
ugcuggcugguuagag

SEQ ID NO: 1739421 - RNA, 21 nt, Human
ugcuggcugccuuagaaccuu

SEQ ID NO: 1739422 - RNA, 14 nt, Human
ugcuggcugccuua

SEQ ID NO: 1739423 - RNA, 15 nt, Human
ugcuggcugccuuag

SEQ ID NO: 1739424 - RNA, 11 nt, Human
aggaauuuaaa

SEQ ID NO: 1739425 - RNA, 23 nt, Human
aggaauugacccacaagaaauga

SEQ ID NO: 1739426 - RNA, 23 nt, Human
aggaauuguguuuauaauuuuaa

SEQ ID NO: 1739427 - RNA, 18 nt, Human
aggaagccagcaggcucu

SEQ ID NO: 1739428 - RNA, 17 nt, Human
aggaagccagcaggcuc

SEQ ID NO: 1739429 - RNA, 18 nt, Human
aggaaggaaacccagcuc

SEQ ID NO: 1739430 - RNA, 15 nt, Human
aggaaggagaggaga

SEQ ID NO: 1739431 - RNA, 19 nt, Human
aggaaggaaacccagcucu

SEQ ID NO: 1739432 - RNA, 19 nt, Human
aggaagacuucaucccucu

SEQ ID NO: 1739433 - RNA, 13 nt, Human
aggaagacuucau

SEQ ID NO: 1739434 - RNA, 23 nt, Human
ugcugagucugaaggcuggguuc

SEQ ID NO: 1739435 - RNA, 22 nt, Human
ugcugagucugaaggcuggguu

SEQ ID NO: 1739436 - RNA, 21 nt, Human
ugcugagucugaaggcugggu

SEQ ID NO: 1739437 - RNA, 18 nt, Human
ugcugagucugaaggcug

SEQ ID NO: 1739438 - RNA, 17 nt, Human
ugcugagucugaaggcu

SEQ ID NO: 1739439 - RNA, 16 nt, Human
ugcugagucugaaggc

SEQ ID NO: 1739440 - RNA, 24 nt, Human
aggaagcacaugccucucucaggc

SEQ ID NO: 1739441 - RNA, 23 nt, Human
aggaagcacaugccucucucagg

SEQ ID NO: 1739442 - RNA, 14 nt, Human
aggaagacuuugga

SEQ ID NO: 1739443 - RNA, 13 nt, Human
aggaagacuuugg

SEQ ID NO: 1739444 - RNA, 15 nt, Human
aggaagccagcaggc

SEQ ID NO: 1739445 - RNA, 14 nt, Human
aggaagccagcagg

SEQ ID NO: 1739446 - RNA, 18 nt, Human
agcugggacuacaggcac

SEQ ID NO: 1739447 - RNA, 16 nt, Human
agcugggacuacaggc

SEQ ID NO: 1739448 - RNA, 19 nt, Human
agcugggacuacaggcacc

SEQ ID NO: 1739449 - RNA, 20 nt, Human
ugcuccagcuguucagcugg

SEQ ID NO: 1739450 - RNA, 19 nt, Human
ugcuccagcuguucagcug

SEQ ID NO: 1739451 - RNA, 16 nt, Human
ugcuccagcuguucag

SEQ ID NO: 1739452 - RNA, 14 nt, Human
ugcugagucugaag

SEQ ID NO: 1739453 - RNA, 15 nt, Human
ugcugagucugaagg

SEQ ID NO: 1739454 - RNA, 14 nt, Human
ugcugacuguacuc

SEQ ID NO: 1739455 - RNA, 22 nt, Human
ugcucugcugacagacacaggc

SEQ ID NO: 1739456 - RNA, 21 nt, Human
ugcucugcugacagacacagg

SEQ ID NO: 1739457 - RNA, 19 nt, Human
aggauuuugauccaagcug

SEQ ID NO: 1739458 - RNA, 17 nt, Human
aggaugccccguccccc

SEQ ID NO: 1739459 - RNA, 14 nt, Human
aggaugcccaaaga

SEQ ID NO: 1739460 - RNA, 20 nt, Human
aggaugaucuaggaagacuu

SEQ ID NO: 1739461 - RNA, 19 nt, Human
aggaugcccaaagaugcag

SEQ ID NO: 1739462 - RNA, 19 nt, Human
aggcaacugcauuggcuuu

SEQ ID NO: 1739463 - RNA, 17 nt, Human
aggcaacucaucuuagg

SEQ ID NO: 1739464 - RNA, 13 nt, Human
uggacccugaggc

SEQ ID NO: 1739465 - RNA, 12 nt, Human
uggacccugagg

SEQ ID NO: 1739466 - RNA, 14 nt, Human
uggacccugaggcc

SEQ ID NO: 1739467 - RNA, 15 nt, Human
uggacccugaggccc

SEQ ID NO: 1739468 - RNA, 21 nt, Human
uggacacagcucuucuccagg

SEQ ID NO: 1739469 - RNA, 18 nt, Human
uggacacagcucuucucc

SEQ ID NO: 1739470 - RNA, 16 nt, Human
uggacacagcucuucu

SEQ ID NO: 1739471 - RNA, 15 nt, Human
uggacacagcucuuc

SEQ ID NO: 1739472 - RNA, 21 nt, Human
aggagggagcaucagugcccu

SEQ ID NO: 1739473 - RNA, 14 nt, Human
aggagggaggggga

SEQ ID NO: 1739474 - RNA, 16 nt, Human
aggauccugagccaga

SEQ ID NO: 1739475 - RNA, 15 nt, Human
aggauccugagccag

SEQ ID NO: 1739476 - RNA, 21 nt, Human
aggauacaaaagcaugugaga

SEQ ID NO: 1739477 - RNA, 17 nt, Human
aggaugaucuaggaaga

SEQ ID NO: 1739478 - RNA, 16 nt, Human
aggaugaucuaggaag

SEQ ID NO: 1739479 - RNA, 22 nt, Human
aggaucucuugagccugggagg

SEQ ID NO: 1739480 - RNA, 21 nt, Human
aggaucucuugagccugggag

SEQ ID NO: 1739481 - RNA, 18 nt, Human
aggauccugagccagauu

SEQ ID NO: 1739482 - RNA, 17 nt, Human
aggauccugagccagau

SEQ ID NO: 1739483 - RNA, 23 nt, Human
uggaaaugggcagagcagagacc

SEQ ID NO: 1739484 - RNA, 20 nt, Human
uggaaauauuaagaaagacu

SEQ ID NO: 1739485 - RNA, 11 nt, Human
aggagaaacug

SEQ ID NO: 1739486 - RNA, 17 nt, Human
aggagaaacuggaacuc

SEQ ID NO: 1739487 - RNA, 17 nt, Human
aggagauuggaaggaac

SEQ ID NO: 1739488 - RNA, 22 nt, Human
aggagccccgaggccuucucug

SEQ ID NO: 1739489 - RNA, 18 nt, Human
aggagcccugggaggcuc

SEQ ID NO: 1739490 - RNA, 14 nt, Human
aggagcagccacau

SEQ ID NO: 1739491 - RNA, 18 nt, Human
aggacauugcggacagcc

SEQ ID NO: 1739492 - RNA, 17 nt, Human
aggacauugcggacagc

SEQ ID NO: 1739493 - RNA, 15 nt, Human
aggacauugcggaca

SEQ ID NO: 1739494 - RNA, 23 nt, Human
aggacauugcggacagccacggc

SEQ ID NO: 1739495 - RNA, 19 nt, Human
aggacauugcggacagcca

SEQ ID NO: 1739496 - RNA, 15 nt, Human
uggaaauauuaagaa

SEQ ID NO: 1739497 - RNA, 19 nt, Human
ugcuugggcuucauccucc

SEQ ID NO: 1739498 - RNA, 21 nt, Human
ugcuuugggcugcccuggugc

SEQ ID NO: 1739499 - RNA, 20 nt, Human
ugcuuugggcugcccuggug

SEQ ID NO: 1739500 - RNA, 19 nt, Human
ugcuuugggcugcccuggu

SEQ ID NO: 1739501 - RNA, 18 nt, Human
ugcuuugggcugcccugg

SEQ ID NO: 1739502 - RNA, 19 nt, Human
aggagcccugggaggcucu

SEQ ID NO: 1739503 - RNA, 16 nt, Human
ugcuugggcuucaucc

SEQ ID NO: 1739504 - RNA, 12 nt, Human
ugcuugggcuuc

SEQ ID NO: 1739505 - RNA, 21 nt, Human
ugcuuggaggaaggaaaccca

SEQ ID NO: 1739506 - RNA, 22 nt, Human
agcgcuggccgggaccccgagc

SEQ ID NO: 1739507 - RNA, 16 nt, Human
agcgcuggccgggacc

SEQ ID NO: 1739508 - RNA, 20 nt, Human
ugcauuuaaaagauacaguu

SEQ ID NO: 1739509 - RNA, 19 nt, Human
ugcauuugaggucuguucu

SEQ ID NO: 1739510 - RNA, 18 nt, Human
ugcauuugaggucuguuc

SEQ ID NO: 1739511 - RNA, 18 nt, Human
agccuuccagggguggga

SEQ ID NO: 1739512 - RNA, 15 nt, Human
agccuugaacuuuga

SEQ ID NO: 1739513 - RNA, 22 nt, Human
agccuugaccauucuccaccug

SEQ ID NO: 1739514 - RNA, 23 nt, Human
agccuugaacuuugaccucugca

SEQ ID NO: 1739515 - RNA, 16 nt, Human
agccuugaacuuugac

SEQ ID NO: 1739516 - RNA, 22 nt, Human
agccuugaacuuugaccucugc

SEQ ID NO: 1739517 - RNA, 22 nt, Human
agcgauucuucugcuucagccu

SEQ ID NO: 1739518 - RNA, 23 nt, Human
agccuugaccauucuccaccugc

SEQ ID NO: 1739519 - RNA, 18 nt, Human
ugccagcuuaucucaggg

SEQ ID NO: 1739520 - RNA, 13 nt, Human
agcggcuggcagc

SEQ ID NO: 1739521 - RNA, 20 nt, Human
agcggggacagcuccuucug

SEQ ID NO: 1739522 - RNA, 19 nt, Human
agcggggacagcuccuucu

SEQ ID NO: 1739523 - RNA, 23 nt, Human
agcggcuggcagcccaccccuca

SEQ ID NO: 1739524 - RNA, 22 nt, Human
agcggggacagcuccuucuguc

SEQ ID NO: 1739525 - RNA, 20 nt, Human
ugcauuugaggucuguucuu

SEQ ID NO: 1739526 - RNA, 21 nt, Human
ugcauuugaggucuguucuuu

SEQ ID NO: 1739527 - RNA, 17 nt, Human
ugccacugccucuuccu

SEQ ID NO: 1739528 - RNA, 13 nt, Human
ugccacugccucu

SEQ ID NO: 1739529 - RNA, 20 nt, Human
ugccacugccucuuccuccc

SEQ ID NO: 1739530 - RNA, 19 nt, Human
ugccacugccucuuccucc

SEQ ID NO: 1739531 - RNA, 18 nt, Human
ugccacugccucuuccuc

SEQ ID NO: 1739532 - RNA, 23 nt, Human
ugccccgaacauguuuuucuucu

SEQ ID NO: 1739533 - RNA, 20 nt, Human
ugcccuaaaguguauuuuuu

SEQ ID NO: 1739534 - RNA, 18 nt, Human
ugcccccucugcccugcg

SEQ ID NO: 1739535 - RNA, 17 nt, Human
ugcccccucugcccugc

SEQ ID NO: 1739536 - RNA, 16 nt, Human
ugcccccucugcccug

SEQ ID NO: 1739537 - RNA, 15 nt, Human
ugcccccucugcccu

SEQ ID NO: 1739538 - RNA, 14 nt, Human
ugcccccucugccc

SEQ ID NO: 1739539 - RNA, 18 nt, Human
ugcccaggccccugccac

SEQ ID NO: 1739540 - RNA, 17 nt, Human
ugcccaggccccugcca

SEQ ID NO: 1739541 - RNA, 15 nt, Human
ugcccaggccccugc

SEQ ID NO: 1739542 - RNA, 17 nt, Human
ugcccagccccuucuga

SEQ ID NO: 1739543 - RNA, 16 nt, Human
ugcccagccccuucug

SEQ ID NO: 1739544 - RNA, 13 nt, Human
ugcccagccccuu

SEQ ID NO: 1739545 - RNA, 20 nt, Human
ugcccaaagaugcagccggu

SEQ ID NO: 1739546 - RNA, 17 nt, Human
ugcccaaagaugcagcc

SEQ ID NO: 1739547 - RNA, 16 nt, Human
agcuccaagcucccag

SEQ ID NO: 1739548 - RNA, 15 nt, Human
agcuccaagcuccca

SEQ ID NO: 1739549 - RNA, 17 nt, Human
agcucaggugucccugc

SEQ ID NO: 1739550 - RNA, 13 nt, Human
agcucagggccug

SEQ ID NO: 1739551 - RNA, 12 nt, Human
agcucagggccu

SEQ ID NO: 1739552 - RNA, 19 nt, Human
agcuauucaguaauaacuc

SEQ ID NO: 1739553 - RNA, 19 nt, Human
agcucagggccuggcucag

SEQ ID NO: 1739554 - RNA, 14 nt, Human
agcucagggccugg

SEQ ID NO: 1739555 - RNA, 20 nt, Human
agcucagggccuggcucagg

SEQ ID NO: 1739556 - RNA, 13 nt, Human
agcgugagccacu

SEQ ID NO: 1739557 - RNA, 21 nt, Human
agcuaggccuggccagaugca

SEQ ID NO: 1739558 - RNA, 17 nt, Human
agcuaucguaaaauuaa

SEQ ID NO: 1739559 - RNA, 21 nt, Human
agcuccaucuccacuccagau

SEQ ID NO: 1739560 - RNA, 19 nt, Human
agcuccagcucaccagccc

SEQ ID NO: 1739561 - RNA, 18 nt, Human
agcuccagcucaccagcc

SEQ ID NO: 1739562 - RNA, 21 nt, Human
agcuccagcucaccagcccca

SEQ ID NO: 1739563 - RNA, 23 nt, Human
agcuccuucuguccuacucugug

SEQ ID NO: 1739564 - RNA, 22 nt, Human
agcuccuucuguccuacucugu

SEQ ID NO: 1739565 - RNA, 23 nt, Human
agcucugcccauccugccccuga

SEQ ID NO: 1739566 - RNA, 21 nt, Human
agcucugcagagcaggaaaca

SEQ ID NO: 1739567 - RNA, 20 nt, Human
ugcccuaaugcgcaggcugg

SEQ ID NO: 1739568 - RNA, 23 nt, Human
ugcccuaaugcgcaggcuggccc

SEQ ID NO: 1739569 - RNA, 19 nt, Human
agcuccaagcucccaggca

SEQ ID NO: 1739570 - RNA, 18 nt, Human
agcuccaagcucccaggc

SEQ ID NO: 1739571 - RNA, 17 nt, Human
agcuccaagcucccagg

SEQ ID NO: 1739572 - RNA, 14 nt, Human
ugcccugcccaccu

SEQ ID NO: 1739573 - RNA, 17 nt, Human
agcuccagcucaccagc

SEQ ID NO: 1739574 - RNA, 13 nt, Human
agcuccagcucac

SEQ ID NO: 1739575 - RNA, 15 nt, Human
ugccucagccucccg

SEQ ID NO: 1739576 - RNA, 15 nt, Human
ugccucagccuccug

SEQ ID NO: 1739577 - RNA, 17 nt, Human
ugccucagccuccugag

SEQ ID NO: 1739578 - RNA, 22 nt, Human
ugccucccaucacccgcuaaga

SEQ ID NO: 1739579 - RNA, 17 nt, Human
ugccucucucaggccaa

SEQ ID NO: 1739580 - RNA, 12 nt, Human
ugccucucugca

SEQ ID NO: 1739581 - RNA, 11 nt, Human
ugccucucugc

SEQ ID NO: 1739582 - RNA, 15 nt, Human
ugccucaccccuugc

SEQ ID NO: 1739583 - RNA, 20 nt, Human
ugccgcagcccugcagaggg

SEQ ID NO: 1739584 - RNA, 22 nt, Human
ugcccuuaccugccaggaagcc

SEQ ID NO: 1739585 - RNA, 18 nt, Human
ugcccugugggcccccaa

SEQ ID NO: 1739586 - RNA, 15 nt, Human
ugcccugugggcccc

SEQ ID NO: 1739587 - RNA, 17 nt, Human
agcucuucuccaggcug

SEQ ID NO: 1739588 - RNA, 16 nt, Human
agcucuucuccaggcu

SEQ ID NO: 1739589 - RNA, 15 nt, Human
agcucuucuccaggc

SEQ ID NO: 1739590 - RNA, 13 nt, Human
agcugccuguuca

SEQ ID NO: 1739591 - RNA, 24 nt, Human
agcugcuuuugucuaugggacuca

SEQ ID NO: 1739592 - RNA, 23 nt, Human
agcugcuuuugucuaugggacuc

SEQ ID NO: 1739593 - RNA, 19 nt, Human
ugccugcccaggccccugc

SEQ ID NO: 1739594 - RNA, 18 nt, Human
ugccugcccaggccccug

SEQ ID NO: 1739595 - RNA, 17 nt, Human
ugccugcccaggccccu

SEQ ID NO: 1739596 - RNA, 12 nt, Human
ugccucugccuc

SEQ ID NO: 1739597 - RNA, 20 nt, Human
ugccugcccaggccccugcc

SEQ ID NO: 1739598 - RNA, 11 nt, Human
ugccucugccu

SEQ ID NO: 1739599 - RNA, 16 nt, Human
ugccucugacacacag

SEQ ID NO: 1739600 - RNA, 14 nt, Human
ugccucugacacac

SEQ ID NO: 1739601 - RNA, 23 nt, Human
ugccucucugcaggucccuaaua

SEQ ID NO: 1739602 - RNA, 15 nt, Human
ugccucucugcaggu

SEQ ID NO: 1739603 - RNA, 21 nt, Human
ugcaaaccaucauugaaaucu

SEQ ID NO: 1739604 - RNA, 22 nt, Human
agccccauucugccugcccagg

SEQ ID NO: 1739605 - RNA, 21 nt, Human
agccccauucugccugcccag

SEQ ID NO: 1739606 - RNA, 18 nt, Human
agccccaaaacucuccuc

SEQ ID NO: 1739607 - RNA, 17 nt, Human
agccccaaaacucuccu

SEQ ID NO: 1739608 - RNA, 16 nt, Human
agccccaaaacucucc

SEQ ID NO: 1739609 - RNA, 23 nt, Human
agccccauucugccugcccaggc

SEQ ID NO: 1739610 - RNA, 16 nt, Human
agcccugguggcagug

SEQ ID NO: 1739611 - RNA, 15 nt, Human
agcccugguggcagu

SEQ ID NO: 1739612 - RNA, 14 nt, Human
agcccugguggcag

SEQ ID NO: 1739613 - RNA, 18 nt, Human
ugcacacaccagagccca

SEQ ID NO: 1739614 - RNA, 17 nt, Human
ugcacacaccagagccc

SEQ ID NO: 1739615 - RNA, 21 nt, Human
ugcacacaccagagcccaccu

SEQ ID NO: 1739616 - RNA, 22 nt, Human
ugcacacaccagagcccaccuu

SEQ ID NO: 1739617 - RNA, 17 nt, Human
agcccugcuuugggcug

SEQ ID NO: 1739618 - RNA, 20 nt, Human
agcccugcuuugggcugccc

SEQ ID NO: 1739619 - RNA, 19 nt, Human
agcccugcuuugggcugcc

SEQ ID NO: 1739620 - RNA, 14 nt, Human
ugcagaagacagua

SEQ ID NO: 1739621 - RNA, 15 nt, Human
ugcagaagacaguau

SEQ ID NO: 1739622 - RNA, 22 nt, Human
ugcagacaggcaagcaccuccu

SEQ ID NO: 1739623 - RNA, 11 nt, Human
ugcacacauuu

SEQ ID NO: 1739624 - RNA, 12 nt, Human
ugcacacauuuu

SEQ ID NO: 1739625 - RNA, 13 nt, Human
ugcacacauuuuu

SEQ ID NO: 1739626 - RNA, 15 nt, Human
ugcacacauuuuuua

SEQ ID NO: 1739627 - RNA, 17 nt, Human
ugcacuccccugcuggg

SEQ ID NO: 1739628 - RNA, 16 nt, Human
ugcacuccccugcugg

SEQ ID NO: 1739629 - RNA, 19 nt, Human
ugcacuccccugcugggug

SEQ ID NO: 1739630 - RNA, 17 nt, Human
agccgagaucacgccac

SEQ ID NO: 1739631 - RNA, 21 nt, Human
agccgagauagccaaggccaa

SEQ ID NO: 1739632 - RNA, 20 nt, Human
agccgagauagccaaggcca

SEQ ID NO: 1739633 - RNA, 21 nt, Human
agcccuuagcagggaaacagc

SEQ ID NO: 1739634 - RNA, 16 nt, Human
agcccuuagcagggaa

SEQ ID NO: 1739635 - RNA, 17 nt, Human
ugcagacucuacagagg

SEQ ID NO: 1739636 - RNA, 16 nt, Human
ugcagacucuacagag

SEQ ID NO: 1739637 - RNA, 18 nt, Human
ugcagacucuacagaggc

SEQ ID NO: 1739638 - RNA, 23 nt, Human
agccucugaaaaccaauguucuc

SEQ ID NO: 1739639 - RNA, 21 nt, Human
agccuccaagcuccaucucca

SEQ ID NO: 1739640 - RNA, 14 nt, Human
agccuccaauuuuu

SEQ ID NO: 1739641 - RNA, 17 nt, Human
agccuccaugcugccuc

SEQ ID NO: 1739642 - RNA, 23 nt, Human
ugcagccucaaccuccugggcua

SEQ ID NO: 1739643 - RNA, 22 nt, Human
ugcagccucaaccuccugggcu

SEQ ID NO: 1739644 - RNA, 21 nt, Human
ugcagccucaaccuccugggc

SEQ ID NO: 1739645 - RNA, 18 nt, Human
agccgagaucacgccacu

SEQ ID NO: 1739646 - RNA, 20 nt, Human
agccucaaccuccugggcua

SEQ ID NO: 1739647 - RNA, 18 nt, Human
agccucacaguccuuacc

SEQ ID NO: 1739648 - RNA, 17 nt, Human
agccucacaguccuuac

SEQ ID NO: 1739649 - RNA, 22 nt, Human
agccucagucucccucccuugg

SEQ ID NO: 1739650 - RNA, 20 nt, Human
agccucagucucccucccuu

SEQ ID NO: 1739651 - RNA, 19 nt, Human
agccucagucucccucccu

SEQ ID NO: 1739652 - RNA, 16 nt, Human
agccucagucucccuc

SEQ ID NO: 1739653 - RNA, 13 nt, Human
agccucagucucc

SEQ ID NO: 1739654 - RNA, 22 nt, Human
ugauuuccguuaaaauaccagc

SEQ ID NO: 1739655 - RNA, 17 nt, Human
ugauuucagcucacugc

SEQ ID NO: 1739656 - RNA, 21 nt, Human
ugauuucagcaccuacagugu

SEQ ID NO: 1739657 - RNA, 17 nt, Human
ugauuuggggauauuuu

SEQ ID NO: 1739658 - RNA, 16 nt, Human
ugauucauaaugacuu

SEQ ID NO: 1739659 - RNA, 18 nt, Human
agcccaggaaaggcucca

SEQ ID NO: 1739660 - RNA, 21 nt, Human
ugauucauaaugacuuaagca

SEQ ID NO: 1739661 - RNA, 14 nt, Human
agcccaggaaaggc

SEQ ID NO: 1739662 - RNA, 23 nt, Human
agcccagcuugaaaccuucacuu

SEQ ID NO: 1739663 - RNA, 13 nt, Human
ugauucuccugcc

SEQ ID NO: 1739664 - RNA, 16 nt, Human
ugauucucaugccuca

SEQ ID NO: 1739665 - RNA, 15 nt, Human
ugauucucaugccuc

SEQ ID NO: 1739666 - RNA, 14 nt, Human
ugauucucaugccu

SEQ ID NO: 1739667 - RNA, 13 nt, Human
ugauucucaugcc

SEQ ID NO: 1739668 - RNA, 23 nt, Human
ugauucccaagcucugcuccucu

SEQ ID NO: 1739669 - RNA, 22 nt, Human
ugauucccaagcucugcuccuc

SEQ ID NO: 1739670 - RNA, 13 nt, Human
agccaguaaaugg

SEQ ID NO: 1739671 - RNA, 18 nt, Human
agccagguuccacagagg

SEQ ID NO: 1739672 - RNA, 22 nt, Human
agccaguaaaugggggugcauu

SEQ ID NO: 1739673 - RNA, 21 nt, Human
agccaguaaaugggggugcau

SEQ ID NO: 1739674 - RNA, 22 nt, Human
agcccacuucugccauauucug

SEQ ID NO: 1739675 - RNA, 15 nt, Human
agcccacuucugcca

SEQ ID NO: 1739676 - RNA, 14 nt, Human
agcccacuucugcc

SEQ ID NO: 1739677 - RNA, 13 nt, Human
agcccacuucugc

SEQ ID NO: 1739678 - RNA, 16 nt, Human
agcccacuguacuugc

SEQ ID NO: 1739679 - RNA, 14 nt, Human
agcccacuguacuu

SEQ ID NO: 1739680 - RNA, 21 nt, Human
ugauccucccaccucagccuc

SEQ ID NO: 1739681 - RNA, 16 nt, Human
ugauccucccaccuca

SEQ ID NO: 1739682 - RNA, 22 nt, Human
ugauccucccaccucagccucc

SEQ ID NO: 1739683 - RNA, 22 nt, Human
ugauccuaaugaaugcauaaaa

SEQ ID NO: 1739684 - RNA, 15 nt, Human
ugauccucccaccuc

SEQ ID NO: 1739685 - RNA, 16 nt, Human
ugauccuaguuccacc

SEQ ID NO: 1739686 - RNA, 21 nt, Human
ugaugggcaacccccagccug

SEQ ID NO: 1739687 - RNA, 14 nt, Human
ugaugggauuuggu

SEQ ID NO: 1739688 - RNA, 19 nt, Human
ugauggggcccugccuccu

SEQ ID NO: 1739689 - RNA, 16 nt, Human
ugauggggcccugccu

SEQ ID NO: 1739690 - RNA, 15 nt, Human
ugauggggcccugcc

SEQ ID NO: 1739691 - RNA, 14 nt, Human
ugauggggcccugc

SEQ ID NO: 1739692 - RNA, 16 nt, Human
ugaugagaggaaauca

SEQ ID NO: 1739693 - RNA, 15 nt, Human
ugaugagaggaaauc

SEQ ID NO: 1739694 - RNA, 14 nt, Human
ugaugagaggaaau

SEQ ID NO: 1739695 - RNA, 13 nt, Human
ugaugagaggaaa

SEQ ID NO: 1739696 - RNA, 20 nt, Human
ugauuaaccacuucagcuga

SEQ ID NO: 1739697 - RNA, 15 nt, Human
agccacgguguucug

SEQ ID NO: 1739698 - RNA, 17 nt, Human
ugauuaauggaaauguu

SEQ ID NO: 1739699 - RNA, 16 nt, Human
agccacugcaccgggc

SEQ ID NO: 1739700 - RNA, 19 nt, Human
ugauuaaccacuucagcug

SEQ ID NO: 1739701 - RNA, 20 nt, Human
ugauuaaauucuugcaaagu

SEQ ID NO: 1739702 - RNA, 17 nt, Human
ugauggugaugaaaugu

SEQ ID NO: 1739703 - RNA, 13 nt, Human
ugauggugcaaug

SEQ ID NO: 1739704 - RNA, 16 nt, Human
ugauggugaugaaaug

SEQ ID NO: 1739705 - RNA, 15 nt, Human
ugauggugaugaaau

SEQ ID NO: 1739706 - RNA, 15 nt, Human
ugauggugcaaugac

SEQ ID NO: 1739707 - RNA, 19 nt, Human
ugauuaaauucuugcaaag

SEQ ID NO: 1739708 - RNA, 11 nt, Human
agccagaggag

SEQ ID NO: 1739709 - RNA, 10 nt, Human
agccagagga

SEQ ID NO: 1739710 - RNA, 19 nt, Human
agccacugcaccgggccac

SEQ ID NO: 1739711 - RNA, 18 nt, Human
agccacugcaccgggcca

SEQ ID NO: 1739712 - RNA, 20 nt, Human
agccacugcaccgggccaca

SEQ ID NO: 1739713 - RNA, 14 nt, Human
agccagcaucggaa

SEQ ID NO: 1739714 - RNA, 22 nt, Human
aguugcauagguuuaauaauuu

SEQ ID NO: 1739715 - RNA, 20 nt, Human
aguugccagucaccccggcc

SEQ ID NO: 1739716 - RNA, 20 nt, Human
uuaaaaaugguuuaaauggu

SEQ ID NO: 1739717 - RNA, 17 nt, Human
uuaaaacaacacucaca

SEQ ID NO: 1739718 - RNA, 18 nt, Human
uuaaaaaguggaaaaaua

SEQ ID NO: 1739719 - RNA, 17 nt, Human
uuaaaccgccaaggcug

SEQ ID NO: 1739720 - RNA, 19 nt, Human
uuaaaauauuccugcauuu

SEQ ID NO: 1739721 - RNA, 16 nt, Human
uuaaaauauuccugca

SEQ ID NO: 1739722 - RNA, 12 nt, Human
uuaaaauauaau

SEQ ID NO: 1739723 - RNA, 15 nt, Human
uuaaauaaaucauaa

SEQ ID NO: 1739724 - RNA, 13 nt, Human
uuaaauaaaucau

SEQ ID NO: 1739725 - RNA, 20 nt, Human
uuaaauaaugugaaacugga

SEQ ID NO: 1739726 - RNA, 21 nt, Human
uuaaauaaugugaaacuggau

SEQ ID NO: 1739727 - RNA, 22 nt, Human
uuaaauaaugugaaacuggauu

SEQ ID NO: 1739728 - RNA, 22 nt, Human
aguuuucacucuuauugcccac

SEQ ID NO: 1739729 - RNA, 13 nt, Human
uuaaauucuugca

SEQ ID NO: 1739730 - RNA, 16 nt, Human
uuaaauucuugcaaag

SEQ ID NO: 1739731 - RNA, 15 nt, Human
aguuucuccaagcag

SEQ ID NO: 1739732 - RNA, 13 nt, Human
aguuucuccaagc

SEQ ID NO: 1739733 - RNA, 21 nt, Human
aguuucuccaagcaggacaug

SEQ ID NO: 1739734 - RNA, 16 nt, Human
aguuucucagcuccca

SEQ ID NO: 1739735 - RNA, 16 nt, Human
aguuucguuuucaaaa

SEQ ID NO: 1739736 - RNA, 15 nt, Human
aguuucguuuucaaa

SEQ ID NO: 1739737 - RNA, 14 nt, Human
uguugucagcugaa

SEQ ID NO: 1739738 - RNA, 16 nt, Human
uguuugccucugccuc

SEQ ID NO: 1739739 - RNA, 14 nt, Human
uguuugccucugcc

SEQ ID NO: 1739740 - RNA, 15 nt, Human
uguuugcaucugaaa

SEQ ID NO: 1739741 - RNA, 15 nt, Human
uguuuggggaugaga

SEQ ID NO: 1739742 - RNA, 19 nt, Human
uguuuggggaugagaaagg

SEQ ID NO: 1739743 - RNA, 13 nt, Human
aguucucuccuuc

SEQ ID NO: 1739744 - RNA, 16 nt, Human
aguucucuccuucuuc

SEQ ID NO: 1739745 - RNA, 15 nt, Human
uguuuucucuugaga

SEQ ID NO: 1739746 - RNA, 17 nt, Human
uguuuucaguguacaug

SEQ ID NO: 1739747 - RNA, 15 nt, Human
uguuuucaguguaca

SEQ ID NO: 1739748 - RNA, 23 nt, Human
aguugauagcacagacccugccc

SEQ ID NO: 1739749 - RNA, 22 nt, Human
aguugauagcacagacccugcc

SEQ ID NO: 1739750 - RNA, 13 nt, Human
aguugauucagcu

SEQ ID NO: 1739751 - RNA, 18 nt, Human
aguugauucagcucugca

SEQ ID NO: 1739752 - RNA, 17 nt, Human
aguugauucagcucugc

SEQ ID NO: 1739753 - RNA, 15 nt, Human
aguugauucagcucu

SEQ ID NO: 1739754 - RNA, 14 nt, Human
aguugauucagcuc

SEQ ID NO: 1739755 - RNA, 23 nt, Human
aguugauucagcucugcaagaau

SEQ ID NO: 1739756 - RNA, 19 nt, Human
aguugcaacuuuguauaaa

SEQ ID NO: 1739757 - RNA, 21 nt, Human
aguugauagcacagacccugc

SEQ ID NO: 1739758 - RNA, 20 nt, Human
aguugauagcacagacccug

SEQ ID NO: 1739759 - RNA, 19 nt, Human
aguugauagcacagacccu

SEQ ID NO: 1739760 - RNA, 15 nt, Human
aguugauagcacaga

SEQ ID NO: 1739761 - RNA, 23 nt, Human
aguguacauggaauaacauguaa

SEQ ID NO: 1739762 - RNA, 17 nt, Human
aguguacagucuuguau

SEQ ID NO: 1739763 - RNA, 16 nt, Human
uguucccauucuugca

SEQ ID NO: 1739764 - RNA, 13 nt, Human
uguucugggacac

SEQ ID NO: 1739765 - RNA, 15 nt, Human
uguucugggacacag

SEQ ID NO: 1739766 - RNA, 14 nt, Human
uguucugggacaca

SEQ ID NO: 1739767 - RNA, 14 nt, Human
uguucuuaauucuu

SEQ ID NO: 1739768 - RNA, 16 nt, Human
uguucuuaauucuuag

SEQ ID NO: 1739769 - RNA, 19 nt, Human
uguucuugguuuguaaauu

SEQ ID NO: 1739770 - RNA, 13 nt, Human
uguucuuuccaaa

SEQ ID NO: 1739771 - RNA, 14 nt, Human
uguucuuuccaaag

SEQ ID NO: 1739772 - RNA, 17 nt, Human
uguucuugguuuguaaa

SEQ ID NO: 1739773 - RNA, 18 nt, Human
uguucuugguuuguaaau

SEQ ID NO: 1739774 - RNA, 16 nt, Human
uguucuuaagacguga

SEQ ID NO: 1739775 - RNA, 22 nt, Human
aguguacauggaauaacaugua

SEQ ID NO: 1739776 - RNA, 21 nt, Human
aguguacauggaauaacaugu

SEQ ID NO: 1739777 - RNA, 13 nt, Human
aguguacagucuu

SEQ ID NO: 1739778 - RNA, 15 nt, Human
aguguacagucuugu

SEQ ID NO: 1739779 - RNA, 16 nt, Human
aguguacagucuugua

SEQ ID NO: 1739780 - RNA, 19 nt, Human
agugggugaauaauacagu

SEQ ID NO: 1739781 - RNA, 21 nt, Human
agugguuccuaauccucuagg

SEQ ID NO: 1739782 - RNA, 16 nt, Human
aguggugcgaucuggg

SEQ ID NO: 1739783 - RNA, 13 nt, Human
aguggcagcugcu

SEQ ID NO: 1739784 - RNA, 12 nt, Human
aguggcagcugc

SEQ ID NO: 1739785 - RNA, 20 nt, Human
aguggcagcugcuuuugucu

SEQ ID NO: 1739786 - RNA, 14 nt, Human
aguggcagcugcuu

SEQ ID NO: 1739787 - RNA, 18 nt, Human
agugggugaauaauacag

SEQ ID NO: 1739788 - RNA, 13 nt, Human
agugggugaauaa

SEQ ID NO: 1739789 - RNA, 18 nt, Human
agugggggaucacagccu

SEQ ID NO: 1739790 - RNA, 20 nt, Human
agugggggaguggccacaga

SEQ ID NO: 1739791 - RNA, 19 nt, Human
agugggggaguggccacag

SEQ ID NO: 1739792 - RNA, 20 nt, Human
aguuauuauauuuacaaaug

SEQ ID NO: 1739793 - RNA, 18 nt, Human
uguucuuuccaaaguaca

SEQ ID NO: 1739794 - RNA, 20 nt, Human
uguucuuuccaaaguacacu

SEQ ID NO: 1739795 - RNA, 15 nt, Human
aguuaccagugccuu

SEQ ID NO: 1739796 - RNA, 16 nt, Human
aguuaccagugccuua

SEQ ID NO: 1739797 - RNA, 15 nt, Human
aguuaguuccacuga

SEQ ID NO: 1739798 - RNA, 17 nt, Human
aguuaguuccacugaga

SEQ ID NO: 1739799 - RNA, 19 nt, Human
aguuaguuccacugagacc

SEQ ID NO: 1739800 - RNA, 17 nt, Human
aguucccuacuuccugu

SEQ ID NO: 1739801 - RNA, 21 nt, Human
aguuauuuuuauuuauuuaaa

SEQ ID NO: 1739802 - RNA, 14 nt, Human
uguuguauucauug

SEQ ID NO: 1739803 - RNA, 13 nt, Human
uguugucagcuga

SEQ ID NO: 1739804 - RNA, 11 nt, Human
uguugucaaga

SEQ ID NO: 1739805 - RNA, 16 nt, Human
uguugucaagaauagc

SEQ ID NO: 1739806 - RNA, 20 nt, Human
uguugucaagaauagcauug

SEQ ID NO: 1739807 - RNA, 16 nt, Human
uguugggccaggagcc

SEQ ID NO: 1739808 - RNA, 13 nt, Human
uguugggccagga

SEQ ID NO: 1739809 - RNA, 22 nt, Human
uuaucaugugaaaucauucauu

SEQ ID NO: 1739810 - RNA, 20 nt, Human
uuaucaugugaaaucauuca

SEQ ID NO: 1739811 - RNA, 18 nt, Human
uuaucaugugaaaucauu

SEQ ID NO: 1739812 - RNA, 17 nt, Human
uuaucaugugaaaucau

SEQ ID NO: 1739813 - RNA, 19 nt, Human
auaccagccaguaaauggg

SEQ ID NO: 1739814 - RNA, 21 nt, Human
auacuaaccagcagaaaugcc

SEQ ID NO: 1739815 - RNA, 13 nt, Human
auacuacaguuug

SEQ ID NO: 1739816 - RNA, 15 nt, Human
auacuacaguuuguu

SEQ ID NO: 1739817 - RNA, 16 nt, Human
auacuacaguuuguua

SEQ ID NO: 1739818 - RNA, 20 nt, Human
auacuacaguuuguuaguau

SEQ ID NO: 1739819 - RNA, 21 nt, Human
auacaguucggugagcuacaa

SEQ ID NO: 1739820 - RNA, 22 nt, Human
auacaggaaaagcugcugacag

SEQ ID NO: 1739821 - RNA, 20 nt, Human
auacaggaaaagcugcugac

SEQ ID NO: 1739822 - RNA, 19 nt, Human
auacaggaaaagcugcuga

SEQ ID NO: 1739823 - RNA, 14 nt, Human
auacaggaaaagcu

SEQ ID NO: 1739824 - RNA, 16 nt, Human
auacauuugauaaagu

SEQ ID NO: 1739825 - RNA, 16 nt, Human
auacauuuaaaacauu

SEQ ID NO: 1739826 - RNA, 21 nt, Human
auacauuuaaaacauuaaaau

SEQ ID NO: 1739827 - RNA, 20 nt, Human
auacauaaacaagaccacgu

SEQ ID NO: 1739828 - RNA, 14 nt, Human
uuagccccauaauu

SEQ ID NO: 1739829 - RNA, 16 nt, Human
uuagcaguuugcuuug

SEQ ID NO: 1739830 - RNA, 18 nt, Human
uuauacccccugcaaagc

SEQ ID NO: 1739831 - RNA, 12 nt, Human
auaauuuuguaa

SEQ ID NO: 1739832 - RNA, 13 nt, Human
auaauuuuguaau

SEQ ID NO: 1739833 - RNA, 23 nt, Human
auaauuuuguaauguaucaaaua

SEQ ID NO: 1739834 - RNA, 22 nt, Human
auacaaaaaaaaaaaaaaauua

SEQ ID NO: 1739835 - RNA, 12 nt, Human
auacaaaagcau

SEQ ID NO: 1739836 - RNA, 13 nt, Human
auacaaaagcaug

SEQ ID NO: 1739837 - RNA, 15 nt, Human
auacaaaagcaugug

SEQ ID NO: 1739838 - RNA, 13 nt, Human
auaaacuuuaccu

SEQ ID NO: 1739839 - RNA, 15 nt, Human
auaaacuuuaccuuu

SEQ ID NO: 1739840 - RNA, 16 nt, Human
auaaacuuuaccuuuu

SEQ ID NO: 1739841 - RNA, 23 nt, Human
auaaacacucuugaaaaaugcau

SEQ ID NO: 1739842 - RNA, 20 nt, Human
auaaccaguguuguggauuu

SEQ ID NO: 1739843 - RNA, 20 nt, Human
auaaccaaagcccaaagugg

SEQ ID NO: 1739844 - RNA, 19 nt, Human
auaacaugugaaaagaaua

SEQ ID NO: 1739845 - RNA, 19 nt, Human
auaaauaaaguuuguugaa

SEQ ID NO: 1739846 - RNA, 13 nt, Human
auaaauaaaguuu

SEQ ID NO: 1739847 - RNA, 12 nt, Human
auaaauaacuuu

SEQ ID NO: 1739848 - RNA, 16 nt, Human
uuacaggaaguacugg

SEQ ID NO: 1739849 - RNA, 15 nt, Human
uuacaggaaguacug

SEQ ID NO: 1739850 - RNA, 22 nt, Human
uuacaggaaguacuggagaaaa

SEQ ID NO: 1739851 - RNA, 18 nt, Human
uuacaggaaguacuggag

SEQ ID NO: 1739852 - RNA, 23 nt, Human
uuaccauuuugggguacccacug

SEQ ID NO: 1739853 - RNA, 14 nt, Human
auaaugaauacuuu

SEQ ID NO: 1739854 - RNA, 14 nt, Human
auaauucuacuuug

SEQ ID NO: 1739855 - RNA, 19 nt, Human
auaauacaguaucucaggg

SEQ ID NO: 1739856 - RNA, 16 nt, Human
uuagauguaauuuugu

SEQ ID NO: 1739857 - RNA, 23 nt, Human
auaauacaccacuacauucuguu

SEQ ID NO: 1739858 - RNA, 21 nt, Human
auaauacaccacuacauucug

SEQ ID NO: 1739859 - RNA, 22 nt, Human
auaaguuaacuuccaauuuaca

SEQ ID NO: 1739860 - RNA, 22 nt, Human
auaagaaccuuuugagugccuu

SEQ ID NO: 1739861 - RNA, 17 nt, Human
auaaguuaacuuccaau

SEQ ID NO: 1739862 - RNA, 23 nt, Human
auaagaaccuuuugagugccuua

SEQ ID NO: 1739863 - RNA, 23 nt, Human
uggguggaugccugguggcagcu

SEQ ID NO: 1739864 - RNA, 14 nt, Human
uggguggaugccug

SEQ ID NO: 1739865 - RNA, 22 nt, Human
ugggucuuguuuuuuuuuucca

SEQ ID NO: 1739866 - RNA, 21 nt, Human
uggucaccaaaucagcugcua

SEQ ID NO: 1739867 - RNA, 23 nt, Human
uggucaccaaaucagcugcuacu

SEQ ID NO: 1739868 - RNA, 22 nt, Human
ugguaauuuaagauuccagaga

SEQ ID NO: 1739869 - RNA, 16 nt, Human
ugguccauagagagca

SEQ ID NO: 1739870 - RNA, 15 nt, Human
ugguccauagagagc

SEQ ID NO: 1739871 - RNA, 19 nt, Human
aggguacuaaggaaucuuu

SEQ ID NO: 1739872 - RNA, 16 nt, Human
aggguaucaggugcug

SEQ ID NO: 1739873 - RNA, 12 nt, Human
aggguagggugg

SEQ ID NO: 1739874 - RNA, 18 nt, Human
aggguaucaggugcugcc

SEQ ID NO: 1739875 - RNA, 12 nt, Human
aggguaaguauu

SEQ ID NO: 1739876 - RNA, 16 nt, Human
aggggauagagagaga

SEQ ID NO: 1739877 - RNA, 13 nt, Human
agggggcugggac

SEQ ID NO: 1739878 - RNA, 15 nt, Human
agggggaaggcaggg

SEQ ID NO: 1739879 - RNA, 15 nt, Human
aggucagugcaaaua

SEQ ID NO: 1739880 - RNA, 21 nt, Human
aggucaaggcugcagugagcc

SEQ ID NO: 1739881 - RNA, 22 nt, Human
aggucauuuuuuuuaagaaaaa

SEQ ID NO: 1739882 - RNA, 23 nt, Human
aggucauuuuuuuuaagaaaaag

SEQ ID NO: 1739883 - RNA, 17 nt, Human
agguccacaacacacag

SEQ ID NO: 1739884 - RNA, 21 nt, Human
aggucuugaacuccuggccuc

SEQ ID NO: 1739885 - RNA, 20 nt, Human
aggucuugaacuccuggccu

SEQ ID NO: 1739886 - RNA, 22 nt, Human
aggucuugaacuccuggccuca

SEQ ID NO: 1739887 - RNA, 19 nt, Human
aggugaaacuccagaugcc

SEQ ID NO: 1739888 - RNA, 20 nt, Human
aggugaaacuccagaugcca

SEQ ID NO: 1739889 - RNA, 21 nt, Human
aggugaaacuccagaugccac

SEQ ID NO: 1739890 - RNA, 22 nt, Human
aggugaaacuccagaugccaca

SEQ ID NO: 1739891 - RNA, 17 nt, Human
agguaugcaaucaaauc

SEQ ID NO: 1739892 - RNA, 20 nt, Human
aggguuuauguuuaggaugu

SEQ ID NO: 1739893 - RNA, 17 nt, Human
aggguugggcugguguc

SEQ ID NO: 1739894 - RNA, 14 nt, Human
uggucuuuugguua

SEQ ID NO: 1739895 - RNA, 19 nt, Human
uggugaacagaacaaaagg

SEQ ID NO: 1739896 - RNA, 15 nt, Human
uggugaacauugcaa

SEQ ID NO: 1739897 - RNA, 20 nt, Human
uggugaacauugcaauagaa

SEQ ID NO: 1739898 - RNA, 21 nt, Human
aggguggugaccucugccuga

SEQ ID NO: 1739899 - RNA, 19 nt, Human
aggguggugaccucugccu

SEQ ID NO: 1739900 - RNA, 18 nt, Human
aggguggugaccucugcc

SEQ ID NO: 1739901 - RNA, 17 nt, Human
aggguggugaccucugc

SEQ ID NO: 1739902 - RNA, 15 nt, Human
aggguugggcuggug

SEQ ID NO: 1739903 - RNA, 17 nt, Human
aggguuggccccugccc

SEQ ID NO: 1739904 - RNA, 14 nt, Human
aggguuggccccug

SEQ ID NO: 1739905 - RNA, 13 nt, Human
aggguuggccccu

SEQ ID NO: 1739906 - RNA, 22 nt, Human
ugguccaugggccauaugaaaa

SEQ ID NO: 1739907 - RNA, 19 nt, Human
ugguccauagagagcaaga

SEQ ID NO: 1739908 - RNA, 13 nt, Human
uggucccacccca

SEQ ID NO: 1739909 - RNA, 19 nt, Human
uggucucgaacuccugacc

SEQ ID NO: 1739910 - RNA, 15 nt, Human
uggucucgaacuccu

SEQ ID NO: 1739911 - RNA, 21 nt, Human
uggucucgaacuccugaccuu

SEQ ID NO: 1739912 - RNA, 20 nt, Human
uggucucgaacuccugaccu

SEQ ID NO: 1739913 - RNA, 22 nt, Human
uggucugugagaugcuagaacu

SEQ ID NO: 1739914 - RNA, 12 nt, Human
uggucuguguga

SEQ ID NO: 1739915 - RNA, 16 nt, Human
uggucuuauuuguaaa

SEQ ID NO: 1739916 - RNA, 18 nt, Human
uggucugacccacugcuu

SEQ ID NO: 1739917 - RNA, 16 nt, Human
uguaaaggaauuuaaa

SEQ ID NO: 1739918 - RNA, 13 nt, Human
ugguuuucuguuc

SEQ ID NO: 1739919 - RNA, 15 nt, Human
ugguuuucuguucuu

SEQ ID NO: 1739920 - RNA, 23 nt, Human
aggugauccacccaccucagccu

SEQ ID NO: 1739921 - RNA, 14 nt, Human
ugguuucagaaaug

SEQ ID NO: 1739922 - RNA, 15 nt, Human
ugguuucagaaaugu

SEQ ID NO: 1739923 - RNA, 21 nt, Human
ugguuuguaaauuaacuuuua

SEQ ID NO: 1739924 - RNA, 12 nt, Human
ugguuuucuguu

SEQ ID NO: 1739925 - RNA, 18 nt, Human
ugguuuuaguugcaacuu

SEQ ID NO: 1739926 - RNA, 17 nt, Human
ugguguuuccuggcacu

SEQ ID NO: 1739927 - RNA, 15 nt, Human
ugguguuuccuggca

SEQ ID NO: 1739928 - RNA, 23 nt, Human
ugguucaggguuggccccugccc

SEQ ID NO: 1739929 - RNA, 22 nt, Human
ugguucaggguuggccccugcc

SEQ ID NO: 1739930 - RNA, 20 nt, Human
ugguucaggguuggccccug

SEQ ID NO: 1739931 - RNA, 12 nt, Human
ugguggcagcug

SEQ ID NO: 1739932 - RNA, 15 nt, Human
ugguguguguaugcg

SEQ ID NO: 1739933 - RNA, 23 nt, Human
ugguggcagcucaccucucccuu

SEQ ID NO: 1739934 - RNA, 20 nt, Human
ugguggcagcucaccucucc

SEQ ID NO: 1739935 - RNA, 19 nt, Human
ugguggcagcucaccucuc

SEQ ID NO: 1739936 - RNA, 16 nt, Human
ugguggcagcucaccu

SEQ ID NO: 1739937 - RNA, 12 nt, Human
ugguggcagcuc

SEQ ID NO: 1739938 - RNA, 15 nt, Human
ugguggcagagugga

SEQ ID NO: 1739939 - RNA, 14 nt, Human
aggugaacauuggu

SEQ ID NO: 1739940 - RNA, 21 nt, Human
aggugaacauugguucuuuca

SEQ ID NO: 1739941 - RNA, 19 nt, Human
uguacuugcucuugaugcc

SEQ ID NO: 1739942 - RNA, 15 nt, Human
uguacuugcucuuga

SEQ ID NO: 1739943 - RNA, 17 nt, Human
uguacaugaaaacacau

SEQ ID NO: 1739944 - RNA, 18 nt, Human
uguacaugaaaacacauu

SEQ ID NO: 1739945 - RNA, 19 nt, Human
uguacaugaaaacacauuu

SEQ ID NO: 1739946 - RNA, 20 nt, Human
uguacaugaaaacacauuuu

SEQ ID NO: 1739947 - RNA, 23 nt, Human
uguacaaaguagaagucuuagau

SEQ ID NO: 1739948 - RNA, 19 nt, Human
uguacaaaguagaagucuu

SEQ ID NO: 1739949 - RNA, 17 nt, Human
uguaauuugugauacaa

SEQ ID NO: 1739950 - RNA, 21 nt, Human
uguaauuugugauacaaugcu

SEQ ID NO: 1739951 - RNA, 18 nt, Human
uguaaggaaugauuaauu

SEQ ID NO: 1739952 - RNA, 16 nt, Human
uguaauuugugauaca

SEQ ID NO: 1739953 - RNA, 15 nt, Human
uguaaggcaaucaug

SEQ ID NO: 1739954 - RNA, 22 nt, Human
uguaagcucuacugaggugcua

SEQ ID NO: 1739955 - RNA, 15 nt, Human
uguaagaaauacaga

SEQ ID NO: 1739956 - RNA, 17 nt, Human
uguaagaaauacagacu

SEQ ID NO: 1739957 - RNA, 15 nt, Human
uguaaggaaugauua

SEQ ID NO: 1739958 - RNA, 14 nt, Human
uguaaggaaugauu

SEQ ID NO: 1739959 - RNA, 13 nt, Human
uguaaggaaugau

SEQ ID NO: 1739960 - RNA, 20 nt, Human
agguugucugaagucacugc

SEQ ID NO: 1739961 - RNA, 16 nt, Human
agguugucugaaguca

SEQ ID NO: 1739962 - RNA, 20 nt, Human
aggugugagucaccaagccc

SEQ ID NO: 1739963 - RNA, 14 nt, Human
aggugugagucacc

SEQ ID NO: 1739964 - RNA, 20 nt, Human
aggugugacugaauuucuuu

SEQ ID NO: 1739965 - RNA, 20 nt, Human
aggugugagccaccacgccc

SEQ ID NO: 1739966 - RNA, 22 nt, Human
aggugugaaccaccacacccag

SEQ ID NO: 1739967 - RNA, 23 nt, Human
aggugugaaccaccacacccagc

SEQ ID NO: 1739968 - RNA, 18 nt, Human
aggugugacugaauuucu

SEQ ID NO: 1739969 - RNA, 13 nt, Human
agguggggcagcu

SEQ ID NO: 1739970 - RNA, 22 nt, Human
aggugauccacucgccuucauc

SEQ ID NO: 1739971 - RNA, 23 nt, Human
agguggggucacucuggcagcuc

SEQ ID NO: 1739972 - RNA, 14 nt, Human
agguggggcagcuu

SEQ ID NO: 1739973 - RNA, 16 nt, Human
agguggggcagcuuga

SEQ ID NO: 1739974 - RNA, 17 nt, Human
agugaaagaaaauaaca

SEQ ID NO: 1739975 - RNA, 14 nt, Human
agugagacagcucu

SEQ ID NO: 1739976 - RNA, 14 nt, Human
agugaaaauauagc

SEQ ID NO: 1739977 - RNA, 15 nt, Human
agugaaaacuuugua

SEQ ID NO: 1739978 - RNA, 16 nt, Human
agugaaaacuuuguag

SEQ ID NO: 1739979 - RNA, 13 nt, Human
agugagacucugu

SEQ ID NO: 1739980 - RNA, 21 nt, Human
agugagacccugucucaaaaa

SEQ ID NO: 1739981 - RNA, 17 nt, Human
agugagacccugucuca

SEQ ID NO: 1739982 - RNA, 13 nt, Human
agugagacagacu

SEQ ID NO: 1739983 - RNA, 17 nt, Human
agugagacucugucuca

SEQ ID NO: 1739984 - RNA, 16 nt, Human
agugagacucugucuc

SEQ ID NO: 1739985 - RNA, 22 nt, Human
agugagacucugucucaaaaaa

SEQ ID NO: 1739986 - RNA, 14 nt, Human
agugagagcugggu

SEQ ID NO: 1739987 - RNA, 16 nt, Human
agugagccgagauugu

SEQ ID NO: 1739988 - RNA, 16 nt, Human
ugugauggggcccugc

SEQ ID NO: 1739989 - RNA, 15 nt, Human
ugugauggggcccug

SEQ ID NO: 1739990 - RNA, 18 nt, Human
ugugauggggcccugccu

SEQ ID NO: 1739991 - RNA, 17 nt, Human
ugugauggggcccugcc

SEQ ID NO: 1739992 - RNA, 19 nt, Human
agucuccaaagucucugga

SEQ ID NO: 1739993 - RNA, 18 nt, Human
agucucccucccuugggg

SEQ ID NO: 1739994 - RNA, 14 nt, Human
agucucccucccuu

SEQ ID NO: 1739995 - RNA, 23 nt, Human
ugugaacugaacucugacaacag

SEQ ID NO: 1739996 - RNA, 14 nt, Human
ugugaacugaacuc

SEQ ID NO: 1739997 - RNA, 19 nt, Human
ugugagcacaaagguagcu

SEQ ID NO: 1739998 - RNA, 23 nt, Human
agugaaaaaggaggaagagaaaa

SEQ ID NO: 1739999 - RNA, 20 nt, Human
agugaaaaaggaggaagaga

SEQ ID NO: 1740000 - RNA, 17 nt, Human
agugaaaaaggaggaag

SEQ ID NO: 1740001 - RNA, 11 nt, Human
agugaaaaagg

SEQ ID NO: 1740002 - RNA, 15 nt, Human
agucuuuuccaugaa

SEQ ID NO: 1740003 - RNA, 13 nt, Human
agucuuuuccaug

SEQ ID NO: 1740004 - RNA, 21 nt, Human
ugucuugcaauggcagccuug

SEQ ID NO: 1740005 - RNA, 20 nt, Human
ugucuugcaauggcagccuu

SEQ ID NO: 1740006 - RNA, 18 nt, Human
ugucuugcaauggcagcc

SEQ ID NO: 1740007 - RNA, 17 nt, Human
ugucuugcaauggcagc

SEQ ID NO: 1740008 - RNA, 15 nt, Human
ugucuugcaauggca

SEQ ID NO: 1740009 - RNA, 23 nt, Human
ugugaaccaccacacccagccca

SEQ ID NO: 1740010 - RNA, 22 nt, Human
ugugaaccaccacacccagccc

SEQ ID NO: 1740011 - RNA, 17 nt, Human
ugugaaccaccacaccc

SEQ ID NO: 1740012 - RNA, 16 nt, Human
ugugaaccaccacacc

SEQ ID NO: 1740013 - RNA, 15 nt, Human
ugugaaccaccacac

SEQ ID NO: 1740014 - RNA, 17 nt, Human
ugucucuacuaaaaaua

SEQ ID NO: 1740015 - RNA, 21 nt, Human
ugucucgugguaggacuguag

SEQ ID NO: 1740016 - RNA, 18 nt, Human
ugucucgugguaggacug

SEQ ID NO: 1740017 - RNA, 19 nt, Human
ugucucgugguaggacugu

SEQ ID NO: 1740018 - RNA, 20 nt, Human
ugucucgugguaggacugua

SEQ ID NO: 1740019 - RNA, 13 nt, Human
ugucucugagagu

SEQ ID NO: 1740020 - RNA, 22 nt, Human
ugucucuggauuauauuaugaa

SEQ ID NO: 1740021 - RNA, 16 nt, Human
agucccugccaaugga

SEQ ID NO: 1740022 - RNA, 14 nt, Human
agucccugccaaug

SEQ ID NO: 1740023 - RNA, 13 nt, Human
agucccugccaau

SEQ ID NO: 1740024 - RNA, 23 nt, Human
aguccccuguuuguuucugaaag

SEQ ID NO: 1740025 - RNA, 18 nt, Human
ugucuuaauuuucuuuca

SEQ ID NO: 1740026 - RNA, 21 nt, Human
ugucucuuuaaugucacaggc

SEQ ID NO: 1740027 - RNA, 22 nt, Human
ugucucuugguccugcugcagu

SEQ ID NO: 1740028 - RNA, 22 nt, Human
ugucucuuuaaugucacaggca

SEQ ID NO: 1740029 - RNA, 21 nt, Human
ugucucuugguccugcugcag

SEQ ID NO: 1740030 - RNA, 20 nt, Human
ugucucuugguccugcugca

SEQ ID NO: 1740031 - RNA, 19 nt, Human
ugucucuugguccugcugc

SEQ ID NO: 1740032 - RNA, 18 nt, Human
ugucucuugguccugcug

SEQ ID NO: 1740033 - RNA, 15 nt, Human
uguagagccaggguc

SEQ ID NO: 1740034 - RNA, 12 nt, Human
uguagagccagg

SEQ ID NO: 1740035 - RNA, 14 nt, Human
uguauguguaagua

SEQ ID NO: 1740036 - RNA, 16 nt, Human
uguaucccaugagccu

SEQ ID NO: 1740037 - RNA, 15 nt, Human
uguaucccaugagcc

SEQ ID NO: 1740038 - RNA, 15 nt, Human
ugucaaaguggugag

SEQ ID NO: 1740039 - RNA, 14 nt, Human
ugucaaagugguga

SEQ ID NO: 1740040 - RNA, 11 nt, Human
uguauuaugug

SEQ ID NO: 1740041 - RNA, 15 nt, Human
uguauuagucacaga

SEQ ID NO: 1740042 - RNA, 21 nt, Human
uguauuaaguuguuaauaaaa

SEQ ID NO: 1740043 - RNA, 19 nt, Human
ugucaaaguggugagaggc

SEQ ID NO: 1740044 - RNA, 16 nt, Human
ugucaaaguggugaga

SEQ ID NO: 1740045 - RNA, 19 nt, Human
ugucaaauauuuagaugua

SEQ ID NO: 1740046 - RNA, 14 nt, Human
aguagcugggacua

SEQ ID NO: 1740047 - RNA, 13 nt, Human
aguagcugggacu

SEQ ID NO: 1740048 - RNA, 15 nt, Human
aguauuauaccuuuu

SEQ ID NO: 1740049 - RNA, 14 nt, Human
aguauuauaccuuu

SEQ ID NO: 1740050 - RNA, 21 nt, Human
aguagcugggacuacaggcac

SEQ ID NO: 1740051 - RNA, 19 nt, Human
aguagcugggacuacaggc

SEQ ID NO: 1740052 - RNA, 22 nt, Human
aguagcugggacuacaggcacc

SEQ ID NO: 1740053 - RNA, 17 nt, Human
aguagcuggauuacagg

SEQ ID NO: 1740054 - RNA, 21 nt, Human
aguauuuaauucauguugccu

SEQ ID NO: 1740055 - RNA, 22 nt, Human
agucacagagauaauucuagcu

SEQ ID NO: 1740056 - RNA, 20 nt, Human
agucacauuccaagccucau

SEQ ID NO: 1740057 - RNA, 15 nt, Human
ugucagcauagaagu

SEQ ID NO: 1740058 - RNA, 17 nt, Human
agucacugagacagccc

SEQ ID NO: 1740059 - RNA, 16 nt, Human
agucacugagacagcc

SEQ ID NO: 1740060 - RNA, 15 nt, Human
agucacugagacagc

SEQ ID NO: 1740061 - RNA, 19 nt, Human
agucagggguucccuuuuu

SEQ ID NO: 1740062 - RNA, 23 nt, Human
agucccaccuuggcugcagggag

SEQ ID NO: 1740063 - RNA, 21 nt, Human
agucccaccuuggcugcaggg

SEQ ID NO: 1740064 - RNA, 20 nt, Human
agucccaggcugagccucag

SEQ ID NO: 1740065 - RNA, 19 nt, Human
aguccccuguuuguuucug

SEQ ID NO: 1740066 - RNA, 14 nt, Human
aguccccuguuugu

SEQ ID NO: 1740067 - RNA, 16 nt, Human
ugucagccauuccugu

SEQ ID NO: 1740068 - RNA, 18 nt, Human
agucacugagacagcccg

SEQ ID NO: 1740069 - RNA, 19 nt, Human
uguccaggcacugcugccc

SEQ ID NO: 1740070 - RNA, 21 nt, Human
uguccaggcacugcugcccag

SEQ ID NO: 1740071 - RNA, 20 nt, Human
uguccaggcacugcugccca

SEQ ID NO: 1740072 - RNA, 22 nt, Human
ugucccuaccgagucucuucuc

SEQ ID NO: 1740073 - RNA, 21 nt, Human
ugucccuaccgagucucuucu

SEQ ID NO: 1740074 - RNA, 20 nt, Human
ugucccuaccgagucucuuc

SEQ ID NO: 1740075 - RNA, 14 nt, Human
ugucccugcacuug

SEQ ID NO: 1740076 - RNA, 12 nt, Human
ugucccuuuucc

SEQ ID NO: 1740077 - RNA, 17 nt, Human
ugucccuuuuccuuuuu

SEQ ID NO: 1740078 - RNA, 13 nt, Human
ugaaagaaaauaa

SEQ ID NO: 1740079 - RNA, 17 nt, Human
ugaaacuggauuaaacu

SEQ ID NO: 1740080 - RNA, 18 nt, Human
ugaaacuggauuaaacuu

SEQ ID NO: 1740081 - RNA, 14 nt, Human
ugaaaauuaacaug

SEQ ID NO: 1740082 - RNA, 15 nt, Human
ugaaaacacauuuuu

SEQ ID NO: 1740083 - RNA, 17 nt, Human
ugaaaacacauuuuucu

SEQ ID NO: 1740084 - RNA, 19 nt, Human
ugaaaacacauuuuucuua

SEQ ID NO: 1740085 - RNA, 20 nt, Human
ugaaaacacauuuuucuuag

SEQ ID NO: 1740086 - RNA, 14 nt, Human
ugaaaacacauuuu

SEQ ID NO: 1740087 - RNA, 12 nt, Human
ugaaaacacauu

SEQ ID NO: 1740088 - RNA, 13 nt, Human
ugaaaacacauuu

SEQ ID NO: 1740089 - RNA, 16 nt, Human
ucuuuuuuugugaugu

SEQ ID NO: 1740090 - RNA, 14 nt, Human
ucuuuuuuugugau

SEQ ID NO: 1740091 - RNA, 23 nt, Human
ucuuuuuuuuuuuuuaaagacag

SEQ ID NO: 1740092 - RNA, 22 nt, Human
ugaaagaaaauaccaaggaaca

SEQ ID NO: 1740093 - RNA, 16 nt, Human
ugaaagacuguacaaa

SEQ ID NO: 1740094 - RNA, 17 nt, Human
ugaaagaggaaugaagu

SEQ ID NO: 1740095 - RNA, 22 nt, Human
ugaaagacuguacaaaguagaa

SEQ ID NO: 1740096 - RNA, 19 nt, Human
ugaaagacuguacaaagua

SEQ ID NO: 1740097 - RNA, 18 nt, Human
ugaaagacuguacaaagu

SEQ ID NO: 1740098 - RNA, 18 nt, Human
ugaaagaggaaugaagua

SEQ ID NO: 1740099 - RNA, 21 nt, Human
agagaccaucccugaaggccc

SEQ ID NO: 1740100 - RNA, 19 nt, Human
agagaccaucccugaaggc

SEQ ID NO: 1740101 - RNA, 23 nt, Human
agagaccaucccugaaggccccg

SEQ ID NO: 1740102 - RNA, 22 nt, Human
agagaccaucccugaaggcccc

SEQ ID NO: 1740103 - RNA, 17 nt, Human
agagaguggcuccuccc

SEQ ID NO: 1740104 - RNA, 14 nt, Human
agagacuccugcag

SEQ ID NO: 1740105 - RNA, 13 nt, Human
agagacuccugca

SEQ ID NO: 1740106 - RNA, 12 nt, Human
agagacuccugc

SEQ ID NO: 1740107 - RNA, 15 nt, Human
agagacuccugcagg

SEQ ID NO: 1740108 - RNA, 14 nt, Human
ucuuuguggcuucc

SEQ ID NO: 1740109 - RNA, 22 nt, Human
ucuuuuuucuaaaguaaaaaca

SEQ ID NO: 1740110 - RNA, 21 nt, Human
ucuuuuuucuaaaguaaaaac

SEQ ID NO: 1740111 - RNA, 14 nt, Human
agagacagaaagca

SEQ ID NO: 1740112 - RNA, 15 nt, Human
agagacagaaagcag

SEQ ID NO: 1740113 - RNA, 20 nt, Human
ucuuuguacagacaacaaac

SEQ ID NO: 1740114 - RNA, 15 nt, Human
ucuuuguacagacaa

SEQ ID NO: 1740115 - RNA, 14 nt, Human
ucuuuguacagaca

SEQ ID NO: 1740116 - RNA, 16 nt, Human
ucuuuguaaugaaaac

SEQ ID NO: 1740117 - RNA, 20 nt, Human
agacugguuccauggccucu

SEQ ID NO: 1740118 - RNA, 15 nt, Human
agacuuuggaaagag

SEQ ID NO: 1740119 - RNA, 17 nt, Human
agacuuuggaaagacuu

SEQ ID NO: 1740120 - RNA, 14 nt, Human
agacuguacaaagu

SEQ ID NO: 1740121 - RNA, 19 nt, Human
agagacacaagccuucggc

SEQ ID NO: 1740122 - RNA, 16 nt, Human
agagacacaagccuuc

SEQ ID NO: 1740123 - RNA, 19 nt, Human
agacuuuucuuucagccaa

SEQ ID NO: 1740124 - RNA, 19 nt, Human
agacuuuggaaagaguagg

SEQ ID NO: 1740125 - RNA, 12 nt, Human
agacuuuuauga

SEQ ID NO: 1740126 - RNA, 15 nt, Human
agacuuuuccaaccc

SEQ ID NO: 1740127 - RNA, 15 nt, Human
agacuuuuaugauac

SEQ ID NO: 1740128 - RNA, 13 nt, Human
agacucugucuca

SEQ ID NO: 1740129 - RNA, 13 nt, Human
agacuccugcagg

SEQ ID NO: 1740130 - RNA, 21 nt, Human
agacuccagcuggguuggaaa

SEQ ID NO: 1740131 - RNA, 16 nt, Human
agacucccaagcugga

SEQ ID NO: 1740132 - RNA, 15 nt, Human
ucuuuaaugucacag

SEQ ID NO: 1740133 - RNA, 22 nt, Human
agacaggcaagcaccuccugcc

SEQ ID NO: 1740134 - RNA, 20 nt, Human
agacaggcaagcaccuccug

SEQ ID NO: 1740135 - RNA, 19 nt, Human
ucuuuaaugucacaggcag

SEQ ID NO: 1740136 - RNA, 18 nt, Human
ucuuuaaugucacaggca

SEQ ID NO: 1740137 - RNA, 12 nt, Human
ucuuuccugagg

SEQ ID NO: 1740138 - RNA, 15 nt, Human
ugaaguaauaugcac

SEQ ID NO: 1740139 - RNA, 14 nt, Human
ugaaguaagcaaag

SEQ ID NO: 1740140 - RNA, 13 nt, Human
ugaaguaagcaaa

SEQ ID NO: 1740141 - RNA, 16 nt, Human
ugaaguaauaugcaca

SEQ ID NO: 1740142 - RNA, 20 nt, Human
ugaaguaauaugcacacauu

SEQ ID NO: 1740143 - RNA, 21 nt, Human
ugaaguaauaugcacacauuu

SEQ ID NO: 1740144 - RNA, 22 nt, Human
ugaaguaauaugcacacauuuu

SEQ ID NO: 1740145 - RNA, 17 nt, Human
ugaaguacucauacaug

SEQ ID NO: 1740146 - RNA, 15 nt, Human
ugaaguaagcaaaga

SEQ ID NO: 1740147 - RNA, 12 nt, Human
ugaauaauacag

SEQ ID NO: 1740148 - RNA, 13 nt, Human
ugaagucacacag

SEQ ID NO: 1740149 - RNA, 13 nt, Human
ugaauaauacagu

SEQ ID NO: 1740150 - RNA, 23 nt, Human
ugaauaauguaagacaaauaugu

SEQ ID NO: 1740151 - RNA, 18 nt, Human
agaguaauccaagcaaau

SEQ ID NO: 1740152 - RNA, 22 nt, Human
agaguaauccaagcaaauguga

SEQ ID NO: 1740153 - RNA, 20 nt, Human
agaguaauccaagcaaaugu

SEQ ID NO: 1740154 - RNA, 16 nt, Human
agagguucaaagauau

SEQ ID NO: 1740155 - RNA, 19 nt, Human
agagguucaaagauauuuu

SEQ ID NO: 1740156 - RNA, 20 nt, Human
agagguucaaagauauuuug

SEQ ID NO: 1740157 - RNA, 22 nt, Human
agaggcugccucucccaucacu

SEQ ID NO: 1740158 - RNA, 15 nt, Human
agagggagugacaga

SEQ ID NO: 1740159 - RNA, 20 nt, Human
agagggagugacagaggcag

SEQ ID NO: 1740160 - RNA, 13 nt, Human
agagguucaaaga

SEQ ID NO: 1740161 - RNA, 23 nt, Human
agaggcagccccauucugccugc

SEQ ID NO: 1740162 - RNA, 21 nt, Human
agaggcagggucucacucugu

SEQ ID NO: 1740163 - RNA, 22 nt, Human
agaggcagccccauucugccug

SEQ ID NO: 1740164 - RNA, 21 nt, Human
agaggcagccccauucugccu

SEQ ID NO: 1740165 - RNA, 24 nt, Human
agaggcagccccauucugccugcc

SEQ ID NO: 1740166 - RNA, 14 nt, Human
ugaaauaagccaga

SEQ ID NO: 1740167 - RNA, 16 nt, Human
ugaaauaacauggccu

SEQ ID NO: 1740168 - RNA, 17 nt, Human
ugaaauaacauggccuu

SEQ ID NO: 1740169 - RNA, 16 nt, Human
agagauugugguuuca

SEQ ID NO: 1740170 - RNA, 23 nt, Human
ugaaauagacccacaagaggcag

SEQ ID NO: 1740171 - RNA, 19 nt, Human
ugaaauuuuuauuaaauua

SEQ ID NO: 1740172 - RNA, 20 nt, Human
ugaaauuuuuauuaaauuau

SEQ ID NO: 1740173 - RNA, 22 nt, Human
ugaacccauauuuguacaccaa

SEQ ID NO: 1740174 - RNA, 18 nt, Human
ugaacccgggaggcagag

SEQ ID NO: 1740175 - RNA, 18 nt, Human
ugaacaaauuuacagaga

SEQ ID NO: 1740176 - RNA, 22 nt, Human
ugaaccaccacacccagcccac

SEQ ID NO: 1740177 - RNA, 13 nt, Human
ugaacaaauuuac

SEQ ID NO: 1740178 - RNA, 21 nt, Human
ugaaccaccacacccagccca

SEQ ID NO: 1740179 - RNA, 11 nt, Human
ugaacuccugg

SEQ ID NO: 1740180 - RNA, 15 nt, Human
ugaacuccugaccuc

SEQ ID NO: 1740181 - RNA, 22 nt, Human
ugaagacaaugacuuacuguac

SEQ ID NO: 1740182 - RNA, 23 nt, Human
ugaagacaaugacuuacuguaca

SEQ ID NO: 1740183 - RNA, 13 nt, Human
ugaagacagagcu

SEQ ID NO: 1740184 - RNA, 13 nt, Human
ugagacagcccgg

SEQ ID NO: 1740185 - RNA, 21 nt, Human
ugagacagaguuuucacucuu

SEQ ID NO: 1740186 - RNA, 11 nt, Human
ugagacagagu

SEQ ID NO: 1740187 - RNA, 20 nt, Human
ugagacagaaucucgcucug

SEQ ID NO: 1740188 - RNA, 20 nt, Human
ugagacucugucucagucca

SEQ ID NO: 1740189 - RNA, 20 nt, Human
ugagacucugucucaaaaaa

SEQ ID NO: 1740190 - RNA, 12 nt, Human
ugagacagcucu

SEQ ID NO: 1740191 - RNA, 22 nt, Human
ugagacagcccgggcucugccu

SEQ ID NO: 1740192 - RNA, 20 nt, Human
ugagacagcccgggcucugc

SEQ ID NO: 1740193 - RNA, 19 nt, Human
ugagacagcccgggcucug

SEQ ID NO: 1740194 - RNA, 18 nt, Human
ugagacagcccgggcucu

SEQ ID NO: 1740195 - RNA, 17 nt, Human
ugagacagcccgggcuc

SEQ ID NO: 1740196 - RNA, 14 nt, Human
ugagaggaaaucac

SEQ ID NO: 1740197 - RNA, 13 nt, Human
ugagaggaaauca

SEQ ID NO: 1740198 - RNA, 12 nt, Human
ugagaggaaauc

SEQ ID NO: 1740199 - RNA, 11 nt, Human
ugagaggaaau

SEQ ID NO: 1740200 - RNA, 10 nt, Human
ugagaggaaa
